United States Patent Application Publication US 2015/0141320 A1 - sequence listing, part 27

SEQ ID NO: 966238 - DNA, 15 bp, Homo sapiens
tacctgggaaaagaa

SEQ ID NO: 966239 - DNA, 15 bp, Homo sapiens
acctgggaaaagaat

SEQ ID NO: 966240 - DNA, 15 bp, Homo sapiens
cctgggaaaagaatc

SEQ ID NO: 966241 - DNA, 15 bp, Homo sapiens
ctgggaaaagaatca

SEQ ID NO: 966242 - DNA, 15 bp, Homo sapiens
tgggaaaagaatcac

SEQ ID NO: 966243 - DNA, 15 bp, Homo sapiens
gggaaaagaatcacg

SEQ ID NO: 966244 - DNA, 15 bp, Homo sapiens
ggaaaagaatcacgg

SEQ ID NO: 966245 - DNA, 15 bp, Homo sapiens
gaaaagaatcacggc

SEQ ID NO: 966246 - DNA, 15 bp, Homo sapiens
aaaagaatcacggca

SEQ ID NO: 966247 - DNA, 15 bp, Homo sapiens
aaagaatcacggcag

SEQ ID NO: 966248 - DNA, 15 bp, Homo sapiens
aagaatcacggcagt

SEQ ID NO: 966249 - DNA, 15 bp, Homo sapiens
agaatcacggcagtg

SEQ ID NO: 966250 - DNA, 15 bp, Homo sapiens
gaatcacggcagtgc

SEQ ID NO: 966251 - DNA, 15 bp, Homo sapiens
aatcacggcagtgct

SEQ ID NO: 966252 - DNA, 15 bp, Homo sapiens
atcacggcagtgctg

SEQ ID NO: 966253 - DNA, 15 bp, Homo sapiens
tcacggcagtgctgg

SEQ ID NO: 966254 - DNA, 15 bp, Homo sapiens
cacggcagtgctggg

SEQ ID NO: 966255 - DNA, 15 bp, Homo sapiens
acggcagtgctggga

SEQ ID NO: 966256 - DNA, 15 bp, Homo sapiens
cggcagtgctgggat

SEQ ID NO: 966257 - DNA, 15 bp, Homo sapiens
ggcagtgctgggatg

SEQ ID NO: 966258 - DNA, 15 bp, Homo sapiens
gcagtgctgggatgg

SEQ ID NO: 966259 - DNA, 15 bp, Homo sapiens
cagtgctgggatggg

SEQ ID NO: 966260 - DNA, 15 bp, Homo sapiens
agtgctgggatgggg

SEQ ID NO: 966261 - DNA, 15 bp, Homo sapiens
gtgctgggatgggga

SEQ ID NO: 966262 - DNA, 15 bp, Homo sapiens
tgctgggatggggat

SEQ ID NO: 966263 - DNA, 15 bp, Homo sapiens
gctgggatggggatt

SEQ ID NO: 966264 - DNA, 15 bp, Homo sapiens
ctgggatggggattt

SEQ ID NO: 966265 - DNA, 15 bp, Homo sapiens
tgggatggggatttc

SEQ ID NO: 966266 - DNA, 15 bp, Homo sapiens
gggatggggatttca

SEQ ID NO: 966267 - DNA, 15 bp, Homo sapiens
ggatggggatttcag

SEQ ID NO: 966268 - DNA, 15 bp, Homo sapiens
gatggggatttcaga

SEQ ID NO: 966269 - DNA, 15 bp, Homo sapiens
atggggatttcagac

SEQ ID NO: 966270 - DNA, 15 bp, Homo sapiens
tggggatttcagact

SEQ ID NO: 966271 - DNA, 15 bp, Homo sapiens
ggggatttcagactc

SEQ ID NO: 966272 - DNA, 15 bp, Homo sapiens
gggatttcagactct

SEQ ID NO: 966273 - DNA, 15 bp, Homo sapiens
ggatttcagactctt

SEQ ID NO: 966274 - DNA, 15 bp, Homo sapiens
gatttcagactctta

SEQ ID NO: 966275 - DNA, 15 bp, Homo sapiens
atttcagactcttaa

SEQ ID NO: 966276 - DNA, 15 bp, Homo sapiens
tttcagactcttaaa

SEQ ID NO: 966277 - DNA, 15 bp, Homo sapiens
ttcagactcttaaat

SEQ ID NO: 966278 - DNA, 15 bp, Homo sapiens
tcagactcttaaata

SEQ ID NO: 966279 - DNA, 15 bp, Homo sapiens
cagactcttaaatat

SEQ ID NO: 966280 - DNA, 15 bp, Homo sapiens
agactcttaaatatg

SEQ ID NO: 966281 - DNA, 15 bp, Homo sapiens
gactcttaaatatga

SEQ ID NO: 966282 - DNA, 15 bp, Homo sapiens
actcttaaatatgat

SEQ ID NO: 966283 - DNA, 15 bp, Homo sapiens
ctcttaaatatgatt

SEQ ID NO: 966284 - DNA, 15 bp, Homo sapiens
tcttaaatatgattc

SEQ ID NO: 966285 - DNA, 15 bp, Homo sapiens
cttaaatatgattct

SEQ ID NO: 966286 - DNA, 15 bp, Homo sapiens
ttaaatatgattctt

SEQ ID NO: 966287 - DNA, 15 bp, Homo sapiens
taaatatgattcttt

SEQ ID NO: 966288 - DNA, 15 bp, Homo sapiens
aaatatgattctttc

SEQ ID NO: 966289 - DNA, 15 bp, Homo sapiens
aatatgattctttct

SEQ ID NO: 966290 - DNA, 15 bp, Homo sapiens
atatgattctttcta

SEQ ID NO: 966291 - DNA, 15 bp, Homo sapiens
tatgattctttctat

SEQ ID NO: 966292 - DNA, 15 bp, Homo sapiens
atgattctttctatc

SEQ ID NO: 966293 - DNA, 15 bp, Homo sapiens
tgattctttctatcc

SEQ ID NO: 966294 - DNA, 15 bp, Homo sapiens
gattctttctatcct

SEQ ID NO: 966295 - DNA, 15 bp, Homo sapiens
attctttctatcctg

SEQ ID NO: 966296 - DNA, 15 bp, Homo sapiens
ttctttctatcctgt

SEQ ID NO: 966297 - DNA, 15 bp, Homo sapiens
tctttctatcctgtg

SEQ ID NO: 966298 - DNA, 15 bp, Homo sapiens
ctttctatcctgtgt

SEQ ID NO: 966299 - DNA, 15 bp, Homo sapiens
tttctatcctgtgtc

SEQ ID NO: 966300 - DNA, 15 bp, Homo sapiens
ttctatcctgtgtcc

SEQ ID NO: 966301 - DNA, 15 bp, Homo sapiens
tctatcctgtgtcct

SEQ ID NO: 966302 - DNA, 15 bp, Homo sapiens
ctatcctgtgtcctg

SEQ ID NO: 966303 - DNA, 15 bp, Homo sapiens
tatcctgtgtcctga

SEQ ID NO: 966304 - DNA, 15 bp, Homo sapiens
atcctgtgtcctgac

SEQ ID NO: 966305 - DNA, 15 bp, Homo sapiens
tcctgtgtcctgact

SEQ ID NO: 966306 - DNA, 15 bp, Homo sapiens
cctgtgtcctgactc

SEQ ID NO: 966307 - DNA, 15 bp, Homo sapiens
ctgtgtcctgactct

SEQ ID NO: 966308 - DNA, 15 bp, Homo sapiens
tgtgtcctgactctt

SEQ ID NO: 966309 - DNA, 15 bp, Homo sapiens
gtgtcctgactcttt

SEQ ID NO: 966310 - DNA, 15 bp, Homo sapiens
tgtcctgactctttt

SEQ ID NO: 966311 - DNA, 15 bp, Homo sapiens
gtcctgactcttttt

SEQ ID NO: 966312 - DNA, 15 bp, Homo sapiens
tcctgactctttttt

SEQ ID NO: 966313 - DNA, 15 bp, Homo sapiens
cctgactcttttttt

SEQ ID NO: 966314 - DNA, 15 bp, Homo sapiens
ctgactcttttttta

SEQ ID NO: 966315 - DNA, 15 bp, Homo sapiens
tgactctttttttag

SEQ ID NO: 966316 - DNA, 15 bp, Homo sapiens
gactctttttttaga

SEQ ID NO: 966317 - DNA, 15 bp, Homo sapiens
actctttttttagac

SEQ ID NO: 966318 - DNA, 15 bp, Homo sapiens
ctctttttttagacc

SEQ ID NO: 966319 - DNA, 15 bp, Homo sapiens
tctttttttagacct

SEQ ID NO: 966320 - DNA, 15 bp, Homo sapiens
ctttttttagacctc

SEQ ID NO: 966321 - DNA, 15 bp, Homo sapiens
tttttttagacctca

SEQ ID NO: 966322 - DNA, 15 bp, Homo sapiens
ttttttagacctcag

SEQ ID NO: 966323 - DNA, 15 bp, Homo sapiens
tttttagacctcagc

SEQ ID NO: 966324 - DNA, 15 bp, Homo sapiens
ttttagacctcagcc

SEQ ID NO: 966325 - DNA, 15 bp, Homo sapiens
tttagacctcagcct

SEQ ID NO: 966326 - DNA, 15 bp, Homo sapiens
ttagacctcagcctt

SEQ ID NO: 966327 - DNA, 15 bp, Homo sapiens
tagacctcagccttg

SEQ ID NO: 966328 - DNA, 15 bp, Homo sapiens
agacctcagccttga

SEQ ID NO: 966329 - DNA, 15 bp, Homo sapiens
gacctcagccttgac

SEQ ID NO: 966330 - DNA, 15 bp, Homo sapiens
acctcagccttgact

SEQ ID NO: 966331 - DNA, 15 bp, Homo sapiens
cctcagccttgactt

SEQ ID NO: 966332 - DNA, 15 bp, Homo sapiens
ctcagccttgacttt

SEQ ID NO: 966333 - DNA, 15 bp, Homo sapiens
tcagccttgactttt

SEQ ID NO: 966334 - DNA, 15 bp, Homo sapiens
cagccttgacttttt

SEQ ID NO: 966335 - DNA, 15 bp, Homo sapiens
agccttgactttttt

SEQ ID NO: 966336 - DNA, 15 bp, Homo sapiens
gccttgactttttta

SEQ ID NO: 966337 - DNA, 15 bp, Homo sapiens
ccttgacttttttag

SEQ ID NO: 966338 - DNA, 15 bp, Homo sapiens
cttgacttttttaga

SEQ ID NO: 966339 - DNA, 15 bp, Homo sapiens
ttgacttttttagac

SEQ ID NO: 966340 - DNA, 15 bp, Homo sapiens
tgacttttttagact

SEQ ID NO: 966341 - DNA, 15 bp, Homo sapiens
gacttttttagactt

SEQ ID NO: 966342 - DNA, 15 bp, Homo sapiens
acttttttagacttt

SEQ ID NO: 966343 - DNA, 15 bp, Homo sapiens
cttttttagactttt

SEQ ID NO: 966344 - DNA, 15 bp, Homo sapiens
ttttttagacttttt

SEQ ID NO: 966345 - DNA, 15 bp, Homo sapiens
tttttagacttttta

SEQ ID NO: 966346 - DNA, 15 bp, Homo sapiens
ttttagactttttag

SEQ ID NO: 966347 - DNA, 15 bp, Homo sapiens
tttagactttttaga

SEQ ID NO: 966348 - DNA, 15 bp, Homo sapiens
ttagactttttagac

SEQ ID NO: 966349 - DNA, 15 bp, Homo sapiens
tagactttttagaca

SEQ ID NO: 966350 - DNA, 15 bp, Homo sapiens
agactttttagacaa

SEQ ID NO: 966351 - DNA, 15 bp, Homo sapiens
gactttttagacaag

SEQ ID NO: 966352 - DNA, 15 bp, Homo sapiens
actttttagacaagc

SEQ ID NO: 966353 - DNA, 15 bp, Homo sapiens
ctttttagacaagca

SEQ ID NO: 966354 - DNA, 15 bp, Homo sapiens
tttttagacaagcat

SEQ ID NO: 966355 - DNA, 15 bp, Homo sapiens
ttttagacaagcatg

SEQ ID NO: 966356 - DNA, 15 bp, Homo sapiens
tttagacaagcatga

SEQ ID NO: 966357 - DNA, 15 bp, Homo sapiens
ttagacaagcatgaa

SEQ ID NO: 966358 - DNA, 15 bp, Homo sapiens
tagacaagcatgaag

SEQ ID NO: 966359 - DNA, 15 bp, Homo sapiens
agacaagcatgaagt

SEQ ID NO: 966360 - DNA, 15 bp, Homo sapiens
gacaagcatgaagtt

SEQ ID NO: 966361 - DNA, 15 bp, Homo sapiens
acaagcatgaagttt

SEQ ID NO: 966362 - DNA, 15 bp, Homo sapiens
caagcatgaagtttc

SEQ ID NO: 966363 - DNA, 15 bp, Homo sapiens
aagcatgaagtttct

SEQ ID NO: 966364 - DNA, 15 bp, Homo sapiens
agcatgaagtttctt

SEQ ID NO: 966365 - DNA, 15 bp, Homo sapiens
gcatgaagtttcttg

SEQ ID NO: 966366 - DNA, 15 bp, Homo sapiens
catgaagtttcttga

SEQ ID NO: 966367 - DNA, 15 bp, Homo sapiens
atgaagtttcttgaa

SEQ ID NO: 966368 - DNA, 15 bp, Homo sapiens
tgaagtttcttgaaa

SEQ ID NO: 966369 - DNA, 15 bp, Homo sapiens
gaagtttcttgaaaa

SEQ ID NO: 966370 - DNA, 15 bp, Homo sapiens
aagtttcttgaaaat

SEQ ID NO: 966371 - DNA, 15 bp, Homo sapiens
agtttcttgaaaatt

SEQ ID NO: 966372 - DNA, 15 bp, Homo sapiens
gtttcttgaaaattt

SEQ ID NO: 966373 - DNA, 15 bp, Homo sapiens
tttcttgaaaatttg

SEQ ID NO: 966374 - DNA, 15 bp, Homo sapiens
ttcttgaaaatttgc

SEQ ID NO: 966375 - DNA, 15 bp, Homo sapiens
tcttgaaaatttgca

SEQ ID NO: 966376 - DNA, 15 bp, Homo sapiens
cttgaaaatttgcat

SEQ ID NO: 966377 - DNA, 15 bp, Homo sapiens
ttgaaaatttgcatg

SEQ ID NO: 966378 - DNA, 15 bp, Homo sapiens
tgaaaatttgcatgg

SEQ ID NO: 966379 - DNA, 15 bp, Homo sapiens
gaaaatttgcatgga

SEQ ID NO: 966380 - DNA, 15 bp, Homo sapiens
aaaatttgcatggat

SEQ ID NO: 966381 - DNA, 15 bp, Homo sapiens
aaatttgcatggata

SEQ ID NO: 966382 - DNA, 15 bp, Homo sapiens
aatttgcatggataa

SEQ ID NO: 966383 - DNA, 15 bp, Homo sapiens
atttgcatggataat

SEQ ID NO: 966384 - DNA, 15 bp, Homo sapiens
tttgcatggataata

SEQ ID NO: 966385 - DNA, 15 bp, Homo sapiens
ttgcatggataataa

SEQ ID NO: 966386 - DNA, 15 bp, Homo sapiens
tgcatggataataag

SEQ ID NO: 966387 - DNA, 15 bp, Homo sapiens
gcatggataataagg

SEQ ID NO: 966388 - DNA, 15 bp, Homo sapiens
catggataataaggc

SEQ ID NO: 966389 - DNA, 15 bp, Homo sapiens
atggataataaggct

SEQ ID NO: 966390 - DNA, 15 bp, Homo sapiens
tggataataaggctg

SEQ ID NO: 966391 - DNA, 15 bp, Homo sapiens
ggataataaggctgc

SEQ ID NO: 966392 - DNA, 15 bp, Homo sapiens
gataataaggctgca

SEQ ID NO: 966393 - DNA, 15 bp, Homo sapiens
ataataaggctgcaa

SEQ ID NO: 966394 - DNA, 15 bp, Homo sapiens
taataaggctgcaac

SEQ ID NO: 966395 - DNA, 15 bp, Homo sapiens
aataaggctgcaaca

SEQ ID NO: 966396 - DNA, 15 bp, Homo sapiens
ataaggctgcaacag

SEQ ID NO: 966397 - DNA, 15 bp, Homo sapiens
taaggctgcaacaga

SEQ ID NO: 966398 - DNA, 15 bp, Homo sapiens
aaggctgcaacagag

SEQ ID NO: 966399 - DNA, 15 bp, Homo sapiens
aggctgcaacagagg

SEQ ID NO: 966400 - DNA, 15 bp, Homo sapiens
ggctgcaacagaggc

SEQ ID NO: 966401 - DNA, 15 bp, Homo sapiens
gctgcaacagaggca

SEQ ID NO: 966402 - DNA, 15 bp, Homo sapiens
ctgcaacagaggcag

SEQ ID NO: 966403 - DNA, 15 bp, Homo sapiens
tgcaacagaggcagg

SEQ ID NO: 966404 - DNA, 15 bp, Homo sapiens
gcaacagaggcaggc

SEQ ID NO: 966405 - DNA, 15 bp, Homo sapiens
caacagaggcaggct

SEQ ID NO: 966406 - DNA, 15 bp, Homo sapiens
aacagaggcaggctc

SEQ ID NO: 966407 - DNA, 15 bp, Homo sapiens
acagaggcaggctcc

SEQ ID NO: 966408 - DNA, 15 bp, Homo sapiens
cagaggcaggctcct

SEQ ID NO: 966409 - DNA, 15 bp, Homo sapiens
agaggcaggctcctc

SEQ ID NO: 966410 - DNA, 15 bp, Homo sapiens
gaggcaggctcctct

SEQ ID NO: 966411 - DNA, 15 bp, Homo sapiens
aggcaggctcctctt

SEQ ID NO: 966412 - DNA, 15 bp, Homo sapiens
ggcaggctcctcttt

SEQ ID NO: 966413 - DNA, 15 bp, Homo sapiens
gcaggctcctctttc

SEQ ID NO: 966414 - DNA, 15 bp, Homo sapiens
caggctcctctttct

SEQ ID NO: 966415 - DNA, 15 bp, Homo sapiens
aggctcctctttctc

SEQ ID NO: 966416 - DNA, 15 bp, Homo sapiens
ggctcctctttctca

SEQ ID NO: 966417 - DNA, 15 bp, Homo sapiens
gctcctctttctcag

SEQ ID NO: 966418 - DNA, 15 bp, Homo sapiens
ctcctctttctcagt

SEQ ID NO: 966419 - DNA, 15 bp, Homo sapiens
tcctctttctcagta

SEQ ID NO: 966420 - DNA, 15 bp, Homo sapiens
cctctttctcagtag

SEQ ID NO: 966421 - DNA, 15 bp, Homo sapiens
ctctttctcagtagc

SEQ ID NO: 966422 - DNA, 15 bp, Homo sapiens
tctttctcagtagca

SEQ ID NO: 966423 - DNA, 15 bp, Homo sapiens
ctttctcagtagcaa

SEQ ID NO: 966424 - DNA, 15 bp, Homo sapiens
tttctcagtagcaac

SEQ ID NO: 966425 - DNA, 15 bp, Homo sapiens
ttctcagtagcaaca

SEQ ID NO: 966426 - DNA, 15 bp, Homo sapiens
tctcagtagcaacat

SEQ ID NO: 966427 - DNA, 15 bp, Homo sapiens
ctcagtagcaacatc

SEQ ID NO: 966428 - DNA, 15 bp, Homo sapiens
tcagtagcaacatct

SEQ ID NO: 966429 - DNA, 15 bp, Homo sapiens
cagtagcaacatcta

SEQ ID NO: 966430 - DNA, 15 bp, Homo sapiens
agtagcaacatctat

SEQ ID NO: 966431 - DNA, 15 bp, Homo sapiens
gtagcaacatctatt

SEQ ID NO: 966432 - DNA, 15 bp, Homo sapiens
tagcaacatctattt

SEQ ID NO: 966433 - DNA, 15 bp, Homo sapiens
agcaacatctatttg

SEQ ID NO: 966434 - DNA, 15 bp, Homo sapiens
gcaacatctatttgt

SEQ ID NO: 966435 - DNA, 15 bp, Homo sapiens
caacatctatttgta

SEQ ID NO: 966436 - DNA, 15 bp, Homo sapiens
aacatctatttgtag

SEQ ID NO: 966437 - DNA, 15 bp, Homo sapiens
acatctatttgtaga

SEQ ID NO: 966438 - DNA, 15 bp, Homo sapiens
catctatttgtagaa

SEQ ID NO: 966439 - DNA, 15 bp, Homo sapiens
atctatttgtagaat

SEQ ID NO: 966440 - DNA, 15 bp, Homo sapiens
tctatttgtagaata

SEQ ID NO: 966441 - DNA, 15 bp, Homo sapiens
ctatttgtagaatag

SEQ ID NO: 966442 - DNA, 15 bp, Homo sapiens
tatttgtagaatagc

SEQ ID NO: 966443 - DNA, 15 bp, Homo sapiens
atttgtagaatagca

SEQ ID NO: 966444 - DNA, 15 bp, Homo sapiens
tttgtagaatagcag

SEQ ID NO: 966445 - DNA, 15 bp, Homo sapiens
ttgtagaatagcagc

SEQ ID NO: 966446 - DNA, 15 bp, Homo sapiens
tgtagaatagcagca

SEQ ID NO: 966447 - DNA, 15 bp, Homo sapiens
gtagaatagcagcaa

SEQ ID NO: 966448 - DNA, 15 bp, Homo sapiens
tagaatagcagcaat

SEQ ID NO: 966449 - DNA, 15 bp, Homo sapiens
agaatagcagcaatg

SEQ ID NO: 966450 - DNA, 15 bp, Homo sapiens
gaatagcagcaatga

SEQ ID NO: 966451 - DNA, 15 bp, Homo sapiens
aatagcagcaatgac

SEQ ID NO: 966452 - DNA, 15 bp, Homo sapiens
atagcagcaatgaca

SEQ ID NO: 966453 - DNA, 15 bp, Homo sapiens
tagcagcaatgacaa

SEQ ID NO: 966454 - DNA, 15 bp, Homo sapiens
agcagcaatgacaat

SEQ ID NO: 966455 - DNA, 15 bp, Homo sapiens
gcagcaatgacaatg

SEQ ID NO: 966456 - DNA, 15 bp, Homo sapiens
cagcaatgacaatgt

SEQ ID NO: 966457 - DNA, 15 bp, Homo sapiens
agcaatgacaatgtc

SEQ ID NO: 966458 - DNA, 15 bp, Homo sapiens
gcaatgacaatgtca

SEQ ID NO: 966459 - DNA, 15 bp, Homo sapiens
caatgacaatgtcat

SEQ ID NO: 966460 - DNA, 15 bp, Homo sapiens
aatgacaatgtcata

SEQ ID NO: 966461 - DNA, 15 bp, Homo sapiens
atgacaatgtcatag

SEQ ID NO: 966462 - DNA, 15 bp, Homo sapiens
tgacaatgtcatagc

SEQ ID NO: 966463 - DNA, 15 bp, Homo sapiens
gacaatgtcatagcc

SEQ ID NO: 966464 - DNA, 15 bp, Homo sapiens
acaatgtcatagccc

SEQ ID NO: 966465 - DNA, 15 bp, Homo sapiens
caatgtcatagccct

SEQ ID NO: 966466 - DNA, 15 bp, Homo sapiens
aatgtcatagcccta

SEQ ID NO: 966467 - DNA, 15 bp, Homo sapiens
atgtcatagccctaa

SEQ ID NO: 966468 - DNA, 15 bp, Homo sapiens
tgtcatagccctaat

SEQ ID NO: 966469 - DNA, 15 bp, Homo sapiens
gtcatagccctaatg

SEQ ID NO: 966470 - DNA, 15 bp, Homo sapiens
tcatagccctaatgg

SEQ ID NO: 966471 - DNA, 15 bp, Homo sapiens
catagccctaatggg

SEQ ID NO: 966472 - DNA, 15 bp, Homo sapiens
atagccctaatgggc

SEQ ID NO: 966473 - DNA, 15 bp, Homo sapiens
tagccctaatgggcc

SEQ ID NO: 966474 - DNA, 15 bp, Homo sapiens
agccctaatgggcct

SEQ ID NO: 966475 - DNA, 15 bp, Homo sapiens
gccctaatgggcctt

SEQ ID NO: 966476 - DNA, 15 bp, Homo sapiens
ccctaatgggcctta

SEQ ID NO: 966477 - DNA, 15 bp, Homo sapiens
cctaatgggccttac

SEQ ID NO: 966478 - DNA, 15 bp, Homo sapiens
ctaatgggccttaca

SEQ ID NO: 966479 - DNA, 15 bp, Homo sapiens
taatgggccttacag

SEQ ID NO: 966480 - DNA, 15 bp, Homo sapiens
aatgggccttacaga

SEQ ID NO: 966481 - DNA, 15 bp, Homo sapiens
atgggccttacagaa

SEQ ID NO: 966482 - DNA, 15 bp, Homo sapiens
tgggccttacagaag

SEQ ID NO: 966483 - DNA, 15 bp, Homo sapiens
gggccttacagaaga

SEQ ID NO: 966484 - DNA, 15 bp, Homo sapiens
ggccttacagaagaa

SEQ ID NO: 966485 - DNA, 15 bp, Homo sapiens
gccttacagaagaaa

SEQ ID NO: 966486 - DNA, 15 bp, Homo sapiens
ccttacagaagaaaa

SEQ ID NO: 966487 - DNA, 15 bp, Homo sapiens
cttacagaagaaaag

SEQ ID NO: 966488 - DNA, 15 bp, Homo sapiens
ttacagaagaaaaga

SEQ ID NO: 966489 - DNA, 15 bp, Homo sapiens
tacagaagaaaagaa

SEQ ID NO: 966490 - DNA, 15 bp, Homo sapiens
acagaagaaaagaat

SEQ ID NO: 966491 - DNA, 15 bp, Homo sapiens
cagaagaaaagaata

SEQ ID NO: 966492 - DNA, 15 bp, Homo sapiens
agaagaaaagaatat

SEQ ID NO: 966493 - DNA, 15 bp, Homo sapiens
gaagaaaagaatata

SEQ ID NO: 966494 - DNA, 15 bp, Homo sapiens
aagaaaagaatatat

SEQ ID NO: 966495 - DNA, 15 bp, Homo sapiens
agaaaagaatatata

SEQ ID NO: 966496 - DNA, 15 bp, Homo sapiens
gaaaagaatatatac

SEQ ID NO: 966497 - DNA, 15 bp, Homo sapiens
aaaagaatatataca

SEQ ID NO: 966498 - DNA, 15 bp, Homo sapiens
aaagaatatatacat

SEQ ID NO: 966499 - DNA, 15 bp, Homo sapiens
aagaatatatacatc

SEQ ID NO: 966500 - DNA, 15 bp, Homo sapiens
agaatatatacatca

SEQ ID NO: 966501 - DNA, 15 bp, Homo sapiens
gaatatatacatcaa

SEQ ID NO: 966502 - DNA, 15 bp, Homo sapiens
aatatatacatcaat

SEQ ID NO: 966503 - DNA, 15 bp, Homo sapiens
atatatacatcaatg

SEQ ID NO: 966504 - DNA, 15 bp, Homo sapiens
tatatacatcaatgt

SEQ ID NO: 966505 - DNA, 15 bp, Homo sapiens
atatacatcaatgta

SEQ ID NO: 966506 - DNA, 15 bp, Homo sapiens
tatacatcaatgtat

SEQ ID NO: 966507 - DNA, 15 bp, Homo sapiens
atacatcaatgtata

SEQ ID NO: 966508 - DNA, 15 bp, Homo sapiens
tacatcaatgtatac

SEQ ID NO: 966509 - DNA, 15 bp, Homo sapiens
acatcaatgtataca

SEQ ID NO: 966510 - DNA, 15 bp, Homo sapiens
catcaatgtatacac

SEQ ID NO: 966511 - DNA, 15 bp, Homo sapiens
atcaatgtatacaca

SEQ ID NO: 966512 - DNA, 15 bp, Homo sapiens
tcaatgtatacacat

SEQ ID NO: 966513 - DNA, 15 bp, Homo sapiens
caatgtatacacata

SEQ ID NO: 966514 - DNA, 15 bp, Homo sapiens
aatgtatacacatat

SEQ ID NO: 966515 - DNA, 15 bp, Homo sapiens
atgtatacacatata

SEQ ID NO: 966516 - DNA, 15 bp, Homo sapiens
tgtatacacatatac

SEQ ID NO: 966517 - DNA, 15 bp, Homo sapiens
gtatacacatatact

SEQ ID NO: 966518 - DNA, 15 bp, Homo sapiens
tatacacatatacta

SEQ ID NO: 966519 - DNA, 15 bp, Homo sapiens
atacacatatactaa

SEQ ID NO: 966520 - DNA, 15 bp, Homo sapiens
tacacatatactaat

SEQ ID NO: 966521 - DNA, 15 bp, Homo sapiens
acacatatactaatg

SEQ ID NO: 966522 - DNA, 15 bp, Homo sapiens
cacatatactaatgg

SEQ ID NO: 966523 - DNA, 15 bp, Homo sapiens
acatatactaatggt

SEQ ID NO: 966524 - DNA, 15 bp, Homo sapiens
catatactaatggta

SEQ ID NO: 966525 - DNA, 15 bp, Homo sapiens
atatactaatggtag

SEQ ID NO: 966526 - DNA, 15 bp, Homo sapiens
tatactaatggtagc

SEQ ID NO: 966527 - DNA, 15 bp, Homo sapiens
atactaatggtagca

SEQ ID NO: 966528 - DNA, 15 bp, Homo sapiens
tactaatggtagcac

SEQ ID NO: 966529 - DNA, 15 bp, Homo sapiens
actaatggtagcaca

SEQ ID NO: 966530 - DNA, 15 bp, Homo sapiens
ctaatggtagcacaa

SEQ ID NO: 966531 - DNA, 15 bp, Homo sapiens
taatggtagcacaag

SEQ ID NO: 966532 - DNA, 15 bp, Homo sapiens
aatggtagcacaagt

SEQ ID NO: 966533 - DNA, 15 bp, Homo sapiens
atggtagcacaagtc

SEQ ID NO: 966534 - DNA, 15 bp, Homo sapiens
tggtagcacaagtct

SEQ ID NO: 966535 - DNA, 15 bp, Homo sapiens
ggtagcacaagtctt

SEQ ID NO: 966536 - DNA, 15 bp, Homo sapiens
gtagcacaagtcttg

SEQ ID NO: 966537 - DNA, 15 bp, Homo sapiens
tagcacaagtcttgg

SEQ ID NO: 966538 - DNA, 15 bp, Homo sapiens
agcacaagtcttgga

SEQ ID NO: 966539 - DNA, 15 bp, Homo sapiens
gcacaagtcttggag

SEQ ID NO: 966540 - DNA, 15 bp, Homo sapiens
cacaagtcttggaga

SEQ ID NO: 966541 - DNA, 15 bp, Homo sapiens
acaagtcttggagat

SEQ ID NO: 966542 - DNA, 15 bp, Homo sapiens
caagtcttggagata

SEQ ID NO: 966543 - DNA, 15 bp, Homo sapiens
aagtcttggagataa

SEQ ID NO: 966544 - DNA, 15 bp, Homo sapiens
agtcttggagataat

SEQ ID NO: 966545 - DNA, 15 bp, Homo sapiens
gtcttggagataatt

SEQ ID NO: 966546 - DNA, 15 bp, Homo sapiens
tcttggagataattt

SEQ ID NO: 966547 - DNA, 15 bp, Homo sapiens
cttggagataatttc

SEQ ID NO: 966548 - DNA, 15 bp, Homo sapiens
ttggagataatttcg

SEQ ID NO: 966549 - DNA, 15 bp, Homo sapiens
tggagataatttcgt

SEQ ID NO: 966550 - DNA, 15 bp, Homo sapiens
ggagataatttcgtg

SEQ ID NO: 966551 - DNA, 15 bp, Homo sapiens
gagataatttcgtgc

SEQ ID NO: 966552 - DNA, 15 bp, Homo sapiens
agataatttcgtgct

SEQ ID NO: 966553 - DNA, 15 bp, Homo sapiens
gataatttcgtgcta

SEQ ID NO: 966554 - DNA, 15 bp, Homo sapiens
ataatttcgtgctat

SEQ ID NO: 966555 - DNA, 15 bp, Homo sapiens
taatttcgtgctata

SEQ ID NO: 966556 - DNA, 15 bp, Homo sapiens
aatttcgtgctataa

SEQ ID NO: 966557 - DNA, 15 bp, Homo sapiens
atttcgtgctataag

SEQ ID NO: 966558 - DNA, 15 bp, Homo sapiens
tttcgtgctataaga

SEQ ID NO: 966559 - DNA, 15 bp, Homo sapiens
ttcgtgctataagaa

SEQ ID NO: 966560 - DNA, 15 bp, Homo sapiens
tcgtgctataagaat

SEQ ID NO: 966561 - DNA, 15 bp, Homo sapiens
cgtgctataagaatt

SEQ ID NO: 966562 - DNA, 15 bp, Homo sapiens
gtgctataagaattc

SEQ ID NO: 966563 - DNA, 15 bp, Homo sapiens
tgctataagaattcc

SEQ ID NO: 966564 - DNA, 15 bp, Homo sapiens
gctataagaattcca

SEQ ID NO: 966565 - DNA, 15 bp, Homo sapiens
ctataagaattccaa

SEQ ID NO: 966566 - DNA, 15 bp, Homo sapiens
tataagaattccaaa

SEQ ID NO: 966567 - DNA, 15 bp, Homo sapiens
ataagaattccaaaa

SEQ ID NO: 966568 - DNA, 15 bp, Homo sapiens
taagaattccaaaaa

SEQ ID NO: 966569 - DNA, 15 bp, Homo sapiens
aagaattccaaaaaa

SEQ ID NO: 966570 - DNA, 15 bp, Homo sapiens
agaattccaaaaaaa

SEQ ID NO: 966571 - DNA, 15 bp, Homo sapiens
gaattccaaaaaaag

SEQ ID NO: 966572 - DNA, 15 bp, Homo sapiens
aattccaaaaaaagg

SEQ ID NO: 966573 - DNA, 15 bp, Homo sapiens
attccaaaaaaaggc

SEQ ID NO: 966574 - DNA, 15 bp, Homo sapiens
ttccaaaaaaaggca

SEQ ID NO: 966575 - DNA, 15 bp, Homo sapiens
tccaaaaaaaggcaa

SEQ ID NO: 966576 - DNA, 15 bp, Homo sapiens
ccaaaaaaaggcaat

SEQ ID NO: 966577 - DNA, 15 bp, Homo sapiens
caaaaaaaggcaatt

SEQ ID NO: 966578 - DNA, 15 bp, Homo sapiens
aaaaaaaggcaattt

SEQ ID NO: 966579 - DNA, 15 bp, Homo sapiens
aaaaaaggcaatttc

SEQ ID NO: 966580 - DNA, 15 bp, Homo sapiens
aaaaaggcaatttct

SEQ ID NO: 966581 - DNA, 15 bp, Homo sapiens
aaaaggcaatttctg

SEQ ID NO: 966582 - DNA, 15 bp, Homo sapiens
aaaggcaatttctga

SEQ ID NO: 966583 - DNA, 15 bp, Homo sapiens
aaggcaatttctgaa

SEQ ID NO: 966584 - DNA, 15 bp, Homo sapiens
aggcaatttctgaaa

SEQ ID NO: 966585 - DNA, 15 bp, Homo sapiens
ggcaatttctgaaag

SEQ ID NO: 966586 - DNA, 15 bp, Homo sapiens
gcaatttctgaaagc

SEQ ID NO: 966587 - DNA, 15 bp, Homo sapiens
caatttctgaaagct

SEQ ID NO: 966588 - DNA, 15 bp, Homo sapiens
aatttctgaaagctg

SEQ ID NO: 966589 - DNA, 15 bp, Homo sapiens
atttctgaaagctgg

SEQ ID NO: 966590 - DNA, 15 bp, Homo sapiens
tttctgaaagctggg

SEQ ID NO: 966591 - DNA, 15 bp, Homo sapiens
ttctgaaagctggga

SEQ ID NO: 966592 - DNA, 15 bp, Homo sapiens
tctgaaagctgggat

SEQ ID NO: 966593 - DNA, 15 bp, Homo sapiens
ctgaaagctgggatg

SEQ ID NO: 966594 - DNA, 15 bp, Homo sapiens
tgaaagctgggatga

SEQ ID NO: 966595 - DNA, 15 bp, Homo sapiens
gaaagctgggatgat

SEQ ID NO: 966596 - DNA, 15 bp, Homo sapiens
aaagctgggatgatt

SEQ ID NO: 966597 - DNA, 15 bp, Homo sapiens
aagctgggatgattg

SEQ ID NO: 966598 - DNA, 15 bp, Homo sapiens
agctgggatgattgt

SEQ ID NO: 966599 - DNA, 15 bp, Homo sapiens
gctgggatgattgtt

SEQ ID NO: 966600 - DNA, 15 bp, Homo sapiens
ctgggatgattgttg

SEQ ID NO: 966601 - DNA, 15 bp, Homo sapiens
tgggatgattgttgc

SEQ ID NO: 966602 - DNA, 15 bp, Homo sapiens
gggatgattgttgcc

SEQ ID NO: 966603 - DNA, 15 bp, Homo sapiens
ggatgattgttgcct

SEQ ID NO: 966604 - DNA, 15 bp, Homo sapiens
gatgattgttgccta

SEQ ID NO: 966605 - DNA, 15 bp, Homo sapiens
atgattgttgcctaa

SEQ ID NO: 966606 - DNA, 15 bp, Homo sapiens
tgattgttgcctaat

SEQ ID NO: 966607 - DNA, 15 bp, Homo sapiens
gattgttgcctaatt

SEQ ID NO: 966608 - DNA, 15 bp, Homo sapiens
attgttgcctaattg

SEQ ID NO: 966609 - DNA, 15 bp, Homo sapiens
ttgttgcctaattgt

SEQ ID NO: 966610 - DNA, 15 bp, Homo sapiens
tgttgcctaattgtt

SEQ ID NO: 966611 - DNA, 15 bp, Homo sapiens
gttgcctaattgtta

SEQ ID NO: 966612 - DNA, 15 bp, Homo sapiens
ttgcctaattgttaa

SEQ ID NO: 966613 - DNA, 15 bp, Homo sapiens
tgcctaattgttaaa

SEQ ID NO: 966614 - DNA, 15 bp, Homo sapiens
gcctaattgttaaaa

SEQ ID NO: 966615 - DNA, 15 bp, Homo sapiens
cctaattgttaaaat

SEQ ID NO: 966616 - DNA, 15 bp, Homo sapiens
ctaattgttaaaatg

SEQ ID NO: 966617 - DNA, 15 bp, Homo sapiens
taattgttaaaatga

SEQ ID NO: 966618 - DNA, 15 bp, Homo sapiens
aattgttaaaatgac

SEQ ID NO: 966619 - DNA, 15 bp, Homo sapiens
attgttaaaatgact

SEQ ID NO: 966620 - DNA, 15 bp, Homo sapiens
ttgttaaaatgactg

SEQ ID NO: 966621 - DNA, 15 bp, Homo sapiens
tgttaaaatgactgc

SEQ ID NO: 966622 - DNA, 15 bp, Homo sapiens
gttaaaatgactgcg

SEQ ID NO: 966623 - DNA, 15 bp, Homo sapiens
ttaaaatgactgcgt

SEQ ID NO: 966624 - DNA, 15 bp, Homo sapiens
taaaatgactgcgtt

SEQ ID NO: 966625 - DNA, 15 bp, Homo sapiens
aaaatgactgcgttt

SEQ ID NO: 966626 - DNA, 15 bp, Homo sapiens
aaatgactgcgttta

SEQ ID NO: 966627 - DNA, 15 bp, Homo sapiens
aatgactgcgtttac

SEQ ID NO: 966628 - DNA, 15 bp, Homo sapiens
atgactgcgtttact

SEQ ID NO: 966629 - DNA, 15 bp, Homo sapiens
tgactgcgtttactt

SEQ ID NO: 966630 - DNA, 15 bp, Homo sapiens
gactgcgtttactta

SEQ ID NO: 966631 - DNA, 15 bp, Homo sapiens
actgcgtttacttaa

SEQ ID NO: 966632 - DNA, 15 bp, Homo sapiens
ctgcgtttacttaat

SEQ ID NO: 966633 - DNA, 15 bp, Homo sapiens
tgcgtttacttaata

SEQ ID NO: 966634 - DNA, 15 bp, Homo sapiens
gcgtttacttaatat

SEQ ID NO: 966635 - DNA, 15 bp, Homo sapiens
cgtttacttaatata

SEQ ID NO: 966636 - DNA, 15 bp, Homo sapiens
gtttacttaatataa

SEQ ID NO: 966637 - DNA, 15 bp, Homo sapiens
tttacttaatataaa

SEQ ID NO: 966638 - DNA, 15 bp, Homo sapiens
ttacttaatataaat

SEQ ID NO: 966639 - DNA, 15 bp, Homo sapiens
tacttaatataaatt

SEQ ID NO: 966640 - DNA, 15 bp, Homo sapiens
acttaatataaattt

SEQ ID NO: 966641 - DNA, 15 bp, Homo sapiens
cttaatataaatttt

SEQ ID NO: 966642 - DNA, 15 bp, Homo sapiens
ttaatataaatttta

SEQ ID NO: 966643 - DNA, 15 bp, Homo sapiens
taatataaattttat

SEQ ID NO: 966644 - DNA, 15 bp, Homo sapiens
aatataaattttatt

SEQ ID NO: 966645 - DNA, 15 bp, Homo sapiens
atataaattttattt

SEQ ID NO: 966646 - DNA, 15 bp, Homo sapiens
tataaattttatttg

SEQ ID NO: 966647 - DNA, 15 bp, Homo sapiens
ataaattttatttga

SEQ ID NO: 966648 - DNA, 15 bp, Homo sapiens
taaattttatttgaa

SEQ ID NO: 966649 - DNA, 15 bp, Homo sapiens
aaattttatttgaaa

SEQ ID NO: 966650 - DNA, 15 bp, Homo sapiens
aattttatttgaaat

SEQ ID NO: 966651 - DNA, 15 bp, Homo sapiens
attttatttgaaata

SEQ ID NO: 966652 - DNA, 15 bp, Homo sapiens
ttttatttgaaatac

SEQ ID NO: 966653 - DNA, 15 bp, Homo sapiens
tttatttgaaatact

SEQ ID NO: 966654 - DNA, 15 bp, Homo sapiens
ttatttgaaatacta

SEQ ID NO: 966655 - DNA, 15 bp, Homo sapiens
tatttgaaatactat

SEQ ID NO: 966656 - DNA, 15 bp, Homo sapiens
atttgaaatactatg

SEQ ID NO: 966657 - DNA, 15 bp, Homo sapiens
tttgaaatactatga

SEQ ID NO: 966658 - DNA, 15 bp, Homo sapiens
ttgaaatactatgaa

SEQ ID NO: 966659 - DNA, 15 bp, Homo sapiens
tgaaatactatgaaa

SEQ ID NO: 966660 - DNA, 15 bp, Homo sapiens
gaaatactatgaaat

SEQ ID NO: 966661 - DNA, 15 bp, Homo sapiens
aaatactatgaaata

SEQ ID NO: 966662 - DNA, 15 bp, Homo sapiens
aatactatgaaataa

SEQ ID NO: 966663 - DNA, 15 bp, Homo sapiens
atactatgaaataaa

SEQ ID NO: 966664 - DNA, 15 bp, Homo sapiens
tactatgaaataaaa

SEQ ID NO: 966665 - DNA, 15 bp, Homo sapiens
actatgaaataaaac

SEQ ID NO: 966666 - DNA, 15 bp, Homo sapiens
ctatgaaataaaaca

SEQ ID NO: 966667 - DNA, 15 bp, Homo sapiens
tatgaaataaaacat

SEQ ID NO: 966668 - DNA, 15 bp, Homo sapiens
atgaaataaaacatc

SEQ ID NO: 966669 - DNA, 15 bp, Homo sapiens
tgaaataaaacatca

SEQ ID NO: 966670 - DNA, 15 bp, Homo sapiens
gaaataaaacatcaa

SEQ ID NO: 966671 - DNA, 15 bp, Homo sapiens
aaataaaacatcaat

SEQ ID NO: 966672 - DNA, 15 bp, Homo sapiens
aataaaacatcaata

SEQ ID NO: 966673 - DNA, 15 bp, Homo sapiens
ataaaacatcaatag

SEQ ID NO: 966674 - DNA, 15 bp, Homo sapiens
taaaacatcaataga

SEQ ID NO: 966675 - DNA, 15 bp, Homo sapiens
aaaacatcaatagaa

SEQ ID NO: 966676 - DNA, 15 bp, Homo sapiens
aaacatcaatagaaa

SEQ ID NO: 966677 - DNA, 15 bp, Homo sapiens
aacatcaatagaaat

SEQ ID NO: 966678 - DNA, 15 bp, Homo sapiens
acatcaatagaaatc

SEQ ID NO: 966679 - DNA, 15 bp, Homo sapiens
catcaatagaaatct

SEQ ID NO: 966680 - DNA, 15 bp, Homo sapiens
atcaatagaaatctt

SEQ ID NO: 966681 - DNA, 15 bp, Homo sapiens
tcaatagaaatcttg

SEQ ID NO: 966682 - DNA, 15 bp, Homo sapiens
caatagaaatcttgt

SEQ ID NO: 966683 - DNA, 15 bp, Homo sapiens
aatagaaatcttgta

SEQ ID NO: 966684 - DNA, 15 bp, Homo sapiens
atagaaatcttgtat

SEQ ID NO: 966685 - DNA, 15 bp, Homo sapiens
tagaaatcttgtatt

SEQ ID NO: 966686 - DNA, 15 bp, Homo sapiens
agaaatcttgtatta

SEQ ID NO: 966687 - DNA, 15 bp, Homo sapiens
gaaatcttgtattat

SEQ ID NO: 966688 - DNA, 15 bp, Homo sapiens
aaatcttgtattatg

SEQ ID NO: 966689 - DNA, 15 bp, Homo sapiens
aatcttgtattatgt

SEQ ID NO: 966690 - DNA, 15 bp, Homo sapiens
atcttgtattatgtg

SEQ ID NO: 966691 - DNA, 15 bp, Homo sapiens
tcttgtattatgtgc

SEQ ID NO: 966692 - DNA, 15 bp, Homo sapiens
cttgtattatgtgca

SEQ ID NO: 966693 - DNA, 15 bp, Homo sapiens
ttgtattatgtgcaa

SEQ ID NO: 966694 - DNA, 15 bp, Homo sapiens
tgtattatgtgcaaa

SEQ ID NO: 966695 - DNA, 15 bp, Homo sapiens
gtattatgtgcaaaa

SEQ ID NO: 966696 - DNA, 15 bp, Homo sapiens
tattatgtgcaaaat

SEQ ID NO: 966697 - DNA, 15 bp, Homo sapiens
attatgtgcaaaatt

SEQ ID NO: 966698 - DNA, 15 bp, Homo sapiens
ttatgtgcaaaattt

SEQ ID NO: 966699 - DNA, 15 bp, Homo sapiens
tatgtgcaaaatttg

SEQ ID NO: 966700 - DNA, 15 bp, Homo sapiens
atgtgcaaaatttga

SEQ ID NO: 966701 - DNA, 15 bp, Homo sapiens
tgtgcaaaatttgaa

SEQ ID NO: 966702 - DNA, 15 bp, Homo sapiens
gtgcaaaatttgaaa

SEQ ID NO: 966703 - DNA, 15 bp, Homo sapiens
tgcaaaatttgaaat

SEQ ID NO: 966704 - DNA, 15 bp, Homo sapiens
gcaaaatttgaaatt

SEQ ID NO: 966705 - DNA, 15 bp, Homo sapiens
caaaatttgaaatta

SEQ ID NO: 966706 - DNA, 15 bp, Homo sapiens
aaaatttgaaattac

SEQ ID NO: 966707 - DNA, 15 bp, Homo sapiens
aaatttgaaattaca

SEQ ID NO: 966708 - DNA, 15 bp, Homo sapiens
aatttgaaattacac

SEQ ID NO: 966709 - DNA, 15 bp, Homo sapiens
atttgaaattacact

SEQ ID NO: 966710 - DNA, 15 bp, Homo sapiens
tttgaaattacactg

SEQ ID NO: 966711 - DNA, 15 bp, Homo sapiens
ttgaaattacactgt

SEQ ID NO: 966712 - DNA, 15 bp, Homo sapiens
tgaaattacactgtg

SEQ ID NO: 966713 - DNA, 15 bp, Homo sapiens
gaaattacactgtgc

SEQ ID NO: 966714 - DNA, 15 bp, Homo sapiens
aaattacactgtgca

SEQ ID NO: 966715 - DNA, 15 bp, Homo sapiens
aattacactgtgcat

SEQ ID NO: 966716 - DNA, 15 bp, Homo sapiens
attacactgtgcatc

SEQ ID NO: 966717 - DNA, 15 bp, Homo sapiens
ttacactgtgcatca

SEQ ID NO: 966718 - DNA, 15 bp, Homo sapiens
tacactgtgcatcaa

SEQ ID NO: 966719 - DNA, 15 bp, Homo sapiens
acactgtgcatcaaa

SEQ ID NO: 966720 - DNA, 15 bp, Homo sapiens
cactgtgcatcaaag

SEQ ID NO: 966721 - DNA, 15 bp, Homo sapiens
actgtgcatcaaagg

SEQ ID NO: 966722 - DNA, 15 bp, Homo sapiens
ctgtgcatcaaagga

SEQ ID NO: 966723 - DNA, 15 bp, Homo sapiens
tgtgcatcaaaggaa

SEQ ID NO: 966724 - DNA, 15 bp, Homo sapiens
gtgcatcaaaggaaa

SEQ ID NO: 966725 - DNA, 15 bp, Homo sapiens
tgcatcaaaggaaaa

SEQ ID NO: 966726 - DNA, 15 bp, Homo sapiens
gcatcaaaggaaaaa

SEQ ID NO: 966727 - DNA, 15 bp, Homo sapiens
catcaaaggaaaaaa

SEQ ID NO: 966728 - DNA, 15 bp, Homo sapiens
atcaaaggaaaaaat

SEQ ID NO: 966729 - DNA, 15 bp, Homo sapiens
tcaaaggaaaaaatg

SEQ ID NO: 966730 - DNA, 15 bp, Homo sapiens
caaaggaaaaaatgc

SEQ ID NO: 966731 - DNA, 15 bp, Homo sapiens
aaaggaaaaaatgca

SEQ ID NO: 966732 - DNA, 15 bp, Homo sapiens
aaggaaaaaatgcaa

SEQ ID NO: 966733 - DNA, 15 bp, Homo sapiens
aggaaaaaatgcaag

SEQ ID NO: 966734 - DNA, 15 bp, Homo sapiens
ggaaaaaatgcaagg

SEQ ID NO: 966735 - DNA, 15 bp, Homo sapiens
gaaaaaatgcaagga

SEQ ID NO: 966736 - DNA, 15 bp, Homo sapiens
aaaaaatgcaaggat

SEQ ID NO: 966737 - DNA, 15 bp, Homo sapiens
aaaaatgcaaggatt

SEQ ID NO: 966738 - DNA, 15 bp, Homo sapiens
aaaatgcaaggattt

SEQ ID NO: 966739 - DNA, 15 bp, Homo sapiens
aaatgcaaggatttt

SEQ ID NO: 966740 - DNA, 15 bp, Homo sapiens
aatgcaaggattttg

SEQ ID NO: 966741 - DNA, 15 bp, Homo sapiens
atgcaaggattttgt

SEQ ID NO: 966742 - DNA, 15 bp, Homo sapiens
tgcaaggattttgta

SEQ ID NO: 966743 - DNA, 15 bp, Homo sapiens
gcaaggattttgtaa

SEQ ID NO: 966744 - DNA, 15 bp, Homo sapiens
caaggattttgtaat

SEQ ID NO: 966745 - DNA, 15 bp, Homo sapiens
aaggattttgtaatt

SEQ ID NO: 966746 - DNA, 15 bp, Homo sapiens
aggattttgtaattt

SEQ ID NO: 966747 - DNA, 15 bp, Homo sapiens
ggattttgtaatttc

SEQ ID NO: 966748 - DNA, 15 bp, Homo sapiens
gattttgtaatttca

SEQ ID NO: 966749 - DNA, 15 bp, Homo sapiens
attttgtaatttcaa

SEQ ID NO: 966750 - DNA, 15 bp, Homo sapiens
ttttgtaatttcaaa

SEQ ID NO: 966751 - DNA, 15 bp, Homo sapiens
tttgtaatttcaaag

SEQ ID NO: 966752 - DNA, 15 bp, Homo sapiens
ttgtaatttcaaagc

SEQ ID NO: 966753 - DNA, 15 bp, Homo sapiens
tgtaatttcaaagcc

SEQ ID NO: 966754 - DNA, 15 bp, Homo sapiens
gtaatttcaaagcca

SEQ ID NO: 966755 - DNA, 15 bp, Homo sapiens
taatttcaaagccag

SEQ ID NO: 966756 - DNA, 15 bp, Homo sapiens
aatttcaaagccagt

SEQ ID NO: 966757 - DNA, 15 bp, Homo sapiens
atttcaaagccagtc

SEQ ID NO: 966758 - DNA, 15 bp, Homo sapiens
tttcaaagccagtct

SEQ ID NO: 966759 - DNA, 15 bp, Homo sapiens
ttcaaagccagtctg

SEQ ID NO: 966760 - DNA, 15 bp, Homo sapiens
tcaaagccagtctgt

SEQ ID NO: 966761 - DNA, 15 bp, Homo sapiens
caaagccagtctgta

SEQ ID NO: 966762 - DNA, 15 bp, Homo sapiens
aaagccagtctgtaa

SEQ ID NO: 966763 - DNA, 15 bp, Homo sapiens
aagccagtctgtaaa

SEQ ID NO: 966764 - DNA, 15 bp, Homo sapiens
agccagtctgtaaaa

SEQ ID NO: 966765 - DNA, 15 bp, Homo sapiens
gccagtctgtaaaac

SEQ ID NO: 966766 - DNA, 15 bp, Homo sapiens
ccagtctgtaaaact

SEQ ID NO: 966767 - DNA, 15 bp, Homo sapiens
cagtctgtaaaacta

SEQ ID NO: 966768 - DNA, 15 bp, Homo sapiens
agtctgtaaaactat

SEQ ID NO: 966769 - DNA, 15 bp, Homo sapiens
gtctgtaaaactatt

SEQ ID NO: 966770 - DNA, 15 bp, Homo sapiens
tctgtaaaactattt

SEQ ID NO: 966771 - DNA, 15 bp, Homo sapiens
ctgtaaaactattta

SEQ ID NO: 966772 - DNA, 15 bp, Homo sapiens
tgtaaaactatttat

SEQ ID NO: 966773 - DNA, 15 bp, Homo sapiens
gtaaaactatttatg

SEQ ID NO: 966774 - DNA, 15 bp, Homo sapiens
taaaactatttatgt

SEQ ID NO: 966775 - DNA, 15 bp, Homo sapiens
aaaactatttatgtt

SEQ ID NO: 966776 - DNA, 15 bp, Homo sapiens
aaactatttatgtta

SEQ ID NO: 966777 - DNA, 15 bp, Homo sapiens
aactatttatgttaa

SEQ ID NO: 966778 - DNA, 15 bp, Homo sapiens
actatttatgttaat

SEQ ID NO: 966779 - DNA, 15 bp, Homo sapiens
ctatttatgttaatg

SEQ ID NO: 966780 - DNA, 15 bp, Homo sapiens
tatttatgttaatgg

SEQ ID NO: 966781 - DNA, 15 bp, Homo sapiens
atttatgttaatggc

SEQ ID NO: 966782 - DNA, 15 bp, Homo sapiens
tttatgttaatggca

SEQ ID NO: 966783 - DNA, 15 bp, Homo sapiens
ttatgttaatggcac

SEQ ID NO: 966784 - DNA, 15 bp, Homo sapiens
tatgttaatggcaca

SEQ ID NO: 966785 - DNA, 15 bp, Homo sapiens
atgttaatggcacat

SEQ ID NO: 966786 - DNA, 15 bp, Homo sapiens
tgttaatggcacatg

SEQ ID NO: 966787 - DNA, 15 bp, Homo sapiens
gttaatggcacatga

SEQ ID NO: 966788 - DNA, 15 bp, Homo sapiens
ttaatggcacatgat

SEQ ID NO: 966789 - DNA, 15 bp, Homo sapiens
taatggcacatgata

SEQ ID NO: 966790 - DNA, 15 bp, Homo sapiens
aatggcacatgatag

SEQ ID NO: 966791 - DNA, 15 bp, Homo sapiens
atggcacatgatagc

SEQ ID NO: 966792 - DNA, 15 bp, Homo sapiens
tggcacatgatagct

SEQ ID NO: 966793 - DNA, 15 bp, Homo sapiens
ggcacatgatagctc

SEQ ID NO: 966794 - DNA, 15 bp, Homo sapiens
gcacatgatagctcc

SEQ ID NO: 966795 - DNA, 15 bp, Homo sapiens
cacatgatagctcca

SEQ ID NO: 966796 - DNA, 15 bp, Homo sapiens
acatgatagctccac

SEQ ID NO: 966797 - DNA, 15 bp, Homo sapiens
catgatagctccact

SEQ ID NO: 966798 - DNA, 15 bp, Homo sapiens
atgatagctccacta

SEQ ID NO: 966799 - DNA, 15 bp, Homo sapiens
tgatagctccactat

SEQ ID NO: 966800 - DNA, 15 bp, Homo sapiens
gatagctccactata

SEQ ID NO: 966801 - DNA, 15 bp, Homo sapiens
atagctccactataa

SEQ ID NO: 966802 - DNA, 15 bp, Homo sapiens
tagctccactataag

SEQ ID NO: 966803 - DNA, 15 bp, Homo sapiens
agctccactataagt

SEQ ID NO: 966804 - DNA, 15 bp, Homo sapiens
gctccactataagta

SEQ ID NO: 966805 - DNA, 15 bp, Homo sapiens
ctccactataagtaa

SEQ ID NO: 966806 - DNA, 15 bp, Homo sapiens
tccactataagtaaa

SEQ ID NO: 966807 - DNA, 15 bp, Homo sapiens
ccactataagtaaaa

SEQ ID NO: 966808 - DNA, 15 bp, Homo sapiens
cactataagtaaaaa

SEQ ID NO: 966809 - DNA, 15 bp, Homo sapiens
actataagtaaaaag

SEQ ID NO: 966810 - DNA, 15 bp, Homo sapiens
ctataagtaaaaaga

SEQ ID NO: 966811 - DNA, 15 bp, Homo sapiens
tataagtaaaaagaa

SEQ ID NO: 966812 - DNA, 15 bp, Homo sapiens
ataagtaaaaagaaa

SEQ ID NO: 966813 - DNA, 15 bp, Homo sapiens
taagtaaaaagaaat

SEQ ID NO: 966814 - DNA, 15 bp, Homo sapiens
aagtaaaaagaaata

SEQ ID NO: 966815 - DNA, 15 bp, Homo sapiens
agtaaaaagaaatac

SEQ ID NO: 966816 - DNA, 15 bp, Homo sapiens
gtaaaaagaaatacc

SEQ ID NO: 966817 - DNA, 15 bp, Homo sapiens
taaaaagaaataccc

SEQ ID NO: 966818 - DNA, 15 bp, Homo sapiens
aaaaagaaataccca

SEQ ID NO: 966819 - DNA, 15 bp, Homo sapiens
aaaagaaatacccaa

SEQ ID NO: 966820 - DNA, 15 bp, Homo sapiens
aaagaaatacccaac

SEQ ID NO: 966821 - DNA, 15 bp, Homo sapiens
aagaaatacccaaca

SEQ ID NO: 966822 - DNA, 15 bp, Homo sapiens
agaaatacccaacac

SEQ ID NO: 966823 - DNA, 15 bp, Homo sapiens
gaaatacccaacacc

SEQ ID NO: 966824 - DNA, 15 bp, Homo sapiens
aaatacccaacaccc

SEQ ID NO: 966825 - DNA, 15 bp, Homo sapiens
aatacccaacaccct

SEQ ID NO: 966826 - DNA, 15 bp, Homo sapiens
atacccaacaccctt

SEQ ID NO: 966827 - DNA, 15 bp, Homo sapiens
tacccaacacccttt

SEQ ID NO: 966828 - DNA, 15 bp, Homo sapiens
acccaacaccctttg

SEQ ID NO: 966829 - DNA, 15 bp, Homo sapiens
cccaacaccctttgt

SEQ ID NO: 966830 - DNA, 15 bp, Homo sapiens
ccaacaccctttgtc

SEQ ID NO: 966831 - DNA, 15 bp, Homo sapiens
caacaccctttgtca

SEQ ID NO: 966832 - DNA, 15 bp, Homo sapiens
aacaccctttgtcaa

SEQ ID NO: 966833 - DNA, 15 bp, Homo sapiens
acaccctttgtcaat

SEQ ID NO: 966834 - DNA, 15 bp, Homo sapiens
caccctttgtcaatc

SEQ ID NO: 966835 - DNA, 15 bp, Homo sapiens
accctttgtcaatct

SEQ ID NO: 966836 - DNA, 15 bp, Homo sapiens
ccctttgtcaatctt

SEQ ID NO: 966837 - DNA, 15 bp, Homo sapiens
cctttgtcaatcttc

SEQ ID NO: 966838 - DNA, 15 bp, Homo sapiens
ctttgtcaatcttca

SEQ ID NO: 966839 - DNA, 15 bp, Homo sapiens
tttgtcaatcttcag

SEQ ID NO: 966840 - DNA, 15 bp, Homo sapiens
ttgtcaatcttcagg

SEQ ID NO: 966841 - DNA, 15 bp, Homo sapiens
tgtcaatcttcaggg

SEQ ID NO: 966842 - DNA, 15 bp, Homo sapiens
gtcaatcttcaggga

SEQ ID NO: 966843 - DNA, 15 bp, Homo sapiens
tcaatcttcagggaa

SEQ ID NO: 966844 - DNA, 15 bp, Homo sapiens
caatcttcagggaaa

SEQ ID NO: 966845 - DNA, 15 bp, Homo sapiens
aatcttcagggaaaa

SEQ ID NO: 966846 - DNA, 15 bp, Homo sapiens
atcttcagggaaaat

SEQ ID NO: 966847 - DNA, 15 bp, Homo sapiens
tcttcagggaaaatg

SEQ ID NO: 966848 - DNA, 15 bp, Homo sapiens
cttcagggaaaatgg

SEQ ID NO: 966849 - DNA, 15 bp, Homo sapiens
ttcagggaaaatggg

SEQ ID NO: 966850 - DNA, 15 bp, Homo sapiens
tcagggaaaatgggt

SEQ ID NO: 966851 - DNA, 15 bp, Homo sapiens
cagggaaaatgggtt

SEQ ID NO: 966852 - DNA, 15 bp, Homo sapiens
agggaaaatgggttc

SEQ ID NO: 966853 - DNA, 15 bp, Homo sapiens
gggaaaatgggttct

SEQ ID NO: 966854 - DNA, 15 bp, Homo sapiens
ggaaaatgggttctg

SEQ ID NO: 966855 - DNA, 15 bp, Homo sapiens
gaaaatgggttctga

SEQ ID NO: 966856 - DNA, 15 bp, Homo sapiens
aaaatgggttctgaa

SEQ ID NO: 966857 - DNA, 15 bp, Homo sapiens
aaatgggttctgaat

SEQ ID NO: 966858 - DNA, 15 bp, Homo sapiens
aatgggttctgaatt

SEQ ID NO: 966859 - DNA, 15 bp, Homo sapiens
atgggttctgaatta

SEQ ID NO: 966860 - DNA, 15 bp, Homo sapiens
tgggttctgaattat

SEQ ID NO: 966861 - DNA, 15 bp, Homo sapiens
gggttctgaattatg

SEQ ID NO: 966862 - DNA, 15 bp, Homo sapiens
ggttctgaattatga

SEQ ID NO: 966863 - DNA, 15 bp, Homo sapiens
gttctgaattatgag

SEQ ID NO: 966864 - DNA, 15 bp, Homo sapiens
ttctgaattatgaga

SEQ ID NO: 966865 - DNA, 15 bp, Homo sapiens
tctgaattatgagag

SEQ ID NO: 966866 - DNA, 15 bp, Homo sapiens
ctgaattatgagagc

SEQ ID NO: 966867 - DNA, 15 bp, Homo sapiens
tgaattatgagagct

SEQ ID NO: 966868 - DNA, 15 bp, Homo sapiens
gaattatgagagctg

SEQ ID NO: 966869 - DNA, 15 bp, Homo sapiens
aattatgagagctgt

SEQ ID NO: 966870 - DNA, 15 bp, Homo sapiens
attatgagagctgtg

SEQ ID NO: 966871 - DNA, 15 bp, Homo sapiens
ttatgagagctgtga

SEQ ID NO: 966872 - DNA, 15 bp, Homo sapiens
tatgagagctgtgac

SEQ ID NO: 966873 - DNA, 15 bp, Homo sapiens
atgagagctgtgact

SEQ ID NO: 966874 - DNA, 15 bp, Homo sapiens
tgagagctgtgacta

SEQ ID NO: 966875 - DNA, 15 bp, Homo sapiens
gagagctgtgactaa

SEQ ID NO: 966876 - DNA, 15 bp, Homo sapiens
agagctgtgactaat

SEQ ID NO: 966877 - DNA, 15 bp, Homo sapiens
gagctgtgactaatg

SEQ ID NO: 966878 - DNA, 15 bp, Homo sapiens
agctgtgactaatga

SEQ ID NO: 966879 - DNA, 15 bp, Homo sapiens
gctgtgactaatgag

SEQ ID NO: 966880 - DNA, 15 bp, Homo sapiens
ctgtgactaatgagt

SEQ ID NO: 966881 - DNA, 15 bp, Homo sapiens
tgtgactaatgagtg

SEQ ID NO: 966882 - DNA, 15 bp, Homo sapiens
gtgactaatgagtga

SEQ ID NO: 966883 - DNA, 15 bp, Homo sapiens
tgactaatgagtgat

SEQ ID NO: 966884 - DNA, 15 bp, Homo sapiens
gactaatgagtgatt

SEQ ID NO: 966885 - DNA, 15 bp, Homo sapiens
actaatgagtgattt

SEQ ID NO: 966886 - DNA, 15 bp, Homo sapiens
ctaatgagtgatttt

SEQ ID NO: 966887 - DNA, 15 bp, Homo sapiens
taatgagtgattttc

SEQ ID NO: 966888 - DNA, 15 bp, Homo sapiens
aatgagtgattttca

SEQ ID NO: 966889 - DNA, 15 bp, Homo sapiens
atgagtgattttcag

SEQ ID NO: 966890 - DNA, 15 bp, Homo sapiens
tgagtgattttcagg

SEQ ID NO: 966891 - DNA, 15 bp, Homo sapiens
gagtgattttcagga

SEQ ID NO: 966892 - DNA, 15 bp, Homo sapiens
agtgattttcaggaa

SEQ ID NO: 966893 - DNA, 15 bp, Homo sapiens
gtgattttcaggaat

SEQ ID NO: 966894 - DNA, 15 bp, Homo sapiens
tgattttcaggaatg

SEQ ID NO: 966895 - DNA, 15 bp, Homo sapiens
gattttcaggaatgc

SEQ ID NO: 966896 - DNA, 15 bp, Homo sapiens
attttcaggaatgca

SEQ ID NO: 966897 - DNA, 15 bp, Homo sapiens
ttttcaggaatgcat

SEQ ID NO: 966898 - DNA, 15 bp, Homo sapiens
tttcaggaatgcatt

SEQ ID NO: 966899 - DNA, 15 bp, Homo sapiens
ttcaggaatgcattt

SEQ ID NO: 966900 - DNA, 15 bp, Homo sapiens
tcaggaatgcatttc

SEQ ID NO: 966901 - DNA, 15 bp, Homo sapiens
caggaatgcatttct

SEQ ID NO: 966902 - DNA, 15 bp, Homo sapiens
aggaatgcatttctg

SEQ ID NO: 966903 - DNA, 15 bp, Homo sapiens
ggaatgcatttctgt

SEQ ID NO: 966904 - DNA, 15 bp, Homo sapiens
gaatgcatttctgtg

SEQ ID NO: 966905 - DNA, 15 bp, Homo sapiens
aatgcatttctgtgt

SEQ ID NO: 966906 - DNA, 15 bp, Homo sapiens
atgcatttctgtgtt

SEQ ID NO: 966907 - DNA, 15 bp, Homo sapiens
tgcatttctgtgtta

SEQ ID NO: 966908 - DNA, 15 bp, Homo sapiens
gcatttctgtgttag

SEQ ID NO: 966909 - DNA, 15 bp, Homo sapiens
catttctgtgttaga

SEQ ID NO: 966910 - DNA, 15 bp, Homo sapiens
atttctgtgttagat

SEQ ID NO: 966911 - DNA, 15 bp, Homo sapiens
tttctgtgttagatg

SEQ ID NO: 966912 - DNA, 15 bp, Homo sapiens
ttctgtgttagatgc

SEQ ID NO: 966913 - DNA, 15 bp, Homo sapiens
tctgtgttagatgca

SEQ ID NO: 966914 - DNA, 15 bp, Homo sapiens
ctgtgttagatgcac

SEQ ID NO: 966915 - DNA, 15 bp, Homo sapiens
tgtgttagatgcact

SEQ ID NO: 966916 - DNA, 15 bp, Homo sapiens
gtgttagatgcactg

SEQ ID NO: 966917 - DNA, 15 bp, Homo sapiens
tgttagatgcactgc

SEQ ID NO: 966918 - DNA, 15 bp, Homo sapiens
gttagatgcactgcc

SEQ ID NO: 966919 - DNA, 15 bp, Homo sapiens
ttagatgcactgccc

SEQ ID NO: 966920 - DNA, 15 bp, Homo sapiens
tagatgcactgccct

SEQ ID NO: 966921 - DNA, 15 bp, Homo sapiens
agatgcactgccctt

SEQ ID NO: 966922 - DNA, 15 bp, Homo sapiens
gatgcactgcccttg

SEQ ID NO: 966923 - DNA, 15 bp, Homo sapiens
atgcactgcccttgt

SEQ ID NO: 966924 - DNA, 15 bp, Homo sapiens
tgcactgcccttgtg

SEQ ID NO: 966925 - DNA, 15 bp, Homo sapiens
gcactgcccttgtgc

SEQ ID NO: 966926 - DNA, 15 bp, Homo sapiens
cactgcccttgtgct

SEQ ID NO: 966927 - DNA, 15 bp, Homo sapiens
actgcccttgtgctc

SEQ ID NO: 966928 - DNA, 15 bp, Homo sapiens
ctgcccttgtgctct

SEQ ID NO: 966929 - DNA, 15 bp, Homo sapiens
tgcccttgtgctctg

SEQ ID NO: 966930 - DNA, 15 bp, Homo sapiens
gcccttgtgctctga

SEQ ID NO: 966931 - DNA, 15 bp, Homo sapiens
cccttgtgctctgaa

SEQ ID NO: 966932 - DNA, 15 bp, Homo sapiens
ccttgtgctctgaag

SEQ ID NO: 966933 - DNA, 15 bp, Homo sapiens
cttgtgctctgaagg

SEQ ID NO: 966934 - DNA, 15 bp, Homo sapiens
ttgtgctctgaaggc

SEQ ID NO: 966935 - DNA, 15 bp, Homo sapiens
tgtgctctgaaggct

SEQ ID NO: 966936 - DNA, 15 bp, Homo sapiens
gtgctctgaaggctt

SEQ ID NO: 966937 - DNA, 15 bp, Homo sapiens
tgctctgaaggcttt

SEQ ID NO: 966938 - DNA, 15 bp, Homo sapiens
gctctgaaggctttg

SEQ ID NO: 966939 - DNA, 15 bp, Homo sapiens
ctctgaaggctttga

SEQ ID NO: 966940 - DNA, 15 bp, Homo sapiens
tctgaaggctttgat

SEQ ID NO: 966941 - DNA, 15 bp, Homo sapiens
ctgaaggctttgatg

SEQ ID NO: 966942 - DNA, 15 bp, Homo sapiens
tgaaggctttgatgt

SEQ ID NO: 966943 - DNA, 15 bp, Homo sapiens
gaaggctttgatgtt

SEQ ID NO: 966944 - DNA, 15 bp, Homo sapiens
aaggctttgatgttc

SEQ ID NO: 966945 - DNA, 15 bp, Homo sapiens
aggctttgatgttct

SEQ ID NO: 966946 - DNA, 15 bp, Homo sapiens
ggctttgatgttctt

SEQ ID NO: 966947 - DNA, 15 bp, Homo sapiens
gctttgatgttctta

SEQ ID NO: 966948 - DNA, 15 bp, Homo sapiens
ctttgatgttcttaa

SEQ ID NO: 966949 - DNA, 15 bp, Homo sapiens
tttgatgttcttaag

SEQ ID NO: 966950 - DNA, 15 bp, Homo sapiens
ttgatgttcttaagg

SEQ ID NO: 966951 - DNA, 15 bp, Homo sapiens
tgatgttcttaaggg

SEQ ID NO: 966952 - DNA, 15 bp, Homo sapiens
gatgttcttaagggc

SEQ ID NO: 966953 - DNA, 15 bp, Homo sapiens
atgttcttaagggca

SEQ ID NO: 966954 - DNA, 15 bp, Homo sapiens
tgttcttaagggcag

SEQ ID NO: 966955 - DNA, 15 bp, Homo sapiens
gttcttaagggcagt

SEQ ID NO: 966956 - DNA, 15 bp, Homo sapiens
ttcttaagggcagtt

SEQ ID NO: 966957 - DNA, 15 bp, Homo sapiens
tcttaagggcagttg

SEQ ID NO: 966958 - DNA, 15 bp, Homo sapiens
cttaagggcagttgg

SEQ ID NO: 966959 - DNA, 15 bp, Homo sapiens
ttaagggcagttgga

SEQ ID NO: 966960 - DNA, 15 bp, Homo sapiens
taagggcagttggac

SEQ ID NO: 966961 - DNA, 15 bp, Homo sapiens
aagggcagttggact

SEQ ID NO: 966962 - DNA, 15 bp, Homo sapiens
agggcagttggactc

SEQ ID NO: 966963 - DNA, 15 bp, Homo sapiens
gggcagttggactca

SEQ ID NO: 966964 - DNA, 15 bp, Homo sapiens
ggcagttggactcat

SEQ ID NO: 966965 - DNA, 15 bp, Homo sapiens
gcagttggactcatt

SEQ ID NO: 966966 - DNA, 15 bp, Homo sapiens
cagttggactcatta

SEQ ID NO: 966967 - DNA, 15 bp, Homo sapiens
agttggactcattat

SEQ ID NO: 966968 - DNA, 15 bp, Homo sapiens
gttggactcattatt

SEQ ID NO: 966969 - DNA, 15 bp, Homo sapiens
ttggactcattattc

SEQ ID NO: 966970 - DNA, 15 bp, Homo sapiens
tggactcattattct

SEQ ID NO: 966971 - DNA, 15 bp, Homo sapiens
ggactcattattctg

SEQ ID NO: 966972 - DNA, 15 bp, Homo sapiens
gactcattattctgc

SEQ ID NO: 966973 - DNA, 15 bp, Homo sapiens
actcattattctgca

SEQ ID NO: 966974 - DNA, 15 bp, Homo sapiens
ctcattattctgcat

SEQ ID NO: 966975 - DNA, 15 bp, Homo sapiens
tcattattctgcatt

SEQ ID NO: 966976 - DNA, 15 bp, Homo sapiens
cattattctgcatta

SEQ ID NO: 966977 - DNA, 15 bp, Homo sapiens
attattctgcattat

SEQ ID NO: 966978 - DNA, 15 bp, Homo sapiens
ttattctgcattatt

SEQ ID NO: 966979 - DNA, 15 bp, Homo sapiens
tattctgcattattt

SEQ ID NO: 966980 - DNA, 15 bp, Homo sapiens
attctgcattatttt

SEQ ID NO: 966981 - DNA, 15 bp, Homo sapiens
ttctgcattattttc

SEQ ID NO: 966982 - DNA, 15 bp, Homo sapiens
tctgcattattttca

SEQ ID NO: 966983 - DNA, 15 bp, Homo sapiens
ctgcattattttcat

SEQ ID NO: 966984 - DNA, 15 bp, Homo sapiens
tgcattattttcatt

SEQ ID NO: 966985 - DNA, 15 bp, Homo sapiens
gcattattttcattt

SEQ ID NO: 966986 - DNA, 15 bp, Homo sapiens
cattattttcatttt

SEQ ID NO: 966987 - DNA, 15 bp, Homo sapiens
attattttcattttt

SEQ ID NO: 966988 - DNA, 15 bp, Homo sapiens
ttattttcatttttt

SEQ ID NO: 966989 - DNA, 15 bp, Homo sapiens
tattttcattttttt

SEQ ID NO: 966990 - DNA, 15 bp, Homo sapiens
attttcatttttttc

SEQ ID NO: 966991 - DNA, 15 bp, Homo sapiens
ttttcatttttttcc

SEQ ID NO: 966992 - DNA, 15 bp, Homo sapiens
tttcatttttttcct

SEQ ID NO: 966993 - DNA, 15 bp, Homo sapiens
ttcatttttttcctg

SEQ ID NO: 966994 - DNA, 15 bp, Homo sapiens
tcatttttttcctgg

SEQ ID NO: 966995 - DNA, 15 bp, Homo sapiens
catttttttcctgga

SEQ ID NO: 966996 - DNA, 15 bp, Homo sapiens
atttttttcctggag

SEQ ID NO: 966997 - DNA, 15 bp, Homo sapiens
tttttttcctggagg

SEQ ID NO: 966998 - DNA, 15 bp, Homo sapiens
ttttttcctggagga

SEQ ID NO: 966999 - DNA, 15 bp, Homo sapiens
tttttcctggaggaa

SEQ ID NO: 967000 - DNA, 15 bp, Homo sapiens
ttttcctggaggaaa

SEQ ID NO: 967001 - DNA, 15 bp, Homo sapiens
tttcctggaggaaac

SEQ ID NO: 967002 - DNA, 15 bp, Homo sapiens
ttcctggaggaaaca

SEQ ID NO: 967003 - DNA, 15 bp, Homo sapiens
tcctggaggaaacat

SEQ ID NO: 967004 - DNA, 15 bp, Homo sapiens
cctggaggaaacata

SEQ ID NO: 967005 - DNA, 15 bp, Homo sapiens
ctggaggaaacatag

SEQ ID NO: 967006 - DNA, 15 bp, Homo sapiens
tggaggaaacatagc

SEQ ID NO: 967007 - DNA, 15 bp, Homo sapiens
ggaggaaacatagct

SEQ ID NO: 967008 - DNA, 15 bp, Homo sapiens
gaggaaacatagcta

SEQ ID NO: 967009 - DNA, 15 bp, Homo sapiens
aggaaacatagctac

SEQ ID NO: 967010 - DNA, 15 bp, Homo sapiens
ggaaacatagctact

SEQ ID NO: 967011 - DNA, 15 bp, Homo sapiens
gaaacatagctactc

SEQ ID NO: 967012 - DNA, 15 bp, Homo sapiens
aaacatagctactct

SEQ ID NO: 967013 - DNA, 15 bp, Homo sapiens
aacatagctactcta

SEQ ID NO: 967014 - DNA, 15 bp, Homo sapiens
acatagctactctag

SEQ ID NO: 967015 - DNA, 15 bp, Homo sapiens
catagctactctagt

SEQ ID NO: 967016 - DNA, 15 bp, Homo sapiens
atagctactctagtg

SEQ ID NO: 967017 - DNA, 15 bp, Homo sapiens
tagctactctagtgt

SEQ ID NO: 967018 - DNA, 15 bp, Homo sapiens
agctactctagtgta

SEQ ID NO: 967019 - DNA, 15 bp, Homo sapiens
gctactctagtgtag

SEQ ID NO: 967020 - DNA, 15 bp, Homo sapiens
ctactctagtgtagc

SEQ ID NO: 967021 - DNA, 15 bp, Homo sapiens
tactctagtgtagca

SEQ ID NO: 967022 - DNA, 15 bp, Homo sapiens
actctagtgtagcag

SEQ ID NO: 967023 - DNA, 15 bp, Homo sapiens
ctctagtgtagcagg

SEQ ID NO: 967024 - DNA, 15 bp, Homo sapiens
tctagtgtagcaggg

SEQ ID NO: 967025 - DNA, 15 bp, Homo sapiens
ctagtgtagcagggc

SEQ ID NO: 967026 - DNA, 15 bp, Homo sapiens
tagtgtagcagggca

SEQ ID NO: 967027 - DNA, 15 bp, Homo sapiens
agtgtagcagggcaa

SEQ ID NO: 967028 - DNA, 15 bp, Homo sapiens
gtgtagcagggcaaa

SEQ ID NO: 967029 - DNA, 15 bp, Homo sapiens
tgtagcagggcaaac

SEQ ID NO: 967030 - DNA, 15 bp, Homo sapiens
gtagcagggcaaacc

SEQ ID NO: 967031 - DNA, 15 bp, Homo sapiens
tagcagggcaaacct

SEQ ID NO: 967032 - DNA, 15 bp, Homo sapiens
agcagggcaaacctt

SEQ ID NO: 967033 - DNA, 15 bp, Homo sapiens
gcagggcaaaccttg

SEQ ID NO: 967034 - DNA, 15 bp, Homo sapiens
cagggcaaaccttgt

SEQ ID NO: 967035 - DNA, 15 bp, Homo sapiens
agggcaaaccttgtg

SEQ ID NO: 967036 - DNA, 15 bp, Homo sapiens
gggcaaaccttgtgg

SEQ ID NO: 967037 - DNA, 15 bp, Homo sapiens
ggcaaaccttgtgga

SEQ ID NO: 967038 - DNA, 15 bp, Homo sapiens
gcaaaccttgtggat

SEQ ID NO: 967039 - DNA, 15 bp, Homo sapiens
caaaccttgtggatg

SEQ ID NO: 967040 - DNA, 15 bp, Homo sapiens
aaaccttgtggatga

SEQ ID NO: 967041 - DNA, 15 bp, Homo sapiens
aaccttgtggatgaa

SEQ ID NO: 967042 - DNA, 15 bp, Homo sapiens
accttgtggatgaaa

SEQ ID NO: 967043 - DNA, 15 bp, Homo sapiens
ccttgtggatgaaac

SEQ ID NO: 967044 - DNA, 15 bp, Homo sapiens
cttgtggatgaaacg

SEQ ID NO: 967045 - DNA, 15 bp, Homo sapiens
ttgtggatgaaacgg

SEQ ID NO: 967046 - DNA, 15 bp, Homo sapiens
tgtggatgaaacgga

SEQ ID NO: 967047 - DNA, 15 bp, Homo sapiens
gtggatgaaacggaa

SEQ ID NO: 967048 - DNA, 15 bp, Homo sapiens
tggatgaaacggaaa

SEQ ID NO: 967049 - DNA, 15 bp, Homo sapiens
ggatgaaacggaaat

SEQ ID NO: 967050 - DNA, 15 bp, Homo sapiens
gatgaaacggaaata

SEQ ID NO: 967051 - DNA, 15 bp, Homo sapiens
atgaaacggaaatat

SEQ ID NO: 967052 - DNA, 15 bp, Homo sapiens
tgaaacggaaatatc

SEQ ID NO: 967053 - DNA, 15 bp, Homo sapiens
gaaacggaaatatct

SEQ ID NO: 967054 - DNA, 15 bp, Homo sapiens
aaacggaaatatctt

SEQ ID NO: 967055 - DNA, 15 bp, Homo sapiens
aacggaaatatctta

SEQ ID NO: 967056 - DNA, 15 bp, Homo sapiens
acggaaatatcttac

SEQ ID NO: 967057 - DNA, 15 bp, Homo sapiens
cggaaatatcttaca

SEQ ID NO: 967058 - DNA, 15 bp, Homo sapiens
ggaaatatcttacaa

SEQ ID NO: 967059 - DNA, 15 bp, Homo sapiens
gaaatatcttacaaa

SEQ ID NO: 967060 - DNA, 15 bp, Homo sapiens
aaatatcttacaaaa

SEQ ID NO: 967061 - DNA, 15 bp, Homo sapiens
aatatcttacaaaat

SEQ ID NO: 967062 - DNA, 15 bp, Homo sapiens
atatcttacaaaatg

SEQ ID NO: 967063 - DNA, 15 bp, Homo sapiens
tatcttacaaaatgt

SEQ ID NO: 967064 - DNA, 15 bp, Homo sapiens
atcttacaaaatgta

SEQ ID NO: 967065 - DNA, 15 bp, Homo sapiens
tcttacaaaatgtaa

SEQ ID NO: 967066 - DNA, 15 bp, Homo sapiens
cttacaaaatgtaaa

SEQ ID NO: 967067 - DNA, 15 bp, Homo sapiens
ttacaaaatgtaaac

SEQ ID NO: 967068 - DNA, 15 bp, Homo sapiens
tacaaaatgtaaacc

SEQ ID NO: 967069 - DNA, 15 bp, Homo sapiens
acaaaatgtaaacct

SEQ ID NO: 967070 - DNA, 15 bp, Homo sapiens
caaaatgtaaacctc

SEQ ID NO: 967071 - DNA, 15 bp, Homo sapiens
aaaatgtaaacctct

SEQ ID NO: 967072 - DNA, 15 bp, Homo sapiens
aaatgtaaacctctt

SEQ ID NO: 967073 - DNA, 15 bp, Homo sapiens
aatgtaaacctcttg

SEQ ID NO: 967074 - DNA, 15 bp, Homo sapiens
atgtaaacctcttgt

SEQ ID NO: 967075 - DNA, 15 bp, Homo sapiens
tgtaaacctcttgta

SEQ ID NO: 967076 - DNA, 15 bp, Homo sapiens
gtaaacctcttgtat

SEQ ID NO: 967077 - DNA, 15 bp, Homo sapiens
taaacctcttgtatt

SEQ ID NO: 967078 - DNA, 15 bp, Homo sapiens
aaacctcttgtatta

SEQ ID NO: 967079 - DNA, 15 bp, Homo sapiens
aacctcttgtattaa

SEQ ID NO: 967080 - DNA, 15 bp, Homo sapiens
acctcttgtattaaa

SEQ ID NO: 967081 - DNA, 15 bp, Homo sapiens
cctcttgtattaaaa

SEQ ID NO: 967082 - DNA, 15 bp, Homo sapiens
ctcttgtattaaaaa

SEQ ID NO: 967083 - DNA, 15 bp, Homo sapiens
tcttgtattaaaaag

SEQ ID NO: 967084 - DNA, 15 bp, Homo sapiens
cttgtattaaaaagt

SEQ ID NO: 967085 - DNA, 15 bp, Homo sapiens
ttgtattaaaaagtt

SEQ ID NO: 967086 - DNA, 15 bp, Homo sapiens
tgtattaaaaagtta

SEQ ID NO: 967087 - DNA, 15 bp, Homo sapiens
gtattaaaaagttaa

SEQ ID NO: 967088 - DNA, 15 bp, Homo sapiens
tattaaaaagttaaa

SEQ ID NO: 967089 - DNA, 15 bp, Homo sapiens
attaaaaagttaaaa

SEQ ID NO: 967090 - DNA, 15 bp, Homo sapiens
ttaaaaagttaaaat

SEQ ID NO: 967091 - DNA, 15 bp, Homo sapiens
taaaaagttaaaatt

SEQ ID NO: 967092 - DNA, 15 bp, Homo sapiens
aaaaagttaaaattc

SEQ ID NO: 967093 - DNA, 15 bp, Homo sapiens
aaaagttaaaattcc

SEQ ID NO: 967094 - DNA, 15 bp, Homo sapiens
aaagttaaaattccg

SEQ ID NO: 967095 - DNA, 15 bp, Homo sapiens
aagttaaaattccgg

SEQ ID NO: 967096 - DNA, 15 bp, Homo sapiens
agttaaaattccggc

SEQ ID NO: 967097 - DNA, 15 bp, Homo sapiens
gttaaaattccggcc

SEQ ID NO: 967098 - DNA, 15 bp, Homo sapiens
ttaaaattccggccg

SEQ ID NO: 967099 - DNA, 15 bp, Homo sapiens
taaaattccggccgg

SEQ ID NO: 967100 - DNA, 15 bp, Homo sapiens
aaaattccggccggg

SEQ ID NO: 967101 - DNA, 15 bp, Homo sapiens
aaattccggccgggt

SEQ ID NO: 967102 - DNA, 15 bp, Homo sapiens
aattccggccgggtg

SEQ ID NO: 967103 - DNA, 15 bp, Homo sapiens
attccggccgggtgc

SEQ ID NO: 967104 - DNA, 15 bp, Homo sapiens
ttccggccgggtgcg

SEQ ID NO: 967105 - DNA, 15 bp, Homo sapiens
tccggccgggtgcgg

SEQ ID NO: 967106 - DNA, 15 bp, Homo sapiens
ccggccgggtgcggt

SEQ ID NO: 967107 - DNA, 15 bp, Homo sapiens
cggccgggtgcggtg

SEQ ID NO: 967108 - DNA, 15 bp, Homo sapiens
ggccgggtgcggtga

SEQ ID NO: 967109 - DNA, 15 bp, Homo sapiens
gccgggtgcggtgac

SEQ ID NO: 967110 - DNA, 15 bp, Homo sapiens
ccgggtgcggtgact

SEQ ID NO: 967111 - DNA, 15 bp, Homo sapiens
cgggtgcggtgactc

SEQ ID NO: 967112 - DNA, 15 bp, Homo sapiens
gggtgcggtgactca

SEQ ID NO: 967113 - DNA, 15 bp, Homo sapiens
ggtgcggtgactcac

SEQ ID NO: 967114 - DNA, 15 bp, Homo sapiens
gtgcggtgactcacg

SEQ ID NO: 967115 - DNA, 15 bp, Homo sapiens
tgcggtgactcacgc

SEQ ID NO: 967116 - DNA, 15 bp, Homo sapiens
gcggtgactcacgcc

SEQ ID NO: 967117 - DNA, 15 bp, Homo sapiens
cggtgactcacgcct

SEQ ID NO: 967118 - DNA, 15 bp, Homo sapiens
ggtgactcacgcctg

SEQ ID NO: 967119 - DNA, 15 bp, Homo sapiens
gtgactcacgcctgt

SEQ ID NO: 967120 - DNA, 15 bp, Homo sapiens
tgactcacgcctgta

SEQ ID NO: 967121 - DNA, 15 bp, Homo sapiens
gactcacgcctgtaa

SEQ ID NO: 967122 - DNA, 15 bp, Homo sapiens
actcacgcctgtaat

SEQ ID NO: 967123 - DNA, 15 bp, Homo sapiens
ctcacgcctgtaatg

SEQ ID NO: 967124 - DNA, 15 bp, Homo sapiens
tcacgcctgtaatgc

SEQ ID NO: 967125 - DNA, 15 bp, Homo sapiens
cacgcctgtaatgcc

SEQ ID NO: 967126 - DNA, 15 bp, Homo sapiens
acgcctgtaatgcca

SEQ ID NO: 967127 - DNA, 15 bp, Homo sapiens
cgcctgtaatgccag

SEQ ID NO: 967128 - DNA, 15 bp, Homo sapiens
gcctgtaatgccagc

SEQ ID NO: 967129 - DNA, 15 bp, Homo sapiens
cctgtaatgccagca

SEQ ID NO: 967130 - DNA, 15 bp, Homo sapiens
ctgtaatgccagcac

SEQ ID NO: 967131 - DNA, 15 bp, Homo sapiens
tgtaatgccagcact

SEQ ID NO: 967132 - DNA, 15 bp, Homo sapiens
gtaatgccagcactt

SEQ ID NO: 967133 - DNA, 15 bp, Homo sapiens
taatgccagcacttt

SEQ ID NO: 967134 - DNA, 15 bp, Homo sapiens
aatgccagcactttg

SEQ ID NO: 967135 - DNA, 15 bp, Homo sapiens
atgccagcactttgg

SEQ ID NO: 967136 - DNA, 15 bp, Homo sapiens
tgccagcactttggg

SEQ ID NO: 967137 - DNA, 15 bp, Homo sapiens
gccagcactttggga

SEQ ID NO: 967138 - DNA, 15 bp, Homo sapiens
ttgggaggccgagga

SEQ ID NO: 967139 - DNA, 15 bp, Homo sapiens
tgggaggccgaggag

SEQ ID NO: 967140 - DNA, 15 bp, Homo sapiens
gggaggccgaggagg

SEQ ID NO: 967141 - DNA, 15 bp, Homo sapiens
ggaggccgaggaggg

SEQ ID NO: 967142 - DNA, 15 bp, Homo sapiens
gaggccgaggagggc

SEQ ID NO: 967143 - DNA, 15 bp, Homo sapiens
aggccgaggagggcg

SEQ ID NO: 967144 - DNA, 15 bp, Homo sapiens
ggccgaggagggcgg

SEQ ID NO: 967145 - DNA, 15 bp, Homo sapiens
gccgaggagggcgga

SEQ ID NO: 967146 - DNA, 15 bp, Homo sapiens
ccgaggagggcggat

SEQ ID NO: 967147 - DNA, 15 bp, Homo sapiens
cgaggagggcggatc

SEQ ID NO: 967148 - DNA, 15 bp, Homo sapiens
gaggagggcggatca

SEQ ID NO: 967149 - DNA, 15 bp, Homo sapiens
aggagggcggatcac

SEQ ID NO: 967150 - DNA, 15 bp, Homo sapiens
ggagggcggatcacg

SEQ ID NO: 967151 - DNA, 15 bp, Homo sapiens
gagggcggatcacga

SEQ ID NO: 967152 - DNA, 15 bp, Homo sapiens
agggcggatcacgag

SEQ ID NO: 967153 - DNA, 15 bp, Homo sapiens
ggagatcgagaccat

SEQ ID NO: 967154 - DNA, 15 bp, Homo sapiens
gatcgagaccatccg

SEQ ID NO: 967155 - DNA, 15 bp, Homo sapiens
atcgagaccatccgg

SEQ ID NO: 967156 - DNA, 15 bp, Homo sapiens
tcgagaccatccggg

SEQ ID NO: 967157 - DNA, 15 bp, Homo sapiens
cgagaccatccgggc

SEQ ID NO: 967158 - DNA, 15 bp, Homo sapiens
gagaccatccgggct

SEQ ID NO: 967159 - DNA, 15 bp, Homo sapiens
agaccatccgggcta

SEQ ID NO: 967160 - DNA, 15 bp, Homo sapiens
gaccatccgggctaa

SEQ ID NO: 967161 - DNA, 15 bp, Homo sapiens
accatccgggctaac

SEQ ID NO: 967162 - DNA, 15 bp, Homo sapiens
ccatccgggctaaca

SEQ ID NO: 967163 - DNA, 15 bp, Homo sapiens
catccgggctaacat

SEQ ID NO: 967164 - DNA, 15 bp, Homo sapiens
atccgggctaacatg

SEQ ID NO: 967165 - DNA, 15 bp, Homo sapiens
tccgggctaacatgg

SEQ ID NO: 967166 - DNA, 15 bp, Homo sapiens
ccgggctaacatggt

SEQ ID NO: 967167 - DNA, 15 bp, Homo sapiens
cgggctaacatggtg

SEQ ID NO: 967168 - DNA, 15 bp, Homo sapiens
gggctaacatggtga

SEQ ID NO: 967169 - DNA, 15 bp, Homo sapiens
ggctaacatggtgaa

SEQ ID NO: 967170 - DNA, 15 bp, Homo sapiens
gctaacatggtgaaa

SEQ ID NO: 967171 - DNA, 15 bp, Homo sapiens
ctaacatggtgaaac

SEQ ID NO: 967172 - DNA, 15 bp, Homo sapiens
taacatggtgaaacc

SEQ ID NO: 967173 - DNA, 15 bp, Homo sapiens
catggtgaaaccccg

SEQ ID NO: 967174 - DNA, 15 bp, Homo sapiens
atggtgaaaccccgt

SEQ ID NO: 967175 - DNA, 15 bp, Homo sapiens
tggtgaaaccccgtc

SEQ ID NO: 967176 - DNA, 15 bp, Homo sapiens
aaaaatacaaaaaaa

SEQ ID NO: 967177 - DNA, 15 bp, Homo sapiens
aaaatacaaaaaaat

SEQ ID NO: 967178 - DNA, 15 bp, Homo sapiens
aaatacaaaaaaatt

SEQ ID NO: 967179 - DNA, 15 bp, Homo sapiens
aatacaaaaaaatta

SEQ ID NO: 967180 - DNA, 15 bp, Homo sapiens
atacaaaaaaattag

SEQ ID NO: 967181 - DNA, 15 bp, Homo sapiens
tacaaaaaaattagc

SEQ ID NO: 967182 - DNA, 15 bp, Homo sapiens
acaaaaaaattagct

SEQ ID NO: 967183 - DNA, 15 bp, Homo sapiens
caaaaaaattagctg

SEQ ID NO: 967184 - DNA, 15 bp, Homo sapiens
aaaaaaattagctgg

SEQ ID NO: 967185 - DNA, 15 bp, Homo sapiens
aaaaaattagctgga

SEQ ID NO: 967186 - DNA, 15 bp, Homo sapiens
aaaaattagctggac

SEQ ID NO: 967187 - DNA, 15 bp, Homo sapiens
aaaattagctggacg

SEQ ID NO: 967188 - DNA, 15 bp, Homo sapiens
aaattagctggacgt

SEQ ID NO: 967189 - DNA, 15 bp, Homo sapiens
aattagctggacgtg

SEQ ID NO: 967190 - DNA, 15 bp, Homo sapiens
attagctggacgtgg

SEQ ID NO: 967191 - DNA, 15 bp, Homo sapiens
ttagctggacgtggt

SEQ ID NO: 967192 - DNA, 15 bp, Homo sapiens
tagctggacgtggtg

SEQ ID NO: 967193 - DNA, 15 bp, Homo sapiens
agctggacgtggtgg

SEQ ID NO: 967194 - DNA, 15 bp, Homo sapiens
gctggacgtggtggc

SEQ ID NO: 967195 - DNA, 15 bp, Homo sapiens
ctggacgtggtggcg

SEQ ID NO: 967196 - DNA, 15 bp, Homo sapiens
tggacgtggtggcgg

SEQ ID NO: 967197 - DNA, 15 bp, Homo sapiens
ggacgtggtggcggg

SEQ ID NO: 967198 - DNA, 15 bp, Homo sapiens
gacgtggtggcgggc

SEQ ID NO: 967199 - DNA, 15 bp, Homo sapiens
acgtggtggcgggcg

SEQ ID NO: 967200 - DNA, 15 bp, Homo sapiens
cgtggtggcgggcgc

SEQ ID NO: 967201 - DNA, 15 bp, Homo sapiens
gtggtggcgggcgcc

SEQ ID NO: 967202 - DNA, 15 bp, Homo sapiens
tggtggcgggcgcct

SEQ ID NO: 967203 - DNA, 15 bp, Homo sapiens
ggtggcgggcgcctg

SEQ ID NO: 967204 - DNA, 15 bp, Homo sapiens
ggcaggagaatggca

SEQ ID NO: 967205 - DNA, 15 bp, Homo sapiens
gcaggagaatggcat

SEQ ID NO: 967206 - DNA, 15 bp, Homo sapiens
caggagaatggcatg

SEQ ID NO: 967207 - DNA, 15 bp, Homo sapiens
aggagaatggcatga

SEQ ID NO: 967208 - DNA, 15 bp, Homo sapiens
ggagaatggcatgaa

SEQ ID NO: 967209 - DNA, 15 bp, Homo sapiens
gagaatggcatgaac

SEQ ID NO: 967210 - DNA, 15 bp, Homo sapiens
agaatggcatgaacc

SEQ ID NO: 967211 - DNA, 15 bp, Homo sapiens
gaatggcatgaaccc

SEQ ID NO: 967212 - DNA, 15 bp, Homo sapiens
aatggcatgaaccca

SEQ ID NO: 967213 - DNA, 15 bp, Homo sapiens
atggcatgaacccag

SEQ ID NO: 967214 - DNA, 15 bp, Homo sapiens
tggcatgaacccagg

SEQ ID NO: 967215 - DNA, 15 bp, Homo sapiens
ggcatgaacccagga

SEQ ID NO: 967216 - DNA, 15 bp, Homo sapiens
gcatgaacccaggag

SEQ ID NO: 967217 - DNA, 15 bp, Homo sapiens
catgaacccaggagg

SEQ ID NO: 967218 - DNA, 15 bp, Homo sapiens
atgaacccaggaggc

SEQ ID NO: 967219 - DNA, 15 bp, Homo sapiens
cccaggaggcggagc

SEQ ID NO: 967220 - DNA, 15 bp, Homo sapiens
ccaggaggcggagct

SEQ ID NO: 967221 - DNA, 15 bp, Homo sapiens
caggaggcggagctt

SEQ ID NO: 967222 - DNA, 15 bp, Homo sapiens
aggaggcggagcttg

SEQ ID NO: 967223 - DNA, 15 bp, Homo sapiens
ggaggcggagcttgc

SEQ ID NO: 967224 - DNA, 15 bp, Homo sapiens
gaggcggagcttgca

SEQ ID NO: 967225 - DNA, 15 bp, Homo sapiens
gcttgcagtgagcca

SEQ ID NO: 967226 - DNA, 15 bp, Homo sapiens
cttgcagtgagccaa

SEQ ID NO: 967227 - DNA, 15 bp, Homo sapiens
cagtgagccaagatg

SEQ ID NO: 967228 - DNA, 15 bp, Homo sapiens
agtgagccaagatgg

SEQ ID NO: 967229 - DNA, 15 bp, Homo sapiens
gtgagccaagatggc

SEQ ID NO: 967230 - DNA, 15 bp, Homo sapiens
tgagccaagatggca

SEQ ID NO: 967231 - DNA, 15 bp, Homo sapiens
gagccaagatggcac

SEQ ID NO: 967232 - DNA, 15 bp, Homo sapiens
agccaagatggcacc

SEQ ID NO: 967233 - DNA, 15 bp, Homo sapiens
gccaagatggcacca

SEQ ID NO: 967234 - DNA, 15 bp, Homo sapiens
ccaagatggcaccac

SEQ ID NO: 967235 - DNA, 15 bp, Homo sapiens
caagatggcaccact

SEQ ID NO: 967236 - DNA, 15 bp, Homo sapiens
aagatggcaccactg

SEQ ID NO: 967237 - DNA, 15 bp, Homo sapiens
agatggcaccactgc

SEQ ID NO: 967238 - DNA, 15 bp, Homo sapiens
gatggcaccactgcg

SEQ ID NO: 967239 - DNA, 15 bp, Homo sapiens
atggcaccactgcgc

SEQ ID NO: 967240 - DNA, 15 bp, Homo sapiens
tggcaccactgcgct

SEQ ID NO: 967241 - DNA, 15 bp, Homo sapiens
ggcaccactgcgctc

SEQ ID NO: 967242 - DNA, 15 bp, Homo sapiens
gcaccactgcgctcc

SEQ ID NO: 967243 - DNA, 15 bp, Homo sapiens
caccactgcgctcca

SEQ ID NO: 967244 - DNA, 15 bp, Homo sapiens
accactgcgctccag

SEQ ID NO: 967245 - DNA, 15 bp, Homo sapiens
ccactgcgctccagc

SEQ ID NO: 967246 - DNA, 15 bp, Homo sapiens
cactgcgctccagcc

SEQ ID NO: 967247 - DNA, 15 bp, Homo sapiens
actgcgctccagcct

SEQ ID NO: 967248 - DNA, 15 bp, Homo sapiens
ctgcgctccagccta

SEQ ID NO: 967249 - DNA, 15 bp, Homo sapiens
tgcgctccagcctag

SEQ ID NO: 967250 - DNA, 15 bp, Homo sapiens
gcgctccagcctagg

SEQ ID NO: 967251 - DNA, 15 bp, Homo sapiens
cgctccagcctaggt

SEQ ID NO: 967252 - DNA, 15 bp, Homo sapiens
gctccagcctaggtg

SEQ ID NO: 967253 - DNA, 15 bp, Homo sapiens
ctccagcctaggtga

SEQ ID NO: 967254 - DNA, 15 bp, Homo sapiens
tccagcctaggtgac

SEQ ID NO: 967255 - DNA, 15 bp, Homo sapiens
ccagcctaggtgaca

SEQ ID NO: 967256 - DNA, 15 bp, Homo sapiens
cagcctaggtgacag

SEQ ID NO: 967257 - DNA, 15 bp, Homo sapiens
agcctaggtgacaga

SEQ ID NO: 967258 - DNA, 15 bp, Homo sapiens
gcctaggtgacagag

SEQ ID NO: 967259 - DNA, 15 bp, Homo sapiens
cctaggtgacagagt

SEQ ID NO: 967260 - DNA, 15 bp, Homo sapiens
ctaggtgacagagtg

SEQ ID NO: 967261 - DNA, 15 bp, Homo sapiens
taggtgacagagtga

SEQ ID NO: 967262 - DNA, 15 bp, Homo sapiens
aggtgacagagtgag

SEQ ID NO: 967263 - DNA, 15 bp, Homo sapiens
tgacagagtgagact

SEQ ID NO: 967264 - DNA, 15 bp, Homo sapiens
gacagagtgagactc

SEQ ID NO: 967265 - DNA, 15 bp, Homo sapiens
acagagtgagactcc

SEQ ID NO: 967266 - DNA, 15 bp, Homo sapiens
cagagtgagactcca

SEQ ID NO: 967267 - DNA, 15 bp, Homo sapiens
agagtgagactccat

SEQ ID NO: 967268 - DNA, 15 bp, Homo sapiens
gagtgagactccatc

SEQ ID NO: 967269 - DNA, 15 bp, Homo sapiens
agtgagactccatct

SEQ ID NO: 967270 - DNA, 15 bp, Homo sapiens
gtgagactccatctc

SEQ ID NO: 967271 - DNA, 15 bp, Homo sapiens
tgagactccatctca

SEQ ID NO: 967272 - DNA, 15 bp, Homo sapiens
gagactccatctcaa

SEQ ID NO: 967273 - DNA, 15 bp, Homo sapiens
agactccatctcaaa

SEQ ID NO: 967274 - DNA, 15 bp, Homo sapiens
gactccatctcaaaa

SEQ ID NO: 967275 - DNA, 15 bp, Homo sapiens
actccatctcaaaaa

SEQ ID NO: 967276 - DNA, 15 bp, Homo sapiens
ctccatctcaaaaaa

SEQ ID NO: 967277 - DNA, 15 bp, Homo sapiens
tccatctcaaaaaaa

SEQ ID NO: 967278 - DNA, 15 bp, Homo sapiens
ccatctcaaaaaaaa

SEQ ID NO: 967279 - DNA, 15 bp, Homo sapiens
catctcaaaaaaaaa

SEQ ID NO: 967280 - DNA, 15 bp, Homo sapiens
atctcaaaaaaaaaa

SEQ ID NO: 967281 - DNA, 15 bp, Homo sapiens
aaaaaagaaaaaagt

SEQ ID NO: 967282 - DNA, 15 bp, Homo sapiens
aaaaagaaaaaagtt

SEQ ID NO: 967283 - DNA, 15 bp, Homo sapiens
aaaagaaaaaagtta

SEQ ID NO: 967284 - DNA, 15 bp, Homo sapiens
aaagaaaaaagttag

SEQ ID NO: 967285 - DNA, 15 bp, Homo sapiens
aagaaaaaagttaga

SEQ ID NO: 967286 - DNA, 15 bp, Homo sapiens
agaaaaaagttagat

SEQ ID NO: 967287 - DNA, 15 bp, Homo sapiens
gaaaaaagttagatt

SEQ ID NO: 967288 - DNA, 15 bp, Homo sapiens
aaaaaagttagattt

SEQ ID NO: 967289 - DNA, 15 bp, Homo sapiens
aaaaagttagatttc

SEQ ID NO: 967290 - DNA, 15 bp, Homo sapiens
aaaagttagatttcc

SEQ ID NO: 967291 - DNA, 15 bp, Homo sapiens
aaagttagatttcca

SEQ ID NO: 967292 - DNA, 15 bp, Homo sapiens
aagttagatttccag

SEQ ID NO: 967293 - DNA, 15 bp, Homo sapiens
agttagatttccagg

SEQ ID NO: 967294 - DNA, 15 bp, Homo sapiens
gttagatttccagga

SEQ ID NO: 967295 - DNA, 15 bp, Homo sapiens
ttagatttccaggat

SEQ ID NO: 967296 - DNA, 15 bp, Homo sapiens
tagatttccaggatc

SEQ ID NO: 967297 - DNA, 15 bp, Homo sapiens
agatttccaggatct

SEQ ID NO: 967298 - DNA, 15 bp, Homo sapiens
gatttccaggatctc

SEQ ID NO: 967299 - DNA, 15 bp, Homo sapiens
atttccaggatctct

SEQ ID NO: 967300 - DNA, 15 bp, Homo sapiens
tttccaggatctctt

SEQ ID NO: 967301 - DNA, 15 bp, Homo sapiens
ttccaggatctcttt

SEQ ID NO: 967302 - DNA, 15 bp, Homo sapiens
tccaggatctctttc

SEQ ID NO: 967303 - DNA, 15 bp, Homo sapiens
ccaggatctctttct

SEQ ID NO: 967304 - DNA, 15 bp, Homo sapiens
caggatctctttcta

SEQ ID NO: 967305 - DNA, 15 bp, Homo sapiens
aggatctctttctaa

SEQ ID NO: 967306 - DNA, 15 bp, Homo sapiens
ggatctctttctaat

SEQ ID NO: 967307 - DNA, 15 bp, Homo sapiens
gatctctttctaatg

SEQ ID NO: 967308 - DNA, 15 bp, Homo sapiens
atctctttctaatgg

SEQ ID NO: 967309 - DNA, 15 bp, Homo sapiens
tctctttctaatggc

SEQ ID NO: 967310 - DNA, 15 bp, Homo sapiens
ctctttctaatggcc

SEQ ID NO: 967311 - DNA, 15 bp, Homo sapiens
tctttctaatggccg

SEQ ID NO: 967312 - DNA, 15 bp, Homo sapiens
ctttctaatggccga

SEQ ID NO: 967313 - DNA, 15 bp, Homo sapiens
tttctaatggccgaa

SEQ ID NO: 967314 - DNA, 15 bp, Homo sapiens
ttctaatggccgaag

SEQ ID NO: 967315 - DNA, 15 bp, Homo sapiens
tctaatggccgaaga

SEQ ID NO: 967316 - DNA, 15 bp, Homo sapiens
ctaatggccgaagat

SEQ ID NO: 967317 - DNA, 15 bp, Homo sapiens
taatggccgaagatt

SEQ ID NO: 967318 - DNA, 15 bp, Homo sapiens
aatggccgaagatta

SEQ ID NO: 967319 - DNA, 15 bp, Homo sapiens
atggccgaagattag

SEQ ID NO: 967320 - DNA, 15 bp, Homo sapiens
tggccgaagattaga

SEQ ID NO: 967321 - DNA, 15 bp, Homo sapiens
ggccgaagattagag

SEQ ID NO: 967322 - DNA, 15 bp, Homo sapiens
gccgaagattagaga

SEQ ID NO: 967323 - DNA, 15 bp, Homo sapiens
ccgaagattagagat

SEQ ID NO: 967324 - DNA, 15 bp, Homo sapiens
cgaagattagagatc

SEQ ID NO: 967325 - DNA, 15 bp, Homo sapiens
gaagattagagatca

SEQ ID NO: 967326 - DNA, 15 bp, Homo sapiens
aagattagagatcat

SEQ ID NO: 967327 - DNA, 15 bp, Homo sapiens
agattagagatcatg

SEQ ID NO: 967328 - DNA, 15 bp, Homo sapiens
gattagagatcatgg

SEQ ID NO: 967329 - DNA, 15 bp, Homo sapiens
attagagatcatggc

SEQ ID NO: 967330 - DNA, 15 bp, Homo sapiens
ttagagatcatggct

SEQ ID NO: 967331 - DNA, 15 bp, Homo sapiens
tagagatcatggctt

SEQ ID NO: 967332 - DNA, 15 bp, Homo sapiens
agagatcatggcttg

SEQ ID NO: 967333 - DNA, 15 bp, Homo sapiens
gagatcatggcttgt

SEQ ID NO: 967334 - DNA, 15 bp, Homo sapiens
agatcatggcttgtg

SEQ ID NO: 967335 - DNA, 15 bp, Homo sapiens
gatcatggcttgtgg

SEQ ID NO: 967336 - DNA, 15 bp, Homo sapiens
atcatggcttgtgga

SEQ ID NO: 967337 - DNA, 15 bp, Homo sapiens
tcatggcttgtggag

SEQ ID NO: 967338 - DNA, 15 bp, Homo sapiens
catggcttgtggagc

SEQ ID NO: 967339 - DNA, 15 bp, Homo sapiens
atggcttgtggagca

SEQ ID NO: 967340 - DNA, 15 bp, Homo sapiens
tggcttgtggagcac

SEQ ID NO: 967341 - DNA, 15 bp, Homo sapiens
ggcttgtggagcaca

SEQ ID NO: 967342 - DNA, 15 bp, Homo sapiens
gcttgtggagcacat

SEQ ID NO: 967343 - DNA, 15 bp, Homo sapiens
cttgtggagcacatc

SEQ ID NO: 967344 - DNA, 15 bp, Homo sapiens
ttgtggagcacatct

SEQ ID NO: 967345 - DNA, 15 bp, Homo sapiens
tgtggagcacatctc

SEQ ID NO: 967346 - DNA, 15 bp, Homo sapiens
gtggagcacatctca

SEQ ID NO: 967347 - DNA, 15 bp, Homo sapiens
tggagcacatctcat

SEQ ID NO: 967348 - DNA, 15 bp, Homo sapiens
ggagcacatctcatc

SEQ ID NO: 967349 - DNA, 15 bp, Homo sapiens
gagcacatctcatct

SEQ ID NO: 967350 - DNA, 15 bp, Homo sapiens
agcacatctcatctt

SEQ ID NO: 967351 - DNA, 15 bp, Homo sapiens
gcacatctcatcttc

SEQ ID NO: 967352 - DNA, 15 bp, Homo sapiens
cacatctcatcttca

SEQ ID NO: 967353 - DNA, 15 bp, Homo sapiens
acatctcatcttcac

SEQ ID NO: 967354 - DNA, 15 bp, Homo sapiens
catctcatcttcact

SEQ ID NO: 967355 - DNA, 15 bp, Homo sapiens
atctcatcttcactt

SEQ ID NO: 967356 - DNA, 15 bp, Homo sapiens
tctcatcttcacttt

SEQ ID NO: 967357 - DNA, 15 bp, Homo sapiens
ctcatcttcactttc

SEQ ID NO: 967358 - DNA, 15 bp, Homo sapiens
tcatcttcactttct

SEQ ID NO: 967359 - DNA, 15 bp, Homo sapiens
catcttcactttctg

SEQ ID NO: 967360 - DNA, 15 bp, Homo sapiens
atcttcactttctgt

SEQ ID NO: 967361 - DNA, 15 bp, Homo sapiens
tcttcactttctgtg

SEQ ID NO: 967362 - DNA, 15 bp, Homo sapiens
cttcactttctgtga

SEQ ID NO: 967363 - DNA, 15 bp, Homo sapiens
ttcactttctgtgaa

SEQ ID NO: 967364 - DNA, 15 bp, Homo sapiens
tcactttctgtgaat

SEQ ID NO: 967365 - DNA, 15 bp, Homo sapiens
cactttctgtgaatg

SEQ ID NO: 967366 - DNA, 15 bp, Homo sapiens
actttctgtgaatgg

SEQ ID NO: 967367 - DNA, 15 bp, Homo sapiens
ctttctgtgaatggg

SEQ ID NO: 967368 - DNA, 15 bp, Homo sapiens
tttctgtgaatggga

SEQ ID NO: 967369 - DNA, 15 bp, Homo sapiens
ttctgtgaatgggac

SEQ ID NO: 967370 - DNA, 15 bp, Homo sapiens
tctgtgaatgggacc

SEQ ID NO: 967371 - DNA, 15 bp, Homo sapiens
ctgtgaatgggacca

SEQ ID NO: 967372 - DNA, 15 bp, Homo sapiens
tgtgaatgggaccaa

SEQ ID NO: 967373 - DNA, 15 bp, Homo sapiens
gtgaatgggaccaat

SEQ ID NO: 967374 - DNA, 15 bp, Homo sapiens
tgaatgggaccaatg

SEQ ID NO: 967375 - DNA, 15 bp, Homo sapiens
gaatgggaccaatgc

SEQ ID NO: 967376 - DNA, 15 bp, Homo sapiens
aatgggaccaatgca

SEQ ID NO: 967377 - DNA, 15 bp, Homo sapiens
atgggaccaatgcag

SEQ ID NO: 967378 - DNA, 15 bp, Homo sapiens
tgggaccaatgcagg

SEQ ID NO: 967379 - DNA, 15 bp, Homo sapiens
gggaccaatgcagga

SEQ ID NO: 967380 - DNA, 15 bp, Homo sapiens
ggaccaatgcaggaa

SEQ ID NO: 967381 - DNA, 15 bp, Homo sapiens
gaccaatgcaggaat

SEQ ID NO: 967382 - DNA, 15 bp, Homo sapiens
accaatgcaggaatt

SEQ ID NO: 967383 - DNA, 15 bp, Homo sapiens
ccaatgcaggaattg

SEQ ID NO: 967384 - DNA, 15 bp, Homo sapiens
caatgcaggaattga

SEQ ID NO: 967385 - DNA, 15 bp, Homo sapiens
aatgcaggaattgaa

SEQ ID NO: 967386 - DNA, 15 bp, Homo sapiens
atgcaggaattgaaa

SEQ ID NO: 967387 - DNA, 15 bp, Homo sapiens
tgcaggaattgaaaa

SEQ ID NO: 967388 - DNA, 15 bp, Homo sapiens
gcaggaattgaaaaa

SEQ ID NO: 967389 - DNA, 15 bp, Homo sapiens
caggaattgaaaaat

SEQ ID NO: 967390 - DNA, 15 bp, Homo sapiens
aggaattgaaaaata

SEQ ID NO: 967391 - DNA, 15 bp, Homo sapiens
ggaattgaaaaatag

SEQ ID NO: 967392 - DNA, 15 bp, Homo sapiens
gaattgaaaaataga

SEQ ID NO: 967393 - DNA, 15 bp, Homo sapiens
aattgaaaaatagag

SEQ ID NO: 967394 - DNA, 15 bp, Homo sapiens
attgaaaaatagagc

SEQ ID NO: 967395 - DNA, 15 bp, Homo sapiens
ttgaaaaatagagcc

SEQ ID NO: 967396 - DNA, 15 bp, Homo sapiens
tgaaaaatagagcct

SEQ ID NO: 967397 - DNA, 15 bp, Homo sapiens
gaaaaatagagcctc

SEQ ID NO: 967398 - DNA, 15 bp, Homo sapiens
aaaaatagagcctca

SEQ ID NO: 967399 - DNA, 15 bp, Homo sapiens
aaaatagagcctcac

SEQ ID NO: 967400 - DNA, 15 bp, Homo sapiens
aaatagagcctcaca

SEQ ID NO: 967401 - DNA, 15 bp, Homo sapiens
aatagagcctcacat

SEQ ID NO: 967402 - DNA, 15 bp, Homo sapiens
atagagcctcacatt

SEQ ID NO: 967403 - DNA, 15 bp, Homo sapiens
tagagcctcacattg

SEQ ID NO: 967404 - DNA, 15 bp, Homo sapiens
agagcctcacattga

SEQ ID NO: 967405 - DNA, 15 bp, Homo sapiens
gagcctcacattgac

SEQ ID NO: 967406 - DNA, 15 bp, Homo sapiens
agcctcacattgaca

SEQ ID NO: 967407 - DNA, 15 bp, Homo sapiens
gcctcacattgacaa

SEQ ID NO: 967408 - DNA, 15 bp, Homo sapiens
cctcacattgacaag

SEQ ID NO: 967409 - DNA, 15 bp, Homo sapiens
ctcacattgacaaga

SEQ ID NO: 967410 - DNA, 15 bp, Homo sapiens
tcacattgacaagac

SEQ ID NO: 967411 - DNA, 15 bp, Homo sapiens
cacattgacaagaca

SEQ ID NO: 967412 - DNA, 15 bp, Homo sapiens
acattgacaagacag

SEQ ID NO: 967413 - DNA, 15 bp, Homo sapiens
cattgacaagacaga

SEQ ID NO: 967414 - DNA, 15 bp, Homo sapiens
attgacaagacagaa

SEQ ID NO: 967415 - DNA, 15 bp, Homo sapiens
ttgacaagacagaaa

SEQ ID NO: 967416 - DNA, 15 bp, Homo sapiens
tgacaagacagaaat

SEQ ID NO: 967417 - DNA, 15 bp, Homo sapiens
gacaagacagaaatc

SEQ ID NO: 967418 - DNA, 15 bp, Homo sapiens
acaagacagaaatct

SEQ ID NO: 967419 - DNA, 15 bp, Homo sapiens
caagacagaaatcta

SEQ ID NO: 967420 - DNA, 15 bp, Homo sapiens
aagacagaaatctat

SEQ ID NO: 967421 - DNA, 15 bp, Homo sapiens
agacagaaatctatt

SEQ ID NO: 967422 - DNA, 15 bp, Homo sapiens
gacagaaatctattg

SEQ ID NO: 967423 - DNA, 15 bp, Homo sapiens
acagaaatctattgc

SEQ ID NO: 967424 - DNA, 15 bp, Homo sapiens
cagaaatctattgct

SEQ ID NO: 967425 - DNA, 15 bp, Homo sapiens
agaaatctattgcta

SEQ ID NO: 967426 - DNA, 15 bp, Homo sapiens
gaaatctattgctag

SEQ ID NO: 967427 - DNA, 15 bp, Homo sapiens
aaatctattgctagg

SEQ ID NO: 967428 - DNA, 15 bp, Homo sapiens
aatctattgctagga

SEQ ID NO: 967429 - DNA, 15 bp, Homo sapiens
atctattgctaggac

SEQ ID NO: 967430 - DNA, 15 bp, Homo sapiens
tctattgctaggact

SEQ ID NO: 967431 - DNA, 15 bp, Homo sapiens
ctattgctaggactt

SEQ ID NO: 967432 - DNA, 15 bp, Homo sapiens
tattgctaggacttt

SEQ ID NO: 967433 - DNA, 15 bp, Homo sapiens
attgctaggactttg

SEQ ID NO: 967434 - DNA, 15 bp, Homo sapiens
ttgctaggactttgc

SEQ ID NO: 967435 - DNA, 15 bp, Homo sapiens
tgctaggactttgca

SEQ ID NO: 967436 - DNA, 15 bp, Homo sapiens
gctaggactttgcaa

SEQ ID NO: 967437 - DNA, 15 bp, Homo sapiens
ctaggactttgcaag

SEQ ID NO: 967438 - DNA, 15 bp, Homo sapiens
taggactttgcaaga

SEQ ID NO: 967439 - DNA, 15 bp, Homo sapiens
aggactttgcaagat

SEQ ID NO: 967440 - DNA, 15 bp, Homo sapiens
ggactttgcaagatt

SEQ ID NO: 967441 - DNA, 15 bp, Homo sapiens
gactttgcaagattt

SEQ ID NO: 967442 - DNA, 15 bp, Homo sapiens
actttgcaagattta

SEQ ID NO: 967443 - DNA, 15 bp, Homo sapiens
ctttgcaagatttat

SEQ ID NO: 967444 - DNA, 15 bp, Homo sapiens
tttgcaagatttatt

SEQ ID NO: 967445 - DNA, 15 bp, Homo sapiens
ttgcaagatttatta

SEQ ID NO: 967446 - DNA, 15 bp, Homo sapiens
tgcaagatttattaa

SEQ ID NO: 967447 - DNA, 15 bp, Homo sapiens
gcaagatttattaag

SEQ ID NO: 967448 - DNA, 15 bp, Homo sapiens
caagatttattaaga

SEQ ID NO: 967449 - DNA, 15 bp, Homo sapiens
aagatttattaagaa

SEQ ID NO: 967450 - DNA, 15 bp, Homo sapiens
agatttattaagaaa

SEQ ID NO: 967451 - DNA, 15 bp, Homo sapiens
gatttattaagaaag

SEQ ID NO: 967452 - DNA, 15 bp, Homo sapiens
atttattaagaaagt

SEQ ID NO: 967453 - DNA, 15 bp, Homo sapiens
tttattaagaaagtg

SEQ ID NO: 967454 - DNA, 15 bp, Homo sapiens
ttattaagaaagtgg

SEQ ID NO: 967455 - DNA, 15 bp, Homo sapiens
tattaagaaagtggt

SEQ ID NO: 967456 - DNA, 15 bp, Homo sapiens
attaagaaagtggtc

SEQ ID NO: 967457 - DNA, 15 bp, Homo sapiens
ttaagaaagtggtca

SEQ ID NO: 967458 - DNA, 15 bp, Homo sapiens
taagaaagtggtcag

SEQ ID NO: 967459 - DNA, 15 bp, Homo sapiens
aagaaagtggtcagt

SEQ ID NO: 967460 - DNA, 15 bp, Homo sapiens
agaaagtggtcagtg

SEQ ID NO: 967461 - DNA, 15 bp, Homo sapiens
gaaagtggtcagtgt

SEQ ID NO: 967462 - DNA, 15 bp, Homo sapiens
aaagtggtcagtgtt

SEQ ID NO: 967463 - DNA, 15 bp, Homo sapiens
aagtggtcagtgttt

SEQ ID NO: 967464 - DNA, 15 bp, Homo sapiens
agtggtcagtgtttt

SEQ ID NO: 967465 - DNA, 15 bp, Homo sapiens
gtggtcagtgtttta

SEQ ID NO: 967466 - DNA, 15 bp, Homo sapiens
tggtcagtgttttaa

SEQ ID NO: 967467 - DNA, 15 bp, Homo sapiens
ggtcagtgttttaaa

SEQ ID NO: 967468 - DNA, 15 bp, Homo sapiens
gtcagtgttttaaaa

SEQ ID NO: 967469 - DNA, 15 bp, Homo sapiens
tcagtgttttaaaat

SEQ ID NO: 967470 - DNA, 15 bp, Homo sapiens
cagtgttttaaaatg

SEQ ID NO: 967471 - DNA, 15 bp, Homo sapiens
agtgttttaaaatga

SEQ ID NO: 967472 - DNA, 15 bp, Homo sapiens
gtgttttaaaatgac

SEQ ID NO: 967473 - DNA, 15 bp, Homo sapiens
tgttttaaaatgacg

SEQ ID NO: 967474 - DNA, 15 bp, Homo sapiens
gttttaaaatgacgg

SEQ ID NO: 967475 - DNA, 15 bp, Homo sapiens
ttttaaaatgacggc

SEQ ID NO: 967476 - DNA, 15 bp, Homo sapiens
tttaaaatgacggct

SEQ ID NO: 967477 - DNA, 15 bp, Homo sapiens
ttaaaatgacggcta

SEQ ID NO: 967478 - DNA, 15 bp, Homo sapiens
taaaatgacggctaa

SEQ ID NO: 967479 - DNA, 15 bp, Homo sapiens
aaaatgacggctaat

SEQ ID NO: 967480 - DNA, 15 bp, Homo sapiens
aaatgacggctaatt

SEQ ID NO: 967481 - DNA, 15 bp, Homo sapiens
aatgacggctaattt

SEQ ID NO: 967482 - DNA, 15 bp, Homo sapiens
atgacggctaatttc

SEQ ID NO: 967483 - DNA, 15 bp, Homo sapiens
tgacggctaatttca

SEQ ID NO: 967484 - DNA, 15 bp, Homo sapiens
gacggctaatttcac

SEQ ID NO: 967485 - DNA, 15 bp, Homo sapiens
acggctaatttcacc

SEQ ID NO: 967486 - DNA, 15 bp, Homo sapiens
cggctaatttcaccc

SEQ ID NO: 967487 - DNA, 15 bp, Homo sapiens
ggctaatttcaccca

SEQ ID NO: 967488 - DNA, 15 bp, Homo sapiens
gctaatttcacccag

SEQ ID NO: 967489 - DNA, 15 bp, Homo sapiens
ctaatttcacccaga

SEQ ID NO: 967490 - DNA, 15 bp, Homo sapiens
taatttcacccagaa

SEQ ID NO: 967491 - DNA, 15 bp, Homo sapiens
aatttcacccagaag

SEQ ID NO: 967492 - DNA, 15 bp, Homo sapiens
atttcacccagaagc

SEQ ID NO: 967493 - DNA, 15 bp, Homo sapiens
tttcacccagaagca

SEQ ID NO: 967494 - DNA, 15 bp, Homo sapiens
ttcacccagaagcat

SEQ ID NO: 967495 - DNA, 15 bp, Homo sapiens
tcacccagaagcatg

SEQ ID NO: 967496 - DNA, 15 bp, Homo sapiens
cacccagaagcatgg

SEQ ID NO: 967497 - DNA, 15 bp, Homo sapiens
acccagaagcatgga

SEQ ID NO: 967498 - DNA, 15 bp, Homo sapiens
cccagaagcatggaa

SEQ ID NO: 967499 - DNA, 15 bp, Homo sapiens
ccagaagcatggaaa

SEQ ID NO: 967500 - DNA, 15 bp, Homo sapiens
cagaagcatggaaaa

SEQ ID NO: 967501 - DNA, 15 bp, Homo sapiens
agaagcatggaaaaa

SEQ ID NO: 967502 - DNA, 15 bp, Homo sapiens
gaagcatggaaaaag

SEQ ID NO: 967503 - DNA, 15 bp, Homo sapiens
aagcatggaaaaagg

SEQ ID NO: 967504 - DNA, 15 bp, Homo sapiens
agcatggaaaaaggc

SEQ ID NO: 967505 - DNA, 15 bp, Homo sapiens
gcatggaaaaaggca

SEQ ID NO: 967506 - DNA, 15 bp, Homo sapiens
catggaaaaaggcac

SEQ ID NO: 967507 - DNA, 15 bp, Homo sapiens
atggaaaaaggcact

SEQ ID NO: 967508 - DNA, 15 bp, Homo sapiens
tggaaaaaggcactc

SEQ ID NO: 967509 - DNA, 15 bp, Homo sapiens
ggaaaaaggcactca

SEQ ID NO: 967510 - DNA, 15 bp, Homo sapiens
gaaaaaggcactcat

SEQ ID NO: 967511 - DNA, 15 bp, Homo sapiens
aaaaaggcactcatt

SEQ ID NO: 967512 - DNA, 15 bp, Homo sapiens
aaaaggcactcattc

SEQ ID NO: 967513 - DNA, 15 bp, Homo sapiens
aaaggcactcattca

SEQ ID NO: 967514 - DNA, 15 bp, Homo sapiens
aaggcactcattcag

SEQ ID NO: 967515 - DNA, 15 bp, Homo sapiens
aggcactcattcagc

SEQ ID NO: 967516 - DNA, 15 bp, Homo sapiens
ggcactcattcagcc

SEQ ID NO: 967517 - DNA, 15 bp, Homo sapiens
gcactcattcagcca

SEQ ID NO: 967518 - DNA, 15 bp, Homo sapiens
cactcattcagccat

SEQ ID NO: 967519 - DNA, 15 bp, Homo sapiens
actcattcagccatt

SEQ ID NO: 967520 - DNA, 15 bp, Homo sapiens
ctcattcagccattg

SEQ ID NO: 967521 - DNA, 15 bp, Homo sapiens
tcattcagccattgt

SEQ ID NO: 967522 - DNA, 15 bp, Homo sapiens
cattcagccattgtc

SEQ ID NO: 967523 - DNA, 15 bp, Homo sapiens
attcagccattgtct

SEQ ID NO: 967524 - DNA, 15 bp, Homo sapiens
ttcagccattgtctg

SEQ ID NO: 967525 - DNA, 15 bp, Homo sapiens
tcagccattgtctgc

SEQ ID NO: 967526 - DNA, 15 bp, Homo sapiens
cagccattgtctgct

SEQ ID NO: 967527 - DNA, 15 bp, Homo sapiens
agccattgtctgctt

SEQ ID NO: 967528 - DNA, 15 bp, Homo sapiens
gccattgtctgctta

SEQ ID NO: 967529 - DNA, 15 bp, Homo sapiens
ccattgtctgcttat

SEQ ID NO: 967530 - DNA, 15 bp, Homo sapiens
cattgtctgcttatt

SEQ ID NO: 967531 - DNA, 15 bp, Homo sapiens
attgtctgcttatta

SEQ ID NO: 967532 - DNA, 15 bp, Homo sapiens
ttgtctgcttattaa

SEQ ID NO: 967533 - DNA, 15 bp, Homo sapiens
tgtctgcttattaat

SEQ ID NO: 967534 - DNA, 15 bp, Homo sapiens
gtctgcttattaata

SEQ ID NO: 967535 - DNA, 15 bp, Homo sapiens
tctgcttattaataa

SEQ ID NO: 967536 - DNA, 15 bp, Homo sapiens
ctgcttattaataaa

SEQ ID NO: 967537 - DNA, 15 bp, Homo sapiens
tgcttattaataaaa

SEQ ID NO: 967538 - DNA, 15 bp, Homo sapiens
gcttattaataaaaa

SEQ ID NO: 967539 - DNA, 15 bp, Homo sapiens
cttattaataaaaac

SEQ ID NO: 967540 - DNA, 15 bp, Homo sapiens
ttattaataaaaacc

SEQ ID NO: 967541 - DNA, 15 bp, Homo sapiens
tattaataaaaacct

SEQ ID NO: 967542 - DNA, 15 bp, Homo sapiens
attaataaaaacctg

SEQ ID NO: 967543 - DNA, 15 bp, Homo sapiens
ttaataaaaacctgt

SEQ ID NO: 967544 - DNA, 15 bp, Homo sapiens
taataaaaacctgta

SEQ ID NO: 967545 - DNA, 15 bp, Homo sapiens
aataaaaacctgtag

SEQ ID NO: 967546 - DNA, 15 bp, Homo sapiens
ataaaaacctgtagc

SEQ ID NO: 967547 - DNA, 15 bp, Homo sapiens
taaaaacctgtagct

SEQ ID NO: 967548 - DNA, 15 bp, Homo sapiens
aaaaacctgtagctt

SEQ ID NO: 967549 - DNA, 15 bp, Homo sapiens
aaaacctgtagctta

SEQ ID NO: 967550 - DNA, 15 bp, Homo sapiens
aaacctgtagcttac

SEQ ID NO: 967551 - DNA, 15 bp, Homo sapiens
aacctgtagcttaca

SEQ ID NO: 967552 - DNA, 15 bp, Homo sapiens
acctgtagcttacat

SEQ ID NO: 967553 - DNA, 15 bp, Homo sapiens
cctgtagcttacata

SEQ ID NO: 967554 - DNA, 15 bp, Homo sapiens
ctgtagcttacatag

SEQ ID NO: 967555 - DNA, 15 bp, Homo sapiens
tgtagcttacatagt

SEQ ID NO: 967556 - DNA, 15 bp, Homo sapiens
gtagcttacatagtg

SEQ ID NO: 967557 - DNA, 15 bp, Homo sapiens
tagcttacatagtga

SEQ ID NO: 967558 - DNA, 15 bp, Homo sapiens
agcttacatagtgaa

SEQ ID NO: 967559 - DNA, 15 bp, Homo sapiens
gcttacatagtgaag

SEQ ID NO: 967560 - DNA, 15 bp, Homo sapiens
cttacatagtgaagc

SEQ ID NO: 967561 - DNA, 15 bp, Homo sapiens
ttacatagtgaagct

SEQ ID NO: 967562 - DNA, 15 bp, Homo sapiens
tacatagtgaagctg

SEQ ID NO: 967563 - DNA, 15 bp, Homo sapiens
acatagtgaagctga

SEQ ID NO: 967564 - DNA, 15 bp, Homo sapiens
catagtgaagctgag

SEQ ID NO: 967565 - DNA, 15 bp, Homo sapiens
atagtgaagctgagt

SEQ ID NO: 967566 - DNA, 15 bp, Homo sapiens
tagtgaagctgagtt

SEQ ID NO: 967567 - DNA, 15 bp, Homo sapiens
agtgaagctgagttg

SEQ ID NO: 967568 - DNA, 15 bp, Homo sapiens
gtgaagctgagttgc

SEQ ID NO: 967569 - DNA, 15 bp, Homo sapiens
tgaagctgagttgcc

SEQ ID NO: 967570 - DNA, 15 bp, Homo sapiens
gaagctgagttgccc

SEQ ID NO: 967571 - DNA, 15 bp, Homo sapiens
aagctgagttgccct

SEQ ID NO: 967572 - DNA, 15 bp, Homo sapiens
agctgagttgccctg

SEQ ID NO: 967573 - DNA, 15 bp, Homo sapiens
gctgagttgccctga

SEQ ID NO: 967574 - DNA, 15 bp, Homo sapiens
ctgagttgccctgag

SEQ ID NO: 967575 - DNA, 15 bp, Homo sapiens
tgagttgccctgaga

SEQ ID NO: 967576 - DNA, 15 bp, Homo sapiens
gagttgccctgagaa

SEQ ID NO: 967577 - DNA, 15 bp, Homo sapiens
agttgccctgagaat

SEQ ID NO: 967578 - DNA, 15 bp, Homo sapiens
gttgccctgagaatt

SEQ ID NO: 967579 - DNA, 15 bp, Homo sapiens
ttgccctgagaatta

SEQ ID NO: 967580 - DNA, 15 bp, Homo sapiens
tgccctgagaattac

SEQ ID NO: 967581 - DNA, 15 bp, Homo sapiens
gccctgagaattaca

SEQ ID NO: 967582 - DNA, 15 bp, Homo sapiens
ccctgagaattacac

SEQ ID NO: 967583 - DNA, 15 bp, Homo sapiens
cctgagaattacacc

SEQ ID NO: 967584 - DNA, 15 bp, Homo sapiens
ctgagaattacacca

SEQ ID NO: 967585 - DNA, 15 bp, Homo sapiens
tgagaattacaccag

SEQ ID NO: 967586 - DNA, 15 bp, Homo sapiens
gagaattacaccagc

SEQ ID NO: 967587 - DNA, 15 bp, Homo sapiens
agaattacaccagct

SEQ ID NO: 967588 - DNA, 15 bp, Homo sapiens
gaattacaccagctg

SEQ ID NO: 967589 - DNA, 15 bp, Homo sapiens
aattacaccagctgt

SEQ ID NO: 967590 - DNA, 15 bp, Homo sapiens
attacaccagctgtc

SEQ ID NO: 967591 - DNA, 15 bp, Homo sapiens
ttacaccagctgtct

SEQ ID NO: 967592 - DNA, 15 bp, Homo sapiens
tacaccagctgtctt

SEQ ID NO: 967593 - DNA, 15 bp, Homo sapiens
acaccagctgtcttt

SEQ ID NO: 967594 - DNA, 15 bp, Homo sapiens
caccagctgtctttc

SEQ ID NO: 967595 - DNA, 15 bp, Homo sapiens
accagctgtctttct

SEQ ID NO: 967596 - DNA, 15 bp, Homo sapiens
ccagctgtctttctg

SEQ ID NO: 967597 - DNA, 15 bp, Homo sapiens
cagctgtctttctga

SEQ ID NO: 967598 - DNA, 15 bp, Homo sapiens
agctgtctttctgac

SEQ ID NO: 967599 - DNA, 15 bp, Homo sapiens
gctgtctttctgact

SEQ ID NO: 967600 - DNA, 15 bp, Homo sapiens
ctgtctttctgacta

SEQ ID NO: 967601 - DNA, 15 bp, Homo sapiens
tgtctttctgactaa

SEQ ID NO: 967602 - DNA, 15 bp, Homo sapiens
gtctttctgactaaa

SEQ ID NO: 967603 - DNA, 15 bp, Homo sapiens
tctttctgactaaat

SEQ ID NO: 967604 - DNA, 15 bp, Homo sapiens
ctttctgactaaatt

SEQ ID NO: 967605 - DNA, 15 bp, Homo sapiens
tttctgactaaattc

SEQ ID NO: 967606 - DNA, 15 bp, Homo sapiens
ttctgactaaattca

SEQ ID NO: 967607 - DNA, 15 bp, Homo sapiens
tctgactaaattcaa

SEQ ID NO: 967608 - DNA, 15 bp, Homo sapiens
ctgactaaattcaag

SEQ ID NO: 967609 - DNA, 15 bp, Homo sapiens
tgactaaattcaagc

SEQ ID NO: 967610 - DNA, 15 bp, Homo sapiens
gactaaattcaagca

SEQ ID NO: 967611 - DNA, 15 bp, Homo sapiens
actaaattcaagcag

SEQ ID NO: 967612 - DNA, 15 bp, Homo sapiens
ctaaattcaagcagt

SEQ ID NO: 967613 - DNA, 15 bp, Homo sapiens
taaattcaagcagtg

SEQ ID NO: 967614 - DNA, 15 bp, Homo sapiens
aaattcaagcagtgg

SEQ ID NO: 967615 - DNA, 15 bp, Homo sapiens
aattcaagcagtggc

SEQ ID NO: 967616 - DNA, 15 bp, Homo sapiens
attcaagcagtggct

SEQ ID NO: 967617 - DNA, 15 bp, Homo sapiens
ttcaagcagtggctt

SEQ ID NO: 967618 - DNA, 15 bp, Homo sapiens
tcaagcagtggcttt

SEQ ID NO: 967619 - DNA, 15 bp, Homo sapiens
caagcagtggcttta

SEQ ID NO: 967620 - DNA, 15 bp, Homo sapiens
aagcagtggctttaa

SEQ ID NO: 967621 - DNA, 15 bp, Homo sapiens
agcagtggctttaac

SEQ ID NO: 967622 - DNA, 15 bp, Homo sapiens
gcagtggctttaact

SEQ ID NO: 967623 - DNA, 15 bp, Homo sapiens
cagtggctttaactg

SEQ ID NO: 967624 - DNA, 15 bp, Homo sapiens
agtggctttaactga

SEQ ID NO: 967625 - DNA, 15 bp, Homo sapiens
gtggctttaactgac

SEQ ID NO: 967626 - DNA, 15 bp, Homo sapiens
tggctttaactgacc

SEQ ID NO: 967627 - DNA, 15 bp, Homo sapiens
ggctttaactgacct

SEQ ID NO: 967628 - DNA, 15 bp, Homo sapiens
gctttaactgacctt

SEQ ID NO: 967629 - DNA, 15 bp, Homo sapiens
ctttaactgaccttt

SEQ ID NO: 967630 - DNA, 15 bp, Homo sapiens
tttaactgacctttt

SEQ ID NO: 967631 - DNA, 15 bp, Homo sapiens
ttaactgaccttttt

SEQ ID NO: 967632 - DNA, 15 bp, Homo sapiens
taactgacctttttt

SEQ ID NO: 967633 - DNA, 15 bp, Homo sapiens
aactgaccttttttt

SEQ ID NO: 967634 - DNA, 15 bp, Homo sapiens
actgacctttttttt

SEQ ID NO: 967635 - DNA, 15 bp, Homo sapiens
ctgaccttttttttt

SEQ ID NO: 967636 - DNA, 15 bp, Homo sapiens
tgacctttttttttt

SEQ ID NO: 967637 - DNA, 15 bp, Homo sapiens
gaccttttttttttt

SEQ ID NO: 967638 - DNA, 15 bp, Homo sapiens
acctttttttttttt

SEQ ID NO: 967639 - DNA, 15 bp, Homo sapiens
cttttttttttttta

SEQ ID NO: 967640 - DNA, 15 bp, Homo sapiens
ttttttttttttatc

SEQ ID NO: 967641 - DNA, 15 bp, Homo sapiens
tttttttttttatct

SEQ ID NO: 967642 - DNA, 15 bp, Homo sapiens
ttttttttttatctg

SEQ ID NO: 967643 - DNA, 15 bp, Homo sapiens
tttttttttatctga

SEQ ID NO: 967644 - DNA, 15 bp, Homo sapiens
ttttttttatctgaa

SEQ ID NO: 967645 - DNA, 15 bp, Homo sapiens
tttttttatctgaat

SEQ ID NO: 967646 - DNA, 15 bp, Homo sapiens
ttttttatctgaatt

SEQ ID NO: 967647 - DNA, 15 bp, Homo sapiens
tttttatctgaatta

SEQ ID NO: 967648 - DNA, 15 bp, Homo sapiens
ttttatctgaattaa

SEQ ID NO: 967649 - DNA, 15 bp, Homo sapiens
tttatctgaattaag

SEQ ID NO: 967650 - DNA, 15 bp, Homo sapiens
ttatctgaattaaga

SEQ ID NO: 967651 - DNA, 15 bp, Homo sapiens
tatctgaattaagat

SEQ ID NO: 967652 - DNA, 15 bp, Homo sapiens
atctgaattaagatc

SEQ ID NO: 967653 - DNA, 15 bp, Homo sapiens
tctgaattaagatca

SEQ ID NO: 967654 - DNA, 15 bp, Homo sapiens
ctgaattaagatcat

SEQ ID NO: 967655 - DNA, 15 bp, Homo sapiens
tgaattaagatcatt

SEQ ID NO: 967656 - DNA, 15 bp, Homo sapiens
gaattaagatcattt

SEQ ID NO: 967657 - DNA, 15 bp, Homo sapiens
aattaagatcatttg

SEQ ID NO: 967658 - DNA, 15 bp, Homo sapiens
attaagatcatttgg

SEQ ID NO: 967659 - DNA, 15 bp, Homo sapiens
ttaagatcatttggg

SEQ ID NO: 967660 - DNA, 15 bp, Homo sapiens
taagatcatttgggc

SEQ ID NO: 967661 - DNA, 15 bp, Homo sapiens
aagatcatttgggcc

SEQ ID NO: 967662 - DNA, 15 bp, Homo sapiens
agatcatttgggcca

SEQ ID NO: 967663 - DNA, 15 bp, Homo sapiens
gatcatttgggccac

SEQ ID NO: 967664 - DNA, 15 bp, Homo sapiens
atcatttgggccaca

SEQ ID NO: 967665 - DNA, 15 bp, Homo sapiens
tcatttgggccacac

SEQ ID NO: 967666 - DNA, 15 bp, Homo sapiens
catttgggccacacc

SEQ ID NO: 967667 - DNA, 15 bp, Homo sapiens
atttgggccacacct

SEQ ID NO: 967668 - DNA, 15 bp, Homo sapiens
tttgggccacaccta

SEQ ID NO: 967669 - DNA, 15 bp, Homo sapiens
ttgggccacacctat

SEQ ID NO: 967670 - DNA, 15 bp, Homo sapiens
tgggccacacctatg

SEQ ID NO: 967671 - DNA, 15 bp, Homo sapiens
gggccacacctatga

SEQ ID NO: 967672 - DNA, 15 bp, Homo sapiens
ggccacacctatgag

SEQ ID NO: 967673 - DNA, 15 bp, Homo sapiens
gccacacctatgagc

SEQ ID NO: 967674 - DNA, 15 bp, Homo sapiens
ccacacctatgagct

SEQ ID NO: 967675 - DNA, 15 bp, Homo sapiens
cacacctatgagctg

SEQ ID NO: 967676 - DNA, 15 bp, Homo sapiens
acacctatgagctga

SEQ ID NO: 967677 - DNA, 15 bp, Homo sapiens
cacctatgagctgag

SEQ ID NO: 967678 - DNA, 15 bp, Homo sapiens
acctatgagctgagg

SEQ ID NO: 967679 - DNA, 15 bp, Homo sapiens
cctatgagctgaggt

SEQ ID NO: 967680 - DNA, 15 bp, Homo sapiens
ctatgagctgaggtc

SEQ ID NO: 967681 - DNA, 15 bp, Homo sapiens
tatgagctgaggtct

SEQ ID NO: 967682 - DNA, 15 bp, Homo sapiens
atgagctgaggtcta

SEQ ID NO: 967683 - DNA, 15 bp, Homo sapiens
tgagctgaggtctag

SEQ ID NO: 967684 - DNA, 15 bp, Homo sapiens
gagctgaggtctagt

SEQ ID NO: 967685 - DNA, 15 bp, Homo sapiens
agctgaggtctagtt

SEQ ID NO: 967686 - DNA, 15 bp, Homo sapiens
gctgaggtctagttc

SEQ ID NO: 967687 - DNA, 15 bp, Homo sapiens
ctgaggtctagttca

SEQ ID NO: 967688 - DNA, 15 bp, Homo sapiens
tgaggtctagttcag

SEQ ID NO: 967689 - DNA, 15 bp, Homo sapiens
gaggtctagttcaga

SEQ ID NO: 967690 - DNA, 15 bp, Homo sapiens
aggtctagttcagat

SEQ ID NO: 967691 - DNA, 15 bp, Homo sapiens
ggtctagttcagatt

SEQ ID NO: 967692 - DNA, 15 bp, Homo sapiens
gtctagttcagattt

SEQ ID NO: 967693 - DNA, 15 bp, Homo sapiens
tctagttcagatttg

SEQ ID NO: 967694 - DNA, 15 bp, Homo sapiens
ctagttcagatttgt

SEQ ID NO: 967695 - DNA, 15 bp, Homo sapiens
tagttcagatttgtt

SEQ ID NO: 967696 - DNA, 15 bp, Homo sapiens
agttcagatttgttg

SEQ ID NO: 967697 - DNA, 15 bp, Homo sapiens
gttcagatttgttgg

SEQ ID NO: 967698 - DNA, 15 bp, Homo sapiens
ttcagatttgttgga

SEQ ID NO: 967699 - DNA, 15 bp, Homo sapiens
tcagatttgttggag

SEQ ID NO: 967700 - DNA, 15 bp, Homo sapiens
cagatttgttggaga

SEQ ID NO: 967701 - DNA, 15 bp, Homo sapiens
agatttgttggagaa

SEQ ID NO: 967702 - DNA, 15 bp, Homo sapiens
gatttgttggagaat

SEQ ID NO: 967703 - DNA, 15 bp, Homo sapiens
atttgttggagaatg

SEQ ID NO: 967704 - DNA, 15 bp, Homo sapiens
tttgttggagaatgc

SEQ ID NO: 967705 - DNA, 15 bp, Homo sapiens
ttgttggagaatgct

SEQ ID NO: 967706 - DNA, 15 bp, Homo sapiens
tgttggagaatgctc

SEQ ID NO: 967707 - DNA, 15 bp, Homo sapiens
gttggagaatgctca

SEQ ID NO: 967708 - DNA, 15 bp, Homo sapiens
ttggagaatgctcac

SEQ ID NO: 967709 - DNA, 15 bp, Homo sapiens
tggagaatgctcacc

SEQ ID NO: 967710 - DNA, 15 bp, Homo sapiens
ggagaatgctcaccc

SEQ ID NO: 967711 - DNA, 15 bp, Homo sapiens
gagaatgctcaccca

SEQ ID NO: 967712 - DNA, 15 bp, Homo sapiens
agaatgctcacccat

SEQ ID NO: 967713 - DNA, 15 bp, Homo sapiens
gaatgctcacccatc

SEQ ID NO: 967714 - DNA, 15 bp, Homo sapiens
aatgctcacccatca

SEQ ID NO: 967715 - DNA, 15 bp, Homo sapiens
atgctcacccatcag

SEQ ID NO: 967716 - DNA, 15 bp, Homo sapiens
tgctcacccatcagt

SEQ ID NO: 967717 - DNA, 15 bp, Homo sapiens
gctcacccatcagta

SEQ ID NO: 967718 - DNA, 15 bp, Homo sapiens
ctcacccatcagtaa

SEQ ID NO: 967719 - DNA, 15 bp, Homo sapiens
tcacccatcagtaat

SEQ ID NO: 967720 - DNA, 15 bp, Homo sapiens
cacccatcagtaatt

SEQ ID NO: 967721 - DNA, 15 bp, Homo sapiens
acccatcagtaattt

SEQ ID NO: 967722 - DNA, 15 bp, Homo sapiens
cccatcagtaatttt

SEQ ID NO: 967723 - DNA, 15 bp, Homo sapiens
ccatcagtaattttt

SEQ ID NO: 967724 - DNA, 15 bp, Homo sapiens
catcagtaatttttt

SEQ ID NO: 967725 - DNA, 15 bp, Homo sapiens
atcagtaattttttg

SEQ ID NO: 967726 - DNA, 15 bp, Homo sapiens
tcagtaattttttga

SEQ ID NO: 967727 - DNA, 15 bp, Homo sapiens
cagtaattttttgac

SEQ ID NO: 967728 - DNA, 15 bp, Homo sapiens
agtaattttttgact

SEQ ID NO: 967729 - DNA, 15 bp, Homo sapiens
gtaattttttgactg

SEQ ID NO: 967730 - DNA, 15 bp, Homo sapiens
taattttttgactga

SEQ ID NO: 967731 - DNA, 15 bp, Homo sapiens
aattttttgactgat

SEQ ID NO: 967732 - DNA, 15 bp, Homo sapiens
attttttgactgatt

SEQ ID NO: 967733 - DNA, 15 bp, Homo sapiens
ttttttgactgattc

SEQ ID NO: 967734 - DNA, 15 bp, Homo sapiens
tttttgactgattca

SEQ ID NO: 967735 - DNA, 15 bp, Homo sapiens
ttttgactgattcaa

SEQ ID NO: 967736 - DNA, 15 bp, Homo sapiens
tttgactgattcaag

SEQ ID NO: 967737 - DNA, 15 bp, Homo sapiens
ttgactgattcaagc

SEQ ID NO: 967738 - DNA, 15 bp, Homo sapiens
tgactgattcaagcc

SEQ ID NO: 967739 - DNA, 15 bp, Homo sapiens
gactgattcaagccc

SEQ ID NO: 967740 - DNA, 15 bp, Homo sapiens
actgattcaagcccc

SEQ ID NO: 967741 - DNA, 15 bp, Homo sapiens
ctgattcaagcccct

SEQ ID NO: 967742 - DNA, 15 bp, Homo sapiens
tgattcaagcccctt

SEQ ID NO: 967743 - DNA, 15 bp, Homo sapiens
gattcaagccccttg

SEQ ID NO: 967744 - DNA, 15 bp, Homo sapiens
attcaagccccttga

SEQ ID NO: 967745 - DNA, 15 bp, Homo sapiens
ttcaagccccttgac

SEQ ID NO: 967746 - DNA, 15 bp, Homo sapiens
tcaagccccttgacc

SEQ ID NO: 967747 - DNA, 15 bp, Homo sapiens
caagccccttgacca

SEQ ID NO: 967748 - DNA, 15 bp, Homo sapiens
aagccccttgaccaa

SEQ ID NO: 967749 - DNA, 15 bp, Homo sapiens
agccccttgaccaat

SEQ ID NO: 967750 - DNA, 15 bp, Homo sapiens
gccccttgaccaatg

SEQ ID NO: 967751 - DNA, 15 bp, Homo sapiens
ccccttgaccaatgg

SEQ ID NO: 967752 - DNA, 15 bp, Homo sapiens
cccttgaccaatgga

SEQ ID NO: 967753 - DNA, 15 bp, Homo sapiens
ccttgaccaatggac

SEQ ID NO: 967754 - DNA, 15 bp, Homo sapiens
cttgaccaatggaca

SEQ ID NO: 967755 - DNA, 15 bp, Homo sapiens
ttgaccaatggacat

SEQ ID NO: 967756 - DNA, 15 bp, Homo sapiens
tgaccaatggacatt

SEQ ID NO: 967757 - DNA, 15 bp, Homo sapiens
gaccaatggacatta

SEQ ID NO: 967758 - DNA, 15 bp, Homo sapiens
accaatggacattag

SEQ ID NO: 967759 - DNA, 15 bp, Homo sapiens
ccaatggacattaga

SEQ ID NO: 967760 - DNA, 15 bp, Homo sapiens
caatggacattagag

SEQ ID NO: 967761 - DNA, 15 bp, Homo sapiens
aatggacattagagg

SEQ ID NO: 967762 - DNA, 15 bp, Homo sapiens
atggacattagagga

SEQ ID NO: 967763 - DNA, 15 bp, Homo sapiens
tggacattagaggat

SEQ ID NO: 967764 - DNA, 15 bp, Homo sapiens
ggacattagaggatg

SEQ ID NO: 967765 - DNA, 15 bp, Homo sapiens
gacattagaggatga

SEQ ID NO: 967766 - DNA, 15 bp, Homo sapiens
acattagaggatgaa

SEQ ID NO: 967767 - DNA, 15 bp, Homo sapiens
cattagaggatgaat

SEQ ID NO: 967768 - DNA, 15 bp, Homo sapiens
attagaggatgaatg

SEQ ID NO: 967769 - DNA, 15 bp, Homo sapiens
ttagaggatgaatga

SEQ ID NO: 967770 - DNA, 15 bp, Homo sapiens
tagaggatgaatgag

SEQ ID NO: 967771 - DNA, 15 bp, Homo sapiens
agaggatgaatgaga

SEQ ID NO: 967772 - DNA, 15 bp, Homo sapiens
gaggatgaatgagaa

SEQ ID NO: 967773 - DNA, 15 bp, Homo sapiens
aggatgaatgagaaa

SEQ ID NO: 967774 - DNA, 15 bp, Homo sapiens
ggatgaatgagaaag

SEQ ID NO: 967775 - DNA, 15 bp, Homo sapiens
gatgaatgagaaagt

SEQ ID NO: 967776 - DNA, 15 bp, Homo sapiens
atgaatgagaaagtg

SEQ ID NO: 967777 - DNA, 15 bp, Homo sapiens
tgaatgagaaagtgg

SEQ ID NO: 967778 - DNA, 15 bp, Homo sapiens
gaatgagaaagtgga

SEQ ID NO: 967779 - DNA, 15 bp, Homo sapiens
aatgagaaagtggaa

SEQ ID NO: 967780 - DNA, 15 bp, Homo sapiens
atgagaaagtggaat

SEQ ID NO: 967781 - DNA, 15 bp, Homo sapiens
tgagaaagtggaata

SEQ ID NO: 967782 - DNA, 15 bp, Homo sapiens
gagaaagtggaatac

SEQ ID NO: 967783 - DNA, 15 bp, Homo sapiens
agaaagtggaataca

SEQ ID NO: 967784 - DNA, 15 bp, Homo sapiens
gaaagtggaatacat

SEQ ID NO: 967785 - DNA, 15 bp, Homo sapiens
aaagtggaatacatt

SEQ ID NO: 967786 - DNA, 15 bp, Homo sapiens
aagtggaatacatta

SEQ ID NO: 967787 - DNA, 15 bp, Homo sapiens
agtggaatacattaa

SEQ ID NO: 967788 - DNA, 15 bp, Homo sapiens
gtggaatacattaag

SEQ ID NO: 967789 - DNA, 15 bp, Homo sapiens
tggaatacattaagt

SEQ ID NO: 967790 - DNA, 15 bp, Homo sapiens
ggaatacattaagta

SEQ ID NO: 967791 - DNA, 15 bp, Homo sapiens
gaatacattaagtaa

SEQ ID NO: 967792 - DNA, 15 bp, Homo sapiens
aatacattaagtaac

SEQ ID NO: 967793 - DNA, 15 bp, Homo sapiens
atacattaagtaact

SEQ ID NO: 967794 - DNA, 15 bp, Homo sapiens
tacattaagtaactt

SEQ ID NO: 967795 - DNA, 15 bp, Homo sapiens
acattaagtaactta

SEQ ID NO: 967796 - DNA, 15 bp, Homo sapiens
cattaagtaacttag

SEQ ID NO: 967797 - DNA, 15 bp, Homo sapiens
attaagtaacttaga

SEQ ID NO: 967798 - DNA, 15 bp, Homo sapiens
ttaagtaacttagaa

SEQ ID NO: 967799 - DNA, 15 bp, Homo sapiens
taagtaacttagaat

SEQ ID NO: 967800 - DNA, 15 bp, Homo sapiens
aagtaacttagaatg

SEQ ID NO: 967801 - DNA, 15 bp, Homo sapiens
agtaacttagaatga

SEQ ID NO: 967802 - DNA, 15 bp, Homo sapiens
gtaacttagaatgaa

SEQ ID NO: 967803 - DNA, 15 bp, Homo sapiens
taacttagaatgaag

SEQ ID NO: 967804 - DNA, 15 bp, Homo sapiens
aacttagaatgaaga

SEQ ID NO: 967805 - DNA, 15 bp, Homo sapiens
acttagaatgaagaa

SEQ ID NO: 967806 - DNA, 15 bp, Homo sapiens
cttagaatgaagaaa

SEQ ID NO: 967807 - DNA, 15 bp, Homo sapiens
ttagaatgaagaaaa

SEQ ID NO: 967808 - DNA, 15 bp, Homo sapiens
tagaatgaagaaaaa

SEQ ID NO: 967809 - DNA, 15 bp, Homo sapiens
agaatgaagaaaaat

SEQ ID NO: 967810 - DNA, 15 bp, Homo sapiens
gaatgaagaaaaatc

SEQ ID NO: 967811 - DNA, 15 bp, Homo sapiens
aatgaagaaaaatca

SEQ ID NO: 967812 - DNA, 15 bp, Homo sapiens
atgaagaaaaatcat

SEQ ID NO: 967813 - DNA, 15 bp, Homo sapiens
tgaagaaaaatcata

SEQ ID NO: 967814 - DNA, 15 bp, Homo sapiens
gaagaaaaatcatag

SEQ ID NO: 967815 - DNA, 15 bp, Homo sapiens
aagaaaaatcatagc

SEQ ID NO: 967816 - DNA, 15 bp, Homo sapiens
agaaaaatcatagca

SEQ ID NO: 967817 - DNA, 15 bp, Homo sapiens
gaaaaatcatagcat

SEQ ID NO: 967818 - DNA, 15 bp, Homo sapiens
aaaaatcatagcata

SEQ ID NO: 967819 - DNA, 15 bp, Homo sapiens
aaaatcatagcataa

SEQ ID NO: 967820 - DNA, 15 bp, Homo sapiens
aaatcatagcataag

SEQ ID NO: 967821 - DNA, 15 bp, Homo sapiens
aatcatagcataaga

SEQ ID NO: 967822 - DNA, 15 bp, Homo sapiens
atcatagcataagag

SEQ ID NO: 967823 - DNA, 15 bp, Homo sapiens
tcatagcataagaga

SEQ ID NO: 967824 - DNA, 15 bp, Homo sapiens
catagcataagagat

SEQ ID NO: 967825 - DNA, 15 bp, Homo sapiens
atagcataagagata

SEQ ID NO: 967826 - DNA, 15 bp, Homo sapiens
tagcataagagatac

SEQ ID NO: 967827 - DNA, 15 bp, Homo sapiens
agcataagagataca

SEQ ID NO: 967828 - DNA, 15 bp, Homo sapiens
gcataagagatacat

SEQ ID NO: 967829 - DNA, 15 bp, Homo sapiens
cataagagatacatt

SEQ ID NO: 967830 - DNA, 15 bp, Homo sapiens
ataagagatacattt

SEQ ID NO: 967831 - DNA, 15 bp, Homo sapiens
taagagatacatttt

SEQ ID NO: 967832 - DNA, 15 bp, Homo sapiens
aagagatacattttt

SEQ ID NO: 967833 - DNA, 15 bp, Homo sapiens
agagatacatttttg

SEQ ID NO: 967834 - DNA, 15 bp, Homo sapiens
gagatacatttttga

SEQ ID NO: 967835 - DNA, 15 bp, Homo sapiens
agatacatttttgac

SEQ ID NO: 967836 - DNA, 15 bp, Homo sapiens
gatacatttttgaca

SEQ ID NO: 967837 - DNA, 15 bp, Homo sapiens
atacatttttgacac

SEQ ID NO: 967838 - DNA, 15 bp, Homo sapiens
tacatttttgacact

SEQ ID NO: 967839 - DNA, 15 bp, Homo sapiens
acatttttgacactt

SEQ ID NO: 967840 - DNA, 15 bp, Homo sapiens
catttttgacacttt

SEQ ID NO: 967841 - DNA, 15 bp, Homo sapiens
atttttgacactttg

SEQ ID NO: 967842 - DNA, 15 bp, Homo sapiens
tttttgacactttgt

SEQ ID NO: 967843 - DNA, 15 bp, Homo sapiens
ttttgacactttgta

SEQ ID NO: 967844 - DNA, 15 bp, Homo sapiens
tttgacactttgtaa

SEQ ID NO: 967845 - DNA, 15 bp, Homo sapiens
ttgacactttgtaac

SEQ ID NO: 967846 - DNA, 15 bp, Homo sapiens
tgacactttgtaaca

SEQ ID NO: 967847 - DNA, 15 bp, Homo sapiens
gacactttgtaacat

SEQ ID NO: 967848 - DNA, 15 bp, Homo sapiens
acactttgtaacatg

SEQ ID NO: 967849 - DNA, 15 bp, Homo sapiens
cactttgtaacatgt

SEQ ID NO: 967850 - DNA, 15 bp, Homo sapiens
actttgtaacatgta

SEQ ID NO: 967851 - DNA, 15 bp, Homo sapiens
ctttgtaacatgtaa

SEQ ID NO: 967852 - DNA, 15 bp, Homo sapiens
tttgtaacatgtaaa

SEQ ID NO: 967853 - DNA, 15 bp, Homo sapiens
ttgtaacatgtaaat

SEQ ID NO: 967854 - DNA, 15 bp, Homo sapiens
tgtaacatgtaaatt

SEQ ID NO: 967855 - DNA, 15 bp, Homo sapiens
gtaacatgtaaatta

SEQ ID NO: 967856 - DNA, 15 bp, Homo sapiens
taacatgtaaattat

SEQ ID NO: 967857 - DNA, 15 bp, Homo sapiens
aacatgtaaattata

SEQ ID NO: 967858 - DNA, 15 bp, Homo sapiens
acatgtaaattataa

SEQ ID NO: 967859 - DNA, 15 bp, Homo sapiens
catgtaaattataat

SEQ ID NO: 967860 - DNA, 15 bp, Homo sapiens
atgtaaattataatt

SEQ ID NO: 967861 - DNA, 15 bp, Homo sapiens
tgtaaattataatta

SEQ ID NO: 967862 - DNA, 15 bp, Homo sapiens
gtaaattataattaa

SEQ ID NO: 967863 - DNA, 15 bp, Homo sapiens
taaattataattaat

SEQ ID NO: 967864 - DNA, 15 bp, Homo sapiens
aaattataattaata

SEQ ID NO: 967865 - DNA, 15 bp, Homo sapiens
aattataattaatac

SEQ ID NO: 967866 - DNA, 15 bp, Homo sapiens
attataattaataca

SEQ ID NO: 967867 - DNA, 15 bp, Homo sapiens
ttataattaatacat

SEQ ID NO: 967868 - DNA, 15 bp, Homo sapiens
tataattaatacata

SEQ ID NO: 967869 - DNA, 15 bp, Homo sapiens
ataattaatacataa

SEQ ID NO: 967870 - DNA, 15 bp, Homo sapiens
taattaatacataaa

SEQ ID NO: 967871 - DNA, 15 bp, Homo sapiens
aattaatacataaat

SEQ ID NO: 967872 - DNA, 15 bp, Homo sapiens
attaatacataaatt

SEQ ID NO: 967873 - DNA, 15 bp, Homo sapiens
ttaatacataaattt

SEQ ID NO: 967874 - DNA, 15 bp, Homo sapiens
taatacataaatttg

SEQ ID NO: 967875 - DNA, 15 bp, Homo sapiens
aatacataaatttgc

SEQ ID NO: 967876 - DNA, 15 bp, Homo sapiens
atacataaatttgca

SEQ ID NO: 967877 - DNA, 15 bp, Homo sapiens
tacataaatttgcac

SEQ ID NO: 967878 - DNA, 15 bp, Homo sapiens
acataaatttgcacc

SEQ ID NO: 967879 - DNA, 15 bp, Homo sapiens
cataaatttgcacca

SEQ ID NO: 967880 - DNA, 15 bp, Homo sapiens
ataaatttgcaccaa

SEQ ID NO: 967881 - DNA, 15 bp, Homo sapiens
taaatttgcaccaat

SEQ ID NO: 967882 - DNA, 15 bp, Homo sapiens
aaatttgcaccaatt

SEQ ID NO: 967883 - DNA, 15 bp, Homo sapiens
aatttgcaccaatta

SEQ ID NO: 967884 - DNA, 15 bp, Homo sapiens
atttgcaccaattac

SEQ ID NO: 967885 - DNA, 15 bp, Homo sapiens
tttgcaccaattact

SEQ ID NO: 967886 - DNA, 15 bp, Homo sapiens
ttgcaccaattactt

SEQ ID NO: 967887 - DNA, 15 bp, Homo sapiens
tgcaccaattacttg

SEQ ID NO: 967888 - DNA, 15 bp, Homo sapiens
gcaccaattacttga

SEQ ID NO: 967889 - DNA, 15 bp, Homo sapiens
caccaattacttgac

SEQ ID NO: 967890 - DNA, 15 bp, Homo sapiens
accaattacttgact

SEQ ID NO: 967891 - DNA, 15 bp, Homo sapiens
ccaattacttgactc

SEQ ID NO: 967892 - DNA, 15 bp, Homo sapiens
caattacttgactca

SEQ ID NO: 967893 - DNA, 15 bp, Homo sapiens
aattacttgactcaa

SEQ ID NO: 967894 - DNA, 15 bp, Homo sapiens
attacttgactcaag

SEQ ID NO: 967895 - DNA, 15 bp, Homo sapiens
ttacttgactcaaga

SEQ ID NO: 967896 - DNA, 15 bp, Homo sapiens
tacttgactcaagag

SEQ ID NO: 967897 - DNA, 15 bp, Homo sapiens
acttgactcaagagc

SEQ ID NO: 967898 - DNA, 15 bp, Homo sapiens
cttgactcaagagct

SEQ ID NO: 967899 - DNA, 15 bp, Homo sapiens
ttgactcaagagctc

SEQ ID NO: 967900 - DNA, 15 bp, Homo sapiens
tgactcaagagctca

SEQ ID NO: 967901 - DNA, 15 bp, Homo sapiens
gactcaagagctcaa

SEQ ID NO: 967902 - DNA, 15 bp, Homo sapiens
actcaagagctcaaa

SEQ ID NO: 967903 - DNA, 15 bp, Homo sapiens
ctcaagagctcaaaa

SEQ ID NO: 967904 - DNA, 15 bp, Homo sapiens
tcaagagctcaaaac

SEQ ID NO: 967905 - DNA, 15 bp, Homo sapiens
caagagctcaaaact

SEQ ID NO: 967906 - DNA, 15 bp, Homo sapiens
aagagctcaaaactt

SEQ ID NO: 967907 - DNA, 15 bp, Homo sapiens
agagctcaaaacttt

SEQ ID NO: 967908 - DNA, 15 bp, Homo sapiens
gagctcaaaactttc

SEQ ID NO: 967909 - DNA, 15 bp, Homo sapiens
agctcaaaactttct

SEQ ID NO: 967910 - DNA, 15 bp, Homo sapiens
gctcaaaactttctg

SEQ ID NO: 967911 - DNA, 15 bp, Homo sapiens
ctcaaaactttctgt

SEQ ID NO: 967912 - DNA, 15 bp, Homo sapiens
tcaaaactttctgta

SEQ ID NO: 967913 - DNA, 15 bp, Homo sapiens
caaaactttctgtaa

SEQ ID NO: 967914 - DNA, 15 bp, Homo sapiens
aaaactttctgtaat

SEQ ID NO: 967915 - DNA, 15 bp, Homo sapiens
aaactttctgtaatg

SEQ ID NO: 967916 - DNA, 15 bp, Homo sapiens
aactttctgtaatgg

SEQ ID NO: 967917 - DNA, 15 bp, Homo sapiens
actttctgtaatggg

SEQ ID NO: 967918 - DNA, 15 bp, Homo sapiens
ctttctgtaatgggt

SEQ ID NO: 967919 - DNA, 15 bp, Homo sapiens
tttctgtaatgggtt

SEQ ID NO: 967920 - DNA, 15 bp, Homo sapiens
ttctgtaatgggttt

SEQ ID NO: 967921 - DNA, 15 bp, Homo sapiens
tctgtaatgggtttg

SEQ ID NO: 967922 - DNA, 15 bp, Homo sapiens
ctgtaatgggtttga

SEQ ID NO: 967923 - DNA, 15 bp, Homo sapiens
tgtaatgggtttgaa

SEQ ID NO: 967924 - DNA, 15 bp, Homo sapiens
gtaatgggtttgaag

SEQ ID NO: 967925 - DNA, 15 bp, Homo sapiens
taatgggtttgaagc

SEQ ID NO: 967926 - DNA, 15 bp, Homo sapiens
aatgggtttgaagca

SEQ ID NO: 967927 - DNA, 15 bp, Homo sapiens
atgggtttgaagcac

SEQ ID NO: 967928 - DNA, 15 bp, Homo sapiens
tgggtttgaagcaca

SEQ ID NO: 967929 - DNA, 15 bp, Homo sapiens
gggtttgaagcacaa

SEQ ID NO: 967930 - DNA, 15 bp, Homo sapiens
ggtttgaagcacaaa

SEQ ID NO: 967931 - DNA, 15 bp, Homo sapiens
gtttgaagcacaaaa

SEQ ID NO: 967932 - DNA, 15 bp, Homo sapiens
tttgaagcacaaaaa

SEQ ID NO: 967933 - DNA, 15 bp, Homo sapiens
ttgaagcacaaaaat

SEQ ID NO: 967934 - DNA, 15 bp, Homo sapiens
tgaagcacaaaaata

SEQ ID NO: 967935 - DNA, 15 bp, Homo sapiens
gaagcacaaaaatac

SEQ ID NO: 967936 - DNA, 15 bp, Homo sapiens
aagcacaaaaataca

SEQ ID NO: 967937 - DNA, 15 bp, Homo sapiens
agcacaaaaatacag

SEQ ID NO: 967938 - DNA, 15 bp, Homo sapiens
gcacaaaaatacagt

SEQ ID NO: 967939 - DNA, 15 bp, Homo sapiens
cacaaaaatacagtg

SEQ ID NO: 967940 - DNA, 15 bp, Homo sapiens
acaaaaatacagtgt

SEQ ID NO: 967941 - DNA, 15 bp, Homo sapiens
caaaaatacagtgtt

SEQ ID NO: 967942 - DNA, 15 bp, Homo sapiens
aaaaatacagtgttt

SEQ ID NO: 967943 - DNA, 15 bp, Homo sapiens
aaaatacagtgttta

SEQ ID NO: 967944 - DNA, 15 bp, Homo sapiens
aaatacagtgtttat

SEQ ID NO: 967945 - DNA, 15 bp, Homo sapiens
aatacagtgtttata

SEQ ID NO: 967946 - DNA, 15 bp, Homo sapiens
atacagtgtttatag

SEQ ID NO: 967947 - DNA, 15 bp, Homo sapiens
tacagtgtttatagt

SEQ ID NO: 967948 - DNA, 15 bp, Homo sapiens
acagtgtttatagtc

SEQ ID NO: 967949 - DNA, 15 bp, Homo sapiens
cagtgtttatagtca

SEQ ID NO: 967950 - DNA, 15 bp, Homo sapiens
agtgtttatagtcag

SEQ ID NO: 967951 - DNA, 15 bp, Homo sapiens
gtgtttatagtcaga

SEQ ID NO: 967952 - DNA, 15 bp, Homo sapiens
tgtttatagtcagag

SEQ ID NO: 967953 - DNA, 15 bp, Homo sapiens
gtttatagtcagagt

SEQ ID NO: 967954 - DNA, 15 bp, Homo sapiens
tttatagtcagagtg

SEQ ID NO: 967955 - DNA, 15 bp, Homo sapiens
ttatagtcagagtgc

SEQ ID NO: 967956 - DNA, 15 bp, Homo sapiens
tatagtcagagtgca

SEQ ID NO: 967957 - DNA, 15 bp, Homo sapiens
atagtcagagtgcag

SEQ ID NO: 967958 - DNA, 15 bp, Homo sapiens
tagtcagagtgcagc

SEQ ID NO: 967959 - DNA, 15 bp, Homo sapiens
agtcagagtgcagcc

SEQ ID NO: 967960 - DNA, 15 bp, Homo sapiens
gtcagagtgcagcct

SEQ ID NO: 967961 - DNA, 15 bp, Homo sapiens
tcagagtgcagcctt

SEQ ID NO: 967962 - DNA, 15 bp, Homo sapiens
cagagtgcagccttt

SEQ ID NO: 967963 - DNA, 15 bp, Homo sapiens
agagtgcagccttta

SEQ ID NO: 967964 - DNA, 15 bp, Homo sapiens
gagtgcagcctttac

SEQ ID NO: 967965 - DNA, 15 bp, Homo sapiens
agtgcagcctttact

SEQ ID NO: 967966 - DNA, 15 bp, Homo sapiens
gtgcagcctttactt

SEQ ID NO: 967967 - DNA, 15 bp, Homo sapiens
tgcagcctttacttt

SEQ ID NO: 967968 - DNA, 15 bp, Homo sapiens
gcagcctttactttc

SEQ ID NO: 967969 - DNA, 15 bp, Homo sapiens
cagcctttactttca

SEQ ID NO: 967970 - DNA, 15 bp, Homo sapiens
agcctttactttcaa

SEQ ID NO: 967971 - DNA, 15 bp, Homo sapiens
gcctttactttcaat

SEQ ID NO: 967972 - DNA, 15 bp, Homo sapiens
cctttactttcaata

SEQ ID NO: 967973 - DNA, 15 bp, Homo sapiens
ctttactttcaataa

SEQ ID NO: 967974 - DNA, 15 bp, Homo sapiens
tttactttcaataat

SEQ ID NO: 967975 - DNA, 15 bp, Homo sapiens
ttactttcaataatg

SEQ ID NO: 967976 - DNA, 15 bp, Homo sapiens
tactttcaataatgg

SEQ ID NO: 967977 - DNA, 15 bp, Homo sapiens
actttcaataatggt

SEQ ID NO: 967978 - DNA, 15 bp, Homo sapiens
ctttcaataatggtt

SEQ ID NO: 967979 - DNA, 15 bp, Homo sapiens
tttcaataatggtta

SEQ ID NO: 967980 - DNA, 15 bp, Homo sapiens
ttcaataatggttat

SEQ ID NO: 967981 - DNA, 15 bp, Homo sapiens
tcaataatggttatg

SEQ ID NO: 967982 - DNA, 15 bp, Homo sapiens
caataatggttatgg

SEQ ID NO: 967983 - DNA, 15 bp, Homo sapiens
aataatggttatgga

SEQ ID NO: 967984 - DNA, 15 bp, Homo sapiens
ataatggttatggaa

SEQ ID NO: 967985 - DNA, 15 bp, Homo sapiens
taatggttatggaaa

SEQ ID NO: 967986 - DNA, 15 bp, Homo sapiens
aatggttatggaaag

SEQ ID NO: 967987 - DNA, 15 bp, Homo sapiens
atggttatggaaagc

SEQ ID NO: 967988 - DNA, 15 bp, Homo sapiens
tggttatggaaagca

SEQ ID NO: 967989 - DNA, 15 bp, Homo sapiens
ggttatggaaagcaa

SEQ ID NO: 967990 - DNA, 15 bp, Homo sapiens
gttatggaaagcaag

SEQ ID NO: 967991 - DNA, 15 bp, Homo sapiens
ttatggaaagcaagt

SEQ ID NO: 967992 - DNA, 15 bp, Homo sapiens
tatggaaagcaagtt

SEQ ID NO: 967993 - DNA, 15 bp, Homo sapiens
atggaaagcaagttt

SEQ ID NO: 967994 - DNA, 15 bp, Homo sapiens
tggaaagcaagtttg

SEQ ID NO: 967995 - DNA, 15 bp, Homo sapiens
ggaaagcaagtttgg

SEQ ID NO: 967996 - DNA, 15 bp, Homo sapiens
gaaagcaagtttggc

SEQ ID NO: 967997 - DNA, 15 bp, Homo sapiens
aaagcaagtttggct

SEQ ID NO: 967998 - DNA, 15 bp, Homo sapiens
aagcaagtttggctt

SEQ ID NO: 967999 - DNA, 15 bp, Homo sapiens
agcaagtttggcttt

SEQ ID NO: 968000 - DNA, 15 bp, Homo sapiens
gcaagtttggcttta

SEQ ID NO: 968001 - DNA, 15 bp, Homo sapiens
caagtttggctttag

SEQ ID NO: 968002 - DNA, 15 bp, Homo sapiens
aagtttggctttagg

SEQ ID NO: 968003 - DNA, 15 bp, Homo sapiens
agtttggctttaggt

SEQ ID NO: 968004 - DNA, 15 bp, Homo sapiens
gtttggctttaggtt

SEQ ID NO: 968005 - DNA, 15 bp, Homo sapiens
tttggctttaggttg

SEQ ID NO: 968006 - DNA, 15 bp, Homo sapiens
ttggctttaggttgt

SEQ ID NO: 968007 - DNA, 15 bp, Homo sapiens
tggctttaggttgta

SEQ ID NO: 968008 - DNA, 15 bp, Homo sapiens
ggctttaggttgtaa

SEQ ID NO: 968009 - DNA, 15 bp, Homo sapiens
gctttaggttgtaaa

SEQ ID NO: 968010 - DNA, 15 bp, Homo sapiens
ctttaggttgtaaag

SEQ ID NO: 968011 - DNA, 15 bp, Homo sapiens
tttaggttgtaaaga

SEQ ID NO: 968012 - DNA, 15 bp, Homo sapiens
ttaggttgtaaagag

SEQ ID NO: 968013 - DNA, 15 bp, Homo sapiens
taggttgtaaagagt

SEQ ID NO: 968014 - DNA, 15 bp, Homo sapiens
aggttgtaaagagtt

SEQ ID NO: 968015 - DNA, 15 bp, Homo sapiens
ggttgtaaagagttt

SEQ ID NO: 968016 - DNA, 15 bp, Homo sapiens
gttgtaaagagtttt

SEQ ID NO: 968017 - DNA, 15 bp, Homo sapiens
ttgtaaagagttttt

SEQ ID NO: 968018 - DNA, 15 bp, Homo sapiens
tgtaaagagtttttc

SEQ ID NO: 968019 - DNA, 15 bp, Homo sapiens
gtaaagagtttttca

SEQ ID NO: 968020 - DNA, 15 bp, Homo sapiens
taaagagtttttcag

SEQ ID NO: 968021 - DNA, 15 bp, Homo sapiens
aaagagtttttcagt

SEQ ID NO: 968022 - DNA, 15 bp, Homo sapiens
aagagtttttcagtg

SEQ ID NO: 968023 - DNA, 15 bp, Homo sapiens
agagtttttcagtgc

SEQ ID NO: 968024 - DNA, 15 bp, Homo sapiens
gagtttttcagtgcc

SEQ ID NO: 968025 - DNA, 15 bp, Homo sapiens
agtttttcagtgcca

SEQ ID NO: 968026 - DNA, 15 bp, Homo sapiens
gtttttcagtgccaa

SEQ ID NO: 968027 - DNA, 15 bp, Homo sapiens
tttttcagtgccaag

SEQ ID NO: 968028 - DNA, 15 bp, Homo sapiens
ttttcagtgccaagg

SEQ ID NO: 968029 - DNA, 15 bp, Homo sapiens
tttcagtgccaaggc

SEQ ID NO: 968030 - DNA, 15 bp, Homo sapiens
ttcagtgccaaggca

SEQ ID NO: 968031 - DNA, 15 bp, Homo sapiens
tcagtgccaaggcat

SEQ ID NO: 968032 - DNA, 15 bp, Homo sapiens
cagtgccaaggcatt

SEQ ID NO: 968033 - DNA, 15 bp, Homo sapiens
agtgccaaggcattt

SEQ ID NO: 968034 - DNA, 15 bp, Homo sapiens
gtgccaaggcatttg

SEQ ID NO: 968035 - DNA, 15 bp, Homo sapiens
tgccaaggcatttga

SEQ ID NO: 968036 - DNA, 15 bp, Homo sapiens
gccaaggcatttgac

SEQ ID NO: 968037 - DNA, 15 bp, Homo sapiens
ccaaggcatttgact

SEQ ID NO: 968038 - DNA, 15 bp, Homo sapiens
caaggcatttgactg

SEQ ID NO: 968039 - DNA, 15 bp, Homo sapiens
aaggcatttgactgc

SEQ ID NO: 968040 - DNA, 15 bp, Homo sapiens
aggcatttgactgcc

SEQ ID NO: 968041 - DNA, 15 bp, Homo sapiens
ggcatttgactgccc

SEQ ID NO: 968042 - DNA, 15 bp, Homo sapiens
gcatttgactgccct

SEQ ID NO: 968043 - DNA, 15 bp, Homo sapiens
catttgactgccctt

SEQ ID NO: 968044 - DNA, 15 bp, Homo sapiens
atttgactgcccttt

SEQ ID NO: 968045 - DNA, 15 bp, Homo sapiens
tttgactgccctttc

SEQ ID NO: 968046 - DNA, 15 bp, Homo sapiens
ttgactgccctttct

SEQ ID NO: 968047 - DNA, 15 bp, Homo sapiens
tgactgccctttctt

SEQ ID NO: 968048 - DNA, 15 bp, Homo sapiens
gactgccctttcttt

SEQ ID NO: 968049 - DNA, 15 bp, Homo sapiens
actgccctttctttc

SEQ ID NO: 968050 - DNA, 15 bp, Homo sapiens
ctgccctttctttct

SEQ ID NO: 968051 - DNA, 15 bp, Homo sapiens
tgccctttctttctt

SEQ ID NO: 968052 - DNA, 15 bp, Homo sapiens
gccctttctttctta

SEQ ID NO: 968053 - DNA, 15 bp, Homo sapiens
ccctttctttcttat

SEQ ID NO: 968054 - DNA, 15 bp, Homo sapiens
cctttctttcttatt

SEQ ID NO: 968055 - DNA, 15 bp, Homo sapiens
ctttctttcttattc

SEQ ID NO: 968056 - DNA, 15 bp, Homo sapiens
tttctttcttattct

SEQ ID NO: 968057 - DNA, 15 bp, Homo sapiens
ttctttcttattctc

SEQ ID NO: 968058 - DNA, 15 bp, Homo sapiens
tctttcttattctcc

SEQ ID NO: 968059 - DNA, 15 bp, Homo sapiens
ctttcttattctcca

SEQ ID NO: 968060 - DNA, 15 bp, Homo sapiens
tttcttattctccat

SEQ ID NO: 968061 - DNA, 15 bp, Homo sapiens
ttcttattctccatt

SEQ ID NO: 968062 - DNA, 15 bp, Homo sapiens
tcttattctccattg

SEQ ID NO: 968063 - DNA, 15 bp, Homo sapiens
cttattctccattgt

SEQ ID NO: 968064 - DNA, 15 bp, Homo sapiens
ttattctccattgtc

SEQ ID NO: 968065 - DNA, 15 bp, Homo sapiens
tattctccattgtct

SEQ ID NO: 968066 - DNA, 15 bp, Homo sapiens
attctccattgtctt

SEQ ID NO: 968067 - DNA, 15 bp, Homo sapiens
ttctccattgtcttg

SEQ ID NO: 968068 - DNA, 15 bp, Homo sapiens
tctccattgtcttgc

SEQ ID NO: 968069 - DNA, 15 bp, Homo sapiens
ctccattgtcttgca

SEQ ID NO: 968070 - DNA, 15 bp, Homo sapiens
tccattgtcttgcag

SEQ ID NO: 968071 - DNA, 15 bp, Homo sapiens
ccattgtcttgcaga

SEQ ID NO: 968072 - DNA, 15 bp, Homo sapiens
cattgtcttgcagac

SEQ ID NO: 968073 - DNA, 15 bp, Homo sapiens
attgtcttgcagacc

SEQ ID NO: 968074 - DNA, 15 bp, Homo sapiens
ttgtcttgcagacca

SEQ ID NO: 968075 - DNA, 15 bp, Homo sapiens
tgtcttgcagaccag

SEQ ID NO: 968076 - DNA, 15 bp, Homo sapiens
gtcttgcagaccaga

SEQ ID NO: 968077 - DNA, 15 bp, Homo sapiens
tcttgcagaccagat

SEQ ID NO: 968078 - DNA, 15 bp, Homo sapiens
cttgcagaccagatg

SEQ ID NO: 968079 - DNA, 15 bp, Homo sapiens
ttgcagaccagatga

SEQ ID NO: 968080 - DNA, 15 bp, Homo sapiens
tgcagaccagatgat

SEQ ID NO: 968081 - DNA, 15 bp, Homo sapiens
gcagaccagatgatg

SEQ ID NO: 968082 - DNA, 15 bp, Homo sapiens
cagaccagatgatgt

SEQ ID NO: 968083 - DNA, 15 bp, Homo sapiens
agaccagatgatgtg

SEQ ID NO: 968084 - DNA, 15 bp, Homo sapiens
gaccagatgatgtgc

SEQ ID NO: 968085 - DNA, 15 bp, Homo sapiens
accagatgatgtgct

SEQ ID NO: 968086 - DNA, 15 bp, Homo sapiens
ccagatgatgtgctt

SEQ ID NO: 968087 - DNA, 15 bp, Homo sapiens
cagatgatgtgcttc

SEQ ID NO: 968088 - DNA, 15 bp, Homo sapiens
agatgatgtgcttct

SEQ ID NO: 968089 - DNA, 15 bp, Homo sapiens
gatgatgtgcttctg

SEQ ID NO: 968090 - DNA, 15 bp, Homo sapiens
atgatgtgcttctgc

SEQ ID NO: 968091 - DNA, 15 bp, Homo sapiens
tgatgtgcttctgca

SEQ ID NO: 968092 - DNA, 15 bp, Homo sapiens
gatgtgcttctgcat

SEQ ID NO: 968093 - DNA, 15 bp, Homo sapiens
atgtgcttctgcatc

SEQ ID NO: 968094 - DNA, 15 bp, Homo sapiens
tgtgcttctgcatcg

SEQ ID NO: 968095 - DNA, 15 bp, Homo sapiens
gtgcttctgcatcgc

SEQ ID NO: 968096 - DNA, 15 bp, Homo sapiens
tgcttctgcatcgca

SEQ ID NO: 968097 - DNA, 15 bp, Homo sapiens
gcttctgcatcgcac

SEQ ID NO: 968098 - DNA, 15 bp, Homo sapiens
cttctgcatcgcact

SEQ ID NO: 968099 - DNA, 15 bp, Homo sapiens
ttctgcatcgcactc

SEQ ID NO: 968100 - DNA, 15 bp, Homo sapiens
tctgcatcgcactca

SEQ ID NO: 968101 - DNA, 15 bp, Homo sapiens
ctgcatcgcactcat

SEQ ID NO: 968102 - DNA, 15 bp, Homo sapiens
tgcatcgcactcatg

SEQ ID NO: 968103 - DNA, 15 bp, Homo sapiens
gcatcgcactcatga

SEQ ID NO: 968104 - DNA, 15 bp, Homo sapiens
catcgcactcatgat

SEQ ID NO: 968105 - DNA, 15 bp, Homo sapiens
atcgcactcatgatg

SEQ ID NO: 968106 - DNA, 15 bp, Homo sapiens
tcgcactcatgatga

SEQ ID NO: 968107 - DNA, 15 bp, Homo sapiens
cgcactcatgatgag

SEQ ID NO: 968108 - DNA, 15 bp, Homo sapiens
gcactcatgatgaga

SEQ ID NO: 968109 - DNA, 15 bp, Homo sapiens
cactcatgatgagat

SEQ ID NO: 968110 - DNA, 15 bp, Homo sapiens
actcatgatgagatt

SEQ ID NO: 968111 - DNA, 15 bp, Homo sapiens
ctcatgatgagattg

SEQ ID NO: 968112 - DNA, 15 bp, Homo sapiens
tcatgatgagattgt

SEQ ID NO: 968113 - DNA, 15 bp, Homo sapiens
catgatgagattgtc

SEQ ID NO: 968114 - DNA, 15 bp, Homo sapiens
atgatgagattgtcc

SEQ ID NO: 968115 - DNA, 15 bp, Homo sapiens
tgatgagattgtcct

SEQ ID NO: 968116 - DNA, 15 bp, Homo sapiens
gatgagattgtcctc

SEQ ID NO: 968117 - DNA, 15 bp, Homo sapiens
atgagattgtcctcc

SEQ ID NO: 968118 - DNA, 15 bp, Homo sapiens
tgagattgtcctcct

SEQ ID NO: 968119 - DNA, 15 bp, Homo sapiens
gagattgtcctcctg

SEQ ID NO: 968120 - DNA, 15 bp, Homo sapiens
agattgtcctcctgc

SEQ ID NO: 968121 - DNA, 15 bp, Homo sapiens
gattgtcctcctgca

SEQ ID NO: 968122 - DNA, 15 bp, Homo sapiens
attgtcctcctgcat

SEQ ID NO: 968123 - DNA, 15 bp, Homo sapiens
ttgtcctcctgcatt

SEQ ID NO: 968124 - DNA, 15 bp, Homo sapiens
tgtcctcctgcattg

SEQ ID NO: 968125 - DNA, 15 bp, Homo sapiens
gtcctcctgcattgc

SEQ ID NO: 968126 - DNA, 15 bp, Homo sapiens
tcctcctgcattgct

SEQ ID NO: 968127 - DNA, 15 bp, Homo sapiens
cctcctgcattgctt

SEQ ID NO: 968128 - DNA, 15 bp, Homo sapiens
ctcctgcattgcttc

SEQ ID NO: 968129 - DNA, 15 bp, Homo sapiens
tcctgcattgcttcc

SEQ ID NO: 968130 - DNA, 15 bp, Homo sapiens
cctgcattgcttcct

SEQ ID NO: 968131 - DNA, 15 bp, Homo sapiens
ctgcattgcttcctc

SEQ ID NO: 968132 - DNA, 15 bp, Homo sapiens
tgcattgcttcctct

SEQ ID NO: 968133 - DNA, 15 bp, Homo sapiens
gcattgcttcctctg

SEQ ID NO: 968134 - DNA, 15 bp, Homo sapiens
cattgcttcctctgg

SEQ ID NO: 968135 - DNA, 15 bp, Homo sapiens
attgcttcctctggc

SEQ ID NO: 968136 - DNA, 15 bp, Homo sapiens
ttgcttcctctggcc

SEQ ID NO: 968137 - DNA, 15 bp, Homo sapiens
tgcttcctctggccc

SEQ ID NO: 968138 - DNA, 15 bp, Homo sapiens
gcttcctctggcccc

SEQ ID NO: 968139 - DNA, 15 bp, Homo sapiens
cttcctctggcccct

SEQ ID NO: 968140 - DNA, 15 bp, Homo sapiens
ttcctctggcccctg

SEQ ID NO: 968141 - DNA, 15 bp, Homo sapiens
tcctctggcccctgg

SEQ ID NO: 968142 - DNA, 15 bp, Homo sapiens
cctctggcccctggt

SEQ ID NO: 968143 - DNA, 15 bp, Homo sapiens
ctctggcccctggtg

SEQ ID NO: 968144 - DNA, 15 bp, Homo sapiens
tctggcccctggtga

SEQ ID NO: 968145 - DNA, 15 bp, Homo sapiens
ctggcccctggtgac

SEQ ID NO: 968146 - DNA, 15 bp, Homo sapiens
tggcccctggtgaca

SEQ ID NO: 968147 - DNA, 15 bp, Homo sapiens
ggcccctggtgacat

SEQ ID NO: 968148 - DNA, 15 bp, Homo sapiens
gcccctggtgacatt

SEQ ID NO: 968149 - DNA, 15 bp, Homo sapiens
cccctggtgacattt

SEQ ID NO: 968150 - DNA, 15 bp, Homo sapiens
ccctggtgacatttg

SEQ ID NO: 968151 - DNA, 15 bp, Homo sapiens
cctggtgacatttgt

SEQ ID NO: 968152 - DNA, 15 bp, Homo sapiens
ctggtgacatttgtg

SEQ ID NO: 968153 - DNA, 15 bp, Homo sapiens
tggtgacatttgtgg

SEQ ID NO: 968154 - DNA, 15 bp, Homo sapiens
ggtgacatttgtggt

SEQ ID NO: 968155 - DNA, 15 bp, Homo sapiens
gtgacatttgtggtg

SEQ ID NO: 968156 - DNA, 15 bp, Homo sapiens
tgacatttgtggtgg

SEQ ID NO: 968157 - DNA, 15 bp, Homo sapiens
gacatttgtggtggg

SEQ ID NO: 968158 - DNA, 15 bp, Homo sapiens
acatttgtggtgggc

SEQ ID NO: 968159 - DNA, 15 bp, Homo sapiens
catttgtggtgggcg

SEQ ID NO: 968160 - DNA, 15 bp, Homo sapiens
atttgtggtgggcgt

SEQ ID NO: 968161 - DNA, 15 bp, Homo sapiens
tttgtggtgggcgtt

SEQ ID NO: 968162 - DNA, 15 bp, Homo sapiens
ttgtggtgggcgttc

SEQ ID NO: 968163 - DNA, 15 bp, Homo sapiens
tgtggtgggcgttct

SEQ ID NO: 968164 - DNA, 15 bp, Homo sapiens
gtggtgggcgttctc

SEQ ID NO: 968165 - DNA, 15 bp, Homo sapiens
tggtgggcgttctca

SEQ ID NO: 968166 - DNA, 15 bp, Homo sapiens
ggtgggcgttctcat

SEQ ID NO: 968167 - DNA, 15 bp, Homo sapiens
gtgggcgttctcatt

SEQ ID NO: 968168 - DNA, 15 bp, Homo sapiens
tgggcgttctcattg

SEQ ID NO: 968169 - DNA, 15 bp, Homo sapiens
gggcgttctcattgt

SEQ ID NO: 968170 - DNA, 15 bp, Homo sapiens
ggcgttctcattgtg

SEQ ID NO: 968171 - DNA, 15 bp, Homo sapiens
gcgttctcattgtgg

SEQ ID NO: 968172 - DNA, 15 bp, Homo sapiens
cgttctcattgtggt

SEQ ID NO: 968173 - DNA, 15 bp, Homo sapiens
gttctcattgtggtc

SEQ ID NO: 968174 - DNA, 15 bp, Homo sapiens
ttctcattgtggtcc

SEQ ID NO: 968175 - DNA, 15 bp, Homo sapiens
tctcattgtggtcct

SEQ ID NO: 968176 - DNA, 15 bp, Homo sapiens
ctcattgtggtcctg

SEQ ID NO: 968177 - DNA, 15 bp, Homo sapiens
tcattgtggtcctga

SEQ ID NO: 968178 - DNA, 15 bp, Homo sapiens
cattgtggtcctgac

SEQ ID NO: 968179 - DNA, 15 bp, Homo sapiens
attgtggtcctgacc

SEQ ID NO: 968180 - DNA, 15 bp, Homo sapiens
ttgtggtcctgacca

SEQ ID NO: 968181 - DNA, 15 bp, Homo sapiens
tgtggtcctgaccat

SEQ ID NO: 968182 - DNA, 15 bp, Homo sapiens
gtggtcctgaccatc

SEQ ID NO: 968183 - DNA, 15 bp, Homo sapiens
tggtcctgaccatct

SEQ ID NO: 968184 - DNA, 15 bp, Homo sapiens
ggtcctgaccatctg

SEQ ID NO: 968185 - DNA, 15 bp, Homo sapiens
gtcctgaccatctgt

SEQ ID NO: 968186 - DNA, 15 bp, Homo sapiens
tcctgaccatctgtg

SEQ ID NO: 968187 - DNA, 15 bp, Homo sapiens
cctgaccatctgtgc

SEQ ID NO: 968188 - DNA, 15 bp, Homo sapiens
ctgaccatctgtgcc

SEQ ID NO: 968189 - DNA, 15 bp, Homo sapiens
tgaccatctgtgcca

SEQ ID NO: 968190 - DNA, 15 bp, Homo sapiens
gaccatctgtgccaa

SEQ ID NO: 968191 - DNA, 15 bp, Homo sapiens
accatctgtgccaag

SEQ ID NO: 968192 - DNA, 15 bp, Homo sapiens
ccatctgtgccaaga

SEQ ID NO: 968193 - DNA, 15 bp, Homo sapiens
catctgtgccaagag

SEQ ID NO: 968194 - DNA, 15 bp, Homo sapiens
atctgtgccaagagc

SEQ ID NO: 968195 - DNA, 15 bp, Homo sapiens
tctgtgccaagagct

SEQ ID NO: 968196 - DNA, 15 bp, Homo sapiens
ctgtgccaagagctt

SEQ ID NO: 968197 - DNA, 15 bp, Homo sapiens
tgtgccaagagcttg

SEQ ID NO: 968198 - DNA, 15 bp, Homo sapiens
gtgccaagagcttgg

SEQ ID NO: 968199 - DNA, 15 bp, Homo sapiens
tgccaagagcttggc

SEQ ID NO: 968200 - DNA, 15 bp, Homo sapiens
gccaagagcttggcg

SEQ ID NO: 968201 - DNA, 15 bp, Homo sapiens
ccaagagcttggcgg

SEQ ID NO: 968202 - DNA, 15 bp, Homo sapiens
caagagcttggcggt

SEQ ID NO: 968203 - DNA, 15 bp, Homo sapiens
aagagcttggcggtc

SEQ ID NO: 968204 - DNA, 15 bp, Homo sapiens
agagcttggcggtca

SEQ ID NO: 968205 - DNA, 15 bp, Homo sapiens
gagcttggcggtcaa

SEQ ID NO: 968206 - DNA, 15 bp, Homo sapiens
agcttggcggtcaag

SEQ ID NO: 968207 - DNA, 15 bp, Homo sapiens
gcttggcggtcaagg

SEQ ID NO: 968208 - DNA, 15 bp, Homo sapiens
cttggcggtcaaggc

SEQ ID NO: 968209 - DNA, 15 bp, Homo sapiens
ttggcggtcaaggcg

SEQ ID NO: 968210 - DNA, 15 bp, Homo sapiens
tggcggtcaaggcgg

SEQ ID NO: 968211 - DNA, 15 bp, Homo sapiens
ggcggtcaaggcgga

SEQ ID NO: 968212 - DNA, 15 bp, Homo sapiens
gcggtcaaggcggaa

SEQ ID NO: 968213 - DNA, 15 bp, Homo sapiens
cggtcaaggcggaag

SEQ ID NO: 968214 - DNA, 15 bp, Homo sapiens
ggtcaaggcggaagc

SEQ ID NO: 968215 - DNA, 15 bp, Homo sapiens
gtcaaggcggaagcc

SEQ ID NO: 968216 - DNA, 15 bp, Homo sapiens
tcaaggcggaagcca

SEQ ID NO: 968217 - DNA, 15 bp, Homo sapiens
caaggcggaagccat

SEQ ID NO: 968218 - DNA, 15 bp, Homo sapiens
aaggcggaagccatg

SEQ ID NO: 968219 - DNA, 15 bp, Homo sapiens
aggcggaagccatga

SEQ ID NO: 968220 - DNA, 15 bp, Homo sapiens
ggcggaagccatgaa

SEQ ID NO: 968221 - DNA, 15 bp, Homo sapiens
gcggaagccatgaag

SEQ ID NO: 968222 - DNA, 15 bp, Homo sapiens
cggaagccatgaaga

SEQ ID NO: 968223 - DNA, 15 bp, Homo sapiens
ggaagccatgaagaa

SEQ ID NO: 968224 - DNA, 15 bp, Homo sapiens
gaagccatgaagaag

SEQ ID NO: 968225 - DNA, 15 bp, Homo sapiens
aagccatgaagaagc

SEQ ID NO: 968226 - DNA, 15 bp, Homo sapiens
agccatgaagaagcg

SEQ ID NO: 968227 - DNA, 15 bp, Homo sapiens
gccatgaagaagcgc

SEQ ID NO: 968228 - DNA, 15 bp, Homo sapiens
ccatgaagaagcgca

SEQ ID NO: 968229 - DNA, 15 bp, Homo sapiens
catgaagaagcgcaa

SEQ ID NO: 968230 - DNA, 15 bp, Homo sapiens
atgaagaagcgcaag

SEQ ID NO: 968231 - DNA, 15 bp, Homo sapiens
tgaagaagcgcaagt

SEQ ID NO: 968232 - DNA, 15 bp, Homo sapiens
gaagaagcgcaagtt

SEQ ID NO: 968233 - DNA, 15 bp, Homo sapiens
aagaagcgcaagttc

SEQ ID NO: 968234 - DNA, 15 bp, Homo sapiens
agaagcgcaagttct

SEQ ID NO: 968235 - DNA, 15 bp, Homo sapiens
gaagcgcaagttctc

SEQ ID NO: 968236 - DNA, 15 bp, Homo sapiens
aagcgcaagttctct

SEQ ID NO: 968237 - DNA, 15 bp, Homo sapiens
agcgcaagttctctt

SEQ ID NO: 968238 - DNA, 15 bp, Homo sapiens
gcgcaagttctctta

SEQ ID NO: 968239 - DNA, 15 bp, Homo sapiens
cgcaagttctcttaa

SEQ ID NO: 968240 - DNA, 15 bp, Homo sapiens
gcaagttctcttaaa

SEQ ID NO: 968241 - DNA, 15 bp, Homo sapiens
caagttctcttaaag

SEQ ID NO: 968242 - DNA, 15 bp, Homo sapiens
aagttctcttaaagg

SEQ ID NO: 968243 - DNA, 15 bp, Homo sapiens
agttctcttaaaggg

SEQ ID NO: 968244 - DNA, 15 bp, Homo sapiens
gttctcttaaagggg

SEQ ID NO: 968245 - DNA, 15 bp, Homo sapiens
ttctcttaaagggga

SEQ ID NO: 968246 - DNA, 15 bp, Homo sapiens
tctcttaaaggggaa

SEQ ID NO: 968247 - DNA, 15 bp, Homo sapiens
ctcttaaaggggaag

SEQ ID NO: 968248 - DNA, 15 bp, Homo sapiens
tcttaaaggggaagg

SEQ ID NO: 968249 - DNA, 15 bp, Homo sapiens
cttaaaggggaagga

SEQ ID NO: 968250 - DNA, 15 bp, Homo sapiens
ttaaaggggaaggag

SEQ ID NO: 968251 - DNA, 15 bp, Homo sapiens
taaaggggaaggagg

SEQ ID NO: 968252 - DNA, 15 bp, Homo sapiens
aaaggggaaggaggc

SEQ ID NO: 968253 - DNA, 15 bp, Homo sapiens
aaggggaaggaggct

SEQ ID NO: 968254 - DNA, 15 bp, Homo sapiens
aggggaaggaggctt

SEQ ID NO: 968255 - DNA, 15 bp, Homo sapiens
ggggaaggaggcttg

SEQ ID NO: 968256 - DNA, 15 bp, Homo sapiens
gggaaggaggcttgt

SEQ ID NO: 968257 - DNA, 15 bp, Homo sapiens
ggaaggaggcttgta

SEQ ID NO: 968258 - DNA, 15 bp, Homo sapiens
gaaggaggcttgtag

SEQ ID NO: 968259 - DNA, 15 bp, Homo sapiens
aaggaggcttgtaga

SEQ ID NO: 968260 - DNA, 15 bp, Homo sapiens
aggaggcttgtagaa

SEQ ID NO: 968261 - DNA, 15 bp, Homo sapiens
ggaggcttgtagaaa

SEQ ID NO: 968262 - DNA, 15 bp, Homo sapiens
gaggcttgtagaaag

SEQ ID NO: 968263 - DNA, 15 bp, Homo sapiens
aggcttgtagaaagc

SEQ ID NO: 968264 - DNA, 15 bp, Homo sapiens
ggcttgtagaaagca

SEQ ID NO: 968265 - DNA, 15 bp, Homo sapiens
gcttgtagaaagcaa

SEQ ID NO: 968266 - DNA, 15 bp, Homo sapiens
cttgtagaaagcaaa

SEQ ID NO: 968267 - DNA, 15 bp, Homo sapiens
ttgtagaaagcaaag

SEQ ID NO: 968268 - DNA, 15 bp, Homo sapiens
tgtagaaagcaaagt

SEQ ID NO: 968269 - DNA, 15 bp, Homo sapiens
gtagaaagcaaagta

SEQ ID NO: 968270 - DNA, 15 bp, Homo sapiens
tagaaagcaaagtac

SEQ ID NO: 968271 - DNA, 15 bp, Homo sapiens
agaaagcaaagtaca

SEQ ID NO: 968272 - DNA, 15 bp, Homo sapiens
gaaagcaaagtacag

SEQ ID NO: 968273 - DNA, 15 bp, Homo sapiens
aaagcaaagtacaga

SEQ ID NO: 968274 - DNA, 15 bp, Homo sapiens
aagcaaagtacagaa

SEQ ID NO: 968275 - DNA, 15 bp, Homo sapiens
agcaaagtacagaag

SEQ ID NO: 968276 - DNA, 15 bp, Homo sapiens
gcaaagtacagaagc

SEQ ID NO: 968277 - DNA, 15 bp, Homo sapiens
caaagtacagaagct

SEQ ID NO: 968278 - DNA, 15 bp, Homo sapiens
aaagtacagaagctg

SEQ ID NO: 968279 - DNA, 15 bp, Homo sapiens
accagcctgctagga

SEQ ID NO: 968280 - DNA, 15 bp, Homo sapiens
ccagcctgctaggag

SEQ ID NO: 968281 - DNA, 15 bp, Homo sapiens
cagcctgctaggagt

SEQ ID NO: 968282 - DNA, 15 bp, Homo sapiens
agcctgctaggagtc

SEQ ID NO: 968283 - DNA, 15 bp, Homo sapiens
gcctgctaggagtcg

SEQ ID NO: 968284 - DNA, 15 bp, Homo sapiens
cctgctaggagtcgg

SEQ ID NO: 968285 - DNA, 15 bp, Homo sapiens
ctgctaggagtcggg

SEQ ID NO: 968286 - DNA, 15 bp, Homo sapiens
tgctaggagtcgggc

SEQ ID NO: 968287 - DNA, 15 bp, Homo sapiens
gctaggagtcgggcc

SEQ ID NO: 968288 - DNA, 15 bp, Homo sapiens
ctaggagtcgggcct

SEQ ID NO: 968289 - DNA, 15 bp, Homo sapiens
taggagtcgggcctc

SEQ ID NO: 968290 - DNA, 15 bp, Homo sapiens
aggagtcgggcctca

SEQ ID NO: 968291 - DNA, 15 bp, Homo sapiens
ggagtcgggcctcac

SEQ ID NO: 968292 - DNA, 15 bp, Homo sapiens
gagtcgggcctcacc

SEQ ID NO: 968293 - DNA, 15 bp, Homo sapiens
agtcgggcctcaccc

SEQ ID NO: 968294 - DNA, 15 bp, Homo sapiens
gtcgggcctcacccc

SEQ ID NO: 968295 - DNA, 15 bp, Homo sapiens
tcgggcctcacccct

SEQ ID NO: 968296 - DNA, 15 bp, Homo sapiens
cgggcctcacccctg

SEQ ID NO: 968297 - DNA, 15 bp, Homo sapiens
gggcctcacccctgg

SEQ ID NO: 968298 - DNA, 15 bp, Homo sapiens
ggcctcacccctggg

SEQ ID NO: 968299 - DNA, 15 bp, Homo sapiens
gcctcacccctgggc

SEQ ID NO: 968300 - DNA, 15 bp, Homo sapiens
cctcacccctgggct

SEQ ID NO: 968301 - DNA, 15 bp, Homo sapiens
ctcacccctgggctg

SEQ ID NO: 968302 - DNA, 15 bp, Homo sapiens
tcacccctgggctgc

SEQ ID NO: 968303 - DNA, 15 bp, Homo sapiens
cacccctgggctgcc

SEQ ID NO: 968304 - DNA, 15 bp, Homo sapiens
acccctgggctgcct

SEQ ID NO: 968305 - DNA, 15 bp, Homo sapiens
cccctgggctgcctt

SEQ ID NO: 968306 - DNA, 15 bp, Homo sapiens
ccctgggctgccttc

SEQ ID NO: 968307 - DNA, 15 bp, Homo sapiens
cctgggctgccttcg

SEQ ID NO: 968308 - DNA, 15 bp, Homo sapiens
ctgggctgccttcgg

SEQ ID NO: 968309 - DNA, 15 bp, Homo sapiens
tgggctgccttcgga

SEQ ID NO: 968310 - DNA, 15 bp, Homo sapiens
gggctgccttcggag

SEQ ID NO: 968311 - DNA, 15 bp, Homo sapiens
ggctgccttcggagc

SEQ ID NO: 968312 - DNA, 15 bp, Homo sapiens
gctgccttcggagct

SEQ ID NO: 968313 - DNA, 15 bp, Homo sapiens
ctgccttcggagctt

SEQ ID NO: 968314 - DNA, 15 bp, Homo sapiens
tgccttcggagctta

SEQ ID NO: 968315 - DNA, 15 bp, Homo sapiens
gccttcggagcttac

SEQ ID NO: 968316 - DNA, 15 bp, Homo sapiens
ccttcggagcttacc

SEQ ID NO: 968317 - DNA, 15 bp, Homo sapiens
cttcggagcttacct

SEQ ID NO: 968318 - DNA, 15 bp, Homo sapiens
ttcggagcttacctg

SEQ ID NO: 968319 - DNA, 15 bp, Homo sapiens
tcggagcttacctgt

SEQ ID NO: 968320 - DNA, 15 bp, Homo sapiens
cggagcttacctgtc

SEQ ID NO: 968321 - DNA, 15 bp, Homo sapiens
ggagcttacctgtct

SEQ ID NO: 968322 - DNA, 15 bp, Homo sapiens
gagcttacctgtctc

SEQ ID NO: 968323 - DNA, 15 bp, Homo sapiens
agcttacctgtctca

SEQ ID NO: 968324 - DNA, 15 bp, Homo sapiens
gcttacctgtctcag

SEQ ID NO: 968325 - DNA, 15 bp, Homo sapiens
cttacctgtctcagg

SEQ ID NO: 968326 - DNA, 15 bp, Homo sapiens
ttacctgtctcagga

SEQ ID NO: 968327 - DNA, 15 bp, Homo sapiens
tacctgtctcaggaa

SEQ ID NO: 968328 - DNA, 15 bp, Homo sapiens
acctgtctcaggaac

SEQ ID NO: 968329 - DNA, 15 bp, Homo sapiens
cctgtctcaggaaca

SEQ ID NO: 968330 - DNA, 15 bp, Homo sapiens
ctgtctcaggaacat

SEQ ID NO: 968331 - DNA, 15 bp, Homo sapiens
tgtctcaggaacatc

SEQ ID NO: 968332 - DNA, 15 bp, Homo sapiens
gtctcaggaacatcc

SEQ ID NO: 968333 - DNA, 15 bp, Homo sapiens
tctcaggaacatccc

SEQ ID NO: 968334 - DNA, 15 bp, Homo sapiens
ctcaggaacatccct

SEQ ID NO: 968335 - DNA, 15 bp, Homo sapiens
tcaggaacatccctc

SEQ ID NO: 968336 - DNA, 15 bp, Homo sapiens
caggaacatccctcc

SEQ ID NO: 968337 - DNA, 15 bp, Homo sapiens
aggaacatccctcct

SEQ ID NO: 968338 - DNA, 15 bp, Homo sapiens
ggaacatccctcctc

SEQ ID NO: 968339 - DNA, 15 bp, Homo sapiens
gaacatccctcctcc

SEQ ID NO: 968340 - DNA, 15 bp, Homo sapiens
aacatccctcctccc

SEQ ID NO: 968341 - DNA, 15 bp, Homo sapiens
acatccctcctcccg

SEQ ID NO: 968342 - DNA, 15 bp, Homo sapiens
catccctcctcccga

SEQ ID NO: 968343 - DNA, 15 bp, Homo sapiens
atccctcctcccgag

SEQ ID NO: 968344 - DNA, 15 bp, Homo sapiens
tccctcctcccgagc

SEQ ID NO: 968345 - DNA, 15 bp, Homo sapiens
ccctcctcccgagca

SEQ ID NO: 968346 - DNA, 15 bp, Homo sapiens
cctcctcccgagcat

SEQ ID NO: 968347 - DNA, 15 bp, Homo sapiens
ctcctcccgagcatg

SEQ ID NO: 968348 - DNA, 15 bp, Homo sapiens
tcctcccgagcatgt

SEQ ID NO: 968349 - DNA, 15 bp, Homo sapiens
cctcccgagcatgtg

SEQ ID NO: 968350 - DNA, 15 bp, Homo sapiens
ctcccgagcatgtgg

SEQ ID NO: 968351 - DNA, 15 bp, Homo sapiens
tcccgagcatgtggg

SEQ ID NO: 968352 - DNA, 15 bp, Homo sapiens
cccgagcatgtggga

SEQ ID NO: 968353 - DNA, 15 bp, Homo sapiens
ccgagcatgtgggag

SEQ ID NO: 968354 - DNA, 15 bp, Homo sapiens
cgagcatgtgggaga

SEQ ID NO: 968355 - DNA, 15 bp, Homo sapiens
gagcatgtgggagaa

SEQ ID NO: 968356 - DNA, 15 bp, Homo sapiens
agcatgtgggagaaa

SEQ ID NO: 968357 - DNA, 15 bp, Homo sapiens
gcatgtgggagaaag

SEQ ID NO: 968358 - DNA, 15 bp, Homo sapiens
catgtgggagaaaga

SEQ ID NO: 968359 - DNA, 15 bp, Homo sapiens
atgtgggagaaagag

SEQ ID NO: 968360 - DNA, 15 bp, Homo sapiens
tgtgggagaaagagc

SEQ ID NO: 968361 - DNA, 15 bp, Homo sapiens
gtgggagaaagagct

SEQ ID NO: 968362 - DNA, 15 bp, Homo sapiens
tgggagaaagagctg

SEQ ID NO: 968363 - DNA, 15 bp, Homo sapiens
gggagaaagagctgg

SEQ ID NO: 968364 - DNA, 15 bp, Homo sapiens
ggagaaagagctggg

SEQ ID NO: 968365 - DNA, 15 bp, Homo sapiens
gagaaagagctggga

SEQ ID NO: 968366 - DNA, 15 bp, Homo sapiens
agaaagagctgggag

SEQ ID NO: 968367 - DNA, 15 bp, Homo sapiens
gaaagagctgggagc

SEQ ID NO: 968368 - DNA, 15 bp, Homo sapiens
aaagagctgggagcc

SEQ ID NO: 968369 - DNA, 15 bp, Homo sapiens
aagagctgggagccc

SEQ ID NO: 968370 - DNA, 15 bp, Homo sapiens
agagctgggagcccc

SEQ ID NO: 968371 - DNA, 15 bp, Homo sapiens
gagctgggagcccct

SEQ ID NO: 968372 - DNA, 15 bp, Homo sapiens
agctgggagcccctc

SEQ ID NO: 968373 - DNA, 15 bp, Homo sapiens
gctgggagcccctcg

SEQ ID NO: 968374 - DNA, 15 bp, Homo sapiens
ctgggagcccctcgc

SEQ ID NO: 968375 - DNA, 15 bp, Homo sapiens
tgggagcccctcgca

SEQ ID NO: 968376 - DNA, 15 bp, Homo sapiens
gggagcccctcgcaa

SEQ ID NO: 968377 - DNA, 15 bp, Homo sapiens
ggagcccctcgcaag

SEQ ID NO: 968378 - DNA, 15 bp, Homo sapiens
gagcccctcgcaagg

SEQ ID NO: 968379 - DNA, 15 bp, Homo sapiens
agcccctcgcaaggc

SEQ ID NO: 968380 - DNA, 15 bp, Homo sapiens
gcccctcgcaaggcc

SEQ ID NO: 968381 - DNA, 15 bp, Homo sapiens
cccctcgcaaggcct

SEQ ID NO: 968382 - DNA, 15 bp, Homo sapiens
ccctcgcaaggcctg

SEQ ID NO: 968383 - DNA, 15 bp, Homo sapiens
cctcgcaaggcctga

SEQ ID NO: 968384 - DNA, 15 bp, Homo sapiens
ctcgcaaggcctgat

SEQ ID NO: 968385 - DNA, 15 bp, Homo sapiens
tcgcaaggcctgatg

SEQ ID NO: 968386 - DNA, 15 bp, Homo sapiens
cgcaaggcctgatgg

SEQ ID NO: 968387 - DNA, 15 bp, Homo sapiens
gcaaggcctgatggg

SEQ ID NO: 968388 - DNA, 15 bp, Homo sapiens
caaggcctgatgggg

SEQ ID NO: 968389 - DNA, 15 bp, Homo sapiens
aaggcctgatggggc

SEQ ID NO: 968390 - DNA, 15 bp, Homo sapiens
aggcctgatggggcc

SEQ ID NO: 968391 - DNA, 15 bp, Homo sapiens
ggcctgatggggcct

SEQ ID NO: 968392 - DNA, 15 bp, Homo sapiens
gcctgatggggcctc

SEQ ID NO: 968393 - DNA, 15 bp, Homo sapiens
cctgatggggcctct

SEQ ID NO: 968394 - DNA, 15 bp, Homo sapiens
ctgatggggcctctg

SEQ ID NO: 968395 - DNA, 15 bp, Homo sapiens
tgatggggcctctgt

SEQ ID NO: 968396 - DNA, 15 bp, Homo sapiens
gatggggcctctgtg

SEQ ID NO: 968397 - DNA, 15 bp, Homo sapiens
atggggcctctgtgt

SEQ ID NO: 968398 - DNA, 15 bp, Homo sapiens
tggggcctctgtgtg

SEQ ID NO: 968399 - DNA, 15 bp, Homo sapiens
ggggcctctgtgtgc

SEQ ID NO: 968400 - DNA, 15 bp, Homo sapiens
gggcctctgtgtgct

SEQ ID NO: 968401 - DNA, 15 bp, Homo sapiens
ggcctctgtgtgctg

SEQ ID NO: 968402 - DNA, 15 bp, Homo sapiens
gcctctgtgtgctgc

SEQ ID NO: 968403 - DNA, 15 bp, Homo sapiens
cctctgtgtgctgca

SEQ ID NO: 968404 - DNA, 15 bp, Homo sapiens
ctctgtgtgctgcat

SEQ ID NO: 968405 - DNA, 15 bp, Homo sapiens
tctgtgtgctgcatg

SEQ ID NO: 968406 - DNA, 15 bp, Homo sapiens
ctgtgtgctgcatga

SEQ ID NO: 968407 - DNA, 15 bp, Homo sapiens
tgtgtgctgcatgaa

SEQ ID NO: 968408 - DNA, 15 bp, Homo sapiens
gtgtgctgcatgaag

SEQ ID NO: 968409 - DNA, 15 bp, Homo sapiens
tgtgctgcatgaagc

SEQ ID NO: 968410 - DNA, 15 bp, Homo sapiens
gtgctgcatgaagca

SEQ ID NO: 968411 - DNA, 15 bp, Homo sapiens
tgctgcatgaagcac

SEQ ID NO: 968412 - DNA, 15 bp, Homo sapiens
gctgcatgaagcact

SEQ ID NO: 968413 - DNA, 15 bp, Homo sapiens
ctgcatgaagcactt

SEQ ID NO: 968414 - DNA, 15 bp, Homo sapiens
tgcatgaagcacttc

SEQ ID NO: 968415 - DNA, 15 bp, Homo sapiens
gcatgaagcacttca

SEQ ID NO: 968416 - DNA, 15 bp, Homo sapiens
catgaagcacttcac

SEQ ID NO: 968417 - DNA, 15 bp, Homo sapiens
atgaagcacttcact

SEQ ID NO: 968418 - DNA, 15 bp, Homo sapiens
tgaagcacttcactt

SEQ ID NO: 968419 - DNA, 15 bp, Homo sapiens
gaagcacttcacttc

SEQ ID NO: 968420 - DNA, 15 bp, Homo sapiens
aagcacttcacttcc

SEQ ID NO: 968421 - DNA, 15 bp, Homo sapiens
agcacttcacttcca

SEQ ID NO: 968422 - DNA, 15 bp, Homo sapiens
gcacttcacttccac

SEQ ID NO: 968423 - DNA, 15 bp, Homo sapiens
cacttcacttccaca

SEQ ID NO: 968424 - DNA, 15 bp, Homo sapiens
acttcacttccacag

SEQ ID NO: 968425 - DNA, 15 bp, Homo sapiens
cttcacttccacagt

SEQ ID NO: 968426 - DNA, 15 bp, Homo sapiens
ttcacttccacagtc

SEQ ID NO: 968427 - DNA, 15 bp, Homo sapiens
tcacttccacagtcc

SEQ ID NO: 968428 - DNA, 15 bp, Homo sapiens
cacttccacagtccc

SEQ ID NO: 968429 - DNA, 15 bp, Homo sapiens
acttccacagtcccc

SEQ ID NO: 968430 - DNA, 15 bp, Homo sapiens
cttccacagtcccca

SEQ ID NO: 968431 - DNA, 15 bp, Homo sapiens
ttccacagtccccat

SEQ ID NO: 968432 - DNA, 15 bp, Homo sapiens
tccacagtccccatg

SEQ ID NO: 968433 - DNA, 15 bp, Homo sapiens
ccacagtccccatgt

SEQ ID NO: 968434 - DNA, 15 bp, Homo sapiens
cacagtccccatgtg

SEQ ID NO: 968435 - DNA, 15 bp, Homo sapiens
acagtccccatgtga

SEQ ID NO: 968436 - DNA, 15 bp, Homo sapiens
cagtccccatgtgag

SEQ ID NO: 968437 - DNA, 15 bp, Homo sapiens
agtccccatgtgagt

SEQ ID NO: 968438 - DNA, 15 bp, Homo sapiens
gtccccatgtgagta

SEQ ID NO: 968439 - DNA, 15 bp, Homo sapiens
tccccatgtgagtaa

SEQ ID NO: 968440 - DNA, 15 bp, Homo sapiens
ccccatgtgagtaac

SEQ ID NO: 968441 - DNA, 15 bp, Homo sapiens
cccatgtgagtaact

SEQ ID NO: 968442 - DNA, 15 bp, Homo sapiens
ccatgtgagtaactc

SEQ ID NO: 968443 - DNA, 15 bp, Homo sapiens
catgtgagtaactcc

SEQ ID NO: 968444 - DNA, 15 bp, Homo sapiens
atgtgagtaactcca

SEQ ID NO: 968445 - DNA, 15 bp, Homo sapiens
tgtgagtaactccag

SEQ ID NO: 968446 - DNA, 15 bp, Homo sapiens
gtgagtaactccaga

SEQ ID NO: 968447 - DNA, 15 bp, Homo sapiens
tgagtaactccagat

SEQ ID NO: 968448 - DNA, 15 bp, Homo sapiens
gagtaactccagatg

SEQ ID NO: 968449 - DNA, 15 bp, Homo sapiens
agtaactccagatga

SEQ ID NO: 968450 - DNA, 15 bp, Homo sapiens
gtaactccagatgag

SEQ ID NO: 968451 - DNA, 15 bp, Homo sapiens
taactccagatgagg

SEQ ID NO: 968452 - DNA, 15 bp, Homo sapiens
aactccagatgaggg

SEQ ID NO: 968453 - DNA, 15 bp, Homo sapiens
actccagatgaggga

SEQ ID NO: 968454 - DNA, 15 bp, Homo sapiens
ctccagatgagggac

SEQ ID NO: 968455 - DNA, 15 bp, Homo sapiens
tccagatgagggaca

SEQ ID NO: 968456 - DNA, 15 bp, Homo sapiens
ccagatgagggacag

SEQ ID NO: 968457 - DNA, 15 bp, Homo sapiens
cagatgagggacaga

SEQ ID NO: 968458 - DNA, 15 bp, Homo sapiens
agatgagggacagag

SEQ ID NO: 968459 - DNA, 15 bp, Homo sapiens
gatgagggacagagg

SEQ ID NO: 968460 - DNA, 15 bp, Homo sapiens
atgagggacagaggg

SEQ ID NO: 968461 - DNA, 15 bp, Homo sapiens
tgagggacagagggg

SEQ ID NO: 968462 - DNA, 15 bp, Homo sapiens
gagggacagaggggt

SEQ ID NO: 968463 - DNA, 15 bp, Homo sapiens
agggacagaggggta

SEQ ID NO: 968464 - DNA, 15 bp, Homo sapiens
gggacagaggggtaa

SEQ ID NO: 968465 - DNA, 15 bp, Homo sapiens
ggacagaggggtaag

SEQ ID NO: 968466 - DNA, 15 bp, Homo sapiens
gacagaggggtaagg

SEQ ID NO: 968467 - DNA, 15 bp, Homo sapiens
acagaggggtaaggc

SEQ ID NO: 968468 - DNA, 15 bp, Homo sapiens
cagaggggtaaggct

SEQ ID NO: 968469 - DNA, 15 bp, Homo sapiens
agaggggtaaggctc

SEQ ID NO: 968470 - DNA, 15 bp, Homo sapiens
gaggggtaaggctcg

SEQ ID NO: 968471 - DNA, 15 bp, Homo sapiens
aggggtaaggctcgc

SEQ ID NO: 968472 - DNA, 15 bp, Homo sapiens
ggggtaaggctcgcc

SEQ ID NO: 968473 - DNA, 15 bp, Homo sapiens
gggtaaggctcgccc

SEQ ID NO: 968474 - DNA, 15 bp, Homo sapiens
ggtaaggctcgcccc

SEQ ID NO: 968475 - DNA, 15 bp, Homo sapiens
gtaaggctcgcccca

SEQ ID NO: 968476 - DNA, 15 bp, Homo sapiens
taaggctcgccccag

SEQ ID NO: 968477 - DNA, 15 bp, Homo sapiens
aaggctcgccccagg

SEQ ID NO: 968478 - DNA, 15 bp, Homo sapiens
aggctcgccccaggt

SEQ ID NO: 968479 - DNA, 15 bp, Homo sapiens
ggctcgccccaggtc

SEQ ID NO: 968480 - DNA, 15 bp, Homo sapiens
gctcgccccaggtca

SEQ ID NO: 968481 - DNA, 15 bp, Homo sapiens
ctcgccccaggtcac

SEQ ID NO: 968482 - DNA, 15 bp, Homo sapiens
tcgccccaggtcaca

SEQ ID NO: 968483 - DNA, 15 bp, Homo sapiens
cgccccaggtcacac

SEQ ID NO: 968484 - DNA, 15 bp, Homo sapiens
gccccaggtcacact

SEQ ID NO: 968485 - DNA, 15 bp, Homo sapiens
ccccaggtcacactg

SEQ ID NO: 968486 - DNA, 15 bp, Homo sapiens
cccaggtcacactgt

SEQ ID NO: 968487 - DNA, 15 bp, Homo sapiens
ccaggtcacactgtc

SEQ ID NO: 968488 - DNA, 15 bp, Homo sapiens
caggtcacactgtca

SEQ ID NO: 968489 - DNA, 15 bp, Homo sapiens
aggtcacactgtcac

SEQ ID NO: 968490 - DNA, 15 bp, Homo sapiens
ggtcacactgtcact

SEQ ID NO: 968491 - DNA, 15 bp, Homo sapiens
gtcacactgtcactt

SEQ ID NO: 968492 - DNA, 15 bp, Homo sapiens
tcacactgtcactta

SEQ ID NO: 968493 - DNA, 15 bp, Homo sapiens
cacactgtcacttag

SEQ ID NO: 968494 - DNA, 15 bp, Homo sapiens
acactgtcacttagt

SEQ ID NO: 968495 - DNA, 15 bp, Homo sapiens
cactgtcacttagtg

SEQ ID NO: 968496 - DNA, 15 bp, Homo sapiens
actgtcacttagtga

SEQ ID NO: 968497 - DNA, 15 bp, Homo sapiens
ctgtcacttagtgat

SEQ ID NO: 968498 - DNA, 15 bp, Homo sapiens
tgtcacttagtgata

SEQ ID NO: 968499 - DNA, 15 bp, Homo sapiens
gtcacttagtgatag

SEQ ID NO: 968500 - DNA, 15 bp, Homo sapiens
tcacttagtgatagg

SEQ ID NO: 968501 - DNA, 15 bp, Homo sapiens
cacttagtgataggt

SEQ ID NO: 968502 - DNA, 15 bp, Homo sapiens
acttagtgataggtg

SEQ ID NO: 968503 - DNA, 15 bp, Homo sapiens
cttagtgataggtgg

SEQ ID NO: 968504 - DNA, 15 bp, Homo sapiens
ttagtgataggtgga

SEQ ID NO: 968505 - DNA, 15 bp, Homo sapiens
tagtgataggtggag

SEQ ID NO: 968506 - DNA, 15 bp, Homo sapiens
agtgataggtggagt

SEQ ID NO: 968507 - DNA, 15 bp, Homo sapiens
gtgataggtggagtt

SEQ ID NO: 968508 - DNA, 15 bp, Homo sapiens
tgataggtggagttg

SEQ ID NO: 968509 - DNA, 15 bp, Homo sapiens
gataggtggagttgg

SEQ ID NO: 968510 - DNA, 15 bp, Homo sapiens
ataggtggagttgga

SEQ ID NO: 968511 - DNA, 15 bp, Homo sapiens
taggtggagttggac

SEQ ID NO: 968512 - DNA, 15 bp, Homo sapiens
aggtggagttggact

SEQ ID NO: 968513 - DNA, 15 bp, Homo sapiens
ggtggagttggactc

SEQ ID NO: 968514 - DNA, 15 bp, Homo sapiens
gtggagttggactca

SEQ ID NO: 968515 - DNA, 15 bp, Homo sapiens
tggagttggactcag

SEQ ID NO: 968516 - DNA, 15 bp, Homo sapiens
ggagttggactcaga

SEQ ID NO: 968517 - DNA, 15 bp, Homo sapiens
gagttggactcagac

SEQ ID NO: 968518 - DNA, 15 bp, Homo sapiens
agttggactcagacc

SEQ ID NO: 968519 - DNA, 15 bp, Homo sapiens
gttggactcagacct

SEQ ID NO: 968520 - DNA, 15 bp, Homo sapiens
ttggactcagacctg

SEQ ID NO: 968521 - DNA, 15 bp, Homo sapiens
tggactcagacctgt

SEQ ID NO: 968522 - DNA, 15 bp, Homo sapiens
ggactcagacctgtc

SEQ ID NO: 968523 - DNA, 15 bp, Homo sapiens
gactcagacctgtcc

SEQ ID NO: 968524 - DNA, 15 bp, Homo sapiens
actcagacctgtccc

SEQ ID NO: 968525 - DNA, 15 bp, Homo sapiens
ctcagacctgtcccc

SEQ ID NO: 968526 - DNA, 15 bp, Homo sapiens
tcagacctgtccccg

SEQ ID NO: 968527 - DNA, 15 bp, Homo sapiens
cagacctgtccccgt

SEQ ID NO: 968528 - DNA, 15 bp, Homo sapiens
agacctgtccccgtc

SEQ ID NO: 968529 - DNA, 15 bp, Homo sapiens
gacctgtccccgtcc

SEQ ID NO: 968530 - DNA, 15 bp, Homo sapiens
acctgtccccgtccc

SEQ ID NO: 968531 - DNA, 15 bp, Homo sapiens
cctgtccccgtccca

SEQ ID NO: 968532 - DNA, 15 bp, Homo sapiens
ctgtccccgtcccac

SEQ ID NO: 968533 - DNA, 15 bp, Homo sapiens
tgtccccgtcccacc

SEQ ID NO: 968534 - DNA, 15 bp, Homo sapiens
gtccccgtcccacct

SEQ ID NO: 968535 - DNA, 15 bp, Homo sapiens
tccccgtcccacctc

SEQ ID NO: 968536 - DNA, 15 bp, Homo sapiens
ccccgtcccacctcc

SEQ ID NO: 968537 - DNA, 15 bp, Homo sapiens
cccgtcccacctccc

SEQ ID NO: 968538 - DNA, 15 bp, Homo sapiens
ccgtcccacctccct

SEQ ID NO: 968539 - DNA, 15 bp, Homo sapiens
cgtcccacctccctg

SEQ ID NO: 968540 - DNA, 15 bp, Homo sapiens
gtcccacctccctgt

SEQ ID NO: 968541 - DNA, 15 bp, Homo sapiens
tcccacctccctgta

SEQ ID NO: 968542 - DNA, 15 bp, Homo sapiens
cccacctccctgtac

SEQ ID NO: 968543 - DNA, 15 bp, Homo sapiens
ccacctccctgtacc

SEQ ID NO: 968544 - DNA, 15 bp, Homo sapiens
cacctccctgtaccc

SEQ ID NO: 968545 - DNA, 15 bp, Homo sapiens
acctccctgtacccc

SEQ ID NO: 968546 - DNA, 15 bp, Homo sapiens
cctccctgtaccccc

SEQ ID NO: 968547 - DNA, 15 bp, Homo sapiens
ctccctgtaccccct

SEQ ID NO: 968548 - DNA, 15 bp, Homo sapiens
tccctgtaccccctc

SEQ ID NO: 968549 - DNA, 15 bp, Homo sapiens
ccctgtaccccctcc

SEQ ID NO: 968550 - DNA, 15 bp, Homo sapiens
cctgtaccccctccc

SEQ ID NO: 968551 - DNA, 15 bp, Homo sapiens
ctgtaccccctcccc

SEQ ID NO: 968552 - DNA, 15 bp, Homo sapiens
tgtaccccctcccca

SEQ ID NO: 968553 - DNA, 15 bp, Homo sapiens
gtaccccctccccag

SEQ ID NO: 968554 - DNA, 15 bp, Homo sapiens
taccccctccccaga

SEQ ID NO: 968555 - DNA, 15 bp, Homo sapiens
accccctccccagac

SEQ ID NO: 968556 - DNA, 15 bp, Homo sapiens
ccccctccccagaca

SEQ ID NO: 968557 - DNA, 15 bp, Homo sapiens
cccctccccagacac

SEQ ID NO: 968558 - DNA, 15 bp, Homo sapiens
ccctccccagacact

SEQ ID NO: 968559 - DNA, 15 bp, Homo sapiens
cctccccagacactg

SEQ ID NO: 968560 - DNA, 15 bp, Homo sapiens
ctccccagacactga

SEQ ID NO: 968561 - DNA, 15 bp, Homo sapiens
tccccagacactgag

SEQ ID NO: 968562 - DNA, 15 bp, Homo sapiens
ccccagacactgagg

SEQ ID NO: 968563 - DNA, 15 bp, Homo sapiens
cccagacactgaggc

SEQ ID NO: 968564 - DNA, 15 bp, Homo sapiens
ccagacactgaggcc

SEQ ID NO: 968565 - DNA, 15 bp, Homo sapiens
cagacactgaggcct

SEQ ID NO: 968566 - DNA, 15 bp, Homo sapiens
agacactgaggcctc

SEQ ID NO: 968567 - DNA, 15 bp, Homo sapiens
gacactgaggcctca

SEQ ID NO: 968568 - DNA, 15 bp, Homo sapiens
acactgaggcctcag

SEQ ID NO: 968569 - DNA, 15 bp, Homo sapiens
cactgaggcctcagt

SEQ ID NO: 968570 - DNA, 15 bp, Homo sapiens
actgaggcctcagtg

SEQ ID NO: 968571 - DNA, 15 bp, Homo sapiens
ctgaggcctcagtga

SEQ ID NO: 968572 - DNA, 15 bp, Homo sapiens
tgaggcctcagtgag

SEQ ID NO: 968573 - DNA, 15 bp, Homo sapiens
gaggcctcagtgagc

SEQ ID NO: 968574 - DNA, 15 bp, Homo sapiens
aggcctcagtgagcc

SEQ ID NO: 968575 - DNA, 15 bp, Homo sapiens
ggcctcagtgagccc

SEQ ID NO: 968576 - DNA, 15 bp, Homo sapiens
gcctcagtgagccct

SEQ ID NO: 968577 - DNA, 15 bp, Homo sapiens
cctcagtgagccctc

SEQ ID NO: 968578 - DNA, 15 bp, Homo sapiens
ctcagtgagccctct

SEQ ID NO: 968579 - DNA, 15 bp, Homo sapiens
tcagtgagccctctg

SEQ ID NO: 968580 - DNA, 15 bp, Homo sapiens
cagtgagccctctga

SEQ ID NO: 968581 - DNA, 15 bp, Homo sapiens
agtgagccctctgag

SEQ ID NO: 968582 - DNA, 15 bp, Homo sapiens
gtgagccctctgagg

SEQ ID NO: 968583 - DNA, 15 bp, Homo sapiens
tgagccctctgaggt

SEQ ID NO: 968584 - DNA, 15 bp, Homo sapiens
gagccctctgaggtc

SEQ ID NO: 968585 - DNA, 15 bp, Homo sapiens
agccctctgaggtcc

SEQ ID NO: 968586 - DNA, 15 bp, Homo sapiens
gccctctgaggtcca

SEQ ID NO: 968587 - DNA, 15 bp, Homo sapiens
ccctctgaggtccag

SEQ ID NO: 968588 - DNA, 15 bp, Homo sapiens
cctctgaggtccagc

SEQ ID NO: 968589 - DNA, 15 bp, Homo sapiens
ctctgaggtccagct

SEQ ID NO: 968590 - DNA, 15 bp, Homo sapiens
tctgaggtccagctc

SEQ ID NO: 968591 - DNA, 15 bp, Homo sapiens
ctgaggtccagctcc

SEQ ID NO: 968592 - DNA, 15 bp, Homo sapiens
tgaggtccagctcct

SEQ ID NO: 968593 - DNA, 15 bp, Homo sapiens
gaggtccagctccta

SEQ ID NO: 968594 - DNA, 15 bp, Homo sapiens
aggtccagctcctac

SEQ ID NO: 968595 - DNA, 15 bp, Homo sapiens
ggtccagctcctacc

SEQ ID NO: 968596 - DNA, 15 bp, Homo sapiens
gtccagctcctacct

SEQ ID NO: 968597 - DNA, 15 bp, Homo sapiens
tccagctcctacctt

SEQ ID NO: 968598 - DNA, 15 bp, Homo sapiens
ccagctcctaccttc

SEQ ID NO: 968599 - DNA, 15 bp, Homo sapiens
cagctcctaccttcg

SEQ ID NO: 968600 - DNA, 15 bp, Homo sapiens
agctcctaccttcgt

SEQ ID NO: 968601 - DNA, 15 bp, Homo sapiens
gctcctaccttcgta

SEQ ID NO: 968602 - DNA, 15 bp, Homo sapiens
ctcctaccttcgtag

SEQ ID NO: 968603 - DNA, 15 bp, Homo sapiens
tcctaccttcgtagg

SEQ ID NO: 968604 - DNA, 15 bp, Homo sapiens
cctaccttcgtaggt

SEQ ID NO: 968605 - DNA, 15 bp, Homo sapiens
ctaccttcgtaggtg

SEQ ID NO: 968606 - DNA, 15 bp, Homo sapiens
taccttcgtaggtgt

SEQ ID NO: 968607 - DNA, 15 bp, Homo sapiens
accttcgtaggtgtt

SEQ ID NO: 968608 - DNA, 15 bp, Homo sapiens
ccttcgtaggtgttc

SEQ ID NO: 968609 - DNA, 15 bp, Homo sapiens
cttcgtaggtgttca

SEQ ID NO: 968610 - DNA, 15 bp, Homo sapiens
ttcgtaggtgttcac

SEQ ID NO: 968611 - DNA, 15 bp, Homo sapiens
tcgtaggtgttcacg

SEQ ID NO: 968612 - DNA, 15 bp, Homo sapiens
cgtaggtgttcacgg

SEQ ID NO: 968613 - DNA, 15 bp, Homo sapiens
gtaggtgttcacggc

SEQ ID NO: 968614 - DNA, 15 bp, Homo sapiens
taggtgttcacggcc

SEQ ID NO: 968615 - DNA, 15 bp, Homo sapiens
aggtgttcacggcct

SEQ ID NO: 968616 - DNA, 15 bp, Homo sapiens
ggtgttcacggcctc

SEQ ID NO: 968617 - DNA, 15 bp, Homo sapiens
gtgttcacggcctcc

SEQ ID NO: 968618 - DNA, 15 bp, Homo sapiens
tgttcacggcctcca

SEQ ID NO: 968619 - DNA, 15 bp, Homo sapiens
gttcacggcctccag

SEQ ID NO: 968620 - DNA, 15 bp, Homo sapiens
ttcacggcctccagg

SEQ ID NO: 968621 - DNA, 15 bp, Homo sapiens
tcacggcctccaggt

SEQ ID NO: 968622 - DNA, 15 bp, Homo sapiens
cacggcctccaggtt

SEQ ID NO: 968623 - DNA, 15 bp, Homo sapiens
acggcctccaggttc

SEQ ID NO: 968624 - DNA, 15 bp, Homo sapiens
cggcctccaggttca

SEQ ID NO: 968625 - DNA, 15 bp, Homo sapiens
ggcctccaggttcat

SEQ ID NO: 968626 - DNA, 15 bp, Homo sapiens
gcctccaggttcatg

SEQ ID NO: 968627 - DNA, 15 bp, Homo sapiens
cctccaggttcatgg

SEQ ID NO: 968628 - DNA, 15 bp, Homo sapiens
ctccaggttcatggc

SEQ ID NO: 968629 - DNA, 15 bp, Homo sapiens
tccaggttcatggcg

SEQ ID NO: 968630 - DNA, 15 bp, Homo sapiens
ccaggttcatggcgt

SEQ ID NO: 968631 - DNA, 15 bp, Homo sapiens
caggttcatggcgtg

SEQ ID NO: 968632 - DNA, 15 bp, Homo sapiens
aggttcatggcgtgc

SEQ ID NO: 968633 - DNA, 15 bp, Homo sapiens
ggttcatggcgtgcc

SEQ ID NO: 968634 - DNA, 15 bp, Homo sapiens
gttcatggcgtgccg

SEQ ID NO: 968635 - DNA, 15 bp, Homo sapiens
ttcatggcgtgccgg

SEQ ID NO: 968636 - DNA, 15 bp, Homo sapiens
tcatggcgtgccgga

SEQ ID NO: 968637 - DNA, 15 bp, Homo sapiens
catggcgtgccggat

SEQ ID NO: 968638 - DNA, 15 bp, Homo sapiens
atggcgtgccggatc

SEQ ID NO: 968639 - DNA, 15 bp, Homo sapiens
tggcgtgccggatca

SEQ ID NO: 968640 - DNA, 15 bp, Homo sapiens
ggcgtgccggatcac

SEQ ID NO: 968641 - DNA, 15 bp, Homo sapiens
gcgtgccggatcacg

SEQ ID NO: 968642 - DNA, 15 bp, Homo sapiens
cgtgccggatcacgt

SEQ ID NO: 968643 - DNA, 15 bp, Homo sapiens
gtgccggatcacgtg

SEQ ID NO: 968644 - DNA, 15 bp, Homo sapiens
tgccggatcacgtga

SEQ ID NO: 968645 - DNA, 15 bp, Homo sapiens
gccggatcacgtgat

SEQ ID NO: 968646 - DNA, 15 bp, Homo sapiens
ccggatcacgtgata

SEQ ID NO: 968647 - DNA, 15 bp, Homo sapiens
cggatcacgtgatac

SEQ ID NO: 968648 - DNA, 15 bp, Homo sapiens
ggatcacgtgatact

SEQ ID NO: 968649 - DNA, 15 bp, Homo sapiens
gatcacgtgatactc

SEQ ID NO: 968650 - DNA, 15 bp, Homo sapiens
atcacgtgatactcg

SEQ ID NO: 968651 - DNA, 15 bp, Homo sapiens
tcacgtgatactcgt

SEQ ID NO: 968652 - DNA, 15 bp, Homo sapiens
cacgtgatactcgtc

SEQ ID NO: 968653 - DNA, 15 bp, Homo sapiens
acgtgatactcgtca

SEQ ID NO: 968654 - DNA, 15 bp, Homo sapiens
cgtgatactcgtcag

SEQ ID NO: 968655 - DNA, 15 bp, Homo sapiens
gtgatactcgtcaga

SEQ ID NO: 968656 - DNA, 15 bp, Homo sapiens
tgatactcgtcagaa

SEQ ID NO: 968657 - DNA, 15 bp, Homo sapiens
gatactcgtcagaaa

SEQ ID NO: 968658 - DNA, 15 bp, Homo sapiens
atactcgtcagaaat

SEQ ID NO: 968659 - DNA, 15 bp, Homo sapiens
tactcgtcagaaatc

SEQ ID NO: 968660 - DNA, 15 bp, Homo sapiens
actcgtcagaaatcc

SEQ ID NO: 968661 - DNA, 15 bp, Homo sapiens
ctcgtcagaaatccc

SEQ ID NO: 968662 - DNA, 15 bp, Homo sapiens
tcgtcagaaatccca

SEQ ID NO: 968663 - DNA, 15 bp, Homo sapiens
cgtcagaaatcccat

SEQ ID NO: 968664 - DNA, 15 bp, Homo sapiens
gtcagaaatcccatt

SEQ ID NO: 968665 - DNA, 15 bp, Homo sapiens
tcagaaatcccattc

SEQ ID NO: 968666 - DNA, 15 bp, Homo sapiens
cagaaatcccattcc

SEQ ID NO: 968667 - DNA, 15 bp, Homo sapiens
agaaatcccattccc

SEQ ID NO: 968668 - DNA, 15 bp, Homo sapiens
gaaatcccattcccc

SEQ ID NO: 968669 - DNA, 15 bp, Homo sapiens
aaatcccattccccc

SEQ ID NO: 968670 - DNA, 15 bp, Homo sapiens
aatcccattcccccc

SEQ ID NO: 968671 - DNA, 15 bp, Homo sapiens
atcccattccccccc

SEQ ID NO: 968672 - DNA, 15 bp, Homo sapiens
tcccattccccccca

SEQ ID NO: 968673 - DNA, 15 bp, Homo sapiens
cccattcccccccag

SEQ ID NO: 968674 - DNA, 15 bp, Homo sapiens
ccattcccccccagc

SEQ ID NO: 968675 - DNA, 15 bp, Homo sapiens
cattcccccccagca

SEQ ID NO: 968676 - DNA, 15 bp, Homo sapiens
attcccccccagcat

SEQ ID NO: 968677 - DNA, 15 bp, Homo sapiens
ttcccccccagcatg

SEQ ID NO: 968678 - DNA, 15 bp, Homo sapiens
tcccccccagcatgt

SEQ ID NO: 968679 - DNA, 15 bp, Homo sapiens
cccccccagcatgtc

SEQ ID NO: 968680 - DNA, 15 bp, Homo sapiens
ccccccagcatgtct

SEQ ID NO: 968681 - DNA, 15 bp, Homo sapiens
cccccagcatgtctc

SEQ ID NO: 968682 - DNA, 15 bp, Homo sapiens
ccccagcatgtctcg

SEQ ID NO: 968683 - DNA, 15 bp, Homo sapiens
cccagcatgtctcgg

SEQ ID NO: 968684 - DNA, 15 bp, Homo sapiens
ccagcatgtctcggg

SEQ ID NO: 968685 - DNA, 15 bp, Homo sapiens
cagcatgtctcgggc

SEQ ID NO: 968686 - DNA, 15 bp, Homo sapiens
agcatgtctcgggcc

SEQ ID NO: 968687 - DNA, 15 bp, Homo sapiens
gcatgtctcgggcct

SEQ ID NO: 968688 - DNA, 15 bp, Homo sapiens
catgtctcgggcctg

SEQ ID NO: 968689 - DNA, 15 bp, Homo sapiens
atgtctcgggcctgg

SEQ ID NO: 968690 - DNA, 15 bp, Homo sapiens
tgtctcgggcctggc

SEQ ID NO: 968691 - DNA, 15 bp, Homo sapiens
gtctcgggcctggcg

SEQ ID NO: 968692 - DNA, 15 bp, Homo sapiens
tctcgggcctggcgg

SEQ ID NO: 968693 - DNA, 15 bp, Homo sapiens
ctcgggcctggcggg

SEQ ID NO: 968694 - DNA, 15 bp, Homo sapiens
tcgggcctggcgggc

SEQ ID NO: 968695 - DNA, 15 bp, Homo sapiens
cgggcctggcgggcg

SEQ ID NO: 968696 - DNA, 15 bp, Homo sapiens
gggcctggcgggcga

SEQ ID NO: 968697 - DNA, 15 bp, Homo sapiens
ggcctggcgggcgat

SEQ ID NO: 968698 - DNA, 15 bp, Homo sapiens
gcctggcgggcgatg

SEQ ID NO: 968699 - DNA, 15 bp, Homo sapiens
cctggcgggcgatgt

SEQ ID NO: 968700 - DNA, 15 bp, Homo sapiens
ctggcgggcgatgtc

SEQ ID NO: 968701 - DNA, 15 bp, Homo sapiens
tggcgggcgatgtcc

SEQ ID NO: 968702 - DNA, 15 bp, Homo sapiens
ggcgggcgatgtcca

SEQ ID NO: 968703 - DNA, 15 bp, Homo sapiens
gcgggcgatgtccag

SEQ ID NO: 968704 - DNA, 15 bp, Homo sapiens
cgggcgatgtccagg

SEQ ID NO: 968705 - DNA, 15 bp, Homo sapiens
gggcgatgtccaggg

SEQ ID NO: 968706 - DNA, 15 bp, Homo sapiens
ggcgatgtccagggc

SEQ ID NO: 968707 - DNA, 15 bp, Homo sapiens
gcgatgtccagggct

SEQ ID NO: 968708 - DNA, 15 bp, Homo sapiens
cgatgtccagggctt

SEQ ID NO: 968709 - DNA, 15 bp, Homo sapiens
gatgtccagggcttt

SEQ ID NO: 968710 - DNA, 15 bp, Homo sapiens
atgtccagggctttc

SEQ ID NO: 968711 - DNA, 15 bp, Homo sapiens
tgtccagggctttcc

SEQ ID NO: 968712 - DNA, 15 bp, Homo sapiens
gtccagggctttccc

SEQ ID NO: 968713 - DNA, 15 bp, Homo sapiens
tccagggctttccca

SEQ ID NO: 968714 - DNA, 15 bp, Homo sapiens
ccagggctttcccac

SEQ ID NO: 968715 - DNA, 15 bp, Homo sapiens
cagggctttcccaca

SEQ ID NO: 968716 - DNA, 15 bp, Homo sapiens
agggctttcccacag

SEQ ID NO: 968717 - DNA, 15 bp, Homo sapiens
gggctttcccacagt

SEQ ID NO: 968718 - DNA, 15 bp, Homo sapiens
ggctttcccacagtt

SEQ ID NO: 968719 - DNA, 15 bp, Homo sapiens
gctttcccacagtta

SEQ ID NO: 968720 - DNA, 15 bp, Homo sapiens
ctttcccacagttat

SEQ ID NO: 968721 - DNA, 15 bp, Homo sapiens
tttcccacagttatt

SEQ ID NO: 968722 - DNA, 15 bp, Homo sapiens
ttcccacagttattc

SEQ ID NO: 968723 - DNA, 15 bp, Homo sapiens
tcccacagttattcc

SEQ ID NO: 968724 - DNA, 15 bp, Homo sapiens
cccacagttattcct

SEQ ID NO: 968725 - DNA, 15 bp, Homo sapiens
ccacagttattcctc

SEQ ID NO: 968726 - DNA, 15 bp, Homo sapiens
cacagttattcctct

SEQ ID NO: 968727 - DNA, 15 bp, Homo sapiens
acagttattcctctt

SEQ ID NO: 968728 - DNA, 15 bp, Homo sapiens
cagttattcctcttc

SEQ ID NO: 968729 - DNA, 15 bp, Homo sapiens
agttattcctcttca

SEQ ID NO: 968730 - DNA, 15 bp, Homo sapiens
gttattcctcttcag

SEQ ID NO: 968731 - DNA, 15 bp, Homo sapiens
ttattcctcttcagc

SEQ ID NO: 968732 - DNA, 15 bp, Homo sapiens
tattcctcttcagca

SEQ ID NO: 968733 - DNA, 15 bp, Homo sapiens
attcctcttcagcag

SEQ ID NO: 968734 - DNA, 15 bp, Homo sapiens
ttcctcttcagcaga

SEQ ID NO: 968735 - DNA, 15 bp, Homo sapiens
tcctcttcagcagag

SEQ ID NO: 968736 - DNA, 15 bp, Homo sapiens
cctcttcagcagaga

SEQ ID NO: 968737 - DNA, 15 bp, Homo sapiens
ctcttcagcagagaa

SEQ ID NO: 968738 - DNA, 15 bp, Homo sapiens
tcttcagcagagaaa

SEQ ID NO: 968739 - DNA, 15 bp, Homo sapiens
cttcagcagagaaac

SEQ ID NO: 968740 - DNA, 15 bp, Homo sapiens
ttcagcagagaaacc

SEQ ID NO: 968741 - DNA, 15 bp, Homo sapiens
tcagcagagaaacca

SEQ ID NO: 968742 - DNA, 15 bp, Homo sapiens
cagcagagaaaccat

SEQ ID NO: 968743 - DNA, 15 bp, Homo sapiens
agcagagaaaccatc

SEQ ID NO: 968744 - DNA, 15 bp, Homo sapiens
gcagagaaaccatct

SEQ ID NO: 968745 - DNA, 15 bp, Homo sapiens
cagagaaaccatctc

SEQ ID NO: 968746 - DNA, 15 bp, Homo sapiens
agagaaaccatctcg

SEQ ID NO: 968747 - DNA, 15 bp, Homo sapiens
gagaaaccatctcgg

SEQ ID NO: 968748 - DNA, 15 bp, Homo sapiens
agaaaccatctcggg

SEQ ID NO: 968749 - DNA, 15 bp, Homo sapiens
gaaaccatctcgggg

SEQ ID NO: 968750 - DNA, 15 bp, Homo sapiens
aaaccatctcggggg

SEQ ID NO: 968751 - DNA, 15 bp, Homo sapiens
aaccatctcgggggc

SEQ ID NO: 968752 - DNA, 15 bp, Homo sapiens
accatctcgggggca

SEQ ID NO: 968753 - DNA, 15 bp, Homo sapiens
ccatctcgggggcag

SEQ ID NO: 968754 - DNA, 15 bp, Homo sapiens
catctcgggggcagc

SEQ ID NO: 968755 - DNA, 15 bp, Homo sapiens
atctcgggggcagcc

SEQ ID NO: 968756 - DNA, 15 bp, Homo sapiens
tctcgggggcagccc

SEQ ID NO: 968757 - DNA, 15 bp, Homo sapiens
ctcgggggcagccct

SEQ ID NO: 968758 - DNA, 15 bp, Homo sapiens
tcgggggcagccctg

SEQ ID NO: 968759 - DNA, 15 bp, Homo sapiens
cgggggcagccctgg

SEQ ID NO: 968760 - DNA, 15 bp, Homo sapiens
gggggcagccctggg

SEQ ID NO: 968761 - DNA, 15 bp, Homo sapiens
ggggcagccctggga

SEQ ID NO: 968762 - DNA, 15 bp, Homo sapiens
gggcagccctgggag

SEQ ID NO: 968763 - DNA, 15 bp, Homo sapiens
ggcagccctgggagt

SEQ ID NO: 968764 - DNA, 15 bp, Homo sapiens
gcagccctgggagtg

SEQ ID NO: 968765 - DNA, 15 bp, Homo sapiens
cagccctgggagtgg

SEQ ID NO: 968766 - DNA, 15 bp, Homo sapiens
agccctgggagtggc

SEQ ID NO: 968767 - DNA, 15 bp, Homo sapiens
gccctgggagtggca

SEQ ID NO: 968768 - DNA, 15 bp, Homo sapiens
ccctgggagtggcac

SEQ ID NO: 968769 - DNA, 15 bp, Homo sapiens
cctgggagtggcaca

SEQ ID NO: 968770 - DNA, 15 bp, Homo sapiens
ctgggagtggcacat

SEQ ID NO: 968771 - DNA, 15 bp, Homo sapiens
tgggagtggcacatg

SEQ ID NO: 968772 - DNA, 15 bp, Homo sapiens
gggagtggcacatga

SEQ ID NO: 968773 - DNA, 15 bp, Homo sapiens
ggagtggcacatgag

SEQ ID NO: 968774 - DNA, 15 bp, Homo sapiens
gagtggcacatgagg

SEQ ID NO: 968775 - DNA, 15 bp, Homo sapiens
agtggcacatgaggg

SEQ ID NO: 968776 - DNA, 15 bp, Homo sapiens
gtggcacatgagggt

SEQ ID NO: 968777 - DNA, 15 bp, Homo sapiens
tggcacatgagggta

SEQ ID NO: 968778 - DNA, 15 bp, Homo sapiens
ggcacatgagggtaa

SEQ ID NO: 968779 - DNA, 15 bp, Homo sapiens
gcacatgagggtaac

SEQ ID NO: 968780 - DNA, 15 bp, Homo sapiens
cacatgagggtaaca

SEQ ID NO: 968781 - DNA, 15 bp, Homo sapiens
acatgagggtaacaa

SEQ ID NO: 968782 - DNA, 15 bp, Homo sapiens
catgagggtaacaag

SEQ ID NO: 968783 - DNA, 15 bp, Homo sapiens
atgagggtaacaagg

SEQ ID NO: 968784 - DNA, 15 bp, Homo sapiens
tgagggtaacaagga

SEQ ID NO: 968785 - DNA, 15 bp, Homo sapiens
gagggtaacaaggac

SEQ ID NO: 968786 - DNA, 15 bp, Homo sapiens
agggtaacaaggact

SEQ ID NO: 968787 - DNA, 15 bp, Homo sapiens
gggtaacaaggactg

SEQ ID NO: 968788 - DNA, 15 bp, Homo sapiens
ggtaacaaggactgg

SEQ ID NO: 968789 - DNA, 15 bp, Homo sapiens
gtaacaaggactggg

SEQ ID NO: 968790 - DNA, 15 bp, Homo sapiens
taacaaggactgggg

SEQ ID NO: 968791 - DNA, 15 bp, Homo sapiens
aacaaggactgggga

SEQ ID NO: 968792 - DNA, 15 bp, Homo sapiens
acaaggactggggat

SEQ ID NO: 968793 - DNA, 15 bp, Homo sapiens
caaggactggggatc

SEQ ID NO: 968794 - DNA, 15 bp, Homo sapiens
aaggactggggatcc

SEQ ID NO: 968795 - DNA, 15 bp, Homo sapiens
aggactggggatcct

SEQ ID NO: 968796 - DNA, 15 bp, Homo sapiens
ggactggggatcctg

SEQ ID NO: 968797 - DNA, 15 bp, Homo sapiens
gactggggatcctgg

SEQ ID NO: 968798 - DNA, 15 bp, Homo sapiens
actggggatcctggc

SEQ ID NO: 968799 - DNA, 15 bp, Homo sapiens
ctggggatcctggca

SEQ ID NO: 968800 - DNA, 15 bp, Homo sapiens
tggggatcctggcat

SEQ ID NO: 968801 - DNA, 15 bp, Homo sapiens
ggggatcctggcatc

SEQ ID NO: 968802 - DNA, 15 bp, Homo sapiens
gggatcctggcatcc

SEQ ID NO: 968803 - DNA, 15 bp, Homo sapiens
ggatcctggcatccc

SEQ ID NO: 968804 - DNA, 15 bp, Homo sapiens
gatcctggcatcccg

SEQ ID NO: 968805 - DNA, 15 bp, Homo sapiens
atcctggcatcccga

SEQ ID NO: 968806 - DNA, 15 bp, Homo sapiens
tcctggcatcccgat

SEQ ID NO: 968807 - DNA, 15 bp, Homo sapiens
cctggcatcccgatg

SEQ ID NO: 968808 - DNA, 15 bp, Homo sapiens
ctggcatcccgatgc

SEQ ID NO: 968809 - DNA, 15 bp, Homo sapiens
tggcatcccgatgct

SEQ ID NO: 968810 - DNA, 15 bp, Homo sapiens
ggcatcccgatgctc

SEQ ID NO: 968811 - DNA, 15 bp, Homo sapiens
gcatcccgatgctcc

SEQ ID NO: 968812 - DNA, 15 bp, Homo sapiens
catcccgatgctcca

SEQ ID NO: 968813 - DNA, 15 bp, Homo sapiens
atcccgatgctccaa

SEQ ID NO: 968814 - DNA, 15 bp, Homo sapiens
tcccgatgctccaag

SEQ ID NO: 968815 - DNA, 15 bp, Homo sapiens
cccgatgctccaagc

SEQ ID NO: 968816 - DNA, 15 bp, Homo sapiens
ccgatgctccaagca

SEQ ID NO: 968817 - DNA, 15 bp, Homo sapiens
cgatgctccaagcaa

SEQ ID NO: 968818 - DNA, 15 bp, Homo sapiens
gatgctccaagcaaa

SEQ ID NO: 968819 - DNA, 15 bp, Homo sapiens
atgctccaagcaaac

SEQ ID NO: 968820 - DNA, 15 bp, Homo sapiens
tgctccaagcaaacc

SEQ ID NO: 968821 - DNA, 15 bp, Homo sapiens
gctccaagcaaacct

SEQ ID NO: 968822 - DNA, 15 bp, Homo sapiens
ctccaagcaaaccta

SEQ ID NO: 968823 - DNA, 15 bp, Homo sapiens
tccaagcaaacctag

SEQ ID NO: 968824 - DNA, 15 bp, Homo sapiens
ccaagcaaacctagc

SEQ ID NO: 968825 - DNA, 15 bp, Homo sapiens
caagcaaacctagcc

SEQ ID NO: 968826 - DNA, 15 bp, Homo sapiens
aagcaaacctagccc

SEQ ID NO: 968827 - DNA, 15 bp, Homo sapiens
agcaaacctagcccg

SEQ ID NO: 968828 - DNA, 15 bp, Homo sapiens
gcaaacctagcccgg

SEQ ID NO: 968829 - DNA, 15 bp, Homo sapiens
caaacctagcccggg

SEQ ID NO: 968830 - DNA, 15 bp, Homo sapiens
aaacctagcccgggg

SEQ ID NO: 968831 - DNA, 15 bp, Homo sapiens
aacctagcccggggt

SEQ ID NO: 968832 - DNA, 15 bp, Homo sapiens
acctagcccggggtg

SEQ ID NO: 968833 - DNA, 15 bp, Homo sapiens
cctagcccggggtgg

SEQ ID NO: 968834 - DNA, 15 bp, Homo sapiens
ctagcccggggtggg

SEQ ID NO: 968835 - DNA, 15 bp, Homo sapiens
tagcccggggtgggg

SEQ ID NO: 968836 - DNA, 15 bp, Homo sapiens
agcccggggtgggga

SEQ ID NO: 968837 - DNA, 15 bp, Homo sapiens
gcccggggtggggat

SEQ ID NO: 968838 - DNA, 15 bp, Homo sapiens
cccggggtggggatt

SEQ ID NO: 968839 - DNA, 15 bp, Homo sapiens
ccggggtggggattc

SEQ ID NO: 968840 - DNA, 15 bp, Homo sapiens
cggggtggggattcc

SEQ ID NO: 968841 - DNA, 15 bp, Homo sapiens
ggggtggggattccc

SEQ ID NO: 968842 - DNA, 15 bp, Homo sapiens
gggtggggattccct

SEQ ID NO: 968843 - DNA, 15 bp, Homo sapiens
ggtggggattccctg

SEQ ID NO: 968844 - DNA, 15 bp, Homo sapiens
gtggggattccctga

SEQ ID NO: 968845 - DNA, 15 bp, Homo sapiens
tggggattccctgat

SEQ ID NO: 968846 - DNA, 15 bp, Homo sapiens
ggggattccctgatg

SEQ ID NO: 968847 - DNA, 15 bp, Homo sapiens
gggattccctgatgc

SEQ ID NO: 968848 - DNA, 15 bp, Homo sapiens
ggattccctgatgca

SEQ ID NO: 968849 - DNA, 15 bp, Homo sapiens
gattccctgatgcag

SEQ ID NO: 968850 - DNA, 15 bp, Homo sapiens
attccctgatgcagc

SEQ ID NO: 968851 - DNA, 15 bp, Homo sapiens
ttccctgatgcagcc

SEQ ID NO: 968852 - DNA, 15 bp, Homo sapiens
tccctgatgcagcca

SEQ ID NO: 968853 - DNA, 15 bp, Homo sapiens
ccctgatgcagccaa

SEQ ID NO: 968854 - DNA, 15 bp, Homo sapiens
cctgatgcagccaag

SEQ ID NO: 968855 - DNA, 15 bp, Homo sapiens
ctgatgcagccaagc

SEQ ID NO: 968856 - DNA, 15 bp, Homo sapiens
tgatgcagccaagct

SEQ ID NO: 968857 - DNA, 15 bp, Homo sapiens
gatgcagccaagctc

SEQ ID NO: 968858 - DNA, 15 bp, Homo sapiens
atgcagccaagctcc

SEQ ID NO: 968859 - DNA, 15 bp, Homo sapiens
tgcagccaagctccc

SEQ ID NO: 968860 - DNA, 15 bp, Homo sapiens
gcagccaagctccca

SEQ ID NO: 968861 - DNA, 15 bp, Homo sapiens
cagccaagctcccaa

SEQ ID NO: 968862 - DNA, 15 bp, Homo sapiens
agccaagctcccaat

SEQ ID NO: 968863 - DNA, 15 bp, Homo sapiens
gccaagctcccaatg

SEQ ID NO: 968864 - DNA, 15 bp, Homo sapiens
ccaagctcccaatga

SEQ ID NO: 968865 - DNA, 15 bp, Homo sapiens
caagctcccaatgag

SEQ ID NO: 968866 - DNA, 15 bp, Homo sapiens
aagctcccaatgagg

SEQ ID NO: 968867 - DNA, 15 bp, Homo sapiens
agctcccaatgaggg

SEQ ID NO: 968868 - DNA, 15 bp, Homo sapiens
gctcccaatgaggga

SEQ ID NO: 968869 - DNA, 15 bp, Homo sapiens
ctcccaatgagggac

SEQ ID NO: 968870 - DNA, 15 bp, Homo sapiens
tcccaatgagggacc

SEQ ID NO: 968871 - DNA, 15 bp, Homo sapiens
cccaatgagggacca

SEQ ID NO: 968872 - DNA, 15 bp, Homo sapiens
ccaatgagggaccag

SEQ ID NO: 968873 - DNA, 15 bp, Homo sapiens
caatgagggaccagt

SEQ ID NO: 968874 - DNA, 15 bp, Homo sapiens
aatgagggaccagtg

SEQ ID NO: 968875 - DNA, 15 bp, Homo sapiens
atgagggaccagtgg

SEQ ID NO: 968876 - DNA, 15 bp, Homo sapiens
tgagggaccagtggg

SEQ ID NO: 968877 - DNA, 15 bp, Homo sapiens
gagggaccagtgggg

SEQ ID NO: 968878 - DNA, 15 bp, Homo sapiens
agggaccagtggggc

SEQ ID NO: 968879 - DNA, 15 bp, Homo sapiens
gggaccagtggggct

SEQ ID NO: 968880 - DNA, 15 bp, Homo sapiens
ggaccagtggggctg

SEQ ID NO: 968881 - DNA, 15 bp, Homo sapiens
gaccagtggggctgt

SEQ ID NO: 968882 - DNA, 15 bp, Homo sapiens
accagtggggctgtc

SEQ ID NO: 968883 - DNA, 15 bp, Homo sapiens
ccagtggggctgtcc

SEQ ID NO: 968884 - DNA, 15 bp, Homo sapiens
cagtggggctgtcct

SEQ ID NO: 968885 - DNA, 15 bp, Homo sapiens
agtggggctgtcctc

SEQ ID NO: 968886 - DNA, 15 bp, Homo sapiens
gtggggctgtcctca

SEQ ID NO: 968887 - DNA, 15 bp, Homo sapiens
tggggctgtcctcag

SEQ ID NO: 968888 - DNA, 15 bp, Homo sapiens
ggggctgtcctcagc

SEQ ID NO: 968889 - DNA, 15 bp, Homo sapiens
gggctgtcctcagcc

SEQ ID NO: 968890 - DNA, 15 bp, Homo sapiens
ggctgtcctcagccc

SEQ ID NO: 968891 - DNA, 15 bp, Homo sapiens
gctgtcctcagccca

SEQ ID NO: 968892 - DNA, 15 bp, Homo sapiens
ctgtcctcagcccag

SEQ ID NO: 968893 - DNA, 15 bp, Homo sapiens
tgtcctcagcccagc

SEQ ID NO: 968894 - DNA, 15 bp, Homo sapiens
gtcctcagcccagcc

SEQ ID NO: 968895 - DNA, 15 bp, Homo sapiens
tcctcagcccagccc

SEQ ID NO: 968896 - DNA, 15 bp, Homo sapiens
cctcagcccagccca

SEQ ID NO: 968897 - DNA, 15 bp, Homo sapiens
ctcagcccagcccat

SEQ ID NO: 968898 - DNA, 15 bp, Homo sapiens
tcagcccagcccatc

SEQ ID NO: 968899 - DNA, 15 bp, Homo sapiens
cagcccagcccatca

SEQ ID NO: 968900 - DNA, 15 bp, Homo sapiens
agcccagcccatcaa

SEQ ID NO: 968901 - DNA, 15 bp, Homo sapiens
gcccagcccatcaag

SEQ ID NO: 968902 - DNA, 15 bp, Homo sapiens
cccagcccatcaagg

SEQ ID NO: 968903 - DNA, 15 bp, Homo sapiens
ccagcccatcaagga

SEQ ID NO: 968904 - DNA, 15 bp, Homo sapiens
cagcccatcaaggac

SEQ ID NO: 968905 - DNA, 15 bp, Homo sapiens
agcccatcaaggaca

SEQ ID NO: 968906 - DNA, 15 bp, Homo sapiens
gcccatcaaggacaa

SEQ ID NO: 968907 - DNA, 15 bp, Homo sapiens
cccatcaaggacaag

SEQ ID NO: 968908 - DNA, 15 bp, Homo sapiens
ccatcaaggacaaga

SEQ ID NO: 968909 - DNA, 15 bp, Homo sapiens
catcaaggacaagag

SEQ ID NO: 968910 - DNA, 15 bp, Homo sapiens
atcaaggacaagagg

SEQ ID NO: 968911 - DNA, 15 bp, Homo sapiens
tcaaggacaagaggg

SEQ ID NO: 968912 - DNA, 15 bp, Homo sapiens
caaggacaagaggga

SEQ ID NO: 968913 - DNA, 15 bp, Homo sapiens
aaggacaagagggac

SEQ ID NO: 968914 - DNA, 15 bp, Homo sapiens
aggacaagagggaca

SEQ ID NO: 968915 - DNA, 15 bp, Homo sapiens
ggacaagagggacag

SEQ ID NO: 968916 - DNA, 15 bp, Homo sapiens
gacaagagggacagc

SEQ ID NO: 968917 - DNA, 15 bp, Homo sapiens
acaagagggacagca

SEQ ID NO: 968918 - DNA, 15 bp, Homo sapiens
caagagggacagcag

SEQ ID NO: 968919 - DNA, 15 bp, Homo sapiens
aagagggacagcaga

SEQ ID NO: 968920 - DNA, 15 bp, Homo sapiens
agagggacagcagaa

SEQ ID NO: 968921 - DNA, 15 bp, Homo sapiens
gagggacagcagaag

SEQ ID NO: 968922 - DNA, 15 bp, Homo sapiens
agggacagcagaagg

SEQ ID NO: 968923 - DNA, 15 bp, Homo sapiens
gggacagcagaaggt

SEQ ID NO: 968924 - DNA, 15 bp, Homo sapiens
ggacagcagaaggtt

SEQ ID NO: 968925 - DNA, 15 bp, Homo sapiens
gacagcagaaggttc

SEQ ID NO: 968926 - DNA, 15 bp, Homo sapiens
acagcagaaggttca

SEQ ID NO: 968927 - DNA, 15 bp, Homo sapiens
cagcagaaggttcag

SEQ ID NO: 968928 - DNA, 15 bp, Homo sapiens
agcagaaggttcagg

SEQ ID NO: 968929 - DNA, 15 bp, Homo sapiens
gcagaaggttcaggt

SEQ ID NO: 968930 - DNA, 15 bp, Homo sapiens
cagaaggttcaggtc

SEQ ID NO: 968931 - DNA, 15 bp, Homo sapiens
agaaggttcaggtcc

SEQ ID NO: 968932 - DNA, 15 bp, Homo sapiens
gaaggttcaggtccc

SEQ ID NO: 968933 - DNA, 15 bp, Homo sapiens
aaggttcaggtcccc

SEQ ID NO: 968934 - DNA, 15 bp, Homo sapiens
aggttcaggtcccca

SEQ ID NO: 968935 - DNA, 15 bp, Homo sapiens
ggttcaggtccccag

SEQ ID NO: 968936 - DNA, 15 bp, Homo sapiens
gttcaggtccccagg

SEQ ID NO: 968937 - DNA, 15 bp, Homo sapiens
ttcaggtccccaggg

SEQ ID NO: 968938 - DNA, 15 bp, Homo sapiens
tcaggtccccagggc

SEQ ID NO: 968939 - DNA, 15 bp, Homo sapiens
caggtccccagggcc

SEQ ID NO: 968940 - DNA, 15 bp, Homo sapiens
aggtccccagggcca

SEQ ID NO: 968941 - DNA, 15 bp, Homo sapiens
ggtccccagggccac

SEQ ID NO: 968942 - DNA, 15 bp, Homo sapiens
gtccccagggccacc

SEQ ID NO: 968943 - DNA, 15 bp, Homo sapiens
tccccagggccacca

SEQ ID NO: 968944 - DNA, 15 bp, Homo sapiens
ccccagggccaccag

SEQ ID NO: 968945 - DNA, 15 bp, Homo sapiens
cccagggccaccagg

SEQ ID NO: 968946 - DNA, 15 bp, Homo sapiens
ccagggccaccaggc

SEQ ID NO: 968947 - DNA, 15 bp, Homo sapiens
cagggccaccaggca

SEQ ID NO: 968948 - DNA, 15 bp, Homo sapiens
agggccaccaggcag

SEQ ID NO: 968949 - DNA, 15 bp, Homo sapiens
gggccaccaggcagg

SEQ ID NO: 968950 - DNA, 15 bp, Homo sapiens
ggccaccaggcagga

SEQ ID NO: 968951 - DNA, 15 bp, Homo sapiens
gccaccaggcaggaa

SEQ ID NO: 968952 - DNA, 15 bp, Homo sapiens
ccaccaggcaggaag

SEQ ID NO: 968953 - DNA, 15 bp, Homo sapiens
caccaggcaggaagg

SEQ ID NO: 968954 - DNA, 15 bp, Homo sapiens
accaggcaggaagga

SEQ ID NO: 968955 - DNA, 15 bp, Homo sapiens
ccaggcaggaaggac

SEQ ID NO: 968956 - DNA, 15 bp, Homo sapiens
caggcaggaaggacc

SEQ ID NO: 968957 - DNA, 15 bp, Homo sapiens
aggcaggaaggacct

SEQ ID NO: 968958 - DNA, 15 bp, Homo sapiens
ggcaggaaggacctt

SEQ ID NO: 968959 - DNA, 15 bp, Homo sapiens
gcaggaaggaccttt

SEQ ID NO: 968960 - DNA, 15 bp, Homo sapiens
caggaaggacctttc

SEQ ID NO: 968961 - DNA, 15 bp, Homo sapiens
aggaaggacctttct

SEQ ID NO: 968962 - DNA, 15 bp, Homo sapiens
ggaaggacctttctc

SEQ ID NO: 968963 - DNA, 15 bp, Homo sapiens
gaaggacctttctct

SEQ ID NO: 968964 - DNA, 15 bp, Homo sapiens
aaggacctttctctc

SEQ ID NO: 968965 - DNA, 15 bp, Homo sapiens
aggacctttctctcc

SEQ ID NO: 968966 - DNA, 15 bp, Homo sapiens
ggacctttctctcca

SEQ ID NO: 968967 - DNA, 15 bp, Homo sapiens
gacctttctctccag

SEQ ID NO: 968968 - DNA, 15 bp, Homo sapiens
acctttctctccagg

SEQ ID NO: 968969 - DNA, 15 bp, Homo sapiens
cctttctctccagga

SEQ ID NO: 968970 - DNA, 15 bp, Homo sapiens
ctttctctccaggaa

SEQ ID NO: 968971 - DNA, 15 bp, Homo sapiens
tttctctccaggaag

SEQ ID NO: 968972 - DNA, 15 bp, Homo sapiens
ttctctccaggaagg

SEQ ID NO: 968973 - DNA, 15 bp, Homo sapiens
tctctccaggaagga

SEQ ID NO: 968974 - DNA, 15 bp, Homo sapiens
ctctccaggaaggac

SEQ ID NO: 968975 - DNA, 15 bp, Homo sapiens
tctccaggaaggaca

SEQ ID NO: 968976 - DNA, 15 bp, Homo sapiens
ctccaggaaggacac

SEQ ID NO: 968977 - DNA, 15 bp, Homo sapiens
tccaggaaggacaca

SEQ ID NO: 968978 - DNA, 15 bp, Homo sapiens
ccaggaaggacacaa

SEQ ID NO: 968979 - DNA, 15 bp, Homo sapiens
caggaaggacacaag

SEQ ID NO: 968980 - DNA, 15 bp, Homo sapiens
aggaaggacacaagg

SEQ ID NO: 968981 - DNA, 15 bp, Homo sapiens
ggaaggacacaaggt

SEQ ID NO: 968982 - DNA, 15 bp, Homo sapiens
gaaggacacaaggtc

SEQ ID NO: 968983 - DNA, 15 bp, Homo sapiens
aaggacacaaggtcc

SEQ ID NO: 968984 - DNA, 15 bp, Homo sapiens
aggacacaaggtcct

SEQ ID NO: 968985 - DNA, 15 bp, Homo sapiens
ggacacaaggtcctc

SEQ ID NO: 968986 - DNA, 15 bp, Homo sapiens
gacacaaggtcctcc

SEQ ID NO: 968987 - DNA, 15 bp, Homo sapiens
acacaaggtcctcca

SEQ ID NO: 968988 - DNA, 15 bp, Homo sapiens
cacaaggtcctccag

SEQ ID NO: 968989 - DNA, 15 bp, Homo sapiens
acaaggtcctccagc

SEQ ID NO: 968990 - DNA, 15 bp, Homo sapiens
caaggtcctccagcc

SEQ ID NO: 968991 - DNA, 15 bp, Homo sapiens
aaggtcctccagcca

SEQ ID NO: 968992 - DNA, 15 bp, Homo sapiens
aggtcctccagccac

SEQ ID NO: 968993 - DNA, 15 bp, Homo sapiens
ggtcctccagccacc

SEQ ID NO: 968994 - DNA, 15 bp, Homo sapiens
gtcctccagccaccg

SEQ ID NO: 968995 - DNA, 15 bp, Homo sapiens
tcctccagccaccgc

SEQ ID NO: 968996 - DNA, 15 bp, Homo sapiens
cctccagccaccgct

SEQ ID NO: 968997 - DNA, 15 bp, Homo sapiens
ctccagccaccgctg

SEQ ID NO: 968998 - DNA, 15 bp, Homo sapiens
tccagccaccgctgc

SEQ ID NO: 968999 - DNA, 15 bp, Homo sapiens
ccagccaccgctgcc

SEQ ID NO: 969000 - DNA, 15 bp, Homo sapiens
cagccaccgctgcca

SEQ ID NO: 969001 - DNA, 15 bp, Homo sapiens
agccaccgctgccat

SEQ ID NO: 969002 - DNA, 15 bp, Homo sapiens
gccaccgctgccatc

SEQ ID NO: 969003 - DNA, 15 bp, Homo sapiens
ccaccgctgccatcc

SEQ ID NO: 969004 - DNA, 15 bp, Homo sapiens
caccgctgccatccc

SEQ ID NO: 969005 - DNA, 15 bp, Homo sapiens
accgctgccatcccc

SEQ ID NO: 969006 - DNA, 15 bp, Homo sapiens
ccgctgccatccccc

SEQ ID NO: 969007 - DNA, 15 bp, Homo sapiens
cgctgccatcccccc

SEQ ID NO: 969008 - DNA, 15 bp, Homo sapiens
gctgccatccccccg

SEQ ID NO: 969009 - DNA, 15 bp, Homo sapiens
ctgccatccccccgc

SEQ ID NO: 969010 - DNA, 15 bp, Homo sapiens
tgccatccccccgcc

SEQ ID NO: 969011 - DNA, 15 bp, Homo sapiens
gccatccccccgccc

SEQ ID NO: 969012 - DNA, 15 bp, Homo sapiens
ccatccccccgcccc

SEQ ID NO: 969013 - DNA, 15 bp, Homo sapiens
catccccccgccccc

SEQ ID NO: 969014 - DNA, 15 bp, Homo sapiens
atccccccgccccca

SEQ ID NO: 969015 - DNA, 15 bp, Homo sapiens
tccccccgcccccac

SEQ ID NO: 969016 - DNA, 15 bp, Homo sapiens
ccccccgcccccacc

SEQ ID NO: 969017 - DNA, 15 bp, Homo sapiens
cccccgcccccacca

SEQ ID NO: 969018 - DNA, 15 bp, Homo sapiens
ccccgcccccaccac

SEQ ID NO: 969019 - DNA, 15 bp, Homo sapiens
cccgcccccaccaca

SEQ ID NO: 969020 - DNA, 15 bp, Homo sapiens
ccgcccccaccacac

SEQ ID NO: 969021 - DNA, 15 bp, Homo sapiens
cgcccccaccacaca

SEQ ID NO: 969022 - DNA, 15 bp, Homo sapiens
gcccccaccacacag

SEQ ID NO: 969023 - DNA, 15 bp, Homo sapiens
cccccaccacacagc

SEQ ID NO: 969024 - DNA, 15 bp, Homo sapiens
ccccaccacacagcc

SEQ ID NO: 969025 - DNA, 15 bp, Homo sapiens
cccaccacacagccc

SEQ ID NO: 969026 - DNA, 15 bp, Homo sapiens
ccaccacacagcccc

SEQ ID NO: 969027 - DNA, 15 bp, Homo sapiens
caccacacagcccct

SEQ ID NO: 969028 - DNA, 15 bp, Homo sapiens
accacacagccccta

SEQ ID NO: 969029 - DNA, 15 bp, Homo sapiens
ccacacagcccctac

SEQ ID NO: 969030 - DNA, 15 bp, Homo sapiens
cacacagcccctact

SEQ ID NO: 969031 - DNA, 15 bp, Homo sapiens
acacagcccctactt

SEQ ID NO: 969032 - DNA, 15 bp, Homo sapiens
cacagcccctacttg

SEQ ID NO: 969033 - DNA, 15 bp, Homo sapiens
acagcccctacttgt

SEQ ID NO: 969034 - DNA, 15 bp, Homo sapiens
cagcccctacttgtc

SEQ ID NO: 969035 - DNA, 15 bp, Homo sapiens
agcccctacttgtcc

SEQ ID NO: 969036 - DNA, 15 bp, Homo sapiens
gcccctacttgtcct

SEQ ID NO: 969037 - DNA, 15 bp, Homo sapiens
cccctacttgtcctg

SEQ ID NO: 969038 - DNA, 15 bp, Homo sapiens
ccctacttgtcctgg

SEQ ID NO: 969039 - DNA, 15 bp, Homo sapiens
cctacttgtcctggt

SEQ ID NO: 969040 - DNA, 15 bp, Homo sapiens
ctacttgtcctggtc

SEQ ID NO: 969041 - DNA, 15 bp, Homo sapiens
tacttgtcctggtcc

SEQ ID NO: 969042 - DNA, 15 bp, Homo sapiens
acttgtcctggtcct

SEQ ID NO: 969043 - DNA, 15 bp, Homo sapiens
cttgtcctggtcctt

SEQ ID NO: 969044 - DNA, 15 bp, Homo sapiens
ttgtcctggtccttc

SEQ ID NO: 969045 - DNA, 15 bp, Homo sapiens
tgtcctggtccttca

SEQ ID NO: 969046 - DNA, 15 bp, Homo sapiens
gtcctggtccttcaa

SEQ ID NO: 969047 - DNA, 15 bp, Homo sapiens
tcctggtccttcaag

SEQ ID NO: 969048 - DNA, 15 bp, Homo sapiens
cctggtccttcaagc

SEQ ID NO: 969049 - DNA, 15 bp, Homo sapiens
ctggtccttcaagcg

SEQ ID NO: 969050 - DNA, 15 bp, Homo sapiens
tggtccttcaagcgg

SEQ ID NO: 969051 - DNA, 15 bp, Homo sapiens
ggtccttcaagcggc

SEQ ID NO: 969052 - DNA, 15 bp, Homo sapiens
gtccttcaagcggcc

SEQ ID NO: 969053 - DNA, 15 bp, Homo sapiens
tccttcaagcggccg

SEQ ID NO: 969054 - DNA, 15 bp, Homo sapiens
ccttcaagcggccga

SEQ ID NO: 969055 - DNA, 15 bp, Homo sapiens
cttcaagcggccgag

SEQ ID NO: 969056 - DNA, 15 bp, Homo sapiens
ttcaagcggccgagc

SEQ ID NO: 969057 - DNA, 15 bp, Homo sapiens
tcaagcggccgagct

SEQ ID NO: 969058 - DNA, 15 bp, Homo sapiens
caagcggccgagctg

SEQ ID NO: 969059 - DNA, 15 bp, Homo sapiens
aagcggccgagctgc

SEQ ID NO: 969060 - DNA, 15 bp, Homo sapiens
agcggccgagctgca

SEQ ID NO: 969061 - DNA, 15 bp, Homo sapiens
gcggccgagctgcag

SEQ ID NO: 969062 - DNA, 15 bp, Homo sapiens
cggccgagctgcagg

SEQ ID NO: 969063 - DNA, 15 bp, Homo sapiens
ggccgagctgcaggc

SEQ ID NO: 969064 - DNA, 15 bp, Homo sapiens
gccgagctgcaggca

SEQ ID NO: 969065 - DNA, 15 bp, Homo sapiens
ccgagctgcaggcag

SEQ ID NO: 969066 - DNA, 15 bp, Homo sapiens
cgagctgcaggcagg

SEQ ID NO: 969067 - DNA, 15 bp, Homo sapiens
gagctgcaggcaggc

SEQ ID NO: 969068 - DNA, 15 bp, Homo sapiens
agctgcaggcaggcg

SEQ ID NO: 969069 - DNA, 15 bp, Homo sapiens
gctgcaggcaggcgt

SEQ ID NO: 969070 - DNA, 15 bp, Homo sapiens
ctgcaggcaggcgtg

SEQ ID NO: 969071 - DNA, 15 bp, Homo sapiens
tgcaggcaggcgtga

SEQ ID NO: 969072 - DNA, 15 bp, Homo sapiens
gcaggcaggcgtgaa

SEQ ID NO: 969073 - DNA, 15 bp, Homo sapiens
caggcaggcgtgaag

SEQ ID NO: 969074 - DNA, 15 bp, Homo sapiens
aggcaggcgtgaagg

SEQ ID NO: 969075 - DNA, 15 bp, Homo sapiens
ggcaggcgtgaaggc

SEQ ID NO: 969076 - DNA, 15 bp, Homo sapiens
gcaggcgtgaaggcc

SEQ ID NO: 969077 - DNA, 15 bp, Homo sapiens
caggcgtgaaggccc

SEQ ID NO: 969078 - DNA, 15 bp, Homo sapiens
aggcgtgaaggccca

SEQ ID NO: 969079 - DNA, 15 bp, Homo sapiens
ggcgtgaaggcccag

SEQ ID NO: 969080 - DNA, 15 bp, Homo sapiens
gcgtgaaggcccagg

SEQ ID NO: 969081 - DNA, 15 bp, Homo sapiens
cgtgaaggcccaggg

SEQ ID NO: 969082 - DNA, 15 bp, Homo sapiens
gtgaaggcccagggt

SEQ ID NO: 969083 - DNA, 15 bp, Homo sapiens
tgaaggcccagggta

SEQ ID NO: 969084 - DNA, 15 bp, Homo sapiens
gaaggcccagggtaa

SEQ ID NO: 969085 - DNA, 15 bp, Homo sapiens
aaggcccagggtaat

SEQ ID NO: 969086 - DNA, 15 bp, Homo sapiens
aggcccagggtaatc

SEQ ID NO: 969087 - DNA, 15 bp, Homo sapiens
ggcccagggtaatct

SEQ ID NO: 969088 - DNA, 15 bp, Homo sapiens
gcccagggtaatctc

SEQ ID NO: 969089 - DNA, 15 bp, Homo sapiens
cccagggtaatctca

SEQ ID NO: 969090 - DNA, 15 bp, Homo sapiens
ccagggtaatctcag

SEQ ID NO: 969091 - DNA, 15 bp, Homo sapiens
cagggtaatctcagt

SEQ ID NO: 969092 - DNA, 15 bp, Homo sapiens
agggtaatctcagtg

SEQ ID NO: 969093 - DNA, 15 bp, Homo sapiens
gggtaatctcagtga

SEQ ID NO: 969094 - DNA, 15 bp, Homo sapiens
ggtaatctcagtgag

SEQ ID NO: 969095 - DNA, 15 bp, Homo sapiens
gtaatctcagtgagc

SEQ ID NO: 969096 - DNA, 15 bp, Homo sapiens
taatctcagtgagca

SEQ ID NO: 969097 - DNA, 15 bp, Homo sapiens
aatctcagtgagcat

SEQ ID NO: 969098 - DNA, 15 bp, Homo sapiens
atctcagtgagcatg

SEQ ID NO: 969099 - DNA, 15 bp, Homo sapiens
tctcagtgagcatgt

SEQ ID NO: 969100 - DNA, 15 bp, Homo sapiens
ctcagtgagcatgtc

SEQ ID NO: 969101 - DNA, 15 bp, Homo sapiens
tcagtgagcatgtct

SEQ ID NO: 969102 - DNA, 15 bp, Homo sapiens
cagtgagcatgtctg

SEQ ID NO: 969103 - DNA, 15 bp, Homo sapiens
agtgagcatgtctgc

SEQ ID NO: 969104 - DNA, 15 bp, Homo sapiens
gtgagcatgtctgcc

SEQ ID NO: 969105 - DNA, 15 bp, Homo sapiens
tgagcatgtctgcca

SEQ ID NO: 969106 - DNA, 15 bp, Homo sapiens
gagcatgtctgccag

SEQ ID NO: 969107 - DNA, 15 bp, Homo sapiens
agcatgtctgccagc

SEQ ID NO: 969108 - DNA, 15 bp, Homo sapiens
gcatgtctgccagct

SEQ ID NO: 969109 - DNA, 15 bp, Homo sapiens
catgtctgccagctt

SEQ ID NO: 969110 - DNA, 15 bp, Homo sapiens
atgtctgccagcttc

SEQ ID NO: 969111 - DNA, 15 bp, Homo sapiens
tgtctgccagcttct

SEQ ID NO: 969112 - DNA, 15 bp, Homo sapiens
gtctgccagcttctt

SEQ ID NO: 969113 - DNA, 15 bp, Homo sapiens
tctgccagcttcttc

SEQ ID NO: 969114 - DNA, 15 bp, Homo sapiens
ctgccagcttcttct

SEQ ID NO: 969115 - DNA, 15 bp, Homo sapiens
tgccagcttcttctg

SEQ ID NO: 969116 - DNA, 15 bp, Homo sapiens
gccagcttcttctga

SEQ ID NO: 969117 - DNA, 15 bp, Homo sapiens
ccagcttcttctgaa

SEQ ID NO: 969118 - DNA, 15 bp, Homo sapiens
cagcttcttctgaat

SEQ ID NO: 969119 - DNA, 15 bp, Homo sapiens
agcttcttctgaatc

SEQ ID NO: 969120 - DNA, 15 bp, Homo sapiens
gcttcttctgaatca

SEQ ID NO: 969121 - DNA, 15 bp, Homo sapiens
cttcttctgaatcag

SEQ ID NO: 969122 - DNA, 15 bp, Homo sapiens
ttcttctgaatcagc

SEQ ID NO: 969123 - DNA, 15 bp, Homo sapiens
tcttctgaatcagct

SEQ ID NO: 969124 - DNA, 15 bp, Homo sapiens
cttctgaatcagctg

SEQ ID NO: 969125 - DNA, 15 bp, Homo sapiens
ttctgaatcagctgg

SEQ ID NO: 969126 - DNA, 15 bp, Homo sapiens
tctgaatcagctggt

SEQ ID NO: 969127 - DNA, 15 bp, Homo sapiens
ctgaatcagctggtt

SEQ ID NO: 969128 - DNA, 15 bp, Homo sapiens
tgaatcagctggttc

SEQ ID NO: 969129 - DNA, 15 bp, Homo sapiens
gaatcagctggttcc

SEQ ID NO: 969130 - DNA, 15 bp, Homo sapiens
aatcagctggttcct

SEQ ID NO: 969131 - DNA, 15 bp, Homo sapiens
atcagctggttcctg

SEQ ID NO: 969132 - DNA, 15 bp, Homo sapiens
tcagctggttcctgg

SEQ ID NO: 969133 - DNA, 15 bp, Homo sapiens
cagctggttcctggc

SEQ ID NO: 969134 - DNA, 15 bp, Homo sapiens
agctggttcctggcc

SEQ ID NO: 969135 - DNA, 15 bp, Homo sapiens
gctggttcctggcca

SEQ ID NO: 969136 - DNA, 15 bp, Homo sapiens
ctggttcctggccag

SEQ ID NO: 969137 - DNA, 15 bp, Homo sapiens
tggttcctggccagt

SEQ ID NO: 969138 - DNA, 15 bp, Homo sapiens
ggttcctggccagtg

SEQ ID NO: 969139 - DNA, 15 bp, Homo sapiens
gttcctggccagtgg

SEQ ID NO: 969140 - DNA, 15 bp, Homo sapiens
ttcctggccagtggg

SEQ ID NO: 969141 - DNA, 15 bp, Homo sapiens
tcctggccagtggga

SEQ ID NO: 969142 - DNA, 15 bp, Homo sapiens
cctggccagtgggac

SEQ ID NO: 969143 - DNA, 15 bp, Homo sapiens
ctggccagtgggaca

SEQ ID NO: 969144 - DNA, 15 bp, Homo sapiens
tggccagtgggacac

SEQ ID NO: 969145 - DNA, 15 bp, Homo sapiens
ggccagtgggacacc

SEQ ID NO: 969146 - DNA, 15 bp, Homo sapiens
gccagtgggacacca

SEQ ID NO: 969147 - DNA, 15 bp, Homo sapiens
ccagtgggacaccaa

SEQ ID NO: 969148 - DNA, 15 bp, Homo sapiens
cagtgggacaccaaa

SEQ ID NO: 969149 - DNA, 15 bp, Homo sapiens
agtgggacaccaaac

SEQ ID NO: 969150 - DNA, 15 bp, Homo sapiens
gtgggacaccaaact

SEQ ID NO: 969151 - DNA, 15 bp, Homo sapiens
tgggacaccaaactg

SEQ ID NO: 969152 - DNA, 15 bp, Homo sapiens
gggacaccaaactgc

SEQ ID NO: 969153 - DNA, 15 bp, Homo sapiens
ggacaccaaactgca

SEQ ID NO: 969154 - DNA, 15 bp, Homo sapiens
gacaccaaactgcat

SEQ ID NO: 969155 - DNA, 15 bp, Homo sapiens
acaccaaactgcatc

SEQ ID NO: 969156 - DNA, 15 bp, Homo sapiens
caccaaactgcatcc

SEQ ID NO: 969157 - DNA, 15 bp, Homo sapiens
accaaactgcatcct

SEQ ID NO: 969158 - DNA, 15 bp, Homo sapiens
ccaaactgcatccta

SEQ ID NO: 969159 - DNA, 15 bp, Homo sapiens
caaactgcatcctac

SEQ ID NO: 969160 - DNA, 15 bp, Homo sapiens
aaactgcatcctaca

SEQ ID NO: 969161 - DNA, 15 bp, Homo sapiens
aactgcatcctacat

SEQ ID NO: 969162 - DNA, 15 bp, Homo sapiens
actgcatcctacatg

SEQ ID NO: 969163 - DNA, 15 bp, Homo sapiens
ctgcatcctacatgg

SEQ ID NO: 969164 - DNA, 15 bp, Homo sapiens
tgcatcctacatggg

SEQ ID NO: 969165 - DNA, 15 bp, Homo sapiens
gcatcctacatgggc

SEQ ID NO: 969166 - DNA, 15 bp, Homo sapiens
catcctacatgggca

SEQ ID NO: 969167 - DNA, 15 bp, Homo sapiens
atcctacatgggcaa

SEQ ID NO: 969168 - DNA, 15 bp, Homo sapiens
tcctacatgggcaat

SEQ ID NO: 969169 - DNA, 15 bp, Homo sapiens
cctacatgggcaatg

SEQ ID NO: 969170 - DNA, 15 bp, Homo sapiens
ctacatgggcaatgg

SEQ ID NO: 969171 - DNA, 15 bp, Homo sapiens
tacatgggcaatggc

SEQ ID NO: 969172 - DNA, 15 bp, Homo sapiens
acatgggcaatggca

SEQ ID NO: 969173 - DNA, 15 bp, Homo sapiens
catgggcaatggcag

SEQ ID NO: 969174 - DNA, 15 bp, Homo sapiens
atgggcaatggcagg

SEQ ID NO: 969175 - DNA, 15 bp, Homo sapiens
tgggcaatggcaggg

SEQ ID NO: 969176 - DNA, 15 bp, Homo sapiens
gggcaatggcagggt

SEQ ID NO: 969177 - DNA, 15 bp, Homo sapiens
ggcaatggcagggta

SEQ ID NO: 969178 - DNA, 15 bp, Homo sapiens
gcaatggcagggtaa

SEQ ID NO: 969179 - DNA, 15 bp, Homo sapiens
caatggcagggtaag

SEQ ID NO: 969180 - DNA, 15 bp, Homo sapiens
aatggcagggtaaga

SEQ ID NO: 969181 - DNA, 15 bp, Homo sapiens
atggcagggtaagag

SEQ ID NO: 969182 - DNA, 15 bp, Homo sapiens
tggcagggtaagagc

SEQ ID NO: 969183 - DNA, 15 bp, Homo sapiens
ggcagggtaagagcg

SEQ ID NO: 969184 - DNA, 15 bp, Homo sapiens
gcagggtaagagcga

SEQ ID NO: 969185 - DNA, 15 bp, Homo sapiens
cagggtaagagcgag

SEQ ID NO: 969186 - DNA, 15 bp, Homo sapiens
agggtaagagcgagg

SEQ ID NO: 969187 - DNA, 15 bp, Homo sapiens
gggtaagagcgaggg

SEQ ID NO: 969188 - DNA, 15 bp, Homo sapiens
ggtaagagcgagggg

SEQ ID NO: 969189 - DNA, 15 bp, Homo sapiens
gtaagagcgagggga

SEQ ID NO: 969190 - DNA, 15 bp, Homo sapiens
taagagcgaggggag

SEQ ID NO: 969191 - DNA, 15 bp, Homo sapiens
aagagcgaggggagg

SEQ ID NO: 969192 - DNA, 15 bp, Homo sapiens
agagcgaggggaggc

SEQ ID NO: 969193 - DNA, 15 bp, Homo sapiens
gagcgaggggaggcc

SEQ ID NO: 969194 - DNA, 15 bp, Homo sapiens
agcgaggggaggccc

SEQ ID NO: 969195 - DNA, 15 bp, Homo sapiens
gcgaggggaggccca

SEQ ID NO: 969196 - DNA, 15 bp, Homo sapiens
cgaggggaggcccac

SEQ ID NO: 969197 - DNA, 15 bp, Homo sapiens
gaggggaggcccact

SEQ ID NO: 969198 - DNA, 15 bp, Homo sapiens
aggggaggcccactc

SEQ ID NO: 969199 - DNA, 15 bp, Homo sapiens
ggggaggcccactct

SEQ ID NO: 969200 - DNA, 15 bp, Homo sapiens
gggaggcccactctc

SEQ ID NO: 969201 - DNA, 15 bp, Homo sapiens
ggaggcccactctcc

SEQ ID NO: 969202 - DNA, 15 bp, Homo sapiens
gaggcccactctccc

SEQ ID NO: 969203 - DNA, 15 bp, Homo sapiens
aggcccactctccca

SEQ ID NO: 969204 - DNA, 15 bp, Homo sapiens
ggcccactctcccac

SEQ ID NO: 969205 - DNA, 15 bp, Homo sapiens
gcccactctcccacc

SEQ ID NO: 969206 - DNA, 15 bp, Homo sapiens
cccactctcccaccc

SEQ ID NO: 969207 - DNA, 15 bp, Homo sapiens
ccactctcccacccc

SEQ ID NO: 969208 - DNA, 15 bp, Homo sapiens
cactctcccaccccg

SEQ ID NO: 969209 - DNA, 15 bp, Homo sapiens
actctcccaccccgt

SEQ ID NO: 969210 - DNA, 15 bp, Homo sapiens
ctctcccaccccgtc

SEQ ID NO: 969211 - DNA, 15 bp, Homo sapiens
tctcccaccccgtcc

SEQ ID NO: 969212 - DNA, 15 bp, Homo sapiens
ctcccaccccgtccc

SEQ ID NO: 969213 - DNA, 15 bp, Homo sapiens
tcccaccccgtccct

SEQ ID NO: 969214 - DNA, 15 bp, Homo sapiens
cccaccccgtccctg

SEQ ID NO: 969215 - DNA, 15 bp, Homo sapiens
ccaccccgtccctgt

SEQ ID NO: 969216 - DNA, 15 bp, Homo sapiens
caccccgtccctgtc

SEQ ID NO: 969217 - DNA, 15 bp, Homo sapiens
accccgtccctgtcc

SEQ ID NO: 969218 - DNA, 15 bp, Homo sapiens
ccccgtccctgtcct

SEQ ID NO: 969219 - DNA, 15 bp, Homo sapiens
cccgtccctgtcctg

SEQ ID NO: 969220 - DNA, 15 bp, Homo sapiens
ccgtccctgtcctgg

SEQ ID NO: 969221 - DNA, 15 bp, Homo sapiens
cgtccctgtcctggg

SEQ ID NO: 969222 - DNA, 15 bp, Homo sapiens
gtccctgtcctgggg

SEQ ID NO: 969223 - DNA, 15 bp, Homo sapiens
tccctgtcctggggc

SEQ ID NO: 969224 - DNA, 15 bp, Homo sapiens
ccctgtcctggggcc

SEQ ID NO: 969225 - DNA, 15 bp, Homo sapiens
cctgtcctggggccc

SEQ ID NO: 969226 - DNA, 15 bp, Homo sapiens
ctgtcctggggcccc

SEQ ID NO: 969227 - DNA, 15 bp, Homo sapiens
tgtcctggggccccc

SEQ ID NO: 969228 - DNA, 15 bp, Homo sapiens
gtcctggggccccct

SEQ ID NO: 969229 - DNA, 15 bp, Homo sapiens
tcctggggccccctg

SEQ ID NO: 969230 - DNA, 15 bp, Homo sapiens
cctggggccccctgc

SEQ ID NO: 969231 - DNA, 15 bp, Homo sapiens
ctggggccccctgct

SEQ ID NO: 969232 - DNA, 15 bp, Homo sapiens
tggggccccctgctc

SEQ ID NO: 969233 - DNA, 15 bp, Homo sapiens
ggggccccctgctcc

SEQ ID NO: 969234 - DNA, 15 bp, Homo sapiens
gggccccctgctcca

SEQ ID NO: 969235 - DNA, 15 bp, Homo sapiens
ggccccctgctccag

SEQ ID NO: 969236 - DNA, 15 bp, Homo sapiens
gccccctgctccagg

SEQ ID NO: 969237 - DNA, 15 bp, Homo sapiens
ccccctgctccagga

SEQ ID NO: 969238 - DNA, 15 bp, Homo sapiens
cccctgctccaggac

SEQ ID NO: 969239 - DNA, 15 bp, Homo sapiens
ccctgctccaggacg

SEQ ID NO: 969240 - DNA, 15 bp, Homo sapiens
cctgctccaggacgc

SEQ ID NO: 969241 - DNA, 15 bp, Homo sapiens
ctgctccaggacgcc

SEQ ID NO: 969242 - DNA, 15 bp, Homo sapiens
tgctccaggacgcct

SEQ ID NO: 969243 - DNA, 15 bp, Homo sapiens
gctccaggacgcctt

SEQ ID NO: 969244 - DNA, 15 bp, Homo sapiens
ctccaggacgccttc

SEQ ID NO: 969245 - DNA, 15 bp, Homo sapiens
tccaggacgccttcc

SEQ ID NO: 969246 - DNA, 15 bp, Homo sapiens
ccaggacgccttccc

SEQ ID NO: 969247 - DNA, 15 bp, Homo sapiens
caggacgccttccca

SEQ ID NO: 969248 - DNA, 15 bp, Homo sapiens
aggacgccttcccag

SEQ ID NO: 969249 - DNA, 15 bp, Homo sapiens
ggacgccttcccagg

SEQ ID NO: 969250 - DNA, 15 bp, Homo sapiens
gacgccttcccaggc

SEQ ID NO: 969251 - DNA, 15 bp, Homo sapiens
acgccttcccaggct

SEQ ID NO: 969252 - DNA, 15 bp, Homo sapiens
cgccttcccaggctg

SEQ ID NO: 969253 - DNA, 15 bp, Homo sapiens
gccttcccaggctgc

SEQ ID NO: 969254 - DNA, 15 bp, Homo sapiens
ccttcccaggctgcc

SEQ ID NO: 969255 - DNA, 15 bp, Homo sapiens
cttcccaggctgcct

SEQ ID NO: 969256 - DNA, 15 bp, Homo sapiens
ttcccaggctgcctc

SEQ ID NO: 969257 - DNA, 15 bp, Homo sapiens
tcccaggctgcctca

SEQ ID NO: 969258 - DNA, 15 bp, Homo sapiens
cccaggctgcctcag

SEQ ID NO: 969259 - DNA, 15 bp, Homo sapiens
ccaggctgcctcagt

SEQ ID NO: 969260 - DNA, 15 bp, Homo sapiens
caggctgcctcagtg

SEQ ID NO: 969261 - DNA, 15 bp, Homo sapiens
aggctgcctcagtgc

SEQ ID NO: 969262 - DNA, 15 bp, Homo sapiens
ggctgcctcagtgcc

SEQ ID NO: 969263 - DNA, 15 bp, Homo sapiens
gctgcctcagtgccc

SEQ ID NO: 969264 - DNA, 15 bp, Homo sapiens
ctgcctcagtgcccc

SEQ ID NO: 969265 - DNA, 15 bp, Homo sapiens
tgcctcagtgccccc

SEQ ID NO: 969266 - DNA, 15 bp, Homo sapiens
gcctcagtgccccca

SEQ ID NO: 969267 - DNA, 15 bp, Homo sapiens
cctcagtgcccccaa

SEQ ID NO: 969268 - DNA, 15 bp, Homo sapiens
ctcagtgcccccaag

SEQ ID NO: 969269 - DNA, 15 bp, Homo sapiens
tcagtgcccccaagc

SEQ ID NO: 969270 - DNA, 15 bp, Homo sapiens
cagtgcccccaagct

SEQ ID NO: 969271 - DNA, 15 bp, Homo sapiens
agtgcccccaagctt

SEQ ID NO: 969272 - DNA, 15 bp, Homo sapiens
gtgcccccaagcttg

SEQ ID NO: 969273 - DNA, 15 bp, Homo sapiens
tgcccccaagcttgc

SEQ ID NO: 969274 - DNA, 15 bp, Homo sapiens
gcccccaagcttgcc

SEQ ID NO: 969275 - DNA, 15 bp, Homo sapiens
cccccaagcttgccc

SEQ ID NO: 969276 - DNA, 15 bp, Homo sapiens
ccccaagcttgccct

SEQ ID NO: 969277 - DNA, 15 bp, Homo sapiens
cccaagcttgccctg

SEQ ID NO: 969278 - DNA, 15 bp, Homo sapiens
ccaagcttgccctgg

SEQ ID NO: 969279 - DNA, 15 bp, Homo sapiens
caagcttgccctggc

SEQ ID NO: 969280 - DNA, 15 bp, Homo sapiens
aagcttgccctggcc

SEQ ID NO: 969281 - DNA, 15 bp, Homo sapiens
agcttgccctggccc

SEQ ID NO: 969282 - DNA, 15 bp, Homo sapiens
gcttgccctggccct

SEQ ID NO: 969283 - DNA, 15 bp, Homo sapiens
cttgccctggccctg

SEQ ID NO: 969284 - DNA, 15 bp, Homo sapiens
ttgccctggccctgc

SEQ ID NO: 969285 - DNA, 15 bp, Homo sapiens
tgccctggccctgcc

SEQ ID NO: 969286 - DNA, 15 bp, Homo sapiens
gccctggccctgccg

SEQ ID NO: 969287 - DNA, 15 bp, Homo sapiens
ccctggccctgccgt

SEQ ID NO: 969288 - DNA, 15 bp, Homo sapiens
cctggccctgccgtt

SEQ ID NO: 969289 - DNA, 15 bp, Homo sapiens
ctggccctgccgttg

SEQ ID NO: 969290 - DNA, 15 bp, Homo sapiens
tggccctgccgttga

SEQ ID NO: 969291 - DNA, 15 bp, Homo sapiens
ggccctgccgttgac

SEQ ID NO: 969292 - DNA, 15 bp, Homo sapiens
gccctgccgttgact

SEQ ID NO: 969293 - DNA, 15 bp, Homo sapiens
ccctgccgttgactc

SEQ ID NO: 969294 - DNA, 15 bp, Homo sapiens
cctgccgttgactca

SEQ ID NO: 969295 - DNA, 15 bp, Homo sapiens
ctgccgttgactcag

SEQ ID NO: 969296 - DNA, 15 bp, Homo sapiens
tgccgttgactcagc

SEQ ID NO: 969297 - DNA, 15 bp, Homo sapiens
gccgttgactcagcc

SEQ ID NO: 969298 - DNA, 15 bp, Homo sapiens
ccgttgactcagccc

SEQ ID NO: 969299 - DNA, 15 bp, Homo sapiens
cgttgactcagccca

SEQ ID NO: 969300 - DNA, 15 bp, Homo sapiens
gttgactcagcccac

SEQ ID NO: 969301 - DNA, 15 bp, Homo sapiens
ttgactcagcccaca

SEQ ID NO: 969302 - DNA, 15 bp, Homo sapiens
tgactcagcccacag

SEQ ID NO: 969303 - DNA, 15 bp, Homo sapiens
gactcagcccacagc

SEQ ID NO: 969304 - DNA, 15 bp, Homo sapiens
actcagcccacagct

SEQ ID NO: 969305 - DNA, 15 bp, Homo sapiens
ctcagcccacagctg

SEQ ID NO: 969306 - DNA, 15 bp, Homo sapiens
tcagcccacagctgc

SEQ ID NO: 969307 - DNA, 15 bp, Homo sapiens
cagcccacagctgct

SEQ ID NO: 969308 - DNA, 15 bp, Homo sapiens
agcccacagctgctc

SEQ ID NO: 969309 - DNA, 15 bp, Homo sapiens
gcccacagctgctca

SEQ ID NO: 969310 - DNA, 15 bp, Homo sapiens
cccacagctgctcag

SEQ ID NO: 969311 - DNA, 15 bp, Homo sapiens
ccacagctgctcaga

SEQ ID NO: 969312 - DNA, 15 bp, Homo sapiens
cacagctgctcagaa

SEQ ID NO: 969313 - DNA, 15 bp, Homo sapiens
acagctgctcagaag

SEQ ID NO: 969314 - DNA, 15 bp, Homo sapiens
cagctgctcagaagg

SEQ ID NO: 969315 - DNA, 15 bp, Homo sapiens
agctgctcagaagga

SEQ ID NO: 969316 - DNA, 15 bp, Homo sapiens
gctgctcagaaggac

SEQ ID NO: 969317 - DNA, 15 bp, Homo sapiens
ctgctcagaaggacg

SEQ ID NO: 969318 - DNA, 15 bp, Homo sapiens
tgctcagaaggacgt

SEQ ID NO: 969319 - DNA, 15 bp, Homo sapiens
gctcagaaggacgtc

SEQ ID NO: 969320 - DNA, 15 bp, Homo sapiens
ctcagaaggacgtca

SEQ ID NO: 969321 - DNA, 15 bp, Homo sapiens
tcagaaggacgtcac

SEQ ID NO: 969322 - DNA, 15 bp, Homo sapiens
cagaaggacgtcact

SEQ ID NO: 969323 - DNA, 15 bp, Homo sapiens
agaaggacgtcactg

SEQ ID NO: 969324 - DNA, 15 bp, Homo sapiens
gaaggacgtcactgg

SEQ ID NO: 969325 - DNA, 15 bp, Homo sapiens
aaggacgtcactggt

SEQ ID NO: 969326 - DNA, 15 bp, Homo sapiens
aggacgtcactggtc

SEQ ID NO: 969327 - DNA, 15 bp, Homo sapiens
ggacgtcactggtca

SEQ ID NO: 969328 - DNA, 15 bp, Homo sapiens
gacgtcactggtcat

SEQ ID NO: 969329 - DNA, 15 bp, Homo sapiens
acgtcactggtcatt

SEQ ID NO: 969330 - DNA, 15 bp, Homo sapiens
cgtcactggtcattc

SEQ ID NO: 969331 - DNA, 15 bp, Homo sapiens
gtcactggtcattcc

SEQ ID NO: 969332 - DNA, 15 bp, Homo sapiens
tcactggtcattcca

SEQ ID NO: 969333 - DNA, 15 bp, Homo sapiens
cactggtcattccag

SEQ ID NO: 969334 - DNA, 15 bp, Homo sapiens
actggtcattccaga

SEQ ID NO: 969335 - DNA, 15 bp, Homo sapiens
ctggtcattccagag

SEQ ID NO: 969336 - DNA, 15 bp, Homo sapiens
tggtcattccagagc

SEQ ID NO: 969337 - DNA, 15 bp, Homo sapiens
ggtcattccagagca

SEQ ID NO: 969338 - DNA, 15 bp, Homo sapiens
gtcattccagagcaa

SEQ ID NO: 969339 - DNA, 15 bp, Homo sapiens
tcattccagagcaag

SEQ ID NO: 969340 - DNA, 15 bp, Homo sapiens
cattccagagcaagg

SEQ ID NO: 969341 - DNA, 15 bp, Homo sapiens
attccagagcaagga

SEQ ID NO: 969342 - DNA, 15 bp, Homo sapiens
ttccagagcaaggaa

SEQ ID NO: 969343 - DNA, 15 bp, Homo sapiens
tccagagcaaggaac

SEQ ID NO: 969344 - DNA, 15 bp, Homo sapiens
ccagagcaaggaact

SEQ ID NO: 969345 - DNA, 15 bp, Homo sapiens
cagagcaaggaactc

SEQ ID NO: 969346 - DNA, 15 bp, Homo sapiens
agagcaaggaactca

SEQ ID NO: 969347 - DNA, 15 bp, Homo sapiens
gagcaaggaactcag

SEQ ID NO: 969348 - DNA, 15 bp, Homo sapiens
agcaaggaactcagg

SEQ ID NO: 969349 - DNA, 15 bp, Homo sapiens
gcaaggaactcaggc

SEQ ID NO: 969350 - DNA, 15 bp, Homo sapiens
caaggaactcaggcc

SEQ ID NO: 969351 - DNA, 15 bp, Homo sapiens
aaggaactcaggcct

SEQ ID NO: 969352 - DNA, 15 bp, Homo sapiens
aggaactcaggcctg

SEQ ID NO: 969353 - DNA, 15 bp, Homo sapiens
ggaactcaggcctgg

SEQ ID NO: 969354 - DNA, 15 bp, Homo sapiens
gaactcaggcctggt

SEQ ID NO: 969355 - DNA, 15 bp, Homo sapiens
aactcaggcctggtg

SEQ ID NO: 969356 - DNA, 15 bp, Homo sapiens
actcaggcctggtgg

SEQ ID NO: 969357 - DNA, 15 bp, Homo sapiens
ctcaggcctggtggg

SEQ ID NO: 969358 - DNA, 15 bp, Homo sapiens
tcaggcctggtgggt

SEQ ID NO: 969359 - DNA, 15 bp, Homo sapiens
caggcctggtgggtg

SEQ ID NO: 969360 - DNA, 15 bp, Homo sapiens
aggcctggtgggtgg

SEQ ID NO: 969361 - DNA, 15 bp, Homo sapiens
ggcctggtgggtggg

SEQ ID NO: 969362 - DNA, 15 bp, Homo sapiens
gcctggtgggtgggg

SEQ ID NO: 969363 - DNA, 15 bp, Homo sapiens
cctggtgggtggggg

SEQ ID NO: 969364 - DNA, 15 bp, Homo sapiens
ctggtgggtgggggc

SEQ ID NO: 969365 - DNA, 15 bp, Homo sapiens
tggtgggtgggggct

SEQ ID NO: 969366 - DNA, 15 bp, Homo sapiens
ggtgggtgggggctg

SEQ ID NO: 969367 - DNA, 15 bp, Homo sapiens
gtgggtgggggctgg

SEQ ID NO: 969368 - DNA, 15 bp, Homo sapiens
tgggtgggggctggg

SEQ ID NO: 969369 - DNA, 15 bp, Homo sapiens
gggtgggggctgggg

SEQ ID NO: 969370 - DNA, 15 bp, Homo sapiens
ggtgggggctgggga

SEQ ID NO: 969371 - DNA, 15 bp, Homo sapiens
gtgggggctggggag

SEQ ID NO: 969372 - DNA, 15 bp, Homo sapiens
tgggggctggggagt

SEQ ID NO: 969373 - DNA, 15 bp, Homo sapiens
gggggctggggagtc

SEQ ID NO: 969374 - DNA, 15 bp, Homo sapiens
ggggctggggagtca

SEQ ID NO: 969375 - DNA, 15 bp, Homo sapiens
gggctggggagtcac

SEQ ID NO: 969376 - DNA, 15 bp, Homo sapiens
ggctggggagtcacc

SEQ ID NO: 969377 - DNA, 15 bp, Homo sapiens
gctggggagtcaccc

SEQ ID NO: 969378 - DNA, 15 bp, Homo sapiens
ctggggagtcaccca

SEQ ID NO: 969379 - DNA, 15 bp, Homo sapiens
tggggagtcacccat

SEQ ID NO: 969380 - DNA, 15 bp, Homo sapiens
ggggagtcacccatg

SEQ ID NO: 969381 - DNA, 15 bp, Homo sapiens
gggagtcacccatgg

SEQ ID NO: 969382 - DNA, 15 bp, Homo sapiens
ggagtcacccatggt

SEQ ID NO: 969383 - DNA, 15 bp, Homo sapiens
gagtcacccatggta

SEQ ID NO: 969384 - DNA, 15 bp, Homo sapiens
agtcacccatggtat

SEQ ID NO: 969385 - DNA, 15 bp, Homo sapiens
gtcacccatggtata

SEQ ID NO: 969386 - DNA, 15 bp, Homo sapiens
tcacccatggtatag

SEQ ID NO: 969387 - DNA, 15 bp, Homo sapiens
cacccatggtataga

SEQ ID NO: 969388 - DNA, 15 bp, Homo sapiens
acccatggtatagag

SEQ ID NO: 969389 - DNA, 15 bp, Homo sapiens
cccatggtatagaga

SEQ ID NO: 969390 - DNA, 15 bp, Homo sapiens
ccatggtatagagag

SEQ ID NO: 969391 - DNA, 15 bp, Homo sapiens
catggtatagagagt

SEQ ID NO: 969392 - DNA, 15 bp, Homo sapiens
atggtatagagagtg

SEQ ID NO: 969393 - DNA, 15 bp, Homo sapiens
tggtatagagagtga

SEQ ID NO: 969394 - DNA, 15 bp, Homo sapiens
ggtatagagagtgaa

SEQ ID NO: 969395 - DNA, 15 bp, Homo sapiens
gtatagagagtgaaa

SEQ ID NO: 969396 - DNA, 15 bp, Homo sapiens
tatagagagtgaaac

SEQ ID NO: 969397 - DNA, 15 bp, Homo sapiens
atagagagtgaaacc

SEQ ID NO: 969398 - DNA, 15 bp, Homo sapiens
tagagagtgaaaccc

SEQ ID NO: 969399 - DNA, 15 bp, Homo sapiens
agagagtgaaaccca

SEQ ID NO: 969400 - DNA, 15 bp, Homo sapiens
gagagtgaaacccaa

SEQ ID NO: 969401 - DNA, 15 bp, Homo sapiens
agagtgaaacccaag

SEQ ID NO: 969402 - DNA, 15 bp, Homo sapiens
gagtgaaacccaagc

SEQ ID NO: 969403 - DNA, 15 bp, Homo sapiens
agtgaaacccaagct

SEQ ID NO: 969404 - DNA, 15 bp, Homo sapiens
gtgaaacccaagctg

SEQ ID NO: 969405 - DNA, 15 bp, Homo sapiens
tgaaacccaagctgc

SEQ ID NO: 969406 - DNA, 15 bp, Homo sapiens
gaaacccaagctgcc

SEQ ID NO: 969407 - DNA, 15 bp, Homo sapiens
aaacccaagctgccc

SEQ ID NO: 969408 - DNA, 15 bp, Homo sapiens
aacccaagctgcccc

SEQ ID NO: 969409 - DNA, 15 bp, Homo sapiens
acccaagctgcccca

SEQ ID NO: 969410 - DNA, 15 bp, Homo sapiens
cccaagctgccccac

SEQ ID NO: 969411 - DNA, 15 bp, Homo sapiens
ccaagctgccccaca

SEQ ID NO: 969412 - DNA, 15 bp, Homo sapiens
caagctgccccacac

SEQ ID NO: 969413 - DNA, 15 bp, Homo sapiens
aagctgccccacacc

SEQ ID NO: 969414 - DNA, 15 bp, Homo sapiens
agctgccccacaccc

SEQ ID NO: 969415 - DNA, 15 bp, Homo sapiens
gctgccccacacccc

SEQ ID NO: 969416 - DNA, 15 bp, Homo sapiens
ctgccccacaccccc

SEQ ID NO: 969417 - DNA, 15 bp, Homo sapiens
tgccccacaccccca

SEQ ID NO: 969418 - DNA, 15 bp, Homo sapiens
gccccacacccccag

SEQ ID NO: 969419 - DNA, 15 bp, Homo sapiens
ccccacacccccaga

SEQ ID NO: 969420 - DNA, 15 bp, Homo sapiens
cccacacccccagag

SEQ ID NO: 969421 - DNA, 15 bp, Homo sapiens
ccacacccccagaga

SEQ ID NO: 969422 - DNA, 15 bp, Homo sapiens
cacacccccagagaa

SEQ ID NO: 969423 - DNA, 15 bp, Homo sapiens
acacccccagagaat

SEQ ID NO: 969424 - DNA, 15 bp, Homo sapiens
cacccccagagaatc

SEQ ID NO: 969425 - DNA, 15 bp, Homo sapiens
acccccagagaatct

SEQ ID NO: 969426 - DNA, 15 bp, Homo sapiens
cccccagagaatctc

SEQ ID NO: 969427 - DNA, 15 bp, Homo sapiens
ccccagagaatctca

SEQ ID NO: 969428 - DNA, 15 bp, Homo sapiens
cccagagaatctcac

SEQ ID NO: 969429 - DNA, 15 bp, Homo sapiens
ccagagaatctcact

SEQ ID NO: 969430 - DNA, 15 bp, Homo sapiens
cagagaatctcactg

SEQ ID NO: 969431 - DNA, 15 bp, Homo sapiens
agagaatctcactgc

SEQ ID NO: 969432 - DNA, 15 bp, Homo sapiens
gagaatctcactgca

SEQ ID NO: 969433 - DNA, 15 bp, Homo sapiens
agaatctcactgcag

SEQ ID NO: 969434 - DNA, 15 bp, Homo sapiens
gaatctcactgcagc

SEQ ID NO: 969435 - DNA, 15 bp, Homo sapiens
aatctcactgcagcc

SEQ ID NO: 969436 - DNA, 15 bp, Homo sapiens
atctcactgcagccc

SEQ ID NO: 969437 - DNA, 15 bp, Homo sapiens
tctcactgcagccct

SEQ ID NO: 969438 - DNA, 15 bp, Homo sapiens
ctcactgcagccctc

SEQ ID NO: 969439 - DNA, 15 bp, Homo sapiens
tcactgcagccctca

SEQ ID NO: 969440 - DNA, 15 bp, Homo sapiens
cactgcagccctcac

SEQ ID NO: 969441 - DNA, 15 bp, Homo sapiens
actgcagccctcaca

SEQ ID NO: 969442 - DNA, 15 bp, Homo sapiens
ctgcagccctcacac

SEQ ID NO: 969443 - DNA, 15 bp, Homo sapiens
tgcagccctcacaca

SEQ ID NO: 969444 - DNA, 15 bp, Homo sapiens
gcagccctcacacac

SEQ ID NO: 969445 - DNA, 15 bp, Homo sapiens
cagccctcacacacc

SEQ ID NO: 969446 - DNA, 15 bp, Homo sapiens
agccctcacacacct

SEQ ID NO: 969447 - DNA, 15 bp, Homo sapiens
gccctcacacacctg

SEQ ID NO: 969448 - DNA, 15 bp, Homo sapiens
ccctcacacacctgt

SEQ ID NO: 969449 - DNA, 15 bp, Homo sapiens
cctcacacacctgtc

SEQ ID NO: 969450 - DNA, 15 bp, Homo sapiens
ctcacacacctgtcg

SEQ ID NO: 969451 - DNA, 15 bp, Homo sapiens
tcacacacctgtcga

SEQ ID NO: 969452 - DNA, 15 bp, Homo sapiens
cacacacctgtcgag

SEQ ID NO: 969453 - DNA, 15 bp, Homo sapiens
acacacctgtcgagg

SEQ ID NO: 969454 - DNA, 15 bp, Homo sapiens
cacacctgtcgaggg

SEQ ID NO: 969455 - DNA, 15 bp, Homo sapiens
acacctgtcgagggc

SEQ ID NO: 969456 - DNA, 15 bp, Homo sapiens
cacctgtcgagggcg

SEQ ID NO: 969457 - DNA, 15 bp, Homo sapiens
acctgtcgagggcgt

SEQ ID NO: 969458 - DNA, 15 bp, Homo sapiens
cctgtcgagggcgta

SEQ ID NO: 969459 - DNA, 15 bp, Homo sapiens
ctgtcgagggcgtac

SEQ ID NO: 969460 - DNA, 15 bp, Homo sapiens
tgtcgagggcgtact

SEQ ID NO: 969461 - DNA, 15 bp, Homo sapiens
gtcgagggcgtactg

SEQ ID NO: 969462 - DNA, 15 bp, Homo sapiens
tcgagggcgtactgc

SEQ ID NO: 969463 - DNA, 15 bp, Homo sapiens
cgagggcgtactgcc

SEQ ID NO: 969464 - DNA, 15 bp, Homo sapiens
gagggcgtactgccg

SEQ ID NO: 969465 - DNA, 15 bp, Homo sapiens
agggcgtactgccgg

SEQ ID NO: 969466 - DNA, 15 bp, Homo sapiens
gggcgtactgccggg

SEQ ID NO: 969467 - DNA, 15 bp, Homo sapiens
ggcgtactgccgggc

SEQ ID NO: 969468 - DNA, 15 bp, Homo sapiens
gcgtactgccgggct

SEQ ID NO: 969469 - DNA, 15 bp, Homo sapiens
cgtactgccgggctg

SEQ ID NO: 969470 - DNA, 15 bp, Homo sapiens
gtactgccgggctgt

SEQ ID NO: 969471 - DNA, 15 bp, Homo sapiens
tactgccgggctgtg

SEQ ID NO: 969472 - DNA, 15 bp, Homo sapiens
actgccgggctgtgt

SEQ ID NO: 969473 - DNA, 15 bp, Homo sapiens
ctgccgggctgtgtg

SEQ ID NO: 969474 - DNA, 15 bp, Homo sapiens
tgccgggctgtgtgc

SEQ ID NO: 969475 - DNA, 15 bp, Homo sapiens
gccgggctgtgtgca

SEQ ID NO: 969476 - DNA, 15 bp, Homo sapiens
ccgggctgtgtgcaa

SEQ ID NO: 969477 - DNA, 15 bp, Homo sapiens
cgggctgtgtgcaag

SEQ ID NO: 969478 - DNA, 15 bp, Homo sapiens
gggctgtgtgcaagc

SEQ ID NO: 969479 - DNA, 15 bp, Homo sapiens
ggctgtgtgcaagca

SEQ ID NO: 969480 - DNA, 15 bp, Homo sapiens
gctgtgtgcaagcag

SEQ ID NO: 969481 - DNA, 15 bp, Homo sapiens
ctgtgtgcaagcaga

SEQ ID NO: 969482 - DNA, 15 bp, Homo sapiens
tgtgtgcaagcagaa

SEQ ID NO: 969483 - DNA, 15 bp, Homo sapiens
gtgtgcaagcagaac

SEQ ID NO: 969484 - DNA, 15 bp, Homo sapiens
tgtgcaagcagaact

SEQ ID NO: 969485 - DNA, 15 bp, Homo sapiens
gtgcaagcagaactc

SEQ ID NO: 969486 - DNA, 15 bp, Homo sapiens
tgcaagcagaactcc

SEQ ID NO: 969487 - DNA, 15 bp, Homo sapiens
gcaagcagaactccg

SEQ ID NO: 969488 - DNA, 15 bp, Homo sapiens
caagcagaactccga

SEQ ID NO: 969489 - DNA, 15 bp, Homo sapiens
aagcagaactccgaa

SEQ ID NO: 969490 - DNA, 15 bp, Homo sapiens
agcagaactccgaag

SEQ ID NO: 969491 - DNA, 15 bp, Homo sapiens
gcagaactccgaagc

SEQ ID NO: 969492 - DNA, 15 bp, Homo sapiens
cagaactccgaagct

SEQ ID NO: 969493 - DNA, 15 bp, Homo sapiens
agaactccgaagctc

SEQ ID NO: 969494 - DNA, 15 bp, Homo sapiens
gaactccgaagctcc

SEQ ID NO: 969495 - DNA, 15 bp, Homo sapiens
aactccgaagctcca

SEQ ID NO: 969496 - DNA, 15 bp, Homo sapiens
actccgaagctccaa

SEQ ID NO: 969497 - DNA, 15 bp, Homo sapiens
ctccgaagctccaag

SEQ ID NO: 969498 - DNA, 15 bp, Homo sapiens
tccgaagctccaagc

SEQ ID NO: 969499 - DNA, 15 bp, Homo sapiens
ccgaagctccaagca

SEQ ID NO: 969500 - DNA, 15 bp, Homo sapiens
cgaagctccaagcac

SEQ ID NO: 969501 - DNA, 15 bp, Homo sapiens
gaagctccaagcacg

SEQ ID NO: 969502 - DNA, 15 bp, Homo sapiens
aagctccaagcacgc

SEQ ID NO: 969503 - DNA, 15 bp, Homo sapiens
agctccaagcacgcc

SEQ ID NO: 969504 - DNA, 15 bp, Homo sapiens
gctccaagcacgccc

SEQ ID NO: 969505 - DNA, 15 bp, Homo sapiens
ctccaagcacgcccc

SEQ ID NO: 969506 - DNA, 15 bp, Homo sapiens
tccaagcacgcccca

SEQ ID NO: 969507 - DNA, 15 bp, Homo sapiens
ccaagcacgccccac

SEQ ID NO: 969508 - DNA, 15 bp, Homo sapiens
caagcacgccccacg

SEQ ID NO: 969509 - DNA, 15 bp, Homo sapiens
aagcacgccccacgc

SEQ ID NO: 969510 - DNA, 15 bp, Homo sapiens
agcacgccccacgcg

SEQ ID NO: 969511 - DNA, 15 bp, Homo sapiens
gcacgccccacgcga

SEQ ID NO: 969512 - DNA, 15 bp, Homo sapiens
cacgccccacgcgat

SEQ ID NO: 969513 - DNA, 15 bp, Homo sapiens
acgccccacgcgatg

SEQ ID NO: 969514 - DNA, 15 bp, Homo sapiens
cgccccacgcgatgc

SEQ ID NO: 969515 - DNA, 15 bp, Homo sapiens
gccccacgcgatgcc

SEQ ID NO: 969516 - DNA, 15 bp, Homo sapiens
ccccacgcgatgccg

SEQ ID NO: 969517 - DNA, 15 bp, Homo sapiens
cccacgcgatgccgt

SEQ ID NO: 969518 - DNA, 15 bp, Homo sapiens
ccacgcgatgccgta

SEQ ID NO: 969519 - DNA, 15 bp, Homo sapiens
cacgcgatgccgtac

SEQ ID NO: 969520 - DNA, 15 bp, Homo sapiens
acgcgatgccgtacc

SEQ ID NO: 969521 - DNA, 15 bp, Homo sapiens
cgcgatgccgtaccg

SEQ ID NO: 969522 - DNA, 15 bp, Homo sapiens
gcgatgccgtaccgg

SEQ ID NO: 969523 - DNA, 15 bp, Homo sapiens
cgatgccgtaccggg

SEQ ID NO: 969524 - DNA, 15 bp, Homo sapiens
gatgccgtaccgggc

SEQ ID NO: 969525 - DNA, 15 bp, Homo sapiens
atgccgtaccgggcg

SEQ ID NO: 969526 - DNA, 15 bp, Homo sapiens
tgccgtaccgggcgt

SEQ ID NO: 969527 - DNA, 15 bp, Homo sapiens
gccgtaccgggcgtt

SEQ ID NO: 969528 - DNA, 15 bp, Homo sapiens
ccgtaccgggcgttg

SEQ ID NO: 969529 - DNA, 15 bp, Homo sapiens
cgtaccgggcgttgt

SEQ ID NO: 969530 - DNA, 15 bp, Homo sapiens
gtaccgggcgttgtt

SEQ ID NO: 969531 - DNA, 15 bp, Homo sapiens
taccgggcgttgttc

SEQ ID NO: 969532 - DNA, 15 bp, Homo sapiens
accgggcgttgttca

SEQ ID NO: 969533 - DNA, 15 bp, Homo sapiens
ccgggcgttgttcag

SEQ ID NO: 969534 - DNA, 15 bp, Homo sapiens
cgggcgttgttcagg

SEQ ID NO: 969535 - DNA, 15 bp, Homo sapiens
gggcgttgttcaggc

SEQ ID NO: 969536 - DNA, 15 bp, Homo sapiens
ggcgttgttcaggca

SEQ ID NO: 969537 - DNA, 15 bp, Homo sapiens
gcgttgttcaggcag

SEQ ID NO: 969538 - DNA, 15 bp, Homo sapiens
cgttgttcaggcagc

SEQ ID NO: 969539 - DNA, 15 bp, Homo sapiens
gttgttcaggcagcc

SEQ ID NO: 969540 - DNA, 15 bp, Homo sapiens
ttgttcaggcagccg

SEQ ID NO: 969541 - DNA, 15 bp, Homo sapiens
tgttcaggcagccga

SEQ ID NO: 969542 - DNA, 15 bp, Homo sapiens
gttcaggcagccgaa

SEQ ID NO: 969543 - DNA, 15 bp, Homo sapiens
ttcaggcagccgaag

SEQ ID NO: 969544 - DNA, 15 bp, Homo sapiens
tcaggcagccgaagg

SEQ ID NO: 969545 - DNA, 15 bp, Homo sapiens
caggcagccgaaggg

SEQ ID NO: 969546 - DNA, 15 bp, Homo sapiens
aggcagccgaaggga

SEQ ID NO: 969547 - DNA, 15 bp, Homo sapiens
ggcagccgaagggac

SEQ ID NO: 969548 - DNA, 15 bp, Homo sapiens
gcagccgaagggacc

SEQ ID NO: 969549 - DNA, 15 bp, Homo sapiens
cagccgaagggaccc

SEQ ID NO: 969550 - DNA, 15 bp, Homo sapiens
agccgaagggaccct

SEQ ID NO: 969551 - DNA, 15 bp, Homo sapiens
gccgaagggaccctg

SEQ ID NO: 969552 - DNA, 15 bp, Homo sapiens
ccgaagggaccctgt

SEQ ID NO: 969553 - DNA, 15 bp, Homo sapiens
cgaagggaccctgta

SEQ ID NO: 969554 - DNA, 15 bp, Homo sapiens
gaagggaccctgtag

SEQ ID NO: 969555 - DNA, 15 bp, Homo sapiens
aagggaccctgtagg

SEQ ID NO: 969556 - DNA, 15 bp, Homo sapiens
agggaccctgtaggg

SEQ ID NO: 969557 - DNA, 15 bp, Homo sapiens
gggaccctgtagggt

SEQ ID NO: 969558 - DNA, 15 bp, Homo sapiens
ggaccctgtagggtt

SEQ ID NO: 969559 - DNA, 15 bp, Homo sapiens
gaccctgtagggttg

SEQ ID NO: 969560 - DNA, 15 bp, Homo sapiens
accctgtagggttga

SEQ ID NO: 969561 - DNA, 15 bp, Homo sapiens
ccctgtagggttgag

SEQ ID NO: 969562 - DNA, 15 bp, Homo sapiens
cctgtagggttgaga

SEQ ID NO: 969563 - DNA, 15 bp, Homo sapiens
ctgtagggttgagat

SEQ ID NO: 969564 - DNA, 15 bp, Homo sapiens
tgtagggttgagatg

SEQ ID NO: 969565 - DNA, 15 bp, Homo sapiens
gtagggttgagatgg

SEQ ID NO: 969566 - DNA, 15 bp, Homo sapiens
tagggttgagatggc

SEQ ID NO: 969567 - DNA, 15 bp, Homo sapiens
agggttgagatggcg

SEQ ID NO: 969568 - DNA, 15 bp, Homo sapiens
gggttgagatggcgc

SEQ ID NO: 969569 - DNA, 15 bp, Homo sapiens
ggttgagatggcgcc

SEQ ID NO: 969570 - DNA, 15 bp, Homo sapiens
gttgagatggcgcct

SEQ ID NO: 969571 - DNA, 15 bp, Homo sapiens
ttgagatggcgcctc

SEQ ID NO: 969572 - DNA, 15 bp, Homo sapiens
tgagatggcgcctca

SEQ ID NO: 969573 - DNA, 15 bp, Homo sapiens
gagatggcgcctcag

SEQ ID NO: 969574 - DNA, 15 bp, Homo sapiens
agatggcgcctcagg

SEQ ID NO: 969575 - DNA, 15 bp, Homo sapiens
gatggcgcctcaggc

SEQ ID NO: 969576 - DNA, 15 bp, Homo sapiens
atggcgcctcaggcc

SEQ ID NO: 969577 - DNA, 15 bp, Homo sapiens
tggcgcctcaggccc

SEQ ID NO: 969578 - DNA, 15 bp, Homo sapiens
ggcgcctcaggccca

SEQ ID NO: 969579 - DNA, 15 bp, Homo sapiens
gcgcctcaggcccac

SEQ ID NO: 969580 - DNA, 15 bp, Homo sapiens
cgcctcaggcccacc

SEQ ID NO: 969581 - DNA, 15 bp, Homo sapiens
gcctcaggcccaccc

SEQ ID NO: 969582 - DNA, 15 bp, Homo sapiens
cctcaggcccaccca

SEQ ID NO: 969583 - DNA, 15 bp, Homo sapiens
ctcaggcccacccaa

SEQ ID NO: 969584 - DNA, 15 bp, Homo sapiens
tcaggcccacccaag

SEQ ID NO: 969585 - DNA, 15 bp, Homo sapiens
caggcccacccaaga

SEQ ID NO: 969586 - DNA, 15 bp, Homo sapiens
aggcccacccaagag

SEQ ID NO: 969587 - DNA, 15 bp, Homo sapiens
ggcccacccaagaga

SEQ ID NO: 969588 - DNA, 15 bp, Homo sapiens
gcccacccaagagac

SEQ ID NO: 969589 - DNA, 15 bp, Homo sapiens
cccacccaagagaca

SEQ ID NO: 969590 - DNA, 15 bp, Homo sapiens
ccacccaagagacac

SEQ ID NO: 969591 - DNA, 15 bp, Homo sapiens
cacccaagagacacc

SEQ ID NO: 969592 - DNA, 15 bp, Homo sapiens
acccaagagacacca

SEQ ID NO: 969593 - DNA, 15 bp, Homo sapiens
cccaagagacaccaa

SEQ ID NO: 969594 - DNA, 15 bp, Homo sapiens
ccaagagacaccaag

SEQ ID NO: 969595 - DNA, 15 bp, Homo sapiens
caagagacaccaaga

SEQ ID NO: 969596 - DNA, 15 bp, Homo sapiens
aagagacaccaagag

SEQ ID NO: 969597 - DNA, 15 bp, Homo sapiens
agagacaccaagagg

SEQ ID NO: 969598 - DNA, 15 bp, Homo sapiens
gagacaccaagaggg

SEQ ID NO: 969599 - DNA, 15 bp, Homo sapiens
agacaccaagagggc

SEQ ID NO: 969600 - DNA, 15 bp, Homo sapiens
gacaccaagagggcc

SEQ ID NO: 969601 - DNA, 15 bp, Homo sapiens
acaccaagagggcct

SEQ ID NO: 969602 - DNA, 15 bp, Homo sapiens
caccaagagggccta

SEQ ID NO: 969603 - DNA, 15 bp, Homo sapiens
accaagagggcctat

SEQ ID NO: 969604 - DNA, 15 bp, Homo sapiens
ccaagagggcctatg

SEQ ID NO: 969605 - DNA, 15 bp, Homo sapiens
caagagggcctatgc

SEQ ID NO: 969606 - DNA, 15 bp, Homo sapiens
aagagggcctatgca

SEQ ID NO: 969607 - DNA, 15 bp, Homo sapiens
agagggcctatgcag

SEQ ID NO: 969608 - DNA, 15 bp, Homo sapiens
gagggcctatgcaga

SEQ ID NO: 969609 - DNA, 15 bp, Homo sapiens
agggcctatgcagaa

SEQ ID NO: 969610 - DNA, 15 bp, Homo sapiens
gggcctatgcagaac

SEQ ID NO: 969611 - DNA, 15 bp, Homo sapiens
ggcctatgcagaacc

SEQ ID NO: 969612 - DNA, 15 bp, Homo sapiens
gcctatgcagaacca

SEQ ID NO: 969613 - DNA, 15 bp, Homo sapiens
cctatgcagaaccaa

SEQ ID NO: 969614 - DNA, 15 bp, Homo sapiens
ctatgcagaaccaac

SEQ ID NO: 969615 - DNA, 15 bp, Homo sapiens
tatgcagaaccaact

SEQ ID NO: 969616 - DNA, 15 bp, Homo sapiens
atgcagaaccaactc

SEQ ID NO: 969617 - DNA, 15 bp, Homo sapiens
tgcagaaccaactct

SEQ ID NO: 969618 - DNA, 15 bp, Homo sapiens
gcagaaccaactctg

SEQ ID NO: 969619 - DNA, 15 bp, Homo sapiens
cagaaccaactctga

SEQ ID NO: 969620 - DNA, 15 bp, Homo sapiens
agaaccaactctgaa

SEQ ID NO: 969621 - DNA, 15 bp, Homo sapiens
gaaccaactctgaag

SEQ ID NO: 969622 - DNA, 15 bp, Homo sapiens
aaccaactctgaagc

SEQ ID NO: 969623 - DNA, 15 bp, Homo sapiens
accaactctgaagca

SEQ ID NO: 969624 - DNA, 15 bp, Homo sapiens
ccaactctgaagcag

SEQ ID NO: 969625 - DNA, 15 bp, Homo sapiens
caactctgaagcagg

SEQ ID NO: 969626 - DNA, 15 bp, Homo sapiens
aactctgaagcaggg

SEQ ID NO: 969627 - DNA, 15 bp, Homo sapiens
actctgaagcaggga

SEQ ID NO: 969628 - DNA, 15 bp, Homo sapiens
ctctgaagcagggaa

SEQ ID NO: 969629 - DNA, 15 bp, Homo sapiens
tctgaagcagggaaa

SEQ ID NO: 969630 - DNA, 15 bp, Homo sapiens
ctgaagcagggaaag

SEQ ID NO: 969631 - DNA, 15 bp, Homo sapiens
tgaagcagggaaagc

SEQ ID NO: 969632 - DNA, 15 bp, Homo sapiens
gaagcagggaaagcc

SEQ ID NO: 969633 - DNA, 15 bp, Homo sapiens
aagcagggaaagcct

SEQ ID NO: 969634 - DNA, 15 bp, Homo sapiens
agcagggaaagcctc

SEQ ID NO: 969635 - DNA, 15 bp, Homo sapiens
gcagggaaagcctcc

SEQ ID NO: 969636 - DNA, 15 bp, Homo sapiens
cagggaaagcctcct

SEQ ID NO: 969637 - DNA, 15 bp, Homo sapiens
agggaaagcctcctc

SEQ ID NO: 969638 - DNA, 15 bp, Homo sapiens
gggaaagcctcctcc

SEQ ID NO: 969639 - DNA, 15 bp, Homo sapiens
ggaaagcctcctccc

SEQ ID NO: 969640 - DNA, 15 bp, Homo sapiens
gaaagcctcctcccc

SEQ ID NO: 969641 - DNA, 15 bp, Homo sapiens
aaagcctcctcccca

SEQ ID NO: 969642 - DNA, 15 bp, Homo sapiens
aagcctcctccccag

SEQ ID NO: 969643 - DNA, 15 bp, Homo sapiens
agcctcctccccagc

SEQ ID NO: 969644 - DNA, 15 bp, Homo sapiens
gcctcctccccagcc

SEQ ID NO: 969645 - DNA, 15 bp, Homo sapiens
cctcctccccagcca

SEQ ID NO: 969646 - DNA, 15 bp, Homo sapiens
ctcctccccagccac

SEQ ID NO: 969647 - DNA, 15 bp, Homo sapiens
tcctccccagccacc

SEQ ID NO: 969648 - DNA, 15 bp, Homo sapiens
cctccccagccaccc

SEQ ID NO: 969649 - DNA, 15 bp, Homo sapiens
ctccccagccacccc

SEQ ID NO: 969650 - DNA, 15 bp, Homo sapiens
tccccagccacccca

SEQ ID NO: 969651 - DNA, 15 bp, Homo sapiens
ccccagccaccccac

SEQ ID NO: 969652 - DNA, 15 bp, Homo sapiens
cccagccaccccacg

SEQ ID NO: 969653 - DNA, 15 bp, Homo sapiens
ccagccaccccacgc

SEQ ID NO: 969654 - DNA, 15 bp, Homo sapiens
cagccaccccacgca

SEQ ID NO: 969655 - DNA, 15 bp, Homo sapiens
agccaccccacgcag

SEQ ID NO: 969656 - DNA, 15 bp, Homo sapiens
gccaccccacgcagg

SEQ ID NO: 969657 - DNA, 15 bp, Homo sapiens
ccaccccacgcaggg

SEQ ID NO: 969658 - DNA, 15 bp, Homo sapiens
caccccacgcagggg

SEQ ID NO: 969659 - DNA, 15 bp, Homo sapiens
accccacgcaggggg

SEQ ID NO: 969660 - DNA, 15 bp, Homo sapiens
ccccacgcaggggga

SEQ ID NO: 969661 - DNA, 15 bp, Homo sapiens
cccacgcagggggac

SEQ ID NO: 969662 - DNA, 15 bp, Homo sapiens
ccacgcagggggact

SEQ ID NO: 969663 - DNA, 15 bp, Homo sapiens
cacgcagggggactc

SEQ ID NO: 969664 - DNA, 15 bp, Homo sapiens
acgcagggggactca

SEQ ID NO: 969665 - DNA, 15 bp, Homo sapiens
cgcagggggactcag

SEQ ID NO: 969666 - DNA, 15 bp, Homo sapiens
gcagggggactcagg

SEQ ID NO: 969667 - DNA, 15 bp, Homo sapiens
cagggggactcaggt

SEQ ID NO: 969668 - DNA, 15 bp, Homo sapiens
agggggactcaggtt

SEQ ID NO: 969669 - DNA, 15 bp, Homo sapiens
gggggactcaggttg

SEQ ID NO: 969670 - DNA, 15 bp, Homo sapiens
ggggactcaggttgt

SEQ ID NO: 969671 - DNA, 15 bp, Homo sapiens
gggactcaggttgtg

SEQ ID NO: 969672 - DNA, 15 bp, Homo sapiens
ggactcaggttgtgg

SEQ ID NO: 969673 - DNA, 15 bp, Homo sapiens
gactcaggttgtggt

SEQ ID NO: 969674 - DNA, 15 bp, Homo sapiens
actcaggttgtggtt

SEQ ID NO: 969675 - DNA, 15 bp, Homo sapiens
ctcaggttgtggttc

SEQ ID NO: 969676 - DNA, 15 bp, Homo sapiens
tcaggttgtggttca

SEQ ID NO: 969677 - DNA, 15 bp, Homo sapiens
caggttgtggttcac

SEQ ID NO: 969678 - DNA, 15 bp, Homo sapiens
aggttgtggttcaca

SEQ ID NO: 969679 - DNA, 15 bp, Homo sapiens
ggttgtggttcacat

SEQ ID NO: 969680 - DNA, 15 bp, Homo sapiens
gttgtggttcacatc

SEQ ID NO: 969681 - DNA, 15 bp, Homo sapiens
ttgtggttcacatca

SEQ ID NO: 969682 - DNA, 15 bp, Homo sapiens
tgtggttcacatcac

SEQ ID NO: 969683 - DNA, 15 bp, Homo sapiens
gtggttcacatcaca

SEQ ID NO: 969684 - DNA, 15 bp, Homo sapiens
tggttcacatcacag

SEQ ID NO: 969685 - DNA, 15 bp, Homo sapiens
ggttcacatcacaga

SEQ ID NO: 969686 - DNA, 15 bp, Homo sapiens
gttcacatcacagat

SEQ ID NO: 969687 - DNA, 15 bp, Homo sapiens
ttcacatcacagatg

SEQ ID NO: 969688 - DNA, 15 bp, Homo sapiens
tcacatcacagatgg

SEQ ID NO: 969689 - DNA, 15 bp, Homo sapiens
cacatcacagatggc

SEQ ID NO: 969690 - DNA, 15 bp, Homo sapiens
acatcacagatggcc

SEQ ID NO: 969691 - DNA, 15 bp, Homo sapiens
catcacagatggccc

SEQ ID NO: 969692 - DNA, 15 bp, Homo sapiens
atcacagatggccct

SEQ ID NO: 969693 - DNA, 15 bp, Homo sapiens
tcacagatggccctg

SEQ ID NO: 969694 - DNA, 15 bp, Homo sapiens
cacagatggccctgg

SEQ ID NO: 969695 - DNA, 15 bp, Homo sapiens
acagatggccctggc

SEQ ID NO: 969696 - DNA, 15 bp, Homo sapiens
cagatggccctggca

SEQ ID NO: 969697 - DNA, 15 bp, Homo sapiens
agatggccctggcac

SEQ ID NO: 969698 - DNA, 15 bp, Homo sapiens
gatggccctggcact

SEQ ID NO: 969699 - DNA, 15 bp, Homo sapiens
atggccctggcactg

SEQ ID NO: 969700 - DNA, 15 bp, Homo sapiens
tggccctggcactga

SEQ ID NO: 969701 - DNA, 15 bp, Homo sapiens
ggccctggcactgaa

SEQ ID NO: 969702 - DNA, 15 bp, Homo sapiens
gccctggcactgaag

SEQ ID NO: 969703 - DNA, 15 bp, Homo sapiens
ccctggcactgaagc

SEQ ID NO: 969704 - DNA, 15 bp, Homo sapiens
cctggcactgaagct

SEQ ID NO: 969705 - DNA, 15 bp, Homo sapiens
ctggcactgaagctc

SEQ ID NO: 969706 - DNA, 15 bp, Homo sapiens
tggcactgaagctcg

SEQ ID NO: 969707 - DNA, 15 bp, Homo sapiens
ggcactgaagctcgg

SEQ ID NO: 969708 - DNA, 15 bp, Homo sapiens
gcactgaagctcggt

SEQ ID NO: 969709 - DNA, 15 bp, Homo sapiens
cactgaagctcggtg

SEQ ID NO: 969710 - DNA, 15 bp, Homo sapiens
actgaagctcggtgc

SEQ ID NO: 969711 - DNA, 15 bp, Homo sapiens
ctgaagctcggtgcc

SEQ ID NO: 969712 - DNA, 15 bp, Homo sapiens
tgaagctcggtgcct

SEQ ID NO: 969713 - DNA, 15 bp, Homo sapiens
gaagctcggtgcctg

SEQ ID NO: 969714 - DNA, 15 bp, Homo sapiens
aagctcggtgcctgc

SEQ ID NO: 969715 - DNA, 15 bp, Homo sapiens
agctcggtgcctgct

SEQ ID NO: 969716 - DNA, 15 bp, Homo sapiens
gctcggtgcctgctc

SEQ ID NO: 969717 - DNA, 15 bp, Homo sapiens
ctcggtgcctgctca

SEQ ID NO: 969718 - DNA, 15 bp, Homo sapiens
tcggtgcctgctcac

SEQ ID NO: 969719 - DNA, 15 bp, Homo sapiens
cggtgcctgctcact

SEQ ID NO: 969720 - DNA, 15 bp, Homo sapiens
ggtgcctgctcactc

SEQ ID NO: 969721 - DNA, 15 bp, Homo sapiens
gtgcctgctcactcg

SEQ ID NO: 969722 - DNA, 15 bp, Homo sapiens
tgcctgctcactcgg

SEQ ID NO: 969723 - DNA, 15 bp, Homo sapiens
gcctgctcactcggt

SEQ ID NO: 969724 - DNA, 15 bp, Homo sapiens
cctgctcactcggtt

SEQ ID NO: 969725 - DNA, 15 bp, Homo sapiens
ctgctcactcggttt

SEQ ID NO: 969726 - DNA, 15 bp, Homo sapiens
tgctcactcggtttg

SEQ ID NO: 969727 - DNA, 15 bp, Homo sapiens
gctcactcggtttgc

SEQ ID NO: 969728 - DNA, 15 bp, Homo sapiens
ctcactcggtttgca

SEQ ID NO: 969729 - DNA, 15 bp, Homo sapiens
tcactcggtttgcac

SEQ ID NO: 969730 - DNA, 15 bp, Homo sapiens
cactcggtttgcaca

SEQ ID NO: 969731 - DNA, 15 bp, Homo sapiens
actcggtttgcacac

SEQ ID NO: 969732 - DNA, 15 bp, Homo sapiens
ctcggtttgcacaca

SEQ ID NO: 969733 - DNA, 15 bp, Homo sapiens
tcggtttgcacacag

SEQ ID NO: 969734 - DNA, 15 bp, Homo sapiens
cggtttgcacacagt

SEQ ID NO: 969735 - DNA, 15 bp, Homo sapiens
ggtttgcacacagtc

SEQ ID NO: 969736 - DNA, 15 bp, Homo sapiens
gtttgcacacagtcc

SEQ ID NO: 969737 - DNA, 15 bp, Homo sapiens
tttgcacacagtccc

SEQ ID NO: 969738 - DNA, 15 bp, Homo sapiens
ttgcacacagtccca

SEQ ID NO: 969739 - DNA, 15 bp, Homo sapiens
tgcacacagtcccac

SEQ ID NO: 969740 - DNA, 15 bp, Homo sapiens
gcacacagtcccacc

SEQ ID NO: 969741 - DNA, 15 bp, Homo sapiens
cacacagtcccaccc

SEQ ID NO: 969742 - DNA, 15 bp, Homo sapiens
acacagtcccaccca

SEQ ID NO: 969743 - DNA, 15 bp, Homo sapiens
cacagtcccacccag

SEQ ID NO: 969744 - DNA, 15 bp, Homo sapiens
acagtcccacccagc

SEQ ID NO: 969745 - DNA, 15 bp, Homo sapiens
cagtcccacccagcc

SEQ ID NO: 969746 - DNA, 15 bp, Homo sapiens
agtcccacccagcct

SEQ ID NO: 969747 - DNA, 15 bp, Homo sapiens
gtcccacccagcctg

SEQ ID NO: 969748 - DNA, 15 bp, Homo sapiens
tcccacccagcctgg

SEQ ID NO: 969749 - DNA, 15 bp, Homo sapiens
cccacccagcctggc

SEQ ID NO: 969750 - DNA, 15 bp, Homo sapiens
ccacccagcctggca

SEQ ID NO: 969751 - DNA, 15 bp, Homo sapiens
cacccagcctggcat

SEQ ID NO: 969752 - DNA, 15 bp, Homo sapiens
acccagcctggcatc

SEQ ID NO: 969753 - DNA, 15 bp, Homo sapiens
cccagcctggcatct

SEQ ID NO: 969754 - DNA, 15 bp, Homo sapiens
ccagcctggcatctg

SEQ ID NO: 969755 - DNA, 15 bp, Homo sapiens
cagcctggcatctgg

SEQ ID NO: 969756 - DNA, 15 bp, Homo sapiens
agcctggcatctggg

SEQ ID NO: 969757 - DNA, 15 bp, Homo sapiens
gcctggcatctgggt

SEQ ID NO: 969758 - DNA, 15 bp, Homo sapiens
cctggcatctgggtt

SEQ ID NO: 969759 - DNA, 15 bp, Homo sapiens
ctggcatctgggttc

SEQ ID NO: 969760 - DNA, 15 bp, Homo sapiens
tggcatctgggttcg

SEQ ID NO: 969761 - DNA, 15 bp, Homo sapiens
ggcatctgggttcga

SEQ ID NO: 969762 - DNA, 15 bp, Homo sapiens
gcatctgggttcgat

SEQ ID NO: 969763 - DNA, 15 bp, Homo sapiens
catctgggttcgatg

SEQ ID NO: 969764 - DNA, 15 bp, Homo sapiens
atctgggttcgatgc

SEQ ID NO: 969765 - DNA, 15 bp, Homo sapiens
tctgggttcgatgct

SEQ ID NO: 969766 - DNA, 15 bp, Homo sapiens
ctgggttcgatgctc

SEQ ID NO: 969767 - DNA, 15 bp, Homo sapiens
tgggttcgatgctca

SEQ ID NO: 969768 - DNA, 15 bp, Homo sapiens
gggttcgatgctcag

SEQ ID NO: 969769 - DNA, 15 bp, Homo sapiens
ggttcgatgctcaga

SEQ ID NO: 969770 - DNA, 15 bp, Homo sapiens
gttcgatgctcagag

SEQ ID NO: 969771 - DNA, 15 bp, Homo sapiens
ttcgatgctcagagc

SEQ ID NO: 969772 - DNA, 15 bp, Homo sapiens
tcgatgctcagagcc

SEQ ID NO: 969773 - DNA, 15 bp, Homo sapiens
cgatgctcagagcca

SEQ ID NO: 969774 - DNA, 15 bp, Homo sapiens
gatgctcagagccag

SEQ ID NO: 969775 - DNA, 15 bp, Homo sapiens
atgctcagagccagg

SEQ ID NO: 969776 - DNA, 15 bp, Homo sapiens
tgctcagagccagga

SEQ ID NO: 969777 - DNA, 15 bp, Homo sapiens
gctcagagccaggag

SEQ ID NO: 969778 - DNA, 15 bp, Homo sapiens
ctcagagccaggagg

SEQ ID NO: 969779 - DNA, 15 bp, Homo sapiens
tcagagccaggaggc

SEQ ID NO: 969780 - DNA, 15 bp, Homo sapiens
cagagccaggaggct

SEQ ID NO: 969781 - DNA, 15 bp, Homo sapiens
agagccaggaggctg

SEQ ID NO: 969782 - DNA, 15 bp, Homo sapiens
gagccaggaggctga

SEQ ID NO: 969783 - DNA, 15 bp, Homo sapiens
agccaggaggctgac

SEQ ID NO: 969784 - DNA, 15 bp, Homo sapiens
gccaggaggctgacg

SEQ ID NO: 969785 - DNA, 15 bp, Homo sapiens
ccaggaggctgacgg

SEQ ID NO: 969786 - DNA, 15 bp, Homo sapiens
caggaggctgacgga

SEQ ID NO: 969787 - DNA, 15 bp, Homo sapiens
aggaggctgacggat

SEQ ID NO: 969788 - DNA, 15 bp, Homo sapiens
ggaggctgacggatg

SEQ ID NO: 969789 - DNA, 15 bp, Homo sapiens
gaggctgacggatgc

SEQ ID NO: 969790 - DNA, 15 bp, Homo sapiens
aggctgacggatgcc

SEQ ID NO: 969791 - DNA, 15 bp, Homo sapiens
ggctgacggatgcca

SEQ ID NO: 969792 - DNA, 15 bp, Homo sapiens
gctgacggatgccag

SEQ ID NO: 969793 - DNA, 15 bp, Homo sapiens
ctgacggatgccaga

SEQ ID NO: 969794 - DNA, 15 bp, Homo sapiens
tgacggatgccagaa

SEQ ID NO: 969795 - DNA, 15 bp, Homo sapiens
gacggatgccagaag

SEQ ID NO: 969796 - DNA, 15 bp, Homo sapiens
acggatgccagaaga

SEQ ID NO: 969797 - DNA, 15 bp, Homo sapiens
cggatgccagaagat

SEQ ID NO: 969798 - DNA, 15 bp, Homo sapiens
ggatgccagaagatg

SEQ ID NO: 969799 - DNA, 15 bp, Homo sapiens
gatgccagaagatgc

SEQ ID NO: 969800 - DNA, 15 bp, Homo sapiens
atgccagaagatgca

SEQ ID NO: 969801 - DNA, 15 bp, Homo sapiens
tgccagaagatgcac

SEQ ID NO: 969802 - DNA, 15 bp, Homo sapiens
gccagaagatgcact

SEQ ID NO: 969803 - DNA, 15 bp, Homo sapiens
ccagaagatgcactg

SEQ ID NO: 969804 - DNA, 15 bp, Homo sapiens
cagaagatgcactgt

SEQ ID NO: 969805 - DNA, 15 bp, Homo sapiens
agaagatgcactgtg

SEQ ID NO: 969806 - DNA, 15 bp, Homo sapiens
gaagatgcactgtga

SEQ ID NO: 969807 - DNA, 15 bp, Homo sapiens
aagatgcactgtgag

SEQ ID NO: 969808 - DNA, 15 bp, Homo sapiens
agatgcactgtgagt

SEQ ID NO: 969809 - DNA, 15 bp, Homo sapiens
gatgcactgtgagtc

SEQ ID NO: 969810 - DNA, 15 bp, Homo sapiens
atgcactgtgagtca

SEQ ID NO: 969811 - DNA, 15 bp, Homo sapiens
tgcactgtgagtcaa

SEQ ID NO: 969812 - DNA, 15 bp, Homo sapiens
gcactgtgagtcaaa

SEQ ID NO: 969813 - DNA, 15 bp, Homo sapiens
cactgtgagtcaaat

SEQ ID NO: 969814 - DNA, 15 bp, Homo sapiens
actgtgagtcaaatg

SEQ ID NO: 969815 - DNA, 15 bp, Homo sapiens
ctgtgagtcaaatga

SEQ ID NO: 969816 - DNA, 15 bp, Homo sapiens
tgtgagtcaaatgac

SEQ ID NO: 969817 - DNA, 15 bp, Homo sapiens
gtgagtcaaatgact

SEQ ID NO: 969818 - DNA, 15 bp, Homo sapiens
tgagtcaaatgactg

SEQ ID NO: 969819 - DNA, 15 bp, Homo sapiens
gagtcaaatgactga

SEQ ID NO: 969820 - DNA, 15 bp, Homo sapiens
agtcaaatgactgag

SEQ ID NO: 969821 - DNA, 15 bp, Homo sapiens
gtcaaatgactgagc

SEQ ID NO: 969822 - DNA, 15 bp, Homo sapiens
tcaaatgactgagct

SEQ ID NO: 969823 - DNA, 15 bp, Homo sapiens
caaatgactgagctg

SEQ ID NO: 969824 - DNA, 15 bp, Homo sapiens
aaatgactgagctgg

SEQ ID NO: 969825 - DNA, 15 bp, Homo sapiens
aatgactgagctggt

SEQ ID NO: 969826 - DNA, 15 bp, Homo sapiens
atgactgagctggtt

SEQ ID NO: 969827 - DNA, 15 bp, Homo sapiens
tgactgagctggttc

SEQ ID NO: 969828 - DNA, 15 bp, Homo sapiens
gactgagctggttca

SEQ ID NO: 969829 - DNA, 15 bp, Homo sapiens
actgagctggttcag

SEQ ID NO: 969830 - DNA, 15 bp, Homo sapiens
ctgagctggttcagg

SEQ ID NO: 969831 - DNA, 15 bp, Homo sapiens
tgagctggttcaggc

SEQ ID NO: 969832 - DNA, 15 bp, Homo sapiens
gagctggttcaggcc

SEQ ID NO: 969833 - DNA, 15 bp, Homo sapiens
agctggttcaggccc

SEQ ID NO: 969834 - DNA, 15 bp, Homo sapiens
gctggttcaggccca

SEQ ID NO: 969835 - DNA, 15 bp, Homo sapiens
ctggttcaggcccat

SEQ ID NO: 969836 - DNA, 15 bp, Homo sapiens
tggttcaggcccatg

SEQ ID NO: 969837 - DNA, 15 bp, Homo sapiens
ggttcaggcccatgt

SEQ ID NO: 969838 - DNA, 15 bp, Homo sapiens
gttcaggcccatgtg

SEQ ID NO: 969839 - DNA, 15 bp, Homo sapiens
ttcaggcccatgtgt

SEQ ID NO: 969840 - DNA, 15 bp, Homo sapiens
tcaggcccatgtgtc

SEQ ID NO: 969841 - DNA, 15 bp, Homo sapiens
caggcccatgtgtcc

SEQ ID NO: 969842 - DNA, 15 bp, Homo sapiens
aggcccatgtgtccc

SEQ ID NO: 969843 - DNA, 15 bp, Homo sapiens
ggcccatgtgtcccg

SEQ ID NO: 969844 - DNA, 15 bp, Homo sapiens
gcccatgtgtcccgg

SEQ ID NO: 969845 - DNA, 15 bp, Homo sapiens
cccatgtgtcccggg

SEQ ID NO: 969846 - DNA, 15 bp, Homo sapiens
ccatgtgtcccgggc

SEQ ID NO: 969847 - DNA, 15 bp, Homo sapiens
catgtgtcccgggca

SEQ ID NO: 969848 - DNA, 15 bp, Homo sapiens
atgtgtcccgggcag

SEQ ID NO: 969849 - DNA, 15 bp, Homo sapiens
tgtgtcccgggcaga

SEQ ID NO: 969850 - DNA, 15 bp, Homo sapiens
gtgtcccgggcagag

SEQ ID NO: 969851 - DNA, 15 bp, Homo sapiens
tgtcccgggcagagc

SEQ ID NO: 969852 - DNA, 15 bp, Homo sapiens
gtcccgggcagagcc

SEQ ID NO: 969853 - DNA, 15 bp, Homo sapiens
tcccgggcagagccg

SEQ ID NO: 969854 - DNA, 15 bp, Homo sapiens
cccgggcagagccgg

SEQ ID NO: 969855 - DNA, 15 bp, Homo sapiens
ccgggcagagccggg

SEQ ID NO: 969856 - DNA, 15 bp, Homo sapiens
cgggcagagccggga

SEQ ID NO: 969857 - DNA, 15 bp, Homo sapiens
gggcagagccgggat

SEQ ID NO: 969858 - DNA, 15 bp, Homo sapiens
ggcagagccgggatg

SEQ ID NO: 969859 - DNA, 15 bp, Homo sapiens
gcagagccgggatga

SEQ ID NO: 969860 - DNA, 15 bp, Homo sapiens
cagagccgggatgag

SEQ ID NO: 969861 - DNA, 15 bp, Homo sapiens
agagccgggatgagc

SEQ ID NO: 969862 - DNA, 15 bp, Homo sapiens
gagccgggatgagcg

SEQ ID NO: 969863 - DNA, 15 bp, Homo sapiens
agccgggatgagcga

SEQ ID NO: 969864 - DNA, 15 bp, Homo sapiens
gccgggatgagcgag

SEQ ID NO: 969865 - DNA, 15 bp, Homo sapiens
ccgggatgagcgaga

SEQ ID NO: 969866 - DNA, 15 bp, Homo sapiens
cgggatgagcgagac

SEQ ID NO: 969867 - DNA, 15 bp, Homo sapiens
gggatgagcgagacg

SEQ ID NO: 969868 - DNA, 15 bp, Homo sapiens
ggatgagcgagacgg

SEQ ID NO: 969869 - DNA, 15 bp, Homo sapiens
gatgagcgagacggt

SEQ ID NO: 969870 - DNA, 15 bp, Homo sapiens
atgagcgagacggtc

SEQ ID NO: 969871 - DNA, 15 bp, Homo sapiens
tgagcgagacggtca

SEQ ID NO: 969872 - DNA, 15 bp, Homo sapiens
gagcgagacggtcac

SEQ ID NO: 969873 - DNA, 15 bp, Homo sapiens
agcgagacggtcacc

SEQ ID NO: 969874 - DNA, 15 bp, Homo sapiens
gcgagacggtcacca

SEQ ID NO: 969875 - DNA, 15 bp, Homo sapiens
cgagacggtcaccaa

SEQ ID NO: 969876 - DNA, 15 bp, Homo sapiens
gagacggtcaccaaa

SEQ ID NO: 969877 - DNA, 15 bp, Homo sapiens
agacggtcaccaaat

SEQ ID NO: 969878 - DNA, 15 bp, Homo sapiens
gacggtcaccaaatg

SEQ ID NO: 969879 - DNA, 15 bp, Homo sapiens
acggtcaccaaatgg

SEQ ID NO: 969880 - DNA, 15 bp, Homo sapiens
cggtcaccaaatggg

SEQ ID NO: 969881 - DNA, 15 bp, Homo sapiens
ggtcaccaaatgggg

SEQ ID NO: 969882 - DNA, 15 bp, Homo sapiens
gtcaccaaatggggg

SEQ ID NO: 969883 - DNA, 15 bp, Homo sapiens
tcaccaaatgggggc

SEQ ID NO: 969884 - DNA, 15 bp, Homo sapiens
caccaaatgggggca

SEQ ID NO: 969885 - DNA, 15 bp, Homo sapiens
accaaatgggggcag

SEQ ID NO: 969886 - DNA, 15 bp, Homo sapiens
ccaaatgggggcagt

SEQ ID NO: 969887 - DNA, 15 bp, Homo sapiens
caaatgggggcagtt

SEQ ID NO: 969888 - DNA, 15 bp, Homo sapiens
aaatgggggcagttt

SEQ ID NO: 969889 - DNA, 15 bp, Homo sapiens
aatgggggcagtttt

SEQ ID NO: 969890 - DNA, 15 bp, Homo sapiens
atgggggcagttttc

SEQ ID NO: 969891 - DNA, 15 bp, Homo sapiens
tgggggcagttttca

SEQ ID NO: 969892 - DNA, 15 bp, Homo sapiens
gggggcagttttcag

SEQ ID NO: 969893 - DNA, 15 bp, Homo sapiens
ggggcagttttcagc

SEQ ID NO: 969894 - DNA, 15 bp, Homo sapiens
gggcagttttcagca

SEQ ID NO: 969895 - DNA, 15 bp, Homo sapiens
ggcagttttcagcac

SEQ ID NO: 969896 - DNA, 15 bp, Homo sapiens
gcagttttcagcacg

SEQ ID NO: 969897 - DNA, 15 bp, Homo sapiens
cagttttcagcacgt

SEQ ID NO: 969898 - DNA, 15 bp, Homo sapiens
agttttcagcacgtc

SEQ ID NO: 969899 - DNA, 15 bp, Homo sapiens
gttttcagcacgtca

SEQ ID NO: 969900 - DNA, 15 bp, Homo sapiens
ttttcagcacgtcag

SEQ ID NO: 969901 - DNA, 15 bp, Homo sapiens
tttcagcacgtcagc

SEQ ID NO: 969902 - DNA, 15 bp, Homo sapiens
ttcagcacgtcagcg

SEQ ID NO: 969903 - DNA, 15 bp, Homo sapiens
tcagcacgtcagcga

SEQ ID NO: 969904 - DNA, 15 bp, Homo sapiens
cagcacgtcagcgag

SEQ ID NO: 969905 - DNA, 15 bp, Homo sapiens
agcacgtcagcgagt

SEQ ID NO: 969906 - DNA, 15 bp, Homo sapiens
gcacgtcagcgagtc

SEQ ID NO: 969907 - DNA, 15 bp, Homo sapiens
cacgtcagcgagtcc

SEQ ID NO: 969908 - DNA, 15 bp, Homo sapiens
acgtcagcgagtccg

SEQ ID NO: 969909 - DNA, 15 bp, Homo sapiens
cgtcagcgagtccgg

SEQ ID NO: 969910 - DNA, 15 bp, Homo sapiens
gtcagcgagtccggc

SEQ ID NO: 969911 - DNA, 15 bp, Homo sapiens
tcagcgagtccggct

SEQ ID NO: 969912 - DNA, 15 bp, Homo sapiens
cagcgagtccggctg

SEQ ID NO: 969913 - DNA, 15 bp, Homo sapiens
agcgagtccggctga

SEQ ID NO: 969914 - DNA, 15 bp, Homo sapiens
gcgagtccggctgag

SEQ ID NO: 969915 - DNA, 15 bp, Homo sapiens
cgagtccggctgagt

SEQ ID NO: 969916 - DNA, 15 bp, Homo sapiens
gagtccggctgagta

SEQ ID NO: 969917 - DNA, 15 bp, Homo sapiens
agtccggctgagtaa

SEQ ID NO: 969918 - DNA, 15 bp, Homo sapiens
gtccggctgagtaag

SEQ ID NO: 969919 - DNA, 15 bp, Homo sapiens
tccggctgagtaaga

SEQ ID NO: 969920 - DNA, 15 bp, Homo sapiens
ccggctgagtaagaa

SEQ ID NO: 969921 - DNA, 15 bp, Homo sapiens
cggctgagtaagaat

SEQ ID NO: 969922 - DNA, 15 bp, Homo sapiens
ggctgagtaagaatc

SEQ ID NO: 969923 - DNA, 15 bp, Homo sapiens
gctgagtaagaatca

SEQ ID NO: 969924 - DNA, 15 bp, Homo sapiens
ctgagtaagaatcac

SEQ ID NO: 969925 - DNA, 15 bp, Homo sapiens
tgagtaagaatcacc

SEQ ID NO: 969926 - DNA, 15 bp, Homo sapiens
gagtaagaatcacca

SEQ ID NO: 969927 - DNA, 15 bp, Homo sapiens
agtaagaatcaccac

SEQ ID NO: 969928 - DNA, 15 bp, Homo sapiens
gtaagaatcaccact

SEQ ID NO: 969929 - DNA, 15 bp, Homo sapiens
taagaatcaccactg

SEQ ID NO: 969930 - DNA, 15 bp, Homo sapiens
aagaatcaccactgt

SEQ ID NO: 969931 - DNA, 15 bp, Homo sapiens
agaatcaccactgtg

SEQ ID NO: 969932 - DNA, 15 bp, Homo sapiens
gaatcaccactgtgt

SEQ ID NO: 969933 - DNA, 15 bp, Homo sapiens
aatcaccactgtgtg

SEQ ID NO: 969934 - DNA, 15 bp, Homo sapiens
atcaccactgtgtgg

SEQ ID NO: 969935 - DNA, 15 bp, Homo sapiens
tcaccactgtgtggg

SEQ ID NO: 969936 - DNA, 15 bp, Homo sapiens
caccactgtgtgggc

SEQ ID NO: 969937 - DNA, 15 bp, Homo sapiens
accactgtgtgggct

SEQ ID NO: 969938 - DNA, 15 bp, Homo sapiens
ccactgtgtgggctc

SEQ ID NO: 969939 - DNA, 15 bp, Homo sapiens
cactgtgtgggctcc

SEQ ID NO: 969940 - DNA, 15 bp, Homo sapiens
actgtgtgggctcca

SEQ ID NO: 969941 - DNA, 15 bp, Homo sapiens
ctgtgtgggctccac

SEQ ID NO: 969942 - DNA, 15 bp, Homo sapiens
tgtgtgggctccaca

SEQ ID NO: 969943 - DNA, 15 bp, Homo sapiens
gtgtgggctccacag

SEQ ID NO: 969944 - DNA, 15 bp, Homo sapiens
tgtgggctccacagg

SEQ ID NO: 969945 - DNA, 15 bp, Homo sapiens
gtgggctccacaggc

SEQ ID NO: 969946 - DNA, 15 bp, Homo sapiens
tgggctccacaggca

SEQ ID NO: 969947 - DNA, 15 bp, Homo sapiens
gggctccacaggcac

SEQ ID NO: 969948 - DNA, 15 bp, Homo sapiens
ggctccacaggcaca

SEQ ID NO: 969949 - DNA, 15 bp, Homo sapiens
gctccacaggcacag

SEQ ID NO: 969950 - DNA, 15 bp, Homo sapiens
ctccacaggcacagg

SEQ ID NO: 969951 - DNA, 15 bp, Homo sapiens
tccacaggcacaggg

SEQ ID NO: 969952 - DNA, 15 bp, Homo sapiens
ccacaggcacaggga

SEQ ID NO: 969953 - DNA, 15 bp, Homo sapiens
cacaggcacagggag

SEQ ID NO: 969954 - DNA, 15 bp, Homo sapiens
acaggcacagggagc

SEQ ID NO: 969955 - DNA, 15 bp, Homo sapiens
caggcacagggagcc

SEQ ID NO: 969956 - DNA, 15 bp, Homo sapiens
aggcacagggagccg

SEQ ID NO: 969957 - DNA, 15 bp, Homo sapiens
ggcacagggagccgc

SEQ ID NO: 969958 - DNA, 15 bp, Homo sapiens
gcacagggagccgcg

SEQ ID NO: 969959 - DNA, 15 bp, Homo sapiens
cacagggagccgcgt

SEQ ID NO: 969960 - DNA, 15 bp, Homo sapiens
acagggagccgcgtc

SEQ ID NO: 969961 - DNA, 15 bp, Homo sapiens
cagggagccgcgtcc

SEQ ID NO: 969962 - DNA, 15 bp, Homo sapiens
agggagccgcgtccc

SEQ ID NO: 969963 - DNA, 15 bp, Homo sapiens
gggagccgcgtcccc

SEQ ID NO: 969964 - DNA, 15 bp, Homo sapiens
ggagccgcgtcccca

SEQ ID NO: 969965 - DNA, 15 bp, Homo sapiens
gagccgcgtccccag

SEQ ID NO: 969966 - DNA, 15 bp, Homo sapiens
agccgcgtccccagc

SEQ ID NO: 969967 - DNA, 15 bp, Homo sapiens
gccgcgtccccagca

SEQ ID NO: 969968 - DNA, 15 bp, Homo sapiens
ccgcgtccccagcac

SEQ ID NO: 969969 - DNA, 15 bp, Homo sapiens
cgcgtccccagcacg

SEQ ID NO: 969970 - DNA, 15 bp, Homo sapiens
gcgtccccagcacgg

SEQ ID NO: 969971 - DNA, 15 bp, Homo sapiens
cgtccccagcacgga

SEQ ID NO: 969972 - DNA, 15 bp, Homo sapiens
gtccccagcacggag

SEQ ID NO: 969973 - DNA, 15 bp, Homo sapiens
tccccagcacggagc

SEQ ID NO: 969974 - DNA, 15 bp, Homo sapiens
ccccagcacggagcc

SEQ ID NO: 969975 - DNA, 15 bp, Homo sapiens
cccagcacggagcct

SEQ ID NO: 969976 - DNA, 15 bp, Homo sapiens
ccagcacggagcctg

SEQ ID NO: 969977 - DNA, 15 bp, Homo sapiens
cagcacggagcctgc

SEQ ID NO: 969978 - DNA, 15 bp, Homo sapiens
agcacggagcctgcc

SEQ ID NO: 969979 - DNA, 15 bp, Homo sapiens
gcacggagcctgcct

SEQ ID NO: 969980 - DNA, 15 bp, Homo sapiens
cacggagcctgcctg

SEQ ID NO: 969981 - DNA, 15 bp, Homo sapiens
acggagcctgcctga

SEQ ID NO: 969982 - DNA, 15 bp, Homo sapiens
cggagcctgcctgac

SEQ ID NO: 969983 - DNA, 15 bp, Homo sapiens
ggagcctgcctgaca

SEQ ID NO: 969984 - DNA, 15 bp, Homo sapiens
gagcctgcctgacaa

SEQ ID NO: 969985 - DNA, 15 bp, Homo sapiens
agcctgcctgacaaa

SEQ ID NO: 969986 - DNA, 15 bp, Homo sapiens
gcctgcctgacaaag

SEQ ID NO: 969987 - DNA, 15 bp, Homo sapiens
cctgcctgacaaagc

SEQ ID NO: 969988 - DNA, 15 bp, Homo sapiens
ctgcctgacaaagcc

SEQ ID NO: 969989 - DNA, 15 bp, Homo sapiens
tgcctgacaaagccg

SEQ ID NO: 969990 - DNA, 15 bp, Homo sapiens
gcctgacaaagccgc

SEQ ID NO: 969991 - DNA, 15 bp, Homo sapiens
cctgacaaagccgca

SEQ ID NO: 969992 - DNA, 15 bp, Homo sapiens
ctgacaaagccgcat

SEQ ID NO: 969993 - DNA, 15 bp, Homo sapiens
tgacaaagccgcatc

SEQ ID NO: 969994 - DNA, 15 bp, Homo sapiens
gacaaagccgcatcc

SEQ ID NO: 969995 - DNA, 15 bp, Homo sapiens
acaaagccgcatccg

SEQ ID NO: 969996 - DNA, 15 bp, Homo sapiens
caaagccgcatccgc

SEQ ID NO: 969997 - DNA, 15 bp, Homo sapiens
aaagccgcatccgca

SEQ ID NO: 969998 - DNA, 15 bp, Homo sapiens
aagccgcatccgcag

SEQ ID NO: 969999 - DNA, 15 bp, Homo sapiens
agccgcatccgcagg

SEQ ID NO: 970000 - DNA, 15 bp, Homo sapiens
gccgcatccgcaggt

SEQ ID NO: 970001 - DNA, 15 bp, Homo sapiens
ccgcatccgcaggtg

SEQ ID NO: 970002 - DNA, 15 bp, Homo sapiens
cgcatccgcaggtga

SEQ ID NO: 970003 - DNA, 15 bp, Homo sapiens
gcatccgcaggtgac

SEQ ID NO: 970004 - DNA, 15 bp, Homo sapiens
catccgcaggtgacc

SEQ ID NO: 970005 - DNA, 15 bp, Homo sapiens
atccgcaggtgaccc

SEQ ID NO: 970006 - DNA, 15 bp, Homo sapiens
tccgcaggtgaccca

SEQ ID NO: 970007 - DNA, 15 bp, Homo sapiens
ccgcaggtgacccaa

SEQ ID NO: 970008 - DNA, 15 bp, Homo sapiens
cgcaggtgacccaac

SEQ ID NO: 970009 - DNA, 15 bp, Homo sapiens
gcaggtgacccaaca

SEQ ID NO: 970010 - DNA, 15 bp, Homo sapiens
caggtgacccaacac

SEQ ID NO: 970011 - DNA, 15 bp, Homo sapiens
aggtgacccaacacc

SEQ ID NO: 970012 - DNA, 15 bp, Homo sapiens
ggtgacccaacaccc

SEQ ID NO: 970013 - DNA, 15 bp, Homo sapiens
gtgacccaacaccca

SEQ ID NO: 970014 - DNA, 15 bp, Homo sapiens
tgacccaacacccat

SEQ ID NO: 970015 - DNA, 15 bp, Homo sapiens
gacccaacacccatt

SEQ ID NO: 970016 - DNA, 15 bp, Homo sapiens
acccaacacccattc

SEQ ID NO: 970017 - DNA, 15 bp, Homo sapiens
cccaacacccattcc

SEQ ID NO: 970018 - DNA, 15 bp, Homo sapiens
ccaacacccattccc

SEQ ID NO: 970019 - DNA, 15 bp, Homo sapiens
caacacccattccca

SEQ ID NO: 970020 - DNA, 15 bp, Homo sapiens
aacacccattcccaa

SEQ ID NO: 970021 - DNA, 15 bp, Homo sapiens
acacccattcccaaa

SEQ ID NO: 970022 - DNA, 15 bp, Homo sapiens
cacccattcccaaag

SEQ ID NO: 970023 - DNA, 15 bp, Homo sapiens
acccattcccaaagt

SEQ ID NO: 970024 - DNA, 15 bp, Homo sapiens
cccattcccaaagtg

SEQ ID NO: 970025 - DNA, 15 bp, Homo sapiens
ccattcccaaagtgg

SEQ ID NO: 970026 - DNA, 15 bp, Homo sapiens
cattcccaaagtggc

SEQ ID NO: 970027 - DNA, 15 bp, Homo sapiens
attcccaaagtggct

SEQ ID NO: 970028 - DNA, 15 bp, Homo sapiens
ttcccaaagtggctg

SEQ ID NO: 970029 - DNA, 15 bp, Homo sapiens
tcccaaagtggctgc

SEQ ID NO: 970030 - DNA, 15 bp, Homo sapiens
cccaaagtggctgcc

SEQ ID NO: 970031 - DNA, 15 bp, Homo sapiens
ccaaagtggctgcca

SEQ ID NO: 970032 - DNA, 15 bp, Homo sapiens
caaagtggctgccac

SEQ ID NO: 970033 - DNA, 15 bp, Homo sapiens
aaagtggctgccact

SEQ ID NO: 970034 - DNA, 15 bp, Homo sapiens
aagtggctgccactt

SEQ ID NO: 970035 - DNA, 15 bp, Homo sapiens
agtggctgccactta

SEQ ID NO: 970036 - DNA, 15 bp, Homo sapiens
gtggctgccacttac

SEQ ID NO: 970037 - DNA, 15 bp, Homo sapiens
tggctgccacttacc

SEQ ID NO: 970038 - DNA, 15 bp, Homo sapiens
ggctgccacttaccc

SEQ ID NO: 970039 - DNA, 15 bp, Homo sapiens
gctgccacttacccc

SEQ ID NO: 970040 - DNA, 15 bp, Homo sapiens
ctgccacttaccccc

SEQ ID NO: 970041 - DNA, 15 bp, Homo sapiens
tgccacttaccccca

SEQ ID NO: 970042 - DNA, 15 bp, Homo sapiens
gccacttacccccag

SEQ ID NO: 970043 - DNA, 15 bp, Homo sapiens
ccacttacccccagg

SEQ ID NO: 970044 - DNA, 15 bp, Homo sapiens
cacttacccccaggc

SEQ ID NO: 970045 - DNA, 15 bp, Homo sapiens
acttacccccaggct

SEQ ID NO: 970046 - DNA, 15 bp, Homo sapiens
cttacccccaggctg

SEQ ID NO: 970047 - DNA, 15 bp, Homo sapiens
ttacccccaggctgg

SEQ ID NO: 970048 - DNA, 15 bp, Homo sapiens
tacccccaggctgga

SEQ ID NO: 970049 - DNA, 15 bp, Homo sapiens
acccccaggctggat

SEQ ID NO: 970050 - DNA, 15 bp, Homo sapiens
cccccaggctggatg

SEQ ID NO: 970051 - DNA, 15 bp, Homo sapiens
ccccaggctggatgc

SEQ ID NO: 970052 - DNA, 15 bp, Homo sapiens
cccaggctggatgca

SEQ ID NO: 970053 - DNA, 15 bp, Homo sapiens
ccaggctggatgcac

SEQ ID NO: 970054 - DNA, 15 bp, Homo sapiens
caggctggatgcacc

SEQ ID NO: 970055 - DNA, 15 bp, Homo sapiens
aggctggatgcacca

SEQ ID NO: 970056 - DNA, 15 bp, Homo sapiens
ggctggatgcaccag

SEQ ID NO: 970057 - DNA, 15 bp, Homo sapiens
gctggatgcaccagg

SEQ ID NO: 970058 - DNA, 15 bp, Homo sapiens
ctggatgcaccaggg

SEQ ID NO: 970059 - DNA, 15 bp, Homo sapiens
tggatgcaccaggga

SEQ ID NO: 970060 - DNA, 15 bp, Homo sapiens
ggatgcaccagggag

SEQ ID NO: 970061 - DNA, 15 bp, Homo sapiens
gatgcaccagggagc

SEQ ID NO: 970062 - DNA, 15 bp, Homo sapiens
atgcaccagggagca

SEQ ID NO: 970063 - DNA, 15 bp, Homo sapiens
tgcaccagggagcac

SEQ ID NO: 970064 - DNA, 15 bp, Homo sapiens
gcaccagggagcaca

SEQ ID NO: 970065 - DNA, 15 bp, Homo sapiens
caccagggagcacat

SEQ ID NO: 970066 - DNA, 15 bp, Homo sapiens
accagggagcacatt

SEQ ID NO: 970067 - DNA, 15 bp, Homo sapiens
ccagggagcacattc

SEQ ID NO: 970068 - DNA, 15 bp, Homo sapiens
cagggagcacattct

SEQ ID NO: 970069 - DNA, 15 bp, Homo sapiens
agggagcacattctc

SEQ ID NO: 970070 - DNA, 15 bp, Homo sapiens
gggagcacattctcc

SEQ ID NO: 970071 - DNA, 15 bp, Homo sapiens
ggagcacattctcct

SEQ ID NO: 970072 - DNA, 15 bp, Homo sapiens
gagcacattctcctc

SEQ ID NO: 970073 - DNA, 15 bp, Homo sapiens
agcacattctcctct

SEQ ID NO: 970074 - DNA, 15 bp, Homo sapiens
gcacattctcctctg

SEQ ID NO: 970075 - DNA, 15 bp, Homo sapiens
cacattctcctctgg

SEQ ID NO: 970076 - DNA, 15 bp, Homo sapiens
acattctcctctggc

SEQ ID NO: 970077 - DNA, 15 bp, Homo sapiens
cattctcctctggca

SEQ ID NO: 970078 - DNA, 15 bp, Homo sapiens
attctcctctggcac

SEQ ID NO: 970079 - DNA, 15 bp, Homo sapiens
ttctcctctggcacc

SEQ ID NO: 970080 - DNA, 15 bp, Homo sapiens
tctcctctggcacct

SEQ ID NO: 970081 - DNA, 15 bp, Homo sapiens
ctcctctggcacctc

SEQ ID NO: 970082 - DNA, 15 bp, Homo sapiens
tcctctggcacctcc

SEQ ID NO: 970083 - DNA, 15 bp, Homo sapiens
cctctggcacctcca

SEQ ID NO: 970084 - DNA, 15 bp, Homo sapiens
ctctggcacctccac

SEQ ID NO: 970085 - DNA, 15 bp, Homo sapiens
tctggcacctccaca

SEQ ID NO: 970086 - DNA, 15 bp, Homo sapiens
ctggcacctccacac

SEQ ID NO: 970087 - DNA, 15 bp, Homo sapiens
tggcacctccacacc

SEQ ID NO: 970088 - DNA, 15 bp, Homo sapiens
ggcacctccacaccg

SEQ ID NO: 970089 - DNA, 15 bp, Homo sapiens
gcacctccacaccgt

SEQ ID NO: 970090 - DNA, 15 bp, Homo sapiens
cacctccacaccgtc

SEQ ID NO: 970091 - DNA, 15 bp, Homo sapiens
acctccacaccgtcc

SEQ ID NO: 970092 - DNA, 15 bp, Homo sapiens
cctccacaccgtcca

SEQ ID NO: 970093 - DNA, 15 bp, Homo sapiens
ctccacaccgtccat

SEQ ID NO: 970094 - DNA, 15 bp, Homo sapiens
tccacaccgtccatg

SEQ ID NO: 970095 - DNA, 15 bp, Homo sapiens
ccacaccgtccatga

SEQ ID NO: 970096 - DNA, 15 bp, Homo sapiens
cacaccgtccatgat

SEQ ID NO: 970097 - DNA, 15 bp, Homo sapiens
acaccgtccatgatg

SEQ ID NO: 970098 - DNA, 15 bp, Homo sapiens
caccgtccatgatga

SEQ ID NO: 970099 - DNA, 15 bp, Homo sapiens
accgtccatgatgat

SEQ ID NO: 970100 - DNA, 15 bp, Homo sapiens
ccgtccatgatgatc

SEQ ID NO: 970101 - DNA, 15 bp, Homo sapiens
cgtccatgatgatca

SEQ ID NO: 970102 - DNA, 15 bp, Homo sapiens
gtccatgatgatcat

SEQ ID NO: 970103 - DNA, 15 bp, Homo sapiens
tccatgatgatcatg

SEQ ID NO: 970104 - DNA, 15 bp, Homo sapiens
ccatgatgatcatgc

SEQ ID NO: 970105 - DNA, 15 bp, Homo sapiens
catgatgatcatgcc

SEQ ID NO: 970106 - DNA, 15 bp, Homo sapiens
atgatgatcatgcct

SEQ ID NO: 970107 - DNA, 15 bp, Homo sapiens
tgatgatcatgcctg

SEQ ID NO: 970108 - DNA, 15 bp, Homo sapiens
gatgatcatgcctgt

SEQ ID NO: 970109 - DNA, 15 bp, Homo sapiens
atgatcatgcctgtg

SEQ ID NO: 970110 - DNA, 15 bp, Homo sapiens
tgatcatgcctgtgg

SEQ ID NO: 970111 - DNA, 15 bp, Homo sapiens
gatcatgcctgtggc

SEQ ID NO: 970112 - DNA, 15 bp, Homo sapiens
atcatgcctgtggct

SEQ ID NO: 970113 - DNA, 15 bp, Homo sapiens
tcatgcctgtggctg

SEQ ID NO: 970114 - DNA, 15 bp, Homo sapiens
catgcctgtggctga

SEQ ID NO: 970115 - DNA, 15 bp, Homo sapiens
atgcctgtggctgag

SEQ ID NO: 970116 - DNA, 15 bp, Homo sapiens
tgcctgtggctgagg

SEQ ID NO: 970117 - DNA, 15 bp, Homo sapiens
gcctgtggctgaggc

SEQ ID NO: 970118 - DNA, 15 bp, Homo sapiens
cctgtggctgaggcc

SEQ ID NO: 970119 - DNA, 15 bp, Homo sapiens
ctgtggctgaggccc

SEQ ID NO: 970120 - DNA, 15 bp, Homo sapiens
tgtggctgaggcccg

SEQ ID NO: 970121 - DNA, 15 bp, Homo sapiens
gtggctgaggcccgc

SEQ ID NO: 970122 - DNA, 15 bp, Homo sapiens
tggctgaggcccgca

SEQ ID NO: 970123 - DNA, 15 bp, Homo sapiens
ggctgaggcccgcag

SEQ ID NO: 970124 - DNA, 15 bp, Homo sapiens
gctgaggcccgcagc

SEQ ID NO: 970125 - DNA, 15 bp, Homo sapiens
ctgaggcccgcagcg

SEQ ID NO: 970126 - DNA, 15 bp, Homo sapiens
tgaggcccgcagcga

SEQ ID NO: 970127 - DNA, 15 bp, Homo sapiens
gaggcccgcagcgag

SEQ ID NO: 970128 - DNA, 15 bp, Homo sapiens
aggcccgcagcgaga

SEQ ID NO: 970129 - DNA, 15 bp, Homo sapiens
ggcccgcagcgagaa

SEQ ID NO: 970130 - DNA, 15 bp, Homo sapiens
gcccgcagcgagaac

SEQ ID NO: 970131 - DNA, 15 bp, Homo sapiens
cccgcagcgagaact

SEQ ID NO: 970132 - DNA, 15 bp, Homo sapiens
ccgcagcgagaactt

SEQ ID NO: 970133 - DNA, 15 bp, Homo sapiens
cgcagcgagaacttg

SEQ ID NO: 970134 - DNA, 15 bp, Homo sapiens
gcagcgagaacttgc

SEQ ID NO: 970135 - DNA, 15 bp, Homo sapiens
cagcgagaacttgcc

SEQ ID NO: 970136 - DNA, 15 bp, Homo sapiens
agcgagaacttgccc

SEQ ID NO: 970137 - DNA, 15 bp, Homo sapiens
gcgagaacttgccct

SEQ ID NO: 970138 - DNA, 15 bp, Homo sapiens
cgagaacttgccctg

SEQ ID NO: 970139 - DNA, 15 bp, Homo sapiens
gagaacttgccctgg

SEQ ID NO: 970140 - DNA, 15 bp, Homo sapiens
agaacttgccctgga

SEQ ID NO: 970141 - DNA, 15 bp, Homo sapiens
gaacttgccctggat

SEQ ID NO: 970142 - DNA, 15 bp, Homo sapiens
aacttgccctggatc

SEQ ID NO: 970143 - DNA, 15 bp, Homo sapiens
acttgccctggatcc

SEQ ID NO: 970144 - DNA, 15 bp, Homo sapiens
cttgccctggatcct

SEQ ID NO: 970145 - DNA, 15 bp, Homo sapiens
ttgccctggatcctg

SEQ ID NO: 970146 - DNA, 15 bp, Homo sapiens
tgccctggatcctgg

SEQ ID NO: 970147 - DNA, 15 bp, Homo sapiens
gccctggatcctggg

SEQ ID NO: 970148 - DNA, 15 bp, Homo sapiens
ccctggatcctgggg

SEQ ID NO: 970149 - DNA, 15 bp, Homo sapiens
cctggatcctggggg

SEQ ID NO: 970150 - DNA, 15 bp, Homo sapiens
ctggatcctgggggc

SEQ ID NO: 970151 - DNA, 15 bp, Homo sapiens
tggatcctgggggcc

SEQ ID NO: 970152 - DNA, 15 bp, Homo sapiens
ggatcctgggggccg

SEQ ID NO: 970153 - DNA, 15 bp, Homo sapiens
gatcctgggggccga

SEQ ID NO: 970154 - DNA, 15 bp, Homo sapiens
atcctgggggccgag

SEQ ID NO: 970155 - DNA, 15 bp, Homo sapiens
tcctgggggccgaga

SEQ ID NO: 970156 - DNA, 15 bp, Homo sapiens
cctgggggccgagag

SEQ ID NO: 970157 - DNA, 15 bp, Homo sapiens
ctgggggccgagaga

SEQ ID NO: 970158 - DNA, 15 bp, Homo sapiens
tgggggccgagagac

SEQ ID NO: 970159 - DNA, 15 bp, Homo sapiens
gggggccgagagacc

SEQ ID NO: 970160 - DNA, 15 bp, Homo sapiens
ggggccgagagaccc

SEQ ID NO: 970161 - DNA, 15 bp, Homo sapiens
gggccgagagacccc

SEQ ID NO: 970162 - DNA, 15 bp, Homo sapiens
ggccgagagaccccg

SEQ ID NO: 970163 - DNA, 15 bp, Homo sapiens
gccgagagaccccgc

SEQ ID NO: 970164 - DNA, 15 bp, Homo sapiens
ccgagagaccccgca

SEQ ID NO: 970165 - DNA, 15 bp, Homo sapiens
cgagagaccccgcat

SEQ ID NO: 970166 - DNA, 15 bp, Homo sapiens
gagagaccccgcatc

SEQ ID NO: 970167 - DNA, 15 bp, Homo sapiens
agagaccccgcatcc

SEQ ID NO: 970168 - DNA, 15 bp, Homo sapiens
gagaccccgcatccc

SEQ ID NO: 970169 - DNA, 15 bp, Homo sapiens
agaccccgcatcccc

SEQ ID NO: 970170 - DNA, 15 bp, Homo sapiens
gaccccgcatcccct

SEQ ID NO: 970171 - DNA, 15 bp, Homo sapiens
accccgcatcccctt

SEQ ID NO: 970172 - DNA, 15 bp, Homo sapiens
ccccgcatccccttc

SEQ ID NO: 970173 - DNA, 15 bp, Homo sapiens
cccgcatccccttct

SEQ ID NO: 970174 - DNA, 15 bp, Homo sapiens
ccgcatccccttctc

SEQ ID NO: 970175 - DNA, 15 bp, Homo sapiens
cgcatccccttctcc

SEQ ID NO: 970176 - DNA, 15 bp, Homo sapiens
gcatccccttctcca

SEQ ID NO: 970177 - DNA, 15 bp, Homo sapiens
catccccttctccag

SEQ ID NO: 970178 - DNA, 15 bp, Homo sapiens
atccccttctccagc

SEQ ID NO: 970179 - DNA, 15 bp, Homo sapiens
tccccttctccagca

SEQ ID NO: 970180 - DNA, 15 bp, Homo sapiens
ccccttctccagcag

SEQ ID NO: 970181 - DNA, 15 bp, Homo sapiens
cccttctccagcagg

SEQ ID NO: 970182 - DNA, 15 bp, Homo sapiens
ccttctccagcagga

SEQ ID NO: 970183 - DNA, 15 bp, Homo sapiens
cttctccagcaggaa

SEQ ID NO: 970184 - DNA, 15 bp, Homo sapiens
ttctccagcaggaag

SEQ ID NO: 970185 - DNA, 15 bp, Homo sapiens
tctccagcaggaagc

SEQ ID NO: 970186 - DNA, 15 bp, Homo sapiens
ctccagcaggaagcc

SEQ ID NO: 970187 - DNA, 15 bp, Homo sapiens
tccagcaggaagccc

SEQ ID NO: 970188 - DNA, 15 bp, Homo sapiens
ccagcaggaagcccc

SEQ ID NO: 970189 - DNA, 15 bp, Homo sapiens
cagcaggaagccccg

SEQ ID NO: 970190 - DNA, 15 bp, Homo sapiens
agcaggaagccccga

SEQ ID NO: 970191 - DNA, 15 bp, Homo sapiens
gcaggaagccccgaa

SEQ ID NO: 970192 - DNA, 15 bp, Homo sapiens
caggaagccccgaat

SEQ ID NO: 970193 - DNA, 15 bp, Homo sapiens
aggaagccccgaatg

SEQ ID NO: 970194 - DNA, 15 bp, Homo sapiens
ggaagccccgaatgc

SEQ ID NO: 970195 - DNA, 15 bp, Homo sapiens
gaagccccgaatgca

SEQ ID NO: 970196 - DNA, 15 bp, Homo sapiens
aagccccgaatgcag

SEQ ID NO: 970197 - DNA, 15 bp, Homo sapiens
agccccgaatgcagc

SEQ ID NO: 970198 - DNA, 15 bp, Homo sapiens
gccccgaatgcagcc

SEQ ID NO: 970199 - DNA, 15 bp, Homo sapiens
ccccgaatgcagcca

SEQ ID NO: 970200 - DNA, 15 bp, Homo sapiens
cccgaatgcagccat

SEQ ID NO: 970201 - DNA, 15 bp, Homo sapiens
ccgaatgcagccatc

SEQ ID NO: 970202 - DNA, 15 bp, Homo sapiens
cgaatgcagccatct

SEQ ID NO: 970203 - DNA, 15 bp, Homo sapiens
gaatgcagccatctt

SEQ ID NO: 970204 - DNA, 15 bp, Homo sapiens
aatgcagccatcttc

SEQ ID NO: 970205 - DNA, 15 bp, Homo sapiens
atgcagccatcttca

SEQ ID NO: 970206 - DNA, 15 bp, Homo sapiens
tgcagccatcttcac

SEQ ID NO: 970207 - DNA, 15 bp, Homo sapiens
gcagccatcttcaca

SEQ ID NO: 970208 - DNA, 15 bp, Homo sapiens
cagccatcttcacac

SEQ ID NO: 970209 - DNA, 15 bp, Homo sapiens
agccatcttcacacc

SEQ ID NO: 970210 - DNA, 15 bp, Homo sapiens
gccatcttcacaccg

SEQ ID NO: 970211 - DNA, 15 bp, Homo sapiens
ccatcttcacaccga

SEQ ID NO: 970212 - DNA, 15 bp, Homo sapiens
catcttcacaccgag

SEQ ID NO: 970213 - DNA, 15 bp, Homo sapiens
atcttcacaccgagc

SEQ ID NO: 970214 - DNA, 15 bp, Homo sapiens
tcttcacaccgagcc

SEQ ID NO: 970215 - DNA, 15 bp, Homo sapiens
cttcacaccgagccc

SEQ ID NO: 970216 - DNA, 15 bp, Homo sapiens
ttcacaccgagccca

SEQ ID NO: 970217 - DNA, 15 bp, Homo sapiens
tcacaccgagcccac

SEQ ID NO: 970218 - DNA, 15 bp, Homo sapiens
cacaccgagcccaca

SEQ ID NO: 970219 - DNA, 15 bp, Homo sapiens
acaccgagcccacac

SEQ ID NO: 970220 - DNA, 15 bp, Homo sapiens
caccgagcccacact

SEQ ID NO: 970221 - DNA, 15 bp, Homo sapiens
accgagcccacacta

SEQ ID NO: 970222 - DNA, 15 bp, Homo sapiens
ccgagcccacactac

SEQ ID NO: 970223 - DNA, 15 bp, Homo sapiens
cgagcccacactaca

SEQ ID NO: 970224 - DNA, 15 bp, Homo sapiens
gagcccacactacaa

SEQ ID NO: 970225 - DNA, 15 bp, Homo sapiens
agcccacactacaaa

SEQ ID NO: 970226 - DNA, 15 bp, Homo sapiens
gcccacactacaaac

SEQ ID NO: 970227 - DNA, 15 bp, Homo sapiens
cccacactacaaaca

SEQ ID NO: 970228 - DNA, 15 bp, Homo sapiens
ccacactacaaacag

SEQ ID NO: 970229 - DNA, 15 bp, Homo sapiens
cacactacaaacaga

SEQ ID NO: 970230 - DNA, 15 bp, Homo sapiens
acactacaaacagat

SEQ ID NO: 970231 - DNA, 15 bp, Homo sapiens
cactacaaacagatc

SEQ ID NO: 970232 - DNA, 15 bp, Homo sapiens
actacaaacagatcg

SEQ ID NO: 970233 - DNA, 15 bp, Homo sapiens
ctacaaacagatcgg

SEQ ID NO: 970234 - DNA, 15 bp, Homo sapiens
tacaaacagatcggc

SEQ ID NO: 970235 - DNA, 15 bp, Homo sapiens
acaaacagatcggcc

SEQ ID NO: 970236 - DNA, 15 bp, Homo sapiens
caaacagatcggcca

SEQ ID NO: 970237 - DNA, 15 bp, Homo sapiens
aaacagatcggccat

SEQ ID NO: 970238 - DNA, 15 bp, Homo sapiens
aacagatcggccata

SEQ ID NO: 970239 - DNA, 15 bp, Homo sapiens
acagatcggccatag

SEQ ID NO: 970240 - DNA, 15 bp, Homo sapiens
cagatcggccatagg

SEQ ID NO: 970241 - DNA, 15 bp, Homo sapiens
agatcggccataggc

SEQ ID NO: 970242 - DNA, 15 bp, Homo sapiens
gatcggccataggcg

SEQ ID NO: 970243 - DNA, 15 bp, Homo sapiens
atcggccataggcga

SEQ ID NO: 970244 - DNA, 15 bp, Homo sapiens
tcggccataggcgag

SEQ ID NO: 970245 - DNA, 15 bp, Homo sapiens
cggccataggcgagt

SEQ ID NO: 970246 - DNA, 15 bp, Homo sapiens
ggccataggcgagtt

SEQ ID NO: 970247 - DNA, 15 bp, Homo sapiens
gccataggcgagttc

SEQ ID NO: 970248 - DNA, 15 bp, Homo sapiens
ccataggcgagttcg

SEQ ID NO: 970249 - DNA, 15 bp, Homo sapiens
cataggcgagttcgt

SEQ ID NO: 970250 - DNA, 15 bp, Homo sapiens
ataggcgagttcgtg

SEQ ID NO: 970251 - DNA, 15 bp, Homo sapiens
taggcgagttcgtga

SEQ ID NO: 970252 - DNA, 15 bp, Homo sapiens
aggcgagttcgtgat

SEQ ID NO: 970253 - DNA, 15 bp, Homo sapiens
ggcgagttcgtgatc

SEQ ID NO: 970254 - DNA, 15 bp, Homo sapiens
gcgagttcgtgatcc

SEQ ID NO: 970255 - DNA, 15 bp, Homo sapiens
cgagttcgtgatcct

SEQ ID NO: 970256 - DNA, 15 bp, Homo sapiens
gagttcgtgatcctg

SEQ ID NO: 970257 - DNA, 15 bp, Homo sapiens
agttcgtgatcctgg

SEQ ID NO: 970258 - DNA, 15 bp, Homo sapiens
gttcgtgatcctggg

SEQ ID NO: 970259 - DNA, 15 bp, Homo sapiens
ttcgtgatcctgggg

SEQ ID NO: 970260 - DNA, 15 bp, Homo sapiens
tcgtgatcctgggga

SEQ ID NO: 970261 - DNA, 15 bp, Homo sapiens
cgtgatcctggggat

SEQ ID NO: 970262 - DNA, 15 bp, Homo sapiens
gtgatcctggggatg

SEQ ID NO: 970263 - DNA, 15 bp, Homo sapiens
tgatcctggggatgg

SEQ ID NO: 970264 - DNA, 15 bp, Homo sapiens
gatcctggggatgga

SEQ ID NO: 970265 - DNA, 15 bp, Homo sapiens
atcctggggatggaa

SEQ ID NO: 970266 - DNA, 15 bp, Homo sapiens
tcctggggatggaac

SEQ ID NO: 970267 - DNA, 15 bp, Homo sapiens
cctggggatggaaca

SEQ ID NO: 970268 - DNA, 15 bp, Homo sapiens
ctggggatggaacag

SEQ ID NO: 970269 - DNA, 15 bp, Homo sapiens
tggggatggaacagt

SEQ ID NO: 970270 - DNA, 15 bp, Homo sapiens
ggggatggaacagtc

SEQ ID NO: 970271 - DNA, 15 bp, Homo sapiens
gggatggaacagtcg

SEQ ID NO: 970272 - DNA, 15 bp, Homo sapiens
ggatggaacagtcgg

SEQ ID NO: 970273 - DNA, 15 bp, Homo sapiens
gatggaacagtcggt

SEQ ID NO: 970274 - DNA, 15 bp, Homo sapiens
atggaacagtcggtg

SEQ ID NO: 970275 - DNA, 15 bp, Homo sapiens
tggaacagtcggtga

SEQ ID NO: 970276 - DNA, 15 bp, Homo sapiens
ggaacagtcggtgag

SEQ ID NO: 970277 - DNA, 15 bp, Homo sapiens
gaacagtcggtgagg

SEQ ID NO: 970278 - DNA, 15 bp, Homo sapiens
aacagtcggtgaggg

SEQ ID NO: 970279 - DNA, 15 bp, Homo sapiens
acagtcggtgagggg

SEQ ID NO: 970280 - DNA, 15 bp, Homo sapiens
cagtcggtgaggggt

SEQ ID NO: 970281 - DNA, 15 bp, Homo sapiens
agtcggtgaggggtc

SEQ ID NO: 970282 - DNA, 15 bp, Homo sapiens
gtcggtgaggggtct

SEQ ID NO: 970283 - DNA, 15 bp, Homo sapiens
tcggtgaggggtctg

SEQ ID NO: 970284 - DNA, 15 bp, Homo sapiens
cggtgaggggtctga

SEQ ID NO: 970285 - DNA, 15 bp, Homo sapiens
ggtgaggggtctgac

SEQ ID NO: 970286 - DNA, 15 bp, Homo sapiens
gtgaggggtctgacc

SEQ ID NO: 970287 - DNA, 15 bp, Homo sapiens
tgaggggtctgacca

SEQ ID NO: 970288 - DNA, 15 bp, Homo sapiens
gaggggtctgaccag

SEQ ID NO: 970289 - DNA, 15 bp, Homo sapiens
aggggtctgaccagt

SEQ ID NO: 970290 - DNA, 15 bp, Homo sapiens
ggggtctgaccagtg

SEQ ID NO: 970291 - DNA, 15 bp, Homo sapiens
gggtctgaccagtgc

SEQ ID NO: 970292 - DNA, 15 bp, Homo sapiens
ggtctgaccagtgcc

SEQ ID NO: 970293 - DNA, 15 bp, Homo sapiens
gtctgaccagtgccc

SEQ ID NO: 970294 - DNA, 15 bp, Homo sapiens
tctgaccagtgcccc

SEQ ID NO: 970295 - DNA, 15 bp, Homo sapiens
ctgaccagtgcccct

SEQ ID NO: 970296 - DNA, 15 bp, Homo sapiens
tgaccagtgcccctt

SEQ ID NO: 970297 - DNA, 15 bp, Homo sapiens
gaccagtgccccttt

SEQ ID NO: 970298 - DNA, 15 bp, Homo sapiens
accagtgcccctttg

SEQ ID NO: 970299 - DNA, 15 bp, Homo sapiens
ccagtgcccctttgc

SEQ ID NO: 970300 - DNA, 15 bp, Homo sapiens
cagtgcccctttgcc

SEQ ID NO: 970301 - DNA, 15 bp, Homo sapiens
agtgcccctttgccc

SEQ ID NO: 970302 - DNA, 15 bp, Homo sapiens
gtgcccctttgcccc

SEQ ID NO: 970303 - DNA, 15 bp, Homo sapiens
tgcccctttgcccct

SEQ ID NO: 970304 - DNA, 15 bp, Homo sapiens
gcccctttgcccctg

SEQ ID NO: 970305 - DNA, 15 bp, Homo sapiens
cccctttgcccctgt

SEQ ID NO: 970306 - DNA, 15 bp, Homo sapiens
ccctttgcccctgtt

SEQ ID NO: 970307 - DNA, 15 bp, Homo sapiens
cctttgcccctgttc

SEQ ID NO: 970308 - DNA, 15 bp, Homo sapiens
ctttgcccctgttca

SEQ ID NO: 970309 - DNA, 15 bp, Homo sapiens
tttgcccctgttcac

SEQ ID NO: 970310 - DNA, 15 bp, Homo sapiens
ttgcccctgttcacc

SEQ ID NO: 970311 - DNA, 15 bp, Homo sapiens
tgcccctgttcacca

SEQ ID NO: 970312 - DNA, 15 bp, Homo sapiens
gcccctgttcaccac

SEQ ID NO: 970313 - DNA, 15 bp, Homo sapiens
cccctgttcaccacc

SEQ ID NO: 970314 - DNA, 15 bp, Homo sapiens
ccctgttcaccacct

SEQ ID NO: 970315 - DNA, 15 bp, Homo sapiens
cctgttcaccacctg

SEQ ID NO: 970316 - DNA, 15 bp, Homo sapiens
ctgttcaccacctgc

SEQ ID NO: 970317 - DNA, 15 bp, Homo sapiens
tgttcaccacctgcc

SEQ ID NO: 970318 - DNA, 15 bp, Homo sapiens
gttcaccacctgccc

SEQ ID NO: 970319 - DNA, 15 bp, Homo sapiens
ttcaccacctgccca

SEQ ID NO: 970320 - DNA, 15 bp, Homo sapiens
tcaccacctgcccac

SEQ ID NO: 970321 - DNA, 15 bp, Homo sapiens
caccacctgcccacc

SEQ ID NO: 970322 - DNA, 15 bp, Homo sapiens
accacctgcccacca

SEQ ID NO: 970323 - DNA, 15 bp, Homo sapiens
ccacctgcccaccac

SEQ ID NO: 970324 - DNA, 15 bp, Homo sapiens
cacctgcccaccacc

SEQ ID NO: 970325 - DNA, 15 bp, Homo sapiens
acctgcccaccaccc

SEQ ID NO: 970326 - DNA, 15 bp, Homo sapiens
cctgcccaccaccca

SEQ ID NO: 970327 - DNA, 15 bp, Homo sapiens
ctgcccaccacccag

SEQ ID NO: 970328 - DNA, 15 bp, Homo sapiens
tgcccaccacccaga

SEQ ID NO: 970329 - DNA, 15 bp, Homo sapiens
gcccaccacccagaa

SEQ ID NO: 970330 - DNA, 15 bp, Homo sapiens
cccaccacccagaac

SEQ ID NO: 970331 - DNA, 15 bp, Homo sapiens
ccaccacccagaacc

SEQ ID NO: 970332 - DNA, 15 bp, Homo sapiens
caccacccagaaccc

SEQ ID NO: 970333 - DNA, 15 bp, Homo sapiens
accacccagaaccct

SEQ ID NO: 970334 - DNA, 15 bp, Homo sapiens
ccacccagaaccctt

SEQ ID NO: 970335 - DNA, 15 bp, Homo sapiens
cacccagaaccctta

SEQ ID NO: 970336 - DNA, 15 bp, Homo sapiens
acccagaacccttac

SEQ ID NO: 970337 - DNA, 15 bp, Homo sapiens
cccagaacccttacc

SEQ ID NO: 970338 - DNA, 15 bp, Homo sapiens
ccagaacccttacca

SEQ ID NO: 970339 - DNA, 15 bp, Homo sapiens
cagaacccttaccag

SEQ ID NO: 970340 - DNA, 15 bp, Homo sapiens
agaacccttaccagg

SEQ ID NO: 970341 - DNA, 15 bp, Homo sapiens
gaacccttaccaggt

SEQ ID NO: 970342 - DNA, 15 bp, Homo sapiens
aacccttaccaggtc

SEQ ID NO: 970343 - DNA, 15 bp, Homo sapiens
acccttaccaggtct

SEQ ID NO: 970344 - DNA, 15 bp, Homo sapiens
cccttaccaggtctt

SEQ ID NO: 970345 - DNA, 15 bp, Homo sapiens
ccttaccaggtcttg

SEQ ID NO: 970346 - DNA, 15 bp, Homo sapiens
cttaccaggtcttgg

SEQ ID NO: 970347 - DNA, 15 bp, Homo sapiens
ttaccaggtcttggt

SEQ ID NO: 970348 - DNA, 15 bp, Homo sapiens
taccaggtcttggtc

SEQ ID NO: 970349 - DNA, 15 bp, Homo sapiens
accaggtcttggtcc

SEQ ID NO: 970350 - DNA, 15 bp, Homo sapiens
ccaggtcttggtccc

SEQ ID NO: 970351 - DNA, 15 bp, Homo sapiens
caggtcttggtccca

SEQ ID NO: 970352 - DNA, 15 bp, Homo sapiens
aggtcttggtcccat

SEQ ID NO: 970353 - DNA, 15 bp, Homo sapiens
ggtcttggtcccatt

SEQ ID NO: 970354 - DNA, 15 bp, Homo sapiens
gtcttggtcccattg

SEQ ID NO: 970355 - DNA, 15 bp, Homo sapiens
tcttggtcccattga

SEQ ID NO: 970356 - DNA, 15 bp, Homo sapiens
cttggtcccattgag

SEQ ID NO: 970357 - DNA, 15 bp, Homo sapiens
ttggtcccattgagg

SEQ ID NO: 970358 - DNA, 15 bp, Homo sapiens
tggtcccattgaggg

SEQ ID NO: 970359 - DNA, 15 bp, Homo sapiens
ggtcccattgagggt

SEQ ID NO: 970360 - DNA, 15 bp, Homo sapiens
gtcccattgagggtg

SEQ ID NO: 970361 - DNA, 15 bp, Homo sapiens
tcccattgagggtgt

SEQ ID NO: 970362 - DNA, 15 bp, Homo sapiens
cccattgagggtgta

SEQ ID NO: 970363 - DNA, 15 bp, Homo sapiens
ccattgagggtgtag

SEQ ID NO: 970364 - DNA, 15 bp, Homo sapiens
cattgagggtgtagc

SEQ ID NO: 970365 - DNA, 15 bp, Homo sapiens
attgagggtgtagct

SEQ ID NO: 970366 - DNA, 15 bp, Homo sapiens
ttgagggtgtagctc

SEQ ID NO: 970367 - DNA, 15 bp, Homo sapiens
tgagggtgtagctct

SEQ ID NO: 970368 - DNA, 15 bp, Homo sapiens
gagggtgtagctctt

SEQ ID NO: 970369 - DNA, 15 bp, Homo sapiens
agggtgtagctcttg

SEQ ID NO: 970370 - DNA, 15 bp, Homo sapiens
gggtgtagctcttgt

SEQ ID NO: 970371 - DNA, 15 bp, Homo sapiens
ggtgtagctcttgtt

SEQ ID NO: 970372 - DNA, 15 bp, Homo sapiens
gtgtagctcttgttg

SEQ ID NO: 970373 - DNA, 15 bp, Homo sapiens
tgtagctcttgttgg

SEQ ID NO: 970374 - DNA, 15 bp, Homo sapiens
gtagctcttgttgga

SEQ ID NO: 970375 - DNA, 15 bp, Homo sapiens
tagctcttgttggat

SEQ ID NO: 970376 - DNA, 15 bp, Homo sapiens
agctcttgttggatg

SEQ ID NO: 970377 - DNA, 15 bp, Homo sapiens
gctcttgttggatga

SEQ ID NO: 970378 - DNA, 15 bp, Homo sapiens
ctcttgttggatgag

SEQ ID NO: 970379 - DNA, 15 bp, Homo sapiens
tcttgttggatgagt

SEQ ID NO: 970380 - DNA, 15 bp, Homo sapiens
cttgttggatgagtt

SEQ ID NO: 970381 - DNA, 15 bp, Homo sapiens
ttgttggatgagttg

SEQ ID NO: 970382 - DNA, 15 bp, Homo sapiens
tgttggatgagttgt

SEQ ID NO: 970383 - DNA, 15 bp, Homo sapiens
gttggatgagttgta

SEQ ID NO: 970384 - DNA, 15 bp, Homo sapiens
ttggatgagttgtag

SEQ ID NO: 970385 - DNA, 15 bp, Homo sapiens
tggatgagttgtagt

SEQ ID NO: 970386 - DNA, 15 bp, Homo sapiens
ggatgagttgtagtg

SEQ ID NO: 970387 - DNA, 15 bp, Homo sapiens
gatgagttgtagtgg

SEQ ID NO: 970388 - DNA, 15 bp, Homo sapiens
atgagttgtagtggg

SEQ ID NO: 970389 - DNA, 15 bp, Homo sapiens
tgagttgtagtgggc

SEQ ID NO: 970390 - DNA, 15 bp, Homo sapiens
gagttgtagtgggct

SEQ ID NO: 970391 - DNA, 15 bp, Homo sapiens
agttgtagtgggctc

SEQ ID NO: 970392 - DNA, 15 bp, Homo sapiens
gttgtagtgggctct

SEQ ID NO: 970393 - DNA, 15 bp, Homo sapiens
ttgtagtgggctctg

SEQ ID NO: 970394 - DNA, 15 bp, Homo sapiens
tgtagtgggctctgg

SEQ ID NO: 970395 - DNA, 15 bp, Homo sapiens
gtagtgggctctggt

SEQ ID NO: 970396 - DNA, 15 bp, Homo sapiens
tagtgggctctggtc

SEQ ID NO: 970397 - DNA, 15 bp, Homo sapiens
agtgggctctggtct

SEQ ID NO: 970398 - DNA, 15 bp, Homo sapiens
gtgggctctggtctc

SEQ ID NO: 970399 - DNA, 15 bp, Homo sapiens
tgggctctggtctcc

SEQ ID NO: 970400 - DNA, 15 bp, Homo sapiens
gggctctggtctcca

SEQ ID NO: 970401 - DNA, 15 bp, Homo sapiens
ggctctggtctccat

SEQ ID NO: 970402 - DNA, 15 bp, Homo sapiens
gctctggtctccatg

SEQ ID NO: 970403 - DNA, 15 bp, Homo sapiens
ctctggtctccatgc

SEQ ID NO: 970404 - DNA, 15 bp, Homo sapiens
tctggtctccatgct

SEQ ID NO: 970405 - DNA, 15 bp, Homo sapiens
ctggtctccatgctg

SEQ ID NO: 970406 - DNA, 15 bp, Homo sapiens
tggtctccatgctgc

SEQ ID NO: 970407 - DNA, 15 bp, Homo sapiens
ggtctccatgctgct

SEQ ID NO: 970408 - DNA, 15 bp, Homo sapiens
gtctccatgctgctg

SEQ ID NO: 970409 - DNA, 15 bp, Homo sapiens
tctccatgctgctgg

SEQ ID NO: 970410 - DNA, 15 bp, Homo sapiens
ctccatgctgctggg

SEQ ID NO: 970411 - DNA, 15 bp, Homo sapiens
tccatgctgctgggg

SEQ ID NO: 970412 - DNA, 15 bp, Homo sapiens
ccatgctgctggggt

SEQ ID NO: 970413 - DNA, 15 bp, Homo sapiens
catgctgctggggtc

SEQ ID NO: 970414 - DNA, 15 bp, Homo sapiens
atgctgctggggtca

SEQ ID NO: 970415 - DNA, 15 bp, Homo sapiens
tgctgctggggtcac

SEQ ID NO: 970416 - DNA, 15 bp, Homo sapiens
gctgctggggtcact

SEQ ID NO: 970417 - DNA, 15 bp, Homo sapiens
ctgctggggtcactt

SEQ ID NO: 970418 - DNA, 15 bp, Homo sapiens
tgctggggtcacttc

SEQ ID NO: 970419 - DNA, 15 bp, Homo sapiens
gctggggtcacttcc

SEQ ID NO: 970420 - DNA, 15 bp, Homo sapiens
ctggggtcacttccg

SEQ ID NO: 970421 - DNA, 15 bp, Homo sapiens
tggggtcacttccgc

SEQ ID NO: 970422 - DNA, 15 bp, Homo sapiens
ggggtcacttccgct

SEQ ID NO: 970423 - DNA, 15 bp, Homo sapiens
gggtcacttccgctg

SEQ ID NO: 970424 - DNA, 15 bp, Homo sapiens
ggtcacttccgctgt

SEQ ID NO: 970425 - DNA, 15 bp, Homo sapiens
gtcacttccgctgtt

SEQ ID NO: 970426 - DNA, 15 bp, Homo sapiens
tcacttccgctgttg

SEQ ID NO: 970427 - DNA, 15 bp, Homo sapiens
cacttccgctgttgg

SEQ ID NO: 970428 - DNA, 15 bp, Homo sapiens
acttccgctgttggg

SEQ ID NO: 970429 - DNA, 15 bp, Homo sapiens
cttccgctgttgggc

SEQ ID NO: 970430 - DNA, 15 bp, Homo sapiens
ttccgctgttgggct

SEQ ID NO: 970431 - DNA, 15 bp, Homo sapiens
tccgctgttgggctc

SEQ ID NO: 970432 - DNA, 15 bp, Homo sapiens
ccgctgttgggctct

SEQ ID NO: 970433 - DNA, 15 bp, Homo sapiens
cgctgttgggctctg

SEQ ID NO: 970434 - DNA, 15 bp, Homo sapiens
gctgttgggctctgt

SEQ ID NO: 970435 - DNA, 15 bp, Homo sapiens
ctgttgggctctgtg

SEQ ID NO: 970436 - DNA, 15 bp, Homo sapiens
tgttgggctctgtga

SEQ ID NO: 970437 - DNA, 15 bp, Homo sapiens
gttgggctctgtgag

SEQ ID NO: 970438 - DNA, 15 bp, Homo sapiens
ttgggctctgtgagc

SEQ ID NO: 970439 - DNA, 15 bp, Homo sapiens
tgggctctgtgagcc

SEQ ID NO: 970440 - DNA, 15 bp, Homo sapiens
gggctctgtgagccc

SEQ ID NO: 970441 - DNA, 15 bp, Homo sapiens
ggctctgtgagcccg

SEQ ID NO: 970442 - DNA, 15 bp, Homo sapiens
gctctgtgagcccga

SEQ ID NO: 970443 - DNA, 15 bp, Homo sapiens
ctctgtgagcccgaa

SEQ ID NO: 970444 - DNA, 15 bp, Homo sapiens
tctgtgagcccgaag

SEQ ID NO: 970445 - DNA, 15 bp, Homo sapiens
ctgtgagcccgaagc

SEQ ID NO: 970446 - DNA, 15 bp, Homo sapiens
tgtgagcccgaagca

SEQ ID NO: 970447 - DNA, 15 bp, Homo sapiens
gtgagcccgaagcag

SEQ ID NO: 970448 - DNA, 15 bp, Homo sapiens
tgagcccgaagcagc

SEQ ID NO: 970449 - DNA, 15 bp, Homo sapiens
gagcccgaagcagcc

SEQ ID NO: 970450 - DNA, 15 bp, Homo sapiens
agcccgaagcagccc

SEQ ID NO: 970451 - DNA, 15 bp, Homo sapiens
gcccgaagcagccca

SEQ ID NO: 970452 - DNA, 15 bp, Homo sapiens
cccgaagcagcccag

SEQ ID NO: 970453 - DNA, 15 bp, Homo sapiens
ccgaagcagcccagg

SEQ ID NO: 970454 - DNA, 15 bp, Homo sapiens
cgaagcagcccagga

SEQ ID NO: 970455 - DNA, 15 bp, Homo sapiens
gaagcagcccaggag

SEQ ID NO: 970456 - DNA, 15 bp, Homo sapiens
aagcagcccaggagc

SEQ ID NO: 970457 - DNA, 15 bp, Homo sapiens
agcagcccaggagct

SEQ ID NO: 970458 - DNA, 15 bp, Homo sapiens
gcagcccaggagctc

SEQ ID NO: 970459 - DNA, 15 bp, Homo sapiens
cagcccaggagctcc

SEQ ID NO: 970460 - DNA, 15 bp, Homo sapiens
agcccaggagctccc

SEQ ID NO: 970461 - DNA, 15 bp, Homo sapiens
gcccaggagctcccc

SEQ ID NO: 970462 - DNA, 15 bp, Homo sapiens
cccaggagctccccc

SEQ ID NO: 970463 - DNA, 15 bp, Homo sapiens
ccaggagctccccct

SEQ ID NO: 970464 - DNA, 15 bp, Homo sapiens
caggagctccccctt

SEQ ID NO: 970465 - DNA, 15 bp, Homo sapiens
aggagctcccccttg

SEQ ID NO: 970466 - DNA, 15 bp, Homo sapiens
ggagctcccccttgg

SEQ ID NO: 970467 - DNA, 15 bp, Homo sapiens
gagctcccccttggc

SEQ ID NO: 970468 - DNA, 15 bp, Homo sapiens
agctcccccttggct

SEQ ID NO: 970469 - DNA, 15 bp, Homo sapiens
gctcccccttggctg

SEQ ID NO: 970470 - DNA, 15 bp, Homo sapiens
ctcccccttggctgc

SEQ ID NO: 970471 - DNA, 15 bp, Homo sapiens
tcccccttggctgca

SEQ ID NO: 970472 - DNA, 15 bp, Homo sapiens
cccccttggctgcag

SEQ ID NO: 970473 - DNA, 15 bp, Homo sapiens
ccccttggctgcagg

SEQ ID NO: 970474 - DNA, 15 bp, Homo sapiens
cccttggctgcaggc

SEQ ID NO: 970475 - DNA, 15 bp, Homo sapiens
ccttggctgcaggca

SEQ ID NO: 970476 - DNA, 15 bp, Homo sapiens
cttggctgcaggcac

SEQ ID NO: 970477 - DNA, 15 bp, Homo sapiens
ttggctgcaggcaca

SEQ ID NO: 970478 - DNA, 15 bp, Homo sapiens
tggctgcaggcacaa

SEQ ID NO: 970479 - DNA, 15 bp, Homo sapiens
ggctgcaggcacaag

SEQ ID NO: 970480 - DNA, 15 bp, Homo sapiens
gctgcaggcacaaga

SEQ ID NO: 970481 - DNA, 15 bp, Homo sapiens
ctgcaggcacaagac

SEQ ID NO: 970482 - DNA, 15 bp, Homo sapiens
tgcaggcacaagaca

SEQ ID NO: 970483 - DNA, 15 bp, Homo sapiens
gcaggcacaagacaa

SEQ ID NO: 970484 - DNA, 15 bp, Homo sapiens
caggcacaagacaaa

SEQ ID NO: 970485 - DNA, 15 bp, Homo sapiens
aggcacaagacaaag

SEQ ID NO: 970486 - DNA, 15 bp, Homo sapiens
ggcacaagacaaagt

SEQ ID NO: 970487 - DNA, 15 bp, Homo sapiens
gcacaagacaaagtc

SEQ ID NO: 970488 - DNA, 15 bp, Homo sapiens
cacaagacaaagtca

SEQ ID NO: 970489 - DNA, 15 bp, Homo sapiens
acaagacaaagtcac

SEQ ID NO: 970490 - DNA, 15 bp, Homo sapiens
caagacaaagtcaca

SEQ ID NO: 970491 - DNA, 15 bp, Homo sapiens
aagacaaagtcacaa

SEQ ID NO: 970492 - DNA, 15 bp, Homo sapiens
agacaaagtcacaag

SEQ ID NO: 970493 - DNA, 15 bp, Homo sapiens
gacaaagtcacaagg

SEQ ID NO: 970494 - DNA, 15 bp, Homo sapiens
acaaagtcacaaggc

SEQ ID NO: 970495 - DNA, 15 bp, Homo sapiens
caaagtcacaaggct

SEQ ID NO: 970496 - DNA, 15 bp, Homo sapiens
aaagtcacaaggctg

SEQ ID NO: 970497 - DNA, 15 bp, Homo sapiens
aagtcacaaggctgc

SEQ ID NO: 970498 - DNA, 15 bp, Homo sapiens
agtcacaaggctgcc

SEQ ID NO: 970499 - DNA, 15 bp, Homo sapiens
gtcacaaggctgcct

SEQ ID NO: 970500 - DNA, 15 bp, Homo sapiens
tcacaaggctgcctg

SEQ ID NO: 970501 - DNA, 15 bp, Homo sapiens
cacaaggctgcctgg

SEQ ID NO: 970502 - DNA, 15 bp, Homo sapiens
acaaggctgcctggt

SEQ ID NO: 970503 - DNA, 15 bp, Homo sapiens
caaggctgcctggtc

SEQ ID NO: 970504 - DNA, 15 bp, Homo sapiens
aaggctgcctggtcc

SEQ ID NO: 970505 - DNA, 15 bp, Homo sapiens
aggctgcctggtccc

SEQ ID NO: 970506 - DNA, 15 bp, Homo sapiens
ggctgcctggtccct

SEQ ID NO: 970507 - DNA, 15 bp, Homo sapiens
gctgcctggtccctg

SEQ ID NO: 970508 - DNA, 15 bp, Homo sapiens
ctgcctggtccctga

SEQ ID NO: 970509 - DNA, 15 bp, Homo sapiens
tgcctggtccctgat

SEQ ID NO: 970510 - DNA, 15 bp, Homo sapiens
gcctggtccctgata

SEQ ID NO: 970511 - DNA, 15 bp, Homo sapiens
cctggtccctgatac

SEQ ID NO: 970512 - DNA, 15 bp, Homo sapiens
ctggtccctgataca

SEQ ID NO: 970513 - DNA, 15 bp, Homo sapiens
tggtccctgatacat

SEQ ID NO: 970514 - DNA, 15 bp, Homo sapiens
ggtccctgatacatc

SEQ ID NO: 970515 - DNA, 15 bp, Homo sapiens
gtccctgatacatcc

SEQ ID NO: 970516 - DNA, 15 bp, Homo sapiens
tccctgatacatccc

SEQ ID NO: 970517 - DNA, 15 bp, Homo sapiens
ccctgatacatcccc

SEQ ID NO: 970518 - DNA, 15 bp, Homo sapiens
cctgatacatcccct

SEQ ID NO: 970519 - DNA, 15 bp, Homo sapiens
ctgatacatcccctt

SEQ ID NO: 970520 - DNA, 15 bp, Homo sapiens
tgatacatcccctta

SEQ ID NO: 970521 - DNA, 15 bp, Homo sapiens
gatacatccccttac

SEQ ID NO: 970522 - DNA, 15 bp, Homo sapiens
atacatccccttact

SEQ ID NO: 970523 - DNA, 15 bp, Homo sapiens
tacatccccttactc

SEQ ID NO: 970524 - DNA, 15 bp, Homo sapiens
acatccccttactca

SEQ ID NO: 970525 - DNA, 15 bp, Homo sapiens
catccccttactcaa

SEQ ID NO: 970526 - DNA, 15 bp, Homo sapiens
atccccttactcaaa

SEQ ID NO: 970527 - DNA, 15 bp, Homo sapiens
tccccttactcaaaa

SEQ ID NO: 970528 - DNA, 15 bp, Homo sapiens
ccccttactcaaaaa

SEQ ID NO: 970529 - DNA, 15 bp, Homo sapiens
cccttactcaaaaat

SEQ ID NO: 970530 - DNA, 15 bp, Homo sapiens
ccttactcaaaaatt

SEQ ID NO: 970531 - DNA, 15 bp, Homo sapiens
cttactcaaaaatta

SEQ ID NO: 970532 - DNA, 15 bp, Homo sapiens
ttactcaaaaattat

SEQ ID NO: 970533 - DNA, 15 bp, Homo sapiens
tactcaaaaattatc

SEQ ID NO: 970534 - DNA, 15 bp, Homo sapiens
actcaaaaattatcc

SEQ ID NO: 970535 - DNA, 15 bp, Homo sapiens
ctcaaaaattatcct

SEQ ID NO: 970536 - DNA, 15 bp, Homo sapiens
tcaaaaattatcctc

SEQ ID NO: 970537 - DNA, 15 bp, Homo sapiens
caaaaattatcctcg

SEQ ID NO: 970538 - DNA, 15 bp, Homo sapiens
aaaaattatcctcgt

SEQ ID NO: 970539 - DNA, 15 bp, Homo sapiens
aaaattatcctcgtg

SEQ ID NO: 970540 - DNA, 15 bp, Homo sapiens
aaattatcctcgtgg

SEQ ID NO: 970541 - DNA, 15 bp, Homo sapiens
aattatcctcgtggc

SEQ ID NO: 970542 - DNA, 15 bp, Homo sapiens
attatcctcgtggcg

SEQ ID NO: 970543 - DNA, 15 bp, Homo sapiens
ttatcctcgtggcgg

SEQ ID NO: 970544 - DNA, 15 bp, Homo sapiens
tatcctcgtggcggg

SEQ ID NO: 970545 - DNA, 15 bp, Homo sapiens
atcctcgtggcgggg

SEQ ID NO: 970546 - DNA, 15 bp, Homo sapiens
tcctcgtggcggggt

SEQ ID NO: 970547 - DNA, 15 bp, Homo sapiens
cctcgtggcggggtg

SEQ ID NO: 970548 - DNA, 15 bp, Homo sapiens
ctcgtggcggggtgc

SEQ ID NO: 970549 - DNA, 15 bp, Homo sapiens
tcgtggcggggtgca

SEQ ID NO: 970550 - DNA, 15 bp, Homo sapiens
cgtggcggggtgcag

SEQ ID NO: 970551 - DNA, 15 bp, Homo sapiens
gtggcggggtgcagt

SEQ ID NO: 970552 - DNA, 15 bp, Homo sapiens
tggcggggtgcagtg

SEQ ID NO: 970553 - DNA, 15 bp, Homo sapiens
ggcggggtgcagtgg

SEQ ID NO: 970554 - DNA, 15 bp, Homo sapiens
gcggggtgcagtggc

SEQ ID NO: 970555 - DNA, 15 bp, Homo sapiens
cggggtgcagtggct

SEQ ID NO: 970556 - DNA, 15 bp, Homo sapiens
ggggtgcagtggctc

SEQ ID NO: 970557 - DNA, 15 bp, Homo sapiens
gggtgcagtggctca

SEQ ID NO: 970558 - DNA, 15 bp, Homo sapiens
ggtgcagtggctcac

SEQ ID NO: 970559 - DNA, 15 bp, Homo sapiens
gtgcagtggctcacg

SEQ ID NO: 970560 - DNA, 15 bp, Homo sapiens
tgcagtggctcacgc

SEQ ID NO: 970561 - DNA, 15 bp, Homo sapiens
gcagtggctcacgcc

SEQ ID NO: 970562 - DNA, 15 bp, Homo sapiens
cagtggctcacgcct

SEQ ID NO: 970563 - DNA, 15 bp, Homo sapiens
agtggctcacgcctg

SEQ ID NO: 970564 - DNA, 15 bp, Homo sapiens
gtggctcacgcctgt

SEQ ID NO: 970565 - DNA, 15 bp, Homo sapiens
tggctcacgcctgtc

SEQ ID NO: 970566 - DNA, 15 bp, Homo sapiens
ggctcacgcctgtca

SEQ ID NO: 970567 - DNA, 15 bp, Homo sapiens
gctcacgcctgtcat

SEQ ID NO: 970568 - DNA, 15 bp, Homo sapiens
ctcacgcctgtcatc

SEQ ID NO: 970569 - DNA, 15 bp, Homo sapiens
tcacgcctgtcatcc

SEQ ID NO: 970570 - DNA, 15 bp, Homo sapiens
cacgcctgtcatccc

SEQ ID NO: 970571 - DNA, 15 bp, Homo sapiens
acgcctgtcatccca

SEQ ID NO: 970572 - DNA, 15 bp, Homo sapiens
cgcctgtcatcccag

SEQ ID NO: 970573 - DNA, 15 bp, Homo sapiens
gcctgtcatcccagc

SEQ ID NO: 970574 - DNA, 15 bp, Homo sapiens
cctgtcatcccagca

SEQ ID NO: 970575 - DNA, 15 bp, Homo sapiens
ctgtcatcccagcac

SEQ ID NO: 970576 - DNA, 15 bp, Homo sapiens
tgtcatcccagcact

SEQ ID NO: 970577 - DNA, 15 bp, Homo sapiens
gtcatcccagcactt

SEQ ID NO: 970578 - DNA, 15 bp, Homo sapiens
tcatcccagcacttt

SEQ ID NO: 970579 - DNA, 15 bp, Homo sapiens
catcccagcacttta

SEQ ID NO: 970580 - DNA, 15 bp, Homo sapiens
atcccagcactttag

SEQ ID NO: 970581 - DNA, 15 bp, Homo sapiens
tcccagcactttagg

SEQ ID NO: 970582 - DNA, 15 bp, Homo sapiens
cccagcactttagga

SEQ ID NO: 970583 - DNA, 15 bp, Homo sapiens
ccagcactttaggag

SEQ ID NO: 970584 - DNA, 15 bp, Homo sapiens
cagcactttaggagg

SEQ ID NO: 970585 - DNA, 15 bp, Homo sapiens
agcactttaggaggc

SEQ ID NO: 970586 - DNA, 15 bp, Homo sapiens
gcactttaggaggcc

SEQ ID NO: 970587 - DNA, 15 bp, Homo sapiens
cactttaggaggcca

SEQ ID NO: 970588 - DNA, 15 bp, Homo sapiens
actttaggaggccaa

SEQ ID NO: 970589 - DNA, 15 bp, Homo sapiens
ctttaggaggccaag

SEQ ID NO: 970590 - DNA, 15 bp, Homo sapiens
tttaggaggccaagg

SEQ ID NO: 970591 - DNA, 15 bp, Homo sapiens
ttaggaggccaaggc

SEQ ID NO: 970592 - DNA, 15 bp, Homo sapiens
taggaggccaaggca

SEQ ID NO: 970593 - DNA, 15 bp, Homo sapiens
aggaggccaaggcag

SEQ ID NO: 970594 - DNA, 15 bp, Homo sapiens
ggaggccaaggcagg

SEQ ID NO: 970595 - DNA, 15 bp, Homo sapiens
gaggccaaggcaggt

SEQ ID NO: 970596 - DNA, 15 bp, Homo sapiens
aggccaaggcaggtg

SEQ ID NO: 970597 - DNA, 15 bp, Homo sapiens
ggccaaggcaggtgg

SEQ ID NO: 970598 - DNA, 15 bp, Homo sapiens
gccaaggcaggtgga

SEQ ID NO: 970599 - DNA, 15 bp, Homo sapiens
ccaaggcaggtggat

SEQ ID NO: 970600 - DNA, 15 bp, Homo sapiens
caaggcaggtggatc

SEQ ID NO: 970601 - DNA, 15 bp, Homo sapiens
aaggcaggtggatca

SEQ ID NO: 970602 - DNA, 15 bp, Homo sapiens
aggcaggtggatcaa

SEQ ID NO: 970603 - DNA, 15 bp, Homo sapiens
ggcaggtggatcaat

SEQ ID NO: 970604 - DNA, 15 bp, Homo sapiens
gcaggtggatcaatt

SEQ ID NO: 970605 - DNA, 15 bp, Homo sapiens
caggtggatcaattg

SEQ ID NO: 970606 - DNA, 15 bp, Homo sapiens
aggtggatcaattga

SEQ ID NO: 970607 - DNA, 15 bp, Homo sapiens
ggtggatcaattgag

SEQ ID NO: 970608 - DNA, 15 bp, Homo sapiens
gtggatcaattgagg

SEQ ID NO: 970609 - DNA, 15 bp, Homo sapiens
tggatcaattgaggt

SEQ ID NO: 970610 - DNA, 15 bp, Homo sapiens
ggatcaattgaggtc

SEQ ID NO: 970611 - DNA, 15 bp, Homo sapiens
gatcaattgaggtca

SEQ ID NO: 970612 - DNA, 15 bp, Homo sapiens
atcaattgaggtcag

SEQ ID NO: 970613 - DNA, 15 bp, Homo sapiens
tcaattgaggtcagg

SEQ ID NO: 970614 - DNA, 15 bp, Homo sapiens
caattgaggtcagga

SEQ ID NO: 970615 - DNA, 15 bp, Homo sapiens
aattgaggtcaggag

SEQ ID NO: 970616 - DNA, 15 bp, Homo sapiens
attgaggtcaggagt

SEQ ID NO: 970617 - DNA, 15 bp, Homo sapiens
ttgaggtcaggagtt

SEQ ID NO: 970618 - DNA, 15 bp, Homo sapiens
tgaggtcaggagttc

SEQ ID NO: 970619 - DNA, 15 bp, Homo sapiens
gaggtcaggagttcc

SEQ ID NO: 970620 - DNA, 15 bp, Homo sapiens
aggtcaggagttcca

SEQ ID NO: 970621 - DNA, 15 bp, Homo sapiens
ggtcaggagttccag

SEQ ID NO: 970622 - DNA, 15 bp, Homo sapiens
gtcaggagttccaga

SEQ ID NO: 970623 - DNA, 15 bp, Homo sapiens
tcaggagttccagac

SEQ ID NO: 970624 - DNA, 15 bp, Homo sapiens
caggagttccagacc

SEQ ID NO: 970625 - DNA, 15 bp, Homo sapiens
aggagttccagacca

SEQ ID NO: 970626 - DNA, 15 bp, Homo sapiens
ggagttccagaccag

SEQ ID NO: 970627 - DNA, 15 bp, Homo sapiens
gagttccagaccagc

SEQ ID NO: 970628 - DNA, 15 bp, Homo sapiens
agttccagaccagcc

SEQ ID NO: 970629 - DNA, 15 bp, Homo sapiens
gttccagaccagcct

SEQ ID NO: 970630 - DNA, 15 bp, Homo sapiens
ttccagaccagcctg

SEQ ID NO: 970631 - DNA, 15 bp, Homo sapiens
tccagaccagcctgg

SEQ ID NO: 970632 - DNA, 15 bp, Homo sapiens
ccagaccagcctggc

SEQ ID NO: 970633 - DNA, 15 bp, Homo sapiens
cagaccagcctggcc

SEQ ID NO: 970634 - DNA, 15 bp, Homo sapiens
agaccagcctggcca

SEQ ID NO: 970635 - DNA, 15 bp, Homo sapiens
gaccagcctggccaa

SEQ ID NO: 970636 - DNA, 15 bp, Homo sapiens
accagcctggccaac

SEQ ID NO: 970637 - DNA, 15 bp, Homo sapiens
ccagcctggccaaca

SEQ ID NO: 970638 - DNA, 15 bp, Homo sapiens
cagcctggccaacat

SEQ ID NO: 970639 - DNA, 15 bp, Homo sapiens
agcctggccaacatg

SEQ ID NO: 970640 - DNA, 15 bp, Homo sapiens
gcctggccaacatgg

SEQ ID NO: 970641 - DNA, 15 bp, Homo sapiens
cctggccaacatggt

SEQ ID NO: 970642 - DNA, 15 bp, Homo sapiens
ctggccaacatggtg

SEQ ID NO: 970643 - DNA, 15 bp, Homo sapiens
tggccaacatggtga

SEQ ID NO: 970644 - DNA, 15 bp, Homo sapiens
ggccaacatggtgaa

SEQ ID NO: 970645 - DNA, 15 bp, Homo sapiens
gccaacatggtgaaa

SEQ ID NO: 970646 - DNA, 15 bp, Homo sapiens
ccaacatggtgaaac

SEQ ID NO: 970647 - DNA, 15 bp, Homo sapiens
caacatggtgaaacc

SEQ ID NO: 970648 - DNA, 15 bp, Homo sapiens
aacatggtgaaaccc

SEQ ID NO: 970649 - DNA, 15 bp, Homo sapiens
acatggtgaaacccc

SEQ ID NO: 970650 - DNA, 15 bp, Homo sapiens
catggtgaaacccca

SEQ ID NO: 970651 - DNA, 15 bp, Homo sapiens
atggtgaaaccccat

SEQ ID NO: 970652 - DNA, 15 bp, Homo sapiens
tggtgaaaccccatc

SEQ ID NO: 970653 - DNA, 15 bp, Homo sapiens
ggtgaaaccccatct

SEQ ID NO: 970654 - DNA, 15 bp, Homo sapiens
gtgaaaccccatctc

SEQ ID NO: 970655 - DNA, 15 bp, Homo sapiens
tgaaaccccatctct

SEQ ID NO: 970656 - DNA, 15 bp, Homo sapiens
gaaaccccatctcta

SEQ ID NO: 970657 - DNA, 15 bp, Homo sapiens
aaaccccatctctac

SEQ ID NO: 970658 - DNA, 15 bp, Homo sapiens
aaccccatctctact

SEQ ID NO: 970659 - DNA, 15 bp, Homo sapiens
accccatctctactt

SEQ ID NO: 970660 - DNA, 15 bp, Homo sapiens
ccccatctctactta

SEQ ID NO: 970661 - DNA, 15 bp, Homo sapiens
cccatctctacttaa

SEQ ID NO: 970662 - DNA, 15 bp, Homo sapiens
ccatctctacttaaa

SEQ ID NO: 970663 - DNA, 15 bp, Homo sapiens
catctctacttaaaa

SEQ ID NO: 970664 - DNA, 15 bp, Homo sapiens
atctctacttaaaaa

SEQ ID NO: 970665 - DNA, 15 bp, Homo sapiens
tctctacttaaaaaa

SEQ ID NO: 970666 - DNA, 15 bp, Homo sapiens
ctctacttaaaaaaa

SEQ ID NO: 970667 - DNA, 15 bp, Homo sapiens
tctacttaaaaaaaa

SEQ ID NO: 970668 - DNA, 15 bp, Homo sapiens
ctacttaaaaaaaaa

SEQ ID NO: 970669 - DNA, 15 bp, Homo sapiens
tacttaaaaaaaaaa

SEQ ID NO: 970670 - DNA, 15 bp, Homo sapiens
acttaaaaaaaaaaa

SEQ ID NO: 970671 - DNA, 15 bp, Homo sapiens
cttaaaaaaaaaaaa

SEQ ID NO: 970672 - DNA, 15 bp, Homo sapiens
ttaaaaaaaaaaaaa

SEQ ID NO: 970673 - DNA, 15 bp, Homo sapiens
taaaaaaaaaaaaaa

SEQ ID NO: 970674 - DNA, 15 bp, Homo sapiens
aaaaaaaaaaaaaaa

SEQ ID NO: 970675 - DNA, 15 bp, Homo sapiens
aaaaaaaaaaaaaat

SEQ ID NO: 970676 - DNA, 15 bp, Homo sapiens
aaaaaaaaaaaaata

SEQ ID NO: 970677 - DNA, 15 bp, Homo sapiens
aaaaaaaaaaaatag

SEQ ID NO: 970678 - DNA, 15 bp, Homo sapiens
aaaaaaaaaaatagc

SEQ ID NO: 970679 - DNA, 15 bp, Homo sapiens
aaaaaaaaaatagcc

SEQ ID NO: 970680 - DNA, 15 bp, Homo sapiens
aaaaaaaaatagcca

SEQ ID NO: 970681 - DNA, 15 bp, Homo sapiens
aaaaaaaatagccag

SEQ ID NO: 970682 - DNA, 15 bp, Homo sapiens
aaaaaaatagccaga

SEQ ID NO: 970683 - DNA, 15 bp, Homo sapiens
aaaaaatagccagat

SEQ ID NO: 970684 - DNA, 15 bp, Homo sapiens
aaaaatagccagatg

SEQ ID NO: 970685 - DNA, 15 bp, Homo sapiens
aaaatagccagatgt

SEQ ID NO: 970686 - DNA, 15 bp, Homo sapiens
aaatagccagatgtg

SEQ ID NO: 970687 - DNA, 15 bp, Homo sapiens
aatagccagatgtgg

SEQ ID NO: 970688 - DNA, 15 bp, Homo sapiens
atagccagatgtggt

SEQ ID NO: 970689 - DNA, 15 bp, Homo sapiens
tagccagatgtggtg

SEQ ID NO: 970690 - DNA, 15 bp, Homo sapiens
agccagatgtggtgg

SEQ ID NO: 970691 - DNA, 15 bp, Homo sapiens
gccagatgtggtggt

SEQ ID NO: 970692 - DNA, 15 bp, Homo sapiens
ccagatgtggtggtg

SEQ ID NO: 970693 - DNA, 15 bp, Homo sapiens
cagatgtggtggtgg

SEQ ID NO: 970694 - DNA, 15 bp, Homo sapiens
agatgtggtggtggg

SEQ ID NO: 970695 - DNA, 15 bp, Homo sapiens
gatgtggtggtgggt

SEQ ID NO: 970696 - DNA, 15 bp, Homo sapiens
atgtggtggtgggtg

SEQ ID NO: 970697 - DNA, 15 bp, Homo sapiens
tgtggtggtgggtgc

SEQ ID NO: 970698 - DNA, 15 bp, Homo sapiens
gtggtggtgggtgcc

SEQ ID NO: 970699 - DNA, 15 bp, Homo sapiens
tggtggtgggtgcct

SEQ ID NO: 970700 - DNA, 15 bp, Homo sapiens
ggtggtgggtgcctg

SEQ ID NO: 970701 - DNA, 15 bp, Homo sapiens
gtggtgggtgcctgt

SEQ ID NO: 970702 - DNA, 15 bp, Homo sapiens
tggtgggtgcctgta

SEQ ID NO: 970703 - DNA, 15 bp, Homo sapiens
ggtgggtgcctgtaa

SEQ ID NO: 970704 - DNA, 15 bp, Homo sapiens
gtgggtgcctgtaat

SEQ ID NO: 970705 - DNA, 15 bp, Homo sapiens
tgggtgcctgtaatc

SEQ ID NO: 970706 - DNA, 15 bp, Homo sapiens
gggtgcctgtaatcc

SEQ ID NO: 970707 - DNA, 15 bp, Homo sapiens
ggtgcctgtaatccc

SEQ ID NO: 970708 - DNA, 15 bp, Homo sapiens
gtgcctgtaatccca

SEQ ID NO: 970709 - DNA, 15 bp, Homo sapiens
tgcctgtaatcccag

SEQ ID NO: 970710 - DNA, 15 bp, Homo sapiens
gcctgtaatcccagc

SEQ ID NO: 970711 - DNA, 15 bp, Homo sapiens
cctgtaatcccagct

SEQ ID NO: 970712 - DNA, 15 bp, Homo sapiens
ctgtaatcccagcta

SEQ ID NO: 970713 - DNA, 15 bp, Homo sapiens
tgtaatcccagctac

SEQ ID NO: 970714 - DNA, 15 bp, Homo sapiens
gtaatcccagctact

SEQ ID NO: 970715 - DNA, 15 bp, Homo sapiens
taatcccagctactc

SEQ ID NO: 970716 - DNA, 15 bp, Homo sapiens
aatcccagctactca

SEQ ID NO: 970717 - DNA, 15 bp, Homo sapiens
atcccagctactcag

SEQ ID NO: 970718 - DNA, 15 bp, Homo sapiens
tcccagctactcagg

SEQ ID NO: 970719 - DNA, 15 bp, Homo sapiens
cccagctactcagga

SEQ ID NO: 970720 - DNA, 15 bp, Homo sapiens
ccagctactcaggag

SEQ ID NO: 970721 - DNA, 15 bp, Homo sapiens
cagctactcaggaga

SEQ ID NO: 970722 - DNA, 15 bp, Homo sapiens
agctactcaggagac

SEQ ID NO: 970723 - DNA, 15 bp, Homo sapiens
gctactcaggagact

SEQ ID NO: 970724 - DNA, 15 bp, Homo sapiens
ctactcaggagactg

SEQ ID NO: 970725 - DNA, 15 bp, Homo sapiens
tactcaggagactga

SEQ ID NO: 970726 - DNA, 15 bp, Homo sapiens
actcaggagactgag

SEQ ID NO: 970727 - DNA, 15 bp, Homo sapiens
ctcaggagactgagg

SEQ ID NO: 970728 - DNA, 15 bp, Homo sapiens
tcaggagactgaggc

SEQ ID NO: 970729 - DNA, 15 bp, Homo sapiens
caggagactgaggca

SEQ ID NO: 970730 - DNA, 15 bp, Homo sapiens
aggagactgaggcag

SEQ ID NO: 970731 - DNA, 15 bp, Homo sapiens
ggagactgaggcagg

SEQ ID NO: 970732 - DNA, 15 bp, Homo sapiens
gagactgaggcagga

SEQ ID NO: 970733 - DNA, 15 bp, Homo sapiens
agactgaggcaggag

SEQ ID NO: 970734 - DNA, 15 bp, Homo sapiens
gactgaggcaggaga

SEQ ID NO: 970735 - DNA, 15 bp, Homo sapiens
actgaggcaggagaa

SEQ ID NO: 970736 - DNA, 15 bp, Homo sapiens
ctgaggcaggagaat

SEQ ID NO: 970737 - DNA, 15 bp, Homo sapiens
tgaggcaggagaatc

SEQ ID NO: 970738 - DNA, 15 bp, Homo sapiens
gaggcaggagaatcg

SEQ ID NO: 970739 - DNA, 15 bp, Homo sapiens
aggcaggagaatcgc

SEQ ID NO: 970740 - DNA, 15 bp, Homo sapiens
ggcaggagaatcgct

SEQ ID NO: 970741 - DNA, 15 bp, Homo sapiens
gcaggagaatcgctt

SEQ ID NO: 970742 - DNA, 15 bp, Homo sapiens
caggagaatcgcttg

SEQ ID NO: 970743 - DNA, 15 bp, Homo sapiens
aggagaatcgcttga

SEQ ID NO: 970744 - DNA, 15 bp, Homo sapiens
ggagaatcgcttgaa

SEQ ID NO: 970745 - DNA, 15 bp, Homo sapiens
gagaatcgcttgaac

SEQ ID NO: 970746 - DNA, 15 bp, Homo sapiens
agaatcgcttgaacc

SEQ ID NO: 970747 - DNA, 15 bp, Homo sapiens
gaatcgcttgaaccc

SEQ ID NO: 970748 - DNA, 15 bp, Homo sapiens
aatcgcttgaacccg

SEQ ID NO: 970749 - DNA, 15 bp, Homo sapiens
atcgcttgaacccgg

SEQ ID NO: 970750 - DNA, 15 bp, Homo sapiens
tcgcttgaacccggg

SEQ ID NO: 970751 - DNA, 15 bp, Homo sapiens
cgcttgaacccgggc

SEQ ID NO: 970752 - DNA, 15 bp, Homo sapiens
gcttgaacccgggca

SEQ ID NO: 970753 - DNA, 15 bp, Homo sapiens
cttgaacccgggcag

SEQ ID NO: 970754 - DNA, 15 bp, Homo sapiens
ttgaacccgggcagg

SEQ ID NO: 970755 - DNA, 15 bp, Homo sapiens
tgaacccgggcagga

SEQ ID NO: 970756 - DNA, 15 bp, Homo sapiens
gaacccgggcaggag

SEQ ID NO: 970757 - DNA, 15 bp, Homo sapiens
aacccgggcaggaga

SEQ ID NO: 970758 - DNA, 15 bp, Homo sapiens
acccgggcaggagag

SEQ ID NO: 970759 - DNA, 15 bp, Homo sapiens
cccgggcaggagagg

SEQ ID NO: 970760 - DNA, 15 bp, Homo sapiens
ccgggcaggagaggt

SEQ ID NO: 970761 - DNA, 15 bp, Homo sapiens
cgggcaggagaggtt

SEQ ID NO: 970762 - DNA, 15 bp, Homo sapiens
gggcaggagaggttg

SEQ ID NO: 970763 - DNA, 15 bp, Homo sapiens
ggcaggagaggttgc

SEQ ID NO: 970764 - DNA, 15 bp, Homo sapiens
gcaggagaggttgca

SEQ ID NO: 970765 - DNA, 15 bp, Homo sapiens
caggagaggttgcag

SEQ ID NO: 970766 - DNA, 15 bp, Homo sapiens
aggagaggttgcagt

SEQ ID NO: 970767 - DNA, 15 bp, Homo sapiens
ggagaggttgcagtg

SEQ ID NO: 970768 - DNA, 15 bp, Homo sapiens
gagaggttgcagtga

SEQ ID NO: 970769 - DNA, 15 bp, Homo sapiens
agaggttgcagtgag

SEQ ID NO: 970770 - DNA, 15 bp, Homo sapiens
gaggttgcagtgagc

SEQ ID NO: 970771 - DNA, 15 bp, Homo sapiens
aggttgcagtgagcc

SEQ ID NO: 970772 - DNA, 15 bp, Homo sapiens
ggttgcagtgagcca

SEQ ID NO: 970773 - DNA, 15 bp, Homo sapiens
gttgcagtgagccaa

SEQ ID NO: 970774 - DNA, 15 bp, Homo sapiens
ttgcagtgagccaag

SEQ ID NO: 970775 - DNA, 15 bp, Homo sapiens
tgcagtgagccaaga

SEQ ID NO: 970776 - DNA, 15 bp, Homo sapiens
gcagtgagccaagat

SEQ ID NO: 970777 - DNA, 15 bp, Homo sapiens
cagtgagccaagatc

SEQ ID NO: 970778 - DNA, 15 bp, Homo sapiens
agtgagccaagatca

SEQ ID NO: 970779 - DNA, 15 bp, Homo sapiens
gtgagccaagatcat

SEQ ID NO: 970780 - DNA, 15 bp, Homo sapiens
tgagccaagatcatg

SEQ ID NO: 970781 - DNA, 15 bp, Homo sapiens
gagccaagatcatgc

SEQ ID NO: 970782 - DNA, 15 bp, Homo sapiens
agccaagatcatgcc

SEQ ID NO: 970783 - DNA, 15 bp, Homo sapiens
gccaagatcatgcca

SEQ ID NO: 970784 - DNA, 15 bp, Homo sapiens
ccaagatcatgccac

SEQ ID NO: 970785 - DNA, 15 bp, Homo sapiens
caagatcatgccact

SEQ ID NO: 970786 - DNA, 15 bp, Homo sapiens
aagatcatgccactg

SEQ ID NO: 970787 - DNA, 15 bp, Homo sapiens
agatcatgccactgc

SEQ ID NO: 970788 - DNA, 15 bp, Homo sapiens
gatcatgccactgca

SEQ ID NO: 970789 - DNA, 15 bp, Homo sapiens
atcatgccactgcac

SEQ ID NO: 970790 - DNA, 15 bp, Homo sapiens
tcatgccactgcact

SEQ ID NO: 970791 - DNA, 15 bp, Homo sapiens
catgccactgcacta

SEQ ID NO: 970792 - DNA, 15 bp, Homo sapiens
atgccactgcactac

SEQ ID NO: 970793 - DNA, 15 bp, Homo sapiens
tgccactgcactaca

SEQ ID NO: 970794 - DNA, 15 bp, Homo sapiens
gccactgcactacag

SEQ ID NO: 970795 - DNA, 15 bp, Homo sapiens
ccactgcactacagc

SEQ ID NO: 970796 - DNA, 15 bp, Homo sapiens
cactgcactacagcc

SEQ ID NO: 970797 - DNA, 15 bp, Homo sapiens
actgcactacagcct

SEQ ID NO: 970798 - DNA, 15 bp, Homo sapiens
ctgcactacagcctg

SEQ ID NO: 970799 - DNA, 15 bp, Homo sapiens
tgcactacagcctgg

SEQ ID NO: 970800 - DNA, 15 bp, Homo sapiens
gcactacagcctggg

SEQ ID NO: 970801 - DNA, 15 bp, Homo sapiens
cactacagcctgggc

SEQ ID NO: 970802 - DNA, 15 bp, Homo sapiens
actacagcctgggca

SEQ ID NO: 970803 - DNA, 15 bp, Homo sapiens
ctacagcctgggcaa

SEQ ID NO: 970804 - DNA, 15 bp, Homo sapiens
tacagcctgggcaac

SEQ ID NO: 970805 - DNA, 15 bp, Homo sapiens
acagcctgggcaaca

SEQ ID NO: 970806 - DNA, 15 bp, Homo sapiens
cagcctgggcaacag

SEQ ID NO: 970807 - DNA, 15 bp, Homo sapiens
agcctgggcaacaga

SEQ ID NO: 970808 - DNA, 15 bp, Homo sapiens
gcctgggcaacagag

SEQ ID NO: 970809 - DNA, 15 bp, Homo sapiens
cctgggcaacagagc

SEQ ID NO: 970810 - DNA, 15 bp, Homo sapiens
ctgggcaacagagca

SEQ ID NO: 970811 - DNA, 15 bp, Homo sapiens
tgggcaacagagcaa

SEQ ID NO: 970812 - DNA, 15 bp, Homo sapiens
gggcaacagagcaag

SEQ ID NO: 970813 - DNA, 15 bp, Homo sapiens
ggcaacagagcaaga

SEQ ID NO: 970814 - DNA, 15 bp, Homo sapiens
gcaacagagcaagac

SEQ ID NO: 970815 - DNA, 15 bp, Homo sapiens
caacagagcaagact

SEQ ID NO: 970816 - DNA, 15 bp, Homo sapiens
aacagagcaagactc

SEQ ID NO: 970817 - DNA, 15 bp, Homo sapiens
acagagcaagactcc

SEQ ID NO: 970818 - DNA, 15 bp, Homo sapiens
cagagcaagactcca

SEQ ID NO: 970819 - DNA, 15 bp, Homo sapiens
agagcaagactccat

SEQ ID NO: 970820 - DNA, 15 bp, Homo sapiens
gagcaagactccatc

SEQ ID NO: 970821 - DNA, 15 bp, Homo sapiens
agcaagactccatct

SEQ ID NO: 970822 - DNA, 15 bp, Homo sapiens
gcaagactccatctc

SEQ ID NO: 970823 - DNA, 15 bp, Homo sapiens
caagactccatctca

SEQ ID NO: 970824 - DNA, 15 bp, Homo sapiens
aagactccatctcaa

SEQ ID NO: 970825 - DNA, 15 bp, Homo sapiens
agactccatctcaaa

SEQ ID NO: 970826 - DNA, 15 bp, Homo sapiens
gactccatctcaaaa

SEQ ID NO: 970827 - DNA, 15 bp, Homo sapiens
actccatctcaaaaa

SEQ ID NO: 970828 - DNA, 15 bp, Homo sapiens
ctccatctcaaaaaa

SEQ ID NO: 970829 - DNA, 15 bp, Homo sapiens
tccatctcaaaaaag

SEQ ID NO: 970830 - DNA, 15 bp, Homo sapiens
ccatctcaaaaaaga

SEQ ID NO: 970831 - DNA, 15 bp, Homo sapiens
catctcaaaaaagaa

SEQ ID NO: 970832 - DNA, 15 bp, Homo sapiens
atctcaaaaaagaaa

SEQ ID NO: 970833 - DNA, 15 bp, Homo sapiens
tctcaaaaaagaaaa

SEQ ID NO: 970834 - DNA, 15 bp, Homo sapiens
ctcaaaaaagaaaaa

SEQ ID NO: 970835 - DNA, 15 bp, Homo sapiens
tcaaaaaagaaaaaa

SEQ ID NO: 970836 - DNA, 15 bp, Homo sapiens
caaaaaagaaaaaaa

SEQ ID NO: 970837 - DNA, 15 bp, Homo sapiens
aaaaaagaaaaaaaa

SEQ ID NO: 970838 - DNA, 15 bp, Homo sapiens
aaaaagaaaaaaaat

SEQ ID NO: 970839 - DNA, 15 bp, Homo sapiens
aaaagaaaaaaaatc

SEQ ID NO: 970840 - DNA, 15 bp, Homo sapiens
aaagaaaaaaaatcc

SEQ ID NO: 970841 - DNA, 15 bp, Homo sapiens
aagaaaaaaaatcca

SEQ ID NO: 970842 - DNA, 15 bp, Homo sapiens
agaaaaaaaatccag

SEQ ID NO: 970843 - DNA, 15 bp, Homo sapiens
gaaaaaaaatccagc

SEQ ID NO: 970844 - DNA, 15 bp, Homo sapiens
aaaaaaaatccagcc

SEQ ID NO: 970845 - DNA, 15 bp, Homo sapiens
aaaaaaatccagcct

SEQ ID NO: 970846 - DNA, 15 bp, Homo sapiens
aaaaaatccagcctg

SEQ ID NO: 970847 - DNA, 15 bp, Homo sapiens
aaaaatccagcctga

SEQ ID NO: 970848 - DNA, 15 bp, Homo sapiens
aaaatccagcctgac

SEQ ID NO: 970849 - DNA, 15 bp, Homo sapiens
aaatccagcctgacc

SEQ ID NO: 970850 - DNA, 15 bp, Homo sapiens
aatccagcctgacca

SEQ ID NO: 970851 - DNA, 15 bp, Homo sapiens
atccagcctgaccaa

SEQ ID NO: 970852 - DNA, 15 bp, Homo sapiens
tccagcctgaccaat

SEQ ID NO: 970853 - DNA, 15 bp, Homo sapiens
ccagcctgaccaata

SEQ ID NO: 970854 - DNA, 15 bp, Homo sapiens
cagcctgaccaatat

SEQ ID NO: 970855 - DNA, 15 bp, Homo sapiens
agcctgaccaatatg

SEQ ID NO: 970856 - DNA, 15 bp, Homo sapiens
gcctgaccaatatgg

SEQ ID NO: 970857 - DNA, 15 bp, Homo sapiens
cctgaccaatatggt

SEQ ID NO: 970858 - DNA, 15 bp, Homo sapiens
ctgaccaatatggtg

SEQ ID NO: 970859 - DNA, 15 bp, Homo sapiens
tgaccaatatggtga

SEQ ID NO: 970860 - DNA, 15 bp, Homo sapiens
gaccaatatggtgaa

SEQ ID NO: 970861 - DNA, 15 bp, Homo sapiens
accaatatggtgaaa

SEQ ID NO: 970862 - DNA, 15 bp, Homo sapiens
ccaatatggtgaaac

SEQ ID NO: 970863 - DNA, 15 bp, Homo sapiens
caatatggtgaaacc

SEQ ID NO: 970864 - DNA, 15 bp, Homo sapiens
aatatggtgaaaccc

SEQ ID NO: 970865 - DNA, 15 bp, Homo sapiens
atatggtgaaacccc

SEQ ID NO: 970866 - DNA, 15 bp, Homo sapiens
tatggtgaaacccca

SEQ ID NO: 970867 - DNA, 15 bp, Homo sapiens
accccatctctacta

SEQ ID NO: 970868 - DNA, 15 bp, Homo sapiens
ccccatctctactaa

SEQ ID NO: 970869 - DNA, 15 bp, Homo sapiens
cccatctctactaaa

SEQ ID NO: 970870 - DNA, 15 bp, Homo sapiens
ccatctctactaaaa

SEQ ID NO: 970871 - DNA, 15 bp, Homo sapiens
catctctactaaaaa

SEQ ID NO: 970872 - DNA, 15 bp, Homo sapiens
atctctactaaaaat

SEQ ID NO: 970873 - DNA, 15 bp, Homo sapiens
tctctactaaaaata

SEQ ID NO: 970874 - DNA, 15 bp, Homo sapiens
ctctactaaaaatac

SEQ ID NO: 970875 - DNA, 15 bp, Homo sapiens
tctactaaaaataca

SEQ ID NO: 970876 - DNA, 15 bp, Homo sapiens
ctactaaaaatacaa

SEQ ID NO: 970877 - DNA, 15 bp, Homo sapiens
tactaaaaatacaaa

SEQ ID NO: 970878 - DNA, 15 bp, Homo sapiens
actaaaaatacaaaa

SEQ ID NO: 970879 - DNA, 15 bp, Homo sapiens
ctaaaaatacaaaaa

SEQ ID NO: 970880 - DNA, 15 bp, Homo sapiens
taaaaatacaaaaaa

SEQ ID NO: 970881 - DNA, 15 bp, Homo sapiens
aaaaatacaaaaaat

SEQ ID NO: 970882 - DNA, 15 bp, Homo sapiens
aaaatacaaaaaatt

SEQ ID NO: 970883 - DNA, 15 bp, Homo sapiens
aaatacaaaaaatta

SEQ ID NO: 970884 - DNA, 15 bp, Homo sapiens
aatacaaaaaattag

SEQ ID NO: 970885 - DNA, 15 bp, Homo sapiens
atacaaaaaattagg

SEQ ID NO: 970886 - DNA, 15 bp, Homo sapiens
tacaaaaaattaggc

SEQ ID NO: 970887 - DNA, 15 bp, Homo sapiens
acaaaaaattaggcc

SEQ ID NO: 970888 - DNA, 15 bp, Homo sapiens
caaaaaattaggcca

SEQ ID NO: 970889 - DNA, 15 bp, Homo sapiens
aaaaaattaggccag

SEQ ID NO: 970890 - DNA, 15 bp, Homo sapiens
aaaaattaggccagt

SEQ ID NO: 970891 - DNA, 15 bp, Homo sapiens
aaaattaggccagtc

SEQ ID NO: 970892 - DNA, 15 bp, Homo sapiens
aaattaggccagtcg

SEQ ID NO: 970893 - DNA, 15 bp, Homo sapiens
aattaggccagtcga

SEQ ID NO: 970894 - DNA, 15 bp, Homo sapiens
attaggccagtcgag

SEQ ID NO: 970895 - DNA, 15 bp, Homo sapiens
ttaggccagtcgagg

SEQ ID NO: 970896 - DNA, 15 bp, Homo sapiens
taggccagtcgaggt

SEQ ID NO: 970897 - DNA, 15 bp, Homo sapiens
aggccagtcgaggtg

SEQ ID NO: 970898 - DNA, 15 bp, Homo sapiens
ggccagtcgaggtgg

SEQ ID NO: 970899 - DNA, 15 bp, Homo sapiens
gccagtcgaggtggc

SEQ ID NO: 970900 - DNA, 15 bp, Homo sapiens
ccagtcgaggtggct

SEQ ID NO: 970901 - DNA, 15 bp, Homo sapiens
cagtcgaggtggctc

SEQ ID NO: 970902 - DNA, 15 bp, Homo sapiens
agtcgaggtggctca

SEQ ID NO: 970903 - DNA, 15 bp, Homo sapiens
gtcgaggtggctcac

SEQ ID NO: 970904 - DNA, 15 bp, Homo sapiens
tcgaggtggctcaca

SEQ ID NO: 970905 - DNA, 15 bp, Homo sapiens
cgaggtggctcacac

SEQ ID NO: 970906 - DNA, 15 bp, Homo sapiens
gaggtggctcacaca

SEQ ID NO: 970907 - DNA, 15 bp, Homo sapiens
aggtggctcacacat

SEQ ID NO: 970908 - DNA, 15 bp, Homo sapiens
ggtggctcacacatg

SEQ ID NO: 970909 - DNA, 15 bp, Homo sapiens
gtggctcacacatgt

SEQ ID NO: 970910 - DNA, 15 bp, Homo sapiens
tggctcacacatgta

SEQ ID NO: 970911 - DNA, 15 bp, Homo sapiens
ggctcacacatgtaa

SEQ ID NO: 970912 - DNA, 15 bp, Homo sapiens
gctcacacatgtaat

SEQ ID NO: 970913 - DNA, 15 bp, Homo sapiens
ctcacacatgtaatc

SEQ ID NO: 970914 - DNA, 15 bp, Homo sapiens
tcacacatgtaatct

SEQ ID NO: 970915 - DNA, 15 bp, Homo sapiens
cacacatgtaatctc

SEQ ID NO: 970916 - DNA, 15 bp, Homo sapiens
acacatgtaatctca

SEQ ID NO: 970917 - DNA, 15 bp, Homo sapiens
cacatgtaatctcag

SEQ ID NO: 970918 - DNA, 15 bp, Homo sapiens
acatgtaatctcagc

SEQ ID NO: 970919 - DNA, 15 bp, Homo sapiens
catgtaatctcagca

SEQ ID NO: 970920 - DNA, 15 bp, Homo sapiens
atgtaatctcagcac

SEQ ID NO: 970921 - DNA, 15 bp, Homo sapiens
tgtaatctcagcact

SEQ ID NO: 970922 - DNA, 15 bp, Homo sapiens
gtaatctcagcactt

SEQ ID NO: 970923 - DNA, 15 bp, Homo sapiens
taatctcagcacttt

SEQ ID NO: 970924 - DNA, 15 bp, Homo sapiens
aatctcagcactttg

SEQ ID NO: 970925 - DNA, 15 bp, Homo sapiens
atctcagcactttgg

SEQ ID NO: 970926 - DNA, 15 bp, Homo sapiens
tctcagcactttggg

SEQ ID NO: 970927 - DNA, 15 bp, Homo sapiens
ctcagcactttggga

SEQ ID NO: 970928 - DNA, 15 bp, Homo sapiens
tcagcactttgggag

SEQ ID NO: 970929 - DNA, 15 bp, Homo sapiens
cagcactttgggagg

SEQ ID NO: 970930 - DNA, 15 bp, Homo sapiens
agcactttgggaggc

SEQ ID NO: 970931 - DNA, 15 bp, Homo sapiens
gcactttgggaggcc

SEQ ID NO: 970932 - DNA, 15 bp, Homo sapiens
cactttgggaggcca

SEQ ID NO: 970933 - DNA, 15 bp, Homo sapiens
actttgggaggccaa

SEQ ID NO: 970934 - DNA, 15 bp, Homo sapiens
ctttgggaggccaag

SEQ ID NO: 970935 - DNA, 15 bp, Homo sapiens
tttgggaggccaagg

SEQ ID NO: 970936 - DNA, 15 bp, Homo sapiens
ttgggaggccaaggc

SEQ ID NO: 970937 - DNA, 15 bp, Homo sapiens
tgggaggccaaggca

SEQ ID NO: 970938 - DNA, 15 bp, Homo sapiens
gggaggccaaggcag

SEQ ID NO: 970939 - DNA, 15 bp, Homo sapiens
ggaggccaaggcaga

SEQ ID NO: 970940 - DNA, 15 bp, Homo sapiens
gaggccaaggcagat

SEQ ID NO: 970941 - DNA, 15 bp, Homo sapiens
aggccaaggcagatg

SEQ ID NO: 970942 - DNA, 15 bp, Homo sapiens
ggccaaggcagatgg

SEQ ID NO: 970943 - DNA, 15 bp, Homo sapiens
gccaaggcagatgga

SEQ ID NO: 970944 - DNA, 15 bp, Homo sapiens
ccaaggcagatggat

SEQ ID NO: 970945 - DNA, 15 bp, Homo sapiens
caaggcagatggatc

SEQ ID NO: 970946 - DNA, 15 bp, Homo sapiens
aaggcagatggatca

SEQ ID NO: 970947 - DNA, 15 bp, Homo sapiens
aggcagatggatcac

SEQ ID NO: 970948 - DNA, 15 bp, Homo sapiens
ggcagatggatcact

SEQ ID NO: 970949 - DNA, 15 bp, Homo sapiens
gcagatggatcactt

SEQ ID NO: 970950 - DNA, 15 bp, Homo sapiens
cagatggatcacttg

SEQ ID NO: 970951 - DNA, 15 bp, Homo sapiens
agatggatcacttga

SEQ ID NO: 970952 - DNA, 15 bp, Homo sapiens
gatggatcacttgag

SEQ ID NO: 970953 - DNA, 15 bp, Homo sapiens
atggatcacttgagg

SEQ ID NO: 970954 - DNA, 15 bp, Homo sapiens
tggatcacttgaggt

SEQ ID NO: 970955 - DNA, 15 bp, Homo sapiens
ggatcacttgaggtc

SEQ ID NO: 970956 - DNA, 15 bp, Homo sapiens
gatcacttgaggtct

SEQ ID NO: 970957 - DNA, 15 bp, Homo sapiens
atcacttgaggtctg

SEQ ID NO: 970958 - DNA, 15 bp, Homo sapiens
tcacttgaggtctgg

SEQ ID NO: 970959 - DNA, 15 bp, Homo sapiens
cacttgaggtctgga

SEQ ID NO: 970960 - DNA, 15 bp, Homo sapiens
acttgaggtctggag

SEQ ID NO: 970961 - DNA, 15 bp, Homo sapiens
cttgaggtctggagt

SEQ ID NO: 970962 - DNA, 15 bp, Homo sapiens
ttgaggtctggagtt

SEQ ID NO: 970963 - DNA, 15 bp, Homo sapiens
tgaggtctggagttc

SEQ ID NO: 970964 - DNA, 15 bp, Homo sapiens
gaggtctggagttcg

SEQ ID NO: 970965 - DNA, 15 bp, Homo sapiens
aggtctggagttcga

SEQ ID NO: 970966 - DNA, 15 bp, Homo sapiens
ggtctggagttcgag

SEQ ID NO: 970967 - DNA, 15 bp, Homo sapiens
gtctggagttcgaga

SEQ ID NO: 970968 - DNA, 15 bp, Homo sapiens
tctggagttcgagac

SEQ ID NO: 970969 - DNA, 15 bp, Homo sapiens
ctggagttcgagacc

SEQ ID NO: 970970 - DNA, 15 bp, Homo sapiens
tggagttcgagacca

SEQ ID NO: 970971 - DNA, 15 bp, Homo sapiens
ggagttcgagaccag

SEQ ID NO: 970972 - DNA, 15 bp, Homo sapiens
gagttcgagaccagc

SEQ ID NO: 970973 - DNA, 15 bp, Homo sapiens
agttcgagaccagcc

SEQ ID NO: 970974 - DNA, 15 bp, Homo sapiens
gttcgagaccagcct

SEQ ID NO: 970975 - DNA, 15 bp, Homo sapiens
ttcgagaccagcctg

SEQ ID NO: 970976 - DNA, 15 bp, Homo sapiens
tcgagaccagcctgg

SEQ ID NO: 970977 - DNA, 15 bp, Homo sapiens
cgagaccagcctggc

SEQ ID NO: 970978 - DNA, 15 bp, Homo sapiens
gagaccagcctggcc

SEQ ID NO: 970979 - DNA, 15 bp, Homo sapiens
agcctggccaacata

SEQ ID NO: 970980 - DNA, 15 bp, Homo sapiens
gcctggccaacatag

SEQ ID NO: 970981 - DNA, 15 bp, Homo sapiens
cctggccaacatagt

SEQ ID NO: 970982 - DNA, 15 bp, Homo sapiens
ctggccaacatagtg

SEQ ID NO: 970983 - DNA, 15 bp, Homo sapiens
tggccaacatagtga

SEQ ID NO: 970984 - DNA, 15 bp, Homo sapiens
ggccaacatagtgaa

SEQ ID NO: 970985 - DNA, 15 bp, Homo sapiens
gccaacatagtgaaa

SEQ ID NO: 970986 - DNA, 15 bp, Homo sapiens
ccaacatagtgaaac

SEQ ID NO: 970987 - DNA, 15 bp, Homo sapiens
caacatagtgaaaca

SEQ ID NO: 970988 - DNA, 15 bp, Homo sapiens
aacatagtgaaacac

SEQ ID NO: 970989 - DNA, 15 bp, Homo sapiens
acatagtgaaacacc

SEQ ID NO: 970990 - DNA, 15 bp, Homo sapiens
catagtgaaacacca

SEQ ID NO: 970991 - DNA, 15 bp, Homo sapiens
atagtgaaacaccat

SEQ ID NO: 970992 - DNA, 15 bp, Homo sapiens
tagtgaaacaccatc

SEQ ID NO: 970993 - DNA, 15 bp, Homo sapiens
agtgaaacaccatct

SEQ ID NO: 970994 - DNA, 15 bp, Homo sapiens
gtgaaacaccatctc

SEQ ID NO: 970995 - DNA, 15 bp, Homo sapiens
tgaaacaccatctct

SEQ ID NO: 970996 - DNA, 15 bp, Homo sapiens
gaaacaccatctcta

SEQ ID NO: 970997 - DNA, 15 bp, Homo sapiens
aaacaccatctctac

SEQ ID NO: 970998 - DNA, 15 bp, Homo sapiens
aacaccatctctact

SEQ ID NO: 970999 - DNA, 15 bp, Homo sapiens
acaccatctctacta

SEQ ID NO: 971000 - DNA, 15 bp, Homo sapiens
caccatctctactaa

SEQ ID NO: 971001 - DNA, 15 bp, Homo sapiens
accatctctactaaa

SEQ ID NO: 971002 - DNA, 15 bp, Homo sapiens
taaaaatacaaaaat

SEQ ID NO: 971003 - DNA, 15 bp, Homo sapiens
aaaaatacaaaaatt

SEQ ID NO: 971004 - DNA, 15 bp, Homo sapiens
aaaatacaaaaatta

SEQ ID NO: 971005 - DNA, 15 bp, Homo sapiens
aaatacaaaaattag

SEQ ID NO: 971006 - DNA, 15 bp, Homo sapiens
aatacaaaaattagc

SEQ ID NO: 971007 - DNA, 15 bp, Homo sapiens
atacaaaaattagcc

SEQ ID NO: 971008 - DNA, 15 bp, Homo sapiens
tacaaaaattagcca

SEQ ID NO: 971009 - DNA, 15 bp, Homo sapiens
acaaaaattagccag

SEQ ID NO: 971010 - DNA, 15 bp, Homo sapiens
caaaaattagccagg

SEQ ID NO: 971011 - DNA, 15 bp, Homo sapiens
aaaaattagccaggc

SEQ ID NO: 971012 - DNA, 15 bp, Homo sapiens
aaaattagccaggca

SEQ ID NO: 971013 - DNA, 15 bp, Homo sapiens
aaattagccaggcac

SEQ ID NO: 971014 - DNA, 15 bp, Homo sapiens
aattagccaggcacg

SEQ ID NO: 971015 - DNA, 15 bp, Homo sapiens
attagccaggcacgg

SEQ ID NO: 971016 - DNA, 15 bp, Homo sapiens
ttagccaggcacggg

SEQ ID NO: 971017 - DNA, 15 bp, Homo sapiens
tagccaggcacgggt

SEQ ID NO: 971018 - DNA, 15 bp, Homo sapiens
agccaggcacgggta

SEQ ID NO: 971019 - DNA, 15 bp, Homo sapiens
gccaggcacgggtag

SEQ ID NO: 971020 - DNA, 15 bp, Homo sapiens
ccaggcacgggtagc

SEQ ID NO: 971021 - DNA, 15 bp, Homo sapiens
caggcacgggtagca

SEQ ID NO: 971022 - DNA, 15 bp, Homo sapiens
aggcacgggtagcaa

SEQ ID NO: 971023 - DNA, 15 bp, Homo sapiens
ggcacgggtagcaag

SEQ ID NO: 971024 - DNA, 15 bp, Homo sapiens
gcacgggtagcaagc

SEQ ID NO: 971025 - DNA, 15 bp, Homo sapiens
cacgggtagcaagca

SEQ ID NO: 971026 - DNA, 15 bp, Homo sapiens
acgggtagcaagcac

SEQ ID NO: 971027 - DNA, 15 bp, Homo sapiens
cgggtagcaagcacc

SEQ ID NO: 971028 - DNA, 15 bp, Homo sapiens
gggtagcaagcacct

SEQ ID NO: 971029 - DNA, 15 bp, Homo sapiens
ggtagcaagcacctg

SEQ ID NO: 971030 - DNA, 15 bp, Homo sapiens
gtagcaagcacctgc

SEQ ID NO: 971031 - DNA, 15 bp, Homo sapiens
tagcaagcacctgca

SEQ ID NO: 971032 - DNA, 15 bp, Homo sapiens
agcaagcacctgcaa

SEQ ID NO: 971033 - DNA, 15 bp, Homo sapiens
gcaagcacctgcaat

SEQ ID NO: 971034 - DNA, 15 bp, Homo sapiens
caagcacctgcaatc

SEQ ID NO: 971035 - DNA, 15 bp, Homo sapiens
aagcacctgcaatcc

SEQ ID NO: 971036 - DNA, 15 bp, Homo sapiens
agcacctgcaatccc

SEQ ID NO: 971037 - DNA, 15 bp, Homo sapiens
gcacctgcaatccca

SEQ ID NO: 971038 - DNA, 15 bp, Homo sapiens
cacctgcaatcccag

SEQ ID NO: 971039 - DNA, 15 bp, Homo sapiens
acctgcaatcccagc

SEQ ID NO: 971040 - DNA, 15 bp, Homo sapiens
cctgcaatcccagct

SEQ ID NO: 971041 - DNA, 15 bp, Homo sapiens
ctgcaatcccagcta

SEQ ID NO: 971042 - DNA, 15 bp, Homo sapiens
tgcaatcccagctaa

SEQ ID NO: 971043 - DNA, 15 bp, Homo sapiens
gcaatcccagctaat

SEQ ID NO: 971044 - DNA, 15 bp, Homo sapiens
caatcccagctaatt

SEQ ID NO: 971045 - DNA, 15 bp, Homo sapiens
aatcccagctaattg

SEQ ID NO: 971046 - DNA, 15 bp, Homo sapiens
atcccagctaattgg

SEQ ID NO: 971047 - DNA, 15 bp, Homo sapiens
tcccagctaattggg

SEQ ID NO: 971048 - DNA, 15 bp, Homo sapiens
cccagctaattggga

SEQ ID NO: 971049 - DNA, 15 bp, Homo sapiens
ccagctaattgggag

SEQ ID NO: 971050 - DNA, 15 bp, Homo sapiens
cagctaattgggagg

SEQ ID NO: 971051 - DNA, 15 bp, Homo sapiens
agctaattgggaggc

SEQ ID NO: 971052 - DNA, 15 bp, Homo sapiens
gctaattgggaggcc

SEQ ID NO: 971053 - DNA, 15 bp, Homo sapiens
ctaattgggaggccg

SEQ ID NO: 971054 - DNA, 15 bp, Homo sapiens
taattgggaggccga

SEQ ID NO: 971055 - DNA, 15 bp, Homo sapiens
aattgggaggccgag

SEQ ID NO: 971056 - DNA, 15 bp, Homo sapiens
attgggaggccgagg

SEQ ID NO: 971057 - DNA, 15 bp, Homo sapiens
ttgggaggccgaggc

SEQ ID NO: 971058 - DNA, 15 bp, Homo sapiens
tgggaggccgaggca

SEQ ID NO: 971059 - DNA, 15 bp, Homo sapiens
gggaggccgaggcac

SEQ ID NO: 971060 - DNA, 15 bp, Homo sapiens
ggaggccgaggcaca

SEQ ID NO: 971061 - DNA, 15 bp, Homo sapiens
gaggccgaggcacag

SEQ ID NO: 971062 - DNA, 15 bp, Homo sapiens
aggccgaggcacagg

SEQ ID NO: 971063 - DNA, 15 bp, Homo sapiens
ggccgaggcacagga

SEQ ID NO: 971064 - DNA, 15 bp, Homo sapiens
gccgaggcacaggaa

SEQ ID NO: 971065 - DNA, 15 bp, Homo sapiens
ccgaggcacaggaat

SEQ ID NO: 971066 - DNA, 15 bp, Homo sapiens
cgaggcacaggaatt

SEQ ID NO: 971067 - DNA, 15 bp, Homo sapiens
gaggcacaggaattg

SEQ ID NO: 971068 - DNA, 15 bp, Homo sapiens
aggcacaggaattgc

SEQ ID NO: 971069 - DNA, 15 bp, Homo sapiens
ggcacaggaattgct

SEQ ID NO: 971070 - DNA, 15 bp, Homo sapiens
gcacaggaattgctt

SEQ ID NO: 971071 - DNA, 15 bp, Homo sapiens
cacaggaattgcttg

SEQ ID NO: 971072 - DNA, 15 bp, Homo sapiens
acaggaattgcttga

SEQ ID NO: 971073 - DNA, 15 bp, Homo sapiens
caggaattgcttgaa

SEQ ID NO: 971074 - DNA, 15 bp, Homo sapiens
aggaattgcttgaac

SEQ ID NO: 971075 - DNA, 15 bp, Homo sapiens
ggaattgcttgaact

SEQ ID NO: 971076 - DNA, 15 bp, Homo sapiens
gaattgcttgaactg

SEQ ID NO: 971077 - DNA, 15 bp, Homo sapiens
aattgcttgaactgg

SEQ ID NO: 971078 - DNA, 15 bp, Homo sapiens
attgcttgaactggg

SEQ ID NO: 971079 - DNA, 15 bp, Homo sapiens
ttgcttgaactgggg

SEQ ID NO: 971080 - DNA, 15 bp, Homo sapiens
tgcttgaactgggga

SEQ ID NO: 971081 - DNA, 15 bp, Homo sapiens
gcttgaactggggaa

SEQ ID NO: 971082 - DNA, 15 bp, Homo sapiens
cttgaactggggaac

SEQ ID NO: 971083 - DNA, 15 bp, Homo sapiens
ttgaactggggaacc

SEQ ID NO: 971084 - DNA, 15 bp, Homo sapiens
tgaactggggaaccg

SEQ ID NO: 971085 - DNA, 15 bp, Homo sapiens
gaactggggaaccgc

SEQ ID NO: 971086 - DNA, 15 bp, Homo sapiens
aactggggaaccgca

SEQ ID NO: 971087 - DNA, 15 bp, Homo sapiens
actggggaaccgcag

SEQ ID NO: 971088 - DNA, 15 bp, Homo sapiens
ctggggaaccgcagg

SEQ ID NO: 971089 - DNA, 15 bp, Homo sapiens
tggggaaccgcaggt

SEQ ID NO: 971090 - DNA, 15 bp, Homo sapiens
ggggaaccgcaggtt

SEQ ID NO: 971091 - DNA, 15 bp, Homo sapiens
gggaaccgcaggttg

SEQ ID NO: 971092 - DNA, 15 bp, Homo sapiens
ggaaccgcaggttgc

SEQ ID NO: 971093 - DNA, 15 bp, Homo sapiens
gaaccgcaggttgca

SEQ ID NO: 971094 - DNA, 15 bp, Homo sapiens
aaccgcaggttgcag

SEQ ID NO: 971095 - DNA, 15 bp, Homo sapiens
accgcaggttgcagt

SEQ ID NO: 971096 - DNA, 15 bp, Homo sapiens
ccgcaggttgcagtg

SEQ ID NO: 971097 - DNA, 15 bp, Homo sapiens
cgcaggttgcagtga

SEQ ID NO: 971098 - DNA, 15 bp, Homo sapiens
gcaggttgcagtgag

SEQ ID NO: 971099 - DNA, 15 bp, Homo sapiens
caggttgcagtgagc

SEQ ID NO: 971100 - DNA, 15 bp, Homo sapiens
cagtgagccaagatt

SEQ ID NO: 971101 - DNA, 15 bp, Homo sapiens
agtgagccaagattg

SEQ ID NO: 971102 - DNA, 15 bp, Homo sapiens
gtgagccaagattgt

SEQ ID NO: 971103 - DNA, 15 bp, Homo sapiens
tgagccaagattgta

SEQ ID NO: 971104 - DNA, 15 bp, Homo sapiens
gagccaagattgtac

SEQ ID NO: 971105 - DNA, 15 bp, Homo sapiens
agccaagattgtacc

SEQ ID NO: 971106 - DNA, 15 bp, Homo sapiens
gccaagattgtacca

SEQ ID NO: 971107 - DNA, 15 bp, Homo sapiens
ccaagattgtaccac

SEQ ID NO: 971108 - DNA, 15 bp, Homo sapiens
caagattgtaccact

SEQ ID NO: 971109 - DNA, 15 bp, Homo sapiens
aagattgtaccactg

SEQ ID NO: 971110 - DNA, 15 bp, Homo sapiens
agattgtaccactgc

SEQ ID NO: 971111 - DNA, 15 bp, Homo sapiens
gattgtaccactgca

SEQ ID NO: 971112 - DNA, 15 bp, Homo sapiens
attgtaccactgcac

SEQ ID NO: 971113 - DNA, 15 bp, Homo sapiens
ttgtaccactgcact

SEQ ID NO: 971114 - DNA, 15 bp, Homo sapiens
tgtaccactgcactt

SEQ ID NO: 971115 - DNA, 15 bp, Homo sapiens
gtaccactgcacttc

SEQ ID NO: 971116 - DNA, 15 bp, Homo sapiens
taccactgcacttca

SEQ ID NO: 971117 - DNA, 15 bp, Homo sapiens
accactgcacttcag

SEQ ID NO: 971118 - DNA, 15 bp, Homo sapiens
ccactgcacttcagc

SEQ ID NO: 971119 - DNA, 15 bp, Homo sapiens
cactgcacttcagcc

SEQ ID NO: 971120 - DNA, 15 bp, Homo sapiens
actgcacttcagcct

SEQ ID NO: 971121 - DNA, 15 bp, Homo sapiens
ctgcacttcagcctg

SEQ ID NO: 971122 - DNA, 15 bp, Homo sapiens
tgcacttcagcctgg

SEQ ID NO: 971123 - DNA, 15 bp, Homo sapiens
gcacttcagcctggg

SEQ ID NO: 971124 - DNA, 15 bp, Homo sapiens
cacttcagcctgggg

SEQ ID NO: 971125 - DNA, 15 bp, Homo sapiens
acttcagcctggggg

SEQ ID NO: 971126 - DNA, 15 bp, Homo sapiens
cttcagcctggggga

SEQ ID NO: 971127 - DNA, 15 bp, Homo sapiens
ttcagcctgggggac

SEQ ID NO: 971128 - DNA, 15 bp, Homo sapiens
tcagcctgggggacg

SEQ ID NO: 971129 - DNA, 15 bp, Homo sapiens
cagcctgggggacgg

SEQ ID NO: 971130 - DNA, 15 bp, Homo sapiens
agcctgggggacgga

SEQ ID NO: 971131 - DNA, 15 bp, Homo sapiens
gcctgggggacggag

SEQ ID NO: 971132 - DNA, 15 bp, Homo sapiens
cctgggggacggagc

SEQ ID NO: 971133 - DNA, 15 bp, Homo sapiens
ctgggggacggagcg

SEQ ID NO: 971134 - DNA, 15 bp, Homo sapiens
tgggggacggagcgg

SEQ ID NO: 971135 - DNA, 15 bp, Homo sapiens
gggggacggagcggg

SEQ ID NO: 971136 - DNA, 15 bp, Homo sapiens
ggggacggagcggga

SEQ ID NO: 971137 - DNA, 15 bp, Homo sapiens
gggacggagcgggac

SEQ ID NO: 971138 - DNA, 15 bp, Homo sapiens
ggacggagcgggact

SEQ ID NO: 971139 - DNA, 15 bp, Homo sapiens
gacggagcgggactt

SEQ ID NO: 971140 - DNA, 15 bp, Homo sapiens
acggagcgggacttt

SEQ ID NO: 971141 - DNA, 15 bp, Homo sapiens
cggagcgggactttg

SEQ ID NO: 971142 - DNA, 15 bp, Homo sapiens
ggagcgggactttgt

SEQ ID NO: 971143 - DNA, 15 bp, Homo sapiens
gagcgggactttgtc

SEQ ID NO: 971144 - DNA, 15 bp, Homo sapiens
agcgggactttgtct

SEQ ID NO: 971145 - DNA, 15 bp, Homo sapiens
gcgggactttgtctc

SEQ ID NO: 971146 - DNA, 15 bp, Homo sapiens
cgggactttgtctca

SEQ ID NO: 971147 - DNA, 15 bp, Homo sapiens
gggactttgtctcaa

SEQ ID NO: 971148 - DNA, 15 bp, Homo sapiens
ggactttgtctcaaa

SEQ ID NO: 971149 - DNA, 15 bp, Homo sapiens
gactttgtctcaaaa

SEQ ID NO: 971150 - DNA, 15 bp, Homo sapiens
actttgtctcaaaaa

SEQ ID NO: 971151 - DNA, 15 bp, Homo sapiens
ctttgtctcaaaaaa

SEQ ID NO: 971152 - DNA, 15 bp, Homo sapiens
tttgtctcaaaaaaa

SEQ ID NO: 971153 - DNA, 15 bp, Homo sapiens
ttgtctcaaaaaaag

SEQ ID NO: 971154 - DNA, 15 bp, Homo sapiens
tgtctcaaaaaaaga

SEQ ID NO: 971155 - DNA, 15 bp, Homo sapiens
gtctcaaaaaaagaa

SEQ ID NO: 971156 - DNA, 15 bp, Homo sapiens
tctcaaaaaaagaaa

SEQ ID NO: 971157 - DNA, 15 bp, Homo sapiens
ctcaaaaaaagaaaa

SEQ ID NO: 971158 - DNA, 15 bp, Homo sapiens
tcaaaaaaagaaaaa

SEQ ID NO: 971159 - DNA, 15 bp, Homo sapiens
caaaaaaagaaaaaa

SEQ ID NO: 971160 - DNA, 15 bp, Homo sapiens
aaaaaaagaaaaaaa

SEQ ID NO: 971161 - DNA, 15 bp, Homo sapiens
aaaaagaaaaaaaaa

SEQ ID NO: 971162 - DNA, 15 bp, Homo sapiens
aaaagaaaaaaaaaa

SEQ ID NO: 971163 - DNA, 15 bp, Homo sapiens
aaagaaaaaaaaaat

SEQ ID NO: 971164 - DNA, 15 bp, Homo sapiens
aagaaaaaaaaaatt

SEQ ID NO: 971165 - DNA, 15 bp, Homo sapiens
agaaaaaaaaaatta

SEQ ID NO: 971166 - DNA, 15 bp, Homo sapiens
gaaaaaaaaaattac

SEQ ID NO: 971167 - DNA, 15 bp, Homo sapiens
aaaaaaaaaattacc

SEQ ID NO: 971168 - DNA, 15 bp, Homo sapiens
aaaaaaaaattaccc

SEQ ID NO: 971169 - DNA, 15 bp, Homo sapiens
aaaaaaaattaccct

SEQ ID NO: 971170 - DNA, 15 bp, Homo sapiens
aaaaaaattaccctc

SEQ ID NO: 971171 - DNA, 15 bp, Homo sapiens
aaaaaattaccctcg

SEQ ID NO: 971172 - DNA, 15 bp, Homo sapiens
aaaaattaccctcgc

SEQ ID NO: 971173 - DNA, 15 bp, Homo sapiens
aaaattaccctcgcc

SEQ ID NO: 971174 - DNA, 15 bp, Homo sapiens
aaattaccctcgccc

SEQ ID NO: 971175 - DNA, 15 bp, Homo sapiens
aattaccctcgcccc

SEQ ID NO: 971176 - DNA, 15 bp, Homo sapiens
attaccctcgcccct

SEQ ID NO: 971177 - DNA, 15 bp, Homo sapiens
ttaccctcgcccctg

SEQ ID NO: 971178 - DNA, 15 bp, Homo sapiens
taccctcgcccctga

SEQ ID NO: 971179 - DNA, 15 bp, Homo sapiens
accctcgcccctgag

SEQ ID NO: 971180 - DNA, 15 bp, Homo sapiens
ccctcgcccctgagt

SEQ ID NO: 971181 - DNA, 15 bp, Homo sapiens
cctcgcccctgagtc

SEQ ID NO: 971182 - DNA, 15 bp, Homo sapiens
ctcgcccctgagtca

SEQ ID NO: 971183 - DNA, 15 bp, Homo sapiens
tcgcccctgagtcag

SEQ ID NO: 971184 - DNA, 15 bp, Homo sapiens
cgcccctgagtcaga

SEQ ID NO: 971185 - DNA, 15 bp, Homo sapiens
gcccctgagtcagac

SEQ ID NO: 971186 - DNA, 15 bp, Homo sapiens
cccctgagtcagacc

SEQ ID NO: 971187 - DNA, 15 bp, Homo sapiens
ccctgagtcagacct

SEQ ID NO: 971188 - DNA, 15 bp, Homo sapiens
cctgagtcagacctc

SEQ ID NO: 971189 - DNA, 15 bp, Homo sapiens
ctgagtcagacctca

SEQ ID NO: 971190 - DNA, 15 bp, Homo sapiens
tgagtcagacctcat

SEQ ID NO: 971191 - DNA, 15 bp, Homo sapiens
gagtcagacctcata

SEQ ID NO: 971192 - DNA, 15 bp, Homo sapiens
agtcagacctcataa

SEQ ID NO: 971193 - DNA, 15 bp, Homo sapiens
gtcagacctcataac

SEQ ID NO: 971194 - DNA, 15 bp, Homo sapiens
tcagacctcataact

SEQ ID NO: 971195 - DNA, 15 bp, Homo sapiens
cagacctcataacta

SEQ ID NO: 971196 - DNA, 15 bp, Homo sapiens
agacctcataactaa

SEQ ID NO: 971197 - DNA, 15 bp, Homo sapiens
gacctcataactaag

SEQ ID NO: 971198 - DNA, 15 bp, Homo sapiens
acctcataactaagt

SEQ ID NO: 971199 - DNA, 15 bp, Homo sapiens
cctcataactaagtt

SEQ ID NO: 971200 - DNA, 15 bp, Homo sapiens
ctcataactaagtta

SEQ ID NO: 971201 - DNA, 15 bp, Homo sapiens
tcataactaagttag

SEQ ID NO: 971202 - DNA, 15 bp, Homo sapiens
cataactaagttaga

SEQ ID NO: 971203 - DNA, 15 bp, Homo sapiens
ataactaagttagat

SEQ ID NO: 971204 - DNA, 15 bp, Homo sapiens
taactaagttagatc

SEQ ID NO: 971205 - DNA, 15 bp, Homo sapiens
aactaagttagatct

SEQ ID NO: 971206 - DNA, 15 bp, Homo sapiens
actaagttagatctg

SEQ ID NO: 971207 - DNA, 15 bp, Homo sapiens
ctaagttagatctgg

SEQ ID NO: 971208 - DNA, 15 bp, Homo sapiens
taagttagatctggc

SEQ ID NO: 971209 - DNA, 15 bp, Homo sapiens
aagttagatctggcc

SEQ ID NO: 971210 - DNA, 15 bp, Homo sapiens
agttagatctggccc

SEQ ID NO: 971211 - DNA, 15 bp, Homo sapiens
gttagatctggccct

SEQ ID NO: 971212 - DNA, 15 bp, Homo sapiens
ttagatctggccctg

SEQ ID NO: 971213 - DNA, 15 bp, Homo sapiens
tagatctggccctgc

SEQ ID NO: 971214 - DNA, 15 bp, Homo sapiens
agatctggccctgct

SEQ ID NO: 971215 - DNA, 15 bp, Homo sapiens
gatctggccctgctt

SEQ ID NO: 971216 - DNA, 15 bp, Homo sapiens
atctggccctgcttt

SEQ ID NO: 971217 - DNA, 15 bp, Homo sapiens
tctggccctgctttc

SEQ ID NO: 971218 - DNA, 15 bp, Homo sapiens
ctggccctgctttca

SEQ ID NO: 971219 - DNA, 15 bp, Homo sapiens
tggccctgctttcaa

SEQ ID NO: 971220 - DNA, 15 bp, Homo sapiens
ggccctgctttcaag

SEQ ID NO: 971221 - DNA, 15 bp, Homo sapiens
gccctgctttcaaga

SEQ ID NO: 971222 - DNA, 15 bp, Homo sapiens
ccctgctttcaagag

SEQ ID NO: 971223 - DNA, 15 bp, Homo sapiens
cctgctttcaagaga

SEQ ID NO: 971224 - DNA, 15 bp, Homo sapiens
ctgctttcaagagac

SEQ ID NO: 971225 - DNA, 15 bp, Homo sapiens
tgctttcaagagaca

SEQ ID NO: 971226 - DNA, 15 bp, Homo sapiens
gctttcaagagacag

SEQ ID NO: 971227 - DNA, 15 bp, Homo sapiens
ctttcaagagacagg

SEQ ID NO: 971228 - DNA, 15 bp, Homo sapiens
tttcaagagacaggt

SEQ ID NO: 971229 - DNA, 15 bp, Homo sapiens
ttcaagagacaggtt

SEQ ID NO: 971230 - DNA, 15 bp, Homo sapiens
tcaagagacaggtta

SEQ ID NO: 971231 - DNA, 15 bp, Homo sapiens
caagagacaggttac

SEQ ID NO: 971232 - DNA, 15 bp, Homo sapiens
aagagacaggttacc

SEQ ID NO: 971233 - DNA, 15 bp, Homo sapiens
agagacaggttaccc

SEQ ID NO: 971234 - DNA, 15 bp, Homo sapiens
gagacaggttacccc

SEQ ID NO: 971235 - DNA, 15 bp, Homo sapiens
agacaggttacccca

SEQ ID NO: 971236 - DNA, 15 bp, Homo sapiens
gacaggttaccccaa

SEQ ID NO: 971237 - DNA, 15 bp, Homo sapiens
acaggttaccccaaa

SEQ ID NO: 971238 - DNA, 15 bp, Homo sapiens
caggttaccccaaag

SEQ ID NO: 971239 - DNA, 15 bp, Homo sapiens
aggttaccccaaagt

SEQ ID NO: 971240 - DNA, 15 bp, Homo sapiens
ggttaccccaaagtc

SEQ ID NO: 971241 - DNA, 15 bp, Homo sapiens
gttaccccaaagtca

SEQ ID NO: 971242 - DNA, 15 bp, Homo sapiens
ttaccccaaagtcat

SEQ ID NO: 971243 - DNA, 15 bp, Homo sapiens
taccccaaagtcatg

SEQ ID NO: 971244 - DNA, 15 bp, Homo sapiens
accccaaagtcatga

SEQ ID NO: 971245 - DNA, 15 bp, Homo sapiens
ccccaaagtcatgat

SEQ ID NO: 971246 - DNA, 15 bp, Homo sapiens
cccaaagtcatgatc

SEQ ID NO: 971247 - DNA, 15 bp, Homo sapiens
ccaaagtcatgatca

SEQ ID NO: 971248 - DNA, 15 bp, Homo sapiens
caaagtcatgatcac

SEQ ID NO: 971249 - DNA, 15 bp, Homo sapiens
aaagtcatgatcaca

SEQ ID NO: 971250 - DNA, 15 bp, Homo sapiens
aagtcatgatcacaa

SEQ ID NO: 971251 - DNA, 15 bp, Homo sapiens
agtcatgatcacaat

SEQ ID NO: 971252 - DNA, 15 bp, Homo sapiens
gtcatgatcacaatg

SEQ ID NO: 971253 - DNA, 15 bp, Homo sapiens
tcatgatcacaatgc

SEQ ID NO: 971254 - DNA, 15 bp, Homo sapiens
catgatcacaatgcc

SEQ ID NO: 971255 - DNA, 15 bp, Homo sapiens
atgatcacaatgcca

SEQ ID NO: 971256 - DNA, 15 bp, Homo sapiens
tgatcacaatgccaa

SEQ ID NO: 971257 - DNA, 15 bp, Homo sapiens
gatcacaatgccaag

SEQ ID NO: 971258 - DNA, 15 bp, Homo sapiens
atcacaatgccaaga

SEQ ID NO: 971259 - DNA, 15 bp, Homo sapiens
tcacaatgccaagat

SEQ ID NO: 971260 - DNA, 15 bp, Homo sapiens
cacaatgccaagatg

SEQ ID NO: 971261 - DNA, 15 bp, Homo sapiens
acaatgccaagatgg

SEQ ID NO: 971262 - DNA, 15 bp, Homo sapiens
caatgccaagatggg

SEQ ID NO: 971263 - DNA, 15 bp, Homo sapiens
aatgccaagatgggg

SEQ ID NO: 971264 - DNA, 15 bp, Homo sapiens
atgccaagatgggga

SEQ ID NO: 971265 - DNA, 15 bp, Homo sapiens
tgccaagatggggag

SEQ ID NO: 971266 - DNA, 15 bp, Homo sapiens
gccaagatggggagg

SEQ ID NO: 971267 - DNA, 15 bp, Homo sapiens
ccaagatggggaggg

SEQ ID NO: 971268 - DNA, 15 bp, Homo sapiens
caagatggggagggg

SEQ ID NO: 971269 - DNA, 15 bp, Homo sapiens
aagatggggaggggg

SEQ ID NO: 971270 - DNA, 15 bp, Homo sapiens
agatggggaggggga

SEQ ID NO: 971271 - DNA, 15 bp, Homo sapiens
gatggggagggggac

SEQ ID NO: 971272 - DNA, 15 bp, Homo sapiens
atggggagggggacc

SEQ ID NO: 971273 - DNA, 15 bp, Homo sapiens
tggggagggggaccc

SEQ ID NO: 971274 - DNA, 15 bp, Homo sapiens
ggggagggggaccca

SEQ ID NO: 971275 - DNA, 15 bp, Homo sapiens
gggagggggacccag

SEQ ID NO: 971276 - DNA, 15 bp, Homo sapiens
ggagggggacccagg

SEQ ID NO: 971277 - DNA, 15 bp, Homo sapiens
gagggggacccaggg

SEQ ID NO: 971278 - DNA, 15 bp, Homo sapiens
agggggacccaggga

SEQ ID NO: 971279 - DNA, 15 bp, Homo sapiens
gggggacccagggaa

SEQ ID NO: 971280 - DNA, 15 bp, Homo sapiens
ggggacccagggaat

SEQ ID NO: 971281 - DNA, 15 bp, Homo sapiens
gggacccagggaatc

SEQ ID NO: 971282 - DNA, 15 bp, Homo sapiens
ggacccagggaatca

SEQ ID NO: 971283 - DNA, 15 bp, Homo sapiens
gacccagggaatcag

SEQ ID NO: 971284 - DNA, 15 bp, Homo sapiens
acccagggaatcagg

SEQ ID NO: 971285 - DNA, 15 bp, Homo sapiens
cccagggaatcagga

SEQ ID NO: 971286 - DNA, 15 bp, Homo sapiens
ccagggaatcaggaa

SEQ ID NO: 971287 - DNA, 15 bp, Homo sapiens
cagggaatcaggaag

SEQ ID NO: 971288 - DNA, 15 bp, Homo sapiens
agggaatcaggaagg

SEQ ID NO: 971289 - DNA, 15 bp, Homo sapiens
gggaatcaggaagga

SEQ ID NO: 971290 - DNA, 15 bp, Homo sapiens
ggaatcaggaaggag

SEQ ID NO: 971291 - DNA, 15 bp, Homo sapiens
gaatcaggaaggagt

SEQ ID NO: 971292 - DNA, 15 bp, Homo sapiens
aatcaggaaggagtt

SEQ ID NO: 971293 - DNA, 15 bp, Homo sapiens
atcaggaaggagttg

SEQ ID NO: 971294 - DNA, 15 bp, Homo sapiens
tcaggaaggagttgg

SEQ ID NO: 971295 - DNA, 15 bp, Homo sapiens
caggaaggagttggc

SEQ ID NO: 971296 - DNA, 15 bp, Homo sapiens
aggaaggagttggcc

SEQ ID NO: 971297 - DNA, 15 bp, Homo sapiens
ggaaggagttggcca

SEQ ID NO: 971298 - DNA, 15 bp, Homo sapiens
gaaggagttggccaa

SEQ ID NO: 971299 - DNA, 15 bp, Homo sapiens
aaggagttggccaaa

SEQ ID NO: 971300 - DNA, 15 bp, Homo sapiens
aggagttggccaaac

SEQ ID NO: 971301 - DNA, 15 bp, Homo sapiens
ggagttggccaaact

SEQ ID NO: 971302 - DNA, 15 bp, Homo sapiens
gagttggccaaactg

SEQ ID NO: 971303 - DNA, 15 bp, Homo sapiens
agttggccaaactgg

SEQ ID NO: 971304 - DNA, 15 bp, Homo sapiens
gttggccaaactgga

SEQ ID NO: 971305 - DNA, 15 bp, Homo sapiens
ttggccaaactggaa

SEQ ID NO: 971306 - DNA, 15 bp, Homo sapiens
tggccaaactggaag

SEQ ID NO: 971307 - DNA, 15 bp, Homo sapiens
ggccaaactggaagg

SEQ ID NO: 971308 - DNA, 15 bp, Homo sapiens
gccaaactggaaggg

SEQ ID NO: 971309 - DNA, 15 bp, Homo sapiens
ccaaactggaagggt

SEQ ID NO: 971310 - DNA, 15 bp, Homo sapiens
caaactggaagggtg

SEQ ID NO: 971311 - DNA, 15 bp, Homo sapiens
aaactggaagggtgt

SEQ ID NO: 971312 - DNA, 15 bp, Homo sapiens
aactggaagggtgtg

SEQ ID NO: 971313 - DNA, 15 bp, Homo sapiens
actggaagggtgtga

SEQ ID NO: 971314 - DNA, 15 bp, Homo sapiens
ctggaagggtgtgag

SEQ ID NO: 971315 - DNA, 15 bp, Homo sapiens
tggaagggtgtgagg

SEQ ID NO: 971316 - DNA, 15 bp, Homo sapiens
ggaagggtgtgagga

SEQ ID NO: 971317 - DNA, 15 bp, Homo sapiens
gaagggtgtgaggag

SEQ ID NO: 971318 - DNA, 15 bp, Homo sapiens
aagggtgtgaggagt

SEQ ID NO: 971319 - DNA, 15 bp, Homo sapiens
agggtgtgaggagtt

SEQ ID NO: 971320 - DNA, 15 bp, Homo sapiens
gggtgtgaggagtta

SEQ ID NO: 971321 - DNA, 15 bp, Homo sapiens
ggtgtgaggagttaa

SEQ ID NO: 971322 - DNA, 15 bp, Homo sapiens
gtgtgaggagttaag

SEQ ID NO: 971323 - DNA, 15 bp, Homo sapiens
tgtgaggagttaagc

SEQ ID NO: 971324 - DNA, 15 bp, Homo sapiens
gtgaggagttaagca

SEQ ID NO: 971325 - DNA, 15 bp, Homo sapiens
tgaggagttaagcag

SEQ ID NO: 971326 - DNA, 15 bp, Homo sapiens
gaggagttaagcagg

SEQ ID NO: 971327 - DNA, 15 bp, Homo sapiens
aggagttaagcagga

SEQ ID NO: 971328 - DNA, 15 bp, Homo sapiens
ggagttaagcaggag

SEQ ID NO: 971329 - DNA, 15 bp, Homo sapiens
gagttaagcaggagg

SEQ ID NO: 971330 - DNA, 15 bp, Homo sapiens
agttaagcaggagga

SEQ ID NO: 971331 - DNA, 15 bp, Homo sapiens
gttaagcaggaggag

SEQ ID NO: 971332 - DNA, 15 bp, Homo sapiens
ttaagcaggaggagg

SEQ ID NO: 971333 - DNA, 15 bp, Homo sapiens
taagcaggaggaggc

SEQ ID NO: 971334 - DNA, 15 bp, Homo sapiens
aagcaggaggaggct

SEQ ID NO: 971335 - DNA, 15 bp, Homo sapiens
agcaggaggaggctg

SEQ ID NO: 971336 - DNA, 15 bp, Homo sapiens
gcaggaggaggctgt

SEQ ID NO: 971337 - DNA, 15 bp, Homo sapiens
caggaggaggctgtg

SEQ ID NO: 971338 - DNA, 15 bp, Homo sapiens
aggaggaggctgtgg

SEQ ID NO: 971339 - DNA, 15 bp, Homo sapiens
ggaggaggctgtggg

SEQ ID NO: 971340 - DNA, 15 bp, Homo sapiens
gaggaggctgtgggg

SEQ ID NO: 971341 - DNA, 15 bp, Homo sapiens
aggaggctgtgggga

SEQ ID NO: 971342 - DNA, 15 bp, Homo sapiens
ggaggctgtggggaa

SEQ ID NO: 971343 - DNA, 15 bp, Homo sapiens
gaggctgtggggaag

SEQ ID NO: 971344 - DNA, 15 bp, Homo sapiens
aggctgtggggaaga

SEQ ID NO: 971345 - DNA, 15 bp, Homo sapiens
ggctgtggggaagag

SEQ ID NO: 971346 - DNA, 15 bp, Homo sapiens
gctgtggggaagagc

SEQ ID NO: 971347 - DNA, 15 bp, Homo sapiens
ctgtggggaagagca

SEQ ID NO: 971348 - DNA, 15 bp, Homo sapiens
tgtggggaagagcag

SEQ ID NO: 971349 - DNA, 15 bp, Homo sapiens
gtggggaagagcagt

SEQ ID NO: 971350 - DNA, 15 bp, Homo sapiens
tggggaagagcagtg

SEQ ID NO: 971351 - DNA, 15 bp, Homo sapiens
ggggaagagcagtgc

SEQ ID NO: 971352 - DNA, 15 bp, Homo sapiens
gggaagagcagtgct

SEQ ID NO: 971353 - DNA, 15 bp, Homo sapiens
ggaagagcagtgctg

SEQ ID NO: 971354 - DNA, 15 bp, Homo sapiens
gaagagcagtgctgg

SEQ ID NO: 971355 - DNA, 15 bp, Homo sapiens
aagagcagtgctggg

SEQ ID NO: 971356 - DNA, 15 bp, Homo sapiens
agagcagtgctggga

SEQ ID NO: 971357 - DNA, 15 bp, Homo sapiens
gagcagtgctgggag

SEQ ID NO: 971358 - DNA, 15 bp, Homo sapiens
agcagtgctgggaga

SEQ ID NO: 971359 - DNA, 15 bp, Homo sapiens
gcagtgctgggagag

SEQ ID NO: 971360 - DNA, 15 bp, Homo sapiens
cagtgctgggagagg

SEQ ID NO: 971361 - DNA, 15 bp, Homo sapiens
agtgctgggagaggg

SEQ ID NO: 971362 - DNA, 15 bp, Homo sapiens
gtgctgggagaggga

SEQ ID NO: 971363 - DNA, 15 bp, Homo sapiens
tgctgggagagggaa

SEQ ID NO: 971364 - DNA, 15 bp, Homo sapiens
gctgggagagggaac

SEQ ID NO: 971365 - DNA, 15 bp, Homo sapiens
ctgggagagggaaca

SEQ ID NO: 971366 - DNA, 15 bp, Homo sapiens
tgggagagggaacag

SEQ ID NO: 971367 - DNA, 15 bp, Homo sapiens
gggagagggaacaga

SEQ ID NO: 971368 - DNA, 15 bp, Homo sapiens
ggagagggaacagat

SEQ ID NO: 971369 - DNA, 15 bp, Homo sapiens
gagagggaacagatg

SEQ ID NO: 971370 - DNA, 15 bp, Homo sapiens
agagggaacagatgt

SEQ ID NO: 971371 - DNA, 15 bp, Homo sapiens
gagggaacagatgtg

SEQ ID NO: 971372 - DNA, 15 bp, Homo sapiens
agggaacagatgtgt

SEQ ID NO: 971373 - DNA, 15 bp, Homo sapiens
gggaacagatgtgta

SEQ ID NO: 971374 - DNA, 15 bp, Homo sapiens
ggaacagatgtgtaa

SEQ ID NO: 971375 - DNA, 15 bp, Homo sapiens
gaacagatgtgtaaa

SEQ ID NO: 971376 - DNA, 15 bp, Homo sapiens
aacagatgtgtaaag

SEQ ID NO: 971377 - DNA, 15 bp, Homo sapiens
acagatgtgtaaaga

SEQ ID NO: 971378 - DNA, 15 bp, Homo sapiens
cagatgtgtaaagaa

SEQ ID NO: 971379 - DNA, 15 bp, Homo sapiens
agatgtgtaaagaac

SEQ ID NO: 971380 - DNA, 15 bp, Homo sapiens
gatgtgtaaagaact

SEQ ID NO: 971381 - DNA, 15 bp, Homo sapiens
atgtgtaaagaactg

SEQ ID NO: 971382 - DNA, 15 bp, Homo sapiens
tgtgtaaagaactgg

SEQ ID NO: 971383 - DNA, 15 bp, Homo sapiens
gtgtaaagaactggt

SEQ ID NO: 971384 - DNA, 15 bp, Homo sapiens
tgtaaagaactggtg

SEQ ID NO: 971385 - DNA, 15 bp, Homo sapiens
gtaaagaactggtgg

SEQ ID NO: 971386 - DNA, 15 bp, Homo sapiens
taaagaactggtggt

SEQ ID NO: 971387 - DNA, 15 bp, Homo sapiens
aaagaactggtggta

SEQ ID NO: 971388 - DNA, 15 bp, Homo sapiens
aagaactggtggtac

SEQ ID NO: 971389 - DNA, 15 bp, Homo sapiens
agaactggtggtact

SEQ ID NO: 971390 - DNA, 15 bp, Homo sapiens
gaactggtggtactt

SEQ ID NO: 971391 - DNA, 15 bp, Homo sapiens
aactggtggtacttc

SEQ ID NO: 971392 - DNA, 15 bp, Homo sapiens
actggtggtacttct

SEQ ID NO: 971393 - DNA, 15 bp, Homo sapiens
ctggtggtacttctg

SEQ ID NO: 971394 - DNA, 15 bp, Homo sapiens
tggtggtacttctgg

SEQ ID NO: 971395 - DNA, 15 bp, Homo sapiens
ggtggtacttctgga

SEQ ID NO: 971396 - DNA, 15 bp, Homo sapiens
gtggtacttctggag

SEQ ID NO: 971397 - DNA, 15 bp, Homo sapiens
tggtacttctggaga

SEQ ID NO: 971398 - DNA, 15 bp, Homo sapiens
ggtacttctggagaa

SEQ ID NO: 971399 - DNA, 15 bp, Homo sapiens
gtacttctggagaat

SEQ ID NO: 971400 - DNA, 15 bp, Homo sapiens
tacttctggagaatt

SEQ ID NO: 971401 - DNA, 15 bp, Homo sapiens
acttctggagaattt

SEQ ID NO: 971402 - DNA, 15 bp, Homo sapiens
cttctggagaatttc

SEQ ID NO: 971403 - DNA, 15 bp, Homo sapiens
ttctggagaatttca

SEQ ID NO: 971404 - DNA, 15 bp, Homo sapiens
tctggagaatttcaa

SEQ ID NO: 971405 - DNA, 15 bp, Homo sapiens
ctggagaatttcaag

SEQ ID NO: 971406 - DNA, 15 bp, Homo sapiens
tggagaatttcaagt

SEQ ID NO: 971407 - DNA, 15 bp, Homo sapiens
ggagaatttcaagta

SEQ ID NO: 971408 - DNA, 15 bp, Homo sapiens
gagaatttcaagtag

SEQ ID NO: 971409 - DNA, 15 bp, Homo sapiens
agaatttcaagtagc

SEQ ID NO: 971410 - DNA, 15 bp, Homo sapiens
gaatttcaagtagct

SEQ ID NO: 971411 - DNA, 15 bp, Homo sapiens
aatttcaagtagcta

SEQ ID NO: 971412 - DNA, 15 bp, Homo sapiens
atttcaagtagctaa

SEQ ID NO: 971413 - DNA, 15 bp, Homo sapiens
tttcaagtagctaag

SEQ ID NO: 971414 - DNA, 15 bp, Homo sapiens
ttcaagtagctaagt

SEQ ID NO: 971415 - DNA, 15 bp, Homo sapiens
tcaagtagctaagtc

SEQ ID NO: 971416 - DNA, 15 bp, Homo sapiens
caagtagctaagtct

SEQ ID NO: 971417 - DNA, 15 bp, Homo sapiens
aagtagctaagtctg

SEQ ID NO: 971418 - DNA, 15 bp, Homo sapiens
agtagctaagtctgg

SEQ ID NO: 971419 - DNA, 15 bp, Homo sapiens
gtagctaagtctggc

SEQ ID NO: 971420 - DNA, 15 bp, Homo sapiens
tagctaagtctggct

SEQ ID NO: 971421 - DNA, 15 bp, Homo sapiens
agctaagtctggctg

SEQ ID NO: 971422 - DNA, 15 bp, Homo sapiens
gctaagtctggctgg

SEQ ID NO: 971423 - DNA, 15 bp, Homo sapiens
ctaagtctggctggg

SEQ ID NO: 971424 - DNA, 15 bp, Homo sapiens
taagtctggctggga

SEQ ID NO: 971425 - DNA, 15 bp, Homo sapiens
aagtctggctgggag

SEQ ID NO: 971426 - DNA, 15 bp, Homo sapiens
agtctggctgggagg

SEQ ID NO: 971427 - DNA, 15 bp, Homo sapiens
gtctggctgggagga

SEQ ID NO: 971428 - DNA, 15 bp, Homo sapiens
tctggctgggaggat

SEQ ID NO: 971429 - DNA, 15 bp, Homo sapiens
ctggctgggaggatc

SEQ ID NO: 971430 - DNA, 15 bp, Homo sapiens
tggctgggaggatca

SEQ ID NO: 971431 - DNA, 15 bp, Homo sapiens
ggctgggaggatcac

SEQ ID NO: 971432 - DNA, 15 bp, Homo sapiens
gctgggaggatcaca

SEQ ID NO: 971433 - DNA, 15 bp, Homo sapiens
ctgggaggatcacat

SEQ ID NO: 971434 - DNA, 15 bp, Homo sapiens
tgggaggatcacatg

SEQ ID NO: 971435 - DNA, 15 bp, Homo sapiens
gggaggatcacatga

SEQ ID NO: 971436 - DNA, 15 bp, Homo sapiens
ggaggatcacatgag

SEQ ID NO: 971437 - DNA, 15 bp, Homo sapiens
gaggatcacatgagt

SEQ ID NO: 971438 - DNA, 15 bp, Homo sapiens
aggatcacatgagtg

SEQ ID NO: 971439 - DNA, 15 bp, Homo sapiens
ggatcacatgagtgg

SEQ ID NO: 971440 - DNA, 15 bp, Homo sapiens
gatcacatgagtggc

SEQ ID NO: 971441 - DNA, 15 bp, Homo sapiens
atcacatgagtggcc

SEQ ID NO: 971442 - DNA, 15 bp, Homo sapiens
tcacatgagtggcca

SEQ ID NO: 971443 - DNA, 15 bp, Homo sapiens
cacatgagtggccag

SEQ ID NO: 971444 - DNA, 15 bp, Homo sapiens
acatgagtggccaga

SEQ ID NO: 971445 - DNA, 15 bp, Homo sapiens
catgagtggccagag

SEQ ID NO: 971446 - DNA, 15 bp, Homo sapiens
atgagtggccagaga

SEQ ID NO: 971447 - DNA, 15 bp, Homo sapiens
tgagtggccagagat

SEQ ID NO: 971448 - DNA, 15 bp, Homo sapiens
gagtggccagagatg

SEQ ID NO: 971449 - DNA, 15 bp, Homo sapiens
agtggccagagatga

SEQ ID NO: 971450 - DNA, 15 bp, Homo sapiens
gtggccagagatgag

SEQ ID NO: 971451 - DNA, 15 bp, Homo sapiens
tggccagagatgagg

SEQ ID NO: 971452 - DNA, 15 bp, Homo sapiens
ggccagagatgaggt

SEQ ID NO: 971453 - DNA, 15 bp, Homo sapiens
gccagagatgaggtg

SEQ ID NO: 971454 - DNA, 15 bp, Homo sapiens
ccagagatgaggtgg

SEQ ID NO: 971455 - DNA, 15 bp, Homo sapiens
cagagatgaggtgga

SEQ ID NO: 971456 - DNA, 15 bp, Homo sapiens
agagatgaggtggaa

SEQ ID NO: 971457 - DNA, 15 bp, Homo sapiens
gagatgaggtggaaa

SEQ ID NO: 971458 - DNA, 15 bp, Homo sapiens
agatgaggtggaaag

SEQ ID NO: 971459 - DNA, 15 bp, Homo sapiens
gatgaggtggaaagg

SEQ ID NO: 971460 - DNA, 15 bp, Homo sapiens
atgaggtggaaaggt

SEQ ID NO: 971461 - DNA, 15 bp, Homo sapiens
tgaggtggaaaggtc

SEQ ID NO: 971462 - DNA, 15 bp, Homo sapiens
gaggtggaaaggtca

SEQ ID NO: 971463 - DNA, 15 bp, Homo sapiens
aggtggaaaggtcag

SEQ ID NO: 971464 - DNA, 15 bp, Homo sapiens
ggtggaaaggtcagc

SEQ ID NO: 971465 - DNA, 15 bp, Homo sapiens
gtggaaaggtcagca

SEQ ID NO: 971466 - DNA, 15 bp, Homo sapiens
tggaaaggtcagcag

SEQ ID NO: 971467 - DNA, 15 bp, Homo sapiens
ggaaaggtcagcaga

SEQ ID NO: 971468 - DNA, 15 bp, Homo sapiens
gaaaggtcagcagag

SEQ ID NO: 971469 - DNA, 15 bp, Homo sapiens
aaaggtcagcagagg

SEQ ID NO: 971470 - DNA, 15 bp, Homo sapiens
aaggtcagcagaggc

SEQ ID NO: 971471 - DNA, 15 bp, Homo sapiens
aggtcagcagaggcc

SEQ ID NO: 971472 - DNA, 15 bp, Homo sapiens
ggtcagcagaggcct

SEQ ID NO: 971473 - DNA, 15 bp, Homo sapiens
gtcagcagaggcctg

SEQ ID NO: 971474 - DNA, 15 bp, Homo sapiens
tcagcagaggcctgg

SEQ ID NO: 971475 - DNA, 15 bp, Homo sapiens
cagcagaggcctggt

SEQ ID NO: 971476 - DNA, 15 bp, Homo sapiens
agcagaggcctggtc

SEQ ID NO: 971477 - DNA, 15 bp, Homo sapiens
gcagaggcctggtca

SEQ ID NO: 971478 - DNA, 15 bp, Homo sapiens
cagaggcctggtcac

SEQ ID NO: 971479 - DNA, 15 bp, Homo sapiens
agaggcctggtcaca

SEQ ID NO: 971480 - DNA, 15 bp, Homo sapiens
gaggcctggtcacac

SEQ ID NO: 971481 - DNA, 15 bp, Homo sapiens
aggcctggtcacaca

SEQ ID NO: 971482 - DNA, 15 bp, Homo sapiens
ggcctggtcacacag

SEQ ID NO: 971483 - DNA, 15 bp, Homo sapiens
gcctggtcacacagg

SEQ ID NO: 971484 - DNA, 15 bp, Homo sapiens
cctggtcacacaggg

SEQ ID NO: 971485 - DNA, 15 bp, Homo sapiens
ctggtcacacagggc

SEQ ID NO: 971486 - DNA, 15 bp, Homo sapiens
tggtcacacagggcc

SEQ ID NO: 971487 - DNA, 15 bp, Homo sapiens
ggtcacacagggcct

SEQ ID NO: 971488 - DNA, 15 bp, Homo sapiens
gtcacacagggcctt

SEQ ID NO: 971489 - DNA, 15 bp, Homo sapiens
tcacacagggccttg

SEQ ID NO: 971490 - DNA, 15 bp, Homo sapiens
cacacagggccttgt

SEQ ID NO: 971491 - DNA, 15 bp, Homo sapiens
acacagggccttgtg

SEQ ID NO: 971492 - DNA, 15 bp, Homo sapiens
cacagggccttgtgg

SEQ ID NO: 971493 - DNA, 15 bp, Homo sapiens
acagggccttgtggg

SEQ ID NO: 971494 - DNA, 15 bp, Homo sapiens
cagggccttgtgggt

SEQ ID NO: 971495 - DNA, 15 bp, Homo sapiens
agggccttgtgggtt

SEQ ID NO: 971496 - DNA, 15 bp, Homo sapiens
gggccttgtgggttt

SEQ ID NO: 971497 - DNA, 15 bp, Homo sapiens
ggccttgtgggtttt

SEQ ID NO: 971498 - DNA, 15 bp, Homo sapiens
gccttgtgggttttt

SEQ ID NO: 971499 - DNA, 15 bp, Homo sapiens
ccttgtgggtttttt

SEQ ID NO: 971500 - DNA, 15 bp, Homo sapiens
cttgtgggttttttt

SEQ ID NO: 971501 - DNA, 15 bp, Homo sapiens
ttgtgggtttttttt

SEQ ID NO: 971502 - DNA, 15 bp, Homo sapiens
tgtgggttttttttt

SEQ ID NO: 971503 - DNA, 15 bp, Homo sapiens
gtgggtttttttttt

SEQ ID NO: 971504 - DNA, 15 bp, Homo sapiens
tgggttttttttttt

SEQ ID NO: 971505 - DNA, 15 bp, Homo sapiens
gggtttttttttttt

SEQ ID NO: 971506 - DNA, 15 bp, Homo sapiens
ggttttttttttttt

SEQ ID NO: 971507 - DNA, 15 bp, Homo sapiens
gtttttttttttttt

SEQ ID NO: 971508 - DNA, 15 bp, Homo sapiens
ttttttttttttttg

SEQ ID NO: 971509 - DNA, 15 bp, Homo sapiens
tttttttttttttgc

SEQ ID NO: 971510 - DNA, 15 bp, Homo sapiens
ttttttttttttgcg

SEQ ID NO: 971511 - DNA, 15 bp, Homo sapiens
tttttttttttgcga

SEQ ID NO: 971512 - DNA, 15 bp, Homo sapiens
ttttttttttgcgaa

SEQ ID NO: 971513 - DNA, 15 bp, Homo sapiens
tttttttttgcgaat

SEQ ID NO: 971514 - DNA, 15 bp, Homo sapiens
ttttttttgcgaatc

SEQ ID NO: 971515 - DNA, 15 bp, Homo sapiens
tttttttgcgaatct

SEQ ID NO: 971516 - DNA, 15 bp, Homo sapiens
ttttttgcgaatctg

SEQ ID NO: 971517 - DNA, 15 bp, Homo sapiens
tttttgcgaatctga

SEQ ID NO: 971518 - DNA, 15 bp, Homo sapiens
ttttgcgaatctgat

SEQ ID NO: 971519 - DNA, 15 bp, Homo sapiens
tttgcgaatctgatc

SEQ ID NO: 971520 - DNA, 15 bp, Homo sapiens
ttgcgaatctgatct

SEQ ID NO: 971521 - DNA, 15 bp, Homo sapiens
tgcgaatctgatctt

SEQ ID NO: 971522 - DNA, 15 bp, Homo sapiens
gcgaatctgatctta

SEQ ID NO: 971523 - DNA, 15 bp, Homo sapiens
cgaatctgatcttat

SEQ ID NO: 971524 - DNA, 15 bp, Homo sapiens
gaatctgatcttatt

SEQ ID NO: 971525 - DNA, 15 bp, Homo sapiens
aatctgatcttattt

SEQ ID NO: 971526 - DNA, 15 bp, Homo sapiens
atctgatcttatttg

SEQ ID NO: 971527 - DNA, 15 bp, Homo sapiens
tctgatcttatttgt

SEQ ID NO: 971528 - DNA, 15 bp, Homo sapiens
ctgatcttatttgtt

SEQ ID NO: 971529 - DNA, 15 bp, Homo sapiens
tgatcttatttgtta

SEQ ID NO: 971530 - DNA, 15 bp, Homo sapiens
gatcttatttgttac

SEQ ID NO: 971531 - DNA, 15 bp, Homo sapiens
atcttatttgttact

SEQ ID NO: 971532 - DNA, 15 bp, Homo sapiens
tcttatttgttactc

SEQ ID NO: 971533 - DNA, 15 bp, Homo sapiens
cttatttgttactca

SEQ ID NO: 971534 - DNA, 15 bp, Homo sapiens
ttatttgttactcaa

SEQ ID NO: 971535 - DNA, 15 bp, Homo sapiens
tatttgttactcaaa

SEQ ID NO: 971536 - DNA, 15 bp, Homo sapiens
atttgttactcaaaa

SEQ ID NO: 971537 - DNA, 15 bp, Homo sapiens
tttgttactcaaaaa

SEQ ID NO: 971538 - DNA, 15 bp, Homo sapiens
ttgttactcaaaaaa

SEQ ID NO: 971539 - DNA, 15 bp, Homo sapiens
tgttactcaaaaaat

SEQ ID NO: 971540 - DNA, 15 bp, Homo sapiens
gttactcaaaaaatc

SEQ ID NO: 971541 - DNA, 15 bp, Homo sapiens
ttactcaaaaaatct

SEQ ID NO: 971542 - DNA, 15 bp, Homo sapiens
tactcaaaaaatctt

SEQ ID NO: 971543 - DNA, 15 bp, Homo sapiens
actcaaaaaatctta

SEQ ID NO: 971544 - DNA, 15 bp, Homo sapiens
ctcaaaaaatcttat

SEQ ID NO: 971545 - DNA, 15 bp, Homo sapiens
tcaaaaaatcttatt

SEQ ID NO: 971546 - DNA, 15 bp, Homo sapiens
caaaaaatcttattt

SEQ ID NO: 971547 - DNA, 15 bp, Homo sapiens
aaaaaatcttatttc

SEQ ID NO: 971548 - DNA, 15 bp, Homo sapiens
aaaaatcttatttct

SEQ ID NO: 971549 - DNA, 15 bp, Homo sapiens
aaaatcttatttctg

SEQ ID NO: 971550 - DNA, 15 bp, Homo sapiens
aaatcttatttctga

SEQ ID NO: 971551 - DNA, 15 bp, Homo sapiens
aatcttatttctgac

SEQ ID NO: 971552 - DNA, 15 bp, Homo sapiens
atcttatttctgact

SEQ ID NO: 971553 - DNA, 15 bp, Homo sapiens
tcttatttctgactg

SEQ ID NO: 971554 - DNA, 15 bp, Homo sapiens
cttatttctgactgg

SEQ ID NO: 971555 - DNA, 15 bp, Homo sapiens
ttatttctgactgga

SEQ ID NO: 971556 - DNA, 15 bp, Homo sapiens
tatttctgactggat

SEQ ID NO: 971557 - DNA, 15 bp, Homo sapiens
atttctgactggatt

SEQ ID NO: 971558 - DNA, 15 bp, Homo sapiens
tttctgactggattc

SEQ ID NO: 971559 - DNA, 15 bp, Homo sapiens
ttctgactggattca

SEQ ID NO: 971560 - DNA, 15 bp, Homo sapiens
tctgactggattcag

SEQ ID NO: 971561 - DNA, 15 bp, Homo sapiens
ctgactggattcaga

SEQ ID NO: 971562 - DNA, 15 bp, Homo sapiens
tgactggattcagac

SEQ ID NO: 971563 - DNA, 15 bp, Homo sapiens
gactggattcagact

SEQ ID NO: 971564 - DNA, 15 bp, Homo sapiens
actggattcagactt

SEQ ID NO: 971565 - DNA, 15 bp, Homo sapiens
ctggattcagactta

SEQ ID NO: 971566 - DNA, 15 bp, Homo sapiens
tggattcagacttag

SEQ ID NO: 971567 - DNA, 15 bp, Homo sapiens
ggattcagacttaga

SEQ ID NO: 971568 - DNA, 15 bp, Homo sapiens
gattcagacttagaa

SEQ ID NO: 971569 - DNA, 15 bp, Homo sapiens
attcagacttagaag

SEQ ID NO: 971570 - DNA, 15 bp, Homo sapiens
ttcagacttagaagt

SEQ ID NO: 971571 - DNA, 15 bp, Homo sapiens
tcagacttagaagtg

SEQ ID NO: 971572 - DNA, 15 bp, Homo sapiens
cagacttagaagtgg

SEQ ID NO: 971573 - DNA, 15 bp, Homo sapiens
agacttagaagtgga

SEQ ID NO: 971574 - DNA, 15 bp, Homo sapiens
gacttagaagtggaa

SEQ ID NO: 971575 - DNA, 15 bp, Homo sapiens
acttagaagtggaag

SEQ ID NO: 971576 - DNA, 15 bp, Homo sapiens
cttagaagtggaagc

SEQ ID NO: 971577 - DNA, 15 bp, Homo sapiens
ttagaagtggaagct

SEQ ID NO: 971578 - DNA, 15 bp, Homo sapiens
tagaagtggaagctc

SEQ ID NO: 971579 - DNA, 15 bp, Homo sapiens
agaagtggaagctcg

SEQ ID NO: 971580 - DNA, 15 bp, Homo sapiens
gaagtggaagctcgc

SEQ ID NO: 971581 - DNA, 15 bp, Homo sapiens
aagtggaagctcgca

SEQ ID NO: 971582 - DNA, 15 bp, Homo sapiens
agtggaagctcgcag

SEQ ID NO: 971583 - DNA, 15 bp, Homo sapiens
gtggaagctcgcaga

SEQ ID NO: 971584 - DNA, 15 bp, Homo sapiens
tggaagctcgcagag

SEQ ID NO: 971585 - DNA, 15 bp, Homo sapiens
ggaagctcgcagaga

SEQ ID NO: 971586 - DNA, 15 bp, Homo sapiens
gaagctcgcagagag

SEQ ID NO: 971587 - DNA, 15 bp, Homo sapiens
aagctcgcagagagg

SEQ ID NO: 971588 - DNA, 15 bp, Homo sapiens
agctcgcagagagga

SEQ ID NO: 971589 - DNA, 15 bp, Homo sapiens
gctcgcagagaggac

SEQ ID NO: 971590 - DNA, 15 bp, Homo sapiens
ctcgcagagaggaca

SEQ ID NO: 971591 - DNA, 15 bp, Homo sapiens
tcgcagagaggacag

SEQ ID NO: 971592 - DNA, 15 bp, Homo sapiens
cgcagagaggacagt

SEQ ID NO: 971593 - DNA, 15 bp, Homo sapiens
gcagagaggacagtc

SEQ ID NO: 971594 - DNA, 15 bp, Homo sapiens
cagagaggacagtct

SEQ ID NO: 971595 - DNA, 15 bp, Homo sapiens
agagaggacagtctg

SEQ ID NO: 971596 - DNA, 15 bp, Homo sapiens
gagaggacagtctgc

SEQ ID NO: 971597 - DNA, 15 bp, Homo sapiens
agaggacagtctgcg

SEQ ID NO: 971598 - DNA, 15 bp, Homo sapiens
gaggacagtctgcgt

SEQ ID NO: 971599 - DNA, 15 bp, Homo sapiens
aggacagtctgcgtc

SEQ ID NO: 971600 - DNA, 15 bp, Homo sapiens
ggacagtctgcgtct

SEQ ID NO: 971601 - DNA, 15 bp, Homo sapiens
gacagtctgcgtctc

SEQ ID NO: 971602 - DNA, 15 bp, Homo sapiens
acagtctgcgtctct

SEQ ID NO: 971603 - DNA, 15 bp, Homo sapiens
cagtctgcgtctctt

SEQ ID NO: 971604 - DNA, 15 bp, Homo sapiens
agtctgcgtctcttc

SEQ ID NO: 971605 - DNA, 15 bp, Homo sapiens
gtctgcgtctcttca

SEQ ID NO: 971606 - DNA, 15 bp, Homo sapiens
tctgcgtctcttcac

SEQ ID NO: 971607 - DNA, 15 bp, Homo sapiens
ctgcgtctcttcacg

SEQ ID NO: 971608 - DNA, 15 bp, Homo sapiens
tgcgtctcttcacga

SEQ ID NO: 971609 - DNA, 15 bp, Homo sapiens
gcgtctcttcacgat

SEQ ID NO: 971610 - DNA, 15 bp, Homo sapiens
cgtctcttcacgatt

SEQ ID NO: 971611 - DNA, 15 bp, Homo sapiens
gtctcttcacgattt

SEQ ID NO: 971612 - DNA, 15 bp, Homo sapiens
tctcttcacgatttg

SEQ ID NO: 971613 - DNA, 15 bp, Homo sapiens
ctcttcacgatttgt

SEQ ID NO: 971614 - DNA, 15 bp, Homo sapiens
tcttcacgatttgtc

SEQ ID NO: 971615 - DNA, 15 bp, Homo sapiens
cttcacgatttgtcc

SEQ ID NO: 971616 - DNA, 15 bp, Homo sapiens
ttcacgatttgtccc

SEQ ID NO: 971617 - DNA, 15 bp, Homo sapiens
tcacgatttgtccct

SEQ ID NO: 971618 - DNA, 15 bp, Homo sapiens
cacgatttgtccctg

SEQ ID NO: 971619 - DNA, 15 bp, Homo sapiens
acgatttgtccctgg

SEQ ID NO: 971620 - DNA, 15 bp, Homo sapiens
cgatttgtccctggt

SEQ ID NO: 971621 - DNA, 15 bp, Homo sapiens
gatttgtccctggtg

SEQ ID NO: 971622 - DNA, 15 bp, Homo sapiens
atttgtccctggtgc

SEQ ID NO: 971623 - DNA, 15 bp, Homo sapiens
tttgtccctggtgct

SEQ ID NO: 971624 - DNA, 15 bp, Homo sapiens
ttgtccctggtgctt

SEQ ID NO: 971625 - DNA, 15 bp, Homo sapiens
tgtccctggtgcttc

SEQ ID NO: 971626 - DNA, 15 bp, Homo sapiens
gtccctggtgcttct

SEQ ID NO: 971627 - DNA, 15 bp, Homo sapiens
tccctggtgcttctt

SEQ ID NO: 971628 - DNA, 15 bp, Homo sapiens
ccctggtgcttctta

SEQ ID NO: 971629 - DNA, 15 bp, Homo sapiens
cctggtgcttcttag

SEQ ID NO: 971630 - DNA, 15 bp, Homo sapiens
ctggtgcttcttagc

SEQ ID NO: 971631 - DNA, 15 bp, Homo sapiens
tggtgcttcttagcc

SEQ ID NO: 971632 - DNA, 15 bp, Homo sapiens
ggtgcttcttagcct

SEQ ID NO: 971633 - DNA, 15 bp, Homo sapiens
gtgcttcttagcctc

SEQ ID NO: 971634 - DNA, 15 bp, Homo sapiens
tgcttcttagcctcc

SEQ ID NO: 971635 - DNA, 15 bp, Homo sapiens
gcttcttagcctcct

SEQ ID NO: 971636 - DNA, 15 bp, Homo sapiens
cttcttagcctcctt

SEQ ID NO: 971637 - DNA, 15 bp, Homo sapiens
ttcttagcctccttc

SEQ ID NO: 971638 - DNA, 15 bp, Homo sapiens
tcttagcctccttca

SEQ ID NO: 971639 - DNA, 15 bp, Homo sapiens
cttagcctccttcat

SEQ ID NO: 971640 - DNA, 15 bp, Homo sapiens
ttagcctccttcatt

SEQ ID NO: 971641 - DNA, 15 bp, Homo sapiens
tagcctccttcattc

SEQ ID NO: 971642 - DNA, 15 bp, Homo sapiens
agcctccttcattct

SEQ ID NO: 971643 - DNA, 15 bp, Homo sapiens
gcctccttcattctc

SEQ ID NO: 971644 - DNA, 15 bp, Homo sapiens
cctccttcattctct

SEQ ID NO: 971645 - DNA, 15 bp, Homo sapiens
ctccttcattctctt

SEQ ID NO: 971646 - DNA, 15 bp, Homo sapiens
tccttcattctcttg

SEQ ID NO: 971647 - DNA, 15 bp, Homo sapiens
ccttcattctcttgg

SEQ ID NO: 971648 - DNA, 15 bp, Homo sapiens
cttcattctcttggc

SEQ ID NO: 971649 - DNA, 15 bp, Homo sapiens
ttcattctcttggcc

SEQ ID NO: 971650 - DNA, 15 bp, Homo sapiens
tcattctcttggcca

SEQ ID NO: 971651 - DNA, 15 bp, Homo sapiens
cattctcttggccaa

SEQ ID NO: 971652 - DNA, 15 bp, Homo sapiens
attctcttggccaaa

SEQ ID NO: 971653 - DNA, 15 bp, Homo sapiens
ttctcttggccaaaa

SEQ ID NO: 971654 - DNA, 15 bp, Homo sapiens
tctcttggccaaaag

SEQ ID NO: 971655 - DNA, 15 bp, Homo sapiens
ctcttggccaaaagt

SEQ ID NO: 971656 - DNA, 15 bp, Homo sapiens
tcttggccaaaagtt

SEQ ID NO: 971657 - DNA, 15 bp, Homo sapiens
cttggccaaaagttt

SEQ ID NO: 971658 - DNA, 15 bp, Homo sapiens
ttggccaaaagttta

SEQ ID NO: 971659 - DNA, 15 bp, Homo sapiens
tggccaaaagtttag

SEQ ID NO: 971660 - DNA, 15 bp, Homo sapiens
ggccaaaagtttagc

SEQ ID NO: 971661 - DNA, 15 bp, Homo sapiens
gccaaaagtttagca

SEQ ID NO: 971662 - DNA, 15 bp, Homo sapiens
ccaaaagtttagcat

SEQ ID NO: 971663 - DNA, 15 bp, Homo sapiens
caaaagtttagcata

SEQ ID NO: 971664 - DNA, 15 bp, Homo sapiens
aaaagtttagcatat

SEQ ID NO: 971665 - DNA, 15 bp, Homo sapiens
aaagtttagcatatt

SEQ ID NO: 971666 - DNA, 15 bp, Homo sapiens
aagtttagcatattc

SEQ ID NO: 971667 - DNA, 15 bp, Homo sapiens
agtttagcatattct

SEQ ID NO: 971668 - DNA, 15 bp, Homo sapiens
gtttagcatattctg

SEQ ID NO: 971669 - DNA, 15 bp, Homo sapiens
tttagcatattctgc

SEQ ID NO: 971670 - DNA, 15 bp, Homo sapiens
ttagcatattctgca

SEQ ID NO: 971671 - DNA, 15 bp, Homo sapiens
tagcatattctgcag

SEQ ID NO: 971672 - DNA, 15 bp, Homo sapiens
agcatattctgcagc

SEQ ID NO: 971673 - DNA, 15 bp, Homo sapiens
gcatattctgcagcc

SEQ ID NO: 971674 - DNA, 15 bp, Homo sapiens
catattctgcagcct

SEQ ID NO: 971675 - DNA, 15 bp, Homo sapiens
atattctgcagcctc

SEQ ID NO: 971676 - DNA, 15 bp, Homo sapiens
tattctgcagcctct

SEQ ID NO: 971677 - DNA, 15 bp, Homo sapiens
attctgcagcctctt

SEQ ID NO: 971678 - DNA, 15 bp, Homo sapiens
ttctgcagcctcttc

SEQ ID NO: 971679 - DNA, 15 bp, Homo sapiens
tctgcagcctcttct

SEQ ID NO: 971680 - DNA, 15 bp, Homo sapiens
ctgcagcctcttctt

SEQ ID NO: 971681 - DNA, 15 bp, Homo sapiens
tgcagcctcttcttt

SEQ ID NO: 971682 - DNA, 15 bp, Homo sapiens
gcagcctcttcttta

SEQ ID NO: 971683 - DNA, 15 bp, Homo sapiens
cagcctcttctttat

SEQ ID NO: 971684 - DNA, 15 bp, Homo sapiens
agcctcttctttatt

SEQ ID NO: 971685 - DNA, 15 bp, Homo sapiens
gcctcttctttattt

SEQ ID NO: 971686 - DNA, 15 bp, Homo sapiens
cctcttctttatttt

SEQ ID NO: 971687 - DNA, 15 bp, Homo sapiens
ctcttctttattttt

SEQ ID NO: 971688 - DNA, 15 bp, Homo sapiens
tcttctttatttttc

SEQ ID NO: 971689 - DNA, 15 bp, Homo sapiens
cttctttatttttct

SEQ ID NO: 971690 - DNA, 15 bp, Homo sapiens
ttctttatttttctt

SEQ ID NO: 971691 - DNA, 15 bp, Homo sapiens
tctttatttttctta

SEQ ID NO: 971692 - DNA, 15 bp, Homo sapiens
ctttatttttcttaa

SEQ ID NO: 971693 - DNA, 15 bp, Homo sapiens
tttatttttcttaat

SEQ ID NO: 971694 - DNA, 15 bp, Homo sapiens
ttatttttcttaata

SEQ ID NO: 971695 - DNA, 15 bp, Homo sapiens
tatttttcttaatat

SEQ ID NO: 971696 - DNA, 15 bp, Homo sapiens
atttttcttaatatg

SEQ ID NO: 971697 - DNA, 15 bp, Homo sapiens
tttttcttaatatgc

SEQ ID NO: 971698 - DNA, 15 bp, Homo sapiens
ttttcttaatatgcg

SEQ ID NO: 971699 - DNA, 15 bp, Homo sapiens
tttcttaatatgcgg

SEQ ID NO: 971700 - DNA, 15 bp, Homo sapiens
ttcttaatatgcggc

SEQ ID NO: 971701 - DNA, 15 bp, Homo sapiens
tcttaatatgcggct

SEQ ID NO: 971702 - DNA, 15 bp, Homo sapiens
cttaatatgcggctg

SEQ ID NO: 971703 - DNA, 15 bp, Homo sapiens
ttaatatgcggctgc

SEQ ID NO: 971704 - DNA, 15 bp, Homo sapiens
taatatgcggctgct

SEQ ID NO: 971705 - DNA, 15 bp, Homo sapiens
aatatgcggctgctt

SEQ ID NO: 971706 - DNA, 15 bp, Homo sapiens
atatgcggctgcttc

SEQ ID NO: 971707 - DNA, 15 bp, Homo sapiens
tatgcggctgcttca

SEQ ID NO: 971708 - DNA, 15 bp, Homo sapiens
atgcggctgcttcag

SEQ ID NO: 971709 - DNA, 15 bp, Homo sapiens
tgcggctgcttcaga

SEQ ID NO: 971710 - DNA, 15 bp, Homo sapiens
gcggctgcttcagag

SEQ ID NO: 971711 - DNA, 15 bp, Homo sapiens
cggctgcttcagagc

SEQ ID NO: 971712 - DNA, 15 bp, Homo sapiens
ggctgcttcagagca

SEQ ID NO: 971713 - DNA, 15 bp, Homo sapiens
gctgcttcagagcaa

SEQ ID NO: 971714 - DNA, 15 bp, Homo sapiens
ctgcttcagagcaat

SEQ ID NO: 971715 - DNA, 15 bp, Homo sapiens
tgcttcagagcaata

SEQ ID NO: 971716 - DNA, 15 bp, Homo sapiens
gcttcagagcaatac

SEQ ID NO: 971717 - DNA, 15 bp, Homo sapiens
cttcagagcaatacg

SEQ ID NO: 971718 - DNA, 15 bp, Homo sapiens
ttcagagcaatacgc

SEQ ID NO: 971719 - DNA, 15 bp, Homo sapiens
tcagagcaatacgcc

SEQ ID NO: 971720 - DNA, 15 bp, Homo sapiens
cagagcaatacgccg

SEQ ID NO: 971721 - DNA, 15 bp, Homo sapiens
agagcaatacgccgc

SEQ ID NO: 971722 - DNA, 15 bp, Homo sapiens
gagcaatacgccgct

SEQ ID NO: 971723 - DNA, 15 bp, Homo sapiens
agcaatacgccgctg

SEQ ID NO: 971724 - DNA, 15 bp, Homo sapiens
gcaatacgccgctgt

SEQ ID NO: 971725 - DNA, 15 bp, Homo sapiens
caatacgccgctgtt

SEQ ID NO: 971726 - DNA, 15 bp, Homo sapiens
aatacgccgctgttt

SEQ ID NO: 971727 - DNA, 15 bp, Homo sapiens
atacgccgctgtttg

SEQ ID NO: 971728 - DNA, 15 bp, Homo sapiens
tacgccgctgtttgt

SEQ ID NO: 971729 - DNA, 15 bp, Homo sapiens
acgccgctgtttgtg

SEQ ID NO: 971730 - DNA, 15 bp, Homo sapiens
cgccgctgtttgtgc

SEQ ID NO: 971731 - DNA, 15 bp, Homo sapiens
gccgctgtttgtgct

SEQ ID NO: 971732 - DNA, 15 bp, Homo sapiens
ccgctgtttgtgctg

SEQ ID NO: 971733 - DNA, 15 bp, Homo sapiens
cgctgtttgtgctgc

SEQ ID NO: 971734 - DNA, 15 bp, Homo sapiens
gctgtttgtgctgca

SEQ ID NO: 971735 - DNA, 15 bp, Homo sapiens
ctgtttgtgctgcag

SEQ ID NO: 971736 - DNA, 15 bp, Homo sapiens
tgtttgtgctgcagg

SEQ ID NO: 971737 - DNA, 15 bp, Homo sapiens
gtttgtgctgcagga

SEQ ID NO: 971738 - DNA, 15 bp, Homo sapiens
tttgtgctgcaggac

SEQ ID NO: 971739 - DNA, 15 bp, Homo sapiens
ttgtgctgcaggaca

SEQ ID NO: 971740 - DNA, 15 bp, Homo sapiens
tgtgctgcaggacat

SEQ ID NO: 971741 - DNA, 15 bp, Homo sapiens
gtgctgcaggacatg

SEQ ID NO: 971742 - DNA, 15 bp, Homo sapiens
tgctgcaggacatgt

SEQ ID NO: 971743 - DNA, 15 bp, Homo sapiens
gctgcaggacatgtg

SEQ ID NO: 971744 - DNA, 15 bp, Homo sapiens
ctgcaggacatgtgg

SEQ ID NO: 971745 - DNA, 15 bp, Homo sapiens
tgcaggacatgtgga

SEQ ID NO: 971746 - DNA, 15 bp, Homo sapiens
gcaggacatgtggag

SEQ ID NO: 971747 - DNA, 15 bp, Homo sapiens
caggacatgtggagt

SEQ ID NO: 971748 - DNA, 15 bp, Homo sapiens
aggacatgtggagtg

SEQ ID NO: 971749 - DNA, 15 bp, Homo sapiens
ggacatgtggagtga

SEQ ID NO: 971750 - DNA, 15 bp, Homo sapiens
gacatgtggagtgac

SEQ ID NO: 971751 - DNA, 15 bp, Homo sapiens
acatgtggagtgaca

SEQ ID NO: 971752 - DNA, 15 bp, Homo sapiens
catgtggagtgacaa

SEQ ID NO: 971753 - DNA, 15 bp, Homo sapiens
atgtggagtgacaag

SEQ ID NO: 971754 - DNA, 15 bp, Homo sapiens
tgtggagtgacaagg

SEQ ID NO: 971755 - DNA, 15 bp, Homo sapiens
gtggagtgacaaggc

SEQ ID NO: 971756 - DNA, 15 bp, Homo sapiens
tggagtgacaaggcg

SEQ ID NO: 971757 - DNA, 15 bp, Homo sapiens
ggagtgacaaggcgc

SEQ ID NO: 971758 - DNA, 15 bp, Homo sapiens
gagtgacaaggcgct

SEQ ID NO: 971759 - DNA, 15 bp, Homo sapiens
agtgacaaggcgctg

SEQ ID NO: 971760 - DNA, 15 bp, Homo sapiens
gtgacaaggcgctga

SEQ ID NO: 971761 - DNA, 15 bp, Homo sapiens
tgacaaggcgctgaa

SEQ ID NO: 971762 - DNA, 15 bp, Homo sapiens
gacaaggcgctgaat

SEQ ID NO: 971763 - DNA, 15 bp, Homo sapiens
acaaggcgctgaatc

SEQ ID NO: 971764 - DNA, 15 bp, Homo sapiens
caaggcgctgaatct

SEQ ID NO: 971765 - DNA, 15 bp, Homo sapiens
aaggcgctgaatctt

SEQ ID NO: 971766 - DNA, 15 bp, Homo sapiens
aggcgctgaatcttg

SEQ ID NO: 971767 - DNA, 15 bp, Homo sapiens
ggcgctgaatcttgg

SEQ ID NO: 971768 - DNA, 15 bp, Homo sapiens
gcgctgaatcttggg

SEQ ID NO: 971769 - DNA, 15 bp, Homo sapiens
cgctgaatcttgggt

SEQ ID NO: 971770 - DNA, 15 bp, Homo sapiens
gctgaatcttgggtg

SEQ ID NO: 971771 - DNA, 15 bp, Homo sapiens
ctgaatcttgggtgc

SEQ ID NO: 971772 - DNA, 15 bp, Homo sapiens
tgaatcttgggtgct

SEQ ID NO: 971773 - DNA, 15 bp, Homo sapiens
gaatcttgggtgctt

SEQ ID NO: 971774 - DNA, 15 bp, Homo sapiens
aatcttgggtgcttt

SEQ ID NO: 971775 - DNA, 15 bp, Homo sapiens
atcttgggtgctttg

SEQ ID NO: 971776 - DNA, 15 bp, Homo sapiens
tcttgggtgctttgg

SEQ ID NO: 971777 - DNA, 15 bp, Homo sapiens
cttgggtgctttggt

SEQ ID NO: 971778 - DNA, 15 bp, Homo sapiens
ttgggtgctttggtc

SEQ ID NO: 971779 - DNA, 15 bp, Homo sapiens
tgggtgctttggtcc

SEQ ID NO: 971780 - DNA, 15 bp, Homo sapiens
gggtgctttggtcct

SEQ ID NO: 971781 - DNA, 15 bp, Homo sapiens
ggtgctttggtccta

SEQ ID NO: 971782 - DNA, 15 bp, Homo sapiens
gtgctttggtcctag

SEQ ID NO: 971783 - DNA, 15 bp, Homo sapiens
tgctttggtcctagg

SEQ ID NO: 971784 - DNA, 15 bp, Homo sapiens
gctttggtcctaggt

SEQ ID NO: 971785 - DNA, 15 bp, Homo sapiens
ctttggtcctaggtt

SEQ ID NO: 971786 - DNA, 15 bp, Homo sapiens
tttggtcctaggttt

SEQ ID NO: 971787 - DNA, 15 bp, Homo sapiens
ttggtcctaggtttc

SEQ ID NO: 971788 - DNA, 15 bp, Homo sapiens
tggtcctaggtttct

SEQ ID NO: 971789 - DNA, 15 bp, Homo sapiens
ggtcctaggtttctt

SEQ ID NO: 971790 - DNA, 15 bp, Homo sapiens
gtcctaggtttctta

SEQ ID NO: 971791 - DNA, 15 bp, Homo sapiens
tcctaggtttcttac

SEQ ID NO: 971792 - DNA, 15 bp, Homo sapiens
cctaggtttcttacc

SEQ ID NO: 971793 - DNA, 15 bp, Homo sapiens
ctaggtttcttacct

SEQ ID NO: 971794 - DNA, 15 bp, Homo sapiens
taggtttcttacctt

SEQ ID NO: 971795 - DNA, 15 bp, Homo sapiens
aggtttcttaccttc

SEQ ID NO: 971796 - DNA, 15 bp, Homo sapiens
ggtttcttaccttct

SEQ ID NO: 971797 - DNA, 15 bp, Homo sapiens
gtttcttaccttctt

SEQ ID NO: 971798 - DNA, 15 bp, Homo sapiens
tttcttaccttcttt

SEQ ID NO: 971799 - DNA, 15 bp, Homo sapiens
ttcttaccttctttg

SEQ ID NO: 971800 - DNA, 15 bp, Homo sapiens
ttgtttaagggcttt

SEQ ID NO: 971801 - DNA, 15 bp, Homo sapiens
tgtttaagggctttt

SEQ ID NO: 971802 - DNA, 15 bp, Homo sapiens
gtttaagggcttttt

SEQ ID NO: 971803 - DNA, 15 bp, Homo sapiens
tttaagggctttttt

SEQ ID NO: 971804 - DNA, 15 bp, Homo sapiens
ttaagggctttttta

SEQ ID NO: 971805 - DNA, 15 bp, Homo sapiens
taagggcttttttac

SEQ ID NO: 971806 - DNA, 15 bp, Homo sapiens
aagggcttttttaca

SEQ ID NO: 971807 - DNA, 15 bp, Homo sapiens
agggcttttttacaa

SEQ ID NO: 971808 - DNA, 15 bp, Homo sapiens
gggcttttttacaac

SEQ ID NO: 971809 - DNA, 15 bp, Homo sapiens
ggcttttttacaaca

SEQ ID NO: 971810 - DNA, 15 bp, Homo sapiens
gcttttttacaacat

SEQ ID NO: 971811 - DNA, 15 bp, Homo sapiens
cttttttacaacata

SEQ ID NO: 971812 - DNA, 15 bp, Homo sapiens
ttttttacaacatac

SEQ ID NO: 971813 - DNA, 15 bp, Homo sapiens
tttttacaacatact

SEQ ID NO: 971814 - DNA, 15 bp, Homo sapiens
ttttacaacatactg

SEQ ID NO: 971815 - DNA, 15 bp, Homo sapiens
tttacaacatactgg

SEQ ID NO: 971816 - DNA, 15 bp, Homo sapiens
ttacaacatactggc

SEQ ID NO: 971817 - DNA, 15 bp, Homo sapiens
tacaacatactggca

SEQ ID NO: 971818 - DNA, 15 bp, Homo sapiens
acaacatactggcag

SEQ ID NO: 971819 - DNA, 15 bp, Homo sapiens
caacatactggcaga

SEQ ID NO: 971820 - DNA, 15 bp, Homo sapiens
aacatactggcagac

SEQ ID NO: 971821 - DNA, 15 bp, Homo sapiens
acatactggcagaca

SEQ ID NO: 971822 - DNA, 15 bp, Homo sapiens
catactggcagacat

SEQ ID NO: 971823 - DNA, 15 bp, Homo sapiens
atactggcagacatc

SEQ ID NO: 971824 - DNA, 15 bp, Homo sapiens
tactggcagacatca

SEQ ID NO: 971825 - DNA, 15 bp, Homo sapiens
actggcagacatcat

SEQ ID NO: 971826 - DNA, 15 bp, Homo sapiens
ctggcagacatcatt

SEQ ID NO: 971827 - DNA, 15 bp, Homo sapiens
tggcagacatcattt

SEQ ID NO: 971828 - DNA, 15 bp, Homo sapiens
ggcagacatcatttt

SEQ ID NO: 971829 - DNA, 15 bp, Homo sapiens
gcagacatcattttc

SEQ ID NO: 971830 - DNA, 15 bp, Homo sapiens
cagacatcattttct

SEQ ID NO: 971831 - DNA, 15 bp, Homo sapiens
agacatcattttctt

SEQ ID NO: 971832 - DNA, 15 bp, Homo sapiens
gacatcattttcttt

SEQ ID NO: 971833 - DNA, 15 bp, Homo sapiens
acatcattttcttta

SEQ ID NO: 971834 - DNA, 15 bp, Homo sapiens
catcattttctttag

SEQ ID NO: 971835 - DNA, 15 bp, Homo sapiens
atcattttctttaga

SEQ ID NO: 971836 - DNA, 15 bp, Homo sapiens
tcattttctttagag

SEQ ID NO: 971837 - DNA, 15 bp, Homo sapiens
cattttctttagaga

SEQ ID NO: 971838 - DNA, 15 bp, Homo sapiens
attttctttagagag

SEQ ID NO: 971839 - DNA, 15 bp, Homo sapiens
ttttctttagagaga

SEQ ID NO: 971840 - DNA, 15 bp, Homo sapiens
tttctttagagagac

SEQ ID NO: 971841 - DNA, 15 bp, Homo sapiens
ttctttagagagact

SEQ ID NO: 971842 - DNA, 15 bp, Homo sapiens
tctttagagagactg

SEQ ID NO: 971843 - DNA, 15 bp, Homo sapiens
ctttagagagactga

SEQ ID NO: 971844 - DNA, 15 bp, Homo sapiens
tttagagagactgaa

SEQ ID NO: 971845 - DNA, 15 bp, Homo sapiens
ttagagagactgaaa

SEQ ID NO: 971846 - DNA, 15 bp, Homo sapiens
tagagagactgaaaa

SEQ ID NO: 971847 - DNA, 15 bp, Homo sapiens
agagagactgaaaag

SEQ ID NO: 971848 - DNA, 15 bp, Homo sapiens
ttttttttacaataa

SEQ ID NO: 971849 - DNA, 15 bp, Homo sapiens
tttttttacaataac

SEQ ID NO: 971850 - DNA, 15 bp, Homo sapiens
ttttttacaataacc

SEQ ID NO: 971851 - DNA, 15 bp, Homo sapiens
tttttacaataacca

SEQ ID NO: 971852 - DNA, 15 bp, Homo sapiens
ttttacaataaccaa

SEQ ID NO: 971853 - DNA, 15 bp, Homo sapiens
tttacaataaccaag

SEQ ID NO: 971854 - DNA, 15 bp, Homo sapiens
ttacaataaccaagt

SEQ ID NO: 971855 - DNA, 15 bp, Homo sapiens
tacaataaccaagtt

SEQ ID NO: 971856 - DNA, 15 bp, Homo sapiens
acaataaccaagttg

SEQ ID NO: 971857 - DNA, 15 bp, Homo sapiens
caataaccaagttga

SEQ ID NO: 971858 - DNA, 15 bp, Homo sapiens
aataaccaagttgag

SEQ ID NO: 971859 - DNA, 15 bp, Homo sapiens
ataaccaagttgaga

SEQ ID NO: 971860 - DNA, 15 bp, Homo sapiens
taaccaagttgagaa

SEQ ID NO: 971861 - DNA, 15 bp, Homo sapiens
aaccaagttgagaac

SEQ ID NO: 971862 - DNA, 15 bp, Homo sapiens
accaagttgagaaca

SEQ ID NO: 971863 - DNA, 15 bp, Homo sapiens
ccaagttgagaacac

SEQ ID NO: 971864 - DNA, 15 bp, Homo sapiens
caagttgagaacact

SEQ ID NO: 971865 - DNA, 15 bp, Homo sapiens
aagttgagaacactc

SEQ ID NO: 971866 - DNA, 15 bp, Homo sapiens
agttgagaacactca

SEQ ID NO: 971867 - DNA, 15 bp, Homo sapiens
gttgagaacactcag

SEQ ID NO: 971868 - DNA, 15 bp, Homo sapiens
ttgagaacactcaga

SEQ ID NO: 971869 - DNA, 15 bp, Homo sapiens
tgagaacactcagat

SEQ ID NO: 971870 - DNA, 15 bp, Homo sapiens
gagaacactcagatt

SEQ ID NO: 971871 - DNA, 15 bp, Homo sapiens
agaacactcagattg

SEQ ID NO: 971872 - DNA, 15 bp, Homo sapiens
gaacactcagattgg

SEQ ID NO: 971873 - DNA, 15 bp, Homo sapiens
aacactcagattggc

SEQ ID NO: 971874 - DNA, 15 bp, Homo sapiens
acactcagattggca

SEQ ID NO: 971875 - DNA, 15 bp, Homo sapiens
cactcagattggcat

SEQ ID NO: 971876 - DNA, 15 bp, Homo sapiens
actcagattggcatc

SEQ ID NO: 971877 - DNA, 15 bp, Homo sapiens
ctcagattggcatcc

SEQ ID NO: 971878 - DNA, 15 bp, Homo sapiens
tcagattggcatcca

SEQ ID NO: 971879 - DNA, 15 bp, Homo sapiens
cagattggcatccac

SEQ ID NO: 971880 - DNA, 15 bp, Homo sapiens
agattggcatccacg

SEQ ID NO: 971881 - DNA, 15 bp, Homo sapiens
gattggcatccacga

SEQ ID NO: 971882 - DNA, 15 bp, Homo sapiens
attggcatccacgat

SEQ ID NO: 971883 - DNA, 15 bp, Homo sapiens
ttggcatccacgatg

SEQ ID NO: 971884 - DNA, 15 bp, Homo sapiens
tggcatccacgatgc

SEQ ID NO: 971885 - DNA, 15 bp, Homo sapiens
ggcatccacgatgca

SEQ ID NO: 971886 - DNA, 15 bp, Homo sapiens
gcatccacgatgcaa

SEQ ID NO: 971887 - DNA, 15 bp, Homo sapiens
catccacgatgcaac

SEQ ID NO: 971888 - DNA, 15 bp, Homo sapiens
atccacgatgcaacc

SEQ ID NO: 971889 - DNA, 15 bp, Homo sapiens
tccacgatgcaacca

SEQ ID NO: 971890 - DNA, 15 bp, Homo sapiens
ccacgatgcaaccat

SEQ ID NO: 971891 - DNA, 15 bp, Homo sapiens
cacgatgcaaccatg

SEQ ID NO: 971892 - DNA, 15 bp, Homo sapiens
acgatgcaaccatga

SEQ ID NO: 971893 - DNA, 15 bp, Homo sapiens
cgatgcaaccatgaa

SEQ ID NO: 971894 - DNA, 15 bp, Homo sapiens
gatgcaaccatgaac

SEQ ID NO: 971895 - DNA, 15 bp, Homo sapiens
atgcaaccatgaact

SEQ ID NO: 971896 - DNA, 15 bp, Homo sapiens
tgcaaccatgaactg

SEQ ID NO: 971897 - DNA, 15 bp, Homo sapiens
gcaaccatgaactga

SEQ ID NO: 971898 - DNA, 15 bp, Homo sapiens
caaccatgaactgat

SEQ ID NO: 971899 - DNA, 15 bp, Homo sapiens
aaccatgaactgatc

SEQ ID NO: 971900 - DNA, 15 bp, Homo sapiens
accatgaactgatct

SEQ ID NO: 971901 - DNA, 15 bp, Homo sapiens
ccatgaactgatctt

SEQ ID NO: 971902 - DNA, 15 bp, Homo sapiens
catgaactgatcttc

SEQ ID NO: 971903 - DNA, 15 bp, Homo sapiens
atgaactgatcttct

SEQ ID NO: 971904 - DNA, 15 bp, Homo sapiens
tgaactgatcttctc

SEQ ID NO: 971905 - DNA, 15 bp, Homo sapiens
gaactgatcttctct

SEQ ID NO: 971906 - DNA, 15 bp, Homo sapiens
aactgatcttctctt

SEQ ID NO: 971907 - DNA, 15 bp, Homo sapiens
actgatcttctcttt

SEQ ID NO: 971908 - DNA, 15 bp, Homo sapiens
ctgatcttctctttc

SEQ ID NO: 971909 - DNA, 15 bp, Homo sapiens
tgatcttctctttct

SEQ ID NO: 971910 - DNA, 15 bp, Homo sapiens
gatcttctctttctt

SEQ ID NO: 971911 - DNA, 15 bp, Homo sapiens
atcttctctttcttt

SEQ ID NO: 971912 - DNA, 15 bp, Homo sapiens
tcttctctttctttc

SEQ ID NO: 971913 - DNA, 15 bp, Homo sapiens
cttctctttctttct

SEQ ID NO: 971914 - DNA, 15 bp, Homo sapiens
ttctctttctttctc

SEQ ID NO: 971915 - DNA, 15 bp, Homo sapiens
tctctttctttctcc

SEQ ID NO: 971916 - DNA, 15 bp, Homo sapiens
ctctttctttctcca

SEQ ID NO: 971917 - DNA, 15 bp, Homo sapiens
tctttctttctccag

SEQ ID NO: 971918 - DNA, 15 bp, Homo sapiens
ctttctttctccagt

SEQ ID NO: 971919 - DNA, 15 bp, Homo sapiens
tttctttctccagtt

SEQ ID NO: 971920 - DNA, 15 bp, Homo sapiens
ttctttctccagttc

SEQ ID NO: 971921 - DNA, 15 bp, Homo sapiens
tctttctccagttct

SEQ ID NO: 971922 - DNA, 15 bp, Homo sapiens
ctttctccagttctc

SEQ ID NO: 971923 - DNA, 15 bp, Homo sapiens
tttctccagttctcc

SEQ ID NO: 971924 - DNA, 15 bp, Homo sapiens
ttctccagttctcct

SEQ ID NO: 971925 - DNA, 15 bp, Homo sapiens
tctccagttctcctt

SEQ ID NO: 971926 - DNA, 15 bp, Homo sapiens
ctccagttctccttg

SEQ ID NO: 971927 - DNA, 15 bp, Homo sapiens
tccagttctccttgg

SEQ ID NO: 971928 - DNA, 15 bp, Homo sapiens
ccagttctccttggt

SEQ ID NO: 971929 - DNA, 15 bp, Homo sapiens
cagttctccttggtc

SEQ ID NO: 971930 - DNA, 15 bp, Homo sapiens
agttctccttggtct

SEQ ID NO: 971931 - DNA, 15 bp, Homo sapiens
gttctccttggtctg

SEQ ID NO: 971932 - DNA, 15 bp, Homo sapiens
ttctccttggtctgt

SEQ ID NO: 971933 - DNA, 15 bp, Homo sapiens
tctccttggtctgta

SEQ ID NO: 971934 - DNA, 15 bp, Homo sapiens
ctccttggtctgtaa

SEQ ID NO: 971935 - DNA, 15 bp, Homo sapiens
tccttggtctgtaat

SEQ ID NO: 971936 - DNA, 15 bp, Homo sapiens
ccttggtctgtaata

SEQ ID NO: 971937 - DNA, 15 bp, Homo sapiens
cttggtctgtaatag

SEQ ID NO: 971938 - DNA, 15 bp, Homo sapiens
ttggtctgtaatagg

SEQ ID NO: 971939 - DNA, 15 bp, Homo sapiens
tggtctgtaatagga

SEQ ID NO: 971940 - DNA, 15 bp, Homo sapiens
ggtctgtaataggaa

SEQ ID NO: 971941 - DNA, 15 bp, Homo sapiens
gtctgtaataggaat

SEQ ID NO: 971942 - DNA, 15 bp, Homo sapiens
tctgtaataggaatg

SEQ ID NO: 971943 - DNA, 15 bp, Homo sapiens
ctgtaataggaatgc

SEQ ID NO: 971944 - DNA, 15 bp, Homo sapiens
tgtaataggaatgcc

SEQ ID NO: 971945 - DNA, 15 bp, Homo sapiens
gtaataggaatgccc

SEQ ID NO: 971946 - DNA, 15 bp, Homo sapiens
taataggaatgcccc

SEQ ID NO: 971947 - DNA, 15 bp, Homo sapiens
aataggaatgcccct

SEQ ID NO: 971948 - DNA, 15 bp, Homo sapiens
ataggaatgcccctt

SEQ ID NO: 971949 - DNA, 15 bp, Homo sapiens
taggaatgcccctta

SEQ ID NO: 971950 - DNA, 15 bp, Homo sapiens
aggaatgccccttac

SEQ ID NO: 971951 - DNA, 15 bp, Homo sapiens
ggaatgccccttact

SEQ ID NO: 971952 - DNA, 15 bp, Homo sapiens
gaatgccccttactc

SEQ ID NO: 971953 - DNA, 15 bp, Homo sapiens
aatgccccttactca

SEQ ID NO: 971954 - DNA, 15 bp, Homo sapiens
atgccccttactcag

SEQ ID NO: 971955 - DNA, 15 bp, Homo sapiens
tgccccttactcagt

SEQ ID NO: 971956 - DNA, 15 bp, Homo sapiens
gccccttactcagta

SEQ ID NO: 971957 - DNA, 15 bp, Homo sapiens
ccccttactcagtag

SEQ ID NO: 971958 - DNA, 15 bp, Homo sapiens
cccttactcagtagc

SEQ ID NO: 971959 - DNA, 15 bp, Homo sapiens
ccttactcagtagca

SEQ ID NO: 971960 - DNA, 15 bp, Homo sapiens
cttactcagtagcaa

SEQ ID NO: 971961 - DNA, 15 bp, Homo sapiens
ttactcagtagcaag

SEQ ID NO: 971962 - DNA, 15 bp, Homo sapiens
tactcagtagcaagt

SEQ ID NO: 971963 - DNA, 15 bp, Homo sapiens
actcagtagcaagtg

SEQ ID NO: 971964 - DNA, 15 bp, Homo sapiens
ctcagtagcaagtgg

SEQ ID NO: 971965 - DNA, 15 bp, Homo sapiens
tcagtagcaagtgga

SEQ ID NO: 971966 - DNA, 15 bp, Homo sapiens
cagtagcaagtggac

SEQ ID NO: 971967 - DNA, 15 bp, Homo sapiens
agtagcaagtggaca

SEQ ID NO: 971968 - DNA, 15 bp, Homo sapiens
gtagcaagtggacac

SEQ ID NO: 971969 - DNA, 15 bp, Homo sapiens
tagcaagtggacacg

SEQ ID NO: 971970 - DNA, 15 bp, Homo sapiens
agcaagtggacacgg

SEQ ID NO: 971971 - DNA, 15 bp, Homo sapiens
gcaagtggacacggc

SEQ ID NO: 971972 - DNA, 15 bp, Homo sapiens
caagtggacacggcc

SEQ ID NO: 971973 - DNA, 15 bp, Homo sapiens
aagtggacacggcca

SEQ ID NO: 971974 - DNA, 15 bp, Homo sapiens
agtggacacggccat

SEQ ID NO: 971975 - DNA, 15 bp, Homo sapiens
gtggacacggccatg

SEQ ID NO: 971976 - DNA, 15 bp, Homo sapiens
tggacacggccatgg

SEQ ID NO: 971977 - DNA, 15 bp, Homo sapiens
ggacacggccatggg

SEQ ID NO: 971978 - DNA, 15 bp, Homo sapiens
gacacggccatgggt

SEQ ID NO: 971979 - DNA, 15 bp, Homo sapiens
acacggccatgggtc

SEQ ID NO: 971980 - DNA, 15 bp, Homo sapiens
cacggccatgggtca

SEQ ID NO: 971981 - DNA, 15 bp, Homo sapiens
acggccatgggtcaa

SEQ ID NO: 971982 - DNA, 15 bp, Homo sapiens
cggccatgggtcaag

SEQ ID NO: 971983 - DNA, 15 bp, Homo sapiens
ggccatgggtcaaga

SEQ ID NO: 971984 - DNA, 15 bp, Homo sapiens
gccatgggtcaagac

SEQ ID NO: 971985 - DNA, 15 bp, Homo sapiens
ccatgggtcaagaca

SEQ ID NO: 971986 - DNA, 15 bp, Homo sapiens
catgggtcaagacac

SEQ ID NO: 971987 - DNA, 15 bp, Homo sapiens
atgggtcaagacacc

SEQ ID NO: 971988 - DNA, 15 bp, Homo sapiens
tgggtcaagacaccc

SEQ ID NO: 971989 - DNA, 15 bp, Homo sapiens
gggtcaagacaccct

SEQ ID NO: 971990 - DNA, 15 bp, Homo sapiens
ggtcaagacaccctg

SEQ ID NO: 971991 - DNA, 15 bp, Homo sapiens
ccacgtaacccttcc

SEQ ID NO: 971992 - DNA, 15 bp, Homo sapiens
cacgtaacccttcca

SEQ ID NO: 971993 - DNA, 15 bp, Homo sapiens
acgtaacccttccat

SEQ ID NO: 971994 - DNA, 15 bp, Homo sapiens
cgtaacccttccatt

SEQ ID NO: 971995 - DNA, 15 bp, Homo sapiens
gtaacccttccattc

SEQ ID NO: 971996 - DNA, 15 bp, Homo sapiens
taacccttccattct

SEQ ID NO: 971997 - DNA, 15 bp, Homo sapiens
aacccttccattctt

SEQ ID NO: 971998 - DNA, 15 bp, Homo sapiens
acccttccattcttc

SEQ ID NO: 971999 - DNA, 15 bp, Homo sapiens
cccttccattcttca

SEQ ID NO: 972000 - DNA, 15 bp, Homo sapiens
ccttccattcttcac

SEQ ID NO: 972001 - DNA, 15 bp, Homo sapiens
cttccattcttcacc

SEQ ID NO: 972002 - DNA, 15 bp, Homo sapiens
ttccattcttcaccc

SEQ ID NO: 972003 - DNA, 15 bp, Homo sapiens
tccattcttcaccca

SEQ ID NO: 972004 - DNA, 15 bp, Homo sapiens
ccattcttcacccag

SEQ ID NO: 972005 - DNA, 15 bp, Homo sapiens
cattcttcacccaga

SEQ ID NO: 972006 - DNA, 15 bp, Homo sapiens
attcttcacccagag

SEQ ID NO: 972007 - DNA, 15 bp, Homo sapiens
ttcttcacccagagc

SEQ ID NO: 972008 - DNA, 15 bp, Homo sapiens
tcttcacccagagcg

SEQ ID NO: 972009 - DNA, 15 bp, Homo sapiens
cttcacccagagcgt

SEQ ID NO: 972010 - DNA, 15 bp, Homo sapiens
ttcacccagagcgtc

SEQ ID NO: 972011 - DNA, 15 bp, Homo sapiens
tcacccagagcgtca

SEQ ID NO: 972012 - DNA, 15 bp, Homo sapiens
cacccagagcgtcaa

SEQ ID NO: 972013 - DNA, 15 bp, Homo sapiens
acccagagcgtcaac

SEQ ID NO: 972014 - DNA, 15 bp, Homo sapiens
cccagagcgtcaaca

SEQ ID NO: 972015 - DNA, 15 bp, Homo sapiens
ccagagcgtcaacag

SEQ ID NO: 972016 - DNA, 15 bp, Homo sapiens
cagagcgtcaacagc

SEQ ID NO: 972017 - DNA, 15 bp, Homo sapiens
agagcgtcaacagca

SEQ ID NO: 972018 - DNA, 15 bp, Homo sapiens
gagcgtcaacagcaa

SEQ ID NO: 972019 - DNA, 15 bp, Homo sapiens
agcgtcaacagcaac

SEQ ID NO: 972020 - DNA, 15 bp, Homo sapiens
gcgtcaacagcaact

SEQ ID NO: 972021 - DNA, 15 bp, Homo sapiens
cgtcaacagcaactt

SEQ ID NO: 972022 - DNA, 15 bp, Homo sapiens
gtcaacagcaacttc

SEQ ID NO: 972023 - DNA, 15 bp, Homo sapiens
tcaacagcaacttct

SEQ ID NO: 972024 - DNA, 15 bp, Homo sapiens
caacagcaacttctg

SEQ ID NO: 972025 - DNA, 15 bp, Homo sapiens
aacagcaacttctgt

SEQ ID NO: 972026 - DNA, 15 bp, Homo sapiens
acagcaacttctgtg

SEQ ID NO: 972027 - DNA, 15 bp, Homo sapiens
cagcaacttctgtgg

SEQ ID NO: 972028 - DNA, 15 bp, Homo sapiens
agcaacttctgtggc

SEQ ID NO: 972029 - DNA, 15 bp, Homo sapiens
gcaacttctgtggcc

SEQ ID NO: 972030 - DNA, 15 bp, Homo sapiens
caacttctgtggcca

SEQ ID NO: 972031 - DNA, 15 bp, Homo sapiens
aacttctgtggccat

SEQ ID NO: 972032 - DNA, 15 bp, Homo sapiens
acttctgtggccata

SEQ ID NO: 972033 - DNA, 15 bp, Homo sapiens
cttctgtggccatac

SEQ ID NO: 972034 - DNA, 15 bp, Homo sapiens
ttctgtggccatacg

SEQ ID NO: 972035 - DNA, 15 bp, Homo sapiens
tctgtggccatacgc

SEQ ID NO: 972036 - DNA, 15 bp, Homo sapiens
ctgtggccatacgct

SEQ ID NO: 972037 - DNA, 15 bp, Homo sapiens
tgtggccatacgctt

SEQ ID NO: 972038 - DNA, 15 bp, Homo sapiens
gtggccatacgcttc

SEQ ID NO: 972039 - DNA, 15 bp, Homo sapiens
tggccatacgcttct

SEQ ID NO: 972040 - DNA, 15 bp, Homo sapiens
ggccatacgcttctc

SEQ ID NO: 972041 - DNA, 15 bp, Homo sapiens
gccatacgcttctca

SEQ ID NO: 972042 - DNA, 15 bp, Homo sapiens
ccatacgcttctcat

SEQ ID NO: 972043 - DNA, 15 bp, Homo sapiens
catacgcttctcata

SEQ ID NO: 972044 - DNA, 15 bp, Homo sapiens
atacgcttctcataa

SEQ ID NO: 972045 - DNA, 15 bp, Homo sapiens
tacgcttctcataaa

SEQ ID NO: 972046 - DNA, 15 bp, Homo sapiens
acgcttctcataaaa

SEQ ID NO: 972047 - DNA, 15 bp, Homo sapiens
cgcttctcataaaaa

SEQ ID NO: 972048 - DNA, 15 bp, Homo sapiens
gcttctcataaaaag

SEQ ID NO: 972049 - DNA, 15 bp, Homo sapiens
cttctcataaaaagt

SEQ ID NO: 972050 - DNA, 15 bp, Homo sapiens
ttctcataaaaagta

SEQ ID NO: 972051 - DNA, 15 bp, Homo sapiens
tctcataaaaagtac

SEQ ID NO: 972052 - DNA, 15 bp, Homo sapiens
ctcataaaaagtaca

SEQ ID NO: 972053 - DNA, 15 bp, Homo sapiens
tcataaaaagtacaa

SEQ ID NO: 972054 - DNA, 15 bp, Homo sapiens
cataaaaagtacaaa

SEQ ID NO: 972055 - DNA, 15 bp, Homo sapiens
ataaaaagtacaaag

SEQ ID NO: 972056 - DNA, 15 bp, Homo sapiens
taaaaagtacaaagt

SEQ ID NO: 972057 - DNA, 15 bp, Homo sapiens
aaaaagtacaaagtt

SEQ ID NO: 972058 - DNA, 15 bp, Homo sapiens
aaaagtacaaagttt

SEQ ID NO: 972059 - DNA, 15 bp, Homo sapiens
aaagtacaaagtttg

SEQ ID NO: 972060 - DNA, 15 bp, Homo sapiens
aagtacaaagtttgc

SEQ ID NO: 972061 - DNA, 15 bp, Homo sapiens
agtacaaagtttgcg

SEQ ID NO: 972062 - DNA, 15 bp, Homo sapiens
gtacaaagtttgcgt

SEQ ID NO: 972063 - DNA, 15 bp, Homo sapiens
tacaaagtttgcgtt

SEQ ID NO: 972064 - DNA, 15 bp, Homo sapiens
acaaagtttgcgttc

SEQ ID NO: 972065 - DNA, 15 bp, Homo sapiens
caaagtttgcgttca

SEQ ID NO: 972066 - DNA, 15 bp, Homo sapiens
aaagtttgcgttcat

SEQ ID NO: 972067 - DNA, 15 bp, Homo sapiens
aagtttgcgttcatc

SEQ ID NO: 972068 - DNA, 15 bp, Homo sapiens
agtttgcgttcatcg

SEQ ID NO: 972069 - DNA, 15 bp, Homo sapiens
gtttgcgttcatcgt

SEQ ID NO: 972070 - DNA, 15 bp, Homo sapiens
tttgcgttcatcgtc

SEQ ID NO: 972071 - DNA, 15 bp, Homo sapiens
ttgcgttcatcgtcc

SEQ ID NO: 972072 - DNA, 15 bp, Homo sapiens
tgcgttcatcgtcca

SEQ ID NO: 972073 - DNA, 15 bp, Homo sapiens
gcgttcatcgtccac

SEQ ID NO: 972074 - DNA, 15 bp, Homo sapiens
cgttcatcgtccact

SEQ ID NO: 972075 - DNA, 15 bp, Homo sapiens
gttcatcgtccactt

SEQ ID NO: 972076 - DNA, 15 bp, Homo sapiens
ttcatcgtccacttc

SEQ ID NO: 972077 - DNA, 15 bp, Homo sapiens
tcatcgtccacttca

SEQ ID NO: 972078 - DNA, 15 bp, Homo sapiens
catcgtccacttcaa

SEQ ID NO: 972079 - DNA, 15 bp, Homo sapiens
atcgtccacttcaat

SEQ ID NO: 972080 - DNA, 15 bp, Homo sapiens
tcgtccacttcaatg

SEQ ID NO: 972081 - DNA, 15 bp, Homo sapiens
cgtccacttcaatga

SEQ ID NO: 972082 - DNA, 15 bp, Homo sapiens
gtccacttcaatgag

SEQ ID NO: 972083 - DNA, 15 bp, Homo sapiens
tccacttcaatgagt

SEQ ID NO: 972084 - DNA, 15 bp, Homo sapiens
ccacttcaatgagtt

SEQ ID NO: 972085 - DNA, 15 bp, Homo sapiens
cacttcaatgagttt

SEQ ID NO: 972086 - DNA, 15 bp, Homo sapiens
acttcaatgagtttc

SEQ ID NO: 972087 - DNA, 15 bp, Homo sapiens
cttcaatgagtttct

SEQ ID NO: 972088 - DNA, 15 bp, Homo sapiens
ttcaatgagtttctg

SEQ ID NO: 972089 - DNA, 15 bp, Homo sapiens
tcaatgagtttctgg

SEQ ID NO: 972090 - DNA, 15 bp, Homo sapiens
caatgagtttctggc

SEQ ID NO: 972091 - DNA, 15 bp, Homo sapiens
aatgagtttctggca

SEQ ID NO: 972092 - DNA, 15 bp, Homo sapiens
atgagtttctggcag

SEQ ID NO: 972093 - DNA, 15 bp, Homo sapiens
tgagtttctggcagc

SEQ ID NO: 972094 - DNA, 15 bp, Homo sapiens
gagtttctggcagcc

SEQ ID NO: 972095 - DNA, 15 bp, Homo sapiens
agtttctggcagcca

SEQ ID NO: 972096 - DNA, 15 bp, Homo sapiens
gtttctggcagccag

SEQ ID NO: 972097 - DNA, 15 bp, Homo sapiens
tttctggcagccagt

SEQ ID NO: 972098 - DNA, 15 bp, Homo sapiens
ttctggcagccagtg

SEQ ID NO: 972099 - DNA, 15 bp, Homo sapiens
tctggcagccagtgg

SEQ ID NO: 972100 - DNA, 15 bp, Homo sapiens
ctggcagccagtggc

SEQ ID NO: 972101 - DNA, 15 bp, Homo sapiens
tggcagccagtggct

SEQ ID NO: 972102 - DNA, 15 bp, Homo sapiens
ggcagccagtggctg

SEQ ID NO: 972103 - DNA, 15 bp, Homo sapiens
gcagccagtggctgg

SEQ ID NO: 972104 - DNA, 15 bp, Homo sapiens
cagccagtggctggg

SEQ ID NO: 972105 - DNA, 15 bp, Homo sapiens
agccagtggctggga

SEQ ID NO: 972106 - DNA, 15 bp, Homo sapiens
gccagtggctgggaa

SEQ ID NO: 972107 - DNA, 15 bp, Homo sapiens
ccagtggctgggaag

SEQ ID NO: 972108 - DNA, 15 bp, Homo sapiens
cagtggctgggaagg

SEQ ID NO: 972109 - DNA, 15 bp, Homo sapiens
agtggctgggaagga

SEQ ID NO: 972110 - DNA, 15 bp, Homo sapiens
gtggctgggaaggag

SEQ ID NO: 972111 - DNA, 15 bp, Homo sapiens
tggctgggaaggaga

SEQ ID NO: 972112 - DNA, 15 bp, Homo sapiens
ggctgggaaggagat

SEQ ID NO: 972113 - DNA, 15 bp, Homo sapiens
gctgggaaggagatg

SEQ ID NO: 972114 - DNA, 15 bp, Homo sapiens
ctgggaaggagatgt

SEQ ID NO: 972115 - DNA, 15 bp, Homo sapiens
tgggaaggagatgtt

SEQ ID NO: 972116 - DNA, 15 bp, Homo sapiens
gggaaggagatgttc

SEQ ID NO: 972117 - DNA, 15 bp, Homo sapiens
ggaaggagatgttca

SEQ ID NO: 972118 - DNA, 15 bp, Homo sapiens
gaaggagatgttcag

SEQ ID NO: 972119 - DNA, 15 bp, Homo sapiens
aaggagatgttcagc

SEQ ID NO: 972120 - DNA, 15 bp, Homo sapiens
aggagatgttcagct

SEQ ID NO: 972121 - DNA, 15 bp, Homo sapiens
ggagatgttcagctt

SEQ ID NO: 972122 - DNA, 15 bp, Homo sapiens
gagatgttcagcttc

SEQ ID NO: 972123 - DNA, 15 bp, Homo sapiens
agatgttcagcttca

SEQ ID NO: 972124 - DNA, 15 bp, Homo sapiens
gatgttcagcttcat

SEQ ID NO: 972125 - DNA, 15 bp, Homo sapiens
atgttcagcttcatc

SEQ ID NO: 972126 - DNA, 15 bp, Homo sapiens
tgttcagcttcatct

SEQ ID NO: 972127 - DNA, 15 bp, Homo sapiens
gttcagcttcatctt

SEQ ID NO: 972128 - DNA, 15 bp, Homo sapiens
ttcagcttcatcttg

SEQ ID NO: 972129 - DNA, 15 bp, Homo sapiens
tcagcttcatcttga

SEQ ID NO: 972130 - DNA, 15 bp, Homo sapiens
cagcttcatcttgaa

SEQ ID NO: 972131 - DNA, 15 bp, Homo sapiens
agcttcatcttgaag

SEQ ID NO: 972132 - DNA, 15 bp, Homo sapiens
gcttcatcttgaagc

SEQ ID NO: 972133 - DNA, 15 bp, Homo sapiens
cttcatcttgaagca

SEQ ID NO: 972134 - DNA, 15 bp, Homo sapiens
ttcatcttgaagcag

SEQ ID NO: 972135 - DNA, 15 bp, Homo sapiens
tcatcttgaagcagc

SEQ ID NO: 972136 - DNA, 15 bp, Homo sapiens
catcttgaagcagct

SEQ ID NO: 972137 - DNA, 15 bp, Homo sapiens
atcttgaagcagctg

SEQ ID NO: 972138 - DNA, 15 bp, Homo sapiens
tcttgaagcagctga

SEQ ID NO: 972139 - DNA, 15 bp, Homo sapiens
cttgaagcagctgaa

SEQ ID NO: 972140 - DNA, 15 bp, Homo sapiens
ttgaagcagctgaac

SEQ ID NO: 972141 - DNA, 15 bp, Homo sapiens
tgaagcagctgaaca

SEQ ID NO: 972142 - DNA, 15 bp, Homo sapiens
gaagcagctgaacac

SEQ ID NO: 972143 - DNA, 15 bp, Homo sapiens
aagcagctgaacacc

SEQ ID NO: 972144 - DNA, 15 bp, Homo sapiens
agcagctgaacacct

SEQ ID NO: 972145 - DNA, 15 bp, Homo sapiens
gcagctgaacacctc

SEQ ID NO: 972146 - DNA, 15 bp, Homo sapiens
cagctgaacacctcc

SEQ ID NO: 972147 - DNA, 15 bp, Homo sapiens
agctgaacacctccg

SEQ ID NO: 972148 - DNA, 15 bp, Homo sapiens
gctgaacacctccga

SEQ ID NO: 972149 - DNA, 15 bp, Homo sapiens
ctgaacacctccgag

SEQ ID NO: 972150 - DNA, 15 bp, Homo sapiens
tgaacacctccgaga

SEQ ID NO: 972151 - DNA, 15 bp, Homo sapiens
gaacacctccgagac

SEQ ID NO: 972152 - DNA, 15 bp, Homo sapiens
aacacctccgagaca

SEQ ID NO: 972153 - DNA, 15 bp, Homo sapiens
acacctccgagacac

SEQ ID NO: 972154 - DNA, 15 bp, Homo sapiens
cacctccgagacacc

SEQ ID NO: 972155 - DNA, 15 bp, Homo sapiens
acctccgagacacca

SEQ ID NO: 972156 - DNA, 15 bp, Homo sapiens
cctccgagacaccac

SEQ ID NO: 972157 - DNA, 15 bp, Homo sapiens
ctccgagacaccacg

SEQ ID NO: 972158 - DNA, 15 bp, Homo sapiens
tccgagacaccacgg

SEQ ID NO: 972159 - DNA, 15 bp, Homo sapiens
ccgagacaccacgga

SEQ ID NO: 972160 - DNA, 15 bp, Homo sapiens
cgagacaccacggaa

SEQ ID NO: 972161 - DNA, 15 bp, Homo sapiens
gagacaccacggaag

SEQ ID NO: 972162 - DNA, 15 bp, Homo sapiens
agacaccacggaaga

SEQ ID NO: 972163 - DNA, 15 bp, Homo sapiens
gacaccacggaagag

SEQ ID NO: 972164 - DNA, 15 bp, Homo sapiens
acaccacggaagagg

SEQ ID NO: 972165 - DNA, 15 bp, Homo sapiens
caccacggaagaggg

SEQ ID NO: 972166 - DNA, 15 bp, Homo sapiens
accacggaagagggc

SEQ ID NO: 972167 - DNA, 15 bp, Homo sapiens
ccacggaagagggcc

SEQ ID NO: 972168 - DNA, 15 bp, Homo sapiens
cacggaagagggcca

SEQ ID NO: 972169 - DNA, 15 bp, Homo sapiens
acggaagagggccaa

SEQ ID NO: 972170 - DNA, 15 bp, Homo sapiens
cggaagagggccaac

SEQ ID NO: 972171 - DNA, 15 bp, Homo sapiens
ggaagagggccaacg

SEQ ID NO: 972172 - DNA, 15 bp, Homo sapiens
gaagagggccaacgt

SEQ ID NO: 972173 - DNA, 15 bp, Homo sapiens
aagagggccaacgtc

SEQ ID NO: 972174 - DNA, 15 bp, Homo sapiens
agagggccaacgtcc

SEQ ID NO: 972175 - DNA, 15 bp, Homo sapiens
gagggccaacgtcca

SEQ ID NO: 972176 - DNA, 15 bp, Homo sapiens
agggccaacgtccac

SEQ ID NO: 972177 - DNA, 15 bp, Homo sapiens
gggccaacgtccact

SEQ ID NO: 972178 - DNA, 15 bp, Homo sapiens
ggccaacgtccactt

SEQ ID NO: 972179 - DNA, 15 bp, Homo sapiens
gccaacgtccactta

SEQ ID NO: 972180 - DNA, 15 bp, Homo sapiens
ccaacgtccacttag

SEQ ID NO: 972181 - DNA, 15 bp, Homo sapiens
caacgtccacttagc

SEQ ID NO: 972182 - DNA, 15 bp, Homo sapiens
aacgtccacttagcg

SEQ ID NO: 972183 - DNA, 15 bp, Homo sapiens
acgtccacttagcgc

SEQ ID NO: 972184 - DNA, 15 bp, Homo sapiens
cgtccacttagcgca

SEQ ID NO: 972185 - DNA, 15 bp, Homo sapiens
gtccacttagcgcag

SEQ ID NO: 972186 - DNA, 15 bp, Homo sapiens
tccacttagcgcagg

SEQ ID NO: 972187 - DNA, 15 bp, Homo sapiens
ccacttagcgcaggt

SEQ ID NO: 972188 - DNA, 15 bp, Homo sapiens
cacttagcgcaggtc

SEQ ID NO: 972189 - DNA, 15 bp, Homo sapiens
acttagcgcaggtca

SEQ ID NO: 972190 - DNA, 15 bp, Homo sapiens
cttagcgcaggtcac

SEQ ID NO: 972191 - DNA, 15 bp, Homo sapiens
ttagcgcaggtcaca

SEQ ID NO: 972192 - DNA, 15 bp, Homo sapiens
tagcgcaggtcacat

SEQ ID NO: 972193 - DNA, 15 bp, Homo sapiens
agcgcaggtcacata

SEQ ID NO: 972194 - DNA, 15 bp, Homo sapiens
gcgcaggtcacatag

SEQ ID NO: 972195 - DNA, 15 bp, Homo sapiens
cgcaggtcacatagg

SEQ ID NO: 972196 - DNA, 15 bp, Homo sapiens
gcaggtcacataggc

SEQ ID NO: 972197 - DNA, 15 bp, Homo sapiens
caggtcacataggct

SEQ ID NO: 972198 - DNA, 15 bp, Homo sapiens
aggtcacataggctc

SEQ ID NO: 972199 - DNA, 15 bp, Homo sapiens
ggtcacataggctct

SEQ ID NO: 972200 - DNA, 15 bp, Homo sapiens
gtcacataggctctt

SEQ ID NO: 972201 - DNA, 15 bp, Homo sapiens
tcacataggctcttt

SEQ ID NO: 972202 - DNA, 15 bp, Homo sapiens
cacataggctctttc

SEQ ID NO: 972203 - DNA, 15 bp, Homo sapiens
acataggctctttcc

SEQ ID NO: 972204 - DNA, 15 bp, Homo sapiens
cataggctctttcct

SEQ ID NO: 972205 - DNA, 15 bp, Homo sapiens
ataggctctttcctt

SEQ ID NO: 972206 - DNA, 15 bp, Homo sapiens
taggctctttccttt

SEQ ID NO: 972207 - DNA, 15 bp, Homo sapiens
aggctctttcctttt

SEQ ID NO: 972208 - DNA, 15 bp, Homo sapiens
ggctctttccttttt

SEQ ID NO: 972209 - DNA, 15 bp, Homo sapiens
gctctttcctttttt

SEQ ID NO: 972210 - DNA, 15 bp, Homo sapiens
ctctttccttttttt

SEQ ID NO: 972211 - DNA, 15 bp, Homo sapiens
tctttcctttttttg

SEQ ID NO: 972212 - DNA, 15 bp, Homo sapiens
ctttcctttttttgt

SEQ ID NO: 972213 - DNA, 15 bp, Homo sapiens
tttcctttttttgtt

SEQ ID NO: 972214 - DNA, 15 bp, Homo sapiens
ttcctttttttgttt

SEQ ID NO: 972215 - DNA, 15 bp, Homo sapiens
tcctttttttgtttt

SEQ ID NO: 972216 - DNA, 15 bp, Homo sapiens
cctttttttgttttt

SEQ ID NO: 972217 - DNA, 15 bp, Homo sapiens
ctttttttgtttttc

SEQ ID NO: 972218 - DNA, 15 bp, Homo sapiens
tttttttgtttttct

SEQ ID NO: 972219 - DNA, 15 bp, Homo sapiens
ttttttgtttttcta

SEQ ID NO: 972220 - DNA, 15 bp, Homo sapiens
tttttgtttttctaa

SEQ ID NO: 972221 - DNA, 15 bp, Homo sapiens
ttttgtttttctaat

SEQ ID NO: 972222 - DNA, 15 bp, Homo sapiens
tttgtttttctaata

SEQ ID NO: 972223 - DNA, 15 bp, Homo sapiens
ttgtttttctaatag

SEQ ID NO: 972224 - DNA, 15 bp, Homo sapiens
tgtttttctaataga

SEQ ID NO: 972225 - DNA, 15 bp, Homo sapiens
gtttttctaatagac

SEQ ID NO: 972226 - DNA, 15 bp, Homo sapiens
tttttctaatagaca

SEQ ID NO: 972227 - DNA, 15 bp, Homo sapiens
ttttctaatagacat

SEQ ID NO: 972228 - DNA, 15 bp, Homo sapiens
tttctaatagacatg

SEQ ID NO: 972229 - DNA, 15 bp, Homo sapiens
ttctaatagacatgg

SEQ ID NO: 972230 - DNA, 15 bp, Homo sapiens
tctaatagacatggg

SEQ ID NO: 972231 - DNA, 15 bp, Homo sapiens
ctaatagacatgggg

SEQ ID NO: 972232 - DNA, 15 bp, Homo sapiens
taatagacatggggt

SEQ ID NO: 972233 - DNA, 15 bp, Homo sapiens
aatagacatggggtc

SEQ ID NO: 972234 - DNA, 15 bp, Homo sapiens
atagacatggggtct

SEQ ID NO: 972235 - DNA, 15 bp, Homo sapiens
tagacatggggtctc

SEQ ID NO: 972236 - DNA, 15 bp, Homo sapiens
agacatggggtctcc

SEQ ID NO: 972237 - DNA, 15 bp, Homo sapiens
gacatggggtctcct

SEQ ID NO: 972238 - DNA, 15 bp, Homo sapiens
acatggggtctcctt

SEQ ID NO: 972239 - DNA, 15 bp, Homo sapiens
catggggtctcctta

SEQ ID NO: 972240 - DNA, 15 bp, Homo sapiens
atggggtctccttac

SEQ ID NO: 972241 - DNA, 15 bp, Homo sapiens
tggggtctccttacg

SEQ ID NO: 972242 - DNA, 15 bp, Homo sapiens
ggggtctccttacgt

SEQ ID NO: 972243 - DNA, 15 bp, Homo sapiens
gggtctccttacgtt

SEQ ID NO: 972244 - DNA, 15 bp, Homo sapiens
ggtctccttacgttg

SEQ ID NO: 972245 - DNA, 15 bp, Homo sapiens
gtctccttacgttgc

SEQ ID NO: 972246 - DNA, 15 bp, Homo sapiens
tctccttacgttgcc

SEQ ID NO: 972247 - DNA, 15 bp, Homo sapiens
ctccttacgttgccc

SEQ ID NO: 972248 - DNA, 15 bp, Homo sapiens
tccttacgttgccca

SEQ ID NO: 972249 - DNA, 15 bp, Homo sapiens
ccttacgttgcccag

SEQ ID NO: 972250 - DNA, 15 bp, Homo sapiens
cttacgttgcccagg

SEQ ID NO: 972251 - DNA, 15 bp, Homo sapiens
ttacgttgcccaggc

SEQ ID NO: 972252 - DNA, 15 bp, Homo sapiens
tacgttgcccaggct

SEQ ID NO: 972253 - DNA, 15 bp, Homo sapiens
acgttgcccaggctg

SEQ ID NO: 972254 - DNA, 15 bp, Homo sapiens
cgttgcccaggctgg

SEQ ID NO: 972255 - DNA, 15 bp, Homo sapiens
gttgcccaggctggt

SEQ ID NO: 972256 - DNA, 15 bp, Homo sapiens
ttgcccaggctggtt

SEQ ID NO: 972257 - DNA, 15 bp, Homo sapiens
tgcccaggctggttt

SEQ ID NO: 972258 - DNA, 15 bp, Homo sapiens
gcccaggctggtttc

SEQ ID NO: 972259 - DNA, 15 bp, Homo sapiens
cccaggctggtttcg

SEQ ID NO: 972260 - DNA, 15 bp, Homo sapiens
ccaggctggtttcga

SEQ ID NO: 972261 - DNA, 15 bp, Homo sapiens
caggctggtttcgaa

SEQ ID NO: 972262 - DNA, 15 bp, Homo sapiens
aggctggtttcgaac

SEQ ID NO: 972263 - DNA, 15 bp, Homo sapiens
ggctggtttcgaact

SEQ ID NO: 972264 - DNA, 15 bp, Homo sapiens
gctggtttcgaactc

SEQ ID NO: 972265 - DNA, 15 bp, Homo sapiens
ctggtttcgaactct

SEQ ID NO: 972266 - DNA, 15 bp, Homo sapiens
tggtttcgaactctt

SEQ ID NO: 972267 - DNA, 15 bp, Homo sapiens
ggtttcgaactcttg

SEQ ID NO: 972268 - DNA, 15 bp, Homo sapiens
gtttcgaactcttgg

SEQ ID NO: 972269 - DNA, 15 bp, Homo sapiens
tttcgaactcttggg

SEQ ID NO: 972270 - DNA, 15 bp, Homo sapiens
ttcgaactcttgggc

SEQ ID NO: 972271 - DNA, 15 bp, Homo sapiens
tcgaactcttgggct

SEQ ID NO: 972272 - DNA, 15 bp, Homo sapiens
cgaactcttgggctc

SEQ ID NO: 972273 - DNA, 15 bp, Homo sapiens
gaactcttgggctca

SEQ ID NO: 972274 - DNA, 15 bp, Homo sapiens
aactcttgggctcaa

SEQ ID NO: 972275 - DNA, 15 bp, Homo sapiens
actcttgggctcaag

SEQ ID NO: 972276 - DNA, 15 bp, Homo sapiens
ctcttgggctcaagg

SEQ ID NO: 972277 - DNA, 15 bp, Homo sapiens
tcttgggctcaaggg

SEQ ID NO: 972278 - DNA, 15 bp, Homo sapiens
cttgggctcaaggga

SEQ ID NO: 972279 - DNA, 15 bp, Homo sapiens
ttgggctcaagggat

SEQ ID NO: 972280 - DNA, 15 bp, Homo sapiens
tgggctcaagggatc

SEQ ID NO: 972281 - DNA, 15 bp, Homo sapiens
gggctcaagggatct

SEQ ID NO: 972282 - DNA, 15 bp, Homo sapiens
ggctcaagggatctt

SEQ ID NO: 972283 - DNA, 15 bp, Homo sapiens
gctcaagggatcttc

SEQ ID NO: 972284 - DNA, 15 bp, Homo sapiens
ctcaagggatcttct

SEQ ID NO: 972285 - DNA, 15 bp, Homo sapiens
tcaagggatcttctc

SEQ ID NO: 972286 - DNA, 15 bp, Homo sapiens
caagggatcttctca

SEQ ID NO: 972287 - DNA, 15 bp, Homo sapiens
aagggatcttctcac

SEQ ID NO: 972288 - DNA, 15 bp, Homo sapiens
agggatcttctcact

SEQ ID NO: 972289 - DNA, 15 bp, Homo sapiens
gggatcttctcactt

SEQ ID NO: 972290 - DNA, 15 bp, Homo sapiens
ggatcttctcacttc

SEQ ID NO: 972291 - DNA, 15 bp, Homo sapiens
gatcttctcacttca

SEQ ID NO: 972292 - DNA, 15 bp, Homo sapiens
atcttctcacttcac

SEQ ID NO: 972293 - DNA, 15 bp, Homo sapiens
tcttctcacttcacc

SEQ ID NO: 972294 - DNA, 15 bp, Homo sapiens
cttctcacttcaccc

SEQ ID NO: 972295 - DNA, 15 bp, Homo sapiens
ttctcacttcaccct

SEQ ID NO: 972296 - DNA, 15 bp, Homo sapiens
tctcacttcaccctc

SEQ ID NO: 972297 - DNA, 15 bp, Homo sapiens
ctcacttcaccctcc

SEQ ID NO: 972298 - DNA, 15 bp, Homo sapiens
tcacttcaccctccc

SEQ ID NO: 972299 - DNA, 15 bp, Homo sapiens
cacttcaccctccca

SEQ ID NO: 972300 - DNA, 15 bp, Homo sapiens
acttcaccctcccaa

SEQ ID NO: 972301 - DNA, 15 bp, Homo sapiens
cttcaccctcccaaa

SEQ ID NO: 972302 - DNA, 15 bp, Homo sapiens
ttcaccctcccaaag

SEQ ID NO: 972303 - DNA, 15 bp, Homo sapiens
tcaccctcccaaagt

SEQ ID NO: 972304 - DNA, 15 bp, Homo sapiens
caccctcccaaagtg

SEQ ID NO: 972305 - DNA, 15 bp, Homo sapiens
accctcccaaagtgc

SEQ ID NO: 972306 - DNA, 15 bp, Homo sapiens
ccctcccaaagtgct

SEQ ID NO: 972307 - DNA, 15 bp, Homo sapiens
cctcccaaagtgctg

SEQ ID NO: 972308 - DNA, 15 bp, Homo sapiens
ctcccaaagtgctgg

SEQ ID NO: 972309 - DNA, 15 bp, Homo sapiens
tcccaaagtgctggg

SEQ ID NO: 972310 - DNA, 15 bp, Homo sapiens
cccaaagtgctggga

SEQ ID NO: 972311 - DNA, 15 bp, Homo sapiens
ccaaagtgctgggat

SEQ ID NO: 972312 - DNA, 15 bp, Homo sapiens
caaagtgctgggatt

SEQ ID NO: 972313 - DNA, 15 bp, Homo sapiens
aaagtgctgggatta

SEQ ID NO: 972314 - DNA, 15 bp, Homo sapiens
aagtgctgggattat

SEQ ID NO: 972315 - DNA, 15 bp, Homo sapiens
agtgctgggattata

SEQ ID NO: 972316 - DNA, 15 bp, Homo sapiens
gtgctgggattatag

SEQ ID NO: 972317 - DNA, 15 bp, Homo sapiens
tgctgggattatagg

SEQ ID NO: 972318 - DNA, 15 bp, Homo sapiens
gctgggattataggt

SEQ ID NO: 972319 - DNA, 15 bp, Homo sapiens
ctgggattataggtg

SEQ ID NO: 972320 - DNA, 15 bp, Homo sapiens
tgggattataggtgt

SEQ ID NO: 972321 - DNA, 15 bp, Homo sapiens
gggattataggtgtg

SEQ ID NO: 972322 - DNA, 15 bp, Homo sapiens
ggattataggtgtga

SEQ ID NO: 972323 - DNA, 15 bp, Homo sapiens
gattataggtgtgag

SEQ ID NO: 972324 - DNA, 15 bp, Homo sapiens
attataggtgtgagc

SEQ ID NO: 972325 - DNA, 15 bp, Homo sapiens
ttataggtgtgagcc

SEQ ID NO: 972326 - DNA, 15 bp, Homo sapiens
tataggtgtgagcca

SEQ ID NO: 972327 - DNA, 15 bp, Homo sapiens
ataggtgtgagccac

SEQ ID NO: 972328 - DNA, 15 bp, Homo sapiens
taggtgtgagccact

SEQ ID NO: 972329 - DNA, 15 bp, Homo sapiens
gtgtgagccactgca

SEQ ID NO: 972330 - DNA, 15 bp, Homo sapiens
tgtgagccactgcaa

SEQ ID NO: 972331 - DNA, 15 bp, Homo sapiens
gtgagccactgcaaa

SEQ ID NO: 972332 - DNA, 15 bp, Homo sapiens
tgagccactgcaaat

SEQ ID NO: 972333 - DNA, 15 bp, Homo sapiens
gagccactgcaaatg

SEQ ID NO: 972334 - DNA, 15 bp, Homo sapiens
agccactgcaaatgg

SEQ ID NO: 972335 - DNA, 15 bp, Homo sapiens
gccactgcaaatggc

SEQ ID NO: 972336 - DNA, 15 bp, Homo sapiens
ccactgcaaatggcc

SEQ ID NO: 972337 - DNA, 15 bp, Homo sapiens
cactgcaaatggcca

SEQ ID NO: 972338 - DNA, 15 bp, Homo sapiens
actgcaaatggccag

SEQ ID NO: 972339 - DNA, 15 bp, Homo sapiens
ctgcaaatggccagc

SEQ ID NO: 972340 - DNA, 15 bp, Homo sapiens
tgcaaatggccagca

SEQ ID NO: 972341 - DNA, 15 bp, Homo sapiens
gcaaatggccagcag

SEQ ID NO: 972342 - DNA, 15 bp, Homo sapiens
caaatggccagcagg

SEQ ID NO: 972343 - DNA, 15 bp, Homo sapiens
aaatggccagcagga

SEQ ID NO: 972344 - DNA, 15 bp, Homo sapiens
aatggccagcaggaa

SEQ ID NO: 972345 - DNA, 15 bp, Homo sapiens
atggccagcaggaac

SEQ ID NO: 972346 - DNA, 15 bp, Homo sapiens
tggccagcaggaacc

SEQ ID NO: 972347 - DNA, 15 bp, Homo sapiens
ggccagcaggaacct

SEQ ID NO: 972348 - DNA, 15 bp, Homo sapiens
gccagcaggaacctg

SEQ ID NO: 972349 - DNA, 15 bp, Homo sapiens
ccagcaggaacctgg

SEQ ID NO: 972350 - DNA, 15 bp, Homo sapiens
cagcaggaacctggt

SEQ ID NO: 972351 - DNA, 15 bp, Homo sapiens
agcaggaacctggtg

SEQ ID NO: 972352 - DNA, 15 bp, Homo sapiens
gcaggaacctggtgg

SEQ ID NO: 972353 - DNA, 15 bp, Homo sapiens
caggaacctggtgga

SEQ ID NO: 972354 - DNA, 15 bp, Homo sapiens
aggaacctggtggac

SEQ ID NO: 972355 - DNA, 15 bp, Homo sapiens
ggaacctggtggact

SEQ ID NO: 972356 - DNA, 15 bp, Homo sapiens
gaacctggtggactt

SEQ ID NO: 972357 - DNA, 15 bp, Homo sapiens
aacctggtggacttt

SEQ ID NO: 972358 - DNA, 15 bp, Homo sapiens
acctggtggacttta

SEQ ID NO: 972359 - DNA, 15 bp, Homo sapiens
cctggtggactttaa

SEQ ID NO: 972360 - DNA, 15 bp, Homo sapiens
ctggtggactttaaa

SEQ ID NO: 972361 - DNA, 15 bp, Homo sapiens
tggtggactttaaac

SEQ ID NO: 972362 - DNA, 15 bp, Homo sapiens
ggtggactttaaact

SEQ ID NO: 972363 - DNA, 15 bp, Homo sapiens
gtggactttaaactt

SEQ ID NO: 972364 - DNA, 15 bp, Homo sapiens
tggactttaaacttt

SEQ ID NO: 972365 - DNA, 15 bp, Homo sapiens
ggactttaaactttg

SEQ ID NO: 972366 - DNA, 15 bp, Homo sapiens
gactttaaactttgg

SEQ ID NO: 972367 - DNA, 15 bp, Homo sapiens
actttaaactttggg

SEQ ID NO: 972368 - DNA, 15 bp, Homo sapiens
ctttaaactttgggc

SEQ ID NO: 972369 - DNA, 15 bp, Homo sapiens
tttaaactttgggct

SEQ ID NO: 972370 - DNA, 15 bp, Homo sapiens
ttaaactttgggctg

SEQ ID NO: 972371 - DNA, 15 bp, Homo sapiens
taaactttgggctgg

SEQ ID NO: 972372 - DNA, 15 bp, Homo sapiens
aaactttgggctgga

SEQ ID NO: 972373 - DNA, 15 bp, Homo sapiens
aactttgggctggac

SEQ ID NO: 972374 - DNA, 15 bp, Homo sapiens
actttgggctggact

SEQ ID NO: 972375 - DNA, 15 bp, Homo sapiens
ctttgggctggactg

SEQ ID NO: 972376 - DNA, 15 bp, Homo sapiens
tttgggctggactgg

SEQ ID NO: 972377 - DNA, 15 bp, Homo sapiens
ttgggctggactggg

SEQ ID NO: 972378 - DNA, 15 bp, Homo sapiens
tgggctggactgggg

SEQ ID NO: 972379 - DNA, 15 bp, Homo sapiens
gggctggactgggga

SEQ ID NO: 972380 - DNA, 15 bp, Homo sapiens
ggctggactggggaa

SEQ ID NO: 972381 - DNA, 15 bp, Homo sapiens
gctggactggggaac

SEQ ID NO: 972382 - DNA, 15 bp, Homo sapiens
ctggactggggaaca

SEQ ID NO: 972383 - DNA, 15 bp, Homo sapiens
tggactggggaacac

SEQ ID NO: 972384 - DNA, 15 bp, Homo sapiens
ggactggggaacaca

SEQ ID NO: 972385 - DNA, 15 bp, Homo sapiens
gactggggaacacag

SEQ ID NO: 972386 - DNA, 15 bp, Homo sapiens
actggggaacacaga

SEQ ID NO: 972387 - DNA, 15 bp, Homo sapiens
ctggggaacacagaa

SEQ ID NO: 972388 - DNA, 15 bp, Homo sapiens
tggggaacacagaaa

SEQ ID NO: 972389 - DNA, 15 bp, Homo sapiens
ggggaacacagaaag

SEQ ID NO: 972390 - DNA, 15 bp, Homo sapiens
gggaacacagaaagc

SEQ ID NO: 972391 - DNA, 15 bp, Homo sapiens
ggaacacagaaagca

SEQ ID NO: 972392 - DNA, 15 bp, Homo sapiens
gaacacagaaagcat

SEQ ID NO: 972393 - DNA, 15 bp, Homo sapiens
aacacagaaagcata

SEQ ID NO: 972394 - DNA, 15 bp, Homo sapiens
acacagaaagcatag

SEQ ID NO: 972395 - DNA, 15 bp, Homo sapiens
cacagaaagcatagg

SEQ ID NO: 972396 - DNA, 15 bp, Homo sapiens
acagaaagcataggg

SEQ ID NO: 972397 - DNA, 15 bp, Homo sapiens
cagaaagcataggga

SEQ ID NO: 972398 - DNA, 15 bp, Homo sapiens
agaaagcatagggag

SEQ ID NO: 972399 - DNA, 15 bp, Homo sapiens
gaaagcatagggaga

SEQ ID NO: 972400 - DNA, 15 bp, Homo sapiens
aaagcatagggagat

SEQ ID NO: 972401 - DNA, 15 bp, Homo sapiens
aagcatagggagatg

SEQ ID NO: 972402 - DNA, 15 bp, Homo sapiens
agcatagggagatga

SEQ ID NO: 972403 - DNA, 15 bp, Homo sapiens
gcatagggagatgac

SEQ ID NO: 972404 - DNA, 15 bp, Homo sapiens
catagggagatgacg

SEQ ID NO: 972405 - DNA, 15 bp, Homo sapiens
atagggagatgacgg

SEQ ID NO: 972406 - DNA, 15 bp, Homo sapiens
tagggagatgacggt

SEQ ID NO: 972407 - DNA, 15 bp, Homo sapiens
agggagatgacggtg

SEQ ID NO: 972408 - DNA, 15 bp, Homo sapiens
gggagatgacggtgg

SEQ ID NO: 972409 - DNA, 15 bp, Homo sapiens
ggagatgacggtggt

SEQ ID NO: 972410 - DNA, 15 bp, Homo sapiens
gagatgacggtggtc

SEQ ID NO: 972411 - DNA, 15 bp, Homo sapiens
agatgacggtggtca

SEQ ID NO: 972412 - DNA, 15 bp, Homo sapiens
gatgacggtggtcac

SEQ ID NO: 972413 - DNA, 15 bp, Homo sapiens
atgacggtggtcaca

SEQ ID NO: 972414 - DNA, 15 bp, Homo sapiens
tgacggtggtcacag

SEQ ID NO: 972415 - DNA, 15 bp, Homo sapiens
gacggtggtcacaga

SEQ ID NO: 972416 - DNA, 15 bp, Homo sapiens
acggtggtcacagag

SEQ ID NO: 972417 - DNA, 15 bp, Homo sapiens
cggtggtcacagagg

SEQ ID NO: 972418 - DNA, 15 bp, Homo sapiens
ggtggtcacagaggg

SEQ ID NO: 972419 - DNA, 15 bp, Homo sapiens
gtggtcacagagggg

SEQ ID NO: 972420 - DNA, 15 bp, Homo sapiens
tggtcacagaggggg

SEQ ID NO: 972421 - DNA, 15 bp, Homo sapiens
ggtcacagaggggga

SEQ ID NO: 972422 - DNA, 15 bp, Homo sapiens
gtcacagagggggac

SEQ ID NO: 972423 - DNA, 15 bp, Homo sapiens
tcacagagggggaca

SEQ ID NO: 972424 - DNA, 15 bp, Homo sapiens
cacagagggggacag

SEQ ID NO: 972425 - DNA, 15 bp, Homo sapiens
acagagggggacagt

SEQ ID NO: 972426 - DNA, 15 bp, Homo sapiens
cagagggggacagtc

SEQ ID NO: 972427 - DNA, 15 bp, Homo sapiens
agagggggacagtca

SEQ ID NO: 972428 - DNA, 15 bp, Homo sapiens
gagggggacagtcag

SEQ ID NO: 972429 - DNA, 15 bp, Homo sapiens
agggggacagtcagg

SEQ ID NO: 972430 - DNA, 15 bp, Homo sapiens
gggggacagtcaggc

SEQ ID NO: 972431 - DNA, 15 bp, Homo sapiens
ggggacagtcaggct

SEQ ID NO: 972432 - DNA, 15 bp, Homo sapiens
gggacagtcaggctg

SEQ ID NO: 972433 - DNA, 15 bp, Homo sapiens
ggacagtcaggctgg

SEQ ID NO: 972434 - DNA, 15 bp, Homo sapiens
gacagtcaggctggc

SEQ ID NO: 972435 - DNA, 15 bp, Homo sapiens
acagtcaggctggcc

SEQ ID NO: 972436 - DNA, 15 bp, Homo sapiens
cagtcaggctggcca

SEQ ID NO: 972437 - DNA, 15 bp, Homo sapiens
agtcaggctggccag

SEQ ID NO: 972438 - DNA, 15 bp, Homo sapiens
gtcaggctggccagg

SEQ ID NO: 972439 - DNA, 15 bp, Homo sapiens
tcaggctggccaggg

SEQ ID NO: 972440 - DNA, 15 bp, Homo sapiens
caggctggccaggga

SEQ ID NO: 972441 - DNA, 15 bp, Homo sapiens
aggctggccagggat

SEQ ID NO: 972442 - DNA, 15 bp, Homo sapiens
ggctggccagggatc

SEQ ID NO: 972443 - DNA, 15 bp, Homo sapiens
gctggccagggatca

SEQ ID NO: 972444 - DNA, 15 bp, Homo sapiens
ctggccagggatcag

SEQ ID NO: 972445 - DNA, 15 bp, Homo sapiens
tggccagggatcaga

SEQ ID NO: 972446 - DNA, 15 bp, Homo sapiens
ggccagggatcagat

SEQ ID NO: 972447 - DNA, 15 bp, Homo sapiens
gccagggatcagatc

SEQ ID NO: 972448 - DNA, 15 bp, Homo sapiens
ccagggatcagatct

SEQ ID NO: 972449 - DNA, 15 bp, Homo sapiens
cagggatcagatctc

SEQ ID NO: 972450 - DNA, 15 bp, Homo sapiens
agggatcagatctcc

SEQ ID NO: 972451 - DNA, 15 bp, Homo sapiens
gggatcagatctcca

SEQ ID NO: 972452 - DNA, 15 bp, Homo sapiens
ggatcagatctccag

SEQ ID NO: 972453 - DNA, 15 bp, Homo sapiens
gatcagatctccagg

SEQ ID NO: 972454 - DNA, 15 bp, Homo sapiens
atcagatctccaggt

SEQ ID NO: 972455 - DNA, 15 bp, Homo sapiens
tcagatctccaggtg

SEQ ID NO: 972456 - DNA, 15 bp, Homo sapiens
cagatctccaggtga

SEQ ID NO: 972457 - DNA, 15 bp, Homo sapiens
agatctccaggtgaa

SEQ ID NO: 972458 - DNA, 15 bp, Homo sapiens
gatctccaggtgaag

SEQ ID NO: 972459 - DNA, 15 bp, Homo sapiens
atctccaggtgaagc

SEQ ID NO: 972460 - DNA, 15 bp, Homo sapiens
tctccaggtgaagcc

SEQ ID NO: 972461 - DNA, 15 bp, Homo sapiens
ctccaggtgaagccc

SEQ ID NO: 972462 - DNA, 15 bp, Homo sapiens
tccaggtgaagccca

SEQ ID NO: 972463 - DNA, 15 bp, Homo sapiens
ccaggtgaagcccag

SEQ ID NO: 972464 - DNA, 15 bp, Homo sapiens
caggtgaagcccagg

SEQ ID NO: 972465 - DNA, 15 bp, Homo sapiens
aggtgaagcccaggg

SEQ ID NO: 972466 - DNA, 15 bp, Homo sapiens
ggtgaagcccagggt

SEQ ID NO: 972467 - DNA, 15 bp, Homo sapiens
gtgaagcccagggtc

SEQ ID NO: 972468 - DNA, 15 bp, Homo sapiens
tgaagcccagggtct

SEQ ID NO: 972469 - DNA, 15 bp, Homo sapiens
gaagcccagggtctg

SEQ ID NO: 972470 - DNA, 15 bp, Homo sapiens
aagcccagggtctgg

SEQ ID NO: 972471 - DNA, 15 bp, Homo sapiens
agcccagggtctggc

SEQ ID NO: 972472 - DNA, 15 bp, Homo sapiens
gcccagggtctggcg

SEQ ID NO: 972473 - DNA, 15 bp, Homo sapiens
cccagggtctggcgg

SEQ ID NO: 972474 - DNA, 15 bp, Homo sapiens
ccagggtctggcggg

SEQ ID NO: 972475 - DNA, 15 bp, Homo sapiens
cagggtctggcgggg

SEQ ID NO: 972476 - DNA, 15 bp, Homo sapiens
agggtctggcggggg

SEQ ID NO: 972477 - DNA, 15 bp, Homo sapiens
gggtctggcgggggt

SEQ ID NO: 972478 - DNA, 15 bp, Homo sapiens
ggtctggcgggggtc

SEQ ID NO: 972479 - DNA, 15 bp, Homo sapiens
gtctggcgggggtcc

SEQ ID NO: 972480 - DNA, 15 bp, Homo sapiens
tctggcgggggtcca

SEQ ID NO: 972481 - DNA, 15 bp, Homo sapiens
ctggcgggggtccag

SEQ ID NO: 972482 - DNA, 15 bp, Homo sapiens
tggcgggggtccagg

SEQ ID NO: 972483 - DNA, 15 bp, Homo sapiens
ggcgggggtccaggt

SEQ ID NO: 972484 - DNA, 15 bp, Homo sapiens
gcgggggtccaggtg

SEQ ID NO: 972485 - DNA, 15 bp, Homo sapiens
cgggggtccaggtgg

SEQ ID NO: 972486 - DNA, 15 bp, Homo sapiens
gggggtccaggtggc

SEQ ID NO: 972487 - DNA, 15 bp, Homo sapiens
ggggtccaggtggcc

SEQ ID NO: 972488 - DNA, 15 bp, Homo sapiens
gggtccaggtggcca

SEQ ID NO: 972489 - DNA, 15 bp, Homo sapiens
ggtccaggtggccac

SEQ ID NO: 972490 - DNA, 15 bp, Homo sapiens
gtccaggtggccact

SEQ ID NO: 972491 - DNA, 15 bp, Homo sapiens
tccaggtggccactt

SEQ ID NO: 972492 - DNA, 15 bp, Homo sapiens
ccaggtggccactta

SEQ ID NO: 972493 - DNA, 15 bp, Homo sapiens
caggtggccacttat

SEQ ID NO: 972494 - DNA, 15 bp, Homo sapiens
aggtggccacttatg

SEQ ID NO: 972495 - DNA, 15 bp, Homo sapiens
ggtggccacttatgc

SEQ ID NO: 972496 - DNA, 15 bp, Homo sapiens
gtggccacttatgct

SEQ ID NO: 972497 - DNA, 15 bp, Homo sapiens
tggccacttatgcta

SEQ ID NO: 972498 - DNA, 15 bp, Homo sapiens
ggccacttatgctat

SEQ ID NO: 972499 - DNA, 15 bp, Homo sapiens
gccacttatgctatc

SEQ ID NO: 972500 - DNA, 15 bp, Homo sapiens
ccacttatgctatct

SEQ ID NO: 972501 - DNA, 15 bp, Homo sapiens
cacttatgctatctt

SEQ ID NO: 972502 - DNA, 15 bp, Homo sapiens
acttatgctatcttt

SEQ ID NO: 972503 - DNA, 15 bp, Homo sapiens
cttatgctatctttg

SEQ ID NO: 972504 - DNA, 15 bp, Homo sapiens
ttatgctatctttga

SEQ ID NO: 972505 - DNA, 15 bp, Homo sapiens
tatgctatctttgag

SEQ ID NO: 972506 - DNA, 15 bp, Homo sapiens
atgctatctttgaga

SEQ ID NO: 972507 - DNA, 15 bp, Homo sapiens
tgctatctttgagat

SEQ ID NO: 972508 - DNA, 15 bp, Homo sapiens
gctatctttgagata

SEQ ID NO: 972509 - DNA, 15 bp, Homo sapiens
ctatctttgagatag

SEQ ID NO: 972510 - DNA, 15 bp, Homo sapiens
tatctttgagatagg

SEQ ID NO: 972511 - DNA, 15 bp, Homo sapiens
atctttgagataggg

SEQ ID NO: 972512 - DNA, 15 bp, Homo sapiens
tctttgagataggga

SEQ ID NO: 972513 - DNA, 15 bp, Homo sapiens
ctttgagatagggac

SEQ ID NO: 972514 - DNA, 15 bp, Homo sapiens
tttgagatagggaca

SEQ ID NO: 972515 - DNA, 15 bp, Homo sapiens
ttgagatagggacag

SEQ ID NO: 972516 - DNA, 15 bp, Homo sapiens
tgagatagggacaga

SEQ ID NO: 972517 - DNA, 15 bp, Homo sapiens
gagatagggacagaa

SEQ ID NO: 972518 - DNA, 15 bp, Homo sapiens
agatagggacagaat

SEQ ID NO: 972519 - DNA, 15 bp, Homo sapiens
gatagggacagaata

SEQ ID NO: 972520 - DNA, 15 bp, Homo sapiens
atagggacagaatag

SEQ ID NO: 972521 - DNA, 15 bp, Homo sapiens
tagggacagaatagg

SEQ ID NO: 972522 - DNA, 15 bp, Homo sapiens
agggacagaataggc

SEQ ID NO: 972523 - DNA, 15 bp, Homo sapiens
gggacagaataggct

SEQ ID NO: 972524 - DNA, 15 bp, Homo sapiens
ggacagaataggctc

SEQ ID NO: 972525 - DNA, 15 bp, Homo sapiens
gacagaataggctca

SEQ ID NO: 972526 - DNA, 15 bp, Homo sapiens
acagaataggctcag

SEQ ID NO: 972527 - DNA, 15 bp, Homo sapiens
cagaataggctcagg

SEQ ID NO: 972528 - DNA, 15 bp, Homo sapiens
agaataggctcaggg

SEQ ID NO: 972529 - DNA, 15 bp, Homo sapiens
gaataggctcagggg

SEQ ID NO: 972530 - DNA, 15 bp, Homo sapiens
aataggctcagggga

SEQ ID NO: 972531 - DNA, 15 bp, Homo sapiens
ataggctcaggggac

SEQ ID NO: 972532 - DNA, 15 bp, Homo sapiens
taggctcaggggaca

SEQ ID NO: 972533 - DNA, 15 bp, Homo sapiens
aggctcaggggacag

SEQ ID NO: 972534 - DNA, 15 bp, Homo sapiens
ggctcaggggacagc

SEQ ID NO: 972535 - DNA, 15 bp, Homo sapiens
gctcaggggacagcc

SEQ ID NO: 972536 - DNA, 15 bp, Homo sapiens
ctcaggggacagccc

SEQ ID NO: 972537 - DNA, 15 bp, Homo sapiens
tcaggggacagcccc

SEQ ID NO: 972538 - DNA, 15 bp, Homo sapiens
caggggacagcccca

SEQ ID NO: 972539 - DNA, 15 bp, Homo sapiens
aggggacagccccac

SEQ ID NO: 972540 - DNA, 15 bp, Homo sapiens
ggggacagccccacc

SEQ ID NO: 972541 - DNA, 15 bp, Homo sapiens
gggacagccccaccc

SEQ ID NO: 972542 - DNA, 15 bp, Homo sapiens
ggacagccccaccct

SEQ ID NO: 972543 - DNA, 15 bp, Homo sapiens
gacagccccaccctt

SEQ ID NO: 972544 - DNA, 15 bp, Homo sapiens
acagccccacccttg

SEQ ID NO: 972545 - DNA, 15 bp, Homo sapiens
cagccccacccttga

SEQ ID NO: 972546 - DNA, 15 bp, Homo sapiens
agccccacccttgag

SEQ ID NO: 972547 - DNA, 15 bp, Homo sapiens
gccccacccttgagt

SEQ ID NO: 972548 - DNA, 15 bp, Homo sapiens
ccccacccttgagtt

SEQ ID NO: 972549 - DNA, 15 bp, Homo sapiens
cccacccttgagttc

SEQ ID NO: 972550 - DNA, 15 bp, Homo sapiens
ccacccttgagttcc

SEQ ID NO: 972551 - DNA, 15 bp, Homo sapiens
cacccttgagttcca

SEQ ID NO: 972552 - DNA, 15 bp, Homo sapiens
acccttgagttccag

SEQ ID NO: 972553 - DNA, 15 bp, Homo sapiens
cccttgagttccaga

SEQ ID NO: 972554 - DNA, 15 bp, Homo sapiens
ccttgagttccagac

SEQ ID NO: 972555 - DNA, 15 bp, Homo sapiens
cttgagttccagacc

SEQ ID NO: 972556 - DNA, 15 bp, Homo sapiens
ttgagttccagacct

SEQ ID NO: 972557 - DNA, 15 bp, Homo sapiens
tgagttccagacctc

SEQ ID NO: 972558 - DNA, 15 bp, Homo sapiens
gagttccagacctca

SEQ ID NO: 972559 - DNA, 15 bp, Homo sapiens
agttccagacctcag

SEQ ID NO: 972560 - DNA, 15 bp, Homo sapiens
gttccagacctcaga

SEQ ID NO: 972561 - DNA, 15 bp, Homo sapiens
ttccagacctcagag

SEQ ID NO: 972562 - DNA, 15 bp, Homo sapiens
tccagacctcagaga

SEQ ID NO: 972563 - DNA, 15 bp, Homo sapiens
ccagacctcagagac

SEQ ID NO: 972564 - DNA, 15 bp, Homo sapiens
cagacctcagagact

SEQ ID NO: 972565 - DNA, 15 bp, Homo sapiens
agacctcagagactg

SEQ ID NO: 972566 - DNA, 15 bp, Homo sapiens
gacctcagagactgt

SEQ ID NO: 972567 - DNA, 15 bp, Homo sapiens
acctcagagactgtc

SEQ ID NO: 972568 - DNA, 15 bp, Homo sapiens
cctcagagactgtct

SEQ ID NO: 972569 - DNA, 15 bp, Homo sapiens
ctcagagactgtctt

SEQ ID NO: 972570 - DNA, 15 bp, Homo sapiens
tcagagactgtcttc

SEQ ID NO: 972571 - DNA, 15 bp, Homo sapiens
cagagactgtcttcc

SEQ ID NO: 972572 - DNA, 15 bp, Homo sapiens
agagactgtcttcct

SEQ ID NO: 972573 - DNA, 15 bp, Homo sapiens
gagactgtcttcctt

SEQ ID NO: 972574 - DNA, 15 bp, Homo sapiens
agactgtcttccttc

SEQ ID NO: 972575 - DNA, 15 bp, Homo sapiens
gactgtcttccttcc

SEQ ID NO: 972576 - DNA, 15 bp, Homo sapiens
actgtcttccttcca

SEQ ID NO: 972577 - DNA, 15 bp, Homo sapiens
ctgtcttccttccac

SEQ ID NO: 972578 - DNA, 15 bp, Homo sapiens
tgtcttccttccacc

SEQ ID NO: 972579 - DNA, 15 bp, Homo sapiens
gtcttccttccacca

SEQ ID NO: 972580 - DNA, 15 bp, Homo sapiens
tcttccttccaccag

SEQ ID NO: 972581 - DNA, 15 bp, Homo sapiens
cttccttccaccagg

SEQ ID NO: 972582 - DNA, 15 bp, Homo sapiens
ttccttccaccaggc

SEQ ID NO: 972583 - DNA, 15 bp, Homo sapiens
tccttccaccaggcc

SEQ ID NO: 972584 - DNA, 15 bp, Homo sapiens
ccttccaccaggccc

SEQ ID NO: 972585 - DNA, 15 bp, Homo sapiens
cttccaccaggcccc

SEQ ID NO: 972586 - DNA, 15 bp, Homo sapiens
ttccaccaggcccca

SEQ ID NO: 972587 - DNA, 15 bp, Homo sapiens
tccaccaggccccat

SEQ ID NO: 972588 - DNA, 15 bp, Homo sapiens
ccaccaggccccatg

SEQ ID NO: 972589 - DNA, 15 bp, Homo sapiens
caccaggccccatgg

SEQ ID NO: 972590 - DNA, 15 bp, Homo sapiens
accaggccccatggg

SEQ ID NO: 972591 - DNA, 15 bp, Homo sapiens
ccaggccccatgggc

SEQ ID NO: 972592 - DNA, 15 bp, Homo sapiens
caggccccatgggca

SEQ ID NO: 972593 - DNA, 15 bp, Homo sapiens
aggccccatgggcag

SEQ ID NO: 972594 - DNA, 15 bp, Homo sapiens
ggccccatgggcagc

SEQ ID NO: 972595 - DNA, 15 bp, Homo sapiens
gccccatgggcagcc

SEQ ID NO: 972596 - DNA, 15 bp, Homo sapiens
ccccatgggcagcca

SEQ ID NO: 972597 - DNA, 15 bp, Homo sapiens
cccatgggcagccac

SEQ ID NO: 972598 - DNA, 15 bp, Homo sapiens
ccatgggcagccact

SEQ ID NO: 972599 - DNA, 15 bp, Homo sapiens
catgggcagccactc

SEQ ID NO: 972600 - DNA, 15 bp, Homo sapiens
atgggcagccactca

SEQ ID NO: 972601 - DNA, 15 bp, Homo sapiens
tgggcagccactcac

SEQ ID NO: 972602 - DNA, 15 bp, Homo sapiens
gggcagccactcacc

SEQ ID NO: 972603 - DNA, 15 bp, Homo sapiens
ggcagccactcaccc

SEQ ID NO: 972604 - DNA, 15 bp, Homo sapiens
gcagccactcaccca

SEQ ID NO: 972605 - DNA, 15 bp, Homo sapiens
cagccactcacccag

SEQ ID NO: 972606 - DNA, 15 bp, Homo sapiens
agccactcacccagc

SEQ ID NO: 972607 - DNA, 15 bp, Homo sapiens
gccactcacccagct

SEQ ID NO: 972608 - DNA, 15 bp, Homo sapiens
ccactcacccagctg

SEQ ID NO: 972609 - DNA, 15 bp, Homo sapiens
cactcacccagctgg

SEQ ID NO: 972610 - DNA, 15 bp, Homo sapiens
actcacccagctggg

SEQ ID NO: 972611 - DNA, 15 bp, Homo sapiens
ctcacccagctgggg

SEQ ID NO: 972612 - DNA, 15 bp, Homo sapiens
tcacccagctggggc

SEQ ID NO: 972613 - DNA, 15 bp, Homo sapiens
cacccagctggggca

SEQ ID NO: 972614 - DNA, 15 bp, Homo sapiens
acccagctggggcag

SEQ ID NO: 972615 - DNA, 15 bp, Homo sapiens
cccagctggggcagg

SEQ ID NO: 972616 - DNA, 15 bp, Homo sapiens
ccagctggggcaggt

SEQ ID NO: 972617 - DNA, 15 bp, Homo sapiens
cagctggggcaggta

SEQ ID NO: 972618 - DNA, 15 bp, Homo sapiens
agctggggcaggtac

SEQ ID NO: 972619 - DNA, 15 bp, Homo sapiens
gctggggcaggtact

SEQ ID NO: 972620 - DNA, 15 bp, Homo sapiens
ctggggcaggtactt

SEQ ID NO: 972621 - DNA, 15 bp, Homo sapiens
tggggcaggtacttc

SEQ ID NO: 972622 - DNA, 15 bp, Homo sapiens
ggggcaggtacttct

SEQ ID NO: 972623 - DNA, 15 bp, Homo sapiens
gggcaggtacttctg

SEQ ID NO: 972624 - DNA, 15 bp, Homo sapiens
ggcaggtacttctgc

SEQ ID NO: 972625 - DNA, 15 bp, Homo sapiens
gcaggtacttctgcc

SEQ ID NO: 972626 - DNA, 15 bp, Homo sapiens
caggtacttctgccg

SEQ ID NO: 972627 - DNA, 15 bp, Homo sapiens
aggtacttctgccgc

SEQ ID NO: 972628 - DNA, 15 bp, Homo sapiens
ggtacttctgccgct

SEQ ID NO: 972629 - DNA, 15 bp, Homo sapiens
gtacttctgccgctg

SEQ ID NO: 972630 - DNA, 15 bp, Homo sapiens
tacttctgccgctgt

SEQ ID NO: 972631 - DNA, 15 bp, Homo sapiens
acttctgccgctgtt

SEQ ID NO: 972632 - DNA, 15 bp, Homo sapiens
cttctgccgctgttc

SEQ ID NO: 972633 - DNA, 15 bp, Homo sapiens
ttctgccgctgttcc

SEQ ID NO: 972634 - DNA, 15 bp, Homo sapiens
tctgccgctgttcct

SEQ ID NO: 972635 - DNA, 15 bp, Homo sapiens
ctgccgctgttcctc

SEQ ID NO: 972636 - DNA, 15 bp, Homo sapiens
tgccgctgttcctcg

SEQ ID NO: 972637 - DNA, 15 bp, Homo sapiens
gccgctgttcctcgc

SEQ ID NO: 972638 - DNA, 15 bp, Homo sapiens
gccgacctgtagcca

SEQ ID NO: 972639 - DNA, 15 bp, Homo sapiens
ccgacctgtagccac

SEQ ID NO: 972640 - DNA, 15 bp, Homo sapiens
cgacctgtagccact

SEQ ID NO: 972641 - DNA, 15 bp, Homo sapiens
gacctgtagccactg

SEQ ID NO: 972642 - DNA, 15 bp, Homo sapiens
acctgtagccactgt

SEQ ID NO: 972643 - DNA, 15 bp, Homo sapiens
cctgtagccactgtc

SEQ ID NO: 972644 - DNA, 15 bp, Homo sapiens
ctgtagccactgtcc

SEQ ID NO: 972645 - DNA, 15 bp, Homo sapiens
tgtagccactgtcca

SEQ ID NO: 972646 - DNA, 15 bp, Homo sapiens
gtagccactgtccac

SEQ ID NO: 972647 - DNA, 15 bp, Homo sapiens
tagccactgtccacc

SEQ ID NO: 972648 - DNA, 15 bp, Homo sapiens
agccactgtccaccc

SEQ ID NO: 972649 - DNA, 15 bp, Homo sapiens
gccactgtccacccg

SEQ ID NO: 972650 - DNA, 15 bp, Homo sapiens
ccactgtccacccgc

SEQ ID NO: 972651 - DNA, 15 bp, Homo sapiens
cactgtccacccgct

SEQ ID NO: 972652 - DNA, 15 bp, Homo sapiens
actgtccacccgctc

SEQ ID NO: 972653 - DNA, 15 bp, Homo sapiens
ctgtccacccgctcc

SEQ ID NO: 972654 - DNA, 15 bp, Homo sapiens
tgtccacccgctcca

SEQ ID NO: 972655 - DNA, 15 bp, Homo sapiens
gtccacccgctccag

SEQ ID NO: 972656 - DNA, 15 bp, Homo sapiens
tccacccgctccagc

SEQ ID NO: 972657 - DNA, 15 bp, Homo sapiens
ccacccgctccagct

SEQ ID NO: 972658 - DNA, 15 bp, Homo sapiens
cacccgctccagctc

SEQ ID NO: 972659 - DNA, 15 bp, Homo sapiens
acccgctccagctct

SEQ ID NO: 972660 - DNA, 15 bp, Homo sapiens
cccgctccagctctc

SEQ ID NO: 972661 - DNA, 15 bp, Homo sapiens
ccgctccagctctcg

SEQ ID NO: 972662 - DNA, 15 bp, Homo sapiens
cgctccagctctcgg

SEQ ID NO: 972663 - DNA, 15 bp, Homo sapiens
gctccagctctcggg

SEQ ID NO: 972664 - DNA, 15 bp, Homo sapiens
ctccagctctcgggc

SEQ ID NO: 972665 - DNA, 15 bp, Homo sapiens
tccagctctcgggcc

SEQ ID NO: 972666 - DNA, 15 bp, Homo sapiens
ccagctctcgggcca

SEQ ID NO: 972667 - DNA, 15 bp, Homo sapiens
cagctctcgggccag

SEQ ID NO: 972668 - DNA, 15 bp, Homo sapiens
agctctcgggccagg

SEQ ID NO: 972669 - DNA, 15 bp, Homo sapiens
gctctcgggccagga

SEQ ID NO: 972670 - DNA, 15 bp, Homo sapiens
ctctcgggccaggag

SEQ ID NO: 972671 - DNA, 15 bp, Homo sapiens
tctcgggccaggagc

SEQ ID NO: 972672 - DNA, 15 bp, Homo sapiens
ctcgggccaggagcc

SEQ ID NO: 972673 - DNA, 15 bp, Homo sapiens
tcgggccaggagccc

SEQ ID NO: 972674 - DNA, 15 bp, Homo sapiens
cgggccaggagccca

SEQ ID NO: 972675 - DNA, 15 bp, Homo sapiens
gggccaggagcccat

SEQ ID NO: 972676 - DNA, 15 bp, Homo sapiens
ggccaggagcccata

SEQ ID NO: 972677 - DNA, 15 bp, Homo sapiens
gccaggagcccatag

SEQ ID NO: 972678 - DNA, 15 bp, Homo sapiens
ccaggagcccatagg

SEQ ID NO: 972679 - DNA, 15 bp, Homo sapiens
caggagcccataggc

SEQ ID NO: 972680 - DNA, 15 bp, Homo sapiens
aggagcccataggcc

SEQ ID NO: 972681 - DNA, 15 bp, Homo sapiens
ggagcccataggcca

SEQ ID NO: 972682 - DNA, 15 bp, Homo sapiens
gagcccataggccac

SEQ ID NO: 972683 - DNA, 15 bp, Homo sapiens
agcccataggccaca

SEQ ID NO: 972684 - DNA, 15 bp, Homo sapiens
gcccataggccacag

SEQ ID NO: 972685 - DNA, 15 bp, Homo sapiens
cccataggccacaga

SEQ ID NO: 972686 - DNA, 15 bp, Homo sapiens
ccataggccacagac

SEQ ID NO: 972687 - DNA, 15 bp, Homo sapiens
cataggccacagacg

SEQ ID NO: 972688 - DNA, 15 bp, Homo sapiens
ataggccacagacga

SEQ ID NO: 972689 - DNA, 15 bp, Homo sapiens
taggccacagacgaa

SEQ ID NO: 972690 - DNA, 15 bp, Homo sapiens
aggccacagacgaaa

SEQ ID NO: 972691 - DNA, 15 bp, Homo sapiens
ggccacagacgaaac

SEQ ID NO: 972692 - DNA, 15 bp, Homo sapiens
gccacagacgaaacc

SEQ ID NO: 972693 - DNA, 15 bp, Homo sapiens
ccacagacgaaaccc

SEQ ID NO: 972694 - DNA, 15 bp, Homo sapiens
cacagacgaaacccc

SEQ ID NO: 972695 - DNA, 15 bp, Homo sapiens
acagacgaaacccca

SEQ ID NO: 972696 - DNA, 15 bp, Homo sapiens
cagacgaaaccccag

SEQ ID NO: 972697 - DNA, 15 bp, Homo sapiens
agacgaaaccccagc

SEQ ID NO: 972698 - DNA, 15 bp, Homo sapiens
gacgaaaccccagca

SEQ ID NO: 972699 - DNA, 15 bp, Homo sapiens
acgaaaccccagcac

SEQ ID NO: 972700 - DNA, 15 bp, Homo sapiens
cgaaaccccagcaca

SEQ ID NO: 972701 - DNA, 15 bp, Homo sapiens
gaaaccccagcacag

SEQ ID NO: 972702 - DNA, 15 bp, Homo sapiens
aaaccccagcacagc

SEQ ID NO: 972703 - DNA, 15 bp, Homo sapiens
aaccccagcacagcc

SEQ ID NO: 972704 - DNA, 15 bp, Homo sapiens
accccagcacagcca

SEQ ID NO: 972705 - DNA, 15 bp, Homo sapiens
ccccagcacagccat

SEQ ID NO: 972706 - DNA, 15 bp, Homo sapiens
cccagcacagccata

SEQ ID NO: 972707 - DNA, 15 bp, Homo sapiens
ccagcacagccatat

SEQ ID NO: 972708 - DNA, 15 bp, Homo sapiens
cagcacagccatatc

SEQ ID NO: 972709 - DNA, 15 bp, Homo sapiens
agcacagccatatcc

SEQ ID NO: 972710 - DNA, 15 bp, Homo sapiens
gcacagccatatcct

SEQ ID NO: 972711 - DNA, 15 bp, Homo sapiens
cacagccatatcctg

SEQ ID NO: 972712 - DNA, 15 bp, Homo sapiens
acagccatatcctgg

SEQ ID NO: 972713 - DNA, 15 bp, Homo sapiens
cagccatatcctggt

SEQ ID NO: 972714 - DNA, 15 bp, Homo sapiens
agccatatcctggtg

SEQ ID NO: 972715 - DNA, 15 bp, Homo sapiens
gccatatcctggtgg

SEQ ID NO: 972716 - DNA, 15 bp, Homo sapiens
ccatatcctggtggt

SEQ ID NO: 972717 - DNA, 15 bp, Homo sapiens
catatcctggtggta

SEQ ID NO: 972718 - DNA, 15 bp, Homo sapiens
atatcctggtggtag

SEQ ID NO: 972719 - DNA, 15 bp, Homo sapiens
tatcctggtggtagt

SEQ ID NO: 972720 - DNA, 15 bp, Homo sapiens
atcctggtggtagta

SEQ ID NO: 972721 - DNA, 15 bp, Homo sapiens
tcctggtggtagtag

SEQ ID NO: 972722 - DNA, 15 bp, Homo sapiens
cctggtggtagtagg

SEQ ID NO: 972723 - DNA, 15 bp, Homo sapiens
ctggtggtagtagga

SEQ ID NO: 972724 - DNA, 15 bp, Homo sapiens
tggtggtagtaggag

SEQ ID NO: 972725 - DNA, 15 bp, Homo sapiens
ggtggtagtaggagg

SEQ ID NO: 972726 - DNA, 15 bp, Homo sapiens
gtggtagtaggaggg

SEQ ID NO: 972727 - DNA, 15 bp, Homo sapiens
tggtagtaggagggg

SEQ ID NO: 972728 - DNA, 15 bp, Homo sapiens
ggtagtaggagggga

SEQ ID NO: 972729 - DNA, 15 bp, Homo sapiens
gtagtaggaggggaa

SEQ ID NO: 972730 - DNA, 15 bp, Homo sapiens
tagtaggaggggaaa

SEQ ID NO: 972731 - DNA, 15 bp, Homo sapiens
agtaggaggggaaag

SEQ ID NO: 972732 - DNA, 15 bp, Homo sapiens
gtaggaggggaaagc

SEQ ID NO: 972733 - DNA, 15 bp, Homo sapiens
taggaggggaaagca

SEQ ID NO: 972734 - DNA, 15 bp, Homo sapiens
aggaggggaaagcag

SEQ ID NO: 972735 - DNA, 15 bp, Homo sapiens
ggaggggaaagcagg

SEQ ID NO: 972736 - DNA, 15 bp, Homo sapiens
gaggggaaagcagga

SEQ ID NO: 972737 - DNA, 15 bp, Homo sapiens
aggggaaagcaggac

SEQ ID NO: 972738 - DNA, 15 bp, Homo sapiens
ggggaaagcaggaca

SEQ ID NO: 972739 - DNA, 15 bp, Homo sapiens
gggaaagcaggacaa

SEQ ID NO: 972740 - DNA, 15 bp, Homo sapiens
ggaaagcaggacaat

SEQ ID NO: 972741 - DNA, 15 bp, Homo sapiens
gaaagcaggacaata

SEQ ID NO: 972742 - DNA, 15 bp, Homo sapiens
aaagcaggacaatag

SEQ ID NO: 972743 - DNA, 15 bp, Homo sapiens
aagcaggacaataga

SEQ ID NO: 972744 - DNA, 15 bp, Homo sapiens
agcaggacaatagag

SEQ ID NO: 972745 - DNA, 15 bp, Homo sapiens
gcaggacaatagaga

SEQ ID NO: 972746 - DNA, 15 bp, Homo sapiens
caggacaatagagaa

SEQ ID NO: 972747 - DNA, 15 bp, Homo sapiens
aggacaatagagaac

SEQ ID NO: 972748 - DNA, 15 bp, Homo sapiens
ggacaatagagaaca

SEQ ID NO: 972749 - DNA, 15 bp, Homo sapiens
gacaatagagaacag

SEQ ID NO: 972750 - DNA, 15 bp, Homo sapiens
acaatagagaacagg

SEQ ID NO: 972751 - DNA, 15 bp, Homo sapiens
caatagagaacaggg

SEQ ID NO: 972752 - DNA, 15 bp, Homo sapiens
aatagagaacagggc

SEQ ID NO: 972753 - DNA, 15 bp, Homo sapiens
atagagaacagggcc

SEQ ID NO: 972754 - DNA, 15 bp, Homo sapiens
tagagaacagggccc

SEQ ID NO: 972755 - DNA, 15 bp, Homo sapiens
agagaacagggccct

SEQ ID NO: 972756 - DNA, 15 bp, Homo sapiens
gagaacagggccctg

SEQ ID NO: 972757 - DNA, 15 bp, Homo sapiens
agaacagggccctgc

SEQ ID NO: 972758 - DNA, 15 bp, Homo sapiens
gaacagggccctgcc

SEQ ID NO: 972759 - DNA, 15 bp, Homo sapiens
aacagggccctgccc

SEQ ID NO: 972760 - DNA, 15 bp, Homo sapiens
acagggccctgccca

SEQ ID NO: 972761 - DNA, 15 bp, Homo sapiens
cagggccctgcccag

SEQ ID NO: 972762 - DNA, 15 bp, Homo sapiens
agggccctgcccagc

SEQ ID NO: 972763 - DNA, 15 bp, Homo sapiens
gggccctgcccagct

SEQ ID NO: 972764 - DNA, 15 bp, Homo sapiens
ggccctgcccagcta

SEQ ID NO: 972765 - DNA, 15 bp, Homo sapiens
gccctgcccagctaa

SEQ ID NO: 972766 - DNA, 15 bp, Homo sapiens
ccctgcccagctaag

SEQ ID NO: 972767 - DNA, 15 bp, Homo sapiens
cctgcccagctaaga

SEQ ID NO: 972768 - DNA, 15 bp, Homo sapiens
ctgcccagctaagac

SEQ ID NO: 972769 - DNA, 15 bp, Homo sapiens
tgcccagctaagacc

SEQ ID NO: 972770 - DNA, 15 bp, Homo sapiens
gcccagctaagaccc

SEQ ID NO: 972771 - DNA, 15 bp, Homo sapiens
cccagctaagaccca

SEQ ID NO: 972772 - DNA, 15 bp, Homo sapiens
ccagctaagacccaa

SEQ ID NO: 972773 - DNA, 15 bp, Homo sapiens
cagctaagacccaag

SEQ ID NO: 972774 - DNA, 15 bp, Homo sapiens
agctaagacccaaga

SEQ ID NO: 972775 - DNA, 15 bp, Homo sapiens
gctaagacccaagag

SEQ ID NO: 972776 - DNA, 15 bp, Homo sapiens
ctaagacccaagaga

SEQ ID NO: 972777 - DNA, 15 bp, Homo sapiens
taagacccaagagac

SEQ ID NO: 972778 - DNA, 15 bp, Homo sapiens
aagacccaagagaca

SEQ ID NO: 972779 - DNA, 15 bp, Homo sapiens
agacccaagagacag

SEQ ID NO: 972780 - DNA, 15 bp, Homo sapiens
gacccaagagacagg

SEQ ID NO: 972781 - DNA, 15 bp, Homo sapiens
acccaagagacaggg

SEQ ID NO: 972782 - DNA, 15 bp, Homo sapiens
cccaagagacagggc

SEQ ID NO: 972783 - DNA, 15 bp, Homo sapiens
ccaagagacagggct

SEQ ID NO: 972784 - DNA, 15 bp, Homo sapiens
caagagacagggctg

SEQ ID NO: 972785 - DNA, 15 bp, Homo sapiens
aagagacagggctga

SEQ ID NO: 972786 - DNA, 15 bp, Homo sapiens
agagacagggctgaa

SEQ ID NO: 972787 - DNA, 15 bp, Homo sapiens
gagacagggctgaat

SEQ ID NO: 972788 - DNA, 15 bp, Homo sapiens
agacagggctgaata

SEQ ID NO: 972789 - DNA, 15 bp, Homo sapiens
gacagggctgaataa

SEQ ID NO: 972790 - DNA, 15 bp, Homo sapiens
acagggctgaataag

SEQ ID NO: 972791 - DNA, 15 bp, Homo sapiens
cagggctgaataagg

SEQ ID NO: 972792 - DNA, 15 bp, Homo sapiens
agggctgaataagga

SEQ ID NO: 972793 - DNA, 15 bp, Homo sapiens
gggctgaataaggac

SEQ ID NO: 972794 - DNA, 15 bp, Homo sapiens
ggctgaataaggaca

SEQ ID NO: 972795 - DNA, 15 bp, Homo sapiens
gctgaataaggacac

SEQ ID NO: 972796 - DNA, 15 bp, Homo sapiens
ctgaataaggacaca

SEQ ID NO: 972797 - DNA, 15 bp, Homo sapiens
tgaataaggacacac

SEQ ID NO: 972798 - DNA, 15 bp, Homo sapiens
gaataaggacacaca

SEQ ID NO: 972799 - DNA, 15 bp, Homo sapiens
aataaggacacacaa

SEQ ID NO: 972800 - DNA, 15 bp, Homo sapiens
ataaggacacacaag

SEQ ID NO: 972801 - DNA, 15 bp, Homo sapiens
taaggacacacaagg

SEQ ID NO: 972802 - DNA, 15 bp, Homo sapiens
aaggacacacaagga

SEQ ID NO: 972803 - DNA, 15 bp, Homo sapiens
aggacacacaaggag

SEQ ID NO: 972804 - DNA, 15 bp, Homo sapiens
ggacacacaaggagg

SEQ ID NO: 972805 - DNA, 15 bp, Homo sapiens
gacacacaaggaggc

SEQ ID NO: 972806 - DNA, 15 bp, Homo sapiens
acacacaaggaggca

SEQ ID NO: 972807 - DNA, 15 bp, Homo sapiens
cacacaaggaggcag

SEQ ID NO: 972808 - DNA, 15 bp, Homo sapiens
acacaaggaggcagg

SEQ ID NO: 972809 - DNA, 15 bp, Homo sapiens
cacaaggaggcaggc

SEQ ID NO: 972810 - DNA, 15 bp, Homo sapiens
acaaggaggcaggca

SEQ ID NO: 972811 - DNA, 15 bp, Homo sapiens
caaggaggcaggcac

SEQ ID NO: 972812 - DNA, 15 bp, Homo sapiens
aaggaggcaggcacc

SEQ ID NO: 972813 - DNA, 15 bp, Homo sapiens
aggaggcaggcacca

SEQ ID NO: 972814 - DNA, 15 bp, Homo sapiens
ggaggcaggcaccaa

SEQ ID NO: 972815 - DNA, 15 bp, Homo sapiens
gaggcaggcaccaag

SEQ ID NO: 972816 - DNA, 15 bp, Homo sapiens
aggcaggcaccaagc

SEQ ID NO: 972817 - DNA, 15 bp, Homo sapiens
ggcaggcaccaagct

SEQ ID NO: 972818 - DNA, 15 bp, Homo sapiens
gcaggcaccaagctg

SEQ ID NO: 972819 - DNA, 15 bp, Homo sapiens
caggcaccaagctgg

SEQ ID NO: 972820 - DNA, 15 bp, Homo sapiens
aggcaccaagctggc

SEQ ID NO: 972821 - DNA, 15 bp, Homo sapiens
ggcaccaagctggcc

SEQ ID NO: 972822 - DNA, 15 bp, Homo sapiens
gcaccaagctggccc

SEQ ID NO: 972823 - DNA, 15 bp, Homo sapiens
caccaagctggccct

SEQ ID NO: 972824 - DNA, 15 bp, Homo sapiens
accaagctggcccta

SEQ ID NO: 972825 - DNA, 15 bp, Homo sapiens
ccaagctggccctag

SEQ ID NO: 972826 - DNA, 15 bp, Homo sapiens
caagctggccctagc

SEQ ID NO: 972827 - DNA, 15 bp, Homo sapiens
aagctggccctagct

SEQ ID NO: 972828 - DNA, 15 bp, Homo sapiens
agctggccctagctg

SEQ ID NO: 972829 - DNA, 15 bp, Homo sapiens
gctggccctagctga

SEQ ID NO: 972830 - DNA, 15 bp, Homo sapiens
ctggccctagctgag

SEQ ID NO: 972831 - DNA, 15 bp, Homo sapiens
tggccctagctgagg

SEQ ID NO: 972832 - DNA, 15 bp, Homo sapiens
ggccctagctgaggt

SEQ ID NO: 972833 - DNA, 15 bp, Homo sapiens
gccctagctgaggtt

SEQ ID NO: 972834 - DNA, 15 bp, Homo sapiens
ccctagctgaggttt

SEQ ID NO: 972835 - DNA, 15 bp, Homo sapiens
cctagctgaggttta

SEQ ID NO: 972836 - DNA, 15 bp, Homo sapiens
ctagctgaggtttat

SEQ ID NO: 972837 - DNA, 15 bp, Homo sapiens
tagctgaggtttatt

SEQ ID NO: 972838 - DNA, 15 bp, Homo sapiens
agctgaggtttattc

SEQ ID NO: 972839 - DNA, 15 bp, Homo sapiens
gctgaggtttattca

SEQ ID NO: 972840 - DNA, 15 bp, Homo sapiens
ctgaggtttattcat

SEQ ID NO: 972841 - DNA, 15 bp, Homo sapiens
tgaggtttattcatt

SEQ ID NO: 972842 - DNA, 15 bp, Homo sapiens
gaggtttattcattt

SEQ ID NO: 972843 - DNA, 15 bp, Homo sapiens
aggtttattcatttc

SEQ ID NO: 972844 - DNA, 15 bp, Homo sapiens
ggtttattcatttca

SEQ ID NO: 972845 - DNA, 15 bp, Homo sapiens
gtttattcatttcat

SEQ ID NO: 972846 - DNA, 15 bp, Homo sapiens
tttattcatttcatc

SEQ ID NO: 972847 - DNA, 15 bp, Homo sapiens
ttattcatttcatct

SEQ ID NO: 972848 - DNA, 15 bp, Homo sapiens
tattcatttcatctc

SEQ ID NO: 972849 - DNA, 15 bp, Homo sapiens
attcatttcatctcc

SEQ ID NO: 972850 - DNA, 15 bp, Homo sapiens
ttcatttcatctcca

SEQ ID NO: 972851 - DNA, 15 bp, Homo sapiens
tcatttcatctccac

SEQ ID NO: 972852 - DNA, 15 bp, Homo sapiens
catttcatctccaca

SEQ ID NO: 972853 - DNA, 15 bp, Homo sapiens
atttcatctccacag

SEQ ID NO: 972854 - DNA, 15 bp, Homo sapiens
tttcatctccacagc

SEQ ID NO: 972855 - DNA, 15 bp, Homo sapiens
ttcatctccacagcc

SEQ ID NO: 972856 - DNA, 15 bp, Homo sapiens
tcatctccacagcca

SEQ ID NO: 972857 - DNA, 15 bp, Homo sapiens
catctccacagccac

SEQ ID NO: 972858 - DNA, 15 bp, Homo sapiens
atctccacagccact

SEQ ID NO: 972859 - DNA, 15 bp, Homo sapiens
tctccacagccactt

SEQ ID NO: 972860 - DNA, 15 bp, Homo sapiens
ctccacagccacttt

SEQ ID NO: 972861 - DNA, 15 bp, Homo sapiens
tccacagccactttc

SEQ ID NO: 972862 - DNA, 15 bp, Homo sapiens
ccacagccactttca

SEQ ID NO: 972863 - DNA, 15 bp, Homo sapiens
cacagccactttcag

SEQ ID NO: 972864 - DNA, 15 bp, Homo sapiens
acagccactttcaga

SEQ ID NO: 972865 - DNA, 15 bp, Homo sapiens
cagccactttcagag

SEQ ID NO: 972866 - DNA, 15 bp, Homo sapiens
agccactttcagagg

SEQ ID NO: 972867 - DNA, 15 bp, Homo sapiens
gccactttcagaggg

SEQ ID NO: 972868 - DNA, 15 bp, Homo sapiens
ccactttcagagggt

SEQ ID NO: 972869 - DNA, 15 bp, Homo sapiens
cactttcagagggtg

SEQ ID NO: 972870 - DNA, 15 bp, Homo sapiens
actttcagagggtgg

SEQ ID NO: 972871 - DNA, 15 bp, Homo sapiens
ctttcagagggtggg

SEQ ID NO: 972872 - DNA, 15 bp, Homo sapiens
tttcagagggtggga

SEQ ID NO: 972873 - DNA, 15 bp, Homo sapiens
ttcagagggtgggac

SEQ ID NO: 972874 - DNA, 15 bp, Homo sapiens
tcagagggtgggaca

SEQ ID NO: 972875 - DNA, 15 bp, Homo sapiens
cagagggtgggacaa

SEQ ID NO: 972876 - DNA, 15 bp, Homo sapiens
agagggtgggacaac

SEQ ID NO: 972877 - DNA, 15 bp, Homo sapiens
gagggtgggacaaca

SEQ ID NO: 972878 - DNA, 15 bp, Homo sapiens
agggtgggacaacag

SEQ ID NO: 972879 - DNA, 15 bp, Homo sapiens
gggtgggacaacagc

SEQ ID NO: 972880 - DNA, 15 bp, Homo sapiens
ggtgggacaacagcc

SEQ ID NO: 972881 - DNA, 15 bp, Homo sapiens
gtgggacaacagccc

SEQ ID NO: 972882 - DNA, 15 bp, Homo sapiens
tgggacaacagcccc

SEQ ID NO: 972883 - DNA, 15 bp, Homo sapiens
gggacaacagcccca

SEQ ID NO: 972884 - DNA, 15 bp, Homo sapiens
ggacaacagccccac

SEQ ID NO: 972885 - DNA, 15 bp, Homo sapiens
gacaacagccccact

SEQ ID NO: 972886 - DNA, 15 bp, Homo sapiens
acaacagccccactt

SEQ ID NO: 972887 - DNA, 15 bp, Homo sapiens
caacagccccacttt

SEQ ID NO: 972888 - DNA, 15 bp, Homo sapiens
aacagccccacttta

SEQ ID NO: 972889 - DNA, 15 bp, Homo sapiens
acagccccactttac

SEQ ID NO: 972890 - DNA, 15 bp, Homo sapiens
cagccccactttaca

SEQ ID NO: 972891 - DNA, 15 bp, Homo sapiens
agccccactttacag

SEQ ID NO: 972892 - DNA, 15 bp, Homo sapiens
gccccactttacaga

SEQ ID NO: 972893 - DNA, 15 bp, Homo sapiens
ccccactttacagac

SEQ ID NO: 972894 - DNA, 15 bp, Homo sapiens
cccactttacagact

SEQ ID NO: 972895 - DNA, 15 bp, Homo sapiens
ccactttacagactg

SEQ ID NO: 972896 - DNA, 15 bp, Homo sapiens
cactttacagactgg

SEQ ID NO: 972897 - DNA, 15 bp, Homo sapiens
actttacagactggg

SEQ ID NO: 972898 - DNA, 15 bp, Homo sapiens
ctttacagactggga

SEQ ID NO: 972899 - DNA, 15 bp, Homo sapiens
tttacagactgggaa

SEQ ID NO: 972900 - DNA, 15 bp, Homo sapiens
ttacagactgggaaa

SEQ ID NO: 972901 - DNA, 15 bp, Homo sapiens
tacagactgggaaat

SEQ ID NO: 972902 - DNA, 15 bp, Homo sapiens
acagactgggaaatt

SEQ ID NO: 972903 - DNA, 15 bp, Homo sapiens
cagactgggaaattg

SEQ ID NO: 972904 - DNA, 15 bp, Homo sapiens
agactgggaaattgt

SEQ ID NO: 972905 - DNA, 15 bp, Homo sapiens
gactgggaaattgtg

SEQ ID NO: 972906 - DNA, 15 bp, Homo sapiens
actgggaaattgtgg

SEQ ID NO: 972907 - DNA, 15 bp, Homo sapiens
ctgggaaattgtggc

SEQ ID NO: 972908 - DNA, 15 bp, Homo sapiens
tgggaaattgtggct

SEQ ID NO: 972909 - DNA, 15 bp, Homo sapiens
gggaaattgtggctt

SEQ ID NO: 972910 - DNA, 15 bp, Homo sapiens
ggaaattgtggctta

SEQ ID NO: 972911 - DNA, 15 bp, Homo sapiens
gaaattgtggcttag

SEQ ID NO: 972912 - DNA, 15 bp, Homo sapiens
aaattgtggcttagg

SEQ ID NO: 972913 - DNA, 15 bp, Homo sapiens
aattgtggcttaggg

SEQ ID NO: 972914 - DNA, 15 bp, Homo sapiens
attgtggcttaggga

SEQ ID NO: 972915 - DNA, 15 bp, Homo sapiens
ttgtggcttagggaa

SEQ ID NO: 972916 - DNA, 15 bp, Homo sapiens
tgtggcttagggaaa

SEQ ID NO: 972917 - DNA, 15 bp, Homo sapiens
gtggcttagggaaag

SEQ ID NO: 972918 - DNA, 15 bp, Homo sapiens
tggcttagggaaaga

SEQ ID NO: 972919 - DNA, 15 bp, Homo sapiens
ggcttagggaaagaa

SEQ ID NO: 972920 - DNA, 15 bp, Homo sapiens
gcttagggaaagaag

SEQ ID NO: 972921 - DNA, 15 bp, Homo sapiens
cttagggaaagaagg

SEQ ID NO: 972922 - DNA, 15 bp, Homo sapiens
ttagggaaagaaggg

SEQ ID NO: 972923 - DNA, 15 bp, Homo sapiens
tagggaaagaagggg

SEQ ID NO: 972924 - DNA, 15 bp, Homo sapiens
agggaaagaaggggg

SEQ ID NO: 972925 - DNA, 15 bp, Homo sapiens
gggaaagaagggggc

SEQ ID NO: 972926 - DNA, 15 bp, Homo sapiens
ggaaagaagggggct

SEQ ID NO: 972927 - DNA, 15 bp, Homo sapiens
gaaagaagggggctt

SEQ ID NO: 972928 - DNA, 15 bp, Homo sapiens
aaagaagggggcttt

SEQ ID NO: 972929 - DNA, 15 bp, Homo sapiens
aagaagggggctttc

SEQ ID NO: 972930 - DNA, 15 bp, Homo sapiens
agaagggggctttca

SEQ ID NO: 972931 - DNA, 15 bp, Homo sapiens
gaagggggctttcag

SEQ ID NO: 972932 - DNA, 15 bp, Homo sapiens
aagggggctttcagt

SEQ ID NO: 972933 - DNA, 15 bp, Homo sapiens
agggggctttcagta

SEQ ID NO: 972934 - DNA, 15 bp, Homo sapiens
gggggctttcagtaa

SEQ ID NO: 972935 - DNA, 15 bp, Homo sapiens
ggggctttcagtaag

SEQ ID NO: 972936 - DNA, 15 bp, Homo sapiens
gggctttcagtaagg

SEQ ID NO: 972937 - DNA, 15 bp, Homo sapiens
ggctttcagtaaggc

SEQ ID NO: 972938 - DNA, 15 bp, Homo sapiens
gctttcagtaaggca

SEQ ID NO: 972939 - DNA, 15 bp, Homo sapiens
ctttcagtaaggcaa

SEQ ID NO: 972940 - DNA, 15 bp, Homo sapiens
tttcagtaaggcaag

SEQ ID NO: 972941 - DNA, 15 bp, Homo sapiens
ttcagtaaggcaaga

SEQ ID NO: 972942 - DNA, 15 bp, Homo sapiens
tcagtaaggcaagag

SEQ ID NO: 972943 - DNA, 15 bp, Homo sapiens
cagtaaggcaagagg

SEQ ID NO: 972944 - DNA, 15 bp, Homo sapiens
agtaaggcaagagga

SEQ ID NO: 972945 - DNA, 15 bp, Homo sapiens
gtaaggcaagaggat

SEQ ID NO: 972946 - DNA, 15 bp, Homo sapiens
taaggcaagaggatc

SEQ ID NO: 972947 - DNA, 15 bp, Homo sapiens
aaggcaagaggatca

SEQ ID NO: 972948 - DNA, 15 bp, Homo sapiens
aggcaagaggatcac

SEQ ID NO: 972949 - DNA, 15 bp, Homo sapiens
ggcaagaggatcact

SEQ ID NO: 972950 - DNA, 15 bp, Homo sapiens
gcaagaggatcactt

SEQ ID NO: 972951 - DNA, 15 bp, Homo sapiens
caagaggatcacttg

SEQ ID NO: 972952 - DNA, 15 bp, Homo sapiens
aagaggatcacttga

SEQ ID NO: 972953 - DNA, 15 bp, Homo sapiens
agaggatcacttgag

SEQ ID NO: 972954 - DNA, 15 bp, Homo sapiens
gaggatcacttgaga

SEQ ID NO: 972955 - DNA, 15 bp, Homo sapiens
aggatcacttgagaa

SEQ ID NO: 972956 - DNA, 15 bp, Homo sapiens
ggatcacttgagaac

SEQ ID NO: 972957 - DNA, 15 bp, Homo sapiens
gatcacttgagaaca

SEQ ID NO: 972958 - DNA, 15 bp, Homo sapiens
atcacttgagaacag

SEQ ID NO: 972959 - DNA, 15 bp, Homo sapiens
tcacttgagaacagc

SEQ ID NO: 972960 - DNA, 15 bp, Homo sapiens
cacttgagaacagcc

SEQ ID NO: 972961 - DNA, 15 bp, Homo sapiens
acttgagaacagcct

SEQ ID NO: 972962 - DNA, 15 bp, Homo sapiens
cttgagaacagcctg

SEQ ID NO: 972963 - DNA, 15 bp, Homo sapiens
ttgagaacagcctgg

SEQ ID NO: 972964 - DNA, 15 bp, Homo sapiens
tgagaacagcctggg

SEQ ID NO: 972965 - DNA, 15 bp, Homo sapiens
gagaacagcctgggc

SEQ ID NO: 972966 - DNA, 15 bp, Homo sapiens
agaacagcctgggca

SEQ ID NO: 972967 - DNA, 15 bp, Homo sapiens
gaacagcctgggcaa

SEQ ID NO: 972968 - DNA, 15 bp, Homo sapiens
aacagcctgggcaac

SEQ ID NO: 972969 - DNA, 15 bp, Homo sapiens
cagcctgggcaacac

SEQ ID NO: 972970 - DNA, 15 bp, Homo sapiens
agcctgggcaacaca

SEQ ID NO: 972971 - DNA, 15 bp, Homo sapiens
gcctgggcaacacag

SEQ ID NO: 972972 - DNA, 15 bp, Homo sapiens
cctgggcaacacagt

SEQ ID NO: 972973 - DNA, 15 bp, Homo sapiens
ctgggcaacacagtg

SEQ ID NO: 972974 - DNA, 15 bp, Homo sapiens
tgggcaacacagtga

SEQ ID NO: 972975 - DNA, 15 bp, Homo sapiens
gggcaacacagtgag

SEQ ID NO: 972976 - DNA, 15 bp, Homo sapiens
ggcaacacagtgaga

SEQ ID NO: 972977 - DNA, 15 bp, Homo sapiens
gcaacacagtgagac

SEQ ID NO: 972978 - DNA, 15 bp, Homo sapiens
caacacagtgagacc

SEQ ID NO: 972979 - DNA, 15 bp, Homo sapiens
aacacagtgagaccc

SEQ ID NO: 972980 - DNA, 15 bp, Homo sapiens
acacagtgagaccct

SEQ ID NO: 972981 - DNA, 15 bp, Homo sapiens
cacagtgagaccctg

SEQ ID NO: 972982 - DNA, 15 bp, Homo sapiens
acagtgagaccctgt

SEQ ID NO: 972983 - DNA, 15 bp, Homo sapiens
cagtgagaccctgtc

SEQ ID NO: 972984 - DNA, 15 bp, Homo sapiens
agtgagaccctgtct

SEQ ID NO: 972985 - DNA, 15 bp, Homo sapiens
gtgagaccctgtctc

SEQ ID NO: 972986 - DNA, 15 bp, Homo sapiens
tgagaccctgtctct

SEQ ID NO: 972987 - DNA, 15 bp, Homo sapiens
gagaccctgtctcta

SEQ ID NO: 972988 - DNA, 15 bp, Homo sapiens
agaccctgtctctaa

SEQ ID NO: 972989 - DNA, 15 bp, Homo sapiens
gaccctgtctctaaa

SEQ ID NO: 972990 - DNA, 15 bp, Homo sapiens
accctgtctctaaaa

SEQ ID NO: 972991 - DNA, 15 bp, Homo sapiens
ccctgtctctaaaaa

SEQ ID NO: 972992 - DNA, 15 bp, Homo sapiens
cctgtctctaaaaaa

SEQ ID NO: 972993 - DNA, 15 bp, Homo sapiens
ctgtctctaaaaaaa

SEQ ID NO: 972994 - DNA, 15 bp, Homo sapiens
tgtctctaaaaaaag

SEQ ID NO: 972995 - DNA, 15 bp, Homo sapiens
gtctctaaaaaaaga

SEQ ID NO: 972996 - DNA, 15 bp, Homo sapiens
tctctaaaaaaagaa

SEQ ID NO: 972997 - DNA, 15 bp, Homo sapiens
ctctaaaaaaagaaa

SEQ ID NO: 972998 - DNA, 15 bp, Homo sapiens
tctaaaaaaagaaac

SEQ ID NO: 972999 - DNA, 15 bp, Homo sapiens
ctaaaaaaagaaaca

SEQ ID NO: 973000 - DNA, 15 bp, Homo sapiens
taaaaaaagaaacaa

SEQ ID NO: 973001 - DNA, 15 bp, Homo sapiens
aaaaaaagaaacaaa

SEQ ID NO: 973002 - DNA, 15 bp, Homo sapiens
aaaaaagaaacaaag

SEQ ID NO: 973003 - DNA, 15 bp, Homo sapiens
aaaaagaaacaaagg

SEQ ID NO: 973004 - DNA, 15 bp, Homo sapiens
aaaagaaacaaaggg

SEQ ID NO: 973005 - DNA, 15 bp, Homo sapiens
aaagaaacaaagggg

SEQ ID NO: 973006 - DNA, 15 bp, Homo sapiens
aagaaacaaaggggc

SEQ ID NO: 973007 - DNA, 15 bp, Homo sapiens
agaaacaaaggggcc

SEQ ID NO: 973008 - DNA, 15 bp, Homo sapiens
gaaacaaaggggcca

SEQ ID NO: 973009 - DNA, 15 bp, Homo sapiens
aaacaaaggggccag

SEQ ID NO: 973010 - DNA, 15 bp, Homo sapiens
aacaaaggggccagg

SEQ ID NO: 973011 - DNA, 15 bp, Homo sapiens
acaaaggggccaggc

SEQ ID NO: 973012 - DNA, 15 bp, Homo sapiens
caaaggggccaggca

SEQ ID NO: 973013 - DNA, 15 bp, Homo sapiens
aaaggggccaggcac

SEQ ID NO: 973014 - DNA, 15 bp, Homo sapiens
aaggggccaggcacg

SEQ ID NO: 973015 - DNA, 15 bp, Homo sapiens
aggggccaggcacgg

SEQ ID NO: 973016 - DNA, 15 bp, Homo sapiens
ggggccaggcacggt

SEQ ID NO: 973017 - DNA, 15 bp, Homo sapiens
gggccaggcacggtg

SEQ ID NO: 973018 - DNA, 15 bp, Homo sapiens
ggccaggcacggtgg

SEQ ID NO: 973019 - DNA, 15 bp, Homo sapiens
gccaggcacggtggc

SEQ ID NO: 973020 - DNA, 15 bp, Homo sapiens
ccaggcacggtggct

SEQ ID NO: 973021 - DNA, 15 bp, Homo sapiens
caggcacggtggctc

SEQ ID NO: 973022 - DNA, 15 bp, Homo sapiens
aggcacggtggctca

SEQ ID NO: 973023 - DNA, 15 bp, Homo sapiens
ggcacggtggctcac

SEQ ID NO: 973024 - DNA, 15 bp, Homo sapiens
gcacggtggctcacg

SEQ ID NO: 973025 - DNA, 15 bp, Homo sapiens
cacggtggctcacgt

SEQ ID NO: 973026 - DNA, 15 bp, Homo sapiens
acggtggctcacgtt

SEQ ID NO: 973027 - DNA, 15 bp, Homo sapiens
cggtggctcacgttt

SEQ ID NO: 973028 - DNA, 15 bp, Homo sapiens
ggtggctcacgttta

SEQ ID NO: 973029 - DNA, 15 bp, Homo sapiens
gtggctcacgtttat

SEQ ID NO: 973030 - DNA, 15 bp, Homo sapiens
tggctcacgtttata

SEQ ID NO: 973031 - DNA, 15 bp, Homo sapiens
ggctcacgtttataa

SEQ ID NO: 973032 - DNA, 15 bp, Homo sapiens
gctcacgtttataat

SEQ ID NO: 973033 - DNA, 15 bp, Homo sapiens
ctcacgtttataatc

SEQ ID NO: 973034 - DNA, 15 bp, Homo sapiens
tcacgtttataatcc

SEQ ID NO: 973035 - DNA, 15 bp, Homo sapiens
cacgtttataatccc

SEQ ID NO: 973036 - DNA, 15 bp, Homo sapiens
acgtttataatccca

SEQ ID NO: 973037 - DNA, 15 bp, Homo sapiens
cgtttataatcccag

SEQ ID NO: 973038 - DNA, 15 bp, Homo sapiens
gtttataatcccagc

SEQ ID NO: 973039 - DNA, 15 bp, Homo sapiens
tttataatcccagca

SEQ ID NO: 973040 - DNA, 15 bp, Homo sapiens
ttataatcccagcac

SEQ ID NO: 973041 - DNA, 15 bp, Homo sapiens
tataatcccagcact

SEQ ID NO: 973042 - DNA, 15 bp, Homo sapiens
ataatcccagcactt

SEQ ID NO: 973043 - DNA, 15 bp, Homo sapiens
taatcccagcacttt

SEQ ID NO: 973044 - DNA, 15 bp, Homo sapiens
aatcccagcactttg

SEQ ID NO: 973045 - DNA, 15 bp, Homo sapiens
atcccagcactttgg

SEQ ID NO: 973046 - DNA, 15 bp, Homo sapiens
tcccagcactttggg

SEQ ID NO: 973047 - DNA, 15 bp, Homo sapiens
cccagcactttggga

SEQ ID NO: 973048 - DNA, 15 bp, Homo sapiens
ccagcactttgggag

SEQ ID NO: 973049 - DNA, 15 bp, Homo sapiens
cactttgggaggccg

SEQ ID NO: 973050 - DNA, 15 bp, Homo sapiens
actttgggaggccga

SEQ ID NO: 973051 - DNA, 15 bp, Homo sapiens
ctttgggaggccgag

SEQ ID NO: 973052 - DNA, 15 bp, Homo sapiens
tttgggaggccgagg

SEQ ID NO: 973053 - DNA, 15 bp, Homo sapiens
ttgggaggccgaggt

SEQ ID NO: 973054 - DNA, 15 bp, Homo sapiens
tgggaggccgaggtg

SEQ ID NO: 973055 - DNA, 15 bp, Homo sapiens
gggaggccgaggtgg

SEQ ID NO: 973056 - DNA, 15 bp, Homo sapiens
ggaggccgaggtggg

SEQ ID NO: 973057 - DNA, 15 bp, Homo sapiens
gaggccgaggtgggt

SEQ ID NO: 973058 - DNA, 15 bp, Homo sapiens
aggccgaggtgggtg

SEQ ID NO: 973059 - DNA, 15 bp, Homo sapiens
ggccgaggtgggtgg

SEQ ID NO: 973060 - DNA, 15 bp, Homo sapiens
gccgaggtgggtgga

SEQ ID NO: 973061 - DNA, 15 bp, Homo sapiens
ccgaggtgggtggat

SEQ ID NO: 973062 - DNA, 15 bp, Homo sapiens
cgaggtgggtggatc

SEQ ID NO: 973063 - DNA, 15 bp, Homo sapiens
gaggtgggtggatca

SEQ ID NO: 973064 - DNA, 15 bp, Homo sapiens
aggtgggtggatcac

SEQ ID NO: 973065 - DNA, 15 bp, Homo sapiens
ggtgggtggatcacc

SEQ ID NO: 973066 - DNA, 15 bp, Homo sapiens
gtgggtggatcacct

SEQ ID NO: 973067 - DNA, 15 bp, Homo sapiens
tgggtggatcacctg

SEQ ID NO: 973068 - DNA, 15 bp, Homo sapiens
gggtggatcacctga

SEQ ID NO: 973069 - DNA, 15 bp, Homo sapiens
ggtggatcacctgag

SEQ ID NO: 973070 - DNA, 15 bp, Homo sapiens
gtggatcacctgagg

SEQ ID NO: 973071 - DNA, 15 bp, Homo sapiens
tggatcacctgaggt

SEQ ID NO: 973072 - DNA, 15 bp, Homo sapiens
ggatcacctgaggtc

SEQ ID NO: 973073 - DNA, 15 bp, Homo sapiens
gatcacctgaggtca

SEQ ID NO: 973074 - DNA, 15 bp, Homo sapiens
atcacctgaggtcag

SEQ ID NO: 973075 - DNA, 15 bp, Homo sapiens
tcacctgaggtcagg

SEQ ID NO: 973076 - DNA, 15 bp, Homo sapiens
cacctgaggtcagga

SEQ ID NO: 973077 - DNA, 15 bp, Homo sapiens
acctgaggtcaggag

SEQ ID NO: 973078 - DNA, 15 bp, Homo sapiens
cctgaggtcaggagt

SEQ ID NO: 973079 - DNA, 15 bp, Homo sapiens
ctgaggtcaggagtt

SEQ ID NO: 973080 - DNA, 15 bp, Homo sapiens
gaggtcaggagttca

SEQ ID NO: 973081 - DNA, 15 bp, Homo sapiens
aggtcaggagttcaa

SEQ ID NO: 973082 - DNA, 15 bp, Homo sapiens
ggtcaggagttcaag

SEQ ID NO: 973083 - DNA, 15 bp, Homo sapiens
gtcaggagttcaaga

SEQ ID NO: 973084 - DNA, 15 bp, Homo sapiens
tcaggagttcaagac

SEQ ID NO: 973085 - DNA, 15 bp, Homo sapiens
caggagttcaagacc

SEQ ID NO: 973086 - DNA, 15 bp, Homo sapiens
aggagttcaagacca

SEQ ID NO: 973087 - DNA, 15 bp, Homo sapiens
ggagttcaagaccag

SEQ ID NO: 973088 - DNA, 15 bp, Homo sapiens
gagttcaagaccagc

SEQ ID NO: 973089 - DNA, 15 bp, Homo sapiens
agttcaagaccagcc

SEQ ID NO: 973090 - DNA, 15 bp, Homo sapiens
gttcaagaccagcct

SEQ ID NO: 973091 - DNA, 15 bp, Homo sapiens
ttcaagaccagcctg

SEQ ID NO: 973092 - DNA, 15 bp, Homo sapiens
tcaagaccagcctgg

SEQ ID NO: 973093 - DNA, 15 bp, Homo sapiens
caagaccagcctggc

SEQ ID NO: 973094 - DNA, 15 bp, Homo sapiens
aagaccagcctggcc

SEQ ID NO: 973095 - DNA, 15 bp, Homo sapiens
ccaacatggtgaaat

SEQ ID NO: 973096 - DNA, 15 bp, Homo sapiens
caacatggtgaaatc

SEQ ID NO: 973097 - DNA, 15 bp, Homo sapiens
aacatggtgaaatcc

SEQ ID NO: 973098 - DNA, 15 bp, Homo sapiens
acatggtgaaatccc

SEQ ID NO: 973099 - DNA, 15 bp, Homo sapiens
catggtgaaatccca

SEQ ID NO: 973100 - DNA, 15 bp, Homo sapiens
atggtgaaatcccat

SEQ ID NO: 973101 - DNA, 15 bp, Homo sapiens
tggtgaaatcccatt

SEQ ID NO: 973102 - DNA, 15 bp, Homo sapiens
ggtgaaatcccattt

SEQ ID NO: 973103 - DNA, 15 bp, Homo sapiens
gtgaaatcccatttc

SEQ ID NO: 973104 - DNA, 15 bp, Homo sapiens
tgaaatcccatttct

SEQ ID NO: 973105 - DNA, 15 bp, Homo sapiens
gaaatcccatttcta

SEQ ID NO: 973106 - DNA, 15 bp, Homo sapiens
aaatcccatttctac

SEQ ID NO: 973107 - DNA, 15 bp, Homo sapiens
aatcccatttctact

SEQ ID NO: 973108 - DNA, 15 bp, Homo sapiens
atcccatttctacta

SEQ ID NO: 973109 - DNA, 15 bp, Homo sapiens
tcccatttctactaa

SEQ ID NO: 973110 - DNA, 15 bp, Homo sapiens
cccatttctactaaa

SEQ ID NO: 973111 - DNA, 15 bp, Homo sapiens
ccatttctactaaaa

SEQ ID NO: 973112 - DNA, 15 bp, Homo sapiens
catttctactaaaaa

SEQ ID NO: 973113 - DNA, 15 bp, Homo sapiens
atttctactaaaaaa

SEQ ID NO: 973114 - DNA, 15 bp, Homo sapiens
tttctactaaaaaat

SEQ ID NO: 973115 - DNA, 15 bp, Homo sapiens
ttctactaaaaaata

SEQ ID NO: 973116 - DNA, 15 bp, Homo sapiens
tctactaaaaaatac

SEQ ID NO: 973117 - DNA, 15 bp, Homo sapiens
ctactaaaaaataca

SEQ ID NO: 973118 - DNA, 15 bp, Homo sapiens
tactaaaaaatacaa

SEQ ID NO: 973119 - DNA, 15 bp, Homo sapiens
actaaaaaatacaaa

SEQ ID NO: 973120 - DNA, 15 bp, Homo sapiens
ctaaaaaatacaaaa

SEQ ID NO: 973121 - DNA, 15 bp, Homo sapiens
taaaaaatacaaaaa

SEQ ID NO: 973122 - DNA, 15 bp, Homo sapiens
aaaaaatacaaaaat

SEQ ID NO: 973123 - DNA, 15 bp, Homo sapiens
atacaaaaattagct

SEQ ID NO: 973124 - DNA, 15 bp, Homo sapiens
tacaaaaattagctg

SEQ ID NO: 973125 - DNA, 15 bp, Homo sapiens
acaaaaattagctgg

SEQ ID NO: 973126 - DNA, 15 bp, Homo sapiens
caaaaattagctggg

SEQ ID NO: 973127 - DNA, 15 bp, Homo sapiens
aaaaattagctgggc

SEQ ID NO: 973128 - DNA, 15 bp, Homo sapiens
aaaattagctgggcg

SEQ ID NO: 973129 - DNA, 15 bp, Homo sapiens
aaattagctgggcgt

SEQ ID NO: 973130 - DNA, 15 bp, Homo sapiens
aattagctgggcgtg

SEQ ID NO: 973131 - DNA, 15 bp, Homo sapiens
attagctgggcgtgg

SEQ ID NO: 973132 - DNA, 15 bp, Homo sapiens
ttagctgggcgtggt

SEQ ID NO: 973133 - DNA, 15 bp, Homo sapiens
tagctgggcgtggtg

SEQ ID NO: 973134 - DNA, 15 bp, Homo sapiens
agctgggcgtggtgg

SEQ ID NO: 973135 - DNA, 15 bp, Homo sapiens
gctgggcgtggtggt

SEQ ID NO: 973136 - DNA, 15 bp, Homo sapiens
ctgggcgtggtggtg

SEQ ID NO: 973137 - DNA, 15 bp, Homo sapiens
tgggcgtggtggtgc

SEQ ID NO: 973138 - DNA, 15 bp, Homo sapiens
gggcgtggtggtgca

SEQ ID NO: 973139 - DNA, 15 bp, Homo sapiens
ggcgtggtggtgcac

SEQ ID NO: 973140 - DNA, 15 bp, Homo sapiens
gcgtggtggtgcacc

SEQ ID NO: 973141 - DNA, 15 bp, Homo sapiens
cgtggtggtgcaccc

SEQ ID NO: 973142 - DNA, 15 bp, Homo sapiens
gtggtggtgcacccc

SEQ ID NO: 973143 - DNA, 15 bp, Homo sapiens
tggtggtgcacccct

SEQ ID NO: 973144 - DNA, 15 bp, Homo sapiens
ggtggtgcacccctg

SEQ ID NO: 973145 - DNA, 15 bp, Homo sapiens
gtggtgcacccctgt

SEQ ID NO: 973146 - DNA, 15 bp, Homo sapiens
tggtgcacccctgta

SEQ ID NO: 973147 - DNA, 15 bp, Homo sapiens
ggtgcacccctgtaa

SEQ ID NO: 973148 - DNA, 15 bp, Homo sapiens
gtgcacccctgtaat

SEQ ID NO: 973149 - DNA, 15 bp, Homo sapiens
tgcacccctgtaatc

SEQ ID NO: 973150 - DNA, 15 bp, Homo sapiens
gcacccctgtaatcc

SEQ ID NO: 973151 - DNA, 15 bp, Homo sapiens
cacccctgtaatccc

SEQ ID NO: 973152 - DNA, 15 bp, Homo sapiens
acccctgtaatccca

SEQ ID NO: 973153 - DNA, 15 bp, Homo sapiens
cccctgtaatcccag

SEQ ID NO: 973154 - DNA, 15 bp, Homo sapiens
ccctgtaatcccagc

SEQ ID NO: 973155 - DNA, 15 bp, Homo sapiens
tcccagctactcaga

SEQ ID NO: 973156 - DNA, 15 bp, Homo sapiens
cccagctactcagaa

SEQ ID NO: 973157 - DNA, 15 bp, Homo sapiens
ccagctactcagaag

SEQ ID NO: 973158 - DNA, 15 bp, Homo sapiens
cagctactcagaagg

SEQ ID NO: 973159 - DNA, 15 bp, Homo sapiens
agctactcagaaggc

SEQ ID NO: 973160 - DNA, 15 bp, Homo sapiens
gctactcagaaggct

SEQ ID NO: 973161 - DNA, 15 bp, Homo sapiens
ctactcagaaggctg

SEQ ID NO: 973162 - DNA, 15 bp, Homo sapiens
tactcagaaggctga

SEQ ID NO: 973163 - DNA, 15 bp, Homo sapiens
actcagaaggctgag

SEQ ID NO: 973164 - DNA, 15 bp, Homo sapiens
ctcagaaggctgagg

SEQ ID NO: 973165 - DNA, 15 bp, Homo sapiens
tcagaaggctgaggt

SEQ ID NO: 973166 - DNA, 15 bp, Homo sapiens
cagaaggctgaggtg

SEQ ID NO: 973167 - DNA, 15 bp, Homo sapiens
agaaggctgaggtgg

SEQ ID NO: 973168 - DNA, 15 bp, Homo sapiens
gaaggctgaggtggc

SEQ ID NO: 973169 - DNA, 15 bp, Homo sapiens
aaggctgaggtggca

SEQ ID NO: 973170 - DNA, 15 bp, Homo sapiens
aggctgaggtggcag

SEQ ID NO: 973171 - DNA, 15 bp, Homo sapiens
ggctgaggtggcaga

SEQ ID NO: 973172 - DNA, 15 bp, Homo sapiens
gctgaggtggcagaa

SEQ ID NO: 973173 - DNA, 15 bp, Homo sapiens
ctgaggtggcagaat

SEQ ID NO: 973174 - DNA, 15 bp, Homo sapiens
tgaggtggcagaatt

SEQ ID NO: 973175 - DNA, 15 bp, Homo sapiens
gaggtggcagaattg

SEQ ID NO: 973176 - DNA, 15 bp, Homo sapiens
aggtggcagaattgc

SEQ ID NO: 973177 - DNA, 15 bp, Homo sapiens
ggtggcagaattgct

SEQ ID NO: 973178 - DNA, 15 bp, Homo sapiens
gtggcagaattgctt

SEQ ID NO: 973179 - DNA, 15 bp, Homo sapiens
tggcagaattgcttg

SEQ ID NO: 973180 - DNA, 15 bp, Homo sapiens
ggcagaattgcttga

SEQ ID NO: 973181 - DNA, 15 bp, Homo sapiens
gcagaattgcttgaa

SEQ ID NO: 973182 - DNA, 15 bp, Homo sapiens
cagaattgcttgaac

SEQ ID NO: 973183 - DNA, 15 bp, Homo sapiens
agaattgcttgaacc

SEQ ID NO: 973184 - DNA, 15 bp, Homo sapiens
gaattgcttgaacct

SEQ ID NO: 973185 - DNA, 15 bp, Homo sapiens
aattgcttgaaccta

SEQ ID NO: 973186 - DNA, 15 bp, Homo sapiens
attgcttgaacctag

SEQ ID NO: 973187 - DNA, 15 bp, Homo sapiens
ttgcttgaacctagg

SEQ ID NO: 973188 - DNA, 15 bp, Homo sapiens
tgcttgaacctagga

SEQ ID NO: 973189 - DNA, 15 bp, Homo sapiens
gcttgaacctaggag

SEQ ID NO: 973190 - DNA, 15 bp, Homo sapiens
cttgaacctaggagg

SEQ ID NO: 973191 - DNA, 15 bp, Homo sapiens
ttgaacctaggagga

SEQ ID NO: 973192 - DNA, 15 bp, Homo sapiens
tgaacctaggaggag

SEQ ID NO: 973193 - DNA, 15 bp, Homo sapiens
gaacctaggaggagg

SEQ ID NO: 973194 - DNA, 15 bp, Homo sapiens
aacctaggaggagga

SEQ ID NO: 973195 - DNA, 15 bp, Homo sapiens
acctaggaggaggaa

SEQ ID NO: 973196 - DNA, 15 bp, Homo sapiens
cctaggaggaggaaa

SEQ ID NO: 973197 - DNA, 15 bp, Homo sapiens
ctaggaggaggaaac

SEQ ID NO: 973198 - DNA, 15 bp, Homo sapiens
taggaggaggaaact

SEQ ID NO: 973199 - DNA, 15 bp, Homo sapiens
aggaggaggaaactg

SEQ ID NO: 973200 - DNA, 15 bp, Homo sapiens
ggaggaggaaactgc

SEQ ID NO: 973201 - DNA, 15 bp, Homo sapiens
gaggaggaaactgca

SEQ ID NO: 973202 - DNA, 15 bp, Homo sapiens
aggaggaaactgcag

SEQ ID NO: 973203 - DNA, 15 bp, Homo sapiens
ggaggaaactgcagt

SEQ ID NO: 973204 - DNA, 15 bp, Homo sapiens
gaggaaactgcagtg

SEQ ID NO: 973205 - DNA, 15 bp, Homo sapiens
aggaaactgcagtga

SEQ ID NO: 973206 - DNA, 15 bp, Homo sapiens
ggaaactgcagtgag

SEQ ID NO: 973207 - DNA, 15 bp, Homo sapiens
gaaactgcagtgagc

SEQ ID NO: 973208 - DNA, 15 bp, Homo sapiens
aaactgcagtgagcc

SEQ ID NO: 973209 - DNA, 15 bp, Homo sapiens
aactgcagtgagcca

SEQ ID NO: 973210 - DNA, 15 bp, Homo sapiens
actgcagtgagccag

SEQ ID NO: 973211 - DNA, 15 bp, Homo sapiens
ctgcagtgagccagg

SEQ ID NO: 973212 - DNA, 15 bp, Homo sapiens
tgcagtgagccagga

SEQ ID NO: 973213 - DNA, 15 bp, Homo sapiens
gcagtgagccaggat

SEQ ID NO: 973214 - DNA, 15 bp, Homo sapiens
cagtgagccaggatc

SEQ ID NO: 973215 - DNA, 15 bp, Homo sapiens
agtgagccaggatcg

SEQ ID NO: 973216 - DNA, 15 bp, Homo sapiens
gtgagccaggatcgc

SEQ ID NO: 973217 - DNA, 15 bp, Homo sapiens
tgagccaggatcgca

SEQ ID NO: 973218 - DNA, 15 bp, Homo sapiens
gagccaggatcgcac

SEQ ID NO: 973219 - DNA, 15 bp, Homo sapiens
agccaggatcgcacc

SEQ ID NO: 973220 - DNA, 15 bp, Homo sapiens
gccaggatcgcacca

SEQ ID NO: 973221 - DNA, 15 bp, Homo sapiens
ccaggatcgcaccac

SEQ ID NO: 973222 - DNA, 15 bp, Homo sapiens
caggatcgcaccact

SEQ ID NO: 973223 - DNA, 15 bp, Homo sapiens
aggatcgcaccactg

SEQ ID NO: 973224 - DNA, 15 bp, Homo sapiens
ggatcgcaccactgt

SEQ ID NO: 973225 - DNA, 15 bp, Homo sapiens
gatcgcaccactgta

SEQ ID NO: 973226 - DNA, 15 bp, Homo sapiens
atcgcaccactgtaa

SEQ ID NO: 973227 - DNA, 15 bp, Homo sapiens
tcgcaccactgtaat

SEQ ID NO: 973228 - DNA, 15 bp, Homo sapiens
cgcaccactgtaatc

SEQ ID NO: 973229 - DNA, 15 bp, Homo sapiens
gcaccactgtaatcc

SEQ ID NO: 973230 - DNA, 15 bp, Homo sapiens
caccactgtaatcca

SEQ ID NO: 973231 - DNA, 15 bp, Homo sapiens
accactgtaatccag

SEQ ID NO: 973232 - DNA, 15 bp, Homo sapiens
ccactgtaatccagt

SEQ ID NO: 973233 - DNA, 15 bp, Homo sapiens
cactgtaatccagta

SEQ ID NO: 973234 - DNA, 15 bp, Homo sapiens
actgtaatccagtaa

SEQ ID NO: 973235 - DNA, 15 bp, Homo sapiens
ctgtaatccagtaat

SEQ ID NO: 973236 - DNA, 15 bp, Homo sapiens
tgtaatccagtaatc

SEQ ID NO: 973237 - DNA, 15 bp, Homo sapiens
gtaatccagtaatcc

SEQ ID NO: 973238 - DNA, 15 bp, Homo sapiens
taatccagtaatcca

SEQ ID NO: 973239 - DNA, 15 bp, Homo sapiens
aatccagtaatccag

SEQ ID NO: 973240 - DNA, 15 bp, Homo sapiens
atccagtaatccagg

SEQ ID NO: 973241 - DNA, 15 bp, Homo sapiens
tccagtaatccaggc

SEQ ID NO: 973242 - DNA, 15 bp, Homo sapiens
ccagtaatccaggct

SEQ ID NO: 973243 - DNA, 15 bp, Homo sapiens
cagtaatccaggctg

SEQ ID NO: 973244 - DNA, 15 bp, Homo sapiens
agtaatccaggctgg

SEQ ID NO: 973245 - DNA, 15 bp, Homo sapiens
gtaatccaggctggg

SEQ ID NO: 973246 - DNA, 15 bp, Homo sapiens
taatccaggctgggt

SEQ ID NO: 973247 - DNA, 15 bp, Homo sapiens
aatccaggctgggtg

SEQ ID NO: 973248 - DNA, 15 bp, Homo sapiens
atccaggctgggtga

SEQ ID NO: 973249 - DNA, 15 bp, Homo sapiens
tccaggctgggtgac

SEQ ID NO: 973250 - DNA, 15 bp, Homo sapiens
ccaggctgggtgaca

SEQ ID NO: 973251 - DNA, 15 bp, Homo sapiens
caggctgggtgacag

SEQ ID NO: 973252 - DNA, 15 bp, Homo sapiens
aggctgggtgacaga

SEQ ID NO: 973253 - DNA, 15 bp, Homo sapiens
ggctgggtgacagag

SEQ ID NO: 973254 - DNA, 15 bp, Homo sapiens
gctgggtgacagagc

SEQ ID NO: 973255 - DNA, 15 bp, Homo sapiens
ctgggtgacagagcg

SEQ ID NO: 973256 - DNA, 15 bp, Homo sapiens
tgggtgacagagcga

SEQ ID NO: 973257 - DNA, 15 bp, Homo sapiens
gggtgacagagcgaa

SEQ ID NO: 973258 - DNA, 15 bp, Homo sapiens
ggtgacagagcgaaa

SEQ ID NO: 973259 - DNA, 15 bp, Homo sapiens
gtgacagagcgaaac

SEQ ID NO: 973260 - DNA, 15 bp, Homo sapiens
tgacagagcgaaact

SEQ ID NO: 973261 - DNA, 15 bp, Homo sapiens
gacagagcgaaactc

SEQ ID NO: 973262 - DNA, 15 bp, Homo sapiens
acagagcgaaactcc

SEQ ID NO: 973263 - DNA, 15 bp, Homo sapiens
cagagcgaaactcca

SEQ ID NO: 973264 - DNA, 15 bp, Homo sapiens
agagcgaaactccat

SEQ ID NO: 973265 - DNA, 15 bp, Homo sapiens
gagcgaaactccatc

SEQ ID NO: 973266 - DNA, 15 bp, Homo sapiens
agcgaaactccatct

SEQ ID NO: 973267 - DNA, 15 bp, Homo sapiens
gcgaaactccatctc

SEQ ID NO: 973268 - DNA, 15 bp, Homo sapiens
cgaaactccatctca

SEQ ID NO: 973269 - DNA, 15 bp, Homo sapiens
gaaactccatctcaa

SEQ ID NO: 973270 - DNA, 15 bp, Homo sapiens
aaactccatctcaaa

SEQ ID NO: 973271 - DNA, 15 bp, Homo sapiens
aactccatctcaaaa

SEQ ID NO: 973272 - DNA, 15 bp, Homo sapiens
tccatctcaaaaaaa

SEQ ID NO: 973273 - DNA, 15 bp, Homo sapiens
ccatctcaaaaaaaa

SEQ ID NO: 973274 - DNA, 15 bp, Homo sapiens
catctcaaaaaaaaa

SEQ ID NO: 973275 - DNA, 15 bp, Homo sapiens
atctcaaaaaaaaaa

SEQ ID NO: 973276 - DNA, 15 bp, Homo sapiens
tctcaaaaaaaaaaa

SEQ ID NO: 973277 - DNA, 15 bp, Homo sapiens
ctcaaaaaaaaaaaa

SEQ ID NO: 973278 - DNA, 15 bp, Homo sapiens
tcaaaaaaaaaaaaa

SEQ ID NO: 973279 - DNA, 15 bp, Homo sapiens
caaaaaaaaaaaaaa

SEQ ID NO: 973280 - DNA, 15 bp, Homo sapiens
aaaaaaaaaaaaaag

SEQ ID NO: 973281 - DNA, 15 bp, Homo sapiens
aaaaaaaaaaaaaga

SEQ ID NO: 973282 - DNA, 15 bp, Homo sapiens
aaaaaaaaaaaagaa

SEQ ID NO: 973283 - DNA, 15 bp, Homo sapiens
aaaaaaaaaaagaaa

SEQ ID NO: 973284 - DNA, 15 bp, Homo sapiens
aaaaaaaaaagaaaa

SEQ ID NO: 973285 - DNA, 15 bp, Homo sapiens
aaaaaaaaagaaaag

SEQ ID NO: 973286 - DNA, 15 bp, Homo sapiens
aaaaaaaagaaaagg

SEQ ID NO: 973287 - DNA, 15 bp, Homo sapiens
aaaaaaagaaaaggg

SEQ ID NO: 973288 - DNA, 15 bp, Homo sapiens
aaaaaagaaaagggc

SEQ ID NO: 973289 - DNA, 15 bp, Homo sapiens
aaaaagaaaagggcc

SEQ ID NO: 973290 - DNA, 15 bp, Homo sapiens
aaaagaaaagggccg

SEQ ID NO: 973291 - DNA, 15 bp, Homo sapiens
aaagaaaagggccgg

SEQ ID NO: 973292 - DNA, 15 bp, Homo sapiens
aagaaaagggccggg

SEQ ID NO: 973293 - DNA, 15 bp, Homo sapiens
agaaaagggccgggc

SEQ ID NO: 973294 - DNA, 15 bp, Homo sapiens
gaaaagggccgggca

SEQ ID NO: 973295 - DNA, 15 bp, Homo sapiens
aaaagggccgggcaa

SEQ ID NO: 973296 - DNA, 15 bp, Homo sapiens
aaagggccgggcaac

SEQ ID NO: 973297 - DNA, 15 bp, Homo sapiens
aagggccgggcaacg

SEQ ID NO: 973298 - DNA, 15 bp, Homo sapiens
agggccgggcaacgg

SEQ ID NO: 973299 - DNA, 15 bp, Homo sapiens
gggccgggcaacggt

SEQ ID NO: 973300 - DNA, 15 bp, Homo sapiens
ggccgggcaacggtg

SEQ ID NO: 973301 - DNA, 15 bp, Homo sapiens
gccgggcaacggtgg

SEQ ID NO: 973302 - DNA, 15 bp, Homo sapiens
ccgggcaacggtggc

SEQ ID NO: 973303 - DNA, 15 bp, Homo sapiens
cgggcaacggtggct

SEQ ID NO: 973304 - DNA, 15 bp, Homo sapiens
gggcaacggtggctc

SEQ ID NO: 973305 - DNA, 15 bp, Homo sapiens
ggcaacggtggctca

SEQ ID NO: 973306 - DNA, 15 bp, Homo sapiens
gcaacggtggctcac

SEQ ID NO: 973307 - DNA, 15 bp, Homo sapiens
caacggtggctcaca

SEQ ID NO: 973308 - DNA, 15 bp, Homo sapiens
aacggtggctcacac

SEQ ID NO: 973309 - DNA, 15 bp, Homo sapiens
acggtggctcacacc

SEQ ID NO: 973310 - DNA, 15 bp, Homo sapiens
cggtggctcacacct

SEQ ID NO: 973311 - DNA, 15 bp, Homo sapiens
ggtggctcacacctg

SEQ ID NO: 973312 - DNA, 15 bp, Homo sapiens
gtggctcacacctgt

SEQ ID NO: 973313 - DNA, 15 bp, Homo sapiens
tggctcacacctgta

SEQ ID NO: 973314 - DNA, 15 bp, Homo sapiens
ggctcacacctgtaa

SEQ ID NO: 973315 - DNA, 15 bp, Homo sapiens
gctcacacctgtaat

SEQ ID NO: 973316 - DNA, 15 bp, Homo sapiens
ctcacacctgtaatc

SEQ ID NO: 973317 - DNA, 15 bp, Homo sapiens
tcacacctgtaatca

SEQ ID NO: 973318 - DNA, 15 bp, Homo sapiens
cacacctgtaatcag

SEQ ID NO: 973319 - DNA, 15 bp, Homo sapiens
acacctgtaatcagg

SEQ ID NO: 973320 - DNA, 15 bp, Homo sapiens
cacctgtaatcagga

SEQ ID NO: 973321 - DNA, 15 bp, Homo sapiens
acctgtaatcaggag

SEQ ID NO: 973322 - DNA, 15 bp, Homo sapiens
cctgtaatcaggagg

SEQ ID NO: 973323 - DNA, 15 bp, Homo sapiens
ctgtaatcaggaggc

SEQ ID NO: 973324 - DNA, 15 bp, Homo sapiens
tgtaatcaggaggct

SEQ ID NO: 973325 - DNA, 15 bp, Homo sapiens
gtaatcaggaggctg

SEQ ID NO: 973326 - DNA, 15 bp, Homo sapiens
taatcaggaggctga

SEQ ID NO: 973327 - DNA, 15 bp, Homo sapiens
aatcaggaggctgag

SEQ ID NO: 973328 - DNA, 15 bp, Homo sapiens
atcaggaggctgagg

SEQ ID NO: 973329 - DNA, 15 bp, Homo sapiens
tcaggaggctgaggc

SEQ ID NO: 973330 - DNA, 15 bp, Homo sapiens
caggaggctgaggcg

SEQ ID NO: 973331 - DNA, 15 bp, Homo sapiens
aggaggctgaggcgg

SEQ ID NO: 973332 - DNA, 15 bp, Homo sapiens
ggaggctgaggcggg

SEQ ID NO: 973333 - DNA, 15 bp, Homo sapiens
gaggctgaggcgggt

SEQ ID NO: 973334 - DNA, 15 bp, Homo sapiens
aggctgaggcgggtg

SEQ ID NO: 973335 - DNA, 15 bp, Homo sapiens
ggctgaggcgggtgg

SEQ ID NO: 973336 - DNA, 15 bp, Homo sapiens
gctgaggcgggtgga

SEQ ID NO: 973337 - DNA, 15 bp, Homo sapiens
ctgaggcgggtggat

SEQ ID NO: 973338 - DNA, 15 bp, Homo sapiens
tgaggcgggtggatc

SEQ ID NO: 973339 - DNA, 15 bp, Homo sapiens
gaggcgggtggatca

SEQ ID NO: 973340 - DNA, 15 bp, Homo sapiens
aggcgggtggatcac

SEQ ID NO: 973341 - DNA, 15 bp, Homo sapiens
ggcgggtggatcacc

SEQ ID NO: 973342 - DNA, 15 bp, Homo sapiens
gcgggtggatcacct

SEQ ID NO: 973343 - DNA, 15 bp, Homo sapiens
cgggtggatcacctg

SEQ ID NO: 973344 - DNA, 15 bp, Homo sapiens
gaggtcaggagttcg

SEQ ID NO: 973345 - DNA, 15 bp, Homo sapiens
aggtcaggagttcga

SEQ ID NO: 973346 - DNA, 15 bp, Homo sapiens
ggtcaggagttcgag

SEQ ID NO: 973347 - DNA, 15 bp, Homo sapiens
gtcaggagttcgaga

SEQ ID NO: 973348 - DNA, 15 bp, Homo sapiens
tcaggagttcgagac

SEQ ID NO: 973349 - DNA, 15 bp, Homo sapiens
caggagttcgagact

SEQ ID NO: 973350 - DNA, 15 bp, Homo sapiens
aggagttcgagacta

SEQ ID NO: 973351 - DNA, 15 bp, Homo sapiens
ggagttcgagactag

SEQ ID NO: 973352 - DNA, 15 bp, Homo sapiens
gagttcgagactagc

SEQ ID NO: 973353 - DNA, 15 bp, Homo sapiens
agttcgagactagcc

SEQ ID NO: 973354 - DNA, 15 bp, Homo sapiens
gttcgagactagcct

SEQ ID NO: 973355 - DNA, 15 bp, Homo sapiens
ttcgagactagcctg

SEQ ID NO: 973356 - DNA, 15 bp, Homo sapiens
tcgagactagcctgg

SEQ ID NO: 973357 - DNA, 15 bp, Homo sapiens
cgagactagcctggc

SEQ ID NO: 973358 - DNA, 15 bp, Homo sapiens
gagactagcctggcc

SEQ ID NO: 973359 - DNA, 15 bp, Homo sapiens
agactagcctggcca

SEQ ID NO: 973360 - DNA, 15 bp, Homo sapiens
gactagcctggccaa

SEQ ID NO: 973361 - DNA, 15 bp, Homo sapiens
actagcctggccaac

SEQ ID NO: 973362 - DNA, 15 bp, Homo sapiens
ctagcctggccaaca

SEQ ID NO: 973363 - DNA, 15 bp, Homo sapiens
tagcctggccaacac

SEQ ID NO: 973364 - DNA, 15 bp, Homo sapiens
agcctggccaacacg

SEQ ID NO: 973365 - DNA, 15 bp, Homo sapiens
gcctggccaacacgg

SEQ ID NO: 973366 - DNA, 15 bp, Homo sapiens
cctggccaacacggt

SEQ ID NO: 973367 - DNA, 15 bp, Homo sapiens
ctggccaacacggtg

SEQ ID NO: 973368 - DNA, 15 bp, Homo sapiens
tggccaacacggtga

SEQ ID NO: 973369 - DNA, 15 bp, Homo sapiens
ggccaacacggtgaa

SEQ ID NO: 973370 - DNA, 15 bp, Homo sapiens
gccaacacggtgaaa

SEQ ID NO: 973371 - DNA, 15 bp, Homo sapiens
ccaacacggtgaaac

SEQ ID NO: 973372 - DNA, 15 bp, Homo sapiens
caacacggtgaaacc

SEQ ID NO: 973373 - DNA, 15 bp, Homo sapiens
aacacggtgaaaccc

SEQ ID NO: 973374 - DNA, 15 bp, Homo sapiens
acacggtgaaacccc

SEQ ID NO: 973375 - DNA, 15 bp, Homo sapiens
cacggtgaaacccca

SEQ ID NO: 973376 - DNA, 15 bp, Homo sapiens
acggtgaaaccccac

SEQ ID NO: 973377 - DNA, 15 bp, Homo sapiens
cggtgaaaccccacc

SEQ ID NO: 973378 - DNA, 15 bp, Homo sapiens
ggtgaaaccccacct

SEQ ID NO: 973379 - DNA, 15 bp, Homo sapiens
gtgaaaccccacctc

SEQ ID NO: 973380 - DNA, 15 bp, Homo sapiens
tgaaaccccacctct

SEQ ID NO: 973381 - DNA, 15 bp, Homo sapiens
gaaaccccacctcta

SEQ ID NO: 973382 - DNA, 15 bp, Homo sapiens
aaaccccacctctac

SEQ ID NO: 973383 - DNA, 15 bp, Homo sapiens
aaccccacctctact

SEQ ID NO: 973384 - DNA, 15 bp, Homo sapiens
accccacctctacta

SEQ ID NO: 973385 - DNA, 15 bp, Homo sapiens
ccccacctctactaa

SEQ ID NO: 973386 - DNA, 15 bp, Homo sapiens
cccacctctactaaa

SEQ ID NO: 973387 - DNA, 15 bp, Homo sapiens
ccacctctactaaaa

SEQ ID NO: 973388 - DNA, 15 bp, Homo sapiens
cacctctactaaaaa

SEQ ID NO: 973389 - DNA, 15 bp, Homo sapiens
acctctactaaaaat

SEQ ID NO: 973390 - DNA, 15 bp, Homo sapiens
cctctactaaaaata

SEQ ID NO: 973391 - DNA, 15 bp, Homo sapiens
aaaattagccaggcg

SEQ ID NO: 973392 - DNA, 15 bp, Homo sapiens
aaattagccaggcgt

SEQ ID NO: 973393 - DNA, 15 bp, Homo sapiens
aattagccaggcgtg

SEQ ID NO: 973394 - DNA, 15 bp, Homo sapiens
attagccaggcgtgg

SEQ ID NO: 973395 - DNA, 15 bp, Homo sapiens
ttagccaggcgtggt

SEQ ID NO: 973396 - DNA, 15 bp, Homo sapiens
tagccaggcgtggtg

SEQ ID NO: 973397 - DNA, 15 bp, Homo sapiens
agccaggcgtggtgg

SEQ ID NO: 973398 - DNA, 15 bp, Homo sapiens
gccaggcgtggtggc

SEQ ID NO: 973399 - DNA, 15 bp, Homo sapiens
ccaggcgtggtggcg

SEQ ID NO: 973400 - DNA, 15 bp, Homo sapiens
caggcgtggtggcgg

SEQ ID NO: 973401 - DNA, 15 bp, Homo sapiens
aggcgtggtggcgga

SEQ ID NO: 973402 - DNA, 15 bp, Homo sapiens
ggcgtggtggcggac

SEQ ID NO: 973403 - DNA, 15 bp, Homo sapiens
gcgtggtggcggacg

SEQ ID NO: 973404 - DNA, 15 bp, Homo sapiens
cgtggtggcggacgc

SEQ ID NO: 973405 - DNA, 15 bp, Homo sapiens
gtggtggcggacgcc

SEQ ID NO: 973406 - DNA, 15 bp, Homo sapiens
tggtggcggacgcct

SEQ ID NO: 973407 - DNA, 15 bp, Homo sapiens
ggtggcggacgcctg

SEQ ID NO: 973408 - DNA, 15 bp, Homo sapiens
gtggcggacgcctgt

SEQ ID NO: 973409 - DNA, 15 bp, Homo sapiens
tggcggacgcctgta

SEQ ID NO: 973410 - DNA, 15 bp, Homo sapiens
ggcggacgcctgtaa

SEQ ID NO: 973411 - DNA, 15 bp, Homo sapiens
gcggacgcctgtaat

SEQ ID NO: 973412 - DNA, 15 bp, Homo sapiens
cggacgcctgtaatc

SEQ ID NO: 973413 - DNA, 15 bp, Homo sapiens
ggacgcctgtaatcc

SEQ ID NO: 973414 - DNA, 15 bp, Homo sapiens
gacgcctgtaatccc

SEQ ID NO: 973415 - DNA, 15 bp, Homo sapiens
acgcctgtaatccca

SEQ ID NO: 973416 - DNA, 15 bp, Homo sapiens
cgcctgtaatcccag

SEQ ID NO: 973417 - DNA, 15 bp, Homo sapiens
aatcccagctactcg

SEQ ID NO: 973418 - DNA, 15 bp, Homo sapiens
atcccagctactcgg

SEQ ID NO: 973419 - DNA, 15 bp, Homo sapiens
tcccagctactcggg

SEQ ID NO: 973420 - DNA, 15 bp, Homo sapiens
cccagctactcggga

SEQ ID NO: 973421 - DNA, 15 bp, Homo sapiens
ccagctactcgggag

SEQ ID NO: 973422 - DNA, 15 bp, Homo sapiens
cagctactcgggagc

SEQ ID NO: 973423 - DNA, 15 bp, Homo sapiens
agctactcgggagcc

SEQ ID NO: 973424 - DNA, 15 bp, Homo sapiens
gctactcgggagcct

SEQ ID NO: 973425 - DNA, 15 bp, Homo sapiens
ctactcgggagcctg

SEQ ID NO: 973426 - DNA, 15 bp, Homo sapiens
tactcgggagcctga

SEQ ID NO: 973427 - DNA, 15 bp, Homo sapiens
actcgggagcctgag

SEQ ID NO: 973428 - DNA, 15 bp, Homo sapiens
ctcgggagcctgagg

SEQ ID NO: 973429 - DNA, 15 bp, Homo sapiens
tcgggagcctgaggc

SEQ ID NO: 973430 - DNA, 15 bp, Homo sapiens
cgggagcctgaggca

SEQ ID NO: 973431 - DNA, 15 bp, Homo sapiens
gggagcctgaggcag

SEQ ID NO: 973432 - DNA, 15 bp, Homo sapiens
ggagcctgaggcagg

SEQ ID NO: 973433 - DNA, 15 bp, Homo sapiens
gagcctgaggcagga

SEQ ID NO: 973434 - DNA, 15 bp, Homo sapiens
agcctgaggcaggat

SEQ ID NO: 973435 - DNA, 15 bp, Homo sapiens
gcctgaggcaggata

SEQ ID NO: 973436 - DNA, 15 bp, Homo sapiens
cctgaggcaggataa

SEQ ID NO: 973437 - DNA, 15 bp, Homo sapiens
ctgaggcaggataat

SEQ ID NO: 973438 - DNA, 15 bp, Homo sapiens
tgaggcaggataatc

SEQ ID NO: 973439 - DNA, 15 bp, Homo sapiens
gaggcaggataatca

SEQ ID NO: 973440 - DNA, 15 bp, Homo sapiens
aggcaggataatcac

SEQ ID NO: 973441 - DNA, 15 bp, Homo sapiens
ggcaggataatcact

SEQ ID NO: 973442 - DNA, 15 bp, Homo sapiens
gcaggataatcactt

SEQ ID NO: 973443 - DNA, 15 bp, Homo sapiens
caggataatcactta

SEQ ID NO: 973444 - DNA, 15 bp, Homo sapiens
aggataatcacttaa

SEQ ID NO: 973445 - DNA, 15 bp, Homo sapiens
ggataatcacttaaa

SEQ ID NO: 973446 - DNA, 15 bp, Homo sapiens
gataatcacttaaac

SEQ ID NO: 973447 - DNA, 15 bp, Homo sapiens
ataatcacttaaacc

SEQ ID NO: 973448 - DNA, 15 bp, Homo sapiens
taatcacttaaaccc

SEQ ID NO: 973449 - DNA, 15 bp, Homo sapiens
aatcacttaaacccg

SEQ ID NO: 973450 - DNA, 15 bp, Homo sapiens
atcacttaaacccgg

SEQ ID NO: 973451 - DNA, 15 bp, Homo sapiens
tcacttaaacccggg

SEQ ID NO: 973452 - DNA, 15 bp, Homo sapiens
cacttaaacccggga

SEQ ID NO: 973453 - DNA, 15 bp, Homo sapiens
acttaaacccgggag

SEQ ID NO: 973454 - DNA, 15 bp, Homo sapiens
cttaaacccgggagg

SEQ ID NO: 973455 - DNA, 15 bp, Homo sapiens
ttaaacccgggaggt

SEQ ID NO: 973456 - DNA, 15 bp, Homo sapiens
taaacccgggaggtg

SEQ ID NO: 973457 - DNA, 15 bp, Homo sapiens
aaacccgggaggtgg

SEQ ID NO: 973458 - DNA, 15 bp, Homo sapiens
aacccgggaggtgga

SEQ ID NO: 973459 - DNA, 15 bp, Homo sapiens
acccgggaggtggag

SEQ ID NO: 973460 - DNA, 15 bp, Homo sapiens
cccgggaggtggagg

SEQ ID NO: 973461 - DNA, 15 bp, Homo sapiens
ccgggaggtggaggc

SEQ ID NO: 973462 - DNA, 15 bp, Homo sapiens
cgggaggtggaggct

SEQ ID NO: 973463 - DNA, 15 bp, Homo sapiens
gggaggtggaggctg

SEQ ID NO: 973464 - DNA, 15 bp, Homo sapiens
ggaggtggaggctgc

SEQ ID NO: 973465 - DNA, 15 bp, Homo sapiens
gaggtggaggctgca

SEQ ID NO: 973466 - DNA, 15 bp, Homo sapiens
aggtggaggctgcag

SEQ ID NO: 973467 - DNA, 15 bp, Homo sapiens
ggtggaggctgcagt

SEQ ID NO: 973468 - DNA, 15 bp, Homo sapiens
gtggaggctgcagtg

SEQ ID NO: 973469 - DNA, 15 bp, Homo sapiens
tggaggctgcagtga

SEQ ID NO: 973470 - DNA, 15 bp, Homo sapiens
ggaggctgcagtgag

SEQ ID NO: 973471 - DNA, 15 bp, Homo sapiens
gaggctgcagtgagc

SEQ ID NO: 973472 - DNA, 15 bp, Homo sapiens
aggctgcagtgagcc

SEQ ID NO: 973473 - DNA, 15 bp, Homo sapiens
ggctgcagtgagcca

SEQ ID NO: 973474 - DNA, 15 bp, Homo sapiens
gctgcagtgagccaa

SEQ ID NO: 973475 - DNA, 15 bp, Homo sapiens
ctgcagtgagccaag

SEQ ID NO: 973476 - DNA, 15 bp, Homo sapiens
gtgagccaagattgc

SEQ ID NO: 973477 - DNA, 15 bp, Homo sapiens
tgagccaagattgca

SEQ ID NO: 973478 - DNA, 15 bp, Homo sapiens
gagccaagattgcat

SEQ ID NO: 973479 - DNA, 15 bp, Homo sapiens
agccaagattgcatc

SEQ ID NO: 973480 - DNA, 15 bp, Homo sapiens
gccaagattgcatca

SEQ ID NO: 973481 - DNA, 15 bp, Homo sapiens
ccaagattgcatcac

SEQ ID NO: 973482 - DNA, 15 bp, Homo sapiens
caagattgcatcact

SEQ ID NO: 973483 - DNA, 15 bp, Homo sapiens
aagattgcatcactg

SEQ ID NO: 973484 - DNA, 15 bp, Homo sapiens
agattgcatcactgc

SEQ ID NO: 973485 - DNA, 15 bp, Homo sapiens
gattgcatcactgca

SEQ ID NO: 973486 - DNA, 15 bp, Homo sapiens
attgcatcactgcac

SEQ ID NO: 973487 - DNA, 15 bp, Homo sapiens
ttgcatcactgcact

SEQ ID NO: 973488 - DNA, 15 bp, Homo sapiens
tgcatcactgcactc

SEQ ID NO: 973489 - DNA, 15 bp, Homo sapiens
gcatcactgcactcc

SEQ ID NO: 973490 - DNA, 15 bp, Homo sapiens
catcactgcactcca

SEQ ID NO: 973491 - DNA, 15 bp, Homo sapiens
atcactgcactccag

SEQ ID NO: 973492 - DNA, 15 bp, Homo sapiens
tcactgcactccagc

SEQ ID NO: 973493 - DNA, 15 bp, Homo sapiens
cactgcactccagcc

SEQ ID NO: 973494 - DNA, 15 bp, Homo sapiens
actgcactccagcct

SEQ ID NO: 973495 - DNA, 15 bp, Homo sapiens
ctgcactccagcctg

SEQ ID NO: 973496 - DNA, 15 bp, Homo sapiens
tgcactccagcctgg

SEQ ID NO: 973497 - DNA, 15 bp, Homo sapiens
gcactccagcctgga

SEQ ID NO: 973498 - DNA, 15 bp, Homo sapiens
cactccagcctggac

SEQ ID NO: 973499 - DNA, 15 bp, Homo sapiens
actccagcctggaca

SEQ ID NO: 973500 - DNA, 15 bp, Homo sapiens
ctccagcctggacaa

SEQ ID NO: 973501 - DNA, 15 bp, Homo sapiens
tccagcctggacaac

SEQ ID NO: 973502 - DNA, 15 bp, Homo sapiens
ccagcctggacaaca

SEQ ID NO: 973503 - DNA, 15 bp, Homo sapiens
cagcctggacaacaa

SEQ ID NO: 973504 - DNA, 15 bp, Homo sapiens
agcctggacaacaag

SEQ ID NO: 973505 - DNA, 15 bp, Homo sapiens
gcctggacaacaaga

SEQ ID NO: 973506 - DNA, 15 bp, Homo sapiens
cctggacaacaagag

SEQ ID NO: 973507 - DNA, 15 bp, Homo sapiens
ctggacaacaagagc

SEQ ID NO: 973508 - DNA, 15 bp, Homo sapiens
tggacaacaagagcg

SEQ ID NO: 973509 - DNA, 15 bp, Homo sapiens
ggacaacaagagcga

SEQ ID NO: 973510 - DNA, 15 bp, Homo sapiens
gacaacaagagcgaa

SEQ ID NO: 973511 - DNA, 15 bp, Homo sapiens
acaacaagagcgaaa

SEQ ID NO: 973512 - DNA, 15 bp, Homo sapiens
caacaagagcgaaac

SEQ ID NO: 973513 - DNA, 15 bp, Homo sapiens
aacaagagcgaaact

SEQ ID NO: 973514 - DNA, 15 bp, Homo sapiens
acaagagcgaaactc

SEQ ID NO: 973515 - DNA, 15 bp, Homo sapiens
caagagcgaaactcc

SEQ ID NO: 973516 - DNA, 15 bp, Homo sapiens
aagagcgaaactcca

SEQ ID NO: 973517 - DNA, 15 bp, Homo sapiens
ctccatctcaaaaag

SEQ ID NO: 973518 - DNA, 15 bp, Homo sapiens
tccatctcaaaaaga

SEQ ID NO: 973519 - DNA, 15 bp, Homo sapiens
ccatctcaaaaagaa

SEQ ID NO: 973520 - DNA, 15 bp, Homo sapiens
catctcaaaaagaag

SEQ ID NO: 973521 - DNA, 15 bp, Homo sapiens
atctcaaaaagaagg

SEQ ID NO: 973522 - DNA, 15 bp, Homo sapiens
tctcaaaaagaaggc

SEQ ID NO: 973523 - DNA, 15 bp, Homo sapiens
ctcaaaaagaaggct

SEQ ID NO: 973524 - DNA, 15 bp, Homo sapiens
tcaaaaagaaggctg

SEQ ID NO: 973525 - DNA, 15 bp, Homo sapiens
caaaaagaaggctga

SEQ ID NO: 973526 - DNA, 15 bp, Homo sapiens
aaaaagaaggctgaa

SEQ ID NO: 973527 - DNA, 15 bp, Homo sapiens
aaaagaaggctgaac

SEQ ID NO: 973528 - DNA, 15 bp, Homo sapiens
aaagaaggctgaacg

SEQ ID NO: 973529 - DNA, 15 bp, Homo sapiens
aagaaggctgaacgt

SEQ ID NO: 973530 - DNA, 15 bp, Homo sapiens
agaaggctgaacgtg

SEQ ID NO: 973531 - DNA, 15 bp, Homo sapiens
gaaggctgaacgtgg

SEQ ID NO: 973532 - DNA, 15 bp, Homo sapiens
aaggctgaacgtggt

SEQ ID NO: 973533 - DNA, 15 bp, Homo sapiens
aggctgaacgtggtg

SEQ ID NO: 973534 - DNA, 15 bp, Homo sapiens
ggctgaacgtggtgg

SEQ ID NO: 973535 - DNA, 15 bp, Homo sapiens
gctgaacgtggtggc

SEQ ID NO: 973536 - DNA, 15 bp, Homo sapiens
ctgaacgtggtggct

SEQ ID NO: 973537 - DNA, 15 bp, Homo sapiens
tgaacgtggtggctc

SEQ ID NO: 973538 - DNA, 15 bp, Homo sapiens
gaacgtggtggctca

SEQ ID NO: 973539 - DNA, 15 bp, Homo sapiens
aacgtggtggctcat

SEQ ID NO: 973540 - DNA, 15 bp, Homo sapiens
acgtggtggctcatg

SEQ ID NO: 973541 - DNA, 15 bp, Homo sapiens
cgtggtggctcatgc

SEQ ID NO: 973542 - DNA, 15 bp, Homo sapiens
gtggtggctcatgcc

SEQ ID NO: 973543 - DNA, 15 bp, Homo sapiens
tggtggctcatgcct

SEQ ID NO: 973544 - DNA, 15 bp, Homo sapiens
ggtggctcatgcctg

SEQ ID NO: 973545 - DNA, 15 bp, Homo sapiens
gtggctcatgcctgt

SEQ ID NO: 973546 - DNA, 15 bp, Homo sapiens
tggctcatgcctgta

SEQ ID NO: 973547 - DNA, 15 bp, Homo sapiens
ggctcatgcctgtaa

SEQ ID NO: 973548 - DNA, 15 bp, Homo sapiens
gctcatgcctgtaat

SEQ ID NO: 973549 - DNA, 15 bp, Homo sapiens
ctcatgcctgtaatc

SEQ ID NO: 973550 - DNA, 15 bp, Homo sapiens
tcatgcctgtaatcc

SEQ ID NO: 973551 - DNA, 15 bp, Homo sapiens
catgcctgtaatccc

SEQ ID NO: 973552 - DNA, 15 bp, Homo sapiens
atgcctgtaatccca

SEQ ID NO: 973553 - DNA, 15 bp, Homo sapiens
cctgtaatcccagca

SEQ ID NO: 973554 - DNA, 15 bp, Homo sapiens
ctgtaatcccagcac

SEQ ID NO: 973555 - DNA, 15 bp, Homo sapiens
tgtaatcccagcact

SEQ ID NO: 973556 - DNA, 15 bp, Homo sapiens
gtaatcccagcactt

SEQ ID NO: 973557 - DNA, 15 bp, Homo sapiens
aatcccagcacttta

SEQ ID NO: 973558 - DNA, 15 bp, Homo sapiens
gcactttaggaggct

SEQ ID NO: 973559 - DNA, 15 bp, Homo sapiens
cactttaggaggctg

SEQ ID NO: 973560 - DNA, 15 bp, Homo sapiens
actttaggaggctga

SEQ ID NO: 973561 - DNA, 15 bp, Homo sapiens
ctttaggaggctgag

SEQ ID NO: 973562 - DNA, 15 bp, Homo sapiens
tttaggaggctgagg

SEQ ID NO: 973563 - DNA, 15 bp, Homo sapiens
ttaggaggctgaggt

SEQ ID NO: 973564 - DNA, 15 bp, Homo sapiens
taggaggctgaggtg

SEQ ID NO: 973565 - DNA, 15 bp, Homo sapiens
aggaggctgaggtgg

SEQ ID NO: 973566 - DNA, 15 bp, Homo sapiens
ggaggctgaggtggg

SEQ ID NO: 973567 - DNA, 15 bp, Homo sapiens
gaggctgaggtgggc

SEQ ID NO: 973568 - DNA, 15 bp, Homo sapiens
aggctgaggtgggcg

SEQ ID NO: 973569 - DNA, 15 bp, Homo sapiens
ggctgaggtgggcgg

SEQ ID NO: 973570 - DNA, 15 bp, Homo sapiens
gctgaggtgggcgga

SEQ ID NO: 973571 - DNA, 15 bp, Homo sapiens
ctgaggtgggcggat

SEQ ID NO: 973572 - DNA, 15 bp, Homo sapiens
tgaggtgggcggatc

SEQ ID NO: 973573 - DNA, 15 bp, Homo sapiens
gaggtgggcggatca

SEQ ID NO: 973574 - DNA, 15 bp, Homo sapiens
aggtgggcggatcac

SEQ ID NO: 973575 - DNA, 15 bp, Homo sapiens
ggtgggcggatcacc

SEQ ID NO: 973576 - DNA, 15 bp, Homo sapiens
gtgggcggatcacct

SEQ ID NO: 973577 - DNA, 15 bp, Homo sapiens
tgggcggatcacctg

SEQ ID NO: 973578 - DNA, 15 bp, Homo sapiens
gggcggatcacctga

SEQ ID NO: 973579 - DNA, 15 bp, Homo sapiens
ggcggatcacctgag

SEQ ID NO: 973580 - DNA, 15 bp, Homo sapiens
gcggatcacctgagg

SEQ ID NO: 973581 - DNA, 15 bp, Homo sapiens
cggatcacctgaggt

SEQ ID NO: 973582 - DNA, 15 bp, Homo sapiens
tgaggtcaggagttt

SEQ ID NO: 973583 - DNA, 15 bp, Homo sapiens
gaggtcaggagtttg

SEQ ID NO: 973584 - DNA, 15 bp, Homo sapiens
aggtcaggagtttga

SEQ ID NO: 973585 - DNA, 15 bp, Homo sapiens
ggtcaggagtttgag

SEQ ID NO: 973586 - DNA, 15 bp, Homo sapiens
gtcaggagtttgaga

SEQ ID NO: 973587 - DNA, 15 bp, Homo sapiens
tcaggagtttgagac

SEQ ID NO: 973588 - DNA, 15 bp, Homo sapiens
caggagtttgagacc

SEQ ID NO: 973589 - DNA, 15 bp, Homo sapiens
aggagtttgagacca

SEQ ID NO: 973590 - DNA, 15 bp, Homo sapiens
ggagtttgagaccag

SEQ ID NO: 973591 - DNA, 15 bp, Homo sapiens
gagtttgagaccagc

SEQ ID NO: 973592 - DNA, 15 bp, Homo sapiens
agtttgagaccagcc

SEQ ID NO: 973593 - DNA, 15 bp, Homo sapiens
gtttgagaccagcct

SEQ ID NO: 973594 - DNA, 15 bp, Homo sapiens
tttgagaccagcctg

SEQ ID NO: 973595 - DNA, 15 bp, Homo sapiens
ttgagaccagcctgg

SEQ ID NO: 973596 - DNA, 15 bp, Homo sapiens
tgagaccagcctggc

SEQ ID NO: 973597 - DNA, 15 bp, Homo sapiens
cagcctggccaacac

SEQ ID NO: 973598 - DNA, 15 bp, Homo sapiens
agcctggccaacaca

SEQ ID NO: 973599 - DNA, 15 bp, Homo sapiens
gcctggccaacacag

SEQ ID NO: 973600 - DNA, 15 bp, Homo sapiens
cctggccaacacagt

SEQ ID NO: 973601 - DNA, 15 bp, Homo sapiens
ctggccaacacagtg

SEQ ID NO: 973602 - DNA, 15 bp, Homo sapiens
tggccaacacagtga

SEQ ID NO: 973603 - DNA, 15 bp, Homo sapiens
ggccaacacagtgaa

SEQ ID NO: 973604 - DNA, 15 bp, Homo sapiens
gccaacacagtgaaa

SEQ ID NO: 973605 - DNA, 15 bp, Homo sapiens
ccaacacagtgaaac

SEQ ID NO: 973606 - DNA, 15 bp, Homo sapiens
caacacagtgaaacc

SEQ ID NO: 973607 - DNA, 15 bp, Homo sapiens
aacacagtgaaaccc

SEQ ID NO: 973608 - DNA, 15 bp, Homo sapiens
acacagtgaaaccct

SEQ ID NO: 973609 - DNA, 15 bp, Homo sapiens
cacagtgaaaccctg

SEQ ID NO: 973610 - DNA, 15 bp, Homo sapiens
acagtgaaaccctgt

SEQ ID NO: 973611 - DNA, 15 bp, Homo sapiens
cagtgaaaccctgtc

SEQ ID NO: 973612 - DNA, 15 bp, Homo sapiens
agtgaaaccctgtct

SEQ ID NO: 973613 - DNA, 15 bp, Homo sapiens
gtgaaaccctgtctc

SEQ ID NO: 973614 - DNA, 15 bp, Homo sapiens
tgaaaccctgtctct

SEQ ID NO: 973615 - DNA, 15 bp, Homo sapiens
gaaaccctgtctcta

SEQ ID NO: 973616 - DNA, 15 bp, Homo sapiens
aaaccctgtctctac

SEQ ID NO: 973617 - DNA, 15 bp, Homo sapiens
aaccctgtctctact

SEQ ID NO: 973618 - DNA, 15 bp, Homo sapiens
accctgtctctacta

SEQ ID NO: 973619 - DNA, 15 bp, Homo sapiens
ccctgtctctactaa

SEQ ID NO: 973620 - DNA, 15 bp, Homo sapiens
cctgtctctactaaa

SEQ ID NO: 973621 - DNA, 15 bp, Homo sapiens
ctgtctctactaaaa

SEQ ID NO: 973622 - DNA, 15 bp, Homo sapiens
tgtctctactaaaaa

SEQ ID NO: 973623 - DNA, 15 bp, Homo sapiens
gtctctactaaaaat

SEQ ID NO: 973624 - DNA, 15 bp, Homo sapiens
aaattagccaggcat

SEQ ID NO: 973625 - DNA, 15 bp, Homo sapiens
aattagccaggcatg

SEQ ID NO: 973626 - DNA, 15 bp, Homo sapiens
attagccaggcatgg

SEQ ID NO: 973627 - DNA, 15 bp, Homo sapiens
ttagccaggcatggt

SEQ ID NO: 973628 - DNA, 15 bp, Homo sapiens
tagccaggcatggtg

SEQ ID NO: 973629 - DNA, 15 bp, Homo sapiens
agccaggcatggtgg

SEQ ID NO: 973630 - DNA, 15 bp, Homo sapiens
gccaggcatggtggc

SEQ ID NO: 973631 - DNA, 15 bp, Homo sapiens
ccaggcatggtggca

SEQ ID NO: 973632 - DNA, 15 bp, Homo sapiens
caggcatggtggcac

SEQ ID NO: 973633 - DNA, 15 bp, Homo sapiens
aggcatggtggcaca

SEQ ID NO: 973634 - DNA, 15 bp, Homo sapiens
ggcatggtggcacat

SEQ ID NO: 973635 - DNA, 15 bp, Homo sapiens
gcatggtggcacata

SEQ ID NO: 973636 - DNA, 15 bp, Homo sapiens
catggtggcacatac

SEQ ID NO: 973637 - DNA, 15 bp, Homo sapiens
atggtggcacatacc

SEQ ID NO: 973638 - DNA, 15 bp, Homo sapiens
tggtggcacatacct

SEQ ID NO: 973639 - DNA, 15 bp, Homo sapiens
ggtggcacatacctg

SEQ ID NO: 973640 - DNA, 15 bp, Homo sapiens
gtggcacatacctgt

SEQ ID NO: 973641 - DNA, 15 bp, Homo sapiens
tggcacatacctgta

SEQ ID NO: 973642 - DNA, 15 bp, Homo sapiens
ggcacatacctgtaa

SEQ ID NO: 973643 - DNA, 15 bp, Homo sapiens
gcacatacctgtaat

SEQ ID NO: 973644 - DNA, 15 bp, Homo sapiens
cacatacctgtaatc

SEQ ID NO: 973645 - DNA, 15 bp, Homo sapiens
acatacctgtaatcc

SEQ ID NO: 973646 - DNA, 15 bp, Homo sapiens
catacctgtaatccc

SEQ ID NO: 973647 - DNA, 15 bp, Homo sapiens
atacctgtaatccca

SEQ ID NO: 973648 - DNA, 15 bp, Homo sapiens
tacctgtaatcccag

SEQ ID NO: 973649 - DNA, 15 bp, Homo sapiens
acctgtaatcccagc

SEQ ID NO: 973650 - DNA, 15 bp, Homo sapiens
taatcccagctacta

SEQ ID NO: 973651 - DNA, 15 bp, Homo sapiens
aatcccagctactag

SEQ ID NO: 973652 - DNA, 15 bp, Homo sapiens
atcccagctactaga

SEQ ID NO: 973653 - DNA, 15 bp, Homo sapiens
tcccagctactagag

SEQ ID NO: 973654 - DNA, 15 bp, Homo sapiens
cccagctactagagg

SEQ ID NO: 973655 - DNA, 15 bp, Homo sapiens
ccagctactagaggg

SEQ ID NO: 973656 - DNA, 15 bp, Homo sapiens
cagctactagagggg

SEQ ID NO: 973657 - DNA, 15 bp, Homo sapiens
agctactagaggggt

SEQ ID NO: 973658 - DNA, 15 bp, Homo sapiens
gctactagaggggtg

SEQ ID NO: 973659 - DNA, 15 bp, Homo sapiens
ctactagaggggtgg

SEQ ID NO: 973660 - DNA, 15 bp, Homo sapiens
tactagaggggtgga

SEQ ID NO: 973661 - DNA, 15 bp, Homo sapiens
actagaggggtggag

SEQ ID NO: 973662 - DNA, 15 bp, Homo sapiens
ctagaggggtggagg

SEQ ID NO: 973663 - DNA, 15 bp, Homo sapiens
tagaggggtggaggc

SEQ ID NO: 973664 - DNA, 15 bp, Homo sapiens
agaggggtggaggca

SEQ ID NO: 973665 - DNA, 15 bp, Homo sapiens
gaggggtggaggcag

SEQ ID NO: 973666 - DNA, 15 bp, Homo sapiens
aggggtggaggcagg

SEQ ID NO: 973667 - DNA, 15 bp, Homo sapiens
ggggtggaggcagga

SEQ ID NO: 973668 - DNA, 15 bp, Homo sapiens
gggtggaggcaggag

SEQ ID NO: 973669 - DNA, 15 bp, Homo sapiens
ggtggaggcaggaga

SEQ ID NO: 973670 - DNA, 15 bp, Homo sapiens
gtggaggcaggagaa

SEQ ID NO: 973671 - DNA, 15 bp, Homo sapiens
tggaggcaggagaat

SEQ ID NO: 973672 - DNA, 15 bp, Homo sapiens
ggaggcaggagaatc

SEQ ID NO: 973673 - DNA, 15 bp, Homo sapiens
ggagaatcgcttgag

SEQ ID NO: 973674 - DNA, 15 bp, Homo sapiens
gagaatcgcttgagc

SEQ ID NO: 973675 - DNA, 15 bp, Homo sapiens
agaatcgcttgagcc

SEQ ID NO: 973676 - DNA, 15 bp, Homo sapiens
gaatcgcttgagcct

SEQ ID NO: 973677 - DNA, 15 bp, Homo sapiens
aatcgcttgagcctg

SEQ ID NO: 973678 - DNA, 15 bp, Homo sapiens
atcgcttgagcctgg

SEQ ID NO: 973679 - DNA, 15 bp, Homo sapiens
tcgcttgagcctggg

SEQ ID NO: 973680 - DNA, 15 bp, Homo sapiens
cgcttgagcctggga

SEQ ID NO: 973681 - DNA, 15 bp, Homo sapiens
gcttgagcctgggag

SEQ ID NO: 973682 - DNA, 15 bp, Homo sapiens
cttgagcctgggagg

SEQ ID NO: 973683 - DNA, 15 bp, Homo sapiens
ttgagcctgggaggc

SEQ ID NO: 973684 - DNA, 15 bp, Homo sapiens
tgagcctgggaggca

SEQ ID NO: 973685 - DNA, 15 bp, Homo sapiens
gagcctgggaggcag

SEQ ID NO: 973686 - DNA, 15 bp, Homo sapiens
agcctgggaggcaga

SEQ ID NO: 973687 - DNA, 15 bp, Homo sapiens
gcctgggaggcagaa

SEQ ID NO: 973688 - DNA, 15 bp, Homo sapiens
cctgggaggcagaat

SEQ ID NO: 973689 - DNA, 15 bp, Homo sapiens
ctgggaggcagaatt

SEQ ID NO: 973690 - DNA, 15 bp, Homo sapiens
tgggaggcagaattt

SEQ ID NO: 973691 - DNA, 15 bp, Homo sapiens
gggaggcagaatttg

SEQ ID NO: 973692 - DNA, 15 bp, Homo sapiens
ggaggcagaatttgc

SEQ ID NO: 973693 - DNA, 15 bp, Homo sapiens
gaggcagaatttgca

SEQ ID NO: 973694 - DNA, 15 bp, Homo sapiens
aggcagaatttgcag

SEQ ID NO: 973695 - DNA, 15 bp, Homo sapiens
ggcagaatttgcagt

SEQ ID NO: 973696 - DNA, 15 bp, Homo sapiens
gcagaatttgcagtg

SEQ ID NO: 973697 - DNA, 15 bp, Homo sapiens
cagaatttgcagtga

SEQ ID NO: 973698 - DNA, 15 bp, Homo sapiens
agaatttgcagtgag

SEQ ID NO: 973699 - DNA, 15 bp, Homo sapiens
gaatttgcagtgagc

SEQ ID NO: 973700 - DNA, 15 bp, Homo sapiens
aatttgcagtgagcc

SEQ ID NO: 973701 - DNA, 15 bp, Homo sapiens
atttgcagtgagcca

SEQ ID NO: 973702 - DNA, 15 bp, Homo sapiens
tttgcagtgagccaa

SEQ ID NO: 973703 - DNA, 15 bp, Homo sapiens
agtgagccaagatcg

SEQ ID NO: 973704 - DNA, 15 bp, Homo sapiens
gtgagccaagatcgt

SEQ ID NO: 973705 - DNA, 15 bp, Homo sapiens
tgagccaagatcgtg

SEQ ID NO: 973706 - DNA, 15 bp, Homo sapiens
gagccaagatcgtgc

SEQ ID NO: 973707 - DNA, 15 bp, Homo sapiens
agccaagatcgtgcc

SEQ ID NO: 973708 - DNA, 15 bp, Homo sapiens
gccaagatcgtgcca

SEQ ID NO: 973709 - DNA, 15 bp, Homo sapiens
ccaagatcgtgccac

SEQ ID NO: 973710 - DNA, 15 bp, Homo sapiens
caagatcgtgccact

SEQ ID NO: 973711 - DNA, 15 bp, Homo sapiens
aagatcgtgccactg

SEQ ID NO: 973712 - DNA, 15 bp, Homo sapiens
agatcgtgccactgc

SEQ ID NO: 973713 - DNA, 15 bp, Homo sapiens
gatcgtgccactgca

SEQ ID NO: 973714 - DNA, 15 bp, Homo sapiens
atcgtgccactgcac

SEQ ID NO: 973715 - DNA, 15 bp, Homo sapiens
tcgtgccactgcact

SEQ ID NO: 973716 - DNA, 15 bp, Homo sapiens
cgtgccactgcactc

SEQ ID NO: 973717 - DNA, 15 bp, Homo sapiens
gtgccactgcactcc

SEQ ID NO: 973718 - DNA, 15 bp, Homo sapiens
tgccactgcactcca

SEQ ID NO: 973719 - DNA, 15 bp, Homo sapiens
gccactgcactccag

SEQ ID NO: 973720 - DNA, 15 bp, Homo sapiens
ccactgcactccagc

SEQ ID NO: 973721 - DNA, 15 bp, Homo sapiens
gcactccagcctggg

SEQ ID NO: 973722 - DNA, 15 bp, Homo sapiens
cactccagcctgggc

SEQ ID NO: 973723 - DNA, 15 bp, Homo sapiens
actccagcctgggca

SEQ ID NO: 973724 - DNA, 15 bp, Homo sapiens
ctccagcctgggcaa

SEQ ID NO: 973725 - DNA, 15 bp, Homo sapiens
tccagcctgggcaac

SEQ ID NO: 973726 - DNA, 15 bp, Homo sapiens
ccagcctgggcaaca

SEQ ID NO: 973727 - DNA, 15 bp, Homo sapiens
ctgggcaacagagcc

SEQ ID NO: 973728 - DNA, 15 bp, Homo sapiens
tgggcaacagagcca

SEQ ID NO: 973729 - DNA, 15 bp, Homo sapiens
gggcaacagagccag

SEQ ID NO: 973730 - DNA, 15 bp, Homo sapiens
ggcaacagagccaga

SEQ ID NO: 973731 - DNA, 15 bp, Homo sapiens
gcaacagagccagac

SEQ ID NO: 973732 - DNA, 15 bp, Homo sapiens
caacagagccagact

SEQ ID NO: 973733 - DNA, 15 bp, Homo sapiens
aacagagccagactc

SEQ ID NO: 973734 - DNA, 15 bp, Homo sapiens
acagagccagactct

SEQ ID NO: 973735 - DNA, 15 bp, Homo sapiens
cagagccagactctg

SEQ ID NO: 973736 - DNA, 15 bp, Homo sapiens
agagccagactctgt

SEQ ID NO: 973737 - DNA, 15 bp, Homo sapiens
gagccagactctgtt

SEQ ID NO: 973738 - DNA, 15 bp, Homo sapiens
agccagactctgttg

SEQ ID NO: 973739 - DNA, 15 bp, Homo sapiens
gccagactctgttgg

SEQ ID NO: 973740 - DNA, 15 bp, Homo sapiens
ccagactctgttggg

SEQ ID NO: 973741 - DNA, 15 bp, Homo sapiens
cagactctgttgggg

SEQ ID NO: 973742 - DNA, 15 bp, Homo sapiens
agactctgttggggg

SEQ ID NO: 973743 - DNA, 15 bp, Homo sapiens
gactctgttgggggg

SEQ ID NO: 973744 - DNA, 15 bp, Homo sapiens
actctgttggggggg

SEQ ID NO: 973745 - DNA, 15 bp, Homo sapiens
ctctgttggggggga

SEQ ID NO: 973746 - DNA, 15 bp, Homo sapiens
tctgttgggggggaa

SEQ ID NO: 973747 - DNA, 15 bp, Homo sapiens
ctgttgggggggaag

SEQ ID NO: 973748 - DNA, 15 bp, Homo sapiens
tgttgggggggaaga

SEQ ID NO: 973749 - DNA, 15 bp, Homo sapiens
gttgggggggaagaa

SEQ ID NO: 973750 - DNA, 15 bp, Homo sapiens
ttgggggggaagaag

SEQ ID NO: 973751 - DNA, 15 bp, Homo sapiens
tgggggggaagaaga

SEQ ID NO: 973752 - DNA, 15 bp, Homo sapiens
gggggggaagaagaa

SEQ ID NO: 973753 - DNA, 15 bp, Homo sapiens
ggggggaagaagaaa

SEQ ID NO: 973754 - DNA, 15 bp, Homo sapiens
gggggaagaagaaag

SEQ ID NO: 973755 - DNA, 15 bp, Homo sapiens
ggggaagaagaaagg

SEQ ID NO: 973756 - DNA, 15 bp, Homo sapiens
gggaagaagaaagga

SEQ ID NO: 973757 - DNA, 15 bp, Homo sapiens
ggaagaagaaaggaa

SEQ ID NO: 973758 - DNA, 15 bp, Homo sapiens
gaagaagaaaggaaa

SEQ ID NO: 973759 - DNA, 15 bp, Homo sapiens
aagaagaaaggaaag

SEQ ID NO: 973760 - DNA, 15 bp, Homo sapiens
agaagaaaggaaaga

SEQ ID NO: 973761 - DNA, 15 bp, Homo sapiens
gaagaaaggaaagaa

SEQ ID NO: 973762 - DNA, 15 bp, Homo sapiens
aagaaaggaaagaaa

SEQ ID NO: 973763 - DNA, 15 bp, Homo sapiens
agaaaggaaagaaaa

SEQ ID NO: 973764 - DNA, 15 bp, Homo sapiens
gaaaggaaagaaaag

SEQ ID NO: 973765 - DNA, 15 bp, Homo sapiens
aaaggaaagaaaagg

SEQ ID NO: 973766 - DNA, 15 bp, Homo sapiens
aaggaaagaaaagga

SEQ ID NO: 973767 - DNA, 15 bp, Homo sapiens
aggaaagaaaaggaa

SEQ ID NO: 973768 - DNA, 15 bp, Homo sapiens
ggaaagaaaaggaaa

SEQ ID NO: 973769 - DNA, 15 bp, Homo sapiens
gaaagaaaaggaaaa

SEQ ID NO: 973770 - DNA, 15 bp, Homo sapiens
aaagaaaaggaaaag

SEQ ID NO: 973771 - DNA, 15 bp, Homo sapiens
aagaaaaggaaaaga

SEQ ID NO: 973772 - DNA, 15 bp, Homo sapiens
agaaaaggaaaagaa

SEQ ID NO: 973773 - DNA, 15 bp, Homo sapiens
gaaaaggaaaagaaa

SEQ ID NO: 973774 - DNA, 15 bp, Homo sapiens
aaaaggaaaagaaaa

SEQ ID NO: 973775 - DNA, 15 bp, Homo sapiens
aaaggaaaagaaaag

SEQ ID NO: 973776 - DNA, 15 bp, Homo sapiens
aaggaaaagaaaaga

SEQ ID NO: 973777 - DNA, 15 bp, Homo sapiens
aggaaaagaaaagaa

SEQ ID NO: 973778 - DNA, 15 bp, Homo sapiens
ggaaaagaaaagaaa

SEQ ID NO: 973779 - DNA, 15 bp, Homo sapiens
gaaaagaaaagaaag

SEQ ID NO: 973780 - DNA, 15 bp, Homo sapiens
aaaagaaaagaaaga

SEQ ID NO: 973781 - DNA, 15 bp, Homo sapiens
aaagaaaagaaagag

SEQ ID NO: 973782 - DNA, 15 bp, Homo sapiens
aagaaaagaaagaga

SEQ ID NO: 973783 - DNA, 15 bp, Homo sapiens
agaaaagaaagagaa

SEQ ID NO: 973784 - DNA, 15 bp, Homo sapiens
gaaaagaaagagaag

SEQ ID NO: 973785 - DNA, 15 bp, Homo sapiens
aaaagaaagagaagg

SEQ ID NO: 973786 - DNA, 15 bp, Homo sapiens
aaagaaagagaagga

SEQ ID NO: 973787 - DNA, 15 bp, Homo sapiens
aagaaagagaaggaa

SEQ ID NO: 973788 - DNA, 15 bp, Homo sapiens
agaaagagaaggaag

SEQ ID NO: 973789 - DNA, 15 bp, Homo sapiens
gaaagagaaggaagg

SEQ ID NO: 973790 - DNA, 15 bp, Homo sapiens
aaagagaaggaagga

SEQ ID NO: 973791 - DNA, 15 bp, Homo sapiens
aagagaaggaaggaa

SEQ ID NO: 973792 - DNA, 15 bp, Homo sapiens
agagaaggaaggaag

SEQ ID NO: 973793 - DNA, 15 bp, Homo sapiens
gagaaggaaggaaga

SEQ ID NO: 973794 - DNA, 15 bp, Homo sapiens
agaaggaaggaagaa

SEQ ID NO: 973795 - DNA, 15 bp, Homo sapiens
gaaggaaggaagaaa

SEQ ID NO: 973796 - DNA, 15 bp, Homo sapiens
aaggaaggaagaaag

SEQ ID NO: 973797 - DNA, 15 bp, Homo sapiens
aggaaggaagaaagg

SEQ ID NO: 973798 - DNA, 15 bp, Homo sapiens
ggaaggaagaaaggg

SEQ ID NO: 973799 - DNA, 15 bp, Homo sapiens
gaaggaagaaaggga

SEQ ID NO: 973800 - DNA, 15 bp, Homo sapiens
aaggaagaaagggag

SEQ ID NO: 973801 - DNA, 15 bp, Homo sapiens
aggaagaaagggagg

SEQ ID NO: 973802 - DNA, 15 bp, Homo sapiens
ggaagaaagggaggg

SEQ ID NO: 973803 - DNA, 15 bp, Homo sapiens
gaagaaagggaggga

SEQ ID NO: 973804 - DNA, 15 bp, Homo sapiens
aagaaagggagggag

SEQ ID NO: 973805 - DNA, 15 bp, Homo sapiens
agaaagggagggagg

SEQ ID NO: 973806 - DNA, 15 bp, Homo sapiens
gaaagggagggaggg

SEQ ID NO: 973807 - DNA, 15 bp, Homo sapiens
aaagggagggaggga

SEQ ID NO: 973808 - DNA, 15 bp, Homo sapiens
aagggagggagggaa

SEQ ID NO: 973809 - DNA, 15 bp, Homo sapiens
agggagggagggaag

SEQ ID NO: 973810 - DNA, 15 bp, Homo sapiens
gggagggagggaagg

SEQ ID NO: 973811 - DNA, 15 bp, Homo sapiens
ggagggagggaagga

SEQ ID NO: 973812 - DNA, 15 bp, Homo sapiens
gagggagggaaggag

SEQ ID NO: 973813 - DNA, 15 bp, Homo sapiens
agggagggaaggagg

SEQ ID NO: 973814 - DNA, 15 bp, Homo sapiens
gggagggaaggagga

SEQ ID NO: 973815 - DNA, 15 bp, Homo sapiens
ggagggaaggaggaa

SEQ ID NO: 973816 - DNA, 15 bp, Homo sapiens
gagggaaggaggaag

SEQ ID NO: 973817 - DNA, 15 bp, Homo sapiens
agggaaggaggaaga

SEQ ID NO: 973818 - DNA, 15 bp, Homo sapiens
gggaaggaggaagag

SEQ ID NO: 973819 - DNA, 15 bp, Homo sapiens
ggaaggaggaagagg

SEQ ID NO: 973820 - DNA, 15 bp, Homo sapiens
gaaggaggaagaggc

SEQ ID NO: 973821 - DNA, 15 bp, Homo sapiens
aaggaggaagaggct

SEQ ID NO: 973822 - DNA, 15 bp, Homo sapiens
aggaggaagaggctt

SEQ ID NO: 973823 - DNA, 15 bp, Homo sapiens
ggaggaagaggcttt

SEQ ID NO: 973824 - DNA, 15 bp, Homo sapiens
gaggaagaggctttc

SEQ ID NO: 973825 - DNA, 15 bp, Homo sapiens
aggaagaggctttca

SEQ ID NO: 973826 - DNA, 15 bp, Homo sapiens
ggaagaggctttcag

SEQ ID NO: 973827 - DNA, 15 bp, Homo sapiens
gaagaggctttcaga

SEQ ID NO: 973828 - DNA, 15 bp, Homo sapiens
aagaggctttcagaa

SEQ ID NO: 973829 - DNA, 15 bp, Homo sapiens
agaggctttcagaat

SEQ ID NO: 973830 - DNA, 15 bp, Homo sapiens
gaggctttcagaata

SEQ ID NO: 973831 - DNA, 15 bp, Homo sapiens
aggctttcagaatac

SEQ ID NO: 973832 - DNA, 15 bp, Homo sapiens
ggctttcagaataca

SEQ ID NO: 973833 - DNA, 15 bp, Homo sapiens
gctttcagaatacag

SEQ ID NO: 973834 - DNA, 15 bp, Homo sapiens
ctttcagaatacaga

SEQ ID NO: 973835 - DNA, 15 bp, Homo sapiens
tttcagaatacagag

SEQ ID NO: 973836 - DNA, 15 bp, Homo sapiens
ttcagaatacagagg

SEQ ID NO: 973837 - DNA, 15 bp, Homo sapiens
tcagaatacagaggg

SEQ ID NO: 973838 - DNA, 15 bp, Homo sapiens
cagaatacagagggt

SEQ ID NO: 973839 - DNA, 15 bp, Homo sapiens
agaatacagagggtt

SEQ ID NO: 973840 - DNA, 15 bp, Homo sapiens
gaatacagagggttc

SEQ ID NO: 973841 - DNA, 15 bp, Homo sapiens
aatacagagggttct

SEQ ID NO: 973842 - DNA, 15 bp, Homo sapiens
atacagagggttctg

SEQ ID NO: 973843 - DNA, 15 bp, Homo sapiens
tacagagggttctgc

SEQ ID NO: 973844 - DNA, 15 bp, Homo sapiens
acagagggttctgca

SEQ ID NO: 973845 - DNA, 15 bp, Homo sapiens
cagagggttctgcag

SEQ ID NO: 973846 - DNA, 15 bp, Homo sapiens
agagggttctgcagt

SEQ ID NO: 973847 - DNA, 15 bp, Homo sapiens
gagggttctgcagtg

SEQ ID NO: 973848 - DNA, 15 bp, Homo sapiens
agggttctgcagtgt

SEQ ID NO: 973849 - DNA, 15 bp, Homo sapiens
gggttctgcagtgtg

SEQ ID NO: 973850 - DNA, 15 bp, Homo sapiens
ggttctgcagtgtgt

SEQ ID NO: 973851 - DNA, 15 bp, Homo sapiens
gttctgcagtgtgtg

SEQ ID NO: 973852 - DNA, 15 bp, Homo sapiens
ttctgcagtgtgtgg

SEQ ID NO: 973853 - DNA, 15 bp, Homo sapiens
tctgcagtgtgtgga

SEQ ID NO: 973854 - DNA, 15 bp, Homo sapiens
ctgcagtgtgtggag

SEQ ID NO: 973855 - DNA, 15 bp, Homo sapiens
tgcagtgtgtggaga

SEQ ID NO: 973856 - DNA, 15 bp, Homo sapiens
gcagtgtgtggagag

SEQ ID NO: 973857 - DNA, 15 bp, Homo sapiens
cagtgtgtggagaga

SEQ ID NO: 973858 - DNA, 15 bp, Homo sapiens
agtgtgtggagagat

SEQ ID NO: 973859 - DNA, 15 bp, Homo sapiens
gtgtgtggagagata

SEQ ID NO: 973860 - DNA, 15 bp, Homo sapiens
tgtgtggagagatac

SEQ ID NO: 973861 - DNA, 15 bp, Homo sapiens
gtgtggagagatact

SEQ ID NO: 973862 - DNA, 15 bp, Homo sapiens
tgtggagagatactt

SEQ ID NO: 973863 - DNA, 15 bp, Homo sapiens
gtggagagatacttg

SEQ ID NO: 973864 - DNA, 15 bp, Homo sapiens
tggagagatacttgt

SEQ ID NO: 973865 - DNA, 15 bp, Homo sapiens
ggagagatacttgtt

SEQ ID NO: 973866 - DNA, 15 bp, Homo sapiens
gagagatacttgttc

SEQ ID NO: 973867 - DNA, 15 bp, Homo sapiens
agagatacttgttcc

SEQ ID NO: 973868 - DNA, 15 bp, Homo sapiens
gagatacttgttcct

SEQ ID NO: 973869 - DNA, 15 bp, Homo sapiens
agatacttgttccta

SEQ ID NO: 973870 - DNA, 15 bp, Homo sapiens
gatacttgttcctac

SEQ ID NO: 973871 - DNA, 15 bp, Homo sapiens
atacttgttcctacc

SEQ ID NO: 973872 - DNA, 15 bp, Homo sapiens
tacttgttcctacct

SEQ ID NO: 973873 - DNA, 15 bp, Homo sapiens
acttgttcctacctt

SEQ ID NO: 973874 - DNA, 15 bp, Homo sapiens
cttgttcctaccttt

SEQ ID NO: 973875 - DNA, 15 bp, Homo sapiens
ttgttcctacctttg

SEQ ID NO: 973876 - DNA, 15 bp, Homo sapiens
tgttcctacctttga

SEQ ID NO: 973877 - DNA, 15 bp, Homo sapiens
gttcctacctttgat

SEQ ID NO: 973878 - DNA, 15 bp, Homo sapiens
ttcctacctttgatg

SEQ ID NO: 973879 - DNA, 15 bp, Homo sapiens
tcctacctttgatgg

SEQ ID NO: 973880 - DNA, 15 bp, Homo sapiens
cctacctttgatggt

SEQ ID NO: 973881 - DNA, 15 bp, Homo sapiens
ctacctttgatggtg

SEQ ID NO: 973882 - DNA, 15 bp, Homo sapiens
tacctttgatggtgg

SEQ ID NO: 973883 - DNA, 15 bp, Homo sapiens
acctttgatggtggg

SEQ ID NO: 973884 - DNA, 15 bp, Homo sapiens
cctttgatggtgggg

SEQ ID NO: 973885 - DNA, 15 bp, Homo sapiens
ctttgatggtggggc

SEQ ID NO: 973886 - DNA, 15 bp, Homo sapiens
tttgatggtggggcc

SEQ ID NO: 973887 - DNA, 15 bp, Homo sapiens
ttgatggtggggccc

SEQ ID NO: 973888 - DNA, 15 bp, Homo sapiens
tgatggtggggccca

SEQ ID NO: 973889 - DNA, 15 bp, Homo sapiens
gatggtggggcccag

SEQ ID NO: 973890 - DNA, 15 bp, Homo sapiens
atggtggggcccagc

SEQ ID NO: 973891 - DNA, 15 bp, Homo sapiens
tggtggggcccagca

SEQ ID NO: 973892 - DNA, 15 bp, Homo sapiens
ggtggggcccagcac

SEQ ID NO: 973893 - DNA, 15 bp, Homo sapiens
gtggggcccagcaca

SEQ ID NO: 973894 - DNA, 15 bp, Homo sapiens
tggggcccagcacac

SEQ ID NO: 973895 - DNA, 15 bp, Homo sapiens
ggggcccagcacacc

SEQ ID NO: 973896 - DNA, 15 bp, Homo sapiens
gggcccagcacaccc

SEQ ID NO: 973897 - DNA, 15 bp, Homo sapiens
ggcccagcacaccca

SEQ ID NO: 973898 - DNA, 15 bp, Homo sapiens
gcccagcacacccaa

SEQ ID NO: 973899 - DNA, 15 bp, Homo sapiens
cccagcacacccaac

SEQ ID NO: 973900 - DNA, 15 bp, Homo sapiens
ccagcacacccaact

SEQ ID NO: 973901 - DNA, 15 bp, Homo sapiens
cagcacacccaactc

SEQ ID NO: 973902 - DNA, 15 bp, Homo sapiens
agcacacccaactcc

SEQ ID NO: 973903 - DNA, 15 bp, Homo sapiens
gcacacccaactccc

SEQ ID NO: 973904 - DNA, 15 bp, Homo sapiens
cacacccaactcccc

SEQ ID NO: 973905 - DNA, 15 bp, Homo sapiens
acacccaactccccc

SEQ ID NO: 973906 - DNA, 15 bp, Homo sapiens
cacccaactccccca

SEQ ID NO: 973907 - DNA, 15 bp, Homo sapiens
acccaactcccccat

SEQ ID NO: 973908 - DNA, 15 bp, Homo sapiens
cccaactcccccatc

SEQ ID NO: 973909 - DNA, 15 bp, Homo sapiens
ccaactcccccatct

SEQ ID NO: 973910 - DNA, 15 bp, Homo sapiens
caactcccccatctc

SEQ ID NO: 973911 - DNA, 15 bp, Homo sapiens
aactcccccatctcc

SEQ ID NO: 973912 - DNA, 15 bp, Homo sapiens
actcccccatctccg

SEQ ID NO: 973913 - DNA, 15 bp, Homo sapiens
ctcccccatctccga

SEQ ID NO: 973914 - DNA, 15 bp, Homo sapiens
tcccccatctccgaa

SEQ ID NO: 973915 - DNA, 15 bp, Homo sapiens
cccccatctccgaaa

SEQ ID NO: 973916 - DNA, 15 bp, Homo sapiens
ccccatctccgaaat

SEQ ID NO: 973917 - DNA, 15 bp, Homo sapiens
cccatctccgaaatg

SEQ ID NO: 973918 - DNA, 15 bp, Homo sapiens
ccatctccgaaatga

SEQ ID NO: 973919 - DNA, 15 bp, Homo sapiens
catctccgaaatgat

SEQ ID NO: 973920 - DNA, 15 bp, Homo sapiens
atctccgaaatgatc

SEQ ID NO: 973921 - DNA, 15 bp, Homo sapiens
tctccgaaatgatct

SEQ ID NO: 973922 - DNA, 15 bp, Homo sapiens
ctccgaaatgatctc

SEQ ID NO: 973923 - DNA, 15 bp, Homo sapiens
tccgaaatgatctcc

SEQ ID NO: 973924 - DNA, 15 bp, Homo sapiens
ccgaaatgatctccc

SEQ ID NO: 973925 - DNA, 15 bp, Homo sapiens
cgaaatgatctcccg

SEQ ID NO: 973926 - DNA, 15 bp, Homo sapiens
gaaatgatctcccga

SEQ ID NO: 973927 - DNA, 15 bp, Homo sapiens
aaatgatctcccgat

SEQ ID NO: 973928 - DNA, 15 bp, Homo sapiens
aatgatctcccgatg

SEQ ID NO: 973929 - DNA, 15 bp, Homo sapiens
atgatctcccgatga

SEQ ID NO: 973930 - DNA, 15 bp, Homo sapiens
tgatctcccgatgaa

SEQ ID NO: 973931 - DNA, 15 bp, Homo sapiens
gatctcccgatgaaa

SEQ ID NO: 973932 - DNA, 15 bp, Homo sapiens
atctcccgatgaaaa

SEQ ID NO: 973933 - DNA, 15 bp, Homo sapiens
tctcccgatgaaaaa

SEQ ID NO: 973934 - DNA, 15 bp, Homo sapiens
ctcccgatgaaaaac

SEQ ID NO: 973935 - DNA, 15 bp, Homo sapiens
tcccgatgaaaaact

SEQ ID NO: 973936 - DNA, 15 bp, Homo sapiens
cccgatgaaaaactg

SEQ ID NO: 973937 - DNA, 15 bp, Homo sapiens
ccgatgaaaaactgc

SEQ ID NO: 973938 - DNA, 15 bp, Homo sapiens
cgatgaaaaactgca

SEQ ID NO: 973939 - DNA, 15 bp, Homo sapiens
gatgaaaaactgcaa

SEQ ID NO: 973940 - DNA, 15 bp, Homo sapiens
atgaaaaactgcaaa

SEQ ID NO: 973941 - DNA, 15 bp, Homo sapiens
tgaaaaactgcaaag

SEQ ID NO: 973942 - DNA, 15 bp, Homo sapiens
gaaaaactgcaaagg

SEQ ID NO: 973943 - DNA, 15 bp, Homo sapiens
aaaaactgcaaaggg

SEQ ID NO: 973944 - DNA, 15 bp, Homo sapiens
aaaactgcaaaggga

SEQ ID NO: 973945 - DNA, 15 bp, Homo sapiens
aaactgcaaagggac

SEQ ID NO: 973946 - DNA, 15 bp, Homo sapiens
aactgcaaagggacc

SEQ ID NO: 973947 - DNA, 15 bp, Homo sapiens
actgcaaagggacca

SEQ ID NO: 973948 - DNA, 15 bp, Homo sapiens
ctgcaaagggaccag

SEQ ID NO: 973949 - DNA, 15 bp, Homo sapiens
tgcaaagggaccagt

SEQ ID NO: 973950 - DNA, 15 bp, Homo sapiens
gcaaagggaccagtg

SEQ ID NO: 973951 - DNA, 15 bp, Homo sapiens
caaagggaccagtgc

SEQ ID NO: 973952 - DNA, 15 bp, Homo sapiens
aaagggaccagtgcc

SEQ ID NO: 973953 - DNA, 15 bp, Homo sapiens
aagggaccagtgccc

SEQ ID NO: 973954 - DNA, 15 bp, Homo sapiens
agggaccagtgccca

SEQ ID NO: 973955 - DNA, 15 bp, Homo sapiens
gggaccagtgcccaa

SEQ ID NO: 973956 - DNA, 15 bp, Homo sapiens
ggaccagtgcccaaa

SEQ ID NO: 973957 - DNA, 15 bp, Homo sapiens
gaccagtgcccaaat

SEQ ID NO: 973958 - DNA, 15 bp, Homo sapiens
accagtgcccaaatt

SEQ ID NO: 973959 - DNA, 15 bp, Homo sapiens
ccagtgcccaaattc

SEQ ID NO: 973960 - DNA, 15 bp, Homo sapiens
cagtgcccaaattca

SEQ ID NO: 973961 - DNA, 15 bp, Homo sapiens
agtgcccaaattcag

SEQ ID NO: 973962 - DNA, 15 bp, Homo sapiens
gtgcccaaattcagg

SEQ ID NO: 973963 - DNA, 15 bp, Homo sapiens
tgcccaaattcaggc

SEQ ID NO: 973964 - DNA, 15 bp, Homo sapiens
gcccaaattcaggcc

SEQ ID NO: 973965 - DNA, 15 bp, Homo sapiens
cccaaattcaggccc

SEQ ID NO: 973966 - DNA, 15 bp, Homo sapiens
ccaaattcaggccca

SEQ ID NO: 973967 - DNA, 15 bp, Homo sapiens
caaattcaggcccag

SEQ ID NO: 973968 - DNA, 15 bp, Homo sapiens
aaattcaggcccagg

SEQ ID NO: 973969 - DNA, 15 bp, Homo sapiens
aattcaggcccaggc

SEQ ID NO: 973970 - DNA, 15 bp, Homo sapiens
attcaggcccaggcc

SEQ ID NO: 973971 - DNA, 15 bp, Homo sapiens
ttcaggcccaggcct

SEQ ID NO: 973972 - DNA, 15 bp, Homo sapiens
tcaggcccaggccta

SEQ ID NO: 973973 - DNA, 15 bp, Homo sapiens
caggcccaggcctag

SEQ ID NO: 973974 - DNA, 15 bp, Homo sapiens
aggcccaggcctagg

SEQ ID NO: 973975 - DNA, 15 bp, Homo sapiens
ggcccaggcctaggc

SEQ ID NO: 973976 - DNA, 15 bp, Homo sapiens
gcccaggcctaggcc

SEQ ID NO: 973977 - DNA, 15 bp, Homo sapiens
cccaggcctaggcca

SEQ ID NO: 973978 - DNA, 15 bp, Homo sapiens
ccaggcctaggccac

SEQ ID NO: 973979 - DNA, 15 bp, Homo sapiens
caggcctaggccaca

SEQ ID NO: 973980 - DNA, 15 bp, Homo sapiens
aggcctaggccacag

SEQ ID NO: 973981 - DNA, 15 bp, Homo sapiens
ggcctaggccacagg

SEQ ID NO: 973982 - DNA, 15 bp, Homo sapiens
gcctaggccacagga

SEQ ID NO: 973983 - DNA, 15 bp, Homo sapiens
cctaggccacaggaa

SEQ ID NO: 973984 - DNA, 15 bp, Homo sapiens
ctaggccacaggaag

SEQ ID NO: 973985 - DNA, 15 bp, Homo sapiens
taggccacaggaagc

SEQ ID NO: 973986 - DNA, 15 bp, Homo sapiens
aggccacaggaagcc

SEQ ID NO: 973987 - DNA, 15 bp, Homo sapiens
ggccacaggaagccc

SEQ ID NO: 973988 - DNA, 15 bp, Homo sapiens
gccacaggaagcccc

SEQ ID NO: 973989 - DNA, 15 bp, Homo sapiens
ccacaggaagcccca

SEQ ID NO: 973990 - DNA, 15 bp, Homo sapiens
cacaggaagccccag

SEQ ID NO: 973991 - DNA, 15 bp, Homo sapiens
acaggaagccccagc

SEQ ID NO: 973992 - DNA, 15 bp, Homo sapiens
caggaagccccagcc

SEQ ID NO: 973993 - DNA, 15 bp, Homo sapiens
aggaagccccagccc

SEQ ID NO: 973994 - DNA, 15 bp, Homo sapiens
ggaagccccagcccc

SEQ ID NO: 973995 - DNA, 15 bp, Homo sapiens
gaagccccagcccca

SEQ ID NO: 973996 - DNA, 15 bp, Homo sapiens
aagccccagccccaa

SEQ ID NO: 973997 - DNA, 15 bp, Homo sapiens
agccccagccccaag

SEQ ID NO: 973998 - DNA, 15 bp, Homo sapiens
gccccagccccaagg

SEQ ID NO: 973999 - DNA, 15 bp, Homo sapiens
ccccagccccaagga

SEQ ID NO: 974000 - DNA, 15 bp, Homo sapiens
cccagccccaaggac

SEQ ID NO: 974001 - DNA, 15 bp, Homo sapiens
ccagccccaaggaca

SEQ ID NO: 974002 - DNA, 15 bp, Homo sapiens
cagccccaaggacag

SEQ ID NO: 974003 - DNA, 15 bp, Homo sapiens
agccccaaggacaga

SEQ ID NO: 974004 - DNA, 15 bp, Homo sapiens
gccccaaggacagag

SEQ ID NO: 974005 - DNA, 15 bp, Homo sapiens
ccccaaggacagagg

SEQ ID NO: 974006 - DNA, 15 bp, Homo sapiens
cccaaggacagaggg

SEQ ID NO: 974007 - DNA, 15 bp, Homo sapiens
ccaaggacagagggg

SEQ ID NO: 974008 - DNA, 15 bp, Homo sapiens
caaggacagaggggc

SEQ ID NO: 974009 - DNA, 15 bp, Homo sapiens
aaggacagaggggcc

SEQ ID NO: 974010 - DNA, 15 bp, Homo sapiens
aggacagaggggcct

SEQ ID NO: 974011 - DNA, 15 bp, Homo sapiens
ggacagaggggcctt

SEQ ID NO: 974012 - DNA, 15 bp, Homo sapiens
gacagaggggccttg

SEQ ID NO: 974013 - DNA, 15 bp, Homo sapiens
acagaggggccttga

SEQ ID NO: 974014 - DNA, 15 bp, Homo sapiens
cagaggggccttgag

SEQ ID NO: 974015 - DNA, 15 bp, Homo sapiens
agaggggccttgagg

SEQ ID NO: 974016 - DNA, 15 bp, Homo sapiens
gaggggccttgaggt

SEQ ID NO: 974017 - DNA, 15 bp, Homo sapiens
aggggccttgaggtg

SEQ ID NO: 974018 - DNA, 15 bp, Homo sapiens
ggggccttgaggtgg

SEQ ID NO: 974019 - DNA, 15 bp, Homo sapiens
gggccttgaggtggg

SEQ ID NO: 974020 - DNA, 15 bp, Homo sapiens
ggccttgaggtgggg

SEQ ID NO: 974021 - DNA, 15 bp, Homo sapiens
gccttgaggtggggt

SEQ ID NO: 974022 - DNA, 15 bp, Homo sapiens
ccttgaggtggggtg

SEQ ID NO: 974023 - DNA, 15 bp, Homo sapiens
cttgaggtggggtgg

SEQ ID NO: 974024 - DNA, 15 bp, Homo sapiens
ttgaggtggggtggc

SEQ ID NO: 974025 - DNA, 15 bp, Homo sapiens
tgaggtggggtggct

SEQ ID NO: 974026 - DNA, 15 bp, Homo sapiens
gaggtggggtggcta

SEQ ID NO: 974027 - DNA, 15 bp, Homo sapiens
aggtggggtggctat

SEQ ID NO: 974028 - DNA, 15 bp, Homo sapiens
ggtggggtggctatg

SEQ ID NO: 974029 - DNA, 15 bp, Homo sapiens
gtggggtggctatgg

SEQ ID NO: 974030 - DNA, 15 bp, Homo sapiens
tggggtggctatggc

SEQ ID NO: 974031 - DNA, 15 bp, Homo sapiens
ggggtggctatggct

SEQ ID NO: 974032 - DNA, 15 bp, Homo sapiens
gggtggctatggctc

SEQ ID NO: 974033 - DNA, 15 bp, Homo sapiens
ggtggctatggctcc

SEQ ID NO: 974034 - DNA, 15 bp, Homo sapiens
gtggctatggctcca

SEQ ID NO: 974035 - DNA, 15 bp, Homo sapiens
tggctatggctccag

SEQ ID NO: 974036 - DNA, 15 bp, Homo sapiens
ggctatggctccagg

SEQ ID NO: 974037 - DNA, 15 bp, Homo sapiens
gctatggctccaggc

SEQ ID NO: 974038 - DNA, 15 bp, Homo sapiens
ctatggctccaggcg

SEQ ID NO: 974039 - DNA, 15 bp, Homo sapiens
tatggctccaggcgg

SEQ ID NO: 974040 - DNA, 15 bp, Homo sapiens
atggctccaggcgga

SEQ ID NO: 974041 - DNA, 15 bp, Homo sapiens
tggctccaggcggag

SEQ ID NO: 974042 - DNA, 15 bp, Homo sapiens
ggctccaggcggagg

SEQ ID NO: 974043 - DNA, 15 bp, Homo sapiens
gctccaggcggagga

SEQ ID NO: 974044 - DNA, 15 bp, Homo sapiens
ctccaggcggaggag

SEQ ID NO: 974045 - DNA, 15 bp, Homo sapiens
tccaggcggaggagc

SEQ ID NO: 974046 - DNA, 15 bp, Homo sapiens
ccaggcggaggagca

SEQ ID NO: 974047 - DNA, 15 bp, Homo sapiens
caggcggaggagcag

SEQ ID NO: 974048 - DNA, 15 bp, Homo sapiens
aggcggaggagcagt

SEQ ID NO: 974049 - DNA, 15 bp, Homo sapiens
ggcggaggagcagtc

SEQ ID NO: 974050 - DNA, 15 bp, Homo sapiens
gcggaggagcagtct

SEQ ID NO: 974051 - DNA, 15 bp, Homo sapiens
cggaggagcagtctc

SEQ ID NO: 974052 - DNA, 15 bp, Homo sapiens
ggaggagcagtctca

SEQ ID NO: 974053 - DNA, 15 bp, Homo sapiens
gaggagcagtctcag

SEQ ID NO: 974054 - DNA, 15 bp, Homo sapiens
aggagcagtctcagg

SEQ ID NO: 974055 - DNA, 15 bp, Homo sapiens
ggagcagtctcaggg

SEQ ID NO: 974056 - DNA, 15 bp, Homo sapiens
gagcagtctcagggc

SEQ ID NO: 974057 - DNA, 15 bp, Homo sapiens
agcagtctcagggca

SEQ ID NO: 974058 - DNA, 15 bp, Homo sapiens
gcagtctcagggcac

SEQ ID NO: 974059 - DNA, 15 bp, Homo sapiens
cagtctcagggcacc

SEQ ID NO: 974060 - DNA, 15 bp, Homo sapiens
agtctcagggcaccc

SEQ ID NO: 974061 - DNA, 15 bp, Homo sapiens
gtctcagggcaccca

SEQ ID NO: 974062 - DNA, 15 bp, Homo sapiens
tctcagggcacccac

SEQ ID NO: 974063 - DNA, 15 bp, Homo sapiens
ctcagggcacccacc

SEQ ID NO: 974064 - DNA, 15 bp, Homo sapiens
tcagggcacccacca

SEQ ID NO: 974065 - DNA, 15 bp, Homo sapiens
cagggcacccaccag

SEQ ID NO: 974066 - DNA, 15 bp, Homo sapiens
agggcacccaccagc

SEQ ID NO: 974067 - DNA, 15 bp, Homo sapiens
gggcacccaccagcc

SEQ ID NO: 974068 - DNA, 15 bp, Homo sapiens
ggcacccaccagccc

SEQ ID NO: 974069 - DNA, 15 bp, Homo sapiens
gcacccaccagcccg

SEQ ID NO: 974070 - DNA, 15 bp, Homo sapiens
cacccaccagcccgc

SEQ ID NO: 974071 - DNA, 15 bp, Homo sapiens
acccaccagcccgcc

SEQ ID NO: 974072 - DNA, 15 bp, Homo sapiens
cccaccagcccgccc

SEQ ID NO: 974073 - DNA, 15 bp, Homo sapiens
ccaccagcccgccca

SEQ ID NO: 974074 - DNA, 15 bp, Homo sapiens
caccagcccgcccac

SEQ ID NO: 974075 - DNA, 15 bp, Homo sapiens
accagcccgcccacc

SEQ ID NO: 974076 - DNA, 15 bp, Homo sapiens
ccagcccgcccacct

SEQ ID NO: 974077 - DNA, 15 bp, Homo sapiens
cagcccgcccacctt

SEQ ID NO: 974078 - DNA, 15 bp, Homo sapiens
agcccgcccaccttc

SEQ ID NO: 974079 - DNA, 15 bp, Homo sapiens
gcccgcccaccttcg

SEQ ID NO: 974080 - DNA, 15 bp, Homo sapiens
cccgcccaccttcgt

SEQ ID NO: 974081 - DNA, 15 bp, Homo sapiens
ccgcccaccttcgtt

SEQ ID NO: 974082 - DNA, 15 bp, Homo sapiens
cgcccaccttcgttg

SEQ ID NO: 974083 - DNA, 15 bp, Homo sapiens
gcccaccttcgttgc

SEQ ID NO: 974084 - DNA, 15 bp, Homo sapiens
cccaccttcgttgcg

SEQ ID NO: 974085 - DNA, 15 bp, Homo sapiens
ccaccttcgttgcga

SEQ ID NO: 974086 - DNA, 15 bp, Homo sapiens
caccttcgttgcgat

SEQ ID NO: 974087 - DNA, 15 bp, Homo sapiens
accttcgttgcgatt

SEQ ID NO: 974088 - DNA, 15 bp, Homo sapiens
ccttcgttgcgattg

SEQ ID NO: 974089 - DNA, 15 bp, Homo sapiens
cttcgttgcgattgg

SEQ ID NO: 974090 - DNA, 15 bp, Homo sapiens
ttcgttgcgattggc

SEQ ID NO: 974091 - DNA, 15 bp, Homo sapiens
tcgttgcgattggcc

SEQ ID NO: 974092 - DNA, 15 bp, Homo sapiens
cgttgcgattggcca

SEQ ID NO: 974093 - DNA, 15 bp, Homo sapiens
gttgcgattggccaa

SEQ ID NO: 974094 - DNA, 15 bp, Homo sapiens
ttgcgattggccaac

SEQ ID NO: 974095 - DNA, 15 bp, Homo sapiens
tgcgattggccaaca

SEQ ID NO: 974096 - DNA, 15 bp, Homo sapiens
gcgattggccaacag

SEQ ID NO: 974097 - DNA, 15 bp, Homo sapiens
cgattggccaacagg

SEQ ID NO: 974098 - DNA, 15 bp, Homo sapiens
gattggccaacagga

SEQ ID NO: 974099 - DNA, 15 bp, Homo sapiens
attggccaacaggat

SEQ ID NO: 974100 - DNA, 15 bp, Homo sapiens
ttggccaacaggatg

SEQ ID NO: 974101 - DNA, 15 bp, Homo sapiens
tggccaacaggatgc

SEQ ID NO: 974102 - DNA, 15 bp, Homo sapiens
ggccaacaggatgcg

SEQ ID NO: 974103 - DNA, 15 bp, Homo sapiens
gccaacaggatgcga

SEQ ID NO: 974104 - DNA, 15 bp, Homo sapiens
ccaacaggatgcgag

SEQ ID NO: 974105 - DNA, 15 bp, Homo sapiens
caacaggatgcgagg

SEQ ID NO: 974106 - DNA, 15 bp, Homo sapiens
aacaggatgcgaggc

SEQ ID NO: 974107 - DNA, 15 bp, Homo sapiens
acaggatgcgaggca

SEQ ID NO: 974108 - DNA, 15 bp, Homo sapiens
caggatgcgaggcat

SEQ ID NO: 974109 - DNA, 15 bp, Homo sapiens
aggatgcgaggcatg

SEQ ID NO: 974110 - DNA, 15 bp, Homo sapiens
ggatgcgaggcatga

SEQ ID NO: 974111 - DNA, 15 bp, Homo sapiens
gatgcgaggcatgag

SEQ ID NO: 974112 - DNA, 15 bp, Homo sapiens
atgcgaggcatgagt

SEQ ID NO: 974113 - DNA, 15 bp, Homo sapiens
tgcgaggcatgagtc

SEQ ID NO: 974114 - DNA, 15 bp, Homo sapiens
gcgaggcatgagtct

SEQ ID NO: 974115 - DNA, 15 bp, Homo sapiens
cgaggcatgagtctc

SEQ ID NO: 974116 - DNA, 15 bp, Homo sapiens
gaggcatgagtctct

SEQ ID NO: 974117 - DNA, 15 bp, Homo sapiens
aggcatgagtctctc

SEQ ID NO: 974118 - DNA, 15 bp, Homo sapiens
ggcatgagtctctcc

SEQ ID NO: 974119 - DNA, 15 bp, Homo sapiens
gcatgagtctctcct

SEQ ID NO: 974120 - DNA, 15 bp, Homo sapiens
catgagtctctcctg

SEQ ID NO: 974121 - DNA, 15 bp, Homo sapiens
atgagtctctcctgg

SEQ ID NO: 974122 - DNA, 15 bp, Homo sapiens
tgagtctctcctggc

SEQ ID NO: 974123 - DNA, 15 bp, Homo sapiens
gagtctctcctggca

SEQ ID NO: 974124 - DNA, 15 bp, Homo sapiens
agtctctcctggcag

SEQ ID NO: 974125 - DNA, 15 bp, Homo sapiens
gtctctcctggcagt

SEQ ID NO: 974126 - DNA, 15 bp, Homo sapiens
tctctcctggcagta

SEQ ID NO: 974127 - DNA, 15 bp, Homo sapiens
ctctcctggcagtag

SEQ ID NO: 974128 - DNA, 15 bp, Homo sapiens
tctcctggcagtagg

SEQ ID NO: 974129 - DNA, 15 bp, Homo sapiens
ctcctggcagtaggt

SEQ ID NO: 974130 - DNA, 15 bp, Homo sapiens
tcctggcagtaggtg

SEQ ID NO: 974131 - DNA, 15 bp, Homo sapiens
cctggcagtaggtgc

SEQ ID NO: 974132 - DNA, 15 bp, Homo sapiens
ctggcagtaggtgcg

SEQ ID NO: 974133 - DNA, 15 bp, Homo sapiens
tggcagtaggtgcgg

SEQ ID NO: 974134 - DNA, 15 bp, Homo sapiens
ggcagtaggtgcgga

SEQ ID NO: 974135 - DNA, 15 bp, Homo sapiens
gcagtaggtgcggaa

SEQ ID NO: 974136 - DNA, 15 bp, Homo sapiens
cagtaggtgcggaag

SEQ ID NO: 974137 - DNA, 15 bp, Homo sapiens
agtaggtgcggaagg

SEQ ID NO: 974138 - DNA, 15 bp, Homo sapiens
gtaggtgcggaaggt

SEQ ID NO: 974139 - DNA, 15 bp, Homo sapiens
taggtgcggaaggtg

SEQ ID NO: 974140 - DNA, 15 bp, Homo sapiens
aggtgcggaaggtgt

SEQ ID NO: 974141 - DNA, 15 bp, Homo sapiens
ggtgcggaaggtgtc

SEQ ID NO: 974142 - DNA, 15 bp, Homo sapiens
gtgcggaaggtgtcc

SEQ ID NO: 974143 - DNA, 15 bp, Homo sapiens
tgcggaaggtgtccc

SEQ ID NO: 974144 - DNA, 15 bp, Homo sapiens
gcggaaggtgtccct

SEQ ID NO: 974145 - DNA, 15 bp, Homo sapiens
cggaaggtgtccctg

SEQ ID NO: 974146 - DNA, 15 bp, Homo sapiens
ggaaggtgtccctga

SEQ ID NO: 974147 - DNA, 15 bp, Homo sapiens
gaaggtgtccctgat

SEQ ID NO: 974148 - DNA, 15 bp, Homo sapiens
aaggtgtccctgatg

SEQ ID NO: 974149 - DNA, 15 bp, Homo sapiens
aggtgtccctgatga

SEQ ID NO: 974150 - DNA, 15 bp, Homo sapiens
ggtgtccctgatgag

SEQ ID NO: 974151 - DNA, 15 bp, Homo sapiens
gtgtccctgatgagg

SEQ ID NO: 974152 - DNA, 15 bp, Homo sapiens
tgtccctgatgagga

SEQ ID NO: 974153 - DNA, 15 bp, Homo sapiens
gtccctgatgaggat

SEQ ID NO: 974154 - DNA, 15 bp, Homo sapiens
tccctgatgaggatc

SEQ ID NO: 974155 - DNA, 15 bp, Homo sapiens
ccctgatgaggatct

SEQ ID NO: 974156 - DNA, 15 bp, Homo sapiens
cctgatgaggatctc

SEQ ID NO: 974157 - DNA, 15 bp, Homo sapiens
ctgatgaggatctca

SEQ ID NO: 974158 - DNA, 15 bp, Homo sapiens
tgatgaggatctcat

SEQ ID NO: 974159 - DNA, 15 bp, Homo sapiens
gatgaggatctcatc

SEQ ID NO: 974160 - DNA, 15 bp, Homo sapiens
atgaggatctcatct

SEQ ID NO: 974161 - DNA, 15 bp, Homo sapiens
tgaggatctcatctg

SEQ ID NO: 974162 - DNA, 15 bp, Homo sapiens
gaggatctcatctgt

SEQ ID NO: 974163 - DNA, 15 bp, Homo sapiens
aggatctcatctgtg

SEQ ID NO: 974164 - DNA, 15 bp, Homo sapiens
ggatctcatctgtgg

SEQ ID NO: 974165 - DNA, 15 bp, Homo sapiens
gatctcatctgtggt

SEQ ID NO: 974166 - DNA, 15 bp, Homo sapiens
atctcatctgtggtc

SEQ ID NO: 974167 - DNA, 15 bp, Homo sapiens
tctcatctgtggtca

SEQ ID NO: 974168 - DNA, 15 bp, Homo sapiens
ctcatctgtggtcag

SEQ ID NO: 974169 - DNA, 15 bp, Homo sapiens
tcatctgtggtcagc

SEQ ID NO: 974170 - DNA, 15 bp, Homo sapiens
catctgtggtcagct

SEQ ID NO: 974171 - DNA, 15 bp, Homo sapiens
atctgtggtcagctg

SEQ ID NO: 974172 - DNA, 15 bp, Homo sapiens
tctgtggtcagctgc

SEQ ID NO: 974173 - DNA, 15 bp, Homo sapiens
ctgtggtcagctgct

SEQ ID NO: 974174 - DNA, 15 bp, Homo sapiens
tgtggtcagctgctc

SEQ ID NO: 974175 - DNA, 15 bp, Homo sapiens
gtggtcagctgctcc

SEQ ID NO: 974176 - DNA, 15 bp, Homo sapiens
tggtcagctgctcct

SEQ ID NO: 974177 - DNA, 15 bp, Homo sapiens
ggtcagctgctcctc

SEQ ID NO: 974178 - DNA, 15 bp, Homo sapiens
gtcagctgctcctcc

SEQ ID NO: 974179 - DNA, 15 bp, Homo sapiens
tcagctgctcctcca

SEQ ID NO: 974180 - DNA, 15 bp, Homo sapiens
cagctgctcctccag

SEQ ID NO: 974181 - DNA, 15 bp, Homo sapiens
agctgctcctccagc

SEQ ID NO: 974182 - DNA, 15 bp, Homo sapiens
gctgctcctccagca

SEQ ID NO: 974183 - DNA, 15 bp, Homo sapiens
ctgctcctccagcac

SEQ ID NO: 974184 - DNA, 15 bp, Homo sapiens
tgctcctccagcacc

SEQ ID NO: 974185 - DNA, 15 bp, Homo sapiens
gctcctccagcacca

SEQ ID NO: 974186 - DNA, 15 bp, Homo sapiens
ctcctccagcaccag

SEQ ID NO: 974187 - DNA, 15 bp, Homo sapiens
tcctccagcaccagc

SEQ ID NO: 974188 - DNA, 15 bp, Homo sapiens
cctccagcaccagcg

SEQ ID NO: 974189 - DNA, 15 bp, Homo sapiens
ctccagcaccagcgg

SEQ ID NO: 974190 - DNA, 15 bp, Homo sapiens
tccagcaccagcggg

SEQ ID NO: 974191 - DNA, 15 bp, Homo sapiens
ccagcaccagcgggt

SEQ ID NO: 974192 - DNA, 15 bp, Homo sapiens
cagcaccagcgggtc

SEQ ID NO: 974193 - DNA, 15 bp, Homo sapiens
agcaccagcgggtcc

SEQ ID NO: 974194 - DNA, 15 bp, Homo sapiens
gcaccagcgggtcct

SEQ ID NO: 974195 - DNA, 15 bp, Homo sapiens
caccagcgggtcctg

SEQ ID NO: 974196 - DNA, 15 bp, Homo sapiens
accagcgggtcctgc

SEQ ID NO: 974197 - DNA, 15 bp, Homo sapiens
ccagcgggtcctgcc

SEQ ID NO: 974198 - DNA, 15 bp, Homo sapiens
cagcgggtcctgcca

SEQ ID NO: 974199 - DNA, 15 bp, Homo sapiens
agcgggtcctgccag

SEQ ID NO: 974200 - DNA, 15 bp, Homo sapiens
gcgggtcctgccagt

SEQ ID NO: 974201 - DNA, 15 bp, Homo sapiens
cgggtcctgccagtc

SEQ ID NO: 974202 - DNA, 15 bp, Homo sapiens
gggtcctgccagtca

SEQ ID NO: 974203 - DNA, 15 bp, Homo sapiens
ggtcctgccagtcaa

SEQ ID NO: 974204 - DNA, 15 bp, Homo sapiens
gtcctgccagtcaaa

SEQ ID NO: 974205 - DNA, 15 bp, Homo sapiens
tcctgccagtcaaac

SEQ ID NO: 974206 - DNA, 15 bp, Homo sapiens
cctgccagtcaaact

SEQ ID NO: 974207 - DNA, 15 bp, Homo sapiens
ctgccagtcaaactc

SEQ ID NO: 974208 - DNA, 15 bp, Homo sapiens
tgccagtcaaactcg

SEQ ID NO: 974209 - DNA, 15 bp, Homo sapiens
gccagtcaaactcgg

SEQ ID NO: 974210 - DNA, 15 bp, Homo sapiens
ccagtcaaactcggg

SEQ ID NO: 974211 - DNA, 15 bp, Homo sapiens
cagtcaaactcggga

SEQ ID NO: 974212 - DNA, 15 bp, Homo sapiens
agtcaaactcgggac

SEQ ID NO: 974213 - DNA, 15 bp, Homo sapiens
gtcaaactcgggacg

SEQ ID NO: 974214 - DNA, 15 bp, Homo sapiens
tcaaactcgggacgc

SEQ ID NO: 974215 - DNA, 15 bp, Homo sapiens
caaactcgggacgcg

SEQ ID NO: 974216 - DNA, 15 bp, Homo sapiens
aaactcgggacgcga

SEQ ID NO: 974217 - DNA, 15 bp, Homo sapiens
aactcgggacgcgag

SEQ ID NO: 974218 - DNA, 15 bp, Homo sapiens
actcgggacgcgagg

SEQ ID NO: 974219 - DNA, 15 bp, Homo sapiens
ctcgggacgcgaggc

SEQ ID NO: 974220 - DNA, 15 bp, Homo sapiens
tcgggacgcgaggct

SEQ ID NO: 974221 - DNA, 15 bp, Homo sapiens
cgggacgcgaggctg

SEQ ID NO: 974222 - DNA, 15 bp, Homo sapiens
gggacgcgaggctgg

SEQ ID NO: 974223 - DNA, 15 bp, Homo sapiens
ggacgcgaggctggg

SEQ ID NO: 974224 - DNA, 15 bp, Homo sapiens
gacgcgaggctggga

SEQ ID NO: 974225 - DNA, 15 bp, Homo sapiens
acgcgaggctgggaa

SEQ ID NO: 974226 - DNA, 15 bp, Homo sapiens
cgcgaggctgggaag

SEQ ID NO: 974227 - DNA, 15 bp, Homo sapiens
gcgaggctgggaagg

SEQ ID NO: 974228 - DNA, 15 bp, Homo sapiens
cgaggctgggaaggg

SEQ ID NO: 974229 - DNA, 15 bp, Homo sapiens
gaggctgggaagggg

SEQ ID NO: 974230 - DNA, 15 bp, Homo sapiens
aggctgggaagggga

SEQ ID NO: 974231 - DNA, 15 bp, Homo sapiens
ggctgggaaggggaa

SEQ ID NO: 974232 - DNA, 15 bp, Homo sapiens
gctgggaaggggaat

SEQ ID NO: 974233 - DNA, 15 bp, Homo sapiens
ctgggaaggggaatt

SEQ ID NO: 974234 - DNA, 15 bp, Homo sapiens
tgggaaggggaattc

SEQ ID NO: 974235 - DNA, 15 bp, Homo sapiens
gggaaggggaattcg

SEQ ID NO: 974236 - DNA, 15 bp, Homo sapiens
ggaaggggaattcgc

SEQ ID NO: 974237 - DNA, 15 bp, Homo sapiens
gaaggggaattcgcc

SEQ ID NO: 974238 - DNA, 15 bp, Homo sapiens
aaggggaattcgcct

SEQ ID NO: 974239 - DNA, 15 bp, Homo sapiens
aggggaattcgcctc

SEQ ID NO: 974240 - DNA, 15 bp, Homo sapiens
ggggaattcgcctcg

SEQ ID NO: 974241 - DNA, 15 bp, Homo sapiens
gggaattcgcctcgg

SEQ ID NO: 974242 - DNA, 15 bp, Homo sapiens
ggaattcgcctcggt

SEQ ID NO: 974243 - DNA, 15 bp, Homo sapiens
gaattcgcctcggtc

SEQ ID NO: 974244 - DNA, 15 bp, Homo sapiens
aattcgcctcggtcc

SEQ ID NO: 974245 - DNA, 15 bp, Homo sapiens
attcgcctcggtcca

SEQ ID NO: 974246 - DNA, 15 bp, Homo sapiens
ttcgcctcggtccag

SEQ ID NO: 974247 - DNA, 15 bp, Homo sapiens
tcgcctcggtccagt

SEQ ID NO: 974248 - DNA, 15 bp, Homo sapiens
cgcctcggtccagtc

SEQ ID NO: 974249 - DNA, 15 bp, Homo sapiens
gcctcggtccagtcc

SEQ ID NO: 974250 - DNA, 15 bp, Homo sapiens
cctcggtccagtccg

SEQ ID NO: 974251 - DNA, 15 bp, Homo sapiens
ctcggtccagtccgc

SEQ ID NO: 974252 - DNA, 15 bp, Homo sapiens
tcggtccagtccgca

SEQ ID NO: 974253 - DNA, 15 bp, Homo sapiens
cggtccagtccgcaa

SEQ ID NO: 974254 - DNA, 15 bp, Homo sapiens
ggtccagtccgcaag

SEQ ID NO: 974255 - DNA, 15 bp, Homo sapiens
gtccagtccgcaaga

SEQ ID NO: 974256 - DNA, 15 bp, Homo sapiens
tccagtccgcaagat

SEQ ID NO: 974257 - DNA, 15 bp, Homo sapiens
ccagtccgcaagatc

SEQ ID NO: 974258 - DNA, 15 bp, Homo sapiens
cagtccgcaagatca

SEQ ID NO: 974259 - DNA, 15 bp, Homo sapiens
agtccgcaagatcac

SEQ ID NO: 974260 - DNA, 15 bp, Homo sapiens
gtccgcaagatcact

SEQ ID NO: 974261 - DNA, 15 bp, Homo sapiens
tccgcaagatcactg

SEQ ID NO: 974262 - DNA, 15 bp, Homo sapiens
ccgcaagatcactgt

SEQ ID NO: 974263 - DNA, 15 bp, Homo sapiens
cgcaagatcactgtg

SEQ ID NO: 974264 - DNA, 15 bp, Homo sapiens
gcaagatcactgtgc

SEQ ID NO: 974265 - DNA, 15 bp, Homo sapiens
caagatcactgtgcc

SEQ ID NO: 974266 - DNA, 15 bp, Homo sapiens
aagatcactgtgccc

SEQ ID NO: 974267 - DNA, 15 bp, Homo sapiens
agatcactgtgccct

SEQ ID NO: 974268 - DNA, 15 bp, Homo sapiens
gatcactgtgccctc

SEQ ID NO: 974269 - DNA, 15 bp, Homo sapiens
atcactgtgccctcc

SEQ ID NO: 974270 - DNA, 15 bp, Homo sapiens
tcactgtgccctccc

SEQ ID NO: 974271 - DNA, 15 bp, Homo sapiens
cactgtgccctccct

SEQ ID NO: 974272 - DNA, 15 bp, Homo sapiens
actgtgccctccctt

SEQ ID NO: 974273 - DNA, 15 bp, Homo sapiens
ctgtgccctcccttc

SEQ ID NO: 974274 - DNA, 15 bp, Homo sapiens
tgtgccctcccttct

SEQ ID NO: 974275 - DNA, 15 bp, Homo sapiens
gtgccctcccttctc

SEQ ID NO: 974276 - DNA, 15 bp, Homo sapiens
tgccctcccttctcg

SEQ ID NO: 974277 - DNA, 15 bp, Homo sapiens
gccctcccttctcgg

SEQ ID NO: 974278 - DNA, 15 bp, Homo sapiens
ccctcccttctcgga

SEQ ID NO: 974279 - DNA, 15 bp, Homo sapiens
cctcccttctcggac

SEQ ID NO: 974280 - DNA, 15 bp, Homo sapiens
ctcccttctcggacc

SEQ ID NO: 974281 - DNA, 15 bp, Homo sapiens
tcccttctcggaccc

SEQ ID NO: 974282 - DNA, 15 bp, Homo sapiens
cccttctcggaccct

SEQ ID NO: 974283 - DNA, 15 bp, Homo sapiens
ccttctcggaccctc

SEQ ID NO: 974284 - DNA, 15 bp, Homo sapiens
cttctcggaccctca

SEQ ID NO: 974285 - DNA, 15 bp, Homo sapiens
ttctcggaccctcat

SEQ ID NO: 974286 - DNA, 15 bp, Homo sapiens
tctcggaccctcatc

SEQ ID NO: 974287 - DNA, 15 bp, Homo sapiens
ctcggaccctcatca

SEQ ID NO: 974288 - DNA, 15 bp, Homo sapiens
tcggaccctcatcag

SEQ ID NO: 974289 - DNA, 15 bp, Homo sapiens
cggaccctcatcagc

SEQ ID NO: 974290 - DNA, 15 bp, Homo sapiens
ggaccctcatcagcc

SEQ ID NO: 974291 - DNA, 15 bp, Homo sapiens
gaccctcatcagccc

SEQ ID NO: 974292 - DNA, 15 bp, Homo sapiens
accctcatcagccct

SEQ ID NO: 974293 - DNA, 15 bp, Homo sapiens
ccctcatcagcccta

SEQ ID NO: 974294 - DNA, 15 bp, Homo sapiens
cctcatcagccctac

SEQ ID NO: 974295 - DNA, 15 bp, Homo sapiens
ctcatcagccctacc

SEQ ID NO: 974296 - DNA, 15 bp, Homo sapiens
tcatcagccctaccc

SEQ ID NO: 974297 - DNA, 15 bp, Homo sapiens
catcagccctacccc

SEQ ID NO: 974298 - DNA, 15 bp, Homo sapiens
atcagccctaccccc

SEQ ID NO: 974299 - DNA, 15 bp, Homo sapiens
tcagccctacccccc

SEQ ID NO: 974300 - DNA, 15 bp, Homo sapiens
cagccctacccccca

SEQ ID NO: 974301 - DNA, 15 bp, Homo sapiens
agccctaccccccaa

SEQ ID NO: 974302 - DNA, 15 bp, Homo sapiens
gccctaccccccaac

SEQ ID NO: 974303 - DNA, 15 bp, Homo sapiens
ccctaccccccaaca

SEQ ID NO: 974304 - DNA, 15 bp, Homo sapiens
cctaccccccaacac

SEQ ID NO: 974305 - DNA, 15 bp, Homo sapiens
ctaccccccaacacc

SEQ ID NO: 974306 - DNA, 15 bp, Homo sapiens
taccccccaacaccc

SEQ ID NO: 974307 - DNA, 15 bp, Homo sapiens
accccccaacaccca

SEQ ID NO: 974308 - DNA, 15 bp, Homo sapiens
ccccccaacacccat

SEQ ID NO: 974309 - DNA, 15 bp, Homo sapiens
cccccaacacccatg

SEQ ID NO: 974310 - DNA, 15 bp, Homo sapiens
ccccaacacccatgt

SEQ ID NO: 974311 - DNA, 15 bp, Homo sapiens
cccaacacccatgtc

SEQ ID NO: 974312 - DNA, 15 bp, Homo sapiens
ccaacacccatgtcg

SEQ ID NO: 974313 - DNA, 15 bp, Homo sapiens
caacacccatgtcgc

SEQ ID NO: 974314 - DNA, 15 bp, Homo sapiens
aacacccatgtcgcc

SEQ ID NO: 974315 - DNA, 15 bp, Homo sapiens
acacccatgtcgccc

SEQ ID NO: 974316 - DNA, 15 bp, Homo sapiens
cacccatgtcgcccc

SEQ ID NO: 974317 - DNA, 15 bp, Homo sapiens
acccatgtcgccccc

SEQ ID NO: 974318 - DNA, 15 bp, Homo sapiens
cccatgtcgcccccc

SEQ ID NO: 974319 - DNA, 15 bp, Homo sapiens
ccatgtcgccccccg

SEQ ID NO: 974320 - DNA, 15 bp, Homo sapiens
catgtcgccccccgg

SEQ ID NO: 974321 - DNA, 15 bp, Homo sapiens
atgtcgccccccggc

SEQ ID NO: 974322 - DNA, 15 bp, Homo sapiens
tgtcgccccccggct

SEQ ID NO: 974323 - DNA, 15 bp, Homo sapiens
gtcgccccccggcta

SEQ ID NO: 974324 - DNA, 15 bp, Homo sapiens
tcgccccccggctag

SEQ ID NO: 974325 - DNA, 15 bp, Homo sapiens
cgccccccggctagt

SEQ ID NO: 974326 - DNA, 15 bp, Homo sapiens
gccccccggctagtg

SEQ ID NO: 974327 - DNA, 15 bp, Homo sapiens
ccccccggctagtgc

SEQ ID NO: 974328 - DNA, 15 bp, Homo sapiens
cccccggctagtgcg

SEQ ID NO: 974329 - DNA, 15 bp, Homo sapiens
ccccggctagtgcga

SEQ ID NO: 974330 - DNA, 15 bp, Homo sapiens
cccggctagtgcgag

SEQ ID NO: 974331 - DNA, 15 bp, Homo sapiens
ccggctagtgcgagc

SEQ ID NO: 974332 - DNA, 15 bp, Homo sapiens
cggctagtgcgagct

SEQ ID NO: 974333 - DNA, 15 bp, Homo sapiens
ggctagtgcgagctg

SEQ ID NO: 974334 - DNA, 15 bp, Homo sapiens
gctagtgcgagctgc

SEQ ID NO: 974335 - DNA, 15 bp, Homo sapiens
ctagtgcgagctgca

SEQ ID NO: 974336 - DNA, 15 bp, Homo sapiens
tagtgcgagctgcaa

SEQ ID NO: 974337 - DNA, 15 bp, Homo sapiens
agtgcgagctgcaag

SEQ ID NO: 974338 - DNA, 15 bp, Homo sapiens
gtgcgagctgcaagc

SEQ ID NO: 974339 - DNA, 15 bp, Homo sapiens
tgcgagctgcaagcg

SEQ ID NO: 974340 - DNA, 15 bp, Homo sapiens
gcgagctgcaagcga

SEQ ID NO: 974341 - DNA, 15 bp, Homo sapiens
cgagctgcaagcgag

SEQ ID NO: 974342 - DNA, 15 bp, Homo sapiens
gagctgcaagcgaga

SEQ ID NO: 974343 - DNA, 15 bp, Homo sapiens
agctgcaagcgagac

SEQ ID NO: 974344 - DNA, 15 bp, Homo sapiens
gctgcaagcgagact

SEQ ID NO: 974345 - DNA, 15 bp, Homo sapiens
ctgcaagcgagactg

SEQ ID NO: 974346 - DNA, 15 bp, Homo sapiens
tgcaagcgagactga

SEQ ID NO: 974347 - DNA, 15 bp, Homo sapiens
gcaagcgagactgat

SEQ ID NO: 974348 - DNA, 15 bp, Homo sapiens
caagcgagactgatc

SEQ ID NO: 974349 - DNA, 15 bp, Homo sapiens
aagcgagactgatca

SEQ ID NO: 974350 - DNA, 15 bp, Homo sapiens
agcgagactgatcag

SEQ ID NO: 974351 - DNA, 15 bp, Homo sapiens
gcgagactgatcagg

SEQ ID NO: 974352 - DNA, 15 bp, Homo sapiens
cgagactgatcaggt

SEQ ID NO: 974353 - DNA, 15 bp, Homo sapiens
gagactgatcaggtg

SEQ ID NO: 974354 - DNA, 15 bp, Homo sapiens
agactgatcaggtga

SEQ ID NO: 974355 - DNA, 15 bp, Homo sapiens
gactgatcaggtgac

SEQ ID NO: 974356 - DNA, 15 bp, Homo sapiens
actgatcaggtgact

SEQ ID NO: 974357 - DNA, 15 bp, Homo sapiens
ctgatcaggtgactt

SEQ ID NO: 974358 - DNA, 15 bp, Homo sapiens
tgatcaggtgacttt

SEQ ID NO: 974359 - DNA, 15 bp, Homo sapiens
gatcaggtgactttt

SEQ ID NO: 974360 - DNA, 15 bp, Homo sapiens
atcaggtgacttttc

SEQ ID NO: 974361 - DNA, 15 bp, Homo sapiens
tcaggtgacttttct

SEQ ID NO: 974362 - DNA, 15 bp, Homo sapiens
caggtgacttttctc

SEQ ID NO: 974363 - DNA, 15 bp, Homo sapiens
aggtgacttttctcc

SEQ ID NO: 974364 - DNA, 15 bp, Homo sapiens
ggtgacttttctccg

SEQ ID NO: 974365 - DNA, 15 bp, Homo sapiens
gtgacttttctccgg

SEQ ID NO: 974366 - DNA, 15 bp, Homo sapiens
tgacttttctccggc

SEQ ID NO: 974367 - DNA, 15 bp, Homo sapiens
gacttttctccggcc

SEQ ID NO: 974368 - DNA, 15 bp, Homo sapiens
acttttctccggccc

SEQ ID NO: 974369 - DNA, 15 bp, Homo sapiens
cttttctccggcccc

SEQ ID NO: 974370 - DNA, 15 bp, Homo sapiens
ttttctccggccccg

SEQ ID NO: 974371 - DNA, 15 bp, Homo sapiens
tttctccggccccgc

SEQ ID NO: 974372 - DNA, 15 bp, Homo sapiens
ttctccggccccgca

SEQ ID NO: 974373 - DNA, 15 bp, Homo sapiens
tctccggccccgcag

SEQ ID NO: 974374 - DNA, 15 bp, Homo sapiens
ctccggccccgcagg

SEQ ID NO: 974375 - DNA, 15 bp, Homo sapiens
tccggccccgcaggc

SEQ ID NO: 974376 - DNA, 15 bp, Homo sapiens
ccggccccgcaggca

SEQ ID NO: 974377 - DNA, 15 bp, Homo sapiens
cggccccgcaggcac

SEQ ID NO: 974378 - DNA, 15 bp, Homo sapiens
ggccccgcaggcaca

SEQ ID NO: 974379 - DNA, 15 bp, Homo sapiens
gccccgcaggcacag

SEQ ID NO: 974380 - DNA, 15 bp, Homo sapiens
ccccgcaggcacagc

SEQ ID NO: 974381 - DNA, 15 bp, Homo sapiens
cccgcaggcacagcg

SEQ ID NO: 974382 - DNA, 15 bp, Homo sapiens
ccgcaggcacagcgc

SEQ ID NO: 974383 - DNA, 15 bp, Homo sapiens
cgcaggcacagcgca

SEQ ID NO: 974384 - DNA, 15 bp, Homo sapiens
gcaggcacagcgcac

SEQ ID NO: 974385 - DNA, 15 bp, Homo sapiens
caggcacagcgcact

SEQ ID NO: 974386 - DNA, 15 bp, Homo sapiens
aggcacagcgcactc

SEQ ID NO: 974387 - DNA, 15 bp, Homo sapiens
ggcacagcgcactca

SEQ ID NO: 974388 - DNA, 15 bp, Homo sapiens
gcacagcgcactcac

SEQ ID NO: 974389 - DNA, 15 bp, Homo sapiens
cacagcgcactcact

SEQ ID NO: 974390 - DNA, 15 bp, Homo sapiens
acagcgcactcactg

SEQ ID NO: 974391 - DNA, 15 bp, Homo sapiens
cagcgcactcactgc

SEQ ID NO: 974392 - DNA, 15 bp, Homo sapiens
agcgcactcactgcc

SEQ ID NO: 974393 - DNA, 15 bp, Homo sapiens
gcgcactcactgcct

SEQ ID NO: 974394 - DNA, 15 bp, Homo sapiens
cgcactcactgcctt

SEQ ID NO: 974395 - DNA, 15 bp, Homo sapiens
gcactcactgcctta

SEQ ID NO: 974396 - DNA, 15 bp, Homo sapiens
cactcactgccttag

SEQ ID NO: 974397 - DNA, 15 bp, Homo sapiens
actcactgccttagt

SEQ ID NO: 974398 - DNA, 15 bp, Homo sapiens
ctcactgccttagtg

SEQ ID NO: 974399 - DNA, 15 bp, Homo sapiens
tcactgccttagtgc

SEQ ID NO: 974400 - DNA, 15 bp, Homo sapiens
cactgccttagtgcc

SEQ ID NO: 974401 - DNA, 15 bp, Homo sapiens
actgccttagtgcct

SEQ ID NO: 974402 - DNA, 15 bp, Homo sapiens
ctgccttagtgcctc

SEQ ID NO: 974403 - DNA, 15 bp, Homo sapiens
tgccttagtgcctct

SEQ ID NO: 974404 - DNA, 15 bp, Homo sapiens
gccttagtgcctctg

SEQ ID NO: 974405 - DNA, 15 bp, Homo sapiens
ccttagtgcctctga

SEQ ID NO: 974406 - DNA, 15 bp, Homo sapiens
cttagtgcctctgac

SEQ ID NO: 974407 - DNA, 15 bp, Homo sapiens
ttagtgcctctgacc

SEQ ID NO: 974408 - DNA, 15 bp, Homo sapiens
tagtgcctctgaccc

SEQ ID NO: 974409 - DNA, 15 bp, Homo sapiens
agtgcctctgaccct

SEQ ID NO: 974410 - DNA, 15 bp, Homo sapiens
gtgcctctgaccctg

SEQ ID NO: 974411 - DNA, 15 bp, Homo sapiens
tgcctctgaccctgg

SEQ ID NO: 974412 - DNA, 15 bp, Homo sapiens
gcctctgaccctggc

SEQ ID NO: 974413 - DNA, 15 bp, Homo sapiens
cctctgaccctggcc

SEQ ID NO: 974414 - DNA, 15 bp, Homo sapiens
ctctgaccctggcca

SEQ ID NO: 974415 - DNA, 15 bp, Homo sapiens
tctgaccctggccac

SEQ ID NO: 974416 - DNA, 15 bp, Homo sapiens
ctgaccctggccacg

SEQ ID NO: 974417 - DNA, 15 bp, Homo sapiens
tgaccctggccacga

SEQ ID NO: 974418 - DNA, 15 bp, Homo sapiens
gaccctggccacgac

SEQ ID NO: 974419 - DNA, 15 bp, Homo sapiens
accctggccacgacc

SEQ ID NO: 974420 - DNA, 15 bp, Homo sapiens
ccctggccacgaccc

SEQ ID NO: 974421 - DNA, 15 bp, Homo sapiens
cctggccacgaccct

SEQ ID NO: 974422 - DNA, 15 bp, Homo sapiens
ctggccacgaccctg

SEQ ID NO: 974423 - DNA, 15 bp, Homo sapiens
tggccacgaccctgc

SEQ ID NO: 974424 - DNA, 15 bp, Homo sapiens
ggccacgaccctgcc

SEQ ID NO: 974425 - DNA, 15 bp, Homo sapiens
gccacgaccctgcca

SEQ ID NO: 974426 - DNA, 15 bp, Homo sapiens
ccacgaccctgccac

SEQ ID NO: 974427 - DNA, 15 bp, Homo sapiens
cacgaccctgccacc

SEQ ID NO: 974428 - DNA, 15 bp, Homo sapiens
acgaccctgccaccc

SEQ ID NO: 974429 - DNA, 15 bp, Homo sapiens
cgaccctgccacccc

SEQ ID NO: 974430 - DNA, 15 bp, Homo sapiens
gaccctgccaccccg

SEQ ID NO: 974431 - DNA, 15 bp, Homo sapiens
accctgccaccccgc

SEQ ID NO: 974432 - DNA, 15 bp, Homo sapiens
ccctgccaccccgct

SEQ ID NO: 974433 - DNA, 15 bp, Homo sapiens
cctgccaccccgctc

SEQ ID NO: 974434 - DNA, 15 bp, Homo sapiens
ctgccaccccgctcg

SEQ ID NO: 974435 - DNA, 15 bp, Homo sapiens
tgccaccccgctcgg

SEQ ID NO: 974436 - DNA, 15 bp, Homo sapiens
gccaccccgctcggg

SEQ ID NO: 974437 - DNA, 15 bp, Homo sapiens
ccaccccgctcgggc

SEQ ID NO: 974438 - DNA, 15 bp, Homo sapiens
caccccgctcgggca

SEQ ID NO: 974439 - DNA, 15 bp, Homo sapiens
accccgctcgggcag

SEQ ID NO: 974440 - DNA, 15 bp, Homo sapiens
ccccgctcgggcagc

SEQ ID NO: 974441 - DNA, 15 bp, Homo sapiens
cccgctcgggcagct

SEQ ID NO: 974442 - DNA, 15 bp, Homo sapiens
ccgctcgggcagctc

SEQ ID NO: 974443 - DNA, 15 bp, Homo sapiens
cgctcgggcagctct

SEQ ID NO: 974444 - DNA, 15 bp, Homo sapiens
gctcgggcagctctc

SEQ ID NO: 974445 - DNA, 15 bp, Homo sapiens
ctcgggcagctctcg

SEQ ID NO: 974446 - DNA, 15 bp, Homo sapiens
tcgggcagctctcgg

SEQ ID NO: 974447 - DNA, 15 bp, Homo sapiens
cgggcagctctcgga

SEQ ID NO: 974448 - DNA, 15 bp, Homo sapiens
gggcagctctcggat

SEQ ID NO: 974449 - DNA, 15 bp, Homo sapiens
ggcagctctcggatt

SEQ ID NO: 974450 - DNA, 15 bp, Homo sapiens
gcagctctcggattc

SEQ ID NO: 974451 - DNA, 15 bp, Homo sapiens
cagctctcggattct

SEQ ID NO: 974452 - DNA, 15 bp, Homo sapiens
agctctcggattctg

SEQ ID NO: 974453 - DNA, 15 bp, Homo sapiens
gctctcggattctgg

SEQ ID NO: 974454 - DNA, 15 bp, Homo sapiens
ctctcggattctggg

SEQ ID NO: 974455 - DNA, 15 bp, Homo sapiens
tctcggattctggga

SEQ ID NO: 974456 - DNA, 15 bp, Homo sapiens
ctcggattctgggac

SEQ ID NO: 974457 - DNA, 15 bp, Homo sapiens
tcggattctgggaca

SEQ ID NO: 974458 - DNA, 15 bp, Homo sapiens
cggattctgggacag

SEQ ID NO: 974459 - DNA, 15 bp, Homo sapiens
ggattctgggacaga

SEQ ID NO: 974460 - DNA, 15 bp, Homo sapiens
gattctgggacagag

SEQ ID NO: 974461 - DNA, 15 bp, Homo sapiens
attctgggacagagt

SEQ ID NO: 974462 - DNA, 15 bp, Homo sapiens
ttctgggacagagtc

SEQ ID NO: 974463 - DNA, 15 bp, Homo sapiens
tctgggacagagtcc

SEQ ID NO: 974464 - DNA, 15 bp, Homo sapiens
ctgggacagagtcca

SEQ ID NO: 974465 - DNA, 15 bp, Homo sapiens
tgggacagagtccac

SEQ ID NO: 974466 - DNA, 15 bp, Homo sapiens
gggacagagtccacc

SEQ ID NO: 974467 - DNA, 15 bp, Homo sapiens
ggacagagtccacct

SEQ ID NO: 974468 - DNA, 15 bp, Homo sapiens
gacagagtccacctg

SEQ ID NO: 974469 - DNA, 15 bp, Homo sapiens
acagagtccacctgc

SEQ ID NO: 974470 - DNA, 15 bp, Homo sapiens
cagagtccacctgcg

SEQ ID NO: 974471 - DNA, 15 bp, Homo sapiens
agagtccacctgcgg

SEQ ID NO: 974472 - DNA, 15 bp, Homo sapiens
gagtccacctgcggc

SEQ ID NO: 974473 - DNA, 15 bp, Homo sapiens
agtccacctgcggca

SEQ ID NO: 974474 - DNA, 15 bp, Homo sapiens
gtccacctgcggcag

SEQ ID NO: 974475 - DNA, 15 bp, Homo sapiens
tccacctgcggcaga

SEQ ID NO: 974476 - DNA, 15 bp, Homo sapiens
ccacctgcggcagac

SEQ ID NO: 974477 - DNA, 15 bp, Homo sapiens
cacctgcggcagaca

SEQ ID NO: 974478 - DNA, 15 bp, Homo sapiens
acctgcggcagacag

SEQ ID NO: 974479 - DNA, 15 bp, Homo sapiens
cctgcggcagacaga

SEQ ID NO: 974480 - DNA, 15 bp, Homo sapiens
ctgcggcagacagac

SEQ ID NO: 974481 - DNA, 15 bp, Homo sapiens
tgcggcagacagaca

SEQ ID NO: 974482 - DNA, 15 bp, Homo sapiens
gcggcagacagacag

SEQ ID NO: 974483 - DNA, 15 bp, Homo sapiens
cggcagacagacagc

SEQ ID NO: 974484 - DNA, 15 bp, Homo sapiens
ggcagacagacagct

SEQ ID NO: 974485 - DNA, 15 bp, Homo sapiens
gcagacagacagctg

SEQ ID NO: 974486 - DNA, 15 bp, Homo sapiens
cagacagacagctga

SEQ ID NO: 974487 - DNA, 15 bp, Homo sapiens
agacagacagctgaa

SEQ ID NO: 974488 - DNA, 15 bp, Homo sapiens
gacagacagctgaac

SEQ ID NO: 974489 - DNA, 15 bp, Homo sapiens
acagacagctgaaca

SEQ ID NO: 974490 - DNA, 15 bp, Homo sapiens
cagacagctgaacag

SEQ ID NO: 974491 - DNA, 15 bp, Homo sapiens
agacagctgaacagg

SEQ ID NO: 974492 - DNA, 15 bp, Homo sapiens
gacagctgaacaggg

SEQ ID NO: 974493 - DNA, 15 bp, Homo sapiens
acagctgaacagggg

SEQ ID NO: 974494 - DNA, 15 bp, Homo sapiens
cagctgaacaggggc

SEQ ID NO: 974495 - DNA, 15 bp, Homo sapiens
agctgaacaggggca

SEQ ID NO: 974496 - DNA, 15 bp, Homo sapiens
gctgaacaggggcag

SEQ ID NO: 974497 - DNA, 15 bp, Homo sapiens
ctgaacaggggcagc

SEQ ID NO: 974498 - DNA, 15 bp, Homo sapiens
tgaacaggggcagca

SEQ ID NO: 974499 - DNA, 15 bp, Homo sapiens
gaacaggggcagcag

SEQ ID NO: 974500 - DNA, 15 bp, Homo sapiens
aacaggggcagcaga

SEQ ID NO: 974501 - DNA, 15 bp, Homo sapiens
acaggggcagcagac

SEQ ID NO: 974502 - DNA, 15 bp, Homo sapiens
caggggcagcagaca

SEQ ID NO: 974503 - DNA, 15 bp, Homo sapiens
aggggcagcagacac

SEQ ID NO: 974504 - DNA, 15 bp, Homo sapiens
ggggcagcagacaca

SEQ ID NO: 974505 - DNA, 15 bp, Homo sapiens
gggcagcagacacac

SEQ ID NO: 974506 - DNA, 15 bp, Homo sapiens
ggcagcagacacacg

SEQ ID NO: 974507 - DNA, 15 bp, Homo sapiens
gcagcagacacacgg

SEQ ID NO: 974508 - DNA, 15 bp, Homo sapiens
cagcagacacacggt

SEQ ID NO: 974509 - DNA, 15 bp, Homo sapiens
agcagacacacggtg

SEQ ID NO: 974510 - DNA, 15 bp, Homo sapiens
gcagacacacggtgc

SEQ ID NO: 974511 - DNA, 15 bp, Homo sapiens
cagacacacggtgcg

SEQ ID NO: 974512 - DNA, 15 bp, Homo sapiens
agacacacggtgcga

SEQ ID NO: 974513 - DNA, 15 bp, Homo sapiens
gacacacggtgcgac

SEQ ID NO: 974514 - DNA, 15 bp, Homo sapiens
acacacggtgcgacc

SEQ ID NO: 974515 - DNA, 15 bp, Homo sapiens
cacacggtgcgacca

SEQ ID NO: 974516 - DNA, 15 bp, Homo sapiens
acacggtgcgaccag

SEQ ID NO: 974517 - DNA, 15 bp, Homo sapiens
cacggtgcgaccaga

SEQ ID NO: 974518 - DNA, 15 bp, Homo sapiens
acggtgcgaccagag

SEQ ID NO: 974519 - DNA, 15 bp, Homo sapiens
cggtgcgaccagagg

SEQ ID NO: 974520 - DNA, 15 bp, Homo sapiens
ggtgcgaccagaggt

SEQ ID NO: 974521 - DNA, 15 bp, Homo sapiens
gtgcgaccagaggtc

SEQ ID NO: 974522 - DNA, 15 bp, Homo sapiens
tgcgaccagaggtcc

SEQ ID NO: 974523 - DNA, 15 bp, Homo sapiens
gcgaccagaggtcct

SEQ ID NO: 974524 - DNA, 15 bp, Homo sapiens
cgaccagaggtcctt

SEQ ID NO: 974525 - DNA, 15 bp, Homo sapiens
gaccagaggtcctta

SEQ ID NO: 974526 - DNA, 15 bp, Homo sapiens
accagaggtccttac

SEQ ID NO: 974527 - DNA, 15 bp, Homo sapiens
ccagaggtccttaca

SEQ ID NO: 974528 - DNA, 15 bp, Homo sapiens
cagaggtccttacac

SEQ ID NO: 974529 - DNA, 15 bp, Homo sapiens
agaggtccttacact

SEQ ID NO: 974530 - DNA, 15 bp, Homo sapiens
gaggtccttacactt

SEQ ID NO: 974531 - DNA, 15 bp, Homo sapiens
aggtccttacactta

SEQ ID NO: 974532 - DNA, 15 bp, Homo sapiens
ggtccttacacttag

SEQ ID NO: 974533 - DNA, 15 bp, Homo sapiens
gtccttacacttagc

SEQ ID NO: 974534 - DNA, 15 bp, Homo sapiens
tccttacacttagcc

SEQ ID NO: 974535 - DNA, 15 bp, Homo sapiens
ccttacacttagcca

SEQ ID NO: 974536 - DNA, 15 bp, Homo sapiens
cttacacttagccag

SEQ ID NO: 974537 - DNA, 15 bp, Homo sapiens
ttacacttagccagt

SEQ ID NO: 974538 - DNA, 15 bp, Homo sapiens
tacacttagccagtt

SEQ ID NO: 974539 - DNA, 15 bp, Homo sapiens
acacttagccagttg

SEQ ID NO: 974540 - DNA, 15 bp, Homo sapiens
cacttagccagttgg

SEQ ID NO: 974541 - DNA, 15 bp, Homo sapiens
acttagccagttggc

SEQ ID NO: 974542 - DNA, 15 bp, Homo sapiens
cttagccagttggct

SEQ ID NO: 974543 - DNA, 15 bp, Homo sapiens
ttagccagttggctc

SEQ ID NO: 974544 - DNA, 15 bp, Homo sapiens
tagccagttggctct

SEQ ID NO: 974545 - DNA, 15 bp, Homo sapiens
agccagttggctctg

SEQ ID NO: 974546 - DNA, 15 bp, Homo sapiens
gccagttggctctgt

SEQ ID NO: 974547 - DNA, 15 bp, Homo sapiens
ccagttggctctgtg

SEQ ID NO: 974548 - DNA, 15 bp, Homo sapiens
cagttggctctgtgt

SEQ ID NO: 974549 - DNA, 15 bp, Homo sapiens
agttggctctgtgtt

SEQ ID NO: 974550 - DNA, 15 bp, Homo sapiens
gttggctctgtgttc

SEQ ID NO: 974551 - DNA, 15 bp, Homo sapiens
ttggctctgtgttct

SEQ ID NO: 974552 - DNA, 15 bp, Homo sapiens
tggctctgtgttctc

SEQ ID NO: 974553 - DNA, 15 bp, Homo sapiens
ggctctgtgttctcc

SEQ ID NO: 974554 - DNA, 15 bp, Homo sapiens
gctctgtgttctccc

SEQ ID NO: 974555 - DNA, 15 bp, Homo sapiens
ctctgtgttctcccg

SEQ ID NO: 974556 - DNA, 15 bp, Homo sapiens
attacaagcatgtgc

SEQ ID NO: 974557 - DNA, 15 bp, Homo sapiens
ttacaagcatgtgcc

SEQ ID NO: 974558 - DNA, 15 bp, Homo sapiens
tacaagcatgtgcca

SEQ ID NO: 974559 - DNA, 15 bp, Homo sapiens
acaagcatgtgccac

SEQ ID NO: 974560 - DNA, 15 bp, Homo sapiens
caagcatgtgccaca

SEQ ID NO: 974561 - DNA, 15 bp, Homo sapiens
aagcatgtgccacaa

SEQ ID NO: 974562 - DNA, 15 bp, Homo sapiens
agcatgtgccacaat

SEQ ID NO: 974563 - DNA, 15 bp, Homo sapiens
gcatgtgccacaatg

SEQ ID NO: 974564 - DNA, 15 bp, Homo sapiens
catgtgccacaatgc

SEQ ID NO: 974565 - DNA, 15 bp, Homo sapiens
atgtgccacaatgcc

SEQ ID NO: 974566 - DNA, 15 bp, Homo sapiens
tgtgccacaatgccc

SEQ ID NO: 974567 - DNA, 15 bp, Homo sapiens
gtgccacaatgccca

SEQ ID NO: 974568 - DNA, 15 bp, Homo sapiens
tgccacaatgcccag

SEQ ID NO: 974569 - DNA, 15 bp, Homo sapiens
gccacaatgcccagc

SEQ ID NO: 974570 - DNA, 15 bp, Homo sapiens
ccacaatgcccagct

SEQ ID NO: 974571 - DNA, 15 bp, Homo sapiens
cacaatgcccagcta

SEQ ID NO: 974572 - DNA, 15 bp, Homo sapiens
acaatgcccagctaa

SEQ ID NO: 974573 - DNA, 15 bp, Homo sapiens
caatgcccagctaat

SEQ ID NO: 974574 - DNA, 15 bp, Homo sapiens
aatgcccagctaatt

SEQ ID NO: 974575 - DNA, 15 bp, Homo sapiens
atgcccagctaattt

SEQ ID NO: 974576 - DNA, 15 bp, Homo sapiens
tgcccagctaatttt

SEQ ID NO: 974577 - DNA, 15 bp, Homo sapiens
gcccagctaattttt

SEQ ID NO: 974578 - DNA, 15 bp, Homo sapiens
cccagctaatttttg

SEQ ID NO: 974579 - DNA, 15 bp, Homo sapiens
ccagctaatttttgt

SEQ ID NO: 974580 - DNA, 15 bp, Homo sapiens
cagctaatttttgta

SEQ ID NO: 974581 - DNA, 15 bp, Homo sapiens
agctaatttttgtat

SEQ ID NO: 974582 - DNA, 15 bp, Homo sapiens
gctaatttttgtatt

SEQ ID NO: 974583 - DNA, 15 bp, Homo sapiens
ctaatttttgtattt

SEQ ID NO: 974584 - DNA, 15 bp, Homo sapiens
taatttttgtatttt

SEQ ID NO: 974585 - DNA, 15 bp, Homo sapiens
aatttttgtattttt

SEQ ID NO: 974586 - DNA, 15 bp, Homo sapiens
atttttgtattttta

SEQ ID NO: 974587 - DNA, 15 bp, Homo sapiens
tttttgtatttttag

SEQ ID NO: 974588 - DNA, 15 bp, Homo sapiens
ttttgtatttttagc

SEQ ID NO: 974589 - DNA, 15 bp, Homo sapiens
tttgtatttttagca

SEQ ID NO: 974590 - DNA, 15 bp, Homo sapiens
ttgtatttttagcag

SEQ ID NO: 974591 - DNA, 15 bp, Homo sapiens
tgtatttttagcaga

SEQ ID NO: 974592 - DNA, 15 bp, Homo sapiens
gtatttttagcagag

SEQ ID NO: 974593 - DNA, 15 bp, Homo sapiens
tatttttagcagaga

SEQ ID NO: 974594 - DNA, 15 bp, Homo sapiens
atttttagcagagag

SEQ ID NO: 974595 - DNA, 15 bp, Homo sapiens
tttttagcagagaga

SEQ ID NO: 974596 - DNA, 15 bp, Homo sapiens
ttttagcagagagag

SEQ ID NO: 974597 - DNA, 15 bp, Homo sapiens
tttagcagagagagg

SEQ ID NO: 974598 - DNA, 15 bp, Homo sapiens
ttagcagagagaggg

SEQ ID NO: 974599 - DNA, 15 bp, Homo sapiens
tagcagagagagggc

SEQ ID NO: 974600 - DNA, 15 bp, Homo sapiens
agcagagagagggct

SEQ ID NO: 974601 - DNA, 15 bp, Homo sapiens
gcagagagagggctt

SEQ ID NO: 974602 - DNA, 15 bp, Homo sapiens
cagagagagggcttc

SEQ ID NO: 974603 - DNA, 15 bp, Homo sapiens
agagagagggcttca

SEQ ID NO: 974604 - DNA, 15 bp, Homo sapiens
gagagagggcttcat

SEQ ID NO: 974605 - DNA, 15 bp, Homo sapiens
agagagggcttcatc

SEQ ID NO: 974606 - DNA, 15 bp, Homo sapiens
gagagggcttcatcc

SEQ ID NO: 974607 - DNA, 15 bp, Homo sapiens
agagggcttcatcct

SEQ ID NO: 974608 - DNA, 15 bp, Homo sapiens
gagggcttcatcctg

SEQ ID NO: 974609 - DNA, 15 bp, Homo sapiens
agggcttcatcctgt

SEQ ID NO: 974610 - DNA, 15 bp, Homo sapiens
gggcttcatcctgtt

SEQ ID NO: 974611 - DNA, 15 bp, Homo sapiens
ggcttcatcctgttg

SEQ ID NO: 974612 - DNA, 15 bp, Homo sapiens
gcttcatcctgttgg

SEQ ID NO: 974613 - DNA, 15 bp, Homo sapiens
cttcatcctgttggc

SEQ ID NO: 974614 - DNA, 15 bp, Homo sapiens
ttcatcctgttggcc

SEQ ID NO: 974615 - DNA, 15 bp, Homo sapiens
tcatcctgttggcca

SEQ ID NO: 974616 - DNA, 15 bp, Homo sapiens
catcctgttggccag

SEQ ID NO: 974617 - DNA, 15 bp, Homo sapiens
atcctgttggccagt

SEQ ID NO: 974618 - DNA, 15 bp, Homo sapiens
tcctgttggccagtc

SEQ ID NO: 974619 - DNA, 15 bp, Homo sapiens
cctgttggccagtct

SEQ ID NO: 974620 - DNA, 15 bp, Homo sapiens
ctgttggccagtctg

SEQ ID NO: 974621 - DNA, 15 bp, Homo sapiens
tgttggccagtctgg

SEQ ID NO: 974622 - DNA, 15 bp, Homo sapiens
gttggccagtctggt

SEQ ID NO: 974623 - DNA, 15 bp, Homo sapiens
ttggccagtctggtc

SEQ ID NO: 974624 - DNA, 15 bp, Homo sapiens
tggccagtctggtct

SEQ ID NO: 974625 - DNA, 15 bp, Homo sapiens
ggccagtctggtctc

SEQ ID NO: 974626 - DNA, 15 bp, Homo sapiens
gccagtctggtctcg

SEQ ID NO: 974627 - DNA, 15 bp, Homo sapiens
ccagtctggtctcga

SEQ ID NO: 974628 - DNA, 15 bp, Homo sapiens
cagtctggtctcgaa

SEQ ID NO: 974629 - DNA, 15 bp, Homo sapiens
agtctggtctcgaac

SEQ ID NO: 974630 - DNA, 15 bp, Homo sapiens
gtctggtctcgaact

SEQ ID NO: 974631 - DNA, 15 bp, Homo sapiens
tctggtctcgaactc

SEQ ID NO: 974632 - DNA, 15 bp, Homo sapiens
ctggtctcgaactcc

SEQ ID NO: 974633 - DNA, 15 bp, Homo sapiens
tggtctcgaactcct

SEQ ID NO: 974634 - DNA, 15 bp, Homo sapiens
ggtctcgaactcctg

SEQ ID NO: 974635 - DNA, 15 bp, Homo sapiens
gtctcgaactcctga

SEQ ID NO: 974636 - DNA, 15 bp, Homo sapiens
tctcgaactcctgac

SEQ ID NO: 974637 - DNA, 15 bp, Homo sapiens
ctcgaactcctgacc

SEQ ID NO: 974638 - DNA, 15 bp, Homo sapiens
tcgaactcctgacct

SEQ ID NO: 974639 - DNA, 15 bp, Homo sapiens
cgaactcctgacctc

SEQ ID NO: 974640 - DNA, 15 bp, Homo sapiens
gaactcctgacctca

SEQ ID NO: 974641 - DNA, 15 bp, Homo sapiens
gacctcaagtgatct

SEQ ID NO: 974642 - DNA, 15 bp, Homo sapiens
acctcaagtgatctc

SEQ ID NO: 974643 - DNA, 15 bp, Homo sapiens
cctcaagtgatctcc

SEQ ID NO: 974644 - DNA, 15 bp, Homo sapiens
ctcaagtgatctccc

SEQ ID NO: 974645 - DNA, 15 bp, Homo sapiens
tcaagtgatctcccc

SEQ ID NO: 974646 - DNA, 15 bp, Homo sapiens
caagtgatctcccca

SEQ ID NO: 974647 - DNA, 15 bp, Homo sapiens
aagtgatctccccac

SEQ ID NO: 974648 - DNA, 15 bp, Homo sapiens
agtgatctccccacc

SEQ ID NO: 974649 - DNA, 15 bp, Homo sapiens
gtgatctccccacct

SEQ ID NO: 974650 - DNA, 15 bp, Homo sapiens
tgatctccccacctt

SEQ ID NO: 974651 - DNA, 15 bp, Homo sapiens
gatctccccaccttg

SEQ ID NO: 974652 - DNA, 15 bp, Homo sapiens
atctccccaccttgg

SEQ ID NO: 974653 - DNA, 15 bp, Homo sapiens
tctccccaccttggc

SEQ ID NO: 974654 - DNA, 15 bp, Homo sapiens
ctccccaccttggct

SEQ ID NO: 974655 - DNA, 15 bp, Homo sapiens
tccccaccttggctt

SEQ ID NO: 974656 - DNA, 15 bp, Homo sapiens
ccccaccttggcttc

SEQ ID NO: 974657 - DNA, 15 bp, Homo sapiens
cccaccttggcttcc

SEQ ID NO: 974658 - DNA, 15 bp, Homo sapiens
ccaccttggcttccc

SEQ ID NO: 974659 - DNA, 15 bp, Homo sapiens
caccttggcttccca

SEQ ID NO: 974660 - DNA, 15 bp, Homo sapiens
accttggcttcccaa

SEQ ID NO: 974661 - DNA, 15 bp, Homo sapiens
ccttggcttcccaaa

SEQ ID NO: 974662 - DNA, 15 bp, Homo sapiens
cttggcttcccaaag

SEQ ID NO: 974663 - DNA, 15 bp, Homo sapiens
ttggcttcccaaagt

SEQ ID NO: 974664 - DNA, 15 bp, Homo sapiens
tggcttcccaaagtg

SEQ ID NO: 974665 - DNA, 15 bp, Homo sapiens
ggcttcccaaagtgc

SEQ ID NO: 974666 - DNA, 15 bp, Homo sapiens
gcttcccaaagtgct

SEQ ID NO: 974667 - DNA, 15 bp, Homo sapiens
cttcccaaagtgctg

SEQ ID NO: 974668 - DNA, 15 bp, Homo sapiens
ttcccaaagtgctgg

SEQ ID NO: 974669 - DNA, 15 bp, Homo sapiens
cccaaagtgctgggg

SEQ ID NO: 974670 - DNA, 15 bp, Homo sapiens
ccaaagtgctggggt

SEQ ID NO: 974671 - DNA, 15 bp, Homo sapiens
caaagtgctggggtt

SEQ ID NO: 974672 - DNA, 15 bp, Homo sapiens
aaagtgctggggtta

SEQ ID NO: 974673 - DNA, 15 bp, Homo sapiens
aagtgctggggttac

SEQ ID NO: 974674 - DNA, 15 bp, Homo sapiens
agtgctggggttaca

SEQ ID NO: 974675 - DNA, 15 bp, Homo sapiens
gtgctggggttacag

SEQ ID NO: 974676 - DNA, 15 bp, Homo sapiens
tgctggggttacagg

SEQ ID NO: 974677 - DNA, 15 bp, Homo sapiens
gctggggttacaggt

SEQ ID NO: 974678 - DNA, 15 bp, Homo sapiens
ctggggttacaggtg

SEQ ID NO: 974679 - DNA, 15 bp, Homo sapiens
tggggttacaggtgt

SEQ ID NO: 974680 - DNA, 15 bp, Homo sapiens
ggggttacaggtgtg

SEQ ID NO: 974681 - DNA, 15 bp, Homo sapiens
gggttacaggtgtga

SEQ ID NO: 974682 - DNA, 15 bp, Homo sapiens
ggttacaggtgtgaa

SEQ ID NO: 974683 - DNA, 15 bp, Homo sapiens
gttacaggtgtgaac

SEQ ID NO: 974684 - DNA, 15 bp, Homo sapiens
ttacaggtgtgaacc

SEQ ID NO: 974685 - DNA, 15 bp, Homo sapiens
tacaggtgtgaacca

SEQ ID NO: 974686 - DNA, 15 bp, Homo sapiens
acaggtgtgaaccac

SEQ ID NO: 974687 - DNA, 15 bp, Homo sapiens
caggtgtgaaccacc

SEQ ID NO: 974688 - DNA, 15 bp, Homo sapiens
aggtgtgaaccaccg

SEQ ID NO: 974689 - DNA, 15 bp, Homo sapiens
ggtgtgaaccaccgc

SEQ ID NO: 974690 - DNA, 15 bp, Homo sapiens
gtgtgaaccaccgca

SEQ ID NO: 974691 - DNA, 15 bp, Homo sapiens
tgtgaaccaccgcac

SEQ ID NO: 974692 - DNA, 15 bp, Homo sapiens
gtgaaccaccgcacc

SEQ ID NO: 974693 - DNA, 15 bp, Homo sapiens
tgaaccaccgcacct

SEQ ID NO: 974694 - DNA, 15 bp, Homo sapiens
gaaccaccgcacctg

SEQ ID NO: 974695 - DNA, 15 bp, Homo sapiens
aaccaccgcacctgg

SEQ ID NO: 974696 - DNA, 15 bp, Homo sapiens
accaccgcacctggc

SEQ ID NO: 974697 - DNA, 15 bp, Homo sapiens
ccaccgcacctggcc

SEQ ID NO: 974698 - DNA, 15 bp, Homo sapiens
caccgcacctggcct

SEQ ID NO: 974699 - DNA, 15 bp, Homo sapiens
accgcacctggcctt

SEQ ID NO: 974700 - DNA, 15 bp, Homo sapiens
ccgcacctggccttg

SEQ ID NO: 974701 - DNA, 15 bp, Homo sapiens
cgcacctggccttgt

SEQ ID NO: 974702 - DNA, 15 bp, Homo sapiens
gcacctggccttgtt

SEQ ID NO: 974703 - DNA, 15 bp, Homo sapiens
cacctggccttgttt

SEQ ID NO: 974704 - DNA, 15 bp, Homo sapiens
acctggccttgtttt

SEQ ID NO: 974705 - DNA, 15 bp, Homo sapiens
cctggccttgttttt

SEQ ID NO: 974706 - DNA, 15 bp, Homo sapiens
ctggccttgtttttg

SEQ ID NO: 974707 - DNA, 15 bp, Homo sapiens
tggccttgtttttgt

SEQ ID NO: 974708 - DNA, 15 bp, Homo sapiens
ggccttgtttttgtt

SEQ ID NO: 974709 - DNA, 15 bp, Homo sapiens
gccttgtttttgttt

SEQ ID NO: 974710 - DNA, 15 bp, Homo sapiens
ccttgtttttgtttg

SEQ ID NO: 974711 - DNA, 15 bp, Homo sapiens
cttgtttttgtttgt

SEQ ID NO: 974712 - DNA, 15 bp, Homo sapiens
ttgtttttgtttgtg

SEQ ID NO: 974713 - DNA, 15 bp, Homo sapiens
tgtttttgtttgtgt

SEQ ID NO: 974714 - DNA, 15 bp, Homo sapiens
gtttttgtttgtgtc

SEQ ID NO: 974715 - DNA, 15 bp, Homo sapiens
tttttgtttgtgtca

SEQ ID NO: 974716 - DNA, 15 bp, Homo sapiens
ttttgtttgtgtcac

SEQ ID NO: 974717 - DNA, 15 bp, Homo sapiens
tttgtttgtgtcacc

SEQ ID NO: 974718 - DNA, 15 bp, Homo sapiens
ttgtttgtgtcaccc

SEQ ID NO: 974719 - DNA, 15 bp, Homo sapiens
tgtttgtgtcaccca

SEQ ID NO: 974720 - DNA, 15 bp, Homo sapiens
gtttgtgtcacccag

SEQ ID NO: 974721 - DNA, 15 bp, Homo sapiens
tttgtgtcacccagg

SEQ ID NO: 974722 - DNA, 15 bp, Homo sapiens
ttgtgtcacccaggt

SEQ ID NO: 974723 - DNA, 15 bp, Homo sapiens
tgtgtcacccaggtt

SEQ ID NO: 974724 - DNA, 15 bp, Homo sapiens
gtgtcacccaggttg

SEQ ID NO: 974725 - DNA, 15 bp, Homo sapiens
tgtcacccaggttga

SEQ ID NO: 974726 - DNA, 15 bp, Homo sapiens
gtcacccaggttgat

SEQ ID NO: 974727 - DNA, 15 bp, Homo sapiens
tcacccaggttgatc

SEQ ID NO: 974728 - DNA, 15 bp, Homo sapiens
cacccaggttgatct

SEQ ID NO: 974729 - DNA, 15 bp, Homo sapiens
acccaggttgatctg

SEQ ID NO: 974730 - DNA, 15 bp, Homo sapiens
cccaggttgatctgc

SEQ ID NO: 974731 - DNA, 15 bp, Homo sapiens
ccaggttgatctgcc

SEQ ID NO: 974732 - DNA, 15 bp, Homo sapiens
caggttgatctgcca

SEQ ID NO: 974733 - DNA, 15 bp, Homo sapiens
aggttgatctgccag

SEQ ID NO: 974734 - DNA, 15 bp, Homo sapiens
ggttgatctgccagg

SEQ ID NO: 974735 - DNA, 15 bp, Homo sapiens
gttgatctgccagga

SEQ ID NO: 974736 - DNA, 15 bp, Homo sapiens
ttgatctgccaggaa

SEQ ID NO: 974737 - DNA, 15 bp, Homo sapiens
tgatctgccaggaat

SEQ ID NO: 974738 - DNA, 15 bp, Homo sapiens
gatctgccaggaata

SEQ ID NO: 974739 - DNA, 15 bp, Homo sapiens
atctgccaggaataa

SEQ ID NO: 974740 - DNA, 15 bp, Homo sapiens
tctgccaggaataaa

SEQ ID NO: 974741 - DNA, 15 bp, Homo sapiens
ctgccaggaataaag

SEQ ID NO: 974742 - DNA, 15 bp, Homo sapiens
tgccaggaataaaga

SEQ ID NO: 974743 - DNA, 15 bp, Homo sapiens
gccaggaataaagat

SEQ ID NO: 974744 - DNA, 15 bp, Homo sapiens
ccaggaataaagatg

SEQ ID NO: 974745 - DNA, 15 bp, Homo sapiens
caggaataaagatgg

SEQ ID NO: 974746 - DNA, 15 bp, Homo sapiens
aggaataaagatggc

SEQ ID NO: 974747 - DNA, 15 bp, Homo sapiens
ggaataaagatggcc

SEQ ID NO: 974748 - DNA, 15 bp, Homo sapiens
gaataaagatggcca

SEQ ID NO: 974749 - DNA, 15 bp, Homo sapiens
aataaagatggccac

SEQ ID NO: 974750 - DNA, 15 bp, Homo sapiens
ataaagatggccacc

SEQ ID NO: 974751 - DNA, 15 bp, Homo sapiens
taaagatggccaccc

SEQ ID NO: 974752 - DNA, 15 bp, Homo sapiens
aaagatggccaccca

SEQ ID NO: 974753 - DNA, 15 bp, Homo sapiens
aagatggccacccaa

SEQ ID NO: 974754 - DNA, 15 bp, Homo sapiens
agatggccacccaac

SEQ ID NO: 974755 - DNA, 15 bp, Homo sapiens
gatggccacccaact

SEQ ID NO: 974756 - DNA, 15 bp, Homo sapiens
atggccacccaactt

SEQ ID NO: 974757 - DNA, 15 bp, Homo sapiens
tggccacccaacttt

SEQ ID NO: 974758 - DNA, 15 bp, Homo sapiens
ggccacccaactttt

SEQ ID NO: 974759 - DNA, 15 bp, Homo sapiens
gccacccaacttttt

SEQ ID NO: 974760 - DNA, 15 bp, Homo sapiens
ccacccaactttttt

SEQ ID NO: 974761 - DNA, 15 bp, Homo sapiens
cacccaacttttttt

SEQ ID NO: 974762 - DNA, 15 bp, Homo sapiens
acccaactttttttt

SEQ ID NO: 974763 - DNA, 15 bp, Homo sapiens
cccaacttttttttt

SEQ ID NO: 974764 - DNA, 15 bp, Homo sapiens
ccaactttttttttt

SEQ ID NO: 974765 - DNA, 15 bp, Homo sapiens
caacttttttttttt

SEQ ID NO: 974766 - DNA, 15 bp, Homo sapiens
aactttttttttttt

SEQ ID NO: 974767 - DNA, 15 bp, Homo sapiens
acttttttttttttc

SEQ ID NO: 974768 - DNA, 15 bp, Homo sapiens
cttttttttttttcc

SEQ ID NO: 974769 - DNA, 15 bp, Homo sapiens
ttttttttttttcca

SEQ ID NO: 974770 - DNA, 15 bp, Homo sapiens
tttttttttttccag

SEQ ID NO: 974771 - DNA, 15 bp, Homo sapiens
ttttttttttccagc

SEQ ID NO: 974772 - DNA, 15 bp, Homo sapiens
tttttttttccagcg

SEQ ID NO: 974773 - DNA, 15 bp, Homo sapiens
ttttttttccagcga

SEQ ID NO: 974774 - DNA, 15 bp, Homo sapiens
tttttttccagcgac

SEQ ID NO: 974775 - DNA, 15 bp, Homo sapiens
ttttttccagcgaca

SEQ ID NO: 974776 - DNA, 15 bp, Homo sapiens
tttttccagcgacag

SEQ ID NO: 974777 - DNA, 15 bp, Homo sapiens
ttttccagcgacaga

SEQ ID NO: 974778 - DNA, 15 bp, Homo sapiens
tttccagcgacagag

SEQ ID NO: 974779 - DNA, 15 bp, Homo sapiens
ttccagcgacagagt

SEQ ID NO: 974780 - DNA, 15 bp, Homo sapiens
tccagcgacagagtc

SEQ ID NO: 974781 - DNA, 15 bp, Homo sapiens
ccagcgacagagtct

SEQ ID NO: 974782 - DNA, 15 bp, Homo sapiens
cagcgacagagtctt

SEQ ID NO: 974783 - DNA, 15 bp, Homo sapiens
agcgacagagtcttg

SEQ ID NO: 974784 - DNA, 15 bp, Homo sapiens
gcgacagagtcttgc

SEQ ID NO: 974785 - DNA, 15 bp, Homo sapiens
cgacagagtcttgct

SEQ ID NO: 974786 - DNA, 15 bp, Homo sapiens
gacagagtcttgctt

SEQ ID NO: 974787 - DNA, 15 bp, Homo sapiens
acagagtcttgcttt

SEQ ID NO: 974788 - DNA, 15 bp, Homo sapiens
cagagtcttgctttc

SEQ ID NO: 974789 - DNA, 15 bp, Homo sapiens
agagtcttgctttct

SEQ ID NO: 974790 - DNA, 15 bp, Homo sapiens
gagtcttgctttctg

SEQ ID NO: 974791 - DNA, 15 bp, Homo sapiens
agtcttgctttctgt

SEQ ID NO: 974792 - DNA, 15 bp, Homo sapiens
gtcttgctttctgtg

SEQ ID NO: 974793 - DNA, 15 bp, Homo sapiens
tcttgctttctgtgc

SEQ ID NO: 974794 - DNA, 15 bp, Homo sapiens
cttgctttctgtgcc

SEQ ID NO: 974795 - DNA, 15 bp, Homo sapiens
ttgctttctgtgccc

SEQ ID NO: 974796 - DNA, 15 bp, Homo sapiens
tgctttctgtgcccc

SEQ ID NO: 974797 - DNA, 15 bp, Homo sapiens
gctttctgtgcccca

SEQ ID NO: 974798 - DNA, 15 bp, Homo sapiens
ctttctgtgccccag

SEQ ID NO: 974799 - DNA, 15 bp, Homo sapiens
tttctgtgccccagg

SEQ ID NO: 974800 - DNA, 15 bp, Homo sapiens
ttctgtgccccaggc

SEQ ID NO: 974801 - DNA, 15 bp, Homo sapiens
tctgtgccccaggct

SEQ ID NO: 974802 - DNA, 15 bp, Homo sapiens
ctgtgccccaggctg

SEQ ID NO: 974803 - DNA, 15 bp, Homo sapiens
tgtgccccaggctgg

SEQ ID NO: 974804 - DNA, 15 bp, Homo sapiens
gtgccccaggctgga

SEQ ID NO: 974805 - DNA, 15 bp, Homo sapiens
tgccccaggctggac

SEQ ID NO: 974806 - DNA, 15 bp, Homo sapiens
gccccaggctggact

SEQ ID NO: 974807 - DNA, 15 bp, Homo sapiens
ccccaggctggactg

SEQ ID NO: 974808 - DNA, 15 bp, Homo sapiens
cccaggctggactgc

SEQ ID NO: 974809 - DNA, 15 bp, Homo sapiens
ccaggctggactgca

SEQ ID NO: 974810 - DNA, 15 bp, Homo sapiens
caggctggactgcag

SEQ ID NO: 974811 - DNA, 15 bp, Homo sapiens
aggctggactgcagt

SEQ ID NO: 974812 - DNA, 15 bp, Homo sapiens
ggctggactgcagtg

SEQ ID NO: 974813 - DNA, 15 bp, Homo sapiens
gctggactgcagtgg

SEQ ID NO: 974814 - DNA, 15 bp, Homo sapiens
ctggactgcagtggt

SEQ ID NO: 974815 - DNA, 15 bp, Homo sapiens
tggactgcagtggtg

SEQ ID NO: 974816 - DNA, 15 bp, Homo sapiens
ggactgcagtggtgt

SEQ ID NO: 974817 - DNA, 15 bp, Homo sapiens
gactgcagtggtgtg

SEQ ID NO: 974818 - DNA, 15 bp, Homo sapiens
actgcagtggtgtga

SEQ ID NO: 974819 - DNA, 15 bp, Homo sapiens
ctgcagtggtgtgat

SEQ ID NO: 974820 - DNA, 15 bp, Homo sapiens
tgcagtggtgtgatt

SEQ ID NO: 974821 - DNA, 15 bp, Homo sapiens
gcagtggtgtgatta

SEQ ID NO: 974822 - DNA, 15 bp, Homo sapiens
cagtggtgtgattat

SEQ ID NO: 974823 - DNA, 15 bp, Homo sapiens
agtggtgtgattata

SEQ ID NO: 974824 - DNA, 15 bp, Homo sapiens
gtggtgtgattatag

SEQ ID NO: 974825 - DNA, 15 bp, Homo sapiens
tggtgtgattatagt

SEQ ID NO: 974826 - DNA, 15 bp, Homo sapiens
ggtgtgattatagtt

SEQ ID NO: 974827 - DNA, 15 bp, Homo sapiens
gtgtgattatagttc

SEQ ID NO: 974828 - DNA, 15 bp, Homo sapiens
tgtgattatagttca

SEQ ID NO: 974829 - DNA, 15 bp, Homo sapiens
gtgattatagttcag

SEQ ID NO: 974830 - DNA, 15 bp, Homo sapiens
tgattatagttcagt

SEQ ID NO: 974831 - DNA, 15 bp, Homo sapiens
gattatagttcagtg

SEQ ID NO: 974832 - DNA, 15 bp, Homo sapiens
attatagttcagtgc

SEQ ID NO: 974833 - DNA, 15 bp, Homo sapiens
ttatagttcagtgca

SEQ ID NO: 974834 - DNA, 15 bp, Homo sapiens
tatagttcagtgcag

SEQ ID NO: 974835 - DNA, 15 bp, Homo sapiens
atagttcagtgcagt

SEQ ID NO: 974836 - DNA, 15 bp, Homo sapiens
tagttcagtgcagtc

SEQ ID NO: 974837 - DNA, 15 bp, Homo sapiens
agttcagtgcagtcc

SEQ ID NO: 974838 - DNA, 15 bp, Homo sapiens
gttcagtgcagtccc

SEQ ID NO: 974839 - DNA, 15 bp, Homo sapiens
ttcagtgcagtcccg

SEQ ID NO: 974840 - DNA, 15 bp, Homo sapiens
tcagtgcagtcccga

SEQ ID NO: 974841 - DNA, 15 bp, Homo sapiens
cagtgcagtcccgac

SEQ ID NO: 974842 - DNA, 15 bp, Homo sapiens
agtgcagtcccgacc

SEQ ID NO: 974843 - DNA, 15 bp, Homo sapiens
gtgcagtcccgacct

SEQ ID NO: 974844 - DNA, 15 bp, Homo sapiens
tgcagtcccgacctc

SEQ ID NO: 974845 - DNA, 15 bp, Homo sapiens
gcagtcccgacctcc

SEQ ID NO: 974846 - DNA, 15 bp, Homo sapiens
cagtcccgacctcct

SEQ ID NO: 974847 - DNA, 15 bp, Homo sapiens
agtcccgacctcctg

SEQ ID NO: 974848 - DNA, 15 bp, Homo sapiens
gtcccgacctcctgg

SEQ ID NO: 974849 - DNA, 15 bp, Homo sapiens
tcccgacctcctggg

SEQ ID NO: 974850 - DNA, 15 bp, Homo sapiens
cccgacctcctgggc

SEQ ID NO: 974851 - DNA, 15 bp, Homo sapiens
ccgacctcctgggct

SEQ ID NO: 974852 - DNA, 15 bp, Homo sapiens
cgacctcctgggctc

SEQ ID NO: 974853 - DNA, 15 bp, Homo sapiens
gacctcctgggctca

SEQ ID NO: 974854 - DNA, 15 bp, Homo sapiens
acctcctgggctcag

SEQ ID NO: 974855 - DNA, 15 bp, Homo sapiens
cctcctgggctcagg

SEQ ID NO: 974856 - DNA, 15 bp, Homo sapiens
ctcctgggctcaggc

SEQ ID NO: 974857 - DNA, 15 bp, Homo sapiens
tcctgggctcaggca

SEQ ID NO: 974858 - DNA, 15 bp, Homo sapiens
cctgggctcaggcaa

SEQ ID NO: 974859 - DNA, 15 bp, Homo sapiens
ctgggctcaggcaat

SEQ ID NO: 974860 - DNA, 15 bp, Homo sapiens
tgggctcaggcaatc

SEQ ID NO: 974861 - DNA, 15 bp, Homo sapiens
gggctcaggcaatcc

SEQ ID NO: 974862 - DNA, 15 bp, Homo sapiens
ggctcaggcaatcct

SEQ ID NO: 974863 - DNA, 15 bp, Homo sapiens
gctcaggcaatcctc

SEQ ID NO: 974864 - DNA, 15 bp, Homo sapiens
ctcaggcaatcctcc

SEQ ID NO: 974865 - DNA, 15 bp, Homo sapiens
tcaggcaatcctccc

SEQ ID NO: 974866 - DNA, 15 bp, Homo sapiens
caggcaatcctccca

SEQ ID NO: 974867 - DNA, 15 bp, Homo sapiens
aggcaatcctcccac

SEQ ID NO: 974868 - DNA, 15 bp, Homo sapiens
ggcaatcctcccacc

SEQ ID NO: 974869 - DNA, 15 bp, Homo sapiens
gcaatcctcccacct

SEQ ID NO: 974870 - DNA, 15 bp, Homo sapiens
caatcctcccacctc

SEQ ID NO: 974871 - DNA, 15 bp, Homo sapiens
aatcctcccacctca

SEQ ID NO: 974872 - DNA, 15 bp, Homo sapiens
ccacctcagcctcct

SEQ ID NO: 974873 - DNA, 15 bp, Homo sapiens
cacctcagcctcctg

SEQ ID NO: 974874 - DNA, 15 bp, Homo sapiens
acctcagcctcctga

SEQ ID NO: 974875 - DNA, 15 bp, Homo sapiens
ctgagtagctgggac

SEQ ID NO: 974876 - DNA, 15 bp, Homo sapiens
tgagtagctgggact

SEQ ID NO: 974877 - DNA, 15 bp, Homo sapiens
gagtagctgggacta

SEQ ID NO: 974878 - DNA, 15 bp, Homo sapiens
agtagctgggactat

SEQ ID NO: 974879 - DNA, 15 bp, Homo sapiens
gtagctgggactatg

SEQ ID NO: 974880 - DNA, 15 bp, Homo sapiens
tagctgggactatgg

SEQ ID NO: 974881 - DNA, 15 bp, Homo sapiens
agctgggactatggg

SEQ ID NO: 974882 - DNA, 15 bp, Homo sapiens
gctgggactatgggc

SEQ ID NO: 974883 - DNA, 15 bp, Homo sapiens
ctgggactatgggca

SEQ ID NO: 974884 - DNA, 15 bp, Homo sapiens
tgggactatgggcat

SEQ ID NO: 974885 - DNA, 15 bp, Homo sapiens
gggactatgggcatg

SEQ ID NO: 974886 - DNA, 15 bp, Homo sapiens
ggactatgggcatgc

SEQ ID NO: 974887 - DNA, 15 bp, Homo sapiens
gactatgggcatgca

SEQ ID NO: 974888 - DNA, 15 bp, Homo sapiens
actatgggcatgcac

SEQ ID NO: 974889 - DNA, 15 bp, Homo sapiens
ctatgggcatgcacc

SEQ ID NO: 974890 - DNA, 15 bp, Homo sapiens
tatgggcatgcacca

SEQ ID NO: 974891 - DNA, 15 bp, Homo sapiens
atgggcatgcaccac

SEQ ID NO: 974892 - DNA, 15 bp, Homo sapiens
tgggcatgcaccacc

SEQ ID NO: 974893 - DNA, 15 bp, Homo sapiens
gggcatgcaccacca

SEQ ID NO: 974894 - DNA, 15 bp, Homo sapiens
ggcatgcaccaccac

SEQ ID NO: 974895 - DNA, 15 bp, Homo sapiens
gcatgcaccaccact

SEQ ID NO: 974896 - DNA, 15 bp, Homo sapiens
catgcaccaccactc

SEQ ID NO: 974897 - DNA, 15 bp, Homo sapiens
atgcaccaccactca

SEQ ID NO: 974898 - DNA, 15 bp, Homo sapiens
tgcaccaccactcac

SEQ ID NO: 974899 - DNA, 15 bp, Homo sapiens
gcaccaccactcaca

SEQ ID NO: 974900 - DNA, 15 bp, Homo sapiens
caccaccactcacag

SEQ ID NO: 974901 - DNA, 15 bp, Homo sapiens
accaccactcacagc

SEQ ID NO: 974902 - DNA, 15 bp, Homo sapiens
ccaccactcacagct

SEQ ID NO: 974903 - DNA, 15 bp, Homo sapiens
caccactcacagctt

SEQ ID NO: 974904 - DNA, 15 bp, Homo sapiens
accactcacagcttt

SEQ ID NO: 974905 - DNA, 15 bp, Homo sapiens
ccactcacagctttt

SEQ ID NO: 974906 - DNA, 15 bp, Homo sapiens
cactcacagcttttt

SEQ ID NO: 974907 - DNA, 15 bp, Homo sapiens
actcacagctttttg

SEQ ID NO: 974908 - DNA, 15 bp, Homo sapiens
ctcacagctttttgt

SEQ ID NO: 974909 - DNA, 15 bp, Homo sapiens
tcacagctttttgtt

SEQ ID NO: 974910 - DNA, 15 bp, Homo sapiens
cacagctttttgttg

SEQ ID NO: 974911 - DNA, 15 bp, Homo sapiens
acagctttttgttgg

SEQ ID NO: 974912 - DNA, 15 bp, Homo sapiens
cagctttttgttgga

SEQ ID NO: 974913 - DNA, 15 bp, Homo sapiens
agctttttgttggag

SEQ ID NO: 974914 - DNA, 15 bp, Homo sapiens
gctttttgttggaga

SEQ ID NO: 974915 - DNA, 15 bp, Homo sapiens
ctttttgttggagag

SEQ ID NO: 974916 - DNA, 15 bp, Homo sapiens
tttttgttggagaga

SEQ ID NO: 974917 - DNA, 15 bp, Homo sapiens
ttttgttggagagat

SEQ ID NO: 974918 - DNA, 15 bp, Homo sapiens
tttgttggagagata

SEQ ID NO: 974919 - DNA, 15 bp, Homo sapiens
ttgttggagagatag

SEQ ID NO: 974920 - DNA, 15 bp, Homo sapiens
tgttggagagatagg

SEQ ID NO: 974921 - DNA, 15 bp, Homo sapiens
gttggagagataggt

SEQ ID NO: 974922 - DNA, 15 bp, Homo sapiens
ttggagagataggtt

SEQ ID NO: 974923 - DNA, 15 bp, Homo sapiens
tggagagataggttt

SEQ ID NO: 974924 - DNA, 15 bp, Homo sapiens
ggagagataggtttt

SEQ ID NO: 974925 - DNA, 15 bp, Homo sapiens
gagagataggtttta

SEQ ID NO: 974926 - DNA, 15 bp, Homo sapiens
agagataggttttat

SEQ ID NO: 974927 - DNA, 15 bp, Homo sapiens
gagataggttttatg

SEQ ID NO: 974928 - DNA, 15 bp, Homo sapiens
agataggttttatgt

SEQ ID NO: 974929 - DNA, 15 bp, Homo sapiens
gataggttttatgtt

SEQ ID NO: 974930 - DNA, 15 bp, Homo sapiens
ataggttttatgttg

SEQ ID NO: 974931 - DNA, 15 bp, Homo sapiens
taggttttatgttgc

SEQ ID NO: 974932 - DNA, 15 bp, Homo sapiens
aggttttatgttgcc

SEQ ID NO: 974933 - DNA, 15 bp, Homo sapiens
ggttttatgttgccc

SEQ ID NO: 974934 - DNA, 15 bp, Homo sapiens
gttttatgttgccca

SEQ ID NO: 974935 - DNA, 15 bp, Homo sapiens
ttttatgttgcccag

SEQ ID NO: 974936 - DNA, 15 bp, Homo sapiens
tttatgttgcccagg

SEQ ID NO: 974937 - DNA, 15 bp, Homo sapiens
ttatgttgcccaggc

SEQ ID NO: 974938 - DNA, 15 bp, Homo sapiens
tatgttgcccaggct

SEQ ID NO: 974939 - DNA, 15 bp, Homo sapiens
atgttgcccaggctg

SEQ ID NO: 974940 - DNA, 15 bp, Homo sapiens
ttgcccaggctggtc

SEQ ID NO: 974941 - DNA, 15 bp, Homo sapiens
tgcccaggctggtct

SEQ ID NO: 974942 - DNA, 15 bp, Homo sapiens
gcccaggctggtctt

SEQ ID NO: 974943 - DNA, 15 bp, Homo sapiens
cccaggctggtcttg

SEQ ID NO: 974944 - DNA, 15 bp, Homo sapiens
ccaggctggtcttga

SEQ ID NO: 974945 - DNA, 15 bp, Homo sapiens
caggctggtcttgaa

SEQ ID NO: 974946 - DNA, 15 bp, Homo sapiens
aggctggtcttgaaa

SEQ ID NO: 974947 - DNA, 15 bp, Homo sapiens
ggctggtcttgaaat

SEQ ID NO: 974948 - DNA, 15 bp, Homo sapiens
gctggtcttgaaatc

SEQ ID NO: 974949 - DNA, 15 bp, Homo sapiens
ctggtcttgaaatcc

SEQ ID NO: 974950 - DNA, 15 bp, Homo sapiens
tggtcttgaaatcct

SEQ ID NO: 974951 - DNA, 15 bp, Homo sapiens
ggtcttgaaatcctg

SEQ ID NO: 974952 - DNA, 15 bp, Homo sapiens
gtcttgaaatcctgg

SEQ ID NO: 974953 - DNA, 15 bp, Homo sapiens
tcttgaaatcctggt

SEQ ID NO: 974954 - DNA, 15 bp, Homo sapiens
cttgaaatcctggtg

SEQ ID NO: 974955 - DNA, 15 bp, Homo sapiens
ttgaaatcctggtgt

SEQ ID NO: 974956 - DNA, 15 bp, Homo sapiens
tgaaatcctggtgtc

SEQ ID NO: 974957 - DNA, 15 bp, Homo sapiens
gaaatcctggtgtca

SEQ ID NO: 974958 - DNA, 15 bp, Homo sapiens
aaatcctggtgtcaa

SEQ ID NO: 974959 - DNA, 15 bp, Homo sapiens
aatcctggtgtcaag

SEQ ID NO: 974960 - DNA, 15 bp, Homo sapiens
atcctggtgtcaagt

SEQ ID NO: 974961 - DNA, 15 bp, Homo sapiens
tcctggtgtcaagtg

SEQ ID NO: 974962 - DNA, 15 bp, Homo sapiens
cctggtgtcaagtga

SEQ ID NO: 974963 - DNA, 15 bp, Homo sapiens
ctggtgtcaagtgat

SEQ ID NO: 974964 - DNA, 15 bp, Homo sapiens
tggtgtcaagtgatc

SEQ ID NO: 974965 - DNA, 15 bp, Homo sapiens
ggtgtcaagtgatcc

SEQ ID NO: 974966 - DNA, 15 bp, Homo sapiens
gtgtcaagtgatcct

SEQ ID NO: 974967 - DNA, 15 bp, Homo sapiens
tgtcaagtgatcctc

SEQ ID NO: 974968 - DNA, 15 bp, Homo sapiens
gtcaagtgatcctcc

SEQ ID NO: 974969 - DNA, 15 bp, Homo sapiens
tcaagtgatcctcct

SEQ ID NO: 974970 - DNA, 15 bp, Homo sapiens
caagtgatcctcctg

SEQ ID NO: 974971 - DNA, 15 bp, Homo sapiens
aagtgatcctcctgc

SEQ ID NO: 974972 - DNA, 15 bp, Homo sapiens
agtgatcctcctgcc

SEQ ID NO: 974973 - DNA, 15 bp, Homo sapiens
gtgatcctcctgcct

SEQ ID NO: 974974 - DNA, 15 bp, Homo sapiens
tgatcctcctgcctc

SEQ ID NO: 974975 - DNA, 15 bp, Homo sapiens
gatcctcctgcctca

SEQ ID NO: 974976 - DNA, 15 bp, Homo sapiens
atcctcctgcctcag

SEQ ID NO: 974977 - DNA, 15 bp, Homo sapiens
tcctcctgcctcagt

SEQ ID NO: 974978 - DNA, 15 bp, Homo sapiens
cctcctgcctcagtc

SEQ ID NO: 974979 - DNA, 15 bp, Homo sapiens
ctcctgcctcagtct

SEQ ID NO: 974980 - DNA, 15 bp, Homo sapiens
tcctgcctcagtctt

SEQ ID NO: 974981 - DNA, 15 bp, Homo sapiens
cctgcctcagtcttc

SEQ ID NO: 974982 - DNA, 15 bp, Homo sapiens
ctgcctcagtcttcc

SEQ ID NO: 974983 - DNA, 15 bp, Homo sapiens
tgcctcagtcttcca

SEQ ID NO: 974984 - DNA, 15 bp, Homo sapiens
gcctcagtcttccaa

SEQ ID NO: 974985 - DNA, 15 bp, Homo sapiens
cctcagtcttccaat

SEQ ID NO: 974986 - DNA, 15 bp, Homo sapiens
ctcagtcttccaatg

SEQ ID NO: 974987 - DNA, 15 bp, Homo sapiens
tcagtcttccaatga

SEQ ID NO: 974988 - DNA, 15 bp, Homo sapiens
cagtcttccaatgag

SEQ ID NO: 974989 - DNA, 15 bp, Homo sapiens
agtcttccaatgagt

SEQ ID NO: 974990 - DNA, 15 bp, Homo sapiens
gtcttccaatgagtg

SEQ ID NO: 974991 - DNA, 15 bp, Homo sapiens
tcttccaatgagtga

SEQ ID NO: 974992 - DNA, 15 bp, Homo sapiens
cttccaatgagtgac

SEQ ID NO: 974993 - DNA, 15 bp, Homo sapiens
ttccaatgagtgact

SEQ ID NO: 974994 - DNA, 15 bp, Homo sapiens
tccaatgagtgacta

SEQ ID NO: 974995 - DNA, 15 bp, Homo sapiens
ccaatgagtgactat

SEQ ID NO: 974996 - DNA, 15 bp, Homo sapiens
caatgagtgactatg

SEQ ID NO: 974997 - DNA, 15 bp, Homo sapiens
aatgagtgactatga

SEQ ID NO: 974998 - DNA, 15 bp, Homo sapiens
atgagtgactatgag

SEQ ID NO: 974999 - DNA, 15 bp, Homo sapiens
tgagtgactatgagt

SEQ ID NO: 975000 - DNA, 15 bp, Homo sapiens
gagtgactatgagtt

SEQ ID NO: 975001 - DNA, 15 bp, Homo sapiens
agtgactatgagtta

SEQ ID NO: 975002 - DNA, 15 bp, Homo sapiens
gtgactatgagttat

SEQ ID NO: 975003 - DNA, 15 bp, Homo sapiens
tgactatgagttatg

SEQ ID NO: 975004 - DNA, 15 bp, Homo sapiens
gactatgagttatgt

SEQ ID NO: 975005 - DNA, 15 bp, Homo sapiens
actatgagttatgtg

SEQ ID NO: 975006 - DNA, 15 bp, Homo sapiens
ctatgagttatgtgt

SEQ ID NO: 975007 - DNA, 15 bp, Homo sapiens
tatgagttatgtgtc

SEQ ID NO: 975008 - DNA, 15 bp, Homo sapiens
atgagttatgtgtct

SEQ ID NO: 975009 - DNA, 15 bp, Homo sapiens
tgagttatgtgtctg

SEQ ID NO: 975010 - DNA, 15 bp, Homo sapiens
gagttatgtgtctgt

SEQ ID NO: 975011 - DNA, 15 bp, Homo sapiens
agttatgtgtctgta

SEQ ID NO: 975012 - DNA, 15 bp, Homo sapiens
gttatgtgtctgtaa

SEQ ID NO: 975013 - DNA, 15 bp, Homo sapiens
ttatgtgtctgtaat

SEQ ID NO: 975014 - DNA, 15 bp, Homo sapiens
tatgtgtctgtaata

SEQ ID NO: 975015 - DNA, 15 bp, Homo sapiens
atgtgtctgtaatac

SEQ ID NO: 975016 - DNA, 15 bp, Homo sapiens
tgtgtctgtaatacg

SEQ ID NO: 975017 - DNA, 15 bp, Homo sapiens
gtgtctgtaatacgt

SEQ ID NO: 975018 - DNA, 15 bp, Homo sapiens
tgtctgtaatacgta

SEQ ID NO: 975019 - DNA, 15 bp, Homo sapiens
gtctgtaatacgtat

SEQ ID NO: 975020 - DNA, 15 bp, Homo sapiens
tctgtaatacgtatc

SEQ ID NO: 975021 - DNA, 15 bp, Homo sapiens
ctgtaatacgtatcc

SEQ ID NO: 975022 - DNA, 15 bp, Homo sapiens
tgtaatacgtatcca

SEQ ID NO: 975023 - DNA, 15 bp, Homo sapiens
gtaatacgtatccat

SEQ ID NO: 975024 - DNA, 15 bp, Homo sapiens
taatacgtatccatg

SEQ ID NO: 975025 - DNA, 15 bp, Homo sapiens
aatacgtatccatgt

SEQ ID NO: 975026 - DNA, 15 bp, Homo sapiens
atacgtatccatgtc

SEQ ID NO: 975027 - DNA, 15 bp, Homo sapiens
tacgtatccatgtcc

SEQ ID NO: 975028 - DNA, 15 bp, Homo sapiens
acgtatccatgtccc

SEQ ID NO: 975029 - DNA, 15 bp, Homo sapiens
cgtatccatgtcccc

SEQ ID NO: 975030 - DNA, 15 bp, Homo sapiens
gtatccatgtcccct

SEQ ID NO: 975031 - DNA, 15 bp, Homo sapiens
tatccatgtcccctt

SEQ ID NO: 975032 - DNA, 15 bp, Homo sapiens
atccatgtccccttc

SEQ ID NO: 975033 - DNA, 15 bp, Homo sapiens
tccatgtccccttcc

SEQ ID NO: 975034 - DNA, 15 bp, Homo sapiens
ccatgtccccttccc

SEQ ID NO: 975035 - DNA, 15 bp, Homo sapiens
catgtccccttccca

SEQ ID NO: 975036 - DNA, 15 bp, Homo sapiens
atgtccccttcccag

SEQ ID NO: 975037 - DNA, 15 bp, Homo sapiens
tgtccccttcccagg

SEQ ID NO: 975038 - DNA, 15 bp, Homo sapiens
gtccccttcccaggc

SEQ ID NO: 975039 - DNA, 15 bp, Homo sapiens
tccccttcccaggct

SEQ ID NO: 975040 - DNA, 15 bp, Homo sapiens
ccccttcccaggctc

SEQ ID NO: 975041 - DNA, 15 bp, Homo sapiens
cccttcccaggctcc

SEQ ID NO: 975042 - DNA, 15 bp, Homo sapiens
ccttcccaggctccc

SEQ ID NO: 975043 - DNA, 15 bp, Homo sapiens
cttcccaggctccca

SEQ ID NO: 975044 - DNA, 15 bp, Homo sapiens
ttcccaggctcccag

SEQ ID NO: 975045 - DNA, 15 bp, Homo sapiens
tcccaggctcccagg

SEQ ID NO: 975046 - DNA, 15 bp, Homo sapiens
cccaggctcccaggg

SEQ ID NO: 975047 - DNA, 15 bp, Homo sapiens
ccaggctcccagggc

SEQ ID NO: 975048 - DNA, 15 bp, Homo sapiens
caggctcccagggca

SEQ ID NO: 975049 - DNA, 15 bp, Homo sapiens
aggctcccagggcac

SEQ ID NO: 975050 - DNA, 15 bp, Homo sapiens
ggctcccagggcacc

SEQ ID NO: 975051 - DNA, 15 bp, Homo sapiens
gctcccagggcacca

SEQ ID NO: 975052 - DNA, 15 bp, Homo sapiens
ctcccagggcaccag

SEQ ID NO: 975053 - DNA, 15 bp, Homo sapiens
tcccagggcaccaga

SEQ ID NO: 975054 - DNA, 15 bp, Homo sapiens
cccagggcaccagag

SEQ ID NO: 975055 - DNA, 15 bp, Homo sapiens
ccagggcaccagagt

SEQ ID NO: 975056 - DNA, 15 bp, Homo sapiens
cagggcaccagagtg

SEQ ID NO: 975057 - DNA, 15 bp, Homo sapiens
agggcaccagagtgg

SEQ ID NO: 975058 - DNA, 15 bp, Homo sapiens
gggcaccagagtgga

SEQ ID NO: 975059 - DNA, 15 bp, Homo sapiens
ggcaccagagtggag

SEQ ID NO: 975060 - DNA, 15 bp, Homo sapiens
gcaccagagtggagg

SEQ ID NO: 975061 - DNA, 15 bp, Homo sapiens
caccagagtggaggt

SEQ ID NO: 975062 - DNA, 15 bp, Homo sapiens
accagagtggaggtt

SEQ ID NO: 975063 - DNA, 15 bp, Homo sapiens
ccagagtggaggttc

SEQ ID NO: 975064 - DNA, 15 bp, Homo sapiens
cagagtggaggttcc

SEQ ID NO: 975065 - DNA, 15 bp, Homo sapiens
agagtggaggttcct

SEQ ID NO: 975066 - DNA, 15 bp, Homo sapiens
gagtggaggttcctg

SEQ ID NO: 975067 - DNA, 15 bp, Homo sapiens
agtggaggttcctgt

SEQ ID NO: 975068 - DNA, 15 bp, Homo sapiens
gtggaggttcctgtt

SEQ ID NO: 975069 - DNA, 15 bp, Homo sapiens
tggaggttcctgttg

SEQ ID NO: 975070 - DNA, 15 bp, Homo sapiens
ggaggttcctgttgt

SEQ ID NO: 975071 - DNA, 15 bp, Homo sapiens
gaggttcctgttgta

SEQ ID NO: 975072 - DNA, 15 bp, Homo sapiens
aggttcctgttgtag

SEQ ID NO: 975073 - DNA, 15 bp, Homo sapiens
ggttcctgttgtaga

SEQ ID NO: 975074 - DNA, 15 bp, Homo sapiens
gttcctgttgtagaa

SEQ ID NO: 975075 - DNA, 15 bp, Homo sapiens
ttcctgttgtagaaa

SEQ ID NO: 975076 - DNA, 15 bp, Homo sapiens
tcctgttgtagaaac

SEQ ID NO: 975077 - DNA, 15 bp, Homo sapiens
cctgttgtagaaact

SEQ ID NO: 975078 - DNA, 15 bp, Homo sapiens
ctgttgtagaaactc

SEQ ID NO: 975079 - DNA, 15 bp, Homo sapiens
tgttgtagaaactca

SEQ ID NO: 975080 - DNA, 15 bp, Homo sapiens
gttgtagaaactcag

SEQ ID NO: 975081 - DNA, 15 bp, Homo sapiens
ttgtagaaactcaga

SEQ ID NO: 975082 - DNA, 15 bp, Homo sapiens
tgtagaaactcagat

SEQ ID NO: 975083 - DNA, 15 bp, Homo sapiens
gtagaaactcagatc

SEQ ID NO: 975084 - DNA, 15 bp, Homo sapiens
tagaaactcagatcc

SEQ ID NO: 975085 - DNA, 15 bp, Homo sapiens
agaaactcagatcct

SEQ ID NO: 975086 - DNA, 15 bp, Homo sapiens
gaaactcagatcctc

SEQ ID NO: 975087 - DNA, 15 bp, Homo sapiens
aaactcagatcctct

SEQ ID NO: 975088 - DNA, 15 bp, Homo sapiens
aactcagatcctctc

SEQ ID NO: 975089 - DNA, 15 bp, Homo sapiens
actcagatcctctcc

SEQ ID NO: 975090 - DNA, 15 bp, Homo sapiens
ctcagatcctctcct

SEQ ID NO: 975091 - DNA, 15 bp, Homo sapiens
tcagatcctctcctc

SEQ ID NO: 975092 - DNA, 15 bp, Homo sapiens
cagatcctctcctca

SEQ ID NO: 975093 - DNA, 15 bp, Homo sapiens
agatcctctcctcat

SEQ ID NO: 975094 - DNA, 15 bp, Homo sapiens
gatcctctcctcatg

SEQ ID NO: 975095 - DNA, 15 bp, Homo sapiens
atcctctcctcatgt

SEQ ID NO: 975096 - DNA, 15 bp, Homo sapiens
tcctctcctcatgtt

SEQ ID NO: 975097 - DNA, 15 bp, Homo sapiens
cctctcctcatgttg

SEQ ID NO: 975098 - DNA, 15 bp, Homo sapiens
ctctcctcatgttgg

SEQ ID NO: 975099 - DNA, 15 bp, Homo sapiens
tctcctcatgttggg

SEQ ID NO: 975100 - DNA, 15 bp, Homo sapiens
ctcctcatgttgggc

SEQ ID NO: 975101 - DNA, 15 bp, Homo sapiens
tcctcatgttgggca

SEQ ID NO: 975102 - DNA, 15 bp, Homo sapiens
cctcatgttgggcag

SEQ ID NO: 975103 - DNA, 15 bp, Homo sapiens
ctcatgttgggcaga

SEQ ID NO: 975104 - DNA, 15 bp, Homo sapiens
tcatgttgggcagaa

SEQ ID NO: 975105 - DNA, 15 bp, Homo sapiens
catgttgggcagaat

SEQ ID NO: 975106 - DNA, 15 bp, Homo sapiens
atgttgggcagaatc

SEQ ID NO: 975107 - DNA, 15 bp, Homo sapiens
tgttgggcagaatca

SEQ ID NO: 975108 - DNA, 15 bp, Homo sapiens
gttgggcagaatcaa

SEQ ID NO: 975109 - DNA, 15 bp, Homo sapiens
ttgggcagaatcaag

SEQ ID NO: 975110 - DNA, 15 bp, Homo sapiens
tgggcagaatcaagg

SEQ ID NO: 975111 - DNA, 15 bp, Homo sapiens
gggcagaatcaagga

SEQ ID NO: 975112 - DNA, 15 bp, Homo sapiens
ggcagaatcaaggag

SEQ ID NO: 975113 - DNA, 15 bp, Homo sapiens
gcagaatcaaggagc

SEQ ID NO: 975114 - DNA, 15 bp, Homo sapiens
cagaatcaaggagca

SEQ ID NO: 975115 - DNA, 15 bp, Homo sapiens
agaatcaaggagcag

SEQ ID NO: 975116 - DNA, 15 bp, Homo sapiens
gaatcaaggagcagc

SEQ ID NO: 975117 - DNA, 15 bp, Homo sapiens
aatcaaggagcagcc

SEQ ID NO: 975118 - DNA, 15 bp, Homo sapiens
atcaaggagcagcca

SEQ ID NO: 975119 - DNA, 15 bp, Homo sapiens
tcaaggagcagccag

SEQ ID NO: 975120 - DNA, 15 bp, Homo sapiens
caaggagcagccagg

SEQ ID NO: 975121 - DNA, 15 bp, Homo sapiens
aaggagcagccaggc

SEQ ID NO: 975122 - DNA, 15 bp, Homo sapiens
aggagcagccaggcc

SEQ ID NO: 975123 - DNA, 15 bp, Homo sapiens
ggagcagccaggccc

SEQ ID NO: 975124 - DNA, 15 bp, Homo sapiens
gagcagccaggccca

SEQ ID NO: 975125 - DNA, 15 bp, Homo sapiens
agcagccaggcccag

SEQ ID NO: 975126 - DNA, 15 bp, Homo sapiens
gcagccaggcccaga

SEQ ID NO: 975127 - DNA, 15 bp, Homo sapiens
cagccaggcccagag

SEQ ID NO: 975128 - DNA, 15 bp, Homo sapiens
agccaggcccagagc

SEQ ID NO: 975129 - DNA, 15 bp, Homo sapiens
gccaggcccagagcc

SEQ ID NO: 975130 - DNA, 15 bp, Homo sapiens
ccaggcccagagcca

SEQ ID NO: 975131 - DNA, 15 bp, Homo sapiens
caggcccagagccag

SEQ ID NO: 975132 - DNA, 15 bp, Homo sapiens
aggcccagagccagg

SEQ ID NO: 975133 - DNA, 15 bp, Homo sapiens
ggcccagagccaggg

SEQ ID NO: 975134 - DNA, 15 bp, Homo sapiens
gcccagagccagggc

SEQ ID NO: 975135 - DNA, 15 bp, Homo sapiens
cccagagccagggca

SEQ ID NO: 975136 - DNA, 15 bp, Homo sapiens
ccagagccagggcac

SEQ ID NO: 975137 - DNA, 15 bp, Homo sapiens
cagagccagggcact

SEQ ID NO: 975138 - DNA, 15 bp, Homo sapiens
agagccagggcactg

SEQ ID NO: 975139 - DNA, 15 bp, Homo sapiens
gagccagggcactgg

SEQ ID NO: 975140 - DNA, 15 bp, Homo sapiens
agccagggcactggt

SEQ ID NO: 975141 - DNA, 15 bp, Homo sapiens
gccagggcactggtc

SEQ ID NO: 975142 - DNA, 15 bp, Homo sapiens
ccagggcactggtct

SEQ ID NO: 975143 - DNA, 15 bp, Homo sapiens
cagggcactggtctc

SEQ ID NO: 975144 - DNA, 15 bp, Homo sapiens
agggcactggtctcc

SEQ ID NO: 975145 - DNA, 15 bp, Homo sapiens
gggcactggtctcct

SEQ ID NO: 975146 - DNA, 15 bp, Homo sapiens
ggcactggtctcctg

SEQ ID NO: 975147 - DNA, 15 bp, Homo sapiens
gcactggtctcctgc

SEQ ID NO: 975148 - DNA, 15 bp, Homo sapiens
cactggtctcctgca

SEQ ID NO: 975149 - DNA, 15 bp, Homo sapiens
actggtctcctgcag

SEQ ID NO: 975150 - DNA, 15 bp, Homo sapiens
ctggtctcctgcagg

SEQ ID NO: 975151 - DNA, 15 bp, Homo sapiens
tggtctcctgcaggt

SEQ ID NO: 975152 - DNA, 15 bp, Homo sapiens
ggtctcctgcaggtc

SEQ ID NO: 975153 - DNA, 15 bp, Homo sapiens
gtctcctgcaggtca

SEQ ID NO: 975154 - DNA, 15 bp, Homo sapiens
tctcctgcaggtcag

SEQ ID NO: 975155 - DNA, 15 bp, Homo sapiens
ctcctgcaggtcagg

SEQ ID NO: 975156 - DNA, 15 bp, Homo sapiens
tcctgcaggtcaggt

SEQ ID NO: 975157 - DNA, 15 bp, Homo sapiens
cctgcaggtcaggta

SEQ ID NO: 975158 - DNA, 15 bp, Homo sapiens
ctgcaggtcaggtac

SEQ ID NO: 975159 - DNA, 15 bp, Homo sapiens
tgcaggtcaggtact

SEQ ID NO: 975160 - DNA, 15 bp, Homo sapiens
gcaggtcaggtactg

SEQ ID NO: 975161 - DNA, 15 bp, Homo sapiens
caggtcaggtactgc

SEQ ID NO: 975162 - DNA, 15 bp, Homo sapiens
aggtcaggtactgcc

SEQ ID NO: 975163 - DNA, 15 bp, Homo sapiens
ggtcaggtactgcct

SEQ ID NO: 975164 - DNA, 15 bp, Homo sapiens
gtcaggtactgcctg

SEQ ID NO: 975165 - DNA, 15 bp, Homo sapiens
tcaggtactgcctgt

SEQ ID NO: 975166 - DNA, 15 bp, Homo sapiens
caggtactgcctgtg

SEQ ID NO: 975167 - DNA, 15 bp, Homo sapiens
aggtactgcctgtgg

SEQ ID NO: 975168 - DNA, 15 bp, Homo sapiens
ggtactgcctgtggc

SEQ ID NO: 975169 - DNA, 15 bp, Homo sapiens
gtactgcctgtggct

SEQ ID NO: 975170 - DNA, 15 bp, Homo sapiens
tactgcctgtggctt

SEQ ID NO: 975171 - DNA, 15 bp, Homo sapiens
actgcctgtggcttg

SEQ ID NO: 975172 - DNA, 15 bp, Homo sapiens
ctgcctgtggcttga

SEQ ID NO: 975173 - DNA, 15 bp, Homo sapiens
tgcctgtggcttgat

SEQ ID NO: 975174 - DNA, 15 bp, Homo sapiens
gcctgtggcttgatc

SEQ ID NO: 975175 - DNA, 15 bp, Homo sapiens
cctgtggcttgatcc

SEQ ID NO: 975176 - DNA, 15 bp, Homo sapiens
ctgtggcttgatcca

SEQ ID NO: 975177 - DNA, 15 bp, Homo sapiens
tgtggcttgatccaa

SEQ ID NO: 975178 - DNA, 15 bp, Homo sapiens
gtggcttgatccaac

SEQ ID NO: 975179 - DNA, 15 bp, Homo sapiens
tggcttgatccaacg

SEQ ID NO: 975180 - DNA, 15 bp, Homo sapiens
ggcttgatccaacgg

SEQ ID NO: 975181 - DNA, 15 bp, Homo sapiens
gcttgatccaacggt

SEQ ID NO: 975182 - DNA, 15 bp, Homo sapiens
cttgatccaacggtc

SEQ ID NO: 975183 - DNA, 15 bp, Homo sapiens
ttgatccaacggtcc

SEQ ID NO: 975184 - DNA, 15 bp, Homo sapiens
tgatccaacggtcct

SEQ ID NO: 975185 - DNA, 15 bp, Homo sapiens
gatccaacggtccta

SEQ ID NO: 975186 - DNA, 15 bp, Homo sapiens
atccaacggtcctat

SEQ ID NO: 975187 - DNA, 15 bp, Homo sapiens
tccaacggtcctatc

SEQ ID NO: 975188 - DNA, 15 bp, Homo sapiens
ccaacggtcctatcc

SEQ ID NO: 975189 - DNA, 15 bp, Homo sapiens
caacggtcctatccc

SEQ ID NO: 975190 - DNA, 15 bp, Homo sapiens
aacggtcctatccca

SEQ ID NO: 975191 - DNA, 15 bp, Homo sapiens
acggtcctatcccac

SEQ ID NO: 975192 - DNA, 15 bp, Homo sapiens
cggtcctatcccacc

SEQ ID NO: 975193 - DNA, 15 bp, Homo sapiens
ggtcctatcccaccc

SEQ ID NO: 975194 - DNA, 15 bp, Homo sapiens
gtcctatcccaccca

SEQ ID NO: 975195 - DNA, 15 bp, Homo sapiens
tcctatcccacccag

SEQ ID NO: 975196 - DNA, 15 bp, Homo sapiens
cctatcccacccagg

SEQ ID NO: 975197 - DNA, 15 bp, Homo sapiens
ctatcccacccagga

SEQ ID NO: 975198 - DNA, 15 bp, Homo sapiens
tatcccacccaggag

SEQ ID NO: 975199 - DNA, 15 bp, Homo sapiens
atcccacccaggagg

SEQ ID NO: 975200 - DNA, 15 bp, Homo sapiens
tcccacccaggagga

SEQ ID NO: 975201 - DNA, 15 bp, Homo sapiens
cccacccaggaggag

SEQ ID NO: 975202 - DNA, 15 bp, Homo sapiens
ccacccaggaggaga

SEQ ID NO: 975203 - DNA, 15 bp, Homo sapiens
cacccaggaggagag

SEQ ID NO: 975204 - DNA, 15 bp, Homo sapiens
acccaggaggagaga

SEQ ID NO: 975205 - DNA, 15 bp, Homo sapiens
cccaggaggagagag

SEQ ID NO: 975206 - DNA, 15 bp, Homo sapiens
ccaggaggagagagg

SEQ ID NO: 975207 - DNA, 15 bp, Homo sapiens
caggaggagagaggg

SEQ ID NO: 975208 - DNA, 15 bp, Homo sapiens
aggaggagagagggt

SEQ ID NO: 975209 - DNA, 15 bp, Homo sapiens
ggaggagagagggtc

SEQ ID NO: 975210 - DNA, 15 bp, Homo sapiens
gaggagagagggtca

SEQ ID NO: 975211 - DNA, 15 bp, Homo sapiens
aggagagagggtcac

SEQ ID NO: 975212 - DNA, 15 bp, Homo sapiens
ggagagagggtcact

SEQ ID NO: 975213 - DNA, 15 bp, Homo sapiens
gagagagggtcactt

SEQ ID NO: 975214 - DNA, 15 bp, Homo sapiens
agagagggtcacttt

SEQ ID NO: 975215 - DNA, 15 bp, Homo sapiens
gagagggtcactttt

SEQ ID NO: 975216 - DNA, 15 bp, Homo sapiens
agagggtcacttttc

SEQ ID NO: 975217 - DNA, 15 bp, Homo sapiens
gagggtcacttttcc

SEQ ID NO: 975218 - DNA, 15 bp, Homo sapiens
agggtcacttttccc

SEQ ID NO: 975219 - DNA, 15 bp, Homo sapiens
gggtcacttttccct

SEQ ID NO: 975220 - DNA, 15 bp, Homo sapiens
ggtcacttttccctt

SEQ ID NO: 975221 - DNA, 15 bp, Homo sapiens
gtcacttttcccttg

SEQ ID NO: 975222 - DNA, 15 bp, Homo sapiens
tcacttttcccttgg

SEQ ID NO: 975223 - DNA, 15 bp, Homo sapiens
cacttttcccttggc

SEQ ID NO: 975224 - DNA, 15 bp, Homo sapiens
acttttcccttggct

SEQ ID NO: 975225 - DNA, 15 bp, Homo sapiens
cttttcccttggctg

SEQ ID NO: 975226 - DNA, 15 bp, Homo sapiens
ttttcccttggctgc

SEQ ID NO: 975227 - DNA, 15 bp, Homo sapiens
tttcccttggctgcc

SEQ ID NO: 975228 - DNA, 15 bp, Homo sapiens
ttcccttggctgccc

SEQ ID NO: 975229 - DNA, 15 bp, Homo sapiens
tcccttggctgcccc

SEQ ID NO: 975230 - DNA, 15 bp, Homo sapiens
cccttggctgccccc

SEQ ID NO: 975231 - DNA, 15 bp, Homo sapiens
ccttggctgccccca

SEQ ID NO: 975232 - DNA, 15 bp, Homo sapiens
cttggctgcccccat

SEQ ID NO: 975233 - DNA, 15 bp, Homo sapiens
ttggctgcccccatc

SEQ ID NO: 975234 - DNA, 15 bp, Homo sapiens
tggctgcccccatcg

SEQ ID NO: 975235 - DNA, 15 bp, Homo sapiens
ggctgcccccatcgc

SEQ ID NO: 975236 - DNA, 15 bp, Homo sapiens
gctgcccccatcgca

SEQ ID NO: 975237 - DNA, 15 bp, Homo sapiens
ctgcccccatcgcac

SEQ ID NO: 975238 - DNA, 15 bp, Homo sapiens
tgcccccatcgcact

SEQ ID NO: 975239 - DNA, 15 bp, Homo sapiens
gcccccatcgcacta

SEQ ID NO: 975240 - DNA, 15 bp, Homo sapiens
cccccatcgcactaa

SEQ ID NO: 975241 - DNA, 15 bp, Homo sapiens
ccccatcgcactaaa

SEQ ID NO: 975242 - DNA, 15 bp, Homo sapiens
cccatcgcactaaag

SEQ ID NO: 975243 - DNA, 15 bp, Homo sapiens
ccatcgcactaaagc

SEQ ID NO: 975244 - DNA, 15 bp, Homo sapiens
catcgcactaaagca

SEQ ID NO: 975245 - DNA, 15 bp, Homo sapiens
atcgcactaaagcag

SEQ ID NO: 975246 - DNA, 15 bp, Homo sapiens
tcgcactaaagcagc

SEQ ID NO: 975247 - DNA, 15 bp, Homo sapiens
cgcactaaagcagct

SEQ ID NO: 975248 - DNA, 15 bp, Homo sapiens
gcactaaagcagctg

SEQ ID NO: 975249 - DNA, 15 bp, Homo sapiens
cactaaagcagctgg

SEQ ID NO: 975250 - DNA, 15 bp, Homo sapiens
actaaagcagctggc

SEQ ID NO: 975251 - DNA, 15 bp, Homo sapiens
ctaaagcagctggca

SEQ ID NO: 975252 - DNA, 15 bp, Homo sapiens
taaagcagctggcac

SEQ ID NO: 975253 - DNA, 15 bp, Homo sapiens
aaagcagctggcact

SEQ ID NO: 975254 - DNA, 15 bp, Homo sapiens
aagcagctggcactg

SEQ ID NO: 975255 - DNA, 15 bp, Homo sapiens
agcagctggcactga

SEQ ID NO: 975256 - DNA, 15 bp, Homo sapiens
gcagctggcactgaa

SEQ ID NO: 975257 - DNA, 15 bp, Homo sapiens
cagctggcactgaac

SEQ ID NO: 975258 - DNA, 15 bp, Homo sapiens
agctggcactgaacc

SEQ ID NO: 975259 - DNA, 15 bp, Homo sapiens
gctggcactgaacca

SEQ ID NO: 975260 - DNA, 15 bp, Homo sapiens
ctggcactgaaccag

SEQ ID NO: 975261 - DNA, 15 bp, Homo sapiens
tggcactgaaccagc

SEQ ID NO: 975262 - DNA, 15 bp, Homo sapiens
ggcactgaaccagcc

SEQ ID NO: 975263 - DNA, 15 bp, Homo sapiens
gcactgaaccagcct

SEQ ID NO: 975264 - DNA, 15 bp, Homo sapiens
cactgaaccagcctc

SEQ ID NO: 975265 - DNA, 15 bp, Homo sapiens
actgaaccagcctcc

SEQ ID NO: 975266 - DNA, 15 bp, Homo sapiens
ctgaaccagcctcca

SEQ ID NO: 975267 - DNA, 15 bp, Homo sapiens
tgaaccagcctccat

SEQ ID NO: 975268 - DNA, 15 bp, Homo sapiens
gaaccagcctccatg

SEQ ID NO: 975269 - DNA, 15 bp, Homo sapiens
aaccagcctccatgc

SEQ ID NO: 975270 - DNA, 15 bp, Homo sapiens
accagcctccatgca

SEQ ID NO: 975271 - DNA, 15 bp, Homo sapiens
ccagcctccatgcag

SEQ ID NO: 975272 - DNA, 15 bp, Homo sapiens
cagcctccatgcagt

SEQ ID NO: 975273 - DNA, 15 bp, Homo sapiens
agcctccatgcagtc

SEQ ID NO: 975274 - DNA, 15 bp, Homo sapiens
gcctccatgcagtcc

SEQ ID NO: 975275 - DNA, 15 bp, Homo sapiens
cctccatgcagtccc

SEQ ID NO: 975276 - DNA, 15 bp, Homo sapiens
ctccatgcagtccca

SEQ ID NO: 975277 - DNA, 15 bp, Homo sapiens
tccatgcagtcccat

SEQ ID NO: 975278 - DNA, 15 bp, Homo sapiens
ccatgcagtcccatg

SEQ ID NO: 975279 - DNA, 15 bp, Homo sapiens
catgcagtcccatgc

SEQ ID NO: 975280 - DNA, 15 bp, Homo sapiens
atgcagtcccatgca

SEQ ID NO: 975281 - DNA, 15 bp, Homo sapiens
tgcagtcccatgcag

SEQ ID NO: 975282 - DNA, 15 bp, Homo sapiens
gcagtcccatgcagt

SEQ ID NO: 975283 - DNA, 15 bp, Homo sapiens
cagtcccatgcagtg

SEQ ID NO: 975284 - DNA, 15 bp, Homo sapiens
agtcccatgcagtgc

SEQ ID NO: 975285 - DNA, 15 bp, Homo sapiens
gtcccatgcagtgcc

SEQ ID NO: 975286 - DNA, 15 bp, Homo sapiens
tcccatgcagtgcca

SEQ ID NO: 975287 - DNA, 15 bp, Homo sapiens
cccatgcagtgccac

SEQ ID NO: 975288 - DNA, 15 bp, Homo sapiens
ccatgcagtgccacc

SEQ ID NO: 975289 - DNA, 15 bp, Homo sapiens
catgcagtgccaccc

SEQ ID NO: 975290 - DNA, 15 bp, Homo sapiens
atgcagtgccaccca

SEQ ID NO: 975291 - DNA, 15 bp, Homo sapiens
tgcagtgccacccaa

SEQ ID NO: 975292 - DNA, 15 bp, Homo sapiens
gcagtgccacccaag

SEQ ID NO: 975293 - DNA, 15 bp, Homo sapiens
cagtgccacccaagg

SEQ ID NO: 975294 - DNA, 15 bp, Homo sapiens
agtgccacccaaggg

SEQ ID NO: 975295 - DNA, 15 bp, Homo sapiens
gtgccacccaagggt

SEQ ID NO: 975296 - DNA, 15 bp, Homo sapiens
tgccacccaagggtc

SEQ ID NO: 975297 - DNA, 15 bp, Homo sapiens
gccacccaagggtcc

SEQ ID NO: 975298 - DNA, 15 bp, Homo sapiens
ccacccaagggtccc

SEQ ID NO: 975299 - DNA, 15 bp, Homo sapiens
cacccaagggtcccc

SEQ ID NO: 975300 - DNA, 15 bp, Homo sapiens
acccaagggtcccca

SEQ ID NO: 975301 - DNA, 15 bp, Homo sapiens
cccaagggtccccag

SEQ ID NO: 975302 - DNA, 15 bp, Homo sapiens
ccaagggtccccagt

SEQ ID NO: 975303 - DNA, 15 bp, Homo sapiens
caagggtccccagta

SEQ ID NO: 975304 - DNA, 15 bp, Homo sapiens
aagggtccccagtag

SEQ ID NO: 975305 - DNA, 15 bp, Homo sapiens
agggtccccagtaga

SEQ ID NO: 975306 - DNA, 15 bp, Homo sapiens
gggtccccagtagac

SEQ ID NO: 975307 - DNA, 15 bp, Homo sapiens
ggtccccagtagaca

SEQ ID NO: 975308 - DNA, 15 bp, Homo sapiens
gtccccagtagacaa

SEQ ID NO: 975309 - DNA, 15 bp, Homo sapiens
tccccagtagacaat

SEQ ID NO: 975310 - DNA, 15 bp, Homo sapiens
ccccagtagacaatg

SEQ ID NO: 975311 - DNA, 15 bp, Homo sapiens
cccagtagacaatgg

SEQ ID NO: 975312 - DNA, 15 bp, Homo sapiens
ccagtagacaatggt

SEQ ID NO: 975313 - DNA, 15 bp, Homo sapiens
cagtagacaatggtg

SEQ ID NO: 975314 - DNA, 15 bp, Homo sapiens
agtagacaatggtgg

SEQ ID NO: 975315 - DNA, 15 bp, Homo sapiens
gtagacaatggtggg

SEQ ID NO: 975316 - DNA, 15 bp, Homo sapiens
tagacaatggtgggc

SEQ ID NO: 975317 - DNA, 15 bp, Homo sapiens
agacaatggtgggcc

SEQ ID NO: 975318 - DNA, 15 bp, Homo sapiens
gacaatggtgggcca

SEQ ID NO: 975319 - DNA, 15 bp, Homo sapiens
acaatggtgggccag

SEQ ID NO: 975320 - DNA, 15 bp, Homo sapiens
caatggtgggccagt

SEQ ID NO: 975321 - DNA, 15 bp, Homo sapiens
aatggtgggccagtt

SEQ ID NO: 975322 - DNA, 15 bp, Homo sapiens
atggtgggccagttg

SEQ ID NO: 975323 - DNA, 15 bp, Homo sapiens
tggtgggccagttgt

SEQ ID NO: 975324 - DNA, 15 bp, Homo sapiens
ggtgggccagttgtc

SEQ ID NO: 975325 - DNA, 15 bp, Homo sapiens
gtgggccagttgtca

SEQ ID NO: 975326 - DNA, 15 bp, Homo sapiens
tgggccagttgtcag

SEQ ID NO: 975327 - DNA, 15 bp, Homo sapiens
gggccagttgtcagg

SEQ ID NO: 975328 - DNA, 15 bp, Homo sapiens
ggccagttgtcaggg

SEQ ID NO: 975329 - DNA, 15 bp, Homo sapiens
gccagttgtcagggg

SEQ ID NO: 975330 - DNA, 15 bp, Homo sapiens
ccagttgtcaggggc

SEQ ID NO: 975331 - DNA, 15 bp, Homo sapiens
cagttgtcaggggct

SEQ ID NO: 975332 - DNA, 15 bp, Homo sapiens
agttgtcaggggctt

SEQ ID NO: 975333 - DNA, 15 bp, Homo sapiens
gttgtcaggggcttc

SEQ ID NO: 975334 - DNA, 15 bp, Homo sapiens
ttgtcaggggcttcc

SEQ ID NO: 975335 - DNA, 15 bp, Homo sapiens
tgtcaggggcttcct

SEQ ID NO: 975336 - DNA, 15 bp, Homo sapiens
gtcaggggcttcctc

SEQ ID NO: 975337 - DNA, 15 bp, Homo sapiens
tcaggggcttcctcc

SEQ ID NO: 975338 - DNA, 15 bp, Homo sapiens
caggggcttcctcct

SEQ ID NO: 975339 - DNA, 15 bp, Homo sapiens
aggggcttcctcctg

SEQ ID NO: 975340 - DNA, 15 bp, Homo sapiens
ggggcttcctcctgc

SEQ ID NO: 975341 - DNA, 15 bp, Homo sapiens
gggcttcctcctgct

SEQ ID NO: 975342 - DNA, 15 bp, Homo sapiens
ggcttcctcctgctg

SEQ ID NO: 975343 - DNA, 15 bp, Homo sapiens
gcttcctcctgctgc

SEQ ID NO: 975344 - DNA, 15 bp, Homo sapiens
cttcctcctgctgca

SEQ ID NO: 975345 - DNA, 15 bp, Homo sapiens
ttcctcctgctgcag

SEQ ID NO: 975346 - DNA, 15 bp, Homo sapiens
tcctcctgctgcagg

SEQ ID NO: 975347 - DNA, 15 bp, Homo sapiens
cctcctgctgcaggg

SEQ ID NO: 975348 - DNA, 15 bp, Homo sapiens
ctcctgctgcagggc

SEQ ID NO: 975349 - DNA, 15 bp, Homo sapiens
tcctgctgcagggct

SEQ ID NO: 975350 - DNA, 15 bp, Homo sapiens
cctgctgcagggctg

SEQ ID NO: 975351 - DNA, 15 bp, Homo sapiens
ctgctgcagggctga

SEQ ID NO: 975352 - DNA, 15 bp, Homo sapiens
tgctgcagggctgag

SEQ ID NO: 975353 - DNA, 15 bp, Homo sapiens
gctgcagggctgaga

SEQ ID NO: 975354 - DNA, 15 bp, Homo sapiens
ctgcagggctgagac

SEQ ID NO: 975355 - DNA, 15 bp, Homo sapiens
tgcagggctgagacc

SEQ ID NO: 975356 - DNA, 15 bp, Homo sapiens
gcagggctgagaccc

SEQ ID NO: 975357 - DNA, 15 bp, Homo sapiens
cagggctgagaccct

SEQ ID NO: 975358 - DNA, 15 bp, Homo sapiens
agggctgagaccctg

SEQ ID NO: 975359 - DNA, 15 bp, Homo sapiens
gggctgagaccctgg

SEQ ID NO: 975360 - DNA, 15 bp, Homo sapiens
ggctgagaccctggg

SEQ ID NO: 975361 - DNA, 15 bp, Homo sapiens
gctgagaccctggga

SEQ ID NO: 975362 - DNA, 15 bp, Homo sapiens
ctgagaccctgggag

SEQ ID NO: 975363 - DNA, 15 bp, Homo sapiens
tgagaccctgggagg

SEQ ID NO: 975364 - DNA, 15 bp, Homo sapiens
gagaccctgggaggt

SEQ ID NO: 975365 - DNA, 15 bp, Homo sapiens
agaccctgggaggtc

SEQ ID NO: 975366 - DNA, 15 bp, Homo sapiens
gaccctgggaggtcc

SEQ ID NO: 975367 - DNA, 15 bp, Homo sapiens
accctgggaggtccc

SEQ ID NO: 975368 - DNA, 15 bp, Homo sapiens
ccctgggaggtccca

SEQ ID NO: 975369 - DNA, 15 bp, Homo sapiens
cctgggaggtcccaa

SEQ ID NO: 975370 - DNA, 15 bp, Homo sapiens
ctgggaggtcccaac

SEQ ID NO: 975371 - DNA, 15 bp, Homo sapiens
tgggaggtcccaacc

SEQ ID NO: 975372 - DNA, 15 bp, Homo sapiens
gggaggtcccaaccc

SEQ ID NO: 975373 - DNA, 15 bp, Homo sapiens
ggaggtcccaaccca

SEQ ID NO: 975374 - DNA, 15 bp, Homo sapiens
gaggtcccaacccag

SEQ ID NO: 975375 - DNA, 15 bp, Homo sapiens
aggtcccaacccagg

SEQ ID NO: 975376 - DNA, 15 bp, Homo sapiens
ggtcccaacccaggc

SEQ ID NO: 975377 - DNA, 15 bp, Homo sapiens
gtcccaacccaggca

SEQ ID NO: 975378 - DNA, 15 bp, Homo sapiens
tcccaacccaggcaa

SEQ ID NO: 975379 - DNA, 15 bp, Homo sapiens
cccaacccaggcaaa

SEQ ID NO: 975380 - DNA, 15 bp, Homo sapiens
ccaacccaggcaaat

SEQ ID NO: 975381 - DNA, 15 bp, Homo sapiens
caacccaggcaaatt

SEQ ID NO: 975382 - DNA, 15 bp, Homo sapiens
aacccaggcaaattg

SEQ ID NO: 975383 - DNA, 15 bp, Homo sapiens
acccaggcaaattga

SEQ ID NO: 975384 - DNA, 15 bp, Homo sapiens
cccaggcaaattgaa

SEQ ID NO: 975385 - DNA, 15 bp, Homo sapiens
ccaggcaaattgaac

SEQ ID NO: 975386 - DNA, 15 bp, Homo sapiens
caggcaaattgaacg

SEQ ID NO: 975387 - DNA, 15 bp, Homo sapiens
aggcaaattgaacgc

SEQ ID NO: 975388 - DNA, 15 bp, Homo sapiens
ggcaaattgaacgcc

SEQ ID NO: 975389 - DNA, 15 bp, Homo sapiens
gcaaattgaacgcca

SEQ ID NO: 975390 - DNA, 15 bp, Homo sapiens
caaattgaacgccag

SEQ ID NO: 975391 - DNA, 15 bp, Homo sapiens
aaattgaacgccagg

SEQ ID NO: 975392 - DNA, 15 bp, Homo sapiens
aattgaacgccaggc

SEQ ID NO: 975393 - DNA, 15 bp, Homo sapiens
attgaacgccaggct

SEQ ID NO: 975394 - DNA, 15 bp, Homo sapiens
ttgaacgccaggcta

SEQ ID NO: 975395 - DNA, 15 bp, Homo sapiens
tgaacgccaggctaa

SEQ ID NO: 975396 - DNA, 15 bp, Homo sapiens
gaacgccaggctaat

SEQ ID NO: 975397 - DNA, 15 bp, Homo sapiens
aacgccaggctaatt

SEQ ID NO: 975398 - DNA, 15 bp, Homo sapiens
acgccaggctaattt

SEQ ID NO: 975399 - DNA, 15 bp, Homo sapiens
cgccaggctaatttg

SEQ ID NO: 975400 - DNA, 15 bp, Homo sapiens
gccaggctaatttga

SEQ ID NO: 975401 - DNA, 15 bp, Homo sapiens
ccaggctaatttgaa

SEQ ID NO: 975402 - DNA, 15 bp, Homo sapiens
caggctaatttgaag

SEQ ID NO: 975403 - DNA, 15 bp, Homo sapiens
aggctaatttgaaga

SEQ ID NO: 975404 - DNA, 15 bp, Homo sapiens
ggctaatttgaagac

SEQ ID NO: 975405 - DNA, 15 bp, Homo sapiens
gctaatttgaagacc

SEQ ID NO: 975406 - DNA, 15 bp, Homo sapiens
ctaatttgaagaccc

SEQ ID NO: 975407 - DNA, 15 bp, Homo sapiens
taatttgaagaccca

SEQ ID NO: 975408 - DNA, 15 bp, Homo sapiens
aatttgaagacccaa

SEQ ID NO: 975409 - DNA, 15 bp, Homo sapiens
atttgaagacccaac

SEQ ID NO: 975410 - DNA, 15 bp, Homo sapiens
tttgaagacccaact

SEQ ID NO: 975411 - DNA, 15 bp, Homo sapiens
ttgaagacccaactc

SEQ ID NO: 975412 - DNA, 15 bp, Homo sapiens
tgaagacccaactcc

SEQ ID NO: 975413 - DNA, 15 bp, Homo sapiens
gaagacccaactccc

SEQ ID NO: 975414 - DNA, 15 bp, Homo sapiens
aagacccaactccca

SEQ ID NO: 975415 - DNA, 15 bp, Homo sapiens
agacccaactcccag

SEQ ID NO: 975416 - DNA, 15 bp, Homo sapiens
gacccaactcccagc

SEQ ID NO: 975417 - DNA, 15 bp, Homo sapiens
acccaactcccagcc

SEQ ID NO: 975418 - DNA, 15 bp, Homo sapiens
cccaactcccagccc

SEQ ID NO: 975419 - DNA, 15 bp, Homo sapiens
ccaactcccagccct

SEQ ID NO: 975420 - DNA, 15 bp, Homo sapiens
caactcccagccctc

SEQ ID NO: 975421 - DNA, 15 bp, Homo sapiens
aactcccagccctcc

SEQ ID NO: 975422 - DNA, 15 bp, Homo sapiens
actcccagccctccc

SEQ ID NO: 975423 - DNA, 15 bp, Homo sapiens
ctcccagccctcccc

SEQ ID NO: 975424 - DNA, 15 bp, Homo sapiens
tcccagccctcccct

SEQ ID NO: 975425 - DNA, 15 bp, Homo sapiens
cccagccctcccctt

SEQ ID NO: 975426 - DNA, 15 bp, Homo sapiens
ccagccctccccttc

SEQ ID NO: 975427 - DNA, 15 bp, Homo sapiens
cagccctccccttca

SEQ ID NO: 975428 - DNA, 15 bp, Homo sapiens
agccctccccttcac

SEQ ID NO: 975429 - DNA, 15 bp, Homo sapiens
gccctccccttcacc

SEQ ID NO: 975430 - DNA, 15 bp, Homo sapiens
ccctccccttcaccg

SEQ ID NO: 975431 - DNA, 15 bp, Homo sapiens
cctccccttcaccgg

SEQ ID NO: 975432 - DNA, 15 bp, Homo sapiens
ctccccttcaccgga

SEQ ID NO: 975433 - DNA, 15 bp, Homo sapiens
tccccttcaccggag

SEQ ID NO: 975434 - DNA, 15 bp, Homo sapiens
ccccttcaccggagg

SEQ ID NO: 975435 - DNA, 15 bp, Homo sapiens
cccttcaccggagga

SEQ ID NO: 975436 - DNA, 15 bp, Homo sapiens
ccttcaccggaggac

SEQ ID NO: 975437 - DNA, 15 bp, Homo sapiens
cttcaccggaggaca

SEQ ID NO: 975438 - DNA, 15 bp, Homo sapiens
ttcaccggaggacag

SEQ ID NO: 975439 - DNA, 15 bp, Homo sapiens
tcaccggaggacaga

SEQ ID NO: 975440 - DNA, 15 bp, Homo sapiens
caccggaggacagag

SEQ ID NO: 975441 - DNA, 15 bp, Homo sapiens
accggaggacagagc

SEQ ID NO: 975442 - DNA, 15 bp, Homo sapiens
ccggaggacagagct

SEQ ID NO: 975443 - DNA, 15 bp, Homo sapiens
cggaggacagagctc

SEQ ID NO: 975444 - DNA, 15 bp, Homo sapiens
ggaggacagagctct

SEQ ID NO: 975445 - DNA, 15 bp, Homo sapiens
gaggacagagctcta

SEQ ID NO: 975446 - DNA, 15 bp, Homo sapiens
aggacagagctctag

SEQ ID NO: 975447 - DNA, 15 bp, Homo sapiens
ggacagagctctagc

SEQ ID NO: 975448 - DNA, 15 bp, Homo sapiens
gacagagctctagct

SEQ ID NO: 975449 - DNA, 15 bp, Homo sapiens
acagagctctagctg

SEQ ID NO: 975450 - DNA, 15 bp, Homo sapiens
cagagctctagctgg

SEQ ID NO: 975451 - DNA, 15 bp, Homo sapiens
agagctctagctggc

SEQ ID NO: 975452 - DNA, 15 bp, Homo sapiens
gagctctagctggcc

SEQ ID NO: 975453 - DNA, 15 bp, Homo sapiens
agctctagctggcct

SEQ ID NO: 975454 - DNA, 15 bp, Homo sapiens
gctctagctggcctg

SEQ ID NO: 975455 - DNA, 15 bp, Homo sapiens
ctctagctggcctgg

SEQ ID NO: 975456 - DNA, 15 bp, Homo sapiens
tctagctggcctggg

SEQ ID NO: 975457 - DNA, 15 bp, Homo sapiens
ctagctggcctgggc

SEQ ID NO: 975458 - DNA, 15 bp, Homo sapiens
tagctggcctgggcc

SEQ ID NO: 975459 - DNA, 15 bp, Homo sapiens
agctggcctgggccc

SEQ ID NO: 975460 - DNA, 15 bp, Homo sapiens
gctggcctgggcccc

SEQ ID NO: 975461 - DNA, 15 bp, Homo sapiens
ctggcctgggccccc

SEQ ID NO: 975462 - DNA, 15 bp, Homo sapiens
tggcctgggccccca

SEQ ID NO: 975463 - DNA, 15 bp, Homo sapiens
ggcctgggcccccac

SEQ ID NO: 975464 - DNA, 15 bp, Homo sapiens
gcctgggcccccacc

SEQ ID NO: 975465 - DNA, 15 bp, Homo sapiens
cctgggcccccacct

SEQ ID NO: 975466 - DNA, 15 bp, Homo sapiens
ctgggcccccacctg

SEQ ID NO: 975467 - DNA, 15 bp, Homo sapiens
tgggcccccacctga

SEQ ID NO: 975468 - DNA, 15 bp, Homo sapiens
gggcccccacctgat

SEQ ID NO: 975469 - DNA, 15 bp, Homo sapiens
ggcccccacctgata

SEQ ID NO: 975470 - DNA, 15 bp, Homo sapiens
gcccccacctgatag

SEQ ID NO: 975471 - DNA, 15 bp, Homo sapiens
cccccacctgatagc

SEQ ID NO: 975472 - DNA, 15 bp, Homo sapiens
ccccacctgatagca

SEQ ID NO: 975473 - DNA, 15 bp, Homo sapiens
cccacctgatagcag

SEQ ID NO: 975474 - DNA, 15 bp, Homo sapiens
ccacctgatagcagc

SEQ ID NO: 975475 - DNA, 15 bp, Homo sapiens
cacctgatagcagcc

SEQ ID NO: 975476 - DNA, 15 bp, Homo sapiens
acctgatagcagcct

SEQ ID NO: 975477 - DNA, 15 bp, Homo sapiens
cctgatagcagcctc

SEQ ID NO: 975478 - DNA, 15 bp, Homo sapiens
ctgatagcagcctcc

SEQ ID NO: 975479 - DNA, 15 bp, Homo sapiens
tgatagcagcctcca

SEQ ID NO: 975480 - DNA, 15 bp, Homo sapiens
gatagcagcctccaa

SEQ ID NO: 975481 - DNA, 15 bp, Homo sapiens
atagcagcctccaac

SEQ ID NO: 975482 - DNA, 15 bp, Homo sapiens
tagcagcctccaacg

SEQ ID NO: 975483 - DNA, 15 bp, Homo sapiens
agcagcctccaacgt

SEQ ID NO: 975484 - DNA, 15 bp, Homo sapiens
gcagcctccaacgtc

SEQ ID NO: 975485 - DNA, 15 bp, Homo sapiens
cagcctccaacgtct

SEQ ID NO: 975486 - DNA, 15 bp, Homo sapiens
agcctccaacgtctg

SEQ ID NO: 975487 - DNA, 15 bp, Homo sapiens
gcctccaacgtctgg

SEQ ID NO: 975488 - DNA, 15 bp, Homo sapiens
cctccaacgtctggg

SEQ ID NO: 975489 - DNA, 15 bp, Homo sapiens
ctccaacgtctgggg

SEQ ID NO: 975490 - DNA, 15 bp, Homo sapiens
tccaacgtctggggt

SEQ ID NO: 975491 - DNA, 15 bp, Homo sapiens
ccaacgtctggggtg

SEQ ID NO: 975492 - DNA, 15 bp, Homo sapiens
caacgtctggggtgt

SEQ ID NO: 975493 - DNA, 15 bp, Homo sapiens
aacgtctggggtgtc

SEQ ID NO: 975494 - DNA, 15 bp, Homo sapiens
acgtctggggtgtct

SEQ ID NO: 975495 - DNA, 15 bp, Homo sapiens
cgtctggggtgtctg

SEQ ID NO: 975496 - DNA, 15 bp, Homo sapiens
gtctggggtgtctga

SEQ ID NO: 975497 - DNA, 15 bp, Homo sapiens
tctggggtgtctgat

SEQ ID NO: 975498 - DNA, 15 bp, Homo sapiens
ctggggtgtctgata

SEQ ID NO: 975499 - DNA, 15 bp, Homo sapiens
tggggtgtctgataa

SEQ ID NO: 975500 - DNA, 15 bp, Homo sapiens
ggggtgtctgataat

SEQ ID NO: 975501 - DNA, 15 bp, Homo sapiens
gggtgtctgataatg

SEQ ID NO: 975502 - DNA, 15 bp, Homo sapiens
ggtgtctgataatgc

SEQ ID NO: 975503 - DNA, 15 bp, Homo sapiens
gtgtctgataatgct

SEQ ID NO: 975504 - DNA, 15 bp, Homo sapiens
tgtctgataatgctt

SEQ ID NO: 975505 - DNA, 15 bp, Homo sapiens
gtctgataatgcttg

SEQ ID NO: 975506 - DNA, 15 bp, Homo sapiens
tctgataatgcttgg

SEQ ID NO: 975507 - DNA, 15 bp, Homo sapiens
ctgataatgcttggc

SEQ ID NO: 975508 - DNA, 15 bp, Homo sapiens
tgataatgcttggcg

SEQ ID NO: 975509 - DNA, 15 bp, Homo sapiens
gataatgcttggcgg

SEQ ID NO: 975510 - DNA, 15 bp, Homo sapiens
ataatgcttggcggg

SEQ ID NO: 975511 - DNA, 15 bp, Homo sapiens
taatgcttggcgggg

SEQ ID NO: 975512 - DNA, 15 bp, Homo sapiens
aatgcttggcgggga

SEQ ID NO: 975513 - DNA, 15 bp, Homo sapiens
atgcttggcggggag

SEQ ID NO: 975514 - DNA, 15 bp, Homo sapiens
tgcttggcggggagc

SEQ ID NO: 975515 - DNA, 15 bp, Homo sapiens
gcttggcggggagct

SEQ ID NO: 975516 - DNA, 15 bp, Homo sapiens
cttggcggggagctc

SEQ ID NO: 975517 - DNA, 15 bp, Homo sapiens
ttggcggggagctcg

SEQ ID NO: 975518 - DNA, 15 bp, Homo sapiens
tggcggggagctcgt

SEQ ID NO: 975519 - DNA, 15 bp, Homo sapiens
ggcggggagctcgtg

SEQ ID NO: 975520 - DNA, 15 bp, Homo sapiens
gcggggagctcgtgc

SEQ ID NO: 975521 - DNA, 15 bp, Homo sapiens
cggggagctcgtgcc

SEQ ID NO: 975522 - DNA, 15 bp, Homo sapiens
ggggagctcgtgcca

SEQ ID NO: 975523 - DNA, 15 bp, Homo sapiens
gggagctcgtgccaa

SEQ ID NO: 975524 - DNA, 15 bp, Homo sapiens
ggagctcgtgccaag

SEQ ID NO: 975525 - DNA, 15 bp, Homo sapiens
gagctcgtgccaagt

SEQ ID NO: 975526 - DNA, 15 bp, Homo sapiens
agctcgtgccaagtc

SEQ ID NO: 975527 - DNA, 15 bp, Homo sapiens
gctcgtgccaagtcc

SEQ ID NO: 975528 - DNA, 15 bp, Homo sapiens
ctcgtgccaagtccc

SEQ ID NO: 975529 - DNA, 15 bp, Homo sapiens
tcgtgccaagtcccg

SEQ ID NO: 975530 - DNA, 15 bp, Homo sapiens
cgtgccaagtcccgc

SEQ ID NO: 975531 - DNA, 15 bp, Homo sapiens
gtgccaagtcccgcc

SEQ ID NO: 975532 - DNA, 15 bp, Homo sapiens
tgccaagtcccgcca

SEQ ID NO: 975533 - DNA, 15 bp, Homo sapiens
gccaagtcccgccat

SEQ ID NO: 975534 - DNA, 15 bp, Homo sapiens
ccaagtcccgccatc

SEQ ID NO: 975535 - DNA, 15 bp, Homo sapiens
caagtcccgccatca

SEQ ID NO: 975536 - DNA, 15 bp, Homo sapiens
aagtcccgccatcag

SEQ ID NO: 975537 - DNA, 15 bp, Homo sapiens
agtcccgccatcagc

SEQ ID NO: 975538 - DNA, 15 bp, Homo sapiens
gtcccgccatcagca

SEQ ID NO: 975539 - DNA, 15 bp, Homo sapiens
tcccgccatcagcac

SEQ ID NO: 975540 - DNA, 15 bp, Homo sapiens
cccgccatcagcacg

SEQ ID NO: 975541 - DNA, 15 bp, Homo sapiens
ccgccatcagcacgg

SEQ ID NO: 975542 - DNA, 15 bp, Homo sapiens
cgccatcagcacggt

SEQ ID NO: 975543 - DNA, 15 bp, Homo sapiens
gccatcagcacggtt

SEQ ID NO: 975544 - DNA, 15 bp, Homo sapiens
ccatcagcacggttg

SEQ ID NO: 975545 - DNA, 15 bp, Homo sapiens
catcagcacggttgt

SEQ ID NO: 975546 - DNA, 15 bp, Homo sapiens
atcagcacggttgtt

SEQ ID NO: 975547 - DNA, 15 bp, Homo sapiens
tcagcacggttgttg

SEQ ID NO: 975548 - DNA, 15 bp, Homo sapiens
cagcacggttgttgc

SEQ ID NO: 975549 - DNA, 15 bp, Homo sapiens
agcacggttgttgct

SEQ ID NO: 975550 - DNA, 15 bp, Homo sapiens
gcacggttgttgctg

SEQ ID NO: 975551 - DNA, 15 bp, Homo sapiens
cacggttgttgctgt

SEQ ID NO: 975552 - DNA, 15 bp, Homo sapiens
acggttgttgctgtt

SEQ ID NO: 975553 - DNA, 15 bp, Homo sapiens
cggttgttgctgttt

SEQ ID NO: 975554 - DNA, 15 bp, Homo sapiens
ggttgttgctgttta

SEQ ID NO: 975555 - DNA, 15 bp, Homo sapiens
gttgttgctgtttac

SEQ ID NO: 975556 - DNA, 15 bp, Homo sapiens
ttgttgctgtttact

SEQ ID NO: 975557 - DNA, 15 bp, Homo sapiens
tgttgctgtttactg

SEQ ID NO: 975558 - DNA, 15 bp, Homo sapiens
gttgctgtttactgg

SEQ ID NO: 975559 - DNA, 15 bp, Homo sapiens
ttgctgtttactggg

SEQ ID NO: 975560 - DNA, 15 bp, Homo sapiens
tgctgtttactgggg

SEQ ID NO: 975561 - DNA, 15 bp, Homo sapiens
gctgtttactgggga

SEQ ID NO: 975562 - DNA, 15 bp, Homo sapiens
ctgtttactggggag

SEQ ID NO: 975563 - DNA, 15 bp, Homo sapiens
tgtttactggggagg

SEQ ID NO: 975564 - DNA, 15 bp, Homo sapiens
gtttactggggaggg

SEQ ID NO: 975565 - DNA, 15 bp, Homo sapiens
tttactggggagggg

SEQ ID NO: 975566 - DNA, 15 bp, Homo sapiens
ttactggggaggggg

SEQ ID NO: 975567 - DNA, 15 bp, Homo sapiens
tactggggaggggga

SEQ ID NO: 975568 - DNA, 15 bp, Homo sapiens
actggggagggggag

SEQ ID NO: 975569 - DNA, 15 bp, Homo sapiens
ctggggagggggagg

SEQ ID NO: 975570 - DNA, 15 bp, Homo sapiens
tggggagggggaggg

SEQ ID NO: 975571 - DNA, 15 bp, Homo sapiens
ggggagggggagggc

SEQ ID NO: 975572 - DNA, 15 bp, Homo sapiens
gggagggggagggct

SEQ ID NO: 975573 - DNA, 15 bp, Homo sapiens
ggagggggagggctg

SEQ ID NO: 975574 - DNA, 15 bp, Homo sapiens
gagggggagggctgt

SEQ ID NO: 975575 - DNA, 15 bp, Homo sapiens
agggggagggctgtg

SEQ ID NO: 975576 - DNA, 15 bp, Homo sapiens
gggggagggctgtgg

SEQ ID NO: 975577 - DNA, 15 bp, Homo sapiens
ggggagggctgtgga

SEQ ID NO: 975578 - DNA, 15 bp, Homo sapiens
gggagggctgtggag

SEQ ID NO: 975579 - DNA, 15 bp, Homo sapiens
ggagggctgtggagc

SEQ ID NO: 975580 - DNA, 15 bp, Homo sapiens
gagggctgtggagcc

SEQ ID NO: 975581 - DNA, 15 bp, Homo sapiens
agggctgtggagcct

SEQ ID NO: 975582 - DNA, 15 bp, Homo sapiens
gggctgtggagcctc

SEQ ID NO: 975583 - DNA, 15 bp, Homo sapiens
ggctgtggagcctca

SEQ ID NO: 975584 - DNA, 15 bp, Homo sapiens
gctgtggagcctcaa

SEQ ID NO: 975585 - DNA, 15 bp, Homo sapiens
ctgtggagcctcaat

SEQ ID NO: 975586 - DNA, 15 bp, Homo sapiens
tgtggagcctcaatc

SEQ ID NO: 975587 - DNA, 15 bp, Homo sapiens
gtggagcctcaatca

SEQ ID NO: 975588 - DNA, 15 bp, Homo sapiens
tggagcctcaatcag

SEQ ID NO: 975589 - DNA, 15 bp, Homo sapiens
ggagcctcaatcagg

SEQ ID NO: 975590 - DNA, 15 bp, Homo sapiens
gagcctcaatcaggg

SEQ ID NO: 975591 - DNA, 15 bp, Homo sapiens
agcctcaatcagggg

SEQ ID NO: 975592 - DNA, 15 bp, Homo sapiens
gcctcaatcaggggg

SEQ ID NO: 975593 - DNA, 15 bp, Homo sapiens
cctcaatcaggggga

SEQ ID NO: 975594 - DNA, 15 bp, Homo sapiens
ctcaatcagggggac

SEQ ID NO: 975595 - DNA, 15 bp, Homo sapiens
tcaatcagggggaca

SEQ ID NO: 975596 - DNA, 15 bp, Homo sapiens
caatcagggggacag

SEQ ID NO: 975597 - DNA, 15 bp, Homo sapiens
aatcagggggacagg

SEQ ID NO: 975598 - DNA, 15 bp, Homo sapiens
atcagggggacaggg

SEQ ID NO: 975599 - DNA, 15 bp, Homo sapiens
tcagggggacagggg

SEQ ID NO: 975600 - DNA, 15 bp, Homo sapiens
cagggggacaggggg

SEQ ID NO: 975601 - DNA, 15 bp, Homo sapiens
agggggacagggggt

SEQ ID NO: 975602 - DNA, 15 bp, Homo sapiens
gggggacagggggtc

SEQ ID NO: 975603 - DNA, 15 bp, Homo sapiens
ggggacagggggtcc

SEQ ID NO: 975604 - DNA, 15 bp, Homo sapiens
gggacagggggtccc

SEQ ID NO: 975605 - DNA, 15 bp, Homo sapiens
ggacagggggtccca

SEQ ID NO: 975606 - DNA, 15 bp, Homo sapiens
gacagggggtcccac

SEQ ID NO: 975607 - DNA, 15 bp, Homo sapiens
acagggggtcccaca

SEQ ID NO: 975608 - DNA, 15 bp, Homo sapiens
cagggggtcccacag

SEQ ID NO: 975609 - DNA, 15 bp, Homo sapiens
agggggtcccacagc

SEQ ID NO: 975610 - DNA, 15 bp, Homo sapiens
gggggtcccacagct

SEQ ID NO: 975611 - DNA, 15 bp, Homo sapiens
ggggtcccacagctt

SEQ ID NO: 975612 - DNA, 15 bp, Homo sapiens
gggtcccacagcttc

SEQ ID NO: 975613 - DNA, 15 bp, Homo sapiens
ggtcccacagcttct

SEQ ID NO: 975614 - DNA, 15 bp, Homo sapiens
gtcccacagcttctt

SEQ ID NO: 975615 - DNA, 15 bp, Homo sapiens
tcccacagcttcttc

SEQ ID NO: 975616 - DNA, 15 bp, Homo sapiens
cccacagcttcttcc

SEQ ID NO: 975617 - DNA, 15 bp, Homo sapiens
ccacagcttcttccc

SEQ ID NO: 975618 - DNA, 15 bp, Homo sapiens
cacagcttcttccca

SEQ ID NO: 975619 - DNA, 15 bp, Homo sapiens
acagcttcttcccag

SEQ ID NO: 975620 - DNA, 15 bp, Homo sapiens
cagcttcttcccaga

SEQ ID NO: 975621 - DNA, 15 bp, Homo sapiens
agcttcttcccagaa

SEQ ID NO: 975622 - DNA, 15 bp, Homo sapiens
gcttcttcccagaat

SEQ ID NO: 975623 - DNA, 15 bp, Homo sapiens
cttcttcccagaata

SEQ ID NO: 975624 - DNA, 15 bp, Homo sapiens
ttcttcccagaatac

SEQ ID NO: 975625 - DNA, 15 bp, Homo sapiens
tcttcccagaatacc

SEQ ID NO: 975626 - DNA, 15 bp, Homo sapiens
cttcccagaataccc

SEQ ID NO: 975627 - DNA, 15 bp, Homo sapiens
ttcccagaataccct

SEQ ID NO: 975628 - DNA, 15 bp, Homo sapiens
tcccagaataccctt

SEQ ID NO: 975629 - DNA, 15 bp, Homo sapiens
cccagaatacccttt

SEQ ID NO: 975630 - DNA, 15 bp, Homo sapiens
ccagaataccctttc

SEQ ID NO: 975631 - DNA, 15 bp, Homo sapiens
cagaataccctttct

SEQ ID NO: 975632 - DNA, 15 bp, Homo sapiens
agaataccctttctg

SEQ ID NO: 975633 - DNA, 15 bp, Homo sapiens
gaataccctttctgc

SEQ ID NO: 975634 - DNA, 15 bp, Homo sapiens
aataccctttctgcc

SEQ ID NO: 975635 - DNA, 15 bp, Homo sapiens
ataccctttctgcct

SEQ ID NO: 975636 - DNA, 15 bp, Homo sapiens
taccctttctgcctt

SEQ ID NO: 975637 - DNA, 15 bp, Homo sapiens
accctttctgccttt

SEQ ID NO: 975638 - DNA, 15 bp, Homo sapiens
ccctttctgcctttt

SEQ ID NO: 975639 - DNA, 15 bp, Homo sapiens
cctttctgccttttc

SEQ ID NO: 975640 - DNA, 15 bp, Homo sapiens
ctttctgccttttcc

SEQ ID NO: 975641 - DNA, 15 bp, Homo sapiens
tttctgccttttcca

SEQ ID NO: 975642 - DNA, 15 bp, Homo sapiens
ttctgccttttccag

SEQ ID NO: 975643 - DNA, 15 bp, Homo sapiens
tctgccttttccagg

SEQ ID NO: 975644 - DNA, 15 bp, Homo sapiens
ctgccttttccagga

SEQ ID NO: 975645 - DNA, 15 bp, Homo sapiens
tgccttttccaggaa

SEQ ID NO: 975646 - DNA, 15 bp, Homo sapiens
gccttttccaggaaa

SEQ ID NO: 975647 - DNA, 15 bp, Homo sapiens
ccttttccaggaaag

SEQ ID NO: 975648 - DNA, 15 bp, Homo sapiens
cttttccaggaaagt

SEQ ID NO: 975649 - DNA, 15 bp, Homo sapiens
ttttccaggaaagtt

SEQ ID NO: 975650 - DNA, 15 bp, Homo sapiens
tttccaggaaagtta

SEQ ID NO: 975651 - DNA, 15 bp, Homo sapiens
ttccaggaaagttaa

SEQ ID NO: 975652 - DNA, 15 bp, Homo sapiens
tccaggaaagttaac

SEQ ID NO: 975653 - DNA, 15 bp, Homo sapiens
ccaggaaagttaact

SEQ ID NO: 975654 - DNA, 15 bp, Homo sapiens
caggaaagttaactg

SEQ ID NO: 975655 - DNA, 15 bp, Homo sapiens
aggaaagttaactga

SEQ ID NO: 975656 - DNA, 15 bp, Homo sapiens
ggaaagttaactgag

SEQ ID NO: 975657 - DNA, 15 bp, Homo sapiens
gaaagttaactgagg

SEQ ID NO: 975658 - DNA, 15 bp, Homo sapiens
aaagttaactgaggg

SEQ ID NO: 975659 - DNA, 15 bp, Homo sapiens
aagttaactgaggga

SEQ ID NO: 975660 - DNA, 15 bp, Homo sapiens
agttaactgagggaa

SEQ ID NO: 975661 - DNA, 15 bp, Homo sapiens
gttaactgagggaag

SEQ ID NO: 975662 - DNA, 15 bp, Homo sapiens
ttaactgagggaaga

SEQ ID NO: 975663 - DNA, 15 bp, Homo sapiens
taactgagggaagac

SEQ ID NO: 975664 - DNA, 15 bp, Homo sapiens
aactgagggaagacc

SEQ ID NO: 975665 - DNA, 15 bp, Homo sapiens
actgagggaagaccc

SEQ ID NO: 975666 - DNA, 15 bp, Homo sapiens
ctgagggaagacccc

SEQ ID NO: 975667 - DNA, 15 bp, Homo sapiens
tgagggaagaccccc

SEQ ID NO: 975668 - DNA, 15 bp, Homo sapiens
gagggaagaccccca

SEQ ID NO: 975669 - DNA, 15 bp, Homo sapiens
agggaagacccccaa

SEQ ID NO: 975670 - DNA, 15 bp, Homo sapiens
gggaagacccccaag

SEQ ID NO: 975671 - DNA, 15 bp, Homo sapiens
ggaagacccccaagt

SEQ ID NO: 975672 - DNA, 15 bp, Homo sapiens
gaagacccccaagtc

SEQ ID NO: 975673 - DNA, 15 bp, Homo sapiens
aagacccccaagtct

SEQ ID NO: 975674 - DNA, 15 bp, Homo sapiens
agacccccaagtctc

SEQ ID NO: 975675 - DNA, 15 bp, Homo sapiens
gacccccaagtctct

SEQ ID NO: 975676 - DNA, 15 bp, Homo sapiens
acccccaagtctctc

SEQ ID NO: 975677 - DNA, 15 bp, Homo sapiens
cccccaagtctctcc

SEQ ID NO: 975678 - DNA, 15 bp, Homo sapiens
ccccaagtctctcct

SEQ ID NO: 975679 - DNA, 15 bp, Homo sapiens
cccaagtctctcctt

SEQ ID NO: 975680 - DNA, 15 bp, Homo sapiens
ccaagtctctccttc

SEQ ID NO: 975681 - DNA, 15 bp, Homo sapiens
caagtctctccttct

SEQ ID NO: 975682 - DNA, 15 bp, Homo sapiens
aagtctctccttctt

SEQ ID NO: 975683 - DNA, 15 bp, Homo sapiens
agtctctccttcttt

SEQ ID NO: 975684 - DNA, 15 bp, Homo sapiens
gtctctccttctttg

SEQ ID NO: 975685 - DNA, 15 bp, Homo sapiens
tctctccttctttgg

SEQ ID NO: 975686 - DNA, 15 bp, Homo sapiens
ctctccttctttgga

SEQ ID NO: 975687 - DNA, 15 bp, Homo sapiens
tctccttctttggag

SEQ ID NO: 975688 - DNA, 15 bp, Homo sapiens
ctccttctttggaga

SEQ ID NO: 975689 - DNA, 15 bp, Homo sapiens
tccttctttggagac

SEQ ID NO: 975690 - DNA, 15 bp, Homo sapiens
ccttctttggagacc

SEQ ID NO: 975691 - DNA, 15 bp, Homo sapiens
cttctttggagaccc

SEQ ID NO: 975692 - DNA, 15 bp, Homo sapiens
ttctttggagaccca

SEQ ID NO: 975693 - DNA, 15 bp, Homo sapiens
tctttggagacccaa

SEQ ID NO: 975694 - DNA, 15 bp, Homo sapiens
ctttggagacccaat

SEQ ID NO: 975695 - DNA, 15 bp, Homo sapiens
tttggagacccaatg

SEQ ID NO: 975696 - DNA, 15 bp, Homo sapiens
ttggagacccaatgt

SEQ ID NO: 975697 - DNA, 15 bp, Homo sapiens
tggagacccaatgtc

SEQ ID NO: 975698 - DNA, 15 bp, Homo sapiens
ggagacccaatgtct

SEQ ID NO: 975699 - DNA, 15 bp, Homo sapiens
gagacccaatgtctg

SEQ ID NO: 975700 - DNA, 15 bp, Homo sapiens
agacccaatgtctgt

SEQ ID NO: 975701 - DNA, 15 bp, Homo sapiens
gacccaatgtctgtt

SEQ ID NO: 975702 - DNA, 15 bp, Homo sapiens
acccaatgtctgttt

SEQ ID NO: 975703 - DNA, 15 bp, Homo sapiens
cccaatgtctgtttt

SEQ ID NO: 975704 - DNA, 15 bp, Homo sapiens
ccaatgtctgttttt

SEQ ID NO: 975705 - DNA, 15 bp, Homo sapiens
caatgtctgttttta

SEQ ID NO: 975706 - DNA, 15 bp, Homo sapiens
aatgtctgtttttac

SEQ ID NO: 975707 - DNA, 15 bp, Homo sapiens
atgtctgtttttacc

SEQ ID NO: 975708 - DNA, 15 bp, Homo sapiens
tgtctgtttttaccc

SEQ ID NO: 975709 - DNA, 15 bp, Homo sapiens
gtctgtttttaccca

SEQ ID NO: 975710 - DNA, 15 bp, Homo sapiens
tctgtttttacccag

SEQ ID NO: 975711 - DNA, 15 bp, Homo sapiens
ctgtttttacccagc

SEQ ID NO: 975712 - DNA, 15 bp, Homo sapiens
tgtttttacccagca

SEQ ID NO: 975713 - DNA, 15 bp, Homo sapiens
gtttttacccagcac

SEQ ID NO: 975714 - DNA, 15 bp, Homo sapiens
tttttacccagcacc

SEQ ID NO: 975715 - DNA, 15 bp, Homo sapiens
ttttacccagcacct

SEQ ID NO: 975716 - DNA, 15 bp, Homo sapiens
tttacccagcacctg

SEQ ID NO: 975717 - DNA, 15 bp, Homo sapiens
ttacccagcacctgg

SEQ ID NO: 975718 - DNA, 15 bp, Homo sapiens
tacccagcacctgga

SEQ ID NO: 975719 - DNA, 15 bp, Homo sapiens
acccagcacctggac

SEQ ID NO: 975720 - DNA, 15 bp, Homo sapiens
cccagcacctggacc

SEQ ID NO: 975721 - DNA, 15 bp, Homo sapiens
ccagcacctggaccc

SEQ ID NO: 975722 - DNA, 15 bp, Homo sapiens
cagcacctggaccct

SEQ ID NO: 975723 - DNA, 15 bp, Homo sapiens
agcacctggaccctc

SEQ ID NO: 975724 - DNA, 15 bp, Homo sapiens
gcacctggaccctca

SEQ ID NO: 975725 - DNA, 15 bp, Homo sapiens
cacctggaccctcaa

SEQ ID NO: 975726 - DNA, 15 bp, Homo sapiens
acctggaccctcaaa

SEQ ID NO: 975727 - DNA, 15 bp, Homo sapiens
cctggaccctcaaac

SEQ ID NO: 975728 - DNA, 15 bp, Homo sapiens
ctggaccctcaaacc

SEQ ID NO: 975729 - DNA, 15 bp, Homo sapiens
tggaccctcaaaccc

SEQ ID NO: 975730 - DNA, 15 bp, Homo sapiens
ggaccctcaaaccct

SEQ ID NO: 975731 - DNA, 15 bp, Homo sapiens
gaccctcaaaccctg

SEQ ID NO: 975732 - DNA, 15 bp, Homo sapiens
accctcaaaccctga

SEQ ID NO: 975733 - DNA, 15 bp, Homo sapiens
ccctcaaaccctgaa

SEQ ID NO: 975734 - DNA, 15 bp, Homo sapiens
cctcaaaccctgaac

SEQ ID NO: 975735 - DNA, 15 bp, Homo sapiens
ctcaaaccctgaacc

SEQ ID NO: 975736 - DNA, 15 bp, Homo sapiens
tcaaaccctgaaccc

SEQ ID NO: 975737 - DNA, 15 bp, Homo sapiens
caaaccctgaacccc

SEQ ID NO: 975738 - DNA, 15 bp, Homo sapiens
aaaccctgaaccccc

SEQ ID NO: 975739 - DNA, 15 bp, Homo sapiens
aaccctgaacccccc

SEQ ID NO: 975740 - DNA, 15 bp, Homo sapiens
accctgaacccccca

SEQ ID NO: 975741 - DNA, 15 bp, Homo sapiens
ccctgaaccccccaa

SEQ ID NO: 975742 - DNA, 15 bp, Homo sapiens
cctgaaccccccaac

SEQ ID NO: 975743 - DNA, 15 bp, Homo sapiens
ctgaaccccccaacc

SEQ ID NO: 975744 - DNA, 15 bp, Homo sapiens
tgaaccccccaaccc

SEQ ID NO: 975745 - DNA, 15 bp, Homo sapiens
gaaccccccaaccct

SEQ ID NO: 975746 - DNA, 15 bp, Homo sapiens
aaccccccaaccctt

SEQ ID NO: 975747 - DNA, 15 bp, Homo sapiens
accccccaacccttg

SEQ ID NO: 975748 - DNA, 15 bp, Homo sapiens
ccccccaacccttga

SEQ ID NO: 975749 - DNA, 15 bp, Homo sapiens
cccccaacccttgat

SEQ ID NO: 975750 - DNA, 15 bp, Homo sapiens
ccccaacccttgata

SEQ ID NO: 975751 - DNA, 15 bp, Homo sapiens
cccaacccttgatat

SEQ ID NO: 975752 - DNA, 15 bp, Homo sapiens
ccaacccttgatatt

SEQ ID NO: 975753 - DNA, 15 bp, Homo sapiens
caacccttgatattt

SEQ ID NO: 975754 - DNA, 15 bp, Homo sapiens
aacccttgatatttg

SEQ ID NO: 975755 - DNA, 15 bp, Homo sapiens
acccttgatatttga

SEQ ID NO: 975756 - DNA, 15 bp, Homo sapiens
cccttgatatttgac

SEQ ID NO: 975757 - DNA, 15 bp, Homo sapiens
ccttgatatttgact

SEQ ID NO: 975758 - DNA, 15 bp, Homo sapiens
cttgatatttgactt

SEQ ID NO: 975759 - DNA, 15 bp, Homo sapiens
ttgatatttgacttg

SEQ ID NO: 975760 - DNA, 15 bp, Homo sapiens
tgatatttgacttgg

SEQ ID NO: 975761 - DNA, 15 bp, Homo sapiens
gatatttgacttggc

SEQ ID NO: 975762 - DNA, 15 bp, Homo sapiens
atatttgacttggct

SEQ ID NO: 975763 - DNA, 15 bp, Homo sapiens
tatttgacttggctt

SEQ ID NO: 975764 - DNA, 15 bp, Homo sapiens
atttgacttggcttt

SEQ ID NO: 975765 - DNA, 15 bp, Homo sapiens
tttgacttggctttg

SEQ ID NO: 975766 - DNA, 15 bp, Homo sapiens
ttgacttggctttgg

SEQ ID NO: 975767 - DNA, 15 bp, Homo sapiens
tgacttggctttgga

SEQ ID NO: 975768 - DNA, 15 bp, Homo sapiens
gacttggctttggac

SEQ ID NO: 975769 - DNA, 15 bp, Homo sapiens
acttggctttggaca

SEQ ID NO: 975770 - DNA, 15 bp, Homo sapiens
cttggctttggacac

SEQ ID NO: 975771 - DNA, 15 bp, Homo sapiens
ttggctttggacaca

SEQ ID NO: 975772 - DNA, 15 bp, Homo sapiens
tggctttggacacag

SEQ ID NO: 975773 - DNA, 15 bp, Homo sapiens
ggctttggacacagg

SEQ ID NO: 975774 - DNA, 15 bp, Homo sapiens
gctttggacacaggg

SEQ ID NO: 975775 - DNA, 15 bp, Homo sapiens
ctttggacacagggt

SEQ ID NO: 975776 - DNA, 15 bp, Homo sapiens
tttggacacagggtt

SEQ ID NO: 975777 - DNA, 15 bp, Homo sapiens
ttggacacagggtta

SEQ ID NO: 975778 - DNA, 15 bp, Homo sapiens
tggacacagggttag

SEQ ID NO: 975779 - DNA, 15 bp, Homo sapiens
ggacacagggttagt

SEQ ID NO: 975780 - DNA, 15 bp, Homo sapiens
gacacagggttagtc

SEQ ID NO: 975781 - DNA, 15 bp, Homo sapiens
acacagggttagtct

SEQ ID NO: 975782 - DNA, 15 bp, Homo sapiens
cacagggttagtctt

SEQ ID NO: 975783 - DNA, 15 bp, Homo sapiens
acagggttagtcttt

SEQ ID NO: 975784 - DNA, 15 bp, Homo sapiens
cagggttagtcttta

SEQ ID NO: 975785 - DNA, 15 bp, Homo sapiens
agggttagtctttaa

SEQ ID NO: 975786 - DNA, 15 bp, Homo sapiens
gggttagtctttaac

SEQ ID NO: 975787 - DNA, 15 bp, Homo sapiens
ggttagtctttaacc

SEQ ID NO: 975788 - DNA, 15 bp, Homo sapiens
gttagtctttaaccc

SEQ ID NO: 975789 - DNA, 15 bp, Homo sapiens
ttagtctttaacccc

SEQ ID NO: 975790 - DNA, 15 bp, Homo sapiens
tagtctttaacccca

SEQ ID NO: 975791 - DNA, 15 bp, Homo sapiens
agtctttaaccccag

SEQ ID NO: 975792 - DNA, 15 bp, Homo sapiens
gtctttaaccccagc

SEQ ID NO: 975793 - DNA, 15 bp, Homo sapiens
tctttaaccccagcc

SEQ ID NO: 975794 - DNA, 15 bp, Homo sapiens
ctttaaccccagccc

SEQ ID NO: 975795 - DNA, 15 bp, Homo sapiens
tttaaccccagcccc

SEQ ID NO: 975796 - DNA, 15 bp, Homo sapiens
ttaaccccagcccca

SEQ ID NO: 975797 - DNA, 15 bp, Homo sapiens
taaccccagccccag

SEQ ID NO: 975798 - DNA, 15 bp, Homo sapiens
aaccccagccccaga

SEQ ID NO: 975799 - DNA, 15 bp, Homo sapiens
accccagccccagac

SEQ ID NO: 975800 - DNA, 15 bp, Homo sapiens
ccccagccccagaca

SEQ ID NO: 975801 - DNA, 15 bp, Homo sapiens
cccagccccagacag

SEQ ID NO: 975802 - DNA, 15 bp, Homo sapiens
ccagccccagacagg

SEQ ID NO: 975803 - DNA, 15 bp, Homo sapiens
cagccccagacaggc

SEQ ID NO: 975804 - DNA, 15 bp, Homo sapiens
agccccagacaggcc

SEQ ID NO: 975805 - DNA, 15 bp, Homo sapiens
gccccagacaggcca

SEQ ID NO: 975806 - DNA, 15 bp, Homo sapiens
ccccagacaggccaa

SEQ ID NO: 975807 - DNA, 15 bp, Homo sapiens
cccagacaggccaac

SEQ ID NO: 975808 - DNA, 15 bp, Homo sapiens
ccagacaggccaacg

SEQ ID NO: 975809 - DNA, 15 bp, Homo sapiens
cagacaggccaacgt

SEQ ID NO: 975810 - DNA, 15 bp, Homo sapiens
agacaggccaacgtg

SEQ ID NO: 975811 - DNA, 15 bp, Homo sapiens
gacaggccaacgtga

SEQ ID NO: 975812 - DNA, 15 bp, Homo sapiens
acaggccaacgtgaa

SEQ ID NO: 975813 - DNA, 15 bp, Homo sapiens
caggccaacgtgaag

SEQ ID NO: 975814 - DNA, 15 bp, Homo sapiens
aggccaacgtgaagt

SEQ ID NO: 975815 - DNA, 15 bp, Homo sapiens
ggccaacgtgaagtt

SEQ ID NO: 975816 - DNA, 15 bp, Homo sapiens
gccaacgtgaagttt

SEQ ID NO: 975817 - DNA, 15 bp, Homo sapiens
ccaacgtgaagtttg

SEQ ID NO: 975818 - DNA, 15 bp, Homo sapiens
caacgtgaagtttgt

SEQ ID NO: 975819 - DNA, 15 bp, Homo sapiens
aacgtgaagtttgtg

SEQ ID NO: 975820 - DNA, 15 bp, Homo sapiens
acgtgaagtttgtgc

SEQ ID NO: 975821 - DNA, 15 bp, Homo sapiens
cgtgaagtttgtgcc

SEQ ID NO: 975822 - DNA, 15 bp, Homo sapiens
gtgaagtttgtgccc

SEQ ID NO: 975823 - DNA, 15 bp, Homo sapiens
tgaagtttgtgcccc

SEQ ID NO: 975824 - DNA, 15 bp, Homo sapiens
gaagtttgtgcccca

SEQ ID NO: 975825 - DNA, 15 bp, Homo sapiens
aagtttgtgccccag

SEQ ID NO: 975826 - DNA, 15 bp, Homo sapiens
agtttgtgccccaga

SEQ ID NO: 975827 - DNA, 15 bp, Homo sapiens
gtttgtgccccagaa

SEQ ID NO: 975828 - DNA, 15 bp, Homo sapiens
tttgtgccccagaaa

SEQ ID NO: 975829 - DNA, 15 bp, Homo sapiens
ttgtgccccagaaac

SEQ ID NO: 975830 - DNA, 15 bp, Homo sapiens
tgtgccccagaaaca

SEQ ID NO: 975831 - DNA, 15 bp, Homo sapiens
gtgccccagaaacag

SEQ ID NO: 975832 - DNA, 15 bp, Homo sapiens
tgccccagaaacagt

SEQ ID NO: 975833 - DNA, 15 bp, Homo sapiens
gccccagaaacagtg

SEQ ID NO: 975834 - DNA, 15 bp, Homo sapiens
ccccagaaacagtgc

SEQ ID NO: 975835 - DNA, 15 bp, Homo sapiens
cccagaaacagtgcc

SEQ ID NO: 975836 - DNA, 15 bp, Homo sapiens
ccagaaacagtgccc

SEQ ID NO: 975837 - DNA, 15 bp, Homo sapiens
cagaaacagtgcccc

SEQ ID NO: 975838 - DNA, 15 bp, Homo sapiens
agaaacagtgccccc

SEQ ID NO: 975839 - DNA, 15 bp, Homo sapiens
gaaacagtgcccccc

SEQ ID NO: 975840 - DNA, 15 bp, Homo sapiens
aaacagtgccccccc

SEQ ID NO: 975841 - DNA, 15 bp, Homo sapiens
aacagtgcccccccg

SEQ ID NO: 975842 - DNA, 15 bp, Homo sapiens
acagtgcccccccgc

SEQ ID NO: 975843 - DNA, 15 bp, Homo sapiens
cagtgcccccccgcc

SEQ ID NO: 975844 - DNA, 15 bp, Homo sapiens
agtgcccccccgccg

SEQ ID NO: 975845 - DNA, 15 bp, Homo sapiens
gtgcccccccgccgc

SEQ ID NO: 975846 - DNA, 15 bp, Homo sapiens
tgcccccccgccgcc

SEQ ID NO: 975847 - DNA, 15 bp, Homo sapiens
gcccccccgccgcct

SEQ ID NO: 975848 - DNA, 15 bp, Homo sapiens
cccccccgccgcctt

SEQ ID NO: 975849 - DNA, 15 bp, Homo sapiens
ccccccgccgccttg

SEQ ID NO: 975850 - DNA, 15 bp, Homo sapiens
cccccgccgccttgc

SEQ ID NO: 975851 - DNA, 15 bp, Homo sapiens
ccccgccgccttgcc

SEQ ID NO: 975852 - DNA, 15 bp, Homo sapiens
cccgccgccttgcct

SEQ ID NO: 975853 - DNA, 15 bp, Homo sapiens
ccgccgccttgcctt

SEQ ID NO: 975854 - DNA, 15 bp, Homo sapiens
cgccgccttgccttg

SEQ ID NO: 975855 - DNA, 15 bp, Homo sapiens
gccgccttgccttgc

SEQ ID NO: 975856 - DNA, 15 bp, Homo sapiens
ccgccttgccttgct

SEQ ID NO: 975857 - DNA, 15 bp, Homo sapiens
cgccttgccttgctt

SEQ ID NO: 975858 - DNA, 15 bp, Homo sapiens
gccttgccttgcttt

SEQ ID NO: 975859 - DNA, 15 bp, Homo sapiens
ccttgccttgctttg

SEQ ID NO: 975860 - DNA, 15 bp, Homo sapiens
cttgccttgctttgc

SEQ ID NO: 975861 - DNA, 15 bp, Homo sapiens
ttgccttgctttgcc

SEQ ID NO: 975862 - DNA, 15 bp, Homo sapiens
tgccttgctttgcct

SEQ ID NO: 975863 - DNA, 15 bp, Homo sapiens
gccttgctttgcctt

SEQ ID NO: 975864 - DNA, 15 bp, Homo sapiens
ccttgctttgcctta

SEQ ID NO: 975865 - DNA, 15 bp, Homo sapiens
cttgctttgccttat

SEQ ID NO: 975866 - DNA, 15 bp, Homo sapiens
ttgctttgccttatc

SEQ ID NO: 975867 - DNA, 15 bp, Homo sapiens
tgctttgccttatca

SEQ ID NO: 975868 - DNA, 15 bp, Homo sapiens
gctttgccttatcag

SEQ ID NO: 975869 - DNA, 15 bp, Homo sapiens
ctttgccttatcaga

SEQ ID NO: 975870 - DNA, 15 bp, Homo sapiens
tttgccttatcagag

SEQ ID NO: 975871 - DNA, 15 bp, Homo sapiens
ttgccttatcagagg

SEQ ID NO: 975872 - DNA, 15 bp, Homo sapiens
tgccttatcagaggc

SEQ ID NO: 975873 - DNA, 15 bp, Homo sapiens
gccttatcagaggct

SEQ ID NO: 975874 - DNA, 15 bp, Homo sapiens
ccttatcagaggctg

SEQ ID NO: 975875 - DNA, 15 bp, Homo sapiens
cttatcagaggctgc

SEQ ID NO: 975876 - DNA, 15 bp, Homo sapiens
ttatcagaggctgca

SEQ ID NO: 975877 - DNA, 15 bp, Homo sapiens
tatcagaggctgcag

SEQ ID NO: 975878 - DNA, 15 bp, Homo sapiens
atcagaggctgcagc

SEQ ID NO: 975879 - DNA, 15 bp, Homo sapiens
tcagaggctgcagcc

SEQ ID NO: 975880 - DNA, 15 bp, Homo sapiens
cagaggctgcagcca

SEQ ID NO: 975881 - DNA, 15 bp, Homo sapiens
agaggctgcagccaa

SEQ ID NO: 975882 - DNA, 15 bp, Homo sapiens
gaggctgcagccaat

SEQ ID NO: 975883 - DNA, 15 bp, Homo sapiens
aggctgcagccaatc

SEQ ID NO: 975884 - DNA, 15 bp, Homo sapiens
ggctgcagccaatca

SEQ ID NO: 975885 - DNA, 15 bp, Homo sapiens
gctgcagccaatcag

SEQ ID NO: 975886 - DNA, 15 bp, Homo sapiens
ctgcagccaatcagc

SEQ ID NO: 975887 - DNA, 15 bp, Homo sapiens
tgcagccaatcagct

SEQ ID NO: 975888 - DNA, 15 bp, Homo sapiens
gcagccaatcagcta

SEQ ID NO: 975889 - DNA, 15 bp, Homo sapiens
cagccaatcagctaa

SEQ ID NO: 975890 - DNA, 15 bp, Homo sapiens
agccaatcagctaag

SEQ ID NO: 975891 - DNA, 15 bp, Homo sapiens
gccaatcagctaagg

SEQ ID NO: 975892 - DNA, 15 bp, Homo sapiens
ccaatcagctaagga

SEQ ID NO: 975893 - DNA, 15 bp, Homo sapiens
caatcagctaaggac

SEQ ID NO: 975894 - DNA, 15 bp, Homo sapiens
aatcagctaaggaca

SEQ ID NO: 975895 - DNA, 15 bp, Homo sapiens
atcagctaaggacag

SEQ ID NO: 975896 - DNA, 15 bp, Homo sapiens
tcagctaaggacaga

SEQ ID NO: 975897 - DNA, 15 bp, Homo sapiens
cagctaaggacagag

SEQ ID NO: 975898 - DNA, 15 bp, Homo sapiens
agctaaggacagaga

SEQ ID NO: 975899 - DNA, 15 bp, Homo sapiens
gctaaggacagagag

SEQ ID NO: 975900 - DNA, 15 bp, Homo sapiens
ctaaggacagagagg

SEQ ID NO: 975901 - DNA, 15 bp, Homo sapiens
taaggacagagagga

SEQ ID NO: 975902 - DNA, 15 bp, Homo sapiens
aaggacagagaggag

SEQ ID NO: 975903 - DNA, 15 bp, Homo sapiens
aggacagagaggagc

SEQ ID NO: 975904 - DNA, 15 bp, Homo sapiens
ggacagagaggagcc

SEQ ID NO: 975905 - DNA, 15 bp, Homo sapiens
gacagagaggagccc

SEQ ID NO: 975906 - DNA, 15 bp, Homo sapiens
acagagaggagccct

SEQ ID NO: 975907 - DNA, 15 bp, Homo sapiens
cagagaggagccctc

SEQ ID NO: 975908 - DNA, 15 bp, Homo sapiens
agagaggagccctcg

SEQ ID NO: 975909 - DNA, 15 bp, Homo sapiens
gagaggagccctcga

SEQ ID NO: 975910 - DNA, 15 bp, Homo sapiens
agaggagccctcgaa

SEQ ID NO: 975911 - DNA, 15 bp, Homo sapiens
gaggagccctcgaag

SEQ ID NO: 975912 - DNA, 15 bp, Homo sapiens
aggagccctcgaagg

SEQ ID NO: 975913 - DNA, 15 bp, Homo sapiens
ggagccctcgaaggg

SEQ ID NO: 975914 - DNA, 15 bp, Homo sapiens
gagccctcgaagggg

SEQ ID NO: 975915 - DNA, 15 bp, Homo sapiens
agccctcgaaggggc

SEQ ID NO: 975916 - DNA, 15 bp, Homo sapiens
gccctcgaaggggct

SEQ ID NO: 975917 - DNA, 15 bp, Homo sapiens
ccctcgaaggggcta

SEQ ID NO: 975918 - DNA, 15 bp, Homo sapiens
cctcgaaggggctat

SEQ ID NO: 975919 - DNA, 15 bp, Homo sapiens
ctcgaaggggctatc

SEQ ID NO: 975920 - DNA, 15 bp, Homo sapiens
tcgaaggggctatca

SEQ ID NO: 975921 - DNA, 15 bp, Homo sapiens
cgaaggggctatcac

SEQ ID NO: 975922 - DNA, 15 bp, Homo sapiens
gaaggggctatcaca

SEQ ID NO: 975923 - DNA, 15 bp, Homo sapiens
aaggggctatcacag

SEQ ID NO: 975924 - DNA, 15 bp, Homo sapiens
aggggctatcacagc

SEQ ID NO: 975925 - DNA, 15 bp, Homo sapiens
ggggctatcacagcc

SEQ ID NO: 975926 - DNA, 15 bp, Homo sapiens
gggctatcacagcct

SEQ ID NO: 975927 - DNA, 15 bp, Homo sapiens
ggctatcacagcctc

SEQ ID NO: 975928 - DNA, 15 bp, Homo sapiens
gctatcacagcctca

SEQ ID NO: 975929 - DNA, 15 bp, Homo sapiens
ctatcacagcctcag

SEQ ID NO: 975930 - DNA, 15 bp, Homo sapiens
tatcacagcctcaga

SEQ ID NO: 975931 - DNA, 15 bp, Homo sapiens
atcacagcctcagag

SEQ ID NO: 975932 - DNA, 15 bp, Homo sapiens
tcacagcctcagagt

SEQ ID NO: 975933 - DNA, 15 bp, Homo sapiens
cacagcctcagagtt

SEQ ID NO: 975934 - DNA, 15 bp, Homo sapiens
acagcctcagagttc

SEQ ID NO: 975935 - DNA, 15 bp, Homo sapiens
cagcctcagagttca

SEQ ID NO: 975936 - DNA, 15 bp, Homo sapiens
agcctcagagttcac

SEQ ID NO: 975937 - DNA, 15 bp, Homo sapiens
gcctcagagttcacg

SEQ ID NO: 975938 - DNA, 15 bp, Homo sapiens
cctcagagttcacga

SEQ ID NO: 975939 - DNA, 15 bp, Homo sapiens
ctcagagttcacgag

SEQ ID NO: 975940 - DNA, 15 bp, Homo sapiens
tcagagttcacgagg

SEQ ID NO: 975941 - DNA, 15 bp, Homo sapiens
cagagttcacgaggc

SEQ ID NO: 975942 - DNA, 15 bp, Homo sapiens
agagttcacgaggca

SEQ ID NO: 975943 - DNA, 15 bp, Homo sapiens
gagttcacgaggcag

SEQ ID NO: 975944 - DNA, 15 bp, Homo sapiens
agttcacgaggcagc

SEQ ID NO: 975945 - DNA, 15 bp, Homo sapiens
gttcacgaggcagcc

SEQ ID NO: 975946 - DNA, 15 bp, Homo sapiens
ttcacgaggcagccg

SEQ ID NO: 975947 - DNA, 15 bp, Homo sapiens
tcacgaggcagccga

SEQ ID NO: 975948 - DNA, 15 bp, Homo sapiens
cacgaggcagccgag

SEQ ID NO: 975949 - DNA, 15 bp, Homo sapiens
acgaggcagccgagg

SEQ ID NO: 975950 - DNA, 15 bp, Homo sapiens
cgaggcagccgagga

SEQ ID NO: 975951 - DNA, 15 bp, Homo sapiens
gaggcagccgaggaa

SEQ ID NO: 975952 - DNA, 15 bp, Homo sapiens
aggcagccgaggaag

SEQ ID NO: 975953 - DNA, 15 bp, Homo sapiens
ggcagccgaggaaga

SEQ ID NO: 975954 - DNA, 15 bp, Homo sapiens
gcagccgaggaagag

SEQ ID NO: 975955 - DNA, 15 bp, Homo sapiens
cagccgaggaagagg

SEQ ID NO: 975956 - DNA, 15 bp, Homo sapiens
agccgaggaagagga

SEQ ID NO: 975957 - DNA, 15 bp, Homo sapiens
gccgaggaagaggag

SEQ ID NO: 975958 - DNA, 15 bp, Homo sapiens
ccgaggaagaggagg

SEQ ID NO: 975959 - DNA, 15 bp, Homo sapiens
cgaggaagaggaggc

SEQ ID NO: 975960 - DNA, 15 bp, Homo sapiens
gaggaagaggaggct

SEQ ID NO: 975961 - DNA, 15 bp, Homo sapiens
aggaagaggaggctt

SEQ ID NO: 975962 - DNA, 15 bp, Homo sapiens
ggaagaggaggcttg

SEQ ID NO: 975963 - DNA, 15 bp, Homo sapiens
gaagaggaggcttga

SEQ ID NO: 975964 - DNA, 15 bp, Homo sapiens
aagaggaggcttgag

SEQ ID NO: 975965 - DNA, 15 bp, Homo sapiens
agaggaggcttgagg

SEQ ID NO: 975966 - DNA, 15 bp, Homo sapiens
gaggaggcttgaggc

SEQ ID NO: 975967 - DNA, 15 bp, Homo sapiens
aggaggcttgaggcc

SEQ ID NO: 975968 - DNA, 15 bp, Homo sapiens
ggaggcttgaggccc

SEQ ID NO: 975969 - DNA, 15 bp, Homo sapiens
gaggcttgaggccca

SEQ ID NO: 975970 - DNA, 15 bp, Homo sapiens
aggcttgaggcccag

SEQ ID NO: 975971 - DNA, 15 bp, Homo sapiens
ggcttgaggcccagg

SEQ ID NO: 975972 - DNA, 15 bp, Homo sapiens
gcttgaggcccaggg

SEQ ID NO: 975973 - DNA, 15 bp, Homo sapiens
cttgaggcccagggt

SEQ ID NO: 975974 - DNA, 15 bp, Homo sapiens
ttgaggcccagggtg

SEQ ID NO: 975975 - DNA, 15 bp, Homo sapiens
tgaggcccagggtgg

SEQ ID NO: 975976 - DNA, 15 bp, Homo sapiens
gaggcccagggtggg

SEQ ID NO: 975977 - DNA, 15 bp, Homo sapiens
aggcccagggtgggc

SEQ ID NO: 975978 - DNA, 15 bp, Homo sapiens
ggcccagggtgggca

SEQ ID NO: 975979 - DNA, 15 bp, Homo sapiens
gcccagggtgggcac

SEQ ID NO: 975980 - DNA, 15 bp, Homo sapiens
cccagggtgggcacc

SEQ ID NO: 975981 - DNA, 15 bp, Homo sapiens
ccagggtgggcacca

SEQ ID NO: 975982 - DNA, 15 bp, Homo sapiens
cagggtgggcaccag

SEQ ID NO: 975983 - DNA, 15 bp, Homo sapiens
agggtgggcaccagc

SEQ ID NO: 975984 - DNA, 15 bp, Homo sapiens
gggtgggcaccagcc

SEQ ID NO: 975985 - DNA, 15 bp, Homo sapiens
ggtgggcaccagcca

SEQ ID NO: 975986 - DNA, 15 bp, Homo sapiens
gtgggcaccagccag

SEQ ID NO: 975987 - DNA, 15 bp, Homo sapiens
tgggcaccagccagc

SEQ ID NO: 975988 - DNA, 15 bp, Homo sapiens
gggcaccagccagcc

SEQ ID NO: 975989 - DNA, 15 bp, Homo sapiens
ggcaccagccagcca

SEQ ID NO: 975990 - DNA, 15 bp, Homo sapiens
gcaccagccagccat

SEQ ID NO: 975991 - DNA, 15 bp, Homo sapiens
caccagccagccatg

SEQ ID NO: 975992 - DNA, 15 bp, Homo sapiens
accagccagccatgg

SEQ ID NO: 975993 - DNA, 15 bp, Homo sapiens
ccagccagccatggc

SEQ ID NO: 975994 - DNA, 15 bp, Homo sapiens
cagccagccatggcc

SEQ ID NO: 975995 - DNA, 15 bp, Homo sapiens
agccagccatggcca

SEQ ID NO: 975996 - DNA, 15 bp, Homo sapiens
gccagccatggccac

SEQ ID NO: 975997 - DNA, 15 bp, Homo sapiens
ccagccatggccaca

SEQ ID NO: 975998 - DNA, 15 bp, Homo sapiens
cagccatggccacag

SEQ ID NO: 975999 - DNA, 15 bp, Homo sapiens
agccatggccacagc

SEQ ID NO: 976000 - DNA, 15 bp, Homo sapiens
gccatggccacagcc

SEQ ID NO: 976001 - DNA, 15 bp, Homo sapiens
ccatggccacagccg

SEQ ID NO: 976002 - DNA, 15 bp, Homo sapiens
catggccacagccga

SEQ ID NO: 976003 - DNA, 15 bp, Homo sapiens
atggccacagccgag

SEQ ID NO: 976004 - DNA, 15 bp, Homo sapiens
tggccacagccgaga

SEQ ID NO: 976005 - DNA, 15 bp, Homo sapiens
ggccacagccgagac

SEQ ID NO: 976006 - DNA, 15 bp, Homo sapiens
gccacagccgagacc

SEQ ID NO: 976007 - DNA, 15 bp, Homo sapiens
ccacagccgagaccg

SEQ ID NO: 976008 - DNA, 15 bp, Homo sapiens
cacagccgagaccgc

SEQ ID NO: 976009 - DNA, 15 bp, Homo sapiens
acagccgagaccgcc

SEQ ID NO: 976010 - DNA, 15 bp, Homo sapiens
cagccgagaccgcct

SEQ ID NO: 976011 - DNA, 15 bp, Homo sapiens
agccgagaccgcctt

SEQ ID NO: 976012 - DNA, 15 bp, Homo sapiens
gccgagaccgccttg

SEQ ID NO: 976013 - DNA, 15 bp, Homo sapiens
ccgagaccgccttgc

SEQ ID NO: 976014 - DNA, 15 bp, Homo sapiens
cgagaccgccttgcc

SEQ ID NO: 976015 - DNA, 15 bp, Homo sapiens
gagaccgccttgccc

SEQ ID NO: 976016 - DNA, 15 bp, Homo sapiens
agaccgccttgccct

SEQ ID NO: 976017 - DNA, 15 bp, Homo sapiens
gaccgccttgccctc

SEQ ID NO: 976018 - DNA, 15 bp, Homo sapiens
accgccttgccctcc

SEQ ID NO: 976019 - DNA, 15 bp, Homo sapiens
ccgccttgccctcca

SEQ ID NO: 976020 - DNA, 15 bp, Homo sapiens
cgccttgccctccat

SEQ ID NO: 976021 - DNA, 15 bp, Homo sapiens
gccttgccctccatc

SEQ ID NO: 976022 - DNA, 15 bp, Homo sapiens
ccttgccctccatca

SEQ ID NO: 976023 - DNA, 15 bp, Homo sapiens
cttgccctccatcag

SEQ ID NO: 976024 - DNA, 15 bp, Homo sapiens
ttgccctccatcagc

SEQ ID NO: 976025 - DNA, 15 bp, Homo sapiens
tgccctccatcagca

SEQ ID NO: 976026 - DNA, 15 bp, Homo sapiens
gccctccatcagcac

SEQ ID NO: 976027 - DNA, 15 bp, Homo sapiens
ccctccatcagcaca

SEQ ID NO: 976028 - DNA, 15 bp, Homo sapiens
cctccatcagcacac

SEQ ID NO: 976029 - DNA, 15 bp, Homo sapiens
ctccatcagcacact

SEQ ID NO: 976030 - DNA, 15 bp, Homo sapiens
tccatcagcacactg

SEQ ID NO: 976031 - DNA, 15 bp, Homo sapiens
ccatcagcacactga

SEQ ID NO: 976032 - DNA, 15 bp, Homo sapiens
catcagcacactgac

SEQ ID NO: 976033 - DNA, 15 bp, Homo sapiens
atcagcacactgacc

SEQ ID NO: 976034 - DNA, 15 bp, Homo sapiens
tcagcacactgaccg

SEQ ID NO: 976035 - DNA, 15 bp, Homo sapiens
cagcacactgaccgc

SEQ ID NO: 976036 - DNA, 15 bp, Homo sapiens
agcacactgaccgcc

SEQ ID NO: 976037 - DNA, 15 bp, Homo sapiens
gcacactgaccgccc

SEQ ID NO: 976038 - DNA, 15 bp, Homo sapiens
cacactgaccgccct

SEQ ID NO: 976039 - DNA, 15 bp, Homo sapiens
acactgaccgccctg

SEQ ID NO: 976040 - DNA, 15 bp, Homo sapiens
cactgaccgccctgg

SEQ ID NO: 976041 - DNA, 15 bp, Homo sapiens
actgaccgccctggg

SEQ ID NO: 976042 - DNA, 15 bp, Homo sapiens
ctgaccgccctgggc

SEQ ID NO: 976043 - DNA, 15 bp, Homo sapiens
tgaccgccctgggcc

SEQ ID NO: 976044 - DNA, 15 bp, Homo sapiens
gaccgccctgggccc

SEQ ID NO: 976045 - DNA, 15 bp, Homo sapiens
accgccctgggcccc

SEQ ID NO: 976046 - DNA, 15 bp, Homo sapiens
ccgccctgggcccct

SEQ ID NO: 976047 - DNA, 15 bp, Homo sapiens
cgccctgggcccctt

SEQ ID NO: 976048 - DNA, 15 bp, Homo sapiens
gccctgggccccttc

SEQ ID NO: 976049 - DNA, 15 bp, Homo sapiens
ccctgggccccttcc

SEQ ID NO: 976050 - DNA, 15 bp, Homo sapiens
cctgggccccttccc

SEQ ID NO: 976051 - DNA, 15 bp, Homo sapiens
ctgggccccttcccg

SEQ ID NO: 976052 - DNA, 15 bp, Homo sapiens
tgggccccttcccgg

SEQ ID NO: 976053 - DNA, 15 bp, Homo sapiens
gggccccttcccgga

SEQ ID NO: 976054 - DNA, 15 bp, Homo sapiens
ggccccttcccggac

SEQ ID NO: 976055 - DNA, 15 bp, Homo sapiens
gccccttcccggaca

SEQ ID NO: 976056 - DNA, 15 bp, Homo sapiens
ccccttcccggacac

SEQ ID NO: 976057 - DNA, 15 bp, Homo sapiens
cccttcccggacaca

SEQ ID NO: 976058 - DNA, 15 bp, Homo sapiens
ccttcccggacacac

SEQ ID NO: 976059 - DNA, 15 bp, Homo sapiens
cttcccggacacaca

SEQ ID NO: 976060 - DNA, 15 bp, Homo sapiens
ttcccggacacacag

SEQ ID NO: 976061 - DNA, 15 bp, Homo sapiens
tcccggacacacagg

SEQ ID NO: 976062 - DNA, 15 bp, Homo sapiens
cccggacacacagga

SEQ ID NO: 976063 - DNA, 15 bp, Homo sapiens
ccggacacacaggat

SEQ ID NO: 976064 - DNA, 15 bp, Homo sapiens
cggacacacaggatg

SEQ ID NO: 976065 - DNA, 15 bp, Homo sapiens
ggacacacaggatga

SEQ ID NO: 976066 - DNA, 15 bp, Homo sapiens
gacacacaggatgac

SEQ ID NO: 976067 - DNA, 15 bp, Homo sapiens
acacacaggatgact

SEQ ID NO: 976068 - DNA, 15 bp, Homo sapiens
cacacaggatgactt

SEQ ID NO: 976069 - DNA, 15 bp, Homo sapiens
acacaggatgacttc

SEQ ID NO: 976070 - DNA, 15 bp, Homo sapiens
cacaggatgacttcc

SEQ ID NO: 976071 - DNA, 15 bp, Homo sapiens
acaggatgacttcct

SEQ ID NO: 976072 - DNA, 15 bp, Homo sapiens
caggatgacttcctc

SEQ ID NO: 976073 - DNA, 15 bp, Homo sapiens
aggatgacttcctca

SEQ ID NO: 976074 - DNA, 15 bp, Homo sapiens
ggatgacttcctcaa

SEQ ID NO: 976075 - DNA, 15 bp, Homo sapiens
gatgacttcctcaag

SEQ ID NO: 976076 - DNA, 15 bp, Homo sapiens
atgacttcctcaagg

SEQ ID NO: 976077 - DNA, 15 bp, Homo sapiens
tgacttcctcaaggt

SEQ ID NO: 976078 - DNA, 15 bp, Homo sapiens
gacttcctcaaggtg

SEQ ID NO: 976079 - DNA, 15 bp, Homo sapiens
acttcctcaaggtgg

SEQ ID NO: 976080 - DNA, 15 bp, Homo sapiens
cttcctcaaggtggg

SEQ ID NO: 976081 - DNA, 15 bp, Homo sapiens
ttcctcaaggtgggg

SEQ ID NO: 976082 - DNA, 15 bp, Homo sapiens
tcctcaaggtggggc

SEQ ID NO: 976083 - DNA, 15 bp, Homo sapiens
cctcaaggtggggcc

SEQ ID NO: 976084 - DNA, 15 bp, Homo sapiens
ctcaaggtggggcct

SEQ ID NO: 976085 - DNA, 15 bp, Homo sapiens
tcaaggtggggccta

SEQ ID NO: 976086 - DNA, 15 bp, Homo sapiens
caaggtggggcctag

SEQ ID NO: 976087 - DNA, 15 bp, Homo sapiens
aaggtggggcctaga

SEQ ID NO: 976088 - DNA, 15 bp, Homo sapiens
aggtggggcctagaa

SEQ ID NO: 976089 - DNA, 15 bp, Homo sapiens
ggtggggcctagaag

SEQ ID NO: 976090 - DNA, 15 bp, Homo sapiens
gtggggcctagaagg

SEQ ID NO: 976091 - DNA, 15 bp, Homo sapiens
tggggcctagaaggt

SEQ ID NO: 976092 - DNA, 15 bp, Homo sapiens
ggggcctagaaggtg

SEQ ID NO: 976093 - DNA, 15 bp, Homo sapiens
gggcctagaaggtgg

SEQ ID NO: 976094 - DNA, 15 bp, Homo sapiens
ggcctagaaggtggg

SEQ ID NO: 976095 - DNA, 15 bp, Homo sapiens
gcctagaaggtgggg

SEQ ID NO: 976096 - DNA, 15 bp, Homo sapiens
cctagaaggtggggt

SEQ ID NO: 976097 - DNA, 15 bp, Homo sapiens
ctagaaggtggggtc

SEQ ID NO: 976098 - DNA, 15 bp, Homo sapiens
tagaaggtggggtct

SEQ ID NO: 976099 - DNA, 15 bp, Homo sapiens
agaaggtggggtcta

SEQ ID NO: 976100 - DNA, 15 bp, Homo sapiens
gaaggtggggtctag

SEQ ID NO: 976101 - DNA, 15 bp, Homo sapiens
aaggtggggtctagg

SEQ ID NO: 976102 - DNA, 15 bp, Homo sapiens
aggtggggtctaggt

SEQ ID NO: 976103 - DNA, 15 bp, Homo sapiens
ggtggggtctaggtg

SEQ ID NO: 976104 - DNA, 15 bp, Homo sapiens
gtggggtctaggtgg

SEQ ID NO: 976105 - DNA, 15 bp, Homo sapiens
tggggtctaggtggg

SEQ ID NO: 976106 - DNA, 15 bp, Homo sapiens
ggggtctaggtgggc

SEQ ID NO: 976107 - DNA, 15 bp, Homo sapiens
gggtctaggtgggct

SEQ ID NO: 976108 - DNA, 15 bp, Homo sapiens
ggtctaggtgggctg

SEQ ID NO: 976109 - DNA, 15 bp, Homo sapiens
gtctaggtgggctgg

SEQ ID NO: 976110 - DNA, 15 bp, Homo sapiens
tctaggtgggctggc

SEQ ID NO: 976111 - DNA, 15 bp, Homo sapiens
ctaggtgggctggct

SEQ ID NO: 976112 - DNA, 15 bp, Homo sapiens
taggtgggctggctg

SEQ ID NO: 976113 - DNA, 15 bp, Homo sapiens
aggtgggctggctgg

SEQ ID NO: 976114 - DNA, 15 bp, Homo sapiens
ggtgggctggctgga

SEQ ID NO: 976115 - DNA, 15 bp, Homo sapiens
gtgggctggctggaa

SEQ ID NO: 976116 - DNA, 15 bp, Homo sapiens
tgggctggctggaat

SEQ ID NO: 976117 - DNA, 15 bp, Homo sapiens
gggctggctggaatc

SEQ ID NO: 976118 - DNA, 15 bp, Homo sapiens
ggctggctggaatcc

SEQ ID NO: 976119 - DNA, 15 bp, Homo sapiens
gctggctggaatcca

SEQ ID NO: 976120 - DNA, 15 bp, Homo sapiens
ctggctggaatccag

SEQ ID NO: 976121 - DNA, 15 bp, Homo sapiens
tggctggaatccagg

SEQ ID NO: 976122 - DNA, 15 bp, Homo sapiens
ggctggaatccaggg

SEQ ID NO: 976123 - DNA, 15 bp, Homo sapiens
gctggaatccagggc

SEQ ID NO: 976124 - DNA, 15 bp, Homo sapiens
ctggaatccagggcc

SEQ ID NO: 976125 - DNA, 15 bp, Homo sapiens
tggaatccagggcca

SEQ ID NO: 976126 - DNA, 15 bp, Homo sapiens
ggaatccagggccac

SEQ ID NO: 976127 - DNA, 15 bp, Homo sapiens
gaatccagggccaca

SEQ ID NO: 976128 - DNA, 15 bp, Homo sapiens
aatccagggccacag

SEQ ID NO: 976129 - DNA, 15 bp, Homo sapiens
atccagggccacagt

SEQ ID NO: 976130 - DNA, 15 bp, Homo sapiens
tccagggccacagtc

SEQ ID NO: 976131 - DNA, 15 bp, Homo sapiens
ccagggccacagtca

SEQ ID NO: 976132 - DNA, 15 bp, Homo sapiens
cagggccacagtcac

SEQ ID NO: 976133 - DNA, 15 bp, Homo sapiens
agggccacagtcaca

SEQ ID NO: 976134 - DNA, 15 bp, Homo sapiens
gggccacagtcacag

SEQ ID NO: 976135 - DNA, 15 bp, Homo sapiens
ggccacagtcacaga

SEQ ID NO: 976136 - DNA, 15 bp, Homo sapiens
gccacagtcacagat

SEQ ID NO: 976137 - DNA, 15 bp, Homo sapiens
ccacagtcacagatc

SEQ ID NO: 976138 - DNA, 15 bp, Homo sapiens
cacagtcacagatct

SEQ ID NO: 976139 - DNA, 15 bp, Homo sapiens
acagtcacagatctt

SEQ ID NO: 976140 - DNA, 15 bp, Homo sapiens
cagtcacagatcttg

SEQ ID NO: 976141 - DNA, 15 bp, Homo sapiens
agtcacagatcttgg

SEQ ID NO: 976142 - DNA, 15 bp, Homo sapiens
gtcacagatcttggg

SEQ ID NO: 976143 - DNA, 15 bp, Homo sapiens
tcacagatcttgggg

SEQ ID NO: 976144 - DNA, 15 bp, Homo sapiens
cacagatcttggggt

SEQ ID NO: 976145 - DNA, 15 bp, Homo sapiens
acagatcttggggtc

SEQ ID NO: 976146 - DNA, 15 bp, Homo sapiens
cagatcttggggtcc

SEQ ID NO: 976147 - DNA, 15 bp, Homo sapiens
agatcttggggtcca

SEQ ID NO: 976148 - DNA, 15 bp, Homo sapiens
gatcttggggtccag

SEQ ID NO: 976149 - DNA, 15 bp, Homo sapiens
atcttggggtccaga

SEQ ID NO: 976150 - DNA, 15 bp, Homo sapiens
tcttggggtccagac

SEQ ID NO: 976151 - DNA, 15 bp, Homo sapiens
cttggggtccagacc

SEQ ID NO: 976152 - DNA, 15 bp, Homo sapiens
ttggggtccagacct

SEQ ID NO: 976153 - DNA, 15 bp, Homo sapiens
tggggtccagacctg

SEQ ID NO: 976154 - DNA, 15 bp, Homo sapiens
ggggtccagacctgc

SEQ ID NO: 976155 - DNA, 15 bp, Homo sapiens
gggtccagacctgca

SEQ ID NO: 976156 - DNA, 15 bp, Homo sapiens
ggtccagacctgcat

SEQ ID NO: 976157 - DNA, 15 bp, Homo sapiens
gtccagacctgcatc

SEQ ID NO: 976158 - DNA, 15 bp, Homo sapiens
tccagacctgcatct

SEQ ID NO: 976159 - DNA, 15 bp, Homo sapiens
ccagacctgcatctt

SEQ ID NO: 976160 - DNA, 15 bp, Homo sapiens
cagacctgcatcttg

SEQ ID NO: 976161 - DNA, 15 bp, Homo sapiens
agacctgcatcttga

SEQ ID NO: 976162 - DNA, 15 bp, Homo sapiens
gacctgcatcttgac

SEQ ID NO: 976163 - DNA, 15 bp, Homo sapiens
acctgcatcttgacc

SEQ ID NO: 976164 - DNA, 15 bp, Homo sapiens
cctgcatcttgacct

SEQ ID NO: 976165 - DNA, 15 bp, Homo sapiens
ctgcatcttgacctg

SEQ ID NO: 976166 - DNA, 15 bp, Homo sapiens
tgcatcttgacctga

SEQ ID NO: 976167 - DNA, 15 bp, Homo sapiens
gcatcttgacctgaa

SEQ ID NO: 976168 - DNA, 15 bp, Homo sapiens
catcttgacctgaaa

SEQ ID NO: 976169 - DNA, 15 bp, Homo sapiens
atcttgacctgaaat

SEQ ID NO: 976170 - DNA, 15 bp, Homo sapiens
tcttgacctgaaatc

SEQ ID NO: 976171 - DNA, 15 bp, Homo sapiens
cttgacctgaaatca

SEQ ID NO: 976172 - DNA, 15 bp, Homo sapiens
ttgacctgaaatcaa

SEQ ID NO: 976173 - DNA, 15 bp, Homo sapiens
tgacctgaaatcaag

SEQ ID NO: 976174 - DNA, 15 bp, Homo sapiens
gacctgaaatcaaga

SEQ ID NO: 976175 - DNA, 15 bp, Homo sapiens
acctgaaatcaagag

SEQ ID NO: 976176 - DNA, 15 bp, Homo sapiens
cctgaaatcaagaga

SEQ ID NO: 976177 - DNA, 15 bp, Homo sapiens
ctgaaatcaagagac

SEQ ID NO: 976178 - DNA, 15 bp, Homo sapiens
tgaaatcaagagact

SEQ ID NO: 976179 - DNA, 15 bp, Homo sapiens
gaaatcaagagactt

SEQ ID NO: 976180 - DNA, 15 bp, Homo sapiens
aaatcaagagactta

SEQ ID NO: 976181 - DNA, 15 bp, Homo sapiens
aatcaagagacttaa

SEQ ID NO: 976182 - DNA, 15 bp, Homo sapiens
atcaagagacttaac

SEQ ID NO: 976183 - DNA, 15 bp, Homo sapiens
tcaagagacttaacc

SEQ ID NO: 976184 - DNA, 15 bp, Homo sapiens
caagagacttaacca

SEQ ID NO: 976185 - DNA, 15 bp, Homo sapiens
aagagacttaaccag

SEQ ID NO: 976186 - DNA, 15 bp, Homo sapiens
agagacttaaccagg

SEQ ID NO: 976187 - DNA, 15 bp, Homo sapiens
gagacttaaccagga

SEQ ID NO: 976188 - DNA, 15 bp, Homo sapiens
agacttaaccaggac

SEQ ID NO: 976189 - DNA, 15 bp, Homo sapiens
gacttaaccaggact

SEQ ID NO: 976190 - DNA, 15 bp, Homo sapiens
acttaaccaggactg

SEQ ID NO: 976191 - DNA, 15 bp, Homo sapiens
cttaaccaggactga

SEQ ID NO: 976192 - DNA, 15 bp, Homo sapiens
ttaaccaggactgag

SEQ ID NO: 976193 - DNA, 15 bp, Homo sapiens
taaccaggactgagg

SEQ ID NO: 976194 - DNA, 15 bp, Homo sapiens
aaccaggactgaggt

SEQ ID NO: 976195 - DNA, 15 bp, Homo sapiens
accaggactgaggta

SEQ ID NO: 976196 - DNA, 15 bp, Homo sapiens
ccaggactgaggtac

SEQ ID NO: 976197 - DNA, 15 bp, Homo sapiens
caggactgaggtacg

SEQ ID NO: 976198 - DNA, 15 bp, Homo sapiens
aggactgaggtacgc

SEQ ID NO: 976199 - DNA, 15 bp, Homo sapiens
ggactgaggtacgct

SEQ ID NO: 976200 - DNA, 15 bp, Homo sapiens
gactgaggtacgctc

SEQ ID NO: 976201 - DNA, 15 bp, Homo sapiens
actgaggtacgctca

SEQ ID NO: 976202 - DNA, 15 bp, Homo sapiens
ctgaggtacgctcag

SEQ ID NO: 976203 - DNA, 15 bp, Homo sapiens
tgaggtacgctcagt

SEQ ID NO: 976204 - DNA, 15 bp, Homo sapiens
gaggtacgctcagtc

SEQ ID NO: 976205 - DNA, 15 bp, Homo sapiens
aggtacgctcagtcc

SEQ ID NO: 976206 - DNA, 15 bp, Homo sapiens
ggtacgctcagtcca

SEQ ID NO: 976207 - DNA, 15 bp, Homo sapiens
gtacgctcagtccag

SEQ ID NO: 976208 - DNA, 15 bp, Homo sapiens
tacgctcagtccagg

SEQ ID NO: 976209 - DNA, 15 bp, Homo sapiens
acgctcagtccagga

SEQ ID NO: 976210 - DNA, 15 bp, Homo sapiens
cgctcagtccaggag

SEQ ID NO: 976211 - DNA, 15 bp, Homo sapiens
gctcagtccaggaga

SEQ ID NO: 976212 - DNA, 15 bp, Homo sapiens
ctcagtccaggagag

SEQ ID NO: 976213 - DNA, 15 bp, Homo sapiens
tcagtccaggagagg

SEQ ID NO: 976214 - DNA, 15 bp, Homo sapiens
cagtccaggagagga

SEQ ID NO: 976215 - DNA, 15 bp, Homo sapiens
agtccaggagaggag

SEQ ID NO: 976216 - DNA, 15 bp, Homo sapiens
gtccaggagaggaga

SEQ ID NO: 976217 - DNA, 15 bp, Homo sapiens
tccaggagaggagat

SEQ ID NO: 976218 - DNA, 15 bp, Homo sapiens
ccaggagaggagatc

SEQ ID NO: 976219 - DNA, 15 bp, Homo sapiens
caggagaggagatct

SEQ ID NO: 976220 - DNA, 15 bp, Homo sapiens
aggagaggagatctc

SEQ ID NO: 976221 - DNA, 15 bp, Homo sapiens
ggagaggagatctca

SEQ ID NO: 976222 - DNA, 15 bp, Homo sapiens
gagaggagatctcag

SEQ ID NO: 976223 - DNA, 15 bp, Homo sapiens
agaggagatctcagc

SEQ ID NO: 976224 - DNA, 15 bp, Homo sapiens
gaggagatctcagct

SEQ ID NO: 976225 - DNA, 15 bp, Homo sapiens
aggagatctcagctt

SEQ ID NO: 976226 - DNA, 15 bp, Homo sapiens
ggagatctcagctta

SEQ ID NO: 976227 - DNA, 15 bp, Homo sapiens
gagatctcagcttag

SEQ ID NO: 976228 - DNA, 15 bp, Homo sapiens
agatctcagcttagt

SEQ ID NO: 976229 - DNA, 15 bp, Homo sapiens
gatctcagcttagtc

SEQ ID NO: 976230 - DNA, 15 bp, Homo sapiens
atctcagcttagtct

SEQ ID NO: 976231 - DNA, 15 bp, Homo sapiens
tctcagcttagtctg

SEQ ID NO: 976232 - DNA, 15 bp, Homo sapiens
ctcagcttagtctgg

SEQ ID NO: 976233 - DNA, 15 bp, Homo sapiens
tcagcttagtctggc

SEQ ID NO: 976234 - DNA, 15 bp, Homo sapiens
cagcttagtctggca

SEQ ID NO: 976235 - DNA, 15 bp, Homo sapiens
agcttagtctggcag

SEQ ID NO: 976236 - DNA, 15 bp, Homo sapiens
gcttagtctggcagg

SEQ ID NO: 976237 - DNA, 15 bp, Homo sapiens
cttagtctggcaggg

SEQ ID NO: 976238 - DNA, 15 bp, Homo sapiens
ttagtctggcagggg

SEQ ID NO: 976239 - DNA, 15 bp, Homo sapiens
tagtctggcaggggg

SEQ ID NO: 976240 - DNA, 15 bp, Homo sapiens
agtctggcagggggt

SEQ ID NO: 976241 - DNA, 15 bp, Homo sapiens
gtctggcagggggtg

SEQ ID NO: 976242 - DNA, 15 bp, Homo sapiens
tctggcagggggtga

SEQ ID NO: 976243 - DNA, 15 bp, Homo sapiens
ctggcagggggtgag

SEQ ID NO: 976244 - DNA, 15 bp, Homo sapiens
tggcagggggtgagg

SEQ ID NO: 976245 - DNA, 15 bp, Homo sapiens
ggcagggggtgagga

SEQ ID NO: 976246 - DNA, 15 bp, Homo sapiens
gcagggggtgaggag

SEQ ID NO: 976247 - DNA, 15 bp, Homo sapiens
cagggggtgaggagg

SEQ ID NO: 976248 - DNA, 15 bp, Homo sapiens
agggggtgaggaggg

SEQ ID NO: 976249 - DNA, 15 bp, Homo sapiens
gggggtgaggagggt

SEQ ID NO: 976250 - DNA, 15 bp, Homo sapiens
ggggtgaggagggtg

SEQ ID NO: 976251 - DNA, 15 bp, Homo sapiens
gggtgaggagggtgg

SEQ ID NO: 976252 - DNA, 15 bp, Homo sapiens
ggtgaggagggtggt

SEQ ID NO: 976253 - DNA, 15 bp, Homo sapiens
gtgaggagggtggtc

SEQ ID NO: 976254 - DNA, 15 bp, Homo sapiens
tgaggagggtggtct

SEQ ID NO: 976255 - DNA, 15 bp, Homo sapiens
gaggagggtggtcta

SEQ ID NO: 976256 - DNA, 15 bp, Homo sapiens
aggagggtggtctag

SEQ ID NO: 976257 - DNA, 15 bp, Homo sapiens
ggagggtggtctagg

SEQ ID NO: 976258 - DNA, 15 bp, Homo sapiens
gagggtggtctaggg

SEQ ID NO: 976259 - DNA, 15 bp, Homo sapiens
agggtggtctagggg

SEQ ID NO: 976260 - DNA, 15 bp, Homo sapiens
gggtggtctaggggt

SEQ ID NO: 976261 - DNA, 15 bp, Homo sapiens
ggtggtctaggggtt

SEQ ID NO: 976262 - DNA, 15 bp, Homo sapiens
gtggtctaggggttt

SEQ ID NO: 976263 - DNA, 15 bp, Homo sapiens
tggtctaggggtttg

SEQ ID NO: 976264 - DNA, 15 bp, Homo sapiens
ggtctaggggtttga

SEQ ID NO: 976265 - DNA, 15 bp, Homo sapiens
gtctaggggtttgag

SEQ ID NO: 976266 - DNA, 15 bp, Homo sapiens
tctaggggtttgagg

SEQ ID NO: 976267 - DNA, 15 bp, Homo sapiens
ctaggggtttgaggt

SEQ ID NO: 976268 - DNA, 15 bp, Homo sapiens
taggggtttgaggtt

SEQ ID NO: 976269 - DNA, 15 bp, Homo sapiens
aggggtttgaggttc

SEQ ID NO: 976270 - DNA, 15 bp, Homo sapiens
ggggtttgaggttct

SEQ ID NO: 976271 - DNA, 15 bp, Homo sapiens
gggtttgaggttcta

SEQ ID NO: 976272 - DNA, 15 bp, Homo sapiens
ggtttgaggttctaa

SEQ ID NO: 976273 - DNA, 15 bp, Homo sapiens
gtttgaggttctaag

SEQ ID NO: 976274 - DNA, 15 bp, Homo sapiens
tttgaggttctaagt

SEQ ID NO: 976275 - DNA, 15 bp, Homo sapiens
ttgaggttctaagtg

SEQ ID NO: 976276 - DNA, 15 bp, Homo sapiens
tgaggttctaagtgt

SEQ ID NO: 976277 - DNA, 15 bp, Homo sapiens
gaggttctaagtgtg

SEQ ID NO: 976278 - DNA, 15 bp, Homo sapiens
aggttctaagtgtga

SEQ ID NO: 976279 - DNA, 15 bp, Homo sapiens
ggttctaagtgtgat

SEQ ID NO: 976280 - DNA, 15 bp, Homo sapiens
gttctaagtgtgatc

SEQ ID NO: 976281 - DNA, 15 bp, Homo sapiens
ttctaagtgtgatct

SEQ ID NO: 976282 - DNA, 15 bp, Homo sapiens
tctaagtgtgatcta

SEQ ID NO: 976283 - DNA, 15 bp, Homo sapiens
ctaagtgtgatctat

SEQ ID NO: 976284 - DNA, 15 bp, Homo sapiens
taagtgtgatctatt

SEQ ID NO: 976285 - DNA, 15 bp, Homo sapiens
aagtgtgatctattt

SEQ ID NO: 976286 - DNA, 15 bp, Homo sapiens
agtgtgatctatttc

SEQ ID NO: 976287 - DNA, 15 bp, Homo sapiens
gtgtgatctatttcg

SEQ ID NO: 976288 - DNA, 15 bp, Homo sapiens
tgtgatctatttcgg

SEQ ID NO: 976289 - DNA, 15 bp, Homo sapiens
gtgatctatttcggt

SEQ ID NO: 976290 - DNA, 15 bp, Homo sapiens
tgatctatttcggta

SEQ ID NO: 976291 - DNA, 15 bp, Homo sapiens
gatctatttcggtaa

SEQ ID NO: 976292 - DNA, 15 bp, Homo sapiens
atctatttcggtaat

SEQ ID NO: 976293 - DNA, 15 bp, Homo sapiens
tctatttcggtaata

SEQ ID NO: 976294 - DNA, 15 bp, Homo sapiens
ctatttcggtaatag

SEQ ID NO: 976295 - DNA, 15 bp, Homo sapiens
tatttcggtaataga

SEQ ID NO: 976296 - DNA, 15 bp, Homo sapiens
atttcggtaatagaa

SEQ ID NO: 976297 - DNA, 15 bp, Homo sapiens
tttcggtaatagaaa

SEQ ID NO: 976298 - DNA, 15 bp, Homo sapiens
ttcggtaatagaaaa

SEQ ID NO: 976299 - DNA, 15 bp, Homo sapiens
tcggtaatagaaaac

SEQ ID NO: 976300 - DNA, 15 bp, Homo sapiens
cggtaatagaaaacg

SEQ ID NO: 976301 - DNA, 15 bp, Homo sapiens
ggtaatagaaaacga

SEQ ID NO: 976302 - DNA, 15 bp, Homo sapiens
gtaatagaaaacgaa

SEQ ID NO: 976303 - DNA, 15 bp, Homo sapiens
taatagaaaacgaag

SEQ ID NO: 976304 - DNA, 15 bp, Homo sapiens
aatagaaaacgaagg

SEQ ID NO: 976305 - DNA, 15 bp, Homo sapiens
atagaaaacgaaggt

SEQ ID NO: 976306 - DNA, 15 bp, Homo sapiens
tagaaaacgaaggta

SEQ ID NO: 976307 - DNA, 15 bp, Homo sapiens
agaaaacgaaggtag

SEQ ID NO: 976308 - DNA, 15 bp, Homo sapiens
gaaaacgaaggtagc

SEQ ID NO: 976309 - DNA, 15 bp, Homo sapiens
aaaacgaaggtagcc

SEQ ID NO: 976310 - DNA, 15 bp, Homo sapiens
aaacgaaggtagcct

SEQ ID NO: 976311 - DNA, 15 bp, Homo sapiens
aacgaaggtagcctg

SEQ ID NO: 976312 - DNA, 15 bp, Homo sapiens
acgaaggtagcctgg

SEQ ID NO: 976313 - DNA, 15 bp, Homo sapiens
cgaaggtagcctggg

SEQ ID NO: 976314 - DNA, 15 bp, Homo sapiens
gaaggtagcctgggc

SEQ ID NO: 976315 - DNA, 15 bp, Homo sapiens
aaggtagcctgggca

SEQ ID NO: 976316 - DNA, 15 bp, Homo sapiens
aggtagcctgggcaa

SEQ ID NO: 976317 - DNA, 15 bp, Homo sapiens
ggtagcctgggcaac

SEQ ID NO: 976318 - DNA, 15 bp, Homo sapiens
gtagcctgggcaaca

SEQ ID NO: 976319 - DNA, 15 bp, Homo sapiens
tagcctgggcaacat

SEQ ID NO: 976320 - DNA, 15 bp, Homo sapiens
agcctgggcaacatg

SEQ ID NO: 976321 - DNA, 15 bp, Homo sapiens
gcctgggcaacatgg

SEQ ID NO: 976322 - DNA, 15 bp, Homo sapiens
cctgggcaacatggt

SEQ ID NO: 976323 - DNA, 15 bp, Homo sapiens
ctgggcaacatggtg

SEQ ID NO: 976324 - DNA, 15 bp, Homo sapiens
tgggcaacatggtga

SEQ ID NO: 976325 - DNA, 15 bp, Homo sapiens
gggcaacatggtgaa

SEQ ID NO: 976326 - DNA, 15 bp, Homo sapiens
ggcaacatggtgaaa

SEQ ID NO: 976327 - DNA, 15 bp, Homo sapiens
gcaacatggtgaaac

SEQ ID NO: 976328 - DNA, 15 bp, Homo sapiens
acatggtgaaaccct

SEQ ID NO: 976329 - DNA, 15 bp, Homo sapiens
catggtgaaacccta

SEQ ID NO: 976330 - DNA, 15 bp, Homo sapiens
atggtgaaaccctat

SEQ ID NO: 976331 - DNA, 15 bp, Homo sapiens
tggtgaaaccctatc

SEQ ID NO: 976332 - DNA, 15 bp, Homo sapiens
ggtgaaaccctatct

SEQ ID NO: 976333 - DNA, 15 bp, Homo sapiens
gtgaaaccctatctc

SEQ ID NO: 976334 - DNA, 15 bp, Homo sapiens
tgaaaccctatctct

SEQ ID NO: 976335 - DNA, 15 bp, Homo sapiens
gaaaccctatctcta

SEQ ID NO: 976336 - DNA, 15 bp, Homo sapiens
aaaccctatctctac

SEQ ID NO: 976337 - DNA, 15 bp, Homo sapiens
aaccctatctctaca

SEQ ID NO: 976338 - DNA, 15 bp, Homo sapiens
accctatctctacaa

SEQ ID NO: 976339 - DNA, 15 bp, Homo sapiens
ccctatctctacaaa

SEQ ID NO: 976340 - DNA, 15 bp, Homo sapiens
cctatctctacaaaa

SEQ ID NO: 976341 - DNA, 15 bp, Homo sapiens
ctatctctacaaaaa

SEQ ID NO: 976342 - DNA, 15 bp, Homo sapiens
tatctctacaaaaaa

SEQ ID NO: 976343 - DNA, 15 bp, Homo sapiens
atctctacaaaaaat

SEQ ID NO: 976344 - DNA, 15 bp, Homo sapiens
tctctacaaaaaata

SEQ ID NO: 976345 - DNA, 15 bp, Homo sapiens
ctctacaaaaaatac

SEQ ID NO: 976346 - DNA, 15 bp, Homo sapiens
tctacaaaaaatacc

SEQ ID NO: 976347 - DNA, 15 bp, Homo sapiens
ctacaaaaaatacca

SEQ ID NO: 976348 - DNA, 15 bp, Homo sapiens
tacaaaaaataccaa

SEQ ID NO: 976349 - DNA, 15 bp, Homo sapiens
acaaaaaataccaaa

SEQ ID NO: 976350 - DNA, 15 bp, Homo sapiens
caaaaaataccaaaa

SEQ ID NO: 976351 - DNA, 15 bp, Homo sapiens
aaaaaataccaaaaa

SEQ ID NO: 976352 - DNA, 15 bp, Homo sapiens
aaaaataccaaaaac

SEQ ID NO: 976353 - DNA, 15 bp, Homo sapiens
aaaataccaaaaaca

SEQ ID NO: 976354 - DNA, 15 bp, Homo sapiens
aaataccaaaaacat

SEQ ID NO: 976355 - DNA, 15 bp, Homo sapiens
aataccaaaaacatt

SEQ ID NO: 976356 - DNA, 15 bp, Homo sapiens
ataccaaaaacatta

SEQ ID NO: 976357 - DNA, 15 bp, Homo sapiens
taccaaaaacattag

SEQ ID NO: 976358 - DNA, 15 bp, Homo sapiens
accaaaaacattagg

SEQ ID NO: 976359 - DNA, 15 bp, Homo sapiens
ccaaaaacattaggc

SEQ ID NO: 976360 - DNA, 15 bp, Homo sapiens
caaaaacattaggcc

SEQ ID NO: 976361 - DNA, 15 bp, Homo sapiens
aaaaacattaggcca

SEQ ID NO: 976362 - DNA, 15 bp, Homo sapiens
aaaacattaggccag

SEQ ID NO: 976363 - DNA, 15 bp, Homo sapiens
aaacattaggccagg

SEQ ID NO: 976364 - DNA, 15 bp, Homo sapiens
aacattaggccaggc

SEQ ID NO: 976365 - DNA, 15 bp, Homo sapiens
acattaggccaggca

SEQ ID NO: 976366 - DNA, 15 bp, Homo sapiens
cattaggccaggcat

SEQ ID NO: 976367 - DNA, 15 bp, Homo sapiens
attaggccaggcatg

SEQ ID NO: 976368 - DNA, 15 bp, Homo sapiens
ttaggccaggcatgg

SEQ ID NO: 976369 - DNA, 15 bp, Homo sapiens
taggccaggcatggg

SEQ ID NO: 976370 - DNA, 15 bp, Homo sapiens
aggccaggcatgggg

SEQ ID NO: 976371 - DNA, 15 bp, Homo sapiens
ggccaggcatggggg

SEQ ID NO: 976372 - DNA, 15 bp, Homo sapiens
gccaggcatgggggc

SEQ ID NO: 976373 - DNA, 15 bp, Homo sapiens
ccaggcatgggggcg

SEQ ID NO: 976374 - DNA, 15 bp, Homo sapiens
caggcatgggggcgt

SEQ ID NO: 976375 - DNA, 15 bp, Homo sapiens
aggcatgggggcgtg

SEQ ID NO: 976376 - DNA, 15 bp, Homo sapiens
ggcatgggggcgtgt

SEQ ID NO: 976377 - DNA, 15 bp, Homo sapiens
gcatgggggcgtgtg

SEQ ID NO: 976378 - DNA, 15 bp, Homo sapiens
catgggggcgtgtgc

SEQ ID NO: 976379 - DNA, 15 bp, Homo sapiens
atgggggcgtgtgcc

SEQ ID NO: 976380 - DNA, 15 bp, Homo sapiens
tgggggcgtgtgcct

SEQ ID NO: 976381 - DNA, 15 bp, Homo sapiens
gggggcgtgtgcctg

SEQ ID NO: 976382 - DNA, 15 bp, Homo sapiens
ggggcgtgtgcctgt

SEQ ID NO: 976383 - DNA, 15 bp, Homo sapiens
gggcgtgtgcctgta

SEQ ID NO: 976384 - DNA, 15 bp, Homo sapiens
ggcgtgtgcctgtag

SEQ ID NO: 976385 - DNA, 15 bp, Homo sapiens
gcgtgtgcctgtagt

SEQ ID NO: 976386 - DNA, 15 bp, Homo sapiens
cgtgtgcctgtagtc

SEQ ID NO: 976387 - DNA, 15 bp, Homo sapiens
gtgtgcctgtagtcc

SEQ ID NO: 976388 - DNA, 15 bp, Homo sapiens
tgtgcctgtagtccc

SEQ ID NO: 976389 - DNA, 15 bp, Homo sapiens
gtgcctgtagtccca

SEQ ID NO: 976390 - DNA, 15 bp, Homo sapiens
tgcctgtagtcccag

SEQ ID NO: 976391 - DNA, 15 bp, Homo sapiens
gcctgtagtcccagg

SEQ ID NO: 976392 - DNA, 15 bp, Homo sapiens
cctgtagtcccaggt

SEQ ID NO: 976393 - DNA, 15 bp, Homo sapiens
ctgtagtcccaggta

SEQ ID NO: 976394 - DNA, 15 bp, Homo sapiens
tgtagtcccaggtac

SEQ ID NO: 976395 - DNA, 15 bp, Homo sapiens
gtagtcccaggtact

SEQ ID NO: 976396 - DNA, 15 bp, Homo sapiens
tagtcccaggtactc

SEQ ID NO: 976397 - DNA, 15 bp, Homo sapiens
agtcccaggtactcc

SEQ ID NO: 976398 - DNA, 15 bp, Homo sapiens
gtcccaggtactccg

SEQ ID NO: 976399 - DNA, 15 bp, Homo sapiens
tcccaggtactccgt

SEQ ID NO: 976400 - DNA, 15 bp, Homo sapiens
cccaggtactccgta

SEQ ID NO: 976401 - DNA, 15 bp, Homo sapiens
ccaggtactccgtag

SEQ ID NO: 976402 - DNA, 15 bp, Homo sapiens
caggtactccgtagg

SEQ ID NO: 976403 - DNA, 15 bp, Homo sapiens
aggtactccgtaggc

SEQ ID NO: 976404 - DNA, 15 bp, Homo sapiens
ggtactccgtaggct

SEQ ID NO: 976405 - DNA, 15 bp, Homo sapiens
gtactccgtaggctg

SEQ ID NO: 976406 - DNA, 15 bp, Homo sapiens
tactccgtaggctga

SEQ ID NO: 976407 - DNA, 15 bp, Homo sapiens
actccgtaggctgat

SEQ ID NO: 976408 - DNA, 15 bp, Homo sapiens
ctccgtaggctgatg

SEQ ID NO: 976409 - DNA, 15 bp, Homo sapiens
tccgtaggctgatgc

SEQ ID NO: 976410 - DNA, 15 bp, Homo sapiens
ccgtaggctgatgca

SEQ ID NO: 976411 - DNA, 15 bp, Homo sapiens
cgtaggctgatgcag

SEQ ID NO: 976412 - DNA, 15 bp, Homo sapiens
gtaggctgatgcagg

SEQ ID NO: 976413 - DNA, 15 bp, Homo sapiens
taggctgatgcagga

SEQ ID NO: 976414 - DNA, 15 bp, Homo sapiens
aggctgatgcaggag

SEQ ID NO: 976415 - DNA, 15 bp, Homo sapiens
ggctgatgcaggagg

SEQ ID NO: 976416 - DNA, 15 bp, Homo sapiens
gctgatgcaggagga

SEQ ID NO: 976417 - DNA, 15 bp, Homo sapiens
ctgatgcaggaggat

SEQ ID NO: 976418 - DNA, 15 bp, Homo sapiens
tgatgcaggaggatc

SEQ ID NO: 976419 - DNA, 15 bp, Homo sapiens
gatgcaggaggatca

SEQ ID NO: 976420 - DNA, 15 bp, Homo sapiens
atgcaggaggatcat

SEQ ID NO: 976421 - DNA, 15 bp, Homo sapiens
tgcaggaggatcatt

SEQ ID NO: 976422 - DNA, 15 bp, Homo sapiens
gcaggaggatcatta

SEQ ID NO: 976423 - DNA, 15 bp, Homo sapiens
caggaggatcattag

SEQ ID NO: 976424 - DNA, 15 bp, Homo sapiens
aggaggatcattaga

SEQ ID NO: 976425 - DNA, 15 bp, Homo sapiens
ggaggatcattagag

SEQ ID NO: 976426 - DNA, 15 bp, Homo sapiens
gaggatcattagagc

SEQ ID NO: 976427 - DNA, 15 bp, Homo sapiens
aggatcattagagcc

SEQ ID NO: 976428 - DNA, 15 bp, Homo sapiens
ggatcattagagccc

SEQ ID NO: 976429 - DNA, 15 bp, Homo sapiens
gatcattagagccca

SEQ ID NO: 976430 - DNA, 15 bp, Homo sapiens
atcattagagcccag

SEQ ID NO: 976431 - DNA, 15 bp, Homo sapiens
tcattagagcccagg

SEQ ID NO: 976432 - DNA, 15 bp, Homo sapiens
cattagagcccagga

SEQ ID NO: 976433 - DNA, 15 bp, Homo sapiens
attagagcccaggag

SEQ ID NO: 976434 - DNA, 15 bp, Homo sapiens
ttagagcccaggaga

SEQ ID NO: 976435 - DNA, 15 bp, Homo sapiens
tagagcccaggagat

SEQ ID NO: 976436 - DNA, 15 bp, Homo sapiens
agagcccaggagatt

SEQ ID NO: 976437 - DNA, 15 bp, Homo sapiens
gagcccaggagatta

SEQ ID NO: 976438 - DNA, 15 bp, Homo sapiens
agcccaggagattaa

SEQ ID NO: 976439 - DNA, 15 bp, Homo sapiens
gcccaggagattaag

SEQ ID NO: 976440 - DNA, 15 bp, Homo sapiens
cccaggagattaagg

SEQ ID NO: 976441 - DNA, 15 bp, Homo sapiens
ccaggagattaagga

SEQ ID NO: 976442 - DNA, 15 bp, Homo sapiens
caggagattaaggat

SEQ ID NO: 976443 - DNA, 15 bp, Homo sapiens
aggagattaaggata

SEQ ID NO: 976444 - DNA, 15 bp, Homo sapiens
ggagattaaggatac

SEQ ID NO: 976445 - DNA, 15 bp, Homo sapiens
gagattaaggataca

SEQ ID NO: 976446 - DNA, 15 bp, Homo sapiens
agattaaggatacag

SEQ ID NO: 976447 - DNA, 15 bp, Homo sapiens
gattaaggatacagt

SEQ ID NO: 976448 - DNA, 15 bp, Homo sapiens
attaaggatacagtg

SEQ ID NO: 976449 - DNA, 15 bp, Homo sapiens
ttaaggatacagtga

SEQ ID NO: 976450 - DNA, 15 bp, Homo sapiens
taaggatacagtgag

SEQ ID NO: 976451 - DNA, 15 bp, Homo sapiens
aaggatacagtgagc

SEQ ID NO: 976452 - DNA, 15 bp, Homo sapiens
aggatacagtgagct

SEQ ID NO: 976453 - DNA, 15 bp, Homo sapiens
ggatacagtgagctg

SEQ ID NO: 976454 - DNA, 15 bp, Homo sapiens
gatacagtgagctgc

SEQ ID NO: 976455 - DNA, 15 bp, Homo sapiens
atacagtgagctgca

SEQ ID NO: 976456 - DNA, 15 bp, Homo sapiens
tacagtgagctgcac

SEQ ID NO: 976457 - DNA, 15 bp, Homo sapiens
acagtgagctgcacc

SEQ ID NO: 976458 - DNA, 15 bp, Homo sapiens
cagtgagctgcacca

SEQ ID NO: 976459 - DNA, 15 bp, Homo sapiens
agtgagctgcaccac

SEQ ID NO: 976460 - DNA, 15 bp, Homo sapiens
gtgagctgcaccact

SEQ ID NO: 976461 - DNA, 15 bp, Homo sapiens
tgagctgcaccactg

SEQ ID NO: 976462 - DNA, 15 bp, Homo sapiens
gagctgcaccactgc

SEQ ID NO: 976463 - DNA, 15 bp, Homo sapiens
agctgcaccactgca

SEQ ID NO: 976464 - DNA, 15 bp, Homo sapiens
gctgcaccactgcac

SEQ ID NO: 976465 - DNA, 15 bp, Homo sapiens
ctgcaccactgcact

SEQ ID NO: 976466 - DNA, 15 bp, Homo sapiens
tgcaccactgcactc

SEQ ID NO: 976467 - DNA, 15 bp, Homo sapiens
gcaccactgcactcc

SEQ ID NO: 976468 - DNA, 15 bp, Homo sapiens
caccactgcactcca

SEQ ID NO: 976469 - DNA, 15 bp, Homo sapiens
accactgcactccag

SEQ ID NO: 976470 - DNA, 15 bp, Homo sapiens
tccagcctgggcaaa

SEQ ID NO: 976471 - DNA, 15 bp, Homo sapiens
ccagcctgggcaaaa

SEQ ID NO: 976472 - DNA, 15 bp, Homo sapiens
cagcctgggcaaaag

SEQ ID NO: 976473 - DNA, 15 bp, Homo sapiens
agcctgggcaaaaga

SEQ ID NO: 976474 - DNA, 15 bp, Homo sapiens
gcctgggcaaaagag

SEQ ID NO: 976475 - DNA, 15 bp, Homo sapiens
cctgggcaaaagagt

SEQ ID NO: 976476 - DNA, 15 bp, Homo sapiens
ctgggcaaaagagta

SEQ ID NO: 976477 - DNA, 15 bp, Homo sapiens
tgggcaaaagagtaa

SEQ ID NO: 976478 - DNA, 15 bp, Homo sapiens
gggcaaaagagtaag

SEQ ID NO: 976479 - DNA, 15 bp, Homo sapiens
ggcaaaagagtaaga

SEQ ID NO: 976480 - DNA, 15 bp, Homo sapiens
gcaaaagagtaagac

SEQ ID NO: 976481 - DNA, 15 bp, Homo sapiens
caaaagagtaagacc

SEQ ID NO: 976482 - DNA, 15 bp, Homo sapiens
aaaagagtaagaccc

SEQ ID NO: 976483 - DNA, 15 bp, Homo sapiens
aaagagtaagaccct

SEQ ID NO: 976484 - DNA, 15 bp, Homo sapiens
aagagtaagacccta

SEQ ID NO: 976485 - DNA, 15 bp, Homo sapiens
agagtaagaccctat

SEQ ID NO: 976486 - DNA, 15 bp, Homo sapiens
gagtaagaccctatc

SEQ ID NO: 976487 - DNA, 15 bp, Homo sapiens
agtaagaccctatct

SEQ ID NO: 976488 - DNA, 15 bp, Homo sapiens
gtaagaccctatctc

SEQ ID NO: 976489 - DNA, 15 bp, Homo sapiens
taagaccctatctca

SEQ ID NO: 976490 - DNA, 15 bp, Homo sapiens
aagaccctatctcaa

SEQ ID NO: 976491 - DNA, 15 bp, Homo sapiens
agaccctatctcaag

SEQ ID NO: 976492 - DNA, 15 bp, Homo sapiens
gaccctatctcaaga

SEQ ID NO: 976493 - DNA, 15 bp, Homo sapiens
accctatctcaagaa

SEQ ID NO: 976494 - DNA, 15 bp, Homo sapiens
ccctatctcaagaaa

SEQ ID NO: 976495 - DNA, 15 bp, Homo sapiens
cctatctcaagaaaa

SEQ ID NO: 976496 - DNA, 15 bp, Homo sapiens
ctatctcaagaaaaa

SEQ ID NO: 976497 - DNA, 15 bp, Homo sapiens
tatctcaagaaaaaa

SEQ ID NO: 976498 - DNA, 15 bp, Homo sapiens
atctcaagaaaaaaa

SEQ ID NO: 976499 - DNA, 15 bp, Homo sapiens
tctcaagaaaaaaaa

SEQ ID NO: 976500 - DNA, 15 bp, Homo sapiens
ctcaagaaaaaaaaa

SEQ ID NO: 976501 - DNA, 15 bp, Homo sapiens
tcaagaaaaaaaaaa

SEQ ID NO: 976502 - DNA, 15 bp, Homo sapiens
caagaaaaaaaaaaa

SEQ ID NO: 976503 - DNA, 15 bp, Homo sapiens
aagaaaaaaaaaaaa

SEQ ID NO: 976504 - DNA, 15 bp, Homo sapiens
agaaaaaaaaaaaaa

SEQ ID NO: 976505 - DNA, 15 bp, Homo sapiens
gaaaaaaaaaaaaaa

SEQ ID NO: 976506 - DNA, 15 bp, Homo sapiens
aaaaaaaaaaaaagg

SEQ ID NO: 976507 - DNA, 15 bp, Homo sapiens
aaaaaaaaaaaagga

SEQ ID NO: 976508 - DNA, 15 bp, Homo sapiens
aaaaaaaaaaaggaa

SEQ ID NO: 976509 - DNA, 15 bp, Homo sapiens
aaaaaaaaaaggaac

SEQ ID NO: 976510 - DNA, 15 bp, Homo sapiens
aaaaaaaaaggaacg

SEQ ID NO: 976511 - DNA, 15 bp, Homo sapiens
aaaaaaaaggaacga

SEQ ID NO: 976512 - DNA, 15 bp, Homo sapiens
aaaaaaaggaacgag

SEQ ID NO: 976513 - DNA, 15 bp, Homo sapiens
aaaaaaggaacgaga

SEQ ID NO: 976514 - DNA, 15 bp, Homo sapiens
aaaaaggaacgagat

SEQ ID NO: 976515 - DNA, 15 bp, Homo sapiens
aaaaggaacgagatc

SEQ ID NO: 976516 - DNA, 15 bp, Homo sapiens
aaaggaacgagatct

SEQ ID NO: 976517 - DNA, 15 bp, Homo sapiens
aaggaacgagatcta

SEQ ID NO: 976518 - DNA, 15 bp, Homo sapiens
aggaacgagatctag

SEQ ID NO: 976519 - DNA, 15 bp, Homo sapiens
ggaacgagatctagg

SEQ ID NO: 976520 - DNA, 15 bp, Homo sapiens
gaacgagatctaggc

SEQ ID NO: 976521 - DNA, 15 bp, Homo sapiens
aacgagatctaggct

SEQ ID NO: 976522 - DNA, 15 bp, Homo sapiens
acgagatctaggctc

SEQ ID NO: 976523 - DNA, 15 bp, Homo sapiens
cgagatctaggctca

SEQ ID NO: 976524 - DNA, 15 bp, Homo sapiens
gagatctaggctcac

SEQ ID NO: 976525 - DNA, 15 bp, Homo sapiens
agatctaggctcaca

SEQ ID NO: 976526 - DNA, 15 bp, Homo sapiens
gatctaggctcacag

SEQ ID NO: 976527 - DNA, 15 bp, Homo sapiens
atctaggctcacaga

SEQ ID NO: 976528 - DNA, 15 bp, Homo sapiens
tctaggctcacagac

SEQ ID NO: 976529 - DNA, 15 bp, Homo sapiens
ctaggctcacagaca

SEQ ID NO: 976530 - DNA, 15 bp, Homo sapiens
taggctcacagacaa

SEQ ID NO: 976531 - DNA, 15 bp, Homo sapiens
aggctcacagacaat

SEQ ID NO: 976532 - DNA, 15 bp, Homo sapiens
ggctcacagacaatc

SEQ ID NO: 976533 - DNA, 15 bp, Homo sapiens
gctcacagacaatct

SEQ ID NO: 976534 - DNA, 15 bp, Homo sapiens
ctcacagacaatctt

SEQ ID NO: 976535 - DNA, 15 bp, Homo sapiens
tcacagacaatcttc

SEQ ID NO: 976536 - DNA, 15 bp, Homo sapiens
cacagacaatcttcc

SEQ ID NO: 976537 - DNA, 15 bp, Homo sapiens
acagacaatcttcca

SEQ ID NO: 976538 - DNA, 15 bp, Homo sapiens
cagacaatcttccag

SEQ ID NO: 976539 - DNA, 15 bp, Homo sapiens
agacaatcttccaga

SEQ ID NO: 976540 - DNA, 15 bp, Homo sapiens
gacaatcttccagat

SEQ ID NO: 976541 - DNA, 15 bp, Homo sapiens
acaatcttccagata

SEQ ID NO: 976542 - DNA, 15 bp, Homo sapiens
caatcttccagatat

SEQ ID NO: 976543 - DNA, 15 bp, Homo sapiens
aatcttccagatatc

SEQ ID NO: 976544 - DNA, 15 bp, Homo sapiens
atcttccagatatca

SEQ ID NO: 976545 - DNA, 15 bp, Homo sapiens
tcttccagatatcag

SEQ ID NO: 976546 - DNA, 15 bp, Homo sapiens
cttccagatatcagc

SEQ ID NO: 976547 - DNA, 15 bp, Homo sapiens
ttccagatatcagcg

SEQ ID NO: 976548 - DNA, 15 bp, Homo sapiens
tccagatatcagcgg

SEQ ID NO: 976549 - DNA, 15 bp, Homo sapiens
ccagatatcagcggg

SEQ ID NO: 976550 - DNA, 15 bp, Homo sapiens
cagatatcagcggga

SEQ ID NO: 976551 - DNA, 15 bp, Homo sapiens
agatatcagcgggaa

SEQ ID NO: 976552 - DNA, 15 bp, Homo sapiens
gatatcagcgggaaa

SEQ ID NO: 976553 - DNA, 15 bp, Homo sapiens
atatcagcgggaaat

SEQ ID NO: 976554 - DNA, 15 bp, Homo sapiens
tatcagcgggaaatg

SEQ ID NO: 976555 - DNA, 15 bp, Homo sapiens
atcagcgggaaatga

SEQ ID NO: 976556 - DNA, 15 bp, Homo sapiens
tcagcgggaaatgat

SEQ ID NO: 976557 - DNA, 15 bp, Homo sapiens
cagcgggaaatgatg

SEQ ID NO: 976558 - DNA, 15 bp, Homo sapiens
agcgggaaatgatga

SEQ ID NO: 976559 - DNA, 15 bp, Homo sapiens
gcgggaaatgatgag

SEQ ID NO: 976560 - DNA, 15 bp, Homo sapiens
cgggaaatgatgagt

SEQ ID NO: 976561 - DNA, 15 bp, Homo sapiens
gggaaatgatgagtg

SEQ ID NO: 976562 - DNA, 15 bp, Homo sapiens
ggaaatgatgagtgt

SEQ ID NO: 976563 - DNA, 15 bp, Homo sapiens
gaaatgatgagtgtg

SEQ ID NO: 976564 - DNA, 15 bp, Homo sapiens
aaatgatgagtgtgt

SEQ ID NO: 976565 - DNA, 15 bp, Homo sapiens
aatgatgagtgtgtc

SEQ ID NO: 976566 - DNA, 15 bp, Homo sapiens
atgatgagtgtgtct

SEQ ID NO: 976567 - DNA, 15 bp, Homo sapiens
tgatgagtgtgtctg

SEQ ID NO: 976568 - DNA, 15 bp, Homo sapiens
gatgagtgtgtctgg

SEQ ID NO: 976569 - DNA, 15 bp, Homo sapiens
atgagtgtgtctggg

SEQ ID NO: 976570 - DNA, 15 bp, Homo sapiens
tgagtgtgtctgggg

SEQ ID NO: 976571 - DNA, 15 bp, Homo sapiens
gagtgtgtctggggg

SEQ ID NO: 976572 - DNA, 15 bp, Homo sapiens
agtgtgtctggggga

SEQ ID NO: 976573 - DNA, 15 bp, Homo sapiens
gtgtgtctgggggac

SEQ ID NO: 976574 - DNA, 15 bp, Homo sapiens
tgtgtctgggggaca

SEQ ID NO: 976575 - DNA, 15 bp, Homo sapiens
gtgtctgggggacat

SEQ ID NO: 976576 - DNA, 15 bp, Homo sapiens
tgtctgggggacatc

SEQ ID NO: 976577 - DNA, 15 bp, Homo sapiens
gtctgggggacatcc

SEQ ID NO: 976578 - DNA, 15 bp, Homo sapiens
tctgggggacatcca

SEQ ID NO: 976579 - DNA, 15 bp, Homo sapiens
ctgggggacatccaa

SEQ ID NO: 976580 - DNA, 15 bp, Homo sapiens
tgggggacatccaaa

SEQ ID NO: 976581 - DNA, 15 bp, Homo sapiens
gggggacatccaaaa

SEQ ID NO: 976582 - DNA, 15 bp, Homo sapiens
ggggacatccaaaat

SEQ ID NO: 976583 - DNA, 15 bp, Homo sapiens
gggacatccaaaatt

SEQ ID NO: 976584 - DNA, 15 bp, Homo sapiens
ggacatccaaaattt

SEQ ID NO: 976585 - DNA, 15 bp, Homo sapiens
gacatccaaaatttc

SEQ ID NO: 976586 - DNA, 15 bp, Homo sapiens
acatccaaaatttcg

SEQ ID NO: 976587 - DNA, 15 bp, Homo sapiens
catccaaaatttcgg

SEQ ID NO: 976588 - DNA, 15 bp, Homo sapiens
atccaaaatttcgga

SEQ ID NO: 976589 - DNA, 15 bp, Homo sapiens
tccaaaatttcggaa

SEQ ID NO: 976590 - DNA, 15 bp, Homo sapiens
ccaaaatttcggaat

SEQ ID NO: 976591 - DNA, 15 bp, Homo sapiens
caaaatttcggaatt

SEQ ID NO: 976592 - DNA, 15 bp, Homo sapiens
aaaatttcggaatta

SEQ ID NO: 976593 - DNA, 15 bp, Homo sapiens
aaatttcggaattaa

SEQ ID NO: 976594 - DNA, 15 bp, Homo sapiens
aatttcggaattaat

SEQ ID NO: 976595 - DNA, 15 bp, Homo sapiens
atttcggaattaatc

SEQ ID NO: 976596 - DNA, 15 bp, Homo sapiens
tttcggaattaatct

SEQ ID NO: 976597 - DNA, 15 bp, Homo sapiens
ttcggaattaatctt

SEQ ID NO: 976598 - DNA, 15 bp, Homo sapiens
tcggaattaatcttg

SEQ ID NO: 976599 - DNA, 15 bp, Homo sapiens
cggaattaatcttgt

SEQ ID NO: 976600 - DNA, 15 bp, Homo sapiens
ggaattaatcttgtt

SEQ ID NO: 976601 - DNA, 15 bp, Homo sapiens
gaattaatcttgttt

SEQ ID NO: 976602 - DNA, 15 bp, Homo sapiens
aattaatcttgtttt

SEQ ID NO: 976603 - DNA, 15 bp, Homo sapiens
attaatcttgttttg

SEQ ID NO: 976604 - DNA, 15 bp, Homo sapiens
ttaatcttgttttgg

SEQ ID NO: 976605 - DNA, 15 bp, Homo sapiens
taatcttgttttggg

SEQ ID NO: 976606 - DNA, 15 bp, Homo sapiens
aatcttgttttggga

SEQ ID NO: 976607 - DNA, 15 bp, Homo sapiens
atcttgttttgggag

SEQ ID NO: 976608 - DNA, 15 bp, Homo sapiens
tcttgttttgggaga

SEQ ID NO: 976609 - DNA, 15 bp, Homo sapiens
cttgttttgggagac

SEQ ID NO: 976610 - DNA, 15 bp, Homo sapiens
ttgttttgggagaca

SEQ ID NO: 976611 - DNA, 15 bp, Homo sapiens
tgttttgggagacag

SEQ ID NO: 976612 - DNA, 15 bp, Homo sapiens
gttttgggagacagg

SEQ ID NO: 976613 - DNA, 15 bp, Homo sapiens
ttttgggagacaggg

SEQ ID NO: 976614 - DNA, 15 bp, Homo sapiens
tttgggagacaggga

SEQ ID NO: 976615 - DNA, 15 bp, Homo sapiens
ttgggagacagggaa

SEQ ID NO: 976616 - DNA, 15 bp, Homo sapiens
tgggagacagggaag

SEQ ID NO: 976617 - DNA, 15 bp, Homo sapiens
gggagacagggaagg

SEQ ID NO: 976618 - DNA, 15 bp, Homo sapiens
ggagacagggaagga

SEQ ID NO: 976619 - DNA, 15 bp, Homo sapiens
gagacagggaaggag

SEQ ID NO: 976620 - DNA, 15 bp, Homo sapiens
agacagggaaggaga

SEQ ID NO: 976621 - DNA, 15 bp, Homo sapiens
gacagggaaggagag

SEQ ID NO: 976622 - DNA, 15 bp, Homo sapiens
acagggaaggagagg

SEQ ID NO: 976623 - DNA, 15 bp, Homo sapiens
cagggaaggagaggg

SEQ ID NO: 976624 - DNA, 15 bp, Homo sapiens
agggaaggagaggga

SEQ ID NO: 976625 - DNA, 15 bp, Homo sapiens
gggaaggagagggat

SEQ ID NO: 976626 - DNA, 15 bp, Homo sapiens
ggaaggagagggatg

SEQ ID NO: 976627 - DNA, 15 bp, Homo sapiens
gaaggagagggatgt

SEQ ID NO: 976628 - DNA, 15 bp, Homo sapiens
aaggagagggatgtt

SEQ ID NO: 976629 - DNA, 15 bp, Homo sapiens
aggagagggatgttc

SEQ ID NO: 976630 - DNA, 15 bp, Homo sapiens
ggagagggatgttct

SEQ ID NO: 976631 - DNA, 15 bp, Homo sapiens
gagagggatgttctg

SEQ ID NO: 976632 - DNA, 15 bp, Homo sapiens
agagggatgttctgg

SEQ ID NO: 976633 - DNA, 15 bp, Homo sapiens
gagggatgttctggg

SEQ ID NO: 976634 - DNA, 15 bp, Homo sapiens
agggatgttctgggg

SEQ ID NO: 976635 - DNA, 15 bp, Homo sapiens
gggatgttctggggg

SEQ ID NO: 976636 - DNA, 15 bp, Homo sapiens
ggatgttctggggga

SEQ ID NO: 976637 - DNA, 15 bp, Homo sapiens
gatgttctgggggaa

SEQ ID NO: 976638 - DNA, 15 bp, Homo sapiens
atgttctgggggaaa

SEQ ID NO: 976639 - DNA, 15 bp, Homo sapiens
tgttctgggggaaaa

SEQ ID NO: 976640 - DNA, 15 bp, Homo sapiens
gttctgggggaaaac

SEQ ID NO: 976641 - DNA, 15 bp, Homo sapiens
ttctgggggaaaact

SEQ ID NO: 976642 - DNA, 15 bp, Homo sapiens
tctgggggaaaacta

SEQ ID NO: 976643 - DNA, 15 bp, Homo sapiens
ctgggggaaaactaa

SEQ ID NO: 976644 - DNA, 15 bp, Homo sapiens
tgggggaaaactaag

SEQ ID NO: 976645 - DNA, 15 bp, Homo sapiens
gggggaaaactaagt

SEQ ID NO: 976646 - DNA, 15 bp, Homo sapiens
ggggaaaactaagtc

SEQ ID NO: 976647 - DNA, 15 bp, Homo sapiens
gggaaaactaagtca

SEQ ID NO: 976648 - DNA, 15 bp, Homo sapiens
ggaaaactaagtcaa

SEQ ID NO: 976649 - DNA, 15 bp, Homo sapiens
gaaaactaagtcaag

SEQ ID NO: 976650 - DNA, 15 bp, Homo sapiens
aaaactaagtcaagg

SEQ ID NO: 976651 - DNA, 15 bp, Homo sapiens
aaactaagtcaaggc

SEQ ID NO: 976652 - DNA, 15 bp, Homo sapiens
aactaagtcaaggct

SEQ ID NO: 976653 - DNA, 15 bp, Homo sapiens
actaagtcaaggctg

SEQ ID NO: 976654 - DNA, 15 bp, Homo sapiens
ctaagtcaaggctgg

SEQ ID NO: 976655 - DNA, 15 bp, Homo sapiens
taagtcaaggctggc

SEQ ID NO: 976656 - DNA, 15 bp, Homo sapiens
aagtcaaggctggca

SEQ ID NO: 976657 - DNA, 15 bp, Homo sapiens
agtcaaggctggcat

SEQ ID NO: 976658 - DNA, 15 bp, Homo sapiens
gtcaaggctggcatc

SEQ ID NO: 976659 - DNA, 15 bp, Homo sapiens
tcaaggctggcatcc

SEQ ID NO: 976660 - DNA, 15 bp, Homo sapiens
caaggctggcatcct

SEQ ID NO: 976661 - DNA, 15 bp, Homo sapiens
aaggctggcatcctc

SEQ ID NO: 976662 - DNA, 15 bp, Homo sapiens
aggctggcatcctct

SEQ ID NO: 976663 - DNA, 15 bp, Homo sapiens
ggctggcatcctctc

SEQ ID NO: 976664 - DNA, 15 bp, Homo sapiens
gctggcatcctctcc

SEQ ID NO: 976665 - DNA, 15 bp, Homo sapiens
gcaggacatgggccc

SEQ ID NO: 976666 - DNA, 15 bp, Homo sapiens
caggacatgggcccg

SEQ ID NO: 976667 - DNA, 15 bp, Homo sapiens
aggacatgggcccgg

SEQ ID NO: 976668 - DNA, 15 bp, Homo sapiens
ggacatgggcccggg

SEQ ID NO: 976669 - DNA, 15 bp, Homo sapiens
gacatgggcccgggt

SEQ ID NO: 976670 - DNA, 15 bp, Homo sapiens
acatgggcccgggtc

SEQ ID NO: 976671 - DNA, 15 bp, Homo sapiens
catgggcccgggtcc

SEQ ID NO: 976672 - DNA, 15 bp, Homo sapiens
atgggcccgggtcct

SEQ ID NO: 976673 - DNA, 15 bp, Homo sapiens
tgggcccgggtcctc

SEQ ID NO: 976674 - DNA, 15 bp, Homo sapiens
gggcccgggtcctcc

SEQ ID NO: 976675 - DNA, 15 bp, Homo sapiens
ggcccgggtcctcct

SEQ ID NO: 976676 - DNA, 15 bp, Homo sapiens
gcccgggtcctcctg

SEQ ID NO: 976677 - DNA, 15 bp, Homo sapiens
cccgggtcctcctga

SEQ ID NO: 976678 - DNA, 15 bp, Homo sapiens
ccgggtcctcctgac

SEQ ID NO: 976679 - DNA, 15 bp, Homo sapiens
cgggtcctcctgacc

SEQ ID NO: 976680 - DNA, 15 bp, Homo sapiens
gggtcctcctgaccc

SEQ ID NO: 976681 - DNA, 15 bp, Homo sapiens
ggtcctcctgacccc

SEQ ID NO: 976682 - DNA, 15 bp, Homo sapiens
gtcctcctgacccca

SEQ ID NO: 976683 - DNA, 15 bp, Homo sapiens
tcctcctgaccccac

SEQ ID NO: 976684 - DNA, 15 bp, Homo sapiens
cctcctgaccccacg

SEQ ID NO: 976685 - DNA, 15 bp, Homo sapiens
ctcctgaccccacgg

SEQ ID NO: 976686 - DNA, 15 bp, Homo sapiens
tcctgaccccacgga

SEQ ID NO: 976687 - DNA, 15 bp, Homo sapiens
cctgaccccacggag

SEQ ID NO: 976688 - DNA, 15 bp, Homo sapiens
ctgaccccacggagc

SEQ ID NO: 976689 - DNA, 15 bp, Homo sapiens
tgaccccacggagcc

SEQ ID NO: 976690 - DNA, 15 bp, Homo sapiens
gaccccacggagccg

SEQ ID NO: 976691 - DNA, 15 bp, Homo sapiens
accccacggagccgc

SEQ ID NO: 976692 - DNA, 15 bp, Homo sapiens
ccccacggagccgcc

SEQ ID NO: 976693 - DNA, 15 bp, Homo sapiens
cccacggagccgccc

SEQ ID NO: 976694 - DNA, 15 bp, Homo sapiens
ccacggagccgcccc

SEQ ID NO: 976695 - DNA, 15 bp, Homo sapiens
cacggagccgcccct

SEQ ID NO: 976696 - DNA, 15 bp, Homo sapiens
acggagccgcccctc

SEQ ID NO: 976697 - DNA, 15 bp, Homo sapiens
cggagccgcccctcc

SEQ ID NO: 976698 - DNA, 15 bp, Homo sapiens
ggagccgcccctcca

SEQ ID NO: 976699 - DNA, 15 bp, Homo sapiens
gagccgcccctccac

SEQ ID NO: 976700 - DNA, 15 bp, Homo sapiens
agccgcccctccacg

SEQ ID NO: 976701 - DNA, 15 bp, Homo sapiens
gccgcccctccacgt

SEQ ID NO: 976702 - DNA, 15 bp, Homo sapiens
ccgcccctccacgtg

SEQ ID NO: 976703 - DNA, 15 bp, Homo sapiens
cgcccctccacgtga

SEQ ID NO: 976704 - DNA, 15 bp, Homo sapiens
gcccctccacgtgaa

SEQ ID NO: 976705 - DNA, 15 bp, Homo sapiens
cccctccacgtgaag

SEQ ID NO: 976706 - DNA, 15 bp, Homo sapiens
ccctccacgtgaagt

SEQ ID NO: 976707 - DNA, 15 bp, Homo sapiens
cctccacgtgaagtc

SEQ ID NO: 976708 - DNA, 15 bp, Homo sapiens
ctccacgtgaagtct

SEQ ID NO: 976709 - DNA, 15 bp, Homo sapiens
tccacgtgaagtctg

SEQ ID NO: 976710 - DNA, 15 bp, Homo sapiens
ccacgtgaagtctga

SEQ ID NO: 976711 - DNA, 15 bp, Homo sapiens
cacgtgaagtctgag

SEQ ID NO: 976712 - DNA, 15 bp, Homo sapiens
acgtgaagtctgagg

SEQ ID NO: 976713 - DNA, 15 bp, Homo sapiens
cgtgaagtctgagga

SEQ ID NO: 976714 - DNA, 15 bp, Homo sapiens
gtgaagtctgaggac

SEQ ID NO: 976715 - DNA, 15 bp, Homo sapiens
tgaagtctgaggacc

SEQ ID NO: 976716 - DNA, 15 bp, Homo sapiens
gaagtctgaggacca

SEQ ID NO: 976717 - DNA, 15 bp, Homo sapiens
aagtctgaggaccag

SEQ ID NO: 976718 - DNA, 15 bp, Homo sapiens
agtctgaggaccagc

SEQ ID NO: 976719 - DNA, 15 bp, Homo sapiens
gtctgaggaccagcc

SEQ ID NO: 976720 - DNA, 15 bp, Homo sapiens
tctgaggaccagccc

SEQ ID NO: 976721 - DNA, 15 bp, Homo sapiens
ctgaggaccagcccg

SEQ ID NO: 976722 - DNA, 15 bp, Homo sapiens
tgaggaccagcccgg

SEQ ID NO: 976723 - DNA, 15 bp, Homo sapiens
gaggaccagcccggg

SEQ ID NO: 976724 - DNA, 15 bp, Homo sapiens
aggaccagcccgggg

SEQ ID NO: 976725 - DNA, 15 bp, Homo sapiens
ggaccagcccgggga

SEQ ID NO: 976726 - DNA, 15 bp, Homo sapiens
gaccagcccggggag

SEQ ID NO: 976727 - DNA, 15 bp, Homo sapiens
accagcccggggagg

SEQ ID NO: 976728 - DNA, 15 bp, Homo sapiens
ccagcccggggagga

SEQ ID NO: 976729 - DNA, 15 bp, Homo sapiens
cagcccggggaggaa

SEQ ID NO: 976730 - DNA, 15 bp, Homo sapiens
agcccggggaggaag

SEQ ID NO: 976731 - DNA, 15 bp, Homo sapiens
gcccggggaggaaga

SEQ ID NO: 976732 - DNA, 15 bp, Homo sapiens
cccggggaggaagag

SEQ ID NO: 976733 - DNA, 15 bp, Homo sapiens
ccggggaggaagagg

SEQ ID NO: 976734 - DNA, 15 bp, Homo sapiens
cggggaggaagagga

SEQ ID NO: 976735 - DNA, 15 bp, Homo sapiens
ggggaggaagaggac

SEQ ID NO: 976736 - DNA, 15 bp, Homo sapiens
gggaggaagaggacg

SEQ ID NO: 976737 - DNA, 15 bp, Homo sapiens
ggaggaagaggacga

SEQ ID NO: 976738 - DNA, 15 bp, Homo sapiens
gaggaagaggacgat

SEQ ID NO: 976739 - DNA, 15 bp, Homo sapiens
aggaagaggacgatg

SEQ ID NO: 976740 - DNA, 15 bp, Homo sapiens
ggaagaggacgatga

SEQ ID NO: 976741 - DNA, 15 bp, Homo sapiens
gaagaggacgatgag

SEQ ID NO: 976742 - DNA, 15 bp, Homo sapiens
aagaggacgatgaga

SEQ ID NO: 976743 - DNA, 15 bp, Homo sapiens
agaggacgatgagag

SEQ ID NO: 976744 - DNA, 15 bp, Homo sapiens
gaggacgatgagagg

SEQ ID NO: 976745 - DNA, 15 bp, Homo sapiens
aggacgatgagaggg

SEQ ID NO: 976746 - DNA, 15 bp, Homo sapiens
ggacgatgagagggg

SEQ ID NO: 976747 - DNA, 15 bp, Homo sapiens
gacgatgagaggggc

SEQ ID NO: 976748 - DNA, 15 bp, Homo sapiens
acgatgagaggggcg

SEQ ID NO: 976749 - DNA, 15 bp, Homo sapiens
cgatgagaggggcgc

SEQ ID NO: 976750 - DNA, 15 bp, Homo sapiens
gatgagaggggcgcg

SEQ ID NO: 976751 - DNA, 15 bp, Homo sapiens
atgagaggggcgcgg

SEQ ID NO: 976752 - DNA, 15 bp, Homo sapiens
tgagaggggcgcgga

SEQ ID NO: 976753 - DNA, 15 bp, Homo sapiens
gagaggggcgcggac

SEQ ID NO: 976754 - DNA, 15 bp, Homo sapiens
agaggggcgcggacg

SEQ ID NO: 976755 - DNA, 15 bp, Homo sapiens
gaggggcgcggacgc

SEQ ID NO: 976756 - DNA, 15 bp, Homo sapiens
aggggcgcggacgcc

SEQ ID NO: 976757 - DNA, 15 bp, Homo sapiens
ggggcgcggacgcca

SEQ ID NO: 976758 - DNA, 15 bp, Homo sapiens
gggcgcggacgccac

SEQ ID NO: 976759 - DNA, 15 bp, Homo sapiens
ggcgcggacgccacc

SEQ ID NO: 976760 - DNA, 15 bp, Homo sapiens
gcgcggacgccacct

SEQ ID NO: 976761 - DNA, 15 bp, Homo sapiens
cgcggacgccacctg

SEQ ID NO: 976762 - DNA, 15 bp, Homo sapiens
gcggacgccacctgg

SEQ ID NO: 976763 - DNA, 15 bp, Homo sapiens
cggacgccacctggg

SEQ ID NO: 976764 - DNA, 15 bp, Homo sapiens
ggacgccacctggga

SEQ ID NO: 976765 - DNA, 15 bp, Homo sapiens
gacgccacctgggac

SEQ ID NO: 976766 - DNA, 15 bp, Homo sapiens
acgccacctgggacc

SEQ ID NO: 976767 - DNA, 15 bp, Homo sapiens
cgccacctgggacct

SEQ ID NO: 976768 - DNA, 15 bp, Homo sapiens
gccacctgggacctg

SEQ ID NO: 976769 - DNA, 15 bp, Homo sapiens
ccacctgggacctgg

SEQ ID NO: 976770 - DNA, 15 bp, Homo sapiens
cacctgggacctgga

SEQ ID NO: 976771 - DNA, 15 bp, Homo sapiens
acctgggacctggat

SEQ ID NO: 976772 - DNA, 15 bp, Homo sapiens
cctgggacctggatc

SEQ ID NO: 976773 - DNA, 15 bp, Homo sapiens
ctgggacctggatct

SEQ ID NO: 976774 - DNA, 15 bp, Homo sapiens
tgggacctggatctc

SEQ ID NO: 976775 - DNA, 15 bp, Homo sapiens
gggacctggatctcc

SEQ ID NO: 976776 - DNA, 15 bp, Homo sapiens
ggacctggatctcct

SEQ ID NO: 976777 - DNA, 15 bp, Homo sapiens
gacctggatctcctc

SEQ ID NO: 976778 - DNA, 15 bp, Homo sapiens
acctggatctcctcc

SEQ ID NO: 976779 - DNA, 15 bp, Homo sapiens
cctggatctcctcct

SEQ ID NO: 976780 - DNA, 15 bp, Homo sapiens
ctggatctcctcctc

SEQ ID NO: 976781 - DNA, 15 bp, Homo sapiens
tggatctcctcctca

SEQ ID NO: 976782 - DNA, 15 bp, Homo sapiens
ggatctcctcctcac

SEQ ID NO: 976783 - DNA, 15 bp, Homo sapiens
gatctcctcctcacc

SEQ ID NO: 976784 - DNA, 15 bp, Homo sapiens
atctcctcctcacca

SEQ ID NO: 976785 - DNA, 15 bp, Homo sapiens
tctcctcctcaccaa

SEQ ID NO: 976786 - DNA, 15 bp, Homo sapiens
ctcctcctcaccaac

SEQ ID NO: 976787 - DNA, 15 bp, Homo sapiens
tcctcctcaccaact

SEQ ID NO: 976788 - DNA, 15 bp, Homo sapiens
cctcctcaccaactt

SEQ ID NO: 976789 - DNA, 15 bp, Homo sapiens
ctcctcaccaacttc

SEQ ID NO: 976790 - DNA, 15 bp, Homo sapiens
tcctcaccaacttct

SEQ ID NO: 976791 - DNA, 15 bp, Homo sapiens
cctcaccaacttctc

SEQ ID NO: 976792 - DNA, 15 bp, Homo sapiens
ctcaccaacttctcg

SEQ ID NO: 976793 - DNA, 15 bp, Homo sapiens
tcaccaacttctcgg

SEQ ID NO: 976794 - DNA, 15 bp, Homo sapiens
caccaacttctcggg

SEQ ID NO: 976795 - DNA, 15 bp, Homo sapiens
accaacttctcgggc

SEQ ID NO: 976796 - DNA, 15 bp, Homo sapiens
ccaacttctcgggcc

SEQ ID NO: 976797 - DNA, 15 bp, Homo sapiens
caacttctcgggccc

SEQ ID NO: 976798 - DNA, 15 bp, Homo sapiens
aacttctcgggcccg

SEQ ID NO: 976799 - DNA, 15 bp, Homo sapiens
acttctcgggcccgg

SEQ ID NO: 976800 - DNA, 15 bp, Homo sapiens
cttctcgggcccgga

SEQ ID NO: 976801 - DNA, 15 bp, Homo sapiens
ttctcgggcccggag

SEQ ID NO: 976802 - DNA, 15 bp, Homo sapiens
tctcgggcccggagc

SEQ ID NO: 976803 - DNA, 15 bp, Homo sapiens
ctcgggcccggagcc

SEQ ID NO: 976804 - DNA, 15 bp, Homo sapiens
tcgggcccggagccc

SEQ ID NO: 976805 - DNA, 15 bp, Homo sapiens
cgggcccggagcccg

SEQ ID NO: 976806 - DNA, 15 bp, Homo sapiens
gggcccggagcccgg

SEQ ID NO: 976807 - DNA, 15 bp, Homo sapiens
ggcccggagcccggt

SEQ ID NO: 976808 - DNA, 15 bp, Homo sapiens
gcccggagcccggtg

SEQ ID NO: 976809 - DNA, 15 bp, Homo sapiens
cccggagcccggtgg

SEQ ID NO: 976810 - DNA, 15 bp, Homo sapiens
ccggagcccggtggc

SEQ ID NO: 976811 - DNA, 15 bp, Homo sapiens
cggagcccggtggcg

SEQ ID NO: 976812 - DNA, 15 bp, Homo sapiens
ggagcccggtggcgc

SEQ ID NO: 976813 - DNA, 15 bp, Homo sapiens
gagcccggtggcgcg

SEQ ID NO: 976814 - DNA, 15 bp, Homo sapiens
agcccggtggcgcgc

SEQ ID NO: 976815 - DNA, 15 bp, Homo sapiens
gcccggtggcgcgcc

SEQ ID NO: 976816 - DNA, 15 bp, Homo sapiens
cccggtggcgcgccc

SEQ ID NO: 976817 - DNA, 15 bp, Homo sapiens
ccggtggcgcgcccc

SEQ ID NO: 976818 - DNA, 15 bp, Homo sapiens
cggtggcgcgcccca

SEQ ID NO: 976819 - DNA, 15 bp, Homo sapiens
ggtggcgcgccccag

SEQ ID NO: 976820 - DNA, 15 bp, Homo sapiens
gtggcgcgccccaga

SEQ ID NO: 976821 - DNA, 15 bp, Homo sapiens
tggcgcgccccagac

SEQ ID NO: 976822 - DNA, 15 bp, Homo sapiens
ggcgcgccccagacc

SEQ ID NO: 976823 - DNA, 15 bp, Homo sapiens
gcgcgccccagacct

SEQ ID NO: 976824 - DNA, 15 bp, Homo sapiens
cgcgccccagacctg

SEQ ID NO: 976825 - DNA, 15 bp, Homo sapiens
gcgccccagacctgc

SEQ ID NO: 976826 - DNA, 15 bp, Homo sapiens
cgccccagacctgcg

SEQ ID NO: 976827 - DNA, 15 bp, Homo sapiens
gccccagacctgcgc

SEQ ID NO: 976828 - DNA, 15 bp, Homo sapiens
ccccagacctgcgct

SEQ ID NO: 976829 - DNA, 15 bp, Homo sapiens
cccagacctgcgctc

SEQ ID NO: 976830 - DNA, 15 bp, Homo sapiens
ccagacctgcgctct

SEQ ID NO: 976831 - DNA, 15 bp, Homo sapiens
cagacctgcgctctg

SEQ ID NO: 976832 - DNA, 15 bp, Homo sapiens
agacctgcgctctgg

SEQ ID NO: 976833 - DNA, 15 bp, Homo sapiens
gacctgcgctctggc

SEQ ID NO: 976834 - DNA, 15 bp, Homo sapiens
acctgcgctctggcg

SEQ ID NO: 976835 - DNA, 15 bp, Homo sapiens
cctgcgctctggcgc

SEQ ID NO: 976836 - DNA, 15 bp, Homo sapiens
ctgcgctctggcgcc

SEQ ID NO: 976837 - DNA, 15 bp, Homo sapiens
tgcgctctggcgccc

SEQ ID NO: 976838 - DNA, 15 bp, Homo sapiens
gcgctctggcgccca

SEQ ID NO: 976839 - DNA, 15 bp, Homo sapiens
cgctctggcgcccag

SEQ ID NO: 976840 - DNA, 15 bp, Homo sapiens
gctctggcgcccagc

SEQ ID NO: 976841 - DNA, 15 bp, Homo sapiens
ctctggcgcccagcg

SEQ ID NO: 976842 - DNA, 15 bp, Homo sapiens
tctggcgcccagcga

SEQ ID NO: 976843 - DNA, 15 bp, Homo sapiens
ctggcgcccagcgag

SEQ ID NO: 976844 - DNA, 15 bp, Homo sapiens
tggcgcccagcgagg

SEQ ID NO: 976845 - DNA, 15 bp, Homo sapiens
ggcgcccagcgaggc

SEQ ID NO: 976846 - DNA, 15 bp, Homo sapiens
gcgcccagcgaggcc

SEQ ID NO: 976847 - DNA, 15 bp, Homo sapiens
cgcccagcgaggcct

SEQ ID NO: 976848 - DNA, 15 bp, Homo sapiens
gcccagcgaggcctc

SEQ ID NO: 976849 - DNA, 15 bp, Homo sapiens
cccagcgaggcctcc

SEQ ID NO: 976850 - DNA, 15 bp, Homo sapiens
ccagcgaggcctccg

SEQ ID NO: 976851 - DNA, 15 bp, Homo sapiens
cagcgaggcctccgg

SEQ ID NO: 976852 - DNA, 15 bp, Homo sapiens
agcgaggcctccggg

SEQ ID NO: 976853 - DNA, 15 bp, Homo sapiens
gcgaggcctccgggg

SEQ ID NO: 976854 - DNA, 15 bp, Homo sapiens
cgaggcctccggggc

SEQ ID NO: 976855 - DNA, 15 bp, Homo sapiens
gaggcctccggggcg

SEQ ID NO: 976856 - DNA, 15 bp, Homo sapiens
aggcctccggggcgc

SEQ ID NO: 976857 - DNA, 15 bp, Homo sapiens
ggcctccggggcgca

SEQ ID NO: 976858 - DNA, 15 bp, Homo sapiens
gcctccggggcgcaa

SEQ ID NO: 976859 - DNA, 15 bp, Homo sapiens
cctccggggcgcaat

SEQ ID NO: 976860 - DNA, 15 bp, Homo sapiens
ctccggggcgcaata

SEQ ID NO: 976861 - DNA, 15 bp, Homo sapiens
tccggggcgcaatat

SEQ ID NO: 976862 - DNA, 15 bp, Homo sapiens
ccggggcgcaatatc

SEQ ID NO: 976863 - DNA, 15 bp, Homo sapiens
cggggcgcaatatcc

SEQ ID NO: 976864 - DNA, 15 bp, Homo sapiens
ggggcgcaatatccg

SEQ ID NO: 976865 - DNA, 15 bp, Homo sapiens
gggcgcaatatccgc

SEQ ID NO: 976866 - DNA, 15 bp, Homo sapiens
ggcgcaatatccgcc

SEQ ID NO: 976867 - DNA, 15 bp, Homo sapiens
gcgcaatatccgccg

SEQ ID NO: 976868 - DNA, 15 bp, Homo sapiens
cgcaatatccgccgc

SEQ ID NO: 976869 - DNA, 15 bp, Homo sapiens
gcaatatccgccgcc

SEQ ID NO: 976870 - DNA, 15 bp, Homo sapiens
caatatccgccgccg

SEQ ID NO: 976871 - DNA, 15 bp, Homo sapiens
aatatccgccgccgc

SEQ ID NO: 976872 - DNA, 15 bp, Homo sapiens
atatccgccgccgcc

SEQ ID NO: 976873 - DNA, 15 bp, Homo sapiens
tatccgccgccgccc

SEQ ID NO: 976874 - DNA, 15 bp, Homo sapiens
atccgccgccgcccg

SEQ ID NO: 976875 - DNA, 15 bp, Homo sapiens
tccgccgccgcccga

SEQ ID NO: 976876 - DNA, 15 bp, Homo sapiens
ccgccgccgcccgag

SEQ ID NO: 976877 - DNA, 15 bp, Homo sapiens
cgccgccgcccgaga

SEQ ID NO: 976878 - DNA, 15 bp, Homo sapiens
gccgccgcccgagac

SEQ ID NO: 976879 - DNA, 15 bp, Homo sapiens
ccgccgcccgagact

SEQ ID NO: 976880 - DNA, 15 bp, Homo sapiens
cgccgcccgagactc

SEQ ID NO: 976881 - DNA, 15 bp, Homo sapiens
gccgcccgagactct

SEQ ID NO: 976882 - DNA, 15 bp, Homo sapiens
ccgcccgagactctg

SEQ ID NO: 976883 - DNA, 15 bp, Homo sapiens
cgcccgagactctgg

SEQ ID NO: 976884 - DNA, 15 bp, Homo sapiens
gcccgagactctggg

SEQ ID NO: 976885 - DNA, 15 bp, Homo sapiens
cccgagactctgggc

SEQ ID NO: 976886 - DNA, 15 bp, Homo sapiens
ccgagactctgggcg

SEQ ID NO: 976887 - DNA, 15 bp, Homo sapiens
cgagactctgggcgc

SEQ ID NO: 976888 - DNA, 15 bp, Homo sapiens
gagactctgggcgca

SEQ ID NO: 976889 - DNA, 15 bp, Homo sapiens
agactctgggcgcat

SEQ ID NO: 976890 - DNA, 15 bp, Homo sapiens
gactctgggcgcata

SEQ ID NO: 976891 - DNA, 15 bp, Homo sapiens
actctgggcgcatat

SEQ ID NO: 976892 - DNA, 15 bp, Homo sapiens
ctctgggcgcatatg

SEQ ID NO: 976893 - DNA, 15 bp, Homo sapiens
tctgggcgcatatgc

SEQ ID NO: 976894 - DNA, 15 bp, Homo sapiens
ctgggcgcatatgct

SEQ ID NO: 976895 - DNA, 15 bp, Homo sapiens
tgggcgcatatgctg

SEQ ID NO: 976896 - DNA, 15 bp, Homo sapiens
gggcgcatatgctgg

SEQ ID NO: 976897 - DNA, 15 bp, Homo sapiens
ggcgcatatgctggc

SEQ ID NO: 976898 - DNA, 15 bp, Homo sapiens
gcgcatatgctggcg

SEQ ID NO: 976899 - DNA, 15 bp, Homo sapiens
cgcatatgctggcgg

SEQ ID NO: 976900 - DNA, 15 bp, Homo sapiens
gcatatgctggcggc

SEQ ID NO: 976901 - DNA, 15 bp, Homo sapiens
catatgctggcggcc

SEQ ID NO: 976902 - DNA, 15 bp, Homo sapiens
atatgctggcggccc

SEQ ID NO: 976903 - DNA, 15 bp, Homo sapiens
tatgctggcggcccg

SEQ ID NO: 976904 - DNA, 15 bp, Homo sapiens
atgctggcggcccgg

SEQ ID NO: 976905 - DNA, 15 bp, Homo sapiens
tgctggcggcccggg

SEQ ID NO: 976906 - DNA, 15 bp, Homo sapiens
gctggcggcccgggg

SEQ ID NO: 976907 - DNA, 15 bp, Homo sapiens
ctggcggcccggggc

SEQ ID NO: 976908 - DNA, 15 bp, Homo sapiens
tggcggcccggggct

SEQ ID NO: 976909 - DNA, 15 bp, Homo sapiens
ggcggcccggggctg

SEQ ID NO: 976910 - DNA, 15 bp, Homo sapiens
gcggcccggggctgg

SEQ ID NO: 976911 - DNA, 15 bp, Homo sapiens
cggcccggggctggt

SEQ ID NO: 976912 - DNA, 15 bp, Homo sapiens
ggcccggggctggtg

SEQ ID NO: 976913 - DNA, 15 bp, Homo sapiens
gcccggggctggtgg

SEQ ID NO: 976914 - DNA, 15 bp, Homo sapiens
cccggggctggtggc

SEQ ID NO: 976915 - DNA, 15 bp, Homo sapiens
ccggggctggtggct

SEQ ID NO: 976916 - DNA, 15 bp, Homo sapiens
cggggctggtggctg

SEQ ID NO: 976917 - DNA, 15 bp, Homo sapiens
ggggctggtggctgg

SEQ ID NO: 976918 - DNA, 15 bp, Homo sapiens
gggctggtggctggg

SEQ ID NO: 976919 - DNA, 15 bp, Homo sapiens
ggctggtggctgggc

SEQ ID NO: 976920 - DNA, 15 bp, Homo sapiens
gctggtggctgggct

SEQ ID NO: 976921 - DNA, 15 bp, Homo sapiens
ctggtggctgggctt

SEQ ID NO: 976922 - DNA, 15 bp, Homo sapiens
tggtggctgggcttt

SEQ ID NO: 976923 - DNA, 15 bp, Homo sapiens
ggtggctgggctttt

SEQ ID NO: 976924 - DNA, 15 bp, Homo sapiens
gtggctgggcttttg

SEQ ID NO: 976925 - DNA, 15 bp, Homo sapiens
tggctgggcttttgg

SEQ ID NO: 976926 - DNA, 15 bp, Homo sapiens
ggctgggcttttggg

SEQ ID NO: 976927 - DNA, 15 bp, Homo sapiens
gctgggcttttgggt

SEQ ID NO: 976928 - DNA, 15 bp, Homo sapiens
ctgggcttttgggtt

SEQ ID NO: 976929 - DNA, 15 bp, Homo sapiens
tgggcttttgggttc

SEQ ID NO: 976930 - DNA, 15 bp, Homo sapiens
gggcttttgggttcg

SEQ ID NO: 976931 - DNA, 15 bp, Homo sapiens
ggcttttgggttcgg

SEQ ID NO: 976932 - DNA, 15 bp, Homo sapiens
gcttttgggttcgga

SEQ ID NO: 976933 - DNA, 15 bp, Homo sapiens
cttttgggttcggag

SEQ ID NO: 976934 - DNA, 15 bp, Homo sapiens
ttttgggttcggagg

SEQ ID NO: 976935 - DNA, 15 bp, Homo sapiens
tttgggttcggagga

SEQ ID NO: 976936 - DNA, 15 bp, Homo sapiens
ttgggttcggaggat

SEQ ID NO: 976937 - DNA, 15 bp, Homo sapiens
tgggttcggaggatc

SEQ ID NO: 976938 - DNA, 15 bp, Homo sapiens
gggttcggaggatca

SEQ ID NO: 976939 - DNA, 15 bp, Homo sapiens
ggttcggaggatcac

SEQ ID NO: 976940 - DNA, 15 bp, Homo sapiens
gttcggaggatcact

SEQ ID NO: 976941 - DNA, 15 bp, Homo sapiens
ttcggaggatcactc

SEQ ID NO: 976942 - DNA, 15 bp, Homo sapiens
tcggaggatcactcg

SEQ ID NO: 976943 - DNA, 15 bp, Homo sapiens
cggaggatcactcgg

SEQ ID NO: 976944 - DNA, 15 bp, Homo sapiens
ggaggatcactcggg

SEQ ID NO: 976945 - DNA, 15 bp, Homo sapiens
gaggatcactcgggt

SEQ ID NO: 976946 - DNA, 15 bp, Homo sapiens
aggatcactcgggtt

SEQ ID NO: 976947 - DNA, 15 bp, Homo sapiens
ggatcactcgggttg

SEQ ID NO: 976948 - DNA, 15 bp, Homo sapiens
gatcactcgggttgg

SEQ ID NO: 976949 - DNA, 15 bp, Homo sapiens
atcactcgggttggg

SEQ ID NO: 976950 - DNA, 15 bp, Homo sapiens
tcactcgggttgggt

SEQ ID NO: 976951 - DNA, 15 bp, Homo sapiens
cactcgggttgggtg

SEQ ID NO: 976952 - DNA, 15 bp, Homo sapiens
actcgggttgggtgc

SEQ ID NO: 976953 - DNA, 15 bp, Homo sapiens
ctcgggttgggtgcg

SEQ ID NO: 976954 - DNA, 15 bp, Homo sapiens
tcgggttgggtgcgc

SEQ ID NO: 976955 - DNA, 15 bp, Homo sapiens
cgggttgggtgcgcc

SEQ ID NO: 976956 - DNA, 15 bp, Homo sapiens
gggttgggtgcgccc

SEQ ID NO: 976957 - DNA, 15 bp, Homo sapiens
ggttgggtgcgccct

SEQ ID NO: 976958 - DNA, 15 bp, Homo sapiens
gttgggtgcgccctg

SEQ ID NO: 976959 - DNA, 15 bp, Homo sapiens
ttgggtgcgccctgc

SEQ ID NO: 976960 - DNA, 15 bp, Homo sapiens
tgggtgcgccctgcc

SEQ ID NO: 976961 - DNA, 15 bp, Homo sapiens
gggtgcgccctgccc

SEQ ID NO: 976962 - DNA, 15 bp, Homo sapiens
ggtgcgccctgccct

SEQ ID NO: 976963 - DNA, 15 bp, Homo sapiens
gtgcgccctgccctg

SEQ ID NO: 976964 - DNA, 15 bp, Homo sapiens
tgcgccctgccctgc

SEQ ID NO: 976965 - DNA, 15 bp, Homo sapiens
gcgccctgccctgcg

SEQ ID NO: 976966 - DNA, 15 bp, Homo sapiens
cgccctgccctgcga

SEQ ID NO: 976967 - DNA, 15 bp, Homo sapiens
gccctgccctgcgag

SEQ ID NO: 976968 - DNA, 15 bp, Homo sapiens
ccctgccctgcgagc

SEQ ID NO: 976969 - DNA, 15 bp, Homo sapiens
cctgccctgcgagcc

SEQ ID NO: 976970 - DNA, 15 bp, Homo sapiens
ctgccctgcgagccc

SEQ ID NO: 976971 - DNA, 15 bp, Homo sapiens
tgccctgcgagcccg

SEQ ID NO: 976972 - DNA, 15 bp, Homo sapiens
gccctgcgagcccgg

SEQ ID NO: 976973 - DNA, 15 bp, Homo sapiens
ccctgcgagcccggg

SEQ ID NO: 976974 - DNA, 15 bp, Homo sapiens
cctgcgagcccgggc

SEQ ID NO: 976975 - DNA, 15 bp, Homo sapiens
ctgcgagcccgggct

SEQ ID NO: 976976 - DNA, 15 bp, Homo sapiens
tgcgagcccgggctc

SEQ ID NO: 976977 - DNA, 15 bp, Homo sapiens
gcgagcccgggctcc

SEQ ID NO: 976978 - DNA, 15 bp, Homo sapiens
cgagcccgggctccc

SEQ ID NO: 976979 - DNA, 15 bp, Homo sapiens
gagcccgggctcccg

SEQ ID NO: 976980 - DNA, 15 bp, Homo sapiens
agcccgggctcccga

SEQ ID NO: 976981 - DNA, 15 bp, Homo sapiens
gcccgggctcccgac

SEQ ID NO: 976982 - DNA, 15 bp, Homo sapiens
cccgggctcccgacg

SEQ ID NO: 976983 - DNA, 15 bp, Homo sapiens
ccgggctcccgacgc

SEQ ID NO: 976984 - DNA, 15 bp, Homo sapiens
cgggctcccgacgcc

SEQ ID NO: 976985 - DNA, 15 bp, Homo sapiens
gggctcccgacgcct

SEQ ID NO: 976986 - DNA, 15 bp, Homo sapiens
ggctcccgacgcctt

SEQ ID NO: 976987 - DNA, 15 bp, Homo sapiens
gctcccgacgccttc

SEQ ID NO: 976988 - DNA, 15 bp, Homo sapiens
ctcccgacgccttcg

SEQ ID NO: 976989 - DNA, 15 bp, Homo sapiens
tcccgacgccttcgt

SEQ ID NO: 976990 - DNA, 15 bp, Homo sapiens
cccgacgccttcgtg

SEQ ID NO: 976991 - DNA, 15 bp, Homo sapiens
ccgacgccttcgtgg

SEQ ID NO: 976992 - DNA, 15 bp, Homo sapiens
cgacgccttcgtggg

SEQ ID NO: 976993 - DNA, 15 bp, Homo sapiens
gacgccttcgtgggc

SEQ ID NO: 976994 - DNA, 15 bp, Homo sapiens
acgccttcgtgggcc

SEQ ID NO: 976995 - DNA, 15 bp, Homo sapiens
cgccttcgtgggccc

SEQ ID NO: 976996 - DNA, 15 bp, Homo sapiens
gccttcgtgggccca

SEQ ID NO: 976997 - DNA, 15 bp, Homo sapiens
ccttcgtgggcccag

SEQ ID NO: 976998 - DNA, 15 bp, Homo sapiens
cttcgtgggcccagc

SEQ ID NO: 976999 - DNA, 15 bp, Homo sapiens
ttcgtgggcccagcc

SEQ ID NO: 977000 - DNA, 15 bp, Homo sapiens
tcgtgggcccagccc

SEQ ID NO: 977001 - DNA, 15 bp, Homo sapiens
cgtgggcccagccct

SEQ ID NO: 977002 - DNA, 15 bp, Homo sapiens
gtgggcccagccctg

SEQ ID NO: 977003 - DNA, 15 bp, Homo sapiens
tgggcccagccctgg

SEQ ID NO: 977004 - DNA, 15 bp, Homo sapiens
gggcccagccctggc

SEQ ID NO: 977005 - DNA, 15 bp, Homo sapiens
ggcccagccctggct

SEQ ID NO: 977006 - DNA, 15 bp, Homo sapiens
gcccagccctggctc

SEQ ID NO: 977007 - DNA, 15 bp, Homo sapiens
cccagccctggctcc

SEQ ID NO: 977008 - DNA, 15 bp, Homo sapiens
ccagccctggctcca

SEQ ID NO: 977009 - DNA, 15 bp, Homo sapiens
cagccctggctccag

SEQ ID NO: 977010 - DNA, 15 bp, Homo sapiens
agccctggctccagc

SEQ ID NO: 977011 - DNA, 15 bp, Homo sapiens
gccctggctccagcc

SEQ ID NO: 977012 - DNA, 15 bp, Homo sapiens
ccctggctccagccc

SEQ ID NO: 977013 - DNA, 15 bp, Homo sapiens
cctggctccagcccc

SEQ ID NO: 977014 - DNA, 15 bp, Homo sapiens
ctggctccagccccg

SEQ ID NO: 977015 - DNA, 15 bp, Homo sapiens
tggctccagccccgg

SEQ ID NO: 977016 - DNA, 15 bp, Homo sapiens
ggctccagccccggc

SEQ ID NO: 977017 - DNA, 15 bp, Homo sapiens
gctccagccccggcc

SEQ ID NO: 977018 - DNA, 15 bp, Homo sapiens
ctccagccccggccc

SEQ ID NO: 977019 - DNA, 15 bp, Homo sapiens
tccagccccggcccc

SEQ ID NO: 977020 - DNA, 15 bp, Homo sapiens
ccagccccggccccc

SEQ ID NO: 977021 - DNA, 15 bp, Homo sapiens
cagccccggcccccg

SEQ ID NO: 977022 - DNA, 15 bp, Homo sapiens
agccccggcccccga

SEQ ID NO: 977023 - DNA, 15 bp, Homo sapiens
gccccggcccccgag

SEQ ID NO: 977024 - DNA, 15 bp, Homo sapiens
ccccggcccccgagc

SEQ ID NO: 977025 - DNA, 15 bp, Homo sapiens
cccggcccccgagcc

SEQ ID NO: 977026 - DNA, 15 bp, Homo sapiens
ccggcccccgagccc

SEQ ID NO: 977027 - DNA, 15 bp, Homo sapiens
cggcccccgagccca

SEQ ID NO: 977028 - DNA, 15 bp, Homo sapiens
ggcccccgagcccaa

SEQ ID NO: 977029 - DNA, 15 bp, Homo sapiens
gcccccgagcccaag

SEQ ID NO: 977030 - DNA, 15 bp, Homo sapiens
cccccgagcccaagg

SEQ ID NO: 977031 - DNA, 15 bp, Homo sapiens
ccccgagcccaaggc

SEQ ID NO: 977032 - DNA, 15 bp, Homo sapiens
cccgagcccaaggcg

SEQ ID NO: 977033 - DNA, 15 bp, Homo sapiens
ccgagcccaaggcgc

SEQ ID NO: 977034 - DNA, 15 bp, Homo sapiens
cgagcccaaggcgct

SEQ ID NO: 977035 - DNA, 15 bp, Homo sapiens
gagcccaaggcgctg

SEQ ID NO: 977036 - DNA, 15 bp, Homo sapiens
agcccaaggcgctgg

SEQ ID NO: 977037 - DNA, 15 bp, Homo sapiens
gcccaaggcgctggc

SEQ ID NO: 977038 - DNA, 15 bp, Homo sapiens
cccaaggcgctggcg

SEQ ID NO: 977039 - DNA, 15 bp, Homo sapiens
ccaaggcgctggcgc

SEQ ID NO: 977040 - DNA, 15 bp, Homo sapiens
caaggcgctggcgct

SEQ ID NO: 977041 - DNA, 15 bp, Homo sapiens
aaggcgctggcgctg

SEQ ID NO: 977042 - DNA, 15 bp, Homo sapiens
aggcgctggcgctgc

SEQ ID NO: 977043 - DNA, 15 bp, Homo sapiens
ggcgctggcgctgca

SEQ ID NO: 977044 - DNA, 15 bp, Homo sapiens
gcgctggcgctgcaa

SEQ ID NO: 977045 - DNA, 15 bp, Homo sapiens
cgctggcgctgcaac

SEQ ID NO: 977046 - DNA, 15 bp, Homo sapiens
gctggcgctgcaacc

SEQ ID NO: 977047 - DNA, 15 bp, Homo sapiens
ctggcgctgcaaccg

SEQ ID NO: 977048 - DNA, 15 bp, Homo sapiens
tggcgctgcaaccgg

SEQ ID NO: 977049 - DNA, 15 bp, Homo sapiens
ggcgctgcaaccggt

SEQ ID NO: 977050 - DNA, 15 bp, Homo sapiens
gcgctgcaaccggtg

SEQ ID NO: 977051 - DNA, 15 bp, Homo sapiens
cgctgcaaccggtgt

SEQ ID NO: 977052 - DNA, 15 bp, Homo sapiens
gctgcaaccggtgta

SEQ ID NO: 977053 - DNA, 15 bp, Homo sapiens
ctgcaaccggtgtac

SEQ ID NO: 977054 - DNA, 15 bp, Homo sapiens
tgcaaccggtgtacc

SEQ ID NO: 977055 - DNA, 15 bp, Homo sapiens
gcaaccggtgtaccc

SEQ ID NO: 977056 - DNA, 15 bp, Homo sapiens
caaccggtgtacccg

SEQ ID NO: 977057 - DNA, 15 bp, Homo sapiens
aaccggtgtacccgg

SEQ ID NO: 977058 - DNA, 15 bp, Homo sapiens
accggtgtacccggg

SEQ ID NO: 977059 - DNA, 15 bp, Homo sapiens
ccggtgtacccgggg

SEQ ID NO: 977060 - DNA, 15 bp, Homo sapiens
cggtgtacccggggc

SEQ ID NO: 977061 - DNA, 15 bp, Homo sapiens
ggtgtacccggggcc

SEQ ID NO: 977062 - DNA, 15 bp, Homo sapiens
gtgtacccggggccc

SEQ ID NO: 977063 - DNA, 15 bp, Homo sapiens
tgtacccggggcccg

SEQ ID NO: 977064 - DNA, 15 bp, Homo sapiens
gtacccggggcccgg

SEQ ID NO: 977065 - DNA, 15 bp, Homo sapiens
tacccggggcccggc

SEQ ID NO: 977066 - DNA, 15 bp, Homo sapiens
acccggggcccggcg

SEQ ID NO: 977067 - DNA, 15 bp, Homo sapiens
cccggggcccggcgc

SEQ ID NO: 977068 - DNA, 15 bp, Homo sapiens
ccggggcccggcgcc

SEQ ID NO: 977069 - DNA, 15 bp, Homo sapiens
cggggcccggcgccg

SEQ ID NO: 977070 - DNA, 15 bp, Homo sapiens
ggggcccggcgccgg

SEQ ID NO: 977071 - DNA, 15 bp, Homo sapiens
gggcccggcgccggc

SEQ ID NO: 977072 - DNA, 15 bp, Homo sapiens
ggcccggcgccggct

SEQ ID NO: 977073 - DNA, 15 bp, Homo sapiens
gcccggcgccggctc

SEQ ID NO: 977074 - DNA, 15 bp, Homo sapiens
cccggcgccggctcc

SEQ ID NO: 977075 - DNA, 15 bp, Homo sapiens
ccggcgccggctcct

SEQ ID NO: 977076 - DNA, 15 bp, Homo sapiens
cggcgccggctcctc

SEQ ID NO: 977077 - DNA, 15 bp, Homo sapiens
ggcgccggctcctcg

SEQ ID NO: 977078 - DNA, 15 bp, Homo sapiens
gcgccggctcctcgg

SEQ ID NO: 977079 - DNA, 15 bp, Homo sapiens
cgccggctcctcggg

SEQ ID NO: 977080 - DNA, 15 bp, Homo sapiens
gccggctcctcgggt

SEQ ID NO: 977081 - DNA, 15 bp, Homo sapiens
ccggctcctcgggtg

SEQ ID NO: 977082 - DNA, 15 bp, Homo sapiens
cggctcctcgggtgg

SEQ ID NO: 977083 - DNA, 15 bp, Homo sapiens
ggctcctcgggtggc

SEQ ID NO: 977084 - DNA, 15 bp, Homo sapiens
gctcctcgggtggct

SEQ ID NO: 977085 - DNA, 15 bp, Homo sapiens
ctcctcgggtggcta

SEQ ID NO: 977086 - DNA, 15 bp, Homo sapiens
tcctcgggtggctac

SEQ ID NO: 977087 - DNA, 15 bp, Homo sapiens
cctcgggtggctact

SEQ ID NO: 977088 - DNA, 15 bp, Homo sapiens
ctcgggtggctactt

SEQ ID NO: 977089 - DNA, 15 bp, Homo sapiens
tcgggtggctacttc

SEQ ID NO: 977090 - DNA, 15 bp, Homo sapiens
cgggtggctacttcc

SEQ ID NO: 977091 - DNA, 15 bp, Homo sapiens
gggtggctacttccc

SEQ ID NO: 977092 - DNA, 15 bp, Homo sapiens
ggtggctacttcccg

SEQ ID NO: 977093 - DNA, 15 bp, Homo sapiens
gtggctacttcccgc

SEQ ID NO: 977094 - DNA, 15 bp, Homo sapiens
tggctacttcccgcg

SEQ ID NO: 977095 - DNA, 15 bp, Homo sapiens
ggctacttcccgcgg

SEQ ID NO: 977096 - DNA, 15 bp, Homo sapiens
gctacttcccgcgga

SEQ ID NO: 977097 - DNA, 15 bp, Homo sapiens
ctacttcccgcggac

SEQ ID NO: 977098 - DNA, 15 bp, Homo sapiens
tacttcccgcggacc

SEQ ID NO: 977099 - DNA, 15 bp, Homo sapiens
acttcccgcggaccg

SEQ ID NO: 977100 - DNA, 15 bp, Homo sapiens
cttcccgcggaccgg

SEQ ID NO: 977101 - DNA, 15 bp, Homo sapiens
ttcccgcggaccggg

SEQ ID NO: 977102 - DNA, 15 bp, Homo sapiens
tcccgcggaccgggc

SEQ ID NO: 977103 - DNA, 15 bp, Homo sapiens
cccgcggaccgggct

SEQ ID NO: 977104 - DNA, 15 bp, Homo sapiens
ccgcggaccgggctt

SEQ ID NO: 977105 - DNA, 15 bp, Homo sapiens
cgcggaccgggcttt

SEQ ID NO: 977106 - DNA, 15 bp, Homo sapiens
gcggaccgggctttc

SEQ ID NO: 977107 - DNA, 15 bp, Homo sapiens
cggaccgggctttca

SEQ ID NO: 977108 - DNA, 15 bp, Homo sapiens
ggaccgggctttcag

SEQ ID NO: 977109 - DNA, 15 bp, Homo sapiens
gaccgggctttcagt

SEQ ID NO: 977110 - DNA, 15 bp, Homo sapiens
accgggctttcagtg

SEQ ID NO: 977111 - DNA, 15 bp, Homo sapiens
ccgggctttcagtgc

SEQ ID NO: 977112 - DNA, 15 bp, Homo sapiens
cgggctttcagtgcc

SEQ ID NO: 977113 - DNA, 15 bp, Homo sapiens
gggctttcagtgcct

SEQ ID NO: 977114 - DNA, 15 bp, Homo sapiens
ggctttcagtgcctg

SEQ ID NO: 977115 - DNA, 15 bp, Homo sapiens
gctttcagtgcctgc

SEQ ID NO: 977116 - DNA, 15 bp, Homo sapiens
ctttcagtgcctgcg

SEQ ID NO: 977117 - DNA, 15 bp, Homo sapiens
tttcagtgcctgcgg

SEQ ID NO: 977118 - DNA, 15 bp, Homo sapiens
ttcagtgcctgcggc

SEQ ID NO: 977119 - DNA, 15 bp, Homo sapiens
tcagtgcctgcggcg

SEQ ID NO: 977120 - DNA, 15 bp, Homo sapiens
cagtgcctgcggcgt

SEQ ID NO: 977121 - DNA, 15 bp, Homo sapiens
agtgcctgcggcgtc

SEQ ID NO: 977122 - DNA, 15 bp, Homo sapiens
gtgcctgcggcgtcg

SEQ ID NO: 977123 - DNA, 15 bp, Homo sapiens
tgcctgcggcgtcgg

SEQ ID NO: 977124 - DNA, 15 bp, Homo sapiens
gcctgcggcgtcggg

SEQ ID NO: 977125 - DNA, 15 bp, Homo sapiens
cctgcggcgtcgggc

SEQ ID NO: 977126 - DNA, 15 bp, Homo sapiens
ctgcggcgtcgggcg

SEQ ID NO: 977127 - DNA, 15 bp, Homo sapiens
tgcggcgtcgggcgc

SEQ ID NO: 977128 - DNA, 15 bp, Homo sapiens
gcggcgtcgggcgcc

SEQ ID NO: 977129 - DNA, 15 bp, Homo sapiens
cggcgtcgggcgccc

SEQ ID NO: 977130 - DNA, 15 bp, Homo sapiens
ggcgtcgggcgcccc

SEQ ID NO: 977131 - DNA, 15 bp, Homo sapiens
gcgtcgggcgccccc

SEQ ID NO: 977132 - DNA, 15 bp, Homo sapiens
cgtcgggcgccccct

SEQ ID NO: 977133 - DNA, 15 bp, Homo sapiens
gtcgggcgcccccta

SEQ ID NO: 977134 - DNA, 15 bp, Homo sapiens
tcgggcgccccctac

SEQ ID NO: 977135 - DNA, 15 bp, Homo sapiens
cgggcgccccctacg

SEQ ID NO: 977136 - DNA, 15 bp, Homo sapiens
gggcgccccctacgg

SEQ ID NO: 977137 - DNA, 15 bp, Homo sapiens
ggcgccccctacggg

SEQ ID NO: 977138 - DNA, 15 bp, Homo sapiens
gcgccccctacgggc

SEQ ID NO: 977139 - DNA, 15 bp, Homo sapiens
cgccccctacgggct

SEQ ID NO: 977140 - DNA, 15 bp, Homo sapiens
gccccctacgggcta

SEQ ID NO: 977141 - DNA, 15 bp, Homo sapiens
ccccctacgggctac

SEQ ID NO: 977142 - DNA, 15 bp, Homo sapiens
cccctacgggctact

SEQ ID NO: 977143 - DNA, 15 bp, Homo sapiens
ccctacgggctactg

SEQ ID NO: 977144 - DNA, 15 bp, Homo sapiens
cctacgggctactgt

SEQ ID NO: 977145 - DNA, 15 bp, Homo sapiens
ctacgggctactgtc

SEQ ID NO: 977146 - DNA, 15 bp, Homo sapiens
tacgggctactgtcc

SEQ ID NO: 977147 - DNA, 15 bp, Homo sapiens
acgggctactgtccg

SEQ ID NO: 977148 - DNA, 15 bp, Homo sapiens
cgggctactgtccgg

SEQ ID NO: 977149 - DNA, 15 bp, Homo sapiens
gggctactgtccggg

SEQ ID NO: 977150 - DNA, 15 bp, Homo sapiens
ggctactgtccgggt

SEQ ID NO: 977151 - DNA, 15 bp, Homo sapiens
gctactgtccgggta

SEQ ID NO: 977152 - DNA, 15 bp, Homo sapiens
ctactgtccgggtac

SEQ ID NO: 977153 - DNA, 15 bp, Homo sapiens
tactgtccgggtacc

SEQ ID NO: 977154 - DNA, 15 bp, Homo sapiens
actgtccgggtaccc

SEQ ID NO: 977155 - DNA, 15 bp, Homo sapiens
ctgtccgggtacccc

SEQ ID NO: 977156 - DNA, 15 bp, Homo sapiens
tgtccgggtaccccg

SEQ ID NO: 977157 - DNA, 15 bp, Homo sapiens
gtccgggtaccccgc

SEQ ID NO: 977158 - DNA, 15 bp, Homo sapiens
tccgggtaccccgcg

SEQ ID NO: 977159 - DNA, 15 bp, Homo sapiens
ccgggtaccccgcga

SEQ ID NO: 977160 - DNA, 15 bp, Homo sapiens
cgggtaccccgcgat

SEQ ID NO: 977161 - DNA, 15 bp, Homo sapiens
gggtaccccgcgatg

SEQ ID NO: 977162 - DNA, 15 bp, Homo sapiens
ggtaccccgcgatgt

SEQ ID NO: 977163 - DNA, 15 bp, Homo sapiens
gtaccccgcgatgta

SEQ ID NO: 977164 - DNA, 15 bp, Homo sapiens
taccccgcgatgtac

SEQ ID NO: 977165 - DNA, 15 bp, Homo sapiens
accccgcgatgtacc

SEQ ID NO: 977166 - DNA, 15 bp, Homo sapiens
ccccgcgatgtaccc

SEQ ID NO: 977167 - DNA, 15 bp, Homo sapiens
cccgcgatgtacccg

SEQ ID NO: 977168 - DNA, 15 bp, Homo sapiens
ccgcgatgtacccgg

SEQ ID NO: 977169 - DNA, 15 bp, Homo sapiens
cgcgatgtacccggc

SEQ ID NO: 977170 - DNA, 15 bp, Homo sapiens
gcgatgtacccggcg

SEQ ID NO: 977171 - DNA, 15 bp, Homo sapiens
cgatgtacccggcgc

SEQ ID NO: 977172 - DNA, 15 bp, Homo sapiens
gatgtacccggcgcc

SEQ ID NO: 977173 - DNA, 15 bp, Homo sapiens
atgtacccggcgcct

SEQ ID NO: 977174 - DNA, 15 bp, Homo sapiens
tgtacccggcgcctc

SEQ ID NO: 977175 - DNA, 15 bp, Homo sapiens
gtacccggcgcctca

SEQ ID NO: 977176 - DNA, 15 bp, Homo sapiens
tacccggcgcctcag

SEQ ID NO: 977177 - DNA, 15 bp, Homo sapiens
acccggcgcctcagt

SEQ ID NO: 977178 - DNA, 15 bp, Homo sapiens
cccggcgcctcagta

SEQ ID NO: 977179 - DNA, 15 bp, Homo sapiens
ccggcgcctcagtac

SEQ ID NO: 977180 - DNA, 15 bp, Homo sapiens
cggcgcctcagtacc

SEQ ID NO: 977181 - DNA, 15 bp, Homo sapiens
ggcgcctcagtacca

SEQ ID NO: 977182 - DNA, 15 bp, Homo sapiens
gcgcctcagtaccaa

SEQ ID NO: 977183 - DNA, 15 bp, Homo sapiens
cgcctcagtaccaag

SEQ ID NO: 977184 - DNA, 15 bp, Homo sapiens
gcctcagtaccaagg

SEQ ID NO: 977185 - DNA, 15 bp, Homo sapiens
cctcagtaccaaggg

SEQ ID NO: 977186 - DNA, 15 bp, Homo sapiens
ctcagtaccaagggc

SEQ ID NO: 977187 - DNA, 15 bp, Homo sapiens
tcagtaccaagggca

SEQ ID NO: 977188 - DNA, 15 bp, Homo sapiens
cagtaccaagggcac

SEQ ID NO: 977189 - DNA, 15 bp, Homo sapiens
agtaccaagggcact

SEQ ID NO: 977190 - DNA, 15 bp, Homo sapiens
gtaccaagggcactt

SEQ ID NO: 977191 - DNA, 15 bp, Homo sapiens
taccaagggcacttc

SEQ ID NO: 977192 - DNA, 15 bp, Homo sapiens
accaagggcacttcc

SEQ ID NO: 977193 - DNA, 15 bp, Homo sapiens
ccaagggcacttcca

SEQ ID NO: 977194 - DNA, 15 bp, Homo sapiens
caagggcacttccag

SEQ ID NO: 977195 - DNA, 15 bp, Homo sapiens
aagggcacttccagc

SEQ ID NO: 977196 - DNA, 15 bp, Homo sapiens
agggcacttccagct

SEQ ID NO: 977197 - DNA, 15 bp, Homo sapiens
gggcacttccagctc

SEQ ID NO: 977198 - DNA, 15 bp, Homo sapiens
ggcacttccagctct

SEQ ID NO: 977199 - DNA, 15 bp, Homo sapiens
gcacttccagctctt

SEQ ID NO: 977200 - DNA, 15 bp, Homo sapiens
cacttccagctcttc

SEQ ID NO: 977201 - DNA, 15 bp, Homo sapiens
acttccagctcttcc

SEQ ID NO: 977202 - DNA, 15 bp, Homo sapiens
cttccagctcttccg

SEQ ID NO: 977203 - DNA, 15 bp, Homo sapiens
ttccagctcttccgc

SEQ ID NO: 977204 - DNA, 15 bp, Homo sapiens
tccagctcttccgcg

SEQ ID NO: 977205 - DNA, 15 bp, Homo sapiens
ccagctcttccgcgg

SEQ ID NO: 977206 - DNA, 15 bp, Homo sapiens
cagctcttccgcggg

SEQ ID NO: 977207 - DNA, 15 bp, Homo sapiens
agctcttccgcgggc

SEQ ID NO: 977208 - DNA, 15 bp, Homo sapiens
gctcttccgcgggct

SEQ ID NO: 977209 - DNA, 15 bp, Homo sapiens
ctcttccgcgggctc

SEQ ID NO: 977210 - DNA, 15 bp, Homo sapiens
tcttccgcgggctcc

SEQ ID NO: 977211 - DNA, 15 bp, Homo sapiens
cttccgcgggctcca

SEQ ID NO: 977212 - DNA, 15 bp, Homo sapiens
ttccgcgggctccag

SEQ ID NO: 977213 - DNA, 15 bp, Homo sapiens
tccgcgggctccagg

SEQ ID NO: 977214 - DNA, 15 bp, Homo sapiens
ccgcgggctccaggg

SEQ ID NO: 977215 - DNA, 15 bp, Homo sapiens
cgcgggctccaggga

SEQ ID NO: 977216 - DNA, 15 bp, Homo sapiens
gcgggctccagggac

SEQ ID NO: 977217 - DNA, 15 bp, Homo sapiens
cgggctccagggacc

SEQ ID NO: 977218 - DNA, 15 bp, Homo sapiens
gggctccagggaccc

SEQ ID NO: 977219 - DNA, 15 bp, Homo sapiens
ggctccagggacccg

SEQ ID NO: 977220 - DNA, 15 bp, Homo sapiens
gctccagggacccgc

SEQ ID NO: 977221 - DNA, 15 bp, Homo sapiens
ctccagggacccgcg

SEQ ID NO: 977222 - DNA, 15 bp, Homo sapiens
tccagggacccgcgc

SEQ ID NO: 977223 - DNA, 15 bp, Homo sapiens
ccagggacccgcgcc

SEQ ID NO: 977224 - DNA, 15 bp, Homo sapiens
cagggacccgcgccc

SEQ ID NO: 977225 - DNA, 15 bp, Homo sapiens
agggacccgcgcccg

SEQ ID NO: 977226 - DNA, 15 bp, Homo sapiens
gggacccgcgcccgg

SEQ ID NO: 977227 - DNA, 15 bp, Homo sapiens
ggacccgcgcccggt

SEQ ID NO: 977228 - DNA, 15 bp, Homo sapiens
gacccgcgcccggtc

SEQ ID NO: 977229 - DNA, 15 bp, Homo sapiens
acccgcgcccggtcc

SEQ ID NO: 977230 - DNA, 15 bp, Homo sapiens
cccgcgcccggtccc

SEQ ID NO: 977231 - DNA, 15 bp, Homo sapiens
ccgcgcccggtcccg

SEQ ID NO: 977232 - DNA, 15 bp, Homo sapiens
cgcgcccggtcccgc

SEQ ID NO: 977233 - DNA, 15 bp, Homo sapiens
gcgcccggtcccgcc

SEQ ID NO: 977234 - DNA, 15 bp, Homo sapiens
cgcccggtcccgcca

SEQ ID NO: 977235 - DNA, 15 bp, Homo sapiens
gcccggtcccgccac

SEQ ID NO: 977236 - DNA, 15 bp, Homo sapiens
cccggtcccgccacg

SEQ ID NO: 977237 - DNA, 15 bp, Homo sapiens
ccggtcccgccacgt

SEQ ID NO: 977238 - DNA, 15 bp, Homo sapiens
cggtcccgccacgtc

SEQ ID NO: 977239 - DNA, 15 bp, Homo sapiens
ggtcccgccacgtcc

SEQ ID NO: 977240 - DNA, 15 bp, Homo sapiens
gtcccgccacgtccc

SEQ ID NO: 977241 - DNA, 15 bp, Homo sapiens
tcccgccacgtcccc

SEQ ID NO: 977242 - DNA, 15 bp, Homo sapiens
cccgccacgtccccc

SEQ ID NO: 977243 - DNA, 15 bp, Homo sapiens
ccgccacgtccccct

SEQ ID NO: 977244 - DNA, 15 bp, Homo sapiens
cgccacgtccccctc

SEQ ID NO: 977245 - DNA, 15 bp, Homo sapiens
gccacgtccccctcc

SEQ ID NO: 977246 - DNA, 15 bp, Homo sapiens
ccacgtccccctcct

SEQ ID NO: 977247 - DNA, 15 bp, Homo sapiens
cacgtccccctcctt

SEQ ID NO: 977248 - DNA, 15 bp, Homo sapiens
acgtccccctccttc

SEQ ID NO: 977249 - DNA, 15 bp, Homo sapiens
cgtccccctccttcc

SEQ ID NO: 977250 - DNA, 15 bp, Homo sapiens
gtccccctccttcct

SEQ ID NO: 977251 - DNA, 15 bp, Homo sapiens
tccccctccttcctg

SEQ ID NO: 977252 - DNA, 15 bp, Homo sapiens
ccccctccttcctga

SEQ ID NO: 977253 - DNA, 15 bp, Homo sapiens
cccctccttcctgag

SEQ ID NO: 977254 - DNA, 15 bp, Homo sapiens
ccctccttcctgagt

SEQ ID NO: 977255 - DNA, 15 bp, Homo sapiens
cctccttcctgagtt

SEQ ID NO: 977256 - DNA, 15 bp, Homo sapiens
ctccttcctgagttg

SEQ ID NO: 977257 - DNA, 15 bp, Homo sapiens
tccttcctgagttgt

SEQ ID NO: 977258 - DNA, 15 bp, Homo sapiens
ccttcctgagttgtt

SEQ ID NO: 977259 - DNA, 15 bp, Homo sapiens
cttcctgagttgttt

SEQ ID NO: 977260 - DNA, 15 bp, Homo sapiens
ttcctgagttgtttg

SEQ ID NO: 977261 - DNA, 15 bp, Homo sapiens
tcctgagttgtttgg

SEQ ID NO: 977262 - DNA, 15 bp, Homo sapiens
cctgagttgtttggg

SEQ ID NO: 977263 - DNA, 15 bp, Homo sapiens
ctgagttgtttggga

SEQ ID NO: 977264 - DNA, 15 bp, Homo sapiens
tgagttgtttgggac

SEQ ID NO: 977265 - DNA, 15 bp, Homo sapiens
gagttgtttgggacc

SEQ ID NO: 977266 - DNA, 15 bp, Homo sapiens
agttgtttgggaccc

SEQ ID NO: 977267 - DNA, 15 bp, Homo sapiens
gttgtttgggacccg

SEQ ID NO: 977268 - DNA, 15 bp, Homo sapiens
ttgtttgggacccgg

SEQ ID NO: 977269 - DNA, 15 bp, Homo sapiens
tgtttgggacccggg

SEQ ID NO: 977270 - DNA, 15 bp, Homo sapiens
gtttgggacccggga

SEQ ID NO: 977271 - DNA, 15 bp, Homo sapiens
tttgggacccgggac

SEQ ID NO: 977272 - DNA, 15 bp, Homo sapiens
ttgggacccgggacg

SEQ ID NO: 977273 - DNA, 15 bp, Homo sapiens
tgggacccgggacgg

SEQ ID NO: 977274 - DNA, 15 bp, Homo sapiens
gggacccgggacggt

SEQ ID NO: 977275 - DNA, 15 bp, Homo sapiens
ggacccgggacggtg

SEQ ID NO: 977276 - DNA, 15 bp, Homo sapiens
gacccgggacggtgg

SEQ ID NO: 977277 - DNA, 15 bp, Homo sapiens
acccgggacggtggg

SEQ ID NO: 977278 - DNA, 15 bp, Homo sapiens
cccgggacggtgggc

SEQ ID NO: 977279 - DNA, 15 bp, Homo sapiens
ccgggacggtgggca

SEQ ID NO: 977280 - DNA, 15 bp, Homo sapiens
cgggacggtgggcac

SEQ ID NO: 977281 - DNA, 15 bp, Homo sapiens
gggacggtgggcact

SEQ ID NO: 977282 - DNA, 15 bp, Homo sapiens
ggacggtgggcactg

SEQ ID NO: 977283 - DNA, 15 bp, Homo sapiens
gacggtgggcactgg

SEQ ID NO: 977284 - DNA, 15 bp, Homo sapiens
acggtgggcactgga

SEQ ID NO: 977285 - DNA, 15 bp, Homo sapiens
cggtgggcactggac

SEQ ID NO: 977286 - DNA, 15 bp, Homo sapiens
ggtgggcactggact

SEQ ID NO: 977287 - DNA, 15 bp, Homo sapiens
gtgggcactggactc

SEQ ID NO: 977288 - DNA, 15 bp, Homo sapiens
tgggcactggactcg

SEQ ID NO: 977289 - DNA, 15 bp, Homo sapiens
gggcactggactcgg

SEQ ID NO: 977290 - DNA, 15 bp, Homo sapiens
ggcactggactcggg

SEQ ID NO: 977291 - DNA, 15 bp, Homo sapiens
gcactggactcgggg

SEQ ID NO: 977292 - DNA, 15 bp, Homo sapiens
cactggactcggggg

SEQ ID NO: 977293 - DNA, 15 bp, Homo sapiens
actggactcgggggg

SEQ ID NO: 977294 - DNA, 15 bp, Homo sapiens
ctggactcgggggga

SEQ ID NO: 977295 - DNA, 15 bp, Homo sapiens
tggactcggggggac

SEQ ID NO: 977296 - DNA, 15 bp, Homo sapiens
ggactcggggggact

SEQ ID NO: 977297 - DNA, 15 bp, Homo sapiens
gactcggggggactg

SEQ ID NO: 977298 - DNA, 15 bp, Homo sapiens
actcggggggactgc

SEQ ID NO: 977299 - DNA, 15 bp, Homo sapiens
ctcggggggactgca

SEQ ID NO: 977300 - DNA, 15 bp, Homo sapiens
tcggggggactgcag

SEQ ID NO: 977301 - DNA, 15 bp, Homo sapiens
cggggggactgcaga

SEQ ID NO: 977302 - DNA, 15 bp, Homo sapiens
ggggggactgcagag

SEQ ID NO: 977303 - DNA, 15 bp, Homo sapiens
gggggactgcagagg

SEQ ID NO: 977304 - DNA, 15 bp, Homo sapiens
ggggactgcagagga

SEQ ID NO: 977305 - DNA, 15 bp, Homo sapiens
gggactgcagaggat

SEQ ID NO: 977306 - DNA, 15 bp, Homo sapiens
ggactgcagaggatc

SEQ ID NO: 977307 - DNA, 15 bp, Homo sapiens
gactgcagaggatcc

SEQ ID NO: 977308 - DNA, 15 bp, Homo sapiens
actgcagaggatcca

SEQ ID NO: 977309 - DNA, 15 bp, Homo sapiens
ctgcagaggatccag

SEQ ID NO: 977310 - DNA, 15 bp, Homo sapiens
tgcagaggatccagg

SEQ ID NO: 977311 - DNA, 15 bp, Homo sapiens
gcagaggatccaggt

SEQ ID NO: 977312 - DNA, 15 bp, Homo sapiens
cagaggatccaggtg

SEQ ID NO: 977313 - DNA, 15 bp, Homo sapiens
agaggatccaggtgt

SEQ ID NO: 977314 - DNA, 15 bp, Homo sapiens
gaggatccaggtgtg

SEQ ID NO: 977315 - DNA, 15 bp, Homo sapiens
aggatccaggtgtga

SEQ ID NO: 977316 - DNA, 15 bp, Homo sapiens
ggatccaggtgtgat

SEQ ID NO: 977317 - DNA, 15 bp, Homo sapiens
gatccaggtgtgata

SEQ ID NO: 977318 - DNA, 15 bp, Homo sapiens
atccaggtgtgatag

SEQ ID NO: 977319 - DNA, 15 bp, Homo sapiens
tccaggtgtgatagc

SEQ ID NO: 977320 - DNA, 15 bp, Homo sapiens
ccaggtgtgatagcc

SEQ ID NO: 977321 - DNA, 15 bp, Homo sapiens
caggtgtgatagccg

SEQ ID NO: 977322 - DNA, 15 bp, Homo sapiens
aggtgtgatagccga

SEQ ID NO: 977323 - DNA, 15 bp, Homo sapiens
ggtgtgatagccgag

SEQ ID NO: 977324 - DNA, 15 bp, Homo sapiens
gtgtgatagccgaga

SEQ ID NO: 977325 - DNA, 15 bp, Homo sapiens
tgtgatagccgagac

SEQ ID NO: 977326 - DNA, 15 bp, Homo sapiens
gtgatagccgagacc

SEQ ID NO: 977327 - DNA, 15 bp, Homo sapiens
tgatagccgagaccg

SEQ ID NO: 977328 - DNA, 15 bp, Homo sapiens
gatagccgagaccgc

SEQ ID NO: 977329 - DNA, 15 bp, Homo sapiens
atagccgagaccgcg

SEQ ID NO: 977330 - DNA, 15 bp, Homo sapiens
tagccgagaccgcgc

SEQ ID NO: 977331 - DNA, 15 bp, Homo sapiens
agccgagaccgcgcc

SEQ ID NO: 977332 - DNA, 15 bp, Homo sapiens
gccgagaccgcgcca

SEQ ID NO: 977333 - DNA, 15 bp, Homo sapiens
ccgagaccgcgccat

SEQ ID NO: 977334 - DNA, 15 bp, Homo sapiens
cgagaccgcgccatc

SEQ ID NO: 977335 - DNA, 15 bp, Homo sapiens
gagaccgcgccatcc

SEQ ID NO: 977336 - DNA, 15 bp, Homo sapiens
agaccgcgccatcca

SEQ ID NO: 977337 - DNA, 15 bp, Homo sapiens
gaccgcgccatccaa

SEQ ID NO: 977338 - DNA, 15 bp, Homo sapiens
accgcgccatccaag

SEQ ID NO: 977339 - DNA, 15 bp, Homo sapiens
ccgcgccatccaagc

SEQ ID NO: 977340 - DNA, 15 bp, Homo sapiens
cgcgccatccaagcg

SEQ ID NO: 977341 - DNA, 15 bp, Homo sapiens
gcgccatccaagcga

SEQ ID NO: 977342 - DNA, 15 bp, Homo sapiens
cgccatccaagcgag

SEQ ID NO: 977343 - DNA, 15 bp, Homo sapiens
gccatccaagcgagg

SEQ ID NO: 977344 - DNA, 15 bp, Homo sapiens
ccatccaagcgaggc

SEQ ID NO: 977345 - DNA, 15 bp, Homo sapiens
catccaagcgaggcc

SEQ ID NO: 977346 - DNA, 15 bp, Homo sapiens
atccaagcgaggccg

SEQ ID NO: 977347 - DNA, 15 bp, Homo sapiens
tccaagcgaggccga

SEQ ID NO: 977348 - DNA, 15 bp, Homo sapiens
ccaagcgaggccgac

SEQ ID NO: 977349 - DNA, 15 bp, Homo sapiens
caagcgaggccgacg

SEQ ID NO: 977350 - DNA, 15 bp, Homo sapiens
aagcgaggccgacgt

SEQ ID NO: 977351 - DNA, 15 bp, Homo sapiens
agcgaggccgacgtt

SEQ ID NO: 977352 - DNA, 15 bp, Homo sapiens
gcgaggccgacgttc

SEQ ID NO: 977353 - DNA, 15 bp, Homo sapiens
cgaggccgacgttcg

SEQ ID NO: 977354 - DNA, 15 bp, Homo sapiens
gaggccgacgttcgt

SEQ ID NO: 977355 - DNA, 15 bp, Homo sapiens
aggccgacgttcgtg

SEQ ID NO: 977356 - DNA, 15 bp, Homo sapiens
ggccgacgttcgtgg

SEQ ID NO: 977357 - DNA, 15 bp, Homo sapiens
gccgacgttcgtggg

SEQ ID NO: 977358 - DNA, 15 bp, Homo sapiens
ccgacgttcgtgggc

SEQ ID NO: 977359 - DNA, 15 bp, Homo sapiens
cgacgttcgtgggcg

SEQ ID NO: 977360 - DNA, 15 bp, Homo sapiens
gacgttcgtgggcgc

SEQ ID NO: 977361 - DNA, 15 bp, Homo sapiens
acgttcgtgggcgcg

SEQ ID NO: 977362 - DNA, 15 bp, Homo sapiens
cgttcgtgggcgcgc

SEQ ID NO: 977363 - DNA, 15 bp, Homo sapiens
gttcgtgggcgcgca

SEQ ID NO: 977364 - DNA, 15 bp, Homo sapiens
ttcgtgggcgcgcaa

SEQ ID NO: 977365 - DNA, 15 bp, Homo sapiens
tcgtgggcgcgcaag

SEQ ID NO: 977366 - DNA, 15 bp, Homo sapiens
cgtgggcgcgcaaga

SEQ ID NO: 977367 - DNA, 15 bp, Homo sapiens
gtgggcgcgcaagag

SEQ ID NO: 977368 - DNA, 15 bp, Homo sapiens
tgggcgcgcaagagg

SEQ ID NO: 977369 - DNA, 15 bp, Homo sapiens
gggcgcgcaagaggc

SEQ ID NO: 977370 - DNA, 15 bp, Homo sapiens
ggcgcgcaagaggca

SEQ ID NO: 977371 - DNA, 15 bp, Homo sapiens
gcgcgcaagaggcag

SEQ ID NO: 977372 - DNA, 15 bp, Homo sapiens
cgcgcaagaggcagg

SEQ ID NO: 977373 - DNA, 15 bp, Homo sapiens
gcgcaagaggcaggc

SEQ ID NO: 977374 - DNA, 15 bp, Homo sapiens
cgcaagaggcaggca

SEQ ID NO: 977375 - DNA, 15 bp, Homo sapiens
gcaagaggcaggcag

SEQ ID NO: 977376 - DNA, 15 bp, Homo sapiens
caagaggcaggcagc

SEQ ID NO: 977377 - DNA, 15 bp, Homo sapiens
aagaggcaggcagcg

SEQ ID NO: 977378 - DNA, 15 bp, Homo sapiens
agaggcaggcagcgc

SEQ ID NO: 977379 - DNA, 15 bp, Homo sapiens
gaggcaggcagcgca

SEQ ID NO: 977380 - DNA, 15 bp, Homo sapiens
aggcaggcagcgcac

SEQ ID NO: 977381 - DNA, 15 bp, Homo sapiens
ggcaggcagcgcaca

SEQ ID NO: 977382 - DNA, 15 bp, Homo sapiens
gcaggcagcgcacac

SEQ ID NO: 977383 - DNA, 15 bp, Homo sapiens
caggcagcgcacacg

SEQ ID NO: 977384 - DNA, 15 bp, Homo sapiens
aggcagcgcacacgt

SEQ ID NO: 977385 - DNA, 15 bp, Homo sapiens
ggcagcgcacacgtg

SEQ ID NO: 977386 - DNA, 15 bp, Homo sapiens
gcagcgcacacgtgc

SEQ ID NO: 977387 - DNA, 15 bp, Homo sapiens
cagcgcacacgtgcg

SEQ ID NO: 977388 - DNA, 15 bp, Homo sapiens
agcgcacacgtgcgc

SEQ ID NO: 977389 - DNA, 15 bp, Homo sapiens
gcgcacacgtgcgcg

SEQ ID NO: 977390 - DNA, 15 bp, Homo sapiens
cgcacacgtgcgcgc

SEQ ID NO: 977391 - DNA, 15 bp, Homo sapiens
gcacacgtgcgcgca

SEQ ID NO: 977392 - DNA, 15 bp, Homo sapiens
cacacgtgcgcgcac

SEQ ID NO: 977393 - DNA, 15 bp, Homo sapiens
acacgtgcgcgcacc

SEQ ID NO: 977394 - DNA, 15 bp, Homo sapiens
cacgtgcgcgcaccc

SEQ ID NO: 977395 - DNA, 15 bp, Homo sapiens
acgtgcgcgcacccg

SEQ ID NO: 977396 - DNA, 15 bp, Homo sapiens
cgtgcgcgcacccgg

SEQ ID NO: 977397 - DNA, 15 bp, Homo sapiens
gtgcgcgcacccggg

SEQ ID NO: 977398 - DNA, 15 bp, Homo sapiens
tgcgcgcacccgggt

SEQ ID NO: 977399 - DNA, 15 bp, Homo sapiens
gcgcgcacccgggtt

SEQ ID NO: 977400 - DNA, 15 bp, Homo sapiens
cgcgcacccgggttg

SEQ ID NO: 977401 - DNA, 15 bp, Homo sapiens
gcgcacccgggttgc

SEQ ID NO: 977402 - DNA, 15 bp, Homo sapiens
cgcacccgggttgcg

SEQ ID NO: 977403 - DNA, 15 bp, Homo sapiens
gcacccgggttgcgg

SEQ ID NO: 977404 - DNA, 15 bp, Homo sapiens
cacccgggttgcggc

SEQ ID NO: 977405 - DNA, 15 bp, Homo sapiens
acccgggttgcggca

SEQ ID NO: 977406 - DNA, 15 bp, Homo sapiens
cccgggttgcggcaa

SEQ ID NO: 977407 - DNA, 15 bp, Homo sapiens
ccgggttgcggcaag

SEQ ID NO: 977408 - DNA, 15 bp, Homo sapiens
cgggttgcggcaaga

SEQ ID NO: 977409 - DNA, 15 bp, Homo sapiens
gggttgcggcaagag

SEQ ID NO: 977410 - DNA, 15 bp, Homo sapiens
ggttgcggcaagagc

SEQ ID NO: 977411 - DNA, 15 bp, Homo sapiens
gttgcggcaagagct

SEQ ID NO: 977412 - DNA, 15 bp, Homo sapiens
ttgcggcaagagcta

SEQ ID NO: 977413 - DNA, 15 bp, Homo sapiens
tgcggcaagagctac

SEQ ID NO: 977414 - DNA, 15 bp, Homo sapiens
gcggcaagagctaca

SEQ ID NO: 977415 - DNA, 15 bp, Homo sapiens
cggcaagagctacac

SEQ ID NO: 977416 - DNA, 15 bp, Homo sapiens
ggcaagagctacacc

SEQ ID NO: 977417 - DNA, 15 bp, Homo sapiens
gcaagagctacacca

SEQ ID NO: 977418 - DNA, 15 bp, Homo sapiens
caagagctacaccaa

SEQ ID NO: 977419 - DNA, 15 bp, Homo sapiens
aagagctacaccaag

SEQ ID NO: 977420 - DNA, 15 bp, Homo sapiens
agagctacaccaaga

SEQ ID NO: 977421 - DNA, 15 bp, Homo sapiens
gagctacaccaagag

SEQ ID NO: 977422 - DNA, 15 bp, Homo sapiens
agctacaccaagagc

SEQ ID NO: 977423 - DNA, 15 bp, Homo sapiens
gctacaccaagagct

SEQ ID NO: 977424 - DNA, 15 bp, Homo sapiens
ctacaccaagagctc

SEQ ID NO: 977425 - DNA, 15 bp, Homo sapiens
tacaccaagagctcc

SEQ ID NO: 977426 - DNA, 15 bp, Homo sapiens
acaccaagagctccc

SEQ ID NO: 977427 - DNA, 15 bp, Homo sapiens
caccaagagctccca

SEQ ID NO: 977428 - DNA, 15 bp, Homo sapiens
accaagagctcccac

SEQ ID NO: 977429 - DNA, 15 bp, Homo sapiens
ccaagagctcccacc

SEQ ID NO: 977430 - DNA, 15 bp, Homo sapiens
caagagctcccacct

SEQ ID NO: 977431 - DNA, 15 bp, Homo sapiens
aagagctcccacctg

SEQ ID NO: 977432 - DNA, 15 bp, Homo sapiens
agagctcccacctga

SEQ ID NO: 977433 - DNA, 15 bp, Homo sapiens
gagctcccacctgaa

SEQ ID NO: 977434 - DNA, 15 bp, Homo sapiens
agctcccacctgaag

SEQ ID NO: 977435 - DNA, 15 bp, Homo sapiens
gctcccacctgaagg

SEQ ID NO: 977436 - DNA, 15 bp, Homo sapiens
ctcccacctgaaggc

SEQ ID NO: 977437 - DNA, 15 bp, Homo sapiens
tcccacctgaaggcg

SEQ ID NO: 977438 - DNA, 15 bp, Homo sapiens
cccacctgaaggcgc

SEQ ID NO: 977439 - DNA, 15 bp, Homo sapiens
ccacctgaaggcgca

SEQ ID NO: 977440 - DNA, 15 bp, Homo sapiens
cacctgaaggcgcat

SEQ ID NO: 977441 - DNA, 15 bp, Homo sapiens
acctgaaggcgcatc

SEQ ID NO: 977442 - DNA, 15 bp, Homo sapiens
cctgaaggcgcatct

SEQ ID NO: 977443 - DNA, 15 bp, Homo sapiens
ctgaaggcgcatctg

SEQ ID NO: 977444 - DNA, 15 bp, Homo sapiens
tgaaggcgcatctgc

SEQ ID NO: 977445 - DNA, 15 bp, Homo sapiens
gaaggcgcatctgcg

SEQ ID NO: 977446 - DNA, 15 bp, Homo sapiens
aaggcgcatctgcgc

SEQ ID NO: 977447 - DNA, 15 bp, Homo sapiens
aggcgcatctgcgca

SEQ ID NO: 977448 - DNA, 15 bp, Homo sapiens
ggcgcatctgcgcac

SEQ ID NO: 977449 - DNA, 15 bp, Homo sapiens
gcgcatctgcgcacg

SEQ ID NO: 977450 - DNA, 15 bp, Homo sapiens
cgcatctgcgcacgc

SEQ ID NO: 977451 - DNA, 15 bp, Homo sapiens
gcatctgcgcacgca

SEQ ID NO: 977452 - DNA, 15 bp, Homo sapiens
catctgcgcacgcac

SEQ ID NO: 977453 - DNA, 15 bp, Homo sapiens
atctgcgcacgcaca

SEQ ID NO: 977454 - DNA, 15 bp, Homo sapiens
tctgcgcacgcacac

SEQ ID NO: 977455 - DNA, 15 bp, Homo sapiens
ctgcgcacgcacaca

SEQ ID NO: 977456 - DNA, 15 bp, Homo sapiens
tgcgcacgcacacag

SEQ ID NO: 977457 - DNA, 15 bp, Homo sapiens
gcgcacgcacacagg

SEQ ID NO: 977458 - DNA, 15 bp, Homo sapiens
cgcacgcacacaggt

SEQ ID NO: 977459 - DNA, 15 bp, Homo sapiens
gcacgcacacaggtg

SEQ ID NO: 977460 - DNA, 15 bp, Homo sapiens
cacgcacacaggtga

SEQ ID NO: 977461 - DNA, 15 bp, Homo sapiens
acgcacacaggtgag

SEQ ID NO: 977462 - DNA, 15 bp, Homo sapiens
cgcacacaggtgagg

SEQ ID NO: 977463 - DNA, 15 bp, Homo sapiens
gcacacaggtgaggg

SEQ ID NO: 977464 - DNA, 15 bp, Homo sapiens
cacacaggtgagggg

SEQ ID NO: 977465 - DNA, 15 bp, Homo sapiens
acacaggtgaggggg

SEQ ID NO: 977466 - DNA, 15 bp, Homo sapiens
cacaggtgagggggc

SEQ ID NO: 977467 - DNA, 15 bp, Homo sapiens
acaggtgagggggcg

SEQ ID NO: 977468 - DNA, 15 bp, Homo sapiens
caggtgagggggcgg

SEQ ID NO: 977469 - DNA, 15 bp, Homo sapiens
aggtgagggggcggg

SEQ ID NO: 977470 - DNA, 15 bp, Homo sapiens
ggtgagggggcgggg

SEQ ID NO: 977471 - DNA, 15 bp, Homo sapiens
gtgagggggcggggc

SEQ ID NO: 977472 - DNA, 15 bp, Homo sapiens
tgagggggcggggcc

SEQ ID NO: 977473 - DNA, 15 bp, Homo sapiens
gagggggcggggccc

SEQ ID NO: 977474 - DNA, 15 bp, Homo sapiens
agggggcggggcccc

SEQ ID NO: 977475 - DNA, 15 bp, Homo sapiens
gggggcggggccccg

SEQ ID NO: 977476 - DNA, 15 bp, Homo sapiens
ggggcggggccccgg

SEQ ID NO: 977477 - DNA, 15 bp, Homo sapiens
gggcggggccccgga

SEQ ID NO: 977478 - DNA, 15 bp, Homo sapiens
ggcggggccccggac

SEQ ID NO: 977479 - DNA, 15 bp, Homo sapiens
gcggggccccggaca

SEQ ID NO: 977480 - DNA, 15 bp, Homo sapiens
cggggccccggacat

SEQ ID NO: 977481 - DNA, 15 bp, Homo sapiens
ggggccccggacatg

SEQ ID NO: 977482 - DNA, 15 bp, Homo sapiens
gggccccggacatga

SEQ ID NO: 977483 - DNA, 15 bp, Homo sapiens
ggccccggacatgag

SEQ ID NO: 977484 - DNA, 15 bp, Homo sapiens
gccccggacatgaga

SEQ ID NO: 977485 - DNA, 15 bp, Homo sapiens
ccccggacatgagaa

SEQ ID NO: 977486 - DNA, 15 bp, Homo sapiens
cccggacatgagaaa

SEQ ID NO: 977487 - DNA, 15 bp, Homo sapiens
ccggacatgagaaag

SEQ ID NO: 977488 - DNA, 15 bp, Homo sapiens
cggacatgagaaagg

SEQ ID NO: 977489 - DNA, 15 bp, Homo sapiens
ggacatgagaaaggg

SEQ ID NO: 977490 - DNA, 15 bp, Homo sapiens
gacatgagaaagggc

SEQ ID NO: 977491 - DNA, 15 bp, Homo sapiens
acatgagaaagggcg

SEQ ID NO: 977492 - DNA, 15 bp, Homo sapiens
catgagaaagggcgc

SEQ ID NO: 977493 - DNA, 15 bp, Homo sapiens
atgagaaagggcgcg

SEQ ID NO: 977494 - DNA, 15 bp, Homo sapiens
tgagaaagggcgcgg

SEQ ID NO: 977495 - DNA, 15 bp, Homo sapiens
gagaaagggcgcggc

SEQ ID NO: 977496 - DNA, 15 bp, Homo sapiens
agaaagggcgcggcg

SEQ ID NO: 977497 - DNA, 15 bp, Homo sapiens
gaaagggcgcggcgc

SEQ ID NO: 977498 - DNA, 15 bp, Homo sapiens
aaagggcgcggcgcc

SEQ ID NO: 977499 - DNA, 15 bp, Homo sapiens
aagggcgcggcgccc

SEQ ID NO: 977500 - DNA, 15 bp, Homo sapiens
agggcgcggcgcccg

SEQ ID NO: 977501 - DNA, 15 bp, Homo sapiens
gggcgcggcgcccgc

SEQ ID NO: 977502 - DNA, 15 bp, Homo sapiens
ggcgcggcgcccgct

SEQ ID NO: 977503 - DNA, 15 bp, Homo sapiens
gcgcggcgcccgctg

SEQ ID NO: 977504 - DNA, 15 bp, Homo sapiens
cgcggcgcccgctgt

SEQ ID NO: 977505 - DNA, 15 bp, Homo sapiens
gcggcgcccgctgta

SEQ ID NO: 977506 - DNA, 15 bp, Homo sapiens
cggcgcccgctgtag

SEQ ID NO: 977507 - DNA, 15 bp, Homo sapiens
ggcgcccgctgtagt

SEQ ID NO: 977508 - DNA, 15 bp, Homo sapiens
gcgcccgctgtagtt

SEQ ID NO: 977509 - DNA, 15 bp, Homo sapiens
cgcccgctgtagtta

SEQ ID NO: 977510 - DNA, 15 bp, Homo sapiens
gcccgctgtagttac

SEQ ID NO: 977511 - DNA, 15 bp, Homo sapiens
cccgctgtagttaca

SEQ ID NO: 977512 - DNA, 15 bp, Homo sapiens
ccgctgtagttacag

SEQ ID NO: 977513 - DNA, 15 bp, Homo sapiens
cgctgtagttacagg

SEQ ID NO: 977514 - DNA, 15 bp, Homo sapiens
gctgtagttacaggg

SEQ ID NO: 977515 - DNA, 15 bp, Homo sapiens
ctgtagttacagggg

SEQ ID NO: 977516 - DNA, 15 bp, Homo sapiens
tgtagttacagggga

SEQ ID NO: 977517 - DNA, 15 bp, Homo sapiens
gtagttacaggggaa

SEQ ID NO: 977518 - DNA, 15 bp, Homo sapiens
tagttacaggggaag

SEQ ID NO: 977519 - DNA, 15 bp, Homo sapiens
agttacaggggaaga

SEQ ID NO: 977520 - DNA, 15 bp, Homo sapiens
gttacaggggaagaa

SEQ ID NO: 977521 - DNA, 15 bp, Homo sapiens
ttacaggggaagaag

SEQ ID NO: 977522 - DNA, 15 bp, Homo sapiens
tacaggggaagaagg

SEQ ID NO: 977523 - DNA, 15 bp, Homo sapiens
acaggggaagaaggg

SEQ ID NO: 977524 - DNA, 15 bp, Homo sapiens
caggggaagaagggt

SEQ ID NO: 977525 - DNA, 15 bp, Homo sapiens
aggggaagaagggtt

SEQ ID NO: 977526 - DNA, 15 bp, Homo sapiens
ggggaagaagggttg

SEQ ID NO: 977527 - DNA, 15 bp, Homo sapiens
gggaagaagggttgc

SEQ ID NO: 977528 - DNA, 15 bp, Homo sapiens
ggaagaagggttgca

SEQ ID NO: 977529 - DNA, 15 bp, Homo sapiens
gaagaagggttgcag

SEQ ID NO: 977530 - DNA, 15 bp, Homo sapiens
aagaagggttgcaga

SEQ ID NO: 977531 - DNA, 15 bp, Homo sapiens
agaagggttgcagag

SEQ ID NO: 977532 - DNA, 15 bp, Homo sapiens
gaagggttgcagagg

SEQ ID NO: 977533 - DNA, 15 bp, Homo sapiens
aagggttgcagaggg

SEQ ID NO: 977534 - DNA, 15 bp, Homo sapiens
agggttgcagagggc

SEQ ID NO: 977535 - DNA, 15 bp, Homo sapiens
gggttgcagagggcg

SEQ ID NO: 977536 - DNA, 15 bp, Homo sapiens
ggttgcagagggcgg

SEQ ID NO: 977537 - DNA, 15 bp, Homo sapiens
gttgcagagggcggg

SEQ ID NO: 977538 - DNA, 15 bp, Homo sapiens
ttgcagagggcggga

SEQ ID NO: 977539 - DNA, 15 bp, Homo sapiens
tgcagagggcgggac

SEQ ID NO: 977540 - DNA, 15 bp, Homo sapiens
gcagagggcgggact

SEQ ID NO: 977541 - DNA, 15 bp, Homo sapiens
cagagggcgggactt

SEQ ID NO: 977542 - DNA, 15 bp, Homo sapiens
agagggcgggacttg

SEQ ID NO: 977543 - DNA, 15 bp, Homo sapiens
gagggcgggacttgg

SEQ ID NO: 977544 - DNA, 15 bp, Homo sapiens
agggcgggacttgga

SEQ ID NO: 977545 - DNA, 15 bp, Homo sapiens
gggcgggacttggac

SEQ ID NO: 977546 - DNA, 15 bp, Homo sapiens
ggcgggacttggact

SEQ ID NO: 977547 - DNA, 15 bp, Homo sapiens
gcgggacttggactt

SEQ ID NO: 977548 - DNA, 15 bp, Homo sapiens
cgggacttggacttg

SEQ ID NO: 977549 - DNA, 15 bp, Homo sapiens
gggacttggacttgg

SEQ ID NO: 977550 - DNA, 15 bp, Homo sapiens
ggacttggacttggc

SEQ ID NO: 977551 - DNA, 15 bp, Homo sapiens
gacttggacttggct

SEQ ID NO: 977552 - DNA, 15 bp, Homo sapiens
acttggacttggctg

SEQ ID NO: 977553 - DNA, 15 bp, Homo sapiens
cttggacttggctgg

SEQ ID NO: 977554 - DNA, 15 bp, Homo sapiens
ttggacttggctggc

SEQ ID NO: 977555 - DNA, 15 bp, Homo sapiens
tggacttggctggcc

SEQ ID NO: 977556 - DNA, 15 bp, Homo sapiens
ggacttggctggcct

SEQ ID NO: 977557 - DNA, 15 bp, Homo sapiens
gacttggctggcctc

SEQ ID NO: 977558 - DNA, 15 bp, Homo sapiens
acttggctggcctct

SEQ ID NO: 977559 - DNA, 15 bp, Homo sapiens
cttggctggcctctg

SEQ ID NO: 977560 - DNA, 15 bp, Homo sapiens
ttggctggcctctga

SEQ ID NO: 977561 - DNA, 15 bp, Homo sapiens
tggctggcctctgag

SEQ ID NO: 977562 - DNA, 15 bp, Homo sapiens
ggctggcctctgaga

SEQ ID NO: 977563 - DNA, 15 bp, Homo sapiens
gctggcctctgagag

SEQ ID NO: 977564 - DNA, 15 bp, Homo sapiens
ctggcctctgagagt

SEQ ID NO: 977565 - DNA, 15 bp, Homo sapiens
tggcctctgagagtg

SEQ ID NO: 977566 - DNA, 15 bp, Homo sapiens
ggcctctgagagtga

SEQ ID NO: 977567 - DNA, 15 bp, Homo sapiens
gcctctgagagtgag

SEQ ID NO: 977568 - DNA, 15 bp, Homo sapiens
cctctgagagtgagt

SEQ ID NO: 977569 - DNA, 15 bp, Homo sapiens
ctctgagagtgagtg

SEQ ID NO: 977570 - DNA, 15 bp, Homo sapiens
tctgagagtgagtgc

SEQ ID NO: 977571 - DNA, 15 bp, Homo sapiens
ctgagagtgagtgcc

SEQ ID NO: 977572 - DNA, 15 bp, Homo sapiens
tgagagtgagtgcct

SEQ ID NO: 977573 - DNA, 15 bp, Homo sapiens
gagagtgagtgcctc

SEQ ID NO: 977574 - DNA, 15 bp, Homo sapiens
agagtgagtgcctcc

SEQ ID NO: 977575 - DNA, 15 bp, Homo sapiens
gagtgagtgcctcct

SEQ ID NO: 977576 - DNA, 15 bp, Homo sapiens
agtgagtgcctcctt

SEQ ID NO: 977577 - DNA, 15 bp, Homo sapiens
gtgagtgcctcctta

SEQ ID NO: 977578 - DNA, 15 bp, Homo sapiens
tgagtgcctccttaa

SEQ ID NO: 977579 - DNA, 15 bp, Homo sapiens
gagtgcctccttaaa

SEQ ID NO: 977580 - DNA, 15 bp, Homo sapiens
agtgcctccttaaat

SEQ ID NO: 977581 - DNA, 15 bp, Homo sapiens
gtgcctccttaaatt

SEQ ID NO: 977582 - DNA, 15 bp, Homo sapiens
tgcctccttaaattt

SEQ ID NO: 977583 - DNA, 15 bp, Homo sapiens
gcctccttaaatttt

SEQ ID NO: 977584 - DNA, 15 bp, Homo sapiens
cctccttaaattttg

SEQ ID NO: 977585 - DNA, 15 bp, Homo sapiens
ctccttaaattttgt

SEQ ID NO: 977586 - DNA, 15 bp, Homo sapiens
tccttaaattttgtg

SEQ ID NO: 977587 - DNA, 15 bp, Homo sapiens
ccttaaattttgtgc

SEQ ID NO: 977588 - DNA, 15 bp, Homo sapiens
cttaaattttgtgcc

SEQ ID NO: 977589 - DNA, 15 bp, Homo sapiens
ttaaattttgtgccc

SEQ ID NO: 977590 - DNA, 15 bp, Homo sapiens
taaattttgtgccct

SEQ ID NO: 977591 - DNA, 15 bp, Homo sapiens
aaattttgtgcccta

SEQ ID NO: 977592 - DNA, 15 bp, Homo sapiens
aattttgtgccctag

SEQ ID NO: 977593 - DNA, 15 bp, Homo sapiens
attttgtgccctagg

SEQ ID NO: 977594 - DNA, 15 bp, Homo sapiens
ttttgtgccctaggg

SEQ ID NO: 977595 - DNA, 15 bp, Homo sapiens
tttgtgccctagggg

SEQ ID NO: 977596 - DNA, 15 bp, Homo sapiens
ttgtgccctaggggc

SEQ ID NO: 977597 - DNA, 15 bp, Homo sapiens
tgtgccctaggggcc

SEQ ID NO: 977598 - DNA, 15 bp, Homo sapiens
gtgccctaggggcct

SEQ ID NO: 977599 - DNA, 15 bp, Homo sapiens
tgccctaggggcctc

SEQ ID NO: 977600 - DNA, 15 bp, Homo sapiens
gccctaggggcctca

SEQ ID NO: 977601 - DNA, 15 bp, Homo sapiens
ccctaggggcctcac

SEQ ID NO: 977602 - DNA, 15 bp, Homo sapiens
cctaggggcctcact

SEQ ID NO: 977603 - DNA, 15 bp, Homo sapiens
ctaggggcctcactt

SEQ ID NO: 977604 - DNA, 15 bp, Homo sapiens
taggggcctcacttt

SEQ ID NO: 977605 - DNA, 15 bp, Homo sapiens
aggggcctcactttg

SEQ ID NO: 977606 - DNA, 15 bp, Homo sapiens
ggggcctcactttgt

SEQ ID NO: 977607 - DNA, 15 bp, Homo sapiens
gggcctcactttgtt

SEQ ID NO: 977608 - DNA, 15 bp, Homo sapiens
ggcctcactttgttc

SEQ ID NO: 977609 - DNA, 15 bp, Homo sapiens
gcctcactttgttca

SEQ ID NO: 977610 - DNA, 15 bp, Homo sapiens
cctcactttgttcat

SEQ ID NO: 977611 - DNA, 15 bp, Homo sapiens
ctcactttgttcatc

SEQ ID NO: 977612 - DNA, 15 bp, Homo sapiens
tcactttgttcatcc

SEQ ID NO: 977613 - DNA, 15 bp, Homo sapiens
cactttgttcatcct

SEQ ID NO: 977614 - DNA, 15 bp, Homo sapiens
actttgttcatccta

SEQ ID NO: 977615 - DNA, 15 bp, Homo sapiens
ctttgttcatcctag

SEQ ID NO: 977616 - DNA, 15 bp, Homo sapiens
tttgttcatcctagt

SEQ ID NO: 977617 - DNA, 15 bp, Homo sapiens
ttgttcatcctagtc

SEQ ID NO: 977618 - DNA, 15 bp, Homo sapiens
tgttcatcctagtcc

SEQ ID NO: 977619 - DNA, 15 bp, Homo sapiens
gttcatcctagtccc

SEQ ID NO: 977620 - DNA, 15 bp, Homo sapiens
ttcatcctagtccca

SEQ ID NO: 977621 - DNA, 15 bp, Homo sapiens
tcatcctagtcccag

SEQ ID NO: 977622 - DNA, 15 bp, Homo sapiens
catcctagtcccagc

SEQ ID NO: 977623 - DNA, 15 bp, Homo sapiens
atcctagtcccagcc

SEQ ID NO: 977624 - DNA, 15 bp, Homo sapiens
tcctagtcccagccc

SEQ ID NO: 977625 - DNA, 15 bp, Homo sapiens
cctagtcccagccca

SEQ ID NO: 977626 - DNA, 15 bp, Homo sapiens
ctagtcccagcccag

SEQ ID NO: 977627 - DNA, 15 bp, Homo sapiens
tagtcccagcccagg

SEQ ID NO: 977628 - DNA, 15 bp, Homo sapiens
agtcccagcccaggc

SEQ ID NO: 977629 - DNA, 15 bp, Homo sapiens
gtcccagcccaggct

SEQ ID NO: 977630 - DNA, 15 bp, Homo sapiens
tcccagcccaggctg

SEQ ID NO: 977631 - DNA, 15 bp, Homo sapiens
cccagcccaggctga

SEQ ID NO: 977632 - DNA, 15 bp, Homo sapiens
ccagcccaggctgag

SEQ ID NO: 977633 - DNA, 15 bp, Homo sapiens
cagcccaggctgagt

SEQ ID NO: 977634 - DNA, 15 bp, Homo sapiens
agcccaggctgagta

SEQ ID NO: 977635 - DNA, 15 bp, Homo sapiens
gcccaggctgagtaa

SEQ ID NO: 977636 - DNA, 15 bp, Homo sapiens
cccaggctgagtaaa

SEQ ID NO: 977637 - DNA, 15 bp, Homo sapiens
ccaggctgagtaaag

SEQ ID NO: 977638 - DNA, 15 bp, Homo sapiens
caggctgagtaaagg

SEQ ID NO: 977639 - DNA, 15 bp, Homo sapiens
aggctgagtaaaggg

SEQ ID NO: 977640 - DNA, 15 bp, Homo sapiens
ggctgagtaaagggg

SEQ ID NO: 977641 - DNA, 15 bp, Homo sapiens
gctgagtaaaggggt

SEQ ID NO: 977642 - DNA, 15 bp, Homo sapiens
ctgagtaaaggggtg

SEQ ID NO: 977643 - DNA, 15 bp, Homo sapiens
tgagtaaaggggtgt

SEQ ID NO: 977644 - DNA, 15 bp, Homo sapiens
gagtaaaggggtgtg

SEQ ID NO: 977645 - DNA, 15 bp, Homo sapiens
agtaaaggggtgtgg

SEQ ID NO: 977646 - DNA, 15 bp, Homo sapiens
gtaaaggggtgtggc

SEQ ID NO: 977647 - DNA, 15 bp, Homo sapiens
taaaggggtgtggcc

SEQ ID NO: 977648 - DNA, 15 bp, Homo sapiens
aaaggggtgtggcca

SEQ ID NO: 977649 - DNA, 15 bp, Homo sapiens
aaggggtgtggccag

SEQ ID NO: 977650 - DNA, 15 bp, Homo sapiens
aggggtgtggccaga

SEQ ID NO: 977651 - DNA, 15 bp, Homo sapiens
ggggtgtggccagat

SEQ ID NO: 977652 - DNA, 15 bp, Homo sapiens
gggtgtggccagatg

SEQ ID NO: 977653 - DNA, 15 bp, Homo sapiens
ggtgtggccagatgc

SEQ ID NO: 977654 - DNA, 15 bp, Homo sapiens
gtgtggccagatgca

SEQ ID NO: 977655 - DNA, 15 bp, Homo sapiens
tgtggccagatgcag

SEQ ID NO: 977656 - DNA, 15 bp, Homo sapiens
gtggccagatgcagg

SEQ ID NO: 977657 - DNA, 15 bp, Homo sapiens
tggccagatgcaggg

SEQ ID NO: 977658 - DNA, 15 bp, Homo sapiens
ggccagatgcagggg

SEQ ID NO: 977659 - DNA, 15 bp, Homo sapiens
gccagatgcagggga

SEQ ID NO: 977660 - DNA, 15 bp, Homo sapiens
ccagatgcaggggac

SEQ ID NO: 977661 - DNA, 15 bp, Homo sapiens
cagatgcaggggacc

SEQ ID NO: 977662 - DNA, 15 bp, Homo sapiens
agatgcaggggaccc

SEQ ID NO: 977663 - DNA, 15 bp, Homo sapiens
gatgcaggggacccg

SEQ ID NO: 977664 - DNA, 15 bp, Homo sapiens
atgcaggggacccgg

SEQ ID NO: 977665 - DNA, 15 bp, Homo sapiens
tgcaggggacccggg

SEQ ID NO: 977666 - DNA, 15 bp, Homo sapiens
gcaggggacccgggg

SEQ ID NO: 977667 - DNA, 15 bp, Homo sapiens
caggggacccgggga

SEQ ID NO: 977668 - DNA, 15 bp, Homo sapiens
aggggacccggggac

SEQ ID NO: 977669 - DNA, 15 bp, Homo sapiens
ggggacccggggaca

SEQ ID NO: 977670 - DNA, 15 bp, Homo sapiens
gggacccggggacat

SEQ ID NO: 977671 - DNA, 15 bp, Homo sapiens
ggacccggggacatg

SEQ ID NO: 977672 - DNA, 15 bp, Homo sapiens
gacccggggacatga

SEQ ID NO: 977673 - DNA, 15 bp, Homo sapiens
acccggggacatgac

SEQ ID NO: 977674 - DNA, 15 bp, Homo sapiens
cccggggacatgact

SEQ ID NO: 977675 - DNA, 15 bp, Homo sapiens
ccggggacatgactg

SEQ ID NO: 977676 - DNA, 15 bp, Homo sapiens
cggggacatgactgg

SEQ ID NO: 977677 - DNA, 15 bp, Homo sapiens
ggggacatgactggg

SEQ ID NO: 977678 - DNA, 15 bp, Homo sapiens
gggacatgactgggc

SEQ ID NO: 977679 - DNA, 15 bp, Homo sapiens
ggacatgactgggca

SEQ ID NO: 977680 - DNA, 15 bp, Homo sapiens
gacatgactgggcag

SEQ ID NO: 977681 - DNA, 15 bp, Homo sapiens
acatgactgggcaga

SEQ ID NO: 977682 - DNA, 15 bp, Homo sapiens
catgactgggcagac

SEQ ID NO: 977683 - DNA, 15 bp, Homo sapiens
atgactgggcagaca

SEQ ID NO: 977684 - DNA, 15 bp, Homo sapiens
tgactgggcagacag

SEQ ID NO: 977685 - DNA, 15 bp, Homo sapiens
gactgggcagacagt

SEQ ID NO: 977686 - DNA, 15 bp, Homo sapiens
actgggcagacagtg

SEQ ID NO: 977687 - DNA, 15 bp, Homo sapiens
ctgggcagacagtgg

SEQ ID NO: 977688 - DNA, 15 bp, Homo sapiens
tgggcagacagtggc

SEQ ID NO: 977689 - DNA, 15 bp, Homo sapiens
gggcagacagtggcg

SEQ ID NO: 977690 - DNA, 15 bp, Homo sapiens
ggcagacagtggcgc

SEQ ID NO: 977691 - DNA, 15 bp, Homo sapiens
gcagacagtggcgct

SEQ ID NO: 977692 - DNA, 15 bp, Homo sapiens
cagacagtggcgctt

SEQ ID NO: 977693 - DNA, 15 bp, Homo sapiens
agacagtggcgctta

SEQ ID NO: 977694 - DNA, 15 bp, Homo sapiens
gacagtggcgcttat

SEQ ID NO: 977695 - DNA, 15 bp, Homo sapiens
acagtggcgcttatg

SEQ ID NO: 977696 - DNA, 15 bp, Homo sapiens
cagtggcgcttatgg

SEQ ID NO: 977697 - DNA, 15 bp, Homo sapiens
agtggcgcttatggc

SEQ ID NO: 977698 - DNA, 15 bp, Homo sapiens
gtggcgcttatggct

SEQ ID NO: 977699 - DNA, 15 bp, Homo sapiens
tggcgcttatggctt

SEQ ID NO: 977700 - DNA, 15 bp, Homo sapiens
ggcgcttatggcttc

SEQ ID NO: 977701 - DNA, 15 bp, Homo sapiens
gcgcttatggcttcc

SEQ ID NO: 977702 - DNA, 15 bp, Homo sapiens
cgcttatggcttcct

SEQ ID NO: 977703 - DNA, 15 bp, Homo sapiens
gcttatggcttcctt

SEQ ID NO: 977704 - DNA, 15 bp, Homo sapiens
cttatggcttccttg

SEQ ID NO: 977705 - DNA, 15 bp, Homo sapiens
ttatggcttccttgt

SEQ ID NO: 977706 - DNA, 15 bp, Homo sapiens
tatggcttccttgtc

SEQ ID NO: 977707 - DNA, 15 bp, Homo sapiens
atggcttccttgtcc

SEQ ID NO: 977708 - DNA, 15 bp, Homo sapiens
tggcttccttgtccc

SEQ ID NO: 977709 - DNA, 15 bp, Homo sapiens
ggcttccttgtcccc

SEQ ID NO: 977710 - DNA, 15 bp, Homo sapiens
gcttccttgtcccct

SEQ ID NO: 977711 - DNA, 15 bp, Homo sapiens
cttccttgtccccta

SEQ ID NO: 977712 - DNA, 15 bp, Homo sapiens
ttccttgtcccctag

SEQ ID NO: 977713 - DNA, 15 bp, Homo sapiens
tccttgtcccctagg

SEQ ID NO: 977714 - DNA, 15 bp, Homo sapiens
ccttgtcccctaggg

SEQ ID NO: 977715 - DNA, 15 bp, Homo sapiens
cttgtcccctagggg

SEQ ID NO: 977716 - DNA, 15 bp, Homo sapiens
ttgtcccctagggga

SEQ ID NO: 977717 - DNA, 15 bp, Homo sapiens
tgtcccctaggggag

SEQ ID NO: 977718 - DNA, 15 bp, Homo sapiens
gtcccctaggggaga

SEQ ID NO: 977719 - DNA, 15 bp, Homo sapiens
tcccctaggggagaa

SEQ ID NO: 977720 - DNA, 15 bp, Homo sapiens
cccctaggggagaag

SEQ ID NO: 977721 - DNA, 15 bp, Homo sapiens
ccctaggggagaagc

SEQ ID NO: 977722 - DNA, 15 bp, Homo sapiens
cctaggggagaagcc

SEQ ID NO: 977723 - DNA, 15 bp, Homo sapiens
ctaggggagaagcca

SEQ ID NO: 977724 - DNA, 15 bp, Homo sapiens
taggggagaagccat

SEQ ID NO: 977725 - DNA, 15 bp, Homo sapiens
aggggagaagccata

SEQ ID NO: 977726 - DNA, 15 bp, Homo sapiens
ggggagaagccatac

SEQ ID NO: 977727 - DNA, 15 bp, Homo sapiens
gggagaagccatacg

SEQ ID NO: 977728 - DNA, 15 bp, Homo sapiens
ggagaagccatacgc

SEQ ID NO: 977729 - DNA, 15 bp, Homo sapiens
gagaagccatacgcc

SEQ ID NO: 977730 - DNA, 15 bp, Homo sapiens
agaagccatacgcct

SEQ ID NO: 977731 - DNA, 15 bp, Homo sapiens
gaagccatacgcctg

SEQ ID NO: 977732 - DNA, 15 bp, Homo sapiens
aagccatacgcctgc

SEQ ID NO: 977733 - DNA, 15 bp, Homo sapiens
agccatacgcctgca

SEQ ID NO: 977734 - DNA, 15 bp, Homo sapiens
gccatacgcctgcac

SEQ ID NO: 977735 - DNA, 15 bp, Homo sapiens
ccatacgcctgcacg

SEQ ID NO: 977736 - DNA, 15 bp, Homo sapiens
catacgcctgcacgt

SEQ ID NO: 977737 - DNA, 15 bp, Homo sapiens
atacgcctgcacgtg

SEQ ID NO: 977738 - DNA, 15 bp, Homo sapiens
tacgcctgcacgtgg

SEQ ID NO: 977739 - DNA, 15 bp, Homo sapiens
acgcctgcacgtggg

SEQ ID NO: 977740 - DNA, 15 bp, Homo sapiens
cgcctgcacgtggga

SEQ ID NO: 977741 - DNA, 15 bp, Homo sapiens
gcctgcacgtgggaa

SEQ ID NO: 977742 - DNA, 15 bp, Homo sapiens
cctgcacgtgggaag

SEQ ID NO: 977743 - DNA, 15 bp, Homo sapiens
ctgcacgtgggaagg

SEQ ID NO: 977744 - DNA, 15 bp, Homo sapiens
tgcacgtgggaaggc

SEQ ID NO: 977745 - DNA, 15 bp, Homo sapiens
gcacgtgggaaggct

SEQ ID NO: 977746 - DNA, 15 bp, Homo sapiens
cacgtgggaaggctg

SEQ ID NO: 977747 - DNA, 15 bp, Homo sapiens
acgtgggaaggctgc

SEQ ID NO: 977748 - DNA, 15 bp, Homo sapiens
cgtgggaaggctgcg

SEQ ID NO: 977749 - DNA, 15 bp, Homo sapiens
gtgggaaggctgcgg

SEQ ID NO: 977750 - DNA, 15 bp, Homo sapiens
tgggaaggctgcggc

SEQ ID NO: 977751 - DNA, 15 bp, Homo sapiens
gggaaggctgcggct

SEQ ID NO: 977752 - DNA, 15 bp, Homo sapiens
ggaaggctgcggctg

SEQ ID NO: 977753 - DNA, 15 bp, Homo sapiens
gaaggctgcggctgg

SEQ ID NO: 977754 - DNA, 15 bp, Homo sapiens
aaggctgcggctgga

SEQ ID NO: 977755 - DNA, 15 bp, Homo sapiens
aggctgcggctggag

SEQ ID NO: 977756 - DNA, 15 bp, Homo sapiens
ggctgcggctggaga

SEQ ID NO: 977757 - DNA, 15 bp, Homo sapiens
gctgcggctggagat

SEQ ID NO: 977758 - DNA, 15 bp, Homo sapiens
ctgcggctggagatt

SEQ ID NO: 977759 - DNA, 15 bp, Homo sapiens
tgcggctggagattc

SEQ ID NO: 977760 - DNA, 15 bp, Homo sapiens
gcggctggagattcg

SEQ ID NO: 977761 - DNA, 15 bp, Homo sapiens
cggctggagattcgc

SEQ ID NO: 977762 - DNA, 15 bp, Homo sapiens
ggctggagattcgcg

SEQ ID NO: 977763 - DNA, 15 bp, Homo sapiens
gctggagattcgcgc

SEQ ID NO: 977764 - DNA, 15 bp, Homo sapiens
ctggagattcgcgcg

SEQ ID NO: 977765 - DNA, 15 bp, Homo sapiens
tggagattcgcgcgc

SEQ ID NO: 977766 - DNA, 15 bp, Homo sapiens
ggagattcgcgcgct

SEQ ID NO: 977767 - DNA, 15 bp, Homo sapiens
gagattcgcgcgctc

SEQ ID NO: 977768 - DNA, 15 bp, Homo sapiens
agattcgcgcgctcg

SEQ ID NO: 977769 - DNA, 15 bp, Homo sapiens
gattcgcgcgctcgg

SEQ ID NO: 977770 - DNA, 15 bp, Homo sapiens
attcgcgcgctcgga

SEQ ID NO: 977771 - DNA, 15 bp, Homo sapiens
ttcgcgcgctcggac

SEQ ID NO: 977772 - DNA, 15 bp, Homo sapiens
tcgcgcgctcggacg

SEQ ID NO: 977773 - DNA, 15 bp, Homo sapiens
cgcgcgctcggacga

SEQ ID NO: 977774 - DNA, 15 bp, Homo sapiens
gcgcgctcggacgag

SEQ ID NO: 977775 - DNA, 15 bp, Homo sapiens
cgcgctcggacgagc

SEQ ID NO: 977776 - DNA, 15 bp, Homo sapiens
gcgctcggacgagct

SEQ ID NO: 977777 - DNA, 15 bp, Homo sapiens
cgctcggacgagctg

SEQ ID NO: 977778 - DNA, 15 bp, Homo sapiens
gctcggacgagctga

SEQ ID NO: 977779 - DNA, 15 bp, Homo sapiens
ctcggacgagctgac

SEQ ID NO: 977780 - DNA, 15 bp, Homo sapiens
tcggacgagctgacc

SEQ ID NO: 977781 - DNA, 15 bp, Homo sapiens
cggacgagctgaccc

SEQ ID NO: 977782 - DNA, 15 bp, Homo sapiens
ggacgagctgacccg

SEQ ID NO: 977783 - DNA, 15 bp, Homo sapiens
gacgagctgacccgc

SEQ ID NO: 977784 - DNA, 15 bp, Homo sapiens
acgagctgacccgcc

SEQ ID NO: 977785 - DNA, 15 bp, Homo sapiens
cgagctgacccgcca

SEQ ID NO: 977786 - DNA, 15 bp, Homo sapiens
gagctgacccgccac

SEQ ID NO: 977787 - DNA, 15 bp, Homo sapiens
agctgacccgccact

SEQ ID NO: 977788 - DNA, 15 bp, Homo sapiens
gctgacccgccacta

SEQ ID NO: 977789 - DNA, 15 bp, Homo sapiens
ctgacccgccactac

SEQ ID NO: 977790 - DNA, 15 bp, Homo sapiens
tgacccgccactacc

SEQ ID NO: 977791 - DNA, 15 bp, Homo sapiens
gacccgccactaccg

SEQ ID NO: 977792 - DNA, 15 bp, Homo sapiens
acccgccactaccgg

SEQ ID NO: 977793 - DNA, 15 bp, Homo sapiens
cccgccactaccgga

SEQ ID NO: 977794 - DNA, 15 bp, Homo sapiens
ccgccactaccggaa

SEQ ID NO: 977795 - DNA, 15 bp, Homo sapiens
cgccactaccggaaa

SEQ ID NO: 977796 - DNA, 15 bp, Homo sapiens
gccactaccggaaac

SEQ ID NO: 977797 - DNA, 15 bp, Homo sapiens
ccactaccggaaaca

SEQ ID NO: 977798 - DNA, 15 bp, Homo sapiens
cactaccggaaacac

SEQ ID NO: 977799 - DNA, 15 bp, Homo sapiens
actaccggaaacaca

SEQ ID NO: 977800 - DNA, 15 bp, Homo sapiens
ctaccggaaacacac

SEQ ID NO: 977801 - DNA, 15 bp, Homo sapiens
taccggaaacacacg

SEQ ID NO: 977802 - DNA, 15 bp, Homo sapiens
accggaaacacacgg

SEQ ID NO: 977803 - DNA, 15 bp, Homo sapiens
ccggaaacacacggg

SEQ ID NO: 977804 - DNA, 15 bp, Homo sapiens
cggaaacacacgggg

SEQ ID NO: 977805 - DNA, 15 bp, Homo sapiens
ggaaacacacggggc

SEQ ID NO: 977806 - DNA, 15 bp, Homo sapiens
gaaacacacggggca

SEQ ID NO: 977807 - DNA, 15 bp, Homo sapiens
aaacacacggggcag

SEQ ID NO: 977808 - DNA, 15 bp, Homo sapiens
aacacacggggcagc

SEQ ID NO: 977809 - DNA, 15 bp, Homo sapiens
acacacggggcagcg

SEQ ID NO: 977810 - DNA, 15 bp, Homo sapiens
cacacggggcagcgc

SEQ ID NO: 977811 - DNA, 15 bp, Homo sapiens
acacggggcagcgcc

SEQ ID NO: 977812 - DNA, 15 bp, Homo sapiens
cacggggcagcgccc

SEQ ID NO: 977813 - DNA, 15 bp, Homo sapiens
acggggcagcgcccc

SEQ ID NO: 977814 - DNA, 15 bp, Homo sapiens
cggggcagcgcccct

SEQ ID NO: 977815 - DNA, 15 bp, Homo sapiens
ggggcagcgcccctt

SEQ ID NO: 977816 - DNA, 15 bp, Homo sapiens
gggcagcgccccttc

SEQ ID NO: 977817 - DNA, 15 bp, Homo sapiens
ggcagcgccccttcc

SEQ ID NO: 977818 - DNA, 15 bp, Homo sapiens
gcagcgccccttccg

SEQ ID NO: 977819 - DNA, 15 bp, Homo sapiens
cagcgccccttccgc

SEQ ID NO: 977820 - DNA, 15 bp, Homo sapiens
agcgccccttccgct

SEQ ID NO: 977821 - DNA, 15 bp, Homo sapiens
gcgccccttccgctg

SEQ ID NO: 977822 - DNA, 15 bp, Homo sapiens
cgccccttccgctgc

SEQ ID NO: 977823 - DNA, 15 bp, Homo sapiens
gccccttccgctgcc

SEQ ID NO: 977824 - DNA, 15 bp, Homo sapiens
ccccttccgctgcca

SEQ ID NO: 977825 - DNA, 15 bp, Homo sapiens
cccttccgctgccag

SEQ ID NO: 977826 - DNA, 15 bp, Homo sapiens
ccttccgctgccagc

SEQ ID NO: 977827 - DNA, 15 bp, Homo sapiens
cttccgctgccagct

SEQ ID NO: 977828 - DNA, 15 bp, Homo sapiens
ttccgctgccagctc

SEQ ID NO: 977829 - DNA, 15 bp, Homo sapiens
tccgctgccagctct

SEQ ID NO: 977830 - DNA, 15 bp, Homo sapiens
ccgctgccagctctg

SEQ ID NO: 977831 - DNA, 15 bp, Homo sapiens
cgctgccagctctgc

SEQ ID NO: 977832 - DNA, 15 bp, Homo sapiens
gctgccagctctgcc

SEQ ID NO: 977833 - DNA, 15 bp, Homo sapiens
ctgccagctctgccc

SEQ ID NO: 977834 - DNA, 15 bp, Homo sapiens
tgccagctctgccca

SEQ ID NO: 977835 - DNA, 15 bp, Homo sapiens
gccagctctgcccac

SEQ ID NO: 977836 - DNA, 15 bp, Homo sapiens
ccagctctgcccacg

SEQ ID NO: 977837 - DNA, 15 bp, Homo sapiens
cagctctgcccacgt

SEQ ID NO: 977838 - DNA, 15 bp, Homo sapiens
agctctgcccacgtg

SEQ ID NO: 977839 - DNA, 15 bp, Homo sapiens
gctctgcccacgtgc

SEQ ID NO: 977840 - DNA, 15 bp, Homo sapiens
ctctgcccacgtgct

SEQ ID NO: 977841 - DNA, 15 bp, Homo sapiens
tctgcccacgtgctt

SEQ ID NO: 977842 - DNA, 15 bp, Homo sapiens
ctgcccacgtgcttt

SEQ ID NO: 977843 - DNA, 15 bp, Homo sapiens
tgcccacgtgctttt

SEQ ID NO: 977844 - DNA, 15 bp, Homo sapiens
gcccacgtgcttttt

SEQ ID NO: 977845 - DNA, 15 bp, Homo sapiens
cccacgtgctttttc

SEQ ID NO: 977846 - DNA, 15 bp, Homo sapiens
ccacgtgctttttcg

SEQ ID NO: 977847 - DNA, 15 bp, Homo sapiens
cacgtgctttttcgc

SEQ ID NO: 977848 - DNA, 15 bp, Homo sapiens
acgtgctttttcgcg

SEQ ID NO: 977849 - DNA, 15 bp, Homo sapiens
cgtgctttttcgcgc

SEQ ID NO: 977850 - DNA, 15 bp, Homo sapiens
gtgctttttcgcgct

SEQ ID NO: 977851 - DNA, 15 bp, Homo sapiens
tgctttttcgcgctc

SEQ ID NO: 977852 - DNA, 15 bp, Homo sapiens
gctttttcgcgctct

SEQ ID NO: 977853 - DNA, 15 bp, Homo sapiens
ctttttcgcgctctg

SEQ ID NO: 977854 - DNA, 15 bp, Homo sapiens
tttttcgcgctctga

SEQ ID NO: 977855 - DNA, 15 bp, Homo sapiens
ttttcgcgctctgac

SEQ ID NO: 977856 - DNA, 15 bp, Homo sapiens
tttcgcgctctgacc

SEQ ID NO: 977857 - DNA, 15 bp, Homo sapiens
ttcgcgctctgacca

SEQ ID NO: 977858 - DNA, 15 bp, Homo sapiens
tcgcgctctgaccac

SEQ ID NO: 977859 - DNA, 15 bp, Homo sapiens
cgcgctctgaccacc

SEQ ID NO: 977860 - DNA, 15 bp, Homo sapiens
gcgctctgaccacct

SEQ ID NO: 977861 - DNA, 15 bp, Homo sapiens
cgctctgaccacctg

SEQ ID NO: 977862 - DNA, 15 bp, Homo sapiens
gctctgaccacctgg

SEQ ID NO: 977863 - DNA, 15 bp, Homo sapiens
ctctgaccacctggc

SEQ ID NO: 977864 - DNA, 15 bp, Homo sapiens
tctgaccacctggcc

SEQ ID NO: 977865 - DNA, 15 bp, Homo sapiens
ctgaccacctggcct

SEQ ID NO: 977866 - DNA, 15 bp, Homo sapiens
tgaccacctggcctt

SEQ ID NO: 977867 - DNA, 15 bp, Homo sapiens
gaccacctggccttg

SEQ ID NO: 977868 - DNA, 15 bp, Homo sapiens
accacctggccttgc

SEQ ID NO: 977869 - DNA, 15 bp, Homo sapiens
ccacctggccttgca

SEQ ID NO: 977870 - DNA, 15 bp, Homo sapiens
cacctggccttgcac

SEQ ID NO: 977871 - DNA, 15 bp, Homo sapiens
acctggccttgcaca

SEQ ID NO: 977872 - DNA, 15 bp, Homo sapiens
cctggccttgcacat

SEQ ID NO: 977873 - DNA, 15 bp, Homo sapiens
ctggccttgcacatg

SEQ ID NO: 977874 - DNA, 15 bp, Homo sapiens
tggccttgcacatga

SEQ ID NO: 977875 - DNA, 15 bp, Homo sapiens
ggccttgcacatgaa

SEQ ID NO: 977876 - DNA, 15 bp, Homo sapiens
gccttgcacatgaag

SEQ ID NO: 977877 - DNA, 15 bp, Homo sapiens
ccttgcacatgaagc

SEQ ID NO: 977878 - DNA, 15 bp, Homo sapiens
cttgcacatgaagcg

SEQ ID NO: 977879 - DNA, 15 bp, Homo sapiens
ttgcacatgaagcgc

SEQ ID NO: 977880 - DNA, 15 bp, Homo sapiens
tgcacatgaagcgcc

SEQ ID NO: 977881 - DNA, 15 bp, Homo sapiens
gcacatgaagcgcca

SEQ ID NO: 977882 - DNA, 15 bp, Homo sapiens
cacatgaagcgccac

SEQ ID NO: 977883 - DNA, 15 bp, Homo sapiens
acatgaagcgccacc

SEQ ID NO: 977884 - DNA, 15 bp, Homo sapiens
catgaagcgccacct

SEQ ID NO: 977885 - DNA, 15 bp, Homo sapiens
atgaagcgccacctt

SEQ ID NO: 977886 - DNA, 15 bp, Homo sapiens
tgaagcgccaccttt

SEQ ID NO: 977887 - DNA, 15 bp, Homo sapiens
gaagcgccacctttg

SEQ ID NO: 977888 - DNA, 15 bp, Homo sapiens
aagcgccacctttga

SEQ ID NO: 977889 - DNA, 15 bp, Homo sapiens
agcgccacctttgag

SEQ ID NO: 977890 - DNA, 15 bp, Homo sapiens
gcgccacctttgagc

SEQ ID NO: 977891 - DNA, 15 bp, Homo sapiens
cgccacctttgagcc

SEQ ID NO: 977892 - DNA, 15 bp, Homo sapiens
gccacctttgagccc

SEQ ID NO: 977893 - DNA, 15 bp, Homo sapiens
ccacctttgagccct

SEQ ID NO: 977894 - DNA, 15 bp, Homo sapiens
cacctttgagccctg

SEQ ID NO: 977895 - DNA, 15 bp, Homo sapiens
acctttgagccctgc

SEQ ID NO: 977896 - DNA, 15 bp, Homo sapiens
cctttgagccctgcc

SEQ ID NO: 977897 - DNA, 15 bp, Homo sapiens
ctttgagccctgccc

SEQ ID NO: 977898 - DNA, 15 bp, Homo sapiens
tttgagccctgccct

SEQ ID NO: 977899 - DNA, 15 bp, Homo sapiens
ttgagccctgccctg

SEQ ID NO: 977900 - DNA, 15 bp, Homo sapiens
tgagccctgccctgg

SEQ ID NO: 977901 - DNA, 15 bp, Homo sapiens
gagccctgccctggc

SEQ ID NO: 977902 - DNA, 15 bp, Homo sapiens
agccctgccctggca

SEQ ID NO: 977903 - DNA, 15 bp, Homo sapiens
gccctgccctggcac

SEQ ID NO: 977904 - DNA, 15 bp, Homo sapiens
ccctgccctggcact

SEQ ID NO: 977905 - DNA, 15 bp, Homo sapiens
cctgccctggcactt

SEQ ID NO: 977906 - DNA, 15 bp, Homo sapiens
ctgccctggcacttg

SEQ ID NO: 977907 - DNA, 15 bp, Homo sapiens
tgccctggcacttgg

SEQ ID NO: 977908 - DNA, 15 bp, Homo sapiens
gccctggcacttgga

SEQ ID NO: 977909 - DNA, 15 bp, Homo sapiens
ccctggcacttggac

SEQ ID NO: 977910 - DNA, 15 bp, Homo sapiens
cctggcacttggact

SEQ ID NO: 977911 - DNA, 15 bp, Homo sapiens
ctggcacttggactc

SEQ ID NO: 977912 - DNA, 15 bp, Homo sapiens
tggcacttggactct

SEQ ID NO: 977913 - DNA, 15 bp, Homo sapiens
ggcacttggactctc

SEQ ID NO: 977914 - DNA, 15 bp, Homo sapiens
gcacttggactctcc

SEQ ID NO: 977915 - DNA, 15 bp, Homo sapiens
cacttggactctcct

SEQ ID NO: 977916 - DNA, 15 bp, Homo sapiens
acttggactctccta

SEQ ID NO: 977917 - DNA, 15 bp, Homo sapiens
cttggactctcctag

SEQ ID NO: 977918 - DNA, 15 bp, Homo sapiens
ttggactctcctagt

SEQ ID NO: 977919 - DNA, 15 bp, Homo sapiens
tggactctcctagtg

SEQ ID NO: 977920 - DNA, 15 bp, Homo sapiens
ggactctcctagtga

SEQ ID NO: 977921 - DNA, 15 bp, Homo sapiens
gactctcctagtgac

SEQ ID NO: 977922 - DNA, 15 bp, Homo sapiens
actctcctagtgact

SEQ ID NO: 977923 - DNA, 15 bp, Homo sapiens
ctctcctagtgactg

SEQ ID NO: 977924 - DNA, 15 bp, Homo sapiens
tctcctagtgactgg

SEQ ID NO: 977925 - DNA, 15 bp, Homo sapiens
ctcctagtgactggg

SEQ ID NO: 977926 - DNA, 15 bp, Homo sapiens
tcctagtgactgggg

SEQ ID NO: 977927 - DNA, 15 bp, Homo sapiens
cctagtgactgggga

SEQ ID NO: 977928 - DNA, 15 bp, Homo sapiens
ctagtgactggggat

SEQ ID NO: 977929 - DNA, 15 bp, Homo sapiens
tagtgactggggatg

SEQ ID NO: 977930 - DNA, 15 bp, Homo sapiens
agtgactggggatgg

SEQ ID NO: 977931 - DNA, 15 bp, Homo sapiens
gtgactggggatggg

SEQ ID NO: 977932 - DNA, 15 bp, Homo sapiens
tgactggggatggga

SEQ ID NO: 977933 - DNA, 15 bp, Homo sapiens
gactggggatgggac

SEQ ID NO: 977934 - DNA, 15 bp, Homo sapiens
actggggatgggaca

SEQ ID NO: 977935 - DNA, 15 bp, Homo sapiens
ctggggatgggacaa

SEQ ID NO: 977936 - DNA, 15 bp, Homo sapiens
tggggatgggacaag

SEQ ID NO: 977937 - DNA, 15 bp, Homo sapiens
ggggatgggacaaga

SEQ ID NO: 977938 - DNA, 15 bp, Homo sapiens
gggatgggacaagaa

SEQ ID NO: 977939 - DNA, 15 bp, Homo sapiens
ggatgggacaagaag

SEQ ID NO: 977940 - DNA, 15 bp, Homo sapiens
gatgggacaagaagc

SEQ ID NO: 977941 - DNA, 15 bp, Homo sapiens
atgggacaagaagcc

SEQ ID NO: 977942 - DNA, 15 bp, Homo sapiens
tgggacaagaagcct

SEQ ID NO: 977943 - DNA, 15 bp, Homo sapiens
gggacaagaagcctg

SEQ ID NO: 977944 - DNA, 15 bp, Homo sapiens
ggacaagaagcctgt

SEQ ID NO: 977945 - DNA, 15 bp, Homo sapiens
gacaagaagcctgtt

SEQ ID NO: 977946 - DNA, 15 bp, Homo sapiens
acaagaagcctgttt

SEQ ID NO: 977947 - DNA, 15 bp, Homo sapiens
caagaagcctgtttg

SEQ ID NO: 977948 - DNA, 15 bp, Homo sapiens
aagaagcctgtttgg

SEQ ID NO: 977949 - DNA, 15 bp, Homo sapiens
agaagcctgtttggt

SEQ ID NO: 977950 - DNA, 15 bp, Homo sapiens
gaagcctgtttggtg

SEQ ID NO: 977951 - DNA, 15 bp, Homo sapiens
aagcctgtttggtgg

SEQ ID NO: 977952 - DNA, 15 bp, Homo sapiens
agcctgtttggtggt

SEQ ID NO: 977953 - DNA, 15 bp, Homo sapiens
gcctgtttggtggtc

SEQ ID NO: 977954 - DNA, 15 bp, Homo sapiens
cctgtttggtggtct

SEQ ID NO: 977955 - DNA, 15 bp, Homo sapiens
ctgtttggtggtctc

SEQ ID NO: 977956 - DNA, 15 bp, Homo sapiens
tgtttggtggtctct

SEQ ID NO: 977957 - DNA, 15 bp, Homo sapiens
gtttggtggtctctt

SEQ ID NO: 977958 - DNA, 15 bp, Homo sapiens
tttggtggtctcttc

SEQ ID NO: 977959 - DNA, 15 bp, Homo sapiens
ttggtggtctcttca

SEQ ID NO: 977960 - DNA, 15 bp, Homo sapiens
tggtggtctcttcac

SEQ ID NO: 977961 - DNA, 15 bp, Homo sapiens
ggtggtctcttcaca

SEQ ID NO: 977962 - DNA, 15 bp, Homo sapiens
gtggtctcttcacac

SEQ ID NO: 977963 - DNA, 15 bp, Homo sapiens
tggtctcttcacacg

SEQ ID NO: 977964 - DNA, 15 bp, Homo sapiens
ggtctcttcacacgg

SEQ ID NO: 977965 - DNA, 15 bp, Homo sapiens
gtctcttcacacgga

SEQ ID NO: 977966 - DNA, 15 bp, Homo sapiens
tctcttcacacggac

SEQ ID NO: 977967 - DNA, 15 bp, Homo sapiens
ctcttcacacggacg

SEQ ID NO: 977968 - DNA, 15 bp, Homo sapiens
tcttcacacggacgc

SEQ ID NO: 977969 - DNA, 15 bp, Homo sapiens
cttcacacggacgcg

SEQ ID NO: 977970 - DNA, 15 bp, Homo sapiens
ttcacacggacgcgc

SEQ ID NO: 977971 - DNA, 15 bp, Homo sapiens
tcacacggacgcgcg

SEQ ID NO: 977972 - DNA, 15 bp, Homo sapiens
cacacggacgcgcgt

SEQ ID NO: 977973 - DNA, 15 bp, Homo sapiens
acacggacgcgcgtg

SEQ ID NO: 977974 - DNA, 15 bp, Homo sapiens
cacggacgcgcgtga

SEQ ID NO: 977975 - DNA, 15 bp, Homo sapiens
acggacgcgcgtgac

SEQ ID NO: 977976 - DNA, 15 bp, Homo sapiens
cggacgcgcgtgaca

SEQ ID NO: 977977 - DNA, 15 bp, Homo sapiens
ggacgcgcgtgacac

SEQ ID NO: 977978 - DNA, 15 bp, Homo sapiens
gacgcgcgtgacaca

SEQ ID NO: 977979 - DNA, 15 bp, Homo sapiens
acgcgcgtgacacaa

SEQ ID NO: 977980 - DNA, 15 bp, Homo sapiens
cgcgcgtgacacaat

SEQ ID NO: 977981 - DNA, 15 bp, Homo sapiens
gcgcgtgacacaatg

SEQ ID NO: 977982 - DNA, 15 bp, Homo sapiens
cgcgtgacacaatgc

SEQ ID NO: 977983 - DNA, 15 bp, Homo sapiens
gcgtgacacaatgct

SEQ ID NO: 977984 - DNA, 15 bp, Homo sapiens
cgtgacacaatgctg

SEQ ID NO: 977985 - DNA, 15 bp, Homo sapiens
gtgacacaatgctgg

SEQ ID NO: 977986 - DNA, 15 bp, Homo sapiens
tgacacaatgctggg

SEQ ID NO: 977987 - DNA, 15 bp, Homo sapiens
gacacaatgctgggt

SEQ ID NO: 977988 - DNA, 15 bp, Homo sapiens
acacaatgctgggtg

SEQ ID NO: 977989 - DNA, 15 bp, Homo sapiens
cacaatgctgggtgg

SEQ ID NO: 977990 - DNA, 15 bp, Homo sapiens
acaatgctgggtggt

SEQ ID NO: 977991 - DNA, 15 bp, Homo sapiens
caatgctgggtggtt

SEQ ID NO: 977992 - DNA, 15 bp, Homo sapiens
aatgctgggtggttt

SEQ ID NO: 977993 - DNA, 15 bp, Homo sapiens
atgctgggtggtttt

SEQ ID NO: 977994 - DNA, 15 bp, Homo sapiens
tgctgggtggttttc

SEQ ID NO: 977995 - DNA, 15 bp, Homo sapiens
gctgggtggttttcc

SEQ ID NO: 977996 - DNA, 15 bp, Homo sapiens
ctgggtggttttccc

SEQ ID NO: 977997 - DNA, 15 bp, Homo sapiens
tgggtggttttccca

SEQ ID NO: 977998 - DNA, 15 bp, Homo sapiens
gggtggttttcccac

SEQ ID NO: 977999 - DNA, 15 bp, Homo sapiens
ggtggttttcccacg

SEQ ID NO: 978000 - DNA, 15 bp, Homo sapiens
gtggttttcccacga

SEQ ID NO: 978001 - DNA, 15 bp, Homo sapiens
tggttttcccacgaa

SEQ ID NO: 978002 - DNA, 15 bp, Homo sapiens
ggttttcccacgaat

SEQ ID NO: 978003 - DNA, 15 bp, Homo sapiens
gttttcccacgaatg

SEQ ID NO: 978004 - DNA, 15 bp, Homo sapiens
ttttcccacgaatgg

SEQ ID NO: 978005 - DNA, 15 bp, Homo sapiens
tttcccacgaatgga

SEQ ID NO: 978006 - DNA, 15 bp, Homo sapiens
ttcccacgaatggac

SEQ ID NO: 978007 - DNA, 15 bp, Homo sapiens
tcccacgaatggacc

SEQ ID NO: 978008 - DNA, 15 bp, Homo sapiens
cccacgaatggaccc

SEQ ID NO: 978009 - DNA, 15 bp, Homo sapiens
ccacgaatggaccct

SEQ ID NO: 978010 - DNA, 15 bp, Homo sapiens
cacgaatggaccctc

SEQ ID NO: 978011 - DNA, 15 bp, Homo sapiens
acgaatggaccctct

SEQ ID NO: 978012 - DNA, 15 bp, Homo sapiens
cgaatggaccctctc

SEQ ID NO: 978013 - DNA, 15 bp, Homo sapiens
gaatggaccctctcc

SEQ ID NO: 978014 - DNA, 15 bp, Homo sapiens
aatggaccctctcct

SEQ ID NO: 978015 - DNA, 15 bp, Homo sapiens
atggaccctctcctg

SEQ ID NO: 978016 - DNA, 15 bp, Homo sapiens
tggaccctctcctgg

SEQ ID NO: 978017 - DNA, 15 bp, Homo sapiens
ggaccctctcctgga

SEQ ID NO: 978018 - DNA, 15 bp, Homo sapiens
gaccctctcctggac

SEQ ID NO: 978019 - DNA, 15 bp, Homo sapiens
accctctcctggact

SEQ ID NO: 978020 - DNA, 15 bp, Homo sapiens
ccctctcctggactc

SEQ ID NO: 978021 - DNA, 15 bp, Homo sapiens
cctctcctggactcg

SEQ ID NO: 978022 - DNA, 15 bp, Homo sapiens
ctctcctggactcgc

SEQ ID NO: 978023 - DNA, 15 bp, Homo sapiens
tctcctggactcgcg

SEQ ID NO: 978024 - DNA, 15 bp, Homo sapiens
ctcctggactcgcgt

SEQ ID NO: 978025 - DNA, 15 bp, Homo sapiens
tcctggactcgcgtt

SEQ ID NO: 978026 - DNA, 15 bp, Homo sapiens
cctggactcgcgttc

SEQ ID NO: 978027 - DNA, 15 bp, Homo sapiens
ctggactcgcgttcc

SEQ ID NO: 978028 - DNA, 15 bp, Homo sapiens
tggactcgcgttccc

SEQ ID NO: 978029 - DNA, 15 bp, Homo sapiens
ggactcgcgttccca

SEQ ID NO: 978030 - DNA, 15 bp, Homo sapiens
gactcgcgttcccaa

SEQ ID NO: 978031 - DNA, 15 bp, Homo sapiens
actcgcgttcccaaa

SEQ ID NO: 978032 - DNA, 15 bp, Homo sapiens
ctcgcgttcccaaag

SEQ ID NO: 978033 - DNA, 15 bp, Homo sapiens
tcgcgttcccaaaga

SEQ ID NO: 978034 - DNA, 15 bp, Homo sapiens
cgcgttcccaaagat

SEQ ID NO: 978035 - DNA, 15 bp, Homo sapiens
gcgttcccaaagatc

SEQ ID NO: 978036 - DNA, 15 bp, Homo sapiens
cgttcccaaagatcc

SEQ ID NO: 978037 - DNA, 15 bp, Homo sapiens
gttcccaaagatcca

SEQ ID NO: 978038 - DNA, 15 bp, Homo sapiens
ttcccaaagatccac

SEQ ID NO: 978039 - DNA, 15 bp, Homo sapiens
tcccaaagatccacc

SEQ ID NO: 978040 - DNA, 15 bp, Homo sapiens
cccaaagatccaccc

SEQ ID NO: 978041 - DNA, 15 bp, Homo sapiens
ccaaagatccaccca

SEQ ID NO: 978042 - DNA, 15 bp, Homo sapiens
caaagatccacccaa

SEQ ID NO: 978043 - DNA, 15 bp, Homo sapiens
aaagatccacccaaa

SEQ ID NO: 978044 - DNA, 15 bp, Homo sapiens
aagatccacccaaat

SEQ ID NO: 978045 - DNA, 15 bp, Homo sapiens
agatccacccaaata

SEQ ID NO: 978046 - DNA, 15 bp, Homo sapiens
gatccacccaaatat

SEQ ID NO: 978047 - DNA, 15 bp, Homo sapiens
atccacccaaatatc

SEQ ID NO: 978048 - DNA, 15 bp, Homo sapiens
tccacccaaatatca

SEQ ID NO: 978049 - DNA, 15 bp, Homo sapiens
ccacccaaatatcaa

SEQ ID NO: 978050 - DNA, 15 bp, Homo sapiens
cacccaaatatcaaa

SEQ ID NO: 978051 - DNA, 15 bp, Homo sapiens
acccaaatatcaaac

SEQ ID NO: 978052 - DNA, 15 bp, Homo sapiens
cccaaatatcaaaca

SEQ ID NO: 978053 - DNA, 15 bp, Homo sapiens
ccaaatatcaaacac

SEQ ID NO: 978054 - DNA, 15 bp, Homo sapiens
caaatatcaaacacg

SEQ ID NO: 978055 - DNA, 15 bp, Homo sapiens
aaatatcaaacacgg

SEQ ID NO: 978056 - DNA, 15 bp, Homo sapiens
aatatcaaacacgga

SEQ ID NO: 978057 - DNA, 15 bp, Homo sapiens
atatcaaacacggac

SEQ ID NO: 978058 - DNA, 15 bp, Homo sapiens
tatcaaacacggacc

SEQ ID NO: 978059 - DNA, 15 bp, Homo sapiens
atcaaacacggaccc

SEQ ID NO: 978060 - DNA, 15 bp, Homo sapiens
tcaaacacggaccca

SEQ ID NO: 978061 - DNA, 15 bp, Homo sapiens
caaacacggacccat

SEQ ID NO: 978062 - DNA, 15 bp, Homo sapiens
aaacacggacccata

SEQ ID NO: 978063 - DNA, 15 bp, Homo sapiens
aacacggacccatag

SEQ ID NO: 978064 - DNA, 15 bp, Homo sapiens
acacggacccataga

SEQ ID NO: 978065 - DNA, 15 bp, Homo sapiens
cacggacccatagac

SEQ ID NO: 978066 - DNA, 15 bp, Homo sapiens
acggacccatagaca

SEQ ID NO: 978067 - DNA, 15 bp, Homo sapiens
cggacccatagacag

SEQ ID NO: 978068 - DNA, 15 bp, Homo sapiens
ggacccatagacagc

SEQ ID NO: 978069 - DNA, 15 bp, Homo sapiens
gacccatagacagcc

SEQ ID NO: 978070 - DNA, 15 bp, Homo sapiens
acccatagacagccc

SEQ ID NO: 978071 - DNA, 15 bp, Homo sapiens
cccatagacagccct

SEQ ID NO: 978072 - DNA, 15 bp, Homo sapiens
ccatagacagccctg

SEQ ID NO: 978073 - DNA, 15 bp, Homo sapiens
catagacagccctgg

SEQ ID NO: 978074 - DNA, 15 bp, Homo sapiens
atagacagccctggg

SEQ ID NO: 978075 - DNA, 15 bp, Homo sapiens
tagacagccctgggg

SEQ ID NO: 978076 - DNA, 15 bp, Homo sapiens
agacagccctggggg

SEQ ID NO: 978077 - DNA, 15 bp, Homo sapiens
gacagccctggggga

SEQ ID NO: 978078 - DNA, 15 bp, Homo sapiens
acagccctgggggag

SEQ ID NO: 978079 - DNA, 15 bp, Homo sapiens
cagccctgggggagc

SEQ ID NO: 978080 - DNA, 15 bp, Homo sapiens
agccctgggggagcc

SEQ ID NO: 978081 - DNA, 15 bp, Homo sapiens
gccctgggggagcct

SEQ ID NO: 978082 - DNA, 15 bp, Homo sapiens
ccctgggggagcctc

SEQ ID NO: 978083 - DNA, 15 bp, Homo sapiens
cctgggggagcctct

SEQ ID NO: 978084 - DNA, 15 bp, Homo sapiens
ctgggggagcctctt

SEQ ID NO: 978085 - DNA, 15 bp, Homo sapiens
tgggggagcctctta

SEQ ID NO: 978086 - DNA, 15 bp, Homo sapiens
gggggagcctcttac

SEQ ID NO: 978087 - DNA, 15 bp, Homo sapiens
ggggagcctcttacg

SEQ ID NO: 978088 - DNA, 15 bp, Homo sapiens
gggagcctcttacgg

SEQ ID NO: 978089 - DNA, 15 bp, Homo sapiens
ggagcctcttacgga

SEQ ID NO: 978090 - DNA, 15 bp, Homo sapiens
gagcctcttacggaa

SEQ ID NO: 978091 - DNA, 15 bp, Homo sapiens
agcctcttacggaaa

SEQ ID NO: 978092 - DNA, 15 bp, Homo sapiens
gcctcttacggaaaa

SEQ ID NO: 978093 - DNA, 15 bp, Homo sapiens
cctcttacggaaaat

SEQ ID NO: 978094 - DNA, 15 bp, Homo sapiens
ctcttacggaaaatc

SEQ ID NO: 978095 - DNA, 15 bp, Homo sapiens
tcttacggaaaatcc

SEQ ID NO: 978096 - DNA, 15 bp, Homo sapiens
cttacggaaaatccg

SEQ ID NO: 978097 - DNA, 15 bp, Homo sapiens
ttacggaaaatccga

SEQ ID NO: 978098 - DNA, 15 bp, Homo sapiens
tacggaaaatccgac

SEQ ID NO: 978099 - DNA, 15 bp, Homo sapiens
acggaaaatccgaca

SEQ ID NO: 978100 - DNA, 15 bp, Homo sapiens
cggaaaatccgacaa

SEQ ID NO: 978101 - DNA, 15 bp, Homo sapiens
ggaaaatccgacaag

SEQ ID NO: 978102 - DNA, 15 bp, Homo sapiens
gaaaatccgacaagc

SEQ ID NO: 978103 - DNA, 15 bp, Homo sapiens
aaaatccgacaagcc

SEQ ID NO: 978104 - DNA, 15 bp, Homo sapiens
aaatccgacaagcct

SEQ ID NO: 978105 - DNA, 15 bp, Homo sapiens
aatccgacaagcctt

SEQ ID NO: 978106 - DNA, 15 bp, Homo sapiens
atccgacaagccttc

SEQ ID NO: 978107 - DNA, 15 bp, Homo sapiens
tccgacaagccttca

SEQ ID NO: 978108 - DNA, 15 bp, Homo sapiens
ccgacaagccttcag

SEQ ID NO: 978109 - DNA, 15 bp, Homo sapiens
cgacaagccttcagc

SEQ ID NO: 978110 - DNA, 15 bp, Homo sapiens
gacaagccttcagcc

SEQ ID NO: 978111 - DNA, 15 bp, Homo sapiens
acaagccttcagcca

SEQ ID NO: 978112 - DNA, 15 bp, Homo sapiens
caagccttcagccac

SEQ ID NO: 978113 - DNA, 15 bp, Homo sapiens
aagccttcagccaca

SEQ ID NO: 978114 - DNA, 15 bp, Homo sapiens
agccttcagccacag

SEQ ID NO: 978115 - DNA, 15 bp, Homo sapiens
gccttcagccacagg

SEQ ID NO: 978116 - DNA, 15 bp, Homo sapiens
ccttcagccacaggg

SEQ ID NO: 978117 - DNA, 15 bp, Homo sapiens
cttcagccacaggga

SEQ ID NO: 978118 - DNA, 15 bp, Homo sapiens
ttcagccacagggag

SEQ ID NO: 978119 - DNA, 15 bp, Homo sapiens
tcagccacagggagc

SEQ ID NO: 978120 - DNA, 15 bp, Homo sapiens
cagccacagggagcc

SEQ ID NO: 978121 - DNA, 15 bp, Homo sapiens
agccacagggagcca

SEQ ID NO: 978122 - DNA, 15 bp, Homo sapiens
gccacagggagccac

SEQ ID NO: 978123 - DNA, 15 bp, Homo sapiens
ccacagggagccaca

SEQ ID NO: 978124 - DNA, 15 bp, Homo sapiens
cacagggagccacac

SEQ ID NO: 978125 - DNA, 15 bp, Homo sapiens
acagggagccacaca

SEQ ID NO: 978126 - DNA, 15 bp, Homo sapiens
cagggagccacacag

SEQ ID NO: 978127 - DNA, 15 bp, Homo sapiens
agggagccacacaga

SEQ ID NO: 978128 - DNA, 15 bp, Homo sapiens
gggagccacacagag

SEQ ID NO: 978129 - DNA, 15 bp, Homo sapiens
ggagccacacagaga

SEQ ID NO: 978130 - DNA, 15 bp, Homo sapiens
gagccacacagagat

SEQ ID NO: 978131 - DNA, 15 bp, Homo sapiens
agccacacagagatg

SEQ ID NO: 978132 - DNA, 15 bp, Homo sapiens
gccacacagagatgt

SEQ ID NO: 978133 - DNA, 15 bp, Homo sapiens
ccacacagagatgtc

SEQ ID NO: 978134 - DNA, 15 bp, Homo sapiens
cacacagagatgtcc

SEQ ID NO: 978135 - DNA, 15 bp, Homo sapiens
acacagagatgtcca

SEQ ID NO: 978136 - DNA, 15 bp, Homo sapiens
cacagagatgtccaa

SEQ ID NO: 978137 - DNA, 15 bp, Homo sapiens
acagagatgtccaaa

SEQ ID NO: 978138 - DNA, 15 bp, Homo sapiens
cagagatgtccaaac

SEQ ID NO: 978139 - DNA, 15 bp, Homo sapiens
agagatgtccaaact

SEQ ID NO: 978140 - DNA, 15 bp, Homo sapiens
gagatgtccaaactg

SEQ ID NO: 978141 - DNA, 15 bp, Homo sapiens
agatgtccaaactgt

SEQ ID NO: 978142 - DNA, 15 bp, Homo sapiens
gatgtccaaactgtc

SEQ ID NO: 978143 - DNA, 15 bp, Homo sapiens
atgtccaaactgtcg

SEQ ID NO: 978144 - DNA, 15 bp, Homo sapiens
tgtccaaactgtcgt

SEQ ID NO: 978145 - DNA, 15 bp, Homo sapiens
gtccaaactgtcgtg

SEQ ID NO: 978146 - DNA, 15 bp, Homo sapiens
tccaaactgtcgtgc

SEQ ID NO: 978147 - DNA, 15 bp, Homo sapiens
ccaaactgtcgtgca

SEQ ID NO: 978148 - DNA, 15 bp, Homo sapiens
caaactgtcgtgcaa

SEQ ID NO: 978149 - DNA, 15 bp, Homo sapiens
aaactgtcgtgcaaa

SEQ ID NO: 978150 - DNA, 15 bp, Homo sapiens
aactgtcgtgcaaac

SEQ ID NO: 978151 - DNA, 15 bp, Homo sapiens
actgtcgtgcaaacc

SEQ ID NO: 978152 - DNA, 15 bp, Homo sapiens
ctgtcgtgcaaaccc

SEQ ID NO: 978153 - DNA, 15 bp, Homo sapiens
tgtcgtgcaaaccca

SEQ ID NO: 978154 - DNA, 15 bp, Homo sapiens
gtcgtgcaaacccag

SEQ ID NO: 978155 - DNA, 15 bp, Homo sapiens
tcgtgcaaacccagt

SEQ ID NO: 978156 - DNA, 15 bp, Homo sapiens
cgtgcaaacccagtg

SEQ ID NO: 978157 - DNA, 15 bp, Homo sapiens
gtgcaaacccagtga

SEQ ID NO: 978158 - DNA, 15 bp, Homo sapiens
tgcaaacccagtgag

SEQ ID NO: 978159 - DNA, 15 bp, Homo sapiens
gcaaacccagtgaga

SEQ ID NO: 978160 - DNA, 15 bp, Homo sapiens
caaacccagtgagac

SEQ ID NO: 978161 - DNA, 15 bp, Homo sapiens
aaacccagtgagaca

SEQ ID NO: 978162 - DNA, 15 bp, Homo sapiens
aacccagtgagacag

SEQ ID NO: 978163 - DNA, 15 bp, Homo sapiens
acccagtgagacaga

SEQ ID NO: 978164 - DNA, 15 bp, Homo sapiens
cccagtgagacagac

SEQ ID NO: 978165 - DNA, 15 bp, Homo sapiens
ccagtgagacagacc

SEQ ID NO: 978166 - DNA, 15 bp, Homo sapiens
cagtgagacagaccg

SEQ ID NO: 978167 - DNA, 15 bp, Homo sapiens
agtgagacagaccgc

SEQ ID NO: 978168 - DNA, 15 bp, Homo sapiens
gtgagacagaccgcc

SEQ ID NO: 978169 - DNA, 15 bp, Homo sapiens
tgagacagaccgcca

SEQ ID NO: 978170 - DNA, 15 bp, Homo sapiens
gagacagaccgccaa

SEQ ID NO: 978171 - DNA, 15 bp, Homo sapiens
agacagaccgccaaa

SEQ ID NO: 978172 - DNA, 15 bp, Homo sapiens
gacagaccgccaaat

SEQ ID NO: 978173 - DNA, 15 bp, Homo sapiens
acagaccgccaaata

SEQ ID NO: 978174 - DNA, 15 bp, Homo sapiens
cagaccgccaaataa

SEQ ID NO: 978175 - DNA, 15 bp, Homo sapiens
agaccgccaaataaa

SEQ ID NO: 978176 - DNA, 15 bp, Homo sapiens
gaccgccaaataaac

SEQ ID NO: 978177 - DNA, 15 bp, Homo sapiens
accgccaaataaacg

SEQ ID NO: 978178 - DNA, 15 bp, Homo sapiens
ccgccaaataaacgg

SEQ ID NO: 978179 - DNA, 15 bp, Homo sapiens
cgccaaataaacgga

SEQ ID NO: 978180 - DNA, 15 bp, Homo sapiens
gccaaataaacggac

SEQ ID NO: 978181 - DNA, 15 bp, Homo sapiens
ccaaataaacggact

SEQ ID NO: 978182 - DNA, 15 bp, Homo sapiens
caaataaacggactc

SEQ ID NO: 978183 - DNA, 15 bp, Homo sapiens
aaataaacggactca

SEQ ID NO: 978184 - DNA, 15 bp, Homo sapiens
aataaacggactcag

SEQ ID NO: 978185 - DNA, 15 bp, Homo sapiens
ataaacggactcagt

SEQ ID NO: 978186 - DNA, 15 bp, Homo sapiens
taaacggactcagtg

SEQ ID NO: 978187 - DNA, 15 bp, Homo sapiens
aaacggactcagtgg

SEQ ID NO: 978188 - DNA, 15 bp, Homo sapiens
aacggactcagtgga

SEQ ID NO: 978189 - DNA, 15 bp, Homo sapiens
acggactcagtggac

SEQ ID NO: 978190 - DNA, 15 bp, Homo sapiens
cggactcagtggaca

SEQ ID NO: 978191 - DNA, 15 bp, Homo sapiens
ggactcagtggacac

SEQ ID NO: 978192 - DNA, 15 bp, Homo sapiens
gactcagtggacact

SEQ ID NO: 978193 - DNA, 15 bp, Homo sapiens
actcagtggacactc

SEQ ID NO: 978194 - DNA, 15 bp, Homo sapiens
ctcagtggacactca

SEQ ID NO: 978195 - DNA, 15 bp, Homo sapiens
tcagtggacactcag

SEQ ID NO: 978196 - DNA, 15 bp, Homo sapiens
cagtggacactcaga

SEQ ID NO: 978197 - DNA, 15 bp, Homo sapiens
agtggacactcagac

SEQ ID NO: 978198 - DNA, 15 bp, Homo sapiens
gtggacactcagacc

SEQ ID NO: 978199 - DNA, 15 bp, Homo sapiens
tggacactcagacca

SEQ ID NO: 978200 - DNA, 15 bp, Homo sapiens
ggacactcagaccag

SEQ ID NO: 978201 - DNA, 15 bp, Homo sapiens
gacactcagaccagc

SEQ ID NO: 978202 - DNA, 15 bp, Homo sapiens
acactcagaccagct

SEQ ID NO: 978203 - DNA, 15 bp, Homo sapiens
cactcagaccagctc

SEQ ID NO: 978204 - DNA, 15 bp, Homo sapiens
actcagaccagctcc

SEQ ID NO: 978205 - DNA, 15 bp, Homo sapiens
ctcagaccagctccc

SEQ ID NO: 978206 - DNA, 15 bp, Homo sapiens
tcagaccagctccca

SEQ ID NO: 978207 - DNA, 15 bp, Homo sapiens
cagaccagctcccag

SEQ ID NO: 978208 - DNA, 15 bp, Homo sapiens
agaccagctcccaga

SEQ ID NO: 978209 - DNA, 15 bp, Homo sapiens
gaccagctcccagat

SEQ ID NO: 978210 - DNA, 15 bp, Homo sapiens
accagctcccagatg

SEQ ID NO: 978211 - DNA, 15 bp, Homo sapiens
ccagctcccagatgg

SEQ ID NO: 978212 - DNA, 15 bp, Homo sapiens
cagctcccagatggc

SEQ ID NO: 978213 - DNA, 15 bp, Homo sapiens
agctcccagatggcc

SEQ ID NO: 978214 - DNA, 15 bp, Homo sapiens
gctcccagatggccc

SEQ ID NO: 978215 - DNA, 15 bp, Homo sapiens
ctcccagatggccct

SEQ ID NO: 978216 - DNA, 15 bp, Homo sapiens
tcccagatggccctg

SEQ ID NO: 978217 - DNA, 15 bp, Homo sapiens
cccagatggccctgg

SEQ ID NO: 978218 - DNA, 15 bp, Homo sapiens
ccagatggccctgga

SEQ ID NO: 978219 - DNA, 15 bp, Homo sapiens
cagatggccctggac

SEQ ID NO: 978220 - DNA, 15 bp, Homo sapiens
agatggccctggaca

SEQ ID NO: 978221 - DNA, 15 bp, Homo sapiens
gatggccctggacag

SEQ ID NO: 978222 - DNA, 15 bp, Homo sapiens
atggccctggacagc

SEQ ID NO: 978223 - DNA, 15 bp, Homo sapiens
tggccctggacagca

SEQ ID NO: 978224 - DNA, 15 bp, Homo sapiens
ggccctggacagcag

SEQ ID NO: 978225 - DNA, 15 bp, Homo sapiens
gccctggacagcagg

SEQ ID NO: 978226 - DNA, 15 bp, Homo sapiens
ccctggacagcagga

SEQ ID NO: 978227 - DNA, 15 bp, Homo sapiens
cctggacagcaggag

SEQ ID NO: 978228 - DNA, 15 bp, Homo sapiens
ctggacagcaggaga

SEQ ID NO: 978229 - DNA, 15 bp, Homo sapiens
tggacagcaggagag

SEQ ID NO: 978230 - DNA, 15 bp, Homo sapiens
ggacagcaggagagg

SEQ ID NO: 978231 - DNA, 15 bp, Homo sapiens
gacagcaggagaggg

SEQ ID NO: 978232 - DNA, 15 bp, Homo sapiens
acagcaggagagggt

SEQ ID NO: 978233 - DNA, 15 bp, Homo sapiens
cagcaggagagggtg

SEQ ID NO: 978234 - DNA, 15 bp, Homo sapiens
agcaggagagggtgt

SEQ ID NO: 978235 - DNA, 15 bp, Homo sapiens
gcaggagagggtgtg

SEQ ID NO: 978236 - DNA, 15 bp, Homo sapiens
caggagagggtgtgg

SEQ ID NO: 978237 - DNA, 15 bp, Homo sapiens
aggagagggtgtggg

SEQ ID NO: 978238 - DNA, 15 bp, Homo sapiens
ggagagggtgtggga

SEQ ID NO: 978239 - DNA, 15 bp, Homo sapiens
gagagggtgtgggat

SEQ ID NO: 978240 - DNA, 15 bp, Homo sapiens
agagggtgtgggatg

SEQ ID NO: 978241 - DNA, 15 bp, Homo sapiens
gagggtgtgggatga

SEQ ID NO: 978242 - DNA, 15 bp, Homo sapiens
agggtgtgggatgag

SEQ ID NO: 978243 - DNA, 15 bp, Homo sapiens
gggtgtgggatgagg

SEQ ID NO: 978244 - DNA, 15 bp, Homo sapiens
ggtgtgggatgaggc

SEQ ID NO: 978245 - DNA, 15 bp, Homo sapiens
gtgtgggatgaggct

SEQ ID NO: 978246 - DNA, 15 bp, Homo sapiens
tgtgggatgaggctt

SEQ ID NO: 978247 - DNA, 15 bp, Homo sapiens
gtgggatgaggcttc

SEQ ID NO: 978248 - DNA, 15 bp, Homo sapiens
tgggatgaggcttcc

SEQ ID NO: 978249 - DNA, 15 bp, Homo sapiens
gggatgaggcttccc

SEQ ID NO: 978250 - DNA, 15 bp, Homo sapiens
ggatgaggcttccca

SEQ ID NO: 978251 - DNA, 15 bp, Homo sapiens
gatgaggcttcccag

SEQ ID NO: 978252 - DNA, 15 bp, Homo sapiens
atgaggcttcccaga

SEQ ID NO: 978253 - DNA, 15 bp, Homo sapiens
tgaggcttcccagag

SEQ ID NO: 978254 - DNA, 15 bp, Homo sapiens
gaggcttcccagaga

SEQ ID NO: 978255 - DNA, 15 bp, Homo sapiens
aggcttcccagagac

SEQ ID NO: 978256 - DNA, 15 bp, Homo sapiens
ggcttcccagagacc

SEQ ID NO: 978257 - DNA, 15 bp, Homo sapiens
gcttcccagagaccc

SEQ ID NO: 978258 - DNA, 15 bp, Homo sapiens
cttcccagagaccct

SEQ ID NO: 978259 - DNA, 15 bp, Homo sapiens
ttcccagagaccctg

SEQ ID NO: 978260 - DNA, 15 bp, Homo sapiens
tcccagagaccctgg

SEQ ID NO: 978261 - DNA, 15 bp, Homo sapiens
cccagagaccctggg

SEQ ID NO: 978262 - DNA, 15 bp, Homo sapiens
ccagagaccctgggt

SEQ ID NO: 978263 - DNA, 15 bp, Homo sapiens
cagagaccctgggtc

SEQ ID NO: 978264 - DNA, 15 bp, Homo sapiens
agagaccctgggtct

SEQ ID NO: 978265 - DNA, 15 bp, Homo sapiens
gagaccctgggtcta

SEQ ID NO: 978266 - DNA, 15 bp, Homo sapiens
agaccctgggtctag

SEQ ID NO: 978267 - DNA, 15 bp, Homo sapiens
gaccctgggtctaga

SEQ ID NO: 978268 - DNA, 15 bp, Homo sapiens
accctgggtctagaa

SEQ ID NO: 978269 - DNA, 15 bp, Homo sapiens
ccctgggtctagaaa

SEQ ID NO: 978270 - DNA, 15 bp, Homo sapiens
cctgggtctagaaag

SEQ ID NO: 978271 - DNA, 15 bp, Homo sapiens
ctgggtctagaaagc

SEQ ID NO: 978272 - DNA, 15 bp, Homo sapiens
tgggtctagaaagcg

SEQ ID NO: 978273 - DNA, 15 bp, Homo sapiens
gggtctagaaagcgg

SEQ ID NO: 978274 - DNA, 15 bp, Homo sapiens
ggtctagaaagcggc

SEQ ID NO: 978275 - DNA, 15 bp, Homo sapiens
gtctagaaagcggct

SEQ ID NO: 978276 - DNA, 15 bp, Homo sapiens
tctagaaagcggctc

SEQ ID NO: 978277 - DNA, 15 bp, Homo sapiens
ctagaaagcggctcc

SEQ ID NO: 978278 - DNA, 15 bp, Homo sapiens
tagaaagcggctcct

SEQ ID NO: 978279 - DNA, 15 bp, Homo sapiens
agaaagcggctcctg

SEQ ID NO: 978280 - DNA, 15 bp, Homo sapiens
gaaagcggctcctga

SEQ ID NO: 978281 - DNA, 15 bp, Homo sapiens
aaagcggctcctgaa

SEQ ID NO: 978282 - DNA, 15 bp, Homo sapiens
aagcggctcctgaag

SEQ ID NO: 978283 - DNA, 15 bp, Homo sapiens
agcggctcctgaagg

SEQ ID NO: 978284 - DNA, 15 bp, Homo sapiens
gcggctcctgaaggt

SEQ ID NO: 978285 - DNA, 15 bp, Homo sapiens
cggctcctgaaggtc

SEQ ID NO: 978286 - DNA, 15 bp, Homo sapiens
ggctcctgaaggtcc

SEQ ID NO: 978287 - DNA, 15 bp, Homo sapiens
gctcctgaaggtccc

SEQ ID NO: 978288 - DNA, 15 bp, Homo sapiens
ctcctgaaggtccct

SEQ ID NO: 978289 - DNA, 15 bp, Homo sapiens
tcctgaaggtccctt

SEQ ID NO: 978290 - DNA, 15 bp, Homo sapiens
cctgaaggtccctta

SEQ ID NO: 978291 - DNA, 15 bp, Homo sapiens
ctgaaggtcccttat

SEQ ID NO: 978292 - DNA, 15 bp, Homo sapiens
tgaaggtcccttatt

SEQ ID NO: 978293 - DNA, 15 bp, Homo sapiens
gaaggtcccttattg

SEQ ID NO: 978294 - DNA, 15 bp, Homo sapiens
aaggtcccttattgt

SEQ ID NO: 978295 - DNA, 15 bp, Homo sapiens
aggtcccttattgtg

SEQ ID NO: 978296 - DNA, 15 bp, Homo sapiens
ggtcccttattgtgg

SEQ ID NO: 978297 - DNA, 15 bp, Homo sapiens
gtcccttattgtggc

SEQ ID NO: 978298 - DNA, 15 bp, Homo sapiens
tcccttattgtggct

SEQ ID NO: 978299 - DNA, 15 bp, Homo sapiens
cccttattgtggctg

SEQ ID NO: 978300 - DNA, 15 bp, Homo sapiens
ccttattgtggctga

SEQ ID NO: 978301 - DNA, 15 bp, Homo sapiens
cttattgtggctgat

SEQ ID NO: 978302 - DNA, 15 bp, Homo sapiens
ttattgtggctgata

SEQ ID NO: 978303 - DNA, 15 bp, Homo sapiens
tattgtggctgatat

SEQ ID NO: 978304 - DNA, 15 bp, Homo sapiens
attgtggctgatatt

SEQ ID NO: 978305 - DNA, 15 bp, Homo sapiens
ttgtggctgatatta

SEQ ID NO: 978306 - DNA, 15 bp, Homo sapiens
tgtggctgatattaa

SEQ ID NO: 978307 - DNA, 15 bp, Homo sapiens
gtggctgatattaac

SEQ ID NO: 978308 - DNA, 15 bp, Homo sapiens
tggctgatattaact

SEQ ID NO: 978309 - DNA, 15 bp, Homo sapiens
ggctgatattaactg

SEQ ID NO: 978310 - DNA, 15 bp, Homo sapiens
gctgatattaactgt

SEQ ID NO: 978311 - DNA, 15 bp, Homo sapiens
ctgatattaactgtc

SEQ ID NO: 978312 - DNA, 15 bp, Homo sapiens
tgatattaactgtca

SEQ ID NO: 978313 - DNA, 15 bp, Homo sapiens
gatattaactgtcaa

SEQ ID NO: 978314 - DNA, 15 bp, Homo sapiens
atattaactgtcaat

SEQ ID NO: 978315 - DNA, 15 bp, Homo sapiens
tattaactgtcaatg

SEQ ID NO: 978316 - DNA, 15 bp, Homo sapiens
attaactgtcaatgg

SEQ ID NO: 978317 - DNA, 15 bp, Homo sapiens
ttaactgtcaatggt

SEQ ID NO: 978318 - DNA, 15 bp, Homo sapiens
taactgtcaatggtt

SEQ ID NO: 978319 - DNA, 15 bp, Homo sapiens
aactgtcaatggtta

SEQ ID NO: 978320 - DNA, 15 bp, Homo sapiens
actgtcaatggttat

SEQ ID NO: 978321 - DNA, 15 bp, Homo sapiens
ctgtcaatggttatg

SEQ ID NO: 978322 - DNA, 15 bp, Homo sapiens
tgtcaatggttatgg

SEQ ID NO: 978323 - DNA, 15 bp, Homo sapiens
gtcaatggttatggg

SEQ ID NO: 978324 - DNA, 15 bp, Homo sapiens
tcaatggttatgggt

SEQ ID NO: 978325 - DNA, 15 bp, Homo sapiens
caatggttatgggtc

SEQ ID NO: 978326 - DNA, 15 bp, Homo sapiens
aatggttatgggtcc

SEQ ID NO: 978327 - DNA, 15 bp, Homo sapiens
atggttatgggtcct

SEQ ID NO: 978328 - DNA, 15 bp, Homo sapiens
tggttatgggtccta

SEQ ID NO: 978329 - DNA, 15 bp, Homo sapiens
ggttatgggtcctat

SEQ ID NO: 978330 - DNA, 15 bp, Homo sapiens
gttatgggtcctata

SEQ ID NO: 978331 - DNA, 15 bp, Homo sapiens
ttatgggtcctataa

SEQ ID NO: 978332 - DNA, 15 bp, Homo sapiens
tatgggtcctataaa

SEQ ID NO: 978333 - DNA, 15 bp, Homo sapiens
atgggtcctataaaa

SEQ ID NO: 978334 - DNA, 15 bp, Homo sapiens
tgggtcctataaaaa

SEQ ID NO: 978335 - DNA, 15 bp, Homo sapiens
gggtcctataaaaat

SEQ ID NO: 978336 - DNA, 15 bp, Homo sapiens
ggtcctataaaaatg

SEQ ID NO: 978337 - DNA, 15 bp, Homo sapiens
gtcctataaaaatgc

SEQ ID NO: 978338 - DNA, 15 bp, Homo sapiens
tcctataaaaatgcc

SEQ ID NO: 978339 - DNA, 15 bp, Homo sapiens
cctataaaaatgccc

SEQ ID NO: 978340 - DNA, 15 bp, Homo sapiens
ctataaaaatgcccc

SEQ ID NO: 978341 - DNA, 15 bp, Homo sapiens
tataaaaatgcccct

SEQ ID NO: 978342 - DNA, 15 bp, Homo sapiens
ataaaaatgcccctc

SEQ ID NO: 978343 - DNA, 15 bp, Homo sapiens
taaaaatgcccctcc

SEQ ID NO: 978344 - DNA, 15 bp, Homo sapiens
aaaaatgcccctccc

SEQ ID NO: 978345 - DNA, 15 bp, Homo sapiens
aaaatgcccctccca

SEQ ID NO: 978346 - DNA, 15 bp, Homo sapiens
aaatgcccctcccag

SEQ ID NO: 978347 - DNA, 15 bp, Homo sapiens
aatgcccctcccaga

SEQ ID NO: 978348 - DNA, 15 bp, Homo sapiens
atgcccctcccagat

SEQ ID NO: 978349 - DNA, 15 bp, Homo sapiens
tgcccctcccagata

SEQ ID NO: 978350 - DNA, 15 bp, Homo sapiens
gcccctcccagataa

SEQ ID NO: 978351 - DNA, 15 bp, Homo sapiens
cccctcccagataaa

SEQ ID NO: 978352 - DNA, 15 bp, Homo sapiens
ccctcccagataaag

SEQ ID NO: 978353 - DNA, 15 bp, Homo sapiens
cctcccagataaagc

SEQ ID NO: 978354 - DNA, 15 bp, Homo sapiens
ctcccagataaagct

SEQ ID NO: 978355 - DNA, 15 bp, Homo sapiens
tcccagataaagctt

SEQ ID NO: 978356 - DNA, 15 bp, Homo sapiens
cccagataaagcttc

SEQ ID NO: 978357 - DNA, 15 bp, Homo sapiens
ccagataaagcttca

SEQ ID NO: 978358 - DNA, 15 bp, Homo sapiens
cagataaagcttcag

SEQ ID NO: 978359 - DNA, 15 bp, Homo sapiens
agataaagcttcagc

SEQ ID NO: 978360 - DNA, 15 bp, Homo sapiens
gataaagcttcagcg

SEQ ID NO: 978361 - DNA, 15 bp, Homo sapiens
ataaagcttcagcgt

SEQ ID NO: 978362 - DNA, 15 bp, Homo sapiens
taaagcttcagcgtt

SEQ ID NO: 978363 - DNA, 15 bp, Homo sapiens
aaagcttcagcgttg

SEQ ID NO: 978364 - DNA, 15 bp, Homo sapiens
aagcttcagcgttgg

SEQ ID NO: 978365 - DNA, 15 bp, Homo sapiens
agcttcagcgttggc

SEQ ID NO: 978366 - DNA, 15 bp, Homo sapiens
gcttcagcgttggcc

SEQ ID NO: 978367 - DNA, 15 bp, Homo sapiens
cttcagcgttggcct

SEQ ID NO: 978368 - DNA, 15 bp, Homo sapiens
ttcagcgttggcctg

SEQ ID NO: 978369 - DNA, 15 bp, Homo sapiens
tcagcgttggcctga

SEQ ID NO: 978370 - DNA, 15 bp, Homo sapiens
cagcgttggcctgaa

SEQ ID NO: 978371 - DNA, 15 bp, Homo sapiens
agcgttggcctgaat

SEQ ID NO: 978372 - DNA, 15 bp, Homo sapiens
gcgttggcctgaatt

SEQ ID NO: 978373 - DNA, 15 bp, Homo sapiens
cgttggcctgaattt

SEQ ID NO: 978374 - DNA, 15 bp, Homo sapiens
gttggcctgaatttt

SEQ ID NO: 978375 - DNA, 15 bp, Homo sapiens
ttggcctgaattttt

SEQ ID NO: 978376 - DNA, 15 bp, Homo sapiens
tggcctgaatttttg

SEQ ID NO: 978377 - DNA, 15 bp, Homo sapiens
ggcctgaatttttgg

SEQ ID NO: 978378 - DNA, 15 bp, Homo sapiens
gcctgaatttttggg

SEQ ID NO: 978379 - DNA, 15 bp, Homo sapiens
cctgaatttttgggt

SEQ ID NO: 978380 - DNA, 15 bp, Homo sapiens
ctgaatttttgggtt

SEQ ID NO: 978381 - DNA, 15 bp, Homo sapiens
tgaatttttgggttt

SEQ ID NO: 978382 - DNA, 15 bp, Homo sapiens
gaatttttgggtttt

SEQ ID NO: 978383 - DNA, 15 bp, Homo sapiens
aatttttgggttttg

SEQ ID NO: 978384 - DNA, 15 bp, Homo sapiens
atttttgggttttgg

SEQ ID NO: 978385 - DNA, 15 bp, Homo sapiens
tttttgggttttgga

SEQ ID NO: 978386 - DNA, 15 bp, Homo sapiens
ttttgggttttggag

SEQ ID NO: 978387 - DNA, 15 bp, Homo sapiens
tttgggttttggagg

SEQ ID NO: 978388 - DNA, 15 bp, Homo sapiens
ttgggttttggaggc

SEQ ID NO: 978389 - DNA, 15 bp, Homo sapiens
tgggttttggaggct

SEQ ID NO: 978390 - DNA, 15 bp, Homo sapiens
gggttttggaggctg

SEQ ID NO: 978391 - DNA, 15 bp, Homo sapiens
ggttttggaggctgg

SEQ ID NO: 978392 - DNA, 15 bp, Homo sapiens
gttttggaggctgga

SEQ ID NO: 978393 - DNA, 15 bp, Homo sapiens
ttttggaggctggaa

SEQ ID NO: 978394 - DNA, 15 bp, Homo sapiens
tttggaggctggaag

SEQ ID NO: 978395 - DNA, 15 bp, Homo sapiens
ttggaggctggaaga

SEQ ID NO: 978396 - DNA, 15 bp, Homo sapiens
tggaggctggaagat

SEQ ID NO: 978397 - DNA, 15 bp, Homo sapiens
ggaggctggaagatg

SEQ ID NO: 978398 - DNA, 15 bp, Homo sapiens
gaggctggaagatgg

SEQ ID NO: 978399 - DNA, 15 bp, Homo sapiens
aggctggaagatggc

SEQ ID NO: 978400 - DNA, 15 bp, Homo sapiens
ggctggaagatggca

SEQ ID NO: 978401 - DNA, 15 bp, Homo sapiens
gctggaagatggcag

SEQ ID NO: 978402 - DNA, 15 bp, Homo sapiens
ctggaagatggcagg

SEQ ID NO: 978403 - DNA, 15 bp, Homo sapiens
tggaagatggcagga

SEQ ID NO: 978404 - DNA, 15 bp, Homo sapiens
ggaagatggcaggag

SEQ ID NO: 978405 - DNA, 15 bp, Homo sapiens
gaagatggcaggagg

SEQ ID NO: 978406 - DNA, 15 bp, Homo sapiens
aagatggcaggaggc

SEQ ID NO: 978407 - DNA, 15 bp, Homo sapiens
agatggcaggaggct

SEQ ID NO: 978408 - DNA, 15 bp, Homo sapiens
gatggcaggaggctg

SEQ ID NO: 978409 - DNA, 15 bp, Homo sapiens
atggcaggaggctgt

SEQ ID NO: 978410 - DNA, 15 bp, Homo sapiens
tggcaggaggctgta

SEQ ID NO: 978411 - DNA, 15 bp, Homo sapiens
ggcaggaggctgtaa

SEQ ID NO: 978412 - DNA, 15 bp, Homo sapiens
gcaggaggctgtaaa

SEQ ID NO: 978413 - DNA, 15 bp, Homo sapiens
caggaggctgtaaac

SEQ ID NO: 978414 - DNA, 15 bp, Homo sapiens
aggaggctgtaaacc

SEQ ID NO: 978415 - DNA, 15 bp, Homo sapiens
ggaggctgtaaacct

SEQ ID NO: 978416 - DNA, 15 bp, Homo sapiens
gaggctgtaaaccta

SEQ ID NO: 978417 - DNA, 15 bp, Homo sapiens
aggctgtaaacctag

SEQ ID NO: 978418 - DNA, 15 bp, Homo sapiens
ggctgtaaacctaga

SEQ ID NO: 978419 - DNA, 15 bp, Homo sapiens
gctgtaaacctagag

SEQ ID NO: 978420 - DNA, 15 bp, Homo sapiens
ctgtaaacctagagg

SEQ ID NO: 978421 - DNA, 15 bp, Homo sapiens
tgtaaacctagaggt

SEQ ID NO: 978422 - DNA, 15 bp, Homo sapiens
gtaaacctagaggtc

SEQ ID NO: 978423 - DNA, 15 bp, Homo sapiens
taaacctagaggtca

SEQ ID NO: 978424 - DNA, 15 bp, Homo sapiens
aaacctagaggtcat

SEQ ID NO: 978425 - DNA, 15 bp, Homo sapiens
aacctagaggtcata

SEQ ID NO: 978426 - DNA, 15 bp, Homo sapiens
acctagaggtcatat

SEQ ID NO: 978427 - DNA, 15 bp, Homo sapiens
cctagaggtcatatt

SEQ ID NO: 978428 - DNA, 15 bp, Homo sapiens
ctagaggtcatatta

SEQ ID NO: 978429 - DNA, 15 bp, Homo sapiens
tagaggtcatattag

SEQ ID NO: 978430 - DNA, 15 bp, Homo sapiens
agaggtcatattaga

SEQ ID NO: 978431 - DNA, 15 bp, Homo sapiens
gaggtcatattagag

SEQ ID NO: 978432 - DNA, 15 bp, Homo sapiens
aggtcatattagagg

SEQ ID NO: 978433 - DNA, 15 bp, Homo sapiens
ggtcatattagaggg

SEQ ID NO: 978434 - DNA, 15 bp, Homo sapiens
gtcatattagagggc

SEQ ID NO: 978435 - DNA, 15 bp, Homo sapiens
tcatattagagggcc

SEQ ID NO: 978436 - DNA, 15 bp, Homo sapiens
catattagagggcct

SEQ ID NO: 978437 - DNA, 15 bp, Homo sapiens
atattagagggcctt

SEQ ID NO: 978438 - DNA, 15 bp, Homo sapiens
tattagagggcctta

SEQ ID NO: 978439 - DNA, 15 bp, Homo sapiens
attagagggccttac

SEQ ID NO: 978440 - DNA, 15 bp, Homo sapiens
ttagagggccttaca

SEQ ID NO: 978441 - DNA, 15 bp, Homo sapiens
tagagggccttacac

SEQ ID NO: 978442 - DNA, 15 bp, Homo sapiens
agagggccttacaca

SEQ ID NO: 978443 - DNA, 15 bp, Homo sapiens
gagggccttacacac

SEQ ID NO: 978444 - DNA, 15 bp, Homo sapiens
agggccttacacacc

SEQ ID NO: 978445 - DNA, 15 bp, Homo sapiens
gggccttacacaccc

SEQ ID NO: 978446 - DNA, 15 bp, Homo sapiens
ggccttacacaccct

SEQ ID NO: 978447 - DNA, 15 bp, Homo sapiens
gccttacacaccctc

SEQ ID NO: 978448 - DNA, 15 bp, Homo sapiens
ccttacacaccctca

SEQ ID NO: 978449 - DNA, 15 bp, Homo sapiens
cttacacaccctcat

SEQ ID NO: 978450 - DNA, 15 bp, Homo sapiens
ttacacaccctcatc

SEQ ID NO: 978451 - DNA, 15 bp, Homo sapiens
tacacaccctcatct

SEQ ID NO: 978452 - DNA, 15 bp, Homo sapiens
acacaccctcatctc

SEQ ID NO: 978453 - DNA, 15 bp, Homo sapiens
cacaccctcatctcc

SEQ ID NO: 978454 - DNA, 15 bp, Homo sapiens
acaccctcatctcct

SEQ ID NO: 978455 - DNA, 15 bp, Homo sapiens
caccctcatctccta

SEQ ID NO: 978456 - DNA, 15 bp, Homo sapiens
accctcatctcctaa

SEQ ID NO: 978457 - DNA, 15 bp, Homo sapiens
ccctcatctcctaaa

SEQ ID NO: 978458 - DNA, 15 bp, Homo sapiens
cctcatctcctaaac

SEQ ID NO: 978459 - DNA, 15 bp, Homo sapiens
ctcatctcctaaact

SEQ ID NO: 978460 - DNA, 15 bp, Homo sapiens
tcatctcctaaacta

SEQ ID NO: 978461 - DNA, 15 bp, Homo sapiens
catctcctaaactac

SEQ ID NO: 978462 - DNA, 15 bp, Homo sapiens
atctcctaaactaca

SEQ ID NO: 978463 - DNA, 15 bp, Homo sapiens
tctcctaaactacag

SEQ ID NO: 978464 - DNA, 15 bp, Homo sapiens
ctcctaaactacagt

SEQ ID NO: 978465 - DNA, 15 bp, Homo sapiens
tcctaaactacagtg

SEQ ID NO: 978466 - DNA, 15 bp, Homo sapiens
cctaaactacagtga

SEQ ID NO: 978467 - DNA, 15 bp, Homo sapiens
ctaaactacagtgac

SEQ ID NO: 978468 - DNA, 15 bp, Homo sapiens
taaactacagtgaca

SEQ ID NO: 978469 - DNA, 15 bp, Homo sapiens
aaactacagtgacac

SEQ ID NO: 978470 - DNA, 15 bp, Homo sapiens
aactacagtgacacc

SEQ ID NO: 978471 - DNA, 15 bp, Homo sapiens
actacagtgacaccc

SEQ ID NO: 978472 - DNA, 15 bp, Homo sapiens
ctacagtgacacccc

SEQ ID NO: 978473 - DNA, 15 bp, Homo sapiens
tacagtgacacccct

SEQ ID NO: 978474 - DNA, 15 bp, Homo sapiens
acagtgacacccctc

SEQ ID NO: 978475 - DNA, 15 bp, Homo sapiens
cagtgacacccctca

SEQ ID NO: 978476 - DNA, 15 bp, Homo sapiens
agtgacacccctcaa

SEQ ID NO: 978477 - DNA, 15 bp, Homo sapiens
gtgacacccctcaac

SEQ ID NO: 978478 - DNA, 15 bp, Homo sapiens
tgacacccctcaact

SEQ ID NO: 978479 - DNA, 15 bp, Homo sapiens
gacacccctcaactc

SEQ ID NO: 978480 - DNA, 15 bp, Homo sapiens
acacccctcaactcc

SEQ ID NO: 978481 - DNA, 15 bp, Homo sapiens
cacccctcaactcca

SEQ ID NO: 978482 - DNA, 15 bp, Homo sapiens
acccctcaactccaa

SEQ ID NO: 978483 - DNA, 15 bp, Homo sapiens
cccctcaactccaac

SEQ ID NO: 978484 - DNA, 15 bp, Homo sapiens
ccctcaactccaaca

SEQ ID NO: 978485 - DNA, 15 bp, Homo sapiens
cctcaactccaacaa

SEQ ID NO: 978486 - DNA, 15 bp, Homo sapiens
ctcaactccaacaag

SEQ ID NO: 978487 - DNA, 15 bp, Homo sapiens
tcaactccaacaagc

SEQ ID NO: 978488 - DNA, 15 bp, Homo sapiens
caactccaacaagcc

SEQ ID NO: 978489 - DNA, 15 bp, Homo sapiens
aactccaacaagccc

SEQ ID NO: 978490 - DNA, 15 bp, Homo sapiens
actccaacaagcccc

SEQ ID NO: 978491 - DNA, 15 bp, Homo sapiens
ctccaacaagccccc

SEQ ID NO: 978492 - DNA, 15 bp, Homo sapiens
tccaacaagccccct

SEQ ID NO: 978493 - DNA, 15 bp, Homo sapiens
ccaacaagccccctt

SEQ ID NO: 978494 - DNA, 15 bp, Homo sapiens
caacaagcccccttg

SEQ ID NO: 978495 - DNA, 15 bp, Homo sapiens
aacaagcccccttgg

SEQ ID NO: 978496 - DNA, 15 bp, Homo sapiens
acaagcccccttggg

SEQ ID NO: 978497 - DNA, 15 bp, Homo sapiens
caagcccccttgggc

SEQ ID NO: 978498 - DNA, 15 bp, Homo sapiens
aagcccccttgggca

SEQ ID NO: 978499 - DNA, 15 bp, Homo sapiens
agcccccttgggcac

SEQ ID NO: 978500 - DNA, 15 bp, Homo sapiens
gcccccttgggcact

SEQ ID NO: 978501 - DNA, 15 bp, Homo sapiens
cccccttgggcactg

SEQ ID NO: 978502 - DNA, 15 bp, Homo sapiens
ccccttgggcactgg

SEQ ID NO: 978503 - DNA, 15 bp, Homo sapiens
cccttgggcactgga

SEQ ID NO: 978504 - DNA, 15 bp, Homo sapiens
ccttgggcactggag

SEQ ID NO: 978505 - DNA, 15 bp, Homo sapiens
cttgggcactggagg

SEQ ID NO: 978506 - DNA, 15 bp, Homo sapiens
ttgggcactggaggc

SEQ ID NO: 978507 - DNA, 15 bp, Homo sapiens
tgggcactggaggcc

SEQ ID NO: 978508 - DNA, 15 bp, Homo sapiens
gggcactggaggcct

SEQ ID NO: 978509 - DNA, 15 bp, Homo sapiens
ggcactggaggcctt

SEQ ID NO: 978510 - DNA, 15 bp, Homo sapiens
gcactggaggccttg

SEQ ID NO: 978511 - DNA, 15 bp, Homo sapiens
cactggaggccttgc

SEQ ID NO: 978512 - DNA, 15 bp, Homo sapiens
actggaggccttgct

SEQ ID NO: 978513 - DNA, 15 bp, Homo sapiens
ctggaggccttgctg

SEQ ID NO: 978514 - DNA, 15 bp, Homo sapiens
tggaggccttgctgt

SEQ ID NO: 978515 - DNA, 15 bp, Homo sapiens
ggaggccttgctgtc

SEQ ID NO: 978516 - DNA, 15 bp, Homo sapiens
gaggccttgctgtcc

SEQ ID NO: 978517 - DNA, 15 bp, Homo sapiens
aggccttgctgtcct

SEQ ID NO: 978518 - DNA, 15 bp, Homo sapiens
ggccttgctgtcctc

SEQ ID NO: 978519 - DNA, 15 bp, Homo sapiens
gccttgctgtcctct

SEQ ID NO: 978520 - DNA, 15 bp, Homo sapiens
ccttgctgtcctctc

SEQ ID NO: 978521 - DNA, 15 bp, Homo sapiens
cttgctgtcctctct

SEQ ID NO: 978522 - DNA, 15 bp, Homo sapiens
ttgctgtcctctctt

SEQ ID NO: 978523 - DNA, 15 bp, Homo sapiens
tgctgtcctctcttt

SEQ ID NO: 978524 - DNA, 15 bp, Homo sapiens
gctgtcctctctttt

SEQ ID NO: 978525 - DNA, 15 bp, Homo sapiens
ctgtcctctcttttc

SEQ ID NO: 978526 - DNA, 15 bp, Homo sapiens
tgtcctctcttttcc

SEQ ID NO: 978527 - DNA, 15 bp, Homo sapiens
gtcctctcttttccc

SEQ ID NO: 978528 - DNA, 15 bp, Homo sapiens
tcctctcttttccca

SEQ ID NO: 978529 - DNA, 15 bp, Homo sapiens
cctctcttttcccac

SEQ ID NO: 978530 - DNA, 15 bp, Homo sapiens
ctctcttttcccacc

SEQ ID NO: 978531 - DNA, 15 bp, Homo sapiens
tctcttttcccaccc

SEQ ID NO: 978532 - DNA, 15 bp, Homo sapiens
ctcttttcccaccca

SEQ ID NO: 978533 - DNA, 15 bp, Homo sapiens
tcttttcccacccag

SEQ ID NO: 978534 - DNA, 15 bp, Homo sapiens
cttttcccacccagt

SEQ ID NO: 978535 - DNA, 15 bp, Homo sapiens
ttttcccacccagtt

SEQ ID NO: 978536 - DNA, 15 bp, Homo sapiens
tttcccacccagttc

SEQ ID NO: 978537 - DNA, 15 bp, Homo sapiens
ttcccacccagttca

SEQ ID NO: 978538 - DNA, 15 bp, Homo sapiens
tcccacccagttcag

SEQ ID NO: 978539 - DNA, 15 bp, Homo sapiens
cccacccagttcagg

SEQ ID NO: 978540 - DNA, 15 bp, Homo sapiens
ccacccagttcaggc

SEQ ID NO: 978541 - DNA, 15 bp, Homo sapiens
cacccagttcaggct

SEQ ID NO: 978542 - DNA, 15 bp, Homo sapiens
acccagttcaggcta

SEQ ID NO: 978543 - DNA, 15 bp, Homo sapiens
cccagttcaggctac

SEQ ID NO: 978544 - DNA, 15 bp, Homo sapiens
ccagttcaggctaca

SEQ ID NO: 978545 - DNA, 15 bp, Homo sapiens
cagttcaggctacac

SEQ ID NO: 978546 - DNA, 15 bp, Homo sapiens
agttcaggctacact

SEQ ID NO: 978547 - DNA, 15 bp, Homo sapiens
gttcaggctacactg

SEQ ID NO: 978548 - DNA, 15 bp, Homo sapiens
ttcaggctacactgt

SEQ ID NO: 978549 - DNA, 15 bp, Homo sapiens
tcaggctacactgtc

SEQ ID NO: 978550 - DNA, 15 bp, Homo sapiens
caggctacactgtcc

SEQ ID NO: 978551 - DNA, 15 bp, Homo sapiens
aggctacactgtcct

SEQ ID NO: 978552 - DNA, 15 bp, Homo sapiens
ggctacactgtcctt

SEQ ID NO: 978553 - DNA, 15 bp, Homo sapiens
gctacactgtccttg

SEQ ID NO: 978554 - DNA, 15 bp, Homo sapiens
ctacactgtccttgt

SEQ ID NO: 978555 - DNA, 15 bp, Homo sapiens
tacactgtccttgtc

SEQ ID NO: 978556 - DNA, 15 bp, Homo sapiens
acactgtccttgtct

SEQ ID NO: 978557 - DNA, 15 bp, Homo sapiens
cactgtccttgtctt

SEQ ID NO: 978558 - DNA, 15 bp, Homo sapiens
actgtccttgtcttc

SEQ ID NO: 978559 - DNA, 15 bp, Homo sapiens
ctgtccttgtcttct

SEQ ID NO: 978560 - DNA, 15 bp, Homo sapiens
tgtccttgtcttctg

SEQ ID NO: 978561 - DNA, 15 bp, Homo sapiens
gtccttgtcttctgc

SEQ ID NO: 978562 - DNA, 15 bp, Homo sapiens
tccttgtcttctgcc

SEQ ID NO: 978563 - DNA, 15 bp, Homo sapiens
ccttgtcttctgcct

SEQ ID NO: 978564 - DNA, 15 bp, Homo sapiens
cttgtcttctgcctt

SEQ ID NO: 978565 - DNA, 15 bp, Homo sapiens
ttgtcttctgccttg

SEQ ID NO: 978566 - DNA, 15 bp, Homo sapiens
tgtcttctgccttga

SEQ ID NO: 978567 - DNA, 15 bp, Homo sapiens
gtcttctgccttgaa

SEQ ID NO: 978568 - DNA, 15 bp, Homo sapiens
tcttctgccttgaac

SEQ ID NO: 978569 - DNA, 15 bp, Homo sapiens
cttctgccttgaacc

SEQ ID NO: 978570 - DNA, 15 bp, Homo sapiens
ttctgccttgaaccc

SEQ ID NO: 978571 - DNA, 15 bp, Homo sapiens
tctgccttgaaccct

SEQ ID NO: 978572 - DNA, 15 bp, Homo sapiens
ctgccttgaaccctg

SEQ ID NO: 978573 - DNA, 15 bp, Homo sapiens
tgccttgaaccctgc

SEQ ID NO: 978574 - DNA, 15 bp, Homo sapiens
gccttgaaccctgcg

SEQ ID NO: 978575 - DNA, 15 bp, Homo sapiens
ccttgaaccctgcgg

SEQ ID NO: 978576 - DNA, 15 bp, Homo sapiens
cttgaaccctgcgga

SEQ ID NO: 978577 - DNA, 15 bp, Homo sapiens
ttgaaccctgcggac

SEQ ID NO: 978578 - DNA, 15 bp, Homo sapiens
tgaaccctgcggaca

SEQ ID NO: 978579 - DNA, 15 bp, Homo sapiens
gaaccctgcggacat

SEQ ID NO: 978580 - DNA, 15 bp, Homo sapiens
aaccctgcggacatt

SEQ ID NO: 978581 - DNA, 15 bp, Homo sapiens
accctgcggacattg

SEQ ID NO: 978582 - DNA, 15 bp, Homo sapiens
ccctgcggacattga

SEQ ID NO: 978583 - DNA, 15 bp, Homo sapiens
cctgcggacattgac

SEQ ID NO: 978584 - DNA, 15 bp, Homo sapiens
ctgcggacattgaca

SEQ ID NO: 978585 - DNA, 15 bp, Homo sapiens
tgcggacattgacag

SEQ ID NO: 978586 - DNA, 15 bp, Homo sapiens
gcggacattgacagc

SEQ ID NO: 978587 - DNA, 15 bp, Homo sapiens
cggacattgacagca

SEQ ID NO: 978588 - DNA, 15 bp, Homo sapiens
ggacattgacagcaa

SEQ ID NO: 978589 - DNA, 15 bp, Homo sapiens
gacattgacagcaaa

SEQ ID NO: 978590 - DNA, 15 bp, Homo sapiens
acattgacagcaaac

SEQ ID NO: 978591 - DNA, 15 bp, Homo sapiens
cattgacagcaaaca

SEQ ID NO: 978592 - DNA, 15 bp, Homo sapiens
attgacagcaaacat

SEQ ID NO: 978593 - DNA, 15 bp, Homo sapiens
ttgacagcaaacatc

SEQ ID NO: 978594 - DNA, 15 bp, Homo sapiens
tgacagcaaacatct

SEQ ID NO: 978595 - DNA, 15 bp, Homo sapiens
gacagcaaacatctc

SEQ ID NO: 978596 - DNA, 15 bp, Homo sapiens
acagcaaacatctcc

SEQ ID NO: 978597 - DNA, 15 bp, Homo sapiens
cagcaaacatctccc

SEQ ID NO: 978598 - DNA, 15 bp, Homo sapiens
agcaaacatctccct

SEQ ID NO: 978599 - DNA, 15 bp, Homo sapiens
gcaaacatctccctg

SEQ ID NO: 978600 - DNA, 15 bp, Homo sapiens
caaacatctccctgg

SEQ ID NO: 978601 - DNA, 15 bp, Homo sapiens
aaacatctccctgga

SEQ ID NO: 978602 - DNA, 15 bp, Homo sapiens
aacatctccctggat

SEQ ID NO: 978603 - DNA, 15 bp, Homo sapiens
acatctccctggatt

SEQ ID NO: 978604 - DNA, 15 bp, Homo sapiens
catctccctggattt

SEQ ID NO: 978605 - DNA, 15 bp, Homo sapiens
atctccctggattta

SEQ ID NO: 978606 - DNA, 15 bp, Homo sapiens
tctccctggatttaa

SEQ ID NO: 978607 - DNA, 15 bp, Homo sapiens
ctccctggatttaag

SEQ ID NO: 978608 - DNA, 15 bp, Homo sapiens
tccctggatttaaga

SEQ ID NO: 978609 - DNA, 15 bp, Homo sapiens
ccctggatttaagag

SEQ ID NO: 978610 - DNA, 15 bp, Homo sapiens
cctggatttaagagt

SEQ ID NO: 978611 - DNA, 15 bp, Homo sapiens
ctggatttaagagtt

SEQ ID NO: 978612 - DNA, 15 bp, Homo sapiens
tggatttaagagttc

SEQ ID NO: 978613 - DNA, 15 bp, Homo sapiens
ggatttaagagttca

SEQ ID NO: 978614 - DNA, 15 bp, Homo sapiens
gatttaagagttcac

SEQ ID NO: 978615 - DNA, 15 bp, Homo sapiens
atttaagagttcaca

SEQ ID NO: 978616 - DNA, 15 bp, Homo sapiens
tttaagagttcacag

SEQ ID NO: 978617 - DNA, 15 bp, Homo sapiens
ttaagagttcacagc

SEQ ID NO: 978618 - DNA, 15 bp, Homo sapiens
taagagttcacagcc

SEQ ID NO: 978619 - DNA, 15 bp, Homo sapiens
aagagttcacagcct

SEQ ID NO: 978620 - DNA, 15 bp, Homo sapiens
agagttcacagccta

SEQ ID NO: 978621 - DNA, 15 bp, Homo sapiens
gagttcacagcctat

SEQ ID NO: 978622 - DNA, 15 bp, Homo sapiens
agttcacagcctatg

SEQ ID NO: 978623 - DNA, 15 bp, Homo sapiens
gttcacagcctatga

SEQ ID NO: 978624 - DNA, 15 bp, Homo sapiens
ttcacagcctatgac

SEQ ID NO: 978625 - DNA, 15 bp, Homo sapiens
tcacagcctatgact

SEQ ID NO: 978626 - DNA, 15 bp, Homo sapiens
cacagcctatgactg

SEQ ID NO: 978627 - DNA, 15 bp, Homo sapiens
acagcctatgactgc

SEQ ID NO: 978628 - DNA, 15 bp, Homo sapiens
cagcctatgactgcc

SEQ ID NO: 978629 - DNA, 15 bp, Homo sapiens
agcctatgactgccc

SEQ ID NO: 978630 - DNA, 15 bp, Homo sapiens
gcctatgactgccca

SEQ ID NO: 978631 - DNA, 15 bp, Homo sapiens
cctatgactgcccag

SEQ ID NO: 978632 - DNA, 15 bp, Homo sapiens
ctatgactgcccagg

SEQ ID NO: 978633 - DNA, 15 bp, Homo sapiens
tatgactgcccaggg

SEQ ID NO: 978634 - DNA, 15 bp, Homo sapiens
atgactgcccagggg

SEQ ID NO: 978635 - DNA, 15 bp, Homo sapiens
tgactgcccaggggg

SEQ ID NO: 978636 - DNA, 15 bp, Homo sapiens
gactgcccagggggt

SEQ ID NO: 978637 - DNA, 15 bp, Homo sapiens
actgcccagggggtt

SEQ ID NO: 978638 - DNA, 15 bp, Homo sapiens
ctgcccagggggttc

SEQ ID NO: 978639 - DNA, 15 bp, Homo sapiens
tgcccagggggttca

SEQ ID NO: 978640 - DNA, 15 bp, Homo sapiens
gcccagggggttcat

SEQ ID NO: 978641 - DNA, 15 bp, Homo sapiens
cccagggggttcatc

SEQ ID NO: 978642 - DNA, 15 bp, Homo sapiens
ccagggggttcatct

SEQ ID NO: 978643 - DNA, 15 bp, Homo sapiens
cagggggttcatctt

SEQ ID NO: 978644 - DNA, 15 bp, Homo sapiens
agggggttcatcttg

SEQ ID NO: 978645 - DNA, 15 bp, Homo sapiens
gggggttcatcttgc

SEQ ID NO: 978646 - DNA, 15 bp, Homo sapiens
ggggttcatcttgcc

SEQ ID NO: 978647 - DNA, 15 bp, Homo sapiens
gggttcatcttgccc

SEQ ID NO: 978648 - DNA, 15 bp, Homo sapiens
ggttcatcttgccca

SEQ ID NO: 978649 - DNA, 15 bp, Homo sapiens
gttcatcttgcccac

SEQ ID NO: 978650 - DNA, 15 bp, Homo sapiens
ttcatcttgcccact

SEQ ID NO: 978651 - DNA, 15 bp, Homo sapiens
tcatcttgcccactg

SEQ ID NO: 978652 - DNA, 15 bp, Homo sapiens
catcttgcccactgt

SEQ ID NO: 978653 - DNA, 15 bp, Homo sapiens
atcttgcccactgtc

SEQ ID NO: 978654 - DNA, 15 bp, Homo sapiens
tcttgcccactgtcc

SEQ ID NO: 978655 - DNA, 15 bp, Homo sapiens
cttgcccactgtcca

SEQ ID NO: 978656 - DNA, 15 bp, Homo sapiens
ttgcccactgtccag

SEQ ID NO: 978657 - DNA, 15 bp, Homo sapiens
tgcccactgtccaga

SEQ ID NO: 978658 - DNA, 15 bp, Homo sapiens
gcccactgtccagat

SEQ ID NO: 978659 - DNA, 15 bp, Homo sapiens
cccactgtccagata

SEQ ID NO: 978660 - DNA, 15 bp, Homo sapiens
ccactgtccagatag

SEQ ID NO: 978661 - DNA, 15 bp, Homo sapiens
cactgtccagataga

SEQ ID NO: 978662 - DNA, 15 bp, Homo sapiens
actgtccagatagag

SEQ ID NO: 978663 - DNA, 15 bp, Homo sapiens
ctgtccagatagagc

SEQ ID NO: 978664 - DNA, 15 bp, Homo sapiens
tgtccagatagagcc

SEQ ID NO: 978665 - DNA, 15 bp, Homo sapiens
gtccagatagagcca

SEQ ID NO: 978666 - DNA, 15 bp, Homo sapiens
tccagatagagccaa

SEQ ID NO: 978667 - DNA, 15 bp, Homo sapiens
ccagatagagccaat

SEQ ID NO: 978668 - DNA, 15 bp, Homo sapiens
cagatagagccaatt

SEQ ID NO: 978669 - DNA, 15 bp, Homo sapiens
agatagagccaattt

SEQ ID NO: 978670 - DNA, 15 bp, Homo sapiens
gatagagccaattta

SEQ ID NO: 978671 - DNA, 15 bp, Homo sapiens
atagagccaatttat

SEQ ID NO: 978672 - DNA, 15 bp, Homo sapiens
tagagccaatttatc

SEQ ID NO: 978673 - DNA, 15 bp, Homo sapiens
agagccaatttatcg

SEQ ID NO: 978674 - DNA, 15 bp, Homo sapiens
gagccaatttatcga

SEQ ID NO: 978675 - DNA, 15 bp, Homo sapiens
agccaatttatcgag

SEQ ID NO: 978676 - DNA, 15 bp, Homo sapiens
gccaatttatcgaga

SEQ ID NO: 978677 - DNA, 15 bp, Homo sapiens
ccaatttatcgagac

SEQ ID NO: 978678 - DNA, 15 bp, Homo sapiens
caatttatcgagaca

SEQ ID NO: 978679 - DNA, 15 bp, Homo sapiens
aatttatcgagacag

SEQ ID NO: 978680 - DNA, 15 bp, Homo sapiens
atttatcgagacaga

SEQ ID NO: 978681 - DNA, 15 bp, Homo sapiens
tttatcgagacagag

SEQ ID NO: 978682 - DNA, 15 bp, Homo sapiens
ttatcgagacagagg

SEQ ID NO: 978683 - DNA, 15 bp, Homo sapiens
tatcgagacagaggg

SEQ ID NO: 978684 - DNA, 15 bp, Homo sapiens
atcgagacagaggga

SEQ ID NO: 978685 - DNA, 15 bp, Homo sapiens
tcgagacagagggat

SEQ ID NO: 978686 - DNA, 15 bp, Homo sapiens
cgagacagagggatt

SEQ ID NO: 978687 - DNA, 15 bp, Homo sapiens
gagacagagggattg

SEQ ID NO: 978688 - DNA, 15 bp, Homo sapiens
agacagagggattgc

SEQ ID NO: 978689 - DNA, 15 bp, Homo sapiens
gacagagggattgca

SEQ ID NO: 978690 - DNA, 15 bp, Homo sapiens
acagagggattgcaa

SEQ ID NO: 978691 - DNA, 15 bp, Homo sapiens
cagagggattgcaat

SEQ ID NO: 978692 - DNA, 15 bp, Homo sapiens
agagggattgcaata

SEQ ID NO: 978693 - DNA, 15 bp, Homo sapiens
gagggattgcaatag

SEQ ID NO: 978694 - DNA, 15 bp, Homo sapiens
agggattgcaataga

SEQ ID NO: 978695 - DNA, 15 bp, Homo sapiens
gggattgcaatagag

SEQ ID NO: 978696 - DNA, 15 bp, Homo sapiens
ggattgcaatagaga

SEQ ID NO: 978697 - DNA, 15 bp, Homo sapiens
gattgcaatagagag

SEQ ID NO: 978698 - DNA, 15 bp, Homo sapiens
attgcaatagagaga

SEQ ID NO: 978699 - DNA, 15 bp, Homo sapiens
ttgcaatagagagag

SEQ ID NO: 978700 - DNA, 15 bp, Homo sapiens
tgcaatagagagagt

SEQ ID NO: 978701 - DNA, 15 bp, Homo sapiens
gcaatagagagagtt

SEQ ID NO: 978702 - DNA, 15 bp, Homo sapiens
caatagagagagttt

SEQ ID NO: 978703 - DNA, 15 bp, Homo sapiens
aatagagagagttta

SEQ ID NO: 978704 - DNA, 15 bp, Homo sapiens
atagagagagtttaa

SEQ ID NO: 978705 - DNA, 15 bp, Homo sapiens
tagagagagtttaat

SEQ ID NO: 978706 - DNA, 15 bp, Homo sapiens
agagagagtttaatc

SEQ ID NO: 978707 - DNA, 15 bp, Homo sapiens
gagagagtttaatcc

SEQ ID NO: 978708 - DNA, 15 bp, Homo sapiens
agagagtttaatcca

SEQ ID NO: 978709 - DNA, 15 bp, Homo sapiens
gagagtttaatccac

SEQ ID NO: 978710 - DNA, 15 bp, Homo sapiens
agagtttaatccaca

SEQ ID NO: 978711 - DNA, 15 bp, Homo sapiens
gagtttaatccacat

SEQ ID NO: 978712 - DNA, 15 bp, Homo sapiens
agtttaatccacata

SEQ ID NO: 978713 - DNA, 15 bp, Homo sapiens
gtttaatccacatac

SEQ ID NO: 978714 - DNA, 15 bp, Homo sapiens
tttaatccacataca

SEQ ID NO: 978715 - DNA, 15 bp, Homo sapiens
ttaatccacatacat

SEQ ID NO: 978716 - DNA, 15 bp, Homo sapiens
taatccacatacatc

SEQ ID NO: 978717 - DNA, 15 bp, Homo sapiens
aatccacatacatcc

SEQ ID NO: 978718 - DNA, 15 bp, Homo sapiens
atccacatacatcca

SEQ ID NO: 978719 - DNA, 15 bp, Homo sapiens
tccacatacatccag

SEQ ID NO: 978720 - DNA, 15 bp, Homo sapiens
ccacatacatccagc

SEQ ID NO: 978721 - DNA, 15 bp, Homo sapiens
cacatacatccagct

SEQ ID NO: 978722 - DNA, 15 bp, Homo sapiens
acatacatccagcta

SEQ ID NO: 978723 - DNA, 15 bp, Homo sapiens
catacatccagctaa

SEQ ID NO: 978724 - DNA, 15 bp, Homo sapiens
atacatccagctaaa

SEQ ID NO: 978725 - DNA, 15 bp, Homo sapiens
tacatccagctaaat

SEQ ID NO: 978726 - DNA, 15 bp, Homo sapiens
acatccagctaaatg

SEQ ID NO: 978727 - DNA, 15 bp, Homo sapiens
catccagctaaatgg

SEQ ID NO: 978728 - DNA, 15 bp, Homo sapiens
atccagctaaatggg

SEQ ID NO: 978729 - DNA, 15 bp, Homo sapiens
tccagctaaatggga

SEQ ID NO: 978730 - DNA, 15 bp, Homo sapiens
ccagctaaatgggag

SEQ ID NO: 978731 - DNA, 15 bp, Homo sapiens
cagctaaatgggaga

SEQ ID NO: 978732 - DNA, 15 bp, Homo sapiens
agctaaatgggagat

SEQ ID NO: 978733 - DNA, 15 bp, Homo sapiens
gctaaatgggagatg

SEQ ID NO: 978734 - DNA, 15 bp, Homo sapiens
ctaaatgggagatgg

SEQ ID NO: 978735 - DNA, 15 bp, Homo sapiens
taaatgggagatggg

SEQ ID NO: 978736 - DNA, 15 bp, Homo sapiens
aaatgggagatggga

SEQ ID NO: 978737 - DNA, 15 bp, Homo sapiens
aatgggagatgggag

SEQ ID NO: 978738 - DNA, 15 bp, Homo sapiens
atgggagatgggagt

SEQ ID NO: 978739 - DNA, 15 bp, Homo sapiens
tgggagatgggagtt

SEQ ID NO: 978740 - DNA, 15 bp, Homo sapiens
gggagatgggagttt

SEQ ID NO: 978741 - DNA, 15 bp, Homo sapiens
ggagatgggagtttt

SEQ ID NO: 978742 - DNA, 15 bp, Homo sapiens
gagatgggagtttta

SEQ ID NO: 978743 - DNA, 15 bp, Homo sapiens
agatgggagttttat

SEQ ID NO: 978744 - DNA, 15 bp, Homo sapiens
gatgggagttttatt

SEQ ID NO: 978745 - DNA, 15 bp, Homo sapiens
atgggagttttatta

SEQ ID NO: 978746 - DNA, 15 bp, Homo sapiens
tgggagttttattac

SEQ ID NO: 978747 - DNA, 15 bp, Homo sapiens
gggagttttattact

SEQ ID NO: 978748 - DNA, 15 bp, Homo sapiens
ggagttttattactt

SEQ ID NO: 978749 - DNA, 15 bp, Homo sapiens
gagttttattacttg

SEQ ID NO: 978750 - DNA, 15 bp, Homo sapiens
agttttattacttga

SEQ ID NO: 978751 - DNA, 15 bp, Homo sapiens
gttttattacttgaa

SEQ ID NO: 978752 - DNA, 15 bp, Homo sapiens
ttttattacttgaat

SEQ ID NO: 978753 - DNA, 15 bp, Homo sapiens
tttattacttgaatc

SEQ ID NO: 978754 - DNA, 15 bp, Homo sapiens
ttattacttgaatca

SEQ ID NO: 978755 - DNA, 15 bp, Homo sapiens
tattacttgaatcag

SEQ ID NO: 978756 - DNA, 15 bp, Homo sapiens
attacttgaatcagc

SEQ ID NO: 978757 - DNA, 15 bp, Homo sapiens
ttacttgaatcagcc

SEQ ID NO: 978758 - DNA, 15 bp, Homo sapiens
tacttgaatcagcct

SEQ ID NO: 978759 - DNA, 15 bp, Homo sapiens
acttgaatcagcctc

SEQ ID NO: 978760 - DNA, 15 bp, Homo sapiens
cttgaatcagcctcc

SEQ ID NO: 978761 - DNA, 15 bp, Homo sapiens
ttgaatcagcctccc

SEQ ID NO: 978762 - DNA, 15 bp, Homo sapiens
tgaatcagcctccct

SEQ ID NO: 978763 - DNA, 15 bp, Homo sapiens
gaatcagcctccctg

SEQ ID NO: 978764 - DNA, 15 bp, Homo sapiens
aatcagcctccctga

SEQ ID NO: 978765 - DNA, 15 bp, Homo sapiens
atcagcctccctgaa

SEQ ID NO: 978766 - DNA, 15 bp, Homo sapiens
tcagcctccctgaaa

SEQ ID NO: 978767 - DNA, 15 bp, Homo sapiens
cagcctccctgaaaa

SEQ ID NO: 978768 - DNA, 15 bp, Homo sapiens
agcctccctgaaaat

SEQ ID NO: 978769 - DNA, 15 bp, Homo sapiens
gcctccctgaaaatt

SEQ ID NO: 978770 - DNA, 15 bp, Homo sapiens
cctccctgaaaattc

SEQ ID NO: 978771 - DNA, 15 bp, Homo sapiens
ctccctgaaaattca

SEQ ID NO: 978772 - DNA, 15 bp, Homo sapiens
tccctgaaaattcag

SEQ ID NO: 978773 - DNA, 15 bp, Homo sapiens
ccctgaaaattcaga

SEQ ID NO: 978774 - DNA, 15 bp, Homo sapiens
cctgaaaattcagag

SEQ ID NO: 978775 - DNA, 15 bp, Homo sapiens
ctgaaaattcagagg

SEQ ID NO: 978776 - DNA, 15 bp, Homo sapiens
tgaaaattcagaggc

SEQ ID NO: 978777 - DNA, 15 bp, Homo sapiens
gaaaattcagaggct

SEQ ID NO: 978778 - DNA, 15 bp, Homo sapiens
aaaattcagaggcta

SEQ ID NO: 978779 - DNA, 15 bp, Homo sapiens
aaattcagaggctag

SEQ ID NO: 978780 - DNA, 15 bp, Homo sapiens
aattcagaggctagg

SEQ ID NO: 978781 - DNA, 15 bp, Homo sapiens
attcagaggctaggg

SEQ ID NO: 978782 - DNA, 15 bp, Homo sapiens
ttcagaggctagggt

SEQ ID NO: 978783 - DNA, 15 bp, Homo sapiens
tcagaggctagggtt

SEQ ID NO: 978784 - DNA, 15 bp, Homo sapiens
cagaggctagggtta

SEQ ID NO: 978785 - DNA, 15 bp, Homo sapiens
agaggctagggttat

SEQ ID NO: 978786 - DNA, 15 bp, Homo sapiens
gaggctagggttatt

SEQ ID NO: 978787 - DNA, 15 bp, Homo sapiens
aggctagggttattc

SEQ ID NO: 978788 - DNA, 15 bp, Homo sapiens
ggctagggttattca

SEQ ID NO: 978789 - DNA, 15 bp, Homo sapiens
gctagggttattcaa

SEQ ID NO: 978790 - DNA, 15 bp, Homo sapiens
ctagggttattcaag

SEQ ID NO: 978791 - DNA, 15 bp, Homo sapiens
tagggttattcaaga

SEQ ID NO: 978792 - DNA, 15 bp, Homo sapiens
agggttattcaagaa

SEQ ID NO: 978793 - DNA, 15 bp, Homo sapiens
gggttattcaagaac

SEQ ID NO: 978794 - DNA, 15 bp, Homo sapiens
ggttattcaagaaca

SEQ ID NO: 978795 - DNA, 15 bp, Homo sapiens
gttattcaagaacag

SEQ ID NO: 978796 - DNA, 15 bp, Homo sapiens
ttattcaagaacagt

SEQ ID NO: 978797 - DNA, 15 bp, Homo sapiens
tattcaagaacagtt

SEQ ID NO: 978798 - DNA, 15 bp, Homo sapiens
attcaagaacagttt

SEQ ID NO: 978799 - DNA, 15 bp, Homo sapiens
ttcaagaacagtttg

SEQ ID NO: 978800 - DNA, 15 bp, Homo sapiens
tcaagaacagtttgg

SEQ ID NO: 978801 - DNA, 15 bp, Homo sapiens
caagaacagtttggt

SEQ ID NO: 978802 - DNA, 15 bp, Homo sapiens
aagaacagtttggtg

SEQ ID NO: 978803 - DNA, 15 bp, Homo sapiens
agaacagtttggtgg

SEQ ID NO: 978804 - DNA, 15 bp, Homo sapiens
gaacagtttggtggg

SEQ ID NO: 978805 - DNA, 15 bp, Homo sapiens
aacagtttggtgggc

SEQ ID NO: 978806 - DNA, 15 bp, Homo sapiens
acagtttggtgggca

SEQ ID NO: 978807 - DNA, 15 bp, Homo sapiens
cagtttggtgggcag

SEQ ID NO: 978808 - DNA, 15 bp, Homo sapiens
agtttggtgggcagg

SEQ ID NO: 978809 - DNA, 15 bp, Homo sapiens
gtttggtgggcagga

SEQ ID NO: 978810 - DNA, 15 bp, Homo sapiens
tttggtgggcaggag

SEQ ID NO: 978811 - DNA, 15 bp, Homo sapiens
ttggtgggcaggagg

SEQ ID NO: 978812 - DNA, 15 bp, Homo sapiens
tggtgggcaggaggg

SEQ ID NO: 978813 - DNA, 15 bp, Homo sapiens
ggtgggcaggagggc

SEQ ID NO: 978814 - DNA, 15 bp, Homo sapiens
gtgggcaggagggct

SEQ ID NO: 978815 - DNA, 15 bp, Homo sapiens
tgggcaggagggcta

SEQ ID NO: 978816 - DNA, 15 bp, Homo sapiens
gggcaggagggctag

SEQ ID NO: 978817 - DNA, 15 bp, Homo sapiens
ggcaggagggctagg

SEQ ID NO: 978818 - DNA, 15 bp, Homo sapiens
gcaggagggctaggg

SEQ ID NO: 978819 - DNA, 15 bp, Homo sapiens
caggagggctaggga

SEQ ID NO: 978820 - DNA, 15 bp, Homo sapiens
aggagggctagggaa

SEQ ID NO: 978821 - DNA, 15 bp, Homo sapiens
ggagggctagggaat

SEQ ID NO: 978822 - DNA, 15 bp, Homo sapiens
gagggctagggaatg

SEQ ID NO: 978823 - DNA, 15 bp, Homo sapiens
agggctagggaatgg

SEQ ID NO: 978824 - DNA, 15 bp, Homo sapiens
gggctagggaatggg

SEQ ID NO: 978825 - DNA, 15 bp, Homo sapiens
ggctagggaatgggt

SEQ ID NO: 978826 - DNA, 15 bp, Homo sapiens
gctagggaatgggtg

SEQ ID NO: 978827 - DNA, 15 bp, Homo sapiens
ctagggaatgggtgc

SEQ ID NO: 978828 - DNA, 15 bp, Homo sapiens
tagggaatgggtgcc

SEQ ID NO: 978829 - DNA, 15 bp, Homo sapiens
agggaatgggtgcct

SEQ ID NO: 978830 - DNA, 15 bp, Homo sapiens
gggaatgggtgcctt

SEQ ID NO: 978831 - DNA, 15 bp, Homo sapiens
ggaatgggtgccttg

SEQ ID NO: 978832 - DNA, 15 bp, Homo sapiens
gaatgggtgccttgc

SEQ ID NO: 978833 - DNA, 15 bp, Homo sapiens
aatgggtgccttgct

SEQ ID NO: 978834 - DNA, 15 bp, Homo sapiens
atgggtgccttgctg

SEQ ID NO: 978835 - DNA, 15 bp, Homo sapiens
tgggtgccttgctgc

SEQ ID NO: 978836 - DNA, 15 bp, Homo sapiens
gggtgccttgctgca

SEQ ID NO: 978837 - DNA, 15 bp, Homo sapiens
ggtgccttgctgcaa

SEQ ID NO: 978838 - DNA, 15 bp, Homo sapiens
gtgccttgctgcaat

SEQ ID NO: 978839 - DNA, 15 bp, Homo sapiens
tgccttgctgcaatc

SEQ ID NO: 978840 - DNA, 15 bp, Homo sapiens
gccttgctgcaatcc

SEQ ID NO: 978841 - DNA, 15 bp, Homo sapiens
ccttgctgcaatcct

SEQ ID NO: 978842 - DNA, 15 bp, Homo sapiens
cttgctgcaatcctg

SEQ ID NO: 978843 - DNA, 15 bp, Homo sapiens
ttgctgcaatcctgg

SEQ ID NO: 978844 - DNA, 15 bp, Homo sapiens
tgctgcaatcctgga

SEQ ID NO: 978845 - DNA, 15 bp, Homo sapiens
gctgcaatcctggag

SEQ ID NO: 978846 - DNA, 15 bp, Homo sapiens
ctgcaatcctggagc

SEQ ID NO: 978847 - DNA, 15 bp, Homo sapiens
tgcaatcctggagct

SEQ ID NO: 978848 - DNA, 15 bp, Homo sapiens
gcaatcctggagctg

SEQ ID NO: 978849 - DNA, 15 bp, Homo sapiens
caatcctggagctgt

SEQ ID NO: 978850 - DNA, 15 bp, Homo sapiens
aatcctggagctgtg

SEQ ID NO: 978851 - DNA, 15 bp, Homo sapiens
atcctggagctgtgg

SEQ ID NO: 978852 - DNA, 15 bp, Homo sapiens
tcctggagctgtgga

SEQ ID NO: 978853 - DNA, 15 bp, Homo sapiens
cctggagctgtggaa

SEQ ID NO: 978854 - DNA, 15 bp, Homo sapiens
ctggagctgtggaaa

SEQ ID NO: 978855 - DNA, 15 bp, Homo sapiens
tggagctgtggaaaa

SEQ ID NO: 978856 - DNA, 15 bp, Homo sapiens
ggagctgtggaaaac

SEQ ID NO: 978857 - DNA, 15 bp, Homo sapiens
gagctgtggaaaaca

SEQ ID NO: 978858 - DNA, 15 bp, Homo sapiens
agctgtggaaaacag

SEQ ID NO: 978859 - DNA, 15 bp, Homo sapiens
gctgtggaaaacagt

SEQ ID NO: 978860 - DNA, 15 bp, Homo sapiens
ctgtggaaaacagtt

SEQ ID NO: 978861 - DNA, 15 bp, Homo sapiens
tgtggaaaacagttg

SEQ ID NO: 978862 - DNA, 15 bp, Homo sapiens
gtggaaaacagttgc

SEQ ID NO: 978863 - DNA, 15 bp, Homo sapiens
tggaaaacagttgct

SEQ ID NO: 978864 - DNA, 15 bp, Homo sapiens
ggaaaacagttgctg

SEQ ID NO: 978865 - DNA, 15 bp, Homo sapiens
gaaaacagttgctga

SEQ ID NO: 978866 - DNA, 15 bp, Homo sapiens
aaaacagttgctgag

SEQ ID NO: 978867 - DNA, 15 bp, Homo sapiens
aaacagttgctgagt

SEQ ID NO: 978868 - DNA, 15 bp, Homo sapiens
aacagttgctgagtc

SEQ ID NO: 978869 - DNA, 15 bp, Homo sapiens
acagttgctgagtca

SEQ ID NO: 978870 - DNA, 15 bp, Homo sapiens
cagttgctgagtcag

SEQ ID NO: 978871 - DNA, 15 bp, Homo sapiens
agttgctgagtcagc

SEQ ID NO: 978872 - DNA, 15 bp, Homo sapiens
gttgctgagtcagct

SEQ ID NO: 978873 - DNA, 15 bp, Homo sapiens
ttgctgagtcagctt

SEQ ID NO: 978874 - DNA, 15 bp, Homo sapiens
tgctgagtcagcttc

SEQ ID NO: 978875 - DNA, 15 bp, Homo sapiens
gctgagtcagcttct

SEQ ID NO: 978876 - DNA, 15 bp, Homo sapiens
ctgagtcagcttctg

SEQ ID NO: 978877 - DNA, 15 bp, Homo sapiens
tgagtcagcttctgg

SEQ ID NO: 978878 - DNA, 15 bp, Homo sapiens
gagtcagcttctggg

SEQ ID NO: 978879 - DNA, 15 bp, Homo sapiens
agtcagcttctgggt

SEQ ID NO: 978880 - DNA, 15 bp, Homo sapiens
gtcagcttctgggtg

SEQ ID NO: 978881 - DNA, 15 bp, Homo sapiens
tcagcttctgggtgg

SEQ ID NO: 978882 - DNA, 15 bp, Homo sapiens
cagcttctgggtggg

SEQ ID NO: 978883 - DNA, 15 bp, Homo sapiens
agcttctgggtgggg

SEQ ID NO: 978884 - DNA, 15 bp, Homo sapiens
gcttctgggtgggga

SEQ ID NO: 978885 - DNA, 15 bp, Homo sapiens
cttctgggtggggac

SEQ ID NO: 978886 - DNA, 15 bp, Homo sapiens
ttctgggtggggacc

SEQ ID NO: 978887 - DNA, 15 bp, Homo sapiens
tctgggtggggacca

SEQ ID NO: 978888 - DNA, 15 bp, Homo sapiens
ctgggtggggaccat

SEQ ID NO: 978889 - DNA, 15 bp, Homo sapiens
tgggtggggaccata

SEQ ID NO: 978890 - DNA, 15 bp, Homo sapiens
gggtggggaccatag

SEQ ID NO: 978891 - DNA, 15 bp, Homo sapiens
ggtggggaccataga

SEQ ID NO: 978892 - DNA, 15 bp, Homo sapiens
gtggggaccatagag

SEQ ID NO: 978893 - DNA, 15 bp, Homo sapiens
tggggaccatagagt

SEQ ID NO: 978894 - DNA, 15 bp, Homo sapiens
ggggaccatagagtc

SEQ ID NO: 978895 - DNA, 15 bp, Homo sapiens
gggaccatagagtcg

SEQ ID NO: 978896 - DNA, 15 bp, Homo sapiens
ggaccatagagtcgc

SEQ ID NO: 978897 - DNA, 15 bp, Homo sapiens
gaccatagagtcgct

SEQ ID NO: 978898 - DNA, 15 bp, Homo sapiens
accatagagtcgcta

SEQ ID NO: 978899 - DNA, 15 bp, Homo sapiens
ccatagagtcgctag

SEQ ID NO: 978900 - DNA, 15 bp, Homo sapiens
catagagtcgctagt

SEQ ID NO: 978901 - DNA, 15 bp, Homo sapiens
atagagtcgctagtc

SEQ ID NO: 978902 - DNA, 15 bp, Homo sapiens
tagagtcgctagtct

SEQ ID NO: 978903 - DNA, 15 bp, Homo sapiens
agagtcgctagtctg

SEQ ID NO: 978904 - DNA, 15 bp, Homo sapiens
gagtcgctagtctgg

SEQ ID NO: 978905 - DNA, 15 bp, Homo sapiens
agtcgctagtctggg

SEQ ID NO: 978906 - DNA, 15 bp, Homo sapiens
gtcgctagtctgggt

SEQ ID NO: 978907 - DNA, 15 bp, Homo sapiens
tcgctagtctgggtg

SEQ ID NO: 978908 - DNA, 15 bp, Homo sapiens
cgctagtctgggtgg

SEQ ID NO: 978909 - DNA, 15 bp, Homo sapiens
gctagtctgggtgga

SEQ ID NO: 978910 - DNA, 15 bp, Homo sapiens
ctagtctgggtggag

SEQ ID NO: 978911 - DNA, 15 bp, Homo sapiens
tagtctgggtggagt

SEQ ID NO: 978912 - DNA, 15 bp, Homo sapiens
agtctgggtggagtc

SEQ ID NO: 978913 - DNA, 15 bp, Homo sapiens
gtctgggtggagtca

SEQ ID NO: 978914 - DNA, 15 bp, Homo sapiens
tctgggtggagtcat

SEQ ID NO: 978915 - DNA, 15 bp, Homo sapiens
ctgggtggagtcatc

SEQ ID NO: 978916 - DNA, 15 bp, Homo sapiens
tgggtggagtcatcc

SEQ ID NO: 978917 - DNA, 15 bp, Homo sapiens
gggtggagtcatcca

SEQ ID NO: 978918 - DNA, 15 bp, Homo sapiens
ggtggagtcatccag

SEQ ID NO: 978919 - DNA, 15 bp, Homo sapiens
gtggagtcatccagt

SEQ ID NO: 978920 - DNA, 15 bp, Homo sapiens
tggagtcatccagtt

SEQ ID NO: 978921 - DNA, 15 bp, Homo sapiens
ggagtcatccagttg

SEQ ID NO: 978922 - DNA, 15 bp, Homo sapiens
gagtcatccagttgt

SEQ ID NO: 978923 - DNA, 15 bp, Homo sapiens
agtcatccagttgtc

SEQ ID NO: 978924 - DNA, 15 bp, Homo sapiens
gtcatccagttgtca

SEQ ID NO: 978925 - DNA, 15 bp, Homo sapiens
tcatccagttgtcag

SEQ ID NO: 978926 - DNA, 15 bp, Homo sapiens
catccagttgtcaga

SEQ ID NO: 978927 - DNA, 15 bp, Homo sapiens
atccagttgtcagat

SEQ ID NO: 978928 - DNA, 15 bp, Homo sapiens
tccagttgtcagata

SEQ ID NO: 978929 - DNA, 15 bp, Homo sapiens
ccagttgtcagatat

SEQ ID NO: 978930 - DNA, 15 bp, Homo sapiens
cagttgtcagatatg

SEQ ID NO: 978931 - DNA, 15 bp, Homo sapiens
agttgtcagatatgc

SEQ ID NO: 978932 - DNA, 15 bp, Homo sapiens
gttgtcagatatgca

SEQ ID NO: 978933 - DNA, 15 bp, Homo sapiens
ttgtcagatatgcaa

SEQ ID NO: 978934 - DNA, 15 bp, Homo sapiens
tgtcagatatgcaaa

SEQ ID NO: 978935 - DNA, 15 bp, Homo sapiens
gtcagatatgcaaaa

SEQ ID NO: 978936 - DNA, 15 bp, Homo sapiens
tcagatatgcaaaaa

SEQ ID NO: 978937 - DNA, 15 bp, Homo sapiens
cagatatgcaaaaag

SEQ ID NO: 978938 - DNA, 15 bp, Homo sapiens
agatatgcaaaaagc

SEQ ID NO: 978939 - DNA, 15 bp, Homo sapiens
gatatgcaaaaagcc

SEQ ID NO: 978940 - DNA, 15 bp, Homo sapiens
atatgcaaaaagcct

SEQ ID NO: 978941 - DNA, 15 bp, Homo sapiens
tatgcaaaaagccta

SEQ ID NO: 978942 - DNA, 15 bp, Homo sapiens
atgcaaaaagcctaa

SEQ ID NO: 978943 - DNA, 15 bp, Homo sapiens
tgcaaaaagcctaaa

SEQ ID NO: 978944 - DNA, 15 bp, Homo sapiens
gcaaaaagcctaaaa

SEQ ID NO: 978945 - DNA, 15 bp, Homo sapiens
caaaaagcctaaaaa

SEQ ID NO: 978946 - DNA, 15 bp, Homo sapiens
aaaaagcctaaaaag

SEQ ID NO: 978947 - DNA, 15 bp, Homo sapiens
aaaagcctaaaaaga

SEQ ID NO: 978948 - DNA, 15 bp, Homo sapiens
aaagcctaaaaagac

SEQ ID NO: 978949 - DNA, 15 bp, Homo sapiens
aagcctaaaaagaca

SEQ ID NO: 978950 - DNA, 15 bp, Homo sapiens
agcctaaaaagacat

SEQ ID NO: 978951 - DNA, 15 bp, Homo sapiens
gcctaaaaagacatc

SEQ ID NO: 978952 - DNA, 15 bp, Homo sapiens
cctaaaaagacatct

SEQ ID NO: 978953 - DNA, 15 bp, Homo sapiens
ctaaaaagacatcta

SEQ ID NO: 978954 - DNA, 15 bp, Homo sapiens
taaaaagacatctaa

SEQ ID NO: 978955 - DNA, 15 bp, Homo sapiens
aaaaagacatctaaa

SEQ ID NO: 978956 - DNA, 15 bp, Homo sapiens
aaaagacatctaaaa

SEQ ID NO: 978957 - DNA, 15 bp, Homo sapiens
aaagacatctaaaaa

SEQ ID NO: 978958 - DNA, 15 bp, Homo sapiens
aagacatctaaaaag

SEQ ID NO: 978959 - DNA, 15 bp, Homo sapiens
agacatctaaaaagg

SEQ ID NO: 978960 - DNA, 15 bp, Homo sapiens
gacatctaaaaaggc

SEQ ID NO: 978961 - DNA, 15 bp, Homo sapiens
acatctaaaaaggcc

SEQ ID NO: 978962 - DNA, 15 bp, Homo sapiens
catctaaaaaggcca

SEQ ID NO: 978963 - DNA, 15 bp, Homo sapiens
atctaaaaaggccag

SEQ ID NO: 978964 - DNA, 15 bp, Homo sapiens
tctaaaaaggccagc

SEQ ID NO: 978965 - DNA, 15 bp, Homo sapiens
ctaaaaaggccagcg

SEQ ID NO: 978966 - DNA, 15 bp, Homo sapiens
taaaaaggccagcgt

SEQ ID NO: 978967 - DNA, 15 bp, Homo sapiens
aaaaaggccagcgtt

SEQ ID NO: 978968 - DNA, 15 bp, Homo sapiens
aaaaggccagcgtta

SEQ ID NO: 978969 - DNA, 15 bp, Homo sapiens
aaaggccagcgttag

SEQ ID NO: 978970 - DNA, 15 bp, Homo sapiens
aaggccagcgttagg

SEQ ID NO: 978971 - DNA, 15 bp, Homo sapiens
aggccagcgttaggt

SEQ ID NO: 978972 - DNA, 15 bp, Homo sapiens
ggccagcgttaggtt

SEQ ID NO: 978973 - DNA, 15 bp, Homo sapiens
gccagcgttaggttt

SEQ ID NO: 978974 - DNA, 15 bp, Homo sapiens
ccagcgttaggtttt

SEQ ID NO: 978975 - DNA, 15 bp, Homo sapiens
cagcgttaggttttg

SEQ ID NO: 978976 - DNA, 15 bp, Homo sapiens
agcgttaggttttgc

SEQ ID NO: 978977 - DNA, 15 bp, Homo sapiens
gcgttaggttttgca

SEQ ID NO: 978978 - DNA, 15 bp, Homo sapiens
cgttaggttttgcaa

SEQ ID NO: 978979 - DNA, 15 bp, Homo sapiens
gttaggttttgcaat

SEQ ID NO: 978980 - DNA, 15 bp, Homo sapiens
ttaggttttgcaata

SEQ ID NO: 978981 - DNA, 15 bp, Homo sapiens
taggttttgcaatag

SEQ ID NO: 978982 - DNA, 15 bp, Homo sapiens
aggttttgcaatagt

SEQ ID NO: 978983 - DNA, 15 bp, Homo sapiens
ggttttgcaatagtc

SEQ ID NO: 978984 - DNA, 15 bp, Homo sapiens
gttttgcaatagtca

SEQ ID NO: 978985 - DNA, 15 bp, Homo sapiens
ttttgcaatagtcat

SEQ ID NO: 978986 - DNA, 15 bp, Homo sapiens
tttgcaatagtcatg

SEQ ID NO: 978987 - DNA, 15 bp, Homo sapiens
ttgcaatagtcatgt

SEQ ID NO: 978988 - DNA, 15 bp, Homo sapiens
tgcaatagtcatgtt

SEQ ID NO: 978989 - DNA, 15 bp, Homo sapiens
gcaatagtcatgtta

SEQ ID NO: 978990 - DNA, 15 bp, Homo sapiens
caatagtcatgttat

SEQ ID NO: 978991 - DNA, 15 bp, Homo sapiens
aatagtcatgttatt

SEQ ID NO: 978992 - DNA, 15 bp, Homo sapiens
atagtcatgttattt

SEQ ID NO: 978993 - DNA, 15 bp, Homo sapiens
tagtcatgttatttg

SEQ ID NO: 978994 - DNA, 15 bp, Homo sapiens
agtcatgttatttgc

SEQ ID NO: 978995 - DNA, 15 bp, Homo sapiens
gtcatgttatttgca

SEQ ID NO: 978996 - DNA, 15 bp, Homo sapiens
tcatgttatttgcag

SEQ ID NO: 978997 - DNA, 15 bp, Homo sapiens
catgttatttgcaga

SEQ ID NO: 978998 - DNA, 15 bp, Homo sapiens
atgttatttgcagaa

SEQ ID NO: 978999 - DNA, 15 bp, Homo sapiens
tgttatttgcagaaa

SEQ ID NO: 979000 - DNA, 15 bp, Homo sapiens
gttatttgcagaaat

SEQ ID NO: 979001 - DNA, 15 bp, Homo sapiens
ttatttgcagaaata

SEQ ID NO: 979002 - DNA, 15 bp, Homo sapiens
tatttgcagaaataa

SEQ ID NO: 979003 - DNA, 15 bp, Homo sapiens
atttgcagaaataac

SEQ ID NO: 979004 - DNA, 15 bp, Homo sapiens
tttgcagaaataact

SEQ ID NO: 979005 - DNA, 15 bp, Homo sapiens
ttgcagaaataactg

SEQ ID NO: 979006 - DNA, 15 bp, Homo sapiens
tgcagaaataactgg

SEQ ID NO: 979007 - DNA, 15 bp, Homo sapiens
gcagaaataactggg

SEQ ID NO: 979008 - DNA, 15 bp, Homo sapiens
cagaaataactgggg

SEQ ID NO: 979009 - DNA, 15 bp, Homo sapiens
agaaataactgggga

SEQ ID NO: 979010 - DNA, 15 bp, Homo sapiens
gaaataactggggaa

SEQ ID NO: 979011 - DNA, 15 bp, Homo sapiens
aaataactggggaag

SEQ ID NO: 979012 - DNA, 15 bp, Homo sapiens
aataactggggaagt

SEQ ID NO: 979013 - DNA, 15 bp, Homo sapiens
ataactggggaagtt

SEQ ID NO: 979014 - DNA, 15 bp, Homo sapiens
taactggggaagttg

SEQ ID NO: 979015 - DNA, 15 bp, Homo sapiens
aactggggaagttgc

SEQ ID NO: 979016 - DNA, 15 bp, Homo sapiens
actggggaagttgca

SEQ ID NO: 979017 - DNA, 15 bp, Homo sapiens
ctggggaagttgcaa

SEQ ID NO: 979018 - DNA, 15 bp, Homo sapiens
tggggaagttgcaaa

SEQ ID NO: 979019 - DNA, 15 bp, Homo sapiens
ggggaagttgcaaac

SEQ ID NO: 979020 - DNA, 15 bp, Homo sapiens
gggaagttgcaaacc

SEQ ID NO: 979021 - DNA, 15 bp, Homo sapiens
ggaagttgcaaacct

SEQ ID NO: 979022 - DNA, 15 bp, Homo sapiens
gaagttgcaaacctt

SEQ ID NO: 979023 - DNA, 15 bp, Homo sapiens
aagttgcaaaccttg

SEQ ID NO: 979024 - DNA, 15 bp, Homo sapiens
agttgcaaaccttgt

SEQ ID NO: 979025 - DNA, 15 bp, Homo sapiens
gttgcaaaccttgtg

SEQ ID NO: 979026 - DNA, 15 bp, Homo sapiens
ttgcaaaccttgtga

SEQ ID NO: 979027 - DNA, 15 bp, Homo sapiens
tgcaaaccttgtgac

SEQ ID NO: 979028 - DNA, 15 bp, Homo sapiens
gcaaaccttgtgacc

SEQ ID NO: 979029 - DNA, 15 bp, Homo sapiens
caaaccttgtgacct

SEQ ID NO: 979030 - DNA, 15 bp, Homo sapiens
aaaccttgtgacctc

SEQ ID NO: 979031 - DNA, 15 bp, Homo sapiens
aaccttgtgacctcc

SEQ ID NO: 979032 - DNA, 15 bp, Homo sapiens
accttgtgacctcca

SEQ ID NO: 979033 - DNA, 15 bp, Homo sapiens
ccttgtgacctccag

SEQ ID NO: 979034 - DNA, 15 bp, Homo sapiens
cttgtgacctccaga

SEQ ID NO: 979035 - DNA, 15 bp, Homo sapiens
ttgtgacctccagaa

SEQ ID NO: 979036 - DNA, 15 bp, Homo sapiens
tgtgacctccagaat

SEQ ID NO: 979037 - DNA, 15 bp, Homo sapiens
gtgacctccagaata

SEQ ID NO: 979038 - DNA, 15 bp, Homo sapiens
tgacctccagaataa

SEQ ID NO: 979039 - DNA, 15 bp, Homo sapiens
gacctccagaataat

SEQ ID NO: 979040 - DNA, 15 bp, Homo sapiens
acctccagaataatg

SEQ ID NO: 979041 - DNA, 15 bp, Homo sapiens
cctccagaataatgg

SEQ ID NO: 979042 - DNA, 15 bp, Homo sapiens
ctccagaataatggc

SEQ ID NO: 979043 - DNA, 15 bp, Homo sapiens
tccagaataatggct

SEQ ID NO: 979044 - DNA, 15 bp, Homo sapiens
ccagaataatggctg

SEQ ID NO: 979045 - DNA, 15 bp, Homo sapiens
cagaataatggctgg

SEQ ID NO: 979046 - DNA, 15 bp, Homo sapiens
agaataatggctggc

SEQ ID NO: 979047 - DNA, 15 bp, Homo sapiens
gaataatggctggcc

SEQ ID NO: 979048 - DNA, 15 bp, Homo sapiens
aataatggctggcca

SEQ ID NO: 979049 - DNA, 15 bp, Homo sapiens
ataatggctggccat

SEQ ID NO: 979050 - DNA, 15 bp, Homo sapiens
taatggctggccatc

SEQ ID NO: 979051 - DNA, 15 bp, Homo sapiens
aatggctggccatct

SEQ ID NO: 979052 - DNA, 15 bp, Homo sapiens
atggctggccatctt

SEQ ID NO: 979053 - DNA, 15 bp, Homo sapiens
tggctggccatcttt

SEQ ID NO: 979054 - DNA, 15 bp, Homo sapiens
ggctggccatctttg

SEQ ID NO: 979055 - DNA, 15 bp, Homo sapiens
gctggccatctttgt

SEQ ID NO: 979056 - DNA, 15 bp, Homo sapiens
ctggccatctttgtt

SEQ ID NO: 979057 - DNA, 15 bp, Homo sapiens
tggccatctttgttt

SEQ ID NO: 979058 - DNA, 15 bp, Homo sapiens
ggccatctttgtttt

SEQ ID NO: 979059 - DNA, 15 bp, Homo sapiens
gccatctttgttttt

SEQ ID NO: 979060 - DNA, 15 bp, Homo sapiens
ccatctttgtttttg

SEQ ID NO: 979061 - DNA, 15 bp, Homo sapiens
catctttgtttttgt

SEQ ID NO: 979062 - DNA, 15 bp, Homo sapiens
atctttgtttttgtt

SEQ ID NO: 979063 - DNA, 15 bp, Homo sapiens
tctttgtttttgttt

SEQ ID NO: 979064 - DNA, 15 bp, Homo sapiens
ctttgtttttgtttt

SEQ ID NO: 979065 - DNA, 15 bp, Homo sapiens
ttgtttttgtttttg

SEQ ID NO: 979066 - DNA, 15 bp, Homo sapiens
tgtttttgtttttga

SEQ ID NO: 979067 - DNA, 15 bp, Homo sapiens
gtttttgtttttgag

SEQ ID NO: 979068 - DNA, 15 bp, Homo sapiens
tttttgtttttgaga

SEQ ID NO: 979069 - DNA, 15 bp, Homo sapiens
ttttgtttttgagat

SEQ ID NO: 979070 - DNA, 15 bp, Homo sapiens
tttgtttttgagatg

SEQ ID NO: 979071 - DNA, 15 bp, Homo sapiens
ttgtttttgagatgg

SEQ ID NO: 979072 - DNA, 15 bp, Homo sapiens
tgtttttgagatgga

SEQ ID NO: 979073 - DNA, 15 bp, Homo sapiens
gtttttgagatggag

SEQ ID NO: 979074 - DNA, 15 bp, Homo sapiens
tttttgagatggagt

SEQ ID NO: 979075 - DNA, 15 bp, Homo sapiens
ttttgagatggagtc

SEQ ID NO: 979076 - DNA, 15 bp, Homo sapiens
tttgagatggagtct

SEQ ID NO: 979077 - DNA, 15 bp, Homo sapiens
ttgagatggagtctt

SEQ ID NO: 979078 - DNA, 15 bp, Homo sapiens
tgagatggagtcttg

SEQ ID NO: 979079 - DNA, 15 bp, Homo sapiens
gagatggagtcttgc

SEQ ID NO: 979080 - DNA, 15 bp, Homo sapiens
agatggagtcttgct

SEQ ID NO: 979081 - DNA, 15 bp, Homo sapiens
gatggagtcttgctc

SEQ ID NO: 979082 - DNA, 15 bp, Homo sapiens
atggagtcttgctct

SEQ ID NO: 979083 - DNA, 15 bp, Homo sapiens
tggagtcttgctctt

SEQ ID NO: 979084 - DNA, 15 bp, Homo sapiens
ggagtcttgctcttg

SEQ ID NO: 979085 - DNA, 15 bp, Homo sapiens
gagtcttgctcttgc

SEQ ID NO: 979086 - DNA, 15 bp, Homo sapiens
agtcttgctcttgcc

SEQ ID NO: 979087 - DNA, 15 bp, Homo sapiens
gtcttgctcttgccc

SEQ ID NO: 979088 - DNA, 15 bp, Homo sapiens
tcttgctcttgccca

SEQ ID NO: 979089 - DNA, 15 bp, Homo sapiens
cttgctcttgcccag

SEQ ID NO: 979090 - DNA, 15 bp, Homo sapiens
ttgctcttgcccagg

SEQ ID NO: 979091 - DNA, 15 bp, Homo sapiens
tgctcttgcccaggc

SEQ ID NO: 979092 - DNA, 15 bp, Homo sapiens
gctcttgcccaggct

SEQ ID NO: 979093 - DNA, 15 bp, Homo sapiens
ctcttgcccaggctg

SEQ ID NO: 979094 - DNA, 15 bp, Homo sapiens
tcttgcccaggctgg

SEQ ID NO: 979095 - DNA, 15 bp, Homo sapiens
cttgcccaggctgga

SEQ ID NO: 979096 - DNA, 15 bp, Homo sapiens
ggctggagtgcagtt

SEQ ID NO: 979097 - DNA, 15 bp, Homo sapiens
gctggagtgcagttg

SEQ ID NO: 979098 - DNA, 15 bp, Homo sapiens
ctggagtgcagttgt

SEQ ID NO: 979099 - DNA, 15 bp, Homo sapiens
tggagtgcagttgtt

SEQ ID NO: 979100 - DNA, 15 bp, Homo sapiens
ggagtgcagttgttc

SEQ ID NO: 979101 - DNA, 15 bp, Homo sapiens
gagtgcagttgttcc

SEQ ID NO: 979102 - DNA, 15 bp, Homo sapiens
agtgcagttgttcca

SEQ ID NO: 979103 - DNA, 15 bp, Homo sapiens
gtgcagttgttccat

SEQ ID NO: 979104 - DNA, 15 bp, Homo sapiens
tgcagttgttccatc

SEQ ID NO: 979105 - DNA, 15 bp, Homo sapiens
gcagttgttccatct

SEQ ID NO: 979106 - DNA, 15 bp, Homo sapiens
cagttgttccatctt

SEQ ID NO: 979107 - DNA, 15 bp, Homo sapiens
agttgttccatcttg

SEQ ID NO: 979108 - DNA, 15 bp, Homo sapiens
gttgttccatcttgg

SEQ ID NO: 979109 - DNA, 15 bp, Homo sapiens
ttgttccatcttggc

SEQ ID NO: 979110 - DNA, 15 bp, Homo sapiens
tgttccatcttggct

SEQ ID NO: 979111 - DNA, 15 bp, Homo sapiens
gttccatcttggctc

SEQ ID NO: 979112 - DNA, 15 bp, Homo sapiens
ttccatcttggctca

SEQ ID NO: 979113 - DNA, 15 bp, Homo sapiens
tccatcttggctcac

SEQ ID NO: 979114 - DNA, 15 bp, Homo sapiens
ccatcttggctcact

SEQ ID NO: 979115 - DNA, 15 bp, Homo sapiens
catcttggctcactg

SEQ ID NO: 979116 - DNA, 15 bp, Homo sapiens
caacctctgcctcct

SEQ ID NO: 979117 - DNA, 15 bp, Homo sapiens
aacctctgcctcctg

SEQ ID NO: 979118 - DNA, 15 bp, Homo sapiens
acctctgcctcctgg

SEQ ID NO: 979119 - DNA, 15 bp, Homo sapiens
cctctgcctcctggg

SEQ ID NO: 979120 - DNA, 15 bp, Homo sapiens
ctctgcctcctgggt

SEQ ID NO: 979121 - DNA, 15 bp, Homo sapiens
tctgcctcctgggtt

SEQ ID NO: 979122 - DNA, 15 bp, Homo sapiens
ctgcctcctgggttc

SEQ ID NO: 979123 - DNA, 15 bp, Homo sapiens
tgcctcctgggttca

SEQ ID NO: 979124 - DNA, 15 bp, Homo sapiens
gcctcctgggttcaa

SEQ ID NO: 979125 - DNA, 15 bp, Homo sapiens
cctcctgggttcaag

SEQ ID NO: 979126 - DNA, 15 bp, Homo sapiens
ctcctgggttcaagt

SEQ ID NO: 979127 - DNA, 15 bp, Homo sapiens
tcctgggttcaagtg

SEQ ID NO: 979128 - DNA, 15 bp, Homo sapiens
cctgggttcaagtga

SEQ ID NO: 979129 - DNA, 15 bp, Homo sapiens
ctgggttcaagtgat

SEQ ID NO: 979130 - DNA, 15 bp, Homo sapiens
tgggttcaagtgatt

SEQ ID NO: 979131 - DNA, 15 bp, Homo sapiens
gggttcaagtgattc

SEQ ID NO: 979132 - DNA, 15 bp, Homo sapiens
ggttcaagtgattct

SEQ ID NO: 979133 - DNA, 15 bp, Homo sapiens
gttcaagtgattctc

SEQ ID NO: 979134 - DNA, 15 bp, Homo sapiens
ttcaagtgattctcc

SEQ ID NO: 979135 - DNA, 15 bp, Homo sapiens
tcaagtgattctcct

SEQ ID NO: 979136 - DNA, 15 bp, Homo sapiens
caagtgattctcctg

SEQ ID NO: 979137 - DNA, 15 bp, Homo sapiens
aagtgattctcctgt

SEQ ID NO: 979138 - DNA, 15 bp, Homo sapiens
agtgattctcctgtg

SEQ ID NO: 979139 - DNA, 15 bp, Homo sapiens
gtgattctcctgtgt

SEQ ID NO: 979140 - DNA, 15 bp, Homo sapiens
tgattctcctgtgtc

SEQ ID NO: 979141 - DNA, 15 bp, Homo sapiens
gattctcctgtgtca

SEQ ID NO: 979142 - DNA, 15 bp, Homo sapiens
attctcctgtgtcag

SEQ ID NO: 979143 - DNA, 15 bp, Homo sapiens
ttctcctgtgtcagc

SEQ ID NO: 979144 - DNA, 15 bp, Homo sapiens
tctcctgtgtcagcc

SEQ ID NO: 979145 - DNA, 15 bp, Homo sapiens
ctcctgtgtcagcct

SEQ ID NO: 979146 - DNA, 15 bp, Homo sapiens
tcctgtgtcagccta

SEQ ID NO: 979147 - DNA, 15 bp, Homo sapiens
cctgtgtcagcctac

SEQ ID NO: 979148 - DNA, 15 bp, Homo sapiens
ctgtgtcagcctacc

SEQ ID NO: 979149 - DNA, 15 bp, Homo sapiens
tgtgtcagcctacca

SEQ ID NO: 979150 - DNA, 15 bp, Homo sapiens
gtgtcagcctaccag

SEQ ID NO: 979151 - DNA, 15 bp, Homo sapiens
tgtcagcctaccagg

SEQ ID NO: 979152 - DNA, 15 bp, Homo sapiens
gtcagcctaccaggt

SEQ ID NO: 979153 - DNA, 15 bp, Homo sapiens
tcagcctaccaggta

SEQ ID NO: 979154 - DNA, 15 bp, Homo sapiens
cagcctaccaggtag

SEQ ID NO: 979155 - DNA, 15 bp, Homo sapiens
agcctaccaggtagc

SEQ ID NO: 979156 - DNA, 15 bp, Homo sapiens
gcctaccaggtagct

SEQ ID NO: 979157 - DNA, 15 bp, Homo sapiens
cctaccaggtagcta

SEQ ID NO: 979158 - DNA, 15 bp, Homo sapiens
ctaccaggtagctag

SEQ ID NO: 979159 - DNA, 15 bp, Homo sapiens
taccaggtagctagg

SEQ ID NO: 979160 - DNA, 15 bp, Homo sapiens
accaggtagctagga

SEQ ID NO: 979161 - DNA, 15 bp, Homo sapiens
ccaggtagctaggat

SEQ ID NO: 979162 - DNA, 15 bp, Homo sapiens
caggtagctaggatt

SEQ ID NO: 979163 - DNA, 15 bp, Homo sapiens
aggtagctaggatta

SEQ ID NO: 979164 - DNA, 15 bp, Homo sapiens
ggtagctaggattac

SEQ ID NO: 979165 - DNA, 15 bp, Homo sapiens
gtagctaggattaca

SEQ ID NO: 979166 - DNA, 15 bp, Homo sapiens
tagctaggattacag

SEQ ID NO: 979167 - DNA, 15 bp, Homo sapiens
agctaggattacagg

SEQ ID NO: 979168 - DNA, 15 bp, Homo sapiens
gctaggattacaggc

SEQ ID NO: 979169 - DNA, 15 bp, Homo sapiens
ctaggattacaggca

SEQ ID NO: 979170 - DNA, 15 bp, Homo sapiens
taggattacaggcac

SEQ ID NO: 979171 - DNA, 15 bp, Homo sapiens
aggattacaggcaca

SEQ ID NO: 979172 - DNA, 15 bp, Homo sapiens
ggattacaggcacat

SEQ ID NO: 979173 - DNA, 15 bp, Homo sapiens
gattacaggcacatg

SEQ ID NO: 979174 - DNA, 15 bp, Homo sapiens
attacaggcacatgc

SEQ ID NO: 979175 - DNA, 15 bp, Homo sapiens
ttacaggcacatgcc

SEQ ID NO: 979176 - DNA, 15 bp, Homo sapiens
tacaggcacatgcca

SEQ ID NO: 979177 - DNA, 15 bp, Homo sapiens
acaggcacatgccac

SEQ ID NO: 979178 - DNA, 15 bp, Homo sapiens
caggcacatgccacc

SEQ ID NO: 979179 - DNA, 15 bp, Homo sapiens
aggcacatgccacca

SEQ ID NO: 979180 - DNA, 15 bp, Homo sapiens
ggcacatgccaccat

SEQ ID NO: 979181 - DNA, 15 bp, Homo sapiens
gcacatgccaccatg

SEQ ID NO: 979182 - DNA, 15 bp, Homo sapiens
cacatgccaccatgc

SEQ ID NO: 979183 - DNA, 15 bp, Homo sapiens
acatgccaccatgcc

SEQ ID NO: 979184 - DNA, 15 bp, Homo sapiens
catgccaccatgccg

SEQ ID NO: 979185 - DNA, 15 bp, Homo sapiens
atgccaccatgccgg

SEQ ID NO: 979186 - DNA, 15 bp, Homo sapiens
tgccaccatgccggg

SEQ ID NO: 979187 - DNA, 15 bp, Homo sapiens
gccaccatgccgggc

SEQ ID NO: 979188 - DNA, 15 bp, Homo sapiens
ccaccatgccgggct

SEQ ID NO: 979189 - DNA, 15 bp, Homo sapiens
caccatgccgggcta

SEQ ID NO: 979190 - DNA, 15 bp, Homo sapiens
accatgccgggctaa

SEQ ID NO: 979191 - DNA, 15 bp, Homo sapiens
ccatgccgggctaat

SEQ ID NO: 979192 - DNA, 15 bp, Homo sapiens
catgccgggctaatt

SEQ ID NO: 979193 - DNA, 15 bp, Homo sapiens
atgccgggctaattt

SEQ ID NO: 979194 - DNA, 15 bp, Homo sapiens
tgccgggctaatttt

SEQ ID NO: 979195 - DNA, 15 bp, Homo sapiens
gccgggctaattttt

SEQ ID NO: 979196 - DNA, 15 bp, Homo sapiens
ccgggctaatttttg

SEQ ID NO: 979197 - DNA, 15 bp, Homo sapiens
cgggctaatttttgt

SEQ ID NO: 979198 - DNA, 15 bp, Homo sapiens
gggctaatttttgta

SEQ ID NO: 979199 - DNA, 15 bp, Homo sapiens
ggctaatttttgtat

SEQ ID NO: 979200 - DNA, 15 bp, Homo sapiens
ttttgtatttttaga

SEQ ID NO: 979201 - DNA, 15 bp, Homo sapiens
tttgtatttttagaa

SEQ ID NO: 979202 - DNA, 15 bp, Homo sapiens
ttgtatttttagaag

SEQ ID NO: 979203 - DNA, 15 bp, Homo sapiens
tgtatttttagaaga

SEQ ID NO: 979204 - DNA, 15 bp, Homo sapiens
gtatttttagaagag

SEQ ID NO: 979205 - DNA, 15 bp, Homo sapiens
tatttttagaagaga

SEQ ID NO: 979206 - DNA, 15 bp, Homo sapiens
atttttagaagagat

SEQ ID NO: 979207 - DNA, 15 bp, Homo sapiens
tttttagaagagatg

SEQ ID NO: 979208 - DNA, 15 bp, Homo sapiens
ttttagaagagatgg

SEQ ID NO: 979209 - DNA, 15 bp, Homo sapiens
tttagaagagatggg

SEQ ID NO: 979210 - DNA, 15 bp, Homo sapiens
ttagaagagatgggg

SEQ ID NO: 979211 - DNA, 15 bp, Homo sapiens
tagaagagatggggt

SEQ ID NO: 979212 - DNA, 15 bp, Homo sapiens
agaagagatggggtt

SEQ ID NO: 979213 - DNA, 15 bp, Homo sapiens
gaagagatggggttt

SEQ ID NO: 979214 - DNA, 15 bp, Homo sapiens
aagagatggggtttc

SEQ ID NO: 979215 - DNA, 15 bp, Homo sapiens
agagatggggtttcg

SEQ ID NO: 979216 - DNA, 15 bp, Homo sapiens
gagatggggtttcga

SEQ ID NO: 979217 - DNA, 15 bp, Homo sapiens
agatggggtttcgaa

SEQ ID NO: 979218 - DNA, 15 bp, Homo sapiens
gatggggtttcgaaa

SEQ ID NO: 979219 - DNA, 15 bp, Homo sapiens
atggggtttcgaaat

SEQ ID NO: 979220 - DNA, 15 bp, Homo sapiens
tggggtttcgaaatg

SEQ ID NO: 979221 - DNA, 15 bp, Homo sapiens
ggggtttcgaaatgc

SEQ ID NO: 979222 - DNA, 15 bp, Homo sapiens
gggtttcgaaatgct

SEQ ID NO: 979223 - DNA, 15 bp, Homo sapiens
ggtttcgaaatgctg

SEQ ID NO: 979224 - DNA, 15 bp, Homo sapiens
gtttcgaaatgctgg

SEQ ID NO: 979225 - DNA, 15 bp, Homo sapiens
tttcgaaatgctggc

SEQ ID NO: 979226 - DNA, 15 bp, Homo sapiens
ttcgaaatgctggcc

SEQ ID NO: 979227 - DNA, 15 bp, Homo sapiens
tcgaaatgctggcca

SEQ ID NO: 979228 - DNA, 15 bp, Homo sapiens
cgaaatgctggccag

SEQ ID NO: 979229 - DNA, 15 bp, Homo sapiens
gaaatgctggccagg

SEQ ID NO: 979230 - DNA, 15 bp, Homo sapiens
aaatgctggccaggc

SEQ ID NO: 979231 - DNA, 15 bp, Homo sapiens
aatgctggccaggct

SEQ ID NO: 979232 - DNA, 15 bp, Homo sapiens
atgctggccaggctg

SEQ ID NO: 979233 - DNA, 15 bp, Homo sapiens
tgctggccaggctgg

SEQ ID NO: 979234 - DNA, 15 bp, Homo sapiens
gctggccaggctggt

SEQ ID NO: 979235 - DNA, 15 bp, Homo sapiens
ctggccaggctggtt

SEQ ID NO: 979236 - DNA, 15 bp, Homo sapiens
tggccaggctggttt

SEQ ID NO: 979237 - DNA, 15 bp, Homo sapiens
ggccaggctggtttc

SEQ ID NO: 979238 - DNA, 15 bp, Homo sapiens
gccaggctggtttcg

SEQ ID NO: 979239 - DNA, 15 bp, Homo sapiens
aggctggtttcgaaa

SEQ ID NO: 979240 - DNA, 15 bp, Homo sapiens
ggctggtttcgaaat

SEQ ID NO: 979241 - DNA, 15 bp, Homo sapiens
gctggtttcgaaatc

SEQ ID NO: 979242 - DNA, 15 bp, Homo sapiens
ctggtttcgaaatcc

SEQ ID NO: 979243 - DNA, 15 bp, Homo sapiens
tggtttcgaaatcct

SEQ ID NO: 979244 - DNA, 15 bp, Homo sapiens
ggtttcgaaatcctg

SEQ ID NO: 979245 - DNA, 15 bp, Homo sapiens
gtttcgaaatcctga

SEQ ID NO: 979246 - DNA, 15 bp, Homo sapiens
tttcgaaatcctgac

SEQ ID NO: 979247 - DNA, 15 bp, Homo sapiens
ttcgaaatcctgacc

SEQ ID NO: 979248 - DNA, 15 bp, Homo sapiens
tcgaaatcctgacct

SEQ ID NO: 979249 - DNA, 15 bp, Homo sapiens
gatcacttgagccca

SEQ ID NO: 979250 - DNA, 15 bp, Homo sapiens
atcacttgagcccag

SEQ ID NO: 979251 - DNA, 15 bp, Homo sapiens
tcacttgagcccagg

SEQ ID NO: 979252 - DNA, 15 bp, Homo sapiens
cacttgagcccagga

SEQ ID NO: 979253 - DNA, 15 bp, Homo sapiens
acttgagcccaggag

SEQ ID NO: 979254 - DNA, 15 bp, Homo sapiens
cttgagcccaggagt

SEQ ID NO: 979255 - DNA, 15 bp, Homo sapiens
ttgagcccaggagtt

SEQ ID NO: 979256 - DNA, 15 bp, Homo sapiens
tgagcccaggagttc

SEQ ID NO: 979257 - DNA, 15 bp, Homo sapiens
gagcccaggagttcg

SEQ ID NO: 979258 - DNA, 15 bp, Homo sapiens
agcccaggagttcga

SEQ ID NO: 979259 - DNA, 15 bp, Homo sapiens
gcccaggagttcgac

SEQ ID NO: 979260 - DNA, 15 bp, Homo sapiens
cccaggagttcgaca

SEQ ID NO: 979261 - DNA, 15 bp, Homo sapiens
ccaggagttcgacac

SEQ ID NO: 979262 - DNA, 15 bp, Homo sapiens
caggagttcgacacc

SEQ ID NO: 979263 - DNA, 15 bp, Homo sapiens
aggagttcgacacca

SEQ ID NO: 979264 - DNA, 15 bp, Homo sapiens
ggagttcgacaccag

SEQ ID NO: 979265 - DNA, 15 bp, Homo sapiens
gagttcgacaccagc

SEQ ID NO: 979266 - DNA, 15 bp, Homo sapiens
agttcgacaccagcc

SEQ ID NO: 979267 - DNA, 15 bp, Homo sapiens
gttcgacaccagcct

SEQ ID NO: 979268 - DNA, 15 bp, Homo sapiens
ttcgacaccagcctg

SEQ ID NO: 979269 - DNA, 15 bp, Homo sapiens
tcgacaccagcctga

SEQ ID NO: 979270 - DNA, 15 bp, Homo sapiens
cgacaccagcctgag

SEQ ID NO: 979271 - DNA, 15 bp, Homo sapiens
gacaccagcctgagc

SEQ ID NO: 979272 - DNA, 15 bp, Homo sapiens
acaccagcctgagcc

SEQ ID NO: 979273 - DNA, 15 bp, Homo sapiens
caccagcctgagccc

SEQ ID NO: 979274 - DNA, 15 bp, Homo sapiens
accagcctgagcccc

SEQ ID NO: 979275 - DNA, 15 bp, Homo sapiens
ccagcctgagcccca

SEQ ID NO: 979276 - DNA, 15 bp, Homo sapiens
cagcctgagccccaa

SEQ ID NO: 979277 - DNA, 15 bp, Homo sapiens
agcctgagccccaag

SEQ ID NO: 979278 - DNA, 15 bp, Homo sapiens
gcctgagccccaagg

SEQ ID NO: 979279 - DNA, 15 bp, Homo sapiens
cctgagccccaaggt

SEQ ID NO: 979280 - DNA, 15 bp, Homo sapiens
ctgagccccaaggtg

SEQ ID NO: 979281 - DNA, 15 bp, Homo sapiens
tgagccccaaggtga

SEQ ID NO: 979282 - DNA, 15 bp, Homo sapiens
gagccccaaggtgaa

SEQ ID NO: 979283 - DNA, 15 bp, Homo sapiens
agccccaaggtgaaa

SEQ ID NO: 979284 - DNA, 15 bp, Homo sapiens
gccccaaggtgaaac

SEQ ID NO: 979285 - DNA, 15 bp, Homo sapiens
ccccaaggtgaaacc

SEQ ID NO: 979286 - DNA, 15 bp, Homo sapiens
cccaaggtgaaaccc

SEQ ID NO: 979287 - DNA, 15 bp, Homo sapiens
ccaaggtgaaacccc

SEQ ID NO: 979288 - DNA, 15 bp, Homo sapiens
caaggtgaaacccca

SEQ ID NO: 979289 - DNA, 15 bp, Homo sapiens
aaggtgaaaccccat

SEQ ID NO: 979290 - DNA, 15 bp, Homo sapiens
aggtgaaaccccatc

SEQ ID NO: 979291 - DNA, 15 bp, Homo sapiens
aaccccatctctacc

SEQ ID NO: 979292 - DNA, 15 bp, Homo sapiens
accccatctctacca

SEQ ID NO: 979293 - DNA, 15 bp, Homo sapiens
ccccatctctaccaa

SEQ ID NO: 979294 - DNA, 15 bp, Homo sapiens
cccatctctaccaaa

SEQ ID NO: 979295 - DNA, 15 bp, Homo sapiens
ccatctctaccaaaa

SEQ ID NO: 979296 - DNA, 15 bp, Homo sapiens
catctctaccaaaaa

SEQ ID NO: 979297 - DNA, 15 bp, Homo sapiens
atctctaccaaaaat

SEQ ID NO: 979298 - DNA, 15 bp, Homo sapiens
tctctaccaaaaatg

SEQ ID NO: 979299 - DNA, 15 bp, Homo sapiens
ctctaccaaaaatgg

SEQ ID NO: 979300 - DNA, 15 bp, Homo sapiens
tctaccaaaaatggt

SEQ ID NO: 979301 - DNA, 15 bp, Homo sapiens
ctaccaaaaatggtg

SEQ ID NO: 979302 - DNA, 15 bp, Homo sapiens
taccaaaaatggtga

SEQ ID NO: 979303 - DNA, 15 bp, Homo sapiens
accaaaaatggtgaa

SEQ ID NO: 979304 - DNA, 15 bp, Homo sapiens
ccaaaaatggtgaaa

SEQ ID NO: 979305 - DNA, 15 bp, Homo sapiens
caaaaatggtgaaac

SEQ ID NO: 979306 - DNA, 15 bp, Homo sapiens
aaaaatggtgaaacc

SEQ ID NO: 979307 - DNA, 15 bp, Homo sapiens
aaaatggtgaaaccc

SEQ ID NO: 979308 - DNA, 15 bp, Homo sapiens
aaatggtgaaaccca

SEQ ID NO: 979309 - DNA, 15 bp, Homo sapiens
aatggtgaaacccag

SEQ ID NO: 979310 - DNA, 15 bp, Homo sapiens
atggtgaaacccagt

SEQ ID NO: 979311 - DNA, 15 bp, Homo sapiens
tggtgaaacccagtc

SEQ ID NO: 979312 - DNA, 15 bp, Homo sapiens
ggtgaaacccagtct

SEQ ID NO: 979313 - DNA, 15 bp, Homo sapiens
gtgaaacccagtctc

SEQ ID NO: 979314 - DNA, 15 bp, Homo sapiens
tgaaacccagtctct

SEQ ID NO: 979315 - DNA, 15 bp, Homo sapiens
gaaacccagtctcta

SEQ ID NO: 979316 - DNA, 15 bp, Homo sapiens
aaacccagtctctac

SEQ ID NO: 979317 - DNA, 15 bp, Homo sapiens
aacccagtctctacc

SEQ ID NO: 979318 - DNA, 15 bp, Homo sapiens
acccagtctctacca

SEQ ID NO: 979319 - DNA, 15 bp, Homo sapiens
cccagtctctaccaa

SEQ ID NO: 979320 - DNA, 15 bp, Homo sapiens
ccagtctctaccaaa

SEQ ID NO: 979321 - DNA, 15 bp, Homo sapiens
cagtctctaccaaaa

SEQ ID NO: 979322 - DNA, 15 bp, Homo sapiens
agtctctaccaaaaa

SEQ ID NO: 979323 - DNA, 15 bp, Homo sapiens
gtctctaccaaaaat

SEQ ID NO: 979324 - DNA, 15 bp, Homo sapiens
tctctaccaaaaata

SEQ ID NO: 979325 - DNA, 15 bp, Homo sapiens
ctctaccaaaaatac

SEQ ID NO: 979326 - DNA, 15 bp, Homo sapiens
tctaccaaaaataca

SEQ ID NO: 979327 - DNA, 15 bp, Homo sapiens
ctaccaaaaatacaa

SEQ ID NO: 979328 - DNA, 15 bp, Homo sapiens
taccaaaaatacaaa

SEQ ID NO: 979329 - DNA, 15 bp, Homo sapiens
accaaaaatacaaaa

SEQ ID NO: 979330 - DNA, 15 bp, Homo sapiens
ccaaaaatacaaaaa

SEQ ID NO: 979331 - DNA, 15 bp, Homo sapiens
caaaaatacaaaaat

SEQ ID NO: 979332 - DNA, 15 bp, Homo sapiens
aaaattagctgggca

SEQ ID NO: 979333 - DNA, 15 bp, Homo sapiens
aaattagctgggcat

SEQ ID NO: 979334 - DNA, 15 bp, Homo sapiens
aattagctgggcatg

SEQ ID NO: 979335 - DNA, 15 bp, Homo sapiens
attagctgggcatgt

SEQ ID NO: 979336 - DNA, 15 bp, Homo sapiens
ttagctgggcatgtg

SEQ ID NO: 979337 - DNA, 15 bp, Homo sapiens
tagctgggcatgtgg

SEQ ID NO: 979338 - DNA, 15 bp, Homo sapiens
agctgggcatgtggc

SEQ ID NO: 979339 - DNA, 15 bp, Homo sapiens
gctgggcatgtggcg

SEQ ID NO: 979340 - DNA, 15 bp, Homo sapiens
ctgggcatgtggcgc

SEQ ID NO: 979341 - DNA, 15 bp, Homo sapiens
tgggcatgtggcgca

SEQ ID NO: 979342 - DNA, 15 bp, Homo sapiens
gggcatgtggcgcat

SEQ ID NO: 979343 - DNA, 15 bp, Homo sapiens
ggcatgtggcgcatg

SEQ ID NO: 979344 - DNA, 15 bp, Homo sapiens
gcatgtggcgcatgc

SEQ ID NO: 979345 - DNA, 15 bp, Homo sapiens
catgtggcgcatgcc

SEQ ID NO: 979346 - DNA, 15 bp, Homo sapiens
atgtggcgcatgcct

SEQ ID NO: 979347 - DNA, 15 bp, Homo sapiens
tgtggcgcatgcctg

SEQ ID NO: 979348 - DNA, 15 bp, Homo sapiens
gtggcgcatgcctgt

SEQ ID NO: 979349 - DNA, 15 bp, Homo sapiens
tggcgcatgcctgta

SEQ ID NO: 979350 - DNA, 15 bp, Homo sapiens
ggcgcatgcctgtaa

SEQ ID NO: 979351 - DNA, 15 bp, Homo sapiens
gcgcatgcctgtaat

SEQ ID NO: 979352 - DNA, 15 bp, Homo sapiens
cgcatgcctgtaatc

SEQ ID NO: 979353 - DNA, 15 bp, Homo sapiens
gcatgcctgtaatcc

SEQ ID NO: 979354 - DNA, 15 bp, Homo sapiens
ccagctactcaggaa

SEQ ID NO: 979355 - DNA, 15 bp, Homo sapiens
cagctactcaggaag

SEQ ID NO: 979356 - DNA, 15 bp, Homo sapiens
agctactcaggaagc

SEQ ID NO: 979357 - DNA, 15 bp, Homo sapiens
gctactcaggaagct

SEQ ID NO: 979358 - DNA, 15 bp, Homo sapiens
ctactcaggaagctg

SEQ ID NO: 979359 - DNA, 15 bp, Homo sapiens
tactcaggaagctga

SEQ ID NO: 979360 - DNA, 15 bp, Homo sapiens
actcaggaagctgag

SEQ ID NO: 979361 - DNA, 15 bp, Homo sapiens
ctcaggaagctgagg

SEQ ID NO: 979362 - DNA, 15 bp, Homo sapiens
tcaggaagctgaggc

SEQ ID NO: 979363 - DNA, 15 bp, Homo sapiens
caggaagctgaggca

SEQ ID NO: 979364 - DNA, 15 bp, Homo sapiens
aggaagctgaggcag

SEQ ID NO: 979365 - DNA, 15 bp, Homo sapiens
ggaagctgaggcagg

SEQ ID NO: 979366 - DNA, 15 bp, Homo sapiens
gaagctgaggcagga

SEQ ID NO: 979367 - DNA, 15 bp, Homo sapiens
aagctgaggcaggag

SEQ ID NO: 979368 - DNA, 15 bp, Homo sapiens
agctgaggcaggagg

SEQ ID NO: 979369 - DNA, 15 bp, Homo sapiens
gctgaggcaggagga

SEQ ID NO: 979370 - DNA, 15 bp, Homo sapiens
ctgaggcaggaggat

SEQ ID NO: 979371 - DNA, 15 bp, Homo sapiens
tgaggcaggaggatt

SEQ ID NO: 979372 - DNA, 15 bp, Homo sapiens
gaggcaggaggattg

SEQ ID NO: 979373 - DNA, 15 bp, Homo sapiens
aggcaggaggattgc

SEQ ID NO: 979374 - DNA, 15 bp, Homo sapiens
ggcaggaggattgct

SEQ ID NO: 979375 - DNA, 15 bp, Homo sapiens
gcaggaggattgctt

SEQ ID NO: 979376 - DNA, 15 bp, Homo sapiens
caggaggattgcttg

SEQ ID NO: 979377 - DNA, 15 bp, Homo sapiens
aggaggattgcttga

SEQ ID NO: 979378 - DNA, 15 bp, Homo sapiens
ggaggattgcttgaa

SEQ ID NO: 979379 - DNA, 15 bp, Homo sapiens
gaggattgcttgaac

SEQ ID NO: 979380 - DNA, 15 bp, Homo sapiens
aggattgcttgaacc

SEQ ID NO: 979381 - DNA, 15 bp, Homo sapiens
ggattgcttgaacct

SEQ ID NO: 979382 - DNA, 15 bp, Homo sapiens
gattgcttgaaccta

SEQ ID NO: 979383 - DNA, 15 bp, Homo sapiens
ttgaacctaggaggc

SEQ ID NO: 979384 - DNA, 15 bp, Homo sapiens
tgaacctaggaggcg

SEQ ID NO: 979385 - DNA, 15 bp, Homo sapiens
gaacctaggaggcgg

SEQ ID NO: 979386 - DNA, 15 bp, Homo sapiens
aacctaggaggcgga

SEQ ID NO: 979387 - DNA, 15 bp, Homo sapiens
acctaggaggcggat

SEQ ID NO: 979388 - DNA, 15 bp, Homo sapiens
cctaggaggcggatg

SEQ ID NO: 979389 - DNA, 15 bp, Homo sapiens
ctaggaggcggatgt

SEQ ID NO: 979390 - DNA, 15 bp, Homo sapiens
taggaggcggatgtt

SEQ ID NO: 979391 - DNA, 15 bp, Homo sapiens
aggaggcggatgttg

SEQ ID NO: 979392 - DNA, 15 bp, Homo sapiens
ggaggcggatgttgc

SEQ ID NO: 979393 - DNA, 15 bp, Homo sapiens
gaggcggatgttgca

SEQ ID NO: 979394 - DNA, 15 bp, Homo sapiens
aggcggatgttgcag

SEQ ID NO: 979395 - DNA, 15 bp, Homo sapiens
ggcggatgttgcagt

SEQ ID NO: 979396 - DNA, 15 bp, Homo sapiens
gcggatgttgcagtg

SEQ ID NO: 979397 - DNA, 15 bp, Homo sapiens
cggatgttgcagtga

SEQ ID NO: 979398 - DNA, 15 bp, Homo sapiens
ggatgttgcagtgag

SEQ ID NO: 979399 - DNA, 15 bp, Homo sapiens
gatgttgcagtgagc

SEQ ID NO: 979400 - DNA, 15 bp, Homo sapiens
atgttgcagtgagct

SEQ ID NO: 979401 - DNA, 15 bp, Homo sapiens
tgttgcagtgagctg

SEQ ID NO: 979402 - DNA, 15 bp, Homo sapiens
gtgagctgagatcac

SEQ ID NO: 979403 - DNA, 15 bp, Homo sapiens
tgagctgagatcaca

SEQ ID NO: 979404 - DNA, 15 bp, Homo sapiens
gagctgagatcacac

SEQ ID NO: 979405 - DNA, 15 bp, Homo sapiens
agctgagatcacacc

SEQ ID NO: 979406 - DNA, 15 bp, Homo sapiens
gctgagatcacacca

SEQ ID NO: 979407 - DNA, 15 bp, Homo sapiens
ctgagatcacaccac

SEQ ID NO: 979408 - DNA, 15 bp, Homo sapiens
tgagatcacaccact

SEQ ID NO: 979409 - DNA, 15 bp, Homo sapiens
gagatcacaccactg

SEQ ID NO: 979410 - DNA, 15 bp, Homo sapiens
agatcacaccactgg

SEQ ID NO: 979411 - DNA, 15 bp, Homo sapiens
gatcacaccactgga

SEQ ID NO: 979412 - DNA, 15 bp, Homo sapiens
atcacaccactggac

SEQ ID NO: 979413 - DNA, 15 bp, Homo sapiens
tcacaccactggact

SEQ ID NO: 979414 - DNA, 15 bp, Homo sapiens
cacaccactggactc

SEQ ID NO: 979415 - DNA, 15 bp, Homo sapiens
acaccactggactcc

SEQ ID NO: 979416 - DNA, 15 bp, Homo sapiens
caccactggactcca

SEQ ID NO: 979417 - DNA, 15 bp, Homo sapiens
accactggactccag

SEQ ID NO: 979418 - DNA, 15 bp, Homo sapiens
ccactggactccagc

SEQ ID NO: 979419 - DNA, 15 bp, Homo sapiens
cactggactccagcc

SEQ ID NO: 979420 - DNA, 15 bp, Homo sapiens
actggactccagcct

SEQ ID NO: 979421 - DNA, 15 bp, Homo sapiens
ctggactccagcctg

SEQ ID NO: 979422 - DNA, 15 bp, Homo sapiens
tggactccagcctgg

SEQ ID NO: 979423 - DNA, 15 bp, Homo sapiens
ggactccagcctggg

SEQ ID NO: 979424 - DNA, 15 bp, Homo sapiens
gactccagcctgggc

SEQ ID NO: 979425 - DNA, 15 bp, Homo sapiens
actccagcctgggcg

SEQ ID NO: 979426 - DNA, 15 bp, Homo sapiens
ctccagcctgggcga

SEQ ID NO: 979427 - DNA, 15 bp, Homo sapiens
tccagcctgggcgac

SEQ ID NO: 979428 - DNA, 15 bp, Homo sapiens
ccagcctgggcgaca

SEQ ID NO: 979429 - DNA, 15 bp, Homo sapiens
cagcctgggcgacag

SEQ ID NO: 979430 - DNA, 15 bp, Homo sapiens
agcctgggcgacaga

SEQ ID NO: 979431 - DNA, 15 bp, Homo sapiens
gcctgggcgacagag

SEQ ID NO: 979432 - DNA, 15 bp, Homo sapiens
cctgggcgacagagt

SEQ ID NO: 979433 - DNA, 15 bp, Homo sapiens
ctgggcgacagagtg

SEQ ID NO: 979434 - DNA, 15 bp, Homo sapiens
tgggcgacagagtga

SEQ ID NO: 979435 - DNA, 15 bp, Homo sapiens
gggcgacagagtgag

SEQ ID NO: 979436 - DNA, 15 bp, Homo sapiens
ggcgacagagtgaga

SEQ ID NO: 979437 - DNA, 15 bp, Homo sapiens
gcgacagagtgagac

SEQ ID NO: 979438 - DNA, 15 bp, Homo sapiens
cgacagagtgagaca

SEQ ID NO: 979439 - DNA, 15 bp, Homo sapiens
gacagagtgagacaa

SEQ ID NO: 979440 - DNA, 15 bp, Homo sapiens
acagagtgagacaac

SEQ ID NO: 979441 - DNA, 15 bp, Homo sapiens
cagagtgagacaacg

SEQ ID NO: 979442 - DNA, 15 bp, Homo sapiens
agagtgagacaacgt

SEQ ID NO: 979443 - DNA, 15 bp, Homo sapiens
gagtgagacaacgtg

SEQ ID NO: 979444 - DNA, 15 bp, Homo sapiens
agtgagacaacgtgt

SEQ ID NO: 979445 - DNA, 15 bp, Homo sapiens
gtgagacaacgtgtc

SEQ ID NO: 979446 - DNA, 15 bp, Homo sapiens
tgagacaacgtgtca

SEQ ID NO: 979447 - DNA, 15 bp, Homo sapiens
gagacaacgtgtcaa

SEQ ID NO: 979448 - DNA, 15 bp, Homo sapiens
agacaacgtgtcaaa

SEQ ID NO: 979449 - DNA, 15 bp, Homo sapiens
gacaacgtgtcaaaa

SEQ ID NO: 979450 - DNA, 15 bp, Homo sapiens
acaacgtgtcaaaaa

SEQ ID NO: 979451 - DNA, 15 bp, Homo sapiens
caacgtgtcaaaaaa

SEQ ID NO: 979452 - DNA, 15 bp, Homo sapiens
aacgtgtcaaaaaaa

SEQ ID NO: 979453 - DNA, 15 bp, Homo sapiens
acgtgtcaaaaaaaa

SEQ ID NO: 979454 - DNA, 15 bp, Homo sapiens
cgtgtcaaaaaaaaa

SEQ ID NO: 979455 - DNA, 15 bp, Homo sapiens
gtgtcaaaaaaaaaa

SEQ ID NO: 979456 - DNA, 15 bp, Homo sapiens
tgtcaaaaaaaaaaa

SEQ ID NO: 979457 - DNA, 15 bp, Homo sapiens
gtcaaaaaaaaaaaa

SEQ ID NO: 979458 - DNA, 15 bp, Homo sapiens
aaaaaaaaaaaaagt

SEQ ID NO: 979459 - DNA, 15 bp, Homo sapiens
aaaaaaaaaaaagtt

SEQ ID NO: 979460 - DNA, 15 bp, Homo sapiens
aaaaaaaaaaagtta

SEQ ID NO: 979461 - DNA, 15 bp, Homo sapiens
aaaaaaaaaagttag

SEQ ID NO: 979462 - DNA, 15 bp, Homo sapiens
aaaaaaaaagttagc

SEQ ID NO: 979463 - DNA, 15 bp, Homo sapiens
aaaaaaaagttagct

SEQ ID NO: 979464 - DNA, 15 bp, Homo sapiens
aaaaaaagttagctt

SEQ ID NO: 979465 - DNA, 15 bp, Homo sapiens
aaaaaagttagcttg

SEQ ID NO: 979466 - DNA, 15 bp, Homo sapiens
aaaaagttagcttga

SEQ ID NO: 979467 - DNA, 15 bp, Homo sapiens
aaaagttagcttgac

SEQ ID NO: 979468 - DNA, 15 bp, Homo sapiens
aaagttagcttgacc

SEQ ID NO: 979469 - DNA, 15 bp, Homo sapiens
aagttagcttgaccc

SEQ ID NO: 979470 - DNA, 15 bp, Homo sapiens
agttagcttgacccc

SEQ ID NO: 979471 - DNA, 15 bp, Homo sapiens
gttagcttgacccca

SEQ ID NO: 979472 - DNA, 15 bp, Homo sapiens
ttagcttgaccccac

SEQ ID NO: 979473 - DNA, 15 bp, Homo sapiens
tagcttgaccccact

SEQ ID NO: 979474 - DNA, 15 bp, Homo sapiens
agcttgaccccactc

SEQ ID NO: 979475 - DNA, 15 bp, Homo sapiens
gcttgaccccactcc

SEQ ID NO: 979476 - DNA, 15 bp, Homo sapiens
cttgaccccactcca

SEQ ID NO: 979477 - DNA, 15 bp, Homo sapiens
ttgaccccactccag

SEQ ID NO: 979478 - DNA, 15 bp, Homo sapiens
tgaccccactccagg

SEQ ID NO: 979479 - DNA, 15 bp, Homo sapiens
gaccccactccagga

SEQ ID NO: 979480 - DNA, 15 bp, Homo sapiens
accccactccaggaa

SEQ ID NO: 979481 - DNA, 15 bp, Homo sapiens
ccccactccaggaat

SEQ ID NO: 979482 - DNA, 15 bp, Homo sapiens
cccactccaggaatg

SEQ ID NO: 979483 - DNA, 15 bp, Homo sapiens
ccactccaggaatga

SEQ ID NO: 979484 - DNA, 15 bp, Homo sapiens
cactccaggaatgac

SEQ ID NO: 979485 - DNA, 15 bp, Homo sapiens
actccaggaatgacc

SEQ ID NO: 979486 - DNA, 15 bp, Homo sapiens
ctccaggaatgacca

SEQ ID NO: 979487 - DNA, 15 bp, Homo sapiens
tccaggaatgaccaa

SEQ ID NO: 979488 - DNA, 15 bp, Homo sapiens
ccaggaatgaccaag

SEQ ID NO: 979489 - DNA, 15 bp, Homo sapiens
caggaatgaccaagc

SEQ ID NO: 979490 - DNA, 15 bp, Homo sapiens
aggaatgaccaagca

SEQ ID NO: 979491 - DNA, 15 bp, Homo sapiens
ggaatgaccaagcaa

SEQ ID NO: 979492 - DNA, 15 bp, Homo sapiens
gaatgaccaagcaag

SEQ ID NO: 979493 - DNA, 15 bp, Homo sapiens
aatgaccaagcaagg

SEQ ID NO: 979494 - DNA, 15 bp, Homo sapiens
atgaccaagcaaggg

SEQ ID NO: 979495 - DNA, 15 bp, Homo sapiens
tgaccaagcaagggc

SEQ ID NO: 979496 - DNA, 15 bp, Homo sapiens
gaccaagcaagggca

SEQ ID NO: 979497 - DNA, 15 bp, Homo sapiens
accaagcaagggcag

SEQ ID NO: 979498 - DNA, 15 bp, Homo sapiens
ccaagcaagggcagt

SEQ ID NO: 979499 - DNA, 15 bp, Homo sapiens
caagcaagggcagtt

SEQ ID NO: 979500 - DNA, 15 bp, Homo sapiens
aagcaagggcagttt

SEQ ID NO: 979501 - DNA, 15 bp, Homo sapiens
agcaagggcagtttg

SEQ ID NO: 979502 - DNA, 15 bp, Homo sapiens
gcaagggcagtttgg

SEQ ID NO: 979503 - DNA, 15 bp, Homo sapiens
caagggcagtttgga

SEQ ID NO: 979504 - DNA, 15 bp, Homo sapiens
aagggcagtttggag

SEQ ID NO: 979505 - DNA, 15 bp, Homo sapiens
agggcagtttggaga

SEQ ID NO: 979506 - DNA, 15 bp, Homo sapiens
gggcagtttggagat

SEQ ID NO: 979507 - DNA, 15 bp, Homo sapiens
ggcagtttggagatt

SEQ ID NO: 979508 - DNA, 15 bp, Homo sapiens
gcagtttggagatta

SEQ ID NO: 979509 - DNA, 15 bp, Homo sapiens
cagtttggagattaa

SEQ ID NO: 979510 - DNA, 15 bp, Homo sapiens
agtttggagattaaa

SEQ ID NO: 979511 - DNA, 15 bp, Homo sapiens
gtttggagattaaag

SEQ ID NO: 979512 - DNA, 15 bp, Homo sapiens
tttggagattaaagg

SEQ ID NO: 979513 - DNA, 15 bp, Homo sapiens
ttggagattaaaggc

SEQ ID NO: 979514 - DNA, 15 bp, Homo sapiens
tggagattaaaggca

SEQ ID NO: 979515 - DNA, 15 bp, Homo sapiens
ggagattaaaggcaa

SEQ ID NO: 979516 - DNA, 15 bp, Homo sapiens
gagattaaaggcaag

SEQ ID NO: 979517 - DNA, 15 bp, Homo sapiens
agattaaaggcaaga

SEQ ID NO: 979518 - DNA, 15 bp, Homo sapiens
gattaaaggcaagat

SEQ ID NO: 979519 - DNA, 15 bp, Homo sapiens
attaaaggcaagatg

SEQ ID NO: 979520 - DNA, 15 bp, Homo sapiens
ttaaaggcaagatgg

SEQ ID NO: 979521 - DNA, 15 bp, Homo sapiens
taaaggcaagatgga

SEQ ID NO: 979522 - DNA, 15 bp, Homo sapiens
aaaggcaagatggag

SEQ ID NO: 979523 - DNA, 15 bp, Homo sapiens
aaggcaagatggagt

SEQ ID NO: 979524 - DNA, 15 bp, Homo sapiens
aggcaagatggagtt

SEQ ID NO: 979525 - DNA, 15 bp, Homo sapiens
ggcaagatggagttg

SEQ ID NO: 979526 - DNA, 15 bp, Homo sapiens
gcaagatggagttgg

SEQ ID NO: 979527 - DNA, 15 bp, Homo sapiens
caagatggagttggt

SEQ ID NO: 979528 - DNA, 15 bp, Homo sapiens
aagatggagttggtt

SEQ ID NO: 979529 - DNA, 15 bp, Homo sapiens
agatggagttggtta

SEQ ID NO: 979530 - DNA, 15 bp, Homo sapiens
gatggagttggttag

SEQ ID NO: 979531 - DNA, 15 bp, Homo sapiens
atggagttggttagg

SEQ ID NO: 979532 - DNA, 15 bp, Homo sapiens
tggagttggttaggt

SEQ ID NO: 979533 - DNA, 15 bp, Homo sapiens
ggagttggttaggtc

SEQ ID NO: 979534 - DNA, 15 bp, Homo sapiens
gagttggttaggtca

SEQ ID NO: 979535 - DNA, 15 bp, Homo sapiens
agttggttaggtcag

SEQ ID NO: 979536 - DNA, 15 bp, Homo sapiens
gttggttaggtcaga

SEQ ID NO: 979537 - DNA, 15 bp, Homo sapiens
ttggttaggtcagag

SEQ ID NO: 979538 - DNA, 15 bp, Homo sapiens
tggttaggtcagagc

SEQ ID NO: 979539 - DNA, 15 bp, Homo sapiens
ggttaggtcagagct

SEQ ID NO: 979540 - DNA, 15 bp, Homo sapiens
gttaggtcagagctc

SEQ ID NO: 979541 - DNA, 15 bp, Homo sapiens
ttaggtcagagctct

SEQ ID NO: 979542 - DNA, 15 bp, Homo sapiens
taggtcagagctctt

SEQ ID NO: 979543 - DNA, 15 bp, Homo sapiens
aggtcagagctcttt

SEQ ID NO: 979544 - DNA, 15 bp, Homo sapiens
ggtcagagctctttc

SEQ ID NO: 979545 - DNA, 15 bp, Homo sapiens
gtcagagctctttca

SEQ ID NO: 979546 - DNA, 15 bp, Homo sapiens
tcagagctctttcac

SEQ ID NO: 979547 - DNA, 15 bp, Homo sapiens
cagagctctttcact

SEQ ID NO: 979548 - DNA, 15 bp, Homo sapiens
agagctctttcactg

SEQ ID NO: 979549 - DNA, 15 bp, Homo sapiens
gagctctttcactga

SEQ ID NO: 979550 - DNA, 15 bp, Homo sapiens
agctctttcactgac

SEQ ID NO: 979551 - DNA, 15 bp, Homo sapiens
gctctttcactgaca

SEQ ID NO: 979552 - DNA, 15 bp, Homo sapiens
ctctttcactgacat

SEQ ID NO: 979553 - DNA, 15 bp, Homo sapiens
tctttcactgacata

SEQ ID NO: 979554 - DNA, 15 bp, Homo sapiens
ctttcactgacataa

SEQ ID NO: 979555 - DNA, 15 bp, Homo sapiens
tttcactgacataat

SEQ ID NO: 979556 - DNA, 15 bp, Homo sapiens
ttcactgacataatt

SEQ ID NO: 979557 - DNA, 15 bp, Homo sapiens
tcactgacataattt

SEQ ID NO: 979558 - DNA, 15 bp, Homo sapiens
cactgacataatttt

SEQ ID NO: 979559 - DNA, 15 bp, Homo sapiens
actgacataattttc

SEQ ID NO: 979560 - DNA, 15 bp, Homo sapiens
ctgacataattttct

SEQ ID NO: 979561 - DNA, 15 bp, Homo sapiens
tgacataattttctg

SEQ ID NO: 979562 - DNA, 15 bp, Homo sapiens
gacataattttctgt

SEQ ID NO: 979563 - DNA, 15 bp, Homo sapiens
acataattttctgtc

SEQ ID NO: 979564 - DNA, 15 bp, Homo sapiens
cataattttctgtca

SEQ ID NO: 979565 - DNA, 15 bp, Homo sapiens
ataattttctgtcat

SEQ ID NO: 979566 - DNA, 15 bp, Homo sapiens
taattttctgtcata

SEQ ID NO: 979567 - DNA, 15 bp, Homo sapiens
aattttctgtcataa

SEQ ID NO: 979568 - DNA, 15 bp, Homo sapiens
attttctgtcataat

SEQ ID NO: 979569 - DNA, 15 bp, Homo sapiens
ttttctgtcataatt

SEQ ID NO: 979570 - DNA, 15 bp, Homo sapiens
tttctgtcataattt

SEQ ID NO: 979571 - DNA, 15 bp, Homo sapiens
ttctgtcataatttt

SEQ ID NO: 979572 - DNA, 15 bp, Homo sapiens
tctgtcataattttt

SEQ ID NO: 979573 - DNA, 15 bp, Homo sapiens
ctgtcataatttttg

SEQ ID NO: 979574 - DNA, 15 bp, Homo sapiens
tgtcataatttttgc

SEQ ID NO: 979575 - DNA, 15 bp, Homo sapiens
gtcataatttttgca

SEQ ID NO: 979576 - DNA, 15 bp, Homo sapiens
tcataatttttgcaa

SEQ ID NO: 979577 - DNA, 15 bp, Homo sapiens
cataatttttgcaaa

SEQ ID NO: 979578 - DNA, 15 bp, Homo sapiens
ataatttttgcaaag

SEQ ID NO: 979579 - DNA, 15 bp, Homo sapiens
taatttttgcaaagg

SEQ ID NO: 979580 - DNA, 15 bp, Homo sapiens
aatttttgcaaaggc

SEQ ID NO: 979581 - DNA, 15 bp, Homo sapiens
atttttgcaaaggca

SEQ ID NO: 979582 - DNA, 15 bp, Homo sapiens
tttttgcaaaggcag

SEQ ID NO: 979583 - DNA, 15 bp, Homo sapiens
ttttgcaaaggcagt

SEQ ID NO: 979584 - DNA, 15 bp, Homo sapiens
tttgcaaaggcagtt

SEQ ID NO: 979585 - DNA, 15 bp, Homo sapiens
ttgcaaaggcagttt

SEQ ID NO: 979586 - DNA, 15 bp, Homo sapiens
tgcaaaggcagtttc

SEQ ID NO: 979587 - DNA, 15 bp, Homo sapiens
gcaaaggcagtttca

SEQ ID NO: 979588 - DNA, 15 bp, Homo sapiens
caaaggcagtttcaa

SEQ ID NO: 979589 - DNA, 15 bp, Homo sapiens
aaaggcagtttcaag

SEQ ID NO: 979590 - DNA, 15 bp, Homo sapiens
aaggcagtttcaagc

SEQ ID NO: 979591 - DNA, 15 bp, Homo sapiens
aggcagtttcaagcc

SEQ ID NO: 979592 - DNA, 15 bp, Homo sapiens
ggcagtttcaagcca

SEQ ID NO: 979593 - DNA, 15 bp, Homo sapiens
gcagtttcaagccag

SEQ ID NO: 979594 - DNA, 15 bp, Homo sapiens
cagtttcaagccagt

SEQ ID NO: 979595 - DNA, 15 bp, Homo sapiens
agtttcaagccagta

SEQ ID NO: 979596 - DNA, 15 bp, Homo sapiens
gtttcaagccagtac

SEQ ID NO: 979597 - DNA, 15 bp, Homo sapiens
tttcaagccagtact

SEQ ID NO: 979598 - DNA, 15 bp, Homo sapiens
ttcaagccagtactc

SEQ ID NO: 979599 - DNA, 15 bp, Homo sapiens
tcaagccagtactca

SEQ ID NO: 979600 - DNA, 15 bp, Homo sapiens
caagccagtactcag

SEQ ID NO: 979601 - DNA, 15 bp, Homo sapiens
aagccagtactcaga

SEQ ID NO: 979602 - DNA, 15 bp, Homo sapiens
agccagtactcagat

SEQ ID NO: 979603 - DNA, 15 bp, Homo sapiens
gccagtactcagatt

SEQ ID NO: 979604 - DNA, 15 bp, Homo sapiens
ccagtactcagattc

SEQ ID NO: 979605 - DNA, 15 bp, Homo sapiens
cagtactcagattcc

SEQ ID NO: 979606 - DNA, 15 bp, Homo sapiens
agtactcagattccc

SEQ ID NO: 979607 - DNA, 15 bp, Homo sapiens
gtactcagattccca

SEQ ID NO: 979608 - DNA, 15 bp, Homo sapiens
tactcagattcccat

SEQ ID NO: 979609 - DNA, 15 bp, Homo sapiens
actcagattcccata

SEQ ID NO: 979610 - DNA, 15 bp, Homo sapiens
ctcagattcccatag

SEQ ID NO: 979611 - DNA, 15 bp, Homo sapiens
tcagattcccatagc

SEQ ID NO: 979612 - DNA, 15 bp, Homo sapiens
cagattcccatagcc

SEQ ID NO: 979613 - DNA, 15 bp, Homo sapiens
agattcccatagccc

SEQ ID NO: 979614 - DNA, 15 bp, Homo sapiens
gattcccatagccct

SEQ ID NO: 979615 - DNA, 15 bp, Homo sapiens
attcccatagccctt

SEQ ID NO: 979616 - DNA, 15 bp, Homo sapiens
ttcccatagcccttt

SEQ ID NO: 979617 - DNA, 15 bp, Homo sapiens
tcccatagccctttg

SEQ ID NO: 979618 - DNA, 15 bp, Homo sapiens
cccatagccctttgc

SEQ ID NO: 979619 - DNA, 15 bp, Homo sapiens
ccatagccctttgcc

SEQ ID NO: 979620 - DNA, 15 bp, Homo sapiens
catagccctttgccc

SEQ ID NO: 979621 - DNA, 15 bp, Homo sapiens
atagccctttgccct

SEQ ID NO: 979622 - DNA, 15 bp, Homo sapiens
tagccctttgccctg

SEQ ID NO: 979623 - DNA, 15 bp, Homo sapiens
agccctttgccctgc

SEQ ID NO: 979624 - DNA, 15 bp, Homo sapiens
gccctttgccctgcc

SEQ ID NO: 979625 - DNA, 15 bp, Homo sapiens
ccctttgccctgcca

SEQ ID NO: 979626 - DNA, 15 bp, Homo sapiens
cctttgccctgccat

SEQ ID NO: 979627 - DNA, 15 bp, Homo sapiens
ctttgccctgccatg

SEQ ID NO: 979628 - DNA, 15 bp, Homo sapiens
tttgccctgccatga

SEQ ID NO: 979629 - DNA, 15 bp, Homo sapiens
ttgccctgccatgat

SEQ ID NO: 979630 - DNA, 15 bp, Homo sapiens
tgccctgccatgatc

SEQ ID NO: 979631 - DNA, 15 bp, Homo sapiens
gccctgccatgatcc

SEQ ID NO: 979632 - DNA, 15 bp, Homo sapiens
ccctgccatgatcct

SEQ ID NO: 979633 - DNA, 15 bp, Homo sapiens
cctgccatgatcctt

SEQ ID NO: 979634 - DNA, 15 bp, Homo sapiens
ctgccatgatccttt

SEQ ID NO: 979635 - DNA, 15 bp, Homo sapiens
tgccatgatcctttg

SEQ ID NO: 979636 - DNA, 15 bp, Homo sapiens
gccatgatcctttga

SEQ ID NO: 979637 - DNA, 15 bp, Homo sapiens
ccatgatcctttgag

SEQ ID NO: 979638 - DNA, 15 bp, Homo sapiens
catgatcctttgagg

SEQ ID NO: 979639 - DNA, 15 bp, Homo sapiens
atgatcctttgaggc

SEQ ID NO: 979640 - DNA, 15 bp, Homo sapiens
tgatcctttgaggct

SEQ ID NO: 979641 - DNA, 15 bp, Homo sapiens
gatcctttgaggctg

SEQ ID NO: 979642 - DNA, 15 bp, Homo sapiens
atcctttgaggctga

SEQ ID NO: 979643 - DNA, 15 bp, Homo sapiens
tcctttgaggctgag

SEQ ID NO: 979644 - DNA, 15 bp, Homo sapiens
cctttgaggctgagg

SEQ ID NO: 979645 - DNA, 15 bp, Homo sapiens
ctttgaggctgaggt

SEQ ID NO: 979646 - DNA, 15 bp, Homo sapiens
tttgaggctgaggtg

SEQ ID NO: 979647 - DNA, 15 bp, Homo sapiens
ttgaggctgaggtgg

SEQ ID NO: 979648 - DNA, 15 bp, Homo sapiens
tgaggctgaggtggg

SEQ ID NO: 979649 - DNA, 15 bp, Homo sapiens
gaggctgaggtggga

SEQ ID NO: 979650 - DNA, 15 bp, Homo sapiens
aggctgaggtgggag

SEQ ID NO: 979651 - DNA, 15 bp, Homo sapiens
ggctgaggtgggaga

SEQ ID NO: 979652 - DNA, 15 bp, Homo sapiens
gctgaggtgggagaa

SEQ ID NO: 979653 - DNA, 15 bp, Homo sapiens
ctgaggtgggagaat

SEQ ID NO: 979654 - DNA, 15 bp, Homo sapiens
tgaggtgggagaatc

SEQ ID NO: 979655 - DNA, 15 bp, Homo sapiens
gaggtgggagaatca

SEQ ID NO: 979656 - DNA, 15 bp, Homo sapiens
aggtgggagaatcac

SEQ ID NO: 979657 - DNA, 15 bp, Homo sapiens
ggtgggagaatcact

SEQ ID NO: 979658 - DNA, 15 bp, Homo sapiens
gtgggagaatcactt

SEQ ID NO: 979659 - DNA, 15 bp, Homo sapiens
tgggagaatcacttg

SEQ ID NO: 979660 - DNA, 15 bp, Homo sapiens
gggagaatcacttga

SEQ ID NO: 979661 - DNA, 15 bp, Homo sapiens
aatcacttgaacccc

SEQ ID NO: 979662 - DNA, 15 bp, Homo sapiens
atcacttgaaccccg

SEQ ID NO: 979663 - DNA, 15 bp, Homo sapiens
tcacttgaaccccgg

SEQ ID NO: 979664 - DNA, 15 bp, Homo sapiens
cacttgaaccccgga

SEQ ID NO: 979665 - DNA, 15 bp, Homo sapiens
acttgaaccccggag

SEQ ID NO: 979666 - DNA, 15 bp, Homo sapiens
cttgaaccccggagt

SEQ ID NO: 979667 - DNA, 15 bp, Homo sapiens
ttgaaccccggagtt

SEQ ID NO: 979668 - DNA, 15 bp, Homo sapiens
tgaaccccggagttc

SEQ ID NO: 979669 - DNA, 15 bp, Homo sapiens
gaaccccggagttcc

SEQ ID NO: 979670 - DNA, 15 bp, Homo sapiens
aaccccggagttcca

SEQ ID NO: 979671 - DNA, 15 bp, Homo sapiens
accccggagttccag

SEQ ID NO: 979672 - DNA, 15 bp, Homo sapiens
ccccggagttccaga

SEQ ID NO: 979673 - DNA, 15 bp, Homo sapiens
cccggagttccagag

SEQ ID NO: 979674 - DNA, 15 bp, Homo sapiens
ccggagttccagagc

SEQ ID NO: 979675 - DNA, 15 bp, Homo sapiens
cggagttccagagca

SEQ ID NO: 979676 - DNA, 15 bp, Homo sapiens
ggagttccagagcag

SEQ ID NO: 979677 - DNA, 15 bp, Homo sapiens
gagttccagagcagc

SEQ ID NO: 979678 - DNA, 15 bp, Homo sapiens
agttccagagcagcc

SEQ ID NO: 979679 - DNA, 15 bp, Homo sapiens
gttccagagcagcct

SEQ ID NO: 979680 - DNA, 15 bp, Homo sapiens
ttccagagcagcctg

SEQ ID NO: 979681 - DNA, 15 bp, Homo sapiens
tccagagcagcctgg

SEQ ID NO: 979682 - DNA, 15 bp, Homo sapiens
ccagagcagcctggg

SEQ ID NO: 979683 - DNA, 15 bp, Homo sapiens
cagagcagcctgggc

SEQ ID NO: 979684 - DNA, 15 bp, Homo sapiens
agagcagcctgggca

SEQ ID NO: 979685 - DNA, 15 bp, Homo sapiens
gagcagcctgggcaa

SEQ ID NO: 979686 - DNA, 15 bp, Homo sapiens
agcagcctgggcaac

SEQ ID NO: 979687 - DNA, 15 bp, Homo sapiens
gcagcctgggcaaca

SEQ ID NO: 979688 - DNA, 15 bp, Homo sapiens
cagcctgggcaacat

SEQ ID NO: 979689 - DNA, 15 bp, Homo sapiens
agcctgggcaacata

SEQ ID NO: 979690 - DNA, 15 bp, Homo sapiens
gcctgggcaacatag

SEQ ID NO: 979691 - DNA, 15 bp, Homo sapiens
cctgggcaacatagt

SEQ ID NO: 979692 - DNA, 15 bp, Homo sapiens
ctgggcaacatagtg

SEQ ID NO: 979693 - DNA, 15 bp, Homo sapiens
tgggcaacatagtga

SEQ ID NO: 979694 - DNA, 15 bp, Homo sapiens
gggcaacatagtgag

SEQ ID NO: 979695 - DNA, 15 bp, Homo sapiens
ggcaacatagtgaga

SEQ ID NO: 979696 - DNA, 15 bp, Homo sapiens
gcaacatagtgagac

SEQ ID NO: 979697 - DNA, 15 bp, Homo sapiens
caacatagtgagacc

SEQ ID NO: 979698 - DNA, 15 bp, Homo sapiens
aacatagtgagaccc

SEQ ID NO: 979699 - DNA, 15 bp, Homo sapiens
acatagtgagaccct

SEQ ID NO: 979700 - DNA, 15 bp, Homo sapiens
catagtgagaccctc

SEQ ID NO: 979701 - DNA, 15 bp, Homo sapiens
atagtgagaccctca

SEQ ID NO: 979702 - DNA, 15 bp, Homo sapiens
tagtgagaccctcat

SEQ ID NO: 979703 - DNA, 15 bp, Homo sapiens
agtgagaccctcatc

SEQ ID NO: 979704 - DNA, 15 bp, Homo sapiens
gtgagaccctcatct

SEQ ID NO: 979705 - DNA, 15 bp, Homo sapiens
tgagaccctcatctc

SEQ ID NO: 979706 - DNA, 15 bp, Homo sapiens
gagaccctcatctct

SEQ ID NO: 979707 - DNA, 15 bp, Homo sapiens
agaccctcatctctg

SEQ ID NO: 979708 - DNA, 15 bp, Homo sapiens
gaccctcatctctgc

SEQ ID NO: 979709 - DNA, 15 bp, Homo sapiens
accctcatctctgca

SEQ ID NO: 979710 - DNA, 15 bp, Homo sapiens
ccctcatctctgcaa

SEQ ID NO: 979711 - DNA, 15 bp, Homo sapiens
cctcatctctgcaat

SEQ ID NO: 979712 - DNA, 15 bp, Homo sapiens
ctcatctctgcaatg

SEQ ID NO: 979713 - DNA, 15 bp, Homo sapiens
tcatctctgcaatga

SEQ ID NO: 979714 - DNA, 15 bp, Homo sapiens
catctctgcaatgaa

SEQ ID NO: 979715 - DNA, 15 bp, Homo sapiens
atctctgcaatgaac

SEQ ID NO: 979716 - DNA, 15 bp, Homo sapiens
tctctgcaatgaaca

SEQ ID NO: 979717 - DNA, 15 bp, Homo sapiens
ctctgcaatgaacaa

SEQ ID NO: 979718 - DNA, 15 bp, Homo sapiens
tctgcaatgaacaat

SEQ ID NO: 979719 - DNA, 15 bp, Homo sapiens
ctgcaatgaacaatt

SEQ ID NO: 979720 - DNA, 15 bp, Homo sapiens
tgcaatgaacaatta

SEQ ID NO: 979721 - DNA, 15 bp, Homo sapiens
gcaatgaacaattat

SEQ ID NO: 979722 - DNA, 15 bp, Homo sapiens
caatgaacaattatc

SEQ ID NO: 979723 - DNA, 15 bp, Homo sapiens
aatgaacaattatct

SEQ ID NO: 979724 - DNA, 15 bp, Homo sapiens
atgaacaattatctg

SEQ ID NO: 979725 - DNA, 15 bp, Homo sapiens
tgaacaattatctgg

SEQ ID NO: 979726 - DNA, 15 bp, Homo sapiens
gaacaattatctggg

SEQ ID NO: 979727 - DNA, 15 bp, Homo sapiens
aacaattatctgggt

SEQ ID NO: 979728 - DNA, 15 bp, Homo sapiens
acaattatctgggtg

SEQ ID NO: 979729 - DNA, 15 bp, Homo sapiens
caattatctgggtgt

SEQ ID NO: 979730 - DNA, 15 bp, Homo sapiens
aattatctgggtgtg

SEQ ID NO: 979731 - DNA, 15 bp, Homo sapiens
attatctgggtgtgg

SEQ ID NO: 979732 - DNA, 15 bp, Homo sapiens
ttatctgggtgtggt

SEQ ID NO: 979733 - DNA, 15 bp, Homo sapiens
tatctgggtgtggtg

SEQ ID NO: 979734 - DNA, 15 bp, Homo sapiens
atctgggtgtggtgg

SEQ ID NO: 979735 - DNA, 15 bp, Homo sapiens
tctgggtgtggtggc

SEQ ID NO: 979736 - DNA, 15 bp, Homo sapiens
ctgggtgtggtggca

SEQ ID NO: 979737 - DNA, 15 bp, Homo sapiens
tgggtgtggtggcac

SEQ ID NO: 979738 - DNA, 15 bp, Homo sapiens
gggtgtggtggcaca

SEQ ID NO: 979739 - DNA, 15 bp, Homo sapiens
ggtgtggtggcacag

SEQ ID NO: 979740 - DNA, 15 bp, Homo sapiens
gtgtggtggcacagg

SEQ ID NO: 979741 - DNA, 15 bp, Homo sapiens
tgtggtggcacaggc

SEQ ID NO: 979742 - DNA, 15 bp, Homo sapiens
gtggtggcacaggcc

SEQ ID NO: 979743 - DNA, 15 bp, Homo sapiens
tggtggcacaggcct

SEQ ID NO: 979744 - DNA, 15 bp, Homo sapiens
ggtggcacaggcctg

SEQ ID NO: 979745 - DNA, 15 bp, Homo sapiens
gtggcacaggcctgt

SEQ ID NO: 979746 - DNA, 15 bp, Homo sapiens
tggcacaggcctgta

SEQ ID NO: 979747 - DNA, 15 bp, Homo sapiens
ggcacaggcctgtag

SEQ ID NO: 979748 - DNA, 15 bp, Homo sapiens
gcacaggcctgtagt

SEQ ID NO: 979749 - DNA, 15 bp, Homo sapiens
cacaggcctgtagta

SEQ ID NO: 979750 - DNA, 15 bp, Homo sapiens
acaggcctgtagtac

SEQ ID NO: 979751 - DNA, 15 bp, Homo sapiens
caggcctgtagtacc

SEQ ID NO: 979752 - DNA, 15 bp, Homo sapiens
aggcctgtagtacca

SEQ ID NO: 979753 - DNA, 15 bp, Homo sapiens
ggcctgtagtaccag

SEQ ID NO: 979754 - DNA, 15 bp, Homo sapiens
gcctgtagtaccagc

SEQ ID NO: 979755 - DNA, 15 bp, Homo sapiens
cctgtagtaccagct

SEQ ID NO: 979756 - DNA, 15 bp, Homo sapiens
ctgtagtaccagcta

SEQ ID NO: 979757 - DNA, 15 bp, Homo sapiens
tgtagtaccagctac

SEQ ID NO: 979758 - DNA, 15 bp, Homo sapiens
gtagtaccagctacc

SEQ ID NO: 979759 - DNA, 15 bp, Homo sapiens
tagtaccagctacct

SEQ ID NO: 979760 - DNA, 15 bp, Homo sapiens
agtaccagctacctg

SEQ ID NO: 979761 - DNA, 15 bp, Homo sapiens
gtaccagctacctgg

SEQ ID NO: 979762 - DNA, 15 bp, Homo sapiens
taccagctacctggg

SEQ ID NO: 979763 - DNA, 15 bp, Homo sapiens
accagctacctggga

SEQ ID NO: 979764 - DNA, 15 bp, Homo sapiens
ccagctacctgggaa

SEQ ID NO: 979765 - DNA, 15 bp, Homo sapiens
cagctacctgggaag

SEQ ID NO: 979766 - DNA, 15 bp, Homo sapiens
agctacctgggaaga

SEQ ID NO: 979767 - DNA, 15 bp, Homo sapiens
gctacctgggaagat

SEQ ID NO: 979768 - DNA, 15 bp, Homo sapiens
ctacctgggaagatc

SEQ ID NO: 979769 - DNA, 15 bp, Homo sapiens
tacctgggaagatct

SEQ ID NO: 979770 - DNA, 15 bp, Homo sapiens
acctgggaagatctc

SEQ ID NO: 979771 - DNA, 15 bp, Homo sapiens
cctgggaagatctct

SEQ ID NO: 979772 - DNA, 15 bp, Homo sapiens
ctgggaagatctctt

SEQ ID NO: 979773 - DNA, 15 bp, Homo sapiens
tgggaagatctcttg

SEQ ID NO: 979774 - DNA, 15 bp, Homo sapiens
gggaagatctcttga

SEQ ID NO: 979775 - DNA, 15 bp, Homo sapiens
ggaagatctcttgag

SEQ ID NO: 979776 - DNA, 15 bp, Homo sapiens
gaagatctcttgagc

SEQ ID NO: 979777 - DNA, 15 bp, Homo sapiens
aagatctcttgagcc

SEQ ID NO: 979778 - DNA, 15 bp, Homo sapiens
agatctcttgagccc

SEQ ID NO: 979779 - DNA, 15 bp, Homo sapiens
gatctcttgagccca

SEQ ID NO: 979780 - DNA, 15 bp, Homo sapiens
atctcttgagcccag

SEQ ID NO: 979781 - DNA, 15 bp, Homo sapiens
tctcttgagcccagt

SEQ ID NO: 979782 - DNA, 15 bp, Homo sapiens
ctcttgagcccagta

SEQ ID NO: 979783 - DNA, 15 bp, Homo sapiens
tcttgagcccagtag

SEQ ID NO: 979784 - DNA, 15 bp, Homo sapiens
cttgagcccagtagg

SEQ ID NO: 979785 - DNA, 15 bp, Homo sapiens
ttgagcccagtaggt

SEQ ID NO: 979786 - DNA, 15 bp, Homo sapiens
tgagcccagtaggtt

SEQ ID NO: 979787 - DNA, 15 bp, Homo sapiens
gagcccagtaggttg

SEQ ID NO: 979788 - DNA, 15 bp, Homo sapiens
agcccagtaggttga

SEQ ID NO: 979789 - DNA, 15 bp, Homo sapiens
gcccagtaggttgag

SEQ ID NO: 979790 - DNA, 15 bp, Homo sapiens
cccagtaggttgagg

SEQ ID NO: 979791 - DNA, 15 bp, Homo sapiens
ccagtaggttgaggc

SEQ ID NO: 979792 - DNA, 15 bp, Homo sapiens
cagtaggttgaggct

SEQ ID NO: 979793 - DNA, 15 bp, Homo sapiens
agtaggttgaggctg

SEQ ID NO: 979794 - DNA, 15 bp, Homo sapiens
gtaggttgaggctgc

SEQ ID NO: 979795 - DNA, 15 bp, Homo sapiens
taggttgaggctgca

SEQ ID NO: 979796 - DNA, 15 bp, Homo sapiens
aggttgaggctgcag

SEQ ID NO: 979797 - DNA, 15 bp, Homo sapiens
ggttgaggctgcagt

SEQ ID NO: 979798 - DNA, 15 bp, Homo sapiens
gttgaggctgcagtg

SEQ ID NO: 979799 - DNA, 15 bp, Homo sapiens
ttgaggctgcagtga

SEQ ID NO: 979800 - DNA, 15 bp, Homo sapiens
tgaggctgcagtgaa

SEQ ID NO: 979801 - DNA, 15 bp, Homo sapiens
gaggctgcagtgaac

SEQ ID NO: 979802 - DNA, 15 bp, Homo sapiens
aggctgcagtgaact

SEQ ID NO: 979803 - DNA, 15 bp, Homo sapiens
ggctgcagtgaactg

SEQ ID NO: 979804 - DNA, 15 bp, Homo sapiens
gctgcagtgaactgt

SEQ ID NO: 979805 - DNA, 15 bp, Homo sapiens
ctgcagtgaactgtg

SEQ ID NO: 979806 - DNA, 15 bp, Homo sapiens
tgcagtgaactgtga

SEQ ID NO: 979807 - DNA, 15 bp, Homo sapiens
gcagtgaactgtgat

SEQ ID NO: 979808 - DNA, 15 bp, Homo sapiens
cagtgaactgtgatg

SEQ ID NO: 979809 - DNA, 15 bp, Homo sapiens
agtgaactgtgatgg

SEQ ID NO: 979810 - DNA, 15 bp, Homo sapiens
gtgaactgtgatgga

SEQ ID NO: 979811 - DNA, 15 bp, Homo sapiens
tgaactgtgatggag

SEQ ID NO: 979812 - DNA, 15 bp, Homo sapiens
gaactgtgatggagt

SEQ ID NO: 979813 - DNA, 15 bp, Homo sapiens
aactgtgatggagtc

SEQ ID NO: 979814 - DNA, 15 bp, Homo sapiens
actgtgatggagtca

SEQ ID NO: 979815 - DNA, 15 bp, Homo sapiens
ctgtgatggagtcac

SEQ ID NO: 979816 - DNA, 15 bp, Homo sapiens
tgtgatggagtcact

SEQ ID NO: 979817 - DNA, 15 bp, Homo sapiens
gtgatggagtcactg

SEQ ID NO: 979818 - DNA, 15 bp, Homo sapiens
tgatggagtcactgc

SEQ ID NO: 979819 - DNA, 15 bp, Homo sapiens
gatggagtcactgca

SEQ ID NO: 979820 - DNA, 15 bp, Homo sapiens
atggagtcactgcat

SEQ ID NO: 979821 - DNA, 15 bp, Homo sapiens
tggagtcactgcatt

SEQ ID NO: 979822 - DNA, 15 bp, Homo sapiens
ggagtcactgcattc

SEQ ID NO: 979823 - DNA, 15 bp, Homo sapiens
gagtcactgcattct

SEQ ID NO: 979824 - DNA, 15 bp, Homo sapiens
agtcactgcattcta

SEQ ID NO: 979825 - DNA, 15 bp, Homo sapiens
gtcactgcattctag

SEQ ID NO: 979826 - DNA, 15 bp, Homo sapiens
tcactgcattctagc

SEQ ID NO: 979827 - DNA, 15 bp, Homo sapiens
cactgcattctagcc

SEQ ID NO: 979828 - DNA, 15 bp, Homo sapiens
actgcattctagcct

SEQ ID NO: 979829 - DNA, 15 bp, Homo sapiens
ctgcattctagcctg

SEQ ID NO: 979830 - DNA, 15 bp, Homo sapiens
tgcattctagcctgg

SEQ ID NO: 979831 - DNA, 15 bp, Homo sapiens
gcattctagcctggg

SEQ ID NO: 979832 - DNA, 15 bp, Homo sapiens
cattctagcctgggt

SEQ ID NO: 979833 - DNA, 15 bp, Homo sapiens
attctagcctgggtg

SEQ ID NO: 979834 - DNA, 15 bp, Homo sapiens
ttctagcctgggtga

SEQ ID NO: 979835 - DNA, 15 bp, Homo sapiens
tctagcctgggtgag

SEQ ID NO: 979836 - DNA, 15 bp, Homo sapiens
ctagcctgggtgaga

SEQ ID NO: 979837 - DNA, 15 bp, Homo sapiens
tagcctgggtgagaa

SEQ ID NO: 979838 - DNA, 15 bp, Homo sapiens
agcctgggtgagaaa

SEQ ID NO: 979839 - DNA, 15 bp, Homo sapiens
gcctgggtgagaaac

SEQ ID NO: 979840 - DNA, 15 bp, Homo sapiens
cctgggtgagaaacc

SEQ ID NO: 979841 - DNA, 15 bp, Homo sapiens
ctgggtgagaaacca

SEQ ID NO: 979842 - DNA, 15 bp, Homo sapiens
tgggtgagaaaccat

SEQ ID NO: 979843 - DNA, 15 bp, Homo sapiens
gggtgagaaaccatt

SEQ ID NO: 979844 - DNA, 15 bp, Homo sapiens
ggtgagaaaccatta

SEQ ID NO: 979845 - DNA, 15 bp, Homo sapiens
gtgagaaaccattat

SEQ ID NO: 979846 - DNA, 15 bp, Homo sapiens
tgagaaaccattatc

SEQ ID NO: 979847 - DNA, 15 bp, Homo sapiens
gagaaaccattatcc

SEQ ID NO: 979848 - DNA, 15 bp, Homo sapiens
agaaaccattatcct

SEQ ID NO: 979849 - DNA, 15 bp, Homo sapiens
gaaaccattatcctg

SEQ ID NO: 979850 - DNA, 15 bp, Homo sapiens
aaaccattatcctgt

SEQ ID NO: 979851 - DNA, 15 bp, Homo sapiens
aaccattatcctgtc

SEQ ID NO: 979852 - DNA, 15 bp, Homo sapiens
accattatcctgtct

SEQ ID NO: 979853 - DNA, 15 bp, Homo sapiens
ccattatcctgtctc

SEQ ID NO: 979854 - DNA, 15 bp, Homo sapiens
cattatcctgtctca

SEQ ID NO: 979855 - DNA, 15 bp, Homo sapiens
attatcctgtctcaa

SEQ ID NO: 979856 - DNA, 15 bp, Homo sapiens
ttatcctgtctcaaa

SEQ ID NO: 979857 - DNA, 15 bp, Homo sapiens
tatcctgtctcaaaa

SEQ ID NO: 979858 - DNA, 15 bp, Homo sapiens
atcctgtctcaaaac

SEQ ID NO: 979859 - DNA, 15 bp, Homo sapiens
tcctgtctcaaaacg

SEQ ID NO: 979860 - DNA, 15 bp, Homo sapiens
cctgtctcaaaacga

SEQ ID NO: 979861 - DNA, 15 bp, Homo sapiens
ctgtctcaaaacgac

SEQ ID NO: 979862 - DNA, 15 bp, Homo sapiens
tgtctcaaaacgaca

SEQ ID NO: 979863 - DNA, 15 bp, Homo sapiens
gtctcaaaacgacaa

SEQ ID NO: 979864 - DNA, 15 bp, Homo sapiens
tctcaaaacgacaaa

SEQ ID NO: 979865 - DNA, 15 bp, Homo sapiens
ctcaaaacgacaaaa

SEQ ID NO: 979866 - DNA, 15 bp, Homo sapiens
tcaaaacgacaaaaa

SEQ ID NO: 979867 - DNA, 15 bp, Homo sapiens
caaaacgacaaaaaa

SEQ ID NO: 979868 - DNA, 15 bp, Homo sapiens
aaaacgacaaaaaac

SEQ ID NO: 979869 - DNA, 15 bp, Homo sapiens
aaacgacaaaaaaca

SEQ ID NO: 979870 - DNA, 15 bp, Homo sapiens
aacgacaaaaaacaa

SEQ ID NO: 979871 - DNA, 15 bp, Homo sapiens
acgacaaaaaacaaa

SEQ ID NO: 979872 - DNA, 15 bp, Homo sapiens
cgacaaaaaacaaac

SEQ ID NO: 979873 - DNA, 15 bp, Homo sapiens
gacaaaaaacaaaca

SEQ ID NO: 979874 - DNA, 15 bp, Homo sapiens
acaaaaaacaaacat

SEQ ID NO: 979875 - DNA, 15 bp, Homo sapiens
caaaaaacaaacata

SEQ ID NO: 979876 - DNA, 15 bp, Homo sapiens
aaaaaacaaacatac

SEQ ID NO: 979877 - DNA, 15 bp, Homo sapiens
aaaaacaaacataca

SEQ ID NO: 979878 - DNA, 15 bp, Homo sapiens
aaaacaaacatacag

SEQ ID NO: 979879 - DNA, 15 bp, Homo sapiens
aaacaaacatacagt

SEQ ID NO: 979880 - DNA, 15 bp, Homo sapiens
aacaaacatacagtc

SEQ ID NO: 979881 - DNA, 15 bp, Homo sapiens
acaaacatacagtca

SEQ ID NO: 979882 - DNA, 15 bp, Homo sapiens
caaacatacagtcac

SEQ ID NO: 979883 - DNA, 15 bp, Homo sapiens
aaacatacagtcacc

SEQ ID NO: 979884 - DNA, 15 bp, Homo sapiens
aacatacagtcacct

SEQ ID NO: 979885 - DNA, 15 bp, Homo sapiens
acatacagtcacctc

SEQ ID NO: 979886 - DNA, 15 bp, Homo sapiens
catacagtcacctct

SEQ ID NO: 979887 - DNA, 15 bp, Homo sapiens
atacagtcacctctt

SEQ ID NO: 979888 - DNA, 15 bp, Homo sapiens
tacagtcacctcttt

SEQ ID NO: 979889 - DNA, 15 bp, Homo sapiens
acagtcacctctttg

SEQ ID NO: 979890 - DNA, 15 bp, Homo sapiens
cagtcacctctttgc

SEQ ID NO: 979891 - DNA, 15 bp, Homo sapiens
agtcacctctttgct

SEQ ID NO: 979892 - DNA, 15 bp, Homo sapiens
gtcacctctttgcta

SEQ ID NO: 979893 - DNA, 15 bp, Homo sapiens
tcacctctttgctag

SEQ ID NO: 979894 - DNA, 15 bp, Homo sapiens
cacctctttgctagc

SEQ ID NO: 979895 - DNA, 15 bp, Homo sapiens
acctctttgctagct

SEQ ID NO: 979896 - DNA, 15 bp, Homo sapiens
cctctttgctagctc

SEQ ID NO: 979897 - DNA, 15 bp, Homo sapiens
ctctttgctagctca

SEQ ID NO: 979898 - DNA, 15 bp, Homo sapiens
tctttgctagctcag

SEQ ID NO: 979899 - DNA, 15 bp, Homo sapiens
ctttgctagctcagg

SEQ ID NO: 979900 - DNA, 15 bp, Homo sapiens
tttgctagctcaggg

SEQ ID NO: 979901 - DNA, 15 bp, Homo sapiens
ttgctagctcagggg

SEQ ID NO: 979902 - DNA, 15 bp, Homo sapiens
tgctagctcagggga

SEQ ID NO: 979903 - DNA, 15 bp, Homo sapiens
gctagctcaggggat

SEQ ID NO: 979904 - DNA, 15 bp, Homo sapiens
ctagctcaggggatc

SEQ ID NO: 979905 - DNA, 15 bp, Homo sapiens
tagctcaggggatcc

SEQ ID NO: 979906 - DNA, 15 bp, Homo sapiens
agctcaggggatcct

SEQ ID NO: 979907 - DNA, 15 bp, Homo sapiens
gctcaggggatcctg

SEQ ID NO: 979908 - DNA, 15 bp, Homo sapiens
ctcaggggatcctgg

SEQ ID NO: 979909 - DNA, 15 bp, Homo sapiens
tcaggggatcctgga

SEQ ID NO: 979910 - DNA, 15 bp, Homo sapiens
caggggatcctggag

SEQ ID NO: 979911 - DNA, 15 bp, Homo sapiens
aggggatcctggaga

SEQ ID NO: 979912 - DNA, 15 bp, Homo sapiens
ggggatcctggagaa

SEQ ID NO: 979913 - DNA, 15 bp, Homo sapiens
gggatcctggagaaa

SEQ ID NO: 979914 - DNA, 15 bp, Homo sapiens
ggatcctggagaaaa

SEQ ID NO: 979915 - DNA, 15 bp, Homo sapiens
gatcctggagaaaac

SEQ ID NO: 979916 - DNA, 15 bp, Homo sapiens
atcctggagaaaacg

SEQ ID NO: 979917 - DNA, 15 bp, Homo sapiens
tcctggagaaaacgt

SEQ ID NO: 979918 - DNA, 15 bp, Homo sapiens
cctggagaaaacgtg

SEQ ID NO: 979919 - DNA, 15 bp, Homo sapiens
ctggagaaaacgtgc

SEQ ID NO: 979920 - DNA, 15 bp, Homo sapiens
tggagaaaacgtgca

SEQ ID NO: 979921 - DNA, 15 bp, Homo sapiens
ggagaaaacgtgcag

SEQ ID NO: 979922 - DNA, 15 bp, Homo sapiens
gagaaaacgtgcaga

SEQ ID NO: 979923 - DNA, 15 bp, Homo sapiens
agaaaacgtgcagaa

SEQ ID NO: 979924 - DNA, 15 bp, Homo sapiens
gaaaacgtgcagaat

SEQ ID NO: 979925 - DNA, 15 bp, Homo sapiens
aaaacgtgcagaatg

SEQ ID NO: 979926 - DNA, 15 bp, Homo sapiens
aaacgtgcagaatga

SEQ ID NO: 979927 - DNA, 15 bp, Homo sapiens
aacgtgcagaatgaa

SEQ ID NO: 979928 - DNA, 15 bp, Homo sapiens
acgtgcagaatgaaa

SEQ ID NO: 979929 - DNA, 15 bp, Homo sapiens
cgtgcagaatgaaaa

SEQ ID NO: 979930 - DNA, 15 bp, Homo sapiens
gtgcagaatgaaaaa

SEQ ID NO: 979931 - DNA, 15 bp, Homo sapiens
tgcagaatgaaaaag

SEQ ID NO: 979932 - DNA, 15 bp, Homo sapiens
gcagaatgaaaaagg

SEQ ID NO: 979933 - DNA, 15 bp, Homo sapiens
cagaatgaaaaagga

SEQ ID NO: 979934 - DNA, 15 bp, Homo sapiens
agaatgaaaaaggag

SEQ ID NO: 979935 - DNA, 15 bp, Homo sapiens
gaatgaaaaaggaga

SEQ ID NO: 979936 - DNA, 15 bp, Homo sapiens
aatgaaaaaggagag

SEQ ID NO: 979937 - DNA, 15 bp, Homo sapiens
atgaaaaaggagagt

SEQ ID NO: 979938 - DNA, 15 bp, Homo sapiens
tgaaaaaggagagtc

SEQ ID NO: 979939 - DNA, 15 bp, Homo sapiens
gaaaaaggagagtct

SEQ ID NO: 979940 - DNA, 15 bp, Homo sapiens
aaaaaggagagtctg

SEQ ID NO: 979941 - DNA, 15 bp, Homo sapiens
aaaaggagagtctgg

SEQ ID NO: 979942 - DNA, 15 bp, Homo sapiens
aaaggagagtctggg

SEQ ID NO: 979943 - DNA, 15 bp, Homo sapiens
aaggagagtctgggt

SEQ ID NO: 979944 - DNA, 15 bp, Homo sapiens
aggagagtctgggtg

SEQ ID NO: 979945 - DNA, 15 bp, Homo sapiens
ggagagtctgggtgg

SEQ ID NO: 979946 - DNA, 15 bp, Homo sapiens
gagagtctgggtggc

SEQ ID NO: 979947 - DNA, 15 bp, Homo sapiens
agagtctgggtggcg

SEQ ID NO: 979948 - DNA, 15 bp, Homo sapiens
gagtctgggtggcgt

SEQ ID NO: 979949 - DNA, 15 bp, Homo sapiens
agtctgggtggcgtg

SEQ ID NO: 979950 - DNA, 15 bp, Homo sapiens
gtctgggtggcgtgg

SEQ ID NO: 979951 - DNA, 15 bp, Homo sapiens
tctgggtggcgtgga

SEQ ID NO: 979952 - DNA, 15 bp, Homo sapiens
ctgggtggcgtggat

SEQ ID NO: 979953 - DNA, 15 bp, Homo sapiens
tgggtggcgtggatt

SEQ ID NO: 979954 - DNA, 15 bp, Homo sapiens
gggtggcgtggatta

SEQ ID NO: 979955 - DNA, 15 bp, Homo sapiens
ggtggcgtggattac

SEQ ID NO: 979956 - DNA, 15 bp, Homo sapiens
gtggcgtggattaca

SEQ ID NO: 979957 - DNA, 15 bp, Homo sapiens
tggcgtggattacat

SEQ ID NO: 979958 - DNA, 15 bp, Homo sapiens
ggcgtggattacatg

SEQ ID NO: 979959 - DNA, 15 bp, Homo sapiens
gcgtggattacatgc

SEQ ID NO: 979960 - DNA, 15 bp, Homo sapiens
cgtggattacatgcc

SEQ ID NO: 979961 - DNA, 15 bp, Homo sapiens
gtggattacatgcct

SEQ ID NO: 979962 - DNA, 15 bp, Homo sapiens
tggattacatgcctg

SEQ ID NO: 979963 - DNA, 15 bp, Homo sapiens
ggattacatgcctgt

SEQ ID NO: 979964 - DNA, 15 bp, Homo sapiens
gattacatgcctgta

SEQ ID NO: 979965 - DNA, 15 bp, Homo sapiens
attacatgcctgtaa

SEQ ID NO: 979966 - DNA, 15 bp, Homo sapiens
ttacatgcctgtaat

SEQ ID NO: 979967 - DNA, 15 bp, Homo sapiens
tacatgcctgtaatc

SEQ ID NO: 979968 - DNA, 15 bp, Homo sapiens
acatgcctgtaatcc

SEQ ID NO: 979969 - DNA, 15 bp, Homo sapiens
gcactttgggaggca

SEQ ID NO: 979970 - DNA, 15 bp, Homo sapiens
cactttgggaggcaa

SEQ ID NO: 979971 - DNA, 15 bp, Homo sapiens
actttgggaggcaag

SEQ ID NO: 979972 - DNA, 15 bp, Homo sapiens
ctttgggaggcaaga

SEQ ID NO: 979973 - DNA, 15 bp, Homo sapiens
tttgggaggcaagac

SEQ ID NO: 979974 - DNA, 15 bp, Homo sapiens
ttgggaggcaagaca

SEQ ID NO: 979975 - DNA, 15 bp, Homo sapiens
tgggaggcaagacag

SEQ ID NO: 979976 - DNA, 15 bp, Homo sapiens
gggaggcaagacagg

SEQ ID NO: 979977 - DNA, 15 bp, Homo sapiens
ggaggcaagacaggt

SEQ ID NO: 979978 - DNA, 15 bp, Homo sapiens
gaggcaagacaggtg

SEQ ID NO: 979979 - DNA, 15 bp, Homo sapiens
aggcaagacaggtgg

SEQ ID NO: 979980 - DNA, 15 bp, Homo sapiens
ggcaagacaggtgga

SEQ ID NO: 979981 - DNA, 15 bp, Homo sapiens
gcaagacaggtggat

SEQ ID NO: 979982 - DNA, 15 bp, Homo sapiens
caagacaggtggatc

SEQ ID NO: 979983 - DNA, 15 bp, Homo sapiens
aagacaggtggatcc

SEQ ID NO: 979984 - DNA, 15 bp, Homo sapiens
agacaggtggatccc

SEQ ID NO: 979985 - DNA, 15 bp, Homo sapiens
gacaggtggatccct

SEQ ID NO: 979986 - DNA, 15 bp, Homo sapiens
acaggtggatccctt

SEQ ID NO: 979987 - DNA, 15 bp, Homo sapiens
caggtggatcccttg

SEQ ID NO: 979988 - DNA, 15 bp, Homo sapiens
aggtggatcccttga

SEQ ID NO: 979989 - DNA, 15 bp, Homo sapiens
ggtggatcccttgag

SEQ ID NO: 979990 - DNA, 15 bp, Homo sapiens
gtggatcccttgagc

SEQ ID NO: 979991 - DNA, 15 bp, Homo sapiens
tggatcccttgagct

SEQ ID NO: 979992 - DNA, 15 bp, Homo sapiens
ggatcccttgagctc

SEQ ID NO: 979993 - DNA, 15 bp, Homo sapiens
gatcccttgagctca

SEQ ID NO: 979994 - DNA, 15 bp, Homo sapiens
atcccttgagctcag

SEQ ID NO: 979995 - DNA, 15 bp, Homo sapiens
tcccttgagctcagg

SEQ ID NO: 979996 - DNA, 15 bp, Homo sapiens
cccttgagctcagga

SEQ ID NO: 979997 - DNA, 15 bp, Homo sapiens
ccttgagctcaggag

SEQ ID NO: 979998 - DNA, 15 bp, Homo sapiens
cttgagctcaggagt

SEQ ID NO: 979999 - DNA, 15 bp, Homo sapiens
ttgagctcaggagtt

SEQ ID NO: 980000 - DNA, 15 bp, Homo sapiens
tgagctcaggagttc

SEQ ID NO: 980001 - DNA, 15 bp, Homo sapiens
gagctcaggagttca

SEQ ID NO: 980002 - DNA, 15 bp, Homo sapiens
agctcaggagttcag

SEQ ID NO: 980003 - DNA, 15 bp, Homo sapiens
gctcaggagttcagc

SEQ ID NO: 980004 - DNA, 15 bp, Homo sapiens
ctcaggagttcagcc

SEQ ID NO: 980005 - DNA, 15 bp, Homo sapiens
tcaggagttcagcct

SEQ ID NO: 980006 - DNA, 15 bp, Homo sapiens
caggagttcagcctg

SEQ ID NO: 980007 - DNA, 15 bp, Homo sapiens
aggagttcagcctga

SEQ ID NO: 980008 - DNA, 15 bp, Homo sapiens
ggagttcagcctgag

SEQ ID NO: 980009 - DNA, 15 bp, Homo sapiens
gagttcagcctgagc

SEQ ID NO: 980010 - DNA, 15 bp, Homo sapiens
agttcagcctgagcc

SEQ ID NO: 980011 - DNA, 15 bp, Homo sapiens
gttcagcctgagcca

SEQ ID NO: 980012 - DNA, 15 bp, Homo sapiens
ttcagcctgagccac

SEQ ID NO: 980013 - DNA, 15 bp, Homo sapiens
tcagcctgagccaca

SEQ ID NO: 980014 - DNA, 15 bp, Homo sapiens
cagcctgagccacat

SEQ ID NO: 980015 - DNA, 15 bp, Homo sapiens
agcctgagccacatg

SEQ ID NO: 980016 - DNA, 15 bp, Homo sapiens
gcctgagccacatgg

SEQ ID NO: 980017 - DNA, 15 bp, Homo sapiens
cctgagccacatggt

SEQ ID NO: 980018 - DNA, 15 bp, Homo sapiens
ctgagccacatggtg

SEQ ID NO: 980019 - DNA, 15 bp, Homo sapiens
tgagccacatggtga

SEQ ID NO: 980020 - DNA, 15 bp, Homo sapiens
gagccacatggtgaa

SEQ ID NO: 980021 - DNA, 15 bp, Homo sapiens
agccacatggtgaaa

SEQ ID NO: 980022 - DNA, 15 bp, Homo sapiens
gccacatggtgaaac

SEQ ID NO: 980023 - DNA, 15 bp, Homo sapiens
ccacatggtgaaacc

SEQ ID NO: 980024 - DNA, 15 bp, Homo sapiens
cacatggtgaaaccg

SEQ ID NO: 980025 - DNA, 15 bp, Homo sapiens
acatggtgaaaccgt

SEQ ID NO: 980026 - DNA, 15 bp, Homo sapiens
catggtgaaaccgtg

SEQ ID NO: 980027 - DNA, 15 bp, Homo sapiens
atggtgaaaccgtgt

SEQ ID NO: 980028 - DNA, 15 bp, Homo sapiens
tggtgaaaccgtgtt

SEQ ID NO: 980029 - DNA, 15 bp, Homo sapiens
ggtgaaaccgtgttt

SEQ ID NO: 980030 - DNA, 15 bp, Homo sapiens
gtgaaaccgtgtttc

SEQ ID NO: 980031 - DNA, 15 bp, Homo sapiens
tgaaaccgtgtttca

SEQ ID NO: 980032 - DNA, 15 bp, Homo sapiens
gaaaccgtgtttcaa

SEQ ID NO: 980033 - DNA, 15 bp, Homo sapiens
aaaccgtgtttcaaa

SEQ ID NO: 980034 - DNA, 15 bp, Homo sapiens
aaccgtgtttcaaaa

SEQ ID NO: 980035 - DNA, 15 bp, Homo sapiens
accgtgtttcaaaaa

SEQ ID NO: 980036 - DNA, 15 bp, Homo sapiens
ccgtgtttcaaaaaa

SEQ ID NO: 980037 - DNA, 15 bp, Homo sapiens
cgtgtttcaaaaaaa

SEQ ID NO: 980038 - DNA, 15 bp, Homo sapiens
gtgtttcaaaaaaaa

SEQ ID NO: 980039 - DNA, 15 bp, Homo sapiens
tgtttcaaaaaaaaa

SEQ ID NO: 980040 - DNA, 15 bp, Homo sapiens
gtttcaaaaaaaaaa

SEQ ID NO: 980041 - DNA, 15 bp, Homo sapiens
tttcaaaaaaaaaac

SEQ ID NO: 980042 - DNA, 15 bp, Homo sapiens
ttcaaaaaaaaaact

SEQ ID NO: 980043 - DNA, 15 bp, Homo sapiens
tcaaaaaaaaaacta

SEQ ID NO: 980044 - DNA, 15 bp, Homo sapiens
caaaaaaaaaactac

SEQ ID NO: 980045 - DNA, 15 bp, Homo sapiens
aaaaaaaaaactaca

SEQ ID NO: 980046 - DNA, 15 bp, Homo sapiens
aaaaaaaaactacaa

SEQ ID NO: 980047 - DNA, 15 bp, Homo sapiens
aaaaaaaactacaaa

SEQ ID NO: 980048 - DNA, 15 bp, Homo sapiens
aaaaaaactacaaaa

SEQ ID NO: 980049 - DNA, 15 bp, Homo sapiens
aaaaaactacaaaaa

SEQ ID NO: 980050 - DNA, 15 bp, Homo sapiens
aaaaactacaaaaat

SEQ ID NO: 980051 - DNA, 15 bp, Homo sapiens
aaaactacaaaaatt

SEQ ID NO: 980052 - DNA, 15 bp, Homo sapiens
aaactacaaaaatta

SEQ ID NO: 980053 - DNA, 15 bp, Homo sapiens
aactacaaaaattag

SEQ ID NO: 980054 - DNA, 15 bp, Homo sapiens
actacaaaaattagc

SEQ ID NO: 980055 - DNA, 15 bp, Homo sapiens
ctacaaaaattagct

SEQ ID NO: 980056 - DNA, 15 bp, Homo sapiens
aattagctgggcata

SEQ ID NO: 980057 - DNA, 15 bp, Homo sapiens
attagctgggcatag

SEQ ID NO: 980058 - DNA, 15 bp, Homo sapiens
ttagctgggcatagt

SEQ ID NO: 980059 - DNA, 15 bp, Homo sapiens
tagctgggcatagtg

SEQ ID NO: 980060 - DNA, 15 bp, Homo sapiens
agctgggcatagtgg

SEQ ID NO: 980061 - DNA, 15 bp, Homo sapiens
gctgggcatagtggc

SEQ ID NO: 980062 - DNA, 15 bp, Homo sapiens
ctgggcatagtggca

SEQ ID NO: 980063 - DNA, 15 bp, Homo sapiens
tgggcatagtggcat

SEQ ID NO: 980064 - DNA, 15 bp, Homo sapiens
gggcatagtggcatg

SEQ ID NO: 980065 - DNA, 15 bp, Homo sapiens
ggcatagtggcatgt

SEQ ID NO: 980066 - DNA, 15 bp, Homo sapiens
gcatagtggcatgtg

SEQ ID NO: 980067 - DNA, 15 bp, Homo sapiens
catagtggcatgtgc

SEQ ID NO: 980068 - DNA, 15 bp, Homo sapiens
atagtggcatgtgcc

SEQ ID NO: 980069 - DNA, 15 bp, Homo sapiens
tagtggcatgtgccc

SEQ ID NO: 980070 - DNA, 15 bp, Homo sapiens
agtggcatgtgcccg

SEQ ID NO: 980071 - DNA, 15 bp, Homo sapiens
gtggcatgtgcccgt

SEQ ID NO: 980072 - DNA, 15 bp, Homo sapiens
tggcatgtgcccgtg

SEQ ID NO: 980073 - DNA, 15 bp, Homo sapiens
ggcatgtgcccgtga

SEQ ID NO: 980074 - DNA, 15 bp, Homo sapiens
gcatgtgcccgtgat

SEQ ID NO: 980075 - DNA, 15 bp, Homo sapiens
catgtgcccgtgatc

SEQ ID NO: 980076 - DNA, 15 bp, Homo sapiens
atgtgcccgtgatcc

SEQ ID NO: 980077 - DNA, 15 bp, Homo sapiens
tgtgcccgtgatccc

SEQ ID NO: 980078 - DNA, 15 bp, Homo sapiens
gtgcccgtgatccca

SEQ ID NO: 980079 - DNA, 15 bp, Homo sapiens
tgcccgtgatcccag

SEQ ID NO: 980080 - DNA, 15 bp, Homo sapiens
gcccgtgatcccagc

SEQ ID NO: 980081 - DNA, 15 bp, Homo sapiens
cccgtgatcccagct

SEQ ID NO: 980082 - DNA, 15 bp, Homo sapiens
ccgtgatcccagcta

SEQ ID NO: 980083 - DNA, 15 bp, Homo sapiens
cgtgatcccagctac

SEQ ID NO: 980084 - DNA, 15 bp, Homo sapiens
gtgatcccagctact

SEQ ID NO: 980085 - DNA, 15 bp, Homo sapiens
tgatcccagctactc

SEQ ID NO: 980086 - DNA, 15 bp, Homo sapiens
gatcccagctactcg

SEQ ID NO: 980087 - DNA, 15 bp, Homo sapiens
cagctactcgggagg

SEQ ID NO: 980088 - DNA, 15 bp, Homo sapiens
agctactcgggaggc

SEQ ID NO: 980089 - DNA, 15 bp, Homo sapiens
gctactcgggaggct

SEQ ID NO: 980090 - DNA, 15 bp, Homo sapiens
ctactcgggaggctg

SEQ ID NO: 980091 - DNA, 15 bp, Homo sapiens
tactcgggaggctga

SEQ ID NO: 980092 - DNA, 15 bp, Homo sapiens
tcgggaggctgaggt

SEQ ID NO: 980093 - DNA, 15 bp, Homo sapiens
cgggaggctgaggtg

SEQ ID NO: 980094 - DNA, 15 bp, Homo sapiens
gggaggctgaggtga

SEQ ID NO: 980095 - DNA, 15 bp, Homo sapiens
ggaggctgaggtgag

SEQ ID NO: 980096 - DNA, 15 bp, Homo sapiens
gaggctgaggtgaga

SEQ ID NO: 980097 - DNA, 15 bp, Homo sapiens
aggctgaggtgagag

SEQ ID NO: 980098 - DNA, 15 bp, Homo sapiens
ggctgaggtgagagg

SEQ ID NO: 980099 - DNA, 15 bp, Homo sapiens
gctgaggtgagagga

SEQ ID NO: 980100 - DNA, 15 bp, Homo sapiens
ctgaggtgagaggat

SEQ ID NO: 980101 - DNA, 15 bp, Homo sapiens
tgaggtgagaggatc

SEQ ID NO: 980102 - DNA, 15 bp, Homo sapiens
gaggtgagaggatca

SEQ ID NO: 980103 - DNA, 15 bp, Homo sapiens
aggtgagaggatcac

SEQ ID NO: 980104 - DNA, 15 bp, Homo sapiens
ggtgagaggatcact

SEQ ID NO: 980105 - DNA, 15 bp, Homo sapiens
gtgagaggatcactt

SEQ ID NO: 980106 - DNA, 15 bp, Homo sapiens
tgagaggatcacttg

SEQ ID NO: 980107 - DNA, 15 bp, Homo sapiens
gagaggatcacttga

SEQ ID NO: 980108 - DNA, 15 bp, Homo sapiens
gaggatcacttgagc

SEQ ID NO: 980109 - DNA, 15 bp, Homo sapiens
aggatcacttgagct

SEQ ID NO: 980110 - DNA, 15 bp, Homo sapiens
ggatcacttgagctg

SEQ ID NO: 980111 - DNA, 15 bp, Homo sapiens
gatcacttgagctgg

SEQ ID NO: 980112 - DNA, 15 bp, Homo sapiens
atcacttgagctggg

SEQ ID NO: 980113 - DNA, 15 bp, Homo sapiens
tcacttgagctgggg

SEQ ID NO: 980114 - DNA, 15 bp, Homo sapiens
cacttgagctgggga

SEQ ID NO: 980115 - DNA, 15 bp, Homo sapiens
acttgagctggggag

SEQ ID NO: 980116 - DNA, 15 bp, Homo sapiens
cttgagctggggagg

SEQ ID NO: 980117 - DNA, 15 bp, Homo sapiens
ttgagctggggaggc

SEQ ID NO: 980118 - DNA, 15 bp, Homo sapiens
tgagctggggaggca

SEQ ID NO: 980119 - DNA, 15 bp, Homo sapiens
gagctggggaggcag

SEQ ID NO: 980120 - DNA, 15 bp, Homo sapiens
agctggggaggcaga

SEQ ID NO: 980121 - DNA, 15 bp, Homo sapiens
gctggggaggcagag

SEQ ID NO: 980122 - DNA, 15 bp, Homo sapiens
ctggggaggcagagg

SEQ ID NO: 980123 - DNA, 15 bp, Homo sapiens
tggggaggcagaggt

SEQ ID NO: 980124 - DNA, 15 bp, Homo sapiens
ggggaggcagaggtt

SEQ ID NO: 980125 - DNA, 15 bp, Homo sapiens
gggaggcagaggttg

SEQ ID NO: 980126 - DNA, 15 bp, Homo sapiens
tgagccaagattgcg

SEQ ID NO: 980127 - DNA, 15 bp, Homo sapiens
gagccaagattgcgc

SEQ ID NO: 980128 - DNA, 15 bp, Homo sapiens
agccaagattgcgcc

SEQ ID NO: 980129 - DNA, 15 bp, Homo sapiens
gccaagattgcgcca

SEQ ID NO: 980130 - DNA, 15 bp, Homo sapiens
ccaagattgcgccac

SEQ ID NO: 980131 - DNA, 15 bp, Homo sapiens
caagattgcgccact

SEQ ID NO: 980132 - DNA, 15 bp, Homo sapiens
aagattgcgccactg

SEQ ID NO: 980133 - DNA, 15 bp, Homo sapiens
agattgcgccactgc

SEQ ID NO: 980134 - DNA, 15 bp, Homo sapiens
gattgcgccactgca

SEQ ID NO: 980135 - DNA, 15 bp, Homo sapiens
attgcgccactgcac

SEQ ID NO: 980136 - DNA, 15 bp, Homo sapiens
ttgcgccactgcact

SEQ ID NO: 980137 - DNA, 15 bp, Homo sapiens
tgcgccactgcactc

SEQ ID NO: 980138 - DNA, 15 bp, Homo sapiens
gcgccactgcactcc

SEQ ID NO: 980139 - DNA, 15 bp, Homo sapiens
cgccactgcactccg

SEQ ID NO: 980140 - DNA, 15 bp, Homo sapiens
gccactgcactccgg

SEQ ID NO: 980141 - DNA, 15 bp, Homo sapiens
ccactgcactccggc

SEQ ID NO: 980142 - DNA, 15 bp, Homo sapiens
cactgcactccggcc

SEQ ID NO: 980143 - DNA, 15 bp, Homo sapiens
actgcactccggcct

SEQ ID NO: 980144 - DNA, 15 bp, Homo sapiens
ctgcactccggcctg

SEQ ID NO: 980145 - DNA, 15 bp, Homo sapiens
tgcactccggcctgg

SEQ ID NO: 980146 - DNA, 15 bp, Homo sapiens
gcactccggcctggg

SEQ ID NO: 980147 - DNA, 15 bp, Homo sapiens
cactccggcctgggc

SEQ ID NO: 980148 - DNA, 15 bp, Homo sapiens
actccggcctgggca

SEQ ID NO: 980149 - DNA, 15 bp, Homo sapiens
ctccggcctgggcaa

SEQ ID NO: 980150 - DNA, 15 bp, Homo sapiens
tccggcctgggcaac

SEQ ID NO: 980151 - DNA, 15 bp, Homo sapiens
ccggcctgggcaaca

SEQ ID NO: 980152 - DNA, 15 bp, Homo sapiens
cggcctgggcaacag

SEQ ID NO: 980153 - DNA, 15 bp, Homo sapiens
ggcctgggcaacaga

SEQ ID NO: 980154 - DNA, 15 bp, Homo sapiens
ctgggcaacagagcg

SEQ ID NO: 980155 - DNA, 15 bp, Homo sapiens
tgggcaacagagcga

SEQ ID NO: 980156 - DNA, 15 bp, Homo sapiens
gggcaacagagcgag

SEQ ID NO: 980157 - DNA, 15 bp, Homo sapiens
ggcaacagagcgaga

SEQ ID NO: 980158 - DNA, 15 bp, Homo sapiens
gcaacagagcgagat

SEQ ID NO: 980159 - DNA, 15 bp, Homo sapiens
caacagagcgagata

SEQ ID NO: 980160 - DNA, 15 bp, Homo sapiens
aacagagcgagatat

SEQ ID NO: 980161 - DNA, 15 bp, Homo sapiens
acagagcgagatatt

SEQ ID NO: 980162 - DNA, 15 bp, Homo sapiens
cagagcgagatattg

SEQ ID NO: 980163 - DNA, 15 bp, Homo sapiens
agagcgagatattgt

SEQ ID NO: 980164 - DNA, 15 bp, Homo sapiens
gagcgagatattgtc

SEQ ID NO: 980165 - DNA, 15 bp, Homo sapiens
agcgagatattgtcc

SEQ ID NO: 980166 - DNA, 15 bp, Homo sapiens
gcgagatattgtccg

SEQ ID NO: 980167 - DNA, 15 bp, Homo sapiens
cgagatattgtccgg

SEQ ID NO: 980168 - DNA, 15 bp, Homo sapiens
gagatattgtccggg

SEQ ID NO: 980169 - DNA, 15 bp, Homo sapiens
agatattgtccggga

SEQ ID NO: 980170 - DNA, 15 bp, Homo sapiens
gatattgtccgggaa

SEQ ID NO: 980171 - DNA, 15 bp, Homo sapiens
atattgtccgggaaa

SEQ ID NO: 980172 - DNA, 15 bp, Homo sapiens
tattgtccgggaaaa

SEQ ID NO: 980173 - DNA, 15 bp, Homo sapiens
attgtccgggaaaaa

SEQ ID NO: 980174 - DNA, 15 bp, Homo sapiens
ttgtccgggaaaaaa

SEQ ID NO: 980175 - DNA, 15 bp, Homo sapiens
tgtccgggaaaaaaa

SEQ ID NO: 980176 - DNA, 15 bp, Homo sapiens
gtccgggaaaaaaaa

SEQ ID NO: 980177 - DNA, 15 bp, Homo sapiens
tccgggaaaaaaaaa

SEQ ID NO: 980178 - DNA, 15 bp, Homo sapiens
ccgggaaaaaaaaaa

SEQ ID NO: 980179 - DNA, 15 bp, Homo sapiens
cgggaaaaaaaaaaa

SEQ ID NO: 980180 - DNA, 15 bp, Homo sapiens
gggaaaaaaaaaaaa

SEQ ID NO: 980181 - DNA, 15 bp, Homo sapiens
ggaaaaaaaaaaaaa

SEQ ID NO: 980182 - DNA, 15 bp, Homo sapiens
aaaaaaaaaaggaag

SEQ ID NO: 980183 - DNA, 15 bp, Homo sapiens
aaaaaaaaaggaagg

SEQ ID NO: 980184 - DNA, 15 bp, Homo sapiens
aaaaaaaaggaagga

SEQ ID NO: 980185 - DNA, 15 bp, Homo sapiens
aaaaaaaggaaggaa

SEQ ID NO: 980186 - DNA, 15 bp, Homo sapiens
aaaaaaggaaggaaa

SEQ ID NO: 980187 - DNA, 15 bp, Homo sapiens
aaaaaggaaggaaaa

SEQ ID NO: 980188 - DNA, 15 bp, Homo sapiens
aaaaggaaggaaaaa

SEQ ID NO: 980189 - DNA, 15 bp, Homo sapiens
aaaggaaggaaaaaa

SEQ ID NO: 980190 - DNA, 15 bp, Homo sapiens
aaggaaggaaaaaaa

SEQ ID NO: 980191 - DNA, 15 bp, Homo sapiens
aggaaggaaaaaaaa

SEQ ID NO: 980192 - DNA, 15 bp, Homo sapiens
ggaaggaaaaaaaaa

SEQ ID NO: 980193 - DNA, 15 bp, Homo sapiens
gaaggaaaaaaaaaa

SEQ ID NO: 980194 - DNA, 15 bp, Homo sapiens
aaggaaaaaaaaaaa

SEQ ID NO: 980195 - DNA, 15 bp, Homo sapiens
aggaaaaaaaaaaag

SEQ ID NO: 980196 - DNA, 15 bp, Homo sapiens
ggaaaaaaaaaaaga

SEQ ID NO: 980197 - DNA, 15 bp, Homo sapiens
gaaaaaaaaaaagaa

SEQ ID NO: 980198 - DNA, 15 bp, Homo sapiens
aaaaaaaaaagaaag

SEQ ID NO: 980199 - DNA, 15 bp, Homo sapiens
aaaaaaaaagaaaga

SEQ ID NO: 980200 - DNA, 15 bp, Homo sapiens
aaaaaaaagaaagaa

SEQ ID NO: 980201 - DNA, 15 bp, Homo sapiens
aaaaaaagaaagaaa

SEQ ID NO: 980202 - DNA, 15 bp, Homo sapiens
aaaaaagaaagaaaa

SEQ ID NO: 980203 - DNA, 15 bp, Homo sapiens
aaaaagaaagaaaaa

SEQ ID NO: 980204 - DNA, 15 bp, Homo sapiens
aaaagaaagaaaaag

SEQ ID NO: 980205 - DNA, 15 bp, Homo sapiens
aaagaaagaaaaagg

SEQ ID NO: 980206 - DNA, 15 bp, Homo sapiens
aagaaagaaaaaggg

SEQ ID NO: 980207 - DNA, 15 bp, Homo sapiens
agaaagaaaaagggg

SEQ ID NO: 980208 - DNA, 15 bp, Homo sapiens
gaaagaaaaagggga

SEQ ID NO: 980209 - DNA, 15 bp, Homo sapiens
aaagaaaaaggggaa

SEQ ID NO: 980210 - DNA, 15 bp, Homo sapiens
aagaaaaaggggaag

SEQ ID NO: 980211 - DNA, 15 bp, Homo sapiens
agaaaaaggggaaga

SEQ ID NO: 980212 - DNA, 15 bp, Homo sapiens
gaaaaaggggaagat

SEQ ID NO: 980213 - DNA, 15 bp, Homo sapiens
aaaaaggggaagata

SEQ ID NO: 980214 - DNA, 15 bp, Homo sapiens
aaaaggggaagatac

SEQ ID NO: 980215 - DNA, 15 bp, Homo sapiens
aaaggggaagataca

SEQ ID NO: 980216 - DNA, 15 bp, Homo sapiens
aaggggaagatacac

SEQ ID NO: 980217 - DNA, 15 bp, Homo sapiens
aggggaagatacact

SEQ ID NO: 980218 - DNA, 15 bp, Homo sapiens
ggggaagatacactg

SEQ ID NO: 980219 - DNA, 15 bp, Homo sapiens
gggaagatacactgg

SEQ ID NO: 980220 - DNA, 15 bp, Homo sapiens
ggaagatacactgga

SEQ ID NO: 980221 - DNA, 15 bp, Homo sapiens
gaagatacactggaa

SEQ ID NO: 980222 - DNA, 15 bp, Homo sapiens
aagatacactggaac

SEQ ID NO: 980223 - DNA, 15 bp, Homo sapiens
agatacactggaaca

SEQ ID NO: 980224 - DNA, 15 bp, Homo sapiens
gatacactggaacac

SEQ ID NO: 980225 - DNA, 15 bp, Homo sapiens
atacactggaacaca

SEQ ID NO: 980226 - DNA, 15 bp, Homo sapiens
tacactggaacacaa

SEQ ID NO: 980227 - DNA, 15 bp, Homo sapiens
acactggaacacaaa

SEQ ID NO: 980228 - DNA, 15 bp, Homo sapiens
cactggaacacaaat

SEQ ID NO: 980229 - DNA, 15 bp, Homo sapiens
actggaacacaaatg

SEQ ID NO: 980230 - DNA, 15 bp, Homo sapiens
ctggaacacaaatgc

SEQ ID NO: 980231 - DNA, 15 bp, Homo sapiens
tggaacacaaatgct

SEQ ID NO: 980232 - DNA, 15 bp, Homo sapiens
ggaacacaaatgctt

SEQ ID NO: 980233 - DNA, 15 bp, Homo sapiens
gaacacaaatgcttc

SEQ ID NO: 980234 - DNA, 15 bp, Homo sapiens
aacacaaatgcttct

SEQ ID NO: 980235 - DNA, 15 bp, Homo sapiens
acacaaatgcttctt

SEQ ID NO: 980236 - DNA, 15 bp, Homo sapiens
cacaaatgcttctta

SEQ ID NO: 980237 - DNA, 15 bp, Homo sapiens
acaaatgcttcttaa

SEQ ID NO: 980238 - DNA, 15 bp, Homo sapiens
caaatgcttcttaag

SEQ ID NO: 980239 - DNA, 15 bp, Homo sapiens
aaatgcttcttaagg

SEQ ID NO: 980240 - DNA, 15 bp, Homo sapiens
aatgcttcttaaggg

SEQ ID NO: 980241 - DNA, 15 bp, Homo sapiens
atgcttcttaagggg

SEQ ID NO: 980242 - DNA, 15 bp, Homo sapiens
tgcttcttaaggggc

SEQ ID NO: 980243 - DNA, 15 bp, Homo sapiens
gcttcttaaggggcg

SEQ ID NO: 980244 - DNA, 15 bp, Homo sapiens
cttcttaaggggcgc

SEQ ID NO: 980245 - DNA, 15 bp, Homo sapiens
ttcttaaggggcgca

SEQ ID NO: 980246 - DNA, 15 bp, Homo sapiens
tcttaaggggcgcag

SEQ ID NO: 980247 - DNA, 15 bp, Homo sapiens
cttaaggggcgcagt

SEQ ID NO: 980248 - DNA, 15 bp, Homo sapiens
ttaaggggcgcagtg

SEQ ID NO: 980249 - DNA, 15 bp, Homo sapiens
taaggggcgcagtgg

SEQ ID NO: 980250 - DNA, 15 bp, Homo sapiens
aaggggcgcagtggc

SEQ ID NO: 980251 - DNA, 15 bp, Homo sapiens
aggggcgcagtggct

SEQ ID NO: 980252 - DNA, 15 bp, Homo sapiens
ggggcgcagtggctc

SEQ ID NO: 980253 - DNA, 15 bp, Homo sapiens
gggcgcagtggctca

SEQ ID NO: 980254 - DNA, 15 bp, Homo sapiens
ggcgcagtggctcac

SEQ ID NO: 980255 - DNA, 15 bp, Homo sapiens
gcgcagtggctcact

SEQ ID NO: 980256 - DNA, 15 bp, Homo sapiens
cgcagtggctcactt

SEQ ID NO: 980257 - DNA, 15 bp, Homo sapiens
gcagtggctcacttc

SEQ ID NO: 980258 - DNA, 15 bp, Homo sapiens
cagtggctcacttct

SEQ ID NO: 980259 - DNA, 15 bp, Homo sapiens
agtggctcacttctg

SEQ ID NO: 980260 - DNA, 15 bp, Homo sapiens
gtggctcacttctgc

SEQ ID NO: 980261 - DNA, 15 bp, Homo sapiens
tggctcacttctgca

SEQ ID NO: 980262 - DNA, 15 bp, Homo sapiens
ggctcacttctgcaa

SEQ ID NO: 980263 - DNA, 15 bp, Homo sapiens
gctcacttctgcaat

SEQ ID NO: 980264 - DNA, 15 bp, Homo sapiens
ctcacttctgcaatc

SEQ ID NO: 980265 - DNA, 15 bp, Homo sapiens
tcacttctgcaatct

SEQ ID NO: 980266 - DNA, 15 bp, Homo sapiens
cacttctgcaatctt

SEQ ID NO: 980267 - DNA, 15 bp, Homo sapiens
acttctgcaatcttg

SEQ ID NO: 980268 - DNA, 15 bp, Homo sapiens
cttctgcaatcttgg

SEQ ID NO: 980269 - DNA, 15 bp, Homo sapiens
ttctgcaatcttggc

SEQ ID NO: 980270 - DNA, 15 bp, Homo sapiens
tctgcaatcttggca

SEQ ID NO: 980271 - DNA, 15 bp, Homo sapiens
ctgcaatcttggcac

SEQ ID NO: 980272 - DNA, 15 bp, Homo sapiens
tgcaatcttggcact

SEQ ID NO: 980273 - DNA, 15 bp, Homo sapiens
gcaatcttggcactt

SEQ ID NO: 980274 - DNA, 15 bp, Homo sapiens
caatcttggcacttt

SEQ ID NO: 980275 - DNA, 15 bp, Homo sapiens
aatcttggcactttc

SEQ ID NO: 980276 - DNA, 15 bp, Homo sapiens
atcttggcactttcg

SEQ ID NO: 980277 - DNA, 15 bp, Homo sapiens
tcttggcactttcgg

SEQ ID NO: 980278 - DNA, 15 bp, Homo sapiens
cttggcactttcggg

SEQ ID NO: 980279 - DNA, 15 bp, Homo sapiens
ttggcactttcgggg

SEQ ID NO: 980280 - DNA, 15 bp, Homo sapiens
tggcactttcggggg

SEQ ID NO: 980281 - DNA, 15 bp, Homo sapiens
ggcactttcgggggc

SEQ ID NO: 980282 - DNA, 15 bp, Homo sapiens
gcactttcgggggcc

SEQ ID NO: 980283 - DNA, 15 bp, Homo sapiens
cactttcgggggccg

SEQ ID NO: 980284 - DNA, 15 bp, Homo sapiens
actttcgggggccga

SEQ ID NO: 980285 - DNA, 15 bp, Homo sapiens
ctttcgggggccgag

SEQ ID NO: 980286 - DNA, 15 bp, Homo sapiens
tttcgggggccgagg

SEQ ID NO: 980287 - DNA, 15 bp, Homo sapiens
ttcgggggccgaggc

SEQ ID NO: 980288 - DNA, 15 bp, Homo sapiens
tcgggggccgaggct

SEQ ID NO: 980289 - DNA, 15 bp, Homo sapiens
cgggggccgaggctg

SEQ ID NO: 980290 - DNA, 15 bp, Homo sapiens
gggggccgaggctgg

SEQ ID NO: 980291 - DNA, 15 bp, Homo sapiens
ggggccgaggctggt

SEQ ID NO: 980292 - DNA, 15 bp, Homo sapiens
gggccgaggctggtg

SEQ ID NO: 980293 - DNA, 15 bp, Homo sapiens
ggccgaggctggtgg

SEQ ID NO: 980294 - DNA, 15 bp, Homo sapiens
gccgaggctggtgga

SEQ ID NO: 980295 - DNA, 15 bp, Homo sapiens
ccgaggctggtggat

SEQ ID NO: 980296 - DNA, 15 bp, Homo sapiens
cgaggctggtggatc

SEQ ID NO: 980297 - DNA, 15 bp, Homo sapiens
gaggctggtggatca

SEQ ID NO: 980298 - DNA, 15 bp, Homo sapiens
aggctggtggatcac

SEQ ID NO: 980299 - DNA, 15 bp, Homo sapiens
ggctggtggatcacg

SEQ ID NO: 980300 - DNA, 15 bp, Homo sapiens
gctggtggatcacga

SEQ ID NO: 980301 - DNA, 15 bp, Homo sapiens
ctggtggatcacgag

SEQ ID NO: 980302 - DNA, 15 bp, Homo sapiens
tggtggatcacgagg

SEQ ID NO: 980303 - DNA, 15 bp, Homo sapiens
ggtggatcacgaggt

SEQ ID NO: 980304 - DNA, 15 bp, Homo sapiens
gtggatcacgaggtc

SEQ ID NO: 980305 - DNA, 15 bp, Homo sapiens
tggatcacgaggtca

SEQ ID NO: 980306 - DNA, 15 bp, Homo sapiens
ggatcacgaggtcag

SEQ ID NO: 980307 - DNA, 15 bp, Homo sapiens
gatcacgaggtcagg

SEQ ID NO: 980308 - DNA, 15 bp, Homo sapiens
atcacgaggtcagga

SEQ ID NO: 980309 - DNA, 15 bp, Homo sapiens
tcacgaggtcaggag

SEQ ID NO: 980310 - DNA, 15 bp, Homo sapiens
cacgaggtcaggagt

SEQ ID NO: 980311 - DNA, 15 bp, Homo sapiens
acgaggtcaggagtt

SEQ ID NO: 980312 - DNA, 15 bp, Homo sapiens
cgaggtcaggagttc

SEQ ID NO: 980313 - DNA, 15 bp, Homo sapiens
caggagttcgagacc

SEQ ID NO: 980314 - DNA, 15 bp, Homo sapiens
aggagttcgagacca

SEQ ID NO: 980315 - DNA, 15 bp, Homo sapiens
ttcgagaccagccta

SEQ ID NO: 980316 - DNA, 15 bp, Homo sapiens
tcgagaccagcctag

SEQ ID NO: 980317 - DNA, 15 bp, Homo sapiens
cgagaccagcctagt

SEQ ID NO: 980318 - DNA, 15 bp, Homo sapiens
gagaccagcctagtc

SEQ ID NO: 980319 - DNA, 15 bp, Homo sapiens
agaccagcctagtca

SEQ ID NO: 980320 - DNA, 15 bp, Homo sapiens
gaccagcctagtcaa

SEQ ID NO: 980321 - DNA, 15 bp, Homo sapiens
accagcctagtcaac

SEQ ID NO: 980322 - DNA, 15 bp, Homo sapiens
ccagcctagtcaaca

SEQ ID NO: 980323 - DNA, 15 bp, Homo sapiens
cagcctagtcaacat

SEQ ID NO: 980324 - DNA, 15 bp, Homo sapiens
agcctagtcaacatg

SEQ ID NO: 980325 - DNA, 15 bp, Homo sapiens
gcctagtcaacatgg

SEQ ID NO: 980326 - DNA, 15 bp, Homo sapiens
cctagtcaacatgga

SEQ ID NO: 980327 - DNA, 15 bp, Homo sapiens
ctagtcaacatggaa

SEQ ID NO: 980328 - DNA, 15 bp, Homo sapiens
tagtcaacatggaaa

SEQ ID NO: 980329 - DNA, 15 bp, Homo sapiens
agtcaacatggaaaa

SEQ ID NO: 980330 - DNA, 15 bp, Homo sapiens
gtcaacatggaaaaa

SEQ ID NO: 980331 - DNA, 15 bp, Homo sapiens
tcaacatggaaaaac

SEQ ID NO: 980332 - DNA, 15 bp, Homo sapiens
caacatggaaaaacc

SEQ ID NO: 980333 - DNA, 15 bp, Homo sapiens
aacatggaaaaaccc

SEQ ID NO: 980334 - DNA, 15 bp, Homo sapiens
acatggaaaaacccc

SEQ ID NO: 980335 - DNA, 15 bp, Homo sapiens
catggaaaaaccccg

SEQ ID NO: 980336 - DNA, 15 bp, Homo sapiens
atggaaaaaccccgt

SEQ ID NO: 980337 - DNA, 15 bp, Homo sapiens
tggaaaaaccccgtc

SEQ ID NO: 980338 - DNA, 15 bp, Homo sapiens
ggaaaaaccccgtct

SEQ ID NO: 980339 - DNA, 15 bp, Homo sapiens
gaaaaaccccgtctc

SEQ ID NO: 980340 - DNA, 15 bp, Homo sapiens
aaaaaccccgtctct

SEQ ID NO: 980341 - DNA, 15 bp, Homo sapiens
aaaaccccgtctcta

SEQ ID NO: 980342 - DNA, 15 bp, Homo sapiens
aaaccccgtctctac

SEQ ID NO: 980343 - DNA, 15 bp, Homo sapiens
aaccccgtctctact

SEQ ID NO: 980344 - DNA, 15 bp, Homo sapiens
accccgtctctacta

SEQ ID NO: 980345 - DNA, 15 bp, Homo sapiens
ccccgtctctactaa

SEQ ID NO: 980346 - DNA, 15 bp, Homo sapiens
cccgtctctactaaa

SEQ ID NO: 980347 - DNA, 15 bp, Homo sapiens
ccgtctctactaaaa

SEQ ID NO: 980348 - DNA, 15 bp, Homo sapiens
cgtctctactaaaac

SEQ ID NO: 980349 - DNA, 15 bp, Homo sapiens
gtctctactaaaact

SEQ ID NO: 980350 - DNA, 15 bp, Homo sapiens
tctctactaaaacta

SEQ ID NO: 980351 - DNA, 15 bp, Homo sapiens
ctctactaaaactac

SEQ ID NO: 980352 - DNA, 15 bp, Homo sapiens
tctactaaaactaca

SEQ ID NO: 980353 - DNA, 15 bp, Homo sapiens
ctactaaaactacaa

SEQ ID NO: 980354 - DNA, 15 bp, Homo sapiens
tactaaaactacaaa

SEQ ID NO: 980355 - DNA, 15 bp, Homo sapiens
actaaaactacaaaa

SEQ ID NO: 980356 - DNA, 15 bp, Homo sapiens
ctaaaactacaaaaa

SEQ ID NO: 980357 - DNA, 15 bp, Homo sapiens
taaaactacaaaaat

SEQ ID NO: 980358 - DNA, 15 bp, Homo sapiens
ctacaaaaattagcc

SEQ ID NO: 980359 - DNA, 15 bp, Homo sapiens
tacaaaaattagccg

SEQ ID NO: 980360 - DNA, 15 bp, Homo sapiens
acaaaaattagccgg

SEQ ID NO: 980361 - DNA, 15 bp, Homo sapiens
caaaaattagccggg

SEQ ID NO: 980362 - DNA, 15 bp, Homo sapiens
aaaaattagccgggc

SEQ ID NO: 980363 - DNA, 15 bp, Homo sapiens
aaaattagccgggcg

SEQ ID NO: 980364 - DNA, 15 bp, Homo sapiens
aaattagccgggcgt

SEQ ID NO: 980365 - DNA, 15 bp, Homo sapiens
aattagccgggcgtg

SEQ ID NO: 980366 - DNA, 15 bp, Homo sapiens
attagccgggcgtgg

SEQ ID NO: 980367 - DNA, 15 bp, Homo sapiens
ttagccgggcgtggt

SEQ ID NO: 980368 - DNA, 15 bp, Homo sapiens
tagccgggcgtggtg

SEQ ID NO: 980369 - DNA, 15 bp, Homo sapiens
agccgggcgtggtgt

SEQ ID NO: 980370 - DNA, 15 bp, Homo sapiens
gccgggcgtggtgtc

SEQ ID NO: 980371 - DNA, 15 bp, Homo sapiens
ccgggcgtggtgtcg

SEQ ID NO: 980372 - DNA, 15 bp, Homo sapiens
cgggcgtggtgtcgg

SEQ ID NO: 980373 - DNA, 15 bp, Homo sapiens
gggcgtggtgtcggg

SEQ ID NO: 980374 - DNA, 15 bp, Homo sapiens
ggcgtggtgtcgggc

SEQ ID NO: 980375 - DNA, 15 bp, Homo sapiens
gcgtggtgtcgggcg

SEQ ID NO: 980376 - DNA, 15 bp, Homo sapiens
cgtggtgtcgggcgc

SEQ ID NO: 980377 - DNA, 15 bp, Homo sapiens
gtggtgtcgggcgcc

SEQ ID NO: 980378 - DNA, 15 bp, Homo sapiens
tggtgtcgggcgcct

SEQ ID NO: 980379 - DNA, 15 bp, Homo sapiens
ggtgtcgggcgcctg

SEQ ID NO: 980380 - DNA, 15 bp, Homo sapiens
gtgtcgggcgcctgt

SEQ ID NO: 980381 - DNA, 15 bp, Homo sapiens
tgtcgggcgcctgta

SEQ ID NO: 980382 - DNA, 15 bp, Homo sapiens
gtcgggcgcctgtaa

SEQ ID NO: 980383 - DNA, 15 bp, Homo sapiens
tcgggcgcctgtaat

SEQ ID NO: 980384 - DNA, 15 bp, Homo sapiens
cgggcgcctgtaatc

SEQ ID NO: 980385 - DNA, 15 bp, Homo sapiens
gggcgcctgtaatcc

SEQ ID NO: 980386 - DNA, 15 bp, Homo sapiens
ggcgcctgtaatccc

SEQ ID NO: 980387 - DNA, 15 bp, Homo sapiens
gcgcctgtaatccca

SEQ ID NO: 980388 - DNA, 15 bp, Homo sapiens
aggctgaggcaggat

SEQ ID NO: 980389 - DNA, 15 bp, Homo sapiens
ggctgaggcaggata

SEQ ID NO: 980390 - DNA, 15 bp, Homo sapiens
gctgaggcaggataa

SEQ ID NO: 980391 - DNA, 15 bp, Homo sapiens
gaggcaggataatcg

SEQ ID NO: 980392 - DNA, 15 bp, Homo sapiens
aggcaggataatcgc

SEQ ID NO: 980393 - DNA, 15 bp, Homo sapiens
ggcaggataatcgct

SEQ ID NO: 980394 - DNA, 15 bp, Homo sapiens
gcaggataatcgctt

SEQ ID NO: 980395 - DNA, 15 bp, Homo sapiens
caggataatcgcttt

SEQ ID NO: 980396 - DNA, 15 bp, Homo sapiens
aggataatcgcttta

SEQ ID NO: 980397 - DNA, 15 bp, Homo sapiens
ggataatcgctttaa

SEQ ID NO: 980398 - DNA, 15 bp, Homo sapiens
gataatcgctttaat

SEQ ID NO: 980399 - DNA, 15 bp, Homo sapiens
ataatcgctttaatc

SEQ ID NO: 980400 - DNA, 15 bp, Homo sapiens
taatcgctttaatca

SEQ ID NO: 980401 - DNA, 15 bp, Homo sapiens
aatcgctttaatcag

SEQ ID NO: 980402 - DNA, 15 bp, Homo sapiens
atcgctttaatcagg

SEQ ID NO: 980403 - DNA, 15 bp, Homo sapiens
tcgctttaatcagga

SEQ ID NO: 980404 - DNA, 15 bp, Homo sapiens
cgctttaatcaggaa

SEQ ID NO: 980405 - DNA, 15 bp, Homo sapiens
gctttaatcaggaag

SEQ ID NO: 980406 - DNA, 15 bp, Homo sapiens
ctttaatcaggaagg

SEQ ID NO: 980407 - DNA, 15 bp, Homo sapiens
tttaatcaggaaggc

SEQ ID NO: 980408 - DNA, 15 bp, Homo sapiens
ttaatcaggaaggcg

SEQ ID NO: 980409 - DNA, 15 bp, Homo sapiens
taatcaggaaggcgg

SEQ ID NO: 980410 - DNA, 15 bp, Homo sapiens
aatcaggaaggcgga

SEQ ID NO: 980411 - DNA, 15 bp, Homo sapiens
atcaggaaggcggag

SEQ ID NO: 980412 - DNA, 15 bp, Homo sapiens
tcaggaaggcggagg

SEQ ID NO: 980413 - DNA, 15 bp, Homo sapiens
caggaaggcggaggt

SEQ ID NO: 980414 - DNA, 15 bp, Homo sapiens
aggaaggcggaggtt

SEQ ID NO: 980415 - DNA, 15 bp, Homo sapiens
ggaaggcggaggttg

SEQ ID NO: 980416 - DNA, 15 bp, Homo sapiens
gaaggcggaggttgc

SEQ ID NO: 980417 - DNA, 15 bp, Homo sapiens
aaggcggaggttgca

SEQ ID NO: 980418 - DNA, 15 bp, Homo sapiens
aggcggaggttgcag

SEQ ID NO: 980419 - DNA, 15 bp, Homo sapiens
ggcggaggttgcagt

SEQ ID NO: 980420 - DNA, 15 bp, Homo sapiens
gcggaggttgcagtg

SEQ ID NO: 980421 - DNA, 15 bp, Homo sapiens
cggaggttgcagtga

SEQ ID NO: 980422 - DNA, 15 bp, Homo sapiens
ggaggttgcagtgaa

SEQ ID NO: 980423 - DNA, 15 bp, Homo sapiens
gaggttgcagtgaac

SEQ ID NO: 980424 - DNA, 15 bp, Homo sapiens
aggttgcagtgaacc

SEQ ID NO: 980425 - DNA, 15 bp, Homo sapiens
ggttgcagtgaaccg

SEQ ID NO: 980426 - DNA, 15 bp, Homo sapiens
gttgcagtgaaccga

SEQ ID NO: 980427 - DNA, 15 bp, Homo sapiens
ttgcagtgaaccgag

SEQ ID NO: 980428 - DNA, 15 bp, Homo sapiens
tgcagtgaaccgaga

SEQ ID NO: 980429 - DNA, 15 bp, Homo sapiens
gcagtgaaccgagat

SEQ ID NO: 980430 - DNA, 15 bp, Homo sapiens
cagtgaaccgagatc

SEQ ID NO: 980431 - DNA, 15 bp, Homo sapiens
agtgaaccgagatcg

SEQ ID NO: 980432 - DNA, 15 bp, Homo sapiens
gtgaaccgagatcgt

SEQ ID NO: 980433 - DNA, 15 bp, Homo sapiens
tgaaccgagatcgtg

SEQ ID NO: 980434 - DNA, 15 bp, Homo sapiens
gaaccgagatcgtgc

SEQ ID NO: 980435 - DNA, 15 bp, Homo sapiens
aaccgagatcgtgcc

SEQ ID NO: 980436 - DNA, 15 bp, Homo sapiens
accgagatcgtgcca

SEQ ID NO: 980437 - DNA, 15 bp, Homo sapiens
ccgagatcgtgccat

SEQ ID NO: 980438 - DNA, 15 bp, Homo sapiens
cgagatcgtgccatt

SEQ ID NO: 980439 - DNA, 15 bp, Homo sapiens
gagatcgtgccattg

SEQ ID NO: 980440 - DNA, 15 bp, Homo sapiens
agatcgtgccattgc

SEQ ID NO: 980441 - DNA, 15 bp, Homo sapiens
gatcgtgccattgca

SEQ ID NO: 980442 - DNA, 15 bp, Homo sapiens
atcgtgccattgcac

SEQ ID NO: 980443 - DNA, 15 bp, Homo sapiens
tcgtgccattgcact

SEQ ID NO: 980444 - DNA, 15 bp, Homo sapiens
cgtgccattgcactc

SEQ ID NO: 980445 - DNA, 15 bp, Homo sapiens
gtgccattgcactcc

SEQ ID NO: 980446 - DNA, 15 bp, Homo sapiens
cagcctgggcgacaa

SEQ ID NO: 980447 - DNA, 15 bp, Homo sapiens
agcctgggcgacaag

SEQ ID NO: 980448 - DNA, 15 bp, Homo sapiens
gcctgggcgacaaga

SEQ ID NO: 980449 - DNA, 15 bp, Homo sapiens
cctgggcgacaagag

SEQ ID NO: 980450 - DNA, 15 bp, Homo sapiens
ctgggcgacaagagt

SEQ ID NO: 980451 - DNA, 15 bp, Homo sapiens
tgggcgacaagagtg

SEQ ID NO: 980452 - DNA, 15 bp, Homo sapiens
gggcgacaagagtga

SEQ ID NO: 980453 - DNA, 15 bp, Homo sapiens
ggcgacaagagtgaa

SEQ ID NO: 980454 - DNA, 15 bp, Homo sapiens
gcgacaagagtgaaa

SEQ ID NO: 980455 - DNA, 15 bp, Homo sapiens
cgacaagagtgaaac

SEQ ID NO: 980456 - DNA, 15 bp, Homo sapiens
gacaagagtgaaact

SEQ ID NO: 980457 - DNA, 15 bp, Homo sapiens
caagagtgaaactcc

SEQ ID NO: 980458 - DNA, 15 bp, Homo sapiens
aagagtgaaactccg

SEQ ID NO: 980459 - DNA, 15 bp, Homo sapiens
agagtgaaactccgt

SEQ ID NO: 980460 - DNA, 15 bp, Homo sapiens
gagtgaaactccgtc

SEQ ID NO: 980461 - DNA, 15 bp, Homo sapiens
agtgaaactccgtct

SEQ ID NO: 980462 - DNA, 15 bp, Homo sapiens
gtgaaactccgtctc

SEQ ID NO: 980463 - DNA, 15 bp, Homo sapiens
tgaaactccgtctca

SEQ ID NO: 980464 - DNA, 15 bp, Homo sapiens
gaaactccgtctcaa

SEQ ID NO: 980465 - DNA, 15 bp, Homo sapiens
aaactccgtctcaaa

SEQ ID NO: 980466 - DNA, 15 bp, Homo sapiens
aactccgtctcaaaa

SEQ ID NO: 980467 - DNA, 15 bp, Homo sapiens
actccgtctcaaaaa

SEQ ID NO: 980468 - DNA, 15 bp, Homo sapiens
ctccgtctcaaaaaa

SEQ ID NO: 980469 - DNA, 15 bp, Homo sapiens
tccgtctcaaaaaaa

SEQ ID NO: 980470 - DNA, 15 bp, Homo sapiens
ccgtctcaaaaaaaa

SEQ ID NO: 980471 - DNA, 15 bp, Homo sapiens
cgtctcaaaaaaaaa

SEQ ID NO: 980472 - DNA, 15 bp, Homo sapiens
aaaaaaaaaaaagag

SEQ ID NO: 980473 - DNA, 15 bp, Homo sapiens
aaaaaaaaaaagagg

SEQ ID NO: 980474 - DNA, 15 bp, Homo sapiens
aaaaaaaaaagagga

SEQ ID NO: 980475 - DNA, 15 bp, Homo sapiens
aaaaaaaaagaggaa

SEQ ID NO: 980476 - DNA, 15 bp, Homo sapiens
aaaaaaaagaggaag

SEQ ID NO: 980477 - DNA, 15 bp, Homo sapiens
aaaaaaagaggaaga

SEQ ID NO: 980478 - DNA, 15 bp, Homo sapiens
aaaaaagaggaagaa

SEQ ID NO: 980479 - DNA, 15 bp, Homo sapiens
aaaaagaggaagaac

SEQ ID NO: 980480 - DNA, 15 bp, Homo sapiens
aaaagaggaagaaca

SEQ ID NO: 980481 - DNA, 15 bp, Homo sapiens
aaagaggaagaacaa

SEQ ID NO: 980482 - DNA, 15 bp, Homo sapiens
aagaggaagaacaaa

SEQ ID NO: 980483 - DNA, 15 bp, Homo sapiens
agaggaagaacaaag

SEQ ID NO: 980484 - DNA, 15 bp, Homo sapiens
gaggaagaacaaagg

SEQ ID NO: 980485 - DNA, 15 bp, Homo sapiens
aggaagaacaaaggt

SEQ ID NO: 980486 - DNA, 15 bp, Homo sapiens
ggaagaacaaaggtc

SEQ ID NO: 980487 - DNA, 15 bp, Homo sapiens
gaagaacaaaggtcc

SEQ ID NO: 980488 - DNA, 15 bp, Homo sapiens
aagaacaaaggtccc

SEQ ID NO: 980489 - DNA, 15 bp, Homo sapiens
agaacaaaggtccca

SEQ ID NO: 980490 - DNA, 15 bp, Homo sapiens
gaacaaaggtcccaa

SEQ ID NO: 980491 - DNA, 15 bp, Homo sapiens
aacaaaggtcccaag

SEQ ID NO: 980492 - DNA, 15 bp, Homo sapiens
acaaaggtcccaaga

SEQ ID NO: 980493 - DNA, 15 bp, Homo sapiens
caaaggtcccaagag

SEQ ID NO: 980494 - DNA, 15 bp, Homo sapiens
aaaggtcccaagagt

SEQ ID NO: 980495 - DNA, 15 bp, Homo sapiens
aaggtcccaagagtt

SEQ ID NO: 980496 - DNA, 15 bp, Homo sapiens
aggtcccaagagttg

SEQ ID NO: 980497 - DNA, 15 bp, Homo sapiens
ggtcccaagagttgg

SEQ ID NO: 980498 - DNA, 15 bp, Homo sapiens
gtcccaagagttgga

SEQ ID NO: 980499 - DNA, 15 bp, Homo sapiens
tcccaagagttggac

SEQ ID NO: 980500 - DNA, 15 bp, Homo sapiens
cccaagagttggacc

SEQ ID NO: 980501 - DNA, 15 bp, Homo sapiens
ccaagagttggaccc

SEQ ID NO: 980502 - DNA, 15 bp, Homo sapiens
caagagttggaccca

SEQ ID NO: 980503 - DNA, 15 bp, Homo sapiens
aagagttggacccag

SEQ ID NO: 980504 - DNA, 15 bp, Homo sapiens
agagttggacccagg

SEQ ID NO: 980505 - DNA, 15 bp, Homo sapiens
gagttggacccaggt

SEQ ID NO: 980506 - DNA, 15 bp, Homo sapiens
agttggacccaggtt

SEQ ID NO: 980507 - DNA, 15 bp, Homo sapiens
gttggacccaggttg

SEQ ID NO: 980508 - DNA, 15 bp, Homo sapiens
ttggacccaggttgt

SEQ ID NO: 980509 - DNA, 15 bp, Homo sapiens
tggacccaggttgta

SEQ ID NO: 980510 - DNA, 15 bp, Homo sapiens
ggacccaggttgtag

SEQ ID NO: 980511 - DNA, 15 bp, Homo sapiens
gacccaggttgtagg

SEQ ID NO: 980512 - DNA, 15 bp, Homo sapiens
acccaggttgtaggg

SEQ ID NO: 980513 - DNA, 15 bp, Homo sapiens
cccaggttgtagggc

SEQ ID NO: 980514 - DNA, 15 bp, Homo sapiens
ccaggttgtagggct

SEQ ID NO: 980515 - DNA, 15 bp, Homo sapiens
caggttgtagggctg

SEQ ID NO: 980516 - DNA, 15 bp, Homo sapiens
aggttgtagggctgg

SEQ ID NO: 980517 - DNA, 15 bp, Homo sapiens
ggttgtagggctgga

SEQ ID NO: 980518 - DNA, 15 bp, Homo sapiens
gttgtagggctggaa

SEQ ID NO: 980519 - DNA, 15 bp, Homo sapiens
ttgtagggctggaat

SEQ ID NO: 980520 - DNA, 15 bp, Homo sapiens
tgtagggctggaata

SEQ ID NO: 980521 - DNA, 15 bp, Homo sapiens
gtagggctggaataa

SEQ ID NO: 980522 - DNA, 15 bp, Homo sapiens
tagggctggaataaa

SEQ ID NO: 980523 - DNA, 15 bp, Homo sapiens
agggctggaataaaa

SEQ ID NO: 980524 - DNA, 15 bp, Homo sapiens
gggctggaataaaaa

SEQ ID NO: 980525 - DNA, 15 bp, Homo sapiens
ggctggaataaaaaa

SEQ ID NO: 980526 - DNA, 15 bp, Homo sapiens
gctggaataaaaaat

SEQ ID NO: 980527 - DNA, 15 bp, Homo sapiens
ctggaataaaaaata

SEQ ID NO: 980528 - DNA, 15 bp, Homo sapiens
tggaataaaaaataa

SEQ ID NO: 980529 - DNA, 15 bp, Homo sapiens
ggaataaaaaataaa

SEQ ID NO: 980530 - DNA, 15 bp, Homo sapiens
gaataaaaaataaaa

SEQ ID NO: 980531 - DNA, 15 bp, Homo sapiens
aataaaaaataaaat

SEQ ID NO: 980532 - DNA, 15 bp, Homo sapiens
ataaaaaataaaata

SEQ ID NO: 980533 - DNA, 15 bp, Homo sapiens
taaaaaataaaatac

SEQ ID NO: 980534 - DNA, 15 bp, Homo sapiens
aaaaaataaaataca

SEQ ID NO: 980535 - DNA, 15 bp, Homo sapiens
aaaaataaaatacaa

SEQ ID NO: 980536 - DNA, 15 bp, Homo sapiens
aaaataaaatacaaa

SEQ ID NO: 980537 - DNA, 15 bp, Homo sapiens
aaataaaatacaaac

SEQ ID NO: 980538 - DNA, 15 bp, Homo sapiens
aataaaatacaaact

SEQ ID NO: 980539 - DNA, 15 bp, Homo sapiens
ataaaatacaaactt

SEQ ID NO: 980540 - DNA, 15 bp, Homo sapiens
taaaatacaaacttg

SEQ ID NO: 980541 - DNA, 15 bp, Homo sapiens
aaaatacaaacttgt

SEQ ID NO: 980542 - DNA, 15 bp, Homo sapiens
aaatacaaacttgtg

SEQ ID NO: 980543 - DNA, 15 bp, Homo sapiens
aatacaaacttgtgc

SEQ ID NO: 980544 - DNA, 15 bp, Homo sapiens
atacaaacttgtgcc

SEQ ID NO: 980545 - DNA, 15 bp, Homo sapiens
tacaaacttgtgcct

SEQ ID NO: 980546 - DNA, 15 bp, Homo sapiens
acaaacttgtgcctg

SEQ ID NO: 980547 - DNA, 15 bp, Homo sapiens
caaacttgtgcctga

SEQ ID NO: 980548 - DNA, 15 bp, Homo sapiens
aaacttgtgcctgat

SEQ ID NO: 980549 - DNA, 15 bp, Homo sapiens
aacttgtgcctgatc

SEQ ID NO: 980550 - DNA, 15 bp, Homo sapiens
acttgtgcctgatcc

SEQ ID NO: 980551 - DNA, 15 bp, Homo sapiens
cttgtgcctgatcca

SEQ ID NO: 980552 - DNA, 15 bp, Homo sapiens
ttgtgcctgatccag

SEQ ID NO: 980553 - DNA, 15 bp, Homo sapiens
tgtgcctgatccaga

SEQ ID NO: 980554 - DNA, 15 bp, Homo sapiens
gtgcctgatccagaa

SEQ ID NO: 980555 - DNA, 15 bp, Homo sapiens
tgcctgatccagaaa

SEQ ID NO: 980556 - DNA, 15 bp, Homo sapiens
gcctgatccagaaac

SEQ ID NO: 980557 - DNA, 15 bp, Homo sapiens
cctgatccagaaacc

SEQ ID NO: 980558 - DNA, 15 bp, Homo sapiens
ctgatccagaaaccc

SEQ ID NO: 980559 - DNA, 15 bp, Homo sapiens
tgatccagaaacccg

SEQ ID NO: 980560 - DNA, 15 bp, Homo sapiens
gatccagaaacccgg

SEQ ID NO: 980561 - DNA, 15 bp, Homo sapiens
atccagaaacccggg

SEQ ID NO: 980562 - DNA, 15 bp, Homo sapiens
tccagaaacccgggc

SEQ ID NO: 980563 - DNA, 15 bp, Homo sapiens
ccagaaacccgggcg

SEQ ID NO: 980564 - DNA, 15 bp, Homo sapiens
cagaaacccgggcgg

SEQ ID NO: 980565 - DNA, 15 bp, Homo sapiens
agaaacccgggcggg

SEQ ID NO: 980566 - DNA, 15 bp, Homo sapiens
gaaacccgggcggga

SEQ ID NO: 980567 - DNA, 15 bp, Homo sapiens
aaacccgggcgggag

SEQ ID NO: 980568 - DNA, 15 bp, Homo sapiens
aacccgggcgggagt

SEQ ID NO: 980569 - DNA, 15 bp, Homo sapiens
acccgggcgggagtt

SEQ ID NO: 980570 - DNA, 15 bp, Homo sapiens
cccgggcgggagttg

SEQ ID NO: 980571 - DNA, 15 bp, Homo sapiens
ccgggcgggagttgg

SEQ ID NO: 980572 - DNA, 15 bp, Homo sapiens
cgggcgggagttggg

SEQ ID NO: 980573 - DNA, 15 bp, Homo sapiens
gggcgggagttgggt

SEQ ID NO: 980574 - DNA, 15 bp, Homo sapiens
ggcgggagttgggtc

SEQ ID NO: 980575 - DNA, 15 bp, Homo sapiens
gcgggagttgggtca

SEQ ID NO: 980576 - DNA, 15 bp, Homo sapiens
cgggagttgggtcag

SEQ ID NO: 980577 - DNA, 15 bp, Homo sapiens
gggagttgggtcaga

SEQ ID NO: 980578 - DNA, 15 bp, Homo sapiens
ggagttgggtcagac

SEQ ID NO: 980579 - DNA, 15 bp, Homo sapiens
gagttgggtcagaca

SEQ ID NO: 980580 - DNA, 15 bp, Homo sapiens
agttgggtcagacag

SEQ ID NO: 980581 - DNA, 15 bp, Homo sapiens
gttgggtcagacaga

SEQ ID NO: 980582 - DNA, 15 bp, Homo sapiens
ttgggtcagacagaa

SEQ ID NO: 980583 - DNA, 15 bp, Homo sapiens
tgggtcagacagaag

SEQ ID NO: 980584 - DNA, 15 bp, Homo sapiens
gggtcagacagaaga

SEQ ID NO: 980585 - DNA, 15 bp, Homo sapiens
ggtcagacagaagag

SEQ ID NO: 980586 - DNA, 15 bp, Homo sapiens
gtcagacagaagagc

SEQ ID NO: 980587 - DNA, 15 bp, Homo sapiens
tcagacagaagagcg

SEQ ID NO: 980588 - DNA, 15 bp, Homo sapiens
cagacagaagagcgt

SEQ ID NO: 980589 - DNA, 15 bp, Homo sapiens
agacagaagagcgtg

SEQ ID NO: 980590 - DNA, 15 bp, Homo sapiens
gacagaagagcgtgg

SEQ ID NO: 980591 - DNA, 15 bp, Homo sapiens
acagaagagcgtggg

SEQ ID NO: 980592 - DNA, 15 bp, Homo sapiens
cagaagagcgtgggc

SEQ ID NO: 980593 - DNA, 15 bp, Homo sapiens
agaagagcgtgggct

SEQ ID NO: 980594 - DNA, 15 bp, Homo sapiens
gaagagcgtgggctg

SEQ ID NO: 980595 - DNA, 15 bp, Homo sapiens
aagagcgtgggctgg

SEQ ID NO: 980596 - DNA, 15 bp, Homo sapiens
agagcgtgggctggg

SEQ ID NO: 980597 - DNA, 15 bp, Homo sapiens
gagcgtgggctggga

SEQ ID NO: 980598 - DNA, 15 bp, Homo sapiens
agcgtgggctgggat

SEQ ID NO: 980599 - DNA, 15 bp, Homo sapiens
gcgtgggctgggatt

SEQ ID NO: 980600 - DNA, 15 bp, Homo sapiens
cgtgggctgggatta

SEQ ID NO: 980601 - DNA, 15 bp, Homo sapiens
gtgggctgggattag

SEQ ID NO: 980602 - DNA, 15 bp, Homo sapiens
tgggctgggattagc

SEQ ID NO: 980603 - DNA, 15 bp, Homo sapiens
gggctgggattagct

SEQ ID NO: 980604 - DNA, 15 bp, Homo sapiens
ggctgggattagcta

SEQ ID NO: 980605 - DNA, 15 bp, Homo sapiens
gctgggattagctac

SEQ ID NO: 980606 - DNA, 15 bp, Homo sapiens
ctgggattagctacc

SEQ ID NO: 980607 - DNA, 15 bp, Homo sapiens
tgggattagctacca

SEQ ID NO: 980608 - DNA, 15 bp, Homo sapiens
gggattagctaccac

SEQ ID NO: 980609 - DNA, 15 bp, Homo sapiens
ggattagctaccacg

SEQ ID NO: 980610 - DNA, 15 bp, Homo sapiens
gattagctaccacga

SEQ ID NO: 980611 - DNA, 15 bp, Homo sapiens
attagctaccacgaa

SEQ ID NO: 980612 - DNA, 15 bp, Homo sapiens
ttagctaccacgaaa

SEQ ID NO: 980613 - DNA, 15 bp, Homo sapiens
tagctaccacgaaaa

SEQ ID NO: 980614 - DNA, 15 bp, Homo sapiens
agctaccacgaaaag

SEQ ID NO: 980615 - DNA, 15 bp, Homo sapiens
gctaccacgaaaagg

SEQ ID NO: 980616 - DNA, 15 bp, Homo sapiens
ctaccacgaaaagga

SEQ ID NO: 980617 - DNA, 15 bp, Homo sapiens
taccacgaaaaggaa

SEQ ID NO: 980618 - DNA, 15 bp, Homo sapiens
accacgaaaaggaac

SEQ ID NO: 980619 - DNA, 15 bp, Homo sapiens
ccacgaaaaggaacg

SEQ ID NO: 980620 - DNA, 15 bp, Homo sapiens
cacgaaaaggaacgg

SEQ ID NO: 980621 - DNA, 15 bp, Homo sapiens
acgaaaaggaacggt

SEQ ID NO: 980622 - DNA, 15 bp, Homo sapiens
cgaaaaggaacggtg

SEQ ID NO: 980623 - DNA, 15 bp, Homo sapiens
gaaaaggaacggtgg

SEQ ID NO: 980624 - DNA, 15 bp, Homo sapiens
aaaaggaacggtggc

SEQ ID NO: 980625 - DNA, 15 bp, Homo sapiens
aaaggaacggtggcc

SEQ ID NO: 980626 - DNA, 15 bp, Homo sapiens
aaggaacggtggcca

SEQ ID NO: 980627 - DNA, 15 bp, Homo sapiens
aggaacggtggccag

SEQ ID NO: 980628 - DNA, 15 bp, Homo sapiens
ggaacggtggccagg

SEQ ID NO: 980629 - DNA, 15 bp, Homo sapiens
gaacggtggccaggc

SEQ ID NO: 980630 - DNA, 15 bp, Homo sapiens
aacggtggccaggct

SEQ ID NO: 980631 - DNA, 15 bp, Homo sapiens
acggtggccaggctc

SEQ ID NO: 980632 - DNA, 15 bp, Homo sapiens
cggtggccaggctcc

SEQ ID NO: 980633 - DNA, 15 bp, Homo sapiens
ggtggccaggctcca

SEQ ID NO: 980634 - DNA, 15 bp, Homo sapiens
gtggccaggctccag

SEQ ID NO: 980635 - DNA, 15 bp, Homo sapiens
tggccaggctccagg

SEQ ID NO: 980636 - DNA, 15 bp, Homo sapiens
ggccaggctccagga

SEQ ID NO: 980637 - DNA, 15 bp, Homo sapiens
gccaggctccaggag

SEQ ID NO: 980638 - DNA, 15 bp, Homo sapiens
ccaggctccaggaga

SEQ ID NO: 980639 - DNA, 15 bp, Homo sapiens
caggctccaggagac

SEQ ID NO: 980640 - DNA, 15 bp, Homo sapiens
aggctccaggagacg

SEQ ID NO: 980641 - DNA, 15 bp, Homo sapiens
ggctccaggagacgc

SEQ ID NO: 980642 - DNA, 15 bp, Homo sapiens
gctccaggagacgct

SEQ ID NO: 980643 - DNA, 15 bp, Homo sapiens
ctccaggagacgctg

SEQ ID NO: 980644 - DNA, 15 bp, Homo sapiens
tccaggagacgctgg

SEQ ID NO: 980645 - DNA, 15 bp, Homo sapiens
ccaggagacgctgga

SEQ ID NO: 980646 - DNA, 15 bp, Homo sapiens
caggagacgctggag

SEQ ID NO: 980647 - DNA, 15 bp, Homo sapiens
aggagacgctggagc

SEQ ID NO: 980648 - DNA, 15 bp, Homo sapiens
ggagacgctggagcg

SEQ ID NO: 980649 - DNA, 15 bp, Homo sapiens
gagacgctggagcgc

SEQ ID NO: 980650 - DNA, 15 bp, Homo sapiens
agacgctggagcgcc

SEQ ID NO: 980651 - DNA, 15 bp, Homo sapiens
gacgctggagcgccg

SEQ ID NO: 980652 - DNA, 15 bp, Homo sapiens
acgctggagcgccgg

SEQ ID NO: 980653 - DNA, 15 bp, Homo sapiens
cgctggagcgccggg

SEQ ID NO: 980654 - DNA, 15 bp, Homo sapiens
gctggagcgccgggc

SEQ ID NO: 980655 - DNA, 15 bp, Homo sapiens
ctggagcgccgggcc

SEQ ID NO: 980656 - DNA, 15 bp, Homo sapiens
tggagcgccgggccc

SEQ ID NO: 980657 - DNA, 15 bp, Homo sapiens
ggagcgccgggcccg

SEQ ID NO: 980658 - DNA, 15 bp, Homo sapiens
gagcgccgggcccgt

SEQ ID NO: 980659 - DNA, 15 bp, Homo sapiens
agcgccgggcccgtc

SEQ ID NO: 980660 - DNA, 15 bp, Homo sapiens
gcgccgggcccgtcg

SEQ ID NO: 980661 - DNA, 15 bp, Homo sapiens
cgccgggcccgtcgt

SEQ ID NO: 980662 - DNA, 15 bp, Homo sapiens
gccgggcccgtcgtg

SEQ ID NO: 980663 - DNA, 15 bp, Homo sapiens
ccgggcccgtcgtgg

SEQ ID NO: 980664 - DNA, 15 bp, Homo sapiens
cgggcccgtcgtggg

SEQ ID NO: 980665 - DNA, 15 bp, Homo sapiens
gggcccgtcgtgggc

SEQ ID NO: 980666 - DNA, 15 bp, Homo sapiens
ggcccgtcgtgggcg

SEQ ID NO: 980667 - DNA, 15 bp, Homo sapiens
gcccgtcgtgggcgt

SEQ ID NO: 980668 - DNA, 15 bp, Homo sapiens
cccgtcgtgggcgtg

SEQ ID NO: 980669 - DNA, 15 bp, Homo sapiens
ccgtcgtgggcgtgg

SEQ ID NO: 980670 - DNA, 15 bp, Homo sapiens
cgtcgtgggcgtggt

SEQ ID NO: 980671 - DNA, 15 bp, Homo sapiens
gtcgtgggcgtggtc

SEQ ID NO: 980672 - DNA, 15 bp, Homo sapiens
tcgtgggcgtggtct

SEQ ID NO: 980673 - DNA, 15 bp, Homo sapiens
cgtgggcgtggtctg

SEQ ID NO: 980674 - DNA, 15 bp, Homo sapiens
gtgggcgtggtctgg

SEQ ID NO: 980675 - DNA, 15 bp, Homo sapiens
tgggcgtggtctggg

SEQ ID NO: 980676 - DNA, 15 bp, Homo sapiens
gggcgtggtctgggc

SEQ ID NO: 980677 - DNA, 15 bp, Homo sapiens
ggcgtggtctgggca

SEQ ID NO: 980678 - DNA, 15 bp, Homo sapiens
gcgtggtctgggcag

SEQ ID NO: 980679 - DNA, 15 bp, Homo sapiens
cgtggtctgggcaga

SEQ ID NO: 980680 - DNA, 15 bp, Homo sapiens
gtggtctgggcagac

SEQ ID NO: 980681 - DNA, 15 bp, Homo sapiens
tggtctgggcagact

SEQ ID NO: 980682 - DNA, 15 bp, Homo sapiens
ggtctgggcagactc

SEQ ID NO: 980683 - DNA, 15 bp, Homo sapiens
gtctgggcagactca

SEQ ID NO: 980684 - DNA, 15 bp, Homo sapiens
tctgggcagactcag

SEQ ID NO: 980685 - DNA, 15 bp, Homo sapiens
ctgggcagactcagc

SEQ ID NO: 980686 - DNA, 15 bp, Homo sapiens
tgggcagactcagcg

SEQ ID NO: 980687 - DNA, 15 bp, Homo sapiens
gggcagactcagcgt

SEQ ID NO: 980688 - DNA, 15 bp, Homo sapiens
ggcagactcagcgtt

SEQ ID NO: 980689 - DNA, 15 bp, Homo sapiens
gcagactcagcgttg

SEQ ID NO: 980690 - DNA, 15 bp, Homo sapiens
cagactcagcgttgc

SEQ ID NO: 980691 - DNA, 15 bp, Homo sapiens
agactcagcgttgcc

SEQ ID NO: 980692 - DNA, 15 bp, Homo sapiens
gactcagcgttgcct

SEQ ID NO: 980693 - DNA, 15 bp, Homo sapiens
actcagcgttgcctt

SEQ ID NO: 980694 - DNA, 15 bp, Homo sapiens
ctcagcgttgccttt

SEQ ID NO: 980695 - DNA, 15 bp, Homo sapiens
tcagcgttgcctttt

SEQ ID NO: 980696 - DNA, 15 bp, Homo sapiens
cagcgttgccttttg

SEQ ID NO: 980697 - DNA, 15 bp, Homo sapiens
agcgttgccttttgc

SEQ ID NO: 980698 - DNA, 15 bp, Homo sapiens
gcgttgccttttgcc

SEQ ID NO: 980699 - DNA, 15 bp, Homo sapiens
cgttgccttttgcct

SEQ ID NO: 980700 - DNA, 15 bp, Homo sapiens
gttgccttttgcctc

SEQ ID NO: 980701 - DNA, 15 bp, Homo sapiens
ttgccttttgcctct

SEQ ID NO: 980702 - DNA, 15 bp, Homo sapiens
tgccttttgcctctc

SEQ ID NO: 980703 - DNA, 15 bp, Homo sapiens
gccttttgcctctcc

SEQ ID NO: 980704 - DNA, 15 bp, Homo sapiens
ccttttgcctctcca

SEQ ID NO: 980705 - DNA, 15 bp, Homo sapiens
cttttgcctctccaa

SEQ ID NO: 980706 - DNA, 15 bp, Homo sapiens
ttttgcctctccaaa

SEQ ID NO: 980707 - DNA, 15 bp, Homo sapiens
tttgcctctccaaaa

SEQ ID NO: 980708 - DNA, 15 bp, Homo sapiens
ttgcctctccaaaac

SEQ ID NO: 980709 - DNA, 15 bp, Homo sapiens
tgcctctccaaaacg

SEQ ID NO: 980710 - DNA, 15 bp, Homo sapiens
gcctctccaaaacgc

SEQ ID NO: 980711 - DNA, 15 bp, Homo sapiens
cctctccaaaacgca

SEQ ID NO: 980712 - DNA, 15 bp, Homo sapiens
ctctccaaaacgcag

SEQ ID NO: 980713 - DNA, 15 bp, Homo sapiens
tctccaaaacgcagc

SEQ ID NO: 980714 - DNA, 15 bp, Homo sapiens
ctccaaaacgcagca

SEQ ID NO: 980715 - DNA, 15 bp, Homo sapiens
tccaaaacgcagcat

SEQ ID NO: 980716 - DNA, 15 bp, Homo sapiens
ccaaaacgcagcatc

SEQ ID NO: 980717 - DNA, 15 bp, Homo sapiens
caaaacgcagcatcg

SEQ ID NO: 980718 - DNA, 15 bp, Homo sapiens
aaaacgcagcatcgc

SEQ ID NO: 980719 - DNA, 15 bp, Homo sapiens
aaacgcagcatcgcg

SEQ ID NO: 980720 - DNA, 15 bp, Homo sapiens
aacgcagcatcgcgt

SEQ ID NO: 980721 - DNA, 15 bp, Homo sapiens
acgcagcatcgcgtc

SEQ ID NO: 980722 - DNA, 15 bp, Homo sapiens
cgcagcatcgcgtct

SEQ ID NO: 980723 - DNA, 15 bp, Homo sapiens
gcagcatcgcgtctc

SEQ ID NO: 980724 - DNA, 15 bp, Homo sapiens
cagcatcgcgtctcg

SEQ ID NO: 980725 - DNA, 15 bp, Homo sapiens
agcatcgcgtctcgg

SEQ ID NO: 980726 - DNA, 15 bp, Homo sapiens
gcatcgcgtctcggg

SEQ ID NO: 980727 - DNA, 15 bp, Homo sapiens
catcgcgtctcgggg

SEQ ID NO: 980728 - DNA, 15 bp, Homo sapiens
atcgcgtctcggggg

SEQ ID NO: 980729 - DNA, 15 bp, Homo sapiens
tcgcgtctcggggga

SEQ ID NO: 980730 - DNA, 15 bp, Homo sapiens
cgcgtctcgggggag

SEQ ID NO: 980731 - DNA, 15 bp, Homo sapiens
gcgtctcgggggagg

SEQ ID NO: 980732 - DNA, 15 bp, Homo sapiens
cgtctcgggggagga

SEQ ID NO: 980733 - DNA, 15 bp, Homo sapiens
gtctcgggggaggag

SEQ ID NO: 980734 - DNA, 15 bp, Homo sapiens
tctcgggggaggagt

SEQ ID NO: 980735 - DNA, 15 bp, Homo sapiens
ctcgggggaggagtc

SEQ ID NO: 980736 - DNA, 15 bp, Homo sapiens
tcgggggaggagtct

SEQ ID NO: 980737 - DNA, 15 bp, Homo sapiens
cgggggaggagtctg

SEQ ID NO: 980738 - DNA, 15 bp, Homo sapiens
gggggaggagtctgt

SEQ ID NO: 980739 - DNA, 15 bp, Homo sapiens
ggggaggagtctgta

SEQ ID NO: 980740 - DNA, 15 bp, Homo sapiens
gggaggagtctgtac

SEQ ID NO: 980741 - DNA, 15 bp, Homo sapiens
ggaggagtctgtacc

SEQ ID NO: 980742 - DNA, 15 bp, Homo sapiens
gaggagtctgtaccc

SEQ ID NO: 980743 - DNA, 15 bp, Homo sapiens
aggagtctgtaccct

SEQ ID NO: 980744 - DNA, 15 bp, Homo sapiens
ggagtctgtaccctc

SEQ ID NO: 980745 - DNA, 15 bp, Homo sapiens
gagtctgtaccctcg

SEQ ID NO: 980746 - DNA, 15 bp, Homo sapiens
agtctgtaccctcgt

SEQ ID NO: 980747 - DNA, 15 bp, Homo sapiens
gtctgtaccctcgtg

SEQ ID NO: 980748 - DNA, 15 bp, Homo sapiens
tctgtaccctcgtga

SEQ ID NO: 980749 - DNA, 15 bp, Homo sapiens
ctgtaccctcgtgat

SEQ ID NO: 980750 - DNA, 15 bp, Homo sapiens
tgtaccctcgtgatg

SEQ ID NO: 980751 - DNA, 15 bp, Homo sapiens
gtaccctcgtgatgt

SEQ ID NO: 980752 - DNA, 15 bp, Homo sapiens
taccctcgtgatgtc

SEQ ID NO: 980753 - DNA, 15 bp, Homo sapiens
accctcgtgatgtcc

SEQ ID NO: 980754 - DNA, 15 bp, Homo sapiens
ccctcgtgatgtccc

SEQ ID NO: 980755 - DNA, 15 bp, Homo sapiens
cctcgtgatgtcccc

SEQ ID NO: 980756 - DNA, 15 bp, Homo sapiens
ctcgtgatgtccccg

SEQ ID NO: 980757 - DNA, 15 bp, Homo sapiens
tcgtgatgtccccgc

SEQ ID NO: 980758 - DNA, 15 bp, Homo sapiens
cgtgatgtccccgcc

SEQ ID NO: 980759 - DNA, 15 bp, Homo sapiens
gtgatgtccccgccc

SEQ ID NO: 980760 - DNA, 15 bp, Homo sapiens
tgatgtccccgcccc

SEQ ID NO: 980761 - DNA, 15 bp, Homo sapiens
gatgtccccgccccg

SEQ ID NO: 980762 - DNA, 15 bp, Homo sapiens
atgtccccgccccgg

SEQ ID NO: 980763 - DNA, 15 bp, Homo sapiens
tgtccccgccccggt

SEQ ID NO: 980764 - DNA, 15 bp, Homo sapiens
gtccccgccccggtt

SEQ ID NO: 980765 - DNA, 15 bp, Homo sapiens
tccccgccccggttc

SEQ ID NO: 980766 - DNA, 15 bp, Homo sapiens
ccccgccccggttcc

SEQ ID NO: 980767 - DNA, 15 bp, Homo sapiens
cccgccccggttccc

SEQ ID NO: 980768 - DNA, 15 bp, Homo sapiens
ccgccccggttccca

SEQ ID NO: 980769 - DNA, 15 bp, Homo sapiens
cgccccggttcccag

SEQ ID NO: 980770 - DNA, 15 bp, Homo sapiens
gccccggttcccagg

SEQ ID NO: 980771 - DNA, 15 bp, Homo sapiens
ccccggttcccaggc

SEQ ID NO: 980772 - DNA, 15 bp, Homo sapiens
cccggttcccaggca

SEQ ID NO: 980773 - DNA, 15 bp, Homo sapiens
ccggttcccaggcaa

SEQ ID NO: 980774 - DNA, 15 bp, Homo sapiens
cggttcccaggcaag

SEQ ID NO: 980775 - DNA, 15 bp, Homo sapiens
ggttcccaggcaagt

SEQ ID NO: 980776 - DNA, 15 bp, Homo sapiens
gttcccaggcaagtt

SEQ ID NO: 980777 - DNA, 15 bp, Homo sapiens
ttcccaggcaagttt

SEQ ID NO: 980778 - DNA, 15 bp, Homo sapiens
tcccaggcaagttta

SEQ ID NO: 980779 - DNA, 15 bp, Homo sapiens
cccaggcaagtttag

SEQ ID NO: 980780 - DNA, 15 bp, Homo sapiens
ccaggcaagtttagg

SEQ ID NO: 980781 - DNA, 15 bp, Homo sapiens
caggcaagtttaggg

SEQ ID NO: 980782 - DNA, 15 bp, Homo sapiens
aggcaagtttaggga

SEQ ID NO: 980783 - DNA, 15 bp, Homo sapiens
ggcaagtttagggaa

SEQ ID NO: 980784 - DNA, 15 bp, Homo sapiens
gcaagtttagggaag

SEQ ID NO: 980785 - DNA, 15 bp, Homo sapiens
caagtttagggaagt

SEQ ID NO: 980786 - DNA, 15 bp, Homo sapiens
aagtttagggaagtg

SEQ ID NO: 980787 - DNA, 15 bp, Homo sapiens
agtttagggaagtga

SEQ ID NO: 980788 - DNA, 15 bp, Homo sapiens
gtttagggaagtgaa

SEQ ID NO: 980789 - DNA, 15 bp, Homo sapiens
tttagggaagtgaaa

SEQ ID NO: 980790 - DNA, 15 bp, Homo sapiens
ttagggaagtgaaag

SEQ ID NO: 980791 - DNA, 15 bp, Homo sapiens
tagggaagtgaaagg

SEQ ID NO: 980792 - DNA, 15 bp, Homo sapiens
agggaagtgaaaggc

SEQ ID NO: 980793 - DNA, 15 bp, Homo sapiens
gggaagtgaaaggcg

SEQ ID NO: 980794 - DNA, 15 bp, Homo sapiens
ggaagtgaaaggcgc

SEQ ID NO: 980795 - DNA, 15 bp, Homo sapiens
gaagtgaaaggcgcc

SEQ ID NO: 980796 - DNA, 15 bp, Homo sapiens
aagtgaaaggcgcca

SEQ ID NO: 980797 - DNA, 15 bp, Homo sapiens
agtgaaaggcgccag

SEQ ID NO: 980798 - DNA, 15 bp, Homo sapiens
gtgaaaggcgccagg

SEQ ID NO: 980799 - DNA, 15 bp, Homo sapiens
tgaaaggcgccaggt

SEQ ID NO: 980800 - DNA, 15 bp, Homo sapiens
gaaaggcgccaggtg

SEQ ID NO: 980801 - DNA, 15 bp, Homo sapiens
aaaggcgccaggtgc

SEQ ID NO: 980802 - DNA, 15 bp, Homo sapiens
aaggcgccaggtgcc

SEQ ID NO: 980803 - DNA, 15 bp, Homo sapiens
aggcgccaggtgcca

SEQ ID NO: 980804 - DNA, 15 bp, Homo sapiens
ggcgccaggtgccag

SEQ ID NO: 980805 - DNA, 15 bp, Homo sapiens
gcgccaggtgccagt

SEQ ID NO: 980806 - DNA, 15 bp, Homo sapiens
cgccaggtgccagtc

SEQ ID NO: 980807 - DNA, 15 bp, Homo sapiens
gccaggtgccagtcc

SEQ ID NO: 980808 - DNA, 15 bp, Homo sapiens
ccaggtgccagtcct

SEQ ID NO: 980809 - DNA, 15 bp, Homo sapiens
caggtgccagtcctg

SEQ ID NO: 980810 - DNA, 15 bp, Homo sapiens
aggtgccagtcctgg

SEQ ID NO: 980811 - DNA, 15 bp, Homo sapiens
ggtgccagtcctggc

SEQ ID NO: 980812 - DNA, 15 bp, Homo sapiens
gtgccagtcctggcc

SEQ ID NO: 980813 - DNA, 15 bp, Homo sapiens
tgccagtcctggcct

SEQ ID NO: 980814 - DNA, 15 bp, Homo sapiens
gccagtcctggcctc

SEQ ID NO: 980815 - DNA, 15 bp, Homo sapiens
ccagtcctggcctct

SEQ ID NO: 980816 - DNA, 15 bp, Homo sapiens
cagtcctggcctctg

SEQ ID NO: 980817 - DNA, 15 bp, Homo sapiens
agtcctggcctctga

SEQ ID NO: 980818 - DNA, 15 bp, Homo sapiens
gtcctggcctctgat

SEQ ID NO: 980819 - DNA, 15 bp, Homo sapiens
tcctggcctctgatg

SEQ ID NO: 980820 - DNA, 15 bp, Homo sapiens
cctggcctctgatgt

SEQ ID NO: 980821 - DNA, 15 bp, Homo sapiens
ctggcctctgatgta

SEQ ID NO: 980822 - DNA, 15 bp, Homo sapiens
tggcctctgatgtaa

SEQ ID NO: 980823 - DNA, 15 bp, Homo sapiens
ggcctctgatgtaac

SEQ ID NO: 980824 - DNA, 15 bp, Homo sapiens
gcctctgatgtaacc

SEQ ID NO: 980825 - DNA, 15 bp, Homo sapiens
cctctgatgtaaccc

SEQ ID NO: 980826 - DNA, 15 bp, Homo sapiens
ctctgatgtaaccca

SEQ ID NO: 980827 - DNA, 15 bp, Homo sapiens
tctgatgtaacccag

SEQ ID NO: 980828 - DNA, 15 bp, Homo sapiens
ctgatgtaacccagc

SEQ ID NO: 980829 - DNA, 15 bp, Homo sapiens
tgatgtaacccagcg

SEQ ID NO: 980830 - DNA, 15 bp, Homo sapiens
gatgtaacccagcgc

SEQ ID NO: 980831 - DNA, 15 bp, Homo sapiens
atgtaacccagcgcc

SEQ ID NO: 980832 - DNA, 15 bp, Homo sapiens
tgtaacccagcgccc

SEQ ID NO: 980833 - DNA, 15 bp, Homo sapiens
gtaacccagcgcccc

SEQ ID NO: 980834 - DNA, 15 bp, Homo sapiens
taacccagcgccccg

SEQ ID NO: 980835 - DNA, 15 bp, Homo sapiens
aacccagcgccccgc

SEQ ID NO: 980836 - DNA, 15 bp, Homo sapiens
acccagcgccccgca

SEQ ID NO: 980837 - DNA, 15 bp, Homo sapiens
cccagcgccccgcag

SEQ ID NO: 980838 - DNA, 15 bp, Homo sapiens
ccagcgccccgcagt

SEQ ID NO: 980839 - DNA, 15 bp, Homo sapiens
cagcgccccgcagtc

SEQ ID NO: 980840 - DNA, 15 bp, Homo sapiens
agcgccccgcagtcc

SEQ ID NO: 980841 - DNA, 15 bp, Homo sapiens
gcgccccgcagtccc

SEQ ID NO: 980842 - DNA, 15 bp, Homo sapiens
cgccccgcagtcccg

SEQ ID NO: 980843 - DNA, 15 bp, Homo sapiens
gccccgcagtcccga

SEQ ID NO: 980844 - DNA, 15 bp, Homo sapiens
ccccgcagtcccgac

SEQ ID NO: 980845 - DNA, 15 bp, Homo sapiens
cccgcagtcccgaca

SEQ ID NO: 980846 - DNA, 15 bp, Homo sapiens
ccgcagtcccgacac

SEQ ID NO: 980847 - DNA, 15 bp, Homo sapiens
cgcagtcccgacaca

SEQ ID NO: 980848 - DNA, 15 bp, Homo sapiens
gcagtcccgacacag

SEQ ID NO: 980849 - DNA, 15 bp, Homo sapiens
cagtcccgacacaga

SEQ ID NO: 980850 - DNA, 15 bp, Homo sapiens
agtcccgacacagat

SEQ ID NO: 980851 - DNA, 15 bp, Homo sapiens
gtcccgacacagatt

SEQ ID NO: 980852 - DNA, 15 bp, Homo sapiens
tcccgacacagattc

SEQ ID NO: 980853 - DNA, 15 bp, Homo sapiens
cccgacacagattcc

SEQ ID NO: 980854 - DNA, 15 bp, Homo sapiens
ccgacacagattcct

SEQ ID NO: 980855 - DNA, 15 bp, Homo sapiens
cgacacagattcctg

SEQ ID NO: 980856 - DNA, 15 bp, Homo sapiens
gacacagattcctgg

SEQ ID NO: 980857 - DNA, 15 bp, Homo sapiens
acacagattcctgga

SEQ ID NO: 980858 - DNA, 15 bp, Homo sapiens
cacagattcctggat

SEQ ID NO: 980859 - DNA, 15 bp, Homo sapiens
acagattcctggatc

SEQ ID NO: 980860 - DNA, 15 bp, Homo sapiens
cagattcctggatct

SEQ ID NO: 980861 - DNA, 15 bp, Homo sapiens
agattcctggatctc

SEQ ID NO: 980862 - DNA, 15 bp, Homo sapiens
gattcctggatctca

SEQ ID NO: 980863 - DNA, 15 bp, Homo sapiens
attcctggatctcag

SEQ ID NO: 980864 - DNA, 15 bp, Homo sapiens
ttcctggatctcagc

SEQ ID NO: 980865 - DNA, 15 bp, Homo sapiens
tcctggatctcagcc

SEQ ID NO: 980866 - DNA, 15 bp, Homo sapiens
cctggatctcagccc

SEQ ID NO: 980867 - DNA, 15 bp, Homo sapiens
ctggatctcagcccc

SEQ ID NO: 980868 - DNA, 15 bp, Homo sapiens
tggatctcagcccca

SEQ ID NO: 980869 - DNA, 15 bp, Homo sapiens
ggatctcagccccat

SEQ ID NO: 980870 - DNA, 15 bp, Homo sapiens
gatctcagccccata

SEQ ID NO: 980871 - DNA, 15 bp, Homo sapiens
atctcagccccatag

SEQ ID NO: 980872 - DNA, 15 bp, Homo sapiens
tctcagccccatagc

SEQ ID NO: 980873 - DNA, 15 bp, Homo sapiens
ctcagccccatagca

SEQ ID NO: 980874 - DNA, 15 bp, Homo sapiens
tcagccccatagcag

SEQ ID NO: 980875 - DNA, 15 bp, Homo sapiens
cagccccatagcagc

SEQ ID NO: 980876 - DNA, 15 bp, Homo sapiens
agccccatagcagct

SEQ ID NO: 980877 - DNA, 15 bp, Homo sapiens
gccccatagcagcta

SEQ ID NO: 980878 - DNA, 15 bp, Homo sapiens
ccccatagcagctat

SEQ ID NO: 980879 - DNA, 15 bp, Homo sapiens
cccatagcagctatg

SEQ ID NO: 980880 - DNA, 15 bp, Homo sapiens
ccatagcagctatga

SEQ ID NO: 980881 - DNA, 15 bp, Homo sapiens
catagcagctatgat

SEQ ID NO: 980882 - DNA, 15 bp, Homo sapiens
atagcagctatgatc

SEQ ID NO: 980883 - DNA, 15 bp, Homo sapiens
tagcagctatgatcc

SEQ ID NO: 980884 - DNA, 15 bp, Homo sapiens
agcagctatgatccc

SEQ ID NO: 980885 - DNA, 15 bp, Homo sapiens
gcagctatgatcccg

SEQ ID NO: 980886 - DNA, 15 bp, Homo sapiens
cagctatgatcccgc

SEQ ID NO: 980887 - DNA, 15 bp, Homo sapiens
agctatgatcccgct

SEQ ID NO: 980888 - DNA, 15 bp, Homo sapiens
gctatgatcccgctg

SEQ ID NO: 980889 - DNA, 15 bp, Homo sapiens
ctatgatcccgctgc

SEQ ID NO: 980890 - DNA, 15 bp, Homo sapiens
tatgatcccgctgct

SEQ ID NO: 980891 - DNA, 15 bp, Homo sapiens
atgatcccgctgctg

SEQ ID NO: 980892 - DNA, 15 bp, Homo sapiens
tgatcccgctgctgc

SEQ ID NO: 980893 - DNA, 15 bp, Homo sapiens
gatcccgctgctgct

SEQ ID NO: 980894 - DNA, 15 bp, Homo sapiens
atcccgctgctgctg

SEQ ID NO: 980895 - DNA, 15 bp, Homo sapiens
tcccgctgctgctgg

SEQ ID NO: 980896 - DNA, 15 bp, Homo sapiens
cccgctgctgctggc

SEQ ID NO: 980897 - DNA, 15 bp, Homo sapiens
ccgctgctgctggca

SEQ ID NO: 980898 - DNA, 15 bp, Homo sapiens
cgctgctgctggcag

SEQ ID NO: 980899 - DNA, 15 bp, Homo sapiens
gctgctgctggcagc

SEQ ID NO: 980900 - DNA, 15 bp, Homo sapiens
ctgctgctggcagcg

SEQ ID NO: 980901 - DNA, 15 bp, Homo sapiens
tgctgctggcagcgc

SEQ ID NO: 980902 - DNA, 15 bp, Homo sapiens
gctgctggcagcgct

SEQ ID NO: 980903 - DNA, 15 bp, Homo sapiens
ctgctggcagcgctg

SEQ ID NO: 980904 - DNA, 15 bp, Homo sapiens
tgctggcagcgctgc

SEQ ID NO: 980905 - DNA, 15 bp, Homo sapiens
gctggcagcgctgct

SEQ ID NO: 980906 - DNA, 15 bp, Homo sapiens
ctggcagcgctgctg

SEQ ID NO: 980907 - DNA, 15 bp, Homo sapiens
tggcagcgctgctgt

SEQ ID NO: 980908 - DNA, 15 bp, Homo sapiens
ggcagcgctgctgtg

SEQ ID NO: 980909 - DNA, 15 bp, Homo sapiens
gcagcgctgctgtgc

SEQ ID NO: 980910 - DNA, 15 bp, Homo sapiens
cagcgctgctgtgcg

SEQ ID NO: 980911 - DNA, 15 bp, Homo sapiens
agcgctgctgtgcgt

SEQ ID NO: 980912 - DNA, 15 bp, Homo sapiens
gcgctgctgtgcgtc

SEQ ID NO: 980913 - DNA, 15 bp, Homo sapiens
cgctgctgtgcgtcc

SEQ ID NO: 980914 - DNA, 15 bp, Homo sapiens
gctgctgtgcgtccc

SEQ ID NO: 980915 - DNA, 15 bp, Homo sapiens
ctgctgtgcgtcccc

SEQ ID NO: 980916 - DNA, 15 bp, Homo sapiens
tgctgtgcgtccccg

SEQ ID NO: 980917 - DNA, 15 bp, Homo sapiens
gctgtgcgtccccgc

SEQ ID NO: 980918 - DNA, 15 bp, Homo sapiens
ctgtgcgtccccgcc

SEQ ID NO: 980919 - DNA, 15 bp, Homo sapiens
tgtgcgtccccgccg

SEQ ID NO: 980920 - DNA, 15 bp, Homo sapiens
gtgcgtccccgccgg

SEQ ID NO: 980921 - DNA, 15 bp, Homo sapiens
tgcgtccccgccggg

SEQ ID NO: 980922 - DNA, 15 bp, Homo sapiens
gcgtccccgccgggg

SEQ ID NO: 980923 - DNA, 15 bp, Homo sapiens
cgtccccgccggggc

SEQ ID NO: 980924 - DNA, 15 bp, Homo sapiens
gtccccgccggggcc

SEQ ID NO: 980925 - DNA, 15 bp, Homo sapiens
tccccgccggggccc

SEQ ID NO: 980926 - DNA, 15 bp, Homo sapiens
ccccgccggggccct

SEQ ID NO: 980927 - DNA, 15 bp, Homo sapiens
cccgccggggccctg

SEQ ID NO: 980928 - DNA, 15 bp, Homo sapiens
ccgccggggccctga

SEQ ID NO: 980929 - DNA, 15 bp, Homo sapiens
cgccggggccctgac

SEQ ID NO: 980930 - DNA, 15 bp, Homo sapiens
gccggggccctgacc

SEQ ID NO: 980931 - DNA, 15 bp, Homo sapiens
ccggggccctgacct

SEQ ID NO: 980932 - DNA, 15 bp, Homo sapiens
cggggccctgacctg

SEQ ID NO: 980933 - DNA, 15 bp, Homo sapiens
ggggccctgacctgc

SEQ ID NO: 980934 - DNA, 15 bp, Homo sapiens
gggccctgacctgct

SEQ ID NO: 980935 - DNA, 15 bp, Homo sapiens
ggccctgacctgcta

SEQ ID NO: 980936 - DNA, 15 bp, Homo sapiens
gccctgacctgctac

SEQ ID NO: 980937 - DNA, 15 bp, Homo sapiens
ccctgacctgctacg

SEQ ID NO: 980938 - DNA, 15 bp, Homo sapiens
cctgacctgctacgg

SEQ ID NO: 980939 - DNA, 15 bp, Homo sapiens
ctgacctgctacggg

SEQ ID NO: 980940 - DNA, 15 bp, Homo sapiens
tgacctgctacgggg

SEQ ID NO: 980941 - DNA, 15 bp, Homo sapiens
gacctgctacgggga

SEQ ID NO: 980942 - DNA, 15 bp, Homo sapiens
acctgctacggggac

SEQ ID NO: 980943 - DNA, 15 bp, Homo sapiens
cctgctacggggact

SEQ ID NO: 980944 - DNA, 15 bp, Homo sapiens
ctgctacggggactc

SEQ ID NO: 980945 - DNA, 15 bp, Homo sapiens
tgctacggggactcc

SEQ ID NO: 980946 - DNA, 15 bp, Homo sapiens
gctacggggactccg

SEQ ID NO: 980947 - DNA, 15 bp, Homo sapiens
ctacggggactccgg

SEQ ID NO: 980948 - DNA, 15 bp, Homo sapiens
tacggggactccggg

SEQ ID NO: 980949 - DNA, 15 bp, Homo sapiens
acggggactccgggc

SEQ ID NO: 980950 - DNA, 15 bp, Homo sapiens
cggggactccgggca

SEQ ID NO: 980951 - DNA, 15 bp, Homo sapiens
ggggactccgggcag

SEQ ID NO: 980952 - DNA, 15 bp, Homo sapiens
gggactccgggcagc

SEQ ID NO: 980953 - DNA, 15 bp, Homo sapiens
ggactccgggcagcc

SEQ ID NO: 980954 - DNA, 15 bp, Homo sapiens
gactccgggcagcct

SEQ ID NO: 980955 - DNA, 15 bp, Homo sapiens
actccgggcagcctg

SEQ ID NO: 980956 - DNA, 15 bp, Homo sapiens
ctccgggcagcctgt

SEQ ID NO: 980957 - DNA, 15 bp, Homo sapiens
tccgggcagcctgta

SEQ ID NO: 980958 - DNA, 15 bp, Homo sapiens
ccgggcagcctgtag

SEQ ID NO: 980959 - DNA, 15 bp, Homo sapiens
cgggcagcctgtaga

SEQ ID NO: 980960 - DNA, 15 bp, Homo sapiens
gggcagcctgtagac

SEQ ID NO: 980961 - DNA, 15 bp, Homo sapiens
ggcagcctgtagact

SEQ ID NO: 980962 - DNA, 15 bp, Homo sapiens
gcagcctgtagactg

SEQ ID NO: 980963 - DNA, 15 bp, Homo sapiens
cagcctgtagactgg

SEQ ID NO: 980964 - DNA, 15 bp, Homo sapiens
agcctgtagactggt

SEQ ID NO: 980965 - DNA, 15 bp, Homo sapiens
gcctgtagactggtg

SEQ ID NO: 980966 - DNA, 15 bp, Homo sapiens
cctgtagactggtga

SEQ ID NO: 980967 - DNA, 15 bp, Homo sapiens
ctgtagactggtgag

SEQ ID NO: 980968 - DNA, 15 bp, Homo sapiens
tgtagactggtgagt

SEQ ID NO: 980969 - DNA, 15 bp, Homo sapiens
gtagactggtgagtg

SEQ ID NO: 980970 - DNA, 15 bp, Homo sapiens
tagactggtgagtgc

SEQ ID NO: 980971 - DNA, 15 bp, Homo sapiens
agactggtgagtgcg

SEQ ID NO: 980972 - DNA, 15 bp, Homo sapiens
gactggtgagtgcgc

SEQ ID NO: 980973 - DNA, 15 bp, Homo sapiens
actggtgagtgcgca

SEQ ID NO: 980974 - DNA, 15 bp, Homo sapiens
ctggtgagtgcgcag

SEQ ID NO: 980975 - DNA, 15 bp, Homo sapiens
tggtgagtgcgcagc

SEQ ID NO: 980976 - DNA, 15 bp, Homo sapiens
ggtgagtgcgcagcg

SEQ ID NO: 980977 - DNA, 15 bp, Homo sapiens
gtgagtgcgcagcgg

SEQ ID NO: 980978 - DNA, 15 bp, Homo sapiens
tgagtgcgcagcggg

SEQ ID NO: 980979 - DNA, 15 bp, Homo sapiens
gagtgcgcagcgggg

SEQ ID NO: 980980 - DNA, 15 bp, Homo sapiens
agtgcgcagcggggg

SEQ ID NO: 980981 - DNA, 15 bp, Homo sapiens
gtgcgcagcgggggg

SEQ ID NO: 980982 - DNA, 15 bp, Homo sapiens
tgcgcagcggggggc

SEQ ID NO: 980983 - DNA, 15 bp, Homo sapiens
gcgcagcggggggcc

SEQ ID NO: 980984 - DNA, 15 bp, Homo sapiens
cgcagcggggggcct

SEQ ID NO: 980985 - DNA, 15 bp, Homo sapiens
gcagcggggggccta

SEQ ID NO: 980986 - DNA, 15 bp, Homo sapiens
cagcggggggcctac

SEQ ID NO: 980987 - DNA, 15 bp, Homo sapiens
agcggggggcctacc

SEQ ID NO: 980988 - DNA, 15 bp, Homo sapiens
gcggggggcctacca

SEQ ID NO: 980989 - DNA, 15 bp, Homo sapiens
cggggggcctaccat

SEQ ID NO: 980990 - DNA, 15 bp, Homo sapiens
ggggggcctaccatc

SEQ ID NO: 980991 - DNA, 15 bp, Homo sapiens
gggggcctaccatcg

SEQ ID NO: 980992 - DNA, 15 bp, Homo sapiens
ggggcctaccatcgc

SEQ ID NO: 980993 - DNA, 15 bp, Homo sapiens
gggcctaccatcgcc

SEQ ID NO: 980994 - DNA, 15 bp, Homo sapiens
ggcctaccatcgccc

SEQ ID NO: 980995 - DNA, 15 bp, Homo sapiens
gcctaccatcgcccc

SEQ ID NO: 980996 - DNA, 15 bp, Homo sapiens
cctaccatcgccccg

SEQ ID NO: 980997 - DNA, 15 bp, Homo sapiens
ctaccatcgccccgg

SEQ ID NO: 980998 - DNA, 15 bp, Homo sapiens
taccatcgccccggg

SEQ ID NO: 980999 - DNA, 15 bp, Homo sapiens
accatcgccccgggg

SEQ ID NO: 981000 - DNA, 15 bp, Homo sapiens
ccatcgccccggggt

SEQ ID NO: 981001 - DNA, 15 bp, Homo sapiens
catcgccccggggtc

SEQ ID NO: 981002 - DNA, 15 bp, Homo sapiens
atcgccccggggtcc

SEQ ID NO: 981003 - DNA, 15 bp, Homo sapiens
tcgccccggggtccg

SEQ ID NO: 981004 - DNA, 15 bp, Homo sapiens
cgccccggggtccgg

SEQ ID NO: 981005 - DNA, 15 bp, Homo sapiens
gccccggggtccggc

SEQ ID NO: 981006 - DNA, 15 bp, Homo sapiens
ccccggggtccggct

SEQ ID NO: 981007 - DNA, 15 bp, Homo sapiens
cccggggtccggctg

SEQ ID NO: 981008 - DNA, 15 bp, Homo sapiens
ccggggtccggctgc

SEQ ID NO: 981009 - DNA, 15 bp, Homo sapiens
cggggtccggctgcg

SEQ ID NO: 981010 - DNA, 15 bp, Homo sapiens
ggggtccggctgcgg

SEQ ID NO: 981011 - DNA, 15 bp, Homo sapiens
gggtccggctgcggt

SEQ ID NO: 981012 - DNA, 15 bp, Homo sapiens
ggtccggctgcggtc

SEQ ID NO: 981013 - DNA, 15 bp, Homo sapiens
gtccggctgcggtca

SEQ ID NO: 981014 - DNA, 15 bp, Homo sapiens
tccggctgcggtcac

SEQ ID NO: 981015 - DNA, 15 bp, Homo sapiens
ccggctgcggtcact

SEQ ID NO: 981016 - DNA, 15 bp, Homo sapiens
cggctgcggtcactc

SEQ ID NO: 981017 - DNA, 15 bp, Homo sapiens
ggctgcggtcactca

SEQ ID NO: 981018 - DNA, 15 bp, Homo sapiens
gctgcggtcactcaa

SEQ ID NO: 981019 - DNA, 15 bp, Homo sapiens
ctgcggtcactcaac

SEQ ID NO: 981020 - DNA, 15 bp, Homo sapiens
tgcggtcactcaacc

SEQ ID NO: 981021 - DNA, 15 bp, Homo sapiens
gcggtcactcaaccg

SEQ ID NO: 981022 - DNA, 15 bp, Homo sapiens
cggtcactcaaccgg

SEQ ID NO: 981023 - DNA, 15 bp, Homo sapiens
ggtcactcaaccggg

SEQ ID NO: 981024 - DNA, 15 bp, Homo sapiens
gtcactcaaccggga

SEQ ID NO: 981025 - DNA, 15 bp, Homo sapiens
tcactcaaccgggat

SEQ ID NO: 981026 - DNA, 15 bp, Homo sapiens
cactcaaccgggatg

SEQ ID NO: 981027 - DNA, 15 bp, Homo sapiens
actcaaccgggatgg

SEQ ID NO: 981028 - DNA, 15 bp, Homo sapiens
ctcaaccgggatggc

SEQ ID NO: 981029 - DNA, 15 bp, Homo sapiens
tcaaccgggatggct

SEQ ID NO: 981030 - DNA, 15 bp, Homo sapiens
caaccgggatggcta

SEQ ID NO: 981031 - DNA, 15 bp, Homo sapiens
aaccgggatggctac

SEQ ID NO: 981032 - DNA, 15 bp, Homo sapiens
accgggatggctacc

SEQ ID NO: 981033 - DNA, 15 bp, Homo sapiens
ccgggatggctacct

SEQ ID NO: 981034 - DNA, 15 bp, Homo sapiens
cgggatggctacctc

SEQ ID NO: 981035 - DNA, 15 bp, Homo sapiens
gggatggctacctcc

SEQ ID NO: 981036 - DNA, 15 bp, Homo sapiens
ggatggctacctcct

SEQ ID NO: 981037 - DNA, 15 bp, Homo sapiens
gatggctacctcctc

SEQ ID NO: 981038 - DNA, 15 bp, Homo sapiens
atggctacctcctcg

SEQ ID NO: 981039 - DNA, 15 bp, Homo sapiens
tggctacctcctcgg

SEQ ID NO: 981040 - DNA, 15 bp, Homo sapiens
ggctacctcctcggg

SEQ ID NO: 981041 - DNA, 15 bp, Homo sapiens
gctacctcctcgggg

SEQ ID NO: 981042 - DNA, 15 bp, Homo sapiens
ctacctcctcgggga

SEQ ID NO: 981043 - DNA, 15 bp, Homo sapiens
tacctcctcggggaa

SEQ ID NO: 981044 - DNA, 15 bp, Homo sapiens
acctcctcggggaac

SEQ ID NO: 981045 - DNA, 15 bp, Homo sapiens
cctcctcggggaacc

SEQ ID NO: 981046 - DNA, 15 bp, Homo sapiens
ctcctcggggaaccc

SEQ ID NO: 981047 - DNA, 15 bp, Homo sapiens
tcctcggggaaccct

SEQ ID NO: 981048 - DNA, 15 bp, Homo sapiens
cctcggggaaccctg

SEQ ID NO: 981049 - DNA, 15 bp, Homo sapiens
ctcggggaaccctgg

SEQ ID NO: 981050 - DNA, 15 bp, Homo sapiens
tcggggaaccctggg

SEQ ID NO: 981051 - DNA, 15 bp, Homo sapiens
cggggaaccctgggg

SEQ ID NO: 981052 - DNA, 15 bp, Homo sapiens
ggggaaccctggggt

SEQ ID NO: 981053 - DNA, 15 bp, Homo sapiens
gggaaccctggggtg

SEQ ID NO: 981054 - DNA, 15 bp, Homo sapiens
ggaaccctggggtgc

SEQ ID NO: 981055 - DNA, 15 bp, Homo sapiens
gaaccctggggtgcc

SEQ ID NO: 981056 - DNA, 15 bp, Homo sapiens
aaccctggggtgcct

SEQ ID NO: 981057 - DNA, 15 bp, Homo sapiens
accctggggtgcctt

SEQ ID NO: 981058 - DNA, 15 bp, Homo sapiens
ccctggggtgccttc

SEQ ID NO: 981059 - DNA, 15 bp, Homo sapiens
cctggggtgccttct

SEQ ID NO: 981060 - DNA, 15 bp, Homo sapiens
ctggggtgccttctc

SEQ ID NO: 981061 - DNA, 15 bp, Homo sapiens
tggggtgccttctct

SEQ ID NO: 981062 - DNA, 15 bp, Homo sapiens
ggggtgccttctctt

SEQ ID NO: 981063 - DNA, 15 bp, Homo sapiens
gggtgccttctcttc

SEQ ID NO: 981064 - DNA, 15 bp, Homo sapiens
ggtgccttctcttcc

SEQ ID NO: 981065 - DNA, 15 bp, Homo sapiens
gtgccttctcttccc

SEQ ID NO: 981066 - DNA, 15 bp, Homo sapiens
tgccttctcttccct

SEQ ID NO: 981067 - DNA, 15 bp, Homo sapiens
gccttctcttccctc

SEQ ID NO: 981068 - DNA, 15 bp, Homo sapiens
ccttctcttccctct

SEQ ID NO: 981069 - DNA, 15 bp, Homo sapiens
cttctcttccctctc

SEQ ID NO: 981070 - DNA, 15 bp, Homo sapiens
ttctcttccctctct

SEQ ID NO: 981071 - DNA, 15 bp, Homo sapiens
tctcttccctctctc

SEQ ID NO: 981072 - DNA, 15 bp, Homo sapiens
ctcttccctctctcc

SEQ ID NO: 981073 - DNA, 15 bp, Homo sapiens
tcttccctctctcct

SEQ ID NO: 981074 - DNA, 15 bp, Homo sapiens
cttccctctctccta

SEQ ID NO: 981075 - DNA, 15 bp, Homo sapiens
ttccctctctcctat

SEQ ID NO: 981076 - DNA, 15 bp, Homo sapiens
tccctctctcctatt

SEQ ID NO: 981077 - DNA, 15 bp, Homo sapiens
ccctctctcctattt

SEQ ID NO: 981078 - DNA, 15 bp, Homo sapiens
cctctctcctatttc

SEQ ID NO: 981079 - DNA, 15 bp, Homo sapiens
ctctctcctatttct

SEQ ID NO: 981080 - DNA, 15 bp, Homo sapiens
tctctcctatttctg

SEQ ID NO: 981081 - DNA, 15 bp, Homo sapiens
ctctcctatttctgt

SEQ ID NO: 981082 - DNA, 15 bp, Homo sapiens
tctcctatttctgtg

SEQ ID NO: 981083 - DNA, 15 bp, Homo sapiens
ctcctatttctgtgc

SEQ ID NO: 981084 - DNA, 15 bp, Homo sapiens
tcctatttctgtgca

SEQ ID NO: 981085 - DNA, 15 bp, Homo sapiens
cctatttctgtgcat

SEQ ID NO: 981086 - DNA, 15 bp, Homo sapiens
ctatttctgtgcatt

SEQ ID NO: 981087 - DNA, 15 bp, Homo sapiens
tatttctgtgcattc

SEQ ID NO: 981088 - DNA, 15 bp, Homo sapiens
atttctgtgcattct

SEQ ID NO: 981089 - DNA, 15 bp, Homo sapiens
tttctgtgcattctc

SEQ ID NO: 981090 - DNA, 15 bp, Homo sapiens
ttctgtgcattctcc

SEQ ID NO: 981091 - DNA, 15 bp, Homo sapiens
tctgtgcattctccg

SEQ ID NO: 981092 - DNA, 15 bp, Homo sapiens
ctgtgcattctccga

SEQ ID NO: 981093 - DNA, 15 bp, Homo sapiens
tgtgcattctccgac

SEQ ID NO: 981094 - DNA, 15 bp, Homo sapiens
gtgcattctccgacc

SEQ ID NO: 981095 - DNA, 15 bp, Homo sapiens
tgcattctccgacct

SEQ ID NO: 981096 - DNA, 15 bp, Homo sapiens
gcattctccgacctc

SEQ ID NO: 981097 - DNA, 15 bp, Homo sapiens
cattctccgacctcc

SEQ ID NO: 981098 - DNA, 15 bp, Homo sapiens
attctccgacctcca

SEQ ID NO: 981099 - DNA, 15 bp, Homo sapiens
ttctccgacctccag

SEQ ID NO: 981100 - DNA, 15 bp, Homo sapiens
tctccgacctccagg

SEQ ID NO: 981101 - DNA, 15 bp, Homo sapiens
ctccgacctccaggt

SEQ ID NO: 981102 - DNA, 15 bp, Homo sapiens
tccgacctccaggtt

SEQ ID NO: 981103 - DNA, 15 bp, Homo sapiens
ccgacctccaggttc

SEQ ID NO: 981104 - DNA, 15 bp, Homo sapiens
cgacctccaggttcg

SEQ ID NO: 981105 - DNA, 15 bp, Homo sapiens
gacctccaggttcgt

SEQ ID NO: 981106 - DNA, 15 bp, Homo sapiens
acctccaggttcgtg

SEQ ID NO: 981107 - DNA, 15 bp, Homo sapiens
cctccaggttcgtgg

SEQ ID NO: 981108 - DNA, 15 bp, Homo sapiens
ctccaggttcgtggt

SEQ ID NO: 981109 - DNA, 15 bp, Homo sapiens
tccaggttcgtggtc

SEQ ID NO: 981110 - DNA, 15 bp, Homo sapiens
ccaggttcgtggtct

SEQ ID NO: 981111 - DNA, 15 bp, Homo sapiens
caggttcgtggtcta

SEQ ID NO: 981112 - DNA, 15 bp, Homo sapiens
aggttcgtggtctac

SEQ ID NO: 981113 - DNA, 15 bp, Homo sapiens
ggttcgtggtctaca

SEQ ID NO: 981114 - DNA, 15 bp, Homo sapiens
gttcgtggtctacaa

SEQ ID NO: 981115 - DNA, 15 bp, Homo sapiens
ttcgtggtctacaag

SEQ ID NO: 981116 - DNA, 15 bp, Homo sapiens
tcgtggtctacaagc

SEQ ID NO: 981117 - DNA, 15 bp, Homo sapiens
cgtggtctacaagct

SEQ ID NO: 981118 - DNA, 15 bp, Homo sapiens
gtggtctacaagctg

SEQ ID NO: 981119 - DNA, 15 bp, Homo sapiens
tggtctacaagctgc

SEQ ID NO: 981120 - DNA, 15 bp, Homo sapiens
ggtctacaagctgcc

SEQ ID NO: 981121 - DNA, 15 bp, Homo sapiens
gtctacaagctgcca

SEQ ID NO: 981122 - DNA, 15 bp, Homo sapiens
tctacaagctgccag

SEQ ID NO: 981123 - DNA, 15 bp, Homo sapiens
ctacaagctgccagc

SEQ ID NO: 981124 - DNA, 15 bp, Homo sapiens
tacaagctgccagct

SEQ ID NO: 981125 - DNA, 15 bp, Homo sapiens
acaagctgccagctc

SEQ ID NO: 981126 - DNA, 15 bp, Homo sapiens
caagctgccagctct

SEQ ID NO: 981127 - DNA, 15 bp, Homo sapiens
aagctgccagctctt

SEQ ID NO: 981128 - DNA, 15 bp, Homo sapiens
agctgccagctctta

SEQ ID NO: 981129 - DNA, 15 bp, Homo sapiens
gctgccagctcttag

SEQ ID NO: 981130 - DNA, 15 bp, Homo sapiens
ctgccagctcttaga

SEQ ID NO: 981131 - DNA, 15 bp, Homo sapiens
tgccagctcttagag

SEQ ID NO: 981132 - DNA, 15 bp, Homo sapiens
gccagctcttagagg

SEQ ID NO: 981133 - DNA, 15 bp, Homo sapiens
ccagctcttagaggg

SEQ ID NO: 981134 - DNA, 15 bp, Homo sapiens
cagctcttagagggt

SEQ ID NO: 981135 - DNA, 15 bp, Homo sapiens
agctcttagagggtc

SEQ ID NO: 981136 - DNA, 15 bp, Homo sapiens
gctcttagagggtcc

SEQ ID NO: 981137 - DNA, 15 bp, Homo sapiens
ctcttagagggtccg

SEQ ID NO: 981138 - DNA, 15 bp, Homo sapiens
tcttagagggtccgg

SEQ ID NO: 981139 - DNA, 15 bp, Homo sapiens
cttagagggtccggg

SEQ ID NO: 981140 - DNA, 15 bp, Homo sapiens
ttagagggtccgggg

SEQ ID NO: 981141 - DNA, 15 bp, Homo sapiens
tagagggtccgggga

SEQ ID NO: 981142 - DNA, 15 bp, Homo sapiens
tgcagtggctcacat

SEQ ID NO: 981143 - DNA, 15 bp, Homo sapiens
gcagtggctcacatc

SEQ ID NO: 981144 - DNA, 15 bp, Homo sapiens
cagtggctcacatct

SEQ ID NO: 981145 - DNA, 15 bp, Homo sapiens
agtggctcacatctg

SEQ ID NO: 981146 - DNA, 15 bp, Homo sapiens
gtggctcacatctgt

SEQ ID NO: 981147 - DNA, 15 bp, Homo sapiens
tggctcacatctgta

SEQ ID NO: 981148 - DNA, 15 bp, Homo sapiens
ggctcacatctgtaa

SEQ ID NO: 981149 - DNA, 15 bp, Homo sapiens
gctcacatctgtaac

SEQ ID NO: 981150 - DNA, 15 bp, Homo sapiens
ctcacatctgtaacc

SEQ ID NO: 981151 - DNA, 15 bp, Homo sapiens
tcacatctgtaaccc

SEQ ID NO: 981152 - DNA, 15 bp, Homo sapiens
cacatctgtaacccc

SEQ ID NO: 981153 - DNA, 15 bp, Homo sapiens
acatctgtaacccca

SEQ ID NO: 981154 - DNA, 15 bp, Homo sapiens
catctgtaaccccag

SEQ ID NO: 981155 - DNA, 15 bp, Homo sapiens
atctgtaaccccagc

SEQ ID NO: 981156 - DNA, 15 bp, Homo sapiens
tctgtaaccccagca

SEQ ID NO: 981157 - DNA, 15 bp, Homo sapiens
ctgtaaccccagcac

SEQ ID NO: 981158 - DNA, 15 bp, Homo sapiens
tgtaaccccagcact

SEQ ID NO: 981159 - DNA, 15 bp, Homo sapiens
gtaaccccagcactt

SEQ ID NO: 981160 - DNA, 15 bp, Homo sapiens
taaccccagcacttt

SEQ ID NO: 981161 - DNA, 15 bp, Homo sapiens
aaccccagcactttg

SEQ ID NO: 981162 - DNA, 15 bp, Homo sapiens
accccagcactttgg

SEQ ID NO: 981163 - DNA, 15 bp, Homo sapiens
ccccagcactttggg

SEQ ID NO: 981164 - DNA, 15 bp, Homo sapiens
tttgggaggctgaga

SEQ ID NO: 981165 - DNA, 15 bp, Homo sapiens
ttgggaggctgagat

SEQ ID NO: 981166 - DNA, 15 bp, Homo sapiens
tgggaggctgagatg

SEQ ID NO: 981167 - DNA, 15 bp, Homo sapiens
gggaggctgagatgg

SEQ ID NO: 981168 - DNA, 15 bp, Homo sapiens
ggaggctgagatggg

SEQ ID NO: 981169 - DNA, 15 bp, Homo sapiens
gaggctgagatgggc

SEQ ID NO: 981170 - DNA, 15 bp, Homo sapiens
aggctgagatgggca

SEQ ID NO: 981171 - DNA, 15 bp, Homo sapiens
ggctgagatgggcag

SEQ ID NO: 981172 - DNA, 15 bp, Homo sapiens
gctgagatgggcaga

SEQ ID NO: 981173 - DNA, 15 bp, Homo sapiens
ctgagatgggcagat

SEQ ID NO: 981174 - DNA, 15 bp, Homo sapiens
tgagatgggcagatc

SEQ ID NO: 981175 - DNA, 15 bp, Homo sapiens
gagatgggcagatca

SEQ ID NO: 981176 - DNA, 15 bp, Homo sapiens
agatgggcagatcac

SEQ ID NO: 981177 - DNA, 15 bp, Homo sapiens
gatgggcagatcact

SEQ ID NO: 981178 - DNA, 15 bp, Homo sapiens
atgggcagatcactt

SEQ ID NO: 981179 - DNA, 15 bp, Homo sapiens
tgggcagatcacttg

SEQ ID NO: 981180 - DNA, 15 bp, Homo sapiens
gcagatcacttgagg

SEQ ID NO: 981181 - DNA, 15 bp, Homo sapiens
cagatcacttgaggt

SEQ ID NO: 981182 - DNA, 15 bp, Homo sapiens
agatcacttgaggtc

SEQ ID NO: 981183 - DNA, 15 bp, Homo sapiens
gatcacttgaggtca

SEQ ID NO: 981184 - DNA, 15 bp, Homo sapiens
atcacttgaggtcag

SEQ ID NO: 981185 - DNA, 15 bp, Homo sapiens
tcacttgaggtcagg

SEQ ID NO: 981186 - DNA, 15 bp, Homo sapiens
cacttgaggtcagga

SEQ ID NO: 981187 - DNA, 15 bp, Homo sapiens
acttgaggtcaggag

SEQ ID NO: 981188 - DNA, 15 bp, Homo sapiens
cttgaggtcaggagt

SEQ ID NO: 981189 - DNA, 15 bp, Homo sapiens
tggtgaaaccccata

SEQ ID NO: 981190 - DNA, 15 bp, Homo sapiens
ggtgaaaccccatat

SEQ ID NO: 981191 - DNA, 15 bp, Homo sapiens
gtgaaaccccatatc

SEQ ID NO: 981192 - DNA, 15 bp, Homo sapiens
tgaaaccccatatcc

SEQ ID NO: 981193 - DNA, 15 bp, Homo sapiens
gaaaccccatatcca

SEQ ID NO: 981194 - DNA, 15 bp, Homo sapiens
aaaccccatatccat

SEQ ID NO: 981195 - DNA, 15 bp, Homo sapiens
aaccccatatccatt

SEQ ID NO: 981196 - DNA, 15 bp, Homo sapiens
accccatatccatta

SEQ ID NO: 981197 - DNA, 15 bp, Homo sapiens
ccccatatccattaa

SEQ ID NO: 981198 - DNA, 15 bp, Homo sapiens
cccatatccattaaa

SEQ ID NO: 981199 - DNA, 15 bp, Homo sapiens
ccatatccattaaaa

SEQ ID NO: 981200 - DNA, 15 bp, Homo sapiens
catatccattaaaaa

SEQ ID NO: 981201 - DNA, 15 bp, Homo sapiens
atatccattaaaaat

SEQ ID NO: 981202 - DNA, 15 bp, Homo sapiens
tatccattaaaaata

SEQ ID NO: 981203 - DNA, 15 bp, Homo sapiens
atccattaaaaatat

SEQ ID NO: 981204 - DNA, 15 bp, Homo sapiens
tccattaaaaatatt

SEQ ID NO: 981205 - DNA, 15 bp, Homo sapiens
ccattaaaaatattt

SEQ ID NO: 981206 - DNA, 15 bp, Homo sapiens
cattaaaaatattta

SEQ ID NO: 981207 - DNA, 15 bp, Homo sapiens
attaaaaatatttaa

SEQ ID NO: 981208 - DNA, 15 bp, Homo sapiens
ttaaaaatatttaaa

SEQ ID NO: 981209 - DNA, 15 bp, Homo sapiens
taaaaatatttaaaa

SEQ ID NO: 981210 - DNA, 15 bp, Homo sapiens
aaaaatatttaaaaa

SEQ ID NO: 981211 - DNA, 15 bp, Homo sapiens
aaaatatttaaaaat

SEQ ID NO: 981212 - DNA, 15 bp, Homo sapiens
aaatatttaaaaatt

SEQ ID NO: 981213 - DNA, 15 bp, Homo sapiens
aatatttaaaaatta

SEQ ID NO: 981214 - DNA, 15 bp, Homo sapiens
atatttaaaaattag

SEQ ID NO: 981215 - DNA, 15 bp, Homo sapiens
tatttaaaaattagc

SEQ ID NO: 981216 - DNA, 15 bp, Homo sapiens
atttaaaaattagcc

SEQ ID NO: 981217 - DNA, 15 bp, Homo sapiens
tttaaaaattagcca

SEQ ID NO: 981218 - DNA, 15 bp, Homo sapiens
ttaaaaattagccag

SEQ ID NO: 981219 - DNA, 15 bp, Homo sapiens
taaaaattagccaga

SEQ ID NO: 981220 - DNA, 15 bp, Homo sapiens
aaaaattagccagac

SEQ ID NO: 981221 - DNA, 15 bp, Homo sapiens
aaaattagccagaca

SEQ ID NO: 981222 - DNA, 15 bp, Homo sapiens
aaattagccagacat

SEQ ID NO: 981223 - DNA, 15 bp, Homo sapiens
aattagccagacatg

SEQ ID NO: 981224 - DNA, 15 bp, Homo sapiens
attagccagacatgg

SEQ ID NO: 981225 - DNA, 15 bp, Homo sapiens
ttagccagacatggt

SEQ ID NO: 981226 - DNA, 15 bp, Homo sapiens
tagccagacatggtg

SEQ ID NO: 981227 - DNA, 15 bp, Homo sapiens
agccagacatggtgg

SEQ ID NO: 981228 - DNA, 15 bp, Homo sapiens
gccagacatggtggc

SEQ ID NO: 981229 - DNA, 15 bp, Homo sapiens
ccagacatggtggca

SEQ ID NO: 981230 - DNA, 15 bp, Homo sapiens
cagacatggtggcac

SEQ ID NO: 981231 - DNA, 15 bp, Homo sapiens
agacatggtggcacg

SEQ ID NO: 981232 - DNA, 15 bp, Homo sapiens
gacatggtggcacgc

SEQ ID NO: 981233 - DNA, 15 bp, Homo sapiens
acatggtggcacgcg

SEQ ID NO: 981234 - DNA, 15 bp, Homo sapiens
catggtggcacgcgt

SEQ ID NO: 981235 - DNA, 15 bp, Homo sapiens
atggtggcacgcgtc

SEQ ID NO: 981236 - DNA, 15 bp, Homo sapiens
tggtggcacgcgtct

SEQ ID NO: 981237 - DNA, 15 bp, Homo sapiens
ggtggcacgcgtctg

SEQ ID NO: 981238 - DNA, 15 bp, Homo sapiens
gtggcacgcgtctgt

SEQ ID NO: 981239 - DNA, 15 bp, Homo sapiens
tggcacgcgtctgtg

SEQ ID NO: 981240 - DNA, 15 bp, Homo sapiens
ggcacgcgtctgtgg

SEQ ID NO: 981241 - DNA, 15 bp, Homo sapiens
gcacgcgtctgtggt

SEQ ID NO: 981242 - DNA, 15 bp, Homo sapiens
cacgcgtctgtggtc

SEQ ID NO: 981243 - DNA, 15 bp, Homo sapiens
acgcgtctgtggtcc

SEQ ID NO: 981244 - DNA, 15 bp, Homo sapiens
cgcgtctgtggtcct

SEQ ID NO: 981245 - DNA, 15 bp, Homo sapiens
gcgtctgtggtccta

SEQ ID NO: 981246 - DNA, 15 bp, Homo sapiens
cgtctgtggtcctag

SEQ ID NO: 981247 - DNA, 15 bp, Homo sapiens
gtctgtggtcctagc

SEQ ID NO: 981248 - DNA, 15 bp, Homo sapiens
tctgtggtcctagct

SEQ ID NO: 981249 - DNA, 15 bp, Homo sapiens
ctgtggtcctagctc

SEQ ID NO: 981250 - DNA, 15 bp, Homo sapiens
tgtggtcctagctcc

SEQ ID NO: 981251 - DNA, 15 bp, Homo sapiens
gtggtcctagctcct

SEQ ID NO: 981252 - DNA, 15 bp, Homo sapiens
tggtcctagctcctc

SEQ ID NO: 981253 - DNA, 15 bp, Homo sapiens
ggtcctagctcctcg

SEQ ID NO: 981254 - DNA, 15 bp, Homo sapiens
gtcctagctcctcgg

SEQ ID NO: 981255 - DNA, 15 bp, Homo sapiens
tcctagctcctcggg

SEQ ID NO: 981256 - DNA, 15 bp, Homo sapiens
cctagctcctcggga

SEQ ID NO: 981257 - DNA, 15 bp, Homo sapiens
ctagctcctcgggag

SEQ ID NO: 981258 - DNA, 15 bp, Homo sapiens
tagctcctcgggagg

SEQ ID NO: 981259 - DNA, 15 bp, Homo sapiens
agctcctcgggaggc

SEQ ID NO: 981260 - DNA, 15 bp, Homo sapiens
gctcctcgggaggct

SEQ ID NO: 981261 - DNA, 15 bp, Homo sapiens
ctcctcgggaggctg

SEQ ID NO: 981262 - DNA, 15 bp, Homo sapiens
tcctcgggaggctga

SEQ ID NO: 981263 - DNA, 15 bp, Homo sapiens
cctcgggaggctgag

SEQ ID NO: 981264 - DNA, 15 bp, Homo sapiens
agaatcgcttgaact

SEQ ID NO: 981265 - DNA, 15 bp, Homo sapiens
gaatcgcttgaactc

SEQ ID NO: 981266 - DNA, 15 bp, Homo sapiens
aatcgcttgaactcg

SEQ ID NO: 981267 - DNA, 15 bp, Homo sapiens
atcgcttgaactcgg

SEQ ID NO: 981268 - DNA, 15 bp, Homo sapiens
tcgcttgaactcggg

SEQ ID NO: 981269 - DNA, 15 bp, Homo sapiens
cgcttgaactcggga

SEQ ID NO: 981270 - DNA, 15 bp, Homo sapiens
gcttgaactcgggag

SEQ ID NO: 981271 - DNA, 15 bp, Homo sapiens
cttgaactcgggagg

SEQ ID NO: 981272 - DNA, 15 bp, Homo sapiens
ttgaactcgggaggc

SEQ ID NO: 981273 - DNA, 15 bp, Homo sapiens
tgaactcgggaggca

SEQ ID NO: 981274 - DNA, 15 bp, Homo sapiens
gaactcgggaggcag

SEQ ID NO: 981275 - DNA, 15 bp, Homo sapiens
aactcgggaggcaga

SEQ ID NO: 981276 - DNA, 15 bp, Homo sapiens
actcgggaggcagag

SEQ ID NO: 981277 - DNA, 15 bp, Homo sapiens
ctcgggaggcagagg

SEQ ID NO: 981278 - DNA, 15 bp, Homo sapiens
tcgggaggcagaggt

SEQ ID NO: 981279 - DNA, 15 bp, Homo sapiens
cgggaggcagaggtt

SEQ ID NO: 981280 - DNA, 15 bp, Homo sapiens
ggaggcagaggttgt

SEQ ID NO: 981281 - DNA, 15 bp, Homo sapiens
gaggcagaggttgtc

SEQ ID NO: 981282 - DNA, 15 bp, Homo sapiens
aggcagaggttgtca

SEQ ID NO: 981283 - DNA, 15 bp, Homo sapiens
ggcagaggttgtcat

SEQ ID NO: 981284 - DNA, 15 bp, Homo sapiens
gcagaggttgtcatg

SEQ ID NO: 981285 - DNA, 15 bp, Homo sapiens
cagaggttgtcatga

SEQ ID NO: 981286 - DNA, 15 bp, Homo sapiens
agaggttgtcatgag

SEQ ID NO: 981287 - DNA, 15 bp, Homo sapiens
gaggttgtcatgagc

SEQ ID NO: 981288 - DNA, 15 bp, Homo sapiens
aggttgtcatgagct

SEQ ID NO: 981289 - DNA, 15 bp, Homo sapiens
ggttgtcatgagctg

SEQ ID NO: 981290 - DNA, 15 bp, Homo sapiens
gttgtcatgagctga

SEQ ID NO: 981291 - DNA, 15 bp, Homo sapiens
ttgtcatgagctgag

SEQ ID NO: 981292 - DNA, 15 bp, Homo sapiens
tgtcatgagctgagc

SEQ ID NO: 981293 - DNA, 15 bp, Homo sapiens
gtcatgagctgagct

SEQ ID NO: 981294 - DNA, 15 bp, Homo sapiens
tcatgagctgagcta

SEQ ID NO: 981295 - DNA, 15 bp, Homo sapiens
catgagctgagctaa

SEQ ID NO: 981296 - DNA, 15 bp, Homo sapiens
atgagctgagctaac

SEQ ID NO: 981297 - DNA, 15 bp, Homo sapiens
tgagctgagctaaca

SEQ ID NO: 981298 - DNA, 15 bp, Homo sapiens
gagctgagctaacac

SEQ ID NO: 981299 - DNA, 15 bp, Homo sapiens
agctgagctaacacc

SEQ ID NO: 981300 - DNA, 15 bp, Homo sapiens
gctgagctaacacca

SEQ ID NO: 981301 - DNA, 15 bp, Homo sapiens
ctgagctaacaccac

SEQ ID NO: 981302 - DNA, 15 bp, Homo sapiens
tgagctaacaccacg

SEQ ID NO: 981303 - DNA, 15 bp, Homo sapiens
gagctaacaccacgg

SEQ ID NO: 981304 - DNA, 15 bp, Homo sapiens
agctaacaccacggc

SEQ ID NO: 981305 - DNA, 15 bp, Homo sapiens
gctaacaccacggca

SEQ ID NO: 981306 - DNA, 15 bp, Homo sapiens
ctaacaccacggcac

SEQ ID NO: 981307 - DNA, 15 bp, Homo sapiens
taacaccacggcact

SEQ ID NO: 981308 - DNA, 15 bp, Homo sapiens
aacaccacggcactt

SEQ ID NO: 981309 - DNA, 15 bp, Homo sapiens
acaccacggcacttc

SEQ ID NO: 981310 - DNA, 15 bp, Homo sapiens
caccacggcacttca

SEQ ID NO: 981311 - DNA, 15 bp, Homo sapiens
accacggcacttcag

SEQ ID NO: 981312 - DNA, 15 bp, Homo sapiens
ccacggcacttcagc

SEQ ID NO: 981313 - DNA, 15 bp, Homo sapiens
cacggcacttcagcc

SEQ ID NO: 981314 - DNA, 15 bp, Homo sapiens
acggcacttcagcct

SEQ ID NO: 981315 - DNA, 15 bp, Homo sapiens
cggcacttcagcctg

SEQ ID NO: 981316 - DNA, 15 bp, Homo sapiens
ggcacttcagcctgg

SEQ ID NO: 981317 - DNA, 15 bp, Homo sapiens
cacttcagcctgggt

SEQ ID NO: 981318 - DNA, 15 bp, Homo sapiens
acttcagcctgggtg

SEQ ID NO: 981319 - DNA, 15 bp, Homo sapiens
cttcagcctgggtga

SEQ ID NO: 981320 - DNA, 15 bp, Homo sapiens
ttcagcctgggtgac

SEQ ID NO: 981321 - DNA, 15 bp, Homo sapiens
tcagcctgggtgaca

SEQ ID NO: 981322 - DNA, 15 bp, Homo sapiens
gcctgggtgacagaa

SEQ ID NO: 981323 - DNA, 15 bp, Homo sapiens
cctgggtgacagaat

SEQ ID NO: 981324 - DNA, 15 bp, Homo sapiens
ctgggtgacagaatg

SEQ ID NO: 981325 - DNA, 15 bp, Homo sapiens
tgggtgacagaatga

SEQ ID NO: 981326 - DNA, 15 bp, Homo sapiens
gggtgacagaatgag

SEQ ID NO: 981327 - DNA, 15 bp, Homo sapiens
ggtgacagaatgaga

SEQ ID NO: 981328 - DNA, 15 bp, Homo sapiens
gtgacagaatgagac

SEQ ID NO: 981329 - DNA, 15 bp, Homo sapiens
tgacagaatgagact

SEQ ID NO: 981330 - DNA, 15 bp, Homo sapiens
gacagaatgagactc

SEQ ID NO: 981331 - DNA, 15 bp, Homo sapiens
acagaatgagactct

SEQ ID NO: 981332 - DNA, 15 bp, Homo sapiens
cagaatgagactctg

SEQ ID NO: 981333 - DNA, 15 bp, Homo sapiens
agaatgagactctgt

SEQ ID NO: 981334 - DNA, 15 bp, Homo sapiens
gaatgagactctgtg

SEQ ID NO: 981335 - DNA, 15 bp, Homo sapiens
aatgagactctgtgt

SEQ ID NO: 981336 - DNA, 15 bp, Homo sapiens
atgagactctgtgtc

SEQ ID NO: 981337 - DNA, 15 bp, Homo sapiens
tgagactctgtgtca

SEQ ID NO: 981338 - DNA, 15 bp, Homo sapiens
gagactctgtgtcaa

SEQ ID NO: 981339 - DNA, 15 bp, Homo sapiens
agactctgtgtcaaa

SEQ ID NO: 981340 - DNA, 15 bp, Homo sapiens
gactctgtgtcaaaa

SEQ ID NO: 981341 - DNA, 15 bp, Homo sapiens
actctgtgtcaaaaa

SEQ ID NO: 981342 - DNA, 15 bp, Homo sapiens
ctctgtgtcaaaaaa

SEQ ID NO: 981343 - DNA, 15 bp, Homo sapiens
tctgtgtcaaaaaaa

SEQ ID NO: 981344 - DNA, 15 bp, Homo sapiens
ctgtgtcaaaaaaat

SEQ ID NO: 981345 - DNA, 15 bp, Homo sapiens
tgtgtcaaaaaaata

SEQ ID NO: 981346 - DNA, 15 bp, Homo sapiens
gtgtcaaaaaaataa

SEQ ID NO: 981347 - DNA, 15 bp, Homo sapiens
tgtcaaaaaaataaa

SEQ ID NO: 981348 - DNA, 15 bp, Homo sapiens
gtcaaaaaaataaaa

SEQ ID NO: 981349 - DNA, 15 bp, Homo sapiens
tcaaaaaaataaaaa

SEQ ID NO: 981350 - DNA, 15 bp, Homo sapiens
caaaaaaataaaaaa

SEQ ID NO: 981351 - DNA, 15 bp, Homo sapiens
aaaaaaataaaaaat

SEQ ID NO: 981352 - DNA, 15 bp, Homo sapiens
aaaaaataaaaaata

SEQ ID NO: 981353 - DNA, 15 bp, Homo sapiens
aaaaataaaaaataa

SEQ ID NO: 981354 - DNA, 15 bp, Homo sapiens
aaaataaaaaataaa

SEQ ID NO: 981355 - DNA, 15 bp, Homo sapiens
aaataaaaaataaaa

SEQ ID NO: 981356 - DNA, 15 bp, Homo sapiens
aataaaaaataaaaa

SEQ ID NO: 981357 - DNA, 15 bp, Homo sapiens
ataaaaaataaaaaa

SEQ ID NO: 981358 - DNA, 15 bp, Homo sapiens
taaaaaataaaaaat

SEQ ID NO: 981359 - DNA, 15 bp, Homo sapiens
aaaaaataaaaaatc

SEQ ID NO: 981360 - DNA, 15 bp, Homo sapiens
aaaaataaaaaatct

SEQ ID NO: 981361 - DNA, 15 bp, Homo sapiens
aaaataaaaaatcta

SEQ ID NO: 981362 - DNA, 15 bp, Homo sapiens
aaataaaaaatctaa

SEQ ID NO: 981363 - DNA, 15 bp, Homo sapiens
aataaaaaatctaag

SEQ ID NO: 981364 - DNA, 15 bp, Homo sapiens
ataaaaaatctaagg

SEQ ID NO: 981365 - DNA, 15 bp, Homo sapiens
taaaaaatctaaggg

SEQ ID NO: 981366 - DNA, 15 bp, Homo sapiens
aaaaaatctaagggc

SEQ ID NO: 981367 - DNA, 15 bp, Homo sapiens
aaaaatctaagggct

SEQ ID NO: 981368 - DNA, 15 bp, Homo sapiens
aaaatctaagggctc

SEQ ID NO: 981369 - DNA, 15 bp, Homo sapiens
aaatctaagggctca

SEQ ID NO: 981370 - DNA, 15 bp, Homo sapiens
aatctaagggctcag

SEQ ID NO: 981371 - DNA, 15 bp, Homo sapiens
atctaagggctcagg

SEQ ID NO: 981372 - DNA, 15 bp, Homo sapiens
tctaagggctcagga

SEQ ID NO: 981373 - DNA, 15 bp, Homo sapiens
ctaagggctcaggaa

SEQ ID NO: 981374 - DNA, 15 bp, Homo sapiens
taagggctcaggaac

SEQ ID NO: 981375 - DNA, 15 bp, Homo sapiens
aagggctcaggaacc

SEQ ID NO: 981376 - DNA, 15 bp, Homo sapiens
agggctcaggaacca

SEQ ID NO: 981377 - DNA, 15 bp, Homo sapiens
gggctcaggaaccag

SEQ ID NO: 981378 - DNA, 15 bp, Homo sapiens
ggctcaggaaccagt

SEQ ID NO: 981379 - DNA, 15 bp, Homo sapiens
gctcaggaaccagtt

SEQ ID NO: 981380 - DNA, 15 bp, Homo sapiens
ctcaggaaccagttt

SEQ ID NO: 981381 - DNA, 15 bp, Homo sapiens
tcaggaaccagtttg

SEQ ID NO: 981382 - DNA, 15 bp, Homo sapiens
caggaaccagtttgg

SEQ ID NO: 981383 - DNA, 15 bp, Homo sapiens
aggaaccagtttgga

SEQ ID NO: 981384 - DNA, 15 bp, Homo sapiens
ggaaccagtttggac

SEQ ID NO: 981385 - DNA, 15 bp, Homo sapiens
gaaccagtttggact

SEQ ID NO: 981386 - DNA, 15 bp, Homo sapiens
aaccagtttggactt

SEQ ID NO: 981387 - DNA, 15 bp, Homo sapiens
accagtttggacttg

SEQ ID NO: 981388 - DNA, 15 bp, Homo sapiens
ccagtttggacttga

SEQ ID NO: 981389 - DNA, 15 bp, Homo sapiens
cagtttggacttgat

SEQ ID NO: 981390 - DNA, 15 bp, Homo sapiens
agtttggacttgatt

SEQ ID NO: 981391 - DNA, 15 bp, Homo sapiens
gtttggacttgattt

SEQ ID NO: 981392 - DNA, 15 bp, Homo sapiens
tttggacttgatttt

SEQ ID NO: 981393 - DNA, 15 bp, Homo sapiens
ttggacttgattttg

SEQ ID NO: 981394 - DNA, 15 bp, Homo sapiens
tggacttgattttga

SEQ ID NO: 981395 - DNA, 15 bp, Homo sapiens
ggacttgattttgaa

SEQ ID NO: 981396 - DNA, 15 bp, Homo sapiens
gacttgattttgaat

SEQ ID NO: 981397 - DNA, 15 bp, Homo sapiens
acttgattttgaatc

SEQ ID NO: 981398 - DNA, 15 bp, Homo sapiens
cttgattttgaatcc

SEQ ID NO: 981399 - DNA, 15 bp, Homo sapiens
ttgattttgaatccc

SEQ ID NO: 981400 - DNA, 15 bp, Homo sapiens
tgattttgaatccca

SEQ ID NO: 981401 - DNA, 15 bp, Homo sapiens
gattttgaatcccag

SEQ ID NO: 981402 - DNA, 15 bp, Homo sapiens
attttgaatcccagt

SEQ ID NO: 981403 - DNA, 15 bp, Homo sapiens
ttttgaatcccagtt

SEQ ID NO: 981404 - DNA, 15 bp, Homo sapiens
tttgaatcccagttc

SEQ ID NO: 981405 - DNA, 15 bp, Homo sapiens
ttgaatcccagttca

SEQ ID NO: 981406 - DNA, 15 bp, Homo sapiens
tgaatcccagttcat

SEQ ID NO: 981407 - DNA, 15 bp, Homo sapiens
gaatcccagttcatc

SEQ ID NO: 981408 - DNA, 15 bp, Homo sapiens
aatcccagttcatcc

SEQ ID NO: 981409 - DNA, 15 bp, Homo sapiens
atcccagttcatccc

SEQ ID NO: 981410 - DNA, 15 bp, Homo sapiens
tcccagttcatcccc

SEQ ID NO: 981411 - DNA, 15 bp, Homo sapiens
cccagttcatcccct

SEQ ID NO: 981412 - DNA, 15 bp, Homo sapiens
ccagttcatcccctt

SEQ ID NO: 981413 - DNA, 15 bp, Homo sapiens
cagttcatccccttc

SEQ ID NO: 981414 - DNA, 15 bp, Homo sapiens
agttcatccccttcc

SEQ ID NO: 981415 - DNA, 15 bp, Homo sapiens
gttcatccccttcct

SEQ ID NO: 981416 - DNA, 15 bp, Homo sapiens
ttcatccccttccta

SEQ ID NO: 981417 - DNA, 15 bp, Homo sapiens
tcatccccttcctag

SEQ ID NO: 981418 - DNA, 15 bp, Homo sapiens
catccccttcctagc

SEQ ID NO: 981419 - DNA, 15 bp, Homo sapiens
atccccttcctagct

SEQ ID NO: 981420 - DNA, 15 bp, Homo sapiens
tccccttcctagctg

SEQ ID NO: 981421 - DNA, 15 bp, Homo sapiens
ccccttcctagctgt

SEQ ID NO: 981422 - DNA, 15 bp, Homo sapiens
cccttcctagctgta

SEQ ID NO: 981423 - DNA, 15 bp, Homo sapiens
ccttcctagctgtat

SEQ ID NO: 981424 - DNA, 15 bp, Homo sapiens
cttcctagctgtatg

SEQ ID NO: 981425 - DNA, 15 bp, Homo sapiens
ttcctagctgtatga

SEQ ID NO: 981426 - DNA, 15 bp, Homo sapiens
tcctagctgtatgac

SEQ ID NO: 981427 - DNA, 15 bp, Homo sapiens
cctagctgtatgacc

SEQ ID NO: 981428 - DNA, 15 bp, Homo sapiens
ctagctgtatgacct

SEQ ID NO: 981429 - DNA, 15 bp, Homo sapiens
tagctgtatgacctt

SEQ ID NO: 981430 - DNA, 15 bp, Homo sapiens
agctgtatgaccttg

SEQ ID NO: 981431 - DNA, 15 bp, Homo sapiens
gctgtatgaccttga

SEQ ID NO: 981432 - DNA, 15 bp, Homo sapiens
ctgtatgaccttgat

SEQ ID NO: 981433 - DNA, 15 bp, Homo sapiens
tgtatgaccttgatt

SEQ ID NO: 981434 - DNA, 15 bp, Homo sapiens
gtatgaccttgattg

SEQ ID NO: 981435 - DNA, 15 bp, Homo sapiens
tatgaccttgattgt

SEQ ID NO: 981436 - DNA, 15 bp, Homo sapiens
atgaccttgattgtg

SEQ ID NO: 981437 - DNA, 15 bp, Homo sapiens
tgaccttgattgtgt

SEQ ID NO: 981438 - DNA, 15 bp, Homo sapiens
gaccttgattgtgtg

SEQ ID NO: 981439 - DNA, 15 bp, Homo sapiens
accttgattgtgtgc

SEQ ID NO: 981440 - DNA, 15 bp, Homo sapiens
ccttgattgtgtgcc

SEQ ID NO: 981441 - DNA, 15 bp, Homo sapiens
cttgattgtgtgcct

SEQ ID NO: 981442 - DNA, 15 bp, Homo sapiens
ttgattgtgtgcctt

SEQ ID NO: 981443 - DNA, 15 bp, Homo sapiens
tgattgtgtgcctta

SEQ ID NO: 981444 - DNA, 15 bp, Homo sapiens
gattgtgtgccttaa

SEQ ID NO: 981445 - DNA, 15 bp, Homo sapiens
attgtgtgccttaac

SEQ ID NO: 981446 - DNA, 15 bp, Homo sapiens
ttgtgtgccttaacc

SEQ ID NO: 981447 - DNA, 15 bp, Homo sapiens
tgtgtgccttaaccg

SEQ ID NO: 981448 - DNA, 15 bp, Homo sapiens
gtgtgccttaaccgc

SEQ ID NO: 981449 - DNA, 15 bp, Homo sapiens
tgtgccttaaccgct

SEQ ID NO: 981450 - DNA, 15 bp, Homo sapiens
gtgccttaaccgctc

SEQ ID NO: 981451 - DNA, 15 bp, Homo sapiens
tgccttaaccgctct

SEQ ID NO: 981452 - DNA, 15 bp, Homo sapiens
gccttaaccgctctg

SEQ ID NO: 981453 - DNA, 15 bp, Homo sapiens
ccttaaccgctctgt

SEQ ID NO: 981454 - DNA, 15 bp, Homo sapiens
cttaaccgctctgtg

SEQ ID NO: 981455 - DNA, 15 bp, Homo sapiens
ttaaccgctctgtga

SEQ ID NO: 981456 - DNA, 15 bp, Homo sapiens
taaccgctctgtgac

SEQ ID NO: 981457 - DNA, 15 bp, Homo sapiens
aaccgctctgtgaca

SEQ ID NO: 981458 - DNA, 15 bp, Homo sapiens
accgctctgtgacac

SEQ ID NO: 981459 - DNA, 15 bp, Homo sapiens
ccgctctgtgacaca

SEQ ID NO: 981460 - DNA, 15 bp, Homo sapiens
cgctctgtgacacag

SEQ ID NO: 981461 - DNA, 15 bp, Homo sapiens
gctctgtgacacagt

SEQ ID NO: 981462 - DNA, 15 bp, Homo sapiens
ctctgtgacacagtc

SEQ ID NO: 981463 - DNA, 15 bp, Homo sapiens
tctgtgacacagtct

SEQ ID NO: 981464 - DNA, 15 bp, Homo sapiens
ctgtgacacagtcta

SEQ ID NO: 981465 - DNA, 15 bp, Homo sapiens
tgtgacacagtctac

SEQ ID NO: 981466 - DNA, 15 bp, Homo sapiens
gtgacacagtctacc

SEQ ID NO: 981467 - DNA, 15 bp, Homo sapiens
tgacacagtctacct

SEQ ID NO: 981468 - DNA, 15 bp, Homo sapiens
gacacagtctacctg

SEQ ID NO: 981469 - DNA, 15 bp, Homo sapiens
acacagtctacctgt

SEQ ID NO: 981470 - DNA, 15 bp, Homo sapiens
cacagtctacctgtc

SEQ ID NO: 981471 - DNA, 15 bp, Homo sapiens
acagtctacctgtct

SEQ ID NO: 981472 - DNA, 15 bp, Homo sapiens
cagtctacctgtctg

SEQ ID NO: 981473 - DNA, 15 bp, Homo sapiens
agtctacctgtctgc

SEQ ID NO: 981474 - DNA, 15 bp, Homo sapiens
gtctacctgtctgca

SEQ ID NO: 981475 - DNA, 15 bp, Homo sapiens
tctacctgtctgcaa

SEQ ID NO: 981476 - DNA, 15 bp, Homo sapiens
ctacctgtctgcaaa

SEQ ID NO: 981477 - DNA, 15 bp, Homo sapiens
tacctgtctgcaaaa

SEQ ID NO: 981478 - DNA, 15 bp, Homo sapiens
acctgtctgcaaaat

SEQ ID NO: 981479 - DNA, 15 bp, Homo sapiens
cctgtctgcaaaatg

SEQ ID NO: 981480 - DNA, 15 bp, Homo sapiens
ctgtctgcaaaatgg

SEQ ID NO: 981481 - DNA, 15 bp, Homo sapiens
tgtctgcaaaatggg

SEQ ID NO: 981482 - DNA, 15 bp, Homo sapiens
gtctgcaaaatggga

SEQ ID NO: 981483 - DNA, 15 bp, Homo sapiens
tctgcaaaatgggaa

SEQ ID NO: 981484 - DNA, 15 bp, Homo sapiens
ctgcaaaatgggaaa

SEQ ID NO: 981485 - DNA, 15 bp, Homo sapiens
tgcaaaatgggaaac

SEQ ID NO: 981486 - DNA, 15 bp, Homo sapiens
gcaaaatgggaaaca

SEQ ID NO: 981487 - DNA, 15 bp, Homo sapiens
caaaatgggaaacat

SEQ ID NO: 981488 - DNA, 15 bp, Homo sapiens
aaaatgggaaacata

SEQ ID NO: 981489 - DNA, 15 bp, Homo sapiens
aaatgggaaacataa

SEQ ID NO: 981490 - DNA, 15 bp, Homo sapiens
aatgggaaacataat

SEQ ID NO: 981491 - DNA, 15 bp, Homo sapiens
atgggaaacataata

SEQ ID NO: 981492 - DNA, 15 bp, Homo sapiens
tgggaaacataatac

SEQ ID NO: 981493 - DNA, 15 bp, Homo sapiens
gggaaacataatacc

SEQ ID NO: 981494 - DNA, 15 bp, Homo sapiens
ggaaacataatacct

SEQ ID NO: 981495 - DNA, 15 bp, Homo sapiens
gaaacataatacctg

SEQ ID NO: 981496 - DNA, 15 bp, Homo sapiens
aaacataatacctgc

SEQ ID NO: 981497 - DNA, 15 bp, Homo sapiens
aacataatacctgcc

SEQ ID NO: 981498 - DNA, 15 bp, Homo sapiens
acataatacctgcca

SEQ ID NO: 981499 - DNA, 15 bp, Homo sapiens
cataatacctgccat

SEQ ID NO: 981500 - DNA, 15 bp, Homo sapiens
ataatacctgccatc

SEQ ID NO: 981501 - DNA, 15 bp, Homo sapiens
taatacctgccatca

SEQ ID NO: 981502 - DNA, 15 bp, Homo sapiens
aatacctgccatcag

SEQ ID NO: 981503 - DNA, 15 bp, Homo sapiens
atacctgccatcagg

SEQ ID NO: 981504 - DNA, 15 bp, Homo sapiens
tacctgccatcagga

SEQ ID NO: 981505 - DNA, 15 bp, Homo sapiens
acctgccatcaggat

SEQ ID NO: 981506 - DNA, 15 bp, Homo sapiens
cctgccatcaggatt

SEQ ID NO: 981507 - DNA, 15 bp, Homo sapiens
ctgccatcaggattg

SEQ ID NO: 981508 - DNA, 15 bp, Homo sapiens
tgccatcaggattgt

SEQ ID NO: 981509 - DNA, 15 bp, Homo sapiens
gccatcaggattgtt

SEQ ID NO: 981510 - DNA, 15 bp, Homo sapiens
ccatcaggattgttg

SEQ ID NO: 981511 - DNA, 15 bp, Homo sapiens
catcaggattgttga

SEQ ID NO: 981512 - DNA, 15 bp, Homo sapiens
atcaggattgttgag

SEQ ID NO: 981513 - DNA, 15 bp, Homo sapiens
tcaggattgttgagg

SEQ ID NO: 981514 - DNA, 15 bp, Homo sapiens
caggattgttgagga

SEQ ID NO: 981515 - DNA, 15 bp, Homo sapiens
aggattgttgaggag

SEQ ID NO: 981516 - DNA, 15 bp, Homo sapiens
ggattgttgaggagt

SEQ ID NO: 981517 - DNA, 15 bp, Homo sapiens
gattgttgaggagta

SEQ ID NO: 981518 - DNA, 15 bp, Homo sapiens
attgttgaggagtaa

SEQ ID NO: 981519 - DNA, 15 bp, Homo sapiens
ttgttgaggagtaaa

SEQ ID NO: 981520 - DNA, 15 bp, Homo sapiens
tgttgaggagtaaat

SEQ ID NO: 981521 - DNA, 15 bp, Homo sapiens
gttgaggagtaaata

SEQ ID NO: 981522 - DNA, 15 bp, Homo sapiens
ttgaggagtaaataa

SEQ ID NO: 981523 - DNA, 15 bp, Homo sapiens
tgaggagtaaataaa

SEQ ID NO: 981524 - DNA, 15 bp, Homo sapiens
gaggagtaaataaat

SEQ ID NO: 981525 - DNA, 15 bp, Homo sapiens
aggagtaaataaatg

SEQ ID NO: 981526 - DNA, 15 bp, Homo sapiens
ggagtaaataaatgg

SEQ ID NO: 981527 - DNA, 15 bp, Homo sapiens
gagtaaataaatgga

SEQ ID NO: 981528 - DNA, 15 bp, Homo sapiens
agtaaataaatggaa

SEQ ID NO: 981529 - DNA, 15 bp, Homo sapiens
gtaaataaatggaaa

SEQ ID NO: 981530 - DNA, 15 bp, Homo sapiens
taaataaatggaaat

SEQ ID NO: 981531 - DNA, 15 bp, Homo sapiens
aaataaatggaaatt

SEQ ID NO: 981532 - DNA, 15 bp, Homo sapiens
aataaatggaaattg

SEQ ID NO: 981533 - DNA, 15 bp, Homo sapiens
ataaatggaaattgg

SEQ ID NO: 981534 - DNA, 15 bp, Homo sapiens
taaatggaaattggt

SEQ ID NO: 981535 - DNA, 15 bp, Homo sapiens
aaatggaaattggtg

SEQ ID NO: 981536 - DNA, 15 bp, Homo sapiens
aatggaaattggtgg

SEQ ID NO: 981537 - DNA, 15 bp, Homo sapiens
atggaaattggtgga

SEQ ID NO: 981538 - DNA, 15 bp, Homo sapiens
tggaaattggtggac

SEQ ID NO: 981539 - DNA, 15 bp, Homo sapiens
ggaaattggtggacg

SEQ ID NO: 981540 - DNA, 15 bp, Homo sapiens
gaaattggtggacga

SEQ ID NO: 981541 - DNA, 15 bp, Homo sapiens
aaattggtggacgag

SEQ ID NO: 981542 - DNA, 15 bp, Homo sapiens
aattggtggacgagg

SEQ ID NO: 981543 - DNA, 15 bp, Homo sapiens
attggtggacgaggc

SEQ ID NO: 981544 - DNA, 15 bp, Homo sapiens
ttggtggacgaggct

SEQ ID NO: 981545 - DNA, 15 bp, Homo sapiens
tggtggacgaggctg

SEQ ID NO: 981546 - DNA, 15 bp, Homo sapiens
ggtggacgaggctgt

SEQ ID NO: 981547 - DNA, 15 bp, Homo sapiens
gtggacgaggctgtt

SEQ ID NO: 981548 - DNA, 15 bp, Homo sapiens
tggacgaggctgtta

SEQ ID NO: 981549 - DNA, 15 bp, Homo sapiens
ggacgaggctgttaa

SEQ ID NO: 981550 - DNA, 15 bp, Homo sapiens
gacgaggctgttaac

SEQ ID NO: 981551 - DNA, 15 bp, Homo sapiens
acgaggctgttaacc

SEQ ID NO: 981552 - DNA, 15 bp, Homo sapiens
cgaggctgttaacct

SEQ ID NO: 981553 - DNA, 15 bp, Homo sapiens
gaggctgttaacctt

SEQ ID NO: 981554 - DNA, 15 bp, Homo sapiens
aggctgttaaccttc

SEQ ID NO: 981555 - DNA, 15 bp, Homo sapiens
ggctgttaaccttct

SEQ ID NO: 981556 - DNA, 15 bp, Homo sapiens
gctgttaaccttctc

SEQ ID NO: 981557 - DNA, 15 bp, Homo sapiens
ctgttaaccttctct

SEQ ID NO: 981558 - DNA, 15 bp, Homo sapiens
tgttaaccttctctt

SEQ ID NO: 981559 - DNA, 15 bp, Homo sapiens
gttaaccttctcttc

SEQ ID NO: 981560 - DNA, 15 bp, Homo sapiens
ttaaccttctcttca

SEQ ID NO: 981561 - DNA, 15 bp, Homo sapiens
taaccttctcttcag

SEQ ID NO: 981562 - DNA, 15 bp, Homo sapiens
aaccttctcttcagg

SEQ ID NO: 981563 - DNA, 15 bp, Homo sapiens
accttctcttcaggt

SEQ ID NO: 981564 - DNA, 15 bp, Homo sapiens
ccttctcttcaggtg

SEQ ID NO: 981565 - DNA, 15 bp, Homo sapiens
cttctcttcaggtgg

SEQ ID NO: 981566 - DNA, 15 bp, Homo sapiens
ttctcttcaggtggg

SEQ ID NO: 981567 - DNA, 15 bp, Homo sapiens
tctcttcaggtgggc

SEQ ID NO: 981568 - DNA, 15 bp, Homo sapiens
ctcttcaggtgggcg

SEQ ID NO: 981569 - DNA, 15 bp, Homo sapiens
tcttcaggtgggcgc

SEQ ID NO: 981570 - DNA, 15 bp, Homo sapiens
cttcaggtgggcgct

SEQ ID NO: 981571 - DNA, 15 bp, Homo sapiens
ttcaggtgggcgctg

SEQ ID NO: 981572 - DNA, 15 bp, Homo sapiens
tcaggtgggcgctgg

SEQ ID NO: 981573 - DNA, 15 bp, Homo sapiens
caggtgggcgctggg

SEQ ID NO: 981574 - DNA, 15 bp, Homo sapiens
aggtgggcgctggga

SEQ ID NO: 981575 - DNA, 15 bp, Homo sapiens
ggtgggcgctgggac

SEQ ID NO: 981576 - DNA, 15 bp, Homo sapiens
gtgggcgctgggaca

SEQ ID NO: 981577 - DNA, 15 bp, Homo sapiens
tgggcgctgggacac

SEQ ID NO: 981578 - DNA, 15 bp, Homo sapiens
gggcgctgggacaca

SEQ ID NO: 981579 - DNA, 15 bp, Homo sapiens
ggcgctgggacacaa

SEQ ID NO: 981580 - DNA, 15 bp, Homo sapiens
gcgctgggacacaag

SEQ ID NO: 981581 - DNA, 15 bp, Homo sapiens
cgctgggacacaaga

SEQ ID NO: 981582 - DNA, 15 bp, Homo sapiens
gctgggacacaagag

SEQ ID NO: 981583 - DNA, 15 bp, Homo sapiens
ctgggacacaagagc

SEQ ID NO: 981584 - DNA, 15 bp, Homo sapiens
tgggacacaagagca

SEQ ID NO: 981585 - DNA, 15 bp, Homo sapiens
gggacacaagagcat

SEQ ID NO: 981586 - DNA, 15 bp, Homo sapiens
ggacacaagagcatc

SEQ ID NO: 981587 - DNA, 15 bp, Homo sapiens
gacacaagagcatcg

SEQ ID NO: 981588 - DNA, 15 bp, Homo sapiens
acacaagagcatcgc

SEQ ID NO: 981589 - DNA, 15 bp, Homo sapiens
cacaagagcatcgca

SEQ ID NO: 981590 - DNA, 15 bp, Homo sapiens
acaagagcatcgcag

SEQ ID NO: 981591 - DNA, 15 bp, Homo sapiens
caagagcatcgcagc

SEQ ID NO: 981592 - DNA, 15 bp, Homo sapiens
aagagcatcgcagct

SEQ ID NO: 981593 - DNA, 15 bp, Homo sapiens
agagcatcgcagctt

SEQ ID NO: 981594 - DNA, 15 bp, Homo sapiens
gagcatcgcagcttc

SEQ ID NO: 981595 - DNA, 15 bp, Homo sapiens
agcatcgcagcttca

SEQ ID NO: 981596 - DNA, 15 bp, Homo sapiens
gcatcgcagcttcaa

SEQ ID NO: 981597 - DNA, 15 bp, Homo sapiens
catcgcagcttcaat

SEQ ID NO: 981598 - DNA, 15 bp, Homo sapiens
atcgcagcttcaatt

SEQ ID NO: 981599 - DNA, 15 bp, Homo sapiens
tcgcagcttcaattc

SEQ ID NO: 981600 - DNA, 15 bp, Homo sapiens
cgcagcttcaattct

SEQ ID NO: 981601 - DNA, 15 bp, Homo sapiens
gcagcttcaattctc

SEQ ID NO: 981602 - DNA, 15 bp, Homo sapiens
cagcttcaattctcc

SEQ ID NO: 981603 - DNA, 15 bp, Homo sapiens
agcttcaattctccc

SEQ ID NO: 981604 - DNA, 15 bp, Homo sapiens
gcttcaattctcccc

SEQ ID NO: 981605 - DNA, 15 bp, Homo sapiens
cttcaattctccccc

SEQ ID NO: 981606 - DNA, 15 bp, Homo sapiens
ttcaattctccccct

SEQ ID NO: 981607 - DNA, 15 bp, Homo sapiens
tcaattctcccccta

SEQ ID NO: 981608 - DNA, 15 bp, Homo sapiens
caattctccccctaa

SEQ ID NO: 981609 - DNA, 15 bp, Homo sapiens
aattctccccctaaa

SEQ ID NO: 981610 - DNA, 15 bp, Homo sapiens
attctccccctaaag

SEQ ID NO: 981611 - DNA, 15 bp, Homo sapiens
ttctccccctaaagg

SEQ ID NO: 981612 - DNA, 15 bp, Homo sapiens
tctccccctaaaggt

SEQ ID NO: 981613 - DNA, 15 bp, Homo sapiens
ctccccctaaaggtt

SEQ ID NO: 981614 - DNA, 15 bp, Homo sapiens
tccccctaaaggttt

SEQ ID NO: 981615 - DNA, 15 bp, Homo sapiens
ccccctaaaggtttg

SEQ ID NO: 981616 - DNA, 15 bp, Homo sapiens
cccctaaaggtttgg

SEQ ID NO: 981617 - DNA, 15 bp, Homo sapiens
ccctaaaggtttggg

SEQ ID NO: 981618 - DNA, 15 bp, Homo sapiens
cctaaaggtttgggg

SEQ ID NO: 981619 - DNA, 15 bp, Homo sapiens
ctaaaggtttggggg

SEQ ID NO: 981620 - DNA, 15 bp, Homo sapiens
taaaggtttgggggc

SEQ ID NO: 981621 - DNA, 15 bp, Homo sapiens
aaaggtttgggggca

SEQ ID NO: 981622 - DNA, 15 bp, Homo sapiens
aaggtttgggggcag

SEQ ID NO: 981623 - DNA, 15 bp, Homo sapiens
aggtttgggggcagt

SEQ ID NO: 981624 - DNA, 15 bp, Homo sapiens
ggtttgggggcagtt

SEQ ID NO: 981625 - DNA, 15 bp, Homo sapiens
gtttgggggcagttg

SEQ ID NO: 981626 - DNA, 15 bp, Homo sapiens
tttgggggcagttgg

SEQ ID NO: 981627 - DNA, 15 bp, Homo sapiens
ttgggggcagttggt

SEQ ID NO: 981628 - DNA, 15 bp, Homo sapiens
tgggggcagttggtg

SEQ ID NO: 981629 - DNA, 15 bp, Homo sapiens
gggggcagttggtgc

SEQ ID NO: 981630 - DNA, 15 bp, Homo sapiens
ggggcagttggtgca

SEQ ID NO: 981631 - DNA, 15 bp, Homo sapiens
gggcagttggtgcag

SEQ ID NO: 981632 - DNA, 15 bp, Homo sapiens
ggcagttggtgcaga

SEQ ID NO: 981633 - DNA, 15 bp, Homo sapiens
gcagttggtgcagag

SEQ ID NO: 981634 - DNA, 15 bp, Homo sapiens
cagttggtgcagagg

SEQ ID NO: 981635 - DNA, 15 bp, Homo sapiens
agttggtgcagaggt

SEQ ID NO: 981636 - DNA, 15 bp, Homo sapiens
gttggtgcagaggtg

SEQ ID NO: 981637 - DNA, 15 bp, Homo sapiens
ttggtgcagaggtga

SEQ ID NO: 981638 - DNA, 15 bp, Homo sapiens
tggtgcagaggtgag

SEQ ID NO: 981639 - DNA, 15 bp, Homo sapiens
ggtgcagaggtgaga

SEQ ID NO: 981640 - DNA, 15 bp, Homo sapiens
gtgcagaggtgagac

SEQ ID NO: 981641 - DNA, 15 bp, Homo sapiens
tgcagaggtgagacc

SEQ ID NO: 981642 - DNA, 15 bp, Homo sapiens
gcagaggtgagacca

SEQ ID NO: 981643 - DNA, 15 bp, Homo sapiens
cagaggtgagaccag

SEQ ID NO: 981644 - DNA, 15 bp, Homo sapiens
agaggtgagaccaga

SEQ ID NO: 981645 - DNA, 15 bp, Homo sapiens
gaggtgagaccagaa

SEQ ID NO: 981646 - DNA, 15 bp, Homo sapiens
aggtgagaccagaag

SEQ ID NO: 981647 - DNA, 15 bp, Homo sapiens
ggtgagaccagaagt

SEQ ID NO: 981648 - DNA, 15 bp, Homo sapiens
gtgagaccagaagtg

SEQ ID NO: 981649 - DNA, 15 bp, Homo sapiens
tgagaccagaagtgg

SEQ ID NO: 981650 - DNA, 15 bp, Homo sapiens
gagaccagaagtggg

SEQ ID NO: 981651 - DNA, 15 bp, Homo sapiens
agaccagaagtggga

SEQ ID NO: 981652 - DNA, 15 bp, Homo sapiens
gaccagaagtgggac

SEQ ID NO: 981653 - DNA, 15 bp, Homo sapiens
accagaagtgggacc

SEQ ID NO: 981654 - DNA, 15 bp, Homo sapiens
ccagaagtgggacca

SEQ ID NO: 981655 - DNA, 15 bp, Homo sapiens
cagaagtgggaccac

SEQ ID NO: 981656 - DNA, 15 bp, Homo sapiens
agaagtgggaccaca

SEQ ID NO: 981657 - DNA, 15 bp, Homo sapiens
gaagtgggaccacag

SEQ ID NO: 981658 - DNA, 15 bp, Homo sapiens
aagtgggaccacagg

SEQ ID NO: 981659 - DNA, 15 bp, Homo sapiens
agtgggaccacagga

SEQ ID NO: 981660 - DNA, 15 bp, Homo sapiens
gtgggaccacaggag

SEQ ID NO: 981661 - DNA, 15 bp, Homo sapiens
tgggaccacaggagg

SEQ ID NO: 981662 - DNA, 15 bp, Homo sapiens
gggaccacaggaggt

SEQ ID NO: 981663 - DNA, 15 bp, Homo sapiens
ggaccacaggaggtg

SEQ ID NO: 981664 - DNA, 15 bp, Homo sapiens
gaccacaggaggtgt

SEQ ID NO: 981665 - DNA, 15 bp, Homo sapiens
accacaggaggtgtc

SEQ ID NO: 981666 - DNA, 15 bp, Homo sapiens
ccacaggaggtgtct

SEQ ID NO: 981667 - DNA, 15 bp, Homo sapiens
cacaggaggtgtcta

SEQ ID NO: 981668 - DNA, 15 bp, Homo sapiens
acaggaggtgtctat

SEQ ID NO: 981669 - DNA, 15 bp, Homo sapiens
caggaggtgtctatc

SEQ ID NO: 981670 - DNA, 15 bp, Homo sapiens
aggaggtgtctatcc

SEQ ID NO: 981671 - DNA, 15 bp, Homo sapiens
ggaggtgtctatcca

SEQ ID NO: 981672 - DNA, 15 bp, Homo sapiens
gaggtgtctatccaa

SEQ ID NO: 981673 - DNA, 15 bp, Homo sapiens
aggtgtctatccaaa

SEQ ID NO: 981674 - DNA, 15 bp, Homo sapiens
ggtgtctatccaaaa

SEQ ID NO: 981675 - DNA, 15 bp, Homo sapiens
gtgtctatccaaaat

SEQ ID NO: 981676 - DNA, 15 bp, Homo sapiens
tgtctatccaaaatt

SEQ ID NO: 981677 - DNA, 15 bp, Homo sapiens
gtctatccaaaattc

SEQ ID NO: 981678 - DNA, 15 bp, Homo sapiens
tctatccaaaattcc

SEQ ID NO: 981679 - DNA, 15 bp, Homo sapiens
ctatccaaaattccc

SEQ ID NO: 981680 - DNA, 15 bp, Homo sapiens
tatccaaaattccct

SEQ ID NO: 981681 - DNA, 15 bp, Homo sapiens
atccaaaattccctc

SEQ ID NO: 981682 - DNA, 15 bp, Homo sapiens
tccaaaattccctcc

SEQ ID NO: 981683 - DNA, 15 bp, Homo sapiens
ccaaaattccctcca

SEQ ID NO: 981684 - DNA, 15 bp, Homo sapiens
caaaattccctccac

SEQ ID NO: 981685 - DNA, 15 bp, Homo sapiens
aaaattccctccact

SEQ ID NO: 981686 - DNA, 15 bp, Homo sapiens
aaattccctccactc

SEQ ID NO: 981687 - DNA, 15 bp, Homo sapiens
aattccctccactct

SEQ ID NO: 981688 - DNA, 15 bp, Homo sapiens
attccctccactctc

SEQ ID NO: 981689 - DNA, 15 bp, Homo sapiens
ttccctccactctcc

SEQ ID NO: 981690 - DNA, 15 bp, Homo sapiens
tccctccactctcca

SEQ ID NO: 981691 - DNA, 15 bp, Homo sapiens
ccctccactctccat

SEQ ID NO: 981692 - DNA, 15 bp, Homo sapiens
cctccactctccatg

SEQ ID NO: 981693 - DNA, 15 bp, Homo sapiens
ctccactctccatgg

SEQ ID NO: 981694 - DNA, 15 bp, Homo sapiens
tccactctccatggt

SEQ ID NO: 981695 - DNA, 15 bp, Homo sapiens
ccactctccatggta

SEQ ID NO: 981696 - DNA, 15 bp, Homo sapiens
cactctccatggtaa

SEQ ID NO: 981697 - DNA, 15 bp, Homo sapiens
actctccatggtaac

SEQ ID NO: 981698 - DNA, 15 bp, Homo sapiens
ctctccatggtaacc

SEQ ID NO: 981699 - DNA, 15 bp, Homo sapiens
tctccatggtaacca

SEQ ID NO: 981700 - DNA, 15 bp, Homo sapiens
ctccatggtaaccag

SEQ ID NO: 981701 - DNA, 15 bp, Homo sapiens
tccatggtaaccaga

SEQ ID NO: 981702 - DNA, 15 bp, Homo sapiens
ccatggtaaccagaa

SEQ ID NO: 981703 - DNA, 15 bp, Homo sapiens
catggtaaccagaac

SEQ ID NO: 981704 - DNA, 15 bp, Homo sapiens
atggtaaccagaact

SEQ ID NO: 981705 - DNA, 15 bp, Homo sapiens
tggtaaccagaactg

SEQ ID NO: 981706 - DNA, 15 bp, Homo sapiens
ggtaaccagaactgg

SEQ ID NO: 981707 - DNA, 15 bp, Homo sapiens
gtaaccagaactgga

SEQ ID NO: 981708 - DNA, 15 bp, Homo sapiens
taaccagaactggag

SEQ ID NO: 981709 - DNA, 15 bp, Homo sapiens
aaccagaactggagt

SEQ ID NO: 981710 - DNA, 15 bp, Homo sapiens
accagaactggagtc

SEQ ID NO: 981711 - DNA, 15 bp, Homo sapiens
ccagaactggagtcc

SEQ ID NO: 981712 - DNA, 15 bp, Homo sapiens
cagaactggagtccc

SEQ ID NO: 981713 - DNA, 15 bp, Homo sapiens
agaactggagtccca

SEQ ID NO: 981714 - DNA, 15 bp, Homo sapiens
gaactggagtcccac

SEQ ID NO: 981715 - DNA, 15 bp, Homo sapiens
aactggagtcccacc

SEQ ID NO: 981716 - DNA, 15 bp, Homo sapiens
actggagtcccacct

SEQ ID NO: 981717 - DNA, 15 bp, Homo sapiens
ctggagtcccacctc

SEQ ID NO: 981718 - DNA, 15 bp, Homo sapiens
tggagtcccacctcc

SEQ ID NO: 981719 - DNA, 15 bp, Homo sapiens
ggagtcccacctccc

SEQ ID NO: 981720 - DNA, 15 bp, Homo sapiens
gagtcccacctccca

SEQ ID NO: 981721 - DNA, 15 bp, Homo sapiens
agtcccacctcccaa

SEQ ID NO: 981722 - DNA, 15 bp, Homo sapiens
gtcccacctcccaaa

SEQ ID NO: 981723 - DNA, 15 bp, Homo sapiens
tcccacctcccaaaa

SEQ ID NO: 981724 - DNA, 15 bp, Homo sapiens
cccacctcccaaaaa

SEQ ID NO: 981725 - DNA, 15 bp, Homo sapiens
ccacctcccaaaaag

SEQ ID NO: 981726 - DNA, 15 bp, Homo sapiens
cacctcccaaaaagc

SEQ ID NO: 981727 - DNA, 15 bp, Homo sapiens
acctcccaaaaagca

SEQ ID NO: 981728 - DNA, 15 bp, Homo sapiens
cctcccaaaaagcac

SEQ ID NO: 981729 - DNA, 15 bp, Homo sapiens
ctcccaaaaagcacc

SEQ ID NO: 981730 - DNA, 15 bp, Homo sapiens
tcccaaaaagcacct

SEQ ID NO: 981731 - DNA, 15 bp, Homo sapiens
cccaaaaagcacctg

SEQ ID NO: 981732 - DNA, 15 bp, Homo sapiens
ccaaaaagcacctgg

SEQ ID NO: 981733 - DNA, 15 bp, Homo sapiens
caaaaagcacctggg

SEQ ID NO: 981734 - DNA, 15 bp, Homo sapiens
aaaaagcacctgggc

SEQ ID NO: 981735 - DNA, 15 bp, Homo sapiens
aaaagcacctgggca

SEQ ID NO: 981736 - DNA, 15 bp, Homo sapiens
aaagcacctgggcat

SEQ ID NO: 981737 - DNA, 15 bp, Homo sapiens
aagcacctgggcatg

SEQ ID NO: 981738 - DNA, 15 bp, Homo sapiens
agcacctgggcatgg

SEQ ID NO: 981739 - DNA, 15 bp, Homo sapiens
gcacctgggcatggg

SEQ ID NO: 981740 - DNA, 15 bp, Homo sapiens
cacctgggcatgggg

SEQ ID NO: 981741 - DNA, 15 bp, Homo sapiens
acctgggcatggggg

SEQ ID NO: 981742 - DNA, 15 bp, Homo sapiens
cctgggcatgggggt

SEQ ID NO: 981743 - DNA, 15 bp, Homo sapiens
ctgggcatgggggtg

SEQ ID NO: 981744 - DNA, 15 bp, Homo sapiens
tgggcatgggggtgg

SEQ ID NO: 981745 - DNA, 15 bp, Homo sapiens
gggcatgggggtggg

SEQ ID NO: 981746 - DNA, 15 bp, Homo sapiens
ggcatgggggtgggg

SEQ ID NO: 981747 - DNA, 15 bp, Homo sapiens
gcatgggggtggggt

SEQ ID NO: 981748 - DNA, 15 bp, Homo sapiens
catgggggtggggtc

SEQ ID NO: 981749 - DNA, 15 bp, Homo sapiens
atgggggtggggtcg

SEQ ID NO: 981750 - DNA, 15 bp, Homo sapiens
tgggggtggggtcgt

SEQ ID NO: 981751 - DNA, 15 bp, Homo sapiens
gggggtggggtcgtg

SEQ ID NO: 981752 - DNA, 15 bp, Homo sapiens
ggggtggggtcgtgt

SEQ ID NO: 981753 - DNA, 15 bp, Homo sapiens
gggtggggtcgtgtg

SEQ ID NO: 981754 - DNA, 15 bp, Homo sapiens
ggtggggtcgtgtga

SEQ ID NO: 981755 - DNA, 15 bp, Homo sapiens
gtggggtcgtgtgat

SEQ ID NO: 981756 - DNA, 15 bp, Homo sapiens
tggggtcgtgtgatg

SEQ ID NO: 981757 - DNA, 15 bp, Homo sapiens
agcgaggaccgctca

SEQ ID NO: 981758 - DNA, 15 bp, Homo sapiens
gcgaggaccgctcag

SEQ ID NO: 981759 - DNA, 15 bp, Homo sapiens
cgaggaccgctcagc

SEQ ID NO: 981760 - DNA, 15 bp, Homo sapiens
gaggaccgctcagcg

SEQ ID NO: 981761 - DNA, 15 bp, Homo sapiens
aggaccgctcagcgt

SEQ ID NO: 981762 - DNA, 15 bp, Homo sapiens
ggaccgctcagcgtg

SEQ ID NO: 981763 - DNA, 15 bp, Homo sapiens
gaccgctcagcgtgg

SEQ ID NO: 981764 - DNA, 15 bp, Homo sapiens
accgctcagcgtggt

SEQ ID NO: 981765 - DNA, 15 bp, Homo sapiens
ccgctcagcgtggtg

SEQ ID NO: 981766 - DNA, 15 bp, Homo sapiens
cgctcagcgtggtgc

SEQ ID NO: 981767 - DNA, 15 bp, Homo sapiens
gctcagcgtggtgcg

SEQ ID NO: 981768 - DNA, 15 bp, Homo sapiens
ctcagcgtggtgcgc

SEQ ID NO: 981769 - DNA, 15 bp, Homo sapiens
tcagcgtggtgcgct

SEQ ID NO: 981770 - DNA, 15 bp, Homo sapiens
cagcgtggtgcgctc

SEQ ID NO: 981771 - DNA, 15 bp, Homo sapiens
agcgtggtgcgctcc

SEQ ID NO: 981772 - DNA, 15 bp, Homo sapiens
gcgtggtgcgctcct

SEQ ID NO: 981773 - DNA, 15 bp, Homo sapiens
cgtggtgcgctcctc

SEQ ID NO: 981774 - DNA, 15 bp, Homo sapiens
gtggtgcgctcctcc

SEQ ID NO: 981775 - DNA, 15 bp, Homo sapiens
tggtgcgctcctcca

SEQ ID NO: 981776 - DNA, 15 bp, Homo sapiens
ggtgcgctcctccac

SEQ ID NO: 981777 - DNA, 15 bp, Homo sapiens
gtgcgctcctccacc

SEQ ID NO: 981778 - DNA, 15 bp, Homo sapiens
tgcgctcctccacca

SEQ ID NO: 981779 - DNA, 15 bp, Homo sapiens
gcgctcctccaccac

SEQ ID NO: 981780 - DNA, 15 bp, Homo sapiens
cgctcctccaccacc

SEQ ID NO: 981781 - DNA, 15 bp, Homo sapiens
gctcctccaccacct

SEQ ID NO: 981782 - DNA, 15 bp, Homo sapiens
ctcctccaccacctc

SEQ ID NO: 981783 - DNA, 15 bp, Homo sapiens
tcctccaccacctcc

SEQ ID NO: 981784 - DNA, 15 bp, Homo sapiens
cctccaccacctcca

SEQ ID NO: 981785 - DNA, 15 bp, Homo sapiens
ctccaccacctccaa

SEQ ID NO: 981786 - DNA, 15 bp, Homo sapiens
tccaccacctccaac

SEQ ID NO: 981787 - DNA, 15 bp, Homo sapiens
ccaccacctccaaca

SEQ ID NO: 981788 - DNA, 15 bp, Homo sapiens
caccacctccaacac

SEQ ID NO: 981789 - DNA, 15 bp, Homo sapiens
accacctccaacacc

SEQ ID NO: 981790 - DNA, 15 bp, Homo sapiens
ccacctccaacaccc

SEQ ID NO: 981791 - DNA, 15 bp, Homo sapiens
cacctccaacaccca

SEQ ID NO: 981792 - DNA, 15 bp, Homo sapiens
acctccaacacccag

SEQ ID NO: 981793 - DNA, 15 bp, Homo sapiens
cctccaacacccagc

SEQ ID NO: 981794 - DNA, 15 bp, Homo sapiens
ctccaacacccagcg

SEQ ID NO: 981795 - DNA, 15 bp, Homo sapiens
tccaacacccagcgc

SEQ ID NO: 981796 - DNA, 15 bp, Homo sapiens
ccaacacccagcgct

SEQ ID NO: 981797 - DNA, 15 bp, Homo sapiens
caacacccagcgctc

SEQ ID NO: 981798 - DNA, 15 bp, Homo sapiens
aacacccagcgctcc

SEQ ID NO: 981799 - DNA, 15 bp, Homo sapiens
acacccagcgctccc

SEQ ID NO: 981800 - DNA, 15 bp, Homo sapiens
cacccagcgctcccg

SEQ ID NO: 981801 - DNA, 15 bp, Homo sapiens
acccagcgctcccgg

SEQ ID NO: 981802 - DNA, 15 bp, Homo sapiens
cccagcgctcccggc

SEQ ID NO: 981803 - DNA, 15 bp, Homo sapiens
ccagcgctcccggcc

SEQ ID NO: 981804 - DNA, 15 bp, Homo sapiens
cagcgctcccggccc

SEQ ID NO: 981805 - DNA, 15 bp, Homo sapiens
agcgctcccggcccc

SEQ ID NO: 981806 - DNA, 15 bp, Homo sapiens
gcgctcccggccccg

SEQ ID NO: 981807 - DNA, 15 bp, Homo sapiens
cgctcccggccccgg

SEQ ID NO: 981808 - DNA, 15 bp, Homo sapiens
gctcccggccccggg

SEQ ID NO: 981809 - DNA, 15 bp, Homo sapiens
ctcccggccccgggg

SEQ ID NO: 981810 - DNA, 15 bp, Homo sapiens
tcccggccccggggg

SEQ ID NO: 981811 - DNA, 15 bp, Homo sapiens
cccggccccgggggg

SEQ ID NO: 981812 - DNA, 15 bp, Homo sapiens
ccggccccggggggc

SEQ ID NO: 981813 - DNA, 15 bp, Homo sapiens
cggccccggggggcc

SEQ ID NO: 981814 - DNA, 15 bp, Homo sapiens
ggccccggggggcct

SEQ ID NO: 981815 - DNA, 15 bp, Homo sapiens
gccccggggggcctc

SEQ ID NO: 981816 - DNA, 15 bp, Homo sapiens
ccccggggggcctcg

SEQ ID NO: 981817 - DNA, 15 bp, Homo sapiens
cccggggggcctcgg

SEQ ID NO: 981818 - DNA, 15 bp, Homo sapiens
ccggggggcctcggg

SEQ ID NO: 981819 - DNA, 15 bp, Homo sapiens
cggggggcctcgggc

SEQ ID NO: 981820 - DNA, 15 bp, Homo sapiens
ggggggcctcgggca

SEQ ID NO: 981821 - DNA, 15 bp, Homo sapiens
gggggcctcgggcac

SEQ ID NO: 981822 - DNA, 15 bp, Homo sapiens
ggggcctcgggcacg

SEQ ID NO: 981823 - DNA, 15 bp, Homo sapiens
gggcctcgggcacgg

SEQ ID NO: 981824 - DNA, 15 bp, Homo sapiens
ggcctcgggcacgga

SEQ ID NO: 981825 - DNA, 15 bp, Homo sapiens
gcctcgggcacggaa

SEQ ID NO: 981826 - DNA, 15 bp, Homo sapiens
cctcgggcacggaag

SEQ ID NO: 981827 - DNA, 15 bp, Homo sapiens
ctcgggcacggaagg

SEQ ID NO: 981828 - DNA, 15 bp, Homo sapiens
tcgggcacggaaggc

SEQ ID NO: 981829 - DNA, 15 bp, Homo sapiens
cgggcacggaaggcg

SEQ ID NO: 981830 - DNA, 15 bp, Homo sapiens
gggcacggaaggcgc

SEQ ID NO: 981831 - DNA, 15 bp, Homo sapiens
ggcacggaaggcgcc

SEQ ID NO: 981832 - DNA, 15 bp, Homo sapiens
gcacggaaggcgcca

SEQ ID NO: 981833 - DNA, 15 bp, Homo sapiens
cacggaaggcgccag

SEQ ID NO: 981834 - DNA, 15 bp, Homo sapiens
acggaaggcgccagg

SEQ ID NO: 981835 - DNA, 15 bp, Homo sapiens
cggaaggcgccaggg

SEQ ID NO: 981836 - DNA, 15 bp, Homo sapiens
ggaaggcgccagggg

SEQ ID NO: 981837 - DNA, 15 bp, Homo sapiens
gaaggcgccaggggt

SEQ ID NO: 981838 - DNA, 15 bp, Homo sapiens
aaggcgccaggggtg

SEQ ID NO: 981839 - DNA, 15 bp, Homo sapiens
aggcgccaggggtgc

SEQ ID NO: 981840 - DNA, 15 bp, Homo sapiens
ggcgccaggggtgcg

SEQ ID NO: 981841 - DNA, 15 bp, Homo sapiens
gcgccaggggtgcgg

SEQ ID NO: 981842 - DNA, 15 bp, Homo sapiens
cgccaggggtgcggg

SEQ ID NO: 981843 - DNA, 15 bp, Homo sapiens
gccaggggtgcgggt

SEQ ID NO: 981844 - DNA, 15 bp, Homo sapiens
ccaggggtgcgggtt

SEQ ID NO: 981845 - DNA, 15 bp, Homo sapiens
caggggtgcgggttc

SEQ ID NO: 981846 - DNA, 15 bp, Homo sapiens
aggggtgcgggttcc

SEQ ID NO: 981847 - DNA, 15 bp, Homo sapiens
ggggtgcgggttcct

SEQ ID NO: 981848 - DNA, 15 bp, Homo sapiens
gggtgcgggttcctg

SEQ ID NO: 981849 - DNA, 15 bp, Homo sapiens
ggtgcgggttcctgc

SEQ ID NO: 981850 - DNA, 15 bp, Homo sapiens
gtgcgggttcctgca

SEQ ID NO: 981851 - DNA, 15 bp, Homo sapiens
tgcgggttcctgcaa

SEQ ID NO: 981852 - DNA, 15 bp, Homo sapiens
gcgggttcctgcaac

SEQ ID NO: 981853 - DNA, 15 bp, Homo sapiens
cgggttcctgcaacc

SEQ ID NO: 981854 - DNA, 15 bp, Homo sapiens
gggttcctgcaaccc

SEQ ID NO: 981855 - DNA, 15 bp, Homo sapiens
ggttcctgcaacccc

SEQ ID NO: 981856 - DNA, 15 bp, Homo sapiens
gttcctgcaacccct

SEQ ID NO: 981857 - DNA, 15 bp, Homo sapiens
ttcctgcaacccctt

SEQ ID NO: 981858 - DNA, 15 bp, Homo sapiens
tcctgcaaccccttg

SEQ ID NO: 981859 - DNA, 15 bp, Homo sapiens
cctgcaaccccttgg

SEQ ID NO: 981860 - DNA, 15 bp, Homo sapiens
ctgcaaccccttgga

SEQ ID NO: 981861 - DNA, 15 bp, Homo sapiens
tgcaaccccttggag

SEQ ID NO: 981862 - DNA, 15 bp, Homo sapiens
gcaaccccttggagt

SEQ ID NO: 981863 - DNA, 15 bp, Homo sapiens
caaccccttggagtc

SEQ ID NO: 981864 - DNA, 15 bp, Homo sapiens
aaccccttggagtcc

SEQ ID NO: 981865 - DNA, 15 bp, Homo sapiens
accccttggagtccg

SEQ ID NO: 981866 - DNA, 15 bp, Homo sapiens
ccccttggagtccgc

SEQ ID NO: 981867 - DNA, 15 bp, Homo sapiens
cccttggagtccgcg

SEQ ID NO: 981868 - DNA, 15 bp, Homo sapiens
ccttggagtccgcgc

SEQ ID NO: 981869 - DNA, 15 bp, Homo sapiens
cttggagtccgcgcc

SEQ ID NO: 981870 - DNA, 15 bp, Homo sapiens
ttggagtccgcgccc

SEQ ID NO: 981871 - DNA, 15 bp, Homo sapiens
tggagtccgcgccca

SEQ ID NO: 981872 - DNA, 15 bp, Homo sapiens
ggagtccgcgcccag

SEQ ID NO: 981873 - DNA, 15 bp, Homo sapiens
gagtccgcgcccaga

SEQ ID NO: 981874 - DNA, 15 bp, Homo sapiens
agtccgcgcccagag

SEQ ID NO: 981875 - DNA, 15 bp, Homo sapiens
gtccgcgcccagagg

SEQ ID NO: 981876 - DNA, 15 bp, Homo sapiens
tccgcgcccagaggc

SEQ ID NO: 981877 - DNA, 15 bp, Homo sapiens
ccgcgcccagaggct

SEQ ID NO: 981878 - DNA, 15 bp, Homo sapiens
cgcgcccagaggctg

SEQ ID NO: 981879 - DNA, 15 bp, Homo sapiens
gcgcccagaggctga

SEQ ID NO: 981880 - DNA, 15 bp, Homo sapiens
cgcccagaggctgag

SEQ ID NO: 981881 - DNA, 15 bp, Homo sapiens
gcccagaggctgagg

SEQ ID NO: 981882 - DNA, 15 bp, Homo sapiens
cccagaggctgaggc

SEQ ID NO: 981883 - DNA, 15 bp, Homo sapiens
ccagaggctgaggca

SEQ ID NO: 981884 - DNA, 15 bp, Homo sapiens
cagaggctgaggcac

SEQ ID NO: 981885 - DNA, 15 bp, Homo sapiens
agaggctgaggcacc

SEQ ID NO: 981886 - DNA, 15 bp, Homo sapiens
gaggctgaggcacca

SEQ ID NO: 981887 - DNA, 15 bp, Homo sapiens
aggctgaggcaccac

SEQ ID NO: 981888 - DNA, 15 bp, Homo sapiens
ggctgaggcaccaca

SEQ ID NO: 981889 - DNA, 15 bp, Homo sapiens
gctgaggcaccacag

SEQ ID NO: 981890 - DNA, 15 bp, Homo sapiens
ctgaggcaccacagc

SEQ ID NO: 981891 - DNA, 15 bp, Homo sapiens
tgaggcaccacagcc

SEQ ID NO: 981892 - DNA, 15 bp, Homo sapiens
gaggcaccacagcct

SEQ ID NO: 981893 - DNA, 15 bp, Homo sapiens
aggcaccacagcctt

SEQ ID NO: 981894 - DNA, 15 bp, Homo sapiens
ggcaccacagcctta

SEQ ID NO: 981895 - DNA, 15 bp, Homo sapiens
gcaccacagccttag

SEQ ID NO: 981896 - DNA, 15 bp, Homo sapiens
caccacagccttagc

SEQ ID NO: 981897 - DNA, 15 bp, Homo sapiens
accacagccttagcc

SEQ ID NO: 981898 - DNA, 15 bp, Homo sapiens
ccacagccttagccc

SEQ ID NO: 981899 - DNA, 15 bp, Homo sapiens
cacagccttagcccc

SEQ ID NO: 981900 - DNA, 15 bp, Homo sapiens
acagccttagccccg

SEQ ID NO: 981901 - DNA, 15 bp, Homo sapiens
cagccttagccccgg

SEQ ID NO: 981902 - DNA, 15 bp, Homo sapiens
agccttagccccggg

SEQ ID NO: 981903 - DNA, 15 bp, Homo sapiens
gccttagccccgggc

SEQ ID NO: 981904 - DNA, 15 bp, Homo sapiens
ccttagccccgggcc

SEQ ID NO: 981905 - DNA, 15 bp, Homo sapiens
cttagccccgggccg

SEQ ID NO: 981906 - DNA, 15 bp, Homo sapiens
ttagccccgggccgc

SEQ ID NO: 981907 - DNA, 15 bp, Homo sapiens
tagccccgggccgcg

SEQ ID NO: 981908 - DNA, 15 bp, Homo sapiens
agccccgggccgcgc

SEQ ID NO: 981909 - DNA, 15 bp, Homo sapiens
gccccgggccgcgca

SEQ ID NO: 981910 - DNA, 15 bp, Homo sapiens
ccccgggccgcgcag

SEQ ID NO: 981911 - DNA, 15 bp, Homo sapiens
cccgggccgcgcagg

SEQ ID NO: 981912 - DNA, 15 bp, Homo sapiens
ccgggccgcgcaggc

SEQ ID NO: 981913 - DNA, 15 bp, Homo sapiens
cgggccgcgcaggct

SEQ ID NO: 981914 - DNA, 15 bp, Homo sapiens
gggccgcgcaggctc

SEQ ID NO: 981915 - DNA, 15 bp, Homo sapiens
ggccgcgcaggctct

SEQ ID NO: 981916 - DNA, 15 bp, Homo sapiens
gccgcgcaggctcta

SEQ ID NO: 981917 - DNA, 15 bp, Homo sapiens
ccgcgcaggctctac

SEQ ID NO: 981918 - DNA, 15 bp, Homo sapiens
cgcgcaggctctacg

SEQ ID NO: 981919 - DNA, 15 bp, Homo sapiens
gcgcaggctctacga

SEQ ID NO: 981920 - DNA, 15 bp, Homo sapiens
cgcaggctctacgac

SEQ ID NO: 981921 - DNA, 15 bp, Homo sapiens
gcaggctctacgaca

SEQ ID NO: 981922 - DNA, 15 bp, Homo sapiens
caggctctacgacaa

SEQ ID NO: 981923 - DNA, 15 bp, Homo sapiens
aggctctacgacaat

SEQ ID NO: 981924 - DNA, 15 bp, Homo sapiens
ggctctacgacaatg

SEQ ID NO: 981925 - DNA, 15 bp, Homo sapiens
gctctacgacaatgg

SEQ ID NO: 981926 - DNA, 15 bp, Homo sapiens
ctctacgacaatggg

SEQ ID NO: 981927 - DNA, 15 bp, Homo sapiens
tctacgacaatgggt

SEQ ID NO: 981928 - DNA, 15 bp, Homo sapiens
ctacgacaatgggta

SEQ ID NO: 981929 - DNA, 15 bp, Homo sapiens
tacgacaatgggtac

SEQ ID NO: 981930 - DNA, 15 bp, Homo sapiens
acgacaatgggtacc

SEQ ID NO: 981931 - DNA, 15 bp, Homo sapiens
cgacaatgggtacca

SEQ ID NO: 981932 - DNA, 15 bp, Homo sapiens
gacaatgggtaccag

SEQ ID NO: 981933 - DNA, 15 bp, Homo sapiens
acaatgggtaccagg

SEQ ID NO: 981934 - DNA, 15 bp, Homo sapiens
caatgggtaccaggg

SEQ ID NO: 981935 - DNA, 15 bp, Homo sapiens
aatgggtaccagggg

SEQ ID NO: 981936 - DNA, 15 bp, Homo sapiens
atgggtaccaggggt

SEQ ID NO: 981937 - DNA, 15 bp, Homo sapiens
tgggtaccaggggtg

SEQ ID NO: 981938 - DNA, 15 bp, Homo sapiens
gggtaccaggggtgt

SEQ ID NO: 981939 - DNA, 15 bp, Homo sapiens
ggtaccaggggtgtg

SEQ ID NO: 981940 - DNA, 15 bp, Homo sapiens
gtaccaggggtgtgc

SEQ ID NO: 981941 - DNA, 15 bp, Homo sapiens
taccaggggtgtgcc

SEQ ID NO: 981942 - DNA, 15 bp, Homo sapiens
accaggggtgtgccc

SEQ ID NO: 981943 - DNA, 15 bp, Homo sapiens
ccaggggtgtgcccg

SEQ ID NO: 981944 - DNA, 15 bp, Homo sapiens
caggggtgtgcccgc

SEQ ID NO: 981945 - DNA, 15 bp, Homo sapiens
aggggtgtgcccgcc

SEQ ID NO: 981946 - DNA, 15 bp, Homo sapiens
ggggtgtgcccgcct

SEQ ID NO: 981947 - DNA, 15 bp, Homo sapiens
gggtgtgcccgcctc

SEQ ID NO: 981948 - DNA, 15 bp, Homo sapiens
ggtgtgcccgcctcg

SEQ ID NO: 981949 - DNA, 15 bp, Homo sapiens
gtgtgcccgcctcgc

SEQ ID NO: 981950 - DNA, 15 bp, Homo sapiens
tgtgcccgcctcgcc

SEQ ID NO: 981951 - DNA, 15 bp, Homo sapiens
gtgcccgcctcgcca

SEQ ID NO: 981952 - DNA, 15 bp, Homo sapiens
tgcccgcctcgccag

SEQ ID NO: 981953 - DNA, 15 bp, Homo sapiens
gcccgcctcgccaga

SEQ ID NO: 981954 - DNA, 15 bp, Homo sapiens
cccgcctcgccagag

SEQ ID NO: 981955 - DNA, 15 bp, Homo sapiens
ccgcctcgccagagc

SEQ ID NO: 981956 - DNA, 15 bp, Homo sapiens
cgcctcgccagagct

SEQ ID NO: 981957 - DNA, 15 bp, Homo sapiens
gcctcgccagagctg

SEQ ID NO: 981958 - DNA, 15 bp, Homo sapiens
cctcgccagagctgc

SEQ ID NO: 981959 - DNA, 15 bp, Homo sapiens
ctcgccagagctgct

SEQ ID NO: 981960 - DNA, 15 bp, Homo sapiens
tcgccagagctgctg

SEQ ID NO: 981961 - DNA, 15 bp, Homo sapiens
cgccagagctgctgc

SEQ ID NO: 981962 - DNA, 15 bp, Homo sapiens
gccagagctgctgcg

SEQ ID NO: 981963 - DNA, 15 bp, Homo sapiens
ccagagctgctgcgc

SEQ ID NO: 981964 - DNA, 15 bp, Homo sapiens
cagagctgctgcgcc

SEQ ID NO: 981965 - DNA, 15 bp, Homo sapiens
agagctgctgcgccg

SEQ ID NO: 981966 - DNA, 15 bp, Homo sapiens
gagctgctgcgccgg

SEQ ID NO: 981967 - DNA, 15 bp, Homo sapiens
agctgctgcgccggc

SEQ ID NO: 981968 - DNA, 15 bp, Homo sapiens
gctgctgcgccggcc

SEQ ID NO: 981969 - DNA, 15 bp, Homo sapiens
ctgctgcgccggcct

SEQ ID NO: 981970 - DNA, 15 bp, Homo sapiens
tgctgcgccggcctg

SEQ ID NO: 981971 - DNA, 15 bp, Homo sapiens
gctgcgccggcctgt

SEQ ID NO: 981972 - DNA, 15 bp, Homo sapiens
ctgcgccggcctgtc

SEQ ID NO: 981973 - DNA, 15 bp, Homo sapiens
tgcgccggcctgtct

SEQ ID NO: 981974 - DNA, 15 bp, Homo sapiens
gcgccggcctgtctc

SEQ ID NO: 981975 - DNA, 15 bp, Homo sapiens
cgccggcctgtctcg

SEQ ID NO: 981976 - DNA, 15 bp, Homo sapiens
gccggcctgtctcgt

SEQ ID NO: 981977 - DNA, 15 bp, Homo sapiens
ccggcctgtctcgtg

SEQ ID NO: 981978 - DNA, 15 bp, Homo sapiens
cggcctgtctcgtgt

SEQ ID NO: 981979 - DNA, 15 bp, Homo sapiens
ggcctgtctcgtgtt

SEQ ID NO: 981980 - DNA, 15 bp, Homo sapiens
gcctgtctcgtgttc

SEQ ID NO: 981981 - DNA, 15 bp, Homo sapiens
cctgtctcgtgttcc

SEQ ID NO: 981982 - DNA, 15 bp, Homo sapiens
ctgtctcgtgttcct

SEQ ID NO: 981983 - DNA, 15 bp, Homo sapiens
tgtctcgtgttcctg

SEQ ID NO: 981984 - DNA, 15 bp, Homo sapiens
gtctcgtgttcctgc

SEQ ID NO: 981985 - DNA, 15 bp, Homo sapiens
tctcgtgttcctgca

SEQ ID NO: 981986 - DNA, 15 bp, Homo sapiens
ctcgtgttcctgcac

SEQ ID NO: 981987 - DNA, 15 bp, Homo sapiens
tcgtgttcctgcacc

SEQ ID NO: 981988 - DNA, 15 bp, Homo sapiens
cgtgttcctgcaccg

SEQ ID NO: 981989 - DNA, 15 bp, Homo sapiens
gtgttcctgcaccgg

SEQ ID NO: 981990 - DNA, 15 bp, Homo sapiens
tgttcctgcaccggg

SEQ ID NO: 981991 - DNA, 15 bp, Homo sapiens
gttcctgcaccgggc

SEQ ID NO: 981992 - DNA, 15 bp, Homo sapiens
ttcctgcaccgggct

SEQ ID NO: 981993 - DNA, 15 bp, Homo sapiens
tcctgcaccgggctc

SEQ ID NO: 981994 - DNA, 15 bp, Homo sapiens
cctgcaccgggctca

SEQ ID NO: 981995 - DNA, 15 bp, Homo sapiens
ctgcaccgggctcag

SEQ ID NO: 981996 - DNA, 15 bp, Homo sapiens
tgcaccgggctcagc

SEQ ID NO: 981997 - DNA, 15 bp, Homo sapiens
gcaccgggctcagcg

SEQ ID NO: 981998 - DNA, 15 bp, Homo sapiens
caccgggctcagcgc

SEQ ID NO: 981999 - DNA, 15 bp, Homo sapiens
accgggctcagcgcc

SEQ ID NO: 982000 - DNA, 15 bp, Homo sapiens
ccgggctcagcgccg

SEQ ID NO: 982001 - DNA, 15 bp, Homo sapiens
cgggctcagcgccgc

SEQ ID NO: 982002 - DNA, 15 bp, Homo sapiens
gggctcagcgccgcc

SEQ ID NO: 982003 - DNA, 15 bp, Homo sapiens
ggctcagcgccgcct

SEQ ID NO: 982004 - DNA, 15 bp, Homo sapiens
gctcagcgccgcctt

SEQ ID NO: 982005 - DNA, 15 bp, Homo sapiens
ctcagcgccgccttg

SEQ ID NO: 982006 - DNA, 15 bp, Homo sapiens
tcagcgccgccttgg

SEQ ID NO: 982007 - DNA, 15 bp, Homo sapiens
cagcgccgccttggc

SEQ ID NO: 982008 - DNA, 15 bp, Homo sapiens
agcgccgccttggcc

SEQ ID NO: 982009 - DNA, 15 bp, Homo sapiens
gcgccgccttggcca

SEQ ID NO: 982010 - DNA, 15 bp, Homo sapiens
cgccgccttggccac

SEQ ID NO: 982011 - DNA, 15 bp, Homo sapiens
gccgccttggccaca

SEQ ID NO: 982012 - DNA, 15 bp, Homo sapiens
ccgccttggccacag

SEQ ID NO: 982013 - DNA, 15 bp, Homo sapiens
cgccttggccacagc

SEQ ID NO: 982014 - DNA, 15 bp, Homo sapiens
gccttggccacagcc

SEQ ID NO: 982015 - DNA, 15 bp, Homo sapiens
ccttggccacagccc

SEQ ID NO: 982016 - DNA, 15 bp, Homo sapiens
cttggccacagccct

SEQ ID NO: 982017 - DNA, 15 bp, Homo sapiens
ttggccacagccctg

SEQ ID NO: 982018 - DNA, 15 bp, Homo sapiens
tggccacagccctgg

SEQ ID NO: 982019 - DNA, 15 bp, Homo sapiens
ggccacagccctggc

SEQ ID NO: 982020 - DNA, 15 bp, Homo sapiens
gccacagccctggcc

SEQ ID NO: 982021 - DNA, 15 bp, Homo sapiens
ccacagccctggcca

SEQ ID NO: 982022 - DNA, 15 bp, Homo sapiens
cacagccctggccat

SEQ ID NO: 982023 - DNA, 15 bp, Homo sapiens
acagccctggccatc

SEQ ID NO: 982024 - DNA, 15 bp, Homo sapiens
cagccctggccatcc

SEQ ID NO: 982025 - DNA, 15 bp, Homo sapiens
agccctggccatccc

SEQ ID NO: 982026 - DNA, 15 bp, Homo sapiens
gccctggccatcccg

SEQ ID NO: 982027 - DNA, 15 bp, Homo sapiens
ccctggccatcccgc

SEQ ID NO: 982028 - DNA, 15 bp, Homo sapiens
cctggccatcccgcc

SEQ ID NO: 982029 - DNA, 15 bp, Homo sapiens
ctggccatcccgcca

SEQ ID NO: 982030 - DNA, 15 bp, Homo sapiens
tggccatcccgccag

SEQ ID NO: 982031 - DNA, 15 bp, Homo sapiens
ggccatcccgccagt

SEQ ID NO: 982032 - DNA, 15 bp, Homo sapiens
gccatcccgccagtg

SEQ ID NO: 982033 - DNA, 15 bp, Homo sapiens
ccatcccgccagtgc

SEQ ID NO: 982034 - DNA, 15 bp, Homo sapiens
catcccgccagtgcc

SEQ ID NO: 982035 - DNA, 15 bp, Homo sapiens
atcccgccagtgcca

SEQ ID NO: 982036 - DNA, 15 bp, Homo sapiens
tcccgccagtgccat

SEQ ID NO: 982037 - DNA, 15 bp, Homo sapiens
cccgccagtgccatc

SEQ ID NO: 982038 - DNA, 15 bp, Homo sapiens
ccgccagtgccatcc

SEQ ID NO: 982039 - DNA, 15 bp, Homo sapiens
cgccagtgccatcct

SEQ ID NO: 982040 - DNA, 15 bp, Homo sapiens
gccagtgccatcctc

SEQ ID NO: 982041 - DNA, 15 bp, Homo sapiens
ccagtgccatcctcc

SEQ ID NO: 982042 - DNA, 15 bp, Homo sapiens
cagtgccatcctccg

SEQ ID NO: 982043 - DNA, 15 bp, Homo sapiens
agtgccatcctccgt

SEQ ID NO: 982044 - DNA, 15 bp, Homo sapiens
gtgccatcctccgtc

SEQ ID NO: 982045 - DNA, 15 bp, Homo sapiens
tgccatcctccgtct

SEQ ID NO: 982046 - DNA, 15 bp, Homo sapiens
gccatcctccgtctg

SEQ ID NO: 982047 - DNA, 15 bp, Homo sapiens
ccatcctccgtctgc

SEQ ID NO: 982048 - DNA, 15 bp, Homo sapiens
catcctccgtctgca

SEQ ID NO: 982049 - DNA, 15 bp, Homo sapiens
atcctccgtctgcac

SEQ ID NO: 982050 - DNA, 15 bp, Homo sapiens
tcctccgtctgcacg

SEQ ID NO: 982051 - DNA, 15 bp, Homo sapiens
cctccgtctgcacgc

SEQ ID NO: 982052 - DNA, 15 bp, Homo sapiens
ctccgtctgcacgct

SEQ ID NO: 982053 - DNA, 15 bp, Homo sapiens
tccgtctgcacgctc

SEQ ID NO: 982054 - DNA, 15 bp, Homo sapiens
ccgtctgcacgctct

SEQ ID NO: 982055 - DNA, 15 bp, Homo sapiens
cgtctgcacgctctg

SEQ ID NO: 982056 - DNA, 15 bp, Homo sapiens
gtctgcacgctctga

SEQ ID NO: 982057 - DNA, 15 bp, Homo sapiens
tctgcacgctctgat

SEQ ID NO: 982058 - DNA, 15 bp, Homo sapiens
ctgcacgctctgatg

SEQ ID NO: 982059 - DNA, 15 bp, Homo sapiens
tgcacgctctgatgc

SEQ ID NO: 982060 - DNA, 15 bp, Homo sapiens
gcacgctctgatgcc

SEQ ID NO: 982061 - DNA, 15 bp, Homo sapiens
cacgctctgatgccg

SEQ ID NO: 982062 - DNA, 15 bp, Homo sapiens
acgctctgatgccgc

SEQ ID NO: 982063 - DNA, 15 bp, Homo sapiens
cgctctgatgccgcg

SEQ ID NO: 982064 - DNA, 15 bp, Homo sapiens
gctctgatgccgcgt

SEQ ID NO: 982065 - DNA, 15 bp, Homo sapiens
ctctgatgccgcgtg

SEQ ID NO: 982066 - DNA, 15 bp, Homo sapiens
tctgatgccgcgtgc

SEQ ID NO: 982067 - DNA, 15 bp, Homo sapiens
ctgatgccgcgtgca

SEQ ID NO: 982068 - DNA, 15 bp, Homo sapiens
tgatgccgcgtgcag

SEQ ID NO: 982069 - DNA, 15 bp, Homo sapiens
gatgccgcgtgcagc

SEQ ID NO: 982070 - DNA, 15 bp, Homo sapiens
atgccgcgtgcagcc

SEQ ID NO: 982071 - DNA, 15 bp, Homo sapiens
tgccgcgtgcagccg

SEQ ID NO: 982072 - DNA, 15 bp, Homo sapiens
gccgcgtgcagccga

SEQ ID NO: 982073 - DNA, 15 bp, Homo sapiens
ccgcgtgcagccgac

SEQ ID NO: 982074 - DNA, 15 bp, Homo sapiens
cgcgtgcagccgacg

SEQ ID NO: 982075 - DNA, 15 bp, Homo sapiens
gcgtgcagccgacgt

SEQ ID NO: 982076 - DNA, 15 bp, Homo sapiens
cgtgcagccgacgtc

SEQ ID NO: 982077 - DNA, 15 bp, Homo sapiens
gtgcagccgacgtcc

SEQ ID NO: 982078 - DNA, 15 bp, Homo sapiens
tgcagccgacgtccc

SEQ ID NO: 982079 - DNA, 15 bp, Homo sapiens
gcagccgacgtcccg

SEQ ID NO: 982080 - DNA, 15 bp, Homo sapiens
cagccgacgtcccgc

SEQ ID NO: 982081 - DNA, 15 bp, Homo sapiens
agccgacgtcccgct

SEQ ID NO: 982082 - DNA, 15 bp, Homo sapiens
gccgacgtcccgctc

SEQ ID NO: 982083 - DNA, 15 bp, Homo sapiens
ccgacgtcccgctcc

SEQ ID NO: 982084 - DNA, 15 bp, Homo sapiens
cgacgtcccgctcca

SEQ ID NO: 982085 - DNA, 15 bp, Homo sapiens
gacgtcccgctccag

SEQ ID NO: 982086 - DNA, 15 bp, Homo sapiens
acgtcccgctccagg

SEQ ID NO: 982087 - DNA, 15 bp, Homo sapiens
cgtcccgctccaggg

SEQ ID NO: 982088 - DNA, 15 bp, Homo sapiens
gtcccgctccagggt

SEQ ID NO: 982089 - DNA, 15 bp, Homo sapiens
tcccgctccagggtc

SEQ ID NO: 982090 - DNA, 15 bp, Homo sapiens
cccgctccagggtcc

SEQ ID NO: 982091 - DNA, 15 bp, Homo sapiens
ccgctccagggtccg

SEQ ID NO: 982092 - DNA, 15 bp, Homo sapiens
cgctccagggtccgg

SEQ ID NO: 982093 - DNA, 15 bp, Homo sapiens
gctccagggtccggc

SEQ ID NO: 982094 - DNA, 15 bp, Homo sapiens
ctccagggtccggcc

SEQ ID NO: 982095 - DNA, 15 bp, Homo sapiens
tccagggtccggcca

SEQ ID NO: 982096 - DNA, 15 bp, Homo sapiens
ccagggtccggccac

SEQ ID NO: 982097 - DNA, 15 bp, Homo sapiens
cagggtccggccacc

SEQ ID NO: 982098 - DNA, 15 bp, Homo sapiens
agggtccggccaccg

SEQ ID NO: 982099 - DNA, 15 bp, Homo sapiens
gggtccggccaccgg

SEQ ID NO: 982100 - DNA, 15 bp, Homo sapiens
ggtccggccaccggg

SEQ ID NO: 982101 - DNA, 15 bp, Homo sapiens
gtccggccaccgggg

SEQ ID NO: 982102 - DNA, 15 bp, Homo sapiens
tccggccaccggggg

SEQ ID NO: 982103 - DNA, 15 bp, Homo sapiens
ccggccaccgggggt

SEQ ID NO: 982104 - DNA, 15 bp, Homo sapiens
cggccaccgggggtc

SEQ ID NO: 982105 - DNA, 15 bp, Homo sapiens
ggccaccgggggtcg

SEQ ID NO: 982106 - DNA, 15 bp, Homo sapiens
gccaccgggggtcgt

SEQ ID NO: 982107 - DNA, 15 bp, Homo sapiens
ccaccgggggtcgtc

SEQ ID NO: 982108 - DNA, 15 bp, Homo sapiens
caccgggggtcgtcg

SEQ ID NO: 982109 - DNA, 15 bp, Homo sapiens
accgggggtcgtcgc

SEQ ID NO: 982110 - DNA, 15 bp, Homo sapiens
ccgggggtcgtcgcg

SEQ ID NO: 982111 - DNA, 15 bp, Homo sapiens
cgggggtcgtcgcgc

SEQ ID NO: 982112 - DNA, 15 bp, Homo sapiens
gggggtcgtcgcgcg

SEQ ID NO: 982113 - DNA, 15 bp, Homo sapiens
ggggtcgtcgcgcgg

SEQ ID NO: 982114 - DNA, 15 bp, Homo sapiens
gggtcgtcgcgcggg

SEQ ID NO: 982115 - DNA, 15 bp, Homo sapiens
ggtcgtcgcgcgggg

SEQ ID NO: 982116 - DNA, 15 bp, Homo sapiens
gtcgtcgcgcggggt

SEQ ID NO: 982117 - DNA, 15 bp, Homo sapiens
tcgtcgcgcggggtg

SEQ ID NO: 982118 - DNA, 15 bp, Homo sapiens
cgtcgcgcggggtgg

SEQ ID NO: 982119 - DNA, 15 bp, Homo sapiens
gtcgcgcggggtggg

SEQ ID NO: 982120 - DNA, 15 bp, Homo sapiens
tcgcgcggggtgggg

SEQ ID NO: 982121 - DNA, 15 bp, Homo sapiens
cgcgcggggtggggt

SEQ ID NO: 982122 - DNA, 15 bp, Homo sapiens
gcgcggggtggggtg

SEQ ID NO: 982123 - DNA, 15 bp, Homo sapiens
cgcggggtggggtgc

SEQ ID NO: 982124 - DNA, 15 bp, Homo sapiens
gcggggtggggtgca

SEQ ID NO: 982125 - DNA, 15 bp, Homo sapiens
cggggtggggtgcac

SEQ ID NO: 982126 - DNA, 15 bp, Homo sapiens
ggggtggggtgcacg

SEQ ID NO: 982127 - DNA, 15 bp, Homo sapiens
gggtggggtgcacgc

SEQ ID NO: 982128 - DNA, 15 bp, Homo sapiens
ggtggggtgcacgcc

SEQ ID NO: 982129 - DNA, 15 bp, Homo sapiens
gtggggtgcacgcct

SEQ ID NO: 982130 - DNA, 15 bp, Homo sapiens
tggggtgcacgcctc

SEQ ID NO: 982131 - DNA, 15 bp, Homo sapiens
ggggtgcacgcctcg

SEQ ID NO: 982132 - DNA, 15 bp, Homo sapiens
gggtgcacgcctcgg

SEQ ID NO: 982133 - DNA, 15 bp, Homo sapiens
ggtgcacgcctcggc

SEQ ID NO: 982134 - DNA, 15 bp, Homo sapiens
gtgcacgcctcggcg

SEQ ID NO: 982135 - DNA, 15 bp, Homo sapiens
tgcacgcctcggcgc

SEQ ID NO: 982136 - DNA, 15 bp, Homo sapiens
gcacgcctcggcgcc

SEQ ID NO: 982137 - DNA, 15 bp, Homo sapiens
cacgcctcggcgccc

SEQ ID NO: 982138 - DNA, 15 bp, Homo sapiens
acgcctcggcgcccc

SEQ ID NO: 982139 - DNA, 15 bp, Homo sapiens
cgcctcggcgccccc

SEQ ID NO: 982140 - DNA, 15 bp, Homo sapiens
gcctcggcgcccccc

SEQ ID NO: 982141 - DNA, 15 bp, Homo sapiens
cctcggcgccccccg

SEQ ID NO: 982142 - DNA, 15 bp, Homo sapiens
ctcggcgccccccgg

SEQ ID NO: 982143 - DNA, 15 bp, Homo sapiens
tcggcgccccccggg

SEQ ID NO: 982144 - DNA, 15 bp, Homo sapiens
cggcgccccccgggg

SEQ ID NO: 982145 - DNA, 15 bp, Homo sapiens
ggcgccccccgggga

SEQ ID NO: 982146 - DNA, 15 bp, Homo sapiens
gcgccccccggggat

SEQ ID NO: 982147 - DNA, 15 bp, Homo sapiens
cgccccccggggatt

SEQ ID NO: 982148 - DNA, 15 bp, Homo sapiens
gccccccggggattc

SEQ ID NO: 982149 - DNA, 15 bp, Homo sapiens
ccccccggggattcc

SEQ ID NO: 982150 - DNA, 15 bp, Homo sapiens
cccccggggattcct

SEQ ID NO: 982151 - DNA, 15 bp, Homo sapiens
ccccggggattcctt

SEQ ID NO: 982152 - DNA, 15 bp, Homo sapiens
cccggggattccttc

SEQ ID NO: 982153 - DNA, 15 bp, Homo sapiens
ccggggattccttct

SEQ ID NO: 982154 - DNA, 15 bp, Homo sapiens
cggggattccttctc

SEQ ID NO: 982155 - DNA, 15 bp, Homo sapiens
ggggattccttctcc

SEQ ID NO: 982156 - DNA, 15 bp, Homo sapiens
gggattccttctcct

SEQ ID NO: 982157 - DNA, 15 bp, Homo sapiens
ggattccttctcctt

SEQ ID NO: 982158 - DNA, 15 bp, Homo sapiens
gattccttctccttg

SEQ ID NO: 982159 - DNA, 15 bp, Homo sapiens
attccttctccttgc

SEQ ID NO: 982160 - DNA, 15 bp, Homo sapiens
ttccttctccttgct

SEQ ID NO: 982161 - DNA, 15 bp, Homo sapiens
tccttctccttgctc

SEQ ID NO: 982162 - DNA, 15 bp, Homo sapiens
ccttctccttgctcg

SEQ ID NO: 982163 - DNA, 15 bp, Homo sapiens
cttctccttgctcga

SEQ ID NO: 982164 - DNA, 15 bp, Homo sapiens
ttctccttgctcgac

SEQ ID NO: 982165 - DNA, 15 bp, Homo sapiens
tctccttgctcgaca

SEQ ID NO: 982166 - DNA, 15 bp, Homo sapiens
ctccttgctcgacac

SEQ ID NO: 982167 - DNA, 15 bp, Homo sapiens
tccttgctcgacact

SEQ ID NO: 982168 - DNA, 15 bp, Homo sapiens
ccttgctcgacactg

SEQ ID NO: 982169 - DNA, 15 bp, Homo sapiens
cttgctcgacactgg

SEQ ID NO: 982170 - DNA, 15 bp, Homo sapiens
ttgctcgacactggt

SEQ ID NO: 982171 - DNA, 15 bp, Homo sapiens
tgctcgacactggtg

SEQ ID NO: 982172 - DNA, 15 bp, Homo sapiens
gctcgacactggtgg

SEQ ID NO: 982173 - DNA, 15 bp, Homo sapiens
ctcgacactggtggc

SEQ ID NO: 982174 - DNA, 15 bp, Homo sapiens
tcgacactggtggcc

SEQ ID NO: 982175 - DNA, 15 bp, Homo sapiens
cgacactggtggcct

SEQ ID NO: 982176 - DNA, 15 bp, Homo sapiens
gacactggtggcctg

SEQ ID NO: 982177 - DNA, 15 bp, Homo sapiens
acactggtggcctgg

SEQ ID NO: 982178 - DNA, 15 bp, Homo sapiens
cactggtggcctgga

SEQ ID NO: 982179 - DNA, 15 bp, Homo sapiens
actggtggcctggag

SEQ ID NO: 982180 - DNA, 15 bp, Homo sapiens
ctggtggcctggagg

SEQ ID NO: 982181 - DNA, 15 bp, Homo sapiens
tggtggcctggaggc

SEQ ID NO: 982182 - DNA, 15 bp, Homo sapiens
ggtggcctggaggca

SEQ ID NO: 982183 - DNA, 15 bp, Homo sapiens
gtggcctggaggcac

SEQ ID NO: 982184 - DNA, 15 bp, Homo sapiens
tggcctggaggcacc

SEQ ID NO: 982185 - DNA, 15 bp, Homo sapiens
ggcctggaggcaccc

SEQ ID NO: 982186 - DNA, 15 bp, Homo sapiens
gcctggaggcaccct

SEQ ID NO: 982187 - DNA, 15 bp, Homo sapiens
cctggaggcaccctc

SEQ ID NO: 982188 - DNA, 15 bp, Homo sapiens
ctggaggcaccctcg

SEQ ID NO: 982189 - DNA, 15 bp, Homo sapiens
tggaggcaccctcgg

SEQ ID NO: 982190 - DNA, 15 bp, Homo sapiens
ggaggcaccctcggg

SEQ ID NO: 982191 - DNA, 15 bp, Homo sapiens
gaggcaccctcgggc

SEQ ID NO: 982192 - DNA, 15 bp, Homo sapiens
aggcaccctcgggca

SEQ ID NO: 982193 - DNA, 15 bp, Homo sapiens
ggcaccctcgggcag

SEQ ID NO: 982194 - DNA, 15 bp, Homo sapiens
gcaccctcgggcagc

SEQ ID NO: 982195 - DNA, 15 bp, Homo sapiens
caccctcgggcagca

SEQ ID NO: 982196 - DNA, 15 bp, Homo sapiens
accctcgggcagcaa

SEQ ID NO: 982197 - DNA, 15 bp, Homo sapiens
ccctcgggcagcaac

SEQ ID NO: 982198 - DNA, 15 bp, Homo sapiens
cctcgggcagcaacg

SEQ ID NO: 982199 - DNA, 15 bp, Homo sapiens
ctcgggcagcaacgg

SEQ ID NO: 982200 - DNA, 15 bp, Homo sapiens
tcgggcagcaacggg

SEQ ID NO: 982201 - DNA, 15 bp, Homo sapiens
cgggcagcaacgggt

SEQ ID NO: 982202 - DNA, 15 bp, Homo sapiens
gggcagcaacgggtc

SEQ ID NO: 982203 - DNA, 15 bp, Homo sapiens
ggcagcaacgggtcc

SEQ ID NO: 982204 - DNA, 15 bp, Homo sapiens
gcagcaacgggtccg

SEQ ID NO: 982205 - DNA, 15 bp, Homo sapiens
cagcaacgggtccgc

SEQ ID NO: 982206 - DNA, 15 bp, Homo sapiens
agcaacgggtccgcg

SEQ ID NO: 982207 - DNA, 15 bp, Homo sapiens
gcaacgggtccgcgc

SEQ ID NO: 982208 - DNA, 15 bp, Homo sapiens
caacgggtccgcgcc

SEQ ID NO: 982209 - DNA, 15 bp, Homo sapiens
aacgggtccgcgccc

SEQ ID NO: 982210 - DNA, 15 bp, Homo sapiens
acgggtccgcgccca

SEQ ID NO: 982211 - DNA, 15 bp, Homo sapiens
cgggtccgcgcccag

SEQ ID NO: 982212 - DNA, 15 bp, Homo sapiens
gggtccgcgcccagg

SEQ ID NO: 982213 - DNA, 15 bp, Homo sapiens
ggtccgcgcccaggc

SEQ ID NO: 982214 - DNA, 15 bp, Homo sapiens
gtccgcgcccaggct

SEQ ID NO: 982215 - DNA, 15 bp, Homo sapiens
tccgcgcccaggctc

SEQ ID NO: 982216 - DNA, 15 bp, Homo sapiens
ccgcgcccaggctca

SEQ ID NO: 982217 - DNA, 15 bp, Homo sapiens
cgcgcccaggctcaa

SEQ ID NO: 982218 - DNA, 15 bp, Homo sapiens
gcgcccaggctcaaa

SEQ ID NO: 982219 - DNA, 15 bp, Homo sapiens
cgcccaggctcaaag

SEQ ID NO: 982220 - DNA, 15 bp, Homo sapiens
gcccaggctcaaagg

SEQ ID NO: 982221 - DNA, 15 bp, Homo sapiens
cccaggctcaaaggt

SEQ ID NO: 982222 - DNA, 15 bp, Homo sapiens
ccaggctcaaaggtg

SEQ ID NO: 982223 - DNA, 15 bp, Homo sapiens
caggctcaaaggtga

SEQ ID NO: 982224 - DNA, 15 bp, Homo sapiens
aggctcaaaggtgac

SEQ ID NO: 982225 - DNA, 15 bp, Homo sapiens
ggctcaaaggtgact

SEQ ID NO: 982226 - DNA, 15 bp, Homo sapiens
gctcaaaggtgactc

SEQ ID NO: 982227 - DNA, 15 bp, Homo sapiens
ctcaaaggtgactcc

SEQ ID NO: 982228 - DNA, 15 bp, Homo sapiens
tcaaaggtgactcct

SEQ ID NO: 982229 - DNA, 15 bp, Homo sapiens
caaaggtgactcctg

SEQ ID NO: 982230 - DNA, 15 bp, Homo sapiens
aaaggtgactcctgt

SEQ ID NO: 982231 - DNA, 15 bp, Homo sapiens
aaggtgactcctgtc

SEQ ID NO: 982232 - DNA, 15 bp, Homo sapiens
aggtgactcctgtcg

SEQ ID NO: 982233 - DNA, 15 bp, Homo sapiens
ggtgactcctgtcgg

SEQ ID NO: 982234 - DNA, 15 bp, Homo sapiens
gtgactcctgtcggc

SEQ ID NO: 982235 - DNA, 15 bp, Homo sapiens
tgactcctgtcggcc

SEQ ID NO: 982236 - DNA, 15 bp, Homo sapiens
gactcctgtcggccc

SEQ ID NO: 982237 - DNA, 15 bp, Homo sapiens
actcctgtcggccca

SEQ ID NO: 982238 - DNA, 15 bp, Homo sapiens
ctcctgtcggcccag

SEQ ID NO: 982239 - DNA, 15 bp, Homo sapiens
tcctgtcggcccagg

SEQ ID NO: 982240 - DNA, 15 bp, Homo sapiens
cctgtcggcccaggc

SEQ ID NO: 982241 - DNA, 15 bp, Homo sapiens
ctgtcggcccaggcg

SEQ ID NO: 982242 - DNA, 15 bp, Homo sapiens
tgtcggcccaggcgg

SEQ ID NO: 982243 - DNA, 15 bp, Homo sapiens
gtcggcccaggcggc

SEQ ID NO: 982244 - DNA, 15 bp, Homo sapiens
tcggcccaggcggcg

SEQ ID NO: 982245 - DNA, 15 bp, Homo sapiens
cggcccaggcggcgg

SEQ ID NO: 982246 - DNA, 15 bp, Homo sapiens
ggcccaggcggcgga

SEQ ID NO: 982247 - DNA, 15 bp, Homo sapiens
gcccaggcggcggac

SEQ ID NO: 982248 - DNA, 15 bp, Homo sapiens
cccaggcggcggacg

SEQ ID NO: 982249 - DNA, 15 bp, Homo sapiens
ccaggcggcggacgg

SEQ ID NO: 982250 - DNA, 15 bp, Homo sapiens
caggcggcggacggc

SEQ ID NO: 982251 - DNA, 15 bp, Homo sapiens
aggcggcggacggcg

SEQ ID NO: 982252 - DNA, 15 bp, Homo sapiens
ggcggcggacggcga

SEQ ID NO: 982253 - DNA, 15 bp, Homo sapiens
gcggcggacggcgac

SEQ ID NO: 982254 - DNA, 15 bp, Homo sapiens
cggcggacggcgacc

SEQ ID NO: 982255 - DNA, 15 bp, Homo sapiens
ggcggacggcgacct

SEQ ID NO: 982256 - DNA, 15 bp, Homo sapiens
gcggacggcgacctg

SEQ ID NO: 982257 - DNA, 15 bp, Homo sapiens
cggacggcgacctgc

SEQ ID NO: 982258 - DNA, 15 bp, Homo sapiens
ggacggcgacctgcc

SEQ ID NO: 982259 - DNA, 15 bp, Homo sapiens
gacggcgacctgccg

SEQ ID NO: 982260 - DNA, 15 bp, Homo sapiens
acggcgacctgccgg

SEQ ID NO: 982261 - DNA, 15 bp, Homo sapiens
cggcgacctgccggg

SEQ ID NO: 982262 - DNA, 15 bp, Homo sapiens
ggcgacctgccgggg

SEQ ID NO: 982263 - DNA, 15 bp, Homo sapiens
gcgacctgccggggc

SEQ ID NO: 982264 - DNA, 15 bp, Homo sapiens
cgacctgccggggcg

SEQ ID NO: 982265 - DNA, 15 bp, Homo sapiens
gacctgccggggcgc

SEQ ID NO: 982266 - DNA, 15 bp, Homo sapiens
acctgccggggcgcg

SEQ ID NO: 982267 - DNA, 15 bp, Homo sapiens
cctgccggggcgcgc

SEQ ID NO: 982268 - DNA, 15 bp, Homo sapiens
ctgccggggcgcgcc

SEQ ID NO: 982269 - DNA, 15 bp, Homo sapiens
tgccggggcgcgcca

SEQ ID NO: 982270 - DNA, 15 bp, Homo sapiens
gccggggcgcgccaa

SEQ ID NO: 982271 - DNA, 15 bp, Homo sapiens
ccggggcgcgccaag

SEQ ID NO: 982272 - DNA, 15 bp, Homo sapiens
cggggcgcgccaagg

SEQ ID NO: 982273 - DNA, 15 bp, Homo sapiens
ggggcgcgccaaggc

SEQ ID NO: 982274 - DNA, 15 bp, Homo sapiens
gggcgcgccaaggcc

SEQ ID NO: 982275 - DNA, 15 bp, Homo sapiens
ggcgcgccaaggccc

SEQ ID NO: 982276 - DNA, 15 bp, Homo sapiens
gcgcgccaaggccct

SEQ ID NO: 982277 - DNA, 15 bp, Homo sapiens
cgcgccaaggccctc

SEQ ID NO: 982278 - DNA, 15 bp, Homo sapiens
gcgccaaggccctcg

SEQ ID NO: 982279 - DNA, 15 bp, Homo sapiens
cgccaaggccctcga

SEQ ID NO: 982280 - DNA, 15 bp, Homo sapiens
gccaaggccctcgac

SEQ ID NO: 982281 - DNA, 15 bp, Homo sapiens
ccaaggccctcgact

SEQ ID NO: 982282 - DNA, 15 bp, Homo sapiens
caaggccctcgactg

SEQ ID NO: 982283 - DNA, 15 bp, Homo sapiens
aaggccctcgactgg

SEQ ID NO: 982284 - DNA, 15 bp, Homo sapiens
aggccctcgactggg

SEQ ID NO: 982285 - DNA, 15 bp, Homo sapiens
ggccctcgactgggg

SEQ ID NO: 982286 - DNA, 15 bp, Homo sapiens
gccctcgactggggg

SEQ ID NO: 982287 - DNA, 15 bp, Homo sapiens
ccctcgactgggggc

SEQ ID NO: 982288 - DNA, 15 bp, Homo sapiens
cctcgactgggggcg

SEQ ID NO: 982289 - DNA, 15 bp, Homo sapiens
ctcgactgggggcgt

SEQ ID NO: 982290 - DNA, 15 bp, Homo sapiens
tcgactgggggcgtc

SEQ ID NO: 982291 - DNA, 15 bp, Homo sapiens
cgactgggggcgtct

SEQ ID NO: 982292 - DNA, 15 bp, Homo sapiens
gactgggggcgtctc

SEQ ID NO: 982293 - DNA, 15 bp, Homo sapiens
actgggggcgtctca

SEQ ID NO: 982294 - DNA, 15 bp, Homo sapiens
ctgggggcgtctcac

SEQ ID NO: 982295 - DNA, 15 bp, Homo sapiens
tgggggcgtctcacc

SEQ ID NO: 982296 - DNA, 15 bp, Homo sapiens
gggggcgtctcaccg

SEQ ID NO: 982297 - DNA, 15 bp, Homo sapiens
ggggcgtctcaccgt

SEQ ID NO: 982298 - DNA, 15 bp, Homo sapiens
gggcgtctcaccgtc

SEQ ID NO: 982299 - DNA, 15 bp, Homo sapiens
ggcgtctcaccgtcg

SEQ ID NO: 982300 - DNA, 15 bp, Homo sapiens
gcgtctcaccgtcgg

SEQ ID NO: 982301 - DNA, 15 bp, Homo sapiens
cgtctcaccgtcgga

SEQ ID NO: 982302 - DNA, 15 bp, Homo sapiens
gtctcaccgtcggac

SEQ ID NO: 982303 - DNA, 15 bp, Homo sapiens
tctcaccgtcggact

SEQ ID NO: 982304 - DNA, 15 bp, Homo sapiens
ctcaccgtcggactc

SEQ ID NO: 982305 - DNA, 15 bp, Homo sapiens
tcaccgtcggactcg

SEQ ID NO: 982306 - DNA, 15 bp, Homo sapiens
caccgtcggactcgg

SEQ ID NO: 982307 - DNA, 15 bp, Homo sapiens
accgtcggactcggc

SEQ ID NO: 982308 - DNA, 15 bp, Homo sapiens
ccgtcggactcggca

SEQ ID NO: 982309 - DNA, 15 bp, Homo sapiens
cgtcggactcggcaa

SEQ ID NO: 982310 - DNA, 15 bp, Homo sapiens
gtcggactcggcaag

SEQ ID NO: 982311 - DNA, 15 bp, Homo sapiens
tcggactcggcaagg

SEQ ID NO: 982312 - DNA, 15 bp, Homo sapiens
cggactcggcaaggc

SEQ ID NO: 982313 - DNA, 15 bp, Homo sapiens
ggactcggcaaggct

SEQ ID NO: 982314 - DNA, 15 bp, Homo sapiens
gactcggcaaggcta

SEQ ID NO: 982315 - DNA, 15 bp, Homo sapiens
actcggcaaggctat

SEQ ID NO: 982316 - DNA, 15 bp, Homo sapiens
ctcggcaaggctatg

SEQ ID NO: 982317 - DNA, 15 bp, Homo sapiens
tcggcaaggctatgc

SEQ ID NO: 982318 - DNA, 15 bp, Homo sapiens
cggcaaggctatgca

SEQ ID NO: 982319 - DNA, 15 bp, Homo sapiens
ggcaaggctatgcag

SEQ ID NO: 982320 - DNA, 15 bp, Homo sapiens
gcaaggctatgcagc

SEQ ID NO: 982321 - DNA, 15 bp, Homo sapiens
caaggctatgcagcg

SEQ ID NO: 982322 - DNA, 15 bp, Homo sapiens
aaggctatgcagcgc

SEQ ID NO: 982323 - DNA, 15 bp, Homo sapiens
aggctatgcagcgcc

SEQ ID NO: 982324 - DNA, 15 bp, Homo sapiens
ggctatgcagcgcca

SEQ ID NO: 982325 - DNA, 15 bp, Homo sapiens
gctatgcagcgccag

SEQ ID NO: 982326 - DNA, 15 bp, Homo sapiens
ctatgcagcgccagc

SEQ ID NO: 982327 - DNA, 15 bp, Homo sapiens
tatgcagcgccagct

SEQ ID NO: 982328 - DNA, 15 bp, Homo sapiens
atgcagcgccagctc

SEQ ID NO: 982329 - DNA, 15 bp, Homo sapiens
tgcagcgccagctcg

SEQ ID NO: 982330 - DNA, 15 bp, Homo sapiens
gcagcgccagctcgc

SEQ ID NO: 982331 - DNA, 15 bp, Homo sapiens
cagcgccagctcgcc

SEQ ID NO: 982332 - DNA, 15 bp, Homo sapiens
agcgccagctcgcca

SEQ ID NO: 982333 - DNA, 15 bp, Homo sapiens
gcgccagctcgccat

SEQ ID NO: 982334 - DNA, 15 bp, Homo sapiens
cgccagctcgccatg

SEQ ID NO: 982335 - DNA, 15 bp, Homo sapiens
gccagctcgccatgg

SEQ ID NO: 982336 - DNA, 15 bp, Homo sapiens
ccagctcgccatgga

SEQ ID NO: 982337 - DNA, 15 bp, Homo sapiens
cagctcgccatggaa

SEQ ID NO: 982338 - DNA, 15 bp, Homo sapiens
agctcgccatggaag

SEQ ID NO: 982339 - DNA, 15 bp, Homo sapiens
gctcgccatggaagt

SEQ ID NO: 982340 - DNA, 15 bp, Homo sapiens
ctcgccatggaagtc

SEQ ID NO: 982341 - DNA, 15 bp, Homo sapiens
tcgccatggaagtcc

SEQ ID NO: 982342 - DNA, 15 bp, Homo sapiens
cgccatggaagtcct

SEQ ID NO: 982343 - DNA, 15 bp, Homo sapiens
gccatggaagtcctt

SEQ ID NO: 982344 - DNA, 15 bp, Homo sapiens
ccatggaagtccttg

SEQ ID NO: 982345 - DNA, 15 bp, Homo sapiens
catggaagtccttgc

SEQ ID NO: 982346 - DNA, 15 bp, Homo sapiens
atggaagtccttgcg

SEQ ID NO: 982347 - DNA, 15 bp, Homo sapiens
tggaagtccttgcgg

SEQ ID NO: 982348 - DNA, 15 bp, Homo sapiens
ggaagtccttgcgga

SEQ ID NO: 982349 - DNA, 15 bp, Homo sapiens
gaagtccttgcggaa

SEQ ID NO: 982350 - DNA, 15 bp, Homo sapiens
aagtccttgcggaaa

SEQ ID NO: 982351 - DNA, 15 bp, Homo sapiens
agtccttgcggaaat

SEQ ID NO: 982352 - DNA, 15 bp, Homo sapiens
gtccttgcggaaatc

SEQ ID NO: 982353 - DNA, 15 bp, Homo sapiens
tccttgcggaaatcc

SEQ ID NO: 982354 - DNA, 15 bp, Homo sapiens
ccttgcggaaatccg

SEQ ID NO: 982355 - DNA, 15 bp, Homo sapiens
cttgcggaaatccgg

SEQ ID NO: 982356 - DNA, 15 bp, Homo sapiens
ttgcggaaatccggg

SEQ ID NO: 982357 - DNA, 15 bp, Homo sapiens
tgcggaaatccgggt

SEQ ID NO: 982358 - DNA, 15 bp, Homo sapiens
gcggaaatccgggtg

SEQ ID NO: 982359 - DNA, 15 bp, Homo sapiens
cggaaatccgggtgg

SEQ ID NO: 982360 - DNA, 15 bp, Homo sapiens
ggaaatccgggtggc

SEQ ID NO: 982361 - DNA, 15 bp, Homo sapiens
gaaatccgggtggcc

SEQ ID NO: 982362 - DNA, 15 bp, Homo sapiens
aaatccgggtggccc

SEQ ID NO: 982363 - DNA, 15 bp, Homo sapiens
aatccgggtggccca

SEQ ID NO: 982364 - DNA, 15 bp, Homo sapiens
atccgggtggcccac

SEQ ID NO: 982365 - DNA, 15 bp, Homo sapiens
tccgggtggcccacc

SEQ ID NO: 982366 - DNA, 15 bp, Homo sapiens
ccgggtggcccacct

SEQ ID NO: 982367 - DNA, 15 bp, Homo sapiens
cgggtggcccacctc

SEQ ID NO: 982368 - DNA, 15 bp, Homo sapiens
gggtggcccacctcg

SEQ ID NO: 982369 - DNA, 15 bp, Homo sapiens
ggtggcccacctcga

SEQ ID NO: 982370 - DNA, 15 bp, Homo sapiens
gtggcccacctcgag

SEQ ID NO: 982371 - DNA, 15 bp, Homo sapiens
tggcccacctcgagg

SEQ ID NO: 982372 - DNA, 15 bp, Homo sapiens
ggcccacctcgaggc

SEQ ID NO: 982373 - DNA, 15 bp, Homo sapiens
gcccacctcgaggct

SEQ ID NO: 982374 - DNA, 15 bp, Homo sapiens
cccacctcgaggctg

SEQ ID NO: 982375 - DNA, 15 bp, Homo sapiens
ccacctcgaggctgt

SEQ ID NO: 982376 - DNA, 15 bp, Homo sapiens
cacctcgaggctgtg

SEQ ID NO: 982377 - DNA, 15 bp, Homo sapiens
acctcgaggctgtgt

SEQ ID NO: 982378 - DNA, 15 bp, Homo sapiens
cctcgaggctgtgtt

SEQ ID NO: 982379 - DNA, 15 bp, Homo sapiens
ctcgaggctgtgttt

SEQ ID NO: 982380 - DNA, 15 bp, Homo sapiens
tcgaggctgtgtttg

SEQ ID NO: 982381 - DNA, 15 bp, Homo sapiens
cgaggctgtgtttgc

SEQ ID NO: 982382 - DNA, 15 bp, Homo sapiens
gaggctgtgtttgcg

SEQ ID NO: 982383 - DNA, 15 bp, Homo sapiens
aggctgtgtttgcgc

SEQ ID NO: 982384 - DNA, 15 bp, Homo sapiens
ggctgtgtttgcgca

SEQ ID NO: 982385 - DNA, 15 bp, Homo sapiens
gctgtgtttgcgcag

SEQ ID NO: 982386 - DNA, 15 bp, Homo sapiens
ctgtgtttgcgcagc

SEQ ID NO: 982387 - DNA, 15 bp, Homo sapiens
tgtgtttgcgcagcg

SEQ ID NO: 982388 - DNA, 15 bp, Homo sapiens
gtgtttgcgcagcgc

SEQ ID NO: 982389 - DNA, 15 bp, Homo sapiens
tgtttgcgcagcgcg

SEQ ID NO: 982390 - DNA, 15 bp, Homo sapiens
gtttgcgcagcgcgc

SEQ ID NO: 982391 - DNA, 15 bp, Homo sapiens
tttgcgcagcgcgcc

SEQ ID NO: 982392 - DNA, 15 bp, Homo sapiens
ttgcgcagcgcgccc

SEQ ID NO: 982393 - DNA, 15 bp, Homo sapiens
tgcgcagcgcgccct

SEQ ID NO: 982394 - DNA, 15 bp, Homo sapiens
gcgcagcgcgccctt

SEQ ID NO: 982395 - DNA, 15 bp, Homo sapiens
cgcagcgcgcccttc

SEQ ID NO: 982396 - DNA, 15 bp, Homo sapiens
gcagcgcgcccttct

SEQ ID NO: 982397 - DNA, 15 bp, Homo sapiens
cagcgcgcccttctt

SEQ ID NO: 982398 - DNA, 15 bp, Homo sapiens
agcgcgcccttcttg

SEQ ID NO: 982399 - DNA, 15 bp, Homo sapiens
gcgcgcccttcttgt

SEQ ID NO: 982400 - DNA, 15 bp, Homo sapiens
cgcgcccttcttgtc

SEQ ID NO: 982401 - DNA, 15 bp, Homo sapiens
gcgcccttcttgtcc

SEQ ID NO: 982402 - DNA, 15 bp, Homo sapiens
cgcccttcttgtccg

SEQ ID NO: 982403 - DNA, 15 bp, Homo sapiens
gcccttcttgtccgc

SEQ ID NO: 982404 - DNA, 15 bp, Homo sapiens
cccttcttgtccgca

SEQ ID NO: 982405 - DNA, 15 bp, Homo sapiens
ccttcttgtccgcac

SEQ ID NO: 982406 - DNA, 15 bp, Homo sapiens
cttcttgtccgcact

SEQ ID NO: 982407 - DNA, 15 bp, Homo sapiens
ttcttgtccgcactc

SEQ ID NO: 982408 - DNA, 15 bp, Homo sapiens
tcttgtccgcactca

SEQ ID NO: 982409 - DNA, 15 bp, Homo sapiens
cttgtccgcactcaa

SEQ ID NO: 982410 - DNA, 15 bp, Homo sapiens
ttgtccgcactcaaa

SEQ ID NO: 982411 - DNA, 15 bp, Homo sapiens
tgtccgcactcaaag

SEQ ID NO: 982412 - DNA, 15 bp, Homo sapiens
gtccgcactcaaaga

SEQ ID NO: 982413 - DNA, 15 bp, Homo sapiens
tccgcactcaaagag

SEQ ID NO: 982414 - DNA, 15 bp, Homo sapiens
ccgcactcaaagagg

SEQ ID NO: 982415 - DNA, 15 bp, Homo sapiens
cgcactcaaagaggc

SEQ ID NO: 982416 - DNA, 15 bp, Homo sapiens
gcactcaaagaggct

SEQ ID NO: 982417 - DNA, 15 bp, Homo sapiens
cactcaaagaggctc

SEQ ID NO: 982418 - DNA, 15 bp, Homo sapiens
actcaaagaggctcc

SEQ ID NO: 982419 - DNA, 15 bp, Homo sapiens
ctcaaagaggctccc

SEQ ID NO: 982420 - DNA, 15 bp, Homo sapiens
tcaaagaggctccca

SEQ ID NO: 982421 - DNA, 15 bp, Homo sapiens
caaagaggctcccag

SEQ ID NO: 982422 - DNA, 15 bp, Homo sapiens
aaagaggctcccagc

SEQ ID NO: 982423 - DNA, 15 bp, Homo sapiens
aagaggctcccagct

SEQ ID NO: 982424 - DNA, 15 bp, Homo sapiens
agaggctcccagctt

SEQ ID NO: 982425 - DNA, 15 bp, Homo sapiens
gaggctcccagcttc

SEQ ID NO: 982426 - DNA, 15 bp, Homo sapiens
aggctcccagcttct

SEQ ID NO: 982427 - DNA, 15 bp, Homo sapiens
ggctcccagcttctc

SEQ ID NO: 982428 - DNA, 15 bp, Homo sapiens
gctcccagcttctcg

SEQ ID NO: 982429 - DNA, 15 bp, Homo sapiens
ctcccagcttctcgg

SEQ ID NO: 982430 - DNA, 15 bp, Homo sapiens
tcccagcttctcggc

SEQ ID NO: 982431 - DNA, 15 bp, Homo sapiens
cccagcttctcggcc

SEQ ID NO: 982432 - DNA, 15 bp, Homo sapiens
ccagcttctcggccg

SEQ ID NO: 982433 - DNA, 15 bp, Homo sapiens
cagcttctcggccga

SEQ ID NO: 982434 - DNA, 15 bp, Homo sapiens
agcttctcggccgac

SEQ ID NO: 982435 - DNA, 15 bp, Homo sapiens
gcttctcggccgact

SEQ ID NO: 982436 - DNA, 15 bp, Homo sapiens
cttctcggccgactg

SEQ ID NO: 982437 - DNA, 15 bp, Homo sapiens
ttctcggccgactgc

SEQ ID NO: 982438 - DNA, 15 bp, Homo sapiens
tctcggccgactgca

SEQ ID NO: 982439 - DNA, 15 bp, Homo sapiens
ctcggccgactgcac

SEQ ID NO: 982440 - DNA, 15 bp, Homo sapiens
tcggccgactgcacg

SEQ ID NO: 982441 - DNA, 15 bp, Homo sapiens
cggccgactgcacgc

SEQ ID NO: 982442 - DNA, 15 bp, Homo sapiens
ggccgactgcacgcg

SEQ ID NO: 982443 - DNA, 15 bp, Homo sapiens
gccgactgcacgcgc

SEQ ID NO: 982444 - DNA, 15 bp, Homo sapiens
ccgactgcacgcgct

SEQ ID NO: 982445 - DNA, 15 bp, Homo sapiens
cgactgcacgcgctt

SEQ ID NO: 982446 - DNA, 15 bp, Homo sapiens
gactgcacgcgcttg

SEQ ID NO: 982447 - DNA, 15 bp, Homo sapiens
actgcacgcgcttga

SEQ ID NO: 982448 - DNA, 15 bp, Homo sapiens
ctgcacgcgcttgag

SEQ ID NO: 982449 - DNA, 15 bp, Homo sapiens
tgcacgcgcttgagg

SEQ ID NO: 982450 - DNA, 15 bp, Homo sapiens
gcacgcgcttgagga

SEQ ID NO: 982451 - DNA, 15 bp, Homo sapiens
cacgcgcttgaggag

SEQ ID NO: 982452 - DNA, 15 bp, Homo sapiens
acgcgcttgaggagc

SEQ ID NO: 982453 - DNA, 15 bp, Homo sapiens
cgcgcttgaggagcg

SEQ ID NO: 982454 - DNA, 15 bp, Homo sapiens
gcgcttgaggagcgg

SEQ ID NO: 982455 - DNA, 15 bp, Homo sapiens
cgcttgaggagcggc

SEQ ID NO: 982456 - DNA, 15 bp, Homo sapiens
gcttgaggagcggcg

SEQ ID NO: 982457 - DNA, 15 bp, Homo sapiens
cttgaggagcggcga

SEQ ID NO: 982458 - DNA, 15 bp, Homo sapiens
ttgaggagcggcgag

SEQ ID NO: 982459 - DNA, 15 bp, Homo sapiens
tgaggagcggcgagc

SEQ ID NO: 982460 - DNA, 15 bp, Homo sapiens
gaggagcggcgagcg

SEQ ID NO: 982461 - DNA, 15 bp, Homo sapiens
aggagcggcgagcga

SEQ ID NO: 982462 - DNA, 15 bp, Homo sapiens
ggagcggcgagcgag

SEQ ID NO: 982463 - DNA, 15 bp, Homo sapiens
gagcggcgagcgagg

SEQ ID NO: 982464 - DNA, 15 bp, Homo sapiens
agcggcgagcgaggg

SEQ ID NO: 982465 - DNA, 15 bp, Homo sapiens
gcggcgagcgagggg

SEQ ID NO: 982466 - DNA, 15 bp, Homo sapiens
cggcgagcgaggggg

SEQ ID NO: 982467 - DNA, 15 bp, Homo sapiens
ggcgagcgagggggc

SEQ ID NO: 982468 - DNA, 15 bp, Homo sapiens
gcgagcgagggggct

SEQ ID NO: 982469 - DNA, 15 bp, Homo sapiens
cgagcgagggggctc

SEQ ID NO: 982470 - DNA, 15 bp, Homo sapiens
gagcgagggggctcg

SEQ ID NO: 982471 - DNA, 15 bp, Homo sapiens
agcgagggggctcgg

SEQ ID NO: 982472 - DNA, 15 bp, Homo sapiens
gcgagggggctcggc

SEQ ID NO: 982473 - DNA, 15 bp, Homo sapiens
cgagggggctcggca

SEQ ID NO: 982474 - DNA, 15 bp, Homo sapiens
gagggggctcggcac

SEQ ID NO: 982475 - DNA, 15 bp, Homo sapiens
agggggctcggcact

SEQ ID NO: 982476 - DNA, 15 bp, Homo sapiens
gggggctcggcactc

SEQ ID NO: 982477 - DNA, 15 bp, Homo sapiens
ggggctcggcactct

SEQ ID NO: 982478 - DNA, 15 bp, Homo sapiens
gggctcggcactctt

SEQ ID NO: 982479 - DNA, 15 bp, Homo sapiens
ggctcggcactcttg

SEQ ID NO: 982480 - DNA, 15 bp, Homo sapiens
gctcggcactcttgg

SEQ ID NO: 982481 - DNA, 15 bp, Homo sapiens
ctcggcactcttggg

SEQ ID NO: 982482 - DNA, 15 bp, Homo sapiens
tcggcactcttgggg

SEQ ID NO: 982483 - DNA, 15 bp, Homo sapiens
cggcactcttggggc

SEQ ID NO: 982484 - DNA, 15 bp, Homo sapiens
ggcactcttggggcg

SEQ ID NO: 982485 - DNA, 15 bp, Homo sapiens
gcactcttggggcgc

SEQ ID NO: 982486 - DNA, 15 bp, Homo sapiens
cactcttggggcgcg

SEQ ID NO: 982487 - DNA, 15 bp, Homo sapiens
actcttggggcgcgg

SEQ ID NO: 982488 - DNA, 15 bp, Homo sapiens
ctcttggggcgcggg

SEQ ID NO: 982489 - DNA, 15 bp, Homo sapiens
tcttggggcgcgggc

SEQ ID NO: 982490 - DNA, 15 bp, Homo sapiens
cttggggcgcgggcg

SEQ ID NO: 982491 - DNA, 15 bp, Homo sapiens
ttggggcgcgggcgc

SEQ ID NO: 982492 - DNA, 15 bp, Homo sapiens
tggggcgcgggcgca

SEQ ID NO: 982493 - DNA, 15 bp, Homo sapiens
ggggcgcgggcgcac

SEQ ID NO: 982494 - DNA, 15 bp, Homo sapiens
gggcgcgggcgcacg

SEQ ID NO: 982495 - DNA, 15 bp, Homo sapiens
ggcgcgggcgcacga

SEQ ID NO: 982496 - DNA, 15 bp, Homo sapiens
gcgcgggcgcacgac

SEQ ID NO: 982497 - DNA, 15 bp, Homo sapiens
cgcgggcgcacgacg

SEQ ID NO: 982498 - DNA, 15 bp, Homo sapiens
gcgggcgcacgacgg

SEQ ID NO: 982499 - DNA, 15 bp, Homo sapiens
cgggcgcacgacggg

SEQ ID NO: 982500 - DNA, 15 bp, Homo sapiens
gggcgcacgacggga

SEQ ID NO: 982501 - DNA, 15 bp, Homo sapiens
ggcgcacgacgggag

SEQ ID NO: 982502 - DNA, 15 bp, Homo sapiens
gcgcacgacgggagg

SEQ ID NO: 982503 - DNA, 15 bp, Homo sapiens
cgcacgacgggaggc

SEQ ID NO: 982504 - DNA, 15 bp, Homo sapiens
gcacgacgggaggcg

SEQ ID NO: 982505 - DNA, 15 bp, Homo sapiens
cacgacgggaggcga

SEQ ID NO: 982506 - DNA, 15 bp, Homo sapiens
acgacgggaggcgat

SEQ ID NO: 982507 - DNA, 15 bp, Homo sapiens
cgacgggaggcgatg

SEQ ID NO: 982508 - DNA, 15 bp, Homo sapiens
gacgggaggcgatga

SEQ ID NO: 982509 - DNA, 15 bp, Homo sapiens
acgggaggcgatgag

SEQ ID NO: 982510 - DNA, 15 bp, Homo sapiens
cgggaggcgatgagt

SEQ ID NO: 982511 - DNA, 15 bp, Homo sapiens
gggaggcgatgagtg

SEQ ID NO: 982512 - DNA, 15 bp, Homo sapiens
ggaggcgatgagtgc

SEQ ID NO: 982513 - DNA, 15 bp, Homo sapiens
gaggcgatgagtgca

SEQ ID NO: 982514 - DNA, 15 bp, Homo sapiens
aggcgatgagtgcag

SEQ ID NO: 982515 - DNA, 15 bp, Homo sapiens
ggcgatgagtgcagt

SEQ ID NO: 982516 - DNA, 15 bp, Homo sapiens
gcgatgagtgcagtt

SEQ ID NO: 982517 - DNA, 15 bp, Homo sapiens
cgatgagtgcagttt

SEQ ID NO: 982518 - DNA, 15 bp, Homo sapiens
gatgagtgcagtttg

SEQ ID NO: 982519 - DNA, 15 bp, Homo sapiens
atgagtgcagtttgg

SEQ ID NO: 982520 - DNA, 15 bp, Homo sapiens
tgagtgcagtttggc

SEQ ID NO: 982521 - DNA, 15 bp, Homo sapiens
gagtgcagtttggcc

SEQ ID NO: 982522 - DNA, 15 bp, Homo sapiens
agtgcagtttggccg

SEQ ID NO: 982523 - DNA, 15 bp, Homo sapiens
gtgcagtttggccgg

SEQ ID NO: 982524 - DNA, 15 bp, Homo sapiens
tgcagtttggccggg

SEQ ID NO: 982525 - DNA, 15 bp, Homo sapiens
gcagtttggccggga

SEQ ID NO: 982526 - DNA, 15 bp, Homo sapiens
cagtttggccgggaa

SEQ ID NO: 982527 - DNA, 15 bp, Homo sapiens
agtttggccgggaag

SEQ ID NO: 982528 - DNA, 15 bp, Homo sapiens
gtttggccgggaagc

SEQ ID NO: 982529 - DNA, 15 bp, Homo sapiens
tttggccgggaagct

SEQ ID NO: 982530 - DNA, 15 bp, Homo sapiens
ttggccgggaagctc

SEQ ID NO: 982531 - DNA, 15 bp, Homo sapiens
tggccgggaagctct

SEQ ID NO: 982532 - DNA, 15 bp, Homo sapiens
ggccgggaagctctg

SEQ ID NO: 982533 - DNA, 15 bp, Homo sapiens
gccgggaagctctga

SEQ ID NO: 982534 - DNA, 15 bp, Homo sapiens
ccgggaagctctgag

SEQ ID NO: 982535 - DNA, 15 bp, Homo sapiens
cgggaagctctgagt

SEQ ID NO: 982536 - DNA, 15 bp, Homo sapiens
gggaagctctgagta

SEQ ID NO: 982537 - DNA, 15 bp, Homo sapiens
ggaagctctgagtag

SEQ ID NO: 982538 - DNA, 15 bp, Homo sapiens
gaagctctgagtagt

SEQ ID NO: 982539 - DNA, 15 bp, Homo sapiens
aagctctgagtagtg

SEQ ID NO: 982540 - DNA, 15 bp, Homo sapiens
agctctgagtagtgt

SEQ ID NO: 982541 - DNA, 15 bp, Homo sapiens
gctctgagtagtgtg

SEQ ID NO: 982542 - DNA, 15 bp, Homo sapiens
ctctgagtagtgtgc

SEQ ID NO: 982543 - DNA, 15 bp, Homo sapiens
tctgagtagtgtgcg

SEQ ID NO: 982544 - DNA, 15 bp, Homo sapiens
ctgagtagtgtgcga

SEQ ID NO: 982545 - DNA, 15 bp, Homo sapiens
tgagtagtgtgcgag

SEQ ID NO: 982546 - DNA, 15 bp, Homo sapiens
gagtagtgtgcgagc

SEQ ID NO: 982547 - DNA, 15 bp, Homo sapiens
agtagtgtgcgagct

SEQ ID NO: 982548 - DNA, 15 bp, Homo sapiens
gtagtgtgcgagctg

SEQ ID NO: 982549 - DNA, 15 bp, Homo sapiens
tagtgtgcgagctgc

SEQ ID NO: 982550 - DNA, 15 bp, Homo sapiens
agtgtgcgagctgcc

SEQ ID NO: 982551 - DNA, 15 bp, Homo sapiens
gtgtgcgagctgccc

SEQ ID NO: 982552 - DNA, 15 bp, Homo sapiens
tgtgcgagctgccca

SEQ ID NO: 982553 - DNA, 15 bp, Homo sapiens
gtgcgagctgcccac

SEQ ID NO: 982554 - DNA, 15 bp, Homo sapiens
tgcgagctgcccacc

SEQ ID NO: 982555 - DNA, 15 bp, Homo sapiens
gcgagctgcccaccg

SEQ ID NO: 982556 - DNA, 15 bp, Homo sapiens
cgagctgcccaccgt

SEQ ID NO: 982557 - DNA, 15 bp, Homo sapiens
gagctgcccaccgtg

SEQ ID NO: 982558 - DNA, 15 bp, Homo sapiens
agctgcccaccgtgt

SEQ ID NO: 982559 - DNA, 15 bp, Homo sapiens
gctgcccaccgtgtg

SEQ ID NO: 982560 - DNA, 15 bp, Homo sapiens
ctgcccaccgtgtgg

SEQ ID NO: 982561 - DNA, 15 bp, Homo sapiens
tgcccaccgtgtggc

SEQ ID NO: 982562 - DNA, 15 bp, Homo sapiens
gcccaccgtgtggcc

SEQ ID NO: 982563 - DNA, 15 bp, Homo sapiens
cccaccgtgtggccc

SEQ ID NO: 982564 - DNA, 15 bp, Homo sapiens
ccaccgtgtggcccg

SEQ ID NO: 982565 - DNA, 15 bp, Homo sapiens
caccgtgtggcccgg

SEQ ID NO: 982566 - DNA, 15 bp, Homo sapiens
accgtgtggcccggc

SEQ ID NO: 982567 - DNA, 15 bp, Homo sapiens
ccgtgtggcccggca

SEQ ID NO: 982568 - DNA, 15 bp, Homo sapiens
cgtgtggcccggcag

SEQ ID NO: 982569 - DNA, 15 bp, Homo sapiens
gtgtggcccggcagt

SEQ ID NO: 982570 - DNA, 15 bp, Homo sapiens
tgtggcccggcagtg

SEQ ID NO: 982571 - DNA, 15 bp, Homo sapiens
gtggcccggcagtgg

SEQ ID NO: 982572 - DNA, 15 bp, Homo sapiens
tggcccggcagtggc

SEQ ID NO: 982573 - DNA, 15 bp, Homo sapiens
ggcccggcagtggcg

SEQ ID NO: 982574 - DNA, 15 bp, Homo sapiens
gcccggcagtggcgg

SEQ ID NO: 982575 - DNA, 15 bp, Homo sapiens
cccggcagtggcggc

SEQ ID NO: 982576 - DNA, 15 bp, Homo sapiens
ccggcagtggcggcg

SEQ ID NO: 982577 - DNA, 15 bp, Homo sapiens
cggcagtggcggcgg

SEQ ID NO: 982578 - DNA, 15 bp, Homo sapiens
ggcagtggcggcggt

SEQ ID NO: 982579 - DNA, 15 bp, Homo sapiens
gcagtggcggcggtg

SEQ ID NO: 982580 - DNA, 15 bp, Homo sapiens
cagtggcggcggtga

SEQ ID NO: 982581 - DNA, 15 bp, Homo sapiens
agtggcggcggtgac

SEQ ID NO: 982582 - DNA, 15 bp, Homo sapiens
gtggcggcggtgacg

SEQ ID NO: 982583 - DNA, 15 bp, Homo sapiens
tggcggcggtgacgc

SEQ ID NO: 982584 - DNA, 15 bp, Homo sapiens
ggcggcggtgacgcc

SEQ ID NO: 982585 - DNA, 15 bp, Homo sapiens
gcggcggtgacgcct

SEQ ID NO: 982586 - DNA, 15 bp, Homo sapiens
cggcggtgacgcctg

SEQ ID NO: 982587 - DNA, 15 bp, Homo sapiens
ggcggtgacgcctgc

SEQ ID NO: 982588 - DNA, 15 bp, Homo sapiens
gcggtgacgcctgcg

SEQ ID NO: 982589 - DNA, 15 bp, Homo sapiens
cggtgacgcctgcgt

SEQ ID NO: 982590 - DNA, 15 bp, Homo sapiens
ggtgacgcctgcgtg

SEQ ID NO: 982591 - DNA, 15 bp, Homo sapiens
gtgacgcctgcgtgg

SEQ ID NO: 982592 - DNA, 15 bp, Homo sapiens
tgacgcctgcgtggg

SEQ ID NO: 982593 - DNA, 15 bp, Homo sapiens
gacgcctgcgtgggg

SEQ ID NO: 982594 - DNA, 15 bp, Homo sapiens
acgcctgcgtggggg

SEQ ID NO: 982595 - DNA, 15 bp, Homo sapiens
cgcctgcgtggggga

SEQ ID NO: 982596 - DNA, 15 bp, Homo sapiens
gcctgcgtgggggac

SEQ ID NO: 982597 - DNA, 15 bp, Homo sapiens
cctgcgtgggggacg

SEQ ID NO: 982598 - DNA, 15 bp, Homo sapiens
ctgcgtgggggacgg

SEQ ID NO: 982599 - DNA, 15 bp, Homo sapiens
tgcgtgggggacggc

SEQ ID NO: 982600 - DNA, 15 bp, Homo sapiens
gcgtgggggacggcg

SEQ ID NO: 982601 - DNA, 15 bp, Homo sapiens
cgtgggggacggcgt

SEQ ID NO: 982602 - DNA, 15 bp, Homo sapiens
gtgggggacggcgtg

SEQ ID NO: 982603 - DNA, 15 bp, Homo sapiens
tgggggacggcgtgt

SEQ ID NO: 982604 - DNA, 15 bp, Homo sapiens
gggggacggcgtgtg

SEQ ID NO: 982605 - DNA, 15 bp, Homo sapiens
ggggacggcgtgtgt

SEQ ID NO: 982606 - DNA, 15 bp, Homo sapiens
gggacggcgtgtgtg

SEQ ID NO: 982607 - DNA, 15 bp, Homo sapiens
ggacggcgtgtgtgc

SEQ ID NO: 982608 - DNA, 15 bp, Homo sapiens
gacggcgtgtgtgcc

SEQ ID NO: 982609 - DNA, 15 bp, Homo sapiens
acggcgtgtgtgcca

SEQ ID NO: 982610 - DNA, 15 bp, Homo sapiens
cggcgtgtgtgccag

SEQ ID NO: 982611 - DNA, 15 bp, Homo sapiens
ggcgtgtgtgccagc

SEQ ID NO: 982612 - DNA, 15 bp, Homo sapiens
gcgtgtgtgccagcg

SEQ ID NO: 982613 - DNA, 15 bp, Homo sapiens
cgtgtgtgccagcgg

SEQ ID NO: 982614 - DNA, 15 bp, Homo sapiens
gtgtgtgccagcggc

SEQ ID NO: 982615 - DNA, 15 bp, Homo sapiens
tgtgtgccagcggcg

SEQ ID NO: 982616 - DNA, 15 bp, Homo sapiens
gtgtgccagcggcga

SEQ ID NO: 982617 - DNA, 15 bp, Homo sapiens
tgtgccagcggcgat

SEQ ID NO: 982618 - DNA, 15 bp, Homo sapiens
gtgccagcggcgata

SEQ ID NO: 982619 - DNA, 15 bp, Homo sapiens
tgccagcggcgatag

SEQ ID NO: 982620 - DNA, 15 bp, Homo sapiens
gccagcggcgataga

SEQ ID NO: 982621 - DNA, 15 bp, Homo sapiens
ccagcggcgatagag

SEQ ID NO: 982622 - DNA, 15 bp, Homo sapiens
cagcggcgatagagg

SEQ ID NO: 982623 - DNA, 15 bp, Homo sapiens
agcggcgatagaggg

SEQ ID NO: 982624 - DNA, 15 bp, Homo sapiens
gcggcgatagaggga

SEQ ID NO: 982625 - DNA, 15 bp, Homo sapiens
cggcgatagagggat

SEQ ID NO: 982626 - DNA, 15 bp, Homo sapiens
ggcgatagagggatg

SEQ ID NO: 982627 - DNA, 15 bp, Homo sapiens
gcgatagagggatgt

SEQ ID NO: 982628 - DNA, 15 bp, Homo sapiens
cgatagagggatgtt

SEQ ID NO: 982629 - DNA, 15 bp, Homo sapiens
gatagagggatgttg

SEQ ID NO: 982630 - DNA, 15 bp, Homo sapiens
atagagggatgttgc

SEQ ID NO: 982631 - DNA, 15 bp, Homo sapiens
tagagggatgttgcc

SEQ ID NO: 982632 - DNA, 15 bp, Homo sapiens
agagggatgttgccg

SEQ ID NO: 982633 - DNA, 15 bp, Homo sapiens
gagggatgttgccgg

SEQ ID NO: 982634 - DNA, 15 bp, Homo sapiens
agggatgttgccggc

SEQ ID NO: 982635 - DNA, 15 bp, Homo sapiens
gggatgttgccggcc

SEQ ID NO: 982636 - DNA, 15 bp, Homo sapiens
ggatgttgccggccg

SEQ ID NO: 982637 - DNA, 15 bp, Homo sapiens
gatgttgccggccga

SEQ ID NO: 982638 - DNA, 15 bp, Homo sapiens
atgttgccggccgac

SEQ ID NO: 982639 - DNA, 15 bp, Homo sapiens
tgttgccggccgact

SEQ ID NO: 982640 - DNA, 15 bp, Homo sapiens
gttgccggccgactt

SEQ ID NO: 982641 - DNA, 15 bp, Homo sapiens
ttgccggccgacttg

SEQ ID NO: 982642 - DNA, 15 bp, Homo sapiens
tgccggccgacttgc

SEQ ID NO: 982643 - DNA, 15 bp, Homo sapiens
gccggccgacttgca

SEQ ID NO: 982644 - DNA, 15 bp, Homo sapiens
ccggccgacttgcat

SEQ ID NO: 982645 - DNA, 15 bp, Homo sapiens
cggccgacttgcatc

SEQ ID NO: 982646 - DNA, 15 bp, Homo sapiens
ggccgacttgcatcg

SEQ ID NO: 982647 - DNA, 15 bp, Homo sapiens
gccgacttgcatcgc

SEQ ID NO: 982648 - DNA, 15 bp, Homo sapiens
ccgacttgcatcgcg

SEQ ID NO: 982649 - DNA, 15 bp, Homo sapiens
cgacttgcatcgcgc

SEQ ID NO: 982650 - DNA, 15 bp, Homo sapiens
gacttgcatcgcgca

SEQ ID NO: 982651 - DNA, 15 bp, Homo sapiens
acttgcatcgcgcag

SEQ ID NO: 982652 - DNA, 15 bp, Homo sapiens
cttgcatcgcgcaga

SEQ ID NO: 982653 - DNA, 15 bp, Homo sapiens
ttgcatcgcgcagag

SEQ ID NO: 982654 - DNA, 15 bp, Homo sapiens
tgcatcgcgcagagc

SEQ ID NO: 982655 - DNA, 15 bp, Homo sapiens
gcatcgcgcagagcg

SEQ ID NO: 982656 - DNA, 15 bp, Homo sapiens
catcgcgcagagcgg

SEQ ID NO: 982657 - DNA, 15 bp, Homo sapiens
atcgcgcagagcggt

SEQ ID NO: 982658 - DNA, 15 bp, Homo sapiens
tcgcgcagagcggta

SEQ ID NO: 982659 - DNA, 15 bp, Homo sapiens
cgcgcagagcggtac

SEQ ID NO: 982660 - DNA, 15 bp, Homo sapiens
gcgcagagcggtact

SEQ ID NO: 982661 - DNA, 15 bp, Homo sapiens
cgcagagcggtactg

SEQ ID NO: 982662 - DNA, 15 bp, Homo sapiens
gcagagcggtactgg

SEQ ID NO: 982663 - DNA, 15 bp, Homo sapiens
cagagcggtactggc

SEQ ID NO: 982664 - DNA, 15 bp, Homo sapiens
agagcggtactggcg

SEQ ID NO: 982665 - DNA, 15 bp, Homo sapiens
gagcggtactggcga

SEQ ID NO: 982666 - DNA, 15 bp, Homo sapiens
agcggtactggcgat

SEQ ID NO: 982667 - DNA, 15 bp, Homo sapiens
gcggtactggcgatg

SEQ ID NO: 982668 - DNA, 15 bp, Homo sapiens
cggtactggcgatgg

SEQ ID NO: 982669 - DNA, 15 bp, Homo sapiens
ggtactggcgatgga

SEQ ID NO: 982670 - DNA, 15 bp, Homo sapiens
gtactggcgatggag

SEQ ID NO: 982671 - DNA, 15 bp, Homo sapiens
tactggcgatggagc

SEQ ID NO: 982672 - DNA, 15 bp, Homo sapiens
actggcgatggagct

SEQ ID NO: 982673 - DNA, 15 bp, Homo sapiens
ctggcgatggagctt

SEQ ID NO: 982674 - DNA, 15 bp, Homo sapiens
tggcgatggagcttt

SEQ ID NO: 982675 - DNA, 15 bp, Homo sapiens
ggcgatggagctttg

SEQ ID NO: 982676 - DNA, 15 bp, Homo sapiens
gcgatggagctttgg

SEQ ID NO: 982677 - DNA, 15 bp, Homo sapiens
cgatggagctttggc

SEQ ID NO: 982678 - DNA, 15 bp, Homo sapiens
gatggagctttggcg

SEQ ID NO: 982679 - DNA, 15 bp, Homo sapiens
atggagctttggcga

SEQ ID NO: 982680 - DNA, 15 bp, Homo sapiens
tggagctttggcgac

SEQ ID NO: 982681 - DNA, 15 bp, Homo sapiens
ggagctttggcgaca

SEQ ID NO: 982682 - DNA, 15 bp, Homo sapiens
gagctttggcgacag

SEQ ID NO: 982683 - DNA, 15 bp, Homo sapiens
agctttggcgacagt

SEQ ID NO: 982684 - DNA, 15 bp, Homo sapiens
gctttggcgacagtc

SEQ ID NO: 982685 - DNA, 15 bp, Homo sapiens
ctttggcgacagtcc

SEQ ID NO: 982686 - DNA, 15 bp, Homo sapiens
tttggcgacagtccg

SEQ ID NO: 982687 - DNA, 15 bp, Homo sapiens
ttggcgacagtccgt

SEQ ID NO: 982688 - DNA, 15 bp, Homo sapiens
tggcgacagtccgtg

SEQ ID NO: 982689 - DNA, 15 bp, Homo sapiens
ggcgacagtccgtgc

SEQ ID NO: 982690 - DNA, 15 bp, Homo sapiens
gcgacagtccgtgca

SEQ ID NO: 982691 - DNA, 15 bp, Homo sapiens
cgacagtccgtgcag

SEQ ID NO: 982692 - DNA, 15 bp, Homo sapiens
gacagtccgtgcagc

SEQ ID NO: 982693 - DNA, 15 bp, Homo sapiens
acagtccgtgcagcg

SEQ ID NO: 982694 - DNA, 15 bp, Homo sapiens
cagtccgtgcagcgt

SEQ ID NO: 982695 - DNA, 15 bp, Homo sapiens
agtccgtgcagcgtg

SEQ ID NO: 982696 - DNA, 15 bp, Homo sapiens
gtccgtgcagcgtgc

SEQ ID NO: 982697 - DNA, 15 bp, Homo sapiens
tccgtgcagcgtgct

SEQ ID NO: 982698 - DNA, 15 bp, Homo sapiens
ccgtgcagcgtgctg

SEQ ID NO: 982699 - DNA, 15 bp, Homo sapiens
cgtgcagcgtgctgg

SEQ ID NO: 982700 - DNA, 15 bp, Homo sapiens
gtgcagcgtgctggg

SEQ ID NO: 982701 - DNA, 15 bp, Homo sapiens
tgcagcgtgctgggc

SEQ ID NO: 982702 - DNA, 15 bp, Homo sapiens
gcagcgtgctgggcc

SEQ ID NO: 982703 - DNA, 15 bp, Homo sapiens
cagcgtgctgggccg

SEQ ID NO: 982704 - DNA, 15 bp, Homo sapiens
agcgtgctgggccga

SEQ ID NO: 982705 - DNA, 15 bp, Homo sapiens
gcgtgctgggccgaa

SEQ ID NO: 982706 - DNA, 15 bp, Homo sapiens
cgtgctgggccgaat

SEQ ID NO: 982707 - DNA, 15 bp, Homo sapiens
gtgctgggccgaatg

SEQ ID NO: 982708 - DNA, 15 bp, Homo sapiens
tgctgggccgaatgt

SEQ ID NO: 982709 - DNA, 15 bp, Homo sapiens
gctgggccgaatgtg

SEQ ID NO: 982710 - DNA, 15 bp, Homo sapiens
ctgggccgaatgtgg

SEQ ID NO: 982711 - DNA, 15 bp, Homo sapiens
tgggccgaatgtggt

SEQ ID NO: 982712 - DNA, 15 bp, Homo sapiens
gggccgaatgtggtg

SEQ ID NO: 982713 - DNA, 15 bp, Homo sapiens
ggccgaatgtggtgc

SEQ ID NO: 982714 - DNA, 15 bp, Homo sapiens
gccgaatgtggtgcg

SEQ ID NO: 982715 - DNA, 15 bp, Homo sapiens
ccgaatgtggtgcga

SEQ ID NO: 982716 - DNA, 15 bp, Homo sapiens
cgaatgtggtgcgac

SEQ ID NO: 982717 - DNA, 15 bp, Homo sapiens
gaatgtggtgcgacg

SEQ ID NO: 982718 - DNA, 15 bp, Homo sapiens
aatgtggtgcgacgc

SEQ ID NO: 982719 - DNA, 15 bp, Homo sapiens
atgtggtgcgacgcc

SEQ ID NO: 982720 - DNA, 15 bp, Homo sapiens
tgtggtgcgacgccg

SEQ ID NO: 982721 - DNA, 15 bp, Homo sapiens
gtggtgcgacgccga

SEQ ID NO: 982722 - DNA, 15 bp, Homo sapiens
tggtgcgacgccgac

SEQ ID NO: 982723 - DNA, 15 bp, Homo sapiens
ggtgcgacgccgacg

SEQ ID NO: 982724 - DNA, 15 bp, Homo sapiens
gtgcgacgccgacga

SEQ ID NO: 982725 - DNA, 15 bp, Homo sapiens
tgcgacgccgacgac

SEQ ID NO: 982726 - DNA, 15 bp, Homo sapiens
gcgacgccgacgacg

SEQ ID NO: 982727 - DNA, 15 bp, Homo sapiens
cgacgccgacgacgc

SEQ ID NO: 982728 - DNA, 15 bp, Homo sapiens
gacgccgacgacgca

SEQ ID NO: 982729 - DNA, 15 bp, Homo sapiens
acgccgacgacgcag

SEQ ID NO: 982730 - DNA, 15 bp, Homo sapiens
cgccgacgacgcagg

SEQ ID NO: 982731 - DNA, 15 bp, Homo sapiens
gccgacgacgcaggc

SEQ ID NO: 982732 - DNA, 15 bp, Homo sapiens
ccgacgacgcaggcg

SEQ ID NO: 982733 - DNA, 15 bp, Homo sapiens
cgacgacgcaggcga

SEQ ID NO: 982734 - DNA, 15 bp, Homo sapiens
gacgacgcaggcgag

SEQ ID NO: 982735 - DNA, 15 bp, Homo sapiens
acgacgcaggcgagt

SEQ ID NO: 982736 - DNA, 15 bp, Homo sapiens
cgacgcaggcgagtt

SEQ ID NO: 982737 - DNA, 15 bp, Homo sapiens
gacgcaggcgagttg

SEQ ID NO: 982738 - DNA, 15 bp, Homo sapiens
acgcaggcgagttgg

SEQ ID NO: 982739 - DNA, 15 bp, Homo sapiens
cgcaggcgagttggg

SEQ ID NO: 982740 - DNA, 15 bp, Homo sapiens
gcaggcgagttgggc

SEQ ID NO: 982741 - DNA, 15 bp, Homo sapiens
caggcgagttgggcg

SEQ ID NO: 982742 - DNA, 15 bp, Homo sapiens
aggcgagttgggcgt

SEQ ID NO: 982743 - DNA, 15 bp, Homo sapiens
ggcgagttgggcgtg

SEQ ID NO: 982744 - DNA, 15 bp, Homo sapiens
gcgagttgggcgtgc

SEQ ID NO: 982745 - DNA, 15 bp, Homo sapiens
cgagttgggcgtgct

SEQ ID NO: 982746 - DNA, 15 bp, Homo sapiens
gagttgggcgtgctc

SEQ ID NO: 982747 - DNA, 15 bp, Homo sapiens
agttgggcgtgctcg

SEQ ID NO: 982748 - DNA, 15 bp, Homo sapiens
gttgggcgtgctcga

SEQ ID NO: 982749 - DNA, 15 bp, Homo sapiens
ttgggcgtgctcgag

SEQ ID NO: 982750 - DNA, 15 bp, Homo sapiens
tgggcgtgctcgagg

SEQ ID NO: 982751 - DNA, 15 bp, Homo sapiens
gggcgtgctcgaggc

SEQ ID NO: 982752 - DNA, 15 bp, Homo sapiens
ggcgtgctcgaggct

SEQ ID NO: 982753 - DNA, 15 bp, Homo sapiens
gcgtgctcgaggctg

SEQ ID NO: 982754 - DNA, 15 bp, Homo sapiens
cgtgctcgaggctgg

SEQ ID NO: 982755 - DNA, 15 bp, Homo sapiens
gtgctcgaggctggg

SEQ ID NO: 982756 - DNA, 15 bp, Homo sapiens
tgctcgaggctgggg

SEQ ID NO: 982757 - DNA, 15 bp, Homo sapiens
gctcgaggctgggga

SEQ ID NO: 982758 - DNA, 15 bp, Homo sapiens
ctcgaggctggggag

SEQ ID NO: 982759 - DNA, 15 bp, Homo sapiens
tcgaggctggggagc

SEQ ID NO: 982760 - DNA, 15 bp, Homo sapiens
cgaggctggggagct

SEQ ID NO: 982761 - DNA, 15 bp, Homo sapiens
gaggctggggagctg

SEQ ID NO: 982762 - DNA, 15 bp, Homo sapiens
aggctggggagctgc

SEQ ID NO: 982763 - DNA, 15 bp, Homo sapiens
ggctggggagctgct

SEQ ID NO: 982764 - DNA, 15 bp, Homo sapiens
gctggggagctgctc

SEQ ID NO: 982765 - DNA, 15 bp, Homo sapiens
ctggggagctgctct

SEQ ID NO: 982766 - DNA, 15 bp, Homo sapiens
tggggagctgctctg

SEQ ID NO: 982767 - DNA, 15 bp, Homo sapiens
ggggagctgctctgg

SEQ ID NO: 982768 - DNA, 15 bp, Homo sapiens
gggagctgctctggg

SEQ ID NO: 982769 - DNA, 15 bp, Homo sapiens
ggagctgctctggga

SEQ ID NO: 982770 - DNA, 15 bp, Homo sapiens
gagctgctctgggat

SEQ ID NO: 982771 - DNA, 15 bp, Homo sapiens
agctgctctgggatg

SEQ ID NO: 982772 - DNA, 15 bp, Homo sapiens
gctgctctgggatga

SEQ ID NO: 982773 - DNA, 15 bp, Homo sapiens
ctgctctgggatgag

SEQ ID NO: 982774 - DNA, 15 bp, Homo sapiens
tgctctgggatgagg

SEQ ID NO: 982775 - DNA, 15 bp, Homo sapiens
gctctgggatgaggc

SEQ ID NO: 982776 - DNA, 15 bp, Homo sapiens
ctctgggatgaggcg

SEQ ID NO: 982777 - DNA, 15 bp, Homo sapiens
tctgggatgaggcgc

SEQ ID NO: 982778 - DNA, 15 bp, Homo sapiens
ctgggatgaggcgcc

SEQ ID NO: 982779 - DNA, 15 bp, Homo sapiens
tgggatgaggcgcct

SEQ ID NO: 982780 - DNA, 15 bp, Homo sapiens
gggatgaggcgcctg

SEQ ID NO: 982781 - DNA, 15 bp, Homo sapiens
ggatgaggcgcctgc

SEQ ID NO: 982782 - DNA, 15 bp, Homo sapiens
gatgaggcgcctgcg

SEQ ID NO: 982783 - DNA, 15 bp, Homo sapiens
atgaggcgcctgcgg

SEQ ID NO: 982784 - DNA, 15 bp, Homo sapiens
tgaggcgcctgcggg

SEQ ID NO: 982785 - DNA, 15 bp, Homo sapiens
gaggcgcctgcggga

SEQ ID NO: 982786 - DNA, 15 bp, Homo sapiens
aggcgcctgcgggag

SEQ ID NO: 982787 - DNA, 15 bp, Homo sapiens
ggcgcctgcgggaga

SEQ ID NO: 982788 - DNA, 15 bp, Homo sapiens
gcgcctgcgggagac

SEQ ID NO: 982789 - DNA, 15 bp, Homo sapiens
cgcctgcgggagaca

SEQ ID NO: 982790 - DNA, 15 bp, Homo sapiens
gcctgcgggagacag

SEQ ID NO: 982791 - DNA, 15 bp, Homo sapiens
cctgcgggagacagg

SEQ ID NO: 982792 - DNA, 15 bp, Homo sapiens
ctgcgggagacagga

SEQ ID NO: 982793 - DNA, 15 bp, Homo sapiens
tgcgggagacaggag

SEQ ID NO: 982794 - DNA, 15 bp, Homo sapiens
gcgggagacaggagg

SEQ ID NO: 982795 - DNA, 15 bp, Homo sapiens
cgggagacaggaggt

SEQ ID NO: 982796 - DNA, 15 bp, Homo sapiens
gggagacaggaggtg

SEQ ID NO: 982797 - DNA, 15 bp, Homo sapiens
ggagacaggaggtga

SEQ ID NO: 982798 - DNA, 15 bp, Homo sapiens
gagacaggaggtgaa

SEQ ID NO: 982799 - DNA, 15 bp, Homo sapiens
agacaggaggtgaag

SEQ ID NO: 982800 - DNA, 15 bp, Homo sapiens
gacaggaggtgaagc

SEQ ID NO: 982801 - DNA, 15 bp, Homo sapiens
acaggaggtgaagcg

SEQ ID NO: 982802 - DNA, 15 bp, Homo sapiens
caggaggtgaagcga

SEQ ID NO: 982803 - DNA, 15 bp, Homo sapiens
aggaggtgaagcgag

SEQ ID NO: 982804 - DNA, 15 bp, Homo sapiens
ggaggtgaagcgagt

SEQ ID NO: 982805 - DNA, 15 bp, Homo sapiens
gaggtgaagcgagtg

SEQ ID NO: 982806 - DNA, 15 bp, Homo sapiens
aggtgaagcgagtga

SEQ ID NO: 982807 - DNA, 15 bp, Homo sapiens
ggtgaagcgagtgag

SEQ ID NO: 982808 - DNA, 15 bp, Homo sapiens
gtgaagcgagtgagt

SEQ ID NO: 982809 - DNA, 15 bp, Homo sapiens
tgaagcgagtgagta

SEQ ID NO: 982810 - DNA, 15 bp, Homo sapiens
gaagcgagtgagtac

SEQ ID NO: 982811 - DNA, 15 bp, Homo sapiens
aagcgagtgagtaca

SEQ ID NO: 982812 - DNA, 15 bp, Homo sapiens
agcgagtgagtacag

SEQ ID NO: 982813 - DNA, 15 bp, Homo sapiens
gcgagtgagtacagc

SEQ ID NO: 982814 - DNA, 15 bp, Homo sapiens
cgagtgagtacagcc

SEQ ID NO: 982815 - DNA, 15 bp, Homo sapiens
gagtgagtacagccc

SEQ ID NO: 982816 - DNA, 15 bp, Homo sapiens
agtgagtacagccca

SEQ ID NO: 982817 - DNA, 15 bp, Homo sapiens
gtgagtacagcccaa

SEQ ID NO: 982818 - DNA, 15 bp, Homo sapiens
tgagtacagcccaag

SEQ ID NO: 982819 - DNA, 15 bp, Homo sapiens
gagtacagcccaagc

SEQ ID NO: 982820 - DNA, 15 bp, Homo sapiens
agtacagcccaagca

SEQ ID NO: 982821 - DNA, 15 bp, Homo sapiens
gtacagcccaagcac

SEQ ID NO: 982822 - DNA, 15 bp, Homo sapiens
tacagcccaagcacc

SEQ ID NO: 982823 - DNA, 15 bp, Homo sapiens
acagcccaagcacca

SEQ ID NO: 982824 - DNA, 15 bp, Homo sapiens
cagcccaagcaccag

SEQ ID NO: 982825 - DNA, 15 bp, Homo sapiens
agcccaagcaccagc

SEQ ID NO: 982826 - DNA, 15 bp, Homo sapiens
gcccaagcaccagcc

SEQ ID NO: 982827 - DNA, 15 bp, Homo sapiens
cccaagcaccagcca

SEQ ID NO: 982828 - DNA, 15 bp, Homo sapiens
ccaagcaccagccag

SEQ ID NO: 982829 - DNA, 15 bp, Homo sapiens
caagcaccagccagg

SEQ ID NO: 982830 - DNA, 15 bp, Homo sapiens
aagcaccagccaggc

SEQ ID NO: 982831 - DNA, 15 bp, Homo sapiens
agcaccagccaggcc

SEQ ID NO: 982832 - DNA, 15 bp, Homo sapiens
gcaccagccaggcca

SEQ ID NO: 982833 - DNA, 15 bp, Homo sapiens
caccagccaggccac

SEQ ID NO: 982834 - DNA, 15 bp, Homo sapiens
accagccaggccacc

SEQ ID NO: 982835 - DNA, 15 bp, Homo sapiens
ccagccaggccaccc

SEQ ID NO: 982836 - DNA, 15 bp, Homo sapiens
cagccaggccacccc

SEQ ID NO: 982837 - DNA, 15 bp, Homo sapiens
agccaggccaccccg

SEQ ID NO: 982838 - DNA, 15 bp, Homo sapiens
gccaggccaccccgc

SEQ ID NO: 982839 - DNA, 15 bp, Homo sapiens
ccaggccaccccgcg

SEQ ID NO: 982840 - DNA, 15 bp, Homo sapiens
caggccaccccgcgc

SEQ ID NO: 982841 - DNA, 15 bp, Homo sapiens
aggccaccccgcgct

SEQ ID NO: 982842 - DNA, 15 bp, Homo sapiens
ggccaccccgcgctg

SEQ ID NO: 982843 - DNA, 15 bp, Homo sapiens
gccaccccgcgctgc

SEQ ID NO: 982844 - DNA, 15 bp, Homo sapiens
ccaccccgcgctgct

SEQ ID NO: 982845 - DNA, 15 bp, Homo sapiens
caccccgcgctgctc

SEQ ID NO: 982846 - DNA, 15 bp, Homo sapiens
accccgcgctgctcg

SEQ ID NO: 982847 - DNA, 15 bp, Homo sapiens
ccccgcgctgctcgg

SEQ ID NO: 982848 - DNA, 15 bp, Homo sapiens
cccgcgctgctcggt

SEQ ID NO: 982849 - DNA, 15 bp, Homo sapiens
ccgcgctgctcggtc

SEQ ID NO: 982850 - DNA, 15 bp, Homo sapiens
cgcgctgctcggtcc

SEQ ID NO: 982851 - DNA, 15 bp, Homo sapiens
gcgctgctcggtccc

SEQ ID NO: 982852 - DNA, 15 bp, Homo sapiens
cgctgctcggtcccc

SEQ ID NO: 982853 - DNA, 15 bp, Homo sapiens
gctgctcggtccccg

SEQ ID NO: 982854 - DNA, 15 bp, Homo sapiens
ctgctcggtccccgc

SEQ ID NO: 982855 - DNA, 15 bp, Homo sapiens
tgctcggtccccgcg

SEQ ID NO: 982856 - DNA, 15 bp, Homo sapiens
gctcggtccccgcgc

SEQ ID NO: 982857 - DNA, 15 bp, Homo sapiens
ctcggtccccgcgca

SEQ ID NO: 982858 - DNA, 15 bp, Homo sapiens
tcggtccccgcgcag

SEQ ID NO: 982859 - DNA, 15 bp, Homo sapiens
cggtccccgcgcagg

SEQ ID NO: 982860 - DNA, 15 bp, Homo sapiens
ggtccccgcgcaggt

SEQ ID NO: 982861 - DNA, 15 bp, Homo sapiens
gtccccgcgcaggtg

SEQ ID NO: 982862 - DNA, 15 bp, Homo sapiens
tccccgcgcaggtgc

SEQ ID NO: 982863 - DNA, 15 bp, Homo sapiens
ccccgcgcaggtgca

SEQ ID NO: 982864 - DNA, 15 bp, Homo sapiens
cccgcgcaggtgcag

SEQ ID NO: 982865 - DNA, 15 bp, Homo sapiens
ccgcgcaggtgcagg

SEQ ID NO: 982866 - DNA, 15 bp, Homo sapiens
cgcgcaggtgcagga

SEQ ID NO: 982867 - DNA, 15 bp, Homo sapiens
gcgcaggtgcaggag

SEQ ID NO: 982868 - DNA, 15 bp, Homo sapiens
cgcaggtgcaggagg

SEQ ID NO: 982869 - DNA, 15 bp, Homo sapiens
gcaggtgcaggaggt

SEQ ID NO: 982870 - DNA, 15 bp, Homo sapiens
caggtgcaggaggta

SEQ ID NO: 982871 - DNA, 15 bp, Homo sapiens
aggtgcaggaggtaa

SEQ ID NO: 982872 - DNA, 15 bp, Homo sapiens
ggtgcaggaggtaat

SEQ ID NO: 982873 - DNA, 15 bp, Homo sapiens
gtgcaggaggtaata

SEQ ID NO: 982874 - DNA, 15 bp, Homo sapiens
tgcaggaggtaatac

SEQ ID NO: 982875 - DNA, 15 bp, Homo sapiens
gcaggaggtaatacc

SEQ ID NO: 982876 - DNA, 15 bp, Homo sapiens
caggaggtaatacct

SEQ ID NO: 982877 - DNA, 15 bp, Homo sapiens
aggaggtaataccta

SEQ ID NO: 982878 - DNA, 15 bp, Homo sapiens
ggaggtaatacctag

SEQ ID NO: 982879 - DNA, 15 bp, Homo sapiens
gaggtaatacctagg

SEQ ID NO: 982880 - DNA, 15 bp, Homo sapiens
aggtaatacctaggt

SEQ ID NO: 982881 - DNA, 15 bp, Homo sapiens
ggtaatacctaggta

SEQ ID NO: 982882 - DNA, 15 bp, Homo sapiens
gtaatacctaggtag

SEQ ID NO: 982883 - DNA, 15 bp, Homo sapiens
taatacctaggtagg

SEQ ID NO: 982884 - DNA, 15 bp, Homo sapiens
aatacctaggtaggc

SEQ ID NO: 982885 - DNA, 15 bp, Homo sapiens
atacctaggtaggcg

SEQ ID NO: 982886 - DNA, 15 bp, Homo sapiens
tacctaggtaggcgg

SEQ ID NO: 982887 - DNA, 15 bp, Homo sapiens
acctaggtaggcgga

SEQ ID NO: 982888 - DNA, 15 bp, Homo sapiens
cctaggtaggcggag

SEQ ID NO: 982889 - DNA, 15 bp, Homo sapiens
ctaggtaggcggagt

SEQ ID NO: 982890 - DNA, 15 bp, Homo sapiens
taggtaggcggagtc

SEQ ID NO: 982891 - DNA, 15 bp, Homo sapiens
aggtaggcggagtca

SEQ ID NO: 982892 - DNA, 15 bp, Homo sapiens
ggtaggcggagtcag

SEQ ID NO: 982893 - DNA, 15 bp, Homo sapiens
gtaggcggagtcagg

SEQ ID NO: 982894 - DNA, 15 bp, Homo sapiens
taggcggagtcaggc

SEQ ID NO: 982895 - DNA, 15 bp, Homo sapiens
aggcggagtcaggcg

SEQ ID NO: 982896 - DNA, 15 bp, Homo sapiens
ggcggagtcaggcgt

SEQ ID NO: 982897 - DNA, 15 bp, Homo sapiens
gcggagtcaggcgtg

SEQ ID NO: 982898 - DNA, 15 bp, Homo sapiens
cggagtcaggcgtgg

SEQ ID NO: 982899 - DNA, 15 bp, Homo sapiens
ggagtcaggcgtgga

SEQ ID NO: 982900 - DNA, 15 bp, Homo sapiens
gagtcaggcgtggag

SEQ ID NO: 982901 - DNA, 15 bp, Homo sapiens
agtcaggcgtggagc

SEQ ID NO: 982902 - DNA, 15 bp, Homo sapiens
gtcaggcgtggagcg

SEQ ID NO: 982903 - DNA, 15 bp, Homo sapiens
tcaggcgtggagcgg

SEQ ID NO: 982904 - DNA, 15 bp, Homo sapiens
caggcgtggagcggt

SEQ ID NO: 982905 - DNA, 15 bp, Homo sapiens
aggcgtggagcggta

SEQ ID NO: 982906 - DNA, 15 bp, Homo sapiens
ggcgtggagcggtag

SEQ ID NO: 982907 - DNA, 15 bp, Homo sapiens
gcgtggagcggtagc

SEQ ID NO: 982908 - DNA, 15 bp, Homo sapiens
cgtggagcggtagct

SEQ ID NO: 982909 - DNA, 15 bp, Homo sapiens
gtggagcggtagctg

SEQ ID NO: 982910 - DNA, 15 bp, Homo sapiens
tggagcggtagctgt

SEQ ID NO: 982911 - DNA, 15 bp, Homo sapiens
ggagcggtagctgtg

SEQ ID NO: 982912 - DNA, 15 bp, Homo sapiens
gagcggtagctgtgc

SEQ ID NO: 982913 - DNA, 15 bp, Homo sapiens
agcggtagctgtgcg

SEQ ID NO: 982914 - DNA, 15 bp, Homo sapiens
gcggtagctgtgcgt

SEQ ID NO: 982915 - DNA, 15 bp, Homo sapiens
cggtagctgtgcgtg

SEQ ID NO: 982916 - DNA, 15 bp, Homo sapiens
ggtagctgtgcgtgg

SEQ ID NO: 982917 - DNA, 15 bp, Homo sapiens
gtagctgtgcgtggg

SEQ ID NO: 982918 - DNA, 15 bp, Homo sapiens
tagctgtgcgtgggc

SEQ ID NO: 982919 - DNA, 15 bp, Homo sapiens
agctgtgcgtgggcg

SEQ ID NO: 982920 - DNA, 15 bp, Homo sapiens
gctgtgcgtgggcga

SEQ ID NO: 982921 - DNA, 15 bp, Homo sapiens
ctgtgcgtgggcgag

SEQ ID NO: 982922 - DNA, 15 bp, Homo sapiens
tgtgcgtgggcgagc

SEQ ID NO: 982923 - DNA, 15 bp, Homo sapiens
gtgcgtgggcgagcg

SEQ ID NO: 982924 - DNA, 15 bp, Homo sapiens
tgcgtgggcgagcgc

SEQ ID NO: 982925 - DNA, 15 bp, Homo sapiens
gcgtgggcgagcgcg

SEQ ID NO: 982926 - DNA, 15 bp, Homo sapiens
cgtgggcgagcgcgc

SEQ ID NO: 982927 - DNA, 15 bp, Homo sapiens
gtgggcgagcgcgcc

SEQ ID NO: 982928 - DNA, 15 bp, Homo sapiens
tgggcgagcgcgccg

SEQ ID NO: 982929 - DNA, 15 bp, Homo sapiens
gggcgagcgcgccgg

SEQ ID NO: 982930 - DNA, 15 bp, Homo sapiens
ggcgagcgcgccggc

SEQ ID NO: 982931 - DNA, 15 bp, Homo sapiens
gcgagcgcgccggca

SEQ ID NO: 982932 - DNA, 15 bp, Homo sapiens
cgagcgcgccggcag

SEQ ID NO: 982933 - DNA, 15 bp, Homo sapiens
gagcgcgccggcagc

SEQ ID NO: 982934 - DNA, 15 bp, Homo sapiens
agcgcgccggcagcc

SEQ ID NO: 982935 - DNA, 15 bp, Homo sapiens
gcgcgccggcagccc

SEQ ID NO: 982936 - DNA, 15 bp, Homo sapiens
cgcgccggcagcccg

SEQ ID NO: 982937 - DNA, 15 bp, Homo sapiens
gcgccggcagcccgt

SEQ ID NO: 982938 - DNA, 15 bp, Homo sapiens
cgccggcagcccgtg

SEQ ID NO: 982939 - DNA, 15 bp, Homo sapiens
gccggcagcccgtgc

SEQ ID NO: 982940 - DNA, 15 bp, Homo sapiens
ccggcagcccgtgcg

SEQ ID NO: 982941 - DNA, 15 bp, Homo sapiens
cggcagcccgtgcgt

SEQ ID NO: 982942 - DNA, 15 bp, Homo sapiens
ggcagcccgtgcgta

SEQ ID NO: 982943 - DNA, 15 bp, Homo sapiens
gcagcccgtgcgtag

SEQ ID NO: 982944 - DNA, 15 bp, Homo sapiens
cagcccgtgcgtagg

SEQ ID NO: 982945 - DNA, 15 bp, Homo sapiens
agcccgtgcgtaggc

SEQ ID NO: 982946 - DNA, 15 bp, Homo sapiens
gcccgtgcgtaggcg

SEQ ID NO: 982947 - DNA, 15 bp, Homo sapiens
cccgtgcgtaggcga

SEQ ID NO: 982948 - DNA, 15 bp, Homo sapiens
ccgtgcgtaggcgag

SEQ ID NO: 982949 - DNA, 15 bp, Homo sapiens
cgtgcgtaggcgagc

SEQ ID NO: 982950 - DNA, 15 bp, Homo sapiens
gtgcgtaggcgagcc

SEQ ID NO: 982951 - DNA, 15 bp, Homo sapiens
tgcgtaggcgagccc

SEQ ID NO: 982952 - DNA, 15 bp, Homo sapiens
gcgtaggcgagcccg

SEQ ID NO: 982953 - DNA, 15 bp, Homo sapiens
cgtaggcgagcccgg

SEQ ID NO: 982954 - DNA, 15 bp, Homo sapiens
gtaggcgagcccggg

SEQ ID NO: 982955 - DNA, 15 bp, Homo sapiens
taggcgagcccggga

SEQ ID NO: 982956 - DNA, 15 bp, Homo sapiens
aggcgagcccgggag

SEQ ID NO: 982957 - DNA, 15 bp, Homo sapiens
ggcgagcccgggaga

SEQ ID NO: 982958 - DNA, 15 bp, Homo sapiens
gcgagcccgggagac

SEQ ID NO: 982959 - DNA, 15 bp, Homo sapiens
cgagcccgggagact

SEQ ID NO: 982960 - DNA, 15 bp, Homo sapiens
gagcccgggagacta

SEQ ID NO: 982961 - DNA, 15 bp, Homo sapiens
agcccgggagactat

SEQ ID NO: 982962 - DNA, 15 bp, Homo sapiens
gcccgggagactatc

SEQ ID NO: 982963 - DNA, 15 bp, Homo sapiens
cccgggagactatcg

SEQ ID NO: 982964 - DNA, 15 bp, Homo sapiens
ccgggagactatcgc

SEQ ID NO: 982965 - DNA, 15 bp, Homo sapiens
cgggagactatcgct

SEQ ID NO: 982966 - DNA, 15 bp, Homo sapiens
gggagactatcgctg

SEQ ID NO: 982967 - DNA, 15 bp, Homo sapiens
ggagactatcgctgg

SEQ ID NO: 982968 - DNA, 15 bp, Homo sapiens
gagactatcgctgga

SEQ ID NO: 982969 - DNA, 15 bp, Homo sapiens
agactatcgctggat

SEQ ID NO: 982970 - DNA, 15 bp, Homo sapiens
gactatcgctggatg

SEQ ID NO: 982971 - DNA, 15 bp, Homo sapiens
actatcgctggatga

SEQ ID NO: 982972 - DNA, 15 bp, Homo sapiens
ctatcgctggatgac

SEQ ID NO: 982973 - DNA, 15 bp, Homo sapiens
tatcgctggatgaca

SEQ ID NO: 982974 - DNA, 15 bp, Homo sapiens
atcgctggatgacag

SEQ ID NO: 982975 - DNA, 15 bp, Homo sapiens
tcgctggatgacagc

SEQ ID NO: 982976 - DNA, 15 bp, Homo sapiens
cgctggatgacagcg

SEQ ID NO: 982977 - DNA, 15 bp, Homo sapiens
gctggatgacagcga

SEQ ID NO: 982978 - DNA, 15 bp, Homo sapiens
ctggatgacagcgag

SEQ ID NO: 982979 - DNA, 15 bp, Homo sapiens
tggatgacagcgagc

SEQ ID NO: 982980 - DNA, 15 bp, Homo sapiens
ggatgacagcgagcg

SEQ ID NO: 982981 - DNA, 15 bp, Homo sapiens
gatgacagcgagcgg

SEQ ID NO: 982982 - DNA, 15 bp, Homo sapiens
atgacagcgagcggt

SEQ ID NO: 982983 - DNA, 15 bp, Homo sapiens
tgacagcgagcggtt

SEQ ID NO: 982984 - DNA, 15 bp, Homo sapiens
gacagcgagcggttc

SEQ ID NO: 982985 - DNA, 15 bp, Homo sapiens
acagcgagcggttca

SEQ ID NO: 982986 - DNA, 15 bp, Homo sapiens
cagcgagcggttcag

SEQ ID NO: 982987 - DNA, 15 bp, Homo sapiens
agcgagcggttcagc

SEQ ID NO: 982988 - DNA, 15 bp, Homo sapiens
gcgagcggttcagcg

SEQ ID NO: 982989 - DNA, 15 bp, Homo sapiens
cgagcggttcagcga

SEQ ID NO: 982990 - DNA, 15 bp, Homo sapiens
gagcggttcagcgac

SEQ ID NO: 982991 - DNA, 15 bp, Homo sapiens
agcggttcagcgacg

SEQ ID NO: 982992 - DNA, 15 bp, Homo sapiens
gcggttcagcgacga

SEQ ID NO: 982993 - DNA, 15 bp, Homo sapiens
cggttcagcgacgac

SEQ ID NO: 982994 - DNA, 15 bp, Homo sapiens
ggttcagcgacgaca

SEQ ID NO: 982995 - DNA, 15 bp, Homo sapiens
gttcagcgacgacag

SEQ ID NO: 982996 - DNA, 15 bp, Homo sapiens
ttcagcgacgacagc

SEQ ID NO: 982997 - DNA, 15 bp, Homo sapiens
tcagcgacgacagcg

SEQ ID NO: 982998 - DNA, 15 bp, Homo sapiens
cagcgacgacagcga

SEQ ID NO: 982999 - DNA, 15 bp, Homo sapiens
agcgacgacagcgag

SEQ ID NO: 983000 - DNA, 15 bp, Homo sapiens
gcgacgacagcgagc

SEQ ID NO: 983001 - DNA, 15 bp, Homo sapiens
cgacgacagcgagcg

SEQ ID NO: 983002 - DNA, 15 bp, Homo sapiens
gacgacagcgagcgg

SEQ ID NO: 983003 - DNA, 15 bp, Homo sapiens
acgacagcgagcggc

SEQ ID NO: 983004 - DNA, 15 bp, Homo sapiens
cgacagcgagcggct

SEQ ID NO: 983005 - DNA, 15 bp, Homo sapiens
gacagcgagcggcta

SEQ ID NO: 983006 - DNA, 15 bp, Homo sapiens
acagcgagcggctag

SEQ ID NO: 983007 - DNA, 15 bp, Homo sapiens
cagcgagcggctagt

SEQ ID NO: 983008 - DNA, 15 bp, Homo sapiens
agcgagcggctagta

SEQ ID NO: 983009 - DNA, 15 bp, Homo sapiens
gcgagcggctagtat

SEQ ID NO: 983010 - DNA, 15 bp, Homo sapiens
cgagcggctagtatg

SEQ ID NO: 983011 - DNA, 15 bp, Homo sapiens
gagcggctagtatgc

SEQ ID NO: 983012 - DNA, 15 bp, Homo sapiens
agcggctagtatgca

SEQ ID NO: 983013 - DNA, 15 bp, Homo sapiens
gcggctagtatgcag

SEQ ID NO: 983014 - DNA, 15 bp, Homo sapiens
cggctagtatgcagc

SEQ ID NO: 983015 - DNA, 15 bp, Homo sapiens
ggctagtatgcagca

SEQ ID NO: 983016 - DNA, 15 bp, Homo sapiens
gctagtatgcagcag

SEQ ID NO: 983017 - DNA, 15 bp, Homo sapiens
ctagtatgcagcagg

SEQ ID NO: 983018 - DNA, 15 bp, Homo sapiens
tagtatgcagcaggt

SEQ ID NO: 983019 - DNA, 15 bp, Homo sapiens
agtatgcagcaggtt

SEQ ID NO: 983020 - DNA, 15 bp, Homo sapiens
gtatgcagcaggttc

SEQ ID NO: 983021 - DNA, 15 bp, Homo sapiens
tatgcagcaggttcg

SEQ ID NO: 983022 - DNA, 15 bp, Homo sapiens
atgcagcaggttcga

SEQ ID NO: 983023 - DNA, 15 bp, Homo sapiens
tgcagcaggttcgac

SEQ ID NO: 983024 - DNA, 15 bp, Homo sapiens
gcagcaggttcgact

SEQ ID NO: 983025 - DNA, 15 bp, Homo sapiens
cagcaggttcgactg

SEQ ID NO: 983026 - DNA, 15 bp, Homo sapiens
agcaggttcgactgc

SEQ ID NO: 983027 - DNA, 15 bp, Homo sapiens
gcaggttcgactgct

SEQ ID NO: 983028 - DNA, 15 bp, Homo sapiens
caggttcgactgctt

SEQ ID NO: 983029 - DNA, 15 bp, Homo sapiens
aggttcgactgcttc

SEQ ID NO: 983030 - DNA, 15 bp, Homo sapiens
ggttcgactgcttcg

SEQ ID NO: 983031 - DNA, 15 bp, Homo sapiens
gttcgactgcttcgt

SEQ ID NO: 983032 - DNA, 15 bp, Homo sapiens
ttcgactgcttcgtg

SEQ ID NO: 983033 - DNA, 15 bp, Homo sapiens
tcgactgcttcgtga

SEQ ID NO: 983034 - DNA, 15 bp, Homo sapiens
cgactgcttcgtgat

SEQ ID NO: 983035 - DNA, 15 bp, Homo sapiens
gactgcttcgtgatc

SEQ ID NO: 983036 - DNA, 15 bp, Homo sapiens
actgcttcgtgatct

SEQ ID NO: 983037 - DNA, 15 bp, Homo sapiens
ctgcttcgtgatctt

SEQ ID NO: 983038 - DNA, 15 bp, Homo sapiens
tgcttcgtgatcttc

SEQ ID NO: 983039 - DNA, 15 bp, Homo sapiens
gcttcgtgatcttcc

SEQ ID NO: 983040 - DNA, 15 bp, Homo sapiens
cttcgtgatcttccg

SEQ ID NO: 983041 - DNA, 15 bp, Homo sapiens
ttcgtgatcttccgg

SEQ ID NO: 983042 - DNA, 15 bp, Homo sapiens
tcgtgatcttccgga

SEQ ID NO: 983043 - DNA, 15 bp, Homo sapiens
cgtgatcttccggaa

SEQ ID NO: 983044 - DNA, 15 bp, Homo sapiens
gtgatcttccggaag

SEQ ID NO: 983045 - DNA, 15 bp, Homo sapiens
tgatcttccggaaga

SEQ ID NO: 983046 - DNA, 15 bp, Homo sapiens
gatcttccggaagag

SEQ ID NO: 983047 - DNA, 15 bp, Homo sapiens
atcttccggaagagg

SEQ ID NO: 983048 - DNA, 15 bp, Homo sapiens
tcttccggaagaggg

SEQ ID NO: 983049 - DNA, 15 bp, Homo sapiens
cttccggaagaggga

SEQ ID NO: 983050 - DNA, 15 bp, Homo sapiens
ttccggaagagggag

SEQ ID NO: 983051 - DNA, 15 bp, Homo sapiens
tccggaagagggagc

SEQ ID NO: 983052 - DNA, 15 bp, Homo sapiens
ccggaagagggagct

SEQ ID NO: 983053 - DNA, 15 bp, Homo sapiens
cggaagagggagctg

SEQ ID NO: 983054 - DNA, 15 bp, Homo sapiens
ggaagagggagctgc

SEQ ID NO: 983055 - DNA, 15 bp, Homo sapiens
gaagagggagctgcg

SEQ ID NO: 983056 - DNA, 15 bp, Homo sapiens
aagagggagctgcgc

SEQ ID NO: 983057 - DNA, 15 bp, Homo sapiens
agagggagctgcgct

SEQ ID NO: 983058 - DNA, 15 bp, Homo sapiens
gagggagctgcgctt

SEQ ID NO: 983059 - DNA, 15 bp, Homo sapiens
agggagctgcgcttc

SEQ ID NO: 983060 - DNA, 15 bp, Homo sapiens
gggagctgcgcttct

SEQ ID NO: 983061 - DNA, 15 bp, Homo sapiens
ggagctgcgcttctt

SEQ ID NO: 983062 - DNA, 15 bp, Homo sapiens
gagctgcgcttcttg

SEQ ID NO: 983063 - DNA, 15 bp, Homo sapiens
agctgcgcttcttgc

SEQ ID NO: 983064 - DNA, 15 bp, Homo sapiens
gctgcgcttcttgct

SEQ ID NO: 983065 - DNA, 15 bp, Homo sapiens
ctgcgcttcttgctg

SEQ ID NO: 983066 - DNA, 15 bp, Homo sapiens
tgcgcttcttgctgc

SEQ ID NO: 983067 - DNA, 15 bp, Homo sapiens
gcgcttcttgctgcg

SEQ ID NO: 983068 - DNA, 15 bp, Homo sapiens
cgcttcttgctgcgg

SEQ ID NO: 983069 - DNA, 15 bp, Homo sapiens
gcttcttgctgcggg

SEQ ID NO: 983070 - DNA, 15 bp, Homo sapiens
cttcttgctgcggga

SEQ ID NO: 983071 - DNA, 15 bp, Homo sapiens
ttcttgctgcgggac

SEQ ID NO: 983072 - DNA, 15 bp, Homo sapiens
tcttgctgcgggaca

SEQ ID NO: 983073 - DNA, 15 bp, Homo sapiens
cttgctgcgggacag

SEQ ID NO: 983074 - DNA, 15 bp, Homo sapiens
ttgctgcgggacagg

SEQ ID NO: 983075 - DNA, 15 bp, Homo sapiens
tgctgcgggacaggg

SEQ ID NO: 983076 - DNA, 15 bp, Homo sapiens
gctgcgggacaggga

SEQ ID NO: 983077 - DNA, 15 bp, Homo sapiens
ctgcgggacagggag

SEQ ID NO: 983078 - DNA, 15 bp, Homo sapiens
tgcgggacagggagg

SEQ ID NO: 983079 - DNA, 15 bp, Homo sapiens
gcgggacagggaggg

SEQ ID NO: 983080 - DNA, 15 bp, Homo sapiens
cgggacagggagggg

SEQ ID NO: 983081 - DNA, 15 bp, Homo sapiens
gggacagggaggggg

SEQ ID NO: 983082 - DNA, 15 bp, Homo sapiens
ggacagggagggggc

SEQ ID NO: 983083 - DNA, 15 bp, Homo sapiens
gacagggagggggcc

SEQ ID NO: 983084 - DNA, 15 bp, Homo sapiens
acagggagggggcca

SEQ ID NO: 983085 - DNA, 15 bp, Homo sapiens
cagggagggggccaa

SEQ ID NO: 983086 - DNA, 15 bp, Homo sapiens
agggagggggccaag

SEQ ID NO: 983087 - DNA, 15 bp, Homo sapiens
gggagggggccaagc

SEQ ID NO: 983088 - DNA, 15 bp, Homo sapiens
ggagggggccaagcg

SEQ ID NO: 983089 - DNA, 15 bp, Homo sapiens
gagggggccaagcgt

SEQ ID NO: 983090 - DNA, 15 bp, Homo sapiens
agggggccaagcgtc

SEQ ID NO: 983091 - DNA, 15 bp, Homo sapiens
gggggccaagcgtcc

SEQ ID NO: 983092 - DNA, 15 bp, Homo sapiens
ggggccaagcgtcct

SEQ ID NO: 983093 - DNA, 15 bp, Homo sapiens
gggccaagcgtcctt

SEQ ID NO: 983094 - DNA, 15 bp, Homo sapiens
ggccaagcgtccttg

SEQ ID NO: 983095 - DNA, 15 bp, Homo sapiens
gccaagcgtccttga

SEQ ID NO: 983096 - DNA, 15 bp, Homo sapiens
ccaagcgtccttgac

SEQ ID NO: 983097 - DNA, 15 bp, Homo sapiens
caagcgtccttgacc

SEQ ID NO: 983098 - DNA, 15 bp, Homo sapiens
aagcgtccttgacct

SEQ ID NO: 983099 - DNA, 15 bp, Homo sapiens
agcgtccttgacctg

SEQ ID NO: 983100 - DNA, 15 bp, Homo sapiens
gcgtccttgacctgg

SEQ ID NO: 983101 - DNA, 15 bp, Homo sapiens
cgtccttgacctgga

SEQ ID NO: 983102 - DNA, 15 bp, Homo sapiens
gtccttgacctggac

SEQ ID NO: 983103 - DNA, 15 bp, Homo sapiens
tccttgacctggacg

SEQ ID NO: 983104 - DNA, 15 bp, Homo sapiens
ccttgacctggacgc

SEQ ID NO: 983105 - DNA, 15 bp, Homo sapiens
cttgacctggacgcc

SEQ ID NO: 983106 - DNA, 15 bp, Homo sapiens
ttgacctggacgcca

SEQ ID NO: 983107 - DNA, 15 bp, Homo sapiens
tgacctggacgccag

SEQ ID NO: 983108 - DNA, 15 bp, Homo sapiens
gacctggacgccaga

SEQ ID NO: 983109 - DNA, 15 bp, Homo sapiens
acctggacgccagag

SEQ ID NO: 983110 - DNA, 15 bp, Homo sapiens
cctggacgccagagc

SEQ ID NO: 983111 - DNA, 15 bp, Homo sapiens
ctggacgccagagct

SEQ ID NO: 983112 - DNA, 15 bp, Homo sapiens
tggacgccagagctc

SEQ ID NO: 983113 - DNA, 15 bp, Homo sapiens
ggacgccagagctca

SEQ ID NO: 983114 - DNA, 15 bp, Homo sapiens
gacgccagagctcag

SEQ ID NO: 983115 - DNA, 15 bp, Homo sapiens
acgccagagctcagg

SEQ ID NO: 983116 - DNA, 15 bp, Homo sapiens
cgccagagctcaggg

SEQ ID NO: 983117 - DNA, 15 bp, Homo sapiens
gccagagctcagggc

SEQ ID NO: 983118 - DNA, 15 bp, Homo sapiens
ccagagctcagggct

SEQ ID NO: 983119 - DNA, 15 bp, Homo sapiens
cagagctcagggctc

SEQ ID NO: 983120 - DNA, 15 bp, Homo sapiens
agagctcagggctcc

SEQ ID NO: 983121 - DNA, 15 bp, Homo sapiens
gagctcagggctcct

SEQ ID NO: 983122 - DNA, 15 bp, Homo sapiens
agctcagggctcctc

SEQ ID NO: 983123 - DNA, 15 bp, Homo sapiens
gctcagggctcctcc

SEQ ID NO: 983124 - DNA, 15 bp, Homo sapiens
ctcagggctcctccc

SEQ ID NO: 983125 - DNA, 15 bp, Homo sapiens
tcagggctcctccca

SEQ ID NO: 983126 - DNA, 15 bp, Homo sapiens
cagggctcctcccat

SEQ ID NO: 983127 - DNA, 15 bp, Homo sapiens
agggctcctcccatt

SEQ ID NO: 983128 - DNA, 15 bp, Homo sapiens
gggctcctcccattt

SEQ ID NO: 983129 - DNA, 15 bp, Homo sapiens
ggctcctcccatttc

SEQ ID NO: 983130 - DNA, 15 bp, Homo sapiens
gctcctcccatttca

SEQ ID NO: 983131 - DNA, 15 bp, Homo sapiens
ctcctcccatttcac

SEQ ID NO: 983132 - DNA, 15 bp, Homo sapiens
tcctcccatttcacg

SEQ ID NO: 983133 - DNA, 15 bp, Homo sapiens
cctcccatttcacgg

SEQ ID NO: 983134 - DNA, 15 bp, Homo sapiens
ctcccatttcacggc

SEQ ID NO: 983135 - DNA, 15 bp, Homo sapiens
tcccatttcacggcc

SEQ ID NO: 983136 - DNA, 15 bp, Homo sapiens
cccatttcacggcct

SEQ ID NO: 983137 - DNA, 15 bp, Homo sapiens
ccatttcacggcctc

SEQ ID NO: 983138 - DNA, 15 bp, Homo sapiens
catttcacggcctca

SEQ ID NO: 983139 - DNA, 15 bp, Homo sapiens
atttcacggcctcac

SEQ ID NO: 983140 - DNA, 15 bp, Homo sapiens
tttcacggcctcaca

SEQ ID NO: 983141 - DNA, 15 bp, Homo sapiens
ttcacggcctcacaa

SEQ ID NO: 983142 - DNA, 15 bp, Homo sapiens
tcacggcctcacaac

SEQ ID NO: 983143 - DNA, 15 bp, Homo sapiens
cacggcctcacaacg

SEQ ID NO: 983144 - DNA, 15 bp, Homo sapiens
acggcctcacaacgg

SEQ ID NO: 983145 - DNA, 15 bp, Homo sapiens
cggcctcacaacggt

SEQ ID NO: 983146 - DNA, 15 bp, Homo sapiens
ggcctcacaacggta

SEQ ID NO: 983147 - DNA, 15 bp, Homo sapiens
gcctcacaacggtaa

SEQ ID NO: 983148 - DNA, 15 bp, Homo sapiens
cctcacaacggtaac

SEQ ID NO: 983149 - DNA, 15 bp, Homo sapiens
ctcacaacggtaacc

SEQ ID NO: 983150 - DNA, 15 bp, Homo sapiens
tcacaacggtaacca

SEQ ID NO: 983151 - DNA, 15 bp, Homo sapiens
cacaacggtaaccac

SEQ ID NO: 983152 - DNA, 15 bp, Homo sapiens
acaacggtaaccacc

SEQ ID NO: 983153 - DNA, 15 bp, Homo sapiens
caacggtaaccaccc

SEQ ID NO: 983154 - DNA, 15 bp, Homo sapiens
aacggtaaccaccca

SEQ ID NO: 983155 - DNA, 15 bp, Homo sapiens
acggtaaccacccac

SEQ ID NO: 983156 - DNA, 15 bp, Homo sapiens
cggtaaccacccacc

SEQ ID NO: 983157 - DNA, 15 bp, Homo sapiens
ggtaaccacccaccc

SEQ ID NO: 983158 - DNA, 15 bp, Homo sapiens
gtaaccacccacccc

SEQ ID NO: 983159 - DNA, 15 bp, Homo sapiens
taaccacccacccct

SEQ ID NO: 983160 - DNA, 15 bp, Homo sapiens
aaccacccacccctt

SEQ ID NO: 983161 - DNA, 15 bp, Homo sapiens
accacccaccccttc

SEQ ID NO: 983162 - DNA, 15 bp, Homo sapiens
ccacccaccccttct

SEQ ID NO: 983163 - DNA, 15 bp, Homo sapiens
cacccaccccttctg

SEQ ID NO: 983164 - DNA, 15 bp, Homo sapiens
acccaccccttctgg

SEQ ID NO: 983165 - DNA, 15 bp, Homo sapiens
cccaccccttctggc

SEQ ID NO: 983166 - DNA, 15 bp, Homo sapiens
ccaccccttctggcc

SEQ ID NO: 983167 - DNA, 15 bp, Homo sapiens
caccccttctggccc

SEQ ID NO: 983168 - DNA, 15 bp, Homo sapiens
accccttctggccct

SEQ ID NO: 983169 - DNA, 15 bp, Homo sapiens
ccccttctggccctt

SEQ ID NO: 983170 - DNA, 15 bp, Homo sapiens
cccttctggcccttc

SEQ ID NO: 983171 - DNA, 15 bp, Homo sapiens
ccttctggcccttcc

SEQ ID NO: 983172 - DNA, 15 bp, Homo sapiens
cttctggcccttccc

SEQ ID NO: 983173 - DNA, 15 bp, Homo sapiens
ttctggcccttccct

SEQ ID NO: 983174 - DNA, 15 bp, Homo sapiens
tctggcccttccctc

SEQ ID NO: 983175 - DNA, 15 bp, Homo sapiens
ctggcccttccctct

SEQ ID NO: 983176 - DNA, 15 bp, Homo sapiens
tggcccttccctctc

SEQ ID NO: 983177 - DNA, 15 bp, Homo sapiens
ggcccttccctctcc

SEQ ID NO: 983178 - DNA, 15 bp, Homo sapiens
gcccttccctctcca

SEQ ID NO: 983179 - DNA, 15 bp, Homo sapiens
cccttccctctccag

SEQ ID NO: 983180 - DNA, 15 bp, Homo sapiens
ccttccctctccagc

SEQ ID NO: 983181 - DNA, 15 bp, Homo sapiens
cttccctctccagct

SEQ ID NO: 983182 - DNA, 15 bp, Homo sapiens
ttccctctccagcta

SEQ ID NO: 983183 - DNA, 15 bp, Homo sapiens
tccctctccagctac

SEQ ID NO: 983184 - DNA, 15 bp, Homo sapiens
ccctctccagctaca

SEQ ID NO: 983185 - DNA, 15 bp, Homo sapiens
cctctccagctacaa

SEQ ID NO: 983186 - DNA, 15 bp, Homo sapiens
ctctccagctacaac

SEQ ID NO: 983187 - DNA, 15 bp, Homo sapiens
tctccagctacaacc

SEQ ID NO: 983188 - DNA, 15 bp, Homo sapiens
ctccagctacaaccc

SEQ ID NO: 983189 - DNA, 15 bp, Homo sapiens
tccagctacaaccca

SEQ ID NO: 983190 - DNA, 15 bp, Homo sapiens
ccagctacaacccac

SEQ ID NO: 983191 - DNA, 15 bp, Homo sapiens
cagctacaacccacc

SEQ ID NO: 983192 - DNA, 15 bp, Homo sapiens
agctacaacccacct

SEQ ID NO: 983193 - DNA, 15 bp, Homo sapiens
gctacaacccaccta

SEQ ID NO: 983194 - DNA, 15 bp, Homo sapiens
ctacaacccacctat

SEQ ID NO: 983195 - DNA, 15 bp, Homo sapiens
tacaacccacctatc

SEQ ID NO: 983196 - DNA, 15 bp, Homo sapiens
acaacccacctatca

SEQ ID NO: 983197 - DNA, 15 bp, Homo sapiens
caacccacctatcaa

SEQ ID NO: 983198 - DNA, 15 bp, Homo sapiens
aacccacctatcaag

SEQ ID NO: 983199 - DNA, 15 bp, Homo sapiens
acccacctatcaaga

SEQ ID NO: 983200 - DNA, 15 bp, Homo sapiens
cccacctatcaagat

SEQ ID NO: 983201 - DNA, 15 bp, Homo sapiens
ccacctatcaagata

SEQ ID NO: 983202 - DNA, 15 bp, Homo sapiens
cacctatcaagataa

SEQ ID NO: 983203 - DNA, 15 bp, Homo sapiens
acctatcaagataaa

SEQ ID NO: 983204 - DNA, 15 bp, Homo sapiens
cctatcaagataaag

SEQ ID NO: 983205 - DNA, 15 bp, Homo sapiens
ctatcaagataaaga

SEQ ID NO: 983206 - DNA, 15 bp, Homo sapiens
tatcaagataaagaa

SEQ ID NO: 983207 - DNA, 15 bp, Homo sapiens
atcaagataaagaac

SEQ ID NO: 983208 - DNA, 15 bp, Homo sapiens
tcaagataaagaact

SEQ ID NO: 983209 - DNA, 15 bp, Homo sapiens
caagataaagaactt

SEQ ID NO: 983210 - DNA, 15 bp, Homo sapiens
aagataaagaacttc

SEQ ID NO: 983211 - DNA, 15 bp, Homo sapiens
agataaagaacttcc

SEQ ID NO: 983212 - DNA, 15 bp, Homo sapiens
gataaagaacttcct

SEQ ID NO: 983213 - DNA, 15 bp, Homo sapiens
ataaagaacttcctt

SEQ ID NO: 983214 - DNA, 15 bp, Homo sapiens
taaagaacttccttt

SEQ ID NO: 983215 - DNA, 15 bp, Homo sapiens
aaagaacttccttta

SEQ ID NO: 983216 - DNA, 15 bp, Homo sapiens
aagaacttcctttag

SEQ ID NO: 983217 - DNA, 15 bp, Homo sapiens
agaacttcctttagc

SEQ ID NO: 983218 - DNA, 15 bp, Homo sapiens
gaacttcctttagct

SEQ ID NO: 983219 - DNA, 15 bp, Homo sapiens
aacttcctttagctc

SEQ ID NO: 983220 - DNA, 15 bp, Homo sapiens
acttcctttagctca

SEQ ID NO: 983221 - DNA, 15 bp, Homo sapiens
cttcctttagctcag

SEQ ID NO: 983222 - DNA, 15 bp, Homo sapiens
ttcctttagctcagt

SEQ ID NO: 983223 - DNA, 15 bp, Homo sapiens
tcctttagctcagtg

SEQ ID NO: 983224 - DNA, 15 bp, Homo sapiens
cctttagctcagtgc

SEQ ID NO: 983225 - DNA, 15 bp, Homo sapiens
ctttagctcagtgct

SEQ ID NO: 983226 - DNA, 15 bp, Homo sapiens
tttagctcagtgctg

SEQ ID NO: 983227 - DNA, 15 bp, Homo sapiens
ttagctcagtgctgc

SEQ ID NO: 983228 - DNA, 15 bp, Homo sapiens
tagctcagtgctgct

SEQ ID NO: 983229 - DNA, 15 bp, Homo sapiens
agctcagtgctgctt

SEQ ID NO: 983230 - DNA, 15 bp, Homo sapiens
gctcagtgctgcttg

SEQ ID NO: 983231 - DNA, 15 bp, Homo sapiens
ctcagtgctgcttgg

SEQ ID NO: 983232 - DNA, 15 bp, Homo sapiens
tcagtgctgcttggc

SEQ ID NO: 983233 - DNA, 15 bp, Homo sapiens
cagtgctgcttggct

SEQ ID NO: 983234 - DNA, 15 bp, Homo sapiens
agtgctgcttggctc

SEQ ID NO: 983235 - DNA, 15 bp, Homo sapiens
gtgctgcttggctcc

SEQ ID NO: 983236 - DNA, 15 bp, Homo sapiens
tgctgcttggctcct

SEQ ID NO: 983237 - DNA, 15 bp, Homo sapiens
gctgcttggctcctc

SEQ ID NO: 983238 - DNA, 15 bp, Homo sapiens
ctgcttggctcctcc

SEQ ID NO: 983239 - DNA, 15 bp, Homo sapiens
tgcttggctcctccc

SEQ ID NO: 983240 - DNA, 15 bp, Homo sapiens
gcttggctcctccca

SEQ ID NO: 983241 - DNA, 15 bp, Homo sapiens
cttggctcctcccac

SEQ ID NO: 983242 - DNA, 15 bp, Homo sapiens
ttggctcctcccact

SEQ ID NO: 983243 - DNA, 15 bp, Homo sapiens
tggctcctcccactt

SEQ ID NO: 983244 - DNA, 15 bp, Homo sapiens
ggctcctcccacttc

SEQ ID NO: 983245 - DNA, 15 bp, Homo sapiens
gctcctcccacttca

SEQ ID NO: 983246 - DNA, 15 bp, Homo sapiens
ctcctcccacttcag

SEQ ID NO: 983247 - DNA, 15 bp, Homo sapiens
tcctcccacttcagt

SEQ ID NO: 983248 - DNA, 15 bp, Homo sapiens
cctcccacttcagtc

SEQ ID NO: 983249 - DNA, 15 bp, Homo sapiens
ctcccacttcagtcc

SEQ ID NO: 983250 - DNA, 15 bp, Homo sapiens
tcccacttcagtccc

SEQ ID NO: 983251 - DNA, 15 bp, Homo sapiens
cccacttcagtcccc

SEQ ID NO: 983252 - DNA, 15 bp, Homo sapiens
ccacttcagtcccca

SEQ ID NO: 983253 - DNA, 15 bp, Homo sapiens
cacttcagtccccac

SEQ ID NO: 983254 - DNA, 15 bp, Homo sapiens
acttcagtccccacc

SEQ ID NO: 983255 - DNA, 15 bp, Homo sapiens
cttcagtccccaccc

SEQ ID NO: 983256 - DNA, 15 bp, Homo sapiens
ttcagtccccaccca

SEQ ID NO: 983257 - DNA, 15 bp, Homo sapiens
tcagtccccacccac

SEQ ID NO: 983258 - DNA, 15 bp, Homo sapiens
cagtccccacccacc

SEQ ID NO: 983259 - DNA, 15 bp, Homo sapiens
agtccccacccaccc

SEQ ID NO: 983260 - DNA, 15 bp, Homo sapiens
gtccccacccacccc

SEQ ID NO: 983261 - DNA, 15 bp, Homo sapiens
tccccacccaccccc

SEQ ID NO: 983262 - DNA, 15 bp, Homo sapiens
ccccacccaccccct

SEQ ID NO: 983263 - DNA, 15 bp, Homo sapiens
cccacccaccccctt

SEQ ID NO: 983264 - DNA, 15 bp, Homo sapiens
ccacccacccccttt

SEQ ID NO: 983265 - DNA, 15 bp, Homo sapiens
cacccaccccctttg

SEQ ID NO: 983266 - DNA, 15 bp, Homo sapiens
acccaccccctttgg

SEQ ID NO: 983267 - DNA, 15 bp, Homo sapiens
cccaccccctttggc

SEQ ID NO: 983268 - DNA, 15 bp, Homo sapiens
ccaccccctttggcc

SEQ ID NO: 983269 - DNA, 15 bp, Homo sapiens
caccccctttggcca

SEQ ID NO: 983270 - DNA, 15 bp, Homo sapiens
accccctttggccac

SEQ ID NO: 983271 - DNA, 15 bp, Homo sapiens
ccccctttggccact

SEQ ID NO: 983272 - DNA, 15 bp, Homo sapiens
cccctttggccactc

SEQ ID NO: 983273 - DNA, 15 bp, Homo sapiens
ccctttggccactcc

SEQ ID NO: 983274 - DNA, 15 bp, Homo sapiens
cctttggccactcct

SEQ ID NO: 983275 - DNA, 15 bp, Homo sapiens
ctttggccactccta

SEQ ID NO: 983276 - DNA, 15 bp, Homo sapiens
tttggccactcctag

SEQ ID NO: 983277 - DNA, 15 bp, Homo sapiens
ttggccactcctagt

SEQ ID NO: 983278 - DNA, 15 bp, Homo sapiens
tggccactcctagtc

SEQ ID NO: 983279 - DNA, 15 bp, Homo sapiens
ggccactcctagtcc

SEQ ID NO: 983280 - DNA, 15 bp, Homo sapiens
gccactcctagtcca

SEQ ID NO: 983281 - DNA, 15 bp, Homo sapiens
ccactcctagtccaa

SEQ ID NO: 983282 - DNA, 15 bp, Homo sapiens
cactcctagtccaag

SEQ ID NO: 983283 - DNA, 15 bp, Homo sapiens
actcctagtccaagc

SEQ ID NO: 983284 - DNA, 15 bp, Homo sapiens
ctcctagtccaagct

SEQ ID NO: 983285 - DNA, 15 bp, Homo sapiens
tcctagtccaagcta

SEQ ID NO: 983286 - DNA, 15 bp, Homo sapiens
cctagtccaagctag

SEQ ID NO: 983287 - DNA, 15 bp, Homo sapiens
ctagtccaagctaga

SEQ ID NO: 983288 - DNA, 15 bp, Homo sapiens
tagtccaagctagaa

SEQ ID NO: 983289 - DNA, 15 bp, Homo sapiens
agtccaagctagaaa

SEQ ID NO: 983290 - DNA, 15 bp, Homo sapiens
gtccaagctagaaac

SEQ ID NO: 983291 - DNA, 15 bp, Homo sapiens
tccaagctagaaaca

SEQ ID NO: 983292 - DNA, 15 bp, Homo sapiens
ccaagctagaaacaa

SEQ ID NO: 983293 - DNA, 15 bp, Homo sapiens
caagctagaaacaag

SEQ ID NO: 983294 - DNA, 15 bp, Homo sapiens
aagctagaaacaagc

SEQ ID NO: 983295 - DNA, 15 bp, Homo sapiens
agctagaaacaagca

SEQ ID NO: 983296 - DNA, 15 bp, Homo sapiens
gctagaaacaagcat

SEQ ID NO: 983297 - DNA, 15 bp, Homo sapiens
ctagaaacaagcatc

SEQ ID NO: 983298 - DNA, 15 bp, Homo sapiens
tagaaacaagcatcc

SEQ ID NO: 983299 - DNA, 15 bp, Homo sapiens
agaaacaagcatcca

SEQ ID NO: 983300 - DNA, 15 bp, Homo sapiens
gaaacaagcatccaa

SEQ ID NO: 983301 - DNA, 15 bp, Homo sapiens
aaacaagcatccaaa

SEQ ID NO: 983302 - DNA, 15 bp, Homo sapiens
aacaagcatccaaac

SEQ ID NO: 983303 - DNA, 15 bp, Homo sapiens
acaagcatccaaaca

SEQ ID NO: 983304 - DNA, 15 bp, Homo sapiens
caagcatccaaacaa

SEQ ID NO: 983305 - DNA, 15 bp, Homo sapiens
aagcatccaaacaaa

SEQ ID NO: 983306 - DNA, 15 bp, Homo sapiens
agcatccaaacaaaa

SEQ ID NO: 983307 - DNA, 15 bp, Homo sapiens
gcatccaaacaaaac

SEQ ID NO: 983308 - DNA, 15 bp, Homo sapiens
catccaaacaaaacc

SEQ ID NO: 983309 - DNA, 15 bp, Homo sapiens
atccaaacaaaacca

SEQ ID NO: 983310 - DNA, 15 bp, Homo sapiens
tccaaacaaaaccaa

SEQ ID NO: 983311 - DNA, 15 bp, Homo sapiens
ccaaacaaaaccaac

SEQ ID NO: 983312 - DNA, 15 bp, Homo sapiens
caaacaaaaccaacc

SEQ ID NO: 983313 - DNA, 15 bp, Homo sapiens
aaacaaaaccaacct

SEQ ID NO: 983314 - DNA, 15 bp, Homo sapiens
aacaaaaccaacctg

SEQ ID NO: 983315 - DNA, 15 bp, Homo sapiens
acaaaaccaacctgt

SEQ ID NO: 983316 - DNA, 15 bp, Homo sapiens
caaaaccaacctgtt

SEQ ID NO: 983317 - DNA, 15 bp, Homo sapiens
aaaaccaacctgttc

SEQ ID NO: 983318 - DNA, 15 bp, Homo sapiens
aaaccaacctgttct

SEQ ID NO: 983319 - DNA, 15 bp, Homo sapiens
aaccaacctgttctg

SEQ ID NO: 983320 - DNA, 15 bp, Homo sapiens
accaacctgttctgc

SEQ ID NO: 983321 - DNA, 15 bp, Homo sapiens
ccaacctgttctgcc

SEQ ID NO: 983322 - DNA, 15 bp, Homo sapiens
caacctgttctgccc

SEQ ID NO: 983323 - DNA, 15 bp, Homo sapiens
aacctgttctgcccc

SEQ ID NO: 983324 - DNA, 15 bp, Homo sapiens
acctgttctgccccg

SEQ ID NO: 983325 - DNA, 15 bp, Homo sapiens
cctgttctgccccgc

SEQ ID NO: 983326 - DNA, 15 bp, Homo sapiens
ctgttctgccccgcc

SEQ ID NO: 983327 - DNA, 15 bp, Homo sapiens
tgttctgccccgccc

SEQ ID NO: 983328 - DNA, 15 bp, Homo sapiens
gttctgccccgccca

SEQ ID NO: 983329 - DNA, 15 bp, Homo sapiens
ttctgccccgcccac

SEQ ID NO: 983330 - DNA, 15 bp, Homo sapiens
tctgccccgcccacc

SEQ ID NO: 983331 - DNA, 15 bp, Homo sapiens
ctgccccgcccacct

SEQ ID NO: 983332 - DNA, 15 bp, Homo sapiens
tgccccgcccacctc

SEQ ID NO: 983333 - DNA, 15 bp, Homo sapiens
gccccgcccacctct

SEQ ID NO: 983334 - DNA, 15 bp, Homo sapiens
ccccgcccacctctc

SEQ ID NO: 983335 - DNA, 15 bp, Homo sapiens
cccgcccacctctct

SEQ ID NO: 983336 - DNA, 15 bp, Homo sapiens
ccgcccacctctcta

SEQ ID NO: 983337 - DNA, 15 bp, Homo sapiens
cgcccacctctctag

SEQ ID NO: 983338 - DNA, 15 bp, Homo sapiens
gcccacctctctagc

SEQ ID NO: 983339 - DNA, 15 bp, Homo sapiens
cccacctctctagct

SEQ ID NO: 983340 - DNA, 15 bp, Homo sapiens
ccacctctctagctc

SEQ ID NO: 983341 - DNA, 15 bp, Homo sapiens
cacctctctagctcc

SEQ ID NO: 983342 - DNA, 15 bp, Homo sapiens
acctctctagctcct

SEQ ID NO: 983343 - DNA, 15 bp, Homo sapiens
cctctctagctcctc

SEQ ID NO: 983344 - DNA, 15 bp, Homo sapiens
ctctctagctcctcc

SEQ ID NO: 983345 - DNA, 15 bp, Homo sapiens
tctctagctcctccc

SEQ ID NO: 983346 - DNA, 15 bp, Homo sapiens
ctctagctcctccct

SEQ ID NO: 983347 - DNA, 15 bp, Homo sapiens
tctagctcctccctc

SEQ ID NO: 983348 - DNA, 15 bp, Homo sapiens
ctagctcctccctct

SEQ ID NO: 983349 - DNA, 15 bp, Homo sapiens
tagctcctccctctt

SEQ ID NO: 983350 - DNA, 15 bp, Homo sapiens
agctcctccctcttc

SEQ ID NO: 983351 - DNA, 15 bp, Homo sapiens
gctcctccctcttcc

SEQ ID NO: 983352 - DNA, 15 bp, Homo sapiens
ctcctccctcttcca

SEQ ID NO: 983353 - DNA, 15 bp, Homo sapiens
tcctccctcttccac

SEQ ID NO: 983354 - DNA, 15 bp, Homo sapiens
cctccctcttccact

SEQ ID NO: 983355 - DNA, 15 bp, Homo sapiens
ctccctcttccacta

SEQ ID NO: 983356 - DNA, 15 bp, Homo sapiens
tccctcttccactac

SEQ ID NO: 983357 - DNA, 15 bp, Homo sapiens
ccctcttccactaca

SEQ ID NO: 983358 - DNA, 15 bp, Homo sapiens
cctcttccactacaa

SEQ ID NO: 983359 - DNA, 15 bp, Homo sapiens
ctcttccactacaat

SEQ ID NO: 983360 - DNA, 15 bp, Homo sapiens
tcttccactacaatc

SEQ ID NO: 983361 - DNA, 15 bp, Homo sapiens
cttccactacaatcc

SEQ ID NO: 983362 - DNA, 15 bp, Homo sapiens
ttccactacaatcca

SEQ ID NO: 983363 - DNA, 15 bp, Homo sapiens
tccactacaatccac

SEQ ID NO: 983364 - DNA, 15 bp, Homo sapiens
ccactacaatccacc

SEQ ID NO: 983365 - DNA, 15 bp, Homo sapiens
cactacaatccacct

SEQ ID NO: 983366 - DNA, 15 bp, Homo sapiens
actacaatccaccta

SEQ ID NO: 983367 - DNA, 15 bp, Homo sapiens
ctacaatccacctat

SEQ ID NO: 983368 - DNA, 15 bp, Homo sapiens
tacaatccacctatc

SEQ ID NO: 983369 - DNA, 15 bp, Homo sapiens
acaatccacctatca

SEQ ID NO: 983370 - DNA, 15 bp, Homo sapiens
caatccacctatcaa

SEQ ID NO: 983371 - DNA, 15 bp, Homo sapiens
aatccacctatcaag

SEQ ID NO: 983372 - DNA, 15 bp, Homo sapiens
atccacctatcaaga

SEQ ID NO: 983373 - DNA, 15 bp, Homo sapiens
tccacctatcaagat

SEQ ID NO: 983374 - DNA, 15 bp, Homo sapiens
cacctatcaagatag

SEQ ID NO: 983375 - DNA, 15 bp, Homo sapiens
acctatcaagataga

SEQ ID NO: 983376 - DNA, 15 bp, Homo sapiens
cctatcaagatagaa

SEQ ID NO: 983377 - DNA, 15 bp, Homo sapiens
ctatcaagatagaac

SEQ ID NO: 983378 - DNA, 15 bp, Homo sapiens
tatcaagatagaact

SEQ ID NO: 983379 - DNA, 15 bp, Homo sapiens
atcaagatagaactt

SEQ ID NO: 983380 - DNA, 15 bp, Homo sapiens
tcaagatagaacttc

SEQ ID NO: 983381 - DNA, 15 bp, Homo sapiens
caagatagaacttcc

SEQ ID NO: 983382 - DNA, 15 bp, Homo sapiens
aagatagaacttcct

SEQ ID NO: 983383 - DNA, 15 bp, Homo sapiens
agatagaacttcctt

SEQ ID NO: 983384 - DNA, 15 bp, Homo sapiens
gatagaacttccttt

SEQ ID NO: 983385 - DNA, 15 bp, Homo sapiens
atagaacttccttta

SEQ ID NO: 983386 - DNA, 15 bp, Homo sapiens
tagaacttcctttag

SEQ ID NO: 983387 - DNA, 15 bp, Homo sapiens
acttcctttagctcc

SEQ ID NO: 983388 - DNA, 15 bp, Homo sapiens
cttcctttagctcct

SEQ ID NO: 983389 - DNA, 15 bp, Homo sapiens
ttcctttagctcctc

SEQ ID NO: 983390 - DNA, 15 bp, Homo sapiens
tcctttagctcctcc

SEQ ID NO: 983391 - DNA, 15 bp, Homo sapiens
cctttagctcctcct

SEQ ID NO: 983392 - DNA, 15 bp, Homo sapiens
ctttagctcctccta

SEQ ID NO: 983393 - DNA, 15 bp, Homo sapiens
tttagctcctcctac

SEQ ID NO: 983394 - DNA, 15 bp, Homo sapiens
ttagctcctcctact

SEQ ID NO: 983395 - DNA, 15 bp, Homo sapiens
tagctcctcctactt

SEQ ID NO: 983396 - DNA, 15 bp, Homo sapiens
agctcctcctacttc

SEQ ID NO: 983397 - DNA, 15 bp, Homo sapiens
gctcctcctacttca

SEQ ID NO: 983398 - DNA, 15 bp, Homo sapiens
ctcctcctacttcag

SEQ ID NO: 983399 - DNA, 15 bp, Homo sapiens
tcctcctacttcagg

SEQ ID NO: 983400 - DNA, 15 bp, Homo sapiens
cctcctacttcaggc

SEQ ID NO: 983401 - DNA, 15 bp, Homo sapiens
ctcctacttcaggcc

SEQ ID NO: 983402 - DNA, 15 bp, Homo sapiens
tcctacttcaggccc

SEQ ID NO: 983403 - DNA, 15 bp, Homo sapiens
cctacttcaggcccc

SEQ ID NO: 983404 - DNA, 15 bp, Homo sapiens
ctacttcaggccccg

SEQ ID NO: 983405 - DNA, 15 bp, Homo sapiens
tacttcaggccccgc

SEQ ID NO: 983406 - DNA, 15 bp, Homo sapiens
acttcaggccccgcc

SEQ ID NO: 983407 - DNA, 15 bp, Homo sapiens
cttcaggccccgccc

SEQ ID NO: 983408 - DNA, 15 bp, Homo sapiens
ttcaggccccgccca

SEQ ID NO: 983409 - DNA, 15 bp, Homo sapiens
tcaggccccgcccaa

SEQ ID NO: 983410 - DNA, 15 bp, Homo sapiens
caggccccgcccaac

SEQ ID NO: 983411 - DNA, 15 bp, Homo sapiens
aggccccgcccaact

SEQ ID NO: 983412 - DNA, 15 bp, Homo sapiens
ggccccgcccaactt

SEQ ID NO: 983413 - DNA, 15 bp, Homo sapiens
gccccgcccaacttt

SEQ ID NO: 983414 - DNA, 15 bp, Homo sapiens
ccccgcccaacttta

SEQ ID NO: 983415 - DNA, 15 bp, Homo sapiens
cccgcccaactttag

SEQ ID NO: 983416 - DNA, 15 bp, Homo sapiens
ccgcccaactttagg

SEQ ID NO: 983417 - DNA, 15 bp, Homo sapiens
cgcccaactttaggc

SEQ ID NO: 983418 - DNA, 15 bp, Homo sapiens
gcccaactttaggcc

SEQ ID NO: 983419 - DNA, 15 bp, Homo sapiens
cccaactttaggcca

SEQ ID NO: 983420 - DNA, 15 bp, Homo sapiens
ccaactttaggccac

SEQ ID NO: 983421 - DNA, 15 bp, Homo sapiens
caactttaggccact

SEQ ID NO: 983422 - DNA, 15 bp, Homo sapiens
aactttaggccactc

SEQ ID NO: 983423 - DNA, 15 bp, Homo sapiens
actttaggccactcc

SEQ ID NO: 983424 - DNA, 15 bp, Homo sapiens
ctttaggccactccc

SEQ ID NO: 983425 - DNA, 15 bp, Homo sapiens
tttaggccactccca

SEQ ID NO: 983426 - DNA, 15 bp, Homo sapiens
ttaggccactcccaa

SEQ ID NO: 983427 - DNA, 15 bp, Homo sapiens
taggccactcccaat

SEQ ID NO: 983428 - DNA, 15 bp, Homo sapiens
aggccactcccaatt

SEQ ID NO: 983429 - DNA, 15 bp, Homo sapiens
ggccactcccaattc

SEQ ID NO: 983430 - DNA, 15 bp, Homo sapiens
gccactcccaattct

SEQ ID NO: 983431 - DNA, 15 bp, Homo sapiens
ccactcccaattctg

SEQ ID NO: 983432 - DNA, 15 bp, Homo sapiens
cactcccaattctgg

SEQ ID NO: 983433 - DNA, 15 bp, Homo sapiens
actcccaattctggc

SEQ ID NO: 983434 - DNA, 15 bp, Homo sapiens
ctcccaattctggct

SEQ ID NO: 983435 - DNA, 15 bp, Homo sapiens
tcccaattctggcta

SEQ ID NO: 983436 - DNA, 15 bp, Homo sapiens
cccaattctggctac

SEQ ID NO: 983437 - DNA, 15 bp, Homo sapiens
ccaattctggctaca

SEQ ID NO: 983438 - DNA, 15 bp, Homo sapiens
caattctggctacaa

SEQ ID NO: 983439 - DNA, 15 bp, Homo sapiens
aattctggctacaaa

SEQ ID NO: 983440 - DNA, 15 bp, Homo sapiens
attctggctacaaac

SEQ ID NO: 983441 - DNA, 15 bp, Homo sapiens
ttctggctacaaaca

SEQ ID NO: 983442 - DNA, 15 bp, Homo sapiens
tctggctacaaacac

SEQ ID NO: 983443 - DNA, 15 bp, Homo sapiens
ctggctacaaacact

SEQ ID NO: 983444 - DNA, 15 bp, Homo sapiens
tggctacaaacactc

SEQ ID NO: 983445 - DNA, 15 bp, Homo sapiens
ggctacaaacactca

SEQ ID NO: 983446 - DNA, 15 bp, Homo sapiens
gctacaaacactcat

SEQ ID NO: 983447 - DNA, 15 bp, Homo sapiens
ctacaaacactcatc

SEQ ID NO: 983448 - DNA, 15 bp, Homo sapiens
tacaaacactcatcc

SEQ ID NO: 983449 - DNA, 15 bp, Homo sapiens
acaaacactcatcca

SEQ ID NO: 983450 - DNA, 15 bp, Homo sapiens
caaacactcatccaa

SEQ ID NO: 983451 - DNA, 15 bp, Homo sapiens
aaacactcatccaaa

SEQ ID NO: 983452 - DNA, 15 bp, Homo sapiens
aacactcatccaaac

SEQ ID NO: 983453 - DNA, 15 bp, Homo sapiens
acactcatccaaaca

SEQ ID NO: 983454 - DNA, 15 bp, Homo sapiens
cactcatccaaacaa

SEQ ID NO: 983455 - DNA, 15 bp, Homo sapiens
actcatccaaacaaa

SEQ ID NO: 983456 - DNA, 15 bp, Homo sapiens
ctcatccaaacaaaa

SEQ ID NO: 983457 - DNA, 15 bp, Homo sapiens
tcatccaaacaaaac

SEQ ID NO: 983458 - DNA, 15 bp, Homo sapiens
tccaaacaaaaccat

SEQ ID NO: 983459 - DNA, 15 bp, Homo sapiens
ccaaacaaaaccatt

SEQ ID NO: 983460 - DNA, 15 bp, Homo sapiens
caaacaaaaccattt

SEQ ID NO: 983461 - DNA, 15 bp, Homo sapiens
aaacaaaaccatttt

SEQ ID NO: 983462 - DNA, 15 bp, Homo sapiens
aacaaaaccattttt

SEQ ID NO: 983463 - DNA, 15 bp, Homo sapiens
acaaaaccatttttt

SEQ ID NO: 983464 - DNA, 15 bp, Homo sapiens
caaaaccattttttt

SEQ ID NO: 983465 - DNA, 15 bp, Homo sapiens
aaaaccatttttttt

SEQ ID NO: 983466 - DNA, 15 bp, Homo sapiens
aaaccattttttttt

SEQ ID NO: 983467 - DNA, 15 bp, Homo sapiens
aaccatttttttttt

SEQ ID NO: 983468 - DNA, 15 bp, Homo sapiens
accattttttttttt

SEQ ID NO: 983469 - DNA, 15 bp, Homo sapiens
ccatttttttttttt

SEQ ID NO: 983470 - DNA, 15 bp, Homo sapiens
cattttttttttttt

SEQ ID NO: 983471 - DNA, 15 bp, Homo sapiens
ttttttttgagacga

SEQ ID NO: 983472 - DNA, 15 bp, Homo sapiens
tttttttgagacgaa

SEQ ID NO: 983473 - DNA, 15 bp, Homo sapiens
ttttttgagacgaag

SEQ ID NO: 983474 - DNA, 15 bp, Homo sapiens
tttttgagacgaagt

SEQ ID NO: 983475 - DNA, 15 bp, Homo sapiens
ttttgagacgaagtt

SEQ ID NO: 983476 - DNA, 15 bp, Homo sapiens
tttgagacgaagttt

SEQ ID NO: 983477 - DNA, 15 bp, Homo sapiens
ttgagacgaagtttc

SEQ ID NO: 983478 - DNA, 15 bp, Homo sapiens
tgagacgaagtttcg

SEQ ID NO: 983479 - DNA, 15 bp, Homo sapiens
gagacgaagtttcgc

SEQ ID NO: 983480 - DNA, 15 bp, Homo sapiens
agacgaagtttcgct

SEQ ID NO: 983481 - DNA, 15 bp, Homo sapiens
gacgaagtttcgctc

SEQ ID NO: 983482 - DNA, 15 bp, Homo sapiens
acgaagtttcgctct

SEQ ID NO: 983483 - DNA, 15 bp, Homo sapiens
cgaagtttcgctctt

SEQ ID NO: 983484 - DNA, 15 bp, Homo sapiens
gaagtttcgctcttg

SEQ ID NO: 983485 - DNA, 15 bp, Homo sapiens
aagtttcgctcttgt

SEQ ID NO: 983486 - DNA, 15 bp, Homo sapiens
agtttcgctcttgtc

SEQ ID NO: 983487 - DNA, 15 bp, Homo sapiens
gtttcgctcttgtcg

SEQ ID NO: 983488 - DNA, 15 bp, Homo sapiens
tttcgctcttgtcgc

SEQ ID NO: 983489 - DNA, 15 bp, Homo sapiens
ttcgctcttgtcgcc

SEQ ID NO: 983490 - DNA, 15 bp, Homo sapiens
tcgctcttgtcgccc

SEQ ID NO: 983491 - DNA, 15 bp, Homo sapiens
cgctcttgtcgccca

SEQ ID NO: 983492 - DNA, 15 bp, Homo sapiens
gctcttgtcgcccag

SEQ ID NO: 983493 - DNA, 15 bp, Homo sapiens
ctcttgtcgcccagg

SEQ ID NO: 983494 - DNA, 15 bp, Homo sapiens
tcttgtcgcccaggc

SEQ ID NO: 983495 - DNA, 15 bp, Homo sapiens
cttgtcgcccaggct

SEQ ID NO: 983496 - DNA, 15 bp, Homo sapiens
ttgtcgcccaggctg

SEQ ID NO: 983497 - DNA, 15 bp, Homo sapiens
tgtcgcccaggctgg

SEQ ID NO: 983498 - DNA, 15 bp, Homo sapiens
gtcgcccaggctgga

SEQ ID NO: 983499 - DNA, 15 bp, Homo sapiens
tcgcccaggctggag

SEQ ID NO: 983500 - DNA, 15 bp, Homo sapiens
cgcccaggctggagt

SEQ ID NO: 983501 - DNA, 15 bp, Homo sapiens
ctggagtgcaatggc

SEQ ID NO: 983502 - DNA, 15 bp, Homo sapiens
tggagtgcaatggca

SEQ ID NO: 983503 - DNA, 15 bp, Homo sapiens
ggagtgcaatggcac

SEQ ID NO: 983504 - DNA, 15 bp, Homo sapiens
gagtgcaatggcacg

SEQ ID NO: 983505 - DNA, 15 bp, Homo sapiens
agtgcaatggcacga

SEQ ID NO: 983506 - DNA, 15 bp, Homo sapiens
gtgcaatggcacgat

SEQ ID NO: 983507 - DNA, 15 bp, Homo sapiens
tgcaatggcacgatc

SEQ ID NO: 983508 - DNA, 15 bp, Homo sapiens
gcaatggcacgatct

SEQ ID NO: 983509 - DNA, 15 bp, Homo sapiens
caatggcacgatctc

SEQ ID NO: 983510 - DNA, 15 bp, Homo sapiens
aatggcacgatctcg

SEQ ID NO: 983511 - DNA, 15 bp, Homo sapiens
atggcacgatctcgg

SEQ ID NO: 983512 - DNA, 15 bp, Homo sapiens
tggcacgatctcggc

SEQ ID NO: 983513 - DNA, 15 bp, Homo sapiens
ggcacgatctcggct

SEQ ID NO: 983514 - DNA, 15 bp, Homo sapiens
gcacgatctcggctc

SEQ ID NO: 983515 - DNA, 15 bp, Homo sapiens
cacgatctcggctca

SEQ ID NO: 983516 - DNA, 15 bp, Homo sapiens
acgatctcggctcac

SEQ ID NO: 983517 - DNA, 15 bp, Homo sapiens
cgatctcggctcact

SEQ ID NO: 983518 - DNA, 15 bp, Homo sapiens
gatctcggctcactg

SEQ ID NO: 983519 - DNA, 15 bp, Homo sapiens
tcactgcaacctcta

SEQ ID NO: 983520 - DNA, 15 bp, Homo sapiens
cactgcaacctctac

SEQ ID NO: 983521 - DNA, 15 bp, Homo sapiens
actgcaacctctacc

SEQ ID NO: 983522 - DNA, 15 bp, Homo sapiens
ctgcaacctctacct

SEQ ID NO: 983523 - DNA, 15 bp, Homo sapiens
tgcaacctctacctc

SEQ ID NO: 983524 - DNA, 15 bp, Homo sapiens
gcaacctctacctcc

SEQ ID NO: 983525 - DNA, 15 bp, Homo sapiens
caacctctacctccc

SEQ ID NO: 983526 - DNA, 15 bp, Homo sapiens
aacctctacctcccg

SEQ ID NO: 983527 - DNA, 15 bp, Homo sapiens
acctctacctcccgg

SEQ ID NO: 983528 - DNA, 15 bp, Homo sapiens
cctctacctcccggg

SEQ ID NO: 983529 - DNA, 15 bp, Homo sapiens
ctctacctcccgggt

SEQ ID NO: 983530 - DNA, 15 bp, Homo sapiens
tctacctcccgggtt

SEQ ID NO: 983531 - DNA, 15 bp, Homo sapiens
ctacctcccgggttc

SEQ ID NO: 983532 - DNA, 15 bp, Homo sapiens
tacctcccgggttca

SEQ ID NO: 983533 - DNA, 15 bp, Homo sapiens
acctcccgggttcaa

SEQ ID NO: 983534 - DNA, 15 bp, Homo sapiens
cctcccgggttcaag

SEQ ID NO: 983535 - DNA, 15 bp, Homo sapiens
ctcccgggttcaagc

SEQ ID NO: 983536 - DNA, 15 bp, Homo sapiens
tcccgggttcaagcg

SEQ ID NO: 983537 - DNA, 15 bp, Homo sapiens
cccgggttcaagcga

SEQ ID NO: 983538 - DNA, 15 bp, Homo sapiens
ccgggttcaagcgat

SEQ ID NO: 983539 - DNA, 15 bp, Homo sapiens
cgggttcaagcgatt

SEQ ID NO: 983540 - DNA, 15 bp, Homo sapiens
gggttcaagcgatta

SEQ ID NO: 983541 - DNA, 15 bp, Homo sapiens
ggttcaagcgattac

SEQ ID NO: 983542 - DNA, 15 bp, Homo sapiens
gttcaagcgattacc

SEQ ID NO: 983543 - DNA, 15 bp, Homo sapiens
ttcaagcgattaccg

SEQ ID NO: 983544 - DNA, 15 bp, Homo sapiens
tcaagcgattaccgt

SEQ ID NO: 983545 - DNA, 15 bp, Homo sapiens
caagcgattaccgtg

SEQ ID NO: 983546 - DNA, 15 bp, Homo sapiens
aagcgattaccgtgc

SEQ ID NO: 983547 - DNA, 15 bp, Homo sapiens
agcgattaccgtgct

SEQ ID NO: 983548 - DNA, 15 bp, Homo sapiens
gcgattaccgtgctt

SEQ ID NO: 983549 - DNA, 15 bp, Homo sapiens
cgattaccgtgcttc

SEQ ID NO: 983550 - DNA, 15 bp, Homo sapiens
gattaccgtgcttca

SEQ ID NO: 983551 - DNA, 15 bp, Homo sapiens
attaccgtgcttcag

SEQ ID NO: 983552 - DNA, 15 bp, Homo sapiens
ttaccgtgcttcagc

SEQ ID NO: 983553 - DNA, 15 bp, Homo sapiens
taccgtgcttcagct

SEQ ID NO: 983554 - DNA, 15 bp, Homo sapiens
accgtgcttcagctt

SEQ ID NO: 983555 - DNA, 15 bp, Homo sapiens
ccgtgcttcagcttc

SEQ ID NO: 983556 - DNA, 15 bp, Homo sapiens
cgtgcttcagcttcg

SEQ ID NO: 983557 - DNA, 15 bp, Homo sapiens
gtgcttcagcttcgt

SEQ ID NO: 983558 - DNA, 15 bp, Homo sapiens
tgcttcagcttcgtg

SEQ ID NO: 983559 - DNA, 15 bp, Homo sapiens
gcttcagcttcgtga

SEQ ID NO: 983560 - DNA, 15 bp, Homo sapiens
cttcagcttcgtgag

SEQ ID NO: 983561 - DNA, 15 bp, Homo sapiens
ttcagcttcgtgagt

SEQ ID NO: 983562 - DNA, 15 bp, Homo sapiens
tcagcttcgtgagta

SEQ ID NO: 983563 - DNA, 15 bp, Homo sapiens
cagcttcgtgagtag

SEQ ID NO: 983564 - DNA, 15 bp, Homo sapiens
agcttcgtgagtagc

SEQ ID NO: 983565 - DNA, 15 bp, Homo sapiens
gcttcgtgagtagcc

SEQ ID NO: 983566 - DNA, 15 bp, Homo sapiens
cttcgtgagtagcct

SEQ ID NO: 983567 - DNA, 15 bp, Homo sapiens
ttcgtgagtagcctc

SEQ ID NO: 983568 - DNA, 15 bp, Homo sapiens
tcgtgagtagcctcc

SEQ ID NO: 983569 - DNA, 15 bp, Homo sapiens
cgtgagtagcctcct

SEQ ID NO: 983570 - DNA, 15 bp, Homo sapiens
gtgagtagcctcctg

SEQ ID NO: 983571 - DNA, 15 bp, Homo sapiens
tgagtagcctcctga

SEQ ID NO: 983572 - DNA, 15 bp, Homo sapiens
gagtagcctcctgag

SEQ ID NO: 983573 - DNA, 15 bp, Homo sapiens
agtagcctcctgagt

SEQ ID NO: 983574 - DNA, 15 bp, Homo sapiens
gtagcctcctgagta

SEQ ID NO: 983575 - DNA, 15 bp, Homo sapiens
tagcctcctgagtag

SEQ ID NO: 983576 - DNA, 15 bp, Homo sapiens
agcctcctgagtagg

SEQ ID NO: 983577 - DNA, 15 bp, Homo sapiens
gcctcctgagtaggt

SEQ ID NO: 983578 - DNA, 15 bp, Homo sapiens
cctcctgagtaggtg

SEQ ID NO: 983579 - DNA, 15 bp, Homo sapiens
ctcctgagtaggtgg

SEQ ID NO: 983580 - DNA, 15 bp, Homo sapiens
tcctgagtaggtggg

SEQ ID NO: 983581 - DNA, 15 bp, Homo sapiens
cctgagtaggtggga

SEQ ID NO: 983582 - DNA, 15 bp, Homo sapiens
ctgagtaggtgggac

SEQ ID NO: 983583 - DNA, 15 bp, Homo sapiens
tgagtaggtgggact

SEQ ID NO: 983584 - DNA, 15 bp, Homo sapiens
gagtaggtgggacta

SEQ ID NO: 983585 - DNA, 15 bp, Homo sapiens
agtaggtgggactac

SEQ ID NO: 983586 - DNA, 15 bp, Homo sapiens
gtaggtgggactaca

SEQ ID NO: 983587 - DNA, 15 bp, Homo sapiens
taggtgggactacag

SEQ ID NO: 983588 - DNA, 15 bp, Homo sapiens
aggtgggactacagg

SEQ ID NO: 983589 - DNA, 15 bp, Homo sapiens
ggtgggactacagga

SEQ ID NO: 983590 - DNA, 15 bp, Homo sapiens
gtgggactacaggag

SEQ ID NO: 983591 - DNA, 15 bp, Homo sapiens
tgggactacaggagt

SEQ ID NO: 983592 - DNA, 15 bp, Homo sapiens
gggactacaggagtg

SEQ ID NO: 983593 - DNA, 15 bp, Homo sapiens
ggactacaggagtga

SEQ ID NO: 983594 - DNA, 15 bp, Homo sapiens
gactacaggagtgag

SEQ ID NO: 983595 - DNA, 15 bp, Homo sapiens
actacaggagtgagc

SEQ ID NO: 983596 - DNA, 15 bp, Homo sapiens
ctacaggagtgagcc

SEQ ID NO: 983597 - DNA, 15 bp, Homo sapiens
tacaggagtgagcca

SEQ ID NO: 983598 - DNA, 15 bp, Homo sapiens
acaggagtgagccac

SEQ ID NO: 983599 - DNA, 15 bp, Homo sapiens
caggagtgagccacc

SEQ ID NO: 983600 - DNA, 15 bp, Homo sapiens
aggagtgagccacca

SEQ ID NO: 983601 - DNA, 15 bp, Homo sapiens
ggagtgagccaccac

SEQ ID NO: 983602 - DNA, 15 bp, Homo sapiens
gagtgagccaccact

SEQ ID NO: 983603 - DNA, 15 bp, Homo sapiens
agtgagccaccactc

SEQ ID NO: 983604 - DNA, 15 bp, Homo sapiens
gtgagccaccactcc

SEQ ID NO: 983605 - DNA, 15 bp, Homo sapiens
tgagccaccactccc

SEQ ID NO: 983606 - DNA, 15 bp, Homo sapiens
gagccaccactccca

SEQ ID NO: 983607 - DNA, 15 bp, Homo sapiens
agccaccactcccag

SEQ ID NO: 983608 - DNA, 15 bp, Homo sapiens
gccaccactcccagc

SEQ ID NO: 983609 - DNA, 15 bp, Homo sapiens
ccaccactcccagct

SEQ ID NO: 983610 - DNA, 15 bp, Homo sapiens
caccactcccagcta

SEQ ID NO: 983611 - DNA, 15 bp, Homo sapiens
accactcccagctaa

SEQ ID NO: 983612 - DNA, 15 bp, Homo sapiens
ccactcccagctaat

SEQ ID NO: 983613 - DNA, 15 bp, Homo sapiens
cactcccagctaatt

SEQ ID NO: 983614 - DNA, 15 bp, Homo sapiens
actcccagctaattt

SEQ ID NO: 983615 - DNA, 15 bp, Homo sapiens
ctcccagctaatttt

SEQ ID NO: 983616 - DNA, 15 bp, Homo sapiens
tcccagctaattttt

SEQ ID NO: 983617 - DNA, 15 bp, Homo sapiens
agagatggggtttca

SEQ ID NO: 983618 - DNA, 15 bp, Homo sapiens
gagatggggtttcac

SEQ ID NO: 983619 - DNA, 15 bp, Homo sapiens
agatggggtttcacc

SEQ ID NO: 983620 - DNA, 15 bp, Homo sapiens
gatggggtttcacca

SEQ ID NO: 983621 - DNA, 15 bp, Homo sapiens
atggggtttcaccat

SEQ ID NO: 983622 - DNA, 15 bp, Homo sapiens
tggggtttcaccatg

SEQ ID NO: 983623 - DNA, 15 bp, Homo sapiens
ggggtttcaccatgt

SEQ ID NO: 983624 - DNA, 15 bp, Homo sapiens
tttcaccatgttggt

SEQ ID NO: 983625 - DNA, 15 bp, Homo sapiens
ttcaccatgttggtc

SEQ ID NO: 983626 - DNA, 15 bp, Homo sapiens
tcaccatgttggtca

SEQ ID NO: 983627 - DNA, 15 bp, Homo sapiens
caccatgttggtcag

SEQ ID NO: 983628 - DNA, 15 bp, Homo sapiens
accatgttggtcagg

SEQ ID NO: 983629 - DNA, 15 bp, Homo sapiens
ccatgttggtcaggc

SEQ ID NO: 983630 - DNA, 15 bp, Homo sapiens
catgttggtcaggct

SEQ ID NO: 983631 - DNA, 15 bp, Homo sapiens
atgttggtcaggctg

SEQ ID NO: 983632 - DNA, 15 bp, Homo sapiens
tgttggtcaggctgg

SEQ ID NO: 983633 - DNA, 15 bp, Homo sapiens
gttggtcaggctggt

SEQ ID NO: 983634 - DNA, 15 bp, Homo sapiens
ttggtcaggctggtc

SEQ ID NO: 983635 - DNA, 15 bp, Homo sapiens
tggtcaggctggtct

SEQ ID NO: 983636 - DNA, 15 bp, Homo sapiens
ggtcaggctggtctc

SEQ ID NO: 983637 - DNA, 15 bp, Homo sapiens
gtcaggctggtctca

SEQ ID NO: 983638 - DNA, 15 bp, Homo sapiens
tcaggctggtctcaa

SEQ ID NO: 983639 - DNA, 15 bp, Homo sapiens
caggctggtctcaaa

SEQ ID NO: 983640 - DNA, 15 bp, Homo sapiens
aggctggtctcaaac

SEQ ID NO: 983641 - DNA, 15 bp, Homo sapiens
ggctggtctcaaact

SEQ ID NO: 983642 - DNA, 15 bp, Homo sapiens
gctggtctcaaactc

SEQ ID NO: 983643 - DNA, 15 bp, Homo sapiens
ctggtctcaaactcc

SEQ ID NO: 983644 - DNA, 15 bp, Homo sapiens
tggtctcaaactcct

SEQ ID NO: 983645 - DNA, 15 bp, Homo sapiens
ggtctcaaactcctg

SEQ ID NO: 983646 - DNA, 15 bp, Homo sapiens
gtctcaaactcctga

SEQ ID NO: 983647 - DNA, 15 bp, Homo sapiens
tctcaaactcctgac

SEQ ID NO: 983648 - DNA, 15 bp, Homo sapiens
tcaggtgatccaccc

SEQ ID NO: 983649 - DNA, 15 bp, Homo sapiens
caggtgatccaccca

SEQ ID NO: 983650 - DNA, 15 bp, Homo sapiens
aggtgatccacccac

SEQ ID NO: 983651 - DNA, 15 bp, Homo sapiens
ggtgatccacccacc

SEQ ID NO: 983652 - DNA, 15 bp, Homo sapiens
gattacaggtgtgaa

SEQ ID NO: 983653 - DNA, 15 bp, Homo sapiens
attacaggtgtgaac

SEQ ID NO: 983654 - DNA, 15 bp, Homo sapiens
aggtgtgaaccacct

SEQ ID NO: 983655 - DNA, 15 bp, Homo sapiens
ggtgtgaaccacctc

SEQ ID NO: 983656 - DNA, 15 bp, Homo sapiens
gtgtgaaccacctcg

SEQ ID NO: 983657 - DNA, 15 bp, Homo sapiens
tgtgaaccacctcgc

SEQ ID NO: 983658 - DNA, 15 bp, Homo sapiens
gtgaaccacctcgcc

SEQ ID NO: 983659 - DNA, 15 bp, Homo sapiens
tgaaccacctcgccc

SEQ ID NO: 983660 - DNA, 15 bp, Homo sapiens
gaaccacctcgcccg

SEQ ID NO: 983661 - DNA, 15 bp, Homo sapiens
aaccacctcgcccgg

SEQ ID NO: 983662 - DNA, 15 bp, Homo sapiens
accacctcgcccggc

SEQ ID NO: 983663 - DNA, 15 bp, Homo sapiens
ccacctcgcccggcc

SEQ ID NO: 983664 - DNA, 15 bp, Homo sapiens
cacctcgcccggcca

SEQ ID NO: 983665 - DNA, 15 bp, Homo sapiens
acctcgcccggccaa

SEQ ID NO: 983666 - DNA, 15 bp, Homo sapiens
cctcgcccggccaaa

SEQ ID NO: 983667 - DNA, 15 bp, Homo sapiens
ctcgcccggccaaaa

SEQ ID NO: 983668 - DNA, 15 bp, Homo sapiens
tcgcccggccaaaaa

SEQ ID NO: 983669 - DNA, 15 bp, Homo sapiens
cgcccggccaaaaac

SEQ ID NO: 983670 - DNA, 15 bp, Homo sapiens
gcccggccaaaaaca

SEQ ID NO: 983671 - DNA, 15 bp, Homo sapiens
cccggccaaaaacaa

SEQ ID NO: 983672 - DNA, 15 bp, Homo sapiens
ccggccaaaaacaac

SEQ ID NO: 983673 - DNA, 15 bp, Homo sapiens
cggccaaaaacaacc

SEQ ID NO: 983674 - DNA, 15 bp, Homo sapiens
ggccaaaaacaacct

SEQ ID NO: 983675 - DNA, 15 bp, Homo sapiens
gccaaaaacaacctc

SEQ ID NO: 983676 - DNA, 15 bp, Homo sapiens
ccaaaaacaacctct

SEQ ID NO: 983677 - DNA, 15 bp, Homo sapiens
caaaaacaacctctt

SEQ ID NO: 983678 - DNA, 15 bp, Homo sapiens
aaaaacaacctcttc

SEQ ID NO: 983679 - DNA, 15 bp, Homo sapiens
aaaacaacctcttct

SEQ ID NO: 983680 - DNA, 15 bp, Homo sapiens
aaacaacctcttcta

SEQ ID NO: 983681 - DNA, 15 bp, Homo sapiens
aacaacctcttctag

SEQ ID NO: 983682 - DNA, 15 bp, Homo sapiens
acaacctcttctagt

SEQ ID NO: 983683 - DNA, 15 bp, Homo sapiens
caacctcttctagtc

SEQ ID NO: 983684 - DNA, 15 bp, Homo sapiens
aacctcttctagtcc

SEQ ID NO: 983685 - DNA, 15 bp, Homo sapiens
acctcttctagtcct

SEQ ID NO: 983686 - DNA, 15 bp, Homo sapiens
cctcttctagtcctg

SEQ ID NO: 983687 - DNA, 15 bp, Homo sapiens
ctcttctagtcctgc

SEQ ID NO: 983688 - DNA, 15 bp, Homo sapiens
tcttctagtcctgcc

SEQ ID NO: 983689 - DNA, 15 bp, Homo sapiens
cttctagtcctgccc

SEQ ID NO: 983690 - DNA, 15 bp, Homo sapiens
ttctagtcctgccca

SEQ ID NO: 983691 - DNA, 15 bp, Homo sapiens
tctagtcctgcccac

SEQ ID NO: 983692 - DNA, 15 bp, Homo sapiens
ctagtcctgcccacc

SEQ ID NO: 983693 - DNA, 15 bp, Homo sapiens
tagtcctgcccaccc

SEQ ID NO: 983694 - DNA, 15 bp, Homo sapiens
agtcctgcccacccc

SEQ ID NO: 983695 - DNA, 15 bp, Homo sapiens
gtcctgcccacccct

SEQ ID NO: 983696 - DNA, 15 bp, Homo sapiens
tcctgcccacccctc

SEQ ID NO: 983697 - DNA, 15 bp, Homo sapiens
cctgcccacccctct

SEQ ID NO: 983698 - DNA, 15 bp, Homo sapiens
ctgcccacccctcta

SEQ ID NO: 983699 - DNA, 15 bp, Homo sapiens
tgcccacccctctag

SEQ ID NO: 983700 - DNA, 15 bp, Homo sapiens
gcccacccctctagt

SEQ ID NO: 983701 - DNA, 15 bp, Homo sapiens
cccacccctctagtc

SEQ ID NO: 983702 - DNA, 15 bp, Homo sapiens
ccacccctctagtcc

SEQ ID NO: 983703 - DNA, 15 bp, Homo sapiens
cacccctctagtccc

SEQ ID NO: 983704 - DNA, 15 bp, Homo sapiens
acccctctagtccct

SEQ ID NO: 983705 - DNA, 15 bp, Homo sapiens
cccctctagtccctc

SEQ ID NO: 983706 - DNA, 15 bp, Homo sapiens
ccctctagtccctcc

SEQ ID NO: 983707 - DNA, 15 bp, Homo sapiens
cctctagtccctccg

SEQ ID NO: 983708 - DNA, 15 bp, Homo sapiens
ctctagtccctccgt

SEQ ID NO: 983709 - DNA, 15 bp, Homo sapiens
tctagtccctccgtc

SEQ ID NO: 983710 - DNA, 15 bp, Homo sapiens
ctagtccctccgtct

SEQ ID NO: 983711 - DNA, 15 bp, Homo sapiens
tagtccctccgtctt

SEQ ID NO: 983712 - DNA, 15 bp, Homo sapiens
agtccctccgtcttt

SEQ ID NO: 983713 - DNA, 15 bp, Homo sapiens
gtccctccgtctttc

SEQ ID NO: 983714 - DNA, 15 bp, Homo sapiens
tccctccgtctttca

SEQ ID NO: 983715 - DNA, 15 bp, Homo sapiens
ccctccgtctttcac

SEQ ID NO: 983716 - DNA, 15 bp, Homo sapiens
cctccgtctttcact

SEQ ID NO: 983717 - DNA, 15 bp, Homo sapiens
ctccgtctttcacta

SEQ ID NO: 983718 - DNA, 15 bp, Homo sapiens
tccgtctttcactac

SEQ ID NO: 983719 - DNA, 15 bp, Homo sapiens
ccgtctttcactaca

SEQ ID NO: 983720 - DNA, 15 bp, Homo sapiens
cgtctttcactacaa

SEQ ID NO: 983721 - DNA, 15 bp, Homo sapiens
gtctttcactacaac

SEQ ID NO: 983722 - DNA, 15 bp, Homo sapiens
tctttcactacaacc

SEQ ID NO: 983723 - DNA, 15 bp, Homo sapiens
ctttcactacaaccc

SEQ ID NO: 983724 - DNA, 15 bp, Homo sapiens
tttcactacaaccca

SEQ ID NO: 983725 - DNA, 15 bp, Homo sapiens
ttcactacaacccac

SEQ ID NO: 983726 - DNA, 15 bp, Homo sapiens
tcactacaacccacc

SEQ ID NO: 983727 - DNA, 15 bp, Homo sapiens
cactacaacccacct

SEQ ID NO: 983728 - DNA, 15 bp, Homo sapiens
actacaacccaccta

SEQ ID NO: 983729 - DNA, 15 bp, Homo sapiens
cccacctatcaagac

SEQ ID NO: 983730 - DNA, 15 bp, Homo sapiens
tcccggtgggcaagg

SEQ ID NO: 983731 - DNA, 15 bp, Homo sapiens
cccggtgggcaagga

SEQ ID NO: 983732 - DNA, 15 bp, Homo sapiens
ccggtgggcaaggac

SEQ ID NO: 983733 - DNA, 15 bp, Homo sapiens
cggtgggcaaggacg

SEQ ID NO: 983734 - DNA, 15 bp, Homo sapiens
ggtgggcaaggacgc

SEQ ID NO: 983735 - DNA, 15 bp, Homo sapiens
gtgggcaaggacgcc

SEQ ID NO: 983736 - DNA, 15 bp, Homo sapiens
tgggcaaggacgcct

SEQ ID NO: 983737 - DNA, 15 bp, Homo sapiens
gggcaaggacgcctg

SEQ ID NO: 983738 - DNA, 15 bp, Homo sapiens
ggcaaggacgcctgc

SEQ ID NO: 983739 - DNA, 15 bp, Homo sapiens
gcaaggacgcctgcg

SEQ ID NO: 983740 - DNA, 15 bp, Homo sapiens
caaggacgcctgcgg

SEQ ID NO: 983741 - DNA, 15 bp, Homo sapiens
aaggacgcctgcggc

SEQ ID NO: 983742 - DNA, 15 bp, Homo sapiens
aggacgcctgcggcg

SEQ ID NO: 983743 - DNA, 15 bp, Homo sapiens
ggacgcctgcggcgg

SEQ ID NO: 983744 - DNA, 15 bp, Homo sapiens
gacgcctgcggcggg

SEQ ID NO: 983745 - DNA, 15 bp, Homo sapiens
acgcctgcggcgggc

SEQ ID NO: 983746 - DNA, 15 bp, Homo sapiens
cgcctgcggcgggct

SEQ ID NO: 983747 - DNA, 15 bp, Homo sapiens
gcctgcggcgggctc

SEQ ID NO: 983748 - DNA, 15 bp, Homo sapiens
cctgcggcgggctcg

SEQ ID NO: 983749 - DNA, 15 bp, Homo sapiens
ctgcggcgggctcgg

SEQ ID NO: 983750 - DNA, 15 bp, Homo sapiens
tgcggcgggctcggt

SEQ ID NO: 983751 - DNA, 15 bp, Homo sapiens
gcggcgggctcggtg

SEQ ID NO: 983752 - DNA, 15 bp, Homo sapiens
cggcgggctcggtgt

SEQ ID NO: 983753 - DNA, 15 bp, Homo sapiens
ggcgggctcggtgtg

SEQ ID NO: 983754 - DNA, 15 bp, Homo sapiens
gcgggctcggtgtgc

SEQ ID NO: 983755 - DNA, 15 bp, Homo sapiens
cgggctcggtgtgca

SEQ ID NO: 983756 - DNA, 15 bp, Homo sapiens
gggctcggtgtgcac

SEQ ID NO: 983757 - DNA, 15 bp, Homo sapiens
ggctcggtgtgcact

SEQ ID NO: 983758 - DNA, 15 bp, Homo sapiens
gctcggtgtgcactt

SEQ ID NO: 983759 - DNA, 15 bp, Homo sapiens
ctcggtgtgcacttt

SEQ ID NO: 983760 - DNA, 15 bp, Homo sapiens
tcggtgtgcactttt

SEQ ID NO: 983761 - DNA, 15 bp, Homo sapiens
cggtgtgcacttttt

SEQ ID NO: 983762 - DNA, 15 bp, Homo sapiens
ggtgtgcactttttg

SEQ ID NO: 983763 - DNA, 15 bp, Homo sapiens
gtgtgcactttttga

SEQ ID NO: 983764 - DNA, 15 bp, Homo sapiens
tgtgcactttttgag

SEQ ID NO: 983765 - DNA, 15 bp, Homo sapiens
gtgcactttttgaga

SEQ ID NO: 983766 - DNA, 15 bp, Homo sapiens
tgcactttttgagag

SEQ ID NO: 983767 - DNA, 15 bp, Homo sapiens
gcactttttgagagc

SEQ ID NO: 983768 - DNA, 15 bp, Homo sapiens
cactttttgagagct

SEQ ID NO: 983769 - DNA, 15 bp, Homo sapiens
actttttgagagcta

SEQ ID NO: 983770 - DNA, 15 bp, Homo sapiens
ctttttgagagctag

SEQ ID NO: 983771 - DNA, 15 bp, Homo sapiens
tttttgagagctagg

SEQ ID NO: 983772 - DNA, 15 bp, Homo sapiens
ttttgagagctagga

SEQ ID NO: 983773 - DNA, 15 bp, Homo sapiens
tttgagagctaggat

SEQ ID NO: 983774 - DNA, 15 bp, Homo sapiens
ttgagagctaggatc

SEQ ID NO: 983775 - DNA, 15 bp, Homo sapiens
tgagagctaggatcc

SEQ ID NO: 983776 - DNA, 15 bp, Homo sapiens
gagagctaggatccc

SEQ ID NO: 983777 - DNA, 15 bp, Homo sapiens
agagctaggatccca

SEQ ID NO: 983778 - DNA, 15 bp, Homo sapiens
gagctaggatcccac

SEQ ID NO: 983779 - DNA, 15 bp, Homo sapiens
agctaggatcccacc

SEQ ID NO: 983780 - DNA, 15 bp, Homo sapiens
gctaggatcccaccg

SEQ ID NO: 983781 - DNA, 15 bp, Homo sapiens
ctaggatcccaccgc

SEQ ID NO: 983782 - DNA, 15 bp, Homo sapiens
taggatcccaccgca

SEQ ID NO: 983783 - DNA, 15 bp, Homo sapiens
aggatcccaccgcat

SEQ ID NO: 983784 - DNA, 15 bp, Homo sapiens
ggatcccaccgcatc

SEQ ID NO: 983785 - DNA, 15 bp, Homo sapiens
gatcccaccgcatcg

SEQ ID NO: 983786 - DNA, 15 bp, Homo sapiens
atcccaccgcatcgc

SEQ ID NO: 983787 - DNA, 15 bp, Homo sapiens
tcccaccgcatcgct

SEQ ID NO: 983788 - DNA, 15 bp, Homo sapiens
cccaccgcatcgctc

SEQ ID NO: 983789 - DNA, 15 bp, Homo sapiens
ccaccgcatcgctcc

SEQ ID NO: 983790 - DNA, 15 bp, Homo sapiens
caccgcatcgctcca

SEQ ID NO: 983791 - DNA, 15 bp, Homo sapiens
accgcatcgctccac

SEQ ID NO: 983792 - DNA, 15 bp, Homo sapiens
ccgcatcgctccact

SEQ ID NO: 983793 - DNA, 15 bp, Homo sapiens
cgcatcgctccactt

SEQ ID NO: 983794 - DNA, 15 bp, Homo sapiens
gcatcgctccacttc

SEQ ID NO: 983795 - DNA, 15 bp, Homo sapiens
catcgctccacttcc

SEQ ID NO: 983796 - DNA, 15 bp, Homo sapiens
atcgctccacttcct

SEQ ID NO: 983797 - DNA, 15 bp, Homo sapiens
tcgctccacttcctg

SEQ ID NO: 983798 - DNA, 15 bp, Homo sapiens
cgctccacttcctgg

SEQ ID NO: 983799 - DNA, 15 bp, Homo sapiens
gctccacttcctggc

SEQ ID NO: 983800 - DNA, 15 bp, Homo sapiens
ctccacttcctggca

SEQ ID NO: 983801 - DNA, 15 bp, Homo sapiens
tccacttcctggcac

SEQ ID NO: 983802 - DNA, 15 bp, Homo sapiens
ccacttcctggcaca

SEQ ID NO: 983803 - DNA, 15 bp, Homo sapiens
cacttcctggcacat

SEQ ID NO: 983804 - DNA, 15 bp, Homo sapiens
acttcctggcacatg

SEQ ID NO: 983805 - DNA, 15 bp, Homo sapiens
cttcctggcacatgg

SEQ ID NO: 983806 - DNA, 15 bp, Homo sapiens
ttcctggcacatggt

SEQ ID NO: 983807 - DNA, 15 bp, Homo sapiens
tcctggcacatggtc

SEQ ID NO: 983808 - DNA, 15 bp, Homo sapiens
cctggcacatggtca

SEQ ID NO: 983809 - DNA, 15 bp, Homo sapiens
ctggcacatggtcac

SEQ ID NO: 983810 - DNA, 15 bp, Homo sapiens
tggcacatggtcact

SEQ ID NO: 983811 - DNA, 15 bp, Homo sapiens
ggcacatggtcactt

SEQ ID NO: 983812 - DNA, 15 bp, Homo sapiens
gcacatggtcacttc

SEQ ID NO: 983813 - DNA, 15 bp, Homo sapiens
cacatggtcacttcc

SEQ ID NO: 983814 - DNA, 15 bp, Homo sapiens
acatggtcacttccc

SEQ ID NO: 983815 - DNA, 15 bp, Homo sapiens
catggtcacttccca

SEQ ID NO: 983816 - DNA, 15 bp, Homo sapiens
atggtcacttcccag

SEQ ID NO: 983817 - DNA, 15 bp, Homo sapiens
tggtcacttcccagg

SEQ ID NO: 983818 - DNA, 15 bp, Homo sapiens
ggtcacttcccaggg

SEQ ID NO: 983819 - DNA, 15 bp, Homo sapiens
gtcacttcccaggga

SEQ ID NO: 983820 - DNA, 15 bp, Homo sapiens
tcacttcccagggaa

SEQ ID NO: 983821 - DNA, 15 bp, Homo sapiens
cacttcccagggaag

SEQ ID NO: 983822 - DNA, 15 bp, Homo sapiens
acttcccagggaagt

SEQ ID NO: 983823 - DNA, 15 bp, Homo sapiens
cttcccagggaagtc

SEQ ID NO: 983824 - DNA, 15 bp, Homo sapiens
ttcccagggaagtcc

SEQ ID NO: 983825 - DNA, 15 bp, Homo sapiens
tcccagggaagtccc

SEQ ID NO: 983826 - DNA, 15 bp, Homo sapiens
cccagggaagtccct

SEQ ID NO: 983827 - DNA, 15 bp, Homo sapiens
ccagggaagtccctt

SEQ ID NO: 983828 - DNA, 15 bp, Homo sapiens
cagggaagtcccttt

SEQ ID NO: 983829 - DNA, 15 bp, Homo sapiens
agggaagtcccttta

SEQ ID NO: 983830 - DNA, 15 bp, Homo sapiens
gggaagtccctttag

SEQ ID NO: 983831 - DNA, 15 bp, Homo sapiens
ggaagtccctttagg

SEQ ID NO: 983832 - DNA, 15 bp, Homo sapiens
gaagtccctttaggg

SEQ ID NO: 983833 - DNA, 15 bp, Homo sapiens
aagtccctttagggg

SEQ ID NO: 983834 - DNA, 15 bp, Homo sapiens
agtccctttaggggg

SEQ ID NO: 983835 - DNA, 15 bp, Homo sapiens
gtccctttagggggg

SEQ ID NO: 983836 - DNA, 15 bp, Homo sapiens
tccctttaggggggc

SEQ ID NO: 983837 - DNA, 15 bp, Homo sapiens
ccctttaggggggcc

SEQ ID NO: 983838 - DNA, 15 bp, Homo sapiens
cctttaggggggcct

SEQ ID NO: 983839 - DNA, 15 bp, Homo sapiens
ctttaggggggcctg

SEQ ID NO: 983840 - DNA, 15 bp, Homo sapiens
tttaggggggcctga

SEQ ID NO: 983841 - DNA, 15 bp, Homo sapiens
ttaggggggcctgac

SEQ ID NO: 983842 - DNA, 15 bp, Homo sapiens
taggggggcctgacc

SEQ ID NO: 983843 - DNA, 15 bp, Homo sapiens
aggggggcctgacct

SEQ ID NO: 983844 - DNA, 15 bp, Homo sapiens
ggggggcctgaccta

SEQ ID NO: 983845 - DNA, 15 bp, Homo sapiens
gggggcctgacctac

SEQ ID NO: 983846 - DNA, 15 bp, Homo sapiens
ggggcctgacctacc

SEQ ID NO: 983847 - DNA, 15 bp, Homo sapiens
gggcctgacctaccc

SEQ ID NO: 983848 - DNA, 15 bp, Homo sapiens
ggcctgacctacccg

SEQ ID NO: 983849 - DNA, 15 bp, Homo sapiens
gcctgacctacccgg

SEQ ID NO: 983850 - DNA, 15 bp, Homo sapiens
cctgacctacccgga

SEQ ID NO: 983851 - DNA, 15 bp, Homo sapiens
ctgacctacccggag

SEQ ID NO: 983852 - DNA, 15 bp, Homo sapiens
tgacctacccggagc

SEQ ID NO: 983853 - DNA, 15 bp, Homo sapiens
gacctacccggagcc

SEQ ID NO: 983854 - DNA, 15 bp, Homo sapiens
acctacccggagcct

SEQ ID NO: 983855 - DNA, 15 bp, Homo sapiens
cctacccggagcctg

SEQ ID NO: 983856 - DNA, 15 bp, Homo sapiens
ctacccggagcctga

SEQ ID NO: 983857 - DNA, 15 bp, Homo sapiens
tacccggagcctgag

SEQ ID NO: 983858 - DNA, 15 bp, Homo sapiens
acccggagcctgagc

SEQ ID NO: 983859 - DNA, 15 bp, Homo sapiens
cccggagcctgagcc

SEQ ID NO: 983860 - DNA, 15 bp, Homo sapiens
ccggagcctgagccg

SEQ ID NO: 983861 - DNA, 15 bp, Homo sapiens
cggagcctgagccga

SEQ ID NO: 983862 - DNA, 15 bp, Homo sapiens
ggagcctgagccgaa

SEQ ID NO: 983863 - DNA, 15 bp, Homo sapiens
gagcctgagccgaag

SEQ ID NO: 983864 - DNA, 15 bp, Homo sapiens
agcctgagccgaagg

SEQ ID NO: 983865 - DNA, 15 bp, Homo sapiens
gcctgagccgaagga

SEQ ID NO: 983866 - DNA, 15 bp, Homo sapiens
cctgagccgaaggaa

SEQ ID NO: 983867 - DNA, 15 bp, Homo sapiens
ctgagccgaaggaac

SEQ ID NO: 983868 - DNA, 15 bp, Homo sapiens
tgagccgaaggaacg

SEQ ID NO: 983869 - DNA, 15 bp, Homo sapiens
gagccgaaggaacga

SEQ ID NO: 983870 - DNA, 15 bp, Homo sapiens
agccgaaggaacgag

SEQ ID NO: 983871 - DNA, 15 bp, Homo sapiens
gccgaaggaacgagt

SEQ ID NO: 983872 - DNA, 15 bp, Homo sapiens
ccgaaggaacgagtt

SEQ ID NO: 983873 - DNA, 15 bp, Homo sapiens
cgaaggaacgagttg

SEQ ID NO: 983874 - DNA, 15 bp, Homo sapiens
gaaggaacgagttgt

SEQ ID NO: 983875 - DNA, 15 bp, Homo sapiens
aaggaacgagttgtc

SEQ ID NO: 983876 - DNA, 15 bp, Homo sapiens
aggaacgagttgtcc

SEQ ID NO: 983877 - DNA, 15 bp, Homo sapiens
ggaacgagttgtcct

SEQ ID NO: 983878 - DNA, 15 bp, Homo sapiens
gaacgagttgtcctt

SEQ ID NO: 983879 - DNA, 15 bp, Homo sapiens
aacgagttgtccttt

SEQ ID NO: 983880 - DNA, 15 bp, Homo sapiens
acgagttgtcctttg

SEQ ID NO: 983881 - DNA, 15 bp, Homo sapiens
cgagttgtcctttga

SEQ ID NO: 983882 - DNA, 15 bp, Homo sapiens
gagttgtcctttgac

SEQ ID NO: 983883 - DNA, 15 bp, Homo sapiens
agttgtcctttgacc

SEQ ID NO: 983884 - DNA, 15 bp, Homo sapiens
gttgtcctttgacct

SEQ ID NO: 983885 - DNA, 15 bp, Homo sapiens
ttgtcctttgacctt

SEQ ID NO: 983886 - DNA, 15 bp, Homo sapiens
tgtcctttgaccttt

SEQ ID NO: 983887 - DNA, 15 bp, Homo sapiens
gtcctttgaccttta

SEQ ID NO: 983888 - DNA, 15 bp, Homo sapiens
tcctttgacctttac

SEQ ID NO: 983889 - DNA, 15 bp, Homo sapiens
cctttgacctttact

SEQ ID NO: 983890 - DNA, 15 bp, Homo sapiens
ctttgacctttactg

SEQ ID NO: 983891 - DNA, 15 bp, Homo sapiens
tttgacctttactgg

SEQ ID NO: 983892 - DNA, 15 bp, Homo sapiens
ttgacctttactggc

SEQ ID NO: 983893 - DNA, 15 bp, Homo sapiens
tgacctttactggcc

SEQ ID NO: 983894 - DNA, 15 bp, Homo sapiens
gacctttactggcca

SEQ ID NO: 983895 - DNA, 15 bp, Homo sapiens
acctttactggccat

SEQ ID NO: 983896 - DNA, 15 bp, Homo sapiens
cctttactggccatt

SEQ ID NO: 983897 - DNA, 15 bp, Homo sapiens
ctttactggccattt

SEQ ID NO: 983898 - DNA, 15 bp, Homo sapiens
tttactggccatttc

SEQ ID NO: 983899 - DNA, 15 bp, Homo sapiens
ttactggccatttca

SEQ ID NO: 983900 - DNA, 15 bp, Homo sapiens
tactggccatttcac

SEQ ID NO: 983901 - DNA, 15 bp, Homo sapiens
actggccatttcacc

SEQ ID NO: 983902 - DNA, 15 bp, Homo sapiens
ctggccatttcacct

SEQ ID NO: 983903 - DNA, 15 bp, Homo sapiens
tggccatttcacctc

SEQ ID NO: 983904 - DNA, 15 bp, Homo sapiens
ggccatttcacctct

SEQ ID NO: 983905 - DNA, 15 bp, Homo sapiens
gccatttcacctctt

SEQ ID NO: 983906 - DNA, 15 bp, Homo sapiens
ccatttcacctcttt

SEQ ID NO: 983907 - DNA, 15 bp, Homo sapiens
catttcacctcttta

SEQ ID NO: 983908 - DNA, 15 bp, Homo sapiens
atttcacctctttat

SEQ ID NO: 983909 - DNA, 15 bp, Homo sapiens
tttcacctctttatg

SEQ ID NO: 983910 - DNA, 15 bp, Homo sapiens
ttcacctctttatga

SEQ ID NO: 983911 - DNA, 15 bp, Homo sapiens
tcacctctttatgac

SEQ ID NO: 983912 - DNA, 15 bp, Homo sapiens
cacctctttatgact

SEQ ID NO: 983913 - DNA, 15 bp, Homo sapiens
acctctttatgactc

SEQ ID NO: 983914 - DNA, 15 bp, Homo sapiens
cctctttatgactca

SEQ ID NO: 983915 - DNA, 15 bp, Homo sapiens
ctctttatgactcaa

SEQ ID NO: 983916 - DNA, 15 bp, Homo sapiens
tctttatgactcaat

SEQ ID NO: 983917 - DNA, 15 bp, Homo sapiens
ctttatgactcaatt

SEQ ID NO: 983918 - DNA, 15 bp, Homo sapiens
tttatgactcaattt

SEQ ID NO: 983919 - DNA, 15 bp, Homo sapiens
ttatgactcaatttc

SEQ ID NO: 983920 - DNA, 15 bp, Homo sapiens
tatgactcaatttct

SEQ ID NO: 983921 - DNA, 15 bp, Homo sapiens
atgactcaatttctc

SEQ ID NO: 983922 - DNA, 15 bp, Homo sapiens
tgactcaatttctca

SEQ ID NO: 983923 - DNA, 15 bp, Homo sapiens
gactcaatttctcat

SEQ ID NO: 983924 - DNA, 15 bp, Homo sapiens
actcaatttctcatc

SEQ ID NO: 983925 - DNA, 15 bp, Homo sapiens
ctcaatttctcatcc

SEQ ID NO: 983926 - DNA, 15 bp, Homo sapiens
tcaatttctcatcca

SEQ ID NO: 983927 - DNA, 15 bp, Homo sapiens
caatttctcatccat

SEQ ID NO: 983928 - DNA, 15 bp, Homo sapiens
aatttctcatccata

SEQ ID NO: 983929 - DNA, 15 bp, Homo sapiens
atttctcatccataa

SEQ ID NO: 983930 - DNA, 15 bp, Homo sapiens
tttctcatccataaa

SEQ ID NO: 983931 - DNA, 15 bp, Homo sapiens
ttctcatccataaag

SEQ ID NO: 983932 - DNA, 15 bp, Homo sapiens
tctcatccataaagt

SEQ ID NO: 983933 - DNA, 15 bp, Homo sapiens
ctcatccataaagtg

SEQ ID NO: 983934 - DNA, 15 bp, Homo sapiens
tcatccataaagtgg

SEQ ID NO: 983935 - DNA, 15 bp, Homo sapiens
catccataaagtgga

SEQ ID NO: 983936 - DNA, 15 bp, Homo sapiens
atccataaagtggaa

SEQ ID NO: 983937 - DNA, 15 bp, Homo sapiens
tccataaagtggaaa

SEQ ID NO: 983938 - DNA, 15 bp, Homo sapiens
ccataaagtggaaag

SEQ ID NO: 983939 - DNA, 15 bp, Homo sapiens
cataaagtggaaagg

SEQ ID NO: 983940 - DNA, 15 bp, Homo sapiens
ataaagtggaaagga

SEQ ID NO: 983941 - DNA, 15 bp, Homo sapiens
taaagtggaaaggag

SEQ ID NO: 983942 - DNA, 15 bp, Homo sapiens
aaagtggaaaggaga

SEQ ID NO: 983943 - DNA, 15 bp, Homo sapiens
aagtggaaaggagag

SEQ ID NO: 983944 - DNA, 15 bp, Homo sapiens
agtggaaaggagagt

SEQ ID NO: 983945 - DNA, 15 bp, Homo sapiens
gtggaaaggagagtg

SEQ ID NO: 983946 - DNA, 15 bp, Homo sapiens
tggaaaggagagtgc

SEQ ID NO: 983947 - DNA, 15 bp, Homo sapiens
ggaaaggagagtgcg

SEQ ID NO: 983948 - DNA, 15 bp, Homo sapiens
gaaaggagagtgcgt

SEQ ID NO: 983949 - DNA, 15 bp, Homo sapiens
aaaggagagtgcgtg

SEQ ID NO: 983950 - DNA, 15 bp, Homo sapiens
aaggagagtgcgtgg

SEQ ID NO: 983951 - DNA, 15 bp, Homo sapiens
aggagagtgcgtggc

SEQ ID NO: 983952 - DNA, 15 bp, Homo sapiens
ggagagtgcgtggct

SEQ ID NO: 983953 - DNA, 15 bp, Homo sapiens
gagagtgcgtggctt

SEQ ID NO: 983954 - DNA, 15 bp, Homo sapiens
agagtgcgtggcttg

SEQ ID NO: 983955 - DNA, 15 bp, Homo sapiens
gagtgcgtggcttga

SEQ ID NO: 983956 - DNA, 15 bp, Homo sapiens
agtgcgtggcttgaa

SEQ ID NO: 983957 - DNA, 15 bp, Homo sapiens
gtgcgtggcttgaaa

SEQ ID NO: 983958 - DNA, 15 bp, Homo sapiens
tgcgtggcttgaaaa

SEQ ID NO: 983959 - DNA, 15 bp, Homo sapiens
gcgtggcttgaaaag

SEQ ID NO: 983960 - DNA, 15 bp, Homo sapiens
cgtggcttgaaaagt

SEQ ID NO: 983961 - DNA, 15 bp, Homo sapiens
gtggcttgaaaagtc

SEQ ID NO: 983962 - DNA, 15 bp, Homo sapiens
tggcttgaaaagtca

SEQ ID NO: 983963 - DNA, 15 bp, Homo sapiens
ggcttgaaaagtcat

SEQ ID NO: 983964 - DNA, 15 bp, Homo sapiens
gcttgaaaagtcatc

SEQ ID NO: 983965 - DNA, 15 bp, Homo sapiens
cttgaaaagtcatca

SEQ ID NO: 983966 - DNA, 15 bp, Homo sapiens
ttgaaaagtcatcag

SEQ ID NO: 983967 - DNA, 15 bp, Homo sapiens
tgaaaagtcatcagt

SEQ ID NO: 983968 - DNA, 15 bp, Homo sapiens
gaaaagtcatcagtg

SEQ ID NO: 983969 - DNA, 15 bp, Homo sapiens
aaaagtcatcagtga

SEQ ID NO: 983970 - DNA, 15 bp, Homo sapiens
aaagtcatcagtgag

SEQ ID NO: 983971 - DNA, 15 bp, Homo sapiens
aagtcatcagtgagt

SEQ ID NO: 983972 - DNA, 15 bp, Homo sapiens
agtcatcagtgagtg

SEQ ID NO: 983973 - DNA, 15 bp, Homo sapiens
gtcatcagtgagtgt

SEQ ID NO: 983974 - DNA, 15 bp, Homo sapiens
tcatcagtgagtgtt

SEQ ID NO: 983975 - DNA, 15 bp, Homo sapiens
catcagtgagtgttt

SEQ ID NO: 983976 - DNA, 15 bp, Homo sapiens
atcagtgagtgttta

SEQ ID NO: 983977 - DNA, 15 bp, Homo sapiens
tcagtgagtgtttaa

SEQ ID NO: 983978 - DNA, 15 bp, Homo sapiens
cagtgagtgtttaat

SEQ ID NO: 983979 - DNA, 15 bp, Homo sapiens
agtgagtgtttaatt

SEQ ID NO: 983980 - DNA, 15 bp, Homo sapiens
gtgagtgtttaattc

SEQ ID NO: 983981 - DNA, 15 bp, Homo sapiens
tgagtgtttaattct

SEQ ID NO: 983982 - DNA, 15 bp, Homo sapiens
gagtgtttaattctt

SEQ ID NO: 983983 - DNA, 15 bp, Homo sapiens
agtgtttaattcttc

SEQ ID NO: 983984 - DNA, 15 bp, Homo sapiens
gtgtttaattcttct

SEQ ID NO: 983985 - DNA, 15 bp, Homo sapiens
tgtttaattcttctt

SEQ ID NO: 983986 - DNA, 15 bp, Homo sapiens
gtttaattcttcttt

SEQ ID NO: 983987 - DNA, 15 bp, Homo sapiens
tttaattcttcttta

SEQ ID NO: 983988 - DNA, 15 bp, Homo sapiens
ttaattcttctttaa

SEQ ID NO: 983989 - DNA, 15 bp, Homo sapiens
taattcttctttaat

SEQ ID NO: 983990 - DNA, 15 bp, Homo sapiens
aattcttctttaatg

SEQ ID NO: 983991 - DNA, 15 bp, Homo sapiens
attcttctttaatgg

SEQ ID NO: 983992 - DNA, 15 bp, Homo sapiens
ttcttctttaatggg

SEQ ID NO: 983993 - DNA, 15 bp, Homo sapiens
tcttctttaatgggt

SEQ ID NO: 983994 - DNA, 15 bp, Homo sapiens
cttctttaatgggtg

SEQ ID NO: 983995 - DNA, 15 bp, Homo sapiens
ttctttaatgggtgt

SEQ ID NO: 983996 - DNA, 15 bp, Homo sapiens
tctttaatgggtgtc

SEQ ID NO: 983997 - DNA, 15 bp, Homo sapiens
ctttaatgggtgtct

SEQ ID NO: 983998 - DNA, 15 bp, Homo sapiens
tttaatgggtgtctt

SEQ ID NO: 983999 - DNA, 15 bp, Homo sapiens
ttaatgggtgtcttc

SEQ ID NO: 984000 - DNA, 15 bp, Homo sapiens
taatgggtgtcttct

SEQ ID NO: 984001 - DNA, 15 bp, Homo sapiens
aatgggtgtcttcta

SEQ ID NO: 984002 - DNA, 15 bp, Homo sapiens
atgggtgtcttctat

SEQ ID NO: 984003 - DNA, 15 bp, Homo sapiens
tgggtgtcttctatt

SEQ ID NO: 984004 - DNA, 15 bp, Homo sapiens
ctattattattatta

SEQ ID NO: 984005 - DNA, 15 bp, Homo sapiens
tattattattattat

SEQ ID NO: 984006 - DNA, 15 bp, Homo sapiens
attattattattatt

SEQ ID NO: 984007 - DNA, 15 bp, Homo sapiens
ttattattattattc

SEQ ID NO: 984008 - DNA, 15 bp, Homo sapiens
atttagtcatcaaat

SEQ ID NO: 984009 - DNA, 15 bp, Homo sapiens
tttagtcatcaaata

SEQ ID NO: 984010 - DNA, 15 bp, Homo sapiens
ttagtcatcaaatat

SEQ ID NO: 984011 - DNA, 15 bp, Homo sapiens
tagtcatcaaatatt

SEQ ID NO: 984012 - DNA, 15 bp, Homo sapiens
agtcatcaaatatta

SEQ ID NO: 984013 - DNA, 15 bp, Homo sapiens
gtcatcaaatattac

SEQ ID NO: 984014 - DNA, 15 bp, Homo sapiens
tcatcaaatattaca

SEQ ID NO: 984015 - DNA, 15 bp, Homo sapiens
catcaaatattacag

SEQ ID NO: 984016 - DNA, 15 bp, Homo sapiens
atcaaatattacagg

SEQ ID NO: 984017 - DNA, 15 bp, Homo sapiens
tcaaatattacaggc

SEQ ID NO: 984018 - DNA, 15 bp, Homo sapiens
caaatattacaggca

SEQ ID NO: 984019 - DNA, 15 bp, Homo sapiens
aaatattacaggcag

SEQ ID NO: 984020 - DNA, 15 bp, Homo sapiens
aatattacaggcagt

SEQ ID NO: 984021 - DNA, 15 bp, Homo sapiens
atattacaggcagtg

SEQ ID NO: 984022 - DNA, 15 bp, Homo sapiens
tattacaggcagtgg

SEQ ID NO: 984023 - DNA, 15 bp, Homo sapiens
attacaggcagtggc

SEQ ID NO: 984024 - DNA, 15 bp, Homo sapiens
ttacaggcagtggct

SEQ ID NO: 984025 - DNA, 15 bp, Homo sapiens
tacaggcagtggctc

SEQ ID NO: 984026 - DNA, 15 bp, Homo sapiens
acaggcagtggctca

SEQ ID NO: 984027 - DNA, 15 bp, Homo sapiens
caggcagtggctcac

SEQ ID NO: 984028 - DNA, 15 bp, Homo sapiens
aggcagtggctcacg

SEQ ID NO: 984029 - DNA, 15 bp, Homo sapiens
ggcagtggctcacgc

SEQ ID NO: 984030 - DNA, 15 bp, Homo sapiens
gcagtggctcacgcc

SEQ ID NO: 984031 - DNA, 15 bp, Homo sapiens
taatcccagcacttc

SEQ ID NO: 984032 - DNA, 15 bp, Homo sapiens
aatcccagcacttcg

SEQ ID NO: 984033 - DNA, 15 bp, Homo sapiens
atcccagcacttcgg

SEQ ID NO: 984034 - DNA, 15 bp, Homo sapiens
tcccagcacttcggg

SEQ ID NO: 984035 - DNA, 15 bp, Homo sapiens
cccagcacttcggga

SEQ ID NO: 984036 - DNA, 15 bp, Homo sapiens
ccagcacttcgggag

SEQ ID NO: 984037 - DNA, 15 bp, Homo sapiens
cagcacttcgggagg

SEQ ID NO: 984038 - DNA, 15 bp, Homo sapiens
agcacttcgggaggc

SEQ ID NO: 984039 - DNA, 15 bp, Homo sapiens
gcacttcgggaggcc

SEQ ID NO: 984040 - DNA, 15 bp, Homo sapiens
cacttcgggaggccg

SEQ ID NO: 984041 - DNA, 15 bp, Homo sapiens
acttcgggaggccga

SEQ ID NO: 984042 - DNA, 15 bp, Homo sapiens
cttcgggaggccgag

SEQ ID NO: 984043 - DNA, 15 bp, Homo sapiens
ttcgggaggccgagg

SEQ ID NO: 984044 - DNA, 15 bp, Homo sapiens
tcgggaggccgaggc

SEQ ID NO: 984045 - DNA, 15 bp, Homo sapiens
cgggaggccgaggca

SEQ ID NO: 984046 - DNA, 15 bp, Homo sapiens
gggaggccgaggcag

SEQ ID NO: 984047 - DNA, 15 bp, Homo sapiens
ggaggccgaggcagg

SEQ ID NO: 984048 - DNA, 15 bp, Homo sapiens
gaggccgaggcaggc

SEQ ID NO: 984049 - DNA, 15 bp, Homo sapiens
aggccgaggcaggct

SEQ ID NO: 984050 - DNA, 15 bp, Homo sapiens
ggccgaggcaggctg

SEQ ID NO: 984051 - DNA, 15 bp, Homo sapiens
gccgaggcaggctga

SEQ ID NO: 984052 - DNA, 15 bp, Homo sapiens
ccgaggcaggctgat

SEQ ID NO: 984053 - DNA, 15 bp, Homo sapiens
cgaggcaggctgatc

SEQ ID NO: 984054 - DNA, 15 bp, Homo sapiens
gaggcaggctgatca

SEQ ID NO: 984055 - DNA, 15 bp, Homo sapiens
aggcaggctgatcac

SEQ ID NO: 984056 - DNA, 15 bp, Homo sapiens
ggcaggctgatcact

SEQ ID NO: 984057 - DNA, 15 bp, Homo sapiens
gcaggctgatcactt

SEQ ID NO: 984058 - DNA, 15 bp, Homo sapiens
caggctgatcacttg

SEQ ID NO: 984059 - DNA, 15 bp, Homo sapiens
aggctgatcacttga

SEQ ID NO: 984060 - DNA, 15 bp, Homo sapiens
ggctgatcacttgag

SEQ ID NO: 984061 - DNA, 15 bp, Homo sapiens
gctgatcacttgagg

SEQ ID NO: 984062 - DNA, 15 bp, Homo sapiens
ctgatcacttgaggt

SEQ ID NO: 984063 - DNA, 15 bp, Homo sapiens
tgatcacttgaggtc

SEQ ID NO: 984064 - DNA, 15 bp, Homo sapiens
gatcacttgaggtca

SEQ ID NO: 984065 - DNA, 15 bp, Homo sapiens
atcacttgaggtcag

SEQ ID NO: 984066 - DNA, 15 bp, Homo sapiens
tcacttgaggtcagg

SEQ ID NO: 984067 - DNA, 15 bp, Homo sapiens
cacttgaggtcaggt

SEQ ID NO: 984068 - DNA, 15 bp, Homo sapiens
acttgaggtcaggtg

SEQ ID NO: 984069 - DNA, 15 bp, Homo sapiens
cttgaggtcaggtgt

SEQ ID NO: 984070 - DNA, 15 bp, Homo sapiens
ttgaggtcaggtgtt

SEQ ID NO: 984071 - DNA, 15 bp, Homo sapiens
tgaggtcaggtgttc

SEQ ID NO: 984072 - DNA, 15 bp, Homo sapiens
gaggtcaggtgttcg

SEQ ID NO: 984073 - DNA, 15 bp, Homo sapiens
aggtcaggtgttcga

SEQ ID NO: 984074 - DNA, 15 bp, Homo sapiens
ggtcaggtgttcgag

SEQ ID NO: 984075 - DNA, 15 bp, Homo sapiens
gtcaggtgttcgaga

SEQ ID NO: 984076 - DNA, 15 bp, Homo sapiens
tcaggtgttcgagac

SEQ ID NO: 984077 - DNA, 15 bp, Homo sapiens
caggtgttcgagacc

SEQ ID NO: 984078 - DNA, 15 bp, Homo sapiens
aggtgttcgagacct

SEQ ID NO: 984079 - DNA, 15 bp, Homo sapiens
ggtgttcgagacctg

SEQ ID NO: 984080 - DNA, 15 bp, Homo sapiens
gtgttcgagacctgc

SEQ ID NO: 984081 - DNA, 15 bp, Homo sapiens
tgttcgagacctgcc

SEQ ID NO: 984082 - DNA, 15 bp, Homo sapiens
gttcgagacctgcct

SEQ ID NO: 984083 - DNA, 15 bp, Homo sapiens
ttcgagacctgcctg

SEQ ID NO: 984084 - DNA, 15 bp, Homo sapiens
tcgagacctgcctgg

SEQ ID NO: 984085 - DNA, 15 bp, Homo sapiens
cgagacctgcctggc

SEQ ID NO: 984086 - DNA, 15 bp, Homo sapiens
gagacctgcctggcc

SEQ ID NO: 984087 - DNA, 15 bp, Homo sapiens
agacctgcctggcca

SEQ ID NO: 984088 - DNA, 15 bp, Homo sapiens
gacctgcctggccaa

SEQ ID NO: 984089 - DNA, 15 bp, Homo sapiens
acctgcctggccaac

SEQ ID NO: 984090 - DNA, 15 bp, Homo sapiens
cctgcctggccaaca

SEQ ID NO: 984091 - DNA, 15 bp, Homo sapiens
ctgcctggccaacat

SEQ ID NO: 984092 - DNA, 15 bp, Homo sapiens
tgcctggccaacatg

SEQ ID NO: 984093 - DNA, 15 bp, Homo sapiens
gcctggccaacatgg

SEQ ID NO: 984094 - DNA, 15 bp, Homo sapiens
cctggccaacatggt

SEQ ID NO: 984095 - DNA, 15 bp, Homo sapiens
ctggccaacatggtg

SEQ ID NO: 984096 - DNA, 15 bp, Homo sapiens
tggccaacatggtga

SEQ ID NO: 984097 - DNA, 15 bp, Homo sapiens
ggccaacatggtgaa

SEQ ID NO: 984098 - DNA, 15 bp, Homo sapiens
gccaacatggtgaaa

SEQ ID NO: 984099 - DNA, 15 bp, Homo sapiens
ccaacatggtgaaac

SEQ ID NO: 984100 - DNA, 15 bp, Homo sapiens
catggtgaaaccccg

SEQ ID NO: 984101 - DNA, 15 bp, Homo sapiens
atggtgaaaccccgt

SEQ ID NO: 984102 - DNA, 15 bp, Homo sapiens
tggtgaaaccccgtc

SEQ ID NO: 984103 - DNA, 15 bp, Homo sapiens
tgaaaccccgtctcc

SEQ ID NO: 984104 - DNA, 15 bp, Homo sapiens
gaaaccccgtctcca

SEQ ID NO: 984105 - DNA, 15 bp, Homo sapiens
aaaccccgtctccac

SEQ ID NO: 984106 - DNA, 15 bp, Homo sapiens
aaccccgtctccacg

SEQ ID NO: 984107 - DNA, 15 bp, Homo sapiens
accccgtctccacga

SEQ ID NO: 984108 - DNA, 15 bp, Homo sapiens
ccccgtctccacgaa

SEQ ID NO: 984109 - DNA, 15 bp, Homo sapiens
cccgtctccacgaaa

SEQ ID NO: 984110 - DNA, 15 bp, Homo sapiens
ccgtctccacgaaaa

SEQ ID NO: 984111 - DNA, 15 bp, Homo sapiens
cgtctccacgaaaaa

SEQ ID NO: 984112 - DNA, 15 bp, Homo sapiens
gtctccacgaaaaat

SEQ ID NO: 984113 - DNA, 15 bp, Homo sapiens
tctccacgaaaaata

SEQ ID NO: 984114 - DNA, 15 bp, Homo sapiens
ctccacgaaaaatac

SEQ ID NO: 984115 - DNA, 15 bp, Homo sapiens
tccacgaaaaataca

SEQ ID NO: 984116 - DNA, 15 bp, Homo sapiens
ccacgaaaaatacaa

SEQ ID NO: 984117 - DNA, 15 bp, Homo sapiens
cacgaaaaatacaaa

SEQ ID NO: 984118 - DNA, 15 bp, Homo sapiens
acgaaaaatacaaaa

SEQ ID NO: 984119 - DNA, 15 bp, Homo sapiens
cgaaaaatacaaaaa

SEQ ID NO: 984120 - DNA, 15 bp, Homo sapiens
gaaaaatacaaaaat

SEQ ID NO: 984121 - DNA, 15 bp, Homo sapiens
aatacaaaaattagc

SEQ ID NO: 984122 - DNA, 15 bp, Homo sapiens
atacaaaaattagcc

SEQ ID NO: 984123 - DNA, 15 bp, Homo sapiens
tacaaaaattagccg

SEQ ID NO: 984124 - DNA, 15 bp, Homo sapiens
acaaaaattagccgg

SEQ ID NO: 984125 - DNA, 15 bp, Homo sapiens
caaaaattagccggc

SEQ ID NO: 984126 - DNA, 15 bp, Homo sapiens
aaaaattagccggcg

SEQ ID NO: 984127 - DNA, 15 bp, Homo sapiens
aaaattagccggcgt

SEQ ID NO: 984128 - DNA, 15 bp, Homo sapiens
aaattagccggcgtc

SEQ ID NO: 984129 - DNA, 15 bp, Homo sapiens
aattagccggcgtcg

SEQ ID NO: 984130 - DNA, 15 bp, Homo sapiens
attagccggcgtcgt

SEQ ID NO: 984131 - DNA, 15 bp, Homo sapiens
ttagccggcgtcgtg

SEQ ID NO: 984132 - DNA, 15 bp, Homo sapiens
tagccggcgtcgtgg

SEQ ID NO: 984133 - DNA, 15 bp, Homo sapiens
agccggcgtcgtggc

SEQ ID NO: 984134 - DNA, 15 bp, Homo sapiens
gccggcgtcgtggcg

SEQ ID NO: 984135 - DNA, 15 bp, Homo sapiens
ccggcgtcgtggcgc

SEQ ID NO: 984136 - DNA, 15 bp, Homo sapiens
cggcgtcgtggcgca

SEQ ID NO: 984137 - DNA, 15 bp, Homo sapiens
ggcgtcgtggcgcac

SEQ ID NO: 984138 - DNA, 15 bp, Homo sapiens
gcgtcgtggcgcacg

SEQ ID NO: 984139 - DNA, 15 bp, Homo sapiens
cgtcgtggcgcacgc

SEQ ID NO: 984140 - DNA, 15 bp, Homo sapiens
gtcgtggcgcacgcc

SEQ ID NO: 984141 - DNA, 15 bp, Homo sapiens
tcgtggcgcacgcct

SEQ ID NO: 984142 - DNA, 15 bp, Homo sapiens
cgtggcgcacgcctg

SEQ ID NO: 984143 - DNA, 15 bp, Homo sapiens
gtggcgcacgcctgt

SEQ ID NO: 984144 - DNA, 15 bp, Homo sapiens
tggcgcacgcctgta

SEQ ID NO: 984145 - DNA, 15 bp, Homo sapiens
ggcgcacgcctgtaa

SEQ ID NO: 984146 - DNA, 15 bp, Homo sapiens
gcgcacgcctgtaat

SEQ ID NO: 984147 - DNA, 15 bp, Homo sapiens
cgcacgcctgtaatc

SEQ ID NO: 984148 - DNA, 15 bp, Homo sapiens
gcacgcctgtaatcc

SEQ ID NO: 984149 - DNA, 15 bp, Homo sapiens
acgcctgtaatcccc

SEQ ID NO: 984150 - DNA, 15 bp, Homo sapiens
cgcctgtaatccccg

SEQ ID NO: 984151 - DNA, 15 bp, Homo sapiens
gcctgtaatccccgc

SEQ ID NO: 984152 - DNA, 15 bp, Homo sapiens
cctgtaatccccgct

SEQ ID NO: 984153 - DNA, 15 bp, Homo sapiens
ctgtaatccccgcta

SEQ ID NO: 984154 - DNA, 15 bp, Homo sapiens
tgtaatccccgctac

SEQ ID NO: 984155 - DNA, 15 bp, Homo sapiens
gtaatccccgctact

SEQ ID NO: 984156 - DNA, 15 bp, Homo sapiens
taatccccgctactc

SEQ ID NO: 984157 - DNA, 15 bp, Homo sapiens
aatccccgctactcg

SEQ ID NO: 984158 - DNA, 15 bp, Homo sapiens
atccccgctactcgg

SEQ ID NO: 984159 - DNA, 15 bp, Homo sapiens
tccccgctactcggg

SEQ ID NO: 984160 - DNA, 15 bp, Homo sapiens
ccccgctactcggga

SEQ ID NO: 984161 - DNA, 15 bp, Homo sapiens
cccgctactcgggag

SEQ ID NO: 984162 - DNA, 15 bp, Homo sapiens
ccgctactcgggagg

SEQ ID NO: 984163 - DNA, 15 bp, Homo sapiens
ctactcgggaggctg

SEQ ID NO: 984164 - DNA, 15 bp, Homo sapiens
tactcgggaggctga

SEQ ID NO: 984165 - DNA, 15 bp, Homo sapiens
actcgggaggctgac

SEQ ID NO: 984166 - DNA, 15 bp, Homo sapiens
ctcgggaggctgacg

SEQ ID NO: 984167 - DNA, 15 bp, Homo sapiens
tcgggaggctgacgc

SEQ ID NO: 984168 - DNA, 15 bp, Homo sapiens
cgggaggctgacgca

SEQ ID NO: 984169 - DNA, 15 bp, Homo sapiens
gggaggctgacgcag

SEQ ID NO: 984170 - DNA, 15 bp, Homo sapiens
ggaggctgacgcagg

SEQ ID NO: 984171 - DNA, 15 bp, Homo sapiens
gaggctgacgcagga

SEQ ID NO: 984172 - DNA, 15 bp, Homo sapiens
aggctgacgcaggag

SEQ ID NO: 984173 - DNA, 15 bp, Homo sapiens
ggctgacgcaggaga

SEQ ID NO: 984174 - DNA, 15 bp, Homo sapiens
gctgacgcaggagaa

SEQ ID NO: 984175 - DNA, 15 bp, Homo sapiens
ctgacgcaggagaat

SEQ ID NO: 984176 - DNA, 15 bp, Homo sapiens
tgacgcaggagaatc

SEQ ID NO: 984177 - DNA, 15 bp, Homo sapiens
gacgcaggagaatcg

SEQ ID NO: 984178 - DNA, 15 bp, Homo sapiens
acgcaggagaatcgc

SEQ ID NO: 984179 - DNA, 15 bp, Homo sapiens
cgcaggagaatcgct

SEQ ID NO: 984180 - DNA, 15 bp, Homo sapiens
gcaggagaatcgctt

SEQ ID NO: 984181 - DNA, 15 bp, Homo sapiens
caggagaatcgcttg

SEQ ID NO: 984182 - DNA, 15 bp, Homo sapiens
aggagaatcgcttgg

SEQ ID NO: 984183 - DNA, 15 bp, Homo sapiens
ggagaatcgcttgga

SEQ ID NO: 984184 - DNA, 15 bp, Homo sapiens
gagaatcgcttggac

SEQ ID NO: 984185 - DNA, 15 bp, Homo sapiens
agaatcgcttggacg

SEQ ID NO: 984186 - DNA, 15 bp, Homo sapiens
gaatcgcttggacgc

SEQ ID NO: 984187 - DNA, 15 bp, Homo sapiens
aatcgcttggacgca

SEQ ID NO: 984188 - DNA, 15 bp, Homo sapiens
atcgcttggacgcag

SEQ ID NO: 984189 - DNA, 15 bp, Homo sapiens
tcgcttggacgcagg

SEQ ID NO: 984190 - DNA, 15 bp, Homo sapiens
cgcttggacgcagga

SEQ ID NO: 984191 - DNA, 15 bp, Homo sapiens
gcttggacgcaggag

SEQ ID NO: 984192 - DNA, 15 bp, Homo sapiens
cttggacgcaggagg

SEQ ID NO: 984193 - DNA, 15 bp, Homo sapiens
ttggacgcaggaggc

SEQ ID NO: 984194 - DNA, 15 bp, Homo sapiens
tggacgcaggaggcg

SEQ ID NO: 984195 - DNA, 15 bp, Homo sapiens
ggacgcaggaggcgg

SEQ ID NO: 984196 - DNA, 15 bp, Homo sapiens
gacgcaggaggcgga

SEQ ID NO: 984197 - DNA, 15 bp, Homo sapiens
acgcaggaggcggag

SEQ ID NO: 984198 - DNA, 15 bp, Homo sapiens
cgcaggaggcggagg

SEQ ID NO: 984199 - DNA, 15 bp, Homo sapiens
gcaggaggcggaggt

SEQ ID NO: 984200 - DNA, 15 bp, Homo sapiens
caggaggcggaggtt

SEQ ID NO: 984201 - DNA, 15 bp, Homo sapiens
aggaggcggaggttg

SEQ ID NO: 984202 - DNA, 15 bp, Homo sapiens
ggaggcggaggttgc

SEQ ID NO: 984203 - DNA, 15 bp, Homo sapiens
gaggcggaggttgca

SEQ ID NO: 984204 - DNA, 15 bp, Homo sapiens
aggcggaggttgcac

SEQ ID NO: 984205 - DNA, 15 bp, Homo sapiens
ggcggaggttgcact

SEQ ID NO: 984206 - DNA, 15 bp, Homo sapiens
gcggaggttgcactg

SEQ ID NO: 984207 - DNA, 15 bp, Homo sapiens
cggaggttgcactga

SEQ ID NO: 984208 - DNA, 15 bp, Homo sapiens
ggaggttgcactgag

SEQ ID NO: 984209 - DNA, 15 bp, Homo sapiens
gaggttgcactgagc

SEQ ID NO: 984210 - DNA, 15 bp, Homo sapiens
aggttgcactgagct

SEQ ID NO: 984211 - DNA, 15 bp, Homo sapiens
ggttgcactgagctg

SEQ ID NO: 984212 - DNA, 15 bp, Homo sapiens
gttgcactgagctga

SEQ ID NO: 984213 - DNA, 15 bp, Homo sapiens
ttgcactgagctgag

SEQ ID NO: 984214 - DNA, 15 bp, Homo sapiens
tgcactgagctgaga

SEQ ID NO: 984215 - DNA, 15 bp, Homo sapiens
gcactgagctgagat

SEQ ID NO: 984216 - DNA, 15 bp, Homo sapiens
cactgagctgagatc

SEQ ID NO: 984217 - DNA, 15 bp, Homo sapiens
actgagctgagatcg

SEQ ID NO: 984218 - DNA, 15 bp, Homo sapiens
ctgagctgagatcgt

SEQ ID NO: 984219 - DNA, 15 bp, Homo sapiens
tgagctgagatcgtg

SEQ ID NO: 984220 - DNA, 15 bp, Homo sapiens
gagctgagatcgtgc

SEQ ID NO: 984221 - DNA, 15 bp, Homo sapiens
agctgagatcgtgcc

SEQ ID NO: 984222 - DNA, 15 bp, Homo sapiens
gctgagatcgtgcca

SEQ ID NO: 984223 - DNA, 15 bp, Homo sapiens
ctgagatcgtgccac

SEQ ID NO: 984224 - DNA, 15 bp, Homo sapiens
tgagatcgtgccact

SEQ ID NO: 984225 - DNA, 15 bp, Homo sapiens
atcgtgccactgcat

SEQ ID NO: 984226 - DNA, 15 bp, Homo sapiens
tcgtgccactgcatt

SEQ ID NO: 984227 - DNA, 15 bp, Homo sapiens
cgtgccactgcattc

SEQ ID NO: 984228 - DNA, 15 bp, Homo sapiens
gtgccactgcattcc

SEQ ID NO: 984229 - DNA, 15 bp, Homo sapiens
tgccactgcattcca

SEQ ID NO: 984230 - DNA, 15 bp, Homo sapiens
gccactgcattccag

SEQ ID NO: 984231 - DNA, 15 bp, Homo sapiens
ccactgcattccagc

SEQ ID NO: 984232 - DNA, 15 bp, Homo sapiens
cactgcattccagct

SEQ ID NO: 984233 - DNA, 15 bp, Homo sapiens
actgcattccagctt

SEQ ID NO: 984234 - DNA, 15 bp, Homo sapiens
ctgcattccagcttg

SEQ ID NO: 984235 - DNA, 15 bp, Homo sapiens
tgcattccagcttgg

SEQ ID NO: 984236 - DNA, 15 bp, Homo sapiens
gcattccagcttggg

SEQ ID NO: 984237 - DNA, 15 bp, Homo sapiens
cattccagcttgggc

SEQ ID NO: 984238 - DNA, 15 bp, Homo sapiens
attccagcttgggcg

SEQ ID NO: 984239 - DNA, 15 bp, Homo sapiens
ttccagcttgggcga

SEQ ID NO: 984240 - DNA, 15 bp, Homo sapiens
tccagcttgggcgac

SEQ ID NO: 984241 - DNA, 15 bp, Homo sapiens
ccagcttgggcgaca

SEQ ID NO: 984242 - DNA, 15 bp, Homo sapiens
cagcttgggcgacac

SEQ ID NO: 984243 - DNA, 15 bp, Homo sapiens
agcttgggcgacaca

SEQ ID NO: 984244 - DNA, 15 bp, Homo sapiens
gcttgggcgacacag

SEQ ID NO: 984245 - DNA, 15 bp, Homo sapiens
cttgggcgacacagc

SEQ ID NO: 984246 - DNA, 15 bp, Homo sapiens
ttgggcgacacagcg

SEQ ID NO: 984247 - DNA, 15 bp, Homo sapiens
tgggcgacacagcga

SEQ ID NO: 984248 - DNA, 15 bp, Homo sapiens
gggcgacacagcgag

SEQ ID NO: 984249 - DNA, 15 bp, Homo sapiens
ggcgacacagcgaga

SEQ ID NO: 984250 - DNA, 15 bp, Homo sapiens
gcgacacagcgagac

SEQ ID NO: 984251 - DNA, 15 bp, Homo sapiens
cgacacagcgagact

SEQ ID NO: 984252 - DNA, 15 bp, Homo sapiens
gacacagcgagactc

SEQ ID NO: 984253 - DNA, 15 bp, Homo sapiens
acacagcgagactct

SEQ ID NO: 984254 - DNA, 15 bp, Homo sapiens
cacagcgagactctg

SEQ ID NO: 984255 - DNA, 15 bp, Homo sapiens
acagcgagactctgt

SEQ ID NO: 984256 - DNA, 15 bp, Homo sapiens
cagcgagactctgtc

SEQ ID NO: 984257 - DNA, 15 bp, Homo sapiens
agcgagactctgtct

SEQ ID NO: 984258 - DNA, 15 bp, Homo sapiens
gcgagactctgtctc

SEQ ID NO: 984259 - DNA, 15 bp, Homo sapiens
cgagactctgtctca

SEQ ID NO: 984260 - DNA, 15 bp, Homo sapiens
gagactctgtctcac

SEQ ID NO: 984261 - DNA, 15 bp, Homo sapiens
agactctgtctcaca

SEQ ID NO: 984262 - DNA, 15 bp, Homo sapiens
gactctgtctcacaa

SEQ ID NO: 984263 - DNA, 15 bp, Homo sapiens
actctgtctcacaaa

SEQ ID NO: 984264 - DNA, 15 bp, Homo sapiens
ctctgtctcacaaaa

SEQ ID NO: 984265 - DNA, 15 bp, Homo sapiens
tctgtctcacaaaaa

SEQ ID NO: 984266 - DNA, 15 bp, Homo sapiens
ctgtctcacaaaaaa

SEQ ID NO: 984267 - DNA, 15 bp, Homo sapiens
tgtctcacaaaaaaa

SEQ ID NO: 984268 - DNA, 15 bp, Homo sapiens
gtctcacaaaaaaaa

SEQ ID NO: 984269 - DNA, 15 bp, Homo sapiens
tctcacaaaaaaaaa

SEQ ID NO: 984270 - DNA, 15 bp, Homo sapiens
ctcacaaaaaaaaaa

SEQ ID NO: 984271 - DNA, 15 bp, Homo sapiens
tcacaaaaaaaaaaa

SEQ ID NO: 984272 - DNA, 15 bp, Homo sapiens
cacaaaaaaaaaaaa

SEQ ID NO: 984273 - DNA, 15 bp, Homo sapiens
acaaaaaaaaaaaaa

SEQ ID NO: 984274 - DNA, 15 bp, Homo sapiens
aaaaaaaaaaagaaa

SEQ ID NO: 984275 - DNA, 15 bp, Homo sapiens
aaaaaaaaaagaaag

SEQ ID NO: 984276 - DNA, 15 bp, Homo sapiens
aaaaaaaaagaaaga

SEQ ID NO: 984277 - DNA, 15 bp, Homo sapiens
aaaaaaaagaaagaa

SEQ ID NO: 984278 - DNA, 15 bp, Homo sapiens
aaaaaaagaaagaaa

SEQ ID NO: 984279 - DNA, 15 bp, Homo sapiens
aaaaaagaaagaaaa

SEQ ID NO: 984280 - DNA, 15 bp, Homo sapiens
aaaaagaaagaaaaa

SEQ ID NO: 984281 - DNA, 15 bp, Homo sapiens
aaaagaaagaaaaaa

SEQ ID NO: 984282 - DNA, 15 bp, Homo sapiens
aaagaaagaaaaaaa

SEQ ID NO: 984283 - DNA, 15 bp, Homo sapiens
aagaaagaaaaaaaa

SEQ ID NO: 984284 - DNA, 15 bp, Homo sapiens
agaaagaaaaaaaaa

SEQ ID NO: 984285 - DNA, 15 bp, Homo sapiens
gaaagaaaaaaaaag

SEQ ID NO: 984286 - DNA, 15 bp, Homo sapiens
aaagaaaaaaaaagg

SEQ ID NO: 984287 - DNA, 15 bp, Homo sapiens
aagaaaaaaaaagga

SEQ ID NO: 984288 - DNA, 15 bp, Homo sapiens
agaaaaaaaaaggaa

SEQ ID NO: 984289 - DNA, 15 bp, Homo sapiens
gaaaaaaaaaggaaa

SEQ ID NO: 984290 - DNA, 15 bp, Homo sapiens
aaaaaaaaaggaaag

SEQ ID NO: 984291 - DNA, 15 bp, Homo sapiens
aaaaaaaaggaaagg

SEQ ID NO: 984292 - DNA, 15 bp, Homo sapiens
aaaaaaaggaaaggg

SEQ ID NO: 984293 - DNA, 15 bp, Homo sapiens
aaaaaaggaaagggc

SEQ ID NO: 984294 - DNA, 15 bp, Homo sapiens
aaaaaggaaagggct

SEQ ID NO: 984295 - DNA, 15 bp, Homo sapiens
aaaaggaaagggctt

SEQ ID NO: 984296 - DNA, 15 bp, Homo sapiens
aaaggaaagggcttc

SEQ ID NO: 984297 - DNA, 15 bp, Homo sapiens
aaggaaagggcttcg

SEQ ID NO: 984298 - DNA, 15 bp, Homo sapiens
aggaaagggcttcga

SEQ ID NO: 984299 - DNA, 15 bp, Homo sapiens
ggaaagggcttcgag

SEQ ID NO: 984300 - DNA, 15 bp, Homo sapiens
gaaagggcttcgaga

SEQ ID NO: 984301 - DNA, 15 bp, Homo sapiens
aaagggcttcgagat

SEQ ID NO: 984302 - DNA, 15 bp, Homo sapiens
aagggcttcgagatg

SEQ ID NO: 984303 - DNA, 15 bp, Homo sapiens
agggcttcgagatgg

SEQ ID NO: 984304 - DNA, 15 bp, Homo sapiens
gggcttcgagatggc

SEQ ID NO: 984305 - DNA, 15 bp, Homo sapiens
ggcttcgagatggct

SEQ ID NO: 984306 - DNA, 15 bp, Homo sapiens
gcttcgagatggctg

SEQ ID NO: 984307 - DNA, 15 bp, Homo sapiens
cttcgagatggctgg

SEQ ID NO: 984308 - DNA, 15 bp, Homo sapiens
ttcgagatggctggt

SEQ ID NO: 984309 - DNA, 15 bp, Homo sapiens
tcgagatggctggtt

SEQ ID NO: 984310 - DNA, 15 bp, Homo sapiens
cgagatggctggttg

SEQ ID NO: 984311 - DNA, 15 bp, Homo sapiens
gagatggctggttga

SEQ ID NO: 984312 - DNA, 15 bp, Homo sapiens
agatggctggttgaa

SEQ ID NO: 984313 - DNA, 15 bp, Homo sapiens
gatggctggttgaaa

SEQ ID NO: 984314 - DNA, 15 bp, Homo sapiens
atggctggttgaaaa

SEQ ID NO: 984315 - DNA, 15 bp, Homo sapiens
tggctggttgaaaac

SEQ ID NO: 984316 - DNA, 15 bp, Homo sapiens
ggctggttgaaaact

SEQ ID NO: 984317 - DNA, 15 bp, Homo sapiens
gctggttgaaaactg

SEQ ID NO: 984318 - DNA, 15 bp, Homo sapiens
ctggttgaaaactgt

SEQ ID NO: 984319 - DNA, 15 bp, Homo sapiens
tggttgaaaactgtc

SEQ ID NO: 984320 - DNA, 15 bp, Homo sapiens
ggttgaaaactgtct

SEQ ID NO: 984321 - DNA, 15 bp, Homo sapiens
gttgaaaactgtctc

SEQ ID NO: 984322 - DNA, 15 bp, Homo sapiens
ttgaaaactgtctcc

SEQ ID NO: 984323 - DNA, 15 bp, Homo sapiens
tgaaaactgtctccg

SEQ ID NO: 984324 - DNA, 15 bp, Homo sapiens
gaaaactgtctccgc

SEQ ID NO: 984325 - DNA, 15 bp, Homo sapiens
aaaactgtctccgcg

SEQ ID NO: 984326 - DNA, 15 bp, Homo sapiens
aaactgtctccgcgc

SEQ ID NO: 984327 - DNA, 15 bp, Homo sapiens
aactgtctccgcgcc

SEQ ID NO: 984328 - DNA, 15 bp, Homo sapiens
actgtctccgcgcct

SEQ ID NO: 984329 - DNA, 15 bp, Homo sapiens
ctgtctccgcgcctc

SEQ ID NO: 984330 - DNA, 15 bp, Homo sapiens
tgtctccgcgcctca

SEQ ID NO: 984331 - DNA, 15 bp, Homo sapiens
gtctccgcgcctcac

SEQ ID NO: 984332 - DNA, 15 bp, Homo sapiens
tctccgcgcctcaca

SEQ ID NO: 984333 - DNA, 15 bp, Homo sapiens
ctccgcgcctcacag

SEQ ID NO: 984334 - DNA, 15 bp, Homo sapiens
tccgcgcctcacagt

SEQ ID NO: 984335 - DNA, 15 bp, Homo sapiens
ccgcgcctcacagtc

SEQ ID NO: 984336 - DNA, 15 bp, Homo sapiens
cgcgcctcacagtcc

SEQ ID NO: 984337 - DNA, 15 bp, Homo sapiens
gcgcctcacagtccc

SEQ ID NO: 984338 - DNA, 15 bp, Homo sapiens
cgcctcacagtccct

SEQ ID NO: 984339 - DNA, 15 bp, Homo sapiens
gcctcacagtccctc

SEQ ID NO: 984340 - DNA, 15 bp, Homo sapiens
cctcacagtccctct

SEQ ID NO: 984341 - DNA, 15 bp, Homo sapiens
ctcacagtccctctt

SEQ ID NO: 984342 - DNA, 15 bp, Homo sapiens
tcacagtccctcttc

SEQ ID NO: 984343 - DNA, 15 bp, Homo sapiens
cacagtccctcttct

SEQ ID NO: 984344 - DNA, 15 bp, Homo sapiens
acagtccctcttctc

SEQ ID NO: 984345 - DNA, 15 bp, Homo sapiens
cagtccctcttctct

SEQ ID NO: 984346 - DNA, 15 bp, Homo sapiens
agtccctcttctctc

SEQ ID NO: 984347 - DNA, 15 bp, Homo sapiens
gtccctcttctctcc

SEQ ID NO: 984348 - DNA, 15 bp, Homo sapiens
tccctcttctctccc

SEQ ID NO: 984349 - DNA, 15 bp, Homo sapiens
ccctcttctctccct

SEQ ID NO: 984350 - DNA, 15 bp, Homo sapiens
cctcttctctccctt

SEQ ID NO: 984351 - DNA, 15 bp, Homo sapiens
ctcttctctccctta

SEQ ID NO: 984352 - DNA, 15 bp, Homo sapiens
tcttctctcccttat

SEQ ID NO: 984353 - DNA, 15 bp, Homo sapiens
cttctctcccttatg

SEQ ID NO: 984354 - DNA, 15 bp, Homo sapiens
ttctctcccttatgc

SEQ ID NO: 984355 - DNA, 15 bp, Homo sapiens
tctctcccttatgcc

SEQ ID NO: 984356 - DNA, 15 bp, Homo sapiens
ctctcccttatgcct

SEQ ID NO: 984357 - DNA, 15 bp, Homo sapiens
tctcccttatgcctc

SEQ ID NO: 984358 - DNA, 15 bp, Homo sapiens
ctcccttatgcctct

SEQ ID NO: 984359 - DNA, 15 bp, Homo sapiens
tcccttatgcctctg

SEQ ID NO: 984360 - DNA, 15 bp, Homo sapiens
cccttatgcctctga

SEQ ID NO: 984361 - DNA, 15 bp, Homo sapiens
ccttatgcctctgag

SEQ ID NO: 984362 - DNA, 15 bp, Homo sapiens
cttatgcctctgagt

SEQ ID NO: 984363 - DNA, 15 bp, Homo sapiens
ttatgcctctgagta

SEQ ID NO: 984364 - DNA, 15 bp, Homo sapiens
tatgcctctgagtaa

SEQ ID NO: 984365 - DNA, 15 bp, Homo sapiens
atgcctctgagtaaa

SEQ ID NO: 984366 - DNA, 15 bp, Homo sapiens
tgcctctgagtaaat

SEQ ID NO: 984367 - DNA, 15 bp, Homo sapiens
gcctctgagtaaatc

SEQ ID NO: 984368 - DNA, 15 bp, Homo sapiens
cctctgagtaaatct

SEQ ID NO: 984369 - DNA, 15 bp, Homo sapiens
ctctgagtaaatctt

SEQ ID NO: 984370 - DNA, 15 bp, Homo sapiens
tctgagtaaatcttg

SEQ ID NO: 984371 - DNA, 15 bp, Homo sapiens
ctgagtaaatcttga

SEQ ID NO: 984372 - DNA, 15 bp, Homo sapiens
tgagtaaatcttgag

SEQ ID NO: 984373 - DNA, 15 bp, Homo sapiens
gagtaaatcttgagc

SEQ ID NO: 984374 - DNA, 15 bp, Homo sapiens
agtaaatcttgagcc

SEQ ID NO: 984375 - DNA, 15 bp, Homo sapiens
gtaaatcttgagccc

SEQ ID NO: 984376 - DNA, 15 bp, Homo sapiens
taaatcttgagccct

SEQ ID NO: 984377 - DNA, 15 bp, Homo sapiens
aaatcttgagccctt

SEQ ID NO: 984378 - DNA, 15 bp, Homo sapiens
aatcttgagcccttt

SEQ ID NO: 984379 - DNA, 15 bp, Homo sapiens
atcttgagccctttc

SEQ ID NO: 984380 - DNA, 15 bp, Homo sapiens
tcttgagccctttca

SEQ ID NO: 984381 - DNA, 15 bp, Homo sapiens
cttgagccctttcac

SEQ ID NO: 984382 - DNA, 15 bp, Homo sapiens
ttgagccctttcact

SEQ ID NO: 984383 - DNA, 15 bp, Homo sapiens
tgagccctttcactc

SEQ ID NO: 984384 - DNA, 15 bp, Homo sapiens
gagccctttcactcc

SEQ ID NO: 984385 - DNA, 15 bp, Homo sapiens
agccctttcactccc

SEQ ID NO: 984386 - DNA, 15 bp, Homo sapiens
gccctttcactccct

SEQ ID NO: 984387 - DNA, 15 bp, Homo sapiens
ccctttcactccctt

SEQ ID NO: 984388 - DNA, 15 bp, Homo sapiens
cctttcactcccttt

SEQ ID NO: 984389 - DNA, 15 bp, Homo sapiens
ctttcactccctttc

SEQ ID NO: 984390 - DNA, 15 bp, Homo sapiens
tttcactccctttct

SEQ ID NO: 984391 - DNA, 15 bp, Homo sapiens
ttcactccctttctc

SEQ ID NO: 984392 - DNA, 15 bp, Homo sapiens
tcactccctttctcg

SEQ ID NO: 984393 - DNA, 15 bp, Homo sapiens
cactccctttctcgc

SEQ ID NO: 984394 - DNA, 15 bp, Homo sapiens
actccctttctcgct

SEQ ID NO: 984395 - DNA, 15 bp, Homo sapiens
ctccctttctcgcta

SEQ ID NO: 984396 - DNA, 15 bp, Homo sapiens
tccctttctcgctat

SEQ ID NO: 984397 - DNA, 15 bp, Homo sapiens
ccctttctcgctatt

SEQ ID NO: 984398 - DNA, 15 bp, Homo sapiens
cctttctcgctattt

SEQ ID NO: 984399 - DNA, 15 bp, Homo sapiens
ctttctcgctattta

SEQ ID NO: 984400 - DNA, 15 bp, Homo sapiens
tttctcgctatttaa

SEQ ID NO: 984401 - DNA, 15 bp, Homo sapiens
ttctcgctatttaaa

SEQ ID NO: 984402 - DNA, 15 bp, Homo sapiens
tctcgctatttaaag

SEQ ID NO: 984403 - DNA, 15 bp, Homo sapiens
ctcgctatttaaagt

SEQ ID NO: 984404 - DNA, 15 bp, Homo sapiens
tcgctatttaaagta

SEQ ID NO: 984405 - DNA, 15 bp, Homo sapiens
cgctatttaaagtat

SEQ ID NO: 984406 - DNA, 15 bp, Homo sapiens
gctatttaaagtatc

SEQ ID NO: 984407 - DNA, 15 bp, Homo sapiens
ctatttaaagtatca

SEQ ID NO: 984408 - DNA, 15 bp, Homo sapiens
tatttaaagtatcaa

SEQ ID NO: 984409 - DNA, 15 bp, Homo sapiens
atttaaagtatcaaa

SEQ ID NO: 984410 - DNA, 15 bp, Homo sapiens
tttaaagtatcaaaa

SEQ ID NO: 984411 - DNA, 15 bp, Homo sapiens
ttaaagtatcaaaac

SEQ ID NO: 984412 - DNA, 15 bp, Homo sapiens
taaagtatcaaaacc

SEQ ID NO: 984413 - DNA, 15 bp, Homo sapiens
aaagtatcaaaacca

SEQ ID NO: 984414 - DNA, 15 bp, Homo sapiens
aagtatcaaaaccat

SEQ ID NO: 984415 - DNA, 15 bp, Homo sapiens
agtatcaaaaccata

SEQ ID NO: 984416 - DNA, 15 bp, Homo sapiens
gtatcaaaaccataa

SEQ ID NO: 984417 - DNA, 15 bp, Homo sapiens
tatcaaaaccataac

SEQ ID NO: 984418 - DNA, 15 bp, Homo sapiens
atcaaaaccataact

SEQ ID NO: 984419 - DNA, 15 bp, Homo sapiens
tcaaaaccataactc

SEQ ID NO: 984420 - DNA, 15 bp, Homo sapiens
caaaaccataactcc

SEQ ID NO: 984421 - DNA, 15 bp, Homo sapiens
aaaaccataactccc

SEQ ID NO: 984422 - DNA, 15 bp, Homo sapiens
aaaccataactcccc

SEQ ID NO: 984423 - DNA, 15 bp, Homo sapiens
aaccataactcccca

SEQ ID NO: 984424 - DNA, 15 bp, Homo sapiens
accataactccccat

SEQ ID NO: 984425 - DNA, 15 bp, Homo sapiens
ccataactccccatt

SEQ ID NO: 984426 - DNA, 15 bp, Homo sapiens
cataactccccattc

SEQ ID NO: 984427 - DNA, 15 bp, Homo sapiens
ataactccccattcg

SEQ ID NO: 984428 - DNA, 15 bp, Homo sapiens
taactccccattcgt

SEQ ID NO: 984429 - DNA, 15 bp, Homo sapiens
aactccccattcgtg

SEQ ID NO: 984430 - DNA, 15 bp, Homo sapiens
actccccattcgtgc

SEQ ID NO: 984431 - DNA, 15 bp, Homo sapiens
ctccccattcgtgcc

SEQ ID NO: 984432 - DNA, 15 bp, Homo sapiens
tccccattcgtgcct

SEQ ID NO: 984433 - DNA, 15 bp, Homo sapiens
ccccattcgtgcctc

SEQ ID NO: 984434 - DNA, 15 bp, Homo sapiens
cccattcgtgcctct

SEQ ID NO: 984435 - DNA, 15 bp, Homo sapiens
ccattcgtgcctctt

SEQ ID NO: 984436 - DNA, 15 bp, Homo sapiens
cattcgtgcctcttt

SEQ ID NO: 984437 - DNA, 15 bp, Homo sapiens
attcgtgcctctttc

SEQ ID NO: 984438 - DNA, 15 bp, Homo sapiens
ttcgtgcctctttcc

SEQ ID NO: 984439 - DNA, 15 bp, Homo sapiens
tcgtgcctctttccg

SEQ ID NO: 984440 - DNA, 15 bp, Homo sapiens
cgtgcctctttccgc

SEQ ID NO: 984441 - DNA, 15 bp, Homo sapiens
gtgcctctttccgcc

SEQ ID NO: 984442 - DNA, 15 bp, Homo sapiens
tgcctctttccgcct

SEQ ID NO: 984443 - DNA, 15 bp, Homo sapiens
gcctctttccgcctg

SEQ ID NO: 984444 - DNA, 15 bp, Homo sapiens
cctctttccgcctgt

SEQ ID NO: 984445 - DNA, 15 bp, Homo sapiens
ctctttccgcctgtt

SEQ ID NO: 984446 - DNA, 15 bp, Homo sapiens
tctttccgcctgttc

SEQ ID NO: 984447 - DNA, 15 bp, Homo sapiens
ctttccgcctgttcc

SEQ ID NO: 984448 - DNA, 15 bp, Homo sapiens
tttccgcctgttccc

SEQ ID NO: 984449 - DNA, 15 bp, Homo sapiens
ttccgcctgttcccg

SEQ ID NO: 984450 - DNA, 15 bp, Homo sapiens
tccgcctgttcccgg

SEQ ID NO: 984451 - DNA, 15 bp, Homo sapiens
ccgcctgttcccggc

SEQ ID NO: 984452 - DNA, 15 bp, Homo sapiens
cgcctgttcccggcg

SEQ ID NO: 984453 - DNA, 15 bp, Homo sapiens
gcctgttcccggcgg

SEQ ID NO: 984454 - DNA, 15 bp, Homo sapiens
cctgttcccggcgga

SEQ ID NO: 984455 - DNA, 15 bp, Homo sapiens
ctgttcccggcggaa

SEQ ID NO: 984456 - DNA, 15 bp, Homo sapiens
tgttcccggcggaac

SEQ ID NO: 984457 - DNA, 15 bp, Homo sapiens
gttcccggcggaaca

SEQ ID NO: 984458 - DNA, 15 bp, Homo sapiens
ttcccggcggaacac

SEQ ID NO: 984459 - DNA, 15 bp, Homo sapiens
tcccggcggaacact

SEQ ID NO: 984460 - DNA, 15 bp, Homo sapiens
cccggcggaacactc

SEQ ID NO: 984461 - DNA, 15 bp, Homo sapiens
ccggcggaacactcc

SEQ ID NO: 984462 - DNA, 15 bp, Homo sapiens
cggcggaacactcct

SEQ ID NO: 984463 - DNA, 15 bp, Homo sapiens
ggcggaacactcctc

SEQ ID NO: 984464 - DNA, 15 bp, Homo sapiens
gcggaacactcctct

SEQ ID NO: 984465 - DNA, 15 bp, Homo sapiens
cggaacactcctctg

SEQ ID NO: 984466 - DNA, 15 bp, Homo sapiens
ggaacactcctctgg

SEQ ID NO: 984467 - DNA, 15 bp, Homo sapiens
gaacactcctctggc

SEQ ID NO: 984468 - DNA, 15 bp, Homo sapiens
aacactcctctggcc

SEQ ID NO: 984469 - DNA, 15 bp, Homo sapiens
acactcctctggcct

SEQ ID NO: 984470 - DNA, 15 bp, Homo sapiens
cactcctctggcctt

SEQ ID NO: 984471 - DNA, 15 bp, Homo sapiens
actcctctggccttc

SEQ ID NO: 984472 - DNA, 15 bp, Homo sapiens
ctcctctggccttct

SEQ ID NO: 984473 - DNA, 15 bp, Homo sapiens
tcctctggccttctc

SEQ ID NO: 984474 - DNA, 15 bp, Homo sapiens
cctctggccttctct

SEQ ID NO: 984475 - DNA, 15 bp, Homo sapiens
ctctggccttctctt

SEQ ID NO: 984476 - DNA, 15 bp, Homo sapiens
tctggccttctcttg

SEQ ID NO: 984477 - DNA, 15 bp, Homo sapiens
ctggccttctcttga

SEQ ID NO: 984478 - DNA, 15 bp, Homo sapiens
tggccttctcttgag

SEQ ID NO: 984479 - DNA, 15 bp, Homo sapiens
ggccttctcttgagg

SEQ ID NO: 984480 - DNA, 15 bp, Homo sapiens
gccttctcttgaggc

SEQ ID NO: 984481 - DNA, 15 bp, Homo sapiens
ccttctcttgaggct

SEQ ID NO: 984482 - DNA, 15 bp, Homo sapiens
cttctcttgaggctc

SEQ ID NO: 984483 - DNA, 15 bp, Homo sapiens
ttctcttgaggctcc

SEQ ID NO: 984484 - DNA, 15 bp, Homo sapiens
tctcttgaggctccc

SEQ ID NO: 984485 - DNA, 15 bp, Homo sapiens
ctcttgaggctccca

SEQ ID NO: 984486 - DNA, 15 bp, Homo sapiens
tcttgaggctcccag

SEQ ID NO: 984487 - DNA, 15 bp, Homo sapiens
cttgaggctcccagt

SEQ ID NO: 984488 - DNA, 15 bp, Homo sapiens
ttgaggctcccagtt

SEQ ID NO: 984489 - DNA, 15 bp, Homo sapiens
tgaggctcccagttc

SEQ ID NO: 984490 - DNA, 15 bp, Homo sapiens
gaggctcccagttca

SEQ ID NO: 984491 - DNA, 15 bp, Homo sapiens
aggctcccagttcac

SEQ ID NO: 984492 - DNA, 15 bp, Homo sapiens
ggctcccagttcacg

SEQ ID NO: 984493 - DNA, 15 bp, Homo sapiens
gctcccagttcacgc

SEQ ID NO: 984494 - DNA, 15 bp, Homo sapiens
ctcccagttcacgct

SEQ ID NO: 984495 - DNA, 15 bp, Homo sapiens
tcccagttcacgctg

SEQ ID NO: 984496 - DNA, 15 bp, Homo sapiens
cccagttcacgctgc

SEQ ID NO: 984497 - DNA, 15 bp, Homo sapiens
ccagttcacgctgca

SEQ ID NO: 984498 - DNA, 15 bp, Homo sapiens
cagttcacgctgcac

SEQ ID NO: 984499 - DNA, 15 bp, Homo sapiens
agttcacgctgcaca

SEQ ID NO: 984500 - DNA, 15 bp, Homo sapiens
gttcacgctgcacag

SEQ ID NO: 984501 - DNA, 15 bp, Homo sapiens
ttcacgctgcacagt

SEQ ID NO: 984502 - DNA, 15 bp, Homo sapiens
tcacgctgcacagtg

SEQ ID NO: 984503 - DNA, 15 bp, Homo sapiens
cacgctgcacagtgc

SEQ ID NO: 984504 - DNA, 15 bp, Homo sapiens
acgctgcacagtgct

SEQ ID NO: 984505 - DNA, 15 bp, Homo sapiens
cgctgcacagtgctg

SEQ ID NO: 984506 - DNA, 15 bp, Homo sapiens
gctgcacagtgctgg

SEQ ID NO: 984507 - DNA, 15 bp, Homo sapiens
ctgcacagtgctggg

SEQ ID NO: 984508 - DNA, 15 bp, Homo sapiens
tgcacagtgctgggc

SEQ ID NO: 984509 - DNA, 15 bp, Homo sapiens
gcacagtgctgggca

SEQ ID NO: 984510 - DNA, 15 bp, Homo sapiens
cacagtgctgggcac

SEQ ID NO: 984511 - DNA, 15 bp, Homo sapiens
acagtgctgggcact

SEQ ID NO: 984512 - DNA, 15 bp, Homo sapiens
cagtgctgggcactg

SEQ ID NO: 984513 - DNA, 15 bp, Homo sapiens
agtgctgggcactgc

SEQ ID NO: 984514 - DNA, 15 bp, Homo sapiens
gtgctgggcactgcc

SEQ ID NO: 984515 - DNA, 15 bp, Homo sapiens
tgctgggcactgcct

SEQ ID NO: 984516 - DNA, 15 bp, Homo sapiens
gctgggcactgcctc

SEQ ID NO: 984517 - DNA, 15 bp, Homo sapiens
ctgggcactgcctcc

SEQ ID NO: 984518 - DNA, 15 bp, Homo sapiens
tgggcactgcctcct

SEQ ID NO: 984519 - DNA, 15 bp, Homo sapiens
gggcactgcctcctc

SEQ ID NO: 984520 - DNA, 15 bp, Homo sapiens
ggcactgcctcctct

SEQ ID NO: 984521 - DNA, 15 bp, Homo sapiens
gcactgcctcctctc

SEQ ID NO: 984522 - DNA, 15 bp, Homo sapiens
cactgcctcctctcc

SEQ ID NO: 984523 - DNA, 15 bp, Homo sapiens
actgcctcctctcca

SEQ ID NO: 984524 - DNA, 15 bp, Homo sapiens
ctgcctcctctccac

SEQ ID NO: 984525 - DNA, 15 bp, Homo sapiens
tgcctcctctccaca

SEQ ID NO: 984526 - DNA, 15 bp, Homo sapiens
gcctcctctccacac

SEQ ID NO: 984527 - DNA, 15 bp, Homo sapiens
cctcctctccacacc

SEQ ID NO: 984528 - DNA, 15 bp, Homo sapiens
ctcctctccacaccc

SEQ ID NO: 984529 - DNA, 15 bp, Homo sapiens
tcctctccacacccc

SEQ ID NO: 984530 - DNA, 15 bp, Homo sapiens
cctctccacacccct

SEQ ID NO: 984531 - DNA, 15 bp, Homo sapiens
ctctccacaccccta

SEQ ID NO: 984532 - DNA, 15 bp, Homo sapiens
tctccacacccctag

SEQ ID NO: 984533 - DNA, 15 bp, Homo sapiens
ctccacacccctagc

SEQ ID NO: 984534 - DNA, 15 bp, Homo sapiens
tccacacccctagcg

SEQ ID NO: 984535 - DNA, 15 bp, Homo sapiens
ccacacccctagcgc

SEQ ID NO: 984536 - DNA, 15 bp, Homo sapiens
cacacccctagcgcc

SEQ ID NO: 984537 - DNA, 15 bp, Homo sapiens
acacccctagcgccc

SEQ ID NO: 984538 - DNA, 15 bp, Homo sapiens
cacccctagcgcccc

SEQ ID NO: 984539 - DNA, 15 bp, Homo sapiens
acccctagcgccccc

SEQ ID NO: 984540 - DNA, 15 bp, Homo sapiens
cccctagcgcccccc

SEQ ID NO: 984541 - DNA, 15 bp, Homo sapiens
ccctagcgcccccca

SEQ ID NO: 984542 - DNA, 15 bp, Homo sapiens
cctagcgccccccac

SEQ ID NO: 984543 - DNA, 15 bp, Homo sapiens
ctagcgccccccacc

SEQ ID NO: 984544 - DNA, 15 bp, Homo sapiens
tagcgccccccaccc

SEQ ID NO: 984545 - DNA, 15 bp, Homo sapiens
agcgccccccacccc

SEQ ID NO: 984546 - DNA, 15 bp, Homo sapiens
gcgccccccacccct

SEQ ID NO: 984547 - DNA, 15 bp, Homo sapiens
cgccccccacccctc

SEQ ID NO: 984548 - DNA, 15 bp, Homo sapiens
gccccccacccctca

SEQ ID NO: 984549 - DNA, 15 bp, Homo sapiens
ccccccacccctcag

SEQ ID NO: 984550 - DNA, 15 bp, Homo sapiens
cccccacccctcagc

SEQ ID NO: 984551 - DNA, 15 bp, Homo sapiens
ccccacccctcagca

SEQ ID NO: 984552 - DNA, 15 bp, Homo sapiens
cccacccctcagcag

SEQ ID NO: 984553 - DNA, 15 bp, Homo sapiens
ccacccctcagcaga

SEQ ID NO: 984554 - DNA, 15 bp, Homo sapiens
cacccctcagcagaa

SEQ ID NO: 984555 - DNA, 15 bp, Homo sapiens
acccctcagcagaag

SEQ ID NO: 984556 - DNA, 15 bp, Homo sapiens
cccctcagcagaagg

SEQ ID NO: 984557 - DNA, 15 bp, Homo sapiens
ccctcagcagaaggg

SEQ ID NO: 984558 - DNA, 15 bp, Homo sapiens
cctcagcagaagggc

SEQ ID NO: 984559 - DNA, 15 bp, Homo sapiens
ctcagcagaagggcc

SEQ ID NO: 984560 - DNA, 15 bp, Homo sapiens
tcagcagaagggccc

SEQ ID NO: 984561 - DNA, 15 bp, Homo sapiens
cagcagaagggcccg

SEQ ID NO: 984562 - DNA, 15 bp, Homo sapiens
agcagaagggcccgc

SEQ ID NO: 984563 - DNA, 15 bp, Homo sapiens
gcagaagggcccgcg

SEQ ID NO: 984564 - DNA, 15 bp, Homo sapiens
cagaagggcccgcga

SEQ ID NO: 984565 - DNA, 15 bp, Homo sapiens
agaagggcccgcgag

SEQ ID NO: 984566 - DNA, 15 bp, Homo sapiens
gaagggcccgcgagg

SEQ ID NO: 984567 - DNA, 15 bp, Homo sapiens
aagggcccgcgagga

SEQ ID NO: 984568 - DNA, 15 bp, Homo sapiens
agggcccgcgaggaa

SEQ ID NO: 984569 - DNA, 15 bp, Homo sapiens
gggcccgcgaggaac

SEQ ID NO: 984570 - DNA, 15 bp, Homo sapiens
ggcccgcgaggaacc

SEQ ID NO: 984571 - DNA, 15 bp, Homo sapiens
gcccgcgaggaaccg

SEQ ID NO: 984572 - DNA, 15 bp, Homo sapiens
cccgcgaggaaccgt

SEQ ID NO: 984573 - DNA, 15 bp, Homo sapiens
ccgcgaggaaccgtg

SEQ ID NO: 984574 - DNA, 15 bp, Homo sapiens
cgcgaggaaccgtgc

SEQ ID NO: 984575 - DNA, 15 bp, Homo sapiens
gcgaggaaccgtgcg

SEQ ID NO: 984576 - DNA, 15 bp, Homo sapiens
cgaggaaccgtgcga

SEQ ID NO: 984577 - DNA, 15 bp, Homo sapiens
gaggaaccgtgcgag

SEQ ID NO: 984578 - DNA, 15 bp, Homo sapiens
aggaaccgtgcgagg

SEQ ID NO: 984579 - DNA, 15 bp, Homo sapiens
ggaaccgtgcgaggt

SEQ ID NO: 984580 - DNA, 15 bp, Homo sapiens
gaaccgtgcgaggtc

SEQ ID NO: 984581 - DNA, 15 bp, Homo sapiens
aaccgtgcgaggtca

SEQ ID NO: 984582 - DNA, 15 bp, Homo sapiens
accgtgcgaggtcag

SEQ ID NO: 984583 - DNA, 15 bp, Homo sapiens
ccgtgcgaggtcagg

SEQ ID NO: 984584 - DNA, 15 bp, Homo sapiens
cgtgcgaggtcaggc

SEQ ID NO: 984585 - DNA, 15 bp, Homo sapiens
gtgcgaggtcaggcc

SEQ ID NO: 984586 - DNA, 15 bp, Homo sapiens
tgcgaggtcaggccg

SEQ ID NO: 984587 - DNA, 15 bp, Homo sapiens
gcgaggtcaggccga

SEQ ID NO: 984588 - DNA, 15 bp, Homo sapiens
cgaggtcaggccgag

SEQ ID NO: 984589 - DNA, 15 bp, Homo sapiens
gaggtcaggccgagc

SEQ ID NO: 984590 - DNA, 15 bp, Homo sapiens
aggtcaggccgagcg

SEQ ID NO: 984591 - DNA, 15 bp, Homo sapiens
ggtcaggccgagcgc

SEQ ID NO: 984592 - DNA, 15 bp, Homo sapiens
gtcaggccgagcgcc

SEQ ID NO: 984593 - DNA, 15 bp, Homo sapiens
tcaggccgagcgccg

SEQ ID NO: 984594 - DNA, 15 bp, Homo sapiens
caggccgagcgccgg

SEQ ID NO: 984595 - DNA, 15 bp, Homo sapiens
aggccgagcgccggc

SEQ ID NO: 984596 - DNA, 15 bp, Homo sapiens
ggccgagcgccggca

SEQ ID NO: 984597 - DNA, 15 bp, Homo sapiens
gccgagcgccggcac

SEQ ID NO: 984598 - DNA, 15 bp, Homo sapiens
ccgagcgccggcacc

SEQ ID NO: 984599 - DNA, 15 bp, Homo sapiens
cgagcgccggcaccg

SEQ ID NO: 984600 - DNA, 15 bp, Homo sapiens
gagcgccggcaccgc

SEQ ID NO: 984601 - DNA, 15 bp, Homo sapiens
agcgccggcaccgcc

SEQ ID NO: 984602 - DNA, 15 bp, Homo sapiens
gcgccggcaccgcca

SEQ ID NO: 984603 - DNA, 15 bp, Homo sapiens
cgccggcaccgccac

SEQ ID NO: 984604 - DNA, 15 bp, Homo sapiens
gccggcaccgccacc

SEQ ID NO: 984605 - DNA, 15 bp, Homo sapiens
ccggcaccgccaccg

SEQ ID NO: 984606 - DNA, 15 bp, Homo sapiens
cggcaccgccaccgg

SEQ ID NO: 984607 - DNA, 15 bp, Homo sapiens
ggcaccgccaccggc

SEQ ID NO: 984608 - DNA, 15 bp, Homo sapiens
gcaccgccaccggca

SEQ ID NO: 984609 - DNA, 15 bp, Homo sapiens
caccgccaccggcac

SEQ ID NO: 984610 - DNA, 15 bp, Homo sapiens
accgccaccggcact

SEQ ID NO: 984611 - DNA, 15 bp, Homo sapiens
ccgccaccggcactg

SEQ ID NO: 984612 - DNA, 15 bp, Homo sapiens
cgccaccggcactgg

SEQ ID NO: 984613 - DNA, 15 bp, Homo sapiens
gccaccggcactggc

SEQ ID NO: 984614 - DNA, 15 bp, Homo sapiens
ccaccggcactggcg

SEQ ID NO: 984615 - DNA, 15 bp, Homo sapiens
caccggcactggcgc

SEQ ID NO: 984616 - DNA, 15 bp, Homo sapiens
accggcactggcgct

SEQ ID NO: 984617 - DNA, 15 bp, Homo sapiens
ccggcactggcgctg

SEQ ID NO: 984618 - DNA, 15 bp, Homo sapiens
cggcactggcgctga

SEQ ID NO: 984619 - DNA, 15 bp, Homo sapiens
ggcactggcgctgag

SEQ ID NO: 984620 - DNA, 15 bp, Homo sapiens
gcactggcgctgagc

SEQ ID NO: 984621 - DNA, 15 bp, Homo sapiens
cactggcgctgagcg

SEQ ID NO: 984622 - DNA, 15 bp, Homo sapiens
actggcgctgagcga

SEQ ID NO: 984623 - DNA, 15 bp, Homo sapiens
ctggcgctgagcgac

SEQ ID NO: 984624 - DNA, 15 bp, Homo sapiens
tggcgctgagcgacg

SEQ ID NO: 984625 - DNA, 15 bp, Homo sapiens
ggcgctgagcgacga

SEQ ID NO: 984626 - DNA, 15 bp, Homo sapiens
gcgctgagcgacgag

SEQ ID NO: 984627 - DNA, 15 bp, Homo sapiens
cgctgagcgacgaga

SEQ ID NO: 984628 - DNA, 15 bp, Homo sapiens
gctgagcgacgagag

SEQ ID NO: 984629 - DNA, 15 bp, Homo sapiens
ctgagcgacgagagc

SEQ ID NO: 984630 - DNA, 15 bp, Homo sapiens
tgagcgacgagagcg

SEQ ID NO: 984631 - DNA, 15 bp, Homo sapiens
gagcgacgagagcgg

SEQ ID NO: 984632 - DNA, 15 bp, Homo sapiens
agcgacgagagcgga

SEQ ID NO: 984633 - DNA, 15 bp, Homo sapiens
gcgacgagagcggac

SEQ ID NO: 984634 - DNA, 15 bp, Homo sapiens
cgacgagagcggact

SEQ ID NO: 984635 - DNA, 15 bp, Homo sapiens
gacgagagcggactc

SEQ ID NO: 984636 - DNA, 15 bp, Homo sapiens
acgagagcggactcc

SEQ ID NO: 984637 - DNA, 15 bp, Homo sapiens
cgagagcggactcct

SEQ ID NO: 984638 - DNA, 15 bp, Homo sapiens
gagagcggactcctg

SEQ ID NO: 984639 - DNA, 15 bp, Homo sapiens
agagcggactcctgc

SEQ ID NO: 984640 - DNA, 15 bp, Homo sapiens
gagcggactcctgcg

SEQ ID NO: 984641 - DNA, 15 bp, Homo sapiens
agcggactcctgcga

SEQ ID NO: 984642 - DNA, 15 bp, Homo sapiens
gcggactcctgcgag

SEQ ID NO: 984643 - DNA, 15 bp, Homo sapiens
cggactcctgcgagc

SEQ ID NO: 984644 - DNA, 15 bp, Homo sapiens
ggactcctgcgagcg

SEQ ID NO: 984645 - DNA, 15 bp, Homo sapiens
gactcctgcgagcgc

SEQ ID NO: 984646 - DNA, 15 bp, Homo sapiens
actcctgcgagcgca

SEQ ID NO: 984647 - DNA, 15 bp, Homo sapiens
ctcctgcgagcgcag

SEQ ID NO: 984648 - DNA, 15 bp, Homo sapiens
tcctgcgagcgcaga

SEQ ID NO: 984649 - DNA, 15 bp, Homo sapiens
cctgcgagcgcagag

SEQ ID NO: 984650 - DNA, 15 bp, Homo sapiens
ctgcgagcgcagaga

SEQ ID NO: 984651 - DNA, 15 bp, Homo sapiens
tgcgagcgcagagag

SEQ ID NO: 984652 - DNA, 15 bp, Homo sapiens
gcgagcgcagagagg

SEQ ID NO: 984653 - DNA, 15 bp, Homo sapiens
cgagcgcagagaggg

SEQ ID NO: 984654 - DNA, 15 bp, Homo sapiens
gagcgcagagaggga

SEQ ID NO: 984655 - DNA, 15 bp, Homo sapiens
agcgcagagagggag

SEQ ID NO: 984656 - DNA, 15 bp, Homo sapiens
gcgcagagagggagg

SEQ ID NO: 984657 - DNA, 15 bp, Homo sapiens
cgcagagagggaggg

SEQ ID NO: 984658 - DNA, 15 bp, Homo sapiens
gcagagagggagggg

SEQ ID NO: 984659 - DNA, 15 bp, Homo sapiens
cagagagggaggggg

SEQ ID NO: 984660 - DNA, 15 bp, Homo sapiens
agagagggaggggga

SEQ ID NO: 984661 - DNA, 15 bp, Homo sapiens
gagagggagggggag

SEQ ID NO: 984662 - DNA, 15 bp, Homo sapiens
agagggagggggaga

SEQ ID NO: 984663 - DNA, 15 bp, Homo sapiens
gagggagggggagat

SEQ ID NO: 984664 - DNA, 15 bp, Homo sapiens
agggagggggagatg

SEQ ID NO: 984665 - DNA, 15 bp, Homo sapiens
gggagggggagatgg

SEQ ID NO: 984666 - DNA, 15 bp, Homo sapiens
ggagggggagatgga

SEQ ID NO: 984667 - DNA, 15 bp, Homo sapiens
gagggggagatggag

SEQ ID NO: 984668 - DNA, 15 bp, Homo sapiens
agggggagatggagg

SEQ ID NO: 984669 - DNA, 15 bp, Homo sapiens
gggggagatggaggg

SEQ ID NO: 984670 - DNA, 15 bp, Homo sapiens
ggggagatggagggc

SEQ ID NO: 984671 - DNA, 15 bp, Homo sapiens
gggagatggagggct

SEQ ID NO: 984672 - DNA, 15 bp, Homo sapiens
ggagatggagggctg

SEQ ID NO: 984673 - DNA, 15 bp, Homo sapiens
gagatggagggctgg

SEQ ID NO: 984674 - DNA, 15 bp, Homo sapiens
agatggagggctgga

SEQ ID NO: 984675 - DNA, 15 bp, Homo sapiens
gatggagggctggat

SEQ ID NO: 984676 - DNA, 15 bp, Homo sapiens
atggagggctggatg

SEQ ID NO: 984677 - DNA, 15 bp, Homo sapiens
tggagggctggatga

SEQ ID NO: 984678 - DNA, 15 bp, Homo sapiens
ggagggctggatgag

SEQ ID NO: 984679 - DNA, 15 bp, Homo sapiens
gagggctggatgagt

SEQ ID NO: 984680 - DNA, 15 bp, Homo sapiens
agggctggatgagtc

SEQ ID NO: 984681 - DNA, 15 bp, Homo sapiens
gggctggatgagtca

SEQ ID NO: 984682 - DNA, 15 bp, Homo sapiens
ggctggatgagtcac

SEQ ID NO: 984683 - DNA, 15 bp, Homo sapiens
gctggatgagtcacg

SEQ ID NO: 984684 - DNA, 15 bp, Homo sapiens
ctggatgagtcacgc

SEQ ID NO: 984685 - DNA, 15 bp, Homo sapiens
tggatgagtcacgcg

SEQ ID NO: 984686 - DNA, 15 bp, Homo sapiens
ggatgagtcacgcgg

SEQ ID NO: 984687 - DNA, 15 bp, Homo sapiens
gatgagtcacgcgga

SEQ ID NO: 984688 - DNA, 15 bp, Homo sapiens
atgagtcacgcggat

SEQ ID NO: 984689 - DNA, 15 bp, Homo sapiens
tgagtcacgcggata

SEQ ID NO: 984690 - DNA, 15 bp, Homo sapiens
gagtcacgcggataa

SEQ ID NO: 984691 - DNA, 15 bp, Homo sapiens
agtcacgcggataat

SEQ ID NO: 984692 - DNA, 15 bp, Homo sapiens
gtcacgcggataatc

SEQ ID NO: 984693 - DNA, 15 bp, Homo sapiens
tcacgcggataatcg

SEQ ID NO: 984694 - DNA, 15 bp, Homo sapiens
cacgcggataatcgc

SEQ ID NO: 984695 - DNA, 15 bp, Homo sapiens
acgcggataatcgcg

SEQ ID NO: 984696 - DNA, 15 bp, Homo sapiens
cgcggataatcgcgc

SEQ ID NO: 984697 - DNA, 15 bp, Homo sapiens
gcggataatcgcgct

SEQ ID NO: 984698 - DNA, 15 bp, Homo sapiens
cggataatcgcgctc

SEQ ID NO: 984699 - DNA, 15 bp, Homo sapiens
ggataatcgcgctct

SEQ ID NO: 984700 - DNA, 15 bp, Homo sapiens
gataatcgcgctctt

SEQ ID NO: 984701 - DNA, 15 bp, Homo sapiens
ataatcgcgctcttc

SEQ ID NO: 984702 - DNA, 15 bp, Homo sapiens
taatcgcgctcttct

SEQ ID NO: 984703 - DNA, 15 bp, Homo sapiens
aatcgcgctcttctc

SEQ ID NO: 984704 - DNA, 15 bp, Homo sapiens
atcgcgctcttctcc

SEQ ID NO: 984705 - DNA, 15 bp, Homo sapiens
tcgcgctcttctcca

SEQ ID NO: 984706 - DNA, 15 bp, Homo sapiens
cgcgctcttctccag

SEQ ID NO: 984707 - DNA, 15 bp, Homo sapiens
gcgctcttctccagc

SEQ ID NO: 984708 - DNA, 15 bp, Homo sapiens
cgctcttctccagcg

SEQ ID NO: 984709 - DNA, 15 bp, Homo sapiens
gctcttctccagcgc

SEQ ID NO: 984710 - DNA, 15 bp, Homo sapiens
ctcttctccagcgcg

SEQ ID NO: 984711 - DNA, 15 bp, Homo sapiens
tcttctccagcgcgc

SEQ ID NO: 984712 - DNA, 15 bp, Homo sapiens
cttctccagcgcgca

SEQ ID NO: 984713 - DNA, 15 bp, Homo sapiens
ttctccagcgcgcag

SEQ ID NO: 984714 - DNA, 15 bp, Homo sapiens
tctccagcgcgcaga

SEQ ID NO: 984715 - DNA, 15 bp, Homo sapiens
ctccagcgcgcagac

SEQ ID NO: 984716 - DNA, 15 bp, Homo sapiens
tccagcgcgcagaca

SEQ ID NO: 984717 - DNA, 15 bp, Homo sapiens
ccagcgcgcagacag

SEQ ID NO: 984718 - DNA, 15 bp, Homo sapiens
cagcgcgcagacagc

SEQ ID NO: 984719 - DNA, 15 bp, Homo sapiens
agcgcgcagacagcg

SEQ ID NO: 984720 - DNA, 15 bp, Homo sapiens
gcgcgcagacagcgc

SEQ ID NO: 984721 - DNA, 15 bp, Homo sapiens
cgcgcagacagcgcg

SEQ ID NO: 984722 - DNA, 15 bp, Homo sapiens
gcgcagacagcgcgg

SEQ ID NO: 984723 - DNA, 15 bp, Homo sapiens
cgcagacagcgcggc

SEQ ID NO: 984724 - DNA, 15 bp, Homo sapiens
gcagacagcgcggca

SEQ ID NO: 984725 - DNA, 15 bp, Homo sapiens
cagacagcgcggcaa

SEQ ID NO: 984726 - DNA, 15 bp, Homo sapiens
agacagcgcggcaag

SEQ ID NO: 984727 - DNA, 15 bp, Homo sapiens
gacagcgcggcaagc

SEQ ID NO: 984728 - DNA, 15 bp, Homo sapiens
acagcgcggcaagcg

SEQ ID NO: 984729 - DNA, 15 bp, Homo sapiens
cagcgcggcaagcgc

SEQ ID NO: 984730 - DNA, 15 bp, Homo sapiens
agcgcggcaagcgcg

SEQ ID NO: 984731 - DNA, 15 bp, Homo sapiens
gcgcggcaagcgcgt

SEQ ID NO: 984732 - DNA, 15 bp, Homo sapiens
cgcggcaagcgcgta

SEQ ID NO: 984733 - DNA, 15 bp, Homo sapiens
gcggcaagcgcgtat

SEQ ID NO: 984734 - DNA, 15 bp, Homo sapiens
cggcaagcgcgtatg

SEQ ID NO: 984735 - DNA, 15 bp, Homo sapiens
ggcaagcgcgtatgc

SEQ ID NO: 984736 - DNA, 15 bp, Homo sapiens
gcaagcgcgtatgct

SEQ ID NO: 984737 - DNA, 15 bp, Homo sapiens
caagcgcgtatgcta

SEQ ID NO: 984738 - DNA, 15 bp, Homo sapiens
aagcgcgtatgctag

SEQ ID NO: 984739 - DNA, 15 bp, Homo sapiens
agcgcgtatgctagc

SEQ ID NO: 984740 - DNA, 15 bp, Homo sapiens
gcgcgtatgctagca

SEQ ID NO: 984741 - DNA, 15 bp, Homo sapiens
cgcgtatgctagcag

SEQ ID NO: 984742 - DNA, 15 bp, Homo sapiens
gcgtatgctagcagg

SEQ ID NO: 984743 - DNA, 15 bp, Homo sapiens
cgtatgctagcaggg

SEQ ID NO: 984744 - DNA, 15 bp, Homo sapiens
gtatgctagcagggg

SEQ ID NO: 984745 - DNA, 15 bp, Homo sapiens
tatgctagcaggggt

SEQ ID NO: 984746 - DNA, 15 bp, Homo sapiens
atgctagcaggggtg

SEQ ID NO: 984747 - DNA, 15 bp, Homo sapiens
tgctagcaggggtgc

SEQ ID NO: 984748 - DNA, 15 bp, Homo sapiens
gctagcaggggtgcg

SEQ ID NO: 984749 - DNA, 15 bp, Homo sapiens
ctagcaggggtgcgg

SEQ ID NO: 984750 - DNA, 15 bp, Homo sapiens
tagcaggggtgcgga

SEQ ID NO: 984751 - DNA, 15 bp, Homo sapiens
agcaggggtgcggac

SEQ ID NO: 984752 - DNA, 15 bp, Homo sapiens
gcaggggtgcggacg

SEQ ID NO: 984753 - DNA, 15 bp, Homo sapiens
caggggtgcggacgc

SEQ ID NO: 984754 - DNA, 15 bp, Homo sapiens
aggggtgcggacgcg

SEQ ID NO: 984755 - DNA, 15 bp, Homo sapiens
ggggtgcggacgcgt

SEQ ID NO: 984756 - DNA, 15 bp, Homo sapiens
gggtgcggacgcgtg

SEQ ID NO: 984757 - DNA, 15 bp, Homo sapiens
ggtgcggacgcgtga

SEQ ID NO: 984758 - DNA, 15 bp, Homo sapiens
gtgcggacgcgtgac

SEQ ID NO: 984759 - DNA, 15 bp, Homo sapiens
tgcggacgcgtgacc

SEQ ID NO: 984760 - DNA, 15 bp, Homo sapiens
gcggacgcgtgaccg

SEQ ID NO: 984761 - DNA, 15 bp, Homo sapiens
cggacgcgtgaccgt

SEQ ID NO: 984762 - DNA, 15 bp, Homo sapiens
ggacgcgtgaccgtg

SEQ ID NO: 984763 - DNA, 15 bp, Homo sapiens
gacgcgtgaccgtgc

SEQ ID NO: 984764 - DNA, 15 bp, Homo sapiens
acgcgtgaccgtgcc

SEQ ID NO: 984765 - DNA, 15 bp, Homo sapiens
cgcgtgaccgtgccg

SEQ ID NO: 984766 - DNA, 15 bp, Homo sapiens
gcgtgaccgtgccgc

SEQ ID NO: 984767 - DNA, 15 bp, Homo sapiens
cgtgaccgtgccgcc

SEQ ID NO: 984768 - DNA, 15 bp, Homo sapiens
gtgaccgtgccgccc

SEQ ID NO: 984769 - DNA, 15 bp, Homo sapiens
tgaccgtgccgcccg

SEQ ID NO: 984770 - DNA, 15 bp, Homo sapiens
gaccgtgccgcccgc

SEQ ID NO: 984771 - DNA, 15 bp, Homo sapiens
accgtgccgcccgct

SEQ ID NO: 984772 - DNA, 15 bp, Homo sapiens
ccgtgccgcccgctg

SEQ ID NO: 984773 - DNA, 15 bp, Homo sapiens
cgtgccgcccgctga

SEQ ID NO: 984774 - DNA, 15 bp, Homo sapiens
gtgccgcccgctgac

SEQ ID NO: 984775 - DNA, 15 bp, Homo sapiens
tgccgcccgctgacc

SEQ ID NO: 984776 - DNA, 15 bp, Homo sapiens
gccgcccgctgaccc

SEQ ID NO: 984777 - DNA, 15 bp, Homo sapiens
ccgcccgctgacccc

SEQ ID NO: 984778 - DNA, 15 bp, Homo sapiens
cgcccgctgacccca

SEQ ID NO: 984779 - DNA, 15 bp, Homo sapiens
gcccgctgaccccac

SEQ ID NO: 984780 - DNA, 15 bp, Homo sapiens
cccgctgaccccacc

SEQ ID NO: 984781 - DNA, 15 bp, Homo sapiens
ccgctgaccccacca

SEQ ID NO: 984782 - DNA, 15 bp, Homo sapiens
cgctgaccccaccag

SEQ ID NO: 984783 - DNA, 15 bp, Homo sapiens
gctgaccccaccagt

SEQ ID NO: 984784 - DNA, 15 bp, Homo sapiens
ctgaccccaccagtc

SEQ ID NO: 984785 - DNA, 15 bp, Homo sapiens
tgaccccaccagtct

SEQ ID NO: 984786 - DNA, 15 bp, Homo sapiens
gaccccaccagtctt

SEQ ID NO: 984787 - DNA, 15 bp, Homo sapiens
accccaccagtcttc

SEQ ID NO: 984788 - DNA, 15 bp, Homo sapiens
ccccaccagtcttcg

SEQ ID NO: 984789 - DNA, 15 bp, Homo sapiens
cccaccagtcttcgc

SEQ ID NO: 984790 - DNA, 15 bp, Homo sapiens
ccaccagtcttcgcg

SEQ ID NO: 984791 - DNA, 15 bp, Homo sapiens
caccagtcttcgcgg

SEQ ID NO: 984792 - DNA, 15 bp, Homo sapiens
accagtcttcgcggg

SEQ ID NO: 984793 - DNA, 15 bp, Homo sapiens
ccagtcttcgcgggc

SEQ ID NO: 984794 - DNA, 15 bp, Homo sapiens
cagtcttcgcgggct

SEQ ID NO: 984795 - DNA, 15 bp, Homo sapiens
agtcttcgcgggctt

SEQ ID NO: 984796 - DNA, 15 bp, Homo sapiens
gtcttcgcgggcttc

SEQ ID NO: 984797 - DNA, 15 bp, Homo sapiens
tcttcgcgggcttcg

SEQ ID NO: 984798 - DNA, 15 bp, Homo sapiens
cttcgcgggcttcga

SEQ ID NO: 984799 - DNA, 15 bp, Homo sapiens
ttcgcgggcttcgaa

SEQ ID NO: 984800 - DNA, 15 bp, Homo sapiens
tcgcgggcttcgaac

SEQ ID NO: 984801 - DNA, 15 bp, Homo sapiens
cgcgggcttcgaacc

SEQ ID NO: 984802 - DNA, 15 bp, Homo sapiens
gcgggcttcgaaccc

SEQ ID NO: 984803 - DNA, 15 bp, Homo sapiens
cgggcttcgaaccca

SEQ ID NO: 984804 - DNA, 15 bp, Homo sapiens
gggcttcgaacccag

SEQ ID NO: 984805 - DNA, 15 bp, Homo sapiens
ggcttcgaacccagg

SEQ ID NO: 984806 - DNA, 15 bp, Homo sapiens
gcttcgaacccaggg

SEQ ID NO: 984807 - DNA, 15 bp, Homo sapiens
cttcgaacccaggga

SEQ ID NO: 984808 - DNA, 15 bp, Homo sapiens
ttcgaacccagggag

SEQ ID NO: 984809 - DNA, 15 bp, Homo sapiens
tcgaacccagggagc

SEQ ID NO: 984810 - DNA, 15 bp, Homo sapiens
cgaacccagggagcc

SEQ ID NO: 984811 - DNA, 15 bp, Homo sapiens
gaacccagggagccg

SEQ ID NO: 984812 - DNA, 15 bp, Homo sapiens
aacccagggagccga

SEQ ID NO: 984813 - DNA, 15 bp, Homo sapiens
acccagggagccgac

SEQ ID NO: 984814 - DNA, 15 bp, Homo sapiens
cccagggagccgaca

SEQ ID NO: 984815 - DNA, 15 bp, Homo sapiens
ccagggagccgacaa

SEQ ID NO: 984816 - DNA, 15 bp, Homo sapiens
cagggagccgacaat

SEQ ID NO: 984817 - DNA, 15 bp, Homo sapiens
agggagccgacaatg

SEQ ID NO: 984818 - DNA, 15 bp, Homo sapiens
gggagccgacaatgg

SEQ ID NO: 984819 - DNA, 15 bp, Homo sapiens
ggagccgacaatggc

SEQ ID NO: 984820 - DNA, 15 bp, Homo sapiens
gagccgacaatggcg

SEQ ID NO: 984821 - DNA, 15 bp, Homo sapiens
agccgacaatggcgg

SEQ ID NO: 984822 - DNA, 15 bp, Homo sapiens
gccgacaatggcggt

SEQ ID NO: 984823 - DNA, 15 bp, Homo sapiens
ccgacaatggcggtg

SEQ ID NO: 984824 - DNA, 15 bp, Homo sapiens
cgacaatggcggtga

SEQ ID NO: 984825 - DNA, 15 bp, Homo sapiens
gacaatggcggtgag

SEQ ID NO: 984826 - DNA, 15 bp, Homo sapiens
acaatggcggtgagt

SEQ ID NO: 984827 - DNA, 15 bp, Homo sapiens
caatggcggtgagta

SEQ ID NO: 984828 - DNA, 15 bp, Homo sapiens
aatggcggtgagtac

SEQ ID NO: 984829 - DNA, 15 bp, Homo sapiens
atggcggtgagtacg

SEQ ID NO: 984830 - DNA, 15 bp, Homo sapiens
tggcggtgagtacgg

SEQ ID NO: 984831 - DNA, 15 bp, Homo sapiens
ggcggtgagtacggc

SEQ ID NO: 984832 - DNA, 15 bp, Homo sapiens
gcggtgagtacggcc

SEQ ID NO: 984833 - DNA, 15 bp, Homo sapiens
cggtgagtacggccc

SEQ ID NO: 984834 - DNA, 15 bp, Homo sapiens
ggtgagtacggccct

SEQ ID NO: 984835 - DNA, 15 bp, Homo sapiens
gtgagtacggccctg

SEQ ID NO: 984836 - DNA, 15 bp, Homo sapiens
tgagtacggccctgg

SEQ ID NO: 984837 - DNA, 15 bp, Homo sapiens
gagtacggccctggt

SEQ ID NO: 984838 - DNA, 15 bp, Homo sapiens
agtacggccctggtc

SEQ ID NO: 984839 - DNA, 15 bp, Homo sapiens
gtacggccctggtcg

SEQ ID NO: 984840 - DNA, 15 bp, Homo sapiens
tacggccctggtcgc

SEQ ID NO: 984841 - DNA, 15 bp, Homo sapiens
acggccctggtcgcg

SEQ ID NO: 984842 - DNA, 15 bp, Homo sapiens
cggccctggtcgcgc

SEQ ID NO: 984843 - DNA, 15 bp, Homo sapiens
ggccctggtcgcgca

SEQ ID NO: 984844 - DNA, 15 bp, Homo sapiens
gccctggtcgcgcag

SEQ ID NO: 984845 - DNA, 15 bp, Homo sapiens
ccctggtcgcgcagc

SEQ ID NO: 984846 - DNA, 15 bp, Homo sapiens
cctggtcgcgcagcg

SEQ ID NO: 984847 - DNA, 15 bp, Homo sapiens
ctggtcgcgcagcga

SEQ ID NO: 984848 - DNA, 15 bp, Homo sapiens
tggtcgcgcagcgac

SEQ ID NO: 984849 - DNA, 15 bp, Homo sapiens
ggtcgcgcagcgacc

SEQ ID NO: 984850 - DNA, 15 bp, Homo sapiens
gtcgcgcagcgaccg

SEQ ID NO: 984851 - DNA, 15 bp, Homo sapiens
tcgcgcagcgaccga

SEQ ID NO: 984852 - DNA, 15 bp, Homo sapiens
cgcgcagcgaccgaa

SEQ ID NO: 984853 - DNA, 15 bp, Homo sapiens
gcgcagcgaccgaac

SEQ ID NO: 984854 - DNA, 15 bp, Homo sapiens
cgcagcgaccgaacc

SEQ ID NO: 984855 - DNA, 15 bp, Homo sapiens
gcagcgaccgaacct

SEQ ID NO: 984856 - DNA, 15 bp, Homo sapiens
cagcgaccgaacctg

SEQ ID NO: 984857 - DNA, 15 bp, Homo sapiens
agcgaccgaacctgc

SEQ ID NO: 984858 - DNA, 15 bp, Homo sapiens
gcgaccgaacctgcg

SEQ ID NO: 984859 - DNA, 15 bp, Homo sapiens
cgaccgaacctgcgc

SEQ ID NO: 984860 - DNA, 15 bp, Homo sapiens
gaccgaacctgcgcc

SEQ ID NO: 984861 - DNA, 15 bp, Homo sapiens
accgaacctgcgccc

SEQ ID NO: 984862 - DNA, 15 bp, Homo sapiens
ccgaacctgcgcccg

SEQ ID NO: 984863 - DNA, 15 bp, Homo sapiens
cgaacctgcgcccgg

SEQ ID NO: 984864 - DNA, 15 bp, Homo sapiens
gaacctgcgcccggt

SEQ ID NO: 984865 - DNA, 15 bp, Homo sapiens
aacctgcgcccggtt

SEQ ID NO: 984866 - DNA, 15 bp, Homo sapiens
acctgcgcccggttc

SEQ ID NO: 984867 - DNA, 15 bp, Homo sapiens
cctgcgcccggttcc

SEQ ID NO: 984868 - DNA, 15 bp, Homo sapiens
ctgcgcccggttcct

SEQ ID NO: 984869 - DNA, 15 bp, Homo sapiens
tgcgcccggttcctc

SEQ ID NO: 984870 - DNA, 15 bp, Homo sapiens
gcgcccggttcctcg

SEQ ID NO: 984871 - DNA, 15 bp, Homo sapiens
cgcccggttcctcgc

SEQ ID NO: 984872 - DNA, 15 bp, Homo sapiens
gcccggttcctcgcg

SEQ ID NO: 984873 - DNA, 15 bp, Homo sapiens
cccggttcctcgcgc

SEQ ID NO: 984874 - DNA, 15 bp, Homo sapiens
ccggttcctcgcgcc

SEQ ID NO: 984875 - DNA, 15 bp, Homo sapiens
cggttcctcgcgccc

SEQ ID NO: 984876 - DNA, 15 bp, Homo sapiens
ggttcctcgcgcccc

SEQ ID NO: 984877 - DNA, 15 bp, Homo sapiens
gttcctcgcgccccg

SEQ ID NO: 984878 - DNA, 15 bp, Homo sapiens
ttcctcgcgccccgc

SEQ ID NO: 984879 - DNA, 15 bp, Homo sapiens
tcctcgcgccccgcg

SEQ ID NO: 984880 - DNA, 15 bp, Homo sapiens
cctcgcgccccgcgc

SEQ ID NO: 984881 - DNA, 15 bp, Homo sapiens
ctcgcgccccgcgct

SEQ ID NO: 984882 - DNA, 15 bp, Homo sapiens
tcgcgccccgcgctg

SEQ ID NO: 984883 - DNA, 15 bp, Homo sapiens
cgcgccccgcgctgg

SEQ ID NO: 984884 - DNA, 15 bp, Homo sapiens
gcgccccgcgctggg

SEQ ID NO: 984885 - DNA, 15 bp, Homo sapiens
cgccccgcgctgggg

SEQ ID NO: 984886 - DNA, 15 bp, Homo sapiens
gccccgcgctggggc

SEQ ID NO: 984887 - DNA, 15 bp, Homo sapiens
ccccgcgctggggcg

SEQ ID NO: 984888 - DNA, 15 bp, Homo sapiens
cccgcgctggggcgg

SEQ ID NO: 984889 - DNA, 15 bp, Homo sapiens
ccgcgctggggcgga

SEQ ID NO: 984890 - DNA, 15 bp, Homo sapiens
cgcgctggggcggac

SEQ ID NO: 984891 - DNA, 15 bp, Homo sapiens
gcgctggggcggacg

SEQ ID NO: 984892 - DNA, 15 bp, Homo sapiens
cgctggggcggacgc

SEQ ID NO: 984893 - DNA, 15 bp, Homo sapiens
gctggggcggacgcc

SEQ ID NO: 984894 - DNA, 15 bp, Homo sapiens
ctggggcggacgccg

SEQ ID NO: 984895 - DNA, 15 bp, Homo sapiens
tggggcggacgccgc

SEQ ID NO: 984896 - DNA, 15 bp, Homo sapiens
ggggcggacgccgcc

SEQ ID NO: 984897 - DNA, 15 bp, Homo sapiens
gggcggacgccgccg

SEQ ID NO: 984898 - DNA, 15 bp, Homo sapiens
ggcggacgccgccgc

SEQ ID NO: 984899 - DNA, 15 bp, Homo sapiens
gcggacgccgccgcc

SEQ ID NO: 984900 - DNA, 15 bp, Homo sapiens
cggacgccgccgccg

SEQ ID NO: 984901 - DNA, 15 bp, Homo sapiens
ggacgccgccgccgc

SEQ ID NO: 984902 - DNA, 15 bp, Homo sapiens
gacgccgccgccgcc

SEQ ID NO: 984903 - DNA, 15 bp, Homo sapiens
acgccgccgccgccg

SEQ ID NO: 984904 - DNA, 15 bp, Homo sapiens
cgccgccgccgccgc

SEQ ID NO: 984905 - DNA, 15 bp, Homo sapiens
gccgccgccgccgcc

SEQ ID NO: 984906 - DNA, 15 bp, Homo sapiens
ccgccgccgccgccg

SEQ ID NO: 984907 - DNA, 15 bp, Homo sapiens
cgccgccgccgccga

SEQ ID NO: 984908 - DNA, 15 bp, Homo sapiens
gccgccgccgccgac

SEQ ID NO: 984909 - DNA, 15 bp, Homo sapiens
ccgccgccgccgaca

SEQ ID NO: 984910 - DNA, 15 bp, Homo sapiens
cgccgccgccgacac

SEQ ID NO: 984911 - DNA, 15 bp, Homo sapiens
gccgccgccgacacc

SEQ ID NO: 984912 - DNA, 15 bp, Homo sapiens
ccgccgccgacacca

SEQ ID NO: 984913 - DNA, 15 bp, Homo sapiens
cgccgccgacaccac

SEQ ID NO: 984914 - DNA, 15 bp, Homo sapiens
gccgccgacaccact

SEQ ID NO: 984915 - DNA, 15 bp, Homo sapiens
ccgccgacaccactg

SEQ ID NO: 984916 - DNA, 15 bp, Homo sapiens
cgccgacaccactgc

SEQ ID NO: 984917 - DNA, 15 bp, Homo sapiens
gccgacaccactgcc

SEQ ID NO: 984918 - DNA, 15 bp, Homo sapiens
ccgacaccactgccg

SEQ ID NO: 984919 - DNA, 15 bp, Homo sapiens
cgacaccactgccgc

SEQ ID NO: 984920 - DNA, 15 bp, Homo sapiens
gacaccactgccgcc

SEQ ID NO: 984921 - DNA, 15 bp, Homo sapiens
acaccactgccgccg

SEQ ID NO: 984922 - DNA, 15 bp, Homo sapiens
caccactgccgccgg

SEQ ID NO: 984923 - DNA, 15 bp, Homo sapiens
accactgccgccggc

SEQ ID NO: 984924 - DNA, 15 bp, Homo sapiens
ccactgccgccggcg

SEQ ID NO: 984925 - DNA, 15 bp, Homo sapiens
cactgccgccggcgt

SEQ ID NO: 984926 - DNA, 15 bp, Homo sapiens
actgccgccggcgtc

SEQ ID NO: 984927 - DNA, 15 bp, Homo sapiens
ctgccgccggcgtca

SEQ ID NO: 984928 - DNA, 15 bp, Homo sapiens
tgccgccggcgtcag

SEQ ID NO: 984929 - DNA, 15 bp, Homo sapiens
gccgccggcgtcagc

SEQ ID NO: 984930 - DNA, 15 bp, Homo sapiens
ccgccggcgtcagct

SEQ ID NO: 984931 - DNA, 15 bp, Homo sapiens
cgccggcgtcagctc

SEQ ID NO: 984932 - DNA, 15 bp, Homo sapiens
gccggcgtcagctcg

SEQ ID NO: 984933 - DNA, 15 bp, Homo sapiens
ccggcgtcagctcgg

SEQ ID NO: 984934 - DNA, 15 bp, Homo sapiens
cggcgtcagctcggc

SEQ ID NO: 984935 - DNA, 15 bp, Homo sapiens
ggcgtcagctcggct

SEQ ID NO: 984936 - DNA, 15 bp, Homo sapiens
gcgtcagctcggctc

SEQ ID NO: 984937 - DNA, 15 bp, Homo sapiens
cgtcagctcggctcc

SEQ ID NO: 984938 - DNA, 15 bp, Homo sapiens
gtcagctcggctcca

SEQ ID NO: 984939 - DNA, 15 bp, Homo sapiens
tcagctcggctccag

SEQ ID NO: 984940 - DNA, 15 bp, Homo sapiens
cagctcggctccagc

SEQ ID NO: 984941 - DNA, 15 bp, Homo sapiens
agctcggctccagcc

SEQ ID NO: 984942 - DNA, 15 bp, Homo sapiens
gctcggctccagccc

SEQ ID NO: 984943 - DNA, 15 bp, Homo sapiens
ctcggctccagcccg

SEQ ID NO: 984944 - DNA, 15 bp, Homo sapiens
tcggctccagcccgc

SEQ ID NO: 984945 - DNA, 15 bp, Homo sapiens
cggctccagcccgcc

SEQ ID NO: 984946 - DNA, 15 bp, Homo sapiens
ggctccagcccgcca

SEQ ID NO: 984947 - DNA, 15 bp, Homo sapiens
gctccagcccgccag

SEQ ID NO: 984948 - DNA, 15 bp, Homo sapiens
ctccagcccgccagc

SEQ ID NO: 984949 - DNA, 15 bp, Homo sapiens
tccagcccgccagct

SEQ ID NO: 984950 - DNA, 15 bp, Homo sapiens
ccagcccgccagctg

SEQ ID NO: 984951 - DNA, 15 bp, Homo sapiens
cagcccgccagctgc

SEQ ID NO: 984952 - DNA, 15 bp, Homo sapiens
agcccgccagctgcc

SEQ ID NO: 984953 - DNA, 15 bp, Homo sapiens
gcccgccagctgcct

SEQ ID NO: 984954 - DNA, 15 bp, Homo sapiens
cccgccagctgcctg

SEQ ID NO: 984955 - DNA, 15 bp, Homo sapiens
ccgccagctgcctgg

SEQ ID NO: 984956 - DNA, 15 bp, Homo sapiens
cgccagctgcctggc

SEQ ID NO: 984957 - DNA, 15 bp, Homo sapiens
gccagctgcctggct

SEQ ID NO: 984958 - DNA, 15 bp, Homo sapiens
ccagctgcctggctg

SEQ ID NO: 984959 - DNA, 15 bp, Homo sapiens
cagctgcctggctgg

SEQ ID NO: 984960 - DNA, 15 bp, Homo sapiens
agctgcctggctggc

SEQ ID NO: 984961 - DNA, 15 bp, Homo sapiens
gctgcctggctggcg

SEQ ID NO: 984962 - DNA, 15 bp, Homo sapiens
ctgcctggctggcgt

SEQ ID NO: 984963 - DNA, 15 bp, Homo sapiens
tgcctggctggcgtc

SEQ ID NO: 984964 - DNA, 15 bp, Homo sapiens
gcctggctggcgtca

SEQ ID NO: 984965 - DNA, 15 bp, Homo sapiens
cctggctggcgtcac

SEQ ID NO: 984966 - DNA, 15 bp, Homo sapiens
ctggctggcgtcacg

SEQ ID NO: 984967 - DNA, 15 bp, Homo sapiens
tggctggcgtcacgg

SEQ ID NO: 984968 - DNA, 15 bp, Homo sapiens
ggctggcgtcacggc

SEQ ID NO: 984969 - DNA, 15 bp, Homo sapiens
gctggcgtcacggcc

SEQ ID NO: 984970 - DNA, 15 bp, Homo sapiens
ctggcgtcacggccc

SEQ ID NO: 984971 - DNA, 15 bp, Homo sapiens
tggcgtcacggcccg

SEQ ID NO: 984972 - DNA, 15 bp, Homo sapiens
ggcgtcacggcccgg

SEQ ID NO: 984973 - DNA, 15 bp, Homo sapiens
gcgtcacggcccggc

SEQ ID NO: 984974 - DNA, 15 bp, Homo sapiens
cgtcacggcccggcc

SEQ ID NO: 984975 - DNA, 15 bp, Homo sapiens
gtcacggcccggccc

SEQ ID NO: 984976 - DNA, 15 bp, Homo sapiens
tcacggcccggccca

SEQ ID NO: 984977 - DNA, 15 bp, Homo sapiens
cacggcccggcccag

SEQ ID NO: 984978 - DNA, 15 bp, Homo sapiens
acggcccggcccagc

SEQ ID NO: 984979 - DNA, 15 bp, Homo sapiens
cggcccggcccagcc

SEQ ID NO: 984980 - DNA, 15 bp, Homo sapiens
ggcccggcccagccc

SEQ ID NO: 984981 - DNA, 15 bp, Homo sapiens
gcccggcccagcccc

SEQ ID NO: 984982 - DNA, 15 bp, Homo sapiens
cccggcccagccccg

SEQ ID NO: 984983 - DNA, 15 bp, Homo sapiens
ccggcccagccccgc

SEQ ID NO: 984984 - DNA, 15 bp, Homo sapiens
cggcccagccccgcc

SEQ ID NO: 984985 - DNA, 15 bp, Homo sapiens
ggcccagccccgccc

SEQ ID NO: 984986 - DNA, 15 bp, Homo sapiens
gcccagccccgcccg

SEQ ID NO: 984987 - DNA, 15 bp, Homo sapiens
cccagccccgcccgc

SEQ ID NO: 984988 - DNA, 15 bp, Homo sapiens
ccagccccgcccgcg

SEQ ID NO: 984989 - DNA, 15 bp, Homo sapiens
cagccccgcccgcgc

SEQ ID NO: 984990 - DNA, 15 bp, Homo sapiens
agccccgcccgcgcc

SEQ ID NO: 984991 - DNA, 15 bp, Homo sapiens
gccccgcccgcgccc

SEQ ID NO: 984992 - DNA, 15 bp, Homo sapiens
ccccgcccgcgcccc

SEQ ID NO: 984993 - DNA, 15 bp, Homo sapiens
cccgcccgcgcccct

SEQ ID NO: 984994 - DNA, 15 bp, Homo sapiens
ccgcccgcgcccctc

SEQ ID NO: 984995 - DNA, 15 bp, Homo sapiens
cgcccgcgcccctcc

SEQ ID NO: 984996 - DNA, 15 bp, Homo sapiens
gcccgcgcccctcct

SEQ ID NO: 984997 - DNA, 15 bp, Homo sapiens
cccgcgcccctcctt

SEQ ID NO: 984998 - DNA, 15 bp, Homo sapiens
ccgcgcccctccttc

SEQ ID NO: 984999 - DNA, 15 bp, Homo sapiens
cgcgcccctccttcc

SEQ ID NO: 985000 - DNA, 15 bp, Homo sapiens
gcgcccctccttccc

SEQ ID NO: 985001 - DNA, 15 bp, Homo sapiens
cgcccctccttcccc

SEQ ID NO: 985002 - DNA, 15 bp, Homo sapiens
gcccctccttcccct

SEQ ID NO: 985003 - DNA, 15 bp, Homo sapiens
cccctccttcccctc

SEQ ID NO: 985004 - DNA, 15 bp, Homo sapiens
ccctccttcccctcc

SEQ ID NO: 985005 - DNA, 15 bp, Homo sapiens
cctccttcccctccc

SEQ ID NO: 985006 - DNA, 15 bp, Homo sapiens
ctccttcccctcccc

SEQ ID NO: 985007 - DNA, 15 bp, Homo sapiens
tccttcccctccccc

SEQ ID NO: 985008 - DNA, 15 bp, Homo sapiens
ccttcccctcccccg

SEQ ID NO: 985009 - DNA, 15 bp, Homo sapiens
cttcccctcccccgc

SEQ ID NO: 985010 - DNA, 15 bp, Homo sapiens
ttcccctcccccgcc

SEQ ID NO: 985011 - DNA, 15 bp, Homo sapiens
tcccctcccccgccc

SEQ ID NO: 985012 - DNA, 15 bp, Homo sapiens
cccctcccccgcccc

SEQ ID NO: 985013 - DNA, 15 bp, Homo sapiens
ccctcccccgccccc

SEQ ID NO: 985014 - DNA, 15 bp, Homo sapiens
cctcccccgccccca

SEQ ID NO: 985015 - DNA, 15 bp, Homo sapiens
ctcccccgcccccac

SEQ ID NO: 985016 - DNA, 15 bp, Homo sapiens
tcccccgcccccacg

SEQ ID NO: 985017 - DNA, 15 bp, Homo sapiens
cccccgcccccacgt

SEQ ID NO: 985018 - DNA, 15 bp, Homo sapiens
ccccgcccccacgtg

SEQ ID NO: 985019 - DNA, 15 bp, Homo sapiens
cccgcccccacgtgc

SEQ ID NO: 985020 - DNA, 15 bp, Homo sapiens
ccgcccccacgtgcg

SEQ ID NO: 985021 - DNA, 15 bp, Homo sapiens
cgcccccacgtgcgc

SEQ ID NO: 985022 - DNA, 15 bp, Homo sapiens
gcccccacgtgcgcc

SEQ ID NO: 985023 - DNA, 15 bp, Homo sapiens
cccccacgtgcgccg

SEQ ID NO: 985024 - DNA, 15 bp, Homo sapiens
ccccacgtgcgccga

SEQ ID NO: 985025 - DNA, 15 bp, Homo sapiens
cccacgtgcgccgag

SEQ ID NO: 985026 - DNA, 15 bp, Homo sapiens
ccacgtgcgccgagt

SEQ ID NO: 985027 - DNA, 15 bp, Homo sapiens
cacgtgcgccgagtt

SEQ ID NO: 985028 - DNA, 15 bp, Homo sapiens
acgtgcgccgagttt

SEQ ID NO: 985029 - DNA, 15 bp, Homo sapiens
cgtgcgccgagtttg

SEQ ID NO: 985030 - DNA, 15 bp, Homo sapiens
gtgcgccgagtttgt

SEQ ID NO: 985031 - DNA, 15 bp, Homo sapiens
tgcgccgagtttgtt

SEQ ID NO: 985032 - DNA, 15 bp, Homo sapiens
gcgccgagtttgttg

SEQ ID NO: 985033 - DNA, 15 bp, Homo sapiens
cgccgagtttgttga

SEQ ID NO: 985034 - DNA, 15 bp, Homo sapiens
gccgagtttgttgat

SEQ ID NO: 985035 - DNA, 15 bp, Homo sapiens
ccgagtttgttgatt

SEQ ID NO: 985036 - DNA, 15 bp, Homo sapiens
cgagtttgttgattt

SEQ ID NO: 985037 - DNA, 15 bp, Homo sapiens
gagtttgttgattta

SEQ ID NO: 985038 - DNA, 15 bp, Homo sapiens
agtttgttgatttag

SEQ ID NO: 985039 - DNA, 15 bp, Homo sapiens
gtttgttgatttagc

SEQ ID NO: 985040 - DNA, 15 bp, Homo sapiens
tttgttgatttagct

SEQ ID NO: 985041 - DNA, 15 bp, Homo sapiens
ttgttgatttagctg

SEQ ID NO: 985042 - DNA, 15 bp, Homo sapiens
tgttgatttagctgc

SEQ ID NO: 985043 - DNA, 15 bp, Homo sapiens
gttgatttagctgcc

SEQ ID NO: 985044 - DNA, 15 bp, Homo sapiens
ttgatttagctgcca

SEQ ID NO: 985045 - DNA, 15 bp, Homo sapiens
tgatttagctgccat

SEQ ID NO: 985046 - DNA, 15 bp, Homo sapiens
gatttagctgccata

SEQ ID NO: 985047 - DNA, 15 bp, Homo sapiens
atttagctgccatag

SEQ ID NO: 985048 - DNA, 15 bp, Homo sapiens
tttagctgccatagc

SEQ ID NO: 985049 - DNA, 15 bp, Homo sapiens
ttagctgccatagca

SEQ ID NO: 985050 - DNA, 15 bp, Homo sapiens
tagctgccatagcaa

SEQ ID NO: 985051 - DNA, 15 bp, Homo sapiens
agctgccatagcaac

SEQ ID NO: 985052 - DNA, 15 bp, Homo sapiens
gctgccatagcaacg

SEQ ID NO: 985053 - DNA, 15 bp, Homo sapiens
ctgccatagcaacga

SEQ ID NO: 985054 - DNA, 15 bp, Homo sapiens
tgccatagcaacgat

SEQ ID NO: 985055 - DNA, 15 bp, Homo sapiens
gccatagcaacgatg

SEQ ID NO: 985056 - DNA, 15 bp, Homo sapiens
ccatagcaacgatgg

SEQ ID NO: 985057 - DNA, 15 bp, Homo sapiens
catagcaacgatgga

SEQ ID NO: 985058 - DNA, 15 bp, Homo sapiens
atagcaacgatggaa

SEQ ID NO: 985059 - DNA, 15 bp, Homo sapiens
tagcaacgatggaag

SEQ ID NO: 985060 - DNA, 15 bp, Homo sapiens
agcaacgatggaagg

SEQ ID NO: 985061 - DNA, 15 bp, Homo sapiens
gcaacgatggaaggg

SEQ ID NO: 985062 - DNA, 15 bp, Homo sapiens
caacgatggaaggga

SEQ ID NO: 985063 - DNA, 15 bp, Homo sapiens
aacgatggaagggag

SEQ ID NO: 985064 - DNA, 15 bp, Homo sapiens
acgatggaagggagc

SEQ ID NO: 985065 - DNA, 15 bp, Homo sapiens
cgatggaagggagcc

SEQ ID NO: 985066 - DNA, 15 bp, Homo sapiens
gatggaagggagcct

SEQ ID NO: 985067 - DNA, 15 bp, Homo sapiens
atggaagggagcctc

SEQ ID NO: 985068 - DNA, 15 bp, Homo sapiens
tggaagggagcctcg

SEQ ID NO: 985069 - DNA, 15 bp, Homo sapiens
ggaagggagcctcgg

SEQ ID NO: 985070 - DNA, 15 bp, Homo sapiens
gaagggagcctcggg

SEQ ID NO: 985071 - DNA, 15 bp, Homo sapiens
aagggagcctcgggg

SEQ ID NO: 985072 - DNA, 15 bp, Homo sapiens
agggagcctcggggg

SEQ ID NO: 985073 - DNA, 15 bp, Homo sapiens
gggagcctcgggggg

SEQ ID NO: 985074 - DNA, 15 bp, Homo sapiens
ggagcctcggggggg

SEQ ID NO: 985075 - DNA, 15 bp, Homo sapiens
gagcctcgggggggg

SEQ ID NO: 985076 - DNA, 15 bp, Homo sapiens
agcctcggggggggc

SEQ ID NO: 985077 - DNA, 15 bp, Homo sapiens
gcctcggggggggcg

SEQ ID NO: 985078 - DNA, 15 bp, Homo sapiens
cctcggggggggcgg

SEQ ID NO: 985079 - DNA, 15 bp, Homo sapiens
ctcggggggggcgga

SEQ ID NO: 985080 - DNA, 15 bp, Homo sapiens
tcggggggggcggag

SEQ ID NO: 985081 - DNA, 15 bp, Homo sapiens
cggggggggcggaga

SEQ ID NO: 985082 - DNA, 15 bp, Homo sapiens
ggggggggcggagag

SEQ ID NO: 985083 - DNA, 15 bp, Homo sapiens
gggggggcggagaga

SEQ ID NO: 985084 - DNA, 15 bp, Homo sapiens
ggggggcggagagaa

SEQ ID NO: 985085 - DNA, 15 bp, Homo sapiens
gggggcggagagaag

SEQ ID NO: 985086 - DNA, 15 bp, Homo sapiens
ggggcggagagaaga

SEQ ID NO: 985087 - DNA, 15 bp, Homo sapiens
gggcggagagaagaa

SEQ ID NO: 985088 - DNA, 15 bp, Homo sapiens
ggcggagagaagaaa

SEQ ID NO: 985089 - DNA, 15 bp, Homo sapiens
gcggagagaagaaag

SEQ ID NO: 985090 - DNA, 15 bp, Homo sapiens
cggagagaagaaagg

SEQ ID NO: 985091 - DNA, 15 bp, Homo sapiens
ggagagaagaaaggg

SEQ ID NO: 985092 - DNA, 15 bp, Homo sapiens
gagagaagaaaggga

SEQ ID NO: 985093 - DNA, 15 bp, Homo sapiens
agagaagaaagggag

SEQ ID NO: 985094 - DNA, 15 bp, Homo sapiens
gagaagaaagggagg

SEQ ID NO: 985095 - DNA, 15 bp, Homo sapiens
agaagaaagggaggg

SEQ ID NO: 985096 - DNA, 15 bp, Homo sapiens
gaagaaagggagggg

SEQ ID NO: 985097 - DNA, 15 bp, Homo sapiens
aagaaagggaggggc

SEQ ID NO: 985098 - DNA, 15 bp, Homo sapiens
agaaagggaggggcg

SEQ ID NO: 985099 - DNA, 15 bp, Homo sapiens
gaaagggaggggcgg

SEQ ID NO: 985100 - DNA, 15 bp, Homo sapiens
aaagggaggggcggg

SEQ ID NO: 985101 - DNA, 15 bp, Homo sapiens
aagggaggggcgggg

SEQ ID NO: 985102 - DNA, 15 bp, Homo sapiens
agggaggggcggggc

SEQ ID NO: 985103 - DNA, 15 bp, Homo sapiens
gggaggggcggggca

SEQ ID NO: 985104 - DNA, 15 bp, Homo sapiens
ggaggggcggggcat

SEQ ID NO: 985105 - DNA, 15 bp, Homo sapiens
gaggggcggggcatg

SEQ ID NO: 985106 - DNA, 15 bp, Homo sapiens
aggggcggggcatgg

SEQ ID NO: 985107 - DNA, 15 bp, Homo sapiens
ggggcggggcatggg

SEQ ID NO: 985108 - DNA, 15 bp, Homo sapiens
gggcggggcatggga

SEQ ID NO: 985109 - DNA, 15 bp, Homo sapiens
ggcggggcatgggag

SEQ ID NO: 985110 - DNA, 15 bp, Homo sapiens
gcggggcatgggaga

SEQ ID NO: 985111 - DNA, 15 bp, Homo sapiens
cggggcatgggagaa

SEQ ID NO: 985112 - DNA, 15 bp, Homo sapiens
ggggcatgggagaag

SEQ ID NO: 985113 - DNA, 15 bp, Homo sapiens
gggcatgggagaagg

SEQ ID NO: 985114 - DNA, 15 bp, Homo sapiens
ggcatgggagaaggc

SEQ ID NO: 985115 - DNA, 15 bp, Homo sapiens
gcatgggagaaggcg

SEQ ID NO: 985116 - DNA, 15 bp, Homo sapiens
catgggagaaggcgg

SEQ ID NO: 985117 - DNA, 15 bp, Homo sapiens
atgggagaaggcgga

SEQ ID NO: 985118 - DNA, 15 bp, Homo sapiens
tgggagaaggcggag

SEQ ID NO: 985119 - DNA, 15 bp, Homo sapiens
gggagaaggcggagg

SEQ ID NO: 985120 - DNA, 15 bp, Homo sapiens
ggagaaggcggagga

SEQ ID NO: 985121 - DNA, 15 bp, Homo sapiens
gagaaggcggaggaa

SEQ ID NO: 985122 - DNA, 15 bp, Homo sapiens
agaaggcggaggaaa

SEQ ID NO: 985123 - DNA, 15 bp, Homo sapiens
gaaggcggaggaaaa

SEQ ID NO: 985124 - DNA, 15 bp, Homo sapiens
aaggcggaggaaaag

SEQ ID NO: 985125 - DNA, 15 bp, Homo sapiens
aggcggaggaaaagg

SEQ ID NO: 985126 - DNA, 15 bp, Homo sapiens
ggcggaggaaaaggc

SEQ ID NO: 985127 - DNA, 15 bp, Homo sapiens
gcggaggaaaaggct

SEQ ID NO: 985128 - DNA, 15 bp, Homo sapiens
cggaggaaaaggctg

SEQ ID NO: 985129 - DNA, 15 bp, Homo sapiens
ggaggaaaaggctgt

SEQ ID NO: 985130 - DNA, 15 bp, Homo sapiens
gaggaaaaggctgta

SEQ ID NO: 985131 - DNA, 15 bp, Homo sapiens
aggaaaaggctgtag

SEQ ID NO: 985132 - DNA, 15 bp, Homo sapiens
ggaaaaggctgtagc

SEQ ID NO: 985133 - DNA, 15 bp, Homo sapiens
gaaaaggctgtagcg

SEQ ID NO: 985134 - DNA, 15 bp, Homo sapiens
aaaaggctgtagcga

SEQ ID NO: 985135 - DNA, 15 bp, Homo sapiens
aaaggctgtagcgaa

SEQ ID NO: 985136 - DNA, 15 bp, Homo sapiens
aaggctgtagcgaag

SEQ ID NO: 985137 - DNA, 15 bp, Homo sapiens
aggctgtagcgaagg

SEQ ID NO: 985138 - DNA, 15 bp, Homo sapiens
ggctgtagcgaagga

SEQ ID NO: 985139 - DNA, 15 bp, Homo sapiens
gctgtagcgaaggaa

SEQ ID NO: 985140 - DNA, 15 bp, Homo sapiens
ctgtagcgaaggaag

SEQ ID NO: 985141 - DNA, 15 bp, Homo sapiens
tgtagcgaaggaagt

SEQ ID NO: 985142 - DNA, 15 bp, Homo sapiens
gtagcgaaggaagtt

SEQ ID NO: 985143 - DNA, 15 bp, Homo sapiens
tagcgaaggaagtta

SEQ ID NO: 985144 - DNA, 15 bp, Homo sapiens
agcgaaggaagttat

SEQ ID NO: 985145 - DNA, 15 bp, Homo sapiens
gcgaaggaagttata

SEQ ID NO: 985146 - DNA, 15 bp, Homo sapiens
cgaaggaagttataa

SEQ ID NO: 985147 - DNA, 15 bp, Homo sapiens
gaaggaagttataag

SEQ ID NO: 985148 - DNA, 15 bp, Homo sapiens
aaggaagttataagt

SEQ ID NO: 985149 - DNA, 15 bp, Homo sapiens
aggaagttataagta

SEQ ID NO: 985150 - DNA, 15 bp, Homo sapiens
ggaagttataagtaa

SEQ ID NO: 985151 - DNA, 15 bp, Homo sapiens
gaagttataagtaag

SEQ ID NO: 985152 - DNA, 15 bp, Homo sapiens
aagttataagtaagg

SEQ ID NO: 985153 - DNA, 15 bp, Homo sapiens
agttataagtaagga

SEQ ID NO: 985154 - DNA, 15 bp, Homo sapiens
gttataagtaaggaa

SEQ ID NO: 985155 - DNA, 15 bp, Homo sapiens
ttataagtaaggaac

SEQ ID NO: 985156 - DNA, 15 bp, Homo sapiens
tataagtaaggaacg

SEQ ID NO: 985157 - DNA, 15 bp, Homo sapiens
ataagtaaggaacgc

SEQ ID NO: 985158 - DNA, 15 bp, Homo sapiens
taagtaaggaacgcg

SEQ ID NO: 985159 - DNA, 15 bp, Homo sapiens
aagtaaggaacgcgc

SEQ ID NO: 985160 - DNA, 15 bp, Homo sapiens
agtaaggaacgcgcg

SEQ ID NO: 985161 - DNA, 15 bp, Homo sapiens
gtaaggaacgcgcgc

SEQ ID NO: 985162 - DNA, 15 bp, Homo sapiens
taaggaacgcgcgcc

SEQ ID NO: 985163 - DNA, 15 bp, Homo sapiens
aaggaacgcgcgccg

SEQ ID NO: 985164 - DNA, 15 bp, Homo sapiens
aggaacgcgcgccgg

SEQ ID NO: 985165 - DNA, 15 bp, Homo sapiens
ggaacgcgcgccggc

SEQ ID NO: 985166 - DNA, 15 bp, Homo sapiens
gaacgcgcgccggcg

SEQ ID NO: 985167 - DNA, 15 bp, Homo sapiens
aacgcgcgccggcgg

SEQ ID NO: 985168 - DNA, 15 bp, Homo sapiens
acgcgcgccggcggc

SEQ ID NO: 985169 - DNA, 15 bp, Homo sapiens
cgcgcgccggcggcc

SEQ ID NO: 985170 - DNA, 15 bp, Homo sapiens
gcgcgccggcggccg

SEQ ID NO: 985171 - DNA, 15 bp, Homo sapiens
cgcgccggcggccgg

SEQ ID NO: 985172 - DNA, 15 bp, Homo sapiens
gcgccggcggccggc

SEQ ID NO: 985173 - DNA, 15 bp, Homo sapiens
cgccggcggccggca

SEQ ID NO: 985174 - DNA, 15 bp, Homo sapiens
gccggcggccggcag

SEQ ID NO: 985175 - DNA, 15 bp, Homo sapiens
ccggcggccggcagt

SEQ ID NO: 985176 - DNA, 15 bp, Homo sapiens
cggcggccggcagtt

SEQ ID NO: 985177 - DNA, 15 bp, Homo sapiens
ggcggccggcagttt

SEQ ID NO: 985178 - DNA, 15 bp, Homo sapiens
gcggccggcagtttc

SEQ ID NO: 985179 - DNA, 15 bp, Homo sapiens
cggccggcagtttcc

SEQ ID NO: 985180 - DNA, 15 bp, Homo sapiens
ggccggcagtttccc

SEQ ID NO: 985181 - DNA, 15 bp, Homo sapiens
gccggcagtttcccg

SEQ ID NO: 985182 - DNA, 15 bp, Homo sapiens
ccggcagtttcccga

SEQ ID NO: 985183 - DNA, 15 bp, Homo sapiens
cggcagtttcccgac

SEQ ID NO: 985184 - DNA, 15 bp, Homo sapiens
ggcagtttcccgacc

SEQ ID NO: 985185 - DNA, 15 bp, Homo sapiens
gcagtttcccgacca

SEQ ID NO: 985186 - DNA, 15 bp, Homo sapiens
cagtttcccgaccag

SEQ ID NO: 985187 - DNA, 15 bp, Homo sapiens
agtttcccgaccaga

SEQ ID NO: 985188 - DNA, 15 bp, Homo sapiens
gtttcccgaccagag

SEQ ID NO: 985189 - DNA, 15 bp, Homo sapiens
tttcccgaccagaga

SEQ ID NO: 985190 - DNA, 15 bp, Homo sapiens
ttcccgaccagagag

SEQ ID NO: 985191 - DNA, 15 bp, Homo sapiens
tcccgaccagagaga

SEQ ID NO: 985192 - DNA, 15 bp, Homo sapiens
cccgaccagagagaa

SEQ ID NO: 985193 - DNA, 15 bp, Homo sapiens
ccgaccagagagaac

SEQ ID NO: 985194 - DNA, 15 bp, Homo sapiens
cgaccagagagaacg

SEQ ID NO: 985195 - DNA, 15 bp, Homo sapiens
gaccagagagaacga

SEQ ID NO: 985196 - DNA, 15 bp, Homo sapiens
accagagagaacgaa

SEQ ID NO: 985197 - DNA, 15 bp, Homo sapiens
ccagagagaacgaac

SEQ ID NO: 985198 - DNA, 15 bp, Homo sapiens
cagagagaacgaacg

SEQ ID NO: 985199 - DNA, 15 bp, Homo sapiens
agagagaacgaacgt

SEQ ID NO: 985200 - DNA, 15 bp, Homo sapiens
gagagaacgaacgtg

SEQ ID NO: 985201 - DNA, 15 bp, Homo sapiens
agagaacgaacgtgt

SEQ ID NO: 985202 - DNA, 15 bp, Homo sapiens
gagaacgaacgtgtc

SEQ ID NO: 985203 - DNA, 15 bp, Homo sapiens
agaacgaacgtgtct

SEQ ID NO: 985204 - DNA, 15 bp, Homo sapiens
gaacgaacgtgtctg

SEQ ID NO: 985205 - DNA, 15 bp, Homo sapiens
aacgaacgtgtctgc

SEQ ID NO: 985206 - DNA, 15 bp, Homo sapiens
acgaacgtgtctgcg

SEQ ID NO: 985207 - DNA, 15 bp, Homo sapiens
cgaacgtgtctgcgg

SEQ ID NO: 985208 - DNA, 15 bp, Homo sapiens
gaacgtgtctgcggg

SEQ ID NO: 985209 - DNA, 15 bp, Homo sapiens
aacgtgtctgcgggc

SEQ ID NO: 985210 - DNA, 15 bp, Homo sapiens
acgtgtctgcgggcg

SEQ ID NO: 985211 - DNA, 15 bp, Homo sapiens
cgtgtctgcgggcgc

SEQ ID NO: 985212 - DNA, 15 bp, Homo sapiens
gtgtctgcgggcgcg

SEQ ID NO: 985213 - DNA, 15 bp, Homo sapiens
tgtctgcgggcgcgc

SEQ ID NO: 985214 - DNA, 15 bp, Homo sapiens
gtctgcgggcgcgcg

SEQ ID NO: 985215 - DNA, 15 bp, Homo sapiens
tctgcgggcgcgcgg

SEQ ID NO: 985216 - DNA, 15 bp, Homo sapiens
ctgcgggcgcgcggg

SEQ ID NO: 985217 - DNA, 15 bp, Homo sapiens
tgcgggcgcgcgggg

SEQ ID NO: 985218 - DNA, 15 bp, Homo sapiens
gcgggcgcgcgggga

SEQ ID NO: 985219 - DNA, 15 bp, Homo sapiens
cgggcgcgcggggag

SEQ ID NO: 985220 - DNA, 15 bp, Homo sapiens
gggcgcgcggggagc

SEQ ID NO: 985221 - DNA, 15 bp, Homo sapiens
ggcgcgcggggagca

SEQ ID NO: 985222 - DNA, 15 bp, Homo sapiens
gcgcgcggggagcag

SEQ ID NO: 985223 - DNA, 15 bp, Homo sapiens
cgcgcggggagcaga

SEQ ID NO: 985224 - DNA, 15 bp, Homo sapiens
gcgcggggagcagag

SEQ ID NO: 985225 - DNA, 15 bp, Homo sapiens
cgcggggagcagagg

SEQ ID NO: 985226 - DNA, 15 bp, Homo sapiens
gcggggagcagaggc

SEQ ID NO: 985227 - DNA, 15 bp, Homo sapiens
cggggagcagaggcg

SEQ ID NO: 985228 - DNA, 15 bp, Homo sapiens
ggggagcagaggcgg

SEQ ID NO: 985229 - DNA, 15 bp, Homo sapiens
gggagcagaggcggt

SEQ ID NO: 985230 - DNA, 15 bp, Homo sapiens
ggagcagaggcggtg

SEQ ID NO: 985231 - DNA, 15 bp, Homo sapiens
gagcagaggcggtgg

SEQ ID NO: 985232 - DNA, 15 bp, Homo sapiens
agcagaggcggtggc

SEQ ID NO: 985233 - DNA, 15 bp, Homo sapiens
gcagaggcggtggcg

SEQ ID NO: 985234 - DNA, 15 bp, Homo sapiens
cagaggcggtggcgg

SEQ ID NO: 985235 - DNA, 15 bp, Homo sapiens
agaggcggtggcggg

SEQ ID NO: 985236 - DNA, 15 bp, Homo sapiens
gaggcggtggcgggc

SEQ ID NO: 985237 - DNA, 15 bp, Homo sapiens
aggcggtggcgggcg

SEQ ID NO: 985238 - DNA, 15 bp, Homo sapiens
ggcggtggcgggcgg

SEQ ID NO: 985239 - DNA, 15 bp, Homo sapiens
gcggtggcgggcggc

SEQ ID NO: 985240 - DNA, 15 bp, Homo sapiens
cggtggcgggcggcg

SEQ ID NO: 985241 - DNA, 15 bp, Homo sapiens
ggtggcgggcggcgg

SEQ ID NO: 985242 - DNA, 15 bp, Homo sapiens
gtggcgggcggcggc

SEQ ID NO: 985243 - DNA, 15 bp, Homo sapiens
tggcgggcggcggcg

SEQ ID NO: 985244 - DNA, 15 bp, Homo sapiens
ggcgggcggcggcgg

SEQ ID NO: 985245 - DNA, 15 bp, Homo sapiens
gcgggcggcggcggc

SEQ ID NO: 985246 - DNA, 15 bp, Homo sapiens
cgggcggcggcggca

SEQ ID NO: 985247 - DNA, 15 bp, Homo sapiens
gggcggcggcggcac

SEQ ID NO: 985248 - DNA, 15 bp, Homo sapiens
ggcggcggcggcacc

SEQ ID NO: 985249 - DNA, 15 bp, Homo sapiens
gcggcggcggcaccg

SEQ ID NO: 985250 - DNA, 15 bp, Homo sapiens
cggcggcggcaccgg

SEQ ID NO: 985251 - DNA, 15 bp, Homo sapiens
ggcggcggcaccggg

SEQ ID NO: 985252 - DNA, 15 bp, Homo sapiens
gcggcggcaccggga

SEQ ID NO: 985253 - DNA, 15 bp, Homo sapiens
cggcggcaccgggag

SEQ ID NO: 985254 - DNA, 15 bp, Homo sapiens
ggcggcaccgggagc

SEQ ID NO: 985255 - DNA, 15 bp, Homo sapiens
gcggcaccgggagcc

SEQ ID NO: 985256 - DNA, 15 bp, Homo sapiens
cggcaccgggagccg

SEQ ID NO: 985257 - DNA, 15 bp, Homo sapiens
ggcaccgggagccgc

SEQ ID NO: 985258 - DNA, 15 bp, Homo sapiens
gcaccgggagccgcc

SEQ ID NO: 985259 - DNA, 15 bp, Homo sapiens
caccgggagccgccg

SEQ ID NO: 985260 - DNA, 15 bp, Homo sapiens
accgggagccgccga

SEQ ID NO: 985261 - DNA, 15 bp, Homo sapiens
ccgggagccgccgag

SEQ ID NO: 985262 - DNA, 15 bp, Homo sapiens
cgggagccgccgagt

SEQ ID NO: 985263 - DNA, 15 bp, Homo sapiens
gggagccgccgagtg

SEQ ID NO: 985264 - DNA, 15 bp, Homo sapiens
ggagccgccgagtga

SEQ ID NO: 985265 - DNA, 15 bp, Homo sapiens
gagccgccgagtgac

SEQ ID NO: 985266 - DNA, 15 bp, Homo sapiens
agccgccgagtgacc

SEQ ID NO: 985267 - DNA, 15 bp, Homo sapiens
gccgccgagtgaccc

SEQ ID NO: 985268 - DNA, 15 bp, Homo sapiens
ccgccgagtgaccct

SEQ ID NO: 985269 - DNA, 15 bp, Homo sapiens
cgccgagtgaccctc

SEQ ID NO: 985270 - DNA, 15 bp, Homo sapiens
gccgagtgaccctcc

SEQ ID NO: 985271 - DNA, 15 bp, Homo sapiens
ccgagtgaccctccc

SEQ ID NO: 985272 - DNA, 15 bp, Homo sapiens
cgagtgaccctcccc

SEQ ID NO: 985273 - DNA, 15 bp, Homo sapiens
gagtgaccctccccc

SEQ ID NO: 985274 - DNA, 15 bp, Homo sapiens
agtgaccctcccccg

SEQ ID NO: 985275 - DNA, 15 bp, Homo sapiens
gtgaccctcccccgc

SEQ ID NO: 985276 - DNA, 15 bp, Homo sapiens
tgaccctcccccgcc

SEQ ID NO: 985277 - DNA, 15 bp, Homo sapiens
gaccctcccccgccc

SEQ ID NO: 985278 - DNA, 15 bp, Homo sapiens
accctcccccgcccc

SEQ ID NO: 985279 - DNA, 15 bp, Homo sapiens
ccctcccccgcccct

SEQ ID NO: 985280 - DNA, 15 bp, Homo sapiens
cctcccccgcccctc

SEQ ID NO: 985281 - DNA, 15 bp, Homo sapiens
ctcccccgcccctct

SEQ ID NO: 985282 - DNA, 15 bp, Homo sapiens
tcccccgcccctctg

SEQ ID NO: 985283 - DNA, 15 bp, Homo sapiens
cccccgcccctctgg

SEQ ID NO: 985284 - DNA, 15 bp, Homo sapiens
ccccgcccctctggc

SEQ ID NO: 985285 - DNA, 15 bp, Homo sapiens
cccgcccctctggcc

SEQ ID NO: 985286 - DNA, 15 bp, Homo sapiens
ccgcccctctggccc

SEQ ID NO: 985287 - DNA, 15 bp, Homo sapiens
cgcccctctggcccc

SEQ ID NO: 985288 - DNA, 15 bp, Homo sapiens
gcccctctggccccc

SEQ ID NO: 985289 - DNA, 15 bp, Homo sapiens
cccctctggcccccc

SEQ ID NO: 985290 - DNA, 15 bp, Homo sapiens
ccctctggcccccca

SEQ ID NO: 985291 - DNA, 15 bp, Homo sapiens
cctctggccccccac

SEQ ID NO: 985292 - DNA, 15 bp, Homo sapiens
ctctggccccccacc

SEQ ID NO: 985293 - DNA, 15 bp, Homo sapiens
tctggccccccaccc

SEQ ID NO: 985294 - DNA, 15 bp, Homo sapiens
ctggccccccaccct

SEQ ID NO: 985295 - DNA, 15 bp, Homo sapiens
tggccccccaccctc

SEQ ID NO: 985296 - DNA, 15 bp, Homo sapiens
ggccccccaccctcc

SEQ ID NO: 985297 - DNA, 15 bp, Homo sapiens
gccccccaccctccc

SEQ ID NO: 985298 - DNA, 15 bp, Homo sapiens
ccccccaccctccca

SEQ ID NO: 985299 - DNA, 15 bp, Homo sapiens
cccccaccctcccac

SEQ ID NO: 985300 - DNA, 15 bp, Homo sapiens
ccccaccctcccacc

SEQ ID NO: 985301 - DNA, 15 bp, Homo sapiens
cccaccctcccaccc

SEQ ID NO: 985302 - DNA, 15 bp, Homo sapiens
ccaccctcccacccg

SEQ ID NO: 985303 - DNA, 15 bp, Homo sapiens
caccctcccacccgc

SEQ ID NO: 985304 - DNA, 15 bp, Homo sapiens
accctcccacccgcc

SEQ ID NO: 985305 - DNA, 15 bp, Homo sapiens
ccctcccacccgccc

SEQ ID NO: 985306 - DNA, 15 bp, Homo sapiens
cctcccacccgcccg

SEQ ID NO: 985307 - DNA, 15 bp, Homo sapiens
ctcccacccgcccgt

SEQ ID NO: 985308 - DNA, 15 bp, Homo sapiens
tcccacccgcccgtg

SEQ ID NO: 985309 - DNA, 15 bp, Homo sapiens
cccacccgcccgtgg

SEQ ID NO: 985310 - DNA, 15 bp, Homo sapiens
ccacccgcccgtggc

SEQ ID NO: 985311 - DNA, 15 bp, Homo sapiens
cacccgcccgtggcc

SEQ ID NO: 985312 - DNA, 15 bp, Homo sapiens
acccgcccgtggccc

SEQ ID NO: 985313 - DNA, 15 bp, Homo sapiens
cccgcccgtggcccg

SEQ ID NO: 985314 - DNA, 15 bp, Homo sapiens
ccgcccgtggcccgc

SEQ ID NO: 985315 - DNA, 15 bp, Homo sapiens
cgcccgtggcccgcg

SEQ ID NO: 985316 - DNA, 15 bp, Homo sapiens
gcccgtggcccgcgc

SEQ ID NO: 985317 - DNA, 15 bp, Homo sapiens
cccgtggcccgcgcc

SEQ ID NO: 985318 - DNA, 15 bp, Homo sapiens
ccgtggcccgcgccc

SEQ ID NO: 985319 - DNA, 15 bp, Homo sapiens
cgtggcccgcgccca

SEQ ID NO: 985320 - DNA, 15 bp, Homo sapiens
gtggcccgcgcccat

SEQ ID NO: 985321 - DNA, 15 bp, Homo sapiens
tggcccgcgcccatg

SEQ ID NO: 985322 - DNA, 15 bp, Homo sapiens
ggcccgcgcccatgg

SEQ ID NO: 985323 - DNA, 15 bp, Homo sapiens
gcccgcgcccatggc

SEQ ID NO: 985324 - DNA, 15 bp, Homo sapiens
cccgcgcccatggcc

SEQ ID NO: 985325 - DNA, 15 bp, Homo sapiens
ccgcgcccatggccg

SEQ ID NO: 985326 - DNA, 15 bp, Homo sapiens
cgcgcccatggccgc

SEQ ID NO: 985327 - DNA, 15 bp, Homo sapiens
gcgcccatggccgcg

SEQ ID NO: 985328 - DNA, 15 bp, Homo sapiens
cgcccatggccgcgc

SEQ ID NO: 985329 - DNA, 15 bp, Homo sapiens
gcccatggccgcgcg

SEQ ID NO: 985330 - DNA, 15 bp, Homo sapiens
cccatggccgcgcgc

SEQ ID NO: 985331 - DNA, 15 bp, Homo sapiens
ccatggccgcgcgcg

SEQ ID NO: 985332 - DNA, 15 bp, Homo sapiens
catggccgcgcgcgc

SEQ ID NO: 985333 - DNA, 15 bp, Homo sapiens
atggccgcgcgcgct

SEQ ID NO: 985334 - DNA, 15 bp, Homo sapiens
tggccgcgcgcgctc

SEQ ID NO: 985335 - DNA, 15 bp, Homo sapiens
ggccgcgcgcgctcc

SEQ ID NO: 985336 - DNA, 15 bp, Homo sapiens
gccgcgcgcgctcca

SEQ ID NO: 985337 - DNA, 15 bp, Homo sapiens
ccgcgcgcgctccac

SEQ ID NO: 985338 - DNA, 15 bp, Homo sapiens
cgcgcgcgctccaca

SEQ ID NO: 985339 - DNA, 15 bp, Homo sapiens
gcgcgcgctccacac

SEQ ID NO: 985340 - DNA, 15 bp, Homo sapiens
cgcgcgctccacaca

SEQ ID NO: 985341 - DNA, 15 bp, Homo sapiens
gcgcgctccacacaa

SEQ ID NO: 985342 - DNA, 15 bp, Homo sapiens
cgcgctccacacaac

SEQ ID NO: 985343 - DNA, 15 bp, Homo sapiens
gcgctccacacaact

SEQ ID NO: 985344 - DNA, 15 bp, Homo sapiens
cgctccacacaactc

SEQ ID NO: 985345 - DNA, 15 bp, Homo sapiens
gctccacacaactca

SEQ ID NO: 985346 - DNA, 15 bp, Homo sapiens
ctccacacaactcac

SEQ ID NO: 985347 - DNA, 15 bp, Homo sapiens
tccacacaactcacc

SEQ ID NO: 985348 - DNA, 15 bp, Homo sapiens
ccacacaactcaccg

SEQ ID NO: 985349 - DNA, 15 bp, Homo sapiens
cacacaactcaccgg

SEQ ID NO: 985350 - DNA, 15 bp, Homo sapiens
acacaactcaccgga

SEQ ID NO: 985351 - DNA, 15 bp, Homo sapiens
cacaactcaccggag

SEQ ID NO: 985352 - DNA, 15 bp, Homo sapiens
acaactcaccggagt

SEQ ID NO: 985353 - DNA, 15 bp, Homo sapiens
caactcaccggagtc

SEQ ID NO: 985354 - DNA, 15 bp, Homo sapiens
aactcaccggagtcc

SEQ ID NO: 985355 - DNA, 15 bp, Homo sapiens
actcaccggagtccg

SEQ ID NO: 985356 - DNA, 15 bp, Homo sapiens
ctcaccggagtccgc

SEQ ID NO: 985357 - DNA, 15 bp, Homo sapiens
tcaccggagtccgcg

SEQ ID NO: 985358 - DNA, 15 bp, Homo sapiens
caccggagtccgcgc

SEQ ID NO: 985359 - DNA, 15 bp, Homo sapiens
accggagtccgcgcc

SEQ ID NO: 985360 - DNA, 15 bp, Homo sapiens
ccggagtccgcgcct

SEQ ID NO: 985361 - DNA, 15 bp, Homo sapiens
cggagtccgcgcctt

SEQ ID NO: 985362 - DNA, 15 bp, Homo sapiens
ggagtccgcgccttg

SEQ ID NO: 985363 - DNA, 15 bp, Homo sapiens
gagtccgcgccttgc

SEQ ID NO: 985364 - DNA, 15 bp, Homo sapiens
agtccgcgccttgcg

SEQ ID NO: 985365 - DNA, 15 bp, Homo sapiens
gtccgcgccttgcgc

SEQ ID NO: 985366 - DNA, 15 bp, Homo sapiens
tccgcgccttgcgcc

SEQ ID NO: 985367 - DNA, 15 bp, Homo sapiens
ccgcgccttgcgccg

SEQ ID NO: 985368 - DNA, 15 bp, Homo sapiens
cgcgccttgcgccgc

SEQ ID NO: 985369 - DNA, 15 bp, Homo sapiens
gcgccttgcgccgcc

SEQ ID NO: 985370 - DNA, 15 bp, Homo sapiens
cgccttgcgccgccg

SEQ ID NO: 985371 - DNA, 15 bp, Homo sapiens
gccttgcgccgccga

SEQ ID NO: 985372 - DNA, 15 bp, Homo sapiens
ccttgcgccgccgac

SEQ ID NO: 985373 - DNA, 15 bp, Homo sapiens
cttgcgccgccgacc

SEQ ID NO: 985374 - DNA, 15 bp, Homo sapiens
ttgcgccgccgacca

SEQ ID NO: 985375 - DNA, 15 bp, Homo sapiens
tgcgccgccgaccag

SEQ ID NO: 985376 - DNA, 15 bp, Homo sapiens
gcgccgccgaccagt

SEQ ID NO: 985377 - DNA, 15 bp, Homo sapiens
cgccgccgaccagtt

SEQ ID NO: 985378 - DNA, 15 bp, Homo sapiens
gccgccgaccagttc

SEQ ID NO: 985379 - DNA, 15 bp, Homo sapiens
ccgccgaccagttcg

SEQ ID NO: 985380 - DNA, 15 bp, Homo sapiens
cgccgaccagttcgc

SEQ ID NO: 985381 - DNA, 15 bp, Homo sapiens
gccgaccagttcgca

SEQ ID NO: 985382 - DNA, 15 bp, Homo sapiens
ccgaccagttcgcag

SEQ ID NO: 985383 - DNA, 15 bp, Homo sapiens
cgaccagttcgcagc

SEQ ID NO: 985384 - DNA, 15 bp, Homo sapiens
gaccagttcgcagct

SEQ ID NO: 985385 - DNA, 15 bp, Homo sapiens
accagttcgcagctc

SEQ ID NO: 985386 - DNA, 15 bp, Homo sapiens
ccagttcgcagctcc

SEQ ID NO: 985387 - DNA, 15 bp, Homo sapiens
cagttcgcagctccg

SEQ ID NO: 985388 - DNA, 15 bp, Homo sapiens
agttcgcagctccgc

SEQ ID NO: 985389 - DNA, 15 bp, Homo sapiens
gttcgcagctccgcg

SEQ ID NO: 985390 - DNA, 15 bp, Homo sapiens
ttcgcagctccgcgc

SEQ ID NO: 985391 - DNA, 15 bp, Homo sapiens
tcgcagctccgcgcc

SEQ ID NO: 985392 - DNA, 15 bp, Homo sapiens
cgcagctccgcgcca

SEQ ID NO: 985393 - DNA, 15 bp, Homo sapiens
gcagctccgcgccac

SEQ ID NO: 985394 - DNA, 15 bp, Homo sapiens
cagctccgcgccacg

SEQ ID NO: 985395 - DNA, 15 bp, Homo sapiens
agctccgcgccacgg

SEQ ID NO: 985396 - DNA, 15 bp, Homo sapiens
gctccgcgccacggc

SEQ ID NO: 985397 - DNA, 15 bp, Homo sapiens
ctccgcgccacggca

SEQ ID NO: 985398 - DNA, 15 bp, Homo sapiens
tccgcgccacggcag

SEQ ID NO: 985399 - DNA, 15 bp, Homo sapiens
ccgcgccacggcagc

SEQ ID NO: 985400 - DNA, 15 bp, Homo sapiens
cgcgccacggcagcc

SEQ ID NO: 985401 - DNA, 15 bp, Homo sapiens
gcgccacggcagcca

SEQ ID NO: 985402 - DNA, 15 bp, Homo sapiens
cgccacggcagccag

SEQ ID NO: 985403 - DNA, 15 bp, Homo sapiens
gccacggcagccagt

SEQ ID NO: 985404 - DNA, 15 bp, Homo sapiens
ccacggcagccagtc

SEQ ID NO: 985405 - DNA, 15 bp, Homo sapiens
cacggcagccagtct

SEQ ID NO: 985406 - DNA, 15 bp, Homo sapiens
acggcagccagtctc

SEQ ID NO: 985407 - DNA, 15 bp, Homo sapiens
cggcagccagtctca

SEQ ID NO: 985408 - DNA, 15 bp, Homo sapiens
ggcagccagtctcac

SEQ ID NO: 985409 - DNA, 15 bp, Homo sapiens
gcagccagtctcacc

SEQ ID NO: 985410 - DNA, 15 bp, Homo sapiens
cagccagtctcacct

SEQ ID NO: 985411 - DNA, 15 bp, Homo sapiens
agccagtctcacctg

SEQ ID NO: 985412 - DNA, 15 bp, Homo sapiens
gccagtctcacctgg

SEQ ID NO: 985413 - DNA, 15 bp, Homo sapiens
ccagtctcacctggc

SEQ ID NO: 985414 - DNA, 15 bp, Homo sapiens
cagtctcacctggcg

SEQ ID NO: 985415 - DNA, 15 bp, Homo sapiens
agtctcacctggcgg

SEQ ID NO: 985416 - DNA, 15 bp, Homo sapiens
gtctcacctggcggc

SEQ ID NO: 985417 - DNA, 15 bp, Homo sapiens
tctcacctggcggca

SEQ ID NO: 985418 - DNA, 15 bp, Homo sapiens
ctcacctggcggcac

SEQ ID NO: 985419 - DNA, 15 bp, Homo sapiens
tcacctggcggcacc

SEQ ID NO: 985420 - DNA, 15 bp, Homo sapiens
cacctggcggcaccg

SEQ ID NO: 985421 - DNA, 15 bp, Homo sapiens
acctggcggcaccgc

SEQ ID NO: 985422 - DNA, 15 bp, Homo sapiens
cctggcggcaccgcc

SEQ ID NO: 985423 - DNA, 15 bp, Homo sapiens
ctggcggcaccgccc

SEQ ID NO: 985424 - DNA, 15 bp, Homo sapiens
tggcggcaccgcccg

SEQ ID NO: 985425 - DNA, 15 bp, Homo sapiens
ggcggcaccgcccgc

SEQ ID NO: 985426 - DNA, 15 bp, Homo sapiens
gcggcaccgcccgcc

SEQ ID NO: 985427 - DNA, 15 bp, Homo sapiens
cggcaccgcccgccc

SEQ ID NO: 985428 - DNA, 15 bp, Homo sapiens
ggcaccgcccgccca

SEQ ID NO: 985429 - DNA, 15 bp, Homo sapiens
gcaccgcccgcccac

SEQ ID NO: 985430 - DNA, 15 bp, Homo sapiens
caccgcccgcccacc

SEQ ID NO: 985431 - DNA, 15 bp, Homo sapiens
accgcccgcccaccg

SEQ ID NO: 985432 - DNA, 15 bp, Homo sapiens
ccgcccgcccaccgc

SEQ ID NO: 985433 - DNA, 15 bp, Homo sapiens
cgcccgcccaccgcc

SEQ ID NO: 985434 - DNA, 15 bp, Homo sapiens
gcccgcccaccgccc

SEQ ID NO: 985435 - DNA, 15 bp, Homo sapiens
cccgcccaccgcccc

SEQ ID NO: 985436 - DNA, 15 bp, Homo sapiens
ccgcccaccgccccg

SEQ ID NO: 985437 - DNA, 15 bp, Homo sapiens
cgcccaccgccccgg

SEQ ID NO: 985438 - DNA, 15 bp, Homo sapiens
gcccaccgccccggc

SEQ ID NO: 985439 - DNA, 15 bp, Homo sapiens
cccaccgccccggcc

SEQ ID NO: 985440 - DNA, 15 bp, Homo sapiens
ccaccgccccggcca

SEQ ID NO: 985441 - DNA, 15 bp, Homo sapiens
caccgccccggccac

SEQ ID NO: 985442 - DNA, 15 bp, Homo sapiens
accgccccggccaca

SEQ ID NO: 985443 - DNA, 15 bp, Homo sapiens
ccgccccggccacag

SEQ ID NO: 985444 - DNA, 15 bp, Homo sapiens
cgccccggccacagc

SEQ ID NO: 985445 - DNA, 15 bp, Homo sapiens
gccccggccacagcc

SEQ ID NO: 985446 - DNA, 15 bp, Homo sapiens
ccccggccacagccc

SEQ ID NO: 985447 - DNA, 15 bp, Homo sapiens
cccggccacagcccc

SEQ ID NO: 985448 - DNA, 15 bp, Homo sapiens
ccggccacagcccct

SEQ ID NO: 985449 - DNA, 15 bp, Homo sapiens
cggccacagcccctg

SEQ ID NO: 985450 - DNA, 15 bp, Homo sapiens
ggccacagcccctgc

SEQ ID NO: 985451 - DNA, 15 bp, Homo sapiens
gccacagcccctgcg

SEQ ID NO: 985452 - DNA, 15 bp, Homo sapiens
ccacagcccctgcgc

SEQ ID NO: 985453 - DNA, 15 bp, Homo sapiens
cacagcccctgcgcc

SEQ ID NO: 985454 - DNA, 15 bp, Homo sapiens
acagcccctgcgccc

SEQ ID NO: 985455 - DNA, 15 bp, Homo sapiens
cagcccctgcgccca

SEQ ID NO: 985456 - DNA, 15 bp, Homo sapiens
agcccctgcgcccac

SEQ ID NO: 985457 - DNA, 15 bp, Homo sapiens
gcccctgcgcccacg

SEQ ID NO: 985458 - DNA, 15 bp, Homo sapiens
cccctgcgcccacgg

SEQ ID NO: 985459 - DNA, 15 bp, Homo sapiens
ccctgcgcccacggc

SEQ ID NO: 985460 - DNA, 15 bp, Homo sapiens
cctgcgcccacggca

SEQ ID NO: 985461 - DNA, 15 bp, Homo sapiens
ctgcgcccacggcag

SEQ ID NO: 985462 - DNA, 15 bp, Homo sapiens
tgcgcccacggcagc

SEQ ID NO: 985463 - DNA, 15 bp, Homo sapiens
gcgcccacggcagca

SEQ ID NO: 985464 - DNA, 15 bp, Homo sapiens
cgcccacggcagcac

SEQ ID NO: 985465 - DNA, 15 bp, Homo sapiens
gcccacggcagcact

SEQ ID NO: 985466 - DNA, 15 bp, Homo sapiens
cccacggcagcactc

SEQ ID NO: 985467 - DNA, 15 bp, Homo sapiens
ccacggcagcactcg

SEQ ID NO: 985468 - DNA, 15 bp, Homo sapiens
cacggcagcactcga

SEQ ID NO: 985469 - DNA, 15 bp, Homo sapiens
acggcagcactcgag

SEQ ID NO: 985470 - DNA, 15 bp, Homo sapiens
cggcagcactcgagg

SEQ ID NO: 985471 - DNA, 15 bp, Homo sapiens
ggcagcactcgaggc

SEQ ID NO: 985472 - DNA, 15 bp, Homo sapiens
gcagcactcgaggcg

SEQ ID NO: 985473 - DNA, 15 bp, Homo sapiens
cagcactcgaggcga

SEQ ID NO: 985474 - DNA, 15 bp, Homo sapiens
agcactcgaggcgac

SEQ ID NO: 985475 - DNA, 15 bp, Homo sapiens
gcactcgaggcgacc

SEQ ID NO: 985476 - DNA, 15 bp, Homo sapiens
cactcgaggcgaccg

SEQ ID NO: 985477 - DNA, 15 bp, Homo sapiens
actcgaggcgaccgc

SEQ ID NO: 985478 - DNA, 15 bp, Homo sapiens
ctcgaggcgaccgcg

SEQ ID NO: 985479 - DNA, 15 bp, Homo sapiens
tcgaggcgaccgcga

SEQ ID NO: 985480 - DNA, 15 bp, Homo sapiens
cgaggcgaccgcgac

SEQ ID NO: 985481 - DNA, 15 bp, Homo sapiens
gaggcgaccgcgaca

SEQ ID NO: 985482 - DNA, 15 bp, Homo sapiens
aggcgaccgcgacag

SEQ ID NO: 985483 - DNA, 15 bp, Homo sapiens
ggcgaccgcgacagt

SEQ ID NO: 985484 - DNA, 15 bp, Homo sapiens
gcgaccgcgacagtg

SEQ ID NO: 985485 - DNA, 15 bp, Homo sapiens
cgaccgcgacagtgg

SEQ ID NO: 985486 - DNA, 15 bp, Homo sapiens
gaccgcgacagtggt

SEQ ID NO: 985487 - DNA, 15 bp, Homo sapiens
accgcgacagtggtg

SEQ ID NO: 985488 - DNA, 15 bp, Homo sapiens
ccgcgacagtggtgg

SEQ ID NO: 985489 - DNA, 15 bp, Homo sapiens
cgcgacagtggtggg

SEQ ID NO: 985490 - DNA, 15 bp, Homo sapiens
gcgacagtggtgggg

SEQ ID NO: 985491 - DNA, 15 bp, Homo sapiens
cgacagtggtggggg

SEQ ID NO: 985492 - DNA, 15 bp, Homo sapiens
gacagtggtggggga

SEQ ID NO: 985493 - DNA, 15 bp, Homo sapiens
acagtggtgggggac

SEQ ID NO: 985494 - DNA, 15 bp, Homo sapiens
cagtggtgggggacg

SEQ ID NO: 985495 - DNA, 15 bp, Homo sapiens
agtggtgggggacgc

SEQ ID NO: 985496 - DNA, 15 bp, Homo sapiens
gtggtgggggacgct

SEQ ID NO: 985497 - DNA, 15 bp, Homo sapiens
tggtgggggacgctg

SEQ ID NO: 985498 - DNA, 15 bp, Homo sapiens
ggtgggggacgctgc

SEQ ID NO: 985499 - DNA, 15 bp, Homo sapiens
gtgggggacgctgct

SEQ ID NO: 985500 - DNA, 15 bp, Homo sapiens
tgggggacgctgctg

SEQ ID NO: 985501 - DNA, 15 bp, Homo sapiens
gggggacgctgctga

SEQ ID NO: 985502 - DNA, 15 bp, Homo sapiens
ggggacgctgctgag

SEQ ID NO: 985503 - DNA, 15 bp, Homo sapiens
gggacgctgctgagt

SEQ ID NO: 985504 - DNA, 15 bp, Homo sapiens
ggacgctgctgagtg

SEQ ID NO: 985505 - DNA, 15 bp, Homo sapiens
gacgctgctgagtgg

SEQ ID NO: 985506 - DNA, 15 bp, Homo sapiens
acgctgctgagtgga

SEQ ID NO: 985507 - DNA, 15 bp, Homo sapiens
cgctgctgagtggaa

SEQ ID NO: 985508 - DNA, 15 bp, Homo sapiens
gctgctgagtggaag

SEQ ID NO: 985509 - DNA, 15 bp, Homo sapiens
ctgctgagtggaaga

SEQ ID NO: 985510 - DNA, 15 bp, Homo sapiens
tgctgagtggaagag

SEQ ID NO: 985511 - DNA, 15 bp, Homo sapiens
gctgagtggaagaga

SEQ ID NO: 985512 - DNA, 15 bp, Homo sapiens
ctgagtggaagagag

SEQ ID NO: 985513 - DNA, 15 bp, Homo sapiens
tgagtggaagagagc

SEQ ID NO: 985514 - DNA, 15 bp, Homo sapiens
gagtggaagagagcg

SEQ ID NO: 985515 - DNA, 15 bp, Homo sapiens
agtggaagagagcgc

SEQ ID NO: 985516 - DNA, 15 bp, Homo sapiens
gtggaagagagcgca

SEQ ID NO: 985517 - DNA, 15 bp, Homo sapiens
tggaagagagcgcag

SEQ ID NO: 985518 - DNA, 15 bp, Homo sapiens
ggaagagagcgcagc

SEQ ID NO: 985519 - DNA, 15 bp, Homo sapiens
gaagagagcgcagcc

SEQ ID NO: 985520 - DNA, 15 bp, Homo sapiens
aagagagcgcagccc

SEQ ID NO: 985521 - DNA, 15 bp, Homo sapiens
agagagcgcagcccg

SEQ ID NO: 985522 - DNA, 15 bp, Homo sapiens
gagagcgcagcccgg

SEQ ID NO: 985523 - DNA, 15 bp, Homo sapiens
agagcgcagcccggc

SEQ ID NO: 985524 - DNA, 15 bp, Homo sapiens
gagcgcagcccggcc

SEQ ID NO: 985525 - DNA, 15 bp, Homo sapiens
agcgcagcccggcca

SEQ ID NO: 985526 - DNA, 15 bp, Homo sapiens
gcgcagcccggccac

SEQ ID NO: 985527 - DNA, 15 bp, Homo sapiens
cgcagcccggccacc

SEQ ID NO: 985528 - DNA, 15 bp, Homo sapiens
gcagcccggccaccg

SEQ ID NO: 985529 - DNA, 15 bp, Homo sapiens
cagcccggccaccgg

SEQ ID NO: 985530 - DNA, 15 bp, Homo sapiens
agcccggccaccgga

SEQ ID NO: 985531 - DNA, 15 bp, Homo sapiens
gcccggccaccggac

SEQ ID NO: 985532 - DNA, 15 bp, Homo sapiens
cccggccaccggacc

SEQ ID NO: 985533 - DNA, 15 bp, Homo sapiens
ccggccaccggacct

SEQ ID NO: 985534 - DNA, 15 bp, Homo sapiens
cggccaccggaccta

SEQ ID NO: 985535 - DNA, 15 bp, Homo sapiens
ggccaccggacctac

SEQ ID NO: 985536 - DNA, 15 bp, Homo sapiens
gccaccggacctact

SEQ ID NO: 985537 - DNA, 15 bp, Homo sapiens
ccaccggacctactt

SEQ ID NO: 985538 - DNA, 15 bp, Homo sapiens
caccggacctactta

SEQ ID NO: 985539 - DNA, 15 bp, Homo sapiens
accggacctacttac

SEQ ID NO: 985540 - DNA, 15 bp, Homo sapiens
ccggacctacttact

SEQ ID NO: 985541 - DNA, 15 bp, Homo sapiens
cggacctacttactc

SEQ ID NO: 985542 - DNA, 15 bp, Homo sapiens
ggacctacttactcg

SEQ ID NO: 985543 - DNA, 15 bp, Homo sapiens
gacctacttactcgc

SEQ ID NO: 985544 - DNA, 15 bp, Homo sapiens
acctacttactcgcc

SEQ ID NO: 985545 - DNA, 15 bp, Homo sapiens
cctacttactcgcct

SEQ ID NO: 985546 - DNA, 15 bp, Homo sapiens
ctacttactcgcctt

SEQ ID NO: 985547 - DNA, 15 bp, Homo sapiens
tacttactcgccttg

SEQ ID NO: 985548 - DNA, 15 bp, Homo sapiens
acttactcgccttgc

SEQ ID NO: 985549 - DNA, 15 bp, Homo sapiens
cttactcgccttgct

SEQ ID NO: 985550 - DNA, 15 bp, Homo sapiens
ttactcgccttgctg

SEQ ID NO: 985551 - DNA, 15 bp, Homo sapiens
tactcgccttgctga

SEQ ID NO: 985552 - DNA, 15 bp, Homo sapiens
actcgccttgctgat

SEQ ID NO: 985553 - DNA, 15 bp, Homo sapiens
ctcgccttgctgatt

SEQ ID NO: 985554 - DNA, 15 bp, Homo sapiens
tcgccttgctgattg

SEQ ID NO: 985555 - DNA, 15 bp, Homo sapiens
cgccttgctgattgt

SEQ ID NO: 985556 - DNA, 15 bp, Homo sapiens
gccttgctgattgtc

SEQ ID NO: 985557 - DNA, 15 bp, Homo sapiens
ccttgctgattgtct

SEQ ID NO: 985558 - DNA, 15 bp, Homo sapiens
cttgctgattgtcta

SEQ ID NO: 985559 - DNA, 15 bp, Homo sapiens
ttgctgattgtctat

SEQ ID NO: 985560 - DNA, 15 bp, Homo sapiens
tgctgattgtctatt

SEQ ID NO: 985561 - DNA, 15 bp, Homo sapiens
gctgattgtctattt

SEQ ID NO: 985562 - DNA, 15 bp, Homo sapiens
ctgattgtctatttt

SEQ ID NO: 985563 - DNA, 15 bp, Homo sapiens
tgattgtctattttt

SEQ ID NO: 985564 - DNA, 15 bp, Homo sapiens
gattgtctatttttg

SEQ ID NO: 985565 - DNA, 15 bp, Homo sapiens
attgtctatttttgc

SEQ ID NO: 985566 - DNA, 15 bp, Homo sapiens
ttgtctatttttgcg

SEQ ID NO: 985567 - DNA, 15 bp, Homo sapiens
tgtctatttttgcgt

SEQ ID NO: 985568 - DNA, 15 bp, Homo sapiens
gtctatttttgcgtt

SEQ ID NO: 985569 - DNA, 15 bp, Homo sapiens
tctatttttgcgttt

SEQ ID NO: 985570 - DNA, 15 bp, Homo sapiens
ctatttttgcgttta

SEQ ID NO: 985571 - DNA, 15 bp, Homo sapiens
tatttttgcgtttac

SEQ ID NO: 985572 - DNA, 15 bp, Homo sapiens
atttttgcgtttaca

SEQ ID NO: 985573 - DNA, 15 bp, Homo sapiens
tttttgcgtttacaa

SEQ ID NO: 985574 - DNA, 15 bp, Homo sapiens
ttttgcgtttacaac

SEQ ID NO: 985575 - DNA, 15 bp, Homo sapiens
tttgcgtttacaact

SEQ ID NO: 985576 - DNA, 15 bp, Homo sapiens
ttgcgtttacaactt

SEQ ID NO: 985577 - DNA, 15 bp, Homo sapiens
tgcgtttacaacttt

SEQ ID NO: 985578 - DNA, 15 bp, Homo sapiens
gcgtttacaactttt

SEQ ID NO: 985579 - DNA, 15 bp, Homo sapiens
cgtttacaacttttc

SEQ ID NO: 985580 - DNA, 15 bp, Homo sapiens
gtttacaacttttct

SEQ ID NO: 985581 - DNA, 15 bp, Homo sapiens
tttacaacttttcta

SEQ ID NO: 985582 - DNA, 15 bp, Homo sapiens
ttacaacttttctaa

SEQ ID NO: 985583 - DNA, 15 bp, Homo sapiens
tacaacttttctaag

SEQ ID NO: 985584 - DNA, 15 bp, Homo sapiens
acaacttttctaaga

SEQ ID NO: 985585 - DNA, 15 bp, Homo sapiens
caacttttctaagaa

SEQ ID NO: 985586 - DNA, 15 bp, Homo sapiens
aacttttctaagaac

SEQ ID NO: 985587 - DNA, 15 bp, Homo sapiens
acttttctaagaact

SEQ ID NO: 985588 - DNA, 15 bp, Homo sapiens
cttttctaagaactt

SEQ ID NO: 985589 - DNA, 15 bp, Homo sapiens
ttttctaagaacttt

SEQ ID NO: 985590 - DNA, 15 bp, Homo sapiens
tttctaagaactttt

SEQ ID NO: 985591 - DNA, 15 bp, Homo sapiens
ttctaagaacttttg

SEQ ID NO: 985592 - DNA, 15 bp, Homo sapiens
tctaagaacttttgt

SEQ ID NO: 985593 - DNA, 15 bp, Homo sapiens
ctaagaacttttgta

SEQ ID NO: 985594 - DNA, 15 bp, Homo sapiens
taagaacttttgtat

SEQ ID NO: 985595 - DNA, 15 bp, Homo sapiens
aagaacttttgtata

SEQ ID NO: 985596 - DNA, 15 bp, Homo sapiens
agaacttttgtatac

SEQ ID NO: 985597 - DNA, 15 bp, Homo sapiens
gaacttttgtataca

SEQ ID NO: 985598 - DNA, 15 bp, Homo sapiens
aacttttgtatacaa

SEQ ID NO: 985599 - DNA, 15 bp, Homo sapiens
acttttgtatacaaa

SEQ ID NO: 985600 - DNA, 15 bp, Homo sapiens
cttttgtatacaaag

SEQ ID NO: 985601 - DNA, 15 bp, Homo sapiens
ttttgtatacaaagg

SEQ ID NO: 985602 - DNA, 15 bp, Homo sapiens
tttgtatacaaagga

SEQ ID NO: 985603 - DNA, 15 bp, Homo sapiens
ttgtatacaaaggaa

SEQ ID NO: 985604 - DNA, 15 bp, Homo sapiens
tgtatacaaaggaac

SEQ ID NO: 985605 - DNA, 15 bp, Homo sapiens
gtatacaaaggaact

SEQ ID NO: 985606 - DNA, 15 bp, Homo sapiens
tatacaaaggaactt

SEQ ID NO: 985607 - DNA, 15 bp, Homo sapiens
atacaaaggaacttt

SEQ ID NO: 985608 - DNA, 15 bp, Homo sapiens
tacaaaggaactttt

SEQ ID NO: 985609 - DNA, 15 bp, Homo sapiens
acaaaggaacttttt

SEQ ID NO: 985610 - DNA, 15 bp, Homo sapiens
caaaggaacttttta

SEQ ID NO: 985611 - DNA, 15 bp, Homo sapiens
aaaggaactttttaa

SEQ ID NO: 985612 - DNA, 15 bp, Homo sapiens
aaggaactttttaaa

SEQ ID NO: 985613 - DNA, 15 bp, Homo sapiens
aggaactttttaaaa

SEQ ID NO: 985614 - DNA, 15 bp, Homo sapiens
ggaactttttaaaaa

SEQ ID NO: 985615 - DNA, 15 bp, Homo sapiens
gaactttttaaaaaa

SEQ ID NO: 985616 - DNA, 15 bp, Homo sapiens
aactttttaaaaaag

SEQ ID NO: 985617 - DNA, 15 bp, Homo sapiens
actttttaaaaaaga

SEQ ID NO: 985618 - DNA, 15 bp, Homo sapiens
ctttttaaaaaagac

SEQ ID NO: 985619 - DNA, 15 bp, Homo sapiens
tttttaaaaaagacg

SEQ ID NO: 985620 - DNA, 15 bp, Homo sapiens
ttttaaaaaagacgc

SEQ ID NO: 985621 - DNA, 15 bp, Homo sapiens
tttaaaaaagacgct

SEQ ID NO: 985622 - DNA, 15 bp, Homo sapiens
ttaaaaaagacgctt

SEQ ID NO: 985623 - DNA, 15 bp, Homo sapiens
taaaaaagacgcttc

SEQ ID NO: 985624 - DNA, 15 bp, Homo sapiens
aaaaaagacgcttcc

SEQ ID NO: 985625 - DNA, 15 bp, Homo sapiens
aaaaagacgcttcca

SEQ ID NO: 985626 - DNA, 15 bp, Homo sapiens
aaaagacgcttccaa

SEQ ID NO: 985627 - DNA, 15 bp, Homo sapiens
aaagacgcttccaag

SEQ ID NO: 985628 - DNA, 15 bp, Homo sapiens
aagacgcttccaagt

SEQ ID NO: 985629 - DNA, 15 bp, Homo sapiens
agacgcttccaagtt

SEQ ID NO: 985630 - DNA, 15 bp, Homo sapiens
gacgcttccaagtta

SEQ ID NO: 985631 - DNA, 15 bp, Homo sapiens
acgcttccaagttat

SEQ ID NO: 985632 - DNA, 15 bp, Homo sapiens
cgcttccaagttata

SEQ ID NO: 985633 - DNA, 15 bp, Homo sapiens
gcttccaagttatat

SEQ ID NO: 985634 - DNA, 15 bp, Homo sapiens
cttccaagttatatt

SEQ ID NO: 985635 - DNA, 15 bp, Homo sapiens
ttccaagttatattt

SEQ ID NO: 985636 - DNA, 15 bp, Homo sapiens
tccaagttatattta

SEQ ID NO: 985637 - DNA, 15 bp, Homo sapiens
ccaagttatatttaa

SEQ ID NO: 985638 - DNA, 15 bp, Homo sapiens
caagttatatttaat

SEQ ID NO: 985639 - DNA, 15 bp, Homo sapiens
aagttatatttaatc

SEQ ID NO: 985640 - DNA, 15 bp, Homo sapiens
agttatatttaatcc

SEQ ID NO: 985641 - DNA, 15 bp, Homo sapiens
gttatatttaatcca

SEQ ID NO: 985642 - DNA, 15 bp, Homo sapiens
ttatatttaatccaa

SEQ ID NO: 985643 - DNA, 15 bp, Homo sapiens
tatatttaatccaaa

SEQ ID NO: 985644 - DNA, 15 bp, Homo sapiens
atatttaatccaaag

SEQ ID NO: 985645 - DNA, 15 bp, Homo sapiens
tatttaatccaaaga

SEQ ID NO: 985646 - DNA, 15 bp, Homo sapiens
atttaatccaaagaa

SEQ ID NO: 985647 - DNA, 15 bp, Homo sapiens
tttaatccaaagaag

SEQ ID NO: 985648 - DNA, 15 bp, Homo sapiens
ttaatccaaagaaga

SEQ ID NO: 985649 - DNA, 15 bp, Homo sapiens
taatccaaagaagaa

SEQ ID NO: 985650 - DNA, 15 bp, Homo sapiens
aatccaaagaagaag

SEQ ID NO: 985651 - DNA, 15 bp, Homo sapiens
atccaaagaagaagg

SEQ ID NO: 985652 - DNA, 15 bp, Homo sapiens
tccaaagaagaagga

SEQ ID NO: 985653 - DNA, 15 bp, Homo sapiens
ccaaagaagaaggat

SEQ ID NO: 985654 - DNA, 15 bp, Homo sapiens
caaagaagaaggatc

SEQ ID NO: 985655 - DNA, 15 bp, Homo sapiens
aaagaagaaggatct

SEQ ID NO: 985656 - DNA, 15 bp, Homo sapiens
aagaagaaggatctc

SEQ ID NO: 985657 - DNA, 15 bp, Homo sapiens
agaagaaggatctcg

SEQ ID NO: 985658 - DNA, 15 bp, Homo sapiens
gaagaaggatctcgg

SEQ ID NO: 985659 - DNA, 15 bp, Homo sapiens
aagaaggatctcggc

SEQ ID NO: 985660 - DNA, 15 bp, Homo sapiens
agaaggatctcggcc

SEQ ID NO: 985661 - DNA, 15 bp, Homo sapiens
gaaggatctcggcca

SEQ ID NO: 985662 - DNA, 15 bp, Homo sapiens
aaggatctcggccaa

SEQ ID NO: 985663 - DNA, 15 bp, Homo sapiens
aggatctcggccaat

SEQ ID NO: 985664 - DNA, 15 bp, Homo sapiens
ggatctcggccaatt

SEQ ID NO: 985665 - DNA, 15 bp, Homo sapiens
gatctcggccaattt

SEQ ID NO: 985666 - DNA, 15 bp, Homo sapiens
atctcggccaatttg

SEQ ID NO: 985667 - DNA, 15 bp, Homo sapiens
tctcggccaatttgg

SEQ ID NO: 985668 - DNA, 15 bp, Homo sapiens
ctcggccaatttggg

SEQ ID NO: 985669 - DNA, 15 bp, Homo sapiens
tcggccaatttgggg

SEQ ID NO: 985670 - DNA, 15 bp, Homo sapiens
cggccaatttggggt

SEQ ID NO: 985671 - DNA, 15 bp, Homo sapiens
ggccaatttggggtt

SEQ ID NO: 985672 - DNA, 15 bp, Homo sapiens
gccaatttggggttt

SEQ ID NO: 985673 - DNA, 15 bp, Homo sapiens
ccaatttggggtttt

SEQ ID NO: 985674 - DNA, 15 bp, Homo sapiens
caatttggggttttg

SEQ ID NO: 985675 - DNA, 15 bp, Homo sapiens
aatttggggttttgg

SEQ ID NO: 985676 - DNA, 15 bp, Homo sapiens
atttggggttttggg

SEQ ID NO: 985677 - DNA, 15 bp, Homo sapiens
tttggggttttgggt

SEQ ID NO: 985678 - DNA, 15 bp, Homo sapiens
ttggggttttgggtt

SEQ ID NO: 985679 - DNA, 15 bp, Homo sapiens
tggggttttgggttt

SEQ ID NO: 985680 - DNA, 15 bp, Homo sapiens
ggggttttgggtttt

SEQ ID NO: 985681 - DNA, 15 bp, Homo sapiens
gggttttgggttttg

SEQ ID NO: 985682 - DNA, 15 bp, Homo sapiens
ggttttgggttttgg

SEQ ID NO: 985683 - DNA, 15 bp, Homo sapiens
gttttgggttttggc

SEQ ID NO: 985684 - DNA, 15 bp, Homo sapiens
cccatcctccggagt

SEQ ID NO: 985685 - DNA, 15 bp, Homo sapiens
ccatcctccggagtc

SEQ ID NO: 985686 - DNA, 15 bp, Homo sapiens
catcctccggagtca

SEQ ID NO: 985687 - DNA, 15 bp, Homo sapiens
atcctccggagtcag

SEQ ID NO: 985688 - DNA, 15 bp, Homo sapiens
tcctccggagtcagt

SEQ ID NO: 985689 - DNA, 15 bp, Homo sapiens
cctccggagtcagtg

SEQ ID NO: 985690 - DNA, 15 bp, Homo sapiens
ctccggagtcagtgg

SEQ ID NO: 985691 - DNA, 15 bp, Homo sapiens
tccggagtcagtggc

SEQ ID NO: 985692 - DNA, 15 bp, Homo sapiens
ccggagtcagtggcc

SEQ ID NO: 985693 - DNA, 15 bp, Homo sapiens
cggagtcagtggccg

SEQ ID NO: 985694 - DNA, 15 bp, Homo sapiens
ggagtcagtggccgc

SEQ ID NO: 985695 - DNA, 15 bp, Homo sapiens
gagtcagtggccgcc

SEQ ID NO: 985696 - DNA, 15 bp, Homo sapiens
agtcagtggccgcca

SEQ ID NO: 985697 - DNA, 15 bp, Homo sapiens
gtcagtggccgccac

SEQ ID NO: 985698 - DNA, 15 bp, Homo sapiens
tcagtggccgccacc

SEQ ID NO: 985699 - DNA, 15 bp, Homo sapiens
cagtggccgccaccg

SEQ ID NO: 985700 - DNA, 15 bp, Homo sapiens
agtggccgccaccgt

SEQ ID NO: 985701 - DNA, 15 bp, Homo sapiens
gtggccgccaccgtg

SEQ ID NO: 985702 - DNA, 15 bp, Homo sapiens
tggccgccaccgtgt

SEQ ID NO: 985703 - DNA, 15 bp, Homo sapiens
ggccgccaccgtgtc

SEQ ID NO: 985704 - DNA, 15 bp, Homo sapiens
gccgccaccgtgtcc

SEQ ID NO: 985705 - DNA, 15 bp, Homo sapiens
ccgccaccgtgtcct

SEQ ID NO: 985706 - DNA, 15 bp, Homo sapiens
cgccaccgtgtcctc

SEQ ID NO: 985707 - DNA, 15 bp, Homo sapiens
gccaccgtgtcctcg

SEQ ID NO: 985708 - DNA, 15 bp, Homo sapiens
ccaccgtgtcctcgt

SEQ ID NO: 985709 - DNA, 15 bp, Homo sapiens
caccgtgtcctcgtc

SEQ ID NO: 985710 - DNA, 15 bp, Homo sapiens
accgtgtcctcgtca

SEQ ID NO: 985711 - DNA, 15 bp, Homo sapiens
ccgtgtcctcgtcag

SEQ ID NO: 985712 - DNA, 15 bp, Homo sapiens
cgtgtcctcgtcagc

SEQ ID NO: 985713 - DNA, 15 bp, Homo sapiens
gtgtcctcgtcagcg

SEQ ID NO: 985714 - DNA, 15 bp, Homo sapiens
tgtcctcgtcagcgt

SEQ ID NO: 985715 - DNA, 15 bp, Homo sapiens
gtcctcgtcagcgtc

SEQ ID NO: 985716 - DNA, 15 bp, Homo sapiens
tcctcgtcagcgtca

SEQ ID NO: 985717 - DNA, 15 bp, Homo sapiens
cctcgtcagcgtcag

SEQ ID NO: 985718 - DNA, 15 bp, Homo sapiens
ctcgtcagcgtcagc

SEQ ID NO: 985719 - DNA, 15 bp, Homo sapiens
tcgtcagcgtcagcc

SEQ ID NO: 985720 - DNA, 15 bp, Homo sapiens
cgtcagcgtcagcct

SEQ ID NO: 985721 - DNA, 15 bp, Homo sapiens
gtcagcgtcagcctc

SEQ ID NO: 985722 - DNA, 15 bp, Homo sapiens
tcagcgtcagcctcc

SEQ ID NO: 985723 - DNA, 15 bp, Homo sapiens
cagcgtcagcctcct

SEQ ID NO: 985724 - DNA, 15 bp, Homo sapiens
agcgtcagcctcctc

SEQ ID NO: 985725 - DNA, 15 bp, Homo sapiens
gcgtcagcctcctct

SEQ ID NO: 985726 - DNA, 15 bp, Homo sapiens
cgtcagcctcctctt

SEQ ID NO: 985727 - DNA, 15 bp, Homo sapiens
gtcagcctcctcttc

SEQ ID NO: 985728 - DNA, 15 bp, Homo sapiens
tcagcctcctcttcg

SEQ ID NO: 985729 - DNA, 15 bp, Homo sapiens
cagcctcctcttcgt

SEQ ID NO: 985730 - DNA, 15 bp, Homo sapiens
agcctcctcttcgtc

SEQ ID NO: 985731 - DNA, 15 bp, Homo sapiens
gcctcctcttcgtcg

SEQ ID NO: 985732 - DNA, 15 bp, Homo sapiens
cctcctcttcgtcgt

SEQ ID NO: 985733 - DNA, 15 bp, Homo sapiens
ctcctcttcgtcgtc

SEQ ID NO: 985734 - DNA, 15 bp, Homo sapiens
tcctcttcgtcgtcg

SEQ ID NO: 985735 - DNA, 15 bp, Homo sapiens
cctcttcgtcgtcgc

SEQ ID NO: 985736 - DNA, 15 bp, Homo sapiens
ctcttcgtcgtcgcc

SEQ ID NO: 985737 - DNA, 15 bp, Homo sapiens
tcttcgtcgtcgccg

SEQ ID NO: 985738 - DNA, 15 bp, Homo sapiens
cttcgtcgtcgccgt

SEQ ID NO: 985739 - DNA, 15 bp, Homo sapiens
ttcgtcgtcgccgtc

SEQ ID NO: 985740 - DNA, 15 bp, Homo sapiens
tcgtcgtcgccgtcg

SEQ ID NO: 985741 - DNA, 15 bp, Homo sapiens
cgtcgtcgccgtcga

SEQ ID NO: 985742 - DNA, 15 bp, Homo sapiens
gtcgtcgccgtcgag

SEQ ID NO: 985743 - DNA, 15 bp, Homo sapiens
tcgtcgccgtcgagc

SEQ ID NO: 985744 - DNA, 15 bp, Homo sapiens
cgtcgccgtcgagca

SEQ ID NO: 985745 - DNA, 15 bp, Homo sapiens
gtcgccgtcgagcag

SEQ ID NO: 985746 - DNA, 15 bp, Homo sapiens
tcgccgtcgagcagc

SEQ ID NO: 985747 - DNA, 15 bp, Homo sapiens
cgccgtcgagcagcg

SEQ ID NO: 985748 - DNA, 15 bp, Homo sapiens
gccgtcgagcagcgg

SEQ ID NO: 985749 - DNA, 15 bp, Homo sapiens
ccgtcgagcagcggc

SEQ ID NO: 985750 - DNA, 15 bp, Homo sapiens
cgtcgagcagcggcc

SEQ ID NO: 985751 - DNA, 15 bp, Homo sapiens
gtcgagcagcggccc

SEQ ID NO: 985752 - DNA, 15 bp, Homo sapiens
tcgagcagcggccct

SEQ ID NO: 985753 - DNA, 15 bp, Homo sapiens
cgagcagcggccctg

SEQ ID NO: 985754 - DNA, 15 bp, Homo sapiens
gagcagcggccctgc

SEQ ID NO: 985755 - DNA, 15 bp, Homo sapiens
agcagcggccctgcc

SEQ ID NO: 985756 - DNA, 15 bp, Homo sapiens
gcagcggccctgcca

SEQ ID NO: 985757 - DNA, 15 bp, Homo sapiens
cagcggccctgccag

SEQ ID NO: 985758 - DNA, 15 bp, Homo sapiens
agcggccctgccagc

SEQ ID NO: 985759 - DNA, 15 bp, Homo sapiens
gcggccctgccagcg

SEQ ID NO: 985760 - DNA, 15 bp, Homo sapiens
cggccctgccagcgc

SEQ ID NO: 985761 - DNA, 15 bp, Homo sapiens
ggccctgccagcgcg

SEQ ID NO: 985762 - DNA, 15 bp, Homo sapiens
gccctgccagcgcgc

SEQ ID NO: 985763 - DNA, 15 bp, Homo sapiens
ccctgccagcgcgcc

SEQ ID NO: 985764 - DNA, 15 bp, Homo sapiens
cctgccagcgcgccc

SEQ ID NO: 985765 - DNA, 15 bp, Homo sapiens
ctgccagcgcgccct

SEQ ID NO: 985766 - DNA, 15 bp, Homo sapiens
tgccagcgcgccctc

SEQ ID NO: 985767 - DNA, 15 bp, Homo sapiens
gccagcgcgccctcc

SEQ ID NO: 985768 - DNA, 15 bp, Homo sapiens
ccagcgcgccctcca

SEQ ID NO: 985769 - DNA, 15 bp, Homo sapiens
cagcgcgccctccac

SEQ ID NO: 985770 - DNA, 15 bp, Homo sapiens
agcgcgccctccacc

SEQ ID NO: 985771 - DNA, 15 bp, Homo sapiens
gcgcgccctccacct

SEQ ID NO: 985772 - DNA, 15 bp, Homo sapiens
cgcgccctccacctg

SEQ ID NO: 985773 - DNA, 15 bp, Homo sapiens
gcgccctccacctgc

SEQ ID NO: 985774 - DNA, 15 bp, Homo sapiens
cgccctccacctgca

SEQ ID NO: 985775 - DNA, 15 bp, Homo sapiens
gccctccacctgcag

SEQ ID NO: 985776 - DNA, 15 bp, Homo sapiens
ccctccacctgcagc

SEQ ID NO: 985777 - DNA, 15 bp, Homo sapiens
cctccacctgcagct

SEQ ID NO: 985778 - DNA, 15 bp, Homo sapiens
ctccacctgcagctt

SEQ ID NO: 985779 - DNA, 15 bp, Homo sapiens
tccacctgcagcttc

SEQ ID NO: 985780 - DNA, 15 bp, Homo sapiens
ccacctgcagcttca

SEQ ID NO: 985781 - DNA, 15 bp, Homo sapiens
cacctgcagcttcac

SEQ ID NO: 985782 - DNA, 15 bp, Homo sapiens
acctgcagcttcacc

SEQ ID NO: 985783 - DNA, 15 bp, Homo sapiens
cctgcagcttcacct

SEQ ID NO: 985784 - DNA, 15 bp, Homo sapiens
ctgcagcttcaccta

SEQ ID NO: 985785 - DNA, 15 bp, Homo sapiens
tgcagcttcacctat

SEQ ID NO: 985786 - DNA, 15 bp, Homo sapiens
gcagcttcacctatc

SEQ ID NO: 985787 - DNA, 15 bp, Homo sapiens
cagcttcacctatcc

SEQ ID NO: 985788 - DNA, 15 bp, Homo sapiens
agcttcacctatccg

SEQ ID NO: 985789 - DNA, 15 bp, Homo sapiens
gcttcacctatccga

SEQ ID NO: 985790 - DNA, 15 bp, Homo sapiens
cttcacctatccgat

SEQ ID NO: 985791 - DNA, 15 bp, Homo sapiens
ttcacctatccgatc

SEQ ID NO: 985792 - DNA, 15 bp, Homo sapiens
tcacctatccgatcc

SEQ ID NO: 985793 - DNA, 15 bp, Homo sapiens
cacctatccgatccg

SEQ ID NO: 985794 - DNA, 15 bp, Homo sapiens
acctatccgatccgg

SEQ ID NO: 985795 - DNA, 15 bp, Homo sapiens
cctatccgatccggg

SEQ ID NO: 985796 - DNA, 15 bp, Homo sapiens
ctatccgatccgggc

SEQ ID NO: 985797 - DNA, 15 bp, Homo sapiens
tatccgatccgggcc

SEQ ID NO: 985798 - DNA, 15 bp, Homo sapiens
atccgatccgggccg

SEQ ID NO: 985799 - DNA, 15 bp, Homo sapiens
tccgatccgggccgg

SEQ ID NO: 985800 - DNA, 15 bp, Homo sapiens
ccgatccgggccggg

SEQ ID NO: 985801 - DNA, 15 bp, Homo sapiens
cgatccgggccggga

SEQ ID NO: 985802 - DNA, 15 bp, Homo sapiens
gatccgggccgggaa

SEQ ID NO: 985803 - DNA, 15 bp, Homo sapiens
atccgggccgggaac

SEQ ID NO: 985804 - DNA, 15 bp, Homo sapiens
tccgggccgggaacg

SEQ ID NO: 985805 - DNA, 15 bp, Homo sapiens
ccgggccgggaacga

SEQ ID NO: 985806 - DNA, 15 bp, Homo sapiens
cgggccgggaacgac

SEQ ID NO: 985807 - DNA, 15 bp, Homo sapiens
gggccgggaacgacc

SEQ ID NO: 985808 - DNA, 15 bp, Homo sapiens
ggccgggaacgaccc

SEQ ID NO: 985809 - DNA, 15 bp, Homo sapiens
gccgggaacgacccg

SEQ ID NO: 985810 - DNA, 15 bp, Homo sapiens
ccgggaacgacccgg

SEQ ID NO: 985811 - DNA, 15 bp, Homo sapiens
cgggaacgacccggg

SEQ ID NO: 985812 - DNA, 15 bp, Homo sapiens
gggaacgacccgggc

SEQ ID NO: 985813 - DNA, 15 bp, Homo sapiens
ggaacgacccgggcg

SEQ ID NO: 985814 - DNA, 15 bp, Homo sapiens
gaacgacccgggcgt

SEQ ID NO: 985815 - DNA, 15 bp, Homo sapiens
aacgacccgggcgtg

SEQ ID NO: 985816 - DNA, 15 bp, Homo sapiens
acgacccgggcgtgg

SEQ ID NO: 985817 - DNA, 15 bp, Homo sapiens
cgacccgggcgtggc

SEQ ID NO: 985818 - DNA, 15 bp, Homo sapiens
gacccgggcgtggcg

SEQ ID NO: 985819 - DNA, 15 bp, Homo sapiens
acccgggcgtggcgc

SEQ ID NO: 985820 - DNA, 15 bp, Homo sapiens
cccgggcgtggcgcc

SEQ ID NO: 985821 - DNA, 15 bp, Homo sapiens
ccgggcgtggcgccg

SEQ ID NO: 985822 - DNA, 15 bp, Homo sapiens
cgggcgtggcgccgg

SEQ ID NO: 985823 - DNA, 15 bp, Homo sapiens
gggcgtggcgccggg

SEQ ID NO: 985824 - DNA, 15 bp, Homo sapiens
ggcgtggcgccgggc

SEQ ID NO: 985825 - DNA, 15 bp, Homo sapiens
gcgtggcgccgggcg

SEQ ID NO: 985826 - DNA, 15 bp, Homo sapiens
cgtggcgccgggcgg

SEQ ID NO: 985827 - DNA, 15 bp, Homo sapiens
gtggcgccgggcggc

SEQ ID NO: 985828 - DNA, 15 bp, Homo sapiens
tggcgccgggcggca

SEQ ID NO: 985829 - DNA, 15 bp, Homo sapiens
ggcgccgggcggcac

SEQ ID NO: 985830 - DNA, 15 bp, Homo sapiens
gcgccgggcggcacg

SEQ ID NO: 985831 - DNA, 15 bp, Homo sapiens
cgccgggcggcacgg

SEQ ID NO: 985832 - DNA, 15 bp, Homo sapiens
gccgggcggcacggg

SEQ ID NO: 985833 - DNA, 15 bp, Homo sapiens
ccgggcggcacgggc

SEQ ID NO: 985834 - DNA, 15 bp, Homo sapiens
cgggcggcacgggcg

SEQ ID NO: 985835 - DNA, 15 bp, Homo sapiens
gggcggcacgggcgg

SEQ ID NO: 985836 - DNA, 15 bp, Homo sapiens
ggcggcacgggcgga

SEQ ID NO: 985837 - DNA, 15 bp, Homo sapiens
gcggcacgggcggag

SEQ ID NO: 985838 - DNA, 15 bp, Homo sapiens
cggcacgggcggagg

SEQ ID NO: 985839 - DNA, 15 bp, Homo sapiens
ggcacgggcggaggc

SEQ ID NO: 985840 - DNA, 15 bp, Homo sapiens
gcacgggcggaggcc

SEQ ID NO: 985841 - DNA, 15 bp, Homo sapiens
cacgggcggaggcct

SEQ ID NO: 985842 - DNA, 15 bp, Homo sapiens
acgggcggaggcctc

SEQ ID NO: 985843 - DNA, 15 bp, Homo sapiens
cgggcggaggcctcc

SEQ ID NO: 985844 - DNA, 15 bp, Homo sapiens
gggcggaggcctcct

SEQ ID NO: 985845 - DNA, 15 bp, Homo sapiens
ggcggaggcctcctc

SEQ ID NO: 985846 - DNA, 15 bp, Homo sapiens
gcggaggcctcctct

SEQ ID NO: 985847 - DNA, 15 bp, Homo sapiens
cggaggcctcctcta

SEQ ID NO: 985848 - DNA, 15 bp, Homo sapiens
ggaggcctcctctat

SEQ ID NO: 985849 - DNA, 15 bp, Homo sapiens
gaggcctcctctatg

SEQ ID NO: 985850 - DNA, 15 bp, Homo sapiens
aggcctcctctatgg

SEQ ID NO: 985851 - DNA, 15 bp, Homo sapiens
ggcctcctctatggc

SEQ ID NO: 985852 - DNA, 15 bp, Homo sapiens
gcctcctctatggca

SEQ ID NO: 985853 - DNA, 15 bp, Homo sapiens
cctcctctatggcag

SEQ ID NO: 985854 - DNA, 15 bp, Homo sapiens
ctcctctatggcagg

SEQ ID NO: 985855 - DNA, 15 bp, Homo sapiens
tcctctatggcaggg

SEQ ID NO: 985856 - DNA, 15 bp, Homo sapiens
cctctatggcaggga

SEQ ID NO: 985857 - DNA, 15 bp, Homo sapiens
ctctatggcagggag

SEQ ID NO: 985858 - DNA, 15 bp, Homo sapiens
tctatggcagggagt

SEQ ID NO: 985859 - DNA, 15 bp, Homo sapiens
ctatggcagggagtc

SEQ ID NO: 985860 - DNA, 15 bp, Homo sapiens
tatggcagggagtcc

SEQ ID NO: 985861 - DNA, 15 bp, Homo sapiens
atggcagggagtccg

SEQ ID NO: 985862 - DNA, 15 bp, Homo sapiens
tggcagggagtccgc

SEQ ID NO: 985863 - DNA, 15 bp, Homo sapiens
ggcagggagtccgct

SEQ ID NO: 985864 - DNA, 15 bp, Homo sapiens
gcagggagtccgctc

SEQ ID NO: 985865 - DNA, 15 bp, Homo sapiens
cagggagtccgctcc

SEQ ID NO: 985866 - DNA, 15 bp, Homo sapiens
agggagtccgctccc

SEQ ID NO: 985867 - DNA, 15 bp, Homo sapiens
gggagtccgctcccc

SEQ ID NO: 985868 - DNA, 15 bp, Homo sapiens
ggagtccgctccccc

SEQ ID NO: 985869 - DNA, 15 bp, Homo sapiens
gagtccgctccccct

SEQ ID NO: 985870 - DNA, 15 bp, Homo sapiens
agtccgctccccctc

SEQ ID NO: 985871 - DNA, 15 bp, Homo sapiens
gtccgctccccctcc

SEQ ID NO: 985872 - DNA, 15 bp, Homo sapiens
tccgctccccctccg

SEQ ID NO: 985873 - DNA, 15 bp, Homo sapiens
ccgctccccctccga

SEQ ID NO: 985874 - DNA, 15 bp, Homo sapiens
cgctccccctccgac

SEQ ID NO: 985875 - DNA, 15 bp, Homo sapiens
cctggcagcgagtac

SEQ ID NO: 985876 - DNA, 15 bp, Homo sapiens
ctggcagcgagtacg

SEQ ID NO: 985877 - DNA, 15 bp, Homo sapiens
tggcagcgagtacgg

SEQ ID NO: 985878 - DNA, 15 bp, Homo sapiens
ggcagcgagtacggc

SEQ ID NO: 985879 - DNA, 15 bp, Homo sapiens
gcagcgagtacggca

SEQ ID NO: 985880 - DNA, 15 bp, Homo sapiens
cagcgagtacggcag

SEQ ID NO: 985881 - DNA, 15 bp, Homo sapiens
agcgagtacggcagc

SEQ ID NO: 985882 - DNA, 15 bp, Homo sapiens
gcgagtacggcagcc

SEQ ID NO: 985883 - DNA, 15 bp, Homo sapiens
cgagtacggcagccc

SEQ ID NO: 985884 - DNA, 15 bp, Homo sapiens
gagtacggcagcccg

SEQ ID NO: 985885 - DNA, 15 bp, Homo sapiens
agtacggcagcccgt

SEQ ID NO: 985886 - DNA, 15 bp, Homo sapiens
gtacggcagcccgtc

SEQ ID NO: 985887 - DNA, 15 bp, Homo sapiens
tacggcagcccgtcg

SEQ ID NO: 985888 - DNA, 15 bp, Homo sapiens
acggcagcccgtcgg

SEQ ID NO: 985889 - DNA, 15 bp, Homo sapiens
cggcagcccgtcggt

SEQ ID NO: 985890 - DNA, 15 bp, Homo sapiens
ggcagcccgtcggtc

SEQ ID NO: 985891 - DNA, 15 bp, Homo sapiens
gcagcccgtcggtca

SEQ ID NO: 985892 - DNA, 15 bp, Homo sapiens
cagcccgtcggtcat

SEQ ID NO: 985893 - DNA, 15 bp, Homo sapiens
agcccgtcggtcatc

SEQ ID NO: 985894 - DNA, 15 bp, Homo sapiens
gcccgtcggtcatca

SEQ ID NO: 985895 - DNA, 15 bp, Homo sapiens
cccgtcggtcatcag

SEQ ID NO: 985896 - DNA, 15 bp, Homo sapiens
ccgtcggtcatcagc

SEQ ID NO: 985897 - DNA, 15 bp, Homo sapiens
cgtcggtcatcagcg

SEQ ID NO: 985898 - DNA, 15 bp, Homo sapiens
gtcggtcatcagcgt

SEQ ID NO: 985899 - DNA, 15 bp, Homo sapiens
tcggtcatcagcgtc

SEQ ID NO: 985900 - DNA, 15 bp, Homo sapiens
cggtcatcagcgtca

SEQ ID NO: 985901 - DNA, 15 bp, Homo sapiens
ggtcatcagcgtcag

SEQ ID NO: 985902 - DNA, 15 bp, Homo sapiens
gtcatcagcgtcagc

SEQ ID NO: 985903 - DNA, 15 bp, Homo sapiens
tcatcagcgtcagca

SEQ ID NO: 985904 - DNA, 15 bp, Homo sapiens
catcagcgtcagcaa

SEQ ID NO: 985905 - DNA, 15 bp, Homo sapiens
atcagcgtcagcaaa

SEQ ID NO: 985906 - DNA, 15 bp, Homo sapiens
tcagcgtcagcaaag

SEQ ID NO: 985907 - DNA, 15 bp, Homo sapiens
cagcgtcagcaaagg

SEQ ID NO: 985908 - DNA, 15 bp, Homo sapiens
agcgtcagcaaaggc

SEQ ID NO: 985909 - DNA, 15 bp, Homo sapiens
gcgtcagcaaaggca

SEQ ID NO: 985910 - DNA, 15 bp, Homo sapiens
cgtcagcaaaggcag

SEQ ID NO: 985911 - DNA, 15 bp, Homo sapiens
gtcagcaaaggcagc

SEQ ID NO: 985912 - DNA, 15 bp, Homo sapiens
tcagcaaaggcagcc

SEQ ID NO: 985913 - DNA, 15 bp, Homo sapiens
cagcaaaggcagccc

SEQ ID NO: 985914 - DNA, 15 bp, Homo sapiens
agcaaaggcagccct

SEQ ID NO: 985915 - DNA, 15 bp, Homo sapiens
gcaaaggcagccctg

SEQ ID NO: 985916 - DNA, 15 bp, Homo sapiens
caaaggcagccctga

SEQ ID NO: 985917 - DNA, 15 bp, Homo sapiens
aaaggcagccctgac

SEQ ID NO: 985918 - DNA, 15 bp, Homo sapiens
aaggcagccctgacg

SEQ ID NO: 985919 - DNA, 15 bp, Homo sapiens
aggcagccctgacgg

SEQ ID NO: 985920 - DNA, 15 bp, Homo sapiens
ggcagccctgacggc

SEQ ID NO: 985921 - DNA, 15 bp, Homo sapiens
gcagccctgacggca

SEQ ID NO: 985922 - DNA, 15 bp, Homo sapiens
cagccctgacggcag

SEQ ID NO: 985923 - DNA, 15 bp, Homo sapiens
agccctgacggcagc

SEQ ID NO: 985924 - DNA, 15 bp, Homo sapiens
gccctgacggcagcc

SEQ ID NO: 985925 - DNA, 15 bp, Homo sapiens
ccctgacggcagcca

SEQ ID NO: 985926 - DNA, 15 bp, Homo sapiens
cctgacggcagccac

SEQ ID NO: 985927 - DNA, 15 bp, Homo sapiens
ctgacggcagccacc

SEQ ID NO: 985928 - DNA, 15 bp, Homo sapiens
tgacggcagccaccc

SEQ ID NO: 985929 - DNA, 15 bp, Homo sapiens
ccggggcccaattac

SEQ ID NO: 985930 - DNA, 15 bp, Homo sapiens
cggggcccaattacc

SEQ ID NO: 985931 - DNA, 15 bp, Homo sapiens
ggggcccaattaccc

SEQ ID NO: 985932 - DNA, 15 bp, Homo sapiens
gggcccaattaccca

SEQ ID NO: 985933 - DNA, 15 bp, Homo sapiens
ggcccaattacccat

SEQ ID NO: 985934 - DNA, 15 bp, Homo sapiens
gcccaattacccatc

SEQ ID NO: 985935 - DNA, 15 bp, Homo sapiens
cccaattacccatcc

SEQ ID NO: 985936 - DNA, 15 bp, Homo sapiens
ccaattacccatcct

SEQ ID NO: 985937 - DNA, 15 bp, Homo sapiens
caattacccatcctt

SEQ ID NO: 985938 - DNA, 15 bp, Homo sapiens
aattacccatccttc

SEQ ID NO: 985939 - DNA, 15 bp, Homo sapiens
attacccatccttcc

SEQ ID NO: 985940 - DNA, 15 bp, Homo sapiens
ttacccatccttcct

SEQ ID NO: 985941 - DNA, 15 bp, Homo sapiens
tacccatccttcctg

SEQ ID NO: 985942 - DNA, 15 bp, Homo sapiens
acccatccttcctgc

SEQ ID NO: 985943 - DNA, 15 bp, Homo sapiens
cccatccttcctgcc

SEQ ID NO: 985944 - DNA, 15 bp, Homo sapiens
ccatccttcctgccc

SEQ ID NO: 985945 - DNA, 15 bp, Homo sapiens
catccttcctgcccg

SEQ ID NO: 985946 - DNA, 15 bp, Homo sapiens
atccttcctgcccga

SEQ ID NO: 985947 - DNA, 15 bp, Homo sapiens
tccttcctgcccgat

SEQ ID NO: 985948 - DNA, 15 bp, Homo sapiens
ccttcctgcccgatc

SEQ ID NO: 985949 - DNA, 15 bp, Homo sapiens
cttcctgcccgatca

SEQ ID NO: 985950 - DNA, 15 bp, Homo sapiens
ttcctgcccgatcag

SEQ ID NO: 985951 - DNA, 15 bp, Homo sapiens
tcctgcccgatcaga

SEQ ID NO: 985952 - DNA, 15 bp, Homo sapiens
cctgcccgatcagat

SEQ ID NO: 985953 - DNA, 15 bp, Homo sapiens
ctgcccgatcagatg

SEQ ID NO: 985954 - DNA, 15 bp, Homo sapiens
tgcccgatcagatgc

SEQ ID NO: 985955 - DNA, 15 bp, Homo sapiens
gcccgatcagatgca

SEQ ID NO: 985956 - DNA, 15 bp, Homo sapiens
cccgatcagatgcag

SEQ ID NO: 985957 - DNA, 15 bp, Homo sapiens
ccgatcagatgcagc

SEQ ID NO: 985958 - DNA, 15 bp, Homo sapiens
cgatcagatgcagcc

SEQ ID NO: 985959 - DNA, 15 bp, Homo sapiens
gatcagatgcagccg

SEQ ID NO: 985960 - DNA, 15 bp, Homo sapiens
atcagatgcagccgc

SEQ ID NO: 985961 - DNA, 15 bp, Homo sapiens
tcagatgcagccgca

SEQ ID NO: 985962 - DNA, 15 bp, Homo sapiens
cagatgcagccgcaa

SEQ ID NO: 985963 - DNA, 15 bp, Homo sapiens
agatgcagccgcaag

SEQ ID NO: 985964 - DNA, 15 bp, Homo sapiens
gatgcagccgcaagt

SEQ ID NO: 985965 - DNA, 15 bp, Homo sapiens
atgcagccgcaagtc

SEQ ID NO: 985966 - DNA, 15 bp, Homo sapiens
tgcagccgcaagtcc

SEQ ID NO: 985967 - DNA, 15 bp, Homo sapiens
gcagccgcaagtccc

SEQ ID NO: 985968 - DNA, 15 bp, Homo sapiens
cagccgcaagtcccg

SEQ ID NO: 985969 - DNA, 15 bp, Homo sapiens
agccgcaagtcccgc

SEQ ID NO: 985970 - DNA, 15 bp, Homo sapiens
gccgcaagtcccgcc

SEQ ID NO: 985971 - DNA, 15 bp, Homo sapiens
ccgcaagtcccgccg

SEQ ID NO: 985972 - DNA, 15 bp, Homo sapiens
cgcaagtcccgccgc

SEQ ID NO: 985973 - DNA, 15 bp, Homo sapiens
gcaagtcccgccgct

SEQ ID NO: 985974 - DNA, 15 bp, Homo sapiens
caagtcccgccgctc

SEQ ID NO: 985975 - DNA, 15 bp, Homo sapiens
aagtcccgccgctcc

SEQ ID NO: 985976 - DNA, 15 bp, Homo sapiens
agtcccgccgctcca

SEQ ID NO: 985977 - DNA, 15 bp, Homo sapiens
gtcccgccgctccat

SEQ ID NO: 985978 - DNA, 15 bp, Homo sapiens
tcccgccgctccatt

SEQ ID NO: 985979 - DNA, 15 bp, Homo sapiens
cccgccgctccatta

SEQ ID NO: 985980 - DNA, 15 bp, Homo sapiens
ccgccgctccattac

SEQ ID NO: 985981 - DNA, 15 bp, Homo sapiens
cgccgctccattacc

SEQ ID NO: 985982 - DNA, 15 bp, Homo sapiens
gccgctccattacca

SEQ ID NO: 985983 - DNA, 15 bp, Homo sapiens
ccgctccattaccaa

SEQ ID NO: 985984 - DNA, 15 bp, Homo sapiens
cgctccattaccaag

SEQ ID NO: 985985 - DNA, 15 bp, Homo sapiens
gctccattaccaagg

SEQ ID NO: 985986 - DNA, 15 bp, Homo sapiens
ctccattaccaaggt

SEQ ID NO: 985987 - DNA, 15 bp, Homo sapiens
tccattaccaaggtc

SEQ ID NO: 985988 - DNA, 15 bp, Homo sapiens
ccattaccaaggtca

SEQ ID NO: 985989 - DNA, 15 bp, Homo sapiens
cattaccaaggtcag

SEQ ID NO: 985990 - DNA, 15 bp, Homo sapiens
attaccaaggtcagt

SEQ ID NO: 985991 - DNA, 15 bp, Homo sapiens
ttaccaaggtcagtc

SEQ ID NO: 985992 - DNA, 15 bp, Homo sapiens
taccaaggtcagtcc

SEQ ID NO: 985993 - DNA, 15 bp, Homo sapiens
accaaggtcagtccc

SEQ ID NO: 985994 - DNA, 15 bp, Homo sapiens
ccaaggtcagtcccg

SEQ ID NO: 985995 - DNA, 15 bp, Homo sapiens
caaggtcagtcccgg

SEQ ID NO: 985996 - DNA, 15 bp, Homo sapiens
aaggtcagtcccggg

SEQ ID NO: 985997 - DNA, 15 bp, Homo sapiens
aggtcagtcccgggg

SEQ ID NO: 985998 - DNA, 15 bp, Homo sapiens
ggtcagtcccgggga

SEQ ID NO: 985999 - DNA, 15 bp, Homo sapiens
gtcagtcccggggat

SEQ ID NO: 986000 - DNA, 15 bp, Homo sapiens
tcagtcccggggatt

SEQ ID NO: 986001 - DNA, 15 bp, Homo sapiens
cagtcccggggattt

SEQ ID NO: 986002 - DNA, 15 bp, Homo sapiens
agtcccggggatttg

SEQ ID NO: 986003 - DNA, 15 bp, Homo sapiens
gtcccggggatttgt

SEQ ID NO: 986004 - DNA, 15 bp, Homo sapiens
tcccggggatttgta

SEQ ID NO: 986005 - DNA, 15 bp, Homo sapiens
cccggggatttgtag

SEQ ID NO: 986006 - DNA, 15 bp, Homo sapiens
ccggggatttgtagc

SEQ ID NO: 986007 - DNA, 15 bp, Homo sapiens
cggggatttgtagct

SEQ ID NO: 986008 - DNA, 15 bp, Homo sapiens
ggggatttgtagctc

SEQ ID NO: 986009 - DNA, 15 bp, Homo sapiens
gggatttgtagctcg

SEQ ID NO: 986010 - DNA, 15 bp, Homo sapiens
ggatttgtagctcgg

SEQ ID NO: 986011 - DNA, 15 bp, Homo sapiens
gatttgtagctcggg

SEQ ID NO: 986012 - DNA, 15 bp, Homo sapiens
atttgtagctcgggc

SEQ ID NO: 986013 - DNA, 15 bp, Homo sapiens
tttgtagctcgggct

SEQ ID NO: 986014 - DNA, 15 bp, Homo sapiens
ttgtagctcgggctg

SEQ ID NO: 986015 - DNA, 15 bp, Homo sapiens
tgtagctcgggctgg

SEQ ID NO: 986016 - DNA, 15 bp, Homo sapiens
gtagctcgggctggg

SEQ ID NO: 986017 - DNA, 15 bp, Homo sapiens
tagctcgggctgggg

SEQ ID NO: 986018 - DNA, 15 bp, Homo sapiens
agctcgggctgggga

SEQ ID NO: 986019 - DNA, 15 bp, Homo sapiens
gctcgggctggggag

SEQ ID NO: 986020 - DNA, 15 bp, Homo sapiens
ctcgggctggggagc

SEQ ID NO: 986021 - DNA, 15 bp, Homo sapiens
tcgggctggggagcc

SEQ ID NO: 986022 - DNA, 15 bp, Homo sapiens
cgggctggggagccc

SEQ ID NO: 986023 - DNA, 15 bp, Homo sapiens
gggctggggagccct

SEQ ID NO: 986024 - DNA, 15 bp, Homo sapiens
ggctggggagccctg

SEQ ID NO: 986025 - DNA, 15 bp, Homo sapiens
gctggggagccctgt

SEQ ID NO: 986026 - DNA, 15 bp, Homo sapiens
ctggggagccctgtg

SEQ ID NO: 986027 - DNA, 15 bp, Homo sapiens
tggggagccctgtgt

SEQ ID NO: 986028 - DNA, 15 bp, Homo sapiens
ggggagccctgtgtg

SEQ ID NO: 986029 - DNA, 15 bp, Homo sapiens
gggagccctgtgtgt

SEQ ID NO: 986030 - DNA, 15 bp, Homo sapiens
ggagccctgtgtgtg

SEQ ID NO: 986031 - DNA, 15 bp, Homo sapiens
gagccctgtgtgtgc

SEQ ID NO: 986032 - DNA, 15 bp, Homo sapiens
agccctgtgtgtgct

SEQ ID NO: 986033 - DNA, 15 bp, Homo sapiens
gccctgtgtgtgctg

SEQ ID NO: 986034 - DNA, 15 bp, Homo sapiens
cgtggccccggaaaa

SEQ ID NO: 986035 - DNA, 15 bp, Homo sapiens
gtggccccggaaaag

SEQ ID NO: 986036 - DNA, 15 bp, Homo sapiens
tggccccggaaaagg

SEQ ID NO: 986037 - DNA, 15 bp, Homo sapiens
ggccccggaaaagga

SEQ ID NO: 986038 - DNA, 15 bp, Homo sapiens
gccccggaaaaggac

SEQ ID NO: 986039 - DNA, 15 bp, Homo sapiens
ccccggaaaaggacc

SEQ ID NO: 986040 - DNA, 15 bp, Homo sapiens
cccggaaaaggaccg

SEQ ID NO: 986041 - DNA, 15 bp, Homo sapiens
ccggaaaaggaccgc

SEQ ID NO: 986042 - DNA, 15 bp, Homo sapiens
cggaaaaggaccgcc

SEQ ID NO: 986043 - DNA, 15 bp, Homo sapiens
ggaaaaggaccgcca

SEQ ID NO: 986044 - DNA, 15 bp, Homo sapiens
gaaaaggaccgccac

SEQ ID NO: 986045 - DNA, 15 bp, Homo sapiens
aaaaggaccgccacc

SEQ ID NO: 986046 - DNA, 15 bp, Homo sapiens
aaaggaccgccaccc

SEQ ID NO: 986047 - DNA, 15 bp, Homo sapiens
aaggaccgccaccca

SEQ ID NO: 986048 - DNA, 15 bp, Homo sapiens
aggaccgccacccac

SEQ ID NO: 986049 - DNA, 15 bp, Homo sapiens
ggaccgccacccaca

SEQ ID NO: 986050 - DNA, 15 bp, Homo sapiens
gaccgccacccacac

SEQ ID NO: 986051 - DNA, 15 bp, Homo sapiens
accgccacccacact

SEQ ID NO: 986052 - DNA, 15 bp, Homo sapiens
ccgccacccacactt

SEQ ID NO: 986053 - DNA, 15 bp, Homo sapiens
cgccacccacacttg

SEQ ID NO: 986054 - DNA, 15 bp, Homo sapiens
gccacccacacttgt

SEQ ID NO: 986055 - DNA, 15 bp, Homo sapiens
ccacccacacttgtg

SEQ ID NO: 986056 - DNA, 15 bp, Homo sapiens
cacccacacttgtga

SEQ ID NO: 986057 - DNA, 15 bp, Homo sapiens
acccacacttgtgat

SEQ ID NO: 986058 - DNA, 15 bp, Homo sapiens
cccacacttgtgatt

SEQ ID NO: 986059 - DNA, 15 bp, Homo sapiens
ccacacttgtgatta

SEQ ID NO: 986060 - DNA, 15 bp, Homo sapiens
cactcctcagtgcct

SEQ ID NO: 986061 - DNA, 15 bp, Homo sapiens
actcctcagtgcctc

SEQ ID NO: 986062 - DNA, 15 bp, Homo sapiens
ctcctcagtgcctcc

SEQ ID NO: 986063 - DNA, 15 bp, Homo sapiens
tcctcagtgcctcct

SEQ ID NO: 986064 - DNA, 15 bp, Homo sapiens
cctcagtgcctcctt

SEQ ID NO: 986065 - DNA, 15 bp, Homo sapiens
ctcagtgcctccttg

SEQ ID NO: 986066 - DNA, 15 bp, Homo sapiens
tcagtgcctccttga

SEQ ID NO: 986067 - DNA, 15 bp, Homo sapiens
cagtgcctccttgac

SEQ ID NO: 986068 - DNA, 15 bp, Homo sapiens
agtgcctccttgact

SEQ ID NO: 986069 - DNA, 15 bp, Homo sapiens
gtgcctccttgactt

SEQ ID NO: 986070 - DNA, 15 bp, Homo sapiens
tgcctccttgacttc

SEQ ID NO: 986071 - DNA, 15 bp, Homo sapiens
gcctccttgacttcc

SEQ ID NO: 986072 - DNA, 15 bp, Homo sapiens
cctccttgacttccc

SEQ ID NO: 986073 - DNA, 15 bp, Homo sapiens
ctccttgacttccca

SEQ ID NO: 986074 - DNA, 15 bp, Homo sapiens
tccttgacttcccag

SEQ ID NO: 986075 - DNA, 15 bp, Homo sapiens
ccttgacttcccagg

SEQ ID NO: 986076 - DNA, 15 bp, Homo sapiens
cttgacttcccaggt

SEQ ID NO: 986077 - DNA, 15 bp, Homo sapiens
ttgacttcccaggtt

SEQ ID NO: 986078 - DNA, 15 bp, Homo sapiens
tgacttcccaggtta

SEQ ID NO: 986079 - DNA, 15 bp, Homo sapiens
gacttcccaggttag

SEQ ID NO: 986080 - DNA, 15 bp, Homo sapiens
acttcccaggttagc

SEQ ID NO: 986081 - DNA, 15 bp, Homo sapiens
cttcccaggttagct

SEQ ID NO: 986082 - DNA, 15 bp, Homo sapiens
ttcccaggttagctt

SEQ ID NO: 986083 - DNA, 15 bp, Homo sapiens
tcccaggttagcttc

SEQ ID NO: 986084 - DNA, 15 bp, Homo sapiens
cccaggttagcttcc

SEQ ID NO: 986085 - DNA, 15 bp, Homo sapiens
ccaggttagcttcca

SEQ ID NO: 986086 - DNA, 15 bp, Homo sapiens
caggttagcttccag

SEQ ID NO: 986087 - DNA, 15 bp, Homo sapiens
aggttagcttccagc

SEQ ID NO: 986088 - DNA, 15 bp, Homo sapiens
tcagtgcctccttgg

SEQ ID NO: 986089 - DNA, 15 bp, Homo sapiens
cagtgcctccttggc

SEQ ID NO: 986090 - DNA, 15 bp, Homo sapiens
agtgcctccttggct

SEQ ID NO: 986091 - DNA, 15 bp, Homo sapiens
gtgcctccttggctt

SEQ ID NO: 986092 - DNA, 15 bp, Homo sapiens
tgcctccttggcttc

SEQ ID NO: 986093 - DNA, 15 bp, Homo sapiens
gcctccttggcttcc

SEQ ID NO: 986094 - DNA, 15 bp, Homo sapiens
cctccttggcttccc

SEQ ID NO: 986095 - DNA, 15 bp, Homo sapiens
ctccttggcttccca

SEQ ID NO: 986096 - DNA, 15 bp, Homo sapiens
tccttggcttcccag

SEQ ID NO: 986097 - DNA, 15 bp, Homo sapiens
ccttggcttcccagg

SEQ ID NO: 986098 - DNA, 15 bp, Homo sapiens
cttggcttcccaggg

SEQ ID NO: 986099 - DNA, 15 bp, Homo sapiens
ttggcttcccagggc

SEQ ID NO: 986100 - DNA, 15 bp, Homo sapiens
tggcttcccagggca

SEQ ID NO: 986101 - DNA, 15 bp, Homo sapiens
ggcttcccagggcag

SEQ ID NO: 986102 - DNA, 15 bp, Homo sapiens
gcttcccagggcagt

SEQ ID NO: 986103 - DNA, 15 bp, Homo sapiens
cttcccagggcagtc

SEQ ID NO: 986104 - DNA, 15 bp, Homo sapiens
ttcccagggcagtct

SEQ ID NO: 986105 - DNA, 15 bp, Homo sapiens
tcccagggcagtcta

SEQ ID NO: 986106 - DNA, 15 bp, Homo sapiens
cccagggcagtctat

SEQ ID NO: 986107 - DNA, 15 bp, Homo sapiens
ccagggcagtctatc

SEQ ID NO: 986108 - DNA, 15 bp, Homo sapiens
cagggcagtctatcg

SEQ ID NO: 986109 - DNA, 15 bp, Homo sapiens
agggcagtctatcgc

SEQ ID NO: 986110 - DNA, 15 bp, Homo sapiens
gggcagtctatcgcc

SEQ ID NO: 986111 - DNA, 15 bp, Homo sapiens
ggcagtctatcgcct

SEQ ID NO: 986112 - DNA, 15 bp, Homo sapiens
gcagtctatcgcctt

SEQ ID NO: 986113 - DNA, 15 bp, Homo sapiens
cagtctatcgccttg

SEQ ID NO: 986114 - DNA, 15 bp, Homo sapiens
agtctatcgccttga

SEQ ID NO: 986115 - DNA, 15 bp, Homo sapiens
gtctatcgccttgat

SEQ ID NO: 986116 - DNA, 15 bp, Homo sapiens
tctatcgccttgatc

SEQ ID NO: 986117 - DNA, 15 bp, Homo sapiens
ctatcgccttgatct

SEQ ID NO: 986118 - DNA, 15 bp, Homo sapiens
tatcgccttgatctc

SEQ ID NO: 986119 - DNA, 15 bp, Homo sapiens
atcgccttgatctcc

SEQ ID NO: 986120 - DNA, 15 bp, Homo sapiens
tcgccttgatctccg

SEQ ID NO: 986121 - DNA, 15 bp, Homo sapiens
cgccttgatctccgg

SEQ ID NO: 986122 - DNA, 15 bp, Homo sapiens
gccttgatctccggg

SEQ ID NO: 986123 - DNA, 15 bp, Homo sapiens
ccttgatctccggga

SEQ ID NO: 986124 - DNA, 15 bp, Homo sapiens
cttgatctccgggat

SEQ ID NO: 986125 - DNA, 15 bp, Homo sapiens
ttgatctccgggatc

SEQ ID NO: 986126 - DNA, 15 bp, Homo sapiens
tgatctccgggatca

SEQ ID NO: 986127 - DNA, 15 bp, Homo sapiens
gatctccgggatcac

SEQ ID NO: 986128 - DNA, 15 bp, Homo sapiens
atctccgggatcact

SEQ ID NO: 986129 - DNA, 15 bp, Homo sapiens
tctccgggatcactg

SEQ ID NO: 986130 - DNA, 15 bp, Homo sapiens
ctccgggatcactgg

SEQ ID NO: 986131 - DNA, 15 bp, Homo sapiens
tccgggatcactgga

SEQ ID NO: 986132 - DNA, 15 bp, Homo sapiens
ccgggatcactggag

SEQ ID NO: 986133 - DNA, 15 bp, Homo sapiens
cgggatcactggaga

SEQ ID NO: 986134 - DNA, 15 bp, Homo sapiens
gggatcactggagag

SEQ ID NO: 986135 - DNA, 15 bp, Homo sapiens
ggatcactggagaga

SEQ ID NO: 986136 - DNA, 15 bp, Homo sapiens
gatcactggagagaa

SEQ ID NO: 986137 - DNA, 15 bp, Homo sapiens
atcactggagagaac

SEQ ID NO: 986138 - DNA, 15 bp, Homo sapiens
tcactggagagaaca

SEQ ID NO: 986139 - DNA, 15 bp, Homo sapiens
cactggagagaacag

SEQ ID NO: 986140 - DNA, 15 bp, Homo sapiens
actggagagaacagc

SEQ ID NO: 986141 - DNA, 15 bp, Homo sapiens
ctggagagaacagca

SEQ ID NO: 986142 - DNA, 15 bp, Homo sapiens
tggagagaacagcaa

SEQ ID NO: 986143 - DNA, 15 bp, Homo sapiens
ggagagaacagcaaa

SEQ ID NO: 986144 - DNA, 15 bp, Homo sapiens
gagagaacagcaaac

SEQ ID NO: 986145 - DNA, 15 bp, Homo sapiens
agagaacagcaaacc

SEQ ID NO: 986146 - DNA, 15 bp, Homo sapiens
gagaacagcaaaccg

SEQ ID NO: 986147 - DNA, 15 bp, Homo sapiens
agaacagcaaaccgg

SEQ ID NO: 986148 - DNA, 15 bp, Homo sapiens
gaacagcaaaccggc

SEQ ID NO: 986149 - DNA, 15 bp, Homo sapiens
aacagcaaaccggcg

SEQ ID NO: 986150 - DNA, 15 bp, Homo sapiens
acagcaaaccggcgc

SEQ ID NO: 986151 - DNA, 15 bp, Homo sapiens
cagcaaaccggcgcc

SEQ ID NO: 986152 - DNA, 15 bp, Homo sapiens
agcaaaccggcgcct

SEQ ID NO: 986153 - DNA, 15 bp, Homo sapiens
gcaaaccggcgccta

SEQ ID NO: 986154 - DNA, 15 bp, Homo sapiens
caaaccggcgcctac

SEQ ID NO: 986155 - DNA, 15 bp, Homo sapiens
aaaccggcgcctact

SEQ ID NO: 986156 - DNA, 15 bp, Homo sapiens
aaccggcgcctactt

SEQ ID NO: 986157 - DNA, 15 bp, Homo sapiens
accggcgcctacttt

SEQ ID NO: 986158 - DNA, 15 bp, Homo sapiens
ccggcgcctactttt

SEQ ID NO: 986159 - DNA, 15 bp, Homo sapiens
cggcgcctacttttc

SEQ ID NO: 986160 - DNA, 15 bp, Homo sapiens
ggcgcctacttttct

SEQ ID NO: 986161 - DNA, 15 bp, Homo sapiens
gcgcctacttttctg

SEQ ID NO: 986162 - DNA, 15 bp, Homo sapiens
cgcctacttttctgc

SEQ ID NO: 986163 - DNA, 15 bp, Homo sapiens
gcctacttttctgcc

SEQ ID NO: 986164 - DNA, 15 bp, Homo sapiens
cctacttttctgccc

SEQ ID NO: 986165 - DNA, 15 bp, Homo sapiens
ctacttttctgccca

SEQ ID NO: 986166 - DNA, 15 bp, Homo sapiens
tacttttctgcccag

SEQ ID NO: 986167 - DNA, 15 bp, Homo sapiens
acttttctgcccagg

SEQ ID NO: 986168 - DNA, 15 bp, Homo sapiens
cttttctgcccagga

SEQ ID NO: 986169 - DNA, 15 bp, Homo sapiens
ttttctgcccaggag

SEQ ID NO: 986170 - DNA, 15 bp, Homo sapiens
tttctgcccaggagc

SEQ ID NO: 986171 - DNA, 15 bp, Homo sapiens
ttctgcccaggagcc

SEQ ID NO: 986172 - DNA, 15 bp, Homo sapiens
tctgcccaggagcct

SEQ ID NO: 986173 - DNA, 15 bp, Homo sapiens
ctgcccaggagcctt

SEQ ID NO: 986174 - DNA, 15 bp, Homo sapiens
tgcccaggagccttt

SEQ ID NO: 986175 - DNA, 15 bp, Homo sapiens
gcccaggagcctttt

SEQ ID NO: 986176 - DNA, 15 bp, Homo sapiens
cccaggagccttttg

SEQ ID NO: 986177 - DNA, 15 bp, Homo sapiens
ccaggagccttttgc

SEQ ID NO: 986178 - DNA, 15 bp, Homo sapiens
caggagccttttgct

SEQ ID NO: 986179 - DNA, 15 bp, Homo sapiens
aggagccttttgctt

SEQ ID NO: 986180 - DNA, 15 bp, Homo sapiens
ggagccttttgcttg

SEQ ID NO: 986181 - DNA, 15 bp, Homo sapiens
gagccttttgcttga

SEQ ID NO: 986182 - DNA, 15 bp, Homo sapiens
agccttttgcttgat

SEQ ID NO: 986183 - DNA, 15 bp, Homo sapiens
gccttttgcttgatg

SEQ ID NO: 986184 - DNA, 15 bp, Homo sapiens
ccttttgcttgatgg

SEQ ID NO: 986185 - DNA, 15 bp, Homo sapiens
cttttgcttgatgga

SEQ ID NO: 986186 - DNA, 15 bp, Homo sapiens
ttttgcttgatggat

SEQ ID NO: 986187 - DNA, 15 bp, Homo sapiens
tttgcttgatggatg

SEQ ID NO: 986188 - DNA, 15 bp, Homo sapiens
ttgcttgatggatgg

SEQ ID NO: 986189 - DNA, 15 bp, Homo sapiens
tgcttgatggatggt

SEQ ID NO: 986190 - DNA, 15 bp, Homo sapiens
gcttgatggatggta

SEQ ID NO: 986191 - DNA, 15 bp, Homo sapiens
cttgatggatggtat

SEQ ID NO: 986192 - DNA, 15 bp, Homo sapiens
ttgatggatggtatc

SEQ ID NO: 986193 - DNA, 15 bp, Homo sapiens
tgatggatggtatct

SEQ ID NO: 986194 - DNA, 15 bp, Homo sapiens
gatggatggtatctg

SEQ ID NO: 986195 - DNA, 15 bp, Homo sapiens
atggatggtatctgt

SEQ ID NO: 986196 - DNA, 15 bp, Homo sapiens
tggatggtatctgtg

SEQ ID NO: 986197 - DNA, 15 bp, Homo sapiens
ggatggtatctgtgt

SEQ ID NO: 986198 - DNA, 15 bp, Homo sapiens
gatggtatctgtgtt

SEQ ID NO: 986199 - DNA, 15 bp, Homo sapiens
atggtatctgtgttt

SEQ ID NO: 986200 - DNA, 15 bp, Homo sapiens
tggtatctgtgtttg

SEQ ID NO: 986201 - DNA, 15 bp, Homo sapiens
ggtatctgtgtttga

SEQ ID NO: 986202 - DNA, 15 bp, Homo sapiens
gtatctgtgtttgaa

SEQ ID NO: 986203 - DNA, 15 bp, Homo sapiens
tatctgtgtttgaat

SEQ ID NO: 986204 - DNA, 15 bp, Homo sapiens
atctgtgtttgaatg

SEQ ID NO: 986205 - DNA, 15 bp, Homo sapiens
tctgtgtttgaatgt

SEQ ID NO: 986206 - DNA, 15 bp, Homo sapiens
ctgtgtttgaatgtg

SEQ ID NO: 986207 - DNA, 15 bp, Homo sapiens
tgtgtttgaatgtgc

SEQ ID NO: 986208 - DNA, 15 bp, Homo sapiens
gtgtttgaatgtgca

SEQ ID NO: 986209 - DNA, 15 bp, Homo sapiens
tgtttgaatgtgcaa

SEQ ID NO: 986210 - DNA, 15 bp, Homo sapiens
gtttgaatgtgcaat

SEQ ID NO: 986211 - DNA, 15 bp, Homo sapiens
tttgaatgtgcaatt

SEQ ID NO: 986212 - DNA, 15 bp, Homo sapiens
ttgaatgtgcaattt

SEQ ID NO: 986213 - DNA, 15 bp, Homo sapiens
tgaatgtgcaatttt

SEQ ID NO: 986214 - DNA, 15 bp, Homo sapiens
gaatgtgcaattttg

SEQ ID NO: 986215 - DNA, 15 bp, Homo sapiens
aatgtgcaattttgt

SEQ ID NO: 986216 - DNA, 15 bp, Homo sapiens
atgtgcaattttgtt

SEQ ID NO: 986217 - DNA, 15 bp, Homo sapiens
tgtgcaattttgtta

SEQ ID NO: 986218 - DNA, 15 bp, Homo sapiens
gtgcaattttgttag

SEQ ID NO: 986219 - DNA, 15 bp, Homo sapiens
tgcaattttgttagg

SEQ ID NO: 986220 - DNA, 15 bp, Homo sapiens
gcaattttgttaggc

SEQ ID NO: 986221 - DNA, 15 bp, Homo sapiens
caattttgttaggct

SEQ ID NO: 986222 - DNA, 15 bp, Homo sapiens
aattttgttaggctt

SEQ ID NO: 986223 - DNA, 15 bp, Homo sapiens
attttgttaggcttt

SEQ ID NO: 986224 - DNA, 15 bp, Homo sapiens
ttttgttaggctttt

SEQ ID NO: 986225 - DNA, 15 bp, Homo sapiens
tttgttaggctttta

SEQ ID NO: 986226 - DNA, 15 bp, Homo sapiens
ttgttaggcttttaa

SEQ ID NO: 986227 - DNA, 15 bp, Homo sapiens
tgttaggcttttaaa

SEQ ID NO: 986228 - DNA, 15 bp, Homo sapiens
gttaggcttttaaaa

SEQ ID NO: 986229 - DNA, 15 bp, Homo sapiens
ttaggcttttaaaag

SEQ ID NO: 986230 - DNA, 15 bp, Homo sapiens
taggcttttaaaagg

SEQ ID NO: 986231 - DNA, 15 bp, Homo sapiens
aggcttttaaaaggc

SEQ ID NO: 986232 - DNA, 15 bp, Homo sapiens
ggcttttaaaaggca

SEQ ID NO: 986233 - DNA, 15 bp, Homo sapiens
gcttttaaaaggcag

SEQ ID NO: 986234 - DNA, 15 bp, Homo sapiens
cttttaaaaggcagg

SEQ ID NO: 986235 - DNA, 15 bp, Homo sapiens
ttttaaaaggcagga

SEQ ID NO: 986236 - DNA, 15 bp, Homo sapiens
tttaaaaggcaggag

SEQ ID NO: 986237 - DNA, 15 bp, Homo sapiens
ttaaaaggcaggaga

SEQ ID NO: 986238 - DNA, 15 bp, Homo sapiens
taaaaggcaggagat

SEQ ID NO: 986239 - DNA, 15 bp, Homo sapiens
aaaaggcaggagatt

SEQ ID NO: 986240 - DNA, 15 bp, Homo sapiens
aaaggcaggagattc

SEQ ID NO: 986241 - DNA, 15 bp, Homo sapiens
aaggcaggagattcc

SEQ ID NO: 986242 - DNA, 15 bp, Homo sapiens
aggcaggagattccc

SEQ ID NO: 986243 - DNA, 15 bp, Homo sapiens
ggcaggagattcccc

SEQ ID NO: 986244 - DNA, 15 bp, Homo sapiens
gcaggagattccccg

SEQ ID NO: 986245 - DNA, 15 bp, Homo sapiens
caggagattccccgc

SEQ ID NO: 986246 - DNA, 15 bp, Homo sapiens
aggagattccccgcg

SEQ ID NO: 986247 - DNA, 15 bp, Homo sapiens
ggagattccccgcgg

SEQ ID NO: 986248 - DNA, 15 bp, Homo sapiens
gagattccccgcggt

SEQ ID NO: 986249 - DNA, 15 bp, Homo sapiens
agattccccgcggtc

SEQ ID NO: 986250 - DNA, 15 bp, Homo sapiens
gattccccgcggtct

SEQ ID NO: 986251 - DNA, 15 bp, Homo sapiens
attccccgcggtctg

SEQ ID NO: 986252 - DNA, 15 bp, Homo sapiens
ttccccgcggtctgt

SEQ ID NO: 986253 - DNA, 15 bp, Homo sapiens
tccccgcggtctgtg

SEQ ID NO: 986254 - DNA, 15 bp, Homo sapiens
ccccgcggtctgtgg

SEQ ID NO: 986255 - DNA, 15 bp, Homo sapiens
cccgcggtctgtggg

SEQ ID NO: 986256 - DNA, 15 bp, Homo sapiens
ccgcggtctgtgggc

SEQ ID NO: 986257 - DNA, 15 bp, Homo sapiens
cgcggtctgtgggcc

SEQ ID NO: 986258 - DNA, 15 bp, Homo sapiens
gcggtctgtgggcct

SEQ ID NO: 986259 - DNA, 15 bp, Homo sapiens
cggtctgtgggcctc

SEQ ID NO: 986260 - DNA, 15 bp, Homo sapiens
ggtctgtgggcctct

SEQ ID NO: 986261 - DNA, 15 bp, Homo sapiens
gtctgtgggcctctc

SEQ ID NO: 986262 - DNA, 15 bp, Homo sapiens
tctgtgggcctctcc

SEQ ID NO: 986263 - DNA, 15 bp, Homo sapiens
ctgtgggcctctcct

SEQ ID NO: 986264 - DNA, 15 bp, Homo sapiens
tgtgggcctctccta

SEQ ID NO: 986265 - DNA, 15 bp, Homo sapiens
gtgggcctctcctag

SEQ ID NO: 986266 - DNA, 15 bp, Homo sapiens
tgggcctctcctagc

SEQ ID NO: 986267 - DNA, 15 bp, Homo sapiens
gggcctctcctagct

SEQ ID NO: 986268 - DNA, 15 bp, Homo sapiens
ggcctctcctagctt

SEQ ID NO: 986269 - DNA, 15 bp, Homo sapiens
gcctctcctagcttg

SEQ ID NO: 986270 - DNA, 15 bp, Homo sapiens
cctctcctagcttgg

SEQ ID NO: 986271 - DNA, 15 bp, Homo sapiens
ctctcctagcttggc

SEQ ID NO: 986272 - DNA, 15 bp, Homo sapiens
tctcctagcttggca

SEQ ID NO: 986273 - DNA, 15 bp, Homo sapiens
ctcctagcttggcat

SEQ ID NO: 986274 - DNA, 15 bp, Homo sapiens
tcctagcttggcatt

SEQ ID NO: 986275 - DNA, 15 bp, Homo sapiens
cctagcttggcatta

SEQ ID NO: 986276 - DNA, 15 bp, Homo sapiens
ctagcttggcattat

SEQ ID NO: 986277 - DNA, 15 bp, Homo sapiens
tagcttggcattata

SEQ ID NO: 986278 - DNA, 15 bp, Homo sapiens
agcttggcattataa

SEQ ID NO: 986279 - DNA, 15 bp, Homo sapiens
gcttggcattataat

SEQ ID NO: 986280 - DNA, 15 bp, Homo sapiens
cttggcattataatc

SEQ ID NO: 986281 - DNA, 15 bp, Homo sapiens
ttggcattataatca

SEQ ID NO: 986282 - DNA, 15 bp, Homo sapiens
tggcattataatcaa

SEQ ID NO: 986283 - DNA, 15 bp, Homo sapiens
ggcattataatcaag

SEQ ID NO: 986284 - DNA, 15 bp, Homo sapiens
gcattataatcaaga

SEQ ID NO: 986285 - DNA, 15 bp, Homo sapiens
cattataatcaagaa

SEQ ID NO: 986286 - DNA, 15 bp, Homo sapiens
attataatcaagaaa

SEQ ID NO: 986287 - DNA, 15 bp, Homo sapiens
ttataatcaagaaat

SEQ ID NO: 986288 - DNA, 15 bp, Homo sapiens
tataatcaagaaatt

SEQ ID NO: 986289 - DNA, 15 bp, Homo sapiens
ataatcaagaaatta

SEQ ID NO: 986290 - DNA, 15 bp, Homo sapiens
taatcaagaaattat

SEQ ID NO: 986291 - DNA, 15 bp, Homo sapiens
aatcaagaaattata

SEQ ID NO: 986292 - DNA, 15 bp, Homo sapiens
atcaagaaattatac

SEQ ID NO: 986293 - DNA, 15 bp, Homo sapiens
tcaagaaattatact

SEQ ID NO: 986294 - DNA, 15 bp, Homo sapiens
caagaaattatactt

SEQ ID NO: 986295 - DNA, 15 bp, Homo sapiens
aagaaattatacttt

SEQ ID NO: 986296 - DNA, 15 bp, Homo sapiens
agaaattatactttg

SEQ ID NO: 986297 - DNA, 15 bp, Homo sapiens
gaaattatactttgc

SEQ ID NO: 986298 - DNA, 15 bp, Homo sapiens
aaattatactttgct

SEQ ID NO: 986299 - DNA, 15 bp, Homo sapiens
aattatactttgcta

SEQ ID NO: 986300 - DNA, 15 bp, Homo sapiens
attatactttgctat

SEQ ID NO: 986301 - DNA, 15 bp, Homo sapiens
ttatactttgctatg

SEQ ID NO: 986302 - DNA, 15 bp, Homo sapiens
tatactttgctatgc

SEQ ID NO: 986303 - DNA, 15 bp, Homo sapiens
atactttgctatgca

SEQ ID NO: 986304 - DNA, 15 bp, Homo sapiens
tactttgctatgcaa

SEQ ID NO: 986305 - DNA, 15 bp, Homo sapiens
actttgctatgcaaa

SEQ ID NO: 986306 - DNA, 15 bp, Homo sapiens
ctttgctatgcaaaa

SEQ ID NO: 986307 - DNA, 15 bp, Homo sapiens
tttgctatgcaaaag

SEQ ID NO: 986308 - DNA, 15 bp, Homo sapiens
ttgctatgcaaaagc

SEQ ID NO: 986309 - DNA, 15 bp, Homo sapiens
tgctatgcaaaagca

SEQ ID NO: 986310 - DNA, 15 bp, Homo sapiens
gctatgcaaaagcat

SEQ ID NO: 986311 - DNA, 15 bp, Homo sapiens
ctatgcaaaagcatg

SEQ ID NO: 986312 - DNA, 15 bp, Homo sapiens
tatgcaaaagcatga

SEQ ID NO: 986313 - DNA, 15 bp, Homo sapiens
atgcaaaagcatgat

SEQ ID NO: 986314 - DNA, 15 bp, Homo sapiens
tgcaaaagcatgatg

SEQ ID NO: 986315 - DNA, 15 bp, Homo sapiens
gcaaaagcatgatgg

SEQ ID NO: 986316 - DNA, 15 bp, Homo sapiens
caaaagcatgatggc

SEQ ID NO: 986317 - DNA, 15 bp, Homo sapiens
aaaagcatgatggct

SEQ ID NO: 986318 - DNA, 15 bp, Homo sapiens
aaagcatgatggctt

SEQ ID NO: 986319 - DNA, 15 bp, Homo sapiens
aagcatgatggcttt

SEQ ID NO: 986320 - DNA, 15 bp, Homo sapiens
agcatgatggctttt

SEQ ID NO: 986321 - DNA, 15 bp, Homo sapiens
gcatgatggcttttt

SEQ ID NO: 986322 - DNA, 15 bp, Homo sapiens
catgatggctttttt

SEQ ID NO: 986323 - DNA, 15 bp, Homo sapiens
atgatggctttttta

SEQ ID NO: 986324 - DNA, 15 bp, Homo sapiens
tgatggcttttttaa

SEQ ID NO: 986325 - DNA, 15 bp, Homo sapiens
gatggcttttttaaa

SEQ ID NO: 986326 - DNA, 15 bp, Homo sapiens
atggcttttttaaaa

SEQ ID NO: 986327 - DNA, 15 bp, Homo sapiens
tggcttttttaaaaa

SEQ ID NO: 986328 - DNA, 15 bp, Homo sapiens
ggcttttttaaaaaa

SEQ ID NO: 986329 - DNA, 15 bp, Homo sapiens
gcttttttaaaaaaa

SEQ ID NO: 986330 - DNA, 15 bp, Homo sapiens
cttttttaaaaaaat

SEQ ID NO: 986331 - DNA, 15 bp, Homo sapiens
ttttttaaaaaaatc

SEQ ID NO: 986332 - DNA, 15 bp, Homo sapiens
tttttaaaaaaatcg

SEQ ID NO: 986333 - DNA, 15 bp, Homo sapiens
ttttaaaaaaatcgt

SEQ ID NO: 986334 - DNA, 15 bp, Homo sapiens
tttaaaaaaatcgtt

SEQ ID NO: 986335 - DNA, 15 bp, Homo sapiens
ttaaaaaaatcgttt

SEQ ID NO: 986336 - DNA, 15 bp, Homo sapiens
taaaaaaatcgtttt

SEQ ID NO: 986337 - DNA, 15 bp, Homo sapiens
aaaaaaatcgttttt

SEQ ID NO: 986338 - DNA, 15 bp, Homo sapiens
aaaaaatcgtttttt

SEQ ID NO: 986339 - DNA, 15 bp, Homo sapiens
aaaaatcgtttttta

SEQ ID NO: 986340 - DNA, 15 bp, Homo sapiens
aaaatcgttttttaa

SEQ ID NO: 986341 - DNA, 15 bp, Homo sapiens
aaatcgttttttaat

SEQ ID NO: 986342 - DNA, 15 bp, Homo sapiens
aatcgttttttaatg

SEQ ID NO: 986343 - DNA, 15 bp, Homo sapiens
atcgttttttaatgt

SEQ ID NO: 986344 - DNA, 15 bp, Homo sapiens
tcgttttttaatgtt

SEQ ID NO: 986345 - DNA, 15 bp, Homo sapiens
cgttttttaatgttc

SEQ ID NO: 986346 - DNA, 15 bp, Homo sapiens
gttttttaatgttcc

SEQ ID NO: 986347 - DNA, 15 bp, Homo sapiens
ttttttaatgttccc

SEQ ID NO: 986348 - DNA, 15 bp, Homo sapiens
tttttaatgttccct

SEQ ID NO: 986349 - DNA, 15 bp, Homo sapiens
ttttaatgttccctt

SEQ ID NO: 986350 - DNA, 15 bp, Homo sapiens
tttaatgttcccttc

SEQ ID NO: 986351 - DNA, 15 bp, Homo sapiens
ttaatgttcccttcc

SEQ ID NO: 986352 - DNA, 15 bp, Homo sapiens
taatgttcccttccc

SEQ ID NO: 986353 - DNA, 15 bp, Homo sapiens
aatgttcccttccca

SEQ ID NO: 986354 - DNA, 15 bp, Homo sapiens
atgttcccttcccag

SEQ ID NO: 986355 - DNA, 15 bp, Homo sapiens
tgttcccttcccagg

SEQ ID NO: 986356 - DNA, 15 bp, Homo sapiens
gttcccttcccaggt

SEQ ID NO: 986357 - DNA, 15 bp, Homo sapiens
ttcccttcccaggtt

SEQ ID NO: 986358 - DNA, 15 bp, Homo sapiens
tcccttcccaggttc

SEQ ID NO: 986359 - DNA, 15 bp, Homo sapiens
cccttcccaggttca

SEQ ID NO: 986360 - DNA, 15 bp, Homo sapiens
ccttcccaggttcac

SEQ ID NO: 986361 - DNA, 15 bp, Homo sapiens
cttcccaggttcacc

SEQ ID NO: 986362 - DNA, 15 bp, Homo sapiens
ttcccaggttcaccc

SEQ ID NO: 986363 - DNA, 15 bp, Homo sapiens
tcccaggttcaccct

SEQ ID NO: 986364 - DNA, 15 bp, Homo sapiens
cccaggttcaccctc

SEQ ID NO: 986365 - DNA, 15 bp, Homo sapiens
ccaggttcaccctcc

SEQ ID NO: 986366 - DNA, 15 bp, Homo sapiens
caggttcaccctccc

SEQ ID NO: 986367 - DNA, 15 bp, Homo sapiens
aggttcaccctccct

SEQ ID NO: 986368 - DNA, 15 bp, Homo sapiens
ggttcaccctccctt

SEQ ID NO: 986369 - DNA, 15 bp, Homo sapiens
gttcaccctcccttt

SEQ ID NO: 986370 - DNA, 15 bp, Homo sapiens
ttcaccctccctttt

SEQ ID NO: 986371 - DNA, 15 bp, Homo sapiens
tcaccctcccttttt

SEQ ID NO: 986372 - DNA, 15 bp, Homo sapiens
caccctccctttttg

SEQ ID NO: 986373 - DNA, 15 bp, Homo sapiens
accctccctttttgt

SEQ ID NO: 986374 - DNA, 15 bp, Homo sapiens
ccctccctttttgtt

SEQ ID NO: 986375 - DNA, 15 bp, Homo sapiens
cctccctttttgtta

SEQ ID NO: 986376 - DNA, 15 bp, Homo sapiens
ctccctttttgttat

SEQ ID NO: 986377 - DNA, 15 bp, Homo sapiens
tccctttttgttatt

SEQ ID NO: 986378 - DNA, 15 bp, Homo sapiens
ccctttttgttattt

SEQ ID NO: 986379 - DNA, 15 bp, Homo sapiens
cctttttgttatttt

SEQ ID NO: 986380 - DNA, 15 bp, Homo sapiens
ctttttgttattttg

SEQ ID NO: 986381 - DNA, 15 bp, Homo sapiens
tttttgttattttga

SEQ ID NO: 986382 - DNA, 15 bp, Homo sapiens
ttttgttattttgaa

SEQ ID NO: 986383 - DNA, 15 bp, Homo sapiens
tttgttattttgaat

SEQ ID NO: 986384 - DNA, 15 bp, Homo sapiens
ttgttattttgaatt

SEQ ID NO: 986385 - DNA, 15 bp, Homo sapiens
tgttattttgaattc

SEQ ID NO: 986386 - DNA, 15 bp, Homo sapiens
gttattttgaattct

SEQ ID NO: 986387 - DNA, 15 bp, Homo sapiens
ttattttgaattctg

SEQ ID NO: 986388 - DNA, 15 bp, Homo sapiens
tattttgaattctgg

SEQ ID NO: 986389 - DNA, 15 bp, Homo sapiens
attttgaattctggt

SEQ ID NO: 986390 - DNA, 15 bp, Homo sapiens
ttttgaattctggtc

SEQ ID NO: 986391 - DNA, 15 bp, Homo sapiens
tttgaattctggtcg

SEQ ID NO: 986392 - DNA, 15 bp, Homo sapiens
ttgaattctggtcgt

SEQ ID NO: 986393 - DNA, 15 bp, Homo sapiens
tgaattctggtcgta

SEQ ID NO: 986394 - DNA, 15 bp, Homo sapiens
gaattctggtcgtaa

SEQ ID NO: 986395 - DNA, 15 bp, Homo sapiens
aattctggtcgtaac

SEQ ID NO: 986396 - DNA, 15 bp, Homo sapiens
attctggtcgtaaca

SEQ ID NO: 986397 - DNA, 15 bp, Homo sapiens
ttctggtcgtaacaa

SEQ ID NO: 986398 - DNA, 15 bp, Homo sapiens
tctggtcgtaacaat

SEQ ID NO: 986399 - DNA, 15 bp, Homo sapiens
ctggtcgtaacaatt

SEQ ID NO: 986400 - DNA, 15 bp, Homo sapiens
tggtcgtaacaattc

SEQ ID NO: 986401 - DNA, 15 bp, Homo sapiens
ggtcgtaacaattcg

SEQ ID NO: 986402 - DNA, 15 bp, Homo sapiens
gtcgtaacaattcgg

SEQ ID NO: 986403 - DNA, 15 bp, Homo sapiens
tcgtaacaattcggt

SEQ ID NO: 986404 - DNA, 15 bp, Homo sapiens
cgtaacaattcggtc

SEQ ID NO: 986405 - DNA, 15 bp, Homo sapiens
gtaacaattcggtct

SEQ ID NO: 986406 - DNA, 15 bp, Homo sapiens
taacaattcggtctt

SEQ ID NO: 986407 - DNA, 15 bp, Homo sapiens
aacaattcggtctta

SEQ ID NO: 986408 - DNA, 15 bp, Homo sapiens
acaattcggtcttac

SEQ ID NO: 986409 - DNA, 15 bp, Homo sapiens
caattcggtcttact

SEQ ID NO: 986410 - DNA, 15 bp, Homo sapiens
aattcggtcttactt

SEQ ID NO: 986411 - DNA, 15 bp, Homo sapiens
attcggtcttacttt

SEQ ID NO: 986412 - DNA, 15 bp, Homo sapiens
ttcggtcttactttt

SEQ ID NO: 986413 - DNA, 15 bp, Homo sapiens
tcggtcttacttttt

SEQ ID NO: 986414 - DNA, 15 bp, Homo sapiens
cggtcttactttttt

SEQ ID NO: 986415 - DNA, 15 bp, Homo sapiens
ggtcttactttttta

SEQ ID NO: 986416 - DNA, 15 bp, Homo sapiens
gtcttacttttttat

SEQ ID NO: 986417 - DNA, 15 bp, Homo sapiens
tcttacttttttatt

SEQ ID NO: 986418 - DNA, 15 bp, Homo sapiens
cttacttttttattt

SEQ ID NO: 986419 - DNA, 15 bp, Homo sapiens
ttacttttttatttt

SEQ ID NO: 986420 - DNA, 15 bp, Homo sapiens
tacttttttattttt

SEQ ID NO: 986421 - DNA, 15 bp, Homo sapiens
acttttttatttttt

SEQ ID NO: 986422 - DNA, 15 bp, Homo sapiens
cttttttatttttta

SEQ ID NO: 986423 - DNA, 15 bp, Homo sapiens
ttttttattttttat

SEQ ID NO: 986424 - DNA, 15 bp, Homo sapiens
tttttattttttatt

SEQ ID NO: 986425 - DNA, 15 bp, Homo sapiens
ttttattttttattt

SEQ ID NO: 986426 - DNA, 15 bp, Homo sapiens
tttattttttatttt

SEQ ID NO: 986427 - DNA, 15 bp, Homo sapiens
ttattttttattttt

SEQ ID NO: 986428 - DNA, 15 bp, Homo sapiens
tattttttatttttt

SEQ ID NO: 986429 - DNA, 15 bp, Homo sapiens
attttttattttttg

SEQ ID NO: 986430 - DNA, 15 bp, Homo sapiens
ttttttattttttgt

SEQ ID NO: 986431 - DNA, 15 bp, Homo sapiens
tttttattttttgtt

SEQ ID NO: 986432 - DNA, 15 bp, Homo sapiens
ttttattttttgttc

SEQ ID NO: 986433 - DNA, 15 bp, Homo sapiens
tttattttttgttcg

SEQ ID NO: 986434 - DNA, 15 bp, Homo sapiens
ttattttttgttcgt

SEQ ID NO: 986435 - DNA, 15 bp, Homo sapiens
tattttttgttcgtt

SEQ ID NO: 986436 - DNA, 15 bp, Homo sapiens
attttttgttcgttt

SEQ ID NO: 986437 - DNA, 15 bp, Homo sapiens
ttttttgttcgtttt

SEQ ID NO: 986438 - DNA, 15 bp, Homo sapiens
tttttgttcgttttg

SEQ ID NO: 986439 - DNA, 15 bp, Homo sapiens
ttttgttcgttttga

SEQ ID NO: 986440 - DNA, 15 bp, Homo sapiens
tttgttcgttttgat

SEQ ID NO: 986441 - DNA, 15 bp, Homo sapiens
ttgttcgttttgatt

SEQ ID NO: 986442 - DNA, 15 bp, Homo sapiens
tgttcgttttgattt

SEQ ID NO: 986443 - DNA, 15 bp, Homo sapiens
gttcgttttgattta

SEQ ID NO: 986444 - DNA, 15 bp, Homo sapiens
ttcgttttgatttac

SEQ ID NO: 986445 - DNA, 15 bp, Homo sapiens
tcgttttgatttaca

SEQ ID NO: 986446 - DNA, 15 bp, Homo sapiens
cgttttgatttacat

SEQ ID NO: 986447 - DNA, 15 bp, Homo sapiens
gttttgatttacatt

SEQ ID NO: 986448 - DNA, 15 bp, Homo sapiens
ttttgatttacattt

SEQ ID NO: 986449 - DNA, 15 bp, Homo sapiens
tttgatttacatttt

SEQ ID NO: 986450 - DNA, 15 bp, Homo sapiens
ttgatttacattttt

SEQ ID NO: 986451 - DNA, 15 bp, Homo sapiens
tgatttacattttta

SEQ ID NO: 986452 - DNA, 15 bp, Homo sapiens
gatttacatttttat

SEQ ID NO: 986453 - DNA, 15 bp, Homo sapiens
atttacatttttatt

SEQ ID NO: 986454 - DNA, 15 bp, Homo sapiens
tttacatttttattt

SEQ ID NO: 986455 - DNA, 15 bp, Homo sapiens
ttacatttttatttt

SEQ ID NO: 986456 - DNA, 15 bp, Homo sapiens
tacatttttattttt

SEQ ID NO: 986457 - DNA, 15 bp, Homo sapiens
acatttttatttttt

SEQ ID NO: 986458 - DNA, 15 bp, Homo sapiens
catttttattttttt

SEQ ID NO: 986459 - DNA, 15 bp, Homo sapiens
atttttatttttttt

SEQ ID NO: 986460 - DNA, 15 bp, Homo sapiens
tttttattttttttc

SEQ ID NO: 986461 - DNA, 15 bp, Homo sapiens
ttttattttttttcc

SEQ ID NO: 986462 - DNA, 15 bp, Homo sapiens
tttattttttttccc

SEQ ID NO: 986463 - DNA, 15 bp, Homo sapiens
ttattttttttcccc

SEQ ID NO: 986464 - DNA, 15 bp, Homo sapiens
tattttttttccccc

SEQ ID NO: 986465 - DNA, 15 bp, Homo sapiens
attttttttccccca

SEQ ID NO: 986466 - DNA, 15 bp, Homo sapiens
ttttttttcccccac

SEQ ID NO: 986467 - DNA, 15 bp, Homo sapiens
tttttttcccccaca

SEQ ID NO: 986468 - DNA, 15 bp, Homo sapiens
ttttttcccccacaa

SEQ ID NO: 986469 - DNA, 15 bp, Homo sapiens
tttttcccccacaag

SEQ ID NO: 986470 - DNA, 15 bp, Homo sapiens
ttttcccccacaagc

SEQ ID NO: 986471 - DNA, 15 bp, Homo sapiens
tttcccccacaagca

SEQ ID NO: 986472 - DNA, 15 bp, Homo sapiens
ttcccccacaagcag

SEQ ID NO: 986473 - DNA, 15 bp, Homo sapiens
tcccccacaagcaga

SEQ ID NO: 986474 - DNA, 15 bp, Homo sapiens
cccccacaagcagaa

SEQ ID NO: 986475 - DNA, 15 bp, Homo sapiens
ccccacaagcagaag

SEQ ID NO: 986476 - DNA, 15 bp, Homo sapiens
cccacaagcagaagg

SEQ ID NO: 986477 - DNA, 15 bp, Homo sapiens
ccacaagcagaaggt

SEQ ID NO: 986478 - DNA, 15 bp, Homo sapiens
cacaagcagaaggtt

SEQ ID NO: 986479 - DNA, 15 bp, Homo sapiens
acaagcagaaggttt

SEQ ID NO: 986480 - DNA, 15 bp, Homo sapiens
caagcagaaggtttt

SEQ ID NO: 986481 - DNA, 15 bp, Homo sapiens
aagcagaaggtttta

SEQ ID NO: 986482 - DNA, 15 bp, Homo sapiens
agcagaaggttttat

SEQ ID NO: 986483 - DNA, 15 bp, Homo sapiens
gcagaaggttttatt

SEQ ID NO: 986484 - DNA, 15 bp, Homo sapiens
cagaaggttttattt

SEQ ID NO: 986485 - DNA, 15 bp, Homo sapiens
agaaggttttatttt

SEQ ID NO: 986486 - DNA, 15 bp, Homo sapiens
gaaggttttatttta

SEQ ID NO: 986487 - DNA, 15 bp, Homo sapiens
aaggttttattttaa

SEQ ID NO: 986488 - DNA, 15 bp, Homo sapiens
aggttttattttaaa

SEQ ID NO: 986489 - DNA, 15 bp, Homo sapiens
ggttttattttaaat

SEQ ID NO: 986490 - DNA, 15 bp, Homo sapiens
gttttattttaaatt

SEQ ID NO: 986491 - DNA, 15 bp, Homo sapiens
ttttattttaaattc

SEQ ID NO: 986492 - DNA, 15 bp, Homo sapiens
tttattttaaattcc

SEQ ID NO: 986493 - DNA, 15 bp, Homo sapiens
ttattttaaattcca

SEQ ID NO: 986494 - DNA, 15 bp, Homo sapiens
tattttaaattccaa

SEQ ID NO: 986495 - DNA, 15 bp, Homo sapiens
attttaaattccaag

SEQ ID NO: 986496 - DNA, 15 bp, Homo sapiens
ttttaaattccaaga

SEQ ID NO: 986497 - DNA, 15 bp, Homo sapiens
tttaaattccaagaa

SEQ ID NO: 986498 - DNA, 15 bp, Homo sapiens
ttaaattccaagaat

SEQ ID NO: 986499 - DNA, 15 bp, Homo sapiens
taaattccaagaata

SEQ ID NO: 986500 - DNA, 15 bp, Homo sapiens
aaattccaagaatat

SEQ ID NO: 986501 - DNA, 15 bp, Homo sapiens
aattccaagaatatg

SEQ ID NO: 986502 - DNA, 15 bp, Homo sapiens
attccaagaatatga

SEQ ID NO: 986503 - DNA, 15 bp, Homo sapiens
ttccaagaatatgat

SEQ ID NO: 986504 - DNA, 15 bp, Homo sapiens
tccaagaatatgatg

SEQ ID NO: 986505 - DNA, 15 bp, Homo sapiens
ccaagaatatgatgg

SEQ ID NO: 986506 - DNA, 15 bp, Homo sapiens
caagaatatgatggt

SEQ ID NO: 986507 - DNA, 15 bp, Homo sapiens
aagaatatgatggtc

SEQ ID NO: 986508 - DNA, 15 bp, Homo sapiens
agaatatgatggtca

SEQ ID NO: 986509 - DNA, 15 bp, Homo sapiens
gaatatgatggtcaa

SEQ ID NO: 986510 - DNA, 15 bp, Homo sapiens
aatatgatggtcaaa

SEQ ID NO: 986511 - DNA, 15 bp, Homo sapiens
atatgatggtcaaaa

SEQ ID NO: 986512 - DNA, 15 bp, Homo sapiens
tatgatggtcaaaat

SEQ ID NO: 986513 - DNA, 15 bp, Homo sapiens
atgatggtcaaaatt

SEQ ID NO: 986514 - DNA, 15 bp, Homo sapiens
tgatggtcaaaattg

SEQ ID NO: 986515 - DNA, 15 bp, Homo sapiens
gatggtcaaaattgc

SEQ ID NO: 986516 - DNA, 15 bp, Homo sapiens
atggtcaaaattgct

SEQ ID NO: 986517 - DNA, 15 bp, Homo sapiens
tggtcaaaattgctg

SEQ ID NO: 986518 - DNA, 15 bp, Homo sapiens
ggtcaaaattgctgg

SEQ ID NO: 986519 - DNA, 15 bp, Homo sapiens
gtcaaaattgctggg

SEQ ID NO: 986520 - DNA, 15 bp, Homo sapiens
tcaaaattgctggga

SEQ ID NO: 986521 - DNA, 15 bp, Homo sapiens
caaaattgctgggaa

SEQ ID NO: 986522 - DNA, 15 bp, Homo sapiens
aaaattgctgggaag

SEQ ID NO: 986523 - DNA, 15 bp, Homo sapiens
aaattgctgggaaga

SEQ ID NO: 986524 - DNA, 15 bp, Homo sapiens
aattgctgggaagat

SEQ ID NO: 986525 - DNA, 15 bp, Homo sapiens
attgctgggaagatt

SEQ ID NO: 986526 - DNA, 15 bp, Homo sapiens
ttgctgggaagattc

SEQ ID NO: 986527 - DNA, 15 bp, Homo sapiens
tgctgggaagattct

SEQ ID NO: 986528 - DNA, 15 bp, Homo sapiens
gctgggaagattctg

SEQ ID NO: 986529 - DNA, 15 bp, Homo sapiens
ctgggaagattctga

SEQ ID NO: 986530 - DNA, 15 bp, Homo sapiens
tgggaagattctgat

SEQ ID NO: 986531 - DNA, 15 bp, Homo sapiens
gggaagattctgatt

SEQ ID NO: 986532 - DNA, 15 bp, Homo sapiens
ggaagattctgattt

SEQ ID NO: 986533 - DNA, 15 bp, Homo sapiens
gaagattctgattta

SEQ ID NO: 986534 - DNA, 15 bp, Homo sapiens
aagattctgatttag

SEQ ID NO: 986535 - DNA, 15 bp, Homo sapiens
agattctgatttagg

SEQ ID NO: 986536 - DNA, 15 bp, Homo sapiens
gattctgatttaggg

SEQ ID NO: 986537 - DNA, 15 bp, Homo sapiens
attctgatttagggt

SEQ ID NO: 986538 - DNA, 15 bp, Homo sapiens
ttctgatttagggtt

SEQ ID NO: 986539 - DNA, 15 bp, Homo sapiens
tctgatttagggttg

SEQ ID NO: 986540 - DNA, 15 bp, Homo sapiens
ctgatttagggttgt

SEQ ID NO: 986541 - DNA, 15 bp, Homo sapiens
tgatttagggttgtc

SEQ ID NO: 986542 - DNA, 15 bp, Homo sapiens
gatttagggttgtca

SEQ ID NO: 986543 - DNA, 15 bp, Homo sapiens
atttagggttgtcac

SEQ ID NO: 986544 - DNA, 15 bp, Homo sapiens
tttagggttgtcact

SEQ ID NO: 986545 - DNA, 15 bp, Homo sapiens
ttagggttgtcactg

SEQ ID NO: 986546 - DNA, 15 bp, Homo sapiens
tagggttgtcactgc

SEQ ID NO: 986547 - DNA, 15 bp, Homo sapiens
agggttgtcactgca

SEQ ID NO: 986548 - DNA, 15 bp, Homo sapiens
gggttgtcactgcag

SEQ ID NO: 986549 - DNA, 15 bp, Homo sapiens
ggttgtcactgcaga

SEQ ID NO: 986550 - DNA, 15 bp, Homo sapiens
gttgtcactgcagag

SEQ ID NO: 986551 - DNA, 15 bp, Homo sapiens
ttgtcactgcagagc

SEQ ID NO: 986552 - DNA, 15 bp, Homo sapiens
tgtcactgcagagca

SEQ ID NO: 986553 - DNA, 15 bp, Homo sapiens
gtcactgcagagcat

SEQ ID NO: 986554 - DNA, 15 bp, Homo sapiens
tcactgcagagcatt

SEQ ID NO: 986555 - DNA, 15 bp, Homo sapiens
cactgcagagcattt

SEQ ID NO: 986556 - DNA, 15 bp, Homo sapiens
actgcagagcatttc

SEQ ID NO: 986557 - DNA, 15 bp, Homo sapiens
ctgcagagcatttcc

SEQ ID NO: 986558 - DNA, 15 bp, Homo sapiens
tgcagagcatttcca

SEQ ID NO: 986559 - DNA, 15 bp, Homo sapiens
gcagagcatttccat

SEQ ID NO: 986560 - DNA, 15 bp, Homo sapiens
cagagcatttccatg

SEQ ID NO: 986561 - DNA, 15 bp, Homo sapiens
agagcatttccatgt

SEQ ID NO: 986562 - DNA, 15 bp, Homo sapiens
gagcatttccatgtc

SEQ ID NO: 986563 - DNA, 15 bp, Homo sapiens
agcatttccatgtca

SEQ ID NO: 986564 - DNA, 15 bp, Homo sapiens
gcatttccatgtcaa

SEQ ID NO: 986565 - DNA, 15 bp, Homo sapiens
catttccatgtcaat

SEQ ID NO: 986566 - DNA, 15 bp, Homo sapiens
atttccatgtcaatg

SEQ ID NO: 986567 - DNA, 15 bp, Homo sapiens
tttccatgtcaatgt

SEQ ID NO: 986568 - DNA, 15 bp, Homo sapiens
ttccatgtcaatgta

SEQ ID NO: 986569 - DNA, 15 bp, Homo sapiens
tccatgtcaatgtaa

SEQ ID NO: 986570 - DNA, 15 bp, Homo sapiens
ccatgtcaatgtaag

SEQ ID NO: 986571 - DNA, 15 bp, Homo sapiens
catgtcaatgtaagt

SEQ ID NO: 986572 - DNA, 15 bp, Homo sapiens
atgtcaatgtaagta

SEQ ID NO: 986573 - DNA, 15 bp, Homo sapiens
tgtcaatgtaagtag

SEQ ID NO: 986574 - DNA, 15 bp, Homo sapiens
gtcaatgtaagtagg

SEQ ID NO: 986575 - DNA, 15 bp, Homo sapiens
tcaatgtaagtaggt

SEQ ID NO: 986576 - DNA, 15 bp, Homo sapiens
caatgtaagtaggta

SEQ ID NO: 986577 - DNA, 15 bp, Homo sapiens
aatgtaagtaggtac

SEQ ID NO: 986578 - DNA, 15 bp, Homo sapiens
atgtaagtaggtacc

SEQ ID NO: 986579 - DNA, 15 bp, Homo sapiens
tgtaagtaggtaccc

SEQ ID NO: 986580 - DNA, 15 bp, Homo sapiens
gtaagtaggtaccca

SEQ ID NO: 986581 - DNA, 15 bp, Homo sapiens
taagtaggtacccaa

SEQ ID NO: 986582 - DNA, 15 bp, Homo sapiens
aagtaggtacccaaa

SEQ ID NO: 986583 - DNA, 15 bp, Homo sapiens
agtaggtacccaaag

SEQ ID NO: 986584 - DNA, 15 bp, Homo sapiens
gtaggtacccaaagt

SEQ ID NO: 986585 - DNA, 15 bp, Homo sapiens
taggtacccaaagtc

SEQ ID NO: 986586 - DNA, 15 bp, Homo sapiens
aggtacccaaagtcg

SEQ ID NO: 986587 - DNA, 15 bp, Homo sapiens
ggtacccaaagtcgt

SEQ ID NO: 986588 - DNA, 15 bp, Homo sapiens
gtacccaaagtcgtt

SEQ ID NO: 986589 - DNA, 15 bp, Homo sapiens
tacccaaagtcgttt

SEQ ID NO: 986590 - DNA, 15 bp, Homo sapiens
acccaaagtcgttta

SEQ ID NO: 986591 - DNA, 15 bp, Homo sapiens
cccaaagtcgtttag

SEQ ID NO: 986592 - DNA, 15 bp, Homo sapiens
ccaaagtcgtttagg

SEQ ID NO: 986593 - DNA, 15 bp, Homo sapiens
caaagtcgtttaggt

SEQ ID NO: 986594 - DNA, 15 bp, Homo sapiens
aaagtcgtttaggtg

SEQ ID NO: 986595 - DNA, 15 bp, Homo sapiens
aagtcgtttaggtgc

SEQ ID NO: 986596 - DNA, 15 bp, Homo sapiens
agtcgtttaggtgca

SEQ ID NO: 986597 - DNA, 15 bp, Homo sapiens
gtcgtttaggtgcag

SEQ ID NO: 986598 - DNA, 15 bp, Homo sapiens
tcgtttaggtgcagc

SEQ ID NO: 986599 - DNA, 15 bp, Homo sapiens
cgtttaggtgcagca

SEQ ID NO: 986600 - DNA, 15 bp, Homo sapiens
gtttaggtgcagcat

SEQ ID NO: 986601 - DNA, 15 bp, Homo sapiens
tttaggtgcagcatt

SEQ ID NO: 986602 - DNA, 15 bp, Homo sapiens
ttaggtgcagcattc

SEQ ID NO: 986603 - DNA, 15 bp, Homo sapiens
taggtgcagcattca

SEQ ID NO: 986604 - DNA, 15 bp, Homo sapiens
aggtgcagcattcag

SEQ ID NO: 986605 - DNA, 15 bp, Homo sapiens
ggtgcagcattcagt

SEQ ID NO: 986606 - DNA, 15 bp, Homo sapiens
gtgcagcattcagta

SEQ ID NO: 986607 - DNA, 15 bp, Homo sapiens
tgcagcattcagtaa

SEQ ID NO: 986608 - DNA, 15 bp, Homo sapiens
gcagcattcagtaac

SEQ ID NO: 986609 - DNA, 15 bp, Homo sapiens
cagcattcagtaacg

SEQ ID NO: 986610 - DNA, 15 bp, Homo sapiens
agcattcagtaacgt

SEQ ID NO: 986611 - DNA, 15 bp, Homo sapiens
gcattcagtaacgta

SEQ ID NO: 986612 - DNA, 15 bp, Homo sapiens
cattcagtaacgtaa

SEQ ID NO: 986613 - DNA, 15 bp, Homo sapiens
attcagtaacgtaaa

SEQ ID NO: 986614 - DNA, 15 bp, Homo sapiens
ttcagtaacgtaaag

SEQ ID NO: 986615 - DNA, 15 bp, Homo sapiens
tcagtaacgtaaagg

SEQ ID NO: 986616 - DNA, 15 bp, Homo sapiens
cagtaacgtaaaggt

SEQ ID NO: 986617 - DNA, 15 bp, Homo sapiens
agtaacgtaaaggta

SEQ ID NO: 986618 - DNA, 15 bp, Homo sapiens
gtaacgtaaaggtaa

SEQ ID NO: 986619 - DNA, 15 bp, Homo sapiens
taacgtaaaggtaaa

SEQ ID NO: 986620 - DNA, 15 bp, Homo sapiens
aacgtaaaggtaaag

SEQ ID NO: 986621 - DNA, 15 bp, Homo sapiens
acgtaaaggtaaaga

SEQ ID NO: 986622 - DNA, 15 bp, Homo sapiens
cgtaaaggtaaagaa

SEQ ID NO: 986623 - DNA, 15 bp, Homo sapiens
gtaaaggtaaagaaa

SEQ ID NO: 986624 - DNA, 15 bp, Homo sapiens
taaaggtaaagaaaa

SEQ ID NO: 986625 - DNA, 15 bp, Homo sapiens
aaaggtaaagaaaaa

SEQ ID NO: 986626 - DNA, 15 bp, Homo sapiens
aaggtaaagaaaaaa

SEQ ID NO: 986627 - DNA, 15 bp, Homo sapiens
aggtaaagaaaaaaa

SEQ ID NO: 986628 - DNA, 15 bp, Homo sapiens
ggtaaagaaaaaaaa

SEQ ID NO: 986629 - DNA, 15 bp, Homo sapiens
gtaaagaaaaaaaaa

SEQ ID NO: 986630 - DNA, 15 bp, Homo sapiens
taaagaaaaaaaaag

SEQ ID NO: 986631 - DNA, 15 bp, Homo sapiens
aaagaaaaaaaaagt

SEQ ID NO: 986632 - DNA, 15 bp, Homo sapiens
aagaaaaaaaaagta

SEQ ID NO: 986633 - DNA, 15 bp, Homo sapiens
agaaaaaaaaagtag

SEQ ID NO: 986634 - DNA, 15 bp, Homo sapiens
gaaaaaaaaagtagc

SEQ ID NO: 986635 - DNA, 15 bp, Homo sapiens
aaaaaaaaagtagcc

SEQ ID NO: 986636 - DNA, 15 bp, Homo sapiens
aaaaaaaagtagcca

SEQ ID NO: 986637 - DNA, 15 bp, Homo sapiens
aaaaaaagtagccac

SEQ ID NO: 986638 - DNA, 15 bp, Homo sapiens
aaaaaagtagccacc

SEQ ID NO: 986639 - DNA, 15 bp, Homo sapiens
aaaaagtagccacct

SEQ ID NO: 986640 - DNA, 15 bp, Homo sapiens
aaaagtagccacctg

SEQ ID NO: 986641 - DNA, 15 bp, Homo sapiens
aaagtagccacctgt

SEQ ID NO: 986642 - DNA, 15 bp, Homo sapiens
aagtagccacctgtg

SEQ ID NO: 986643 - DNA, 15 bp, Homo sapiens
agtagccacctgtgg

SEQ ID NO: 986644 - DNA, 15 bp, Homo sapiens
gtagccacctgtggc

SEQ ID NO: 986645 - DNA, 15 bp, Homo sapiens
tagccacctgtggct

SEQ ID NO: 986646 - DNA, 15 bp, Homo sapiens
agccacctgtggctt

SEQ ID NO: 986647 - DNA, 15 bp, Homo sapiens
gccacctgtggcttt

SEQ ID NO: 986648 - DNA, 15 bp, Homo sapiens
ccacctgtggctttt

SEQ ID NO: 986649 - DNA, 15 bp, Homo sapiens
cacctgtggcttttt

SEQ ID NO: 986650 - DNA, 15 bp, Homo sapiens
acctgtggcttttta

SEQ ID NO: 986651 - DNA, 15 bp, Homo sapiens
cctgtggctttttat

SEQ ID NO: 986652 - DNA, 15 bp, Homo sapiens
ctgtggctttttatc

SEQ ID NO: 986653 - DNA, 15 bp, Homo sapiens
tgtggctttttatcc

SEQ ID NO: 986654 - DNA, 15 bp, Homo sapiens
gtggctttttatccc

SEQ ID NO: 986655 - DNA, 15 bp, Homo sapiens
tggctttttatcccc

SEQ ID NO: 986656 - DNA, 15 bp, Homo sapiens
ggctttttatcccca

SEQ ID NO: 986657 - DNA, 15 bp, Homo sapiens
gctttttatccccag

SEQ ID NO: 986658 - DNA, 15 bp, Homo sapiens
ctatatttgtcttcc

SEQ ID NO: 986659 - DNA, 15 bp, Homo sapiens
tatatttgtcttccg

SEQ ID NO: 986660 - DNA, 15 bp, Homo sapiens
atatttgtcttccga

SEQ ID NO: 986661 - DNA, 15 bp, Homo sapiens
tatttgtcttccgat

SEQ ID NO: 986662 - DNA, 15 bp, Homo sapiens
atttgtcttccgatc

SEQ ID NO: 986663 - DNA, 15 bp, Homo sapiens
tttgtcttccgatca

SEQ ID NO: 986664 - DNA, 15 bp, Homo sapiens
ttgtcttccgatcaa

SEQ ID NO: 986665 - DNA, 15 bp, Homo sapiens
tgtcttccgatcaac

SEQ ID NO: 986666 - DNA, 15 bp, Homo sapiens
gtcttccgatcaaca

SEQ ID NO: 986667 - DNA, 15 bp, Homo sapiens
tcttccgatcaacat

SEQ ID NO: 986668 - DNA, 15 bp, Homo sapiens
cttccgatcaacatt

SEQ ID NO: 986669 - DNA, 15 bp, Homo sapiens
ttccgatcaacattt

SEQ ID NO: 986670 - DNA, 15 bp, Homo sapiens
tccgatcaacattta

SEQ ID NO: 986671 - DNA, 15 bp, Homo sapiens
ccgatcaacatttat

SEQ ID NO: 986672 - DNA, 15 bp, Homo sapiens
cgatcaacatttatg

SEQ ID NO: 986673 - DNA, 15 bp, Homo sapiens
gatcaacatttatga

SEQ ID NO: 986674 - DNA, 15 bp, Homo sapiens
atcaacatttatgac

SEQ ID NO: 986675 - DNA, 15 bp, Homo sapiens
tcaacatttatgacc

SEQ ID NO: 986676 - DNA, 15 bp, Homo sapiens
caacatttatgacct

SEQ ID NO: 986677 - DNA, 15 bp, Homo sapiens
aacatttatgaccta

SEQ ID NO: 986678 - DNA, 15 bp, Homo sapiens
acatttatgacctaa

SEQ ID NO: 986679 - DNA, 15 bp, Homo sapiens
catttatgacctaag

SEQ ID NO: 986680 - DNA, 15 bp, Homo sapiens
atttatgacctaagt

SEQ ID NO: 986681 - DNA, 15 bp, Homo sapiens
tttatgacctaagtc

SEQ ID NO: 986682 - DNA, 15 bp, Homo sapiens
ttatgacctaagtca

SEQ ID NO: 986683 - DNA, 15 bp, Homo sapiens
tatgacctaagtcag

SEQ ID NO: 986684 - DNA, 15 bp, Homo sapiens
atgacctaagtcagg

SEQ ID NO: 986685 - DNA, 15 bp, Homo sapiens
tgacctaagtcaggt

SEQ ID NO: 986686 - DNA, 15 bp, Homo sapiens
gacctaagtcaggta

SEQ ID NO: 986687 - DNA, 15 bp, Homo sapiens
acctaagtcaggtaa

SEQ ID NO: 986688 - DNA, 15 bp, Homo sapiens
cctaagtcaggtaat

SEQ ID NO: 986689 - DNA, 15 bp, Homo sapiens
ctaagtcaggtaata

SEQ ID NO: 986690 - DNA, 15 bp, Homo sapiens
taagtcaggtaatat

SEQ ID NO: 986691 - DNA, 15 bp, Homo sapiens
aagtcaggtaatata

SEQ ID NO: 986692 - DNA, 15 bp, Homo sapiens
agtcaggtaatatac

SEQ ID NO: 986693 - DNA, 15 bp, Homo sapiens
gtcaggtaatatacc

SEQ ID NO: 986694 - DNA, 15 bp, Homo sapiens
tcaggtaatatacct

SEQ ID NO: 986695 - DNA, 15 bp, Homo sapiens
caggtaatatacctg

SEQ ID NO: 986696 - DNA, 15 bp, Homo sapiens
aggtaatatacctgg

SEQ ID NO: 986697 - DNA, 15 bp, Homo sapiens
ggtaatatacctggt

SEQ ID NO: 986698 - DNA, 15 bp, Homo sapiens
gtaatatacctggtt

SEQ ID NO: 986699 - DNA, 15 bp, Homo sapiens
taatatacctggttt

SEQ ID NO: 986700 - DNA, 15 bp, Homo sapiens
aatatacctggttta

SEQ ID NO: 986701 - DNA, 15 bp, Homo sapiens
atatacctggtttac

SEQ ID NO: 986702 - DNA, 15 bp, Homo sapiens
tatacctggtttact

SEQ ID NO: 986703 - DNA, 15 bp, Homo sapiens
atacctggtttactt

SEQ ID NO: 986704 - DNA, 15 bp, Homo sapiens
tacctggtttacttc

SEQ ID NO: 986705 - DNA, 15 bp, Homo sapiens
acctggtttacttct

SEQ ID NO: 986706 - DNA, 15 bp, Homo sapiens
cctggtttacttctt

SEQ ID NO: 986707 - DNA, 15 bp, Homo sapiens
ctggtttacttcttt

SEQ ID NO: 986708 - DNA, 15 bp, Homo sapiens
tggtttacttcttta

SEQ ID NO: 986709 - DNA, 15 bp, Homo sapiens
ggtttacttctttag

SEQ ID NO: 986710 - DNA, 15 bp, Homo sapiens
gtttacttctttagc

SEQ ID NO: 986711 - DNA, 15 bp, Homo sapiens
tttacttctttagca

SEQ ID NO: 986712 - DNA, 15 bp, Homo sapiens
ttacttctttagcat

SEQ ID NO: 986713 - DNA, 15 bp, Homo sapiens
tacttctttagcatt

SEQ ID NO: 986714 - DNA, 15 bp, Homo sapiens
acttctttagcattt

SEQ ID NO: 986715 - DNA, 15 bp, Homo sapiens
cttctttagcatttt

SEQ ID NO: 986716 - DNA, 15 bp, Homo sapiens
ttctttagcattttt

SEQ ID NO: 986717 - DNA, 15 bp, Homo sapiens
tctttagcattttta

SEQ ID NO: 986718 - DNA, 15 bp, Homo sapiens
ctttagcatttttat

SEQ ID NO: 986719 - DNA, 15 bp, Homo sapiens
tttagcatttttatg

SEQ ID NO: 986720 - DNA, 15 bp, Homo sapiens
ttagcatttttatgc

SEQ ID NO: 986721 - DNA, 15 bp, Homo sapiens
tagcatttttatgca

SEQ ID NO: 986722 - DNA, 15 bp, Homo sapiens
agcatttttatgcag

SEQ ID NO: 986723 - DNA, 15 bp, Homo sapiens
gcatttttatgcaga

SEQ ID NO: 986724 - DNA, 15 bp, Homo sapiens
catttttatgcagac

SEQ ID NO: 986725 - DNA, 15 bp, Homo sapiens
atttttatgcagaca

SEQ ID NO: 986726 - DNA, 15 bp, Homo sapiens
tttttatgcagacag

SEQ ID NO: 986727 - DNA, 15 bp, Homo sapiens
ttttatgcagacagt

SEQ ID NO: 986728 - DNA, 15 bp, Homo sapiens
tttatgcagacagtc

SEQ ID NO: 986729 - DNA, 15 bp, Homo sapiens
ttatgcagacagtct

SEQ ID NO: 986730 - DNA, 15 bp, Homo sapiens
tatgcagacagtctg

SEQ ID NO: 986731 - DNA, 15 bp, Homo sapiens
atgcagacagtctgt

SEQ ID NO: 986732 - DNA, 15 bp, Homo sapiens
tgcagacagtctgtt

SEQ ID NO: 986733 - DNA, 15 bp, Homo sapiens
gcagacagtctgtta

SEQ ID NO: 986734 - DNA, 15 bp, Homo sapiens
cagacagtctgttat

SEQ ID NO: 986735 - DNA, 15 bp, Homo sapiens
agacagtctgttatg

SEQ ID NO: 986736 - DNA, 15 bp, Homo sapiens
gacagtctgttatgc

SEQ ID NO: 986737 - DNA, 15 bp, Homo sapiens
acagtctgttatgca

SEQ ID NO: 986738 - DNA, 15 bp, Homo sapiens
cagtctgttatgcac

SEQ ID NO: 986739 - DNA, 15 bp, Homo sapiens
agtctgttatgcact

SEQ ID NO: 986740 - DNA, 15 bp, Homo sapiens
gtctgttatgcactg

SEQ ID NO: 986741 - DNA, 15 bp, Homo sapiens
tctgttatgcactgt

SEQ ID NO: 986742 - DNA, 15 bp, Homo sapiens
ctgttatgcactgtg

SEQ ID NO: 986743 - DNA, 15 bp, Homo sapiens
tgttatgcactgtgg

SEQ ID NO: 986744 - DNA, 15 bp, Homo sapiens
gttatgcactgtggt

SEQ ID NO: 986745 - DNA, 15 bp, Homo sapiens
ttatgcactgtggtt

SEQ ID NO: 986746 - DNA, 15 bp, Homo sapiens
tatgcactgtggttt

SEQ ID NO: 986747 - DNA, 15 bp, Homo sapiens
atgcactgtggtttc

SEQ ID NO: 986748 - DNA, 15 bp, Homo sapiens
tgcactgtggtttca

SEQ ID NO: 986749 - DNA, 15 bp, Homo sapiens
gcactgtggtttcag

SEQ ID NO: 986750 - DNA, 15 bp, Homo sapiens
cactgtggtttcaga

SEQ ID NO: 986751 - DNA, 15 bp, Homo sapiens
actgtggtttcagat

SEQ ID NO: 986752 - DNA, 15 bp, Homo sapiens
ctgtggtttcagatg

SEQ ID NO: 986753 - DNA, 15 bp, Homo sapiens
tgtggtttcagatgt

SEQ ID NO: 986754 - DNA, 15 bp, Homo sapiens
gtggtttcagatgtg

SEQ ID NO: 986755 - DNA, 15 bp, Homo sapiens
tggtttcagatgtgc

SEQ ID NO: 986756 - DNA, 15 bp, Homo sapiens
ggtttcagatgtgca

SEQ ID NO: 986757 - DNA, 15 bp, Homo sapiens
gtttcagatgtgcaa

SEQ ID NO: 986758 - DNA, 15 bp, Homo sapiens
tttcagatgtgcaat

SEQ ID NO: 986759 - DNA, 15 bp, Homo sapiens
ttcagatgtgcaata

SEQ ID NO: 986760 - DNA, 15 bp, Homo sapiens
ttcagccctcaagac

SEQ ID NO: 986761 - DNA, 15 bp, Homo sapiens
tcagccctcaagact

SEQ ID NO: 986762 - DNA, 15 bp, Homo sapiens
cagccctcaagacta

SEQ ID NO: 986763 - DNA, 15 bp, Homo sapiens
agccctcaagactag

SEQ ID NO: 986764 - DNA, 15 bp, Homo sapiens
gccctcaagactaga

SEQ ID NO: 986765 - DNA, 15 bp, Homo sapiens
ccctcaagactagac

SEQ ID NO: 986766 - DNA, 15 bp, Homo sapiens
cctcaagactagacg

SEQ ID NO: 986767 - DNA, 15 bp, Homo sapiens
ctcaagactagacgc

SEQ ID NO: 986768 - DNA, 15 bp, Homo sapiens
tcaagactagacgca

SEQ ID NO: 986769 - DNA, 15 bp, Homo sapiens
caagactagacgcac

SEQ ID NO: 986770 - DNA, 15 bp, Homo sapiens
aagactagacgcact

SEQ ID NO: 986771 - DNA, 15 bp, Homo sapiens
agactagacgcactg

SEQ ID NO: 986772 - DNA, 15 bp, Homo sapiens
gactagacgcactgt

SEQ ID NO: 986773 - DNA, 15 bp, Homo sapiens
actagacgcactgta

SEQ ID NO: 986774 - DNA, 15 bp, Homo sapiens
ctagacgcactgtat

SEQ ID NO: 986775 - DNA, 15 bp, Homo sapiens
tagacgcactgtatt

SEQ ID NO: 986776 - DNA, 15 bp, Homo sapiens
agacgcactgtattt

SEQ ID NO: 986777 - DNA, 15 bp, Homo sapiens
gacgcactgtatttt

SEQ ID NO: 986778 - DNA, 15 bp, Homo sapiens
acgcactgtattttg

SEQ ID NO: 986779 - DNA, 15 bp, Homo sapiens
cgcactgtattttgt

SEQ ID NO: 986780 - DNA, 15 bp, Homo sapiens
gcactgtattttgtt

SEQ ID NO: 986781 - DNA, 15 bp, Homo sapiens
cactgtattttgtta

SEQ ID NO: 986782 - DNA, 15 bp, Homo sapiens
actgtattttgttaa

SEQ ID NO: 986783 - DNA, 15 bp, Homo sapiens
ctgtattttgttaac

SEQ ID NO: 986784 - DNA, 15 bp, Homo sapiens
tgtattttgttaaca

SEQ ID NO: 986785 - DNA, 15 bp, Homo sapiens
gtattttgttaacaa

SEQ ID NO: 986786 - DNA, 15 bp, Homo sapiens
tattttgttaacaaa

SEQ ID NO: 986787 - DNA, 15 bp, Homo sapiens
attttgttaacaaaa

SEQ ID NO: 986788 - DNA, 15 bp, Homo sapiens
ttttgttaacaaaac

SEQ ID NO: 986789 - DNA, 15 bp, Homo sapiens
tttgttaacaaaaca

SEQ ID NO: 986790 - DNA, 15 bp, Homo sapiens
ttgttaacaaaacaa

SEQ ID NO: 986791 - DNA, 15 bp, Homo sapiens
tgttaacaaaacaag

SEQ ID NO: 986792 - DNA, 15 bp, Homo sapiens
gttaacaaaacaagg

SEQ ID NO: 986793 - DNA, 15 bp, Homo sapiens
ttaacaaaacaaggc

SEQ ID NO: 986794 - DNA, 15 bp, Homo sapiens
taacaaaacaaggcc

SEQ ID NO: 986795 - DNA, 15 bp, Homo sapiens
aacaaaacaaggcca

SEQ ID NO: 986796 - DNA, 15 bp, Homo sapiens
acaaaacaaggccat

SEQ ID NO: 986797 - DNA, 15 bp, Homo sapiens
caaaacaaggccata

SEQ ID NO: 986798 - DNA, 15 bp, Homo sapiens
aaaacaaggccatat

SEQ ID NO: 986799 - DNA, 15 bp, Homo sapiens
aaacaaggccatata

SEQ ID NO: 986800 - DNA, 15 bp, Homo sapiens
aacaaggccatatac

SEQ ID NO: 986801 - DNA, 15 bp, Homo sapiens
acaaggccatatacc

SEQ ID NO: 986802 - DNA, 15 bp, Homo sapiens
caaggccatataccc

SEQ ID NO: 986803 - DNA, 15 bp, Homo sapiens
aaggccatataccca

SEQ ID NO: 986804 - DNA, 15 bp, Homo sapiens
aggccatatacccag

SEQ ID NO: 986805 - DNA, 15 bp, Homo sapiens
ggccatatacccagg

SEQ ID NO: 986806 - DNA, 15 bp, Homo sapiens
gccatatacccaggc

SEQ ID NO: 986807 - DNA, 15 bp, Homo sapiens
ccatatacccaggcg

SEQ ID NO: 986808 - DNA, 15 bp, Homo sapiens
catatacccaggcgt

SEQ ID NO: 986809 - DNA, 15 bp, Homo sapiens
atatacccaggcgtc

SEQ ID NO: 986810 - DNA, 15 bp, Homo sapiens
tatacccaggcgtca

SEQ ID NO: 986811 - DNA, 15 bp, Homo sapiens
atacccaggcgtcag

SEQ ID NO: 986812 - DNA, 15 bp, Homo sapiens
tacccaggcgtcagt

SEQ ID NO: 986813 - DNA, 15 bp, Homo sapiens
acccaggcgtcagtg

SEQ ID NO: 986814 - DNA, 15 bp, Homo sapiens
cccaggcgtcagtgg

SEQ ID NO: 986815 - DNA, 15 bp, Homo sapiens
ccaggcgtcagtggc

SEQ ID NO: 986816 - DNA, 15 bp, Homo sapiens
caggcgtcagtggct

SEQ ID NO: 986817 - DNA, 15 bp, Homo sapiens
aggcgtcagtggctg

SEQ ID NO: 986818 - DNA, 15 bp, Homo sapiens
ggcgtcagtggctgt

SEQ ID NO: 986819 - DNA, 15 bp, Homo sapiens
gcgtcagtggctgtc

SEQ ID NO: 986820 - DNA, 15 bp, Homo sapiens
cgtcagtggctgtcc

SEQ ID NO: 986821 - DNA, 15 bp, Homo sapiens
gtcagtggctgtccc

SEQ ID NO: 986822 - DNA, 15 bp, Homo sapiens
tcagtggctgtcccc

SEQ ID NO: 986823 - DNA, 15 bp, Homo sapiens
cagtggctgtcccct

SEQ ID NO: 986824 - DNA, 15 bp, Homo sapiens
agtggctgtcccctc

SEQ ID NO: 986825 - DNA, 15 bp, Homo sapiens
gtggctgtcccctct

SEQ ID NO: 986826 - DNA, 15 bp, Homo sapiens
tggctgtcccctctg

SEQ ID NO: 986827 - DNA, 15 bp, Homo sapiens
ggctgtcccctctgg

SEQ ID NO: 986828 - DNA, 15 bp, Homo sapiens
gctgtcccctctggc

SEQ ID NO: 986829 - DNA, 15 bp, Homo sapiens
ctgtcccctctggca

SEQ ID NO: 986830 - DNA, 15 bp, Homo sapiens
tgtcccctctggcag

SEQ ID NO: 986831 - DNA, 15 bp, Homo sapiens
gtcccctctggcagt

SEQ ID NO: 986832 - DNA, 15 bp, Homo sapiens
tcccctctggcagtc

SEQ ID NO: 986833 - DNA, 15 bp, Homo sapiens
cccctctggcagtct

SEQ ID NO: 986834 - DNA, 15 bp, Homo sapiens
ccctctggcagtctc

SEQ ID NO: 986835 - DNA, 15 bp, Homo sapiens
cctctggcagtctct

SEQ ID NO: 986836 - DNA, 15 bp, Homo sapiens
ctctggcagtctctc

SEQ ID NO: 986837 - DNA, 15 bp, Homo sapiens
tctggcagtctctct

SEQ ID NO: 986838 - DNA, 15 bp, Homo sapiens
ctggcagtctctctc

SEQ ID NO: 986839 - DNA, 15 bp, Homo sapiens
tggcagtctctctcc

SEQ ID NO: 986840 - DNA, 15 bp, Homo sapiens
ggcagtctctctcca

SEQ ID NO: 986841 - DNA, 15 bp, Homo sapiens
gcagtctctctccac

SEQ ID NO: 986842 - DNA, 15 bp, Homo sapiens
cagtctctctccacc

SEQ ID NO: 986843 - DNA, 15 bp, Homo sapiens
agtctctctccaccc

SEQ ID NO: 986844 - DNA, 15 bp, Homo sapiens
gtctctctccaccct

SEQ ID NO: 986845 - DNA, 15 bp, Homo sapiens
tctctctccaccctg

SEQ ID NO: 986846 - DNA, 15 bp, Homo sapiens
ctctctccaccctgt

SEQ ID NO: 986847 - DNA, 15 bp, Homo sapiens
tctctccaccctgtt

SEQ ID NO: 986848 - DNA, 15 bp, Homo sapiens
ctctccaccctgtta

SEQ ID NO: 986849 - DNA, 15 bp, Homo sapiens
tctccaccctgttag

SEQ ID NO: 986850 - DNA, 15 bp, Homo sapiens
ctccaccctgttaga

SEQ ID NO: 986851 - DNA, 15 bp, Homo sapiens
tccaccctgttagaa

SEQ ID NO: 986852 - DNA, 15 bp, Homo sapiens
ccaccctgttagaaa

SEQ ID NO: 986853 - DNA, 15 bp, Homo sapiens
caccctgttagaaac

SEQ ID NO: 986854 - DNA, 15 bp, Homo sapiens
accctgttagaaact

SEQ ID NO: 986855 - DNA, 15 bp, Homo sapiens
ccctgttagaaactc

SEQ ID NO: 986856 - DNA, 15 bp, Homo sapiens
cctgttagaaactct

SEQ ID NO: 986857 - DNA, 15 bp, Homo sapiens
ctgttagaaactctg

SEQ ID NO: 986858 - DNA, 15 bp, Homo sapiens
tgttagaaactctga

SEQ ID NO: 986859 - DNA, 15 bp, Homo sapiens
gttagaaactctgaa

SEQ ID NO: 986860 - DNA, 15 bp, Homo sapiens
ttagaaactctgaaa

SEQ ID NO: 986861 - DNA, 15 bp, Homo sapiens
tagaaactctgaaag

SEQ ID NO: 986862 - DNA, 15 bp, Homo sapiens
agaaactctgaaaga

SEQ ID NO: 986863 - DNA, 15 bp, Homo sapiens
gaaactctgaaagat

SEQ ID NO: 986864 - DNA, 15 bp, Homo sapiens
aaactctgaaagatt

SEQ ID NO: 986865 - DNA, 15 bp, Homo sapiens
aactctgaaagattc

SEQ ID NO: 986866 - DNA, 15 bp, Homo sapiens
actctgaaagattca

SEQ ID NO: 986867 - DNA, 15 bp, Homo sapiens
ctctgaaagattcaa

SEQ ID NO: 986868 - DNA, 15 bp, Homo sapiens
tctgaaagattcaaa

SEQ ID NO: 986869 - DNA, 15 bp, Homo sapiens
ctgaaagattcaaag

SEQ ID NO: 986870 - DNA, 15 bp, Homo sapiens
tgaaagattcaaagg

SEQ ID NO: 986871 - DNA, 15 bp, Homo sapiens
gaaagattcaaaggg

SEQ ID NO: 986872 - DNA, 15 bp, Homo sapiens
aaagattcaaagggc

SEQ ID NO: 986873 - DNA, 15 bp, Homo sapiens
aagattcaaagggcg

SEQ ID NO: 986874 - DNA, 15 bp, Homo sapiens
agattcaaagggcga

SEQ ID NO: 986875 - DNA, 15 bp, Homo sapiens
gattcaaagggcgag

SEQ ID NO: 986876 - DNA, 15 bp, Homo sapiens
attcaaagggcgagg

SEQ ID NO: 986877 - DNA, 15 bp, Homo sapiens
ttcaaagggcgagga

SEQ ID NO: 986878 - DNA, 15 bp, Homo sapiens
tcaaagggcgaggag

SEQ ID NO: 986879 - DNA, 15 bp, Homo sapiens
caaagggcgaggaga

SEQ ID NO: 986880 - DNA, 15 bp, Homo sapiens
aaagggcgaggagat

SEQ ID NO: 986881 - DNA, 15 bp, Homo sapiens
aagggcgaggagatt

SEQ ID NO: 986882 - DNA, 15 bp, Homo sapiens
agggcgaggagatta

SEQ ID NO: 986883 - DNA, 15 bp, Homo sapiens
gggcgaggagattaa

SEQ ID NO: 986884 - DNA, 15 bp, Homo sapiens
ggcgaggagattaag

SEQ ID NO: 986885 - DNA, 15 bp, Homo sapiens
gcgaggagattaagg

SEQ ID NO: 986886 - DNA, 15 bp, Homo sapiens
cgaggagattaaggg

SEQ ID NO: 986887 - DNA, 15 bp, Homo sapiens
gaggagattaaggga

SEQ ID NO: 986888 - DNA, 15 bp, Homo sapiens
aggagattaagggac

SEQ ID NO: 986889 - DNA, 15 bp, Homo sapiens
ggagattaagggact

SEQ ID NO: 986890 - DNA, 15 bp, Homo sapiens
gagattaagggactc

SEQ ID NO: 986891 - DNA, 15 bp, Homo sapiens
agattaagggactca

SEQ ID NO: 986892 - DNA, 15 bp, Homo sapiens
gattaagggactcaa

SEQ ID NO: 986893 - DNA, 15 bp, Homo sapiens
attaagggactcaaa

SEQ ID NO: 986894 - DNA, 15 bp, Homo sapiens
ttaagggactcaaag

SEQ ID NO: 986895 - DNA, 15 bp, Homo sapiens
taagggactcaaaga

SEQ ID NO: 986896 - DNA, 15 bp, Homo sapiens
aagggactcaaagaa

SEQ ID NO: 986897 - DNA, 15 bp, Homo sapiens
agggactcaaagaat

SEQ ID NO: 986898 - DNA, 15 bp, Homo sapiens
gggactcaaagaatt

SEQ ID NO: 986899 - DNA, 15 bp, Homo sapiens
ggactcaaagaattt

SEQ ID NO: 986900 - DNA, 15 bp, Homo sapiens
gactcaaagaattta

SEQ ID NO: 986901 - DNA, 15 bp, Homo sapiens
actcaaagaatttaa

SEQ ID NO: 986902 - DNA, 15 bp, Homo sapiens
ctcaaagaatttaaa

SEQ ID NO: 986903 - DNA, 15 bp, Homo sapiens
tcaaagaatttaaac

SEQ ID NO: 986904 - DNA, 15 bp, Homo sapiens
caaagaatttaaact

SEQ ID NO: 986905 - DNA, 15 bp, Homo sapiens
aaagaatttaaactc

SEQ ID NO: 986906 - DNA, 15 bp, Homo sapiens
aagaatttaaactca

SEQ ID NO: 986907 - DNA, 15 bp, Homo sapiens
agaatttaaactcaa

SEQ ID NO: 986908 - DNA, 15 bp, Homo sapiens
gaatttaaactcaag

SEQ ID NO: 986909 - DNA, 15 bp, Homo sapiens
aatttaaactcaagt

SEQ ID NO: 986910 - DNA, 15 bp, Homo sapiens
atttaaactcaagtt

SEQ ID NO: 986911 - DNA, 15 bp, Homo sapiens
tttaaactcaagttt

SEQ ID NO: 986912 - DNA, 15 bp, Homo sapiens
ttaaactcaagtttg

SEQ ID NO: 986913 - DNA, 15 bp, Homo sapiens
taaactcaagtttgg

SEQ ID NO: 986914 - DNA, 15 bp, Homo sapiens
aaactcaagtttgga

SEQ ID NO: 986915 - DNA, 15 bp, Homo sapiens
aactcaagtttggat

SEQ ID NO: 986916 - DNA, 15 bp, Homo sapiens
actcaagtttggata

SEQ ID NO: 986917 - DNA, 15 bp, Homo sapiens
ctcaagtttggatag

SEQ ID NO: 986918 - DNA, 15 bp, Homo sapiens
tcaagtttggatagt

SEQ ID NO: 986919 - DNA, 15 bp, Homo sapiens
caagtttggatagtg

SEQ ID NO: 986920 - DNA, 15 bp, Homo sapiens
aagtttggatagtgc

SEQ ID NO: 986921 - DNA, 15 bp, Homo sapiens
agtttggatagtgct

SEQ ID NO: 986922 - DNA, 15 bp, Homo sapiens
gtttggatagtgctt

SEQ ID NO: 986923 - DNA, 15 bp, Homo sapiens
tttggatagtgcttt

SEQ ID NO: 986924 - DNA, 15 bp, Homo sapiens
ttggatagtgcttta

SEQ ID NO: 986925 - DNA, 15 bp, Homo sapiens
tggatagtgctttat

SEQ ID NO: 986926 - DNA, 15 bp, Homo sapiens
ggatagtgctttata

SEQ ID NO: 986927 - DNA, 15 bp, Homo sapiens
gatagtgctttatag

SEQ ID NO: 986928 - DNA, 15 bp, Homo sapiens
atagtgctttatagc

SEQ ID NO: 986929 - DNA, 15 bp, Homo sapiens
tagtgctttatagca

SEQ ID NO: 986930 - DNA, 15 bp, Homo sapiens
agtgctttatagcac

SEQ ID NO: 986931 - DNA, 15 bp, Homo sapiens
gtgctttatagcact

SEQ ID NO: 986932 - DNA, 15 bp, Homo sapiens
tgctttatagcactt

SEQ ID NO: 986933 - DNA, 15 bp, Homo sapiens
gctttatagcacttt

SEQ ID NO: 986934 - DNA, 15 bp, Homo sapiens
ctttatagcactttt

SEQ ID NO: 986935 - DNA, 15 bp, Homo sapiens
tttatagcacttttc

SEQ ID NO: 986936 - DNA, 15 bp, Homo sapiens
ttatagcacttttca

SEQ ID NO: 986937 - DNA, 15 bp, Homo sapiens
tatagcacttttcac

SEQ ID NO: 986938 - DNA, 15 bp, Homo sapiens
atagcacttttcacc

SEQ ID NO: 986939 - DNA, 15 bp, Homo sapiens
tagcacttttcaccg

SEQ ID NO: 986940 - DNA, 15 bp, Homo sapiens
agcacttttcaccgt

SEQ ID NO: 986941 - DNA, 15 bp, Homo sapiens
gcacttttcaccgta

SEQ ID NO: 986942 - DNA, 15 bp, Homo sapiens
cacttttcaccgtat

SEQ ID NO: 986943 - DNA, 15 bp, Homo sapiens
acttttcaccgtatt

SEQ ID NO: 986944 - DNA, 15 bp, Homo sapiens
cttttcaccgtatta

SEQ ID NO: 986945 - DNA, 15 bp, Homo sapiens
ttttcaccgtattat

SEQ ID NO: 986946 - DNA, 15 bp, Homo sapiens
tttcaccgtattatc

SEQ ID NO: 986947 - DNA, 15 bp, Homo sapiens
ttcaccgtattatct

SEQ ID NO: 986948 - DNA, 15 bp, Homo sapiens
tcaccgtattatctt

SEQ ID NO: 986949 - DNA, 15 bp, Homo sapiens
caccgtattatctta

SEQ ID NO: 986950 - DNA, 15 bp, Homo sapiens
accgtattatcttat

SEQ ID NO: 986951 - DNA, 15 bp, Homo sapiens
ccgtattatcttatc

SEQ ID NO: 986952 - DNA, 15 bp, Homo sapiens
cgtattatcttatct

SEQ ID NO: 986953 - DNA, 15 bp, Homo sapiens
gtattatcttatctc

SEQ ID NO: 986954 - DNA, 15 bp, Homo sapiens
tattatcttatctcc

SEQ ID NO: 986955 - DNA, 15 bp, Homo sapiens
attatcttatctcct

SEQ ID NO: 986956 - DNA, 15 bp, Homo sapiens
ttatcttatctcctc

SEQ ID NO: 986957 - DNA, 15 bp, Homo sapiens
tatcttatctcctct

SEQ ID NO: 986958 - DNA, 15 bp, Homo sapiens
atcttatctcctctg

SEQ ID NO: 986959 - DNA, 15 bp, Homo sapiens
tcttatctcctctgt

SEQ ID NO: 986960 - DNA, 15 bp, Homo sapiens
cttatctcctctgta

SEQ ID NO: 986961 - DNA, 15 bp, Homo sapiens
ttatctcctctgtag

SEQ ID NO: 986962 - DNA, 15 bp, Homo sapiens
tatctcctctgtagg

SEQ ID NO: 986963 - DNA, 15 bp, Homo sapiens
atctcctctgtaggg

SEQ ID NO: 986964 - DNA, 15 bp, Homo sapiens
tctcctctgtagggc

SEQ ID NO: 986965 - DNA, 15 bp, Homo sapiens
ctcctctgtagggca

SEQ ID NO: 986966 - DNA, 15 bp, Homo sapiens
tcctctgtagggcag

SEQ ID NO: 986967 - DNA, 15 bp, Homo sapiens
cctctgtagggcagc

SEQ ID NO: 986968 - DNA, 15 bp, Homo sapiens
ctctgtagggcagca

SEQ ID NO: 986969 - DNA, 15 bp, Homo sapiens
tctgtagggcagcag

SEQ ID NO: 986970 - DNA, 15 bp, Homo sapiens
ctgtagggcagcagc

SEQ ID NO: 986971 - DNA, 15 bp, Homo sapiens
tgtagggcagcagcc

SEQ ID NO: 986972 - DNA, 15 bp, Homo sapiens
gtagggcagcagccg

SEQ ID NO: 986973 - DNA, 15 bp, Homo sapiens
tagggcagcagccgg

SEQ ID NO: 986974 - DNA, 15 bp, Homo sapiens
agggcagcagccggc

SEQ ID NO: 986975 - DNA, 15 bp, Homo sapiens
gggcagcagccggcc

SEQ ID NO: 986976 - DNA, 15 bp, Homo sapiens
ggcagcagccggcct

SEQ ID NO: 986977 - DNA, 15 bp, Homo sapiens
gcagcagccggcctc

SEQ ID NO: 986978 - DNA, 15 bp, Homo sapiens
cagcagccggcctct

SEQ ID NO: 986979 - DNA, 15 bp, Homo sapiens
agcagccggcctctt

SEQ ID NO: 986980 - DNA, 15 bp, Homo sapiens
gcagccggcctctta

SEQ ID NO: 986981 - DNA, 15 bp, Homo sapiens
cagccggcctcttaa

SEQ ID NO: 986982 - DNA, 15 bp, Homo sapiens
agccggcctcttaac

SEQ ID NO: 986983 - DNA, 15 bp, Homo sapiens
gccggcctcttaaca

SEQ ID NO: 986984 - DNA, 15 bp, Homo sapiens
ccggcctcttaacag

SEQ ID NO: 986985 - DNA, 15 bp, Homo sapiens
cggcctcttaacaga

SEQ ID NO: 986986 - DNA, 15 bp, Homo sapiens
ggcctcttaacagat

SEQ ID NO: 986987 - DNA, 15 bp, Homo sapiens
gcctcttaacagatg

SEQ ID NO: 986988 - DNA, 15 bp, Homo sapiens
cctcttaacagatga

SEQ ID NO: 986989 - DNA, 15 bp, Homo sapiens
ctcttaacagatgag

SEQ ID NO: 986990 - DNA, 15 bp, Homo sapiens
tcttaacagatgagg

SEQ ID NO: 986991 - DNA, 15 bp, Homo sapiens
cttaacagatgagga

SEQ ID NO: 986992 - DNA, 15 bp, Homo sapiens
ttaacagatgaggac

SEQ ID NO: 986993 - DNA, 15 bp, Homo sapiens
taacagatgaggaca

SEQ ID NO: 986994 - DNA, 15 bp, Homo sapiens
aacagatgaggacat

SEQ ID NO: 986995 - DNA, 15 bp, Homo sapiens
acagatgaggacatt

SEQ ID NO: 986996 - DNA, 15 bp, Homo sapiens
cagatgaggacattt

SEQ ID NO: 986997 - DNA, 15 bp, Homo sapiens
agatgaggacatttc

SEQ ID NO: 986998 - DNA, 15 bp, Homo sapiens
gatgaggacatttca

SEQ ID NO: 986999 - DNA, 15 bp, Homo sapiens
atgaggacatttcag

SEQ ID NO: 987000 - DNA, 15 bp, Homo sapiens
tgaggacatttcagc

SEQ ID NO: 987001 - DNA, 15 bp, Homo sapiens
gaggacatttcagca

SEQ ID NO: 987002 - DNA, 15 bp, Homo sapiens
aggacatttcagcaa

SEQ ID NO: 987003 - DNA, 15 bp, Homo sapiens
ggacatttcagcaaa

SEQ ID NO: 987004 - DNA, 15 bp, Homo sapiens
gacatttcagcaaag

SEQ ID NO: 987005 - DNA, 15 bp, Homo sapiens
acatttcagcaaagt

SEQ ID NO: 987006 - DNA, 15 bp, Homo sapiens
catttcagcaaagtt

SEQ ID NO: 987007 - DNA, 15 bp, Homo sapiens
atttcagcaaagttc

SEQ ID NO: 987008 - DNA, 15 bp, Homo sapiens
tttcagcaaagttca

SEQ ID NO: 987009 - DNA, 15 bp, Homo sapiens
ttcagcaaagttcag

SEQ ID NO: 987010 - DNA, 15 bp, Homo sapiens
tcagcaaagttcaga

SEQ ID NO: 987011 - DNA, 15 bp, Homo sapiens
cagcaaagttcagag

SEQ ID NO: 987012 - DNA, 15 bp, Homo sapiens
agcaaagttcagaga

SEQ ID NO: 987013 - DNA, 15 bp, Homo sapiens
gcaaagttcagagag

SEQ ID NO: 987014 - DNA, 15 bp, Homo sapiens
caaagttcagagagg

SEQ ID NO: 987015 - DNA, 15 bp, Homo sapiens
aaagttcagagagga

SEQ ID NO: 987016 - DNA, 15 bp, Homo sapiens
aagttcagagaggaa

SEQ ID NO: 987017 - DNA, 15 bp, Homo sapiens
agttcagagaggaat

SEQ ID NO: 987018 - DNA, 15 bp, Homo sapiens
gttcagagaggaatc

SEQ ID NO: 987019 - DNA, 15 bp, Homo sapiens
ttcagagaggaatcg

SEQ ID NO: 987020 - DNA, 15 bp, Homo sapiens
tcagagaggaatcgg

SEQ ID NO: 987021 - DNA, 15 bp, Homo sapiens
cagagaggaatcggc

SEQ ID NO: 987022 - DNA, 15 bp, Homo sapiens
agagaggaatcggca

SEQ ID NO: 987023 - DNA, 15 bp, Homo sapiens
gagaggaatcggcag

SEQ ID NO: 987024 - DNA, 15 bp, Homo sapiens
agaggaatcggcagt

SEQ ID NO: 987025 - DNA, 15 bp, Homo sapiens
gaggaatcggcagtt

SEQ ID NO: 987026 - DNA, 15 bp, Homo sapiens
aggaatcggcagttt

SEQ ID NO: 987027 - DNA, 15 bp, Homo sapiens
ggaatcggcagtttg

SEQ ID NO: 987028 - DNA, 15 bp, Homo sapiens
gaatcggcagtttgg

SEQ ID NO: 987029 - DNA, 15 bp, Homo sapiens
aatcggcagtttggg

SEQ ID NO: 987030 - DNA, 15 bp, Homo sapiens
atcggcagtttgggc

SEQ ID NO: 987031 - DNA, 15 bp, Homo sapiens
tcggcagtttgggcc

SEQ ID NO: 987032 - DNA, 15 bp, Homo sapiens
cggcagtttgggcct

SEQ ID NO: 987033 - DNA, 15 bp, Homo sapiens
ggcagtttgggcctg

SEQ ID NO: 987034 - DNA, 15 bp, Homo sapiens
gcagtttgggcctga

SEQ ID NO: 987035 - DNA, 15 bp, Homo sapiens
cagtttgggcctgac

SEQ ID NO: 987036 - DNA, 15 bp, Homo sapiens
agtttgggcctgacc

SEQ ID NO: 987037 - DNA, 15 bp, Homo sapiens
gtttgggcctgacca

SEQ ID NO: 987038 - DNA, 15 bp, Homo sapiens
tttgggcctgaccaa

SEQ ID NO: 987039 - DNA, 15 bp, Homo sapiens
ttgggcctgaccaaa

SEQ ID NO: 987040 - DNA, 15 bp, Homo sapiens
tgggcctgaccaaaa

SEQ ID NO: 987041 - DNA, 15 bp, Homo sapiens
gggcctgaccaaaaa

SEQ ID NO: 987042 - DNA, 15 bp, Homo sapiens
ggcctgaccaaaaaa

SEQ ID NO: 987043 - DNA, 15 bp, Homo sapiens
gcctgaccaaaaaaa

SEQ ID NO: 987044 - DNA, 15 bp, Homo sapiens
cctgaccaaaaaaaa

SEQ ID NO: 987045 - DNA, 15 bp, Homo sapiens
ctgaccaaaaaaaaa

SEQ ID NO: 987046 - DNA, 15 bp, Homo sapiens
tgaccaaaaaaaaaa

SEQ ID NO: 987047 - DNA, 15 bp, Homo sapiens
gaccaaaaaaaaaaa

SEQ ID NO: 987048 - DNA, 15 bp, Homo sapiens
accaaaaaaaaaaaa

SEQ ID NO: 987049 - DNA, 15 bp, Homo sapiens
ccaaaaaaaaaaaaa

SEQ ID NO: 987050 - DNA, 15 bp, Homo sapiens
caaaaaaaaaaaaaa

SEQ ID NO: 987051 - DNA, 15 bp, Homo sapiens
aaaaaaaaaaaaagc

SEQ ID NO: 987052 - DNA, 15 bp, Homo sapiens
aaaaaaaaaaaagct

SEQ ID NO: 987053 - DNA, 15 bp, Homo sapiens
aaaaaaaaaaagctg

SEQ ID NO: 987054 - DNA, 15 bp, Homo sapiens
aaaaaaaaaagctgg

SEQ ID NO: 987055 - DNA, 15 bp, Homo sapiens
aaaaaaaaagctggg

SEQ ID NO: 987056 - DNA, 15 bp, Homo sapiens
aaaaaaaagctgggg

SEQ ID NO: 987057 - DNA, 15 bp, Homo sapiens
aaaaaaagctgggga

SEQ ID NO: 987058 - DNA, 15 bp, Homo sapiens
aaaaaagctggggac

SEQ ID NO: 987059 - DNA, 15 bp, Homo sapiens
aaaaagctggggacc

SEQ ID NO: 987060 - DNA, 15 bp, Homo sapiens
aaaagctggggacca

SEQ ID NO: 987061 - DNA, 15 bp, Homo sapiens
aaagctggggaccat

SEQ ID NO: 987062 - DNA, 15 bp, Homo sapiens
aagctggggaccatt

SEQ ID NO: 987063 - DNA, 15 bp, Homo sapiens
agctggggaccattt

SEQ ID NO: 987064 - DNA, 15 bp, Homo sapiens
gctggggaccattta

SEQ ID NO: 987065 - DNA, 15 bp, Homo sapiens
ctggggaccatttaa

SEQ ID NO: 987066 - DNA, 15 bp, Homo sapiens
tggggaccatttaat

SEQ ID NO: 987067 - DNA, 15 bp, Homo sapiens
ggggaccatttaatg

SEQ ID NO: 987068 - DNA, 15 bp, Homo sapiens
gggaccatttaatga

SEQ ID NO: 987069 - DNA, 15 bp, Homo sapiens
ggaccatttaatgat

SEQ ID NO: 987070 - DNA, 15 bp, Homo sapiens
gaccatttaatgatc

SEQ ID NO: 987071 - DNA, 15 bp, Homo sapiens
accatttaatgatca

SEQ ID NO: 987072 - DNA, 15 bp, Homo sapiens
ccatttaatgatcac

SEQ ID NO: 987073 - DNA, 15 bp, Homo sapiens
catttaatgatcacc

SEQ ID NO: 987074 - DNA, 15 bp, Homo sapiens
atttaatgatcacct

SEQ ID NO: 987075 - DNA, 15 bp, Homo sapiens
tttaatgatcaccta

SEQ ID NO: 987076 - DNA, 15 bp, Homo sapiens
ttaatgatcacctac

SEQ ID NO: 987077 - DNA, 15 bp, Homo sapiens
taatgatcacctacc

SEQ ID NO: 987078 - DNA, 15 bp, Homo sapiens
aatgatcacctacca

SEQ ID NO: 987079 - DNA, 15 bp, Homo sapiens
atgatcacctaccag

SEQ ID NO: 987080 - DNA, 15 bp, Homo sapiens
tgatcacctaccagg

SEQ ID NO: 987081 - DNA, 15 bp, Homo sapiens
gatcacctaccaggt

SEQ ID NO: 987082 - DNA, 15 bp, Homo sapiens
atcacctaccaggtg

SEQ ID NO: 987083 - DNA, 15 bp, Homo sapiens
tcacctaccaggtgg

SEQ ID NO: 987084 - DNA, 15 bp, Homo sapiens
cacctaccaggtggc

SEQ ID NO: 987085 - DNA, 15 bp, Homo sapiens
acctaccaggtggca

SEQ ID NO: 987086 - DNA, 15 bp, Homo sapiens
cctaccaggtggcag

SEQ ID NO: 987087 - DNA, 15 bp, Homo sapiens
ctaccaggtggcaga

SEQ ID NO: 987088 - DNA, 15 bp, Homo sapiens
taccaggtggcagac

SEQ ID NO: 987089 - DNA, 15 bp, Homo sapiens
accaggtggcagaca

SEQ ID NO: 987090 - DNA, 15 bp, Homo sapiens
ccaggtggcagacag

SEQ ID NO: 987091 - DNA, 15 bp, Homo sapiens
caggtggcagacaga

SEQ ID NO: 987092 - DNA, 15 bp, Homo sapiens
aggtggcagacagac

SEQ ID NO: 987093 - DNA, 15 bp, Homo sapiens
ggtggcagacagaca

SEQ ID NO: 987094 - DNA, 15 bp, Homo sapiens
gtggcagacagacag

SEQ ID NO: 987095 - DNA, 15 bp, Homo sapiens
tggcagacagacagg

SEQ ID NO: 987096 - DNA, 15 bp, Homo sapiens
ggcagacagacaggg

SEQ ID NO: 987097 - DNA, 15 bp, Homo sapiens
gcagacagacagggc

SEQ ID NO: 987098 - DNA, 15 bp, Homo sapiens
cagacagacagggct

SEQ ID NO: 987099 - DNA, 15 bp, Homo sapiens
agacagacagggctc

SEQ ID NO: 987100 - DNA, 15 bp, Homo sapiens
gacagacagggctct

SEQ ID NO: 987101 - DNA, 15 bp, Homo sapiens
acagacagggctctg

SEQ ID NO: 987102 - DNA, 15 bp, Homo sapiens
cagacagggctctgg

SEQ ID NO: 987103 - DNA, 15 bp, Homo sapiens
agacagggctctggg

SEQ ID NO: 987104 - DNA, 15 bp, Homo sapiens
gacagggctctgggt

SEQ ID NO: 987105 - DNA, 15 bp, Homo sapiens
acagggctctgggta

SEQ ID NO: 987106 - DNA, 15 bp, Homo sapiens
cagggctctgggtac

SEQ ID NO: 987107 - DNA, 15 bp, Homo sapiens
agggctctgggtact

SEQ ID NO: 987108 - DNA, 15 bp, Homo sapiens
gggctctgggtactc

SEQ ID NO: 987109 - DNA, 15 bp, Homo sapiens
ggctctgggtactct

SEQ ID NO: 987110 - DNA, 15 bp, Homo sapiens
gctctgggtactctt

SEQ ID NO: 987111 - DNA, 15 bp, Homo sapiens
ctctgggtactctta

SEQ ID NO: 987112 - DNA, 15 bp, Homo sapiens
tctgggtactcttaa

SEQ ID NO: 987113 - DNA, 15 bp, Homo sapiens
ctgggtactcttaaa

SEQ ID NO: 987114 - DNA, 15 bp, Homo sapiens
tgggtactcttaaaa

SEQ ID NO: 987115 - DNA, 15 bp, Homo sapiens
gggtactcttaaaat

SEQ ID NO: 987116 - DNA, 15 bp, Homo sapiens
ggtactcttaaaatt

SEQ ID NO: 987117 - DNA, 15 bp, Homo sapiens
gtactcttaaaattt

SEQ ID NO: 987118 - DNA, 15 bp, Homo sapiens
tactcttaaaatttt

SEQ ID NO: 987119 - DNA, 15 bp, Homo sapiens
actcttaaaatttta

SEQ ID NO: 987120 - DNA, 15 bp, Homo sapiens
ctcttaaaattttag

SEQ ID NO: 987121 - DNA, 15 bp, Homo sapiens
tcttaaaattttagt

SEQ ID NO: 987122 - DNA, 15 bp, Homo sapiens
cttaaaattttagta

SEQ ID NO: 987123 - DNA, 15 bp, Homo sapiens
ttaaaattttagtac

SEQ ID NO: 987124 - DNA, 15 bp, Homo sapiens
taaaattttagtact

SEQ ID NO: 987125 - DNA, 15 bp, Homo sapiens
aaaattttagtactg

SEQ ID NO: 987126 - DNA, 15 bp, Homo sapiens
aaattttagtactgt

SEQ ID NO: 987127 - DNA, 15 bp, Homo sapiens
aattttagtactgtg

SEQ ID NO: 987128 - DNA, 15 bp, Homo sapiens
attttagtactgtgg

SEQ ID NO: 987129 - DNA, 15 bp, Homo sapiens
ttttagtactgtgga

SEQ ID NO: 987130 - DNA, 15 bp, Homo sapiens
tttagtactgtggac

SEQ ID NO: 987131 - DNA, 15 bp, Homo sapiens
ttagtactgtggacc

SEQ ID NO: 987132 - DNA, 15 bp, Homo sapiens
tagtactgtggacca

SEQ ID NO: 987133 - DNA, 15 bp, Homo sapiens
agtactgtggaccac

SEQ ID NO: 987134 - DNA, 15 bp, Homo sapiens
gtactgtggaccaca

SEQ ID NO: 987135 - DNA, 15 bp, Homo sapiens
tactgtggaccacat

SEQ ID NO: 987136 - DNA, 15 bp, Homo sapiens
actgtggaccacatt

SEQ ID NO: 987137 - DNA, 15 bp, Homo sapiens
ctgtggaccacattg

SEQ ID NO: 987138 - DNA, 15 bp, Homo sapiens
tgtggaccacattga

SEQ ID NO: 987139 - DNA, 15 bp, Homo sapiens
gtggaccacattgag

SEQ ID NO: 987140 - DNA, 15 bp, Homo sapiens
tggaccacattgagg

SEQ ID NO: 987141 - DNA, 15 bp, Homo sapiens
ggaccacattgaggg

SEQ ID NO: 987142 - DNA, 15 bp, Homo sapiens
gaccacattgaggga

SEQ ID NO: 987143 - DNA, 15 bp, Homo sapiens
accacattgagggat

SEQ ID NO: 987144 - DNA, 15 bp, Homo sapiens
ccacattgagggatt

SEQ ID NO: 987145 - DNA, 15 bp, Homo sapiens
cacattgagggatta

SEQ ID NO: 987146 - DNA, 15 bp, Homo sapiens
acattgagggattag

SEQ ID NO: 987147 - DNA, 15 bp, Homo sapiens
cattgagggattagt

SEQ ID NO: 987148 - DNA, 15 bp, Homo sapiens
attgagggattagtg

SEQ ID NO: 987149 - DNA, 15 bp, Homo sapiens
ttgagggattagtgt

SEQ ID NO: 987150 - DNA, 15 bp, Homo sapiens
tgagggattagtgtt

SEQ ID NO: 987151 - DNA, 15 bp, Homo sapiens
gagggattagtgtta

SEQ ID NO: 987152 - DNA, 15 bp, Homo sapiens
agggattagtgttac

SEQ ID NO: 987153 - DNA, 15 bp, Homo sapiens
gggattagtgttact

SEQ ID NO: 987154 - DNA, 15 bp, Homo sapiens
ggattagtgttactt

SEQ ID NO: 987155 - DNA, 15 bp, Homo sapiens
gattagtgttactta

SEQ ID NO: 987156 - DNA, 15 bp, Homo sapiens
attagtgttacttac

SEQ ID NO: 987157 - DNA, 15 bp, Homo sapiens
ttagtgttacttacc

SEQ ID NO: 987158 - DNA, 15 bp, Homo sapiens
tagtgttacttaccc

SEQ ID NO: 987159 - DNA, 15 bp, Homo sapiens
agtgttacttaccca

SEQ ID NO: 987160 - DNA, 15 bp, Homo sapiens
gtgttacttacccac

SEQ ID NO: 987161 - DNA, 15 bp, Homo sapiens
tgttacttacccact

SEQ ID NO: 987162 - DNA, 15 bp, Homo sapiens
gttacttacccactt

SEQ ID NO: 987163 - DNA, 15 bp, Homo sapiens
ttacttacccacttt

SEQ ID NO: 987164 - DNA, 15 bp, Homo sapiens
tacttacccacttta

SEQ ID NO: 987165 - DNA, 15 bp, Homo sapiens
acttacccactttat

SEQ ID NO: 987166 - DNA, 15 bp, Homo sapiens
cttacccactttatc

SEQ ID NO: 987167 - DNA, 15 bp, Homo sapiens
ttacccactttatcg

SEQ ID NO: 987168 - DNA, 15 bp, Homo sapiens
tacccactttatcga

SEQ ID NO: 987169 - DNA, 15 bp, Homo sapiens
acccactttatcgac

SEQ ID NO: 987170 - DNA, 15 bp, Homo sapiens
cccactttatcgaca

SEQ ID NO: 987171 - DNA, 15 bp, Homo sapiens
ccactttatcgacag

SEQ ID NO: 987172 - DNA, 15 bp, Homo sapiens
cactttatcgacagt

SEQ ID NO: 987173 - DNA, 15 bp, Homo sapiens
actttatcgacagtg

SEQ ID NO: 987174 - DNA, 15 bp, Homo sapiens
ctttatcgacagtga

SEQ ID NO: 987175 - DNA, 15 bp, Homo sapiens
tttatcgacagtgag

SEQ ID NO: 987176 - DNA, 15 bp, Homo sapiens
ttatcgacagtgagg

SEQ ID NO: 987177 - DNA, 15 bp, Homo sapiens
tatcgacagtgaggt

SEQ ID NO: 987178 - DNA, 15 bp, Homo sapiens
atcgacagtgaggta

SEQ ID NO: 987179 - DNA, 15 bp, Homo sapiens
tcgacagtgaggtag

SEQ ID NO: 987180 - DNA, 15 bp, Homo sapiens
cgacagtgaggtaga

SEQ ID NO: 987181 - DNA, 15 bp, Homo sapiens
gacagtgaggtagag

SEQ ID NO: 987182 - DNA, 15 bp, Homo sapiens
acagtgaggtagagg

SEQ ID NO: 987183 - DNA, 15 bp, Homo sapiens
cagtgaggtagaggc

SEQ ID NO: 987184 - DNA, 15 bp, Homo sapiens
agtgaggtagaggct

SEQ ID NO: 987185 - DNA, 15 bp, Homo sapiens
gtgaggtagaggctc

SEQ ID NO: 987186 - DNA, 15 bp, Homo sapiens
tgaggtagaggctca

SEQ ID NO: 987187 - DNA, 15 bp, Homo sapiens
gaggtagaggctcag

SEQ ID NO: 987188 - DNA, 15 bp, Homo sapiens
aggtagaggctcaga

SEQ ID NO: 987189 - DNA, 15 bp, Homo sapiens
ggtagaggctcagaa

SEQ ID NO: 987190 - DNA, 15 bp, Homo sapiens
gtagaggctcagaaa

SEQ ID NO: 987191 - DNA, 15 bp, Homo sapiens
tagaggctcagaaaa

SEQ ID NO: 987192 - DNA, 15 bp, Homo sapiens
agaggctcagaaaat

SEQ ID NO: 987193 - DNA, 15 bp, Homo sapiens
gaggctcagaaaatt

SEQ ID NO: 987194 - DNA, 15 bp, Homo sapiens
aggctcagaaaatta

SEQ ID NO: 987195 - DNA, 15 bp, Homo sapiens
ggctcagaaaattaa

SEQ ID NO: 987196 - DNA, 15 bp, Homo sapiens
gctcagaaaattaaa

SEQ ID NO: 987197 - DNA, 15 bp, Homo sapiens
ctcagaaaattaaaa

SEQ ID NO: 987198 - DNA, 15 bp, Homo sapiens
tcagaaaattaaaag

SEQ ID NO: 987199 - DNA, 15 bp, Homo sapiens
cagaaaattaaaaga

SEQ ID NO: 987200 - DNA, 15 bp, Homo sapiens
agaaaattaaaagac

SEQ ID NO: 987201 - DNA, 15 bp, Homo sapiens
gaaaattaaaagact

SEQ ID NO: 987202 - DNA, 15 bp, Homo sapiens
aaaattaaaagactt

SEQ ID NO: 987203 - DNA, 15 bp, Homo sapiens
aaattaaaagactta

SEQ ID NO: 987204 - DNA, 15 bp, Homo sapiens
aattaaaagacttaa

SEQ ID NO: 987205 - DNA, 15 bp, Homo sapiens
attaaaagacttaat

SEQ ID NO: 987206 - DNA, 15 bp, Homo sapiens
ttaaaagacttaatt

SEQ ID NO: 987207 - DNA, 15 bp, Homo sapiens
taaaagacttaattt

SEQ ID NO: 987208 - DNA, 15 bp, Homo sapiens
aaaagacttaatttg

SEQ ID NO: 987209 - DNA, 15 bp, Homo sapiens
aaagacttaatttgt

SEQ ID NO: 987210 - DNA, 15 bp, Homo sapiens
aagacttaatttgtt

SEQ ID NO: 987211 - DNA, 15 bp, Homo sapiens
agacttaatttgttt

SEQ ID NO: 987212 - DNA, 15 bp, Homo sapiens
gacttaatttgttta

SEQ ID NO: 987213 - DNA, 15 bp, Homo sapiens
acttaatttgtttaa

SEQ ID NO: 987214 - DNA, 15 bp, Homo sapiens
cttaatttgtttaac

SEQ ID NO: 987215 - DNA, 15 bp, Homo sapiens
ttaatttgtttaaca

SEQ ID NO: 987216 - DNA, 15 bp, Homo sapiens
taatttgtttaacaa

SEQ ID NO: 987217 - DNA, 15 bp, Homo sapiens
aatttgtttaacaaa

SEQ ID NO: 987218 - DNA, 15 bp, Homo sapiens
atttgtttaacaaat

SEQ ID NO: 987219 - DNA, 15 bp, Homo sapiens
tttgtttaacaaata

SEQ ID NO: 987220 - DNA, 15 bp, Homo sapiens
ttgtttaacaaatat

SEQ ID NO: 987221 - DNA, 15 bp, Homo sapiens
tgtttaacaaatatt

SEQ ID NO: 987222 - DNA, 15 bp, Homo sapiens
gtttaacaaatattg

SEQ ID NO: 987223 - DNA, 15 bp, Homo sapiens
tttaacaaatattga

SEQ ID NO: 987224 - DNA, 15 bp, Homo sapiens
ttaacaaatattgag

SEQ ID NO: 987225 - DNA, 15 bp, Homo sapiens
taacaaatattgagt

SEQ ID NO: 987226 - DNA, 15 bp, Homo sapiens
aacaaatattgagta

SEQ ID NO: 987227 - DNA, 15 bp, Homo sapiens
acaaatattgagtac

SEQ ID NO: 987228 - DNA, 15 bp, Homo sapiens
caaatattgagtaca

SEQ ID NO: 987229 - DNA, 15 bp, Homo sapiens
aaatattgagtacat

SEQ ID NO: 987230 - DNA, 15 bp, Homo sapiens
aatattgagtacata

SEQ ID NO: 987231 - DNA, 15 bp, Homo sapiens
atattgagtacatag

SEQ ID NO: 987232 - DNA, 15 bp, Homo sapiens
tattgagtacatagc

SEQ ID NO: 987233 - DNA, 15 bp, Homo sapiens
attgagtacatagcc

SEQ ID NO: 987234 - DNA, 15 bp, Homo sapiens
ttgagtacatagcct

SEQ ID NO: 987235 - DNA, 15 bp, Homo sapiens
tgagtacatagccta

SEQ ID NO: 987236 - DNA, 15 bp, Homo sapiens
gagtacatagcctac

SEQ ID NO: 987237 - DNA, 15 bp, Homo sapiens
agtacatagcctacg

SEQ ID NO: 987238 - DNA, 15 bp, Homo sapiens
gtacatagcctacgc

SEQ ID NO: 987239 - DNA, 15 bp, Homo sapiens
tacatagcctacgcc

SEQ ID NO: 987240 - DNA, 15 bp, Homo sapiens
acatagcctacgcct

SEQ ID NO: 987241 - DNA, 15 bp, Homo sapiens
catagcctacgccta

SEQ ID NO: 987242 - DNA, 15 bp, Homo sapiens
atagcctacgcctat

SEQ ID NO: 987243 - DNA, 15 bp, Homo sapiens
tagcctacgcctatg

SEQ ID NO: 987244 - DNA, 15 bp, Homo sapiens
agcctacgcctatgc

SEQ ID NO: 987245 - DNA, 15 bp, Homo sapiens
gcctacgcctatgcc

SEQ ID NO: 987246 - DNA, 15 bp, Homo sapiens
cctacgcctatgccc

SEQ ID NO: 987247 - DNA, 15 bp, Homo sapiens
ctacgcctatgccca

SEQ ID NO: 987248 - DNA, 15 bp, Homo sapiens
tacgcctatgcccag

SEQ ID NO: 987249 - DNA, 15 bp, Homo sapiens
acgcctatgcccagc

SEQ ID NO: 987250 - DNA, 15 bp, Homo sapiens
cgcctatgcccagcc

SEQ ID NO: 987251 - DNA, 15 bp, Homo sapiens
gcctatgcccagcca

SEQ ID NO: 987252 - DNA, 15 bp, Homo sapiens
cctatgcccagccaa

SEQ ID NO: 987253 - DNA, 15 bp, Homo sapiens
ctatgcccagccaat

SEQ ID NO: 987254 - DNA, 15 bp, Homo sapiens
tatgcccagccaatg

SEQ ID NO: 987255 - DNA, 15 bp, Homo sapiens
atgcccagccaatga

SEQ ID NO: 987256 - DNA, 15 bp, Homo sapiens
tgcccagccaatgat

SEQ ID NO: 987257 - DNA, 15 bp, Homo sapiens
gcccagccaatgata

SEQ ID NO: 987258 - DNA, 15 bp, Homo sapiens
cccagccaatgatac

SEQ ID NO: 987259 - DNA, 15 bp, Homo sapiens
ccagccaatgataca

SEQ ID NO: 987260 - DNA, 15 bp, Homo sapiens
cagccaatgatacag

SEQ ID NO: 987261 - DNA, 15 bp, Homo sapiens
agccaatgatacagg

SEQ ID NO: 987262 - DNA, 15 bp, Homo sapiens
gccaatgatacaggc

SEQ ID NO: 987263 - DNA, 15 bp, Homo sapiens
ccaatgatacaggcc

SEQ ID NO: 987264 - DNA, 15 bp, Homo sapiens
caatgatacaggcct

SEQ ID NO: 987265 - DNA, 15 bp, Homo sapiens
aatgatacaggcctt

SEQ ID NO: 987266 - DNA, 15 bp, Homo sapiens
atgatacaggcctta

SEQ ID NO: 987267 - DNA, 15 bp, Homo sapiens
tgatacaggccttaa

SEQ ID NO: 987268 - DNA, 15 bp, Homo sapiens
gatacaggccttaaa

SEQ ID NO: 987269 - DNA, 15 bp, Homo sapiens
atacaggccttaaat

SEQ ID NO: 987270 - DNA, 15 bp, Homo sapiens
tacaggccttaaatg

SEQ ID NO: 987271 - DNA, 15 bp, Homo sapiens
acaggccttaaatgg

SEQ ID NO: 987272 - DNA, 15 bp, Homo sapiens
caggccttaaatgga

SEQ ID NO: 987273 - DNA, 15 bp, Homo sapiens
aggccttaaatggag

SEQ ID NO: 987274 - DNA, 15 bp, Homo sapiens
ggccttaaatggagt

SEQ ID NO: 987275 - DNA, 15 bp, Homo sapiens
gccttaaatggagta

SEQ ID NO: 987276 - DNA, 15 bp, Homo sapiens
ccttaaatggagtag

SEQ ID NO: 987277 - DNA, 15 bp, Homo sapiens
cttaaatggagtagt

SEQ ID NO: 987278 - DNA, 15 bp, Homo sapiens
ttaaatggagtagtg

SEQ ID NO: 987279 - DNA, 15 bp, Homo sapiens
taaatggagtagtgt

SEQ ID NO: 987280 - DNA, 15 bp, Homo sapiens
aaatggagtagtgtc

SEQ ID NO: 987281 - DNA, 15 bp, Homo sapiens
aatggagtagtgtcc

SEQ ID NO: 987282 - DNA, 15 bp, Homo sapiens
atggagtagtgtcca

SEQ ID NO: 987283 - DNA, 15 bp, Homo sapiens
tggagtagtgtccag

SEQ ID NO: 987284 - DNA, 15 bp, Homo sapiens
ggagtagtgtccaga

SEQ ID NO: 987285 - DNA, 15 bp, Homo sapiens
gagtagtgtccagag

SEQ ID NO: 987286 - DNA, 15 bp, Homo sapiens
agtagtgtccagagg

SEQ ID NO: 987287 - DNA, 15 bp, Homo sapiens
gtagtgtccagaggt

SEQ ID NO: 987288 - DNA, 15 bp, Homo sapiens
tagtgtccagaggtt

SEQ ID NO: 987289 - DNA, 15 bp, Homo sapiens
agtgtccagaggtta

SEQ ID NO: 987290 - DNA, 15 bp, Homo sapiens
gtgtccagaggttag

SEQ ID NO: 987291 - DNA, 15 bp, Homo sapiens
tgtccagaggttagg

SEQ ID NO: 987292 - DNA, 15 bp, Homo sapiens
gtccagaggttagga

SEQ ID NO: 987293 - DNA, 15 bp, Homo sapiens
tccagaggttaggaa

SEQ ID NO: 987294 - DNA, 15 bp, Homo sapiens
ccagaggttaggaat

SEQ ID NO: 987295 - DNA, 15 bp, Homo sapiens
cagaggttaggaatc

SEQ ID NO: 987296 - DNA, 15 bp, Homo sapiens
agaggttaggaatcc

SEQ ID NO: 987297 - DNA, 15 bp, Homo sapiens
gaggttaggaatcct

SEQ ID NO: 987298 - DNA, 15 bp, Homo sapiens
aggttaggaatcctg

SEQ ID NO: 987299 - DNA, 15 bp, Homo sapiens
ggttaggaatcctgc

SEQ ID NO: 987300 - DNA, 15 bp, Homo sapiens
gttaggaatcctgcc

SEQ ID NO: 987301 - DNA, 15 bp, Homo sapiens
ttaggaatcctgcca

SEQ ID NO: 987302 - DNA, 15 bp, Homo sapiens
taggaatcctgccat

SEQ ID NO: 987303 - DNA, 15 bp, Homo sapiens
aggaatcctgccatc

SEQ ID NO: 987304 - DNA, 15 bp, Homo sapiens
ggaatcctgccatcc

SEQ ID NO: 987305 - DNA, 15 bp, Homo sapiens
gaatcctgccatcct

SEQ ID NO: 987306 - DNA, 15 bp, Homo sapiens
aatcctgccatcctt

SEQ ID NO: 987307 - DNA, 15 bp, Homo sapiens
atcctgccatccttt

SEQ ID NO: 987308 - DNA, 15 bp, Homo sapiens
tcctgccatccttta

SEQ ID NO: 987309 - DNA, 15 bp, Homo sapiens
cctgccatcctttag

SEQ ID NO: 987310 - DNA, 15 bp, Homo sapiens
ctgccatcctttagg

SEQ ID NO: 987311 - DNA, 15 bp, Homo sapiens
tgccatcctttaggc

SEQ ID NO: 987312 - DNA, 15 bp, Homo sapiens
gccatcctttaggcc

SEQ ID NO: 987313 - DNA, 15 bp, Homo sapiens
ccatcctttaggcct

SEQ ID NO: 987314 - DNA, 15 bp, Homo sapiens
catcctttaggcctg

SEQ ID NO: 987315 - DNA, 15 bp, Homo sapiens
atcctttaggcctgt

SEQ ID NO: 987316 - DNA, 15 bp, Homo sapiens
tcctttaggcctgtg

SEQ ID NO: 987317 - DNA, 15 bp, Homo sapiens
cctttaggcctgtgg

SEQ ID NO: 987318 - DNA, 15 bp, Homo sapiens
ctttaggcctgtggg

SEQ ID NO: 987319 - DNA, 15 bp, Homo sapiens
tttaggcctgtgggt

SEQ ID NO: 987320 - DNA, 15 bp, Homo sapiens
ttaggcctgtgggtc

SEQ ID NO: 987321 - DNA, 15 bp, Homo sapiens
taggcctgtgggtct

SEQ ID NO: 987322 - DNA, 15 bp, Homo sapiens
aggcctgtgggtctg

SEQ ID NO: 987323 - DNA, 15 bp, Homo sapiens
ggcctgtgggtctgg

SEQ ID NO: 987324 - DNA, 15 bp, Homo sapiens
gcctgtgggtctgga

SEQ ID NO: 987325 - DNA, 15 bp, Homo sapiens
cctgtgggtctggaa

SEQ ID NO: 987326 - DNA, 15 bp, Homo sapiens
ctgtgggtctggaaa

SEQ ID NO: 987327 - DNA, 15 bp, Homo sapiens
tgtgggtctggaaag

SEQ ID NO: 987328 - DNA, 15 bp, Homo sapiens
gtgggtctggaaagg

SEQ ID NO: 987329 - DNA, 15 bp, Homo sapiens
tgggtctggaaaggc

SEQ ID NO: 987330 - DNA, 15 bp, Homo sapiens
gggtctggaaaggca

SEQ ID NO: 987331 - DNA, 15 bp, Homo sapiens
ggtctggaaaggcaa

SEQ ID NO: 987332 - DNA, 15 bp, Homo sapiens
gtctggaaaggcaat

SEQ ID NO: 987333 - DNA, 15 bp, Homo sapiens
tctggaaaggcaatg

SEQ ID NO: 987334 - DNA, 15 bp, Homo sapiens
ctggaaaggcaatga

SEQ ID NO: 987335 - DNA, 15 bp, Homo sapiens
tggaaaggcaatgac

SEQ ID NO: 987336 - DNA, 15 bp, Homo sapiens
ggaaaggcaatgact

SEQ ID NO: 987337 - DNA, 15 bp, Homo sapiens
gaaaggcaatgacta

SEQ ID NO: 987338 - DNA, 15 bp, Homo sapiens
aaaggcaatgactac

SEQ ID NO: 987339 - DNA, 15 bp, Homo sapiens
aaggcaatgactact

SEQ ID NO: 987340 - DNA, 15 bp, Homo sapiens
aggcaatgactacta

SEQ ID NO: 987341 - DNA, 15 bp, Homo sapiens
ggcaatgactactac

SEQ ID NO: 987342 - DNA, 15 bp, Homo sapiens
gcaatgactactacc

SEQ ID NO: 987343 - DNA, 15 bp, Homo sapiens
caatgactactaccc

SEQ ID NO: 987344 - DNA, 15 bp, Homo sapiens
aatgactactacccc

SEQ ID NO: 987345 - DNA, 15 bp, Homo sapiens
atgactactacccct

SEQ ID NO: 987346 - DNA, 15 bp, Homo sapiens
tgactactacccctc

SEQ ID NO: 987347 - DNA, 15 bp, Homo sapiens
gactactacccctct

SEQ ID NO: 987348 - DNA, 15 bp, Homo sapiens
actactacccctcta

SEQ ID NO: 987349 - DNA, 15 bp, Homo sapiens
ctactacccctctaa

SEQ ID NO: 987350 - DNA, 15 bp, Homo sapiens
tactacccctctaaa

SEQ ID NO: 987351 - DNA, 15 bp, Homo sapiens
actacccctctaaac

SEQ ID NO: 987352 - DNA, 15 bp, Homo sapiens
ctacccctctaaaca

SEQ ID NO: 987353 - DNA, 15 bp, Homo sapiens
tacccctctaaacat

SEQ ID NO: 987354 - DNA, 15 bp, Homo sapiens
acccctctaaacatc

SEQ ID NO: 987355 - DNA, 15 bp, Homo sapiens
cccctctaaacatct

SEQ ID NO: 987356 - DNA, 15 bp, Homo sapiens
ccctctaaacatctc

SEQ ID NO: 987357 - DNA, 15 bp, Homo sapiens
cctctaaacatctct

SEQ ID NO: 987358 - DNA, 15 bp, Homo sapiens
ctctaaacatctctg

SEQ ID NO: 987359 - DNA, 15 bp, Homo sapiens
tctaaacatctctgc

SEQ ID NO: 987360 - DNA, 15 bp, Homo sapiens
ctaaacatctctgcc

SEQ ID NO: 987361 - DNA, 15 bp, Homo sapiens
taaacatctctgccc

SEQ ID NO: 987362 - DNA, 15 bp, Homo sapiens
aaacatctctgccct

SEQ ID NO: 987363 - DNA, 15 bp, Homo sapiens
aacatctctgccctg

SEQ ID NO: 987364 - DNA, 15 bp, Homo sapiens
acatctctgccctgt

SEQ ID NO: 987365 - DNA, 15 bp, Homo sapiens
catctctgccctgtg

SEQ ID NO: 987366 - DNA, 15 bp, Homo sapiens
atctctgccctgtgc

SEQ ID NO: 987367 - DNA, 15 bp, Homo sapiens
tctctgccctgtgct

SEQ ID NO: 987368 - DNA, 15 bp, Homo sapiens
ctctgccctgtgctc

SEQ ID NO: 987369 - DNA, 15 bp, Homo sapiens
tctgccctgtgctca

SEQ ID NO: 987370 - DNA, 15 bp, Homo sapiens
ctgccctgtgctcaa

SEQ ID NO: 987371 - DNA, 15 bp, Homo sapiens
tgccctgtgctcaag

SEQ ID NO: 987372 - DNA, 15 bp, Homo sapiens
gccctgtgctcaagc

SEQ ID NO: 987373 - DNA, 15 bp, Homo sapiens
ccctgtgctcaagct

SEQ ID NO: 987374 - DNA, 15 bp, Homo sapiens
cctgtgctcaagctt

SEQ ID NO: 987375 - DNA, 15 bp, Homo sapiens
ctgtgctcaagcttc

SEQ ID NO: 987376 - DNA, 15 bp, Homo sapiens
tgtgctcaagcttcc

SEQ ID NO: 987377 - DNA, 15 bp, Homo sapiens
gtgctcaagcttccc

SEQ ID NO: 987378 - DNA, 15 bp, Homo sapiens
tgctcaagcttccct

SEQ ID NO: 987379 - DNA, 15 bp, Homo sapiens
gctcaagcttccctg

SEQ ID NO: 987380 - DNA, 15 bp, Homo sapiens
ctcaagcttccctgc

SEQ ID NO: 987381 - DNA, 15 bp, Homo sapiens
tcaagcttccctgct

SEQ ID NO: 987382 - DNA, 15 bp, Homo sapiens
caagcttccctgctc

SEQ ID NO: 987383 - DNA, 15 bp, Homo sapiens
aagcttccctgctct

SEQ ID NO: 987384 - DNA, 15 bp, Homo sapiens
agcttccctgctctg

SEQ ID NO: 987385 - DNA, 15 bp, Homo sapiens
gcttccctgctctgg

SEQ ID NO: 987386 - DNA, 15 bp, Homo sapiens
cttccctgctctggg

SEQ ID NO: 987387 - DNA, 15 bp, Homo sapiens
ttccctgctctgggt

SEQ ID NO: 987388 - DNA, 15 bp, Homo sapiens
tccctgctctgggta

SEQ ID NO: 987389 - DNA, 15 bp, Homo sapiens
ccctgctctgggtaa

SEQ ID NO: 987390 - DNA, 15 bp, Homo sapiens
cctgctctgggtaag

SEQ ID NO: 987391 - DNA, 15 bp, Homo sapiens
ctgctctgggtaagg

SEQ ID NO: 987392 - DNA, 15 bp, Homo sapiens
tgctctgggtaaggc

SEQ ID NO: 987393 - DNA, 15 bp, Homo sapiens
gctctgggtaaggca

SEQ ID NO: 987394 - DNA, 15 bp, Homo sapiens
ctctgggtaaggcaa

SEQ ID NO: 987395 - DNA, 15 bp, Homo sapiens
tctgggtaaggcaac

SEQ ID NO: 987396 - DNA, 15 bp, Homo sapiens
ctgggtaaggcaacc

SEQ ID NO: 987397 - DNA, 15 bp, Homo sapiens
tgggtaaggcaacct

SEQ ID NO: 987398 - DNA, 15 bp, Homo sapiens
gggtaaggcaacctc

SEQ ID NO: 987399 - DNA, 15 bp, Homo sapiens
ggtaaggcaacctcg

SEQ ID NO: 987400 - DNA, 15 bp, Homo sapiens
gtaaggcaacctcgg

SEQ ID NO: 987401 - DNA, 15 bp, Homo sapiens
taaggcaacctcggg

SEQ ID NO: 987402 - DNA, 15 bp, Homo sapiens
aaggcaacctcgggc

SEQ ID NO: 987403 - DNA, 15 bp, Homo sapiens
aggcaacctcgggcc

SEQ ID NO: 987404 - DNA, 15 bp, Homo sapiens
ggcaacctcgggccc

SEQ ID NO: 987405 - DNA, 15 bp, Homo sapiens
gcaacctcgggccca

SEQ ID NO: 987406 - DNA, 15 bp, Homo sapiens
caacctcgggcccag

SEQ ID NO: 987407 - DNA, 15 bp, Homo sapiens
aacctcgggcccagg

SEQ ID NO: 987408 - DNA, 15 bp, Homo sapiens
acctcgggcccaggc

SEQ ID NO: 987409 - DNA, 15 bp, Homo sapiens
cctcgggcccaggct

SEQ ID NO: 987410 - DNA, 15 bp, Homo sapiens
ctcgggcccaggctg

SEQ ID NO: 987411 - DNA, 15 bp, Homo sapiens
tcgggcccaggctgt

SEQ ID NO: 987412 - DNA, 15 bp, Homo sapiens
cgggcccaggctgtg

SEQ ID NO: 987413 - DNA, 15 bp, Homo sapiens
gggcccaggctgtga

SEQ ID NO: 987414 - DNA, 15 bp, Homo sapiens
ggcccaggctgtgac

SEQ ID NO: 987415 - DNA, 15 bp, Homo sapiens
gcccaggctgtgacc

SEQ ID NO: 987416 - DNA, 15 bp, Homo sapiens
cccaggctgtgacct

SEQ ID NO: 987417 - DNA, 15 bp, Homo sapiens
ccaggctgtgacctt

SEQ ID NO: 987418 - DNA, 15 bp, Homo sapiens
caggctgtgaccttc

SEQ ID NO: 987419 - DNA, 15 bp, Homo sapiens
aggctgtgaccttcc

SEQ ID NO: 987420 - DNA, 15 bp, Homo sapiens
ggctgtgaccttccc

SEQ ID NO: 987421 - DNA, 15 bp, Homo sapiens
gctgtgaccttccca

SEQ ID NO: 987422 - DNA, 15 bp, Homo sapiens
ctgtgaccttcccat

SEQ ID NO: 987423 - DNA, 15 bp, Homo sapiens
tgtgaccttcccatg

SEQ ID NO: 987424 - DNA, 15 bp, Homo sapiens
gtgaccttcccatga

SEQ ID NO: 987425 - DNA, 15 bp, Homo sapiens
tgaccttcccatgaa

SEQ ID NO: 987426 - DNA, 15 bp, Homo sapiens
gaccttcccatgaaa

SEQ ID NO: 987427 - DNA, 15 bp, Homo sapiens
accttcccatgaaaa

SEQ ID NO: 987428 - DNA, 15 bp, Homo sapiens
ccttcccatgaaaag

SEQ ID NO: 987429 - DNA, 15 bp, Homo sapiens
cttcccatgaaaaga

SEQ ID NO: 987430 - DNA, 15 bp, Homo sapiens
ttcccatgaaaagaa

SEQ ID NO: 987431 - DNA, 15 bp, Homo sapiens
tcccatgaaaagaac

SEQ ID NO: 987432 - DNA, 15 bp, Homo sapiens
cccatgaaaagaacc

SEQ ID NO: 987433 - DNA, 15 bp, Homo sapiens
ccatgaaaagaacca

SEQ ID NO: 987434 - DNA, 15 bp, Homo sapiens
catgaaaagaaccag

SEQ ID NO: 987435 - DNA, 15 bp, Homo sapiens
atgaaaagaaccaga

SEQ ID NO: 987436 - DNA, 15 bp, Homo sapiens
tgaaaagaaccagaa

SEQ ID NO: 987437 - DNA, 15 bp, Homo sapiens
gaaaagaaccagaaa

SEQ ID NO: 987438 - DNA, 15 bp, Homo sapiens
aaaagaaccagaaat

SEQ ID NO: 987439 - DNA, 15 bp, Homo sapiens
aaagaaccagaaatt

SEQ ID NO: 987440 - DNA, 15 bp, Homo sapiens
aagaaccagaaattc

SEQ ID NO: 987441 - DNA, 15 bp, Homo sapiens
agaaccagaaattct

SEQ ID NO: 987442 - DNA, 15 bp, Homo sapiens
gaaccagaaattctg

SEQ ID NO: 987443 - DNA, 15 bp, Homo sapiens
aaccagaaattctga

SEQ ID NO: 987444 - DNA, 15 bp, Homo sapiens
accagaaattctgag

SEQ ID NO: 987445 - DNA, 15 bp, Homo sapiens
ccagaaattctgaga

SEQ ID NO: 987446 - DNA, 15 bp, Homo sapiens
cagaaattctgagaa

SEQ ID NO: 987447 - DNA, 15 bp, Homo sapiens
agaaattctgagaac

SEQ ID NO: 987448 - DNA, 15 bp, Homo sapiens
gaaattctgagaacc

SEQ ID NO: 987449 - DNA, 15 bp, Homo sapiens
aaattctgagaaccg

SEQ ID NO: 987450 - DNA, 15 bp, Homo sapiens
aattctgagaaccga

SEQ ID NO: 987451 - DNA, 15 bp, Homo sapiens
attctgagaaccgag

SEQ ID NO: 987452 - DNA, 15 bp, Homo sapiens
ttctgagaaccgagt

SEQ ID NO: 987453 - DNA, 15 bp, Homo sapiens
tctgagaaccgagtt

SEQ ID NO: 987454 - DNA, 15 bp, Homo sapiens
ctgagaaccgagttt

SEQ ID NO: 987455 - DNA, 15 bp, Homo sapiens
tgagaaccgagttta

SEQ ID NO: 987456 - DNA, 15 bp, Homo sapiens
gagaaccgagtttat

SEQ ID NO: 987457 - DNA, 15 bp, Homo sapiens
agaaccgagtttata

SEQ ID NO: 987458 - DNA, 15 bp, Homo sapiens
gaaccgagtttataa

SEQ ID NO: 987459 - DNA, 15 bp, Homo sapiens
aaccgagtttataac

SEQ ID NO: 987460 - DNA, 15 bp, Homo sapiens
accgagtttataacc

SEQ ID NO: 987461 - DNA, 15 bp, Homo sapiens
ccgagtttataacct

SEQ ID NO: 987462 - DNA, 15 bp, Homo sapiens
cgagtttataacctg

SEQ ID NO: 987463 - DNA, 15 bp, Homo sapiens
gagtttataacctgc

SEQ ID NO: 987464 - DNA, 15 bp, Homo sapiens
agtttataacctgca

SEQ ID NO: 987465 - DNA, 15 bp, Homo sapiens
gtttataacctgcac

SEQ ID NO: 987466 - DNA, 15 bp, Homo sapiens
tttataacctgcaca

SEQ ID NO: 987467 - DNA, 15 bp, Homo sapiens
ttataacctgcacat

SEQ ID NO: 987468 - DNA, 15 bp, Homo sapiens
tataacctgcacatt

SEQ ID NO: 987469 - DNA, 15 bp, Homo sapiens
ataacctgcacattc

SEQ ID NO: 987470 - DNA, 15 bp, Homo sapiens
taacctgcacattct

SEQ ID NO: 987471 - DNA, 15 bp, Homo sapiens
aacctgcacattctg

SEQ ID NO: 987472 - DNA, 15 bp, Homo sapiens
acctgcacattctgc

SEQ ID NO: 987473 - DNA, 15 bp, Homo sapiens
cctgcacattctgca

SEQ ID NO: 987474 - DNA, 15 bp, Homo sapiens
ctgcacattctgcac

SEQ ID NO: 987475 - DNA, 15 bp, Homo sapiens
tgcacattctgcaca

SEQ ID NO: 987476 - DNA, 15 bp, Homo sapiens
gcacattctgcacat

SEQ ID NO: 987477 - DNA, 15 bp, Homo sapiens
cacattctgcacatg

SEQ ID NO: 987478 - DNA, 15 bp, Homo sapiens
acattctgcacatgt

SEQ ID NO: 987479 - DNA, 15 bp, Homo sapiens
cattctgcacatgta

SEQ ID NO: 987480 - DNA, 15 bp, Homo sapiens
attctgcacatgtat

SEQ ID NO: 987481 - DNA, 15 bp, Homo sapiens
ttctgcacatgtatc

SEQ ID NO: 987482 - DNA, 15 bp, Homo sapiens
tctgcacatgtatcc

SEQ ID NO: 987483 - DNA, 15 bp, Homo sapiens
ctgcacatgtatccc

SEQ ID NO: 987484 - DNA, 15 bp, Homo sapiens
tgcacatgtatcccg

SEQ ID NO: 987485 - DNA, 15 bp, Homo sapiens
gcacatgtatcccgg

SEQ ID NO: 987486 - DNA, 15 bp, Homo sapiens
cacatgtatcccgga

SEQ ID NO: 987487 - DNA, 15 bp, Homo sapiens
acatgtatcccggaa

SEQ ID NO: 987488 - DNA, 15 bp, Homo sapiens
catgtatcccggaac

SEQ ID NO: 987489 - DNA, 15 bp, Homo sapiens
atgtatcccggaact

SEQ ID NO: 987490 - DNA, 15 bp, Homo sapiens
tgtatcccggaactt

SEQ ID NO: 987491 - DNA, 15 bp, Homo sapiens
gtatcccggaactta

SEQ ID NO: 987492 - DNA, 15 bp, Homo sapiens
tatcccggaacttaa

SEQ ID NO: 987493 - DNA, 15 bp, Homo sapiens
atcccggaacttaaa

SEQ ID NO: 987494 - DNA, 15 bp, Homo sapiens
tcccggaacttaaag

SEQ ID NO: 987495 - DNA, 15 bp, Homo sapiens
cccggaacttaaagt

SEQ ID NO: 987496 - DNA, 15 bp, Homo sapiens
ccggaacttaaagta

SEQ ID NO: 987497 - DNA, 15 bp, Homo sapiens
cggaacttaaagtaa

SEQ ID NO: 987498 - DNA, 15 bp, Homo sapiens
ggaacttaaagtaaa

SEQ ID NO: 987499 - DNA, 15 bp, Homo sapiens
gaacttaaagtaaaa

SEQ ID NO: 987500 - DNA, 15 bp, Homo sapiens
aacttaaagtaaaaa

SEQ ID NO: 987501 - DNA, 15 bp, Homo sapiens
acttaaagtaaaaaa

SEQ ID NO: 987502 - DNA, 15 bp, Homo sapiens
cttaaagtaaaaaaa

SEQ ID NO: 987503 - DNA, 15 bp, Homo sapiens
ttaaagtaaaaaaaa

SEQ ID NO: 987504 - DNA, 15 bp, Homo sapiens
taaagtaaaaaaaaa

SEQ ID NO: 987505 - DNA, 15 bp, Homo sapiens
aaagtaaaaaaaaac

SEQ ID NO: 987506 - DNA, 15 bp, Homo sapiens
aagtaaaaaaaaaca

SEQ ID NO: 987507 - DNA, 15 bp, Homo sapiens
agtaaaaaaaaacaa

SEQ ID NO: 987508 - DNA, 15 bp, Homo sapiens
gtaaaaaaaaacaaa

SEQ ID NO: 987509 - DNA, 15 bp, Homo sapiens
taaaaaaaaacaaaa

SEQ ID NO: 987510 - DNA, 15 bp, Homo sapiens
aaaaaaaaacaaaaa

SEQ ID NO: 987511 - DNA, 15 bp, Homo sapiens
aaaaaaaacaaaaaa

SEQ ID NO: 987512 - DNA, 15 bp, Homo sapiens
aaaaaaacaaaaaaa

SEQ ID NO: 987513 - DNA, 15 bp, Homo sapiens
aaaaaacaaaaaaac

SEQ ID NO: 987514 - DNA, 15 bp, Homo sapiens
aaaaacaaaaaaaca

SEQ ID NO: 987515 - DNA, 15 bp, Homo sapiens
aaaacaaaaaaacaa

SEQ ID NO: 987516 - DNA, 15 bp, Homo sapiens
aaacaaaaaaacaaa

SEQ ID NO: 987517 - DNA, 15 bp, Homo sapiens
aacaaaaaaacaaaa

SEQ ID NO: 987518 - DNA, 15 bp, Homo sapiens
acaaaaaaacaaaaa

SEQ ID NO: 987519 - DNA, 15 bp, Homo sapiens
caaaaaaacaaaaaa

SEQ ID NO: 987520 - DNA, 15 bp, Homo sapiens
aaaaaacaaaaaaaa

SEQ ID NO: 987521 - DNA, 15 bp, Homo sapiens
aaaaacaaaaaaaaa

SEQ ID NO: 987522 - DNA, 15 bp, Homo sapiens
aaaacaaaaaaaaaa

SEQ ID NO: 987523 - DNA, 15 bp, Homo sapiens
aaacaaaaaaaaaac

SEQ ID NO: 987524 - DNA, 15 bp, Homo sapiens
aacaaaaaaaaaaca

SEQ ID NO: 987525 - DNA, 15 bp, Homo sapiens
acaaaaaaaaaacac

SEQ ID NO: 987526 - DNA, 15 bp, Homo sapiens
caaaaaaaaaacacc

SEQ ID NO: 987527 - DNA, 15 bp, Homo sapiens
aaaaaaaaaacacca

SEQ ID NO: 987528 - DNA, 15 bp, Homo sapiens
aaaaaaaaacaccat

SEQ ID NO: 987529 - DNA, 15 bp, Homo sapiens
aaaaaaaacaccatg

SEQ ID NO: 987530 - DNA, 15 bp, Homo sapiens
aaaaaaacaccatga

SEQ ID NO: 987531 - DNA, 15 bp, Homo sapiens
aaaaaacaccatgaa

SEQ ID NO: 987532 - DNA, 15 bp, Homo sapiens
aaaaacaccatgaag

SEQ ID NO: 987533 - DNA, 15 bp, Homo sapiens
aaaacaccatgaaga

SEQ ID NO: 987534 - DNA, 15 bp, Homo sapiens
aaacaccatgaagaa

SEQ ID NO: 987535 - DNA, 15 bp, Homo sapiens
aacaccatgaagaat

SEQ ID NO: 987536 - DNA, 15 bp, Homo sapiens
acaccatgaagaatt

SEQ ID NO: 987537 - DNA, 15 bp, Homo sapiens
caccatgaagaattg

SEQ ID NO: 987538 - DNA, 15 bp, Homo sapiens
accatgaagaattgt

SEQ ID NO: 987539 - DNA, 15 bp, Homo sapiens
ccatgaagaattgtt

SEQ ID NO: 987540 - DNA, 15 bp, Homo sapiens
catgaagaattgttg

SEQ ID NO: 987541 - DNA, 15 bp, Homo sapiens
atgaagaattgttgg

SEQ ID NO: 987542 - DNA, 15 bp, Homo sapiens
tgaagaattgttggt

SEQ ID NO: 987543 - DNA, 15 bp, Homo sapiens
gaagaattgttggtg

SEQ ID NO: 987544 - DNA, 15 bp, Homo sapiens
aagaattgttggtgc

SEQ ID NO: 987545 - DNA, 15 bp, Homo sapiens
agaattgttggtgct

SEQ ID NO: 987546 - DNA, 15 bp, Homo sapiens
gaattgttggtgctt

SEQ ID NO: 987547 - DNA, 15 bp, Homo sapiens
aattgttggtgcttt

SEQ ID NO: 987548 - DNA, 15 bp, Homo sapiens
attgttggtgctttg

SEQ ID NO: 987549 - DNA, 15 bp, Homo sapiens
ttgttggtgctttgg

SEQ ID NO: 987550 - DNA, 15 bp, Homo sapiens
tgttggtgctttggg

SEQ ID NO: 987551 - DNA, 15 bp, Homo sapiens
gttggtgctttgggc

SEQ ID NO: 987552 - DNA, 15 bp, Homo sapiens
ttggtgctttgggcc

SEQ ID NO: 987553 - DNA, 15 bp, Homo sapiens
tggtgctttgggcct

SEQ ID NO: 987554 - DNA, 15 bp, Homo sapiens
ggtgctttgggcctg

SEQ ID NO: 987555 - DNA, 15 bp, Homo sapiens
gtgctttgggcctgg

SEQ ID NO: 987556 - DNA, 15 bp, Homo sapiens
tgctttgggcctgga

SEQ ID NO: 987557 - DNA, 15 bp, Homo sapiens
gctttgggcctggag

SEQ ID NO: 987558 - DNA, 15 bp, Homo sapiens
ctttgggcctggagg

SEQ ID NO: 987559 - DNA, 15 bp, Homo sapiens
tttgggcctggaggt

SEQ ID NO: 987560 - DNA, 15 bp, Homo sapiens
ttgggcctggaggtg

SEQ ID NO: 987561 - DNA, 15 bp, Homo sapiens
tgggcctggaggtgg

SEQ ID NO: 987562 - DNA, 15 bp, Homo sapiens
gggcctggaggtggc

SEQ ID NO: 987563 - DNA, 15 bp, Homo sapiens
ggcctggaggtggca

SEQ ID NO: 987564 - DNA, 15 bp, Homo sapiens
gcctggaggtggcag

SEQ ID NO: 987565 - DNA, 15 bp, Homo sapiens
cctggaggtggcagc

SEQ ID NO: 987566 - DNA, 15 bp, Homo sapiens
ctggaggtggcagcg

SEQ ID NO: 987567 - DNA, 15 bp, Homo sapiens
tggaggtggcagcgg

SEQ ID NO: 987568 - DNA, 15 bp, Homo sapiens
ggaggtggcagcggg

SEQ ID NO: 987569 - DNA, 15 bp, Homo sapiens
gaggtggcagcggga

SEQ ID NO: 987570 - DNA, 15 bp, Homo sapiens
aggtggcagcgggaa

SEQ ID NO: 987571 - DNA, 15 bp, Homo sapiens
ggtggcagcgggaac

SEQ ID NO: 987572 - DNA, 15 bp, Homo sapiens
gtggcagcgggaacc

SEQ ID NO: 987573 - DNA, 15 bp, Homo sapiens
tggcagcgggaaccc

SEQ ID NO: 987574 - DNA, 15 bp, Homo sapiens
ggcagcgggaaccct

SEQ ID NO: 987575 - DNA, 15 bp, Homo sapiens
gcagcgggaaccctg

SEQ ID NO: 987576 - DNA, 15 bp, Homo sapiens
cagcgggaaccctgt

SEQ ID NO: 987577 - DNA, 15 bp, Homo sapiens
agcgggaaccctgtg

SEQ ID NO: 987578 - DNA, 15 bp, Homo sapiens
gcgggaaccctgtgg

SEQ ID NO: 987579 - DNA, 15 bp, Homo sapiens
cgggaaccctgtggt

SEQ ID NO: 987580 - DNA, 15 bp, Homo sapiens
gggaaccctgtggtc

SEQ ID NO: 987581 - DNA, 15 bp, Homo sapiens
ggaaccctgtggtca

SEQ ID NO: 987582 - DNA, 15 bp, Homo sapiens
gaaccctgtggtcag

SEQ ID NO: 987583 - DNA, 15 bp, Homo sapiens
aaccctgtggtcaga

SEQ ID NO: 987584 - DNA, 15 bp, Homo sapiens
accctgtggtcagag

SEQ ID NO: 987585 - DNA, 15 bp, Homo sapiens
ccctgtggtcagagt

SEQ ID NO: 987586 - DNA, 15 bp, Homo sapiens
cctgtggtcagagta

SEQ ID NO: 987587 - DNA, 15 bp, Homo sapiens
ctgtggtcagagtag

SEQ ID NO: 987588 - DNA, 15 bp, Homo sapiens
tgtggtcagagtagt

SEQ ID NO: 987589 - DNA, 15 bp, Homo sapiens
gtggtcagagtagtg

SEQ ID NO: 987590 - DNA, 15 bp, Homo sapiens
tggtcagagtagtgg

SEQ ID NO: 987591 - DNA, 15 bp, Homo sapiens
ggtcagagtagtggg

SEQ ID NO: 987592 - DNA, 15 bp, Homo sapiens
gtcagagtagtgggt

SEQ ID NO: 987593 - DNA, 15 bp, Homo sapiens
tcagagtagtgggtc

SEQ ID NO: 987594 - DNA, 15 bp, Homo sapiens
cagagtagtgggtcc

SEQ ID NO: 987595 - DNA, 15 bp, Homo sapiens
agagtagtgggtcct

SEQ ID NO: 987596 - DNA, 15 bp, Homo sapiens
gagtagtgggtcctg

SEQ ID NO: 987597 - DNA, 15 bp, Homo sapiens
agtagtgggtcctga

SEQ ID NO: 987598 - DNA, 15 bp, Homo sapiens
gtagtgggtcctgag

SEQ ID NO: 987599 - DNA, 15 bp, Homo sapiens
tagtgggtcctgaga

SEQ ID NO: 987600 - DNA, 15 bp, Homo sapiens
agtgggtcctgagaa

SEQ ID NO: 987601 - DNA, 15 bp, Homo sapiens
gtgggtcctgagaat

SEQ ID NO: 987602 - DNA, 15 bp, Homo sapiens
tgggtcctgagaatg

SEQ ID NO: 987603 - DNA, 15 bp, Homo sapiens
gggtcctgagaatgc

SEQ ID NO: 987604 - DNA, 15 bp, Homo sapiens
ggtcctgagaatgcc

SEQ ID NO: 987605 - DNA, 15 bp, Homo sapiens
gtcctgagaatgcca

SEQ ID NO: 987606 - DNA, 15 bp, Homo sapiens
tcctgagaatgccag

SEQ ID NO: 987607 - DNA, 15 bp, Homo sapiens
cctgagaatgccagg

SEQ ID NO: 987608 - DNA, 15 bp, Homo sapiens
ctgagaatgccaggc

SEQ ID NO: 987609 - DNA, 15 bp, Homo sapiens
tgagaatgccaggcg

SEQ ID NO: 987610 - DNA, 15 bp, Homo sapiens
gagaatgccaggcga

SEQ ID NO: 987611 - DNA, 15 bp, Homo sapiens
agaatgccaggcgac

SEQ ID NO: 987612 - DNA, 15 bp, Homo sapiens
gaatgccaggcgacg

SEQ ID NO: 987613 - DNA, 15 bp, Homo sapiens
aatgccaggcgacgg

SEQ ID NO: 987614 - DNA, 15 bp, Homo sapiens
atgccaggcgacgga

SEQ ID NO: 987615 - DNA, 15 bp, Homo sapiens
tgccaggcgacggag

SEQ ID NO: 987616 - DNA, 15 bp, Homo sapiens
gccaggcgacggagc

SEQ ID NO: 987617 - DNA, 15 bp, Homo sapiens
ccaggcgacggagcc

SEQ ID NO: 987618 - DNA, 15 bp, Homo sapiens
caggcgacggagcct

SEQ ID NO: 987619 - DNA, 15 bp, Homo sapiens
aggcgacggagcctg

SEQ ID NO: 987620 - DNA, 15 bp, Homo sapiens
ggcgacggagcctgg

SEQ ID NO: 987621 - DNA, 15 bp, Homo sapiens
gcgacggagcctggg

SEQ ID NO: 987622 - DNA, 15 bp, Homo sapiens
cgacggagcctgggg

SEQ ID NO: 987623 - DNA, 15 bp, Homo sapiens
gacggagcctggggc

SEQ ID NO: 987624 - DNA, 15 bp, Homo sapiens
acggagcctggggcg

SEQ ID NO: 987625 - DNA, 15 bp, Homo sapiens
cggagcctggggcga

SEQ ID NO: 987626 - DNA, 15 bp, Homo sapiens
ggagcctggggcgag

SEQ ID NO: 987627 - DNA, 15 bp, Homo sapiens
gagcctggggcgaga

SEQ ID NO: 987628 - DNA, 15 bp, Homo sapiens
agcctggggcgagag

SEQ ID NO: 987629 - DNA, 15 bp, Homo sapiens
gcctggggcgagagg

SEQ ID NO: 987630 - DNA, 15 bp, Homo sapiens
cctggggcgagaggg

SEQ ID NO: 987631 - DNA, 15 bp, Homo sapiens
ctggggcgagaggga

SEQ ID NO: 987632 - DNA, 15 bp, Homo sapiens
tggggcgagagggag

SEQ ID NO: 987633 - DNA, 15 bp, Homo sapiens
ggggcgagagggagc

SEQ ID NO: 987634 - DNA, 15 bp, Homo sapiens
gggcgagagggagct

SEQ ID NO: 987635 - DNA, 15 bp, Homo sapiens
ggcgagagggagcta

SEQ ID NO: 987636 - DNA, 15 bp, Homo sapiens
gcgagagggagctac

SEQ ID NO: 987637 - DNA, 15 bp, Homo sapiens
cgagagggagctacc

SEQ ID NO: 987638 - DNA, 15 bp, Homo sapiens
gagagggagctaccc

SEQ ID NO: 987639 - DNA, 15 bp, Homo sapiens
agagggagctacccg

SEQ ID NO: 987640 - DNA, 15 bp, Homo sapiens
gagggagctacccgc

SEQ ID NO: 987641 - DNA, 15 bp, Homo sapiens
agggagctacccgcc

SEQ ID NO: 987642 - DNA, 15 bp, Homo sapiens
gggagctacccgccc

SEQ ID NO: 987643 - DNA, 15 bp, Homo sapiens
ggagctacccgcccg

SEQ ID NO: 987644 - DNA, 15 bp, Homo sapiens
gagctacccgcccgg

SEQ ID NO: 987645 - DNA, 15 bp, Homo sapiens
agctacccgcccggg

SEQ ID NO: 987646 - DNA, 15 bp, Homo sapiens
gctacccgcccgggc

SEQ ID NO: 987647 - DNA, 15 bp, Homo sapiens
ctacccgcccgggcc

SEQ ID NO: 987648 - DNA, 15 bp, Homo sapiens
tacccgcccgggcct

SEQ ID NO: 987649 - DNA, 15 bp, Homo sapiens
acccgcccgggcctg

SEQ ID NO: 987650 - DNA, 15 bp, Homo sapiens
cccgcccgggcctga

SEQ ID NO: 987651 - DNA, 15 bp, Homo sapiens
ccgcccgggcctgat

SEQ ID NO: 987652 - DNA, 15 bp, Homo sapiens
cgcccgggcctgatt

SEQ ID NO: 987653 - DNA, 15 bp, Homo sapiens
gcccgggcctgattt

SEQ ID NO: 987654 - DNA, 15 bp, Homo sapiens
cccgggcctgatttt

SEQ ID NO: 987655 - DNA, 15 bp, Homo sapiens
ccgggcctgattttg

SEQ ID NO: 987656 - DNA, 15 bp, Homo sapiens
cgggcctgattttgt

SEQ ID NO: 987657 - DNA, 15 bp, Homo sapiens
gggcctgattttgtt

SEQ ID NO: 987658 - DNA, 15 bp, Homo sapiens
ggcctgattttgtta

SEQ ID NO: 987659 - DNA, 15 bp, Homo sapiens
gcctgattttgttat

SEQ ID NO: 987660 - DNA, 15 bp, Homo sapiens
cctgattttgttatt

SEQ ID NO: 987661 - DNA, 15 bp, Homo sapiens
ctgattttgttattt

SEQ ID NO: 987662 - DNA, 15 bp, Homo sapiens
tgattttgttatttg

SEQ ID NO: 987663 - DNA, 15 bp, Homo sapiens
gattttgttatttgg

SEQ ID NO: 987664 - DNA, 15 bp, Homo sapiens
attttgttatttgga

SEQ ID NO: 987665 - DNA, 15 bp, Homo sapiens
ttttgttatttggag

SEQ ID NO: 987666 - DNA, 15 bp, Homo sapiens
tttgttatttggagg

SEQ ID NO: 987667 - DNA, 15 bp, Homo sapiens
ttgttatttggagga

SEQ ID NO: 987668 - DNA, 15 bp, Homo sapiens
tgttatttggaggaa

SEQ ID NO: 987669 - DNA, 15 bp, Homo sapiens
gttatttggaggaag

SEQ ID NO: 987670 - DNA, 15 bp, Homo sapiens
ttatttggaggaagt

SEQ ID NO: 987671 - DNA, 15 bp, Homo sapiens
tatttggaggaagta

SEQ ID NO: 987672 - DNA, 15 bp, Homo sapiens
atttggaggaagtag

SEQ ID NO: 987673 - DNA, 15 bp, Homo sapiens
tttggaggaagtagg

SEQ ID NO: 987674 - DNA, 15 bp, Homo sapiens
ttggaggaagtagga

SEQ ID NO: 987675 - DNA, 15 bp, Homo sapiens
tggaggaagtaggat

SEQ ID NO: 987676 - DNA, 15 bp, Homo sapiens
ggaggaagtaggata

SEQ ID NO: 987677 - DNA, 15 bp, Homo sapiens
gaggaagtaggataa

SEQ ID NO: 987678 - DNA, 15 bp, Homo sapiens
aggaagtaggataaa

SEQ ID NO: 987679 - DNA, 15 bp, Homo sapiens
ggaagtaggataaac

SEQ ID NO: 987680 - DNA, 15 bp, Homo sapiens
gaagtaggataaacg

SEQ ID NO: 987681 - DNA, 15 bp, Homo sapiens
aagtaggataaacgc

SEQ ID NO: 987682 - DNA, 15 bp, Homo sapiens
agtaggataaacgct

SEQ ID NO: 987683 - DNA, 15 bp, Homo sapiens
gtaggataaacgctg

SEQ ID NO: 987684 - DNA, 15 bp, Homo sapiens
taggataaacgctgt

SEQ ID NO: 987685 - DNA, 15 bp, Homo sapiens
aggataaacgctgtt

SEQ ID NO: 987686 - DNA, 15 bp, Homo sapiens
ggataaacgctgttt

SEQ ID NO: 987687 - DNA, 15 bp, Homo sapiens
gataaacgctgtttt

SEQ ID NO: 987688 - DNA, 15 bp, Homo sapiens
ataaacgctgttttg

SEQ ID NO: 987689 - DNA, 15 bp, Homo sapiens
taaacgctgttttgc

SEQ ID NO: 987690 - DNA, 15 bp, Homo sapiens
aaacgctgttttgcc

SEQ ID NO: 987691 - DNA, 15 bp, Homo sapiens
aacgctgttttgcct

SEQ ID NO: 987692 - DNA, 15 bp, Homo sapiens
acgctgttttgcctt

SEQ ID NO: 987693 - DNA, 15 bp, Homo sapiens
cgctgttttgcctta

SEQ ID NO: 987694 - DNA, 15 bp, Homo sapiens
gctgttttgccttat

SEQ ID NO: 987695 - DNA, 15 bp, Homo sapiens
ctgttttgccttata

SEQ ID NO: 987696 - DNA, 15 bp, Homo sapiens
tgttttgccttatat

SEQ ID NO: 987697 - DNA, 15 bp, Homo sapiens
gttttgccttatata

SEQ ID NO: 987698 - DNA, 15 bp, Homo sapiens
ttttgccttatataa

SEQ ID NO: 987699 - DNA, 15 bp, Homo sapiens
tttgccttatataat

SEQ ID NO: 987700 - DNA, 15 bp, Homo sapiens
ttgccttatataatc

SEQ ID NO: 987701 - DNA, 15 bp, Homo sapiens
tgccttatataatcg

SEQ ID NO: 987702 - DNA, 15 bp, Homo sapiens
gccttatataatcgc

SEQ ID NO: 987703 - DNA, 15 bp, Homo sapiens
ccttatataatcgca

SEQ ID NO: 987704 - DNA, 15 bp, Homo sapiens
cttatataatcgcat

SEQ ID NO: 987705 - DNA, 15 bp, Homo sapiens
ttatataatcgcatc

SEQ ID NO: 987706 - DNA, 15 bp, Homo sapiens
tatataatcgcatcc

SEQ ID NO: 987707 - DNA, 15 bp, Homo sapiens
atataatcgcatcct

SEQ ID NO: 987708 - DNA, 15 bp, Homo sapiens
tataatcgcatcctt

SEQ ID NO: 987709 - DNA, 15 bp, Homo sapiens
ataatcgcatccttc

SEQ ID NO: 987710 - DNA, 15 bp, Homo sapiens
taatcgcatccttcc

SEQ ID NO: 987711 - DNA, 15 bp, Homo sapiens
aatcgcatccttcct

SEQ ID NO: 987712 - DNA, 15 bp, Homo sapiens
atcgcatccttcctc

SEQ ID NO: 987713 - DNA, 15 bp, Homo sapiens
tcgcatccttcctct

SEQ ID NO: 987714 - DNA, 15 bp, Homo sapiens
cgcatccttcctctg

SEQ ID NO: 987715 - DNA, 15 bp, Homo sapiens
gcatccttcctctgg

SEQ ID NO: 987716 - DNA, 15 bp, Homo sapiens
catccttcctctggc

SEQ ID NO: 987717 - DNA, 15 bp, Homo sapiens
atccttcctctggct

SEQ ID NO: 987718 - DNA, 15 bp, Homo sapiens
tccttcctctggctg

SEQ ID NO: 987719 - DNA, 15 bp, Homo sapiens
ccttcctctggctgg

SEQ ID NO: 987720 - DNA, 15 bp, Homo sapiens
cttcctctggctggt

SEQ ID NO: 987721 - DNA, 15 bp, Homo sapiens
ttcctctggctggtt

SEQ ID NO: 987722 - DNA, 15 bp, Homo sapiens
tcctctggctggttt

SEQ ID NO: 987723 - DNA, 15 bp, Homo sapiens
cctctggctggttta

SEQ ID NO: 987724 - DNA, 15 bp, Homo sapiens
ctctggctggtttaa

SEQ ID NO: 987725 - DNA, 15 bp, Homo sapiens
tctggctggtttaaa

SEQ ID NO: 987726 - DNA, 15 bp, Homo sapiens
ctggctggtttaaaa

SEQ ID NO: 987727 - DNA, 15 bp, Homo sapiens
tggctggtttaaaat

SEQ ID NO: 987728 - DNA, 15 bp, Homo sapiens
ggctggtttaaaatt

SEQ ID NO: 987729 - DNA, 15 bp, Homo sapiens
gctggtttaaaatta

SEQ ID NO: 987730 - DNA, 15 bp, Homo sapiens
ctggtttaaaattag

SEQ ID NO: 987731 - DNA, 15 bp, Homo sapiens
tggtttaaaattagg

SEQ ID NO: 987732 - DNA, 15 bp, Homo sapiens
ggtttaaaattaggt

SEQ ID NO: 987733 - DNA, 15 bp, Homo sapiens
gtttaaaattaggtg

SEQ ID NO: 987734 - DNA, 15 bp, Homo sapiens
tttaaaattaggtgg

SEQ ID NO: 987735 - DNA, 15 bp, Homo sapiens
ttaaaattaggtggg

SEQ ID NO: 987736 - DNA, 15 bp, Homo sapiens
taaaattaggtgggg

SEQ ID NO: 987737 - DNA, 15 bp, Homo sapiens
aaaattaggtggggg

SEQ ID NO: 987738 - DNA, 15 bp, Homo sapiens
aaattaggtgggggt

SEQ ID NO: 987739 - DNA, 15 bp, Homo sapiens
aattaggtgggggtg

SEQ ID NO: 987740 - DNA, 15 bp, Homo sapiens
attaggtgggggtgg

SEQ ID NO: 987741 - DNA, 15 bp, Homo sapiens
ttaggtgggggtgga

SEQ ID NO: 987742 - DNA, 15 bp, Homo sapiens
taggtgggggtggag

SEQ ID NO: 987743 - DNA, 15 bp, Homo sapiens
aggtgggggtggagg

SEQ ID NO: 987744 - DNA, 15 bp, Homo sapiens
ggtgggggtggaggg

SEQ ID NO: 987745 - DNA, 15 bp, Homo sapiens
gtgggggtggaggga

SEQ ID NO: 987746 - DNA, 15 bp, Homo sapiens
tgggggtggagggat

SEQ ID NO: 987747 - DNA, 15 bp, Homo sapiens
gggggtggagggatg

SEQ ID NO: 987748 - DNA, 15 bp, Homo sapiens
ggggtggagggatgg

SEQ ID NO: 987749 - DNA, 15 bp, Homo sapiens
gggtggagggatggg

SEQ ID NO: 987750 - DNA, 15 bp, Homo sapiens
ggtggagggatgggg

SEQ ID NO: 987751 - DNA, 15 bp, Homo sapiens
gtggagggatgggga

SEQ ID NO: 987752 - DNA, 15 bp, Homo sapiens
tggagggatggggag

SEQ ID NO: 987753 - DNA, 15 bp, Homo sapiens
ggagggatggggagt

SEQ ID NO: 987754 - DNA, 15 bp, Homo sapiens
gagggatggggagtg

SEQ ID NO: 987755 - DNA, 15 bp, Homo sapiens
agggatggggagtgt

SEQ ID NO: 987756 - DNA, 15 bp, Homo sapiens
gggatggggagtgtt

SEQ ID NO: 987757 - DNA, 15 bp, Homo sapiens
ggatggggagtgttg

SEQ ID NO: 987758 - DNA, 15 bp, Homo sapiens
gatggggagtgttgc

SEQ ID NO: 987759 - DNA, 15 bp, Homo sapiens
atggggagtgttgca

SEQ ID NO: 987760 - DNA, 15 bp, Homo sapiens
tggggagtgttgcat

SEQ ID NO: 987761 - DNA, 15 bp, Homo sapiens
ggggagtgttgcatt

SEQ ID NO: 987762 - DNA, 15 bp, Homo sapiens
gggagtgttgcattg

SEQ ID NO: 987763 - DNA, 15 bp, Homo sapiens
ggagtgttgcattgg

SEQ ID NO: 987764 - DNA, 15 bp, Homo sapiens
gagtgttgcattggg

SEQ ID NO: 987765 - DNA, 15 bp, Homo sapiens
agtgttgcattggga

SEQ ID NO: 987766 - DNA, 15 bp, Homo sapiens
gtgttgcattgggag

SEQ ID NO: 987767 - DNA, 15 bp, Homo sapiens
tgttgcattgggagg

SEQ ID NO: 987768 - DNA, 15 bp, Homo sapiens
gttgcattgggagga

SEQ ID NO: 987769 - DNA, 15 bp, Homo sapiens
ttgcattgggaggaa

SEQ ID NO: 987770 - DNA, 15 bp, Homo sapiens
tgcattgggaggaag

SEQ ID NO: 987771 - DNA, 15 bp, Homo sapiens
gcattgggaggaagc

SEQ ID NO: 987772 - DNA, 15 bp, Homo sapiens
cattgggaggaagcc

SEQ ID NO: 987773 - DNA, 15 bp, Homo sapiens
attgggaggaagcct

SEQ ID NO: 987774 - DNA, 15 bp, Homo sapiens
ttgggaggaagcctc

SEQ ID NO: 987775 - DNA, 15 bp, Homo sapiens
tgggaggaagcctca

SEQ ID NO: 987776 - DNA, 15 bp, Homo sapiens
gggaggaagcctcat

SEQ ID NO: 987777 - DNA, 15 bp, Homo sapiens
ggaggaagcctcata

SEQ ID NO: 987778 - DNA, 15 bp, Homo sapiens
gaggaagcctcatag

SEQ ID NO: 987779 - DNA, 15 bp, Homo sapiens
aggaagcctcatagc

SEQ ID NO: 987780 - DNA, 15 bp, Homo sapiens
ggaagcctcatagct

SEQ ID NO: 987781 - DNA, 15 bp, Homo sapiens
gaagcctcatagctt

SEQ ID NO: 987782 - DNA, 15 bp, Homo sapiens
aagcctcatagcttc

SEQ ID NO: 987783 - DNA, 15 bp, Homo sapiens
agcctcatagcttca

SEQ ID NO: 987784 - DNA, 15 bp, Homo sapiens
gcctcatagcttcat

SEQ ID NO: 987785 - DNA, 15 bp, Homo sapiens
cctcatagcttcatg

SEQ ID NO: 987786 - DNA, 15 bp, Homo sapiens
ctcatagcttcatgg

SEQ ID NO: 987787 - DNA, 15 bp, Homo sapiens
tcatagcttcatggt

SEQ ID NO: 987788 - DNA, 15 bp, Homo sapiens
catagcttcatggtt

SEQ ID NO: 987789 - DNA, 15 bp, Homo sapiens
atagcttcatggttt

SEQ ID NO: 987790 - DNA, 15 bp, Homo sapiens
tagcttcatggtttt

SEQ ID NO: 987791 - DNA, 15 bp, Homo sapiens
agcttcatggttttg

SEQ ID NO: 987792 - DNA, 15 bp, Homo sapiens
gcttcatggttttga

SEQ ID NO: 987793 - DNA, 15 bp, Homo sapiens
cttcatggttttgat

SEQ ID NO: 987794 - DNA, 15 bp, Homo sapiens
ttcatggttttgata

SEQ ID NO: 987795 - DNA, 15 bp, Homo sapiens
tcatggttttgatac

SEQ ID NO: 987796 - DNA, 15 bp, Homo sapiens
catggttttgataca

SEQ ID NO: 987797 - DNA, 15 bp, Homo sapiens
atggttttgatacac

SEQ ID NO: 987798 - DNA, 15 bp, Homo sapiens
tggttttgatacaca

SEQ ID NO: 987799 - DNA, 15 bp, Homo sapiens
ggttttgatacacat

SEQ ID NO: 987800 - DNA, 15 bp, Homo sapiens
gttttgatacacatg

SEQ ID NO: 987801 - DNA, 15 bp, Homo sapiens
ttttgatacacatgt

SEQ ID NO: 987802 - DNA, 15 bp, Homo sapiens
tttgatacacatgtg

SEQ ID NO: 987803 - DNA, 15 bp, Homo sapiens
ttgatacacatgtgc

SEQ ID NO: 987804 - DNA, 15 bp, Homo sapiens
tgatacacatgtgcg

SEQ ID NO: 987805 - DNA, 15 bp, Homo sapiens
gatacacatgtgcga

SEQ ID NO: 987806 - DNA, 15 bp, Homo sapiens
atacacatgtgcgat

SEQ ID NO: 987807 - DNA, 15 bp, Homo sapiens
tacacatgtgcgatc

SEQ ID NO: 987808 - DNA, 15 bp, Homo sapiens
acacatgtgcgatcc

SEQ ID NO: 987809 - DNA, 15 bp, Homo sapiens
cacatgtgcgatccc

SEQ ID NO: 987810 - DNA, 15 bp, Homo sapiens
acatgtgcgatcccg

SEQ ID NO: 987811 - DNA, 15 bp, Homo sapiens
catgtgcgatcccgg

SEQ ID NO: 987812 - DNA, 15 bp, Homo sapiens
atgtgcgatcccggt

SEQ ID NO: 987813 - DNA, 15 bp, Homo sapiens
tgtgcgatcccggtc

SEQ ID NO: 987814 - DNA, 15 bp, Homo sapiens
gtgcgatcccggtca

SEQ ID NO: 987815 - DNA, 15 bp, Homo sapiens
tgcgatcccggtcac

SEQ ID NO: 987816 - DNA, 15 bp, Homo sapiens
gcgatcccggtcacc

SEQ ID NO: 987817 - DNA, 15 bp, Homo sapiens
cgatcccggtcacct

SEQ ID NO: 987818 - DNA, 15 bp, Homo sapiens
gatcccggtcacctg

SEQ ID NO: 987819 - DNA, 15 bp, Homo sapiens
atcccggtcacctgg

SEQ ID NO: 987820 - DNA, 15 bp, Homo sapiens
tcccggtcacctgga

SEQ ID NO: 987821 - DNA, 15 bp, Homo sapiens
cccggtcacctggat

SEQ ID NO: 987822 - DNA, 15 bp, Homo sapiens
ccggtcacctggatt

SEQ ID NO: 987823 - DNA, 15 bp, Homo sapiens
cggtcacctggattt

SEQ ID NO: 987824 - DNA, 15 bp, Homo sapiens
ggtcacctggatttc

SEQ ID NO: 987825 - DNA, 15 bp, Homo sapiens
gtcacctggatttca

SEQ ID NO: 987826 - DNA, 15 bp, Homo sapiens
tcacctggatttcat

SEQ ID NO: 987827 - DNA, 15 bp, Homo sapiens
cacctggatttcata

SEQ ID NO: 987828 - DNA, 15 bp, Homo sapiens
acctggatttcataa

SEQ ID NO: 987829 - DNA, 15 bp, Homo sapiens
cctggatttcataat

SEQ ID NO: 987830 - DNA, 15 bp, Homo sapiens
ctggatttcataatt

SEQ ID NO: 987831 - DNA, 15 bp, Homo sapiens
tggatttcataattc

SEQ ID NO: 987832 - DNA, 15 bp, Homo sapiens
ggatttcataattca

SEQ ID NO: 987833 - DNA, 15 bp, Homo sapiens
gatttcataattcaa

SEQ ID NO: 987834 - DNA, 15 bp, Homo sapiens
atttcataattcaaa

SEQ ID NO: 987835 - DNA, 15 bp, Homo sapiens
tttcataattcaaat

SEQ ID NO: 987836 - DNA, 15 bp, Homo sapiens
ttcataattcaaatg

SEQ ID NO: 987837 - DNA, 15 bp, Homo sapiens
tcataattcaaatgt

SEQ ID NO: 987838 - DNA, 15 bp, Homo sapiens
cataattcaaatgta

SEQ ID NO: 987839 - DNA, 15 bp, Homo sapiens
ataattcaaatgtaa

SEQ ID NO: 987840 - DNA, 15 bp, Homo sapiens
taattcaaatgtaac

SEQ ID NO: 987841 - DNA, 15 bp, Homo sapiens
aattcaaatgtaacc

SEQ ID NO: 987842 - DNA, 15 bp, Homo sapiens
attcaaatgtaaccc

SEQ ID NO: 987843 - DNA, 15 bp, Homo sapiens
ttcaaatgtaacccg

SEQ ID NO: 987844 - DNA, 15 bp, Homo sapiens
tcaaatgtaacccga

SEQ ID NO: 987845 - DNA, 15 bp, Homo sapiens
caaatgtaacccgaa

SEQ ID NO: 987846 - DNA, 15 bp, Homo sapiens
aaatgtaacccgaag

SEQ ID NO: 987847 - DNA, 15 bp, Homo sapiens
aatgtaacccgaagg

SEQ ID NO: 987848 - DNA, 15 bp, Homo sapiens
atgtaacccgaagga

SEQ ID NO: 987849 - DNA, 15 bp, Homo sapiens
tgtaacccgaaggac

SEQ ID NO: 987850 - DNA, 15 bp, Homo sapiens
gtaacccgaaggacc

SEQ ID NO: 987851 - DNA, 15 bp, Homo sapiens
taacccgaaggacca

SEQ ID NO: 987852 - DNA, 15 bp, Homo sapiens
aacccgaaggaccag

SEQ ID NO: 987853 - DNA, 15 bp, Homo sapiens
acccgaaggaccagc

SEQ ID NO: 987854 - DNA, 15 bp, Homo sapiens
cccgaaggaccagct

SEQ ID NO: 987855 - DNA, 15 bp, Homo sapiens
ccgaaggaccagctg

SEQ ID NO: 987856 - DNA, 15 bp, Homo sapiens
cgaaggaccagctgg

SEQ ID NO: 987857 - DNA, 15 bp, Homo sapiens
gaaggaccagctgga

SEQ ID NO: 987858 - DNA, 15 bp, Homo sapiens
aaggaccagctggaa

SEQ ID NO: 987859 - DNA, 15 bp, Homo sapiens
aggaccagctggaat

SEQ ID NO: 987860 - DNA, 15 bp, Homo sapiens
ggaccagctggaatt

SEQ ID NO: 987861 - DNA, 15 bp, Homo sapiens
gaccagctggaatta

SEQ ID NO: 987862 - DNA, 15 bp, Homo sapiens
accagctggaattac

SEQ ID NO: 987863 - DNA, 15 bp, Homo sapiens
ccagctggaattacc

SEQ ID NO: 987864 - DNA, 15 bp, Homo sapiens
cagctggaattaccc

SEQ ID NO: 987865 - DNA, 15 bp, Homo sapiens
agctggaattaccct

SEQ ID NO: 987866 - DNA, 15 bp, Homo sapiens
gctggaattaccctg

SEQ ID NO: 987867 - DNA, 15 bp, Homo sapiens
ctggaattaccctgc

SEQ ID NO: 987868 - DNA, 15 bp, Homo sapiens
tggaattaccctgcc

SEQ ID NO: 987869 - DNA, 15 bp, Homo sapiens
ggaattaccctgccc

SEQ ID NO: 987870 - DNA, 15 bp, Homo sapiens
gaattaccctgccca

SEQ ID NO: 987871 - DNA, 15 bp, Homo sapiens
aattaccctgcccag

SEQ ID NO: 987872 - DNA, 15 bp, Homo sapiens
attaccctgcccagg

SEQ ID NO: 987873 - DNA, 15 bp, Homo sapiens
ttaccctgcccaggc

SEQ ID NO: 987874 - DNA, 15 bp, Homo sapiens
taccctgcccaggcg

SEQ ID NO: 987875 - DNA, 15 bp, Homo sapiens
accctgcccaggcgc

SEQ ID NO: 987876 - DNA, 15 bp, Homo sapiens
ccctgcccaggcgca

SEQ ID NO: 987877 - DNA, 15 bp, Homo sapiens
cctgcccaggcgcac

SEQ ID NO: 987878 - DNA, 15 bp, Homo sapiens
ctgcccaggcgcaca

SEQ ID NO: 987879 - DNA, 15 bp, Homo sapiens
tgcccaggcgcacag

SEQ ID NO: 987880 - DNA, 15 bp, Homo sapiens
gcccaggcgcacagt

SEQ ID NO: 987881 - DNA, 15 bp, Homo sapiens
cccaggcgcacagtg

SEQ ID NO: 987882 - DNA, 15 bp, Homo sapiens
ccaggcgcacagtgc

SEQ ID NO: 987883 - DNA, 15 bp, Homo sapiens
caggcgcacagtgct

SEQ ID NO: 987884 - DNA, 15 bp, Homo sapiens
aggcgcacagtgctt

SEQ ID NO: 987885 - DNA, 15 bp, Homo sapiens
ggcgcacagtgcttc

SEQ ID NO: 987886 - DNA, 15 bp, Homo sapiens
gcgcacagtgcttca

SEQ ID NO: 987887 - DNA, 15 bp, Homo sapiens
cgcacagtgcttcaa

SEQ ID NO: 987888 - DNA, 15 bp, Homo sapiens
gcacagtgcttcaaa

SEQ ID NO: 987889 - DNA, 15 bp, Homo sapiens
cacagtgcttcaaaa

SEQ ID NO: 987890 - DNA, 15 bp, Homo sapiens
acagtgcttcaaaac

SEQ ID NO: 987891 - DNA, 15 bp, Homo sapiens
cagtgcttcaaaacc

SEQ ID NO: 987892 - DNA, 15 bp, Homo sapiens
agtgcttcaaaaccc

SEQ ID NO: 987893 - DNA, 15 bp, Homo sapiens
gtgcttcaaaacccc

SEQ ID NO: 987894 - DNA, 15 bp, Homo sapiens
tgcttcaaaacccca

SEQ ID NO: 987895 - DNA, 15 bp, Homo sapiens
gcttcaaaaccccac

SEQ ID NO: 987896 - DNA, 15 bp, Homo sapiens
cttcaaaaccccacg

SEQ ID NO: 987897 - DNA, 15 bp, Homo sapiens
ttcaaaaccccacgt

SEQ ID NO: 987898 - DNA, 15 bp, Homo sapiens
tcaaaaccccacgta

SEQ ID NO: 987899 - DNA, 15 bp, Homo sapiens
caaaaccccacgtag

SEQ ID NO: 987900 - DNA, 15 bp, Homo sapiens
aaaaccccacgtaga

SEQ ID NO: 987901 - DNA, 15 bp, Homo sapiens
aaaccccacgtagag

SEQ ID NO: 987902 - DNA, 15 bp, Homo sapiens
aaccccacgtagagc

SEQ ID NO: 987903 - DNA, 15 bp, Homo sapiens
accccacgtagagcc

SEQ ID NO: 987904 - DNA, 15 bp, Homo sapiens
ccccacgtagagcca

SEQ ID NO: 987905 - DNA, 15 bp, Homo sapiens
cccacgtagagccag

SEQ ID NO: 987906 - DNA, 15 bp, Homo sapiens
ccacgtagagccagg

SEQ ID NO: 987907 - DNA, 15 bp, Homo sapiens
cacgtagagccagga

SEQ ID NO: 987908 - DNA, 15 bp, Homo sapiens
acgtagagccaggag

SEQ ID NO: 987909 - DNA, 15 bp, Homo sapiens
cgtagagccaggagc

SEQ ID NO: 987910 - DNA, 15 bp, Homo sapiens
gtagagccaggagca

SEQ ID NO: 987911 - DNA, 15 bp, Homo sapiens
tagagccaggagcaa

SEQ ID NO: 987912 - DNA, 15 bp, Homo sapiens
agagccaggagcaag

SEQ ID NO: 987913 - DNA, 15 bp, Homo sapiens
gagccaggagcaaga

SEQ ID NO: 987914 - DNA, 15 bp, Homo sapiens
agccaggagcaagag

SEQ ID NO: 987915 - DNA, 15 bp, Homo sapiens
gccaggagcaagagt

SEQ ID NO: 987916 - DNA, 15 bp, Homo sapiens
ccaggagcaagagta

SEQ ID NO: 987917 - DNA, 15 bp, Homo sapiens
caggagcaagagtat

SEQ ID NO: 987918 - DNA, 15 bp, Homo sapiens
aggagcaagagtata

SEQ ID NO: 987919 - DNA, 15 bp, Homo sapiens
ggagcaagagtatat

SEQ ID NO: 987920 - DNA, 15 bp, Homo sapiens
gagcaagagtatata

SEQ ID NO: 987921 - DNA, 15 bp, Homo sapiens
agcaagagtatatac

SEQ ID NO: 987922 - DNA, 15 bp, Homo sapiens
gcaagagtatataca

SEQ ID NO: 987923 - DNA, 15 bp, Homo sapiens
caagagtatatacac

SEQ ID NO: 987924 - DNA, 15 bp, Homo sapiens
aagagtatatacacg

SEQ ID NO: 987925 - DNA, 15 bp, Homo sapiens
agagtatatacacgc

SEQ ID NO: 987926 - DNA, 15 bp, Homo sapiens
gagtatatacacgct

SEQ ID NO: 987927 - DNA, 15 bp, Homo sapiens
agtatatacacgcta

SEQ ID NO: 987928 - DNA, 15 bp, Homo sapiens
gtatatacacgctag

SEQ ID NO: 987929 - DNA, 15 bp, Homo sapiens
tatatacacgctagg

SEQ ID NO: 987930 - DNA, 15 bp, Homo sapiens
atatacacgctagga

SEQ ID NO: 987931 - DNA, 15 bp, Homo sapiens
tatacacgctaggaa

SEQ ID NO: 987932 - DNA, 15 bp, Homo sapiens
atacacgctaggaac

SEQ ID NO: 987933 - DNA, 15 bp, Homo sapiens
tacacgctaggaact

SEQ ID NO: 987934 - DNA, 15 bp, Homo sapiens
acacgctaggaactt

SEQ ID NO: 987935 - DNA, 15 bp, Homo sapiens
cacgctaggaacttg

SEQ ID NO: 987936 - DNA, 15 bp, Homo sapiens
acgctaggaacttgg

SEQ ID NO: 987937 - DNA, 15 bp, Homo sapiens
cgctaggaacttggt

SEQ ID NO: 987938 - DNA, 15 bp, Homo sapiens
gctaggaacttggta

SEQ ID NO: 987939 - DNA, 15 bp, Homo sapiens
ctaggaacttggtat

SEQ ID NO: 987940 - DNA, 15 bp, Homo sapiens
taggaacttggtatc

SEQ ID NO: 987941 - DNA, 15 bp, Homo sapiens
aggaacttggtatct

SEQ ID NO: 987942 - DNA, 15 bp, Homo sapiens
ggaacttggtatctg

SEQ ID NO: 987943 - DNA, 15 bp, Homo sapiens
gaacttggtatctga

SEQ ID NO: 987944 - DNA, 15 bp, Homo sapiens
aacttggtatctgag

SEQ ID NO: 987945 - DNA, 15 bp, Homo sapiens
acttggtatctgagc

SEQ ID NO: 987946 - DNA, 15 bp, Homo sapiens
cttggtatctgagct

SEQ ID NO: 987947 - DNA, 15 bp, Homo sapiens
ttggtatctgagctg

SEQ ID NO: 987948 - DNA, 15 bp, Homo sapiens
tggtatctgagctga

SEQ ID NO: 987949 - DNA, 15 bp, Homo sapiens
ggtatctgagctgag

SEQ ID NO: 987950 - DNA, 15 bp, Homo sapiens
gtatctgagctgaga

SEQ ID NO: 987951 - DNA, 15 bp, Homo sapiens
tatctgagctgagac

SEQ ID NO: 987952 - DNA, 15 bp, Homo sapiens
atctgagctgagaca

SEQ ID NO: 987953 - DNA, 15 bp, Homo sapiens
tctgagctgagacac

SEQ ID NO: 987954 - DNA, 15 bp, Homo sapiens
ctgagctgagacacc

SEQ ID NO: 987955 - DNA, 15 bp, Homo sapiens
tgagctgagacacct

SEQ ID NO: 987956 - DNA, 15 bp, Homo sapiens
gagctgagacacctg

SEQ ID NO: 987957 - DNA, 15 bp, Homo sapiens
agctgagacacctga

SEQ ID NO: 987958 - DNA, 15 bp, Homo sapiens
gctgagacacctgag

SEQ ID NO: 987959 - DNA, 15 bp, Homo sapiens
ctgagacacctgagt

SEQ ID NO: 987960 - DNA, 15 bp, Homo sapiens
tgagacacctgagtc

SEQ ID NO: 987961 - DNA, 15 bp, Homo sapiens
gagacacctgagtcc

SEQ ID NO: 987962 - DNA, 15 bp, Homo sapiens
agacacctgagtcct

SEQ ID NO: 987963 - DNA, 15 bp, Homo sapiens
gacacctgagtcctc

SEQ ID NO: 987964 - DNA, 15 bp, Homo sapiens
acacctgagtcctcc

SEQ ID NO: 987965 - DNA, 15 bp, Homo sapiens
cacctgagtcctcct

SEQ ID NO: 987966 - DNA, 15 bp, Homo sapiens
acctgagtcctcctg

SEQ ID NO: 987967 - DNA, 15 bp, Homo sapiens
cctgagtcctcctga

SEQ ID NO: 987968 - DNA, 15 bp, Homo sapiens
ctgagtcctcctgag

SEQ ID NO: 987969 - DNA, 15 bp, Homo sapiens
tgagtcctcctgagg

SEQ ID NO: 987970 - DNA, 15 bp, Homo sapiens
gagtcctcctgaggg

SEQ ID NO: 987971 - DNA, 15 bp, Homo sapiens
agtcctcctgagggc

SEQ ID NO: 987972 - DNA, 15 bp, Homo sapiens
gtcctcctgagggcc

SEQ ID NO: 987973 - DNA, 15 bp, Homo sapiens
tcctcctgagggccc

SEQ ID NO: 987974 - DNA, 15 bp, Homo sapiens
cctcctgagggcccg

SEQ ID NO: 987975 - DNA, 15 bp, Homo sapiens
ctcctgagggcccgg

SEQ ID NO: 987976 - DNA, 15 bp, Homo sapiens
tcctgagggcccggc

SEQ ID NO: 987977 - DNA, 15 bp, Homo sapiens
cctgagggcccggcc

SEQ ID NO: 987978 - DNA, 15 bp, Homo sapiens
ctgagggcccggcct

SEQ ID NO: 987979 - DNA, 15 bp, Homo sapiens
tgagggcccggccta

SEQ ID NO: 987980 - DNA, 15 bp, Homo sapiens
gagggcccggcctag

SEQ ID NO: 987981 - DNA, 15 bp, Homo sapiens
agggcccggcctagt

SEQ ID NO: 987982 - DNA, 15 bp, Homo sapiens
gggcccggcctagtt

SEQ ID NO: 987983 - DNA, 15 bp, Homo sapiens
ggcccggcctagttt

SEQ ID NO: 987984 - DNA, 15 bp, Homo sapiens
gcccggcctagttta

SEQ ID NO: 987985 - DNA, 15 bp, Homo sapiens
cccggcctagtttag

SEQ ID NO: 987986 - DNA, 15 bp, Homo sapiens
ccggcctagtttaga

SEQ ID NO: 987987 - DNA, 15 bp, Homo sapiens
cggcctagtttagaa

SEQ ID NO: 987988 - DNA, 15 bp, Homo sapiens
ggcctagtttagaaa

SEQ ID NO: 987989 - DNA, 15 bp, Homo sapiens
gcctagtttagaaag

SEQ ID NO: 987990 - DNA, 15 bp, Homo sapiens
cctagtttagaaagg

SEQ ID NO: 987991 - DNA, 15 bp, Homo sapiens
ctagtttagaaaggg

SEQ ID NO: 987992 - DNA, 15 bp, Homo sapiens
tagtttagaaagggc

SEQ ID NO: 987993 - DNA, 15 bp, Homo sapiens
agtttagaaagggcg

SEQ ID NO: 987994 - DNA, 15 bp, Homo sapiens
gtttagaaagggcga

SEQ ID NO: 987995 - DNA, 15 bp, Homo sapiens
tttagaaagggcgag

SEQ ID NO: 987996 - DNA, 15 bp, Homo sapiens
ttagaaagggcgaga

SEQ ID NO: 987997 - DNA, 15 bp, Homo sapiens
tagaaagggcgagaa

SEQ ID NO: 987998 - DNA, 15 bp, Homo sapiens
agaaagggcgagaat

SEQ ID NO: 987999 - DNA, 15 bp, Homo sapiens
gaaagggcgagaatt

SEQ ID NO: 988000 - DNA, 15 bp, Homo sapiens
aaagggcgagaattt

SEQ ID NO: 988001 - DNA, 15 bp, Homo sapiens
aagggcgagaatttt

SEQ ID NO: 988002 - DNA, 15 bp, Homo sapiens
agggcgagaattttg

SEQ ID NO: 988003 - DNA, 15 bp, Homo sapiens
gggcgagaattttgc

SEQ ID NO: 988004 - DNA, 15 bp, Homo sapiens
ggcgagaattttgca

SEQ ID NO: 988005 - DNA, 15 bp, Homo sapiens
gcgagaattttgcag

SEQ ID NO: 988006 - DNA, 15 bp, Homo sapiens
cgagaattttgcagg

SEQ ID NO: 988007 - DNA, 15 bp, Homo sapiens
gagaattttgcaggt

SEQ ID NO: 988008 - DNA, 15 bp, Homo sapiens
agaattttgcaggtc

SEQ ID NO: 988009 - DNA, 15 bp, Homo sapiens
gaattttgcaggtct

SEQ ID NO: 988010 - DNA, 15 bp, Homo sapiens
aattttgcaggtctc

SEQ ID NO: 988011 - DNA, 15 bp, Homo sapiens
attttgcaggtctct

SEQ ID NO: 988012 - DNA, 15 bp, Homo sapiens
ttttgcaggtctctt

SEQ ID NO: 988013 - DNA, 15 bp, Homo sapiens
tttgcaggtctcttg

SEQ ID NO: 988014 - DNA, 15 bp, Homo sapiens
ttgcaggtctcttga

SEQ ID NO: 988015 - DNA, 15 bp, Homo sapiens
tgcaggtctcttgag

SEQ ID NO: 988016 - DNA, 15 bp, Homo sapiens
gcaggtctcttgaga

SEQ ID NO: 988017 - DNA, 15 bp, Homo sapiens
caggtctcttgagag

SEQ ID NO: 988018 - DNA, 15 bp, Homo sapiens
aggtctcttgagagt

SEQ ID NO: 988019 - DNA, 15 bp, Homo sapiens
ggtctcttgagagtc

SEQ ID NO: 988020 - DNA, 15 bp, Homo sapiens
gtctcttgagagtct

SEQ ID NO: 988021 - DNA, 15 bp, Homo sapiens
tctcttgagagtctc

SEQ ID NO: 988022 - DNA, 15 bp, Homo sapiens
ctcttgagagtctct

SEQ ID NO: 988023 - DNA, 15 bp, Homo sapiens
tcttgagagtctctg

SEQ ID NO: 988024 - DNA, 15 bp, Homo sapiens
cttgagagtctctga

SEQ ID NO: 988025 - DNA, 15 bp, Homo sapiens
ttgagagtctctgac

SEQ ID NO: 988026 - DNA, 15 bp, Homo sapiens
tgagagtctctgaca

SEQ ID NO: 988027 - DNA, 15 bp, Homo sapiens
gagagtctctgacag

SEQ ID NO: 988028 - DNA, 15 bp, Homo sapiens
agagtctctgacagt

SEQ ID NO: 988029 - DNA, 15 bp, Homo sapiens
gagtctctgacagtg

SEQ ID NO: 988030 - DNA, 15 bp, Homo sapiens
agtctctgacagtgt

SEQ ID NO: 988031 - DNA, 15 bp, Homo sapiens
gtctctgacagtgtt

SEQ ID NO: 988032 - DNA, 15 bp, Homo sapiens
tctctgacagtgttg

SEQ ID NO: 988033 - DNA, 15 bp, Homo sapiens
ctctgacagtgttgt

SEQ ID NO: 988034 - DNA, 15 bp, Homo sapiens
tctgacagtgttgtt

SEQ ID NO: 988035 - DNA, 15 bp, Homo sapiens
ctgacagtgttgtta

SEQ ID NO: 988036 - DNA, 15 bp, Homo sapiens
tgacagtgttgttaa

SEQ ID NO: 988037 - DNA, 15 bp, Homo sapiens
gacagtgttgttaat

SEQ ID NO: 988038 - DNA, 15 bp, Homo sapiens
acagtgttgttaatt

SEQ ID NO: 988039 - DNA, 15 bp, Homo sapiens
cagtgttgttaattt

SEQ ID NO: 988040 - DNA, 15 bp, Homo sapiens
agtgttgttaatttg

SEQ ID NO: 988041 - DNA, 15 bp, Homo sapiens
gtgttgttaatttgt

SEQ ID NO: 988042 - DNA, 15 bp, Homo sapiens
tgttgttaatttgta

SEQ ID NO: 988043 - DNA, 15 bp, Homo sapiens
gttgttaatttgtaa

SEQ ID NO: 988044 - DNA, 15 bp, Homo sapiens
ttgttaatttgtaaa

SEQ ID NO: 988045 - DNA, 15 bp, Homo sapiens
tgttaatttgtaaat

SEQ ID NO: 988046 - DNA, 15 bp, Homo sapiens
gttaatttgtaaatt

SEQ ID NO: 988047 - DNA, 15 bp, Homo sapiens
ttaatttgtaaatta

SEQ ID NO: 988048 - DNA, 15 bp, Homo sapiens
taatttgtaaattaa

SEQ ID NO: 988049 - DNA, 15 bp, Homo sapiens
aatttgtaaattaag

SEQ ID NO: 988050 - DNA, 15 bp, Homo sapiens
atttgtaaattaaga

SEQ ID NO: 988051 - DNA, 15 bp, Homo sapiens
tttgtaaattaagaa

SEQ ID NO: 988052 - DNA, 15 bp, Homo sapiens
ttgtaaattaagaag

SEQ ID NO: 988053 - DNA, 15 bp, Homo sapiens
tgtaaattaagaagc

SEQ ID NO: 988054 - DNA, 15 bp, Homo sapiens
gtaaattaagaagct

SEQ ID NO: 988055 - DNA, 15 bp, Homo sapiens
taaattaagaagctg

SEQ ID NO: 988056 - DNA, 15 bp, Homo sapiens
aaattaagaagctgg

SEQ ID NO: 988057 - DNA, 15 bp, Homo sapiens
aattaagaagctggc

SEQ ID NO: 988058 - DNA, 15 bp, Homo sapiens
attaagaagctggct

SEQ ID NO: 988059 - DNA, 15 bp, Homo sapiens
ttaagaagctggctc

SEQ ID NO: 988060 - DNA, 15 bp, Homo sapiens
taagaagctggctcc

SEQ ID NO: 988061 - DNA, 15 bp, Homo sapiens
aagaagctggctccc

SEQ ID NO: 988062 - DNA, 15 bp, Homo sapiens
agaagctggctcccc

SEQ ID NO: 988063 - DNA, 15 bp, Homo sapiens
gaagctggctccccg

SEQ ID NO: 988064 - DNA, 15 bp, Homo sapiens
aagctggctccccgg

SEQ ID NO: 988065 - DNA, 15 bp, Homo sapiens
agctggctccccggc

SEQ ID NO: 988066 - DNA, 15 bp, Homo sapiens
gctggctccccggct

SEQ ID NO: 988067 - DNA, 15 bp, Homo sapiens
ctggctccccggctg

SEQ ID NO: 988068 - DNA, 15 bp, Homo sapiens
tggctccccggctgt

SEQ ID NO: 988069 - DNA, 15 bp, Homo sapiens
ggctccccggctgtc

SEQ ID NO: 988070 - DNA, 15 bp, Homo sapiens
gctccccggctgtct

SEQ ID NO: 988071 - DNA, 15 bp, Homo sapiens
ctccccggctgtcta

SEQ ID NO: 988072 - DNA, 15 bp, Homo sapiens
tccccggctgtctag

SEQ ID NO: 988073 - DNA, 15 bp, Homo sapiens
ccccggctgtctagt

SEQ ID NO: 988074 - DNA, 15 bp, Homo sapiens
cccggctgtctagta

SEQ ID NO: 988075 - DNA, 15 bp, Homo sapiens
ccggctgtctagtaa

SEQ ID NO: 988076 - DNA, 15 bp, Homo sapiens
cggctgtctagtaac

SEQ ID NO: 988077 - DNA, 15 bp, Homo sapiens
ggctgtctagtaact

SEQ ID NO: 988078 - DNA, 15 bp, Homo sapiens
gctgtctagtaactt

SEQ ID NO: 988079 - DNA, 15 bp, Homo sapiens
ctgtctagtaactta

SEQ ID NO: 988080 - DNA, 15 bp, Homo sapiens
tgtctagtaacttag

SEQ ID NO: 988081 - DNA, 15 bp, Homo sapiens
gtctagtaacttagg

SEQ ID NO: 988082 - DNA, 15 bp, Homo sapiens
tctagtaacttaggg

SEQ ID NO: 988083 - DNA, 15 bp, Homo sapiens
ctagtaacttaggga

SEQ ID NO: 988084 - DNA, 15 bp, Homo sapiens
tagtaacttagggat

SEQ ID NO: 988085 - DNA, 15 bp, Homo sapiens
agtaacttagggatt

SEQ ID NO: 988086 - DNA, 15 bp, Homo sapiens
gtaacttagggatta

SEQ ID NO: 988087 - DNA, 15 bp, Homo sapiens
taacttagggattag

SEQ ID NO: 988088 - DNA, 15 bp, Homo sapiens
aacttagggattagc

SEQ ID NO: 988089 - DNA, 15 bp, Homo sapiens
acttagggattagca

SEQ ID NO: 988090 - DNA, 15 bp, Homo sapiens
cttagggattagcaa

SEQ ID NO: 988091 - DNA, 15 bp, Homo sapiens
ttagggattagcaaa

SEQ ID NO: 988092 - DNA, 15 bp, Homo sapiens
tagggattagcaaat

SEQ ID NO: 988093 - DNA, 15 bp, Homo sapiens
agggattagcaaatg

SEQ ID NO: 988094 - DNA, 15 bp, Homo sapiens
gggattagcaaatgc

SEQ ID NO: 988095 - DNA, 15 bp, Homo sapiens
ggattagcaaatgca

SEQ ID NO: 988096 - DNA, 15 bp, Homo sapiens
gattagcaaatgcaa

SEQ ID NO: 988097 - DNA, 15 bp, Homo sapiens
attagcaaatgcaaa

SEQ ID NO: 988098 - DNA, 15 bp, Homo sapiens
ttagcaaatgcaaaa

SEQ ID NO: 988099 - DNA, 15 bp, Homo sapiens
tagcaaatgcaaaag

SEQ ID NO: 988100 - DNA, 15 bp, Homo sapiens
agcaaatgcaaaagt

SEQ ID NO: 988101 - DNA, 15 bp, Homo sapiens
gcaaatgcaaaagta

SEQ ID NO: 988102 - DNA, 15 bp, Homo sapiens
caaatgcaaaagtat

SEQ ID NO: 988103 - DNA, 15 bp, Homo sapiens
aaatgcaaaagtata

SEQ ID NO: 988104 - DNA, 15 bp, Homo sapiens
aatgcaaaagtatag

SEQ ID NO: 988105 - DNA, 15 bp, Homo sapiens
atgcaaaagtataga

SEQ ID NO: 988106 - DNA, 15 bp, Homo sapiens
tgcaaaagtatagac

SEQ ID NO: 988107 - DNA, 15 bp, Homo sapiens
gcaaaagtatagact

SEQ ID NO: 988108 - DNA, 15 bp, Homo sapiens
caaaagtatagactt

SEQ ID NO: 988109 - DNA, 15 bp, Homo sapiens
aaaagtatagacttt

SEQ ID NO: 988110 - DNA, 15 bp, Homo sapiens
aaagtatagactttt

SEQ ID NO: 988111 - DNA, 15 bp, Homo sapiens
aagtatagactttta

SEQ ID NO: 988112 - DNA, 15 bp, Homo sapiens
agtatagacttttat

SEQ ID NO: 988113 - DNA, 15 bp, Homo sapiens
gtatagacttttatg

SEQ ID NO: 988114 - DNA, 15 bp, Homo sapiens
tatagacttttatgg

SEQ ID NO: 988115 - DNA, 15 bp, Homo sapiens
atagacttttatggt

SEQ ID NO: 988116 - DNA, 15 bp, Homo sapiens
tagacttttatggta

SEQ ID NO: 988117 - DNA, 15 bp, Homo sapiens
agacttttatggtag

SEQ ID NO: 988118 - DNA, 15 bp, Homo sapiens
gacttttatggtagt

SEQ ID NO: 988119 - DNA, 15 bp, Homo sapiens
acttttatggtagtt

SEQ ID NO: 988120 - DNA, 15 bp, Homo sapiens
cttttatggtagttt

SEQ ID NO: 988121 - DNA, 15 bp, Homo sapiens
ttttatggtagtttc

SEQ ID NO: 988122 - DNA, 15 bp, Homo sapiens
tttatggtagtttct

SEQ ID NO: 988123 - DNA, 15 bp, Homo sapiens
ttatggtagtttctt

SEQ ID NO: 988124 - DNA, 15 bp, Homo sapiens
tatggtagtttctta

SEQ ID NO: 988125 - DNA, 15 bp, Homo sapiens
atggtagtttcttat

SEQ ID NO: 988126 - DNA, 15 bp, Homo sapiens
tggtagtttcttatc

SEQ ID NO: 988127 - DNA, 15 bp, Homo sapiens
ggtagtttcttatcc

SEQ ID NO: 988128 - DNA, 15 bp, Homo sapiens
gtagtttcttatcct

SEQ ID NO: 988129 - DNA, 15 bp, Homo sapiens
tagtttcttatcctt

SEQ ID NO: 988130 - DNA, 15 bp, Homo sapiens
agtttcttatccttc

SEQ ID NO: 988131 - DNA, 15 bp, Homo sapiens
gtttcttatccttcc

SEQ ID NO: 988132 - DNA, 15 bp, Homo sapiens
tttcttatccttccc

SEQ ID NO: 988133 - DNA, 15 bp, Homo sapiens
ttcttatccttccct

SEQ ID NO: 988134 - DNA, 15 bp, Homo sapiens
tcttatccttccctt

SEQ ID NO: 988135 - DNA, 15 bp, Homo sapiens
cttatccttcccttt

SEQ ID NO: 988136 - DNA, 15 bp, Homo sapiens
ttatccttccctttc

SEQ ID NO: 988137 - DNA, 15 bp, Homo sapiens
tatccttccctttcc

SEQ ID NO: 988138 - DNA, 15 bp, Homo sapiens
atccttccctttccc

SEQ ID NO: 988139 - DNA, 15 bp, Homo sapiens
tccttccctttccca

SEQ ID NO: 988140 - DNA, 15 bp, Homo sapiens
ccttccctttcccag

SEQ ID NO: 988141 - DNA, 15 bp, Homo sapiens
cttccctttcccaga

SEQ ID NO: 988142 - DNA, 15 bp, Homo sapiens
ttccctttcccagat

SEQ ID NO: 988143 - DNA, 15 bp, Homo sapiens
tccctttcccagatt

SEQ ID NO: 988144 - DNA, 15 bp, Homo sapiens
ccctttcccagattt

SEQ ID NO: 988145 - DNA, 15 bp, Homo sapiens
cctttcccagatttc

SEQ ID NO: 988146 - DNA, 15 bp, Homo sapiens
ctttcccagatttct

SEQ ID NO: 988147 - DNA, 15 bp, Homo sapiens
tttcccagatttctg

SEQ ID NO: 988148 - DNA, 15 bp, Homo sapiens
ttcccagatttctgt

SEQ ID NO: 988149 - DNA, 15 bp, Homo sapiens
tcccagatttctgtt

SEQ ID NO: 988150 - DNA, 15 bp, Homo sapiens
cccagatttctgttc

SEQ ID NO: 988151 - DNA, 15 bp, Homo sapiens
ccagatttctgttct

SEQ ID NO: 988152 - DNA, 15 bp, Homo sapiens
cagatttctgttctt

SEQ ID NO: 988153 - DNA, 15 bp, Homo sapiens
agatttctgttcttt

SEQ ID NO: 988154 - DNA, 15 bp, Homo sapiens
gatttctgttctttg

SEQ ID NO: 988155 - DNA, 15 bp, Homo sapiens
atttctgttctttgg

SEQ ID NO: 988156 - DNA, 15 bp, Homo sapiens
tttctgttctttggt

SEQ ID NO: 988157 - DNA, 15 bp, Homo sapiens
ttctgttctttggtt

SEQ ID NO: 988158 - DNA, 15 bp, Homo sapiens
tctgttctttggttg

SEQ ID NO: 988159 - DNA, 15 bp, Homo sapiens
ctgttctttggttgg

SEQ ID NO: 988160 - DNA, 15 bp, Homo sapiens
tgttctttggttggt

SEQ ID NO: 988161 - DNA, 15 bp, Homo sapiens
gttctttggttggtt

SEQ ID NO: 988162 - DNA, 15 bp, Homo sapiens
ttctttggttggtta

SEQ ID NO: 988163 - DNA, 15 bp, Homo sapiens
tctttggttggttac

SEQ ID NO: 988164 - DNA, 15 bp, Homo sapiens
ctttggttggttaca

SEQ ID NO: 988165 - DNA, 15 bp, Homo sapiens
tttggttggttacaa

SEQ ID NO: 988166 - DNA, 15 bp, Homo sapiens
ttggttggttacaaa

SEQ ID NO: 988167 - DNA, 15 bp, Homo sapiens
tggttggttacaaag

SEQ ID NO: 988168 - DNA, 15 bp, Homo sapiens
ggttggttacaaagc

SEQ ID NO: 988169 - DNA, 15 bp, Homo sapiens
gttggttacaaagcc

SEQ ID NO: 988170 - DNA, 15 bp, Homo sapiens
ttggttacaaagcct

SEQ ID NO: 988171 - DNA, 15 bp, Homo sapiens
tggttacaaagcctc

SEQ ID NO: 988172 - DNA, 15 bp, Homo sapiens
ggttacaaagcctct

SEQ ID NO: 988173 - DNA, 15 bp, Homo sapiens
gttacaaagcctctt

SEQ ID NO: 988174 - DNA, 15 bp, Homo sapiens
ttacaaagcctctta

SEQ ID NO: 988175 - DNA, 15 bp, Homo sapiens
tacaaagcctcttat

SEQ ID NO: 988176 - DNA, 15 bp, Homo sapiens
acaaagcctcttatc

SEQ ID NO: 988177 - DNA, 15 bp, Homo sapiens
caaagcctcttatct

SEQ ID NO: 988178 - DNA, 15 bp, Homo sapiens
aaagcctcttatctc

SEQ ID NO: 988179 - DNA, 15 bp, Homo sapiens
aagcctcttatctct

SEQ ID NO: 988180 - DNA, 15 bp, Homo sapiens
agcctcttatctctt

SEQ ID NO: 988181 - DNA, 15 bp, Homo sapiens
gcctcttatctcttt

SEQ ID NO: 988182 - DNA, 15 bp, Homo sapiens
cctcttatctctttt

SEQ ID NO: 988183 - DNA, 15 bp, Homo sapiens
ctcttatctcttttt

SEQ ID NO: 988184 - DNA, 15 bp, Homo sapiens
tcttatctctttttg

SEQ ID NO: 988185 - DNA, 15 bp, Homo sapiens
cttatctctttttga

SEQ ID NO: 988186 - DNA, 15 bp, Homo sapiens
ttatctctttttgat

SEQ ID NO: 988187 - DNA, 15 bp, Homo sapiens
tatctctttttgatt

SEQ ID NO: 988188 - DNA, 15 bp, Homo sapiens
atctctttttgattc

SEQ ID NO: 988189 - DNA, 15 bp, Homo sapiens
tctctttttgattca

SEQ ID NO: 988190 - DNA, 15 bp, Homo sapiens
ctctttttgattcag

SEQ ID NO: 988191 - DNA, 15 bp, Homo sapiens
tctttttgattcagt

SEQ ID NO: 988192 - DNA, 15 bp, Homo sapiens
ctttttgattcagta

SEQ ID NO: 988193 - DNA, 15 bp, Homo sapiens
tttttgattcagtaa

SEQ ID NO: 988194 - DNA, 15 bp, Homo sapiens
ttttgattcagtaaa

SEQ ID NO: 988195 - DNA, 15 bp, Homo sapiens
tttgattcagtaaag

SEQ ID NO: 988196 - DNA, 15 bp, Homo sapiens
ttgattcagtaaagt

SEQ ID NO: 988197 - DNA, 15 bp, Homo sapiens
tgattcagtaaagtg

SEQ ID NO: 988198 - DNA, 15 bp, Homo sapiens
gattcagtaaagtga

SEQ ID NO: 988199 - DNA, 15 bp, Homo sapiens
attcagtaaagtgat

SEQ ID NO: 988200 - DNA, 15 bp, Homo sapiens
ttcagtaaagtgatg

SEQ ID NO: 988201 - DNA, 15 bp, Homo sapiens
tcagtaaagtgatgg

SEQ ID NO: 988202 - DNA, 15 bp, Homo sapiens
cagtaaagtgatggg

SEQ ID NO: 988203 - DNA, 15 bp, Homo sapiens
agtaaagtgatgggt

SEQ ID NO: 988204 - DNA, 15 bp, Homo sapiens
gtaaagtgatgggta

SEQ ID NO: 988205 - DNA, 15 bp, Homo sapiens
taaagtgatgggtaa

SEQ ID NO: 988206 - DNA, 15 bp, Homo sapiens
aaagtgatgggtaat

SEQ ID NO: 988207 - DNA, 15 bp, Homo sapiens
aagtgatgggtaata

SEQ ID NO: 988208 - DNA, 15 bp, Homo sapiens
agtgatgggtaataa

SEQ ID NO: 988209 - DNA, 15 bp, Homo sapiens
gtgatgggtaataat

SEQ ID NO: 988210 - DNA, 15 bp, Homo sapiens
tgatgggtaataatg

SEQ ID NO: 988211 - DNA, 15 bp, Homo sapiens
gatgggtaataatgc

SEQ ID NO: 988212 - DNA, 15 bp, Homo sapiens
atgggtaataatgcg

SEQ ID NO: 988213 - DNA, 15 bp, Homo sapiens
tgggtaataatgcga

SEQ ID NO: 988214 - DNA, 15 bp, Homo sapiens
gggtaataatgcgac

SEQ ID NO: 988215 - DNA, 15 bp, Homo sapiens
ggtaataatgcgaca

SEQ ID NO: 988216 - DNA, 15 bp, Homo sapiens
gtaataatgcgacac

SEQ ID NO: 988217 - DNA, 15 bp, Homo sapiens
taataatgcgacact

SEQ ID NO: 988218 - DNA, 15 bp, Homo sapiens
aataatgcgacactg

SEQ ID NO: 988219 - DNA, 15 bp, Homo sapiens
ataatgcgacactgg

SEQ ID NO: 988220 - DNA, 15 bp, Homo sapiens
taatgcgacactgga

SEQ ID NO: 988221 - DNA, 15 bp, Homo sapiens
aatgcgacactggaa

SEQ ID NO: 988222 - DNA, 15 bp, Homo sapiens
atgcgacactggaac

SEQ ID NO: 988223 - DNA, 15 bp, Homo sapiens
tgcgacactggaaca

SEQ ID NO: 988224 - DNA, 15 bp, Homo sapiens
gcgacactggaacaa

SEQ ID NO: 988225 - DNA, 15 bp, Homo sapiens
cgacactggaacaaa

SEQ ID NO: 988226 - DNA, 15 bp, Homo sapiens
gacactggaacaaat

SEQ ID NO: 988227 - DNA, 15 bp, Homo sapiens
acactggaacaaatc

SEQ ID NO: 988228 - DNA, 15 bp, Homo sapiens
cactggaacaaatcc

SEQ ID NO: 988229 - DNA, 15 bp, Homo sapiens
actggaacaaatcca

SEQ ID NO: 988230 - DNA, 15 bp, Homo sapiens
ctggaacaaatccat

SEQ ID NO: 988231 - DNA, 15 bp, Homo sapiens
tggaacaaatccatc

SEQ ID NO: 988232 - DNA, 15 bp, Homo sapiens
ggaacaaatccatct

SEQ ID NO: 988233 - DNA, 15 bp, Homo sapiens
gaacaaatccatctc

SEQ ID NO: 988234 - DNA, 15 bp, Homo sapiens
aacaaatccatctct

SEQ ID NO: 988235 - DNA, 15 bp, Homo sapiens
acaaatccatctctt

SEQ ID NO: 988236 - DNA, 15 bp, Homo sapiens
caaatccatctcttg

SEQ ID NO: 988237 - DNA, 15 bp, Homo sapiens
aaatccatctcttgt

SEQ ID NO: 988238 - DNA, 15 bp, Homo sapiens
aatccatctcttgtt

SEQ ID NO: 988239 - DNA, 15 bp, Homo sapiens
atccatctcttgttg

SEQ ID NO: 988240 - DNA, 15 bp, Homo sapiens
tccatctcttgttgg

SEQ ID NO: 988241 - DNA, 15 bp, Homo sapiens
ccatctcttgttgga

SEQ ID NO: 988242 - DNA, 15 bp, Homo sapiens
catctcttgttggaa

SEQ ID NO: 988243 - DNA, 15 bp, Homo sapiens
atctcttgttggaaa

SEQ ID NO: 988244 - DNA, 15 bp, Homo sapiens
tctcttgttggaaat

SEQ ID NO: 988245 - DNA, 15 bp, Homo sapiens
ctcttgttggaaatg

SEQ ID NO: 988246 - DNA, 15 bp, Homo sapiens
tcttgttggaaatgg

SEQ ID NO: 988247 - DNA, 15 bp, Homo sapiens
cttgttggaaatgga

SEQ ID NO: 988248 - DNA, 15 bp, Homo sapiens
ttgttggaaatggaa

SEQ ID NO: 988249 - DNA, 15 bp, Homo sapiens
tgttggaaatggaag

SEQ ID NO: 988250 - DNA, 15 bp, Homo sapiens
gttggaaatggaagc

SEQ ID NO: 988251 - DNA, 15 bp, Homo sapiens
ttggaaatggaagct

SEQ ID NO: 988252 - DNA, 15 bp, Homo sapiens
tggaaatggaagctg

SEQ ID NO: 988253 - DNA, 15 bp, Homo sapiens
ggaaatggaagctgg

SEQ ID NO: 988254 - DNA, 15 bp, Homo sapiens
gaaatggaagctggg

SEQ ID NO: 988255 - DNA, 15 bp, Homo sapiens
aaatggaagctgggt

SEQ ID NO: 988256 - DNA, 15 bp, Homo sapiens
aatggaagctgggtt

SEQ ID NO: 988257 - DNA, 15 bp, Homo sapiens
atggaagctgggttg

SEQ ID NO: 988258 - DNA, 15 bp, Homo sapiens
tggaagctgggttgg

SEQ ID NO: 988259 - DNA, 15 bp, Homo sapiens
ggaagctgggttggg

SEQ ID NO: 988260 - DNA, 15 bp, Homo sapiens
gaagctgggttggga

SEQ ID NO: 988261 - DNA, 15 bp, Homo sapiens
aagctgggttgggac

SEQ ID NO: 988262 - DNA, 15 bp, Homo sapiens
agctgggttgggact

SEQ ID NO: 988263 - DNA, 15 bp, Homo sapiens
gctgggttgggactt

SEQ ID NO: 988264 - DNA, 15 bp, Homo sapiens
ctgggttgggacttg

SEQ ID NO: 988265 - DNA, 15 bp, Homo sapiens
tgggttgggacttgt

SEQ ID NO: 988266 - DNA, 15 bp, Homo sapiens
gggttgggacttgtg

SEQ ID NO: 988267 - DNA, 15 bp, Homo sapiens
ggttgggacttgtgc

SEQ ID NO: 988268 - DNA, 15 bp, Homo sapiens
gttgggacttgtgct

SEQ ID NO: 988269 - DNA, 15 bp, Homo sapiens
ttgggacttgtgctg

SEQ ID NO: 988270 - DNA, 15 bp, Homo sapiens
tgggacttgtgctgt

SEQ ID NO: 988271 - DNA, 15 bp, Homo sapiens
gggacttgtgctgtg

SEQ ID NO: 988272 - DNA, 15 bp, Homo sapiens
ggacttgtgctgtgt

SEQ ID NO: 988273 - DNA, 15 bp, Homo sapiens
gacttgtgctgtgtc

SEQ ID NO: 988274 - DNA, 15 bp, Homo sapiens
acttgtgctgtgtca

SEQ ID NO: 988275 - DNA, 15 bp, Homo sapiens
cttgtgctgtgtcac

SEQ ID NO: 988276 - DNA, 15 bp, Homo sapiens
ttgtgctgtgtcacc

SEQ ID NO: 988277 - DNA, 15 bp, Homo sapiens
tgtgctgtgtcaccc

SEQ ID NO: 988278 - DNA, 15 bp, Homo sapiens
gtgctgtgtcaccct

SEQ ID NO: 988279 - DNA, 15 bp, Homo sapiens
tgctgtgtcaccctc

SEQ ID NO: 988280 - DNA, 15 bp, Homo sapiens
gctgtgtcaccctca

SEQ ID NO: 988281 - DNA, 15 bp, Homo sapiens
ctgtgtcaccctcaa

SEQ ID NO: 988282 - DNA, 15 bp, Homo sapiens
tgtgtcaccctcaag

SEQ ID NO: 988283 - DNA, 15 bp, Homo sapiens
gtgtcaccctcaagt

SEQ ID NO: 988284 - DNA, 15 bp, Homo sapiens
tgtcaccctcaagta

SEQ ID NO: 988285 - DNA, 15 bp, Homo sapiens
gtcaccctcaagtat

SEQ ID NO: 988286 - DNA, 15 bp, Homo sapiens
tcaccctcaagtatg

SEQ ID NO: 988287 - DNA, 15 bp, Homo sapiens
caccctcaagtatga

SEQ ID NO: 988288 - DNA, 15 bp, Homo sapiens
accctcaagtatgaa

SEQ ID NO: 988289 - DNA, 15 bp, Homo sapiens
ccctcaagtatgaag

SEQ ID NO: 988290 - DNA, 15 bp, Homo sapiens
cctcaagtatgaagt

SEQ ID NO: 988291 - DNA, 15 bp, Homo sapiens
ctcaagtatgaagtg

SEQ ID NO: 988292 - DNA, 15 bp, Homo sapiens
tcaagtatgaagtgt

SEQ ID NO: 988293 - DNA, 15 bp, Homo sapiens
caagtatgaagtgta

SEQ ID NO: 988294 - DNA, 15 bp, Homo sapiens
aagtatgaagtgtaa

SEQ ID NO: 988295 - DNA, 15 bp, Homo sapiens
agtatgaagtgtaaa

SEQ ID NO: 988296 - DNA, 15 bp, Homo sapiens
gtatgaagtgtaaac

SEQ ID NO: 988297 - DNA, 15 bp, Homo sapiens
tatgaagtgtaaact

SEQ ID NO: 988298 - DNA, 15 bp, Homo sapiens
atgaagtgtaaactc

SEQ ID NO: 988299 - DNA, 15 bp, Homo sapiens
tgaagtgtaaactct

SEQ ID NO: 988300 - DNA, 15 bp, Homo sapiens
gaagtgtaaactctt

SEQ ID NO: 988301 - DNA, 15 bp, Homo sapiens
aagtgtaaactcttt

SEQ ID NO: 988302 - DNA, 15 bp, Homo sapiens
agtgtaaactctttc

SEQ ID NO: 988303 - DNA, 15 bp, Homo sapiens
gtgtaaactctttct

SEQ ID NO: 988304 - DNA, 15 bp, Homo sapiens
tgtaaactctttctt

SEQ ID NO: 988305 - DNA, 15 bp, Homo sapiens
gtaaactctttcttg

SEQ ID NO: 988306 - DNA, 15 bp, Homo sapiens
taaactctttcttgg

SEQ ID NO: 988307 - DNA, 15 bp, Homo sapiens
aaactctttcttggg

SEQ ID NO: 988308 - DNA, 15 bp, Homo sapiens
aactctttcttgggc

SEQ ID NO: 988309 - DNA, 15 bp, Homo sapiens
actctttcttgggcc

SEQ ID NO: 988310 - DNA, 15 bp, Homo sapiens
ctctttcttgggcca

SEQ ID NO: 988311 - DNA, 15 bp, Homo sapiens
tctttcttgggccac

SEQ ID NO: 988312 - DNA, 15 bp, Homo sapiens
ctttcttgggccacc

SEQ ID NO: 988313 - DNA, 15 bp, Homo sapiens
tttcttgggccacca

SEQ ID NO: 988314 - DNA, 15 bp, Homo sapiens
ttcttgggccaccaa

SEQ ID NO: 988315 - DNA, 15 bp, Homo sapiens
tcttgggccaccaaa

SEQ ID NO: 988316 - DNA, 15 bp, Homo sapiens
cttgggccaccaaag

SEQ ID NO: 988317 - DNA, 15 bp, Homo sapiens
ttgggccaccaaagt

SEQ ID NO: 988318 - DNA, 15 bp, Homo sapiens
tgggccaccaaagta

SEQ ID NO: 988319 - DNA, 15 bp, Homo sapiens
gggccaccaaagtaa

SEQ ID NO: 988320 - DNA, 15 bp, Homo sapiens
ggccaccaaagtaac

SEQ ID NO: 988321 - DNA, 15 bp, Homo sapiens
gccaccaaagtaact

SEQ ID NO: 988322 - DNA, 15 bp, Homo sapiens
ccaccaaagtaacta

SEQ ID NO: 988323 - DNA, 15 bp, Homo sapiens
caccaaagtaactaa

SEQ ID NO: 988324 - DNA, 15 bp, Homo sapiens
accaaagtaactaaa

SEQ ID NO: 988325 - DNA, 15 bp, Homo sapiens
ccaaagtaactaaac

SEQ ID NO: 988326 - DNA, 15 bp, Homo sapiens
caaagtaactaaaca

SEQ ID NO: 988327 - DNA, 15 bp, Homo sapiens
aaagtaactaaacaa

SEQ ID NO: 988328 - DNA, 15 bp, Homo sapiens
aagtaactaaacaag

SEQ ID NO: 988329 - DNA, 15 bp, Homo sapiens
agtaactaaacaaga

SEQ ID NO: 988330 - DNA, 15 bp, Homo sapiens
gtaactaaacaagaa

SEQ ID NO: 988331 - DNA, 15 bp, Homo sapiens
taactaaacaagaaa

SEQ ID NO: 988332 - DNA, 15 bp, Homo sapiens
aactaaacaagaaat

SEQ ID NO: 988333 - DNA, 15 bp, Homo sapiens
actaaacaagaaatg

SEQ ID NO: 988334 - DNA, 15 bp, Homo sapiens
ctaaacaagaaatgc

SEQ ID NO: 988335 - DNA, 15 bp, Homo sapiens
taaacaagaaatgca

SEQ ID NO: 988336 - DNA, 15 bp, Homo sapiens
aaacaagaaatgcaa

SEQ ID NO: 988337 - DNA, 15 bp, Homo sapiens
aacaagaaatgcaac

SEQ ID NO: 988338 - DNA, 15 bp, Homo sapiens
acaagaaatgcaaca

SEQ ID NO: 988339 - DNA, 15 bp, Homo sapiens
caagaaatgcaacat

SEQ ID NO: 988340 - DNA, 15 bp, Homo sapiens
aagaaatgcaacatt

SEQ ID NO: 988341 - DNA, 15 bp, Homo sapiens
agaaatgcaacattc

SEQ ID NO: 988342 - DNA, 15 bp, Homo sapiens
gaaatgcaacattct

SEQ ID NO: 988343 - DNA, 15 bp, Homo sapiens
aaatgcaacattctc

SEQ ID NO: 988344 - DNA, 15 bp, Homo sapiens
aatgcaacattctcc

SEQ ID NO: 988345 - DNA, 15 bp, Homo sapiens
atgcaacattctccc

SEQ ID NO: 988346 - DNA, 15 bp, Homo sapiens
tgcaacattctccca

SEQ ID NO: 988347 - DNA, 15 bp, Homo sapiens
gcaacattctcccat

SEQ ID NO: 988348 - DNA, 15 bp, Homo sapiens
caacattctcccatg

SEQ ID NO: 988349 - DNA, 15 bp, Homo sapiens
aacattctcccatga

SEQ ID NO: 988350 - DNA, 15 bp, Homo sapiens
acattctcccatgaa

SEQ ID NO: 988351 - DNA, 15 bp, Homo sapiens
cattctcccatgaat

SEQ ID NO: 988352 - DNA, 15 bp, Homo sapiens
attctcccatgaata

SEQ ID NO: 988353 - DNA, 15 bp, Homo sapiens
ttctcccatgaatac

SEQ ID NO: 988354 - DNA, 15 bp, Homo sapiens
tctcccatgaataca

SEQ ID NO: 988355 - DNA, 15 bp, Homo sapiens
ctcccatgaatacat

SEQ ID NO: 988356 - DNA, 15 bp, Homo sapiens
tcccatgaatacatt

SEQ ID NO: 988357 - DNA, 15 bp, Homo sapiens
cccatgaatacatta

SEQ ID NO: 988358 - DNA, 15 bp, Homo sapiens
ccatgaatacattag

SEQ ID NO: 988359 - DNA, 15 bp, Homo sapiens
catgaatacattaga

SEQ ID NO: 988360 - DNA, 15 bp, Homo sapiens
atgaatacattagag

SEQ ID NO: 988361 - DNA, 15 bp, Homo sapiens
tgaatacattagagt

SEQ ID NO: 988362 - DNA, 15 bp, Homo sapiens
gaatacattagagtt

SEQ ID NO: 988363 - DNA, 15 bp, Homo sapiens
aatacattagagtta

SEQ ID NO: 988364 - DNA, 15 bp, Homo sapiens
atacattagagttaa

SEQ ID NO: 988365 - DNA, 15 bp, Homo sapiens
tacattagagttaat

SEQ ID NO: 988366 - DNA, 15 bp, Homo sapiens
acattagagttaata

SEQ ID NO: 988367 - DNA, 15 bp, Homo sapiens
cattagagttaatac

SEQ ID NO: 988368 - DNA, 15 bp, Homo sapiens
attagagttaatact

SEQ ID NO: 988369 - DNA, 15 bp, Homo sapiens
ttagagttaatactg

SEQ ID NO: 988370 - DNA, 15 bp, Homo sapiens
tagagttaatactgt

SEQ ID NO: 988371 - DNA, 15 bp, Homo sapiens
agagttaatactgtg

SEQ ID NO: 988372 - DNA, 15 bp, Homo sapiens
gagttaatactgtgg

SEQ ID NO: 988373 - DNA, 15 bp, Homo sapiens
agttaatactgtggc

SEQ ID NO: 988374 - DNA, 15 bp, Homo sapiens
gttaatactgtggcc

SEQ ID NO: 988375 - DNA, 15 bp, Homo sapiens
ttaatactgtggcca

SEQ ID NO: 988376 - DNA, 15 bp, Homo sapiens
taatactgtggccac

SEQ ID NO: 988377 - DNA, 15 bp, Homo sapiens
aatactgtggccaca

SEQ ID NO: 988378 - DNA, 15 bp, Homo sapiens
atactgtggccacat

SEQ ID NO: 988379 - DNA, 15 bp, Homo sapiens
tactgtggccacatt

SEQ ID NO: 988380 - DNA, 15 bp, Homo sapiens
actgtggccacattt

SEQ ID NO: 988381 - DNA, 15 bp, Homo sapiens
ctgtggccacatttg

SEQ ID NO: 988382 - DNA, 15 bp, Homo sapiens
tgtggccacatttgg

SEQ ID NO: 988383 - DNA, 15 bp, Homo sapiens
gtggccacatttgga

SEQ ID NO: 988384 - DNA, 15 bp, Homo sapiens
tggccacatttggaa

SEQ ID NO: 988385 - DNA, 15 bp, Homo sapiens
ggccacatttggaaa

SEQ ID NO: 988386 - DNA, 15 bp, Homo sapiens
gccacatttggaaaa

SEQ ID NO: 988387 - DNA, 15 bp, Homo sapiens
ccacatttggaaaat

SEQ ID NO: 988388 - DNA, 15 bp, Homo sapiens
cacatttggaaaatt

SEQ ID NO: 988389 - DNA, 15 bp, Homo sapiens
acatttggaaaatta

SEQ ID NO: 988390 - DNA, 15 bp, Homo sapiens
catttggaaaattag

SEQ ID NO: 988391 - DNA, 15 bp, Homo sapiens
atttggaaaattagc

SEQ ID NO: 988392 - DNA, 15 bp, Homo sapiens
tttggaaaattagca

SEQ ID NO: 988393 - DNA, 15 bp, Homo sapiens
ttggaaaattagcat

SEQ ID NO: 988394 - DNA, 15 bp, Homo sapiens
tggaaaattagcata

SEQ ID NO: 988395 - DNA, 15 bp, Homo sapiens
ggaaaattagcatag

SEQ ID NO: 988396 - DNA, 15 bp, Homo sapiens
gaaaattagcatagc

SEQ ID NO: 988397 - DNA, 15 bp, Homo sapiens
aaaattagcatagct

SEQ ID NO: 988398 - DNA, 15 bp, Homo sapiens
aaattagcatagctc

SEQ ID NO: 988399 - DNA, 15 bp, Homo sapiens
aattagcatagctcg

SEQ ID NO: 988400 - DNA, 15 bp, Homo sapiens
attagcatagctcgt

SEQ ID NO: 988401 - DNA, 15 bp, Homo sapiens
ttagcatagctcgta

SEQ ID NO: 988402 - DNA, 15 bp, Homo sapiens
tagcatagctcgtaa

SEQ ID NO: 988403 - DNA, 15 bp, Homo sapiens
agcatagctcgtaaa

SEQ ID NO: 988404 - DNA, 15 bp, Homo sapiens
gcatagctcgtaaaa

SEQ ID NO: 988405 - DNA, 15 bp, Homo sapiens
catagctcgtaaaag

SEQ ID NO: 988406 - DNA, 15 bp, Homo sapiens
atagctcgtaaaagc

SEQ ID NO: 988407 - DNA, 15 bp, Homo sapiens
tagctcgtaaaagcc

SEQ ID NO: 988408 - DNA, 15 bp, Homo sapiens
agctcgtaaaagcca

SEQ ID NO: 988409 - DNA, 15 bp, Homo sapiens
gctcgtaaaagccaa

SEQ ID NO: 988410 - DNA, 15 bp, Homo sapiens
ctcgtaaaagccaaa

SEQ ID NO: 988411 - DNA, 15 bp, Homo sapiens
tcgtaaaagccaaat

SEQ ID NO: 988412 - DNA, 15 bp, Homo sapiens
cgtaaaagccaaatg

SEQ ID NO: 988413 - DNA, 15 bp, Homo sapiens
gtaaaagccaaatgc

SEQ ID NO: 988414 - DNA, 15 bp, Homo sapiens
taaaagccaaatgca

SEQ ID NO: 988415 - DNA, 15 bp, Homo sapiens
aaaagccaaatgcag

SEQ ID NO: 988416 - DNA, 15 bp, Homo sapiens
aaagccaaatgcaga

SEQ ID NO: 988417 - DNA, 15 bp, Homo sapiens
aagccaaatgcagaa

SEQ ID NO: 988418 - DNA, 15 bp, Homo sapiens
agccaaatgcagaaa

SEQ ID NO: 988419 - DNA, 15 bp, Homo sapiens
gccaaatgcagaaaa

SEQ ID NO: 988420 - DNA, 15 bp, Homo sapiens
ccaaatgcagaaaat

SEQ ID NO: 988421 - DNA, 15 bp, Homo sapiens
caaatgcagaaaatt

SEQ ID NO: 988422 - DNA, 15 bp, Homo sapiens
aaatgcagaaaatta

SEQ ID NO: 988423 - DNA, 15 bp, Homo sapiens
aatgcagaaaattaa

SEQ ID NO: 988424 - DNA, 15 bp, Homo sapiens
atgcagaaaattaat

SEQ ID NO: 988425 - DNA, 15 bp, Homo sapiens
tgcagaaaattaatt

SEQ ID NO: 988426 - DNA, 15 bp, Homo sapiens
gcagaaaattaattg

SEQ ID NO: 988427 - DNA, 15 bp, Homo sapiens
cagaaaattaattgt

SEQ ID NO: 988428 - DNA, 15 bp, Homo sapiens
agaaaattaattgtt

SEQ ID NO: 988429 - DNA, 15 bp, Homo sapiens
gaaaattaattgtta

SEQ ID NO: 988430 - DNA, 15 bp, Homo sapiens
aaaattaattgttaa

SEQ ID NO: 988431 - DNA, 15 bp, Homo sapiens
aaattaattgttaag

SEQ ID NO: 988432 - DNA, 15 bp, Homo sapiens
aattaattgttaagt

SEQ ID NO: 988433 - DNA, 15 bp, Homo sapiens
attaattgttaagta

SEQ ID NO: 988434 - DNA, 15 bp, Homo sapiens
ttaattgttaagtat

SEQ ID NO: 988435 - DNA, 15 bp, Homo sapiens
taattgttaagtatt

SEQ ID NO: 988436 - DNA, 15 bp, Homo sapiens
aattgttaagtattc

SEQ ID NO: 988437 - DNA, 15 bp, Homo sapiens
attgttaagtattct

SEQ ID NO: 988438 - DNA, 15 bp, Homo sapiens
ttgttaagtattcta

SEQ ID NO: 988439 - DNA, 15 bp, Homo sapiens
tgttaagtattctat

SEQ ID NO: 988440 - DNA, 15 bp, Homo sapiens
gttaagtattctatc

SEQ ID NO: 988441 - DNA, 15 bp, Homo sapiens
ttaagtattctatca

SEQ ID NO: 988442 - DNA, 15 bp, Homo sapiens
taagtattctatcac

SEQ ID NO: 988443 - DNA, 15 bp, Homo sapiens
aagtattctatcacc

SEQ ID NO: 988444 - DNA, 15 bp, Homo sapiens
agtattctatcacca

SEQ ID NO: 988445 - DNA, 15 bp, Homo sapiens
gtattctatcaccac

SEQ ID NO: 988446 - DNA, 15 bp, Homo sapiens
tattctatcaccaca

SEQ ID NO: 988447 - DNA, 15 bp, Homo sapiens
attctatcaccacag

SEQ ID NO: 988448 - DNA, 15 bp, Homo sapiens
ttctatcaccacagc

SEQ ID NO: 988449 - DNA, 15 bp, Homo sapiens
tctatcaccacagct

SEQ ID NO: 988450 - DNA, 15 bp, Homo sapiens
ctatcaccacagctc

SEQ ID NO: 988451 - DNA, 15 bp, Homo sapiens
tatcaccacagctct

SEQ ID NO: 988452 - DNA, 15 bp, Homo sapiens
atcaccacagctcta

SEQ ID NO: 988453 - DNA, 15 bp, Homo sapiens
tcaccacagctctat

SEQ ID NO: 988454 - DNA, 15 bp, Homo sapiens
caccacagctctatc

SEQ ID NO: 988455 - DNA, 15 bp, Homo sapiens
accacagctctatcc

SEQ ID NO: 988456 - DNA, 15 bp, Homo sapiens
ccacagctctatcct

SEQ ID NO: 988457 - DNA, 15 bp, Homo sapiens
cacagctctatcctc

SEQ ID NO: 988458 - DNA, 15 bp, Homo sapiens
acagctctatcctcc

SEQ ID NO: 988459 - DNA, 15 bp, Homo sapiens
cagctctatcctcct

SEQ ID NO: 988460 - DNA, 15 bp, Homo sapiens
agctctatcctcctc

SEQ ID NO: 988461 - DNA, 15 bp, Homo sapiens
gctctatcctcctcc

SEQ ID NO: 988462 - DNA, 15 bp, Homo sapiens
ctctatcctcctccg

SEQ ID NO: 988463 - DNA, 15 bp, Homo sapiens
tctatcctcctccgc

SEQ ID NO: 988464 - DNA, 15 bp, Homo sapiens
ctatcctcctccgcc

SEQ ID NO: 988465 - DNA, 15 bp, Homo sapiens
tatcctcctccgccc

SEQ ID NO: 988466 - DNA, 15 bp, Homo sapiens
atcctcctccgccca

SEQ ID NO: 988467 - DNA, 15 bp, Homo sapiens
tcctcctccgcccac

SEQ ID NO: 988468 - DNA, 15 bp, Homo sapiens
cctcctccgcccacc

SEQ ID NO: 988469 - DNA, 15 bp, Homo sapiens
ctcctccgcccaccc

SEQ ID NO: 988470 - DNA, 15 bp, Homo sapiens
tcctccgcccaccca

SEQ ID NO: 988471 - DNA, 15 bp, Homo sapiens
cctccgcccacccac

SEQ ID NO: 988472 - DNA, 15 bp, Homo sapiens
ctccgcccacccacc

SEQ ID NO: 988473 - DNA, 15 bp, Homo sapiens
tccgcccacccaccc

SEQ ID NO: 988474 - DNA, 15 bp, Homo sapiens
ccgcccacccaccct

SEQ ID NO: 988475 - DNA, 15 bp, Homo sapiens
cgcccacccaccctt

SEQ ID NO: 988476 - DNA, 15 bp, Homo sapiens
gcccacccacccttg

SEQ ID NO: 988477 - DNA, 15 bp, Homo sapiens
cccacccacccttga

SEQ ID NO: 988478 - DNA, 15 bp, Homo sapiens
ccacccacccttgag

SEQ ID NO: 988479 - DNA, 15 bp, Homo sapiens
cacccacccttgagg

SEQ ID NO: 988480 - DNA, 15 bp, Homo sapiens
acccacccttgagga

SEQ ID NO: 988481 - DNA, 15 bp, Homo sapiens
cccacccttgaggaa

SEQ ID NO: 988482 - DNA, 15 bp, Homo sapiens
ccacccttgaggaag

SEQ ID NO: 988483 - DNA, 15 bp, Homo sapiens
cacccttgaggaaga

SEQ ID NO: 988484 - DNA, 15 bp, Homo sapiens
acccttgaggaagac

SEQ ID NO: 988485 - DNA, 15 bp, Homo sapiens
cccttgaggaagaca

SEQ ID NO: 988486 - DNA, 15 bp, Homo sapiens
ccttgaggaagacaa

SEQ ID NO: 988487 - DNA, 15 bp, Homo sapiens
cttgaggaagacaag

SEQ ID NO: 988488 - DNA, 15 bp, Homo sapiens
ttgaggaagacaagc

SEQ ID NO: 988489 - DNA, 15 bp, Homo sapiens
tgaggaagacaagcc

SEQ ID NO: 988490 - DNA, 15 bp, Homo sapiens
gaggaagacaagccc

SEQ ID NO: 988491 - DNA, 15 bp, Homo sapiens
aggaagacaagccca

SEQ ID NO: 988492 - DNA, 15 bp, Homo sapiens
ggaagacaagcccaa

SEQ ID NO: 988493 - DNA, 15 bp, Homo sapiens
gaagacaagcccaaa

SEQ ID NO: 988494 - DNA, 15 bp, Homo sapiens
aagacaagcccaaag

SEQ ID NO: 988495 - DNA, 15 bp, Homo sapiens
agacaagcccaaagt

SEQ ID NO: 988496 - DNA, 15 bp, Homo sapiens
gacaagcccaaagtt

SEQ ID NO: 988497 - DNA, 15 bp, Homo sapiens
acaagcccaaagtta

SEQ ID NO: 988498 - DNA, 15 bp, Homo sapiens
caagcccaaagttag

SEQ ID NO: 988499 - DNA, 15 bp, Homo sapiens
aagcccaaagttagt

SEQ ID NO: 988500 - DNA, 15 bp, Homo sapiens
agcccaaagttagtt

SEQ ID NO: 988501 - DNA, 15 bp, Homo sapiens
gcccaaagttagttg

SEQ ID NO: 988502 - DNA, 15 bp, Homo sapiens
cccaaagttagttga

SEQ ID NO: 988503 - DNA, 15 bp, Homo sapiens
ccaaagttagttgat

SEQ ID NO: 988504 - DNA, 15 bp, Homo sapiens
caaagttagttgatg

SEQ ID NO: 988505 - DNA, 15 bp, Homo sapiens
aaagttagttgatgc

SEQ ID NO: 988506 - DNA, 15 bp, Homo sapiens
aagttagttgatgct

SEQ ID NO: 988507 - DNA, 15 bp, Homo sapiens
agttagttgatgcta

SEQ ID NO: 988508 - DNA, 15 bp, Homo sapiens
gttagttgatgctat

SEQ ID NO: 988509 - DNA, 15 bp, Homo sapiens
ttagttgatgctatg

SEQ ID NO: 988510 - DNA, 15 bp, Homo sapiens
tagttgatgctatgg

SEQ ID NO: 988511 - DNA, 15 bp, Homo sapiens
agttgatgctatgga

SEQ ID NO: 988512 - DNA, 15 bp, Homo sapiens
gttgatgctatggaa

SEQ ID NO: 988513 - DNA, 15 bp, Homo sapiens
ttgatgctatggaat

SEQ ID NO: 988514 - DNA, 15 bp, Homo sapiens
tgatgctatggaatc

SEQ ID NO: 988515 - DNA, 15 bp, Homo sapiens
gatgctatggaatca

SEQ ID NO: 988516 - DNA, 15 bp, Homo sapiens
atgctatggaatcac

SEQ ID NO: 988517 - DNA, 15 bp, Homo sapiens
tgctatggaatcaca

SEQ ID NO: 988518 - DNA, 15 bp, Homo sapiens
gctatggaatcacaa

SEQ ID NO: 988519 - DNA, 15 bp, Homo sapiens
ctatggaatcacaag

SEQ ID NO: 988520 - DNA, 15 bp, Homo sapiens
tatggaatcacaagg

SEQ ID NO: 988521 - DNA, 15 bp, Homo sapiens
atggaatcacaagga

SEQ ID NO: 988522 - DNA, 15 bp, Homo sapiens
tggaatcacaaggat

SEQ ID NO: 988523 - DNA, 15 bp, Homo sapiens
ggaatcacaaggatg

SEQ ID NO: 988524 - DNA, 15 bp, Homo sapiens
gaatcacaaggatgt

SEQ ID NO: 988525 - DNA, 15 bp, Homo sapiens
aatcacaaggatgtc

SEQ ID NO: 988526 - DNA, 15 bp, Homo sapiens
atcacaaggatgtcc

SEQ ID NO: 988527 - DNA, 15 bp, Homo sapiens
tcacaaggatgtccc

SEQ ID NO: 988528 - DNA, 15 bp, Homo sapiens
cacaaggatgtccca

SEQ ID NO: 988529 - DNA, 15 bp, Homo sapiens
acaaggatgtcccag

SEQ ID NO: 988530 - DNA, 15 bp, Homo sapiens
caaggatgtcccagt

SEQ ID NO: 988531 - DNA, 15 bp, Homo sapiens
aaggatgtcccagtc

SEQ ID NO: 988532 - DNA, 15 bp, Homo sapiens
aggatgtcccagtcc

SEQ ID NO: 988533 - DNA, 15 bp, Homo sapiens
ggatgtcccagtccg

SEQ ID NO: 988534 - DNA, 15 bp, Homo sapiens
gatgtcccagtccgt

SEQ ID NO: 988535 - DNA, 15 bp, Homo sapiens
atgtcccagtccgtg

SEQ ID NO: 988536 - DNA, 15 bp, Homo sapiens
tgtcccagtccgtga

SEQ ID NO: 988537 - DNA, 15 bp, Homo sapiens
gtcccagtccgtgat

SEQ ID NO: 988538 - DNA, 15 bp, Homo sapiens
tcccagtccgtgatt

SEQ ID NO: 988539 - DNA, 15 bp, Homo sapiens
cccagtccgtgattt

SEQ ID NO: 988540 - DNA, 15 bp, Homo sapiens
ccagtccgtgatttg

SEQ ID NO: 988541 - DNA, 15 bp, Homo sapiens
cagtccgtgatttgc

SEQ ID NO: 988542 - DNA, 15 bp, Homo sapiens
agtccgtgatttgct

SEQ ID NO: 988543 - DNA, 15 bp, Homo sapiens
gtccgtgatttgctg

SEQ ID NO: 988544 - DNA, 15 bp, Homo sapiens
tccgtgatttgctgt

SEQ ID NO: 988545 - DNA, 15 bp, Homo sapiens
ccgtgatttgctgta

SEQ ID NO: 988546 - DNA, 15 bp, Homo sapiens
cgtgatttgctgtaa

SEQ ID NO: 988547 - DNA, 15 bp, Homo sapiens
gtgatttgctgtaat

SEQ ID NO: 988548 - DNA, 15 bp, Homo sapiens
tgatttgctgtaatt

SEQ ID NO: 988549 - DNA, 15 bp, Homo sapiens
gatttgctgtaattg

SEQ ID NO: 988550 - DNA, 15 bp, Homo sapiens
atttgctgtaattga

SEQ ID NO: 988551 - DNA, 15 bp, Homo sapiens
tttgctgtaattgaa

SEQ ID NO: 988552 - DNA, 15 bp, Homo sapiens
ttgctgtaattgaat

SEQ ID NO: 988553 - DNA, 15 bp, Homo sapiens
tgctgtaattgaatc

SEQ ID NO: 988554 - DNA, 15 bp, Homo sapiens
gctgtaattgaatcc

SEQ ID NO: 988555 - DNA, 15 bp, Homo sapiens
ctgtaattgaatcca

SEQ ID NO: 988556 - DNA, 15 bp, Homo sapiens
tgtaattgaatccat

SEQ ID NO: 988557 - DNA, 15 bp, Homo sapiens
gtaattgaatccatt

SEQ ID NO: 988558 - DNA, 15 bp, Homo sapiens
taattgaatccattt

SEQ ID NO: 988559 - DNA, 15 bp, Homo sapiens
aattgaatccatttt

SEQ ID NO: 988560 - DNA, 15 bp, Homo sapiens
attgaatccatttta

SEQ ID NO: 988561 - DNA, 15 bp, Homo sapiens
ttgaatccattttaa

SEQ ID NO: 988562 - DNA, 15 bp, Homo sapiens
tgaatccattttaaa

SEQ ID NO: 988563 - DNA, 15 bp, Homo sapiens
gaatccattttaaat

SEQ ID NO: 988564 - DNA, 15 bp, Homo sapiens
aatccattttaaatg

SEQ ID NO: 988565 - DNA, 15 bp, Homo sapiens
atccattttaaatgt

SEQ ID NO: 988566 - DNA, 15 bp, Homo sapiens
tccattttaaatgtg

SEQ ID NO: 988567 - DNA, 15 bp, Homo sapiens
ccattttaaatgtgg

SEQ ID NO: 988568 - DNA, 15 bp, Homo sapiens
cattttaaatgtgga

SEQ ID NO: 988569 - DNA, 15 bp, Homo sapiens
attttaaatgtggag

SEQ ID NO: 988570 - DNA, 15 bp, Homo sapiens
ttttaaatgtggagt

SEQ ID NO: 988571 - DNA, 15 bp, Homo sapiens
tttaaatgtggagtc

SEQ ID NO: 988572 - DNA, 15 bp, Homo sapiens
ttaaatgtggagtct

SEQ ID NO: 988573 - DNA, 15 bp, Homo sapiens
taaatgtggagtctg

SEQ ID NO: 988574 - DNA, 15 bp, Homo sapiens
aaatgtggagtctgg

SEQ ID NO: 988575 - DNA, 15 bp, Homo sapiens
aatgtggagtctgga

SEQ ID NO: 988576 - DNA, 15 bp, Homo sapiens
atgtggagtctggat

SEQ ID NO: 988577 - DNA, 15 bp, Homo sapiens
tgtggagtctggatg

SEQ ID NO: 988578 - DNA, 15 bp, Homo sapiens
gtggagtctggatgc

SEQ ID NO: 988579 - DNA, 15 bp, Homo sapiens
tggagtctggatgct

SEQ ID NO: 988580 - DNA, 15 bp, Homo sapiens
ggagtctggatgctg

SEQ ID NO: 988581 - DNA, 15 bp, Homo sapiens
gagtctggatgctgt

SEQ ID NO: 988582 - DNA, 15 bp, Homo sapiens
agtctggatgctgtt

SEQ ID NO: 988583 - DNA, 15 bp, Homo sapiens
gtctggatgctgttg

SEQ ID NO: 988584 - DNA, 15 bp, Homo sapiens
tctggatgctgttgg

SEQ ID NO: 988585 - DNA, 15 bp, Homo sapiens
ctggatgctgttggc

SEQ ID NO: 988586 - DNA, 15 bp, Homo sapiens
tggatgctgttggca

SEQ ID NO: 988587 - DNA, 15 bp, Homo sapiens
ggatgctgttggcat

SEQ ID NO: 988588 - DNA, 15 bp, Homo sapiens
gatgctgttggcata

SEQ ID NO: 988589 - DNA, 15 bp, Homo sapiens
atgctgttggcatac

SEQ ID NO: 988590 - DNA, 15 bp, Homo sapiens
tgctgttggcatacc

SEQ ID NO: 988591 - DNA, 15 bp, Homo sapiens
gctgttggcatacct

SEQ ID NO: 988592 - DNA, 15 bp, Homo sapiens
ctgttggcatacctt

SEQ ID NO: 988593 - DNA, 15 bp, Homo sapiens
tgttggcataccttt

SEQ ID NO: 988594 - DNA, 15 bp, Homo sapiens
gttggcataccttta

SEQ ID NO: 988595 - DNA, 15 bp, Homo sapiens
ttggcatacctttat

SEQ ID NO: 988596 - DNA, 15 bp, Homo sapiens
tggcatacctttatt

SEQ ID NO: 988597 - DNA, 15 bp, Homo sapiens
ggcatacctttattt

SEQ ID NO: 988598 - DNA, 15 bp, Homo sapiens
gcatacctttatttt

SEQ ID NO: 988599 - DNA, 15 bp, Homo sapiens
catacctttattttg

SEQ ID NO: 988600 - DNA, 15 bp, Homo sapiens
atacctttattttgc

SEQ ID NO: 988601 - DNA, 15 bp, Homo sapiens
tacctttattttgct

SEQ ID NO: 988602 - DNA, 15 bp, Homo sapiens
acctttattttgctt

SEQ ID NO: 988603 - DNA, 15 bp, Homo sapiens
cctttattttgcttg

SEQ ID NO: 988604 - DNA, 15 bp, Homo sapiens
ctttattttgcttgt

SEQ ID NO: 988605 - DNA, 15 bp, Homo sapiens
tttattttgcttgtt

SEQ ID NO: 988606 - DNA, 15 bp, Homo sapiens
ttattttgcttgttt

SEQ ID NO: 988607 - DNA, 15 bp, Homo sapiens
tattttgcttgtttt

SEQ ID NO: 988608 - DNA, 15 bp, Homo sapiens
attttgcttgttttt

SEQ ID NO: 988609 - DNA, 15 bp, Homo sapiens
ttttgcttgtttttc

SEQ ID NO: 988610 - DNA, 15 bp, Homo sapiens
tttgcttgtttttcc

SEQ ID NO: 988611 - DNA, 15 bp, Homo sapiens
ttgcttgtttttccc

SEQ ID NO: 988612 - DNA, 15 bp, Homo sapiens
tgcttgtttttcccc

SEQ ID NO: 988613 - DNA, 15 bp, Homo sapiens
gcttgtttttccccc

SEQ ID NO: 988614 - DNA, 15 bp, Homo sapiens
cttgtttttccccct

SEQ ID NO: 988615 - DNA, 15 bp, Homo sapiens
ttgtttttccccctg

SEQ ID NO: 988616 - DNA, 15 bp, Homo sapiens
tgtttttccccctga

SEQ ID NO: 988617 - DNA, 15 bp, Homo sapiens
gtttttccccctgac

SEQ ID NO: 988618 - DNA, 15 bp, Homo sapiens
tttttccccctgaca

SEQ ID NO: 988619 - DNA, 15 bp, Homo sapiens
ttttccccctgacaa

SEQ ID NO: 988620 - DNA, 15 bp, Homo sapiens
tttccccctgacaaa

SEQ ID NO: 988621 - DNA, 15 bp, Homo sapiens
ttccccctgacaaac

SEQ ID NO: 988622 - DNA, 15 bp, Homo sapiens
tccccctgacaaaca

SEQ ID NO: 988623 - DNA, 15 bp, Homo sapiens
ccccctgacaaacaa

SEQ ID NO: 988624 - DNA, 15 bp, Homo sapiens
cccctgacaaacaaa

SEQ ID NO: 988625 - DNA, 15 bp, Homo sapiens
ccctgacaaacaaat

SEQ ID NO: 988626 - DNA, 15 bp, Homo sapiens
cctgacaaacaaatc

SEQ ID NO: 988627 - DNA, 15 bp, Homo sapiens
ctgacaaacaaatca

SEQ ID NO: 988628 - DNA, 15 bp, Homo sapiens
tgacaaacaaatcat

SEQ ID NO: 988629 - DNA, 15 bp, Homo sapiens
gacaaacaaatcatt

SEQ ID NO: 988630 - DNA, 15 bp, Homo sapiens
acaaacaaatcattt

SEQ ID NO: 988631 - DNA, 15 bp, Homo sapiens
caaacaaatcattta

SEQ ID NO: 988632 - DNA, 15 bp, Homo sapiens
aaacaaatcatttac

SEQ ID NO: 988633 - DNA, 15 bp, Homo sapiens
aacaaatcatttaca

SEQ ID NO: 988634 - DNA, 15 bp, Homo sapiens
acaaatcatttacac

SEQ ID NO: 988635 - DNA, 15 bp, Homo sapiens
caaatcatttacaca

SEQ ID NO: 988636 - DNA, 15 bp, Homo sapiens
aaatcatttacacat

SEQ ID NO: 988637 - DNA, 15 bp, Homo sapiens
aatcatttacacatt

SEQ ID NO: 988638 - DNA, 15 bp, Homo sapiens
atcatttacacattt

SEQ ID NO: 988639 - DNA, 15 bp, Homo sapiens
tcatttacacatttg

SEQ ID NO: 988640 - DNA, 15 bp, Homo sapiens
catttacacatttgc

SEQ ID NO: 988641 - DNA, 15 bp, Homo sapiens
atttacacatttgcc

SEQ ID NO: 988642 - DNA, 15 bp, Homo sapiens
tttacacatttgccc

SEQ ID NO: 988643 - DNA, 15 bp, Homo sapiens
ttacacatttgcccg

SEQ ID NO: 988644 - DNA, 15 bp, Homo sapiens
tacacatttgcccga

SEQ ID NO: 988645 - DNA, 15 bp, Homo sapiens
acacatttgcccgaa

SEQ ID NO: 988646 - DNA, 15 bp, Homo sapiens
cacatttgcccgaag

SEQ ID NO: 988647 - DNA, 15 bp, Homo sapiens
acatttgcccgaagc

SEQ ID NO: 988648 - DNA, 15 bp, Homo sapiens
catttgcccgaagcc

SEQ ID NO: 988649 - DNA, 15 bp, Homo sapiens
atttgcccgaagcca

SEQ ID NO: 988650 - DNA, 15 bp, Homo sapiens
tttgcccgaagccat

SEQ ID NO: 988651 - DNA, 15 bp, Homo sapiens
ttgcccgaagccata

SEQ ID NO: 988652 - DNA, 15 bp, Homo sapiens
tgcccgaagccatag

SEQ ID NO: 988653 - DNA, 15 bp, Homo sapiens
gcccgaagccataga

SEQ ID NO: 988654 - DNA, 15 bp, Homo sapiens
cccgaagccatagaa

SEQ ID NO: 988655 - DNA, 15 bp, Homo sapiens
ccgaagccatagaat

SEQ ID NO: 988656 - DNA, 15 bp, Homo sapiens
cgaagccatagaatg

SEQ ID NO: 988657 - DNA, 15 bp, Homo sapiens
gaagccatagaatgg

SEQ ID NO: 988658 - DNA, 15 bp, Homo sapiens
aagccatagaatggg

SEQ ID NO: 988659 - DNA, 15 bp, Homo sapiens
agccatagaatgggt

SEQ ID NO: 988660 - DNA, 15 bp, Homo sapiens
gccatagaatgggta

SEQ ID NO: 988661 - DNA, 15 bp, Homo sapiens
ccatagaatgggtag

SEQ ID NO: 988662 - DNA, 15 bp, Homo sapiens
catagaatgggtaga

SEQ ID NO: 988663 - DNA, 15 bp, Homo sapiens
atagaatgggtagag

SEQ ID NO: 988664 - DNA, 15 bp, Homo sapiens
tagaatgggtagagg

SEQ ID NO: 988665 - DNA, 15 bp, Homo sapiens
agaatgggtagaggg

SEQ ID NO: 988666 - DNA, 15 bp, Homo sapiens
gaatgggtagagggg

SEQ ID NO: 988667 - DNA, 15 bp, Homo sapiens
aatgggtagagggga

SEQ ID NO: 988668 - DNA, 15 bp, Homo sapiens
atgggtagaggggat

SEQ ID NO: 988669 - DNA, 15 bp, Homo sapiens
tgggtagaggggatg

SEQ ID NO: 988670 - DNA, 15 bp, Homo sapiens
gggtagaggggatga

SEQ ID NO: 988671 - DNA, 15 bp, Homo sapiens
ggtagaggggatgac

SEQ ID NO: 988672 - DNA, 15 bp, Homo sapiens
gtagaggggatgact

SEQ ID NO: 988673 - DNA, 15 bp, Homo sapiens
tagaggggatgacta

SEQ ID NO: 988674 - DNA, 15 bp, Homo sapiens
agaggggatgactaa

SEQ ID NO: 988675 - DNA, 15 bp, Homo sapiens
gaggggatgactaag

SEQ ID NO: 988676 - DNA, 15 bp, Homo sapiens
aggggatgactaaga

SEQ ID NO: 988677 - DNA, 15 bp, Homo sapiens
ggggatgactaagat

SEQ ID NO: 988678 - DNA, 15 bp, Homo sapiens
gggatgactaagatg

SEQ ID NO: 988679 - DNA, 15 bp, Homo sapiens
ggatgactaagatgt

SEQ ID NO: 988680 - DNA, 15 bp, Homo sapiens
gatgactaagatgtc

SEQ ID NO: 988681 - DNA, 15 bp, Homo sapiens
atgactaagatgtca

SEQ ID NO: 988682 - DNA, 15 bp, Homo sapiens
tgactaagatgtcat

SEQ ID NO: 988683 - DNA, 15 bp, Homo sapiens
gactaagatgtcatc

SEQ ID NO: 988684 - DNA, 15 bp, Homo sapiens
actaagatgtcatca

SEQ ID NO: 988685 - DNA, 15 bp, Homo sapiens
ctaagatgtcatcac

SEQ ID NO: 988686 - DNA, 15 bp, Homo sapiens
taagatgtcatcacg

SEQ ID NO: 988687 - DNA, 15 bp, Homo sapiens
aagatgtcatcacgt

SEQ ID NO: 988688 - DNA, 15 bp, Homo sapiens
agatgtcatcacgtg

SEQ ID NO: 988689 - DNA, 15 bp, Homo sapiens
gatgtcatcacgtgc

SEQ ID NO: 988690 - DNA, 15 bp, Homo sapiens
atgtcatcacgtgct

SEQ ID NO: 988691 - DNA, 15 bp, Homo sapiens
tgtcatcacgtgctc

SEQ ID NO: 988692 - DNA, 15 bp, Homo sapiens
gtcatcacgtgctct

SEQ ID NO: 988693 - DNA, 15 bp, Homo sapiens
tcatcacgtgctctc

SEQ ID NO: 988694 - DNA, 15 bp, Homo sapiens
catcacgtgctctca

SEQ ID NO: 988695 - DNA, 15 bp, Homo sapiens
atcacgtgctctcaa

SEQ ID NO: 988696 - DNA, 15 bp, Homo sapiens
tcacgtgctctcaat

SEQ ID NO: 988697 - DNA, 15 bp, Homo sapiens
cacgtgctctcaatt

SEQ ID NO: 988698 - DNA, 15 bp, Homo sapiens
acgtgctctcaattt

SEQ ID NO: 988699 - DNA, 15 bp, Homo sapiens
cgtgctctcaatttg

SEQ ID NO: 988700 - DNA, 15 bp, Homo sapiens
gtgctctcaatttgg

SEQ ID NO: 988701 - DNA, 15 bp, Homo sapiens
tgctctcaatttgga

SEQ ID NO: 988702 - DNA, 15 bp, Homo sapiens
gctctcaatttggag

SEQ ID NO: 988703 - DNA, 15 bp, Homo sapiens
ctctcaatttggagg

SEQ ID NO: 988704 - DNA, 15 bp, Homo sapiens
tctcaatttggaggc

SEQ ID NO: 988705 - DNA, 15 bp, Homo sapiens
ctcaatttggaggca

SEQ ID NO: 988706 - DNA, 15 bp, Homo sapiens
tcaatttggaggcag

SEQ ID NO: 988707 - DNA, 15 bp, Homo sapiens
caatttggaggcagc

SEQ ID NO: 988708 - DNA, 15 bp, Homo sapiens
aatttggaggcagca

SEQ ID NO: 988709 - DNA, 15 bp, Homo sapiens
atttggaggcagcat

SEQ ID NO: 988710 - DNA, 15 bp, Homo sapiens
tttggaggcagcatg

SEQ ID NO: 988711 - DNA, 15 bp, Homo sapiens
ttggaggcagcatga

SEQ ID NO: 988712 - DNA, 15 bp, Homo sapiens
tggaggcagcatgat

SEQ ID NO: 988713 - DNA, 15 bp, Homo sapiens
ggaggcagcatgatt

SEQ ID NO: 988714 - DNA, 15 bp, Homo sapiens
gaggcagcatgattt

SEQ ID NO: 988715 - DNA, 15 bp, Homo sapiens
aggcagcatgatttc

SEQ ID NO: 988716 - DNA, 15 bp, Homo sapiens
ggcagcatgatttcc

SEQ ID NO: 988717 - DNA, 15 bp, Homo sapiens
gcagcatgatttccc

SEQ ID NO: 988718 - DNA, 15 bp, Homo sapiens
cagcatgatttcccc

SEQ ID NO: 988719 - DNA, 15 bp, Homo sapiens
agcatgatttcccct

SEQ ID NO: 988720 - DNA, 15 bp, Homo sapiens
gcatgatttcccctg

SEQ ID NO: 988721 - DNA, 15 bp, Homo sapiens
catgatttcccctga

SEQ ID NO: 988722 - DNA, 15 bp, Homo sapiens
atgatttcccctgac

SEQ ID NO: 988723 - DNA, 15 bp, Homo sapiens
tgatttcccctgaca

SEQ ID NO: 988724 - DNA, 15 bp, Homo sapiens
gatttcccctgacat

SEQ ID NO: 988725 - DNA, 15 bp, Homo sapiens
atttcccctgacatt

SEQ ID NO: 988726 - DNA, 15 bp, Homo sapiens
tttcccctgacattt

SEQ ID NO: 988727 - DNA, 15 bp, Homo sapiens
ttcccctgacattta

SEQ ID NO: 988728 - DNA, 15 bp, Homo sapiens
tcccctgacatttac

SEQ ID NO: 988729 - DNA, 15 bp, Homo sapiens
cccctgacatttaca

SEQ ID NO: 988730 - DNA, 15 bp, Homo sapiens
ccctgacatttacat

SEQ ID NO: 988731 - DNA, 15 bp, Homo sapiens
cctgacatttacatt

SEQ ID NO: 988732 - DNA, 15 bp, Homo sapiens
ctgacatttacattt

SEQ ID NO: 988733 - DNA, 15 bp, Homo sapiens
tgacatttacattta

SEQ ID NO: 988734 - DNA, 15 bp, Homo sapiens
gacatttacatttat

SEQ ID NO: 988735 - DNA, 15 bp, Homo sapiens
acatttacatttatg

SEQ ID NO: 988736 - DNA, 15 bp, Homo sapiens
catttacatttatgg

SEQ ID NO: 988737 - DNA, 15 bp, Homo sapiens
atttacatttatggg

SEQ ID NO: 988738 - DNA, 15 bp, Homo sapiens
tttacatttatgggc

SEQ ID NO: 988739 - DNA, 15 bp, Homo sapiens
ttacatttatgggct

SEQ ID NO: 988740 - DNA, 15 bp, Homo sapiens
tacatttatgggcta

SEQ ID NO: 988741 - DNA, 15 bp, Homo sapiens
acatttatgggctag

SEQ ID NO: 988742 - DNA, 15 bp, Homo sapiens
catttatgggctagc

SEQ ID NO: 988743 - DNA, 15 bp, Homo sapiens
atttatgggctagct

SEQ ID NO: 988744 - DNA, 15 bp, Homo sapiens
tttatgggctagcta

SEQ ID NO: 988745 - DNA, 15 bp, Homo sapiens
ttatgggctagctaa

SEQ ID NO: 988746 - DNA, 15 bp, Homo sapiens
tatgggctagctaat

SEQ ID NO: 988747 - DNA, 15 bp, Homo sapiens
atgggctagctaatt

SEQ ID NO: 988748 - DNA, 15 bp, Homo sapiens
tgggctagctaattt

SEQ ID NO: 988749 - DNA, 15 bp, Homo sapiens
gggctagctaatttt

SEQ ID NO: 988750 - DNA, 15 bp, Homo sapiens
ggctagctaattttt

SEQ ID NO: 988751 - DNA, 15 bp, Homo sapiens
gctagctaatttttc

SEQ ID NO: 988752 - DNA, 15 bp, Homo sapiens
ctagctaatttttcc

SEQ ID NO: 988753 - DNA, 15 bp, Homo sapiens
tagctaatttttccc

SEQ ID NO: 988754 - DNA, 15 bp, Homo sapiens
agctaatttttccct

SEQ ID NO: 988755 - DNA, 15 bp, Homo sapiens
gctaatttttccctt

SEQ ID NO: 988756 - DNA, 15 bp, Homo sapiens
ctaatttttcccttc

SEQ ID NO: 988757 - DNA, 15 bp, Homo sapiens
taatttttcccttcg

SEQ ID NO: 988758 - DNA, 15 bp, Homo sapiens
aatttttcccttcgt

SEQ ID NO: 988759 - DNA, 15 bp, Homo sapiens
atttttcccttcgtc

SEQ ID NO: 988760 - DNA, 15 bp, Homo sapiens
tttttcccttcgtct

SEQ ID NO: 988761 - DNA, 15 bp, Homo sapiens
ttttcccttcgtctt

SEQ ID NO: 988762 - DNA, 15 bp, Homo sapiens
tttcccttcgtctta

SEQ ID NO: 988763 - DNA, 15 bp, Homo sapiens
ttcccttcgtcttag

SEQ ID NO: 988764 - DNA, 15 bp, Homo sapiens
tcccttcgtcttagt

SEQ ID NO: 988765 - DNA, 15 bp, Homo sapiens
cccttcgtcttagta

SEQ ID NO: 988766 - DNA, 15 bp, Homo sapiens
ccttcgtcttagtaa

SEQ ID NO: 988767 - DNA, 15 bp, Homo sapiens
cttcgtcttagtaaa

SEQ ID NO: 988768 - DNA, 15 bp, Homo sapiens
ttcgtcttagtaaag

SEQ ID NO: 988769 - DNA, 15 bp, Homo sapiens
tcgtcttagtaaagt

SEQ ID NO: 988770 - DNA, 15 bp, Homo sapiens
cgtcttagtaaagtt

SEQ ID NO: 988771 - DNA, 15 bp, Homo sapiens
gtcttagtaaagttt

SEQ ID NO: 988772 - DNA, 15 bp, Homo sapiens
tcttagtaaagttta

SEQ ID NO: 988773 - DNA, 15 bp, Homo sapiens
cttagtaaagtttat

SEQ ID NO: 988774 - DNA, 15 bp, Homo sapiens
ttagtaaagtttata

SEQ ID NO: 988775 - DNA, 15 bp, Homo sapiens
tagtaaagtttatat

SEQ ID NO: 988776 - DNA, 15 bp, Homo sapiens
agtaaagtttatatt

SEQ ID NO: 988777 - DNA, 15 bp, Homo sapiens
gtaaagtttatatta

SEQ ID NO: 988778 - DNA, 15 bp, Homo sapiens
taaagtttatattac

SEQ ID NO: 988779 - DNA, 15 bp, Homo sapiens
aaagtttatattaca

SEQ ID NO: 988780 - DNA, 15 bp, Homo sapiens
aagtttatattacag

SEQ ID NO: 988781 - DNA, 15 bp, Homo sapiens
agtttatattacaga

SEQ ID NO: 988782 - DNA, 15 bp, Homo sapiens
gtttatattacagaa

SEQ ID NO: 988783 - DNA, 15 bp, Homo sapiens
tttatattacagaag

SEQ ID NO: 988784 - DNA, 15 bp, Homo sapiens
ttatattacagaagc

SEQ ID NO: 988785 - DNA, 15 bp, Homo sapiens
tatattacagaagcg

SEQ ID NO: 988786 - DNA, 15 bp, Homo sapiens
atattacagaagcgc

SEQ ID NO: 988787 - DNA, 15 bp, Homo sapiens
tattacagaagcgcc

SEQ ID NO: 988788 - DNA, 15 bp, Homo sapiens
attacagaagcgccc

SEQ ID NO: 988789 - DNA, 15 bp, Homo sapiens
ttacagaagcgccca

SEQ ID NO: 988790 - DNA, 15 bp, Homo sapiens
tacagaagcgcccag

SEQ ID NO: 988791 - DNA, 15 bp, Homo sapiens
acagaagcgcccagc

SEQ ID NO: 988792 - DNA, 15 bp, Homo sapiens
cagaagcgcccagcc

SEQ ID NO: 988793 - DNA, 15 bp, Homo sapiens
agaagcgcccagcca

SEQ ID NO: 988794 - DNA, 15 bp, Homo sapiens
gaagcgcccagccaa

SEQ ID NO: 988795 - DNA, 15 bp, Homo sapiens
aagcgcccagccaag

SEQ ID NO: 988796 - DNA, 15 bp, Homo sapiens
agcgcccagccaaga

SEQ ID NO: 988797 - DNA, 15 bp, Homo sapiens
gcgcccagccaagaa

SEQ ID NO: 988798 - DNA, 15 bp, Homo sapiens
cgcccagccaagaac

SEQ ID NO: 988799 - DNA, 15 bp, Homo sapiens
gcccagccaagaacc

SEQ ID NO: 988800 - DNA, 15 bp, Homo sapiens
cccagccaagaacct

SEQ ID NO: 988801 - DNA, 15 bp, Homo sapiens
ccagccaagaacctt

SEQ ID NO: 988802 - DNA, 15 bp, Homo sapiens
cagccaagaacctta

SEQ ID NO: 988803 - DNA, 15 bp, Homo sapiens
agccaagaaccttat

SEQ ID NO: 988804 - DNA, 15 bp, Homo sapiens
gccaagaaccttatc

SEQ ID NO: 988805 - DNA, 15 bp, Homo sapiens
ccaagaaccttatcc

SEQ ID NO: 988806 - DNA, 15 bp, Homo sapiens
caagaaccttatccc

SEQ ID NO: 988807 - DNA, 15 bp, Homo sapiens
aagaaccttatccca

SEQ ID NO: 988808 - DNA, 15 bp, Homo sapiens
agaaccttatcccac

SEQ ID NO: 988809 - DNA, 15 bp, Homo sapiens
gaaccttatcccaca

SEQ ID NO: 988810 - DNA, 15 bp, Homo sapiens
aaccttatcccacat

SEQ ID NO: 988811 - DNA, 15 bp, Homo sapiens
accttatcccacatc

SEQ ID NO: 988812 - DNA, 15 bp, Homo sapiens
ccttatcccacatcc

SEQ ID NO: 988813 - DNA, 15 bp, Homo sapiens
cttatcccacatcca

SEQ ID NO: 988814 - DNA, 15 bp, Homo sapiens
ttatcccacatccag

SEQ ID NO: 988815 - DNA, 15 bp, Homo sapiens
tatcccacatccaga

SEQ ID NO: 988816 - DNA, 15 bp, Homo sapiens
atcccacatccagat

SEQ ID NO: 988817 - DNA, 15 bp, Homo sapiens
tcccacatccagatc

SEQ ID NO: 988818 - DNA, 15 bp, Homo sapiens
cccacatccagatct

SEQ ID NO: 988819 - DNA, 15 bp, Homo sapiens
ccacatccagatctg

SEQ ID NO: 988820 - DNA, 15 bp, Homo sapiens
cacatccagatctgt

SEQ ID NO: 988821 - DNA, 15 bp, Homo sapiens
acatccagatctgta

SEQ ID NO: 988822 - DNA, 15 bp, Homo sapiens
catccagatctgtaa

SEQ ID NO: 988823 - DNA, 15 bp, Homo sapiens
atccagatctgtaaa

SEQ ID NO: 988824 - DNA, 15 bp, Homo sapiens
tccagatctgtaaaa

SEQ ID NO: 988825 - DNA, 15 bp, Homo sapiens
ccagatctgtaaaat

SEQ ID NO: 988826 - DNA, 15 bp, Homo sapiens
cagatctgtaaaatg

SEQ ID NO: 988827 - DNA, 15 bp, Homo sapiens
agatctgtaaaatga

SEQ ID NO: 988828 - DNA, 15 bp, Homo sapiens
gatctgtaaaatgat

SEQ ID NO: 988829 - DNA, 15 bp, Homo sapiens
atctgtaaaatgatg

SEQ ID NO: 988830 - DNA, 15 bp, Homo sapiens
tctgtaaaatgatgt

SEQ ID NO: 988831 - DNA, 15 bp, Homo sapiens
ctgtaaaatgatgtt

SEQ ID NO: 988832 - DNA, 15 bp, Homo sapiens
tgtaaaatgatgttc

SEQ ID NO: 988833 - DNA, 15 bp, Homo sapiens
gtaaaatgatgttca

SEQ ID NO: 988834 - DNA, 15 bp, Homo sapiens
taaaatgatgttcag

SEQ ID NO: 988835 - DNA, 15 bp, Homo sapiens
aaaatgatgttcaga

SEQ ID NO: 988836 - DNA, 15 bp, Homo sapiens
aaatgatgttcagat

SEQ ID NO: 988837 - DNA, 15 bp, Homo sapiens
aatgatgttcagatt

SEQ ID NO: 988838 - DNA, 15 bp, Homo sapiens
atgatgttcagattt

SEQ ID NO: 988839 - DNA, 15 bp, Homo sapiens
tgatgttcagatttt

SEQ ID NO: 988840 - DNA, 15 bp, Homo sapiens
gatgttcagatttta

SEQ ID NO: 988841 - DNA, 15 bp, Homo sapiens
atgttcagattttat

SEQ ID NO: 988842 - DNA, 15 bp, Homo sapiens
tgttcagattttata

SEQ ID NO: 988843 - DNA, 15 bp, Homo sapiens
gttcagattttataa

SEQ ID NO: 988844 - DNA, 15 bp, Homo sapiens
ttcagattttataat

SEQ ID NO: 988845 - DNA, 15 bp, Homo sapiens
tcagattttataatc

SEQ ID NO: 988846 - DNA, 15 bp, Homo sapiens
cagattttataatct

SEQ ID NO: 988847 - DNA, 15 bp, Homo sapiens
agattttataatctg

SEQ ID NO: 988848 - DNA, 15 bp, Homo sapiens
gattttataatctgt

SEQ ID NO: 988849 - DNA, 15 bp, Homo sapiens
attttataatctgtg

SEQ ID NO: 988850 - DNA, 15 bp, Homo sapiens
ttttataatctgtgg

SEQ ID NO: 988851 - DNA, 15 bp, Homo sapiens
tttataatctgtgga

SEQ ID NO: 988852 - DNA, 15 bp, Homo sapiens
ttataatctgtggac

SEQ ID NO: 988853 - DNA, 15 bp, Homo sapiens
tataatctgtggact

SEQ ID NO: 988854 - DNA, 15 bp, Homo sapiens
ataatctgtggactg

SEQ ID NO: 988855 - DNA, 15 bp, Homo sapiens
taatctgtggactgg

SEQ ID NO: 988856 - DNA, 15 bp, Homo sapiens
aatctgtggactgga

SEQ ID NO: 988857 - DNA, 15 bp, Homo sapiens
atctgtggactggat

SEQ ID NO: 988858 - DNA, 15 bp, Homo sapiens
tctgtggactggatg

SEQ ID NO: 988859 - DNA, 15 bp, Homo sapiens
ctgtggactggatgc

SEQ ID NO: 988860 - DNA, 15 bp, Homo sapiens
tgtggactggatgca

SEQ ID NO: 988861 - DNA, 15 bp, Homo sapiens
gtggactggatgcaa

SEQ ID NO: 988862 - DNA, 15 bp, Homo sapiens
tggactggatgcaat

SEQ ID NO: 988863 - DNA, 15 bp, Homo sapiens
ggactggatgcaatg

SEQ ID NO: 988864 - DNA, 15 bp, Homo sapiens
gactggatgcaatga

SEQ ID NO: 988865 - DNA, 15 bp, Homo sapiens
actggatgcaatgac

SEQ ID NO: 988866 - DNA, 15 bp, Homo sapiens
ctggatgcaatgaca

SEQ ID NO: 988867 - DNA, 15 bp, Homo sapiens
tggatgcaatgacag

SEQ ID NO: 988868 - DNA, 15 bp, Homo sapiens
ggatgcaatgacagc

SEQ ID NO: 988869 - DNA, 15 bp, Homo sapiens
gatgcaatgacagct

SEQ ID NO: 988870 - DNA, 15 bp, Homo sapiens
atgcaatgacagctt

SEQ ID NO: 988871 - DNA, 15 bp, Homo sapiens
tgcaatgacagcttg

SEQ ID NO: 988872 - DNA, 15 bp, Homo sapiens
gcaatgacagcttgt

SEQ ID NO: 988873 - DNA, 15 bp, Homo sapiens
caatgacagcttgtg

SEQ ID NO: 988874 - DNA, 15 bp, Homo sapiens
aatgacagcttgtga

SEQ ID NO: 988875 - DNA, 15 bp, Homo sapiens
atgacagcttgtgac

SEQ ID NO: 988876 - DNA, 15 bp, Homo sapiens
tgacagcttgtgact

SEQ ID NO: 988877 - DNA, 15 bp, Homo sapiens
gacagcttgtgactg

SEQ ID NO: 988878 - DNA, 15 bp, Homo sapiens
acagcttgtgactgt

SEQ ID NO: 988879 - DNA, 15 bp, Homo sapiens
cagcttgtgactgtt

SEQ ID NO: 988880 - DNA, 15 bp, Homo sapiens
agcttgtgactgttt

SEQ ID NO: 988881 - DNA, 15 bp, Homo sapiens
gcttgtgactgttta

SEQ ID NO: 988882 - DNA, 15 bp, Homo sapiens
cttgtgactgtttat

SEQ ID NO: 988883 - DNA, 15 bp, Homo sapiens
ttgtgactgtttatt

SEQ ID NO: 988884 - DNA, 15 bp, Homo sapiens
tgtgactgtttattg

SEQ ID NO: 988885 - DNA, 15 bp, Homo sapiens
gtgactgtttattgc

SEQ ID NO: 988886 - DNA, 15 bp, Homo sapiens
tgactgtttattgcg

SEQ ID NO: 988887 - DNA, 15 bp, Homo sapiens
gactgtttattgcgt

SEQ ID NO: 988888 - DNA, 15 bp, Homo sapiens
actgtttattgcgtg

SEQ ID NO: 988889 - DNA, 15 bp, Homo sapiens
ctgtttattgcgtgg

SEQ ID NO: 988890 - DNA, 15 bp, Homo sapiens
tgtttattgcgtggg

SEQ ID NO: 988891 - DNA, 15 bp, Homo sapiens
gtttattgcgtggga

SEQ ID NO: 988892 - DNA, 15 bp, Homo sapiens
tttattgcgtgggac

SEQ ID NO: 988893 - DNA, 15 bp, Homo sapiens
ttattgcgtgggact

SEQ ID NO: 988894 - DNA, 15 bp, Homo sapiens
tattgcgtgggactg

SEQ ID NO: 988895 - DNA, 15 bp, Homo sapiens
attgcgtgggactgc

SEQ ID NO: 988896 - DNA, 15 bp, Homo sapiens
ttgcgtgggactgcc

SEQ ID NO: 988897 - DNA, 15 bp, Homo sapiens
tgcgtgggactgccc

SEQ ID NO: 988898 - DNA, 15 bp, Homo sapiens
gcgtgggactgcccc

SEQ ID NO: 988899 - DNA, 15 bp, Homo sapiens
cgtgggactgccccc

SEQ ID NO: 988900 - DNA, 15 bp, Homo sapiens
gtgggactgccccca

SEQ ID NO: 988901 - DNA, 15 bp, Homo sapiens
tgggactgcccccaa

SEQ ID NO: 988902 - DNA, 15 bp, Homo sapiens
gggactgcccccaaa

SEQ ID NO: 988903 - DNA, 15 bp, Homo sapiens
ggactgcccccaaat

SEQ ID NO: 988904 - DNA, 15 bp, Homo sapiens
gactgcccccaaatt

SEQ ID NO: 988905 - DNA, 15 bp, Homo sapiens
actgcccccaaattc

SEQ ID NO: 988906 - DNA, 15 bp, Homo sapiens
ctgcccccaaattca

SEQ ID NO: 988907 - DNA, 15 bp, Homo sapiens
tgcccccaaattcaa

SEQ ID NO: 988908 - DNA, 15 bp, Homo sapiens
gcccccaaattcaaa

SEQ ID NO: 988909 - DNA, 15 bp, Homo sapiens
cccccaaattcaaag

SEQ ID NO: 988910 - DNA, 15 bp, Homo sapiens
ccccaaattcaaaga

SEQ ID NO: 988911 - DNA, 15 bp, Homo sapiens
cccaaattcaaagat

SEQ ID NO: 988912 - DNA, 15 bp, Homo sapiens
ccaaattcaaagatg

SEQ ID NO: 988913 - DNA, 15 bp, Homo sapiens
caaattcaaagatgc

SEQ ID NO: 988914 - DNA, 15 bp, Homo sapiens
aaattcaaagatgct

SEQ ID NO: 988915 - DNA, 15 bp, Homo sapiens
aattcaaagatgcta

SEQ ID NO: 988916 - DNA, 15 bp, Homo sapiens
attcaaagatgctat

SEQ ID NO: 988917 - DNA, 15 bp, Homo sapiens
ttcaaagatgctatt

SEQ ID NO: 988918 - DNA, 15 bp, Homo sapiens
tcaaagatgctatta

SEQ ID NO: 988919 - DNA, 15 bp, Homo sapiens
caaagatgctattaa

SEQ ID NO: 988920 - DNA, 15 bp, Homo sapiens
aaagatgctattaat

SEQ ID NO: 988921 - DNA, 15 bp, Homo sapiens
aagatgctattaatt

SEQ ID NO: 988922 - DNA, 15 bp, Homo sapiens
agatgctattaattt

SEQ ID NO: 988923 - DNA, 15 bp, Homo sapiens
gatgctattaattta

SEQ ID NO: 988924 - DNA, 15 bp, Homo sapiens
atgctattaatttac

SEQ ID NO: 988925 - DNA, 15 bp, Homo sapiens
tgctattaatttacc

SEQ ID NO: 988926 - DNA, 15 bp, Homo sapiens
gctattaatttacca

SEQ ID NO: 988927 - DNA, 15 bp, Homo sapiens
ctattaatttaccac

SEQ ID NO: 988928 - DNA, 15 bp, Homo sapiens
tattaatttaccaca

SEQ ID NO: 988929 - DNA, 15 bp, Homo sapiens
attaatttaccacag

SEQ ID NO: 988930 - DNA, 15 bp, Homo sapiens
ttaatttaccacaga

SEQ ID NO: 988931 - DNA, 15 bp, Homo sapiens
taatttaccacagac

SEQ ID NO: 988932 - DNA, 15 bp, Homo sapiens
aatttaccacagacc

SEQ ID NO: 988933 - DNA, 15 bp, Homo sapiens
atttaccacagacct

SEQ ID NO: 988934 - DNA, 15 bp, Homo sapiens
tttaccacagacctt

SEQ ID NO: 988935 - DNA, 15 bp, Homo sapiens
ttaccacagacctta

SEQ ID NO: 988936 - DNA, 15 bp, Homo sapiens
taccacagaccttat

SEQ ID NO: 988937 - DNA, 15 bp, Homo sapiens
accacagaccttatc

SEQ ID NO: 988938 - DNA, 15 bp, Homo sapiens
ccacagaccttatct

SEQ ID NO: 988939 - DNA, 15 bp, Homo sapiens
cacagaccttatctg

SEQ ID NO: 988940 - DNA, 15 bp, Homo sapiens
acagaccttatctgc

SEQ ID NO: 988941 - DNA, 15 bp, Homo sapiens
cagaccttatctgca

SEQ ID NO: 988942 - DNA, 15 bp, Homo sapiens
agaccttatctgcac

SEQ ID NO: 988943 - DNA, 15 bp, Homo sapiens
gaccttatctgcacg

SEQ ID NO: 988944 - DNA, 15 bp, Homo sapiens
accttatctgcacga

SEQ ID NO: 988945 - DNA, 15 bp, Homo sapiens
ccttatctgcacgat

SEQ ID NO: 988946 - DNA, 15 bp, Homo sapiens
cttatctgcacgatt

SEQ ID NO: 988947 - DNA, 15 bp, Homo sapiens
ttatctgcacgatta

SEQ ID NO: 988948 - DNA, 15 bp, Homo sapiens
tatctgcacgattat

SEQ ID NO: 988949 - DNA, 15 bp, Homo sapiens
atctgcacgattatc

SEQ ID NO: 988950 - DNA, 15 bp, Homo sapiens
tctgcacgattatcc

SEQ ID NO: 988951 - DNA, 15 bp, Homo sapiens
ctgcacgattatcct

SEQ ID NO: 988952 - DNA, 15 bp, Homo sapiens
tgcacgattatcctt

SEQ ID NO: 988953 - DNA, 15 bp, Homo sapiens
gcacgattatccttc

SEQ ID NO: 988954 - DNA, 15 bp, Homo sapiens
cacgattatccttca

SEQ ID NO: 988955 - DNA, 15 bp, Homo sapiens
acgattatccttcat

SEQ ID NO: 988956 - DNA, 15 bp, Homo sapiens
cgattatccttcata

SEQ ID NO: 988957 - DNA, 15 bp, Homo sapiens
gattatccttcataa

SEQ ID NO: 988958 - DNA, 15 bp, Homo sapiens
attatccttcataaa

SEQ ID NO: 988959 - DNA, 15 bp, Homo sapiens
ttatccttcataaat

SEQ ID NO: 988960 - DNA, 15 bp, Homo sapiens
tatccttcataaata

SEQ ID NO: 988961 - DNA, 15 bp, Homo sapiens
atccttcataaatat

SEQ ID NO: 988962 - DNA, 15 bp, Homo sapiens
tccttcataaatatg

SEQ ID NO: 988963 - DNA, 15 bp, Homo sapiens
ccttcataaatatgc

SEQ ID NO: 988964 - DNA, 15 bp, Homo sapiens
cttcataaatatgct

SEQ ID NO: 988965 - DNA, 15 bp, Homo sapiens
ttcataaatatgctg

SEQ ID NO: 988966 - DNA, 15 bp, Homo sapiens
tcataaatatgctga

SEQ ID NO: 988967 - DNA, 15 bp, Homo sapiens
cataaatatgctgac

SEQ ID NO: 988968 - DNA, 15 bp, Homo sapiens
ataaatatgctgacg

SEQ ID NO: 988969 - DNA, 15 bp, Homo sapiens
taaatatgctgacgc

SEQ ID NO: 988970 - DNA, 15 bp, Homo sapiens
aaatatgctgacgca

SEQ ID NO: 988971 - DNA, 15 bp, Homo sapiens
aatatgctgacgcaa

SEQ ID NO: 988972 - DNA, 15 bp, Homo sapiens
atatgctgacgcaat

SEQ ID NO: 988973 - DNA, 15 bp, Homo sapiens
tatgctgacgcaatc

SEQ ID NO: 988974 - DNA, 15 bp, Homo sapiens
atgctgacgcaatcc

SEQ ID NO: 988975 - DNA, 15 bp, Homo sapiens
tgctgacgcaatcca

SEQ ID NO: 988976 - DNA, 15 bp, Homo sapiens
gctgacgcaatccac

SEQ ID NO: 988977 - DNA, 15 bp, Homo sapiens
ctgacgcaatccact

SEQ ID NO: 988978 - DNA, 15 bp, Homo sapiens
tgacgcaatccactt

SEQ ID NO: 988979 - DNA, 15 bp, Homo sapiens
gacgcaatccacttt

SEQ ID NO: 988980 - DNA, 15 bp, Homo sapiens
acgcaatccactttt

SEQ ID NO: 988981 - DNA, 15 bp, Homo sapiens
cgcaatccacttttt

SEQ ID NO: 988982 - DNA, 15 bp, Homo sapiens
gcaatccactttttc

SEQ ID NO: 988983 - DNA, 15 bp, Homo sapiens
caatccactttttct

SEQ ID NO: 988984 - DNA, 15 bp, Homo sapiens
aatccactttttctg

SEQ ID NO: 988985 - DNA, 15 bp, Homo sapiens
atccactttttctgg

SEQ ID NO: 988986 - DNA, 15 bp, Homo sapiens
tccactttttctggt

SEQ ID NO: 988987 - DNA, 15 bp, Homo sapiens
ccactttttctggtt

SEQ ID NO: 988988 - DNA, 15 bp, Homo sapiens
cactttttctggttc

SEQ ID NO: 988989 - DNA, 15 bp, Homo sapiens
actttttctggttca

SEQ ID NO: 988990 - DNA, 15 bp, Homo sapiens
ctttttctggttcag

SEQ ID NO: 988991 - DNA, 15 bp, Homo sapiens
tttttctggttcaga

SEQ ID NO: 988992 - DNA, 15 bp, Homo sapiens
ttttctggttcagag

SEQ ID NO: 988993 - DNA, 15 bp, Homo sapiens
tttctggttcagaga

SEQ ID NO: 988994 - DNA, 15 bp, Homo sapiens
ttctggttcagagag

SEQ ID NO: 988995 - DNA, 15 bp, Homo sapiens
tctggttcagagagg

SEQ ID NO: 988996 - DNA, 15 bp, Homo sapiens
ctggttcagagagga

SEQ ID NO: 988997 - DNA, 15 bp, Homo sapiens
tggttcagagaggag

SEQ ID NO: 988998 - DNA, 15 bp, Homo sapiens
ggttcagagaggaga

SEQ ID NO: 988999 - DNA, 15 bp, Homo sapiens
gttcagagaggagac

SEQ ID NO: 989000 - DNA, 15 bp, Homo sapiens
ttcagagaggagacc

SEQ ID NO: 989001 - DNA, 15 bp, Homo sapiens
tcagagaggagacca

SEQ ID NO: 989002 - DNA, 15 bp, Homo sapiens
cagagaggagaccaa

SEQ ID NO: 989003 - DNA, 15 bp, Homo sapiens
agagaggagaccaag

SEQ ID NO: 989004 - DNA, 15 bp, Homo sapiens
gagaggagaccaagg

SEQ ID NO: 989005 - DNA, 15 bp, Homo sapiens
agaggagaccaaggg

SEQ ID NO: 989006 - DNA, 15 bp, Homo sapiens
gaggagaccaaggga

SEQ ID NO: 989007 - DNA, 15 bp, Homo sapiens
aggagaccaagggaa

SEQ ID NO: 989008 - DNA, 15 bp, Homo sapiens
ggagaccaagggaaa

SEQ ID NO: 989009 - DNA, 15 bp, Homo sapiens
gagaccaagggaaac

SEQ ID NO: 989010 - DNA, 15 bp, Homo sapiens
agaccaagggaaaca

SEQ ID NO: 989011 - DNA, 15 bp, Homo sapiens
gaccaagggaaacag

SEQ ID NO: 989012 - DNA, 15 bp, Homo sapiens
accaagggaaacagc

SEQ ID NO: 989013 - DNA, 15 bp, Homo sapiens
ccaagggaaacagct

SEQ ID NO: 989014 - DNA, 15 bp, Homo sapiens
caagggaaacagcta

SEQ ID NO: 989015 - DNA, 15 bp, Homo sapiens
aagggaaacagctaa

SEQ ID NO: 989016 - DNA, 15 bp, Homo sapiens
agggaaacagctaac

SEQ ID NO: 989017 - DNA, 15 bp, Homo sapiens
gggaaacagctaacc

SEQ ID NO: 989018 - DNA, 15 bp, Homo sapiens
ggaaacagctaaccc

SEQ ID NO: 989019 - DNA, 15 bp, Homo sapiens
gaaacagctaacccg

SEQ ID NO: 989020 - DNA, 15 bp, Homo sapiens
aaacagctaacccgg

SEQ ID NO: 989021 - DNA, 15 bp, Homo sapiens
aacagctaacccggt

SEQ ID NO: 989022 - DNA, 15 bp, Homo sapiens
acagctaacccggtt

SEQ ID NO: 989023 - DNA, 15 bp, Homo sapiens
cagctaacccggttg

SEQ ID NO: 989024 - DNA, 15 bp, Homo sapiens
agctaacccggttgc

SEQ ID NO: 989025 - DNA, 15 bp, Homo sapiens
gctaacccggttgct

SEQ ID NO: 989026 - DNA, 15 bp, Homo sapiens
ctaacccggttgcta

SEQ ID NO: 989027 - DNA, 15 bp, Homo sapiens
taacccggttgctaa

SEQ ID NO: 989028 - DNA, 15 bp, Homo sapiens
aacccggttgctaaa

SEQ ID NO: 989029 - DNA, 15 bp, Homo sapiens
acccggttgctaaaa

SEQ ID NO: 989030 - DNA, 15 bp, Homo sapiens
cccggttgctaaaac

SEQ ID NO: 989031 - DNA, 15 bp, Homo sapiens
ccggttgctaaaacc

SEQ ID NO: 989032 - DNA, 15 bp, Homo sapiens
cggttgctaaaacct

SEQ ID NO: 989033 - DNA, 15 bp, Homo sapiens
ggttgctaaaacctt

SEQ ID NO: 989034 - DNA, 15 bp, Homo sapiens
gttgctaaaaccttt

SEQ ID NO: 989035 - DNA, 15 bp, Homo sapiens
ttgctaaaacctttt

SEQ ID NO: 989036 - DNA, 15 bp, Homo sapiens
tgctaaaaccttttt

SEQ ID NO: 989037 - DNA, 15 bp, Homo sapiens
gctaaaacctttttc

SEQ ID NO: 989038 - DNA, 15 bp, Homo sapiens
ctaaaacctttttca

SEQ ID NO: 989039 - DNA, 15 bp, Homo sapiens
taaaacctttttcat

SEQ ID NO: 989040 - DNA, 15 bp, Homo sapiens
aaaacctttttcatt

SEQ ID NO: 989041 - DNA, 15 bp, Homo sapiens
aaacctttttcattt

SEQ ID NO: 989042 - DNA, 15 bp, Homo sapiens
aacctttttcatttt

SEQ ID NO: 989043 - DNA, 15 bp, Homo sapiens
acctttttcattttc

SEQ ID NO: 989044 - DNA, 15 bp, Homo sapiens
cctttttcattttcc

SEQ ID NO: 989045 - DNA, 15 bp, Homo sapiens
ctttttcattttcct

SEQ ID NO: 989046 - DNA, 15 bp, Homo sapiens
tttttcattttcctt

SEQ ID NO: 989047 - DNA, 15 bp, Homo sapiens
ttttcattttccttc

SEQ ID NO: 989048 - DNA, 15 bp, Homo sapiens
tttcattttccttcc

SEQ ID NO: 989049 - DNA, 15 bp, Homo sapiens
ttcattttccttccc

SEQ ID NO: 989050 - DNA, 15 bp, Homo sapiens
tcattttccttccca

SEQ ID NO: 989051 - DNA, 15 bp, Homo sapiens
cattttccttcccat

SEQ ID NO: 989052 - DNA, 15 bp, Homo sapiens
attttccttcccata

SEQ ID NO: 989053 - DNA, 15 bp, Homo sapiens
ttttccttcccatat

SEQ ID NO: 989054 - DNA, 15 bp, Homo sapiens
tttccttcccatatg

SEQ ID NO: 989055 - DNA, 15 bp, Homo sapiens
ttccttcccatatgt

SEQ ID NO: 989056 - DNA, 15 bp, Homo sapiens
tccttcccatatgtg

SEQ ID NO: 989057 - DNA, 15 bp, Homo sapiens
ccttcccatatgtga

SEQ ID NO: 989058 - DNA, 15 bp, Homo sapiens
cttcccatatgtgat

SEQ ID NO: 989059 - DNA, 15 bp, Homo sapiens
ttcccatatgtgatt

SEQ ID NO: 989060 - DNA, 15 bp, Homo sapiens
tcccatatgtgattg

SEQ ID NO: 989061 - DNA, 15 bp, Homo sapiens
cccatatgtgattgt

SEQ ID NO: 989062 - DNA, 15 bp, Homo sapiens
ccatatgtgattgtc

SEQ ID NO: 989063 - DNA, 15 bp, Homo sapiens
catatgtgattgtct

SEQ ID NO: 989064 - DNA, 15 bp, Homo sapiens
atatgtgattgtctc

SEQ ID NO: 989065 - DNA, 15 bp, Homo sapiens
tatgtgattgtctcc

SEQ ID NO: 989066 - DNA, 15 bp, Homo sapiens
atgtgattgtctcca

SEQ ID NO: 989067 - DNA, 15 bp, Homo sapiens
tgtgattgtctccat

SEQ ID NO: 989068 - DNA, 15 bp, Homo sapiens
gtgattgtctccatg

SEQ ID NO: 989069 - DNA, 15 bp, Homo sapiens
tgattgtctccatgt

SEQ ID NO: 989070 - DNA, 15 bp, Homo sapiens
gattgtctccatgtc

SEQ ID NO: 989071 - DNA, 15 bp, Homo sapiens
attgtctccatgtcc

SEQ ID NO: 989072 - DNA, 15 bp, Homo sapiens
ttgtctccatgtcca

SEQ ID NO: 989073 - DNA, 15 bp, Homo sapiens
tgtctccatgtccaa

SEQ ID NO: 989074 - DNA, 15 bp, Homo sapiens
gtctccatgtccaag

SEQ ID NO: 989075 - DNA, 15 bp, Homo sapiens
tctccatgtccaagg

SEQ ID NO: 989076 - DNA, 15 bp, Homo sapiens
ctccatgtccaaggg

SEQ ID NO: 989077 - DNA, 15 bp, Homo sapiens
tccatgtccaaggga

SEQ ID NO: 989078 - DNA, 15 bp, Homo sapiens
ccatgtccaagggag

SEQ ID NO: 989079 - DNA, 15 bp, Homo sapiens
catgtccaagggagg

SEQ ID NO: 989080 - DNA, 15 bp, Homo sapiens
atgtccaagggaggc

SEQ ID NO: 989081 - DNA, 15 bp, Homo sapiens
tgtccaagggaggct

SEQ ID NO: 989082 - DNA, 15 bp, Homo sapiens
gtccaagggaggctg

SEQ ID NO: 989083 - DNA, 15 bp, Homo sapiens
tccaagggaggctgg

SEQ ID NO: 989084 - DNA, 15 bp, Homo sapiens
ccaagggaggctggg

SEQ ID NO: 989085 - DNA, 15 bp, Homo sapiens
caagggaggctgggc

SEQ ID NO: 989086 - DNA, 15 bp, Homo sapiens
aagggaggctgggct

SEQ ID NO: 989087 - DNA, 15 bp, Homo sapiens
agggaggctgggcta

SEQ ID NO: 989088 - DNA, 15 bp, Homo sapiens
gggaggctgggctaa

SEQ ID NO: 989089 - DNA, 15 bp, Homo sapiens
ggaggctgggctaat

SEQ ID NO: 989090 - DNA, 15 bp, Homo sapiens
gaggctgggctaatc

SEQ ID NO: 989091 - DNA, 15 bp, Homo sapiens
aggctgggctaatca

SEQ ID NO: 989092 - DNA, 15 bp, Homo sapiens
ggctgggctaatcat

SEQ ID NO: 989093 - DNA, 15 bp, Homo sapiens
gctgggctaatcatg

SEQ ID NO: 989094 - DNA, 15 bp, Homo sapiens
ctgggctaatcatga

SEQ ID NO: 989095 - DNA, 15 bp, Homo sapiens
tgggctaatcatgaa

SEQ ID NO: 989096 - DNA, 15 bp, Homo sapiens
gggctaatcatgaac

SEQ ID NO: 989097 - DNA, 15 bp, Homo sapiens
ggctaatcatgaacc

SEQ ID NO: 989098 - DNA, 15 bp, Homo sapiens
gctaatcatgaacct

SEQ ID NO: 989099 - DNA, 15 bp, Homo sapiens
ctaatcatgaacctg

SEQ ID NO: 989100 - DNA, 15 bp, Homo sapiens
taatcatgaacctgg

SEQ ID NO: 989101 - DNA, 15 bp, Homo sapiens
aatcatgaacctggt

SEQ ID NO: 989102 - DNA, 15 bp, Homo sapiens
atcatgaacctggtc

SEQ ID NO: 989103 - DNA, 15 bp, Homo sapiens
tcatgaacctggtct

SEQ ID NO: 989104 - DNA, 15 bp, Homo sapiens
catgaacctggtctc

SEQ ID NO: 989105 - DNA, 15 bp, Homo sapiens
atgaacctggtctcc

SEQ ID NO: 989106 - DNA, 15 bp, Homo sapiens
tgaacctggtctccc

SEQ ID NO: 989107 - DNA, 15 bp, Homo sapiens
gaacctggtctccca

SEQ ID NO: 989108 - DNA, 15 bp, Homo sapiens
aacctggtctcccat

SEQ ID NO: 989109 - DNA, 15 bp, Homo sapiens
acctggtctcccatt

SEQ ID NO: 989110 - DNA, 15 bp, Homo sapiens
cctggtctcccattt

SEQ ID NO: 989111 - DNA, 15 bp, Homo sapiens
ctggtctcccatttt

SEQ ID NO: 989112 - DNA, 15 bp, Homo sapiens
tggtctcccattttt

SEQ ID NO: 989113 - DNA, 15 bp, Homo sapiens
ggtctcccattttta

SEQ ID NO: 989114 - DNA, 15 bp, Homo sapiens
gtctcccatttttaa

SEQ ID NO: 989115 - DNA, 15 bp, Homo sapiens
tctcccatttttaaa

SEQ ID NO: 989116 - DNA, 15 bp, Homo sapiens
ctcccatttttaaag

SEQ ID NO: 989117 - DNA, 15 bp, Homo sapiens
tcccatttttaaaga

SEQ ID NO: 989118 - DNA, 15 bp, Homo sapiens
cccatttttaaagag

SEQ ID NO: 989119 - DNA, 15 bp, Homo sapiens
ccatttttaaagaga

SEQ ID NO: 989120 - DNA, 15 bp, Homo sapiens
catttttaaagagaa

SEQ ID NO: 989121 - DNA, 15 bp, Homo sapiens
atttttaaagagaag

SEQ ID NO: 989122 - DNA, 15 bp, Homo sapiens
tttttaaagagaaga

SEQ ID NO: 989123 - DNA, 15 bp, Homo sapiens
ttttaaagagaagat

SEQ ID NO: 989124 - DNA, 15 bp, Homo sapiens
tttaaagagaagata

SEQ ID NO: 989125 - DNA, 15 bp, Homo sapiens
ttaaagagaagataa

SEQ ID NO: 989126 - DNA, 15 bp, Homo sapiens
taaagagaagataaa

SEQ ID NO: 989127 - DNA, 15 bp, Homo sapiens
aaagagaagataaat

SEQ ID NO: 989128 - DNA, 15 bp, Homo sapiens
aagagaagataaatt

SEQ ID NO: 989129 - DNA, 15 bp, Homo sapiens
agagaagataaatta

SEQ ID NO: 989130 - DNA, 15 bp, Homo sapiens
gagaagataaattat

SEQ ID NO: 989131 - DNA, 15 bp, Homo sapiens
agaagataaattatg

SEQ ID NO: 989132 - DNA, 15 bp, Homo sapiens
gaagataaattatgc

SEQ ID NO: 989133 - DNA, 15 bp, Homo sapiens
aagataaattatgct

SEQ ID NO: 989134 - DNA, 15 bp, Homo sapiens
agataaattatgctc

SEQ ID NO: 989135 - DNA, 15 bp, Homo sapiens
gataaattatgctca

SEQ ID NO: 989136 - DNA, 15 bp, Homo sapiens
ataaattatgctcag

SEQ ID NO: 989137 - DNA, 15 bp, Homo sapiens
taaattatgctcaga

SEQ ID NO: 989138 - DNA, 15 bp, Homo sapiens
aaattatgctcagaa

SEQ ID NO: 989139 - DNA, 15 bp, Homo sapiens
aattatgctcagaag

SEQ ID NO: 989140 - DNA, 15 bp, Homo sapiens
attatgctcagaaga

SEQ ID NO: 989141 - DNA, 15 bp, Homo sapiens
ttatgctcagaagag

SEQ ID NO: 989142 - DNA, 15 bp, Homo sapiens
tatgctcagaagaga

SEQ ID NO: 989143 - DNA, 15 bp, Homo sapiens
atgctcagaagagat

SEQ ID NO: 989144 - DNA, 15 bp, Homo sapiens
tgctcagaagagata

SEQ ID NO: 989145 - DNA, 15 bp, Homo sapiens
gctcagaagagatag

SEQ ID NO: 989146 - DNA, 15 bp, Homo sapiens
ctcagaagagatagc

SEQ ID NO: 989147 - DNA, 15 bp, Homo sapiens
tcagaagagatagcg

SEQ ID NO: 989148 - DNA, 15 bp, Homo sapiens
cagaagagatagcgg

SEQ ID NO: 989149 - DNA, 15 bp, Homo sapiens
agaagagatagcggt

SEQ ID NO: 989150 - DNA, 15 bp, Homo sapiens
gaagagatagcggtt

SEQ ID NO: 989151 - DNA, 15 bp, Homo sapiens
aagagatagcggttc

SEQ ID NO: 989152 - DNA, 15 bp, Homo sapiens
agagatagcggttca

SEQ ID NO: 989153 - DNA, 15 bp, Homo sapiens
gagatagcggttcat

SEQ ID NO: 989154 - DNA, 15 bp, Homo sapiens
agatagcggttcatt

SEQ ID NO: 989155 - DNA, 15 bp, Homo sapiens
gatagcggttcattt

SEQ ID NO: 989156 - DNA, 15 bp, Homo sapiens
atagcggttcatttc

SEQ ID NO: 989157 - DNA, 15 bp, Homo sapiens
tagcggttcatttct

SEQ ID NO: 989158 - DNA, 15 bp, Homo sapiens
agcggttcatttctc

SEQ ID NO: 989159 - DNA, 15 bp, Homo sapiens
gcggttcatttctca

SEQ ID NO: 989160 - DNA, 15 bp, Homo sapiens
cggttcatttctcac

SEQ ID NO: 989161 - DNA, 15 bp, Homo sapiens
ggttcatttctcacc

SEQ ID NO: 989162 - DNA, 15 bp, Homo sapiens
gttcatttctcaccg

SEQ ID NO: 989163 - DNA, 15 bp, Homo sapiens
ttcatttctcaccga

SEQ ID NO: 989164 - DNA, 15 bp, Homo sapiens
tcatttctcaccgac

SEQ ID NO: 989165 - DNA, 15 bp, Homo sapiens
catttctcaccgacc

SEQ ID NO: 989166 - DNA, 15 bp, Homo sapiens
atttctcaccgacca

SEQ ID NO: 989167 - DNA, 15 bp, Homo sapiens
tttctcaccgaccac

SEQ ID NO: 989168 - DNA, 15 bp, Homo sapiens
ttctcaccgaccact

SEQ ID NO: 989169 - DNA, 15 bp, Homo sapiens
tctcaccgaccactt

SEQ ID NO: 989170 - DNA, 15 bp, Homo sapiens
ctcaccgaccacttg

SEQ ID NO: 989171 - DNA, 15 bp, Homo sapiens
tcaccgaccacttga

SEQ ID NO: 989172 - DNA, 15 bp, Homo sapiens
caccgaccacttgat

SEQ ID NO: 989173 - DNA, 15 bp, Homo sapiens
accgaccacttgatt

SEQ ID NO: 989174 - DNA, 15 bp, Homo sapiens
ccgaccacttgattc

SEQ ID NO: 989175 - DNA, 15 bp, Homo sapiens
cgaccacttgattcc

SEQ ID NO: 989176 - DNA, 15 bp, Homo sapiens
gaccacttgattccc

SEQ ID NO: 989177 - DNA, 15 bp, Homo sapiens
accacttgattccct

SEQ ID NO: 989178 - DNA, 15 bp, Homo sapiens
ccacttgattccctt

SEQ ID NO: 989179 - DNA, 15 bp, Homo sapiens
cacttgattcccttg

SEQ ID NO: 989180 - DNA, 15 bp, Homo sapiens
acttgattcccttgt

SEQ ID NO: 989181 - DNA, 15 bp, Homo sapiens
cttgattcccttgtc

SEQ ID NO: 989182 - DNA, 15 bp, Homo sapiens
ttgattcccttgtct

SEQ ID NO: 989183 - DNA, 15 bp, Homo sapiens
tgattcccttgtctt

SEQ ID NO: 989184 - DNA, 15 bp, Homo sapiens
gattcccttgtctta

SEQ ID NO: 989185 - DNA, 15 bp, Homo sapiens
attcccttgtcttac

SEQ ID NO: 989186 - DNA, 15 bp, Homo sapiens
ttcccttgtcttaca

SEQ ID NO: 989187 - DNA, 15 bp, Homo sapiens
tcccttgtcttacat

SEQ ID NO: 989188 - DNA, 15 bp, Homo sapiens
cccttgtcttacatt

SEQ ID NO: 989189 - DNA, 15 bp, Homo sapiens
ccttgtcttacatta

SEQ ID NO: 989190 - DNA, 15 bp, Homo sapiens
cttgtcttacattaa

SEQ ID NO: 989191 - DNA, 15 bp, Homo sapiens
ttgtcttacattaaa

SEQ ID NO: 989192 - DNA, 15 bp, Homo sapiens
tgtcttacattaaat

SEQ ID NO: 989193 - DNA, 15 bp, Homo sapiens
gtcttacattaaatg

SEQ ID NO: 989194 - DNA, 15 bp, Homo sapiens
tcttacattaaatgt

SEQ ID NO: 989195 - DNA, 15 bp, Homo sapiens
cttacattaaatgtt

SEQ ID NO: 989196 - DNA, 15 bp, Homo sapiens
ttacattaaatgttc

SEQ ID NO: 989197 - DNA, 15 bp, Homo sapiens
tacattaaatgttct

SEQ ID NO: 989198 - DNA, 15 bp, Homo sapiens
acattaaatgttcta

SEQ ID NO: 989199 - DNA, 15 bp, Homo sapiens
cattaaatgttctat

SEQ ID NO: 989200 - DNA, 15 bp, Homo sapiens
attaaatgttctatt

SEQ ID NO: 989201 - DNA, 15 bp, Homo sapiens
ttaaatgttctattt

SEQ ID NO: 989202 - DNA, 15 bp, Homo sapiens
taaatgttctatttc

SEQ ID NO: 989203 - DNA, 15 bp, Homo sapiens
aaatgttctatttct

SEQ ID NO: 989204 - DNA, 15 bp, Homo sapiens
aatgttctatttctg

SEQ ID NO: 989205 - DNA, 15 bp, Homo sapiens
atgttctatttctgt

SEQ ID NO: 989206 - DNA, 15 bp, Homo sapiens
tgttctatttctgtt

SEQ ID NO: 989207 - DNA, 15 bp, Homo sapiens
gttctatttctgtta

SEQ ID NO: 989208 - DNA, 15 bp, Homo sapiens
ttctatttctgttat

SEQ ID NO: 989209 - DNA, 15 bp, Homo sapiens
tctatttctgttatc

SEQ ID NO: 989210 - DNA, 15 bp, Homo sapiens
ctatttctgttatct

SEQ ID NO: 989211 - DNA, 15 bp, Homo sapiens
tatttctgttatctc

SEQ ID NO: 989212 - DNA, 15 bp, Homo sapiens
atttctgttatctct

SEQ ID NO: 989213 - DNA, 15 bp, Homo sapiens
tttctgttatctcta

SEQ ID NO: 989214 - DNA, 15 bp, Homo sapiens
ttctgttatctctaa

SEQ ID NO: 989215 - DNA, 15 bp, Homo sapiens
tctgttatctctaat

SEQ ID NO: 989216 - DNA, 15 bp, Homo sapiens
ctgttatctctaatg

SEQ ID NO: 989217 - DNA, 15 bp, Homo sapiens
tgttatctctaatgc

SEQ ID NO: 989218 - DNA, 15 bp, Homo sapiens
gttatctctaatgct

SEQ ID NO: 989219 - DNA, 15 bp, Homo sapiens
ttatctctaatgctg

SEQ ID NO: 989220 - DNA, 15 bp, Homo sapiens
tatctctaatgctgt

SEQ ID NO: 989221 - DNA, 15 bp, Homo sapiens
atctctaatgctgtt

SEQ ID NO: 989222 - DNA, 15 bp, Homo sapiens
tctctaatgctgttt

SEQ ID NO: 989223 - DNA, 15 bp, Homo sapiens
ctctaatgctgtttg

SEQ ID NO: 989224 - DNA, 15 bp, Homo sapiens
tctaatgctgtttgt

SEQ ID NO: 989225 - DNA, 15 bp, Homo sapiens
ctaatgctgtttgtt

SEQ ID NO: 989226 - DNA, 15 bp, Homo sapiens
taatgctgtttgttt

SEQ ID NO: 989227 - DNA, 15 bp, Homo sapiens
aatgctgtttgtttt

SEQ ID NO: 989228 - DNA, 15 bp, Homo sapiens
atgctgtttgttttc

SEQ ID NO: 989229 - DNA, 15 bp, Homo sapiens
tgctgtttgttttcc

SEQ ID NO: 989230 - DNA, 15 bp, Homo sapiens
gctgtttgttttcca

SEQ ID NO: 989231 - DNA, 15 bp, Homo sapiens
ctgtttgttttccat

SEQ ID NO: 989232 - DNA, 15 bp, Homo sapiens
tgtttgttttccata

SEQ ID NO: 989233 - DNA, 15 bp, Homo sapiens
gtttgttttccatat

SEQ ID NO: 989234 - DNA, 15 bp, Homo sapiens
tttgttttccatata

SEQ ID NO: 989235 - DNA, 15 bp, Homo sapiens
ttgttttccatatag

SEQ ID NO: 989236 - DNA, 15 bp, Homo sapiens
tgttttccatataga

SEQ ID NO: 989237 - DNA, 15 bp, Homo sapiens
gttttccatatagaa

SEQ ID NO: 989238 - DNA, 15 bp, Homo sapiens
ttttccatatagaag

SEQ ID NO: 989239 - DNA, 15 bp, Homo sapiens
tttccatatagaagg

SEQ ID NO: 989240 - DNA, 15 bp, Homo sapiens
ttccatatagaaggt

SEQ ID NO: 989241 - DNA, 15 bp, Homo sapiens
tccatatagaaggtt

SEQ ID NO: 989242 - DNA, 15 bp, Homo sapiens
ccatatagaaggttc

SEQ ID NO: 989243 - DNA, 15 bp, Homo sapiens
catatagaaggttca

SEQ ID NO: 989244 - DNA, 15 bp, Homo sapiens
atatagaaggttcag

SEQ ID NO: 989245 - DNA, 15 bp, Homo sapiens
tatagaaggttcagt

SEQ ID NO: 989246 - DNA, 15 bp, Homo sapiens
atagaaggttcagtt

SEQ ID NO: 989247 - DNA, 15 bp, Homo sapiens
tagaaggttcagtta

SEQ ID NO: 989248 - DNA, 15 bp, Homo sapiens
agaaggttcagttac

SEQ ID NO: 989249 - DNA, 15 bp, Homo sapiens
gaaggttcagttaca

SEQ ID NO: 989250 - DNA, 15 bp, Homo sapiens
aaggttcagttacac

SEQ ID NO: 989251 - DNA, 15 bp, Homo sapiens
aggttcagttacacc

SEQ ID NO: 989252 - DNA, 15 bp, Homo sapiens
ggttcagttacacca

SEQ ID NO: 989253 - DNA, 15 bp, Homo sapiens
gttcagttacaccat

SEQ ID NO: 989254 - DNA, 15 bp, Homo sapiens
ttcagttacaccatt

SEQ ID NO: 989255 - DNA, 15 bp, Homo sapiens
tcagttacaccatta

SEQ ID NO: 989256 - DNA, 15 bp, Homo sapiens
cagttacaccattac

SEQ ID NO: 989257 - DNA, 15 bp, Homo sapiens
agttacaccattaca

SEQ ID NO: 989258 - DNA, 15 bp, Homo sapiens
gttacaccattacat

SEQ ID NO: 989259 - DNA, 15 bp, Homo sapiens
ttacaccattacatt

SEQ ID NO: 989260 - DNA, 15 bp, Homo sapiens
tacaccattacattt

SEQ ID NO: 989261 - DNA, 15 bp, Homo sapiens
acaccattacatttc

SEQ ID NO: 989262 - DNA, 15 bp, Homo sapiens
caccattacatttcc

SEQ ID NO: 989263 - DNA, 15 bp, Homo sapiens
accattacatttcca

SEQ ID NO: 989264 - DNA, 15 bp, Homo sapiens
ccattacatttccaa

SEQ ID NO: 989265 - DNA, 15 bp, Homo sapiens
cattacatttccaaa

SEQ ID NO: 989266 - DNA, 15 bp, Homo sapiens
attacatttccaaaa

SEQ ID NO: 989267 - DNA, 15 bp, Homo sapiens
ttacatttccaaaac

SEQ ID NO: 989268 - DNA, 15 bp, Homo sapiens
tacatttccaaaact

SEQ ID NO: 989269 - DNA, 15 bp, Homo sapiens
acatttccaaaactt

SEQ ID NO: 989270 - DNA, 15 bp, Homo sapiens
catttccaaaacttt

SEQ ID NO: 989271 - DNA, 15 bp, Homo sapiens
atttccaaaactttt

SEQ ID NO: 989272 - DNA, 15 bp, Homo sapiens
tttccaaaacttttc

SEQ ID NO: 989273 - DNA, 15 bp, Homo sapiens
ttccaaaacttttct

SEQ ID NO: 989274 - DNA, 15 bp, Homo sapiens
tccaaaacttttctt

SEQ ID NO: 989275 - DNA, 15 bp, Homo sapiens
ccaaaacttttctta

SEQ ID NO: 989276 - DNA, 15 bp, Homo sapiens
caaaacttttcttaa

SEQ ID NO: 989277 - DNA, 15 bp, Homo sapiens
aaaacttttcttaaa

SEQ ID NO: 989278 - DNA, 15 bp, Homo sapiens
aaacttttcttaaaa

SEQ ID NO: 989279 - DNA, 15 bp, Homo sapiens
aacttttcttaaaaa

SEQ ID NO: 989280 - DNA, 15 bp, Homo sapiens
acttttcttaaaaaa

SEQ ID NO: 989281 - DNA, 15 bp, Homo sapiens
cttttcttaaaaaac

SEQ ID NO: 989282 - DNA, 15 bp, Homo sapiens
ttttcttaaaaaact

SEQ ID NO: 989283 - DNA, 15 bp, Homo sapiens
tttcttaaaaaactc

SEQ ID NO: 989284 - DNA, 15 bp, Homo sapiens
ttcttaaaaaactca

SEQ ID NO: 989285 - DNA, 15 bp, Homo sapiens
tcttaaaaaactcat

SEQ ID NO: 989286 - DNA, 15 bp, Homo sapiens
cttaaaaaactcatt

SEQ ID NO: 989287 - DNA, 15 bp, Homo sapiens
ttaaaaaactcattt

SEQ ID NO: 989288 - DNA, 15 bp, Homo sapiens
taaaaaactcatttt

SEQ ID NO: 989289 - DNA, 15 bp, Homo sapiens
aaaaaactcattttt

SEQ ID NO: 989290 - DNA, 15 bp, Homo sapiens
aaaaactcattttta

SEQ ID NO: 989291 - DNA, 15 bp, Homo sapiens
aaaactcatttttaa

SEQ ID NO: 989292 - DNA, 15 bp, Homo sapiens
aaactcatttttaaa

SEQ ID NO: 989293 - DNA, 15 bp, Homo sapiens
aactcatttttaaaa

SEQ ID NO: 989294 - DNA, 15 bp, Homo sapiens
actcatttttaaaaa

SEQ ID NO: 989295 - DNA, 15 bp, Homo sapiens
ctcatttttaaaaaa

SEQ ID NO: 989296 - DNA, 15 bp, Homo sapiens
tcatttttaaaaaac

SEQ ID NO: 989297 - DNA, 15 bp, Homo sapiens
catttttaaaaaacg

SEQ ID NO: 989298 - DNA, 15 bp, Homo sapiens
atttttaaaaaacga

SEQ ID NO: 989299 - DNA, 15 bp, Homo sapiens
tttttaaaaaacgaa

SEQ ID NO: 989300 - DNA, 15 bp, Homo sapiens
ttttaaaaaacgaag

SEQ ID NO: 989301 - DNA, 15 bp, Homo sapiens
tttaaaaaacgaagc

SEQ ID NO: 989302 - DNA, 15 bp, Homo sapiens
ttaaaaaacgaagca

SEQ ID NO: 989303 - DNA, 15 bp, Homo sapiens
taaaaaacgaagcaa

SEQ ID NO: 989304 - DNA, 15 bp, Homo sapiens
aaaaaacgaagcaac

SEQ ID NO: 989305 - DNA, 15 bp, Homo sapiens
aaaaacgaagcaact

SEQ ID NO: 989306 - DNA, 15 bp, Homo sapiens
aaaacgaagcaactt

SEQ ID NO: 989307 - DNA, 15 bp, Homo sapiens
aaacgaagcaactta

SEQ ID NO: 989308 - DNA, 15 bp, Homo sapiens
aacgaagcaacttac

SEQ ID NO: 989309 - DNA, 15 bp, Homo sapiens
acgaagcaacttacc

SEQ ID NO: 989310 - DNA, 15 bp, Homo sapiens
cgaagcaacttaccc

SEQ ID NO: 989311 - DNA, 15 bp, Homo sapiens
gaagcaacttaccca

SEQ ID NO: 989312 - DNA, 15 bp, Homo sapiens
aagcaacttacccat

SEQ ID NO: 989313 - DNA, 15 bp, Homo sapiens
agcaacttacccatt

SEQ ID NO: 989314 - DNA, 15 bp, Homo sapiens
gcaacttacccattt

SEQ ID NO: 989315 - DNA, 15 bp, Homo sapiens
caacttacccattta

SEQ ID NO: 989316 - DNA, 15 bp, Homo sapiens
aacttacccatttat

SEQ ID NO: 989317 - DNA, 15 bp, Homo sapiens
acttacccatttata

SEQ ID NO: 989318 - DNA, 15 bp, Homo sapiens
cttacccatttatat

SEQ ID NO: 989319 - DNA, 15 bp, Homo sapiens
ttacccatttatata

SEQ ID NO: 989320 - DNA, 15 bp, Homo sapiens
tacccatttatatat

SEQ ID NO: 989321 - DNA, 15 bp, Homo sapiens
acccatttatatatg

SEQ ID NO: 989322 - DNA, 15 bp, Homo sapiens
cccatttatatatgg

SEQ ID NO: 989323 - DNA, 15 bp, Homo sapiens
ccatttatatatggt

SEQ ID NO: 989324 - DNA, 15 bp, Homo sapiens
catttatatatggtc

SEQ ID NO: 989325 - DNA, 15 bp, Homo sapiens
atttatatatggtcc

SEQ ID NO: 989326 - DNA, 15 bp, Homo sapiens
tttatatatggtccc

SEQ ID NO: 989327 - DNA, 15 bp, Homo sapiens
ttatatatggtcccc

SEQ ID NO: 989328 - DNA, 15 bp, Homo sapiens
tatatatggtccccc

SEQ ID NO: 989329 - DNA, 15 bp, Homo sapiens
atatatggtccccct

SEQ ID NO: 989330 - DNA, 15 bp, Homo sapiens
tatatggtccccctc

SEQ ID NO: 989331 - DNA, 15 bp, Homo sapiens
atatggtccccctcc

SEQ ID NO: 989332 - DNA, 15 bp, Homo sapiens
tatggtccccctccc

SEQ ID NO: 989333 - DNA, 15 bp, Homo sapiens
atggtccccctcccc

SEQ ID NO: 989334 - DNA, 15 bp, Homo sapiens
tggtccccctccccc

SEQ ID NO: 989335 - DNA, 15 bp, Homo sapiens
ggtccccctcccccc

SEQ ID NO: 989336 - DNA, 15 bp, Homo sapiens
gtccccctcccccca

SEQ ID NO: 989337 - DNA, 15 bp, Homo sapiens
tccccctccccccaa

SEQ ID NO: 989338 - DNA, 15 bp, Homo sapiens
ccccctccccccaag

SEQ ID NO: 989339 - DNA, 15 bp, Homo sapiens
cccctccccccaaga

SEQ ID NO: 989340 - DNA, 15 bp, Homo sapiens
ccctccccccaagaa

SEQ ID NO: 989341 - DNA, 15 bp, Homo sapiens
cctccccccaagaaa

SEQ ID NO: 989342 - DNA, 15 bp, Homo sapiens
ctccccccaagaaac

SEQ ID NO: 989343 - DNA, 15 bp, Homo sapiens
tccccccaagaaaca

SEQ ID NO: 989344 - DNA, 15 bp, Homo sapiens
ccccccaagaaacac

SEQ ID NO: 989345 - DNA, 15 bp, Homo sapiens
cccccaagaaacaca

SEQ ID NO: 989346 - DNA, 15 bp, Homo sapiens
ccccaagaaacacac

SEQ ID NO: 989347 - DNA, 15 bp, Homo sapiens
cccaagaaacacaca

SEQ ID NO: 989348 - DNA, 15 bp, Homo sapiens
ccaagaaacacacat

SEQ ID NO: 989349 - DNA, 15 bp, Homo sapiens
caagaaacacacata

SEQ ID NO: 989350 - DNA, 15 bp, Homo sapiens
aagaaacacacatag

SEQ ID NO: 989351 - DNA, 15 bp, Homo sapiens
agaaacacacatagt

SEQ ID NO: 989352 - DNA, 15 bp, Homo sapiens
gaaacacacatagtt

SEQ ID NO: 989353 - DNA, 15 bp, Homo sapiens
aaacacacatagttt

SEQ ID NO: 989354 - DNA, 15 bp, Homo sapiens
aacacacatagtttt

SEQ ID NO: 989355 - DNA, 15 bp, Homo sapiens
acacacatagttttg

SEQ ID NO: 989356 - DNA, 15 bp, Homo sapiens
cacacatagttttga

SEQ ID NO: 989357 - DNA, 15 bp, Homo sapiens
acacatagttttgac

SEQ ID NO: 989358 - DNA, 15 bp, Homo sapiens
cacatagttttgaca

SEQ ID NO: 989359 - DNA, 15 bp, Homo sapiens
acatagttttgacaa

SEQ ID NO: 989360 - DNA, 15 bp, Homo sapiens
catagttttgacaaa

SEQ ID NO: 989361 - DNA, 15 bp, Homo sapiens
atagttttgacaaag

SEQ ID NO: 989362 - DNA, 15 bp, Homo sapiens
tagttttgacaaagg

SEQ ID NO: 989363 - DNA, 15 bp, Homo sapiens
agttttgacaaaggt

SEQ ID NO: 989364 - DNA, 15 bp, Homo sapiens
gttttgacaaaggta

SEQ ID NO: 989365 - DNA, 15 bp, Homo sapiens
ttttgacaaaggtac

SEQ ID NO: 989366 - DNA, 15 bp, Homo sapiens
tttgacaaaggtacc

SEQ ID NO: 989367 - DNA, 15 bp, Homo sapiens
ttgacaaaggtacct

SEQ ID NO: 989368 - DNA, 15 bp, Homo sapiens
tgacaaaggtacctt

SEQ ID NO: 989369 - DNA, 15 bp, Homo sapiens
gacaaaggtaccttt

SEQ ID NO: 989370 - DNA, 15 bp, Homo sapiens
acaaaggtacctttt

SEQ ID NO: 989371 - DNA, 15 bp, Homo sapiens
caaaggtaccttttt

SEQ ID NO: 989372 - DNA, 15 bp, Homo sapiens
aaaggtacctttttc

SEQ ID NO: 989373 - DNA, 15 bp, Homo sapiens
aaggtacctttttca

SEQ ID NO: 989374 - DNA, 15 bp, Homo sapiens
aggtacctttttcaa

SEQ ID NO: 989375 - DNA, 15 bp, Homo sapiens
ggtacctttttcaaa

SEQ ID NO: 989376 - DNA, 15 bp, Homo sapiens
gtacctttttcaaag

SEQ ID NO: 989377 - DNA, 15 bp, Homo sapiens
tacctttttcaaaga

SEQ ID NO: 989378 - DNA, 15 bp, Homo sapiens
acctttttcaaagat

SEQ ID NO: 989379 - DNA, 15 bp, Homo sapiens
cctttttcaaagatg

SEQ ID NO: 989380 - DNA, 15 bp, Homo sapiens
ctttttcaaagatga

SEQ ID NO: 989381 - DNA, 15 bp, Homo sapiens
tttttcaaagatgaa

SEQ ID NO: 989382 - DNA, 15 bp, Homo sapiens
ttttcaaagatgaaa

SEQ ID NO: 989383 - DNA, 15 bp, Homo sapiens
tttcaaagatgaaac

SEQ ID NO: 989384 - DNA, 15 bp, Homo sapiens
ttcaaagatgaaaca

SEQ ID NO: 989385 - DNA, 15 bp, Homo sapiens
tcaaagatgaaacaa

SEQ ID NO: 989386 - DNA, 15 bp, Homo sapiens
caaagatgaaacaaa

SEQ ID NO: 989387 - DNA, 15 bp, Homo sapiens
aaagatgaaacaaag

SEQ ID NO: 989388 - DNA, 15 bp, Homo sapiens
aagatgaaacaaagt

SEQ ID NO: 989389 - DNA, 15 bp, Homo sapiens
agatgaaacaaagta

SEQ ID NO: 989390 - DNA, 15 bp, Homo sapiens
gatgaaacaaagtat

SEQ ID NO: 989391 - DNA, 15 bp, Homo sapiens
atgaaacaaagtatg

SEQ ID NO: 989392 - DNA, 15 bp, Homo sapiens
tgaaacaaagtatgt

SEQ ID NO: 989393 - DNA, 15 bp, Homo sapiens
gaaacaaagtatgtc

SEQ ID NO: 989394 - DNA, 15 bp, Homo sapiens
aaacaaagtatgtct

SEQ ID NO: 989395 - DNA, 15 bp, Homo sapiens
aacaaagtatgtctt

SEQ ID NO: 989396 - DNA, 15 bp, Homo sapiens
acaaagtatgtcttt

SEQ ID NO: 989397 - DNA, 15 bp, Homo sapiens
caaagtatgtctttc

SEQ ID NO: 989398 - DNA, 15 bp, Homo sapiens
aaagtatgtctttcc

SEQ ID NO: 989399 - DNA, 15 bp, Homo sapiens
aagtatgtctttcca

SEQ ID NO: 989400 - DNA, 15 bp, Homo sapiens
agtatgtctttccat

SEQ ID NO: 989401 - DNA, 15 bp, Homo sapiens
gtatgtctttccata

SEQ ID NO: 989402 - DNA, 15 bp, Homo sapiens
tatgtctttccatac

SEQ ID NO: 989403 - DNA, 15 bp, Homo sapiens
atgtctttccataca

SEQ ID NO: 989404 - DNA, 15 bp, Homo sapiens
tgtctttccatacat

SEQ ID NO: 989405 - DNA, 15 bp, Homo sapiens
gtctttccatacata

SEQ ID NO: 989406 - DNA, 15 bp, Homo sapiens
tctttccatacatag

SEQ ID NO: 989407 - DNA, 15 bp, Homo sapiens
ctttccatacataga

SEQ ID NO: 989408 - DNA, 15 bp, Homo sapiens
tttccatacatagat

SEQ ID NO: 989409 - DNA, 15 bp, Homo sapiens
ttccatacatagata

SEQ ID NO: 989410 - DNA, 15 bp, Homo sapiens
tccatacatagatat

SEQ ID NO: 989411 - DNA, 15 bp, Homo sapiens
ccatacatagatatg

SEQ ID NO: 989412 - DNA, 15 bp, Homo sapiens
catacatagatatgt

SEQ ID NO: 989413 - DNA, 15 bp, Homo sapiens
atacatagatatgtg

SEQ ID NO: 989414 - DNA, 15 bp, Homo sapiens
tacatagatatgtgt

SEQ ID NO: 989415 - DNA, 15 bp, Homo sapiens
acatagatatgtgtg

SEQ ID NO: 989416 - DNA, 15 bp, Homo sapiens
catagatatgtgtgt

SEQ ID NO: 989417 - DNA, 15 bp, Homo sapiens
atagatatgtgtgtg

SEQ ID NO: 989418 - DNA, 15 bp, Homo sapiens
tagatatgtgtgtgt

SEQ ID NO: 989419 - DNA, 15 bp, Homo sapiens
agatatgtgtgtgtg

SEQ ID NO: 989420 - DNA, 15 bp, Homo sapiens
gatatgtgtgtgtgt

SEQ ID NO: 989421 - DNA, 15 bp, Homo sapiens
atatgtgtgtgtgtg

SEQ ID NO: 989422 - DNA, 15 bp, Homo sapiens
tatgtgtgtgtgtgt

SEQ ID NO: 989423 - DNA, 15 bp, Homo sapiens
atgtgtgtgtgtgtg

SEQ ID NO: 989424 - DNA, 15 bp, Homo sapiens
tgtgtgtgtgtgtgt

SEQ ID NO: 989425 - DNA, 15 bp, Homo sapiens
gtgtgtgtgtgtgtg

SEQ ID NO: 989426 - DNA, 15 bp, Homo sapiens
gtgtgtgtgtgtgta

SEQ ID NO: 989427 - DNA, 15 bp, Homo sapiens
tgtgtgtgtgtgtat

SEQ ID NO: 989428 - DNA, 15 bp, Homo sapiens
gtgtgtgtgtgtata

SEQ ID NO: 989429 - DNA, 15 bp, Homo sapiens
tgtgtgtgtgtatat

SEQ ID NO: 989430 - DNA, 15 bp, Homo sapiens
gtgtgtgtgtatatg

SEQ ID NO: 989431 - DNA, 15 bp, Homo sapiens
tgtgtgtgtatatgt

SEQ ID NO: 989432 - DNA, 15 bp, Homo sapiens
gtgtgtgtatatgta

SEQ ID NO: 989433 - DNA, 15 bp, Homo sapiens
tgtgtgtatatgtat

SEQ ID NO: 989434 - DNA, 15 bp, Homo sapiens
gtgtgtatatgtatg

SEQ ID NO: 989435 - DNA, 15 bp, Homo sapiens
tgtgtatatgtatgt

SEQ ID NO: 989436 - DNA, 15 bp, Homo sapiens
gtgtatatgtatgta

SEQ ID NO: 989437 - DNA, 15 bp, Homo sapiens
tgtatatgtatgtat

SEQ ID NO: 989438 - DNA, 15 bp, Homo sapiens
gtatatgtatgtata

SEQ ID NO: 989439 - DNA, 15 bp, Homo sapiens
tatatgtatgtatat

SEQ ID NO: 989440 - DNA, 15 bp, Homo sapiens
atatgtatgtatata

SEQ ID NO: 989441 - DNA, 15 bp, Homo sapiens
tatgtatgtatatat

SEQ ID NO: 989442 - DNA, 15 bp, Homo sapiens
atgtatgtatatata

SEQ ID NO: 989443 - DNA, 15 bp, Homo sapiens
tgtatgtatatatag

SEQ ID NO: 989444 - DNA, 15 bp, Homo sapiens
gtatgtatatataga

SEQ ID NO: 989445 - DNA, 15 bp, Homo sapiens
tatgtatatatagat

SEQ ID NO: 989446 - DNA, 15 bp, Homo sapiens
atgtatatatagatt

SEQ ID NO: 989447 - DNA, 15 bp, Homo sapiens
tgtatatatagattt

SEQ ID NO: 989448 - DNA, 15 bp, Homo sapiens
gtatatatagatttt

SEQ ID NO: 989449 - DNA, 15 bp, Homo sapiens
tatatatagattttt

SEQ ID NO: 989450 - DNA, 15 bp, Homo sapiens
atatatagatttttt

SEQ ID NO: 989451 - DNA, 15 bp, Homo sapiens
tatatagattttttt

SEQ ID NO: 989452 - DNA, 15 bp, Homo sapiens
atatagattttttta

SEQ ID NO: 989453 - DNA, 15 bp, Homo sapiens
tatagatttttttaa

SEQ ID NO: 989454 - DNA, 15 bp, Homo sapiens
atagatttttttaaa

SEQ ID NO: 989455 - DNA, 15 bp, Homo sapiens
tagatttttttaaag

SEQ ID NO: 989456 - DNA, 15 bp, Homo sapiens
agatttttttaaagc

SEQ ID NO: 989457 - DNA, 15 bp, Homo sapiens
gatttttttaaagct

SEQ ID NO: 989458 - DNA, 15 bp, Homo sapiens
atttttttaaagcta

SEQ ID NO: 989459 - DNA, 15 bp, Homo sapiens
tttttttaaagctaa

SEQ ID NO: 989460 - DNA, 15 bp, Homo sapiens
ttttttaaagctaag

SEQ ID NO: 989461 - DNA, 15 bp, Homo sapiens
tttttaaagctaagt

SEQ ID NO: 989462 - DNA, 15 bp, Homo sapiens
ttttaaagctaagtg

SEQ ID NO: 989463 - DNA, 15 bp, Homo sapiens
tttaaagctaagtgc

SEQ ID NO: 989464 - DNA, 15 bp, Homo sapiens
ttaaagctaagtgct

SEQ ID NO: 989465 - DNA, 15 bp, Homo sapiens
taaagctaagtgctt

SEQ ID NO: 989466 - DNA, 15 bp, Homo sapiens
aaagctaagtgcttt

SEQ ID NO: 989467 - DNA, 15 bp, Homo sapiens
aagctaagtgctttc

SEQ ID NO: 989468 - DNA, 15 bp, Homo sapiens
agctaagtgctttca

SEQ ID NO: 989469 - DNA, 15 bp, Homo sapiens
gctaagtgctttcag

SEQ ID NO: 989470 - DNA, 15 bp, Homo sapiens
ctaagtgctttcagt

SEQ ID NO: 989471 - DNA, 15 bp, Homo sapiens
taagtgctttcagtt

SEQ ID NO: 989472 - DNA, 15 bp, Homo sapiens
aagtgctttcagttg

SEQ ID NO: 989473 - DNA, 15 bp, Homo sapiens
agtgctttcagttga

SEQ ID NO: 989474 - DNA, 15 bp, Homo sapiens
gtgctttcagttgag

SEQ ID NO: 989475 - DNA, 15 bp, Homo sapiens
tgctttcagttgaga

SEQ ID NO: 989476 - DNA, 15 bp, Homo sapiens
gctttcagttgagag

SEQ ID NO: 989477 - DNA, 15 bp, Homo sapiens
ctttcagttgagagg

SEQ ID NO: 989478 - DNA, 15 bp, Homo sapiens
tttcagttgagaggg

SEQ ID NO: 989479 - DNA, 15 bp, Homo sapiens
ttcagttgagagggg

SEQ ID NO: 989480 - DNA, 15 bp, Homo sapiens
tcagttgagagggga

SEQ ID NO: 989481 - DNA, 15 bp, Homo sapiens
cagttgagaggggag

SEQ ID NO: 989482 - DNA, 15 bp, Homo sapiens
agttgagaggggagg

SEQ ID NO: 989483 - DNA, 15 bp, Homo sapiens
gttgagaggggaggc

SEQ ID NO: 989484 - DNA, 15 bp, Homo sapiens
ttgagaggggaggcc

SEQ ID NO: 989485 - DNA, 15 bp, Homo sapiens
tgagaggggaggccc

SEQ ID NO: 989486 - DNA, 15 bp, Homo sapiens
gagaggggaggcccg

SEQ ID NO: 989487 - DNA, 15 bp, Homo sapiens
agaggggaggcccga

SEQ ID NO: 989488 - DNA, 15 bp, Homo sapiens
gaggggaggcccgaa

SEQ ID NO: 989489 - DNA, 15 bp, Homo sapiens
aggggaggcccgaaa

SEQ ID NO: 989490 - DNA, 15 bp, Homo sapiens
ggggaggcccgaaag

SEQ ID NO: 989491 - DNA, 15 bp, Homo sapiens
gggaggcccgaaagg

SEQ ID NO: 989492 - DNA, 15 bp, Homo sapiens
ggaggcccgaaagga

SEQ ID NO: 989493 - DNA, 15 bp, Homo sapiens
gaggcccgaaaggaa

SEQ ID NO: 989494 - DNA, 15 bp, Homo sapiens
aggcccgaaaggaaa

SEQ ID NO: 989495 - DNA, 15 bp, Homo sapiens
ggcccgaaaggaaaa

SEQ ID NO: 989496 - DNA, 15 bp, Homo sapiens
gcccgaaaggaaaaa

SEQ ID NO: 989497 - DNA, 15 bp, Homo sapiens
cccgaaaggaaaaaa

SEQ ID NO: 989498 - DNA, 15 bp, Homo sapiens
ccgaaaggaaaaaac

SEQ ID NO: 989499 - DNA, 15 bp, Homo sapiens
cgaaaggaaaaaacc

SEQ ID NO: 989500 - DNA, 15 bp, Homo sapiens
gaaaggaaaaaacct

SEQ ID NO: 989501 - DNA, 15 bp, Homo sapiens
aaaggaaaaaaccta

SEQ ID NO: 989502 - DNA, 15 bp, Homo sapiens
aaggaaaaaacctag

SEQ ID NO: 989503 - DNA, 15 bp, Homo sapiens
aggaaaaaacctaga

SEQ ID NO: 989504 - DNA, 15 bp, Homo sapiens
ggaaaaaacctagag

SEQ ID NO: 989505 - DNA, 15 bp, Homo sapiens
gaaaaaacctagaga

SEQ ID NO: 989506 - DNA, 15 bp, Homo sapiens
aaaaaacctagagag

SEQ ID NO: 989507 - DNA, 15 bp, Homo sapiens
aaaaacctagagaga

SEQ ID NO: 989508 - DNA, 15 bp, Homo sapiens
aaaacctagagagat

SEQ ID NO: 989509 - DNA, 15 bp, Homo sapiens
aaacctagagagatg

SEQ ID NO: 989510 - DNA, 15 bp, Homo sapiens
aacctagagagatga

SEQ ID NO: 989511 - DNA, 15 bp, Homo sapiens
acctagagagatgac

SEQ ID NO: 989512 - DNA, 15 bp, Homo sapiens
cctagagagatgacg

SEQ ID NO: 989513 - DNA, 15 bp, Homo sapiens
ctagagagatgacgg

SEQ ID NO: 989514 - DNA, 15 bp, Homo sapiens
tagagagatgacggg

SEQ ID NO: 989515 - DNA, 15 bp, Homo sapiens
agagagatgacgggg

SEQ ID NO: 989516 - DNA, 15 bp, Homo sapiens
gagagatgacggggg

SEQ ID NO: 989517 - DNA, 15 bp, Homo sapiens
agagatgacggggga

SEQ ID NO: 989518 - DNA, 15 bp, Homo sapiens
gagatgacgggggag

SEQ ID NO: 989519 - DNA, 15 bp, Homo sapiens
agatgacgggggaga

SEQ ID NO: 989520 - DNA, 15 bp, Homo sapiens
gatgacgggggagat

SEQ ID NO: 989521 - DNA, 15 bp, Homo sapiens
atgacgggggagatg

SEQ ID NO: 989522 - DNA, 15 bp, Homo sapiens
tgacgggggagatgg

SEQ ID NO: 989523 - DNA, 15 bp, Homo sapiens
gacgggggagatggg

SEQ ID NO: 989524 - DNA, 15 bp, Homo sapiens
acgggggagatgggt

SEQ ID NO: 989525 - DNA, 15 bp, Homo sapiens
cgggggagatgggtt

SEQ ID NO: 989526 - DNA, 15 bp, Homo sapiens
gggggagatgggttt

SEQ ID NO: 989527 - DNA, 15 bp, Homo sapiens
ggggagatgggtttt

SEQ ID NO: 989528 - DNA, 15 bp, Homo sapiens
gggagatgggttttt

SEQ ID NO: 989529 - DNA, 15 bp, Homo sapiens
ggagatgggtttttt

SEQ ID NO: 989530 - DNA, 15 bp, Homo sapiens
gagatgggttttttt

SEQ ID NO: 989531 - DNA, 15 bp, Homo sapiens
agatgggtttttttt

SEQ ID NO: 989532 - DNA, 15 bp, Homo sapiens
gatgggtttttttta

SEQ ID NO: 989533 - DNA, 15 bp, Homo sapiens
atgggttttttttag

SEQ ID NO: 989534 - DNA, 15 bp, Homo sapiens
tgggttttttttagt

SEQ ID NO: 989535 - DNA, 15 bp, Homo sapiens
gggttttttttagta

SEQ ID NO: 989536 - DNA, 15 bp, Homo sapiens
ggttttttttagtat

SEQ ID NO: 989537 - DNA, 15 bp, Homo sapiens
gttttttttagtatt

SEQ ID NO: 989538 - DNA, 15 bp, Homo sapiens
ttttttttagtatta

SEQ ID NO: 989539 - DNA, 15 bp, Homo sapiens
tttttttagtattat

SEQ ID NO: 989540 - DNA, 15 bp, Homo sapiens
ttttttagtattatt

SEQ ID NO: 989541 - DNA, 15 bp, Homo sapiens
tttttagtattattt

SEQ ID NO: 989542 - DNA, 15 bp, Homo sapiens
ttttagtattatttt

SEQ ID NO: 989543 - DNA, 15 bp, Homo sapiens
tttagtattatttta

SEQ ID NO: 989544 - DNA, 15 bp, Homo sapiens
ttagtattattttaa

SEQ ID NO: 989545 - DNA, 15 bp, Homo sapiens
tagtattattttaat

SEQ ID NO: 989546 - DNA, 15 bp, Homo sapiens
agtattattttaatg

SEQ ID NO: 989547 - DNA, 15 bp, Homo sapiens
gtattattttaatgt

SEQ ID NO: 989548 - DNA, 15 bp, Homo sapiens
tattattttaatgta

SEQ ID NO: 989549 - DNA, 15 bp, Homo sapiens
attattttaatgtaa

SEQ ID NO: 989550 - DNA, 15 bp, Homo sapiens
ttattttaatgtaac

SEQ ID NO: 989551 - DNA, 15 bp, Homo sapiens
tattttaatgtaact

SEQ ID NO: 989552 - DNA, 15 bp, Homo sapiens
attttaatgtaactt

SEQ ID NO: 989553 - DNA, 15 bp, Homo sapiens
ttttaatgtaacttt

SEQ ID NO: 989554 - DNA, 15 bp, Homo sapiens
tttaatgtaactttc

SEQ ID NO: 989555 - DNA, 15 bp, Homo sapiens
ttaatgtaactttct

SEQ ID NO: 989556 - DNA, 15 bp, Homo sapiens
taatgtaactttctt

SEQ ID NO: 989557 - DNA, 15 bp, Homo sapiens
aatgtaactttcttt

SEQ ID NO: 989558 - DNA, 15 bp, Homo sapiens
atgtaactttctttt

SEQ ID NO: 989559 - DNA, 15 bp, Homo sapiens
tgtaactttcttttg

SEQ ID NO: 989560 - DNA, 15 bp, Homo sapiens
gtaactttcttttgc

SEQ ID NO: 989561 - DNA, 15 bp, Homo sapiens
taactttcttttgct

SEQ ID NO: 989562 - DNA, 15 bp, Homo sapiens
aactttcttttgcta

SEQ ID NO: 989563 - DNA, 15 bp, Homo sapiens
actttcttttgctaa

SEQ ID NO: 989564 - DNA, 15 bp, Homo sapiens
ctttcttttgctaat

SEQ ID NO: 989565 - DNA, 15 bp, Homo sapiens
tttcttttgctaatc

SEQ ID NO: 989566 - DNA, 15 bp, Homo sapiens
ttcttttgctaatcc

SEQ ID NO: 989567 - DNA, 15 bp, Homo sapiens
tcttttgctaatccg

SEQ ID NO: 989568 - DNA, 15 bp, Homo sapiens
cttttgctaatccgc

SEQ ID NO: 989569 - DNA, 15 bp, Homo sapiens
ttttgctaatccgct

SEQ ID NO: 989570 - DNA, 15 bp, Homo sapiens
tttgctaatccgctc

SEQ ID NO: 989571 - DNA, 15 bp, Homo sapiens
ttgctaatccgctcc

SEQ ID NO: 989572 - DNA, 15 bp, Homo sapiens
tgctaatccgctcct

SEQ ID NO: 989573 - DNA, 15 bp, Homo sapiens
gctaatccgctcctc

SEQ ID NO: 989574 - DNA, 15 bp, Homo sapiens
ctaatccgctcctct

SEQ ID NO: 989575 - DNA, 15 bp, Homo sapiens
taatccgctcctctc

SEQ ID NO: 989576 - DNA, 15 bp, Homo sapiens
aatccgctcctctct

SEQ ID NO: 989577 - DNA, 15 bp, Homo sapiens
atccgctcctctctc

SEQ ID NO: 989578 - DNA, 15 bp, Homo sapiens
tccgctcctctctct

SEQ ID NO: 989579 - DNA, 15 bp, Homo sapiens
ccgctcctctctctg

SEQ ID NO: 989580 - DNA, 15 bp, Homo sapiens
cgctcctctctctgt

SEQ ID NO: 989581 - DNA, 15 bp, Homo sapiens
gctcctctctctgtt

SEQ ID NO: 989582 - DNA, 15 bp, Homo sapiens
ctcctctctctgttc

SEQ ID NO: 989583 - DNA, 15 bp, Homo sapiens
tcctctctctgttct

SEQ ID NO: 989584 - DNA, 15 bp, Homo sapiens
cctctctctgttctc

SEQ ID NO: 989585 - DNA, 15 bp, Homo sapiens
ctctctctgttctct

SEQ ID NO: 989586 - DNA, 15 bp, Homo sapiens
tctctctgttctcta

SEQ ID NO: 989587 - DNA, 15 bp, Homo sapiens
ctctctgttctctag

SEQ ID NO: 989588 - DNA, 15 bp, Homo sapiens
tctctgttctctagg

SEQ ID NO: 989589 - DNA, 15 bp, Homo sapiens
ctctgttctctagga

SEQ ID NO: 989590 - DNA, 15 bp, Homo sapiens
tctgttctctaggac

SEQ ID NO: 989591 - DNA, 15 bp, Homo sapiens
ctgttctctaggaca

SEQ ID NO: 989592 - DNA, 15 bp, Homo sapiens
tgttctctaggacat

SEQ ID NO: 989593 - DNA, 15 bp, Homo sapiens
gttctctaggacata

SEQ ID NO: 989594 - DNA, 15 bp, Homo sapiens
ttctctaggacatat

SEQ ID NO: 989595 - DNA, 15 bp, Homo sapiens
tctctaggacatatg

SEQ ID NO: 989596 - DNA, 15 bp, Homo sapiens
ctctaggacatatga

SEQ ID NO: 989597 - DNA, 15 bp, Homo sapiens
tctaggacatatgag

SEQ ID NO: 989598 - DNA, 15 bp, Homo sapiens
ctaggacatatgagc

SEQ ID NO: 989599 - DNA, 15 bp, Homo sapiens
taggacatatgagcc

SEQ ID NO: 989600 - DNA, 15 bp, Homo sapiens
aggacatatgagccc

SEQ ID NO: 989601 - DNA, 15 bp, Homo sapiens
ggacatatgagccct

SEQ ID NO: 989602 - DNA, 15 bp, Homo sapiens
gacatatgagcccta

SEQ ID NO: 989603 - DNA, 15 bp, Homo sapiens
acatatgagccctac

SEQ ID NO: 989604 - DNA, 15 bp, Homo sapiens
catatgagccctacc

SEQ ID NO: 989605 - DNA, 15 bp, Homo sapiens
atatgagccctacca

SEQ ID NO: 989606 - DNA, 15 bp, Homo sapiens
tatgagccctaccac

SEQ ID NO: 989607 - DNA, 15 bp, Homo sapiens
atgagccctaccacc

SEQ ID NO: 989608 - DNA, 15 bp, Homo sapiens
tgagccctaccacct

SEQ ID NO: 989609 - DNA, 15 bp, Homo sapiens
gagccctaccacctg

SEQ ID NO: 989610 - DNA, 15 bp, Homo sapiens
agccctaccacctgc

SEQ ID NO: 989611 - DNA, 15 bp, Homo sapiens
gccctaccacctgca

SEQ ID NO: 989612 - DNA, 15 bp, Homo sapiens
ccctaccacctgcac

SEQ ID NO: 989613 - DNA, 15 bp, Homo sapiens
cctaccacctgcacc

SEQ ID NO: 989614 - DNA, 15 bp, Homo sapiens
ctaccacctgcaccc

SEQ ID NO: 989615 - DNA, 15 bp, Homo sapiens
taccacctgcaccct

SEQ ID NO: 989616 - DNA, 15 bp, Homo sapiens
accacctgcaccctg

SEQ ID NO: 989617 - DNA, 15 bp, Homo sapiens
ccacctgcaccctga

SEQ ID NO: 989618 - DNA, 15 bp, Homo sapiens
cacctgcaccctgag

SEQ ID NO: 989619 - DNA, 15 bp, Homo sapiens
acctgcaccctgagg

SEQ ID NO: 989620 - DNA, 15 bp, Homo sapiens
cctgcaccctgagga

SEQ ID NO: 989621 - DNA, 15 bp, Homo sapiens
ctgcaccctgaggaa

SEQ ID NO: 989622 - DNA, 15 bp, Homo sapiens
tgcaccctgaggaaa

SEQ ID NO: 989623 - DNA, 15 bp, Homo sapiens
gcaccctgaggaaac

SEQ ID NO: 989624 - DNA, 15 bp, Homo sapiens
caccctgaggaaaca

SEQ ID NO: 989625 - DNA, 15 bp, Homo sapiens
accctgaggaaacac

SEQ ID NO: 989626 - DNA, 15 bp, Homo sapiens
ccctgaggaaacaca

SEQ ID NO: 989627 - DNA, 15 bp, Homo sapiens
cctgaggaaacacaa

SEQ ID NO: 989628 - DNA, 15 bp, Homo sapiens
ctgaggaaacacaag

SEQ ID NO: 989629 - DNA, 15 bp, Homo sapiens
tgaggaaacacaaga

SEQ ID NO: 989630 - DNA, 15 bp, Homo sapiens
gaggaaacacaagac

SEQ ID NO: 989631 - DNA, 15 bp, Homo sapiens
aggaaacacaagacc

SEQ ID NO: 989632 - DNA, 15 bp, Homo sapiens
ggaaacacaagacca

SEQ ID NO: 989633 - DNA, 15 bp, Homo sapiens
gaaacacaagaccaa

SEQ ID NO: 989634 - DNA, 15 bp, Homo sapiens
aaacacaagaccaat

SEQ ID NO: 989635 - DNA, 15 bp, Homo sapiens
aacacaagaccaatc

SEQ ID NO: 989636 - DNA, 15 bp, Homo sapiens
acacaagaccaatcg

SEQ ID NO: 989637 - DNA, 15 bp, Homo sapiens
cacaagaccaatcgg

SEQ ID NO: 989638 - DNA, 15 bp, Homo sapiens
acaagaccaatcgga

SEQ ID NO: 989639 - DNA, 15 bp, Homo sapiens
caagaccaatcggaa

SEQ ID NO: 989640 - DNA, 15 bp, Homo sapiens
aagaccaatcggaag

SEQ ID NO: 989641 - DNA, 15 bp, Homo sapiens
agaccaatcggaagc

SEQ ID NO: 989642 - DNA, 15 bp, Homo sapiens
gaccaatcggaagcc

SEQ ID NO: 989643 - DNA, 15 bp, Homo sapiens
accaatcggaagccg

SEQ ID NO: 989644 - DNA, 15 bp, Homo sapiens
ccaatcggaagccgc

SEQ ID NO: 989645 - DNA, 15 bp, Homo sapiens
caatcggaagccgcg

SEQ ID NO: 989646 - DNA, 15 bp, Homo sapiens
aatcggaagccgcgc

SEQ ID NO: 989647 - DNA, 15 bp, Homo sapiens
atcggaagccgcgca

SEQ ID NO: 989648 - DNA, 15 bp, Homo sapiens
tcggaagccgcgcac

SEQ ID NO: 989649 - DNA, 15 bp, Homo sapiens
cggaagccgcgcacg

SEQ ID NO: 989650 - DNA, 15 bp, Homo sapiens
ggaagccgcgcacgc

SEQ ID NO: 989651 - DNA, 15 bp, Homo sapiens
gaagccgcgcacgcc

SEQ ID NO: 989652 - DNA, 15 bp, Homo sapiens
aagccgcgcacgccc

SEQ ID NO: 989653 - DNA, 15 bp, Homo sapiens
agccgcgcacgccct

SEQ ID NO: 989654 - DNA, 15 bp, Homo sapiens
gccgcgcacgccctt

SEQ ID NO: 989655 - DNA, 15 bp, Homo sapiens
ccgcgcacgcccttt

SEQ ID NO: 989656 - DNA, 15 bp, Homo sapiens
cgcgcacgcccttta

SEQ ID NO: 989657 - DNA, 15 bp, Homo sapiens
gcgcacgccctttac

SEQ ID NO: 989658 - DNA, 15 bp, Homo sapiens
cgcacgccctttacc

SEQ ID NO: 989659 - DNA, 15 bp, Homo sapiens
gcacgccctttacca

SEQ ID NO: 989660 - DNA, 15 bp, Homo sapiens
cacgccctttaccac

SEQ ID NO: 989661 - DNA, 15 bp, Homo sapiens
acgccctttaccaca

SEQ ID NO: 989662 - DNA, 15 bp, Homo sapiens
cgccctttaccacat

SEQ ID NO: 989663 - DNA, 15 bp, Homo sapiens
gccctttaccacatc

SEQ ID NO: 989664 - DNA, 15 bp, Homo sapiens
ccctttaccacatcc

SEQ ID NO: 989665 - DNA, 15 bp, Homo sapiens
cctttaccacatccc

SEQ ID NO: 989666 - DNA, 15 bp, Homo sapiens
ctttaccacatccca

SEQ ID NO: 989667 - DNA, 15 bp, Homo sapiens
tttaccacatcccag

SEQ ID NO: 989668 - DNA, 15 bp, Homo sapiens
ttaccacatcccagc

SEQ ID NO: 989669 - DNA, 15 bp, Homo sapiens
taccacatcccagct

SEQ ID NO: 989670 - DNA, 15 bp, Homo sapiens
accacatcccagctc

SEQ ID NO: 989671 - DNA, 15 bp, Homo sapiens
ccacatcccagctcc

SEQ ID NO: 989672 - DNA, 15 bp, Homo sapiens
cacatcccagctcct

SEQ ID NO: 989673 - DNA, 15 bp, Homo sapiens
acatcccagctcctc

SEQ ID NO: 989674 - DNA, 15 bp, Homo sapiens
catcccagctcctcg

SEQ ID NO: 989675 - DNA, 15 bp, Homo sapiens
atcccagctcctcgc

SEQ ID NO: 989676 - DNA, 15 bp, Homo sapiens
tcccagctcctcgcc

SEQ ID NO: 989677 - DNA, 15 bp, Homo sapiens
cccagctcctcgccc

SEQ ID NO: 989678 - DNA, 15 bp, Homo sapiens
ccagctcctcgccct

SEQ ID NO: 989679 - DNA, 15 bp, Homo sapiens
cagctcctcgccctg

SEQ ID NO: 989680 - DNA, 15 bp, Homo sapiens
agctcctcgccctgg

SEQ ID NO: 989681 - DNA, 15 bp, Homo sapiens
gctcctcgccctgga

SEQ ID NO: 989682 - DNA, 15 bp, Homo sapiens
ctcctcgccctggag

SEQ ID NO: 989683 - DNA, 15 bp, Homo sapiens
tcctcgccctggagc

SEQ ID NO: 989684 - DNA, 15 bp, Homo sapiens
cctcgccctggagcg

SEQ ID NO: 989685 - DNA, 15 bp, Homo sapiens
ctcgccctggagcgc

SEQ ID NO: 989686 - DNA, 15 bp, Homo sapiens
tcgccctggagcgca

SEQ ID NO: 989687 - DNA, 15 bp, Homo sapiens
cgccctggagcgcaa

SEQ ID NO: 989688 - DNA, 15 bp, Homo sapiens
gccctggagcgcaag

SEQ ID NO: 989689 - DNA, 15 bp, Homo sapiens
ccctggagcgcaagt

SEQ ID NO: 989690 - DNA, 15 bp, Homo sapiens
cctggagcgcaagtt

SEQ ID NO: 989691 - DNA, 15 bp, Homo sapiens
ctggagcgcaagttc

SEQ ID NO: 989692 - DNA, 15 bp, Homo sapiens
tggagcgcaagttcc

SEQ ID NO: 989693 - DNA, 15 bp, Homo sapiens
ggagcgcaagttccg

SEQ ID NO: 989694 - DNA, 15 bp, Homo sapiens
gagcgcaagttccgt

SEQ ID NO: 989695 - DNA, 15 bp, Homo sapiens
agcgcaagttccgtc

SEQ ID NO: 989696 - DNA, 15 bp, Homo sapiens
gcgcaagttccgtca

SEQ ID NO: 989697 - DNA, 15 bp, Homo sapiens
cgcaagttccgtcag

SEQ ID NO: 989698 - DNA, 15 bp, Homo sapiens
gcaagttccgtcaga

SEQ ID NO: 989699 - DNA, 15 bp, Homo sapiens
caagttccgtcagaa

SEQ ID NO: 989700 - DNA, 15 bp, Homo sapiens
aagttccgtcagaaa

SEQ ID NO: 989701 - DNA, 15 bp, Homo sapiens
agttccgtcagaaac

SEQ ID NO: 989702 - DNA, 15 bp, Homo sapiens
gttccgtcagaaaca

SEQ ID NO: 989703 - DNA, 15 bp, Homo sapiens
ttccgtcagaaacag

SEQ ID NO: 989704 - DNA, 15 bp, Homo sapiens
tccgtcagaaacagt

SEQ ID NO: 989705 - DNA, 15 bp, Homo sapiens
ccgtcagaaacagta

SEQ ID NO: 989706 - DNA, 15 bp, Homo sapiens
cgtcagaaacagtac

SEQ ID NO: 989707 - DNA, 15 bp, Homo sapiens
gtcagaaacagtacc

SEQ ID NO: 989708 - DNA, 15 bp, Homo sapiens
tcagaaacagtacct

SEQ ID NO: 989709 - DNA, 15 bp, Homo sapiens
cagaaacagtacctc

SEQ ID NO: 989710 - DNA, 15 bp, Homo sapiens
agaaacagtacctct

SEQ ID NO: 989711 - DNA, 15 bp, Homo sapiens
gaaacagtacctctc

SEQ ID NO: 989712 - DNA, 15 bp, Homo sapiens
aaacagtacctctcc

SEQ ID NO: 989713 - DNA, 15 bp, Homo sapiens
aacagtacctctcca

SEQ ID NO: 989714 - DNA, 15 bp, Homo sapiens
acagtacctctccat

SEQ ID NO: 989715 - DNA, 15 bp, Homo sapiens
cagtacctctccatt

SEQ ID NO: 989716 - DNA, 15 bp, Homo sapiens
agtacctctccattg

SEQ ID NO: 989717 - DNA, 15 bp, Homo sapiens
gtacctctccattgc

SEQ ID NO: 989718 - DNA, 15 bp, Homo sapiens
tacctctccattgca

SEQ ID NO: 989719 - DNA, 15 bp, Homo sapiens
acctctccattgcag

SEQ ID NO: 989720 - DNA, 15 bp, Homo sapiens
cctctccattgcaga

SEQ ID NO: 989721 - DNA, 15 bp, Homo sapiens
ctctccattgcagag

SEQ ID NO: 989722 - DNA, 15 bp, Homo sapiens
tctccattgcagagc

SEQ ID NO: 989723 - DNA, 15 bp, Homo sapiens
ctccattgcagagcg

SEQ ID NO: 989724 - DNA, 15 bp, Homo sapiens
tccattgcagagcgt

SEQ ID NO: 989725 - DNA, 15 bp, Homo sapiens
ccattgcagagcgtg

SEQ ID NO: 989726 - DNA, 15 bp, Homo sapiens
cattgcagagcgtgc

SEQ ID NO: 989727 - DNA, 15 bp, Homo sapiens
attgcagagcgtgca

SEQ ID NO: 989728 - DNA, 15 bp, Homo sapiens
ttgcagagcgtgcag

SEQ ID NO: 989729 - DNA, 15 bp, Homo sapiens
tgcagagcgtgcaga

SEQ ID NO: 989730 - DNA, 15 bp, Homo sapiens
gcagagcgtgcagag

SEQ ID NO: 989731 - DNA, 15 bp, Homo sapiens
cagagcgtgcagagt

SEQ ID NO: 989732 - DNA, 15 bp, Homo sapiens
agagcgtgcagagtt

SEQ ID NO: 989733 - DNA, 15 bp, Homo sapiens
gagcgtgcagagttc

SEQ ID NO: 989734 - DNA, 15 bp, Homo sapiens
agcgtgcagagttct

SEQ ID NO: 989735 - DNA, 15 bp, Homo sapiens
gcgtgcagagttctc

SEQ ID NO: 989736 - DNA, 15 bp, Homo sapiens
cgtgcagagttctcc

SEQ ID NO: 989737 - DNA, 15 bp, Homo sapiens
gtgcagagttctcca

SEQ ID NO: 989738 - DNA, 15 bp, Homo sapiens
tgcagagttctccag

SEQ ID NO: 989739 - DNA, 15 bp, Homo sapiens
gcagagttctccagc

SEQ ID NO: 989740 - DNA, 15 bp, Homo sapiens
cagagttctccagct

SEQ ID NO: 989741 - DNA, 15 bp, Homo sapiens
agagttctccagctc

SEQ ID NO: 989742 - DNA, 15 bp, Homo sapiens
gagttctccagctct

SEQ ID NO: 989743 - DNA, 15 bp, Homo sapiens
agttctccagctctc

SEQ ID NO: 989744 - DNA, 15 bp, Homo sapiens
gttctccagctctct

SEQ ID NO: 989745 - DNA, 15 bp, Homo sapiens
ttctccagctctctg

SEQ ID NO: 989746 - DNA, 15 bp, Homo sapiens
tctccagctctctga

SEQ ID NO: 989747 - DNA, 15 bp, Homo sapiens
ctccagctctctgaa

SEQ ID NO: 989748 - DNA, 15 bp, Homo sapiens
tccagctctctgaac

SEQ ID NO: 989749 - DNA, 15 bp, Homo sapiens
ccagctctctgaacc

SEQ ID NO: 989750 - DNA, 15 bp, Homo sapiens
cagctctctgaacct

SEQ ID NO: 989751 - DNA, 15 bp, Homo sapiens
agctctctgaacctc

SEQ ID NO: 989752 - DNA, 15 bp, Homo sapiens
gctctctgaacctca

SEQ ID NO: 989753 - DNA, 15 bp, Homo sapiens
ctctctgaacctcac

SEQ ID NO: 989754 - DNA, 15 bp, Homo sapiens
tctctgaacctcaca

SEQ ID NO: 989755 - DNA, 15 bp, Homo sapiens
ctctgaacctcacag

SEQ ID NO: 989756 - DNA, 15 bp, Homo sapiens
tctgaacctcacaga

SEQ ID NO: 989757 - DNA, 15 bp, Homo sapiens
ctgaacctcacagag

SEQ ID NO: 989758 - DNA, 15 bp, Homo sapiens
tgaacctcacagaga

SEQ ID NO: 989759 - DNA, 15 bp, Homo sapiens
gaacctcacagagac

SEQ ID NO: 989760 - DNA, 15 bp, Homo sapiens
aacctcacagagacc

SEQ ID NO: 989761 - DNA, 15 bp, Homo sapiens
acctcacagagaccc

SEQ ID NO: 989762 - DNA, 15 bp, Homo sapiens
cctcacagagaccca

SEQ ID NO: 989763 - DNA, 15 bp, Homo sapiens
ctcacagagacccag

SEQ ID NO: 989764 - DNA, 15 bp, Homo sapiens
tcacagagacccagg

SEQ ID NO: 989765 - DNA, 15 bp, Homo sapiens
cacagagacccaggt

SEQ ID NO: 989766 - DNA, 15 bp, Homo sapiens
acagagacccaggtc

SEQ ID NO: 989767 - DNA, 15 bp, Homo sapiens
cagagacccaggtca

SEQ ID NO: 989768 - DNA, 15 bp, Homo sapiens
agagacccaggtcaa

SEQ ID NO: 989769 - DNA, 15 bp, Homo sapiens
gagacccaggtcaaa

SEQ ID NO: 989770 - DNA, 15 bp, Homo sapiens
agacccaggtcaaaa

SEQ ID NO: 989771 - DNA, 15 bp, Homo sapiens
gacccaggtcaaaat

SEQ ID NO: 989772 - DNA, 15 bp, Homo sapiens
acccaggtcaaaatc

SEQ ID NO: 989773 - DNA, 15 bp, Homo sapiens
cccaggtcaaaatct

SEQ ID NO: 989774 - DNA, 15 bp, Homo sapiens
ccaggtcaaaatctg

SEQ ID NO: 989775 - DNA, 15 bp, Homo sapiens
caggtcaaaatctgg

SEQ ID NO: 989776 - DNA, 15 bp, Homo sapiens
aggtcaaaatctggt

SEQ ID NO: 989777 - DNA, 15 bp, Homo sapiens
ggtcaaaatctggtt

SEQ ID NO: 989778 - DNA, 15 bp, Homo sapiens
gtcaaaatctggttc

SEQ ID NO: 989779 - DNA, 15 bp, Homo sapiens
tcaaaatctggttcc

SEQ ID NO: 989780 - DNA, 15 bp, Homo sapiens
caaaatctggttcca

SEQ ID NO: 989781 - DNA, 15 bp, Homo sapiens
aaaatctggttccag

SEQ ID NO: 989782 - DNA, 15 bp, Homo sapiens
aaatctggttccaga

SEQ ID NO: 989783 - DNA, 15 bp, Homo sapiens
aatctggttccagaa

SEQ ID NO: 989784 - DNA, 15 bp, Homo sapiens
atctggttccagaac

SEQ ID NO: 989785 - DNA, 15 bp, Homo sapiens
tctggttccagaacc

SEQ ID NO: 989786 - DNA, 15 bp, Homo sapiens
ctggttccagaaccg

SEQ ID NO: 989787 - DNA, 15 bp, Homo sapiens
tggttccagaaccga

SEQ ID NO: 989788 - DNA, 15 bp, Homo sapiens
ggttccagaaccgaa

SEQ ID NO: 989789 - DNA, 15 bp, Homo sapiens
gttccagaaccgaag

SEQ ID NO: 989790 - DNA, 15 bp, Homo sapiens
ttccagaaccgaagg

SEQ ID NO: 989791 - DNA, 15 bp, Homo sapiens
tccagaaccgaaggg

SEQ ID NO: 989792 - DNA, 15 bp, Homo sapiens
ccagaaccgaagggc

SEQ ID NO: 989793 - DNA, 15 bp, Homo sapiens
cagaaccgaagggcc

SEQ ID NO: 989794 - DNA, 15 bp, Homo sapiens
agaaccgaagggcca

SEQ ID NO: 989795 - DNA, 15 bp, Homo sapiens
gaaccgaagggccaa

SEQ ID NO: 989796 - DNA, 15 bp, Homo sapiens
aaccgaagggccaag

SEQ ID NO: 989797 - DNA, 15 bp, Homo sapiens
accgaagggccaagg

SEQ ID NO: 989798 - DNA, 15 bp, Homo sapiens
ccgaagggccaaggc

SEQ ID NO: 989799 - DNA, 15 bp, Homo sapiens
cgaagggccaaggcg

SEQ ID NO: 989800 - DNA, 15 bp, Homo sapiens
gaagggccaaggcga

SEQ ID NO: 989801 - DNA, 15 bp, Homo sapiens
aagggccaaggcgaa

SEQ ID NO: 989802 - DNA, 15 bp, Homo sapiens
agggccaaggcgaaa

SEQ ID NO: 989803 - DNA, 15 bp, Homo sapiens
gggccaaggcgaaaa

SEQ ID NO: 989804 - DNA, 15 bp, Homo sapiens
ggccaaggcgaaaag

SEQ ID NO: 989805 - DNA, 15 bp, Homo sapiens
gccaaggcgaaaaga

SEQ ID NO: 989806 - DNA, 15 bp, Homo sapiens
ccaaggcgaaaagac

SEQ ID NO: 989807 - DNA, 15 bp, Homo sapiens
caaggcgaaaagact

SEQ ID NO: 989808 - DNA, 15 bp, Homo sapiens
aaggcgaaaagactg

SEQ ID NO: 989809 - DNA, 15 bp, Homo sapiens
aggcgaaaagactgc

SEQ ID NO: 989810 - DNA, 15 bp, Homo sapiens
ggcgaaaagactgca

SEQ ID NO: 989811 - DNA, 15 bp, Homo sapiens
gcgaaaagactgcag

SEQ ID NO: 989812 - DNA, 15 bp, Homo sapiens
cgaaaagactgcagg

SEQ ID NO: 989813 - DNA, 15 bp, Homo sapiens
gaaaagactgcagga

SEQ ID NO: 989814 - DNA, 15 bp, Homo sapiens
aaaagactgcaggag

SEQ ID NO: 989815 - DNA, 15 bp, Homo sapiens
aaagactgcaggagg

SEQ ID NO: 989816 - DNA, 15 bp, Homo sapiens
aagactgcaggaggc

SEQ ID NO: 989817 - DNA, 15 bp, Homo sapiens
agactgcaggaggca

SEQ ID NO: 989818 - DNA, 15 bp, Homo sapiens
gactgcaggaggcag

SEQ ID NO: 989819 - DNA, 15 bp, Homo sapiens
actgcaggaggcaga

SEQ ID NO: 989820 - DNA, 15 bp, Homo sapiens
ctgcaggaggcagaa

SEQ ID NO: 989821 - DNA, 15 bp, Homo sapiens
tgcaggaggcagaac

SEQ ID NO: 989822 - DNA, 15 bp, Homo sapiens
gcaggaggcagaact

SEQ ID NO: 989823 - DNA, 15 bp, Homo sapiens
caggaggcagaactg

SEQ ID NO: 989824 - DNA, 15 bp, Homo sapiens
aggaggcagaactgg

SEQ ID NO: 989825 - DNA, 15 bp, Homo sapiens
ggaggcagaactgga

SEQ ID NO: 989826 - DNA, 15 bp, Homo sapiens
gaggcagaactggaa

SEQ ID NO: 989827 - DNA, 15 bp, Homo sapiens
aggcagaactggaaa

SEQ ID NO: 989828 - DNA, 15 bp, Homo sapiens
ggcagaactggaaaa

SEQ ID NO: 989829 - DNA, 15 bp, Homo sapiens
gcagaactggaaaag

SEQ ID NO: 989830 - DNA, 15 bp, Homo sapiens
cagaactggaaaagc

SEQ ID NO: 989831 - DNA, 15 bp, Homo sapiens
agaactggaaaagct

SEQ ID NO: 989832 - DNA, 15 bp, Homo sapiens
gaactggaaaagctg

SEQ ID NO: 989833 - DNA, 15 bp, Homo sapiens
aactggaaaagctga

SEQ ID NO: 989834 - DNA, 15 bp, Homo sapiens
actggaaaagctgaa

SEQ ID NO: 989835 - DNA, 15 bp, Homo sapiens
ctggaaaagctgaaa

SEQ ID NO: 989836 - DNA, 15 bp, Homo sapiens
tggaaaagctgaaaa

SEQ ID NO: 989837 - DNA, 15 bp, Homo sapiens
ggaaaagctgaaaat

SEQ ID NO: 989838 - DNA, 15 bp, Homo sapiens
gaaaagctgaaaatg

SEQ ID NO: 989839 - DNA, 15 bp, Homo sapiens
aaaagctgaaaatgg

SEQ ID NO: 989840 - DNA, 15 bp, Homo sapiens
aaagctgaaaatggc

SEQ ID NO: 989841 - DNA, 15 bp, Homo sapiens
aagctgaaaatggct

SEQ ID NO: 989842 - DNA, 15 bp, Homo sapiens
agctgaaaatggctg

SEQ ID NO: 989843 - DNA, 15 bp, Homo sapiens
gctgaaaatggctgc

SEQ ID NO: 989844 - DNA, 15 bp, Homo sapiens
ctgaaaatggctgca

SEQ ID NO: 989845 - DNA, 15 bp, Homo sapiens
tgaaaatggctgcaa

SEQ ID NO: 989846 - DNA, 15 bp, Homo sapiens
gaaaatggctgcaaa

SEQ ID NO: 989847 - DNA, 15 bp, Homo sapiens
aaaatggctgcaaaa

SEQ ID NO: 989848 - DNA, 15 bp, Homo sapiens
aaatggctgcaaaac

SEQ ID NO: 989849 - DNA, 15 bp, Homo sapiens
aatggctgcaaaacc

SEQ ID NO: 989850 - DNA, 15 bp, Homo sapiens
atggctgcaaaacct

SEQ ID NO: 989851 - DNA, 15 bp, Homo sapiens
tggctgcaaaaccta

SEQ ID NO: 989852 - DNA, 15 bp, Homo sapiens
ggctgcaaaacctat

SEQ ID NO: 989853 - DNA, 15 bp, Homo sapiens
gctgcaaaacctatg

SEQ ID NO: 989854 - DNA, 15 bp, Homo sapiens
ctgcaaaacctatgc

SEQ ID NO: 989855 - DNA, 15 bp, Homo sapiens
tgcaaaacctatgct

SEQ ID NO: 989856 - DNA, 15 bp, Homo sapiens
gcaaaacctatgctg

SEQ ID NO: 989857 - DNA, 15 bp, Homo sapiens
caaaacctatgctgc

SEQ ID NO: 989858 - DNA, 15 bp, Homo sapiens
aaaacctatgctgcc

SEQ ID NO: 989859 - DNA, 15 bp, Homo sapiens
aaacctatgctgccc

SEQ ID NO: 989860 - DNA, 15 bp, Homo sapiens
aacctatgctgccct

SEQ ID NO: 989861 - DNA, 15 bp, Homo sapiens
acctatgctgccctc

SEQ ID NO: 989862 - DNA, 15 bp, Homo sapiens
cctatgctgccctcc

SEQ ID NO: 989863 - DNA, 15 bp, Homo sapiens
ctatgctgccctcca

SEQ ID NO: 989864 - DNA, 15 bp, Homo sapiens
tatgctgccctccag

SEQ ID NO: 989865 - DNA, 15 bp, Homo sapiens
atgctgccctccagc

SEQ ID NO: 989866 - DNA, 15 bp, Homo sapiens
tgctgccctccagct

SEQ ID NO: 989867 - DNA, 15 bp, Homo sapiens
gctgccctccagctt

SEQ ID NO: 989868 - DNA, 15 bp, Homo sapiens
ctgccctccagcttc

SEQ ID NO: 989869 - DNA, 15 bp, Homo sapiens
tgccctccagcttca

SEQ ID NO: 989870 - DNA, 15 bp, Homo sapiens
gccctccagcttcag

SEQ ID NO: 989871 - DNA, 15 bp, Homo sapiens
ccctccagcttcagt

SEQ ID NO: 989872 - DNA, 15 bp, Homo sapiens
cctccagcttcagtc

SEQ ID NO: 989873 - DNA, 15 bp, Homo sapiens
ctccagcttcagtct

SEQ ID NO: 989874 - DNA, 15 bp, Homo sapiens
tccagcttcagtctc

SEQ ID NO: 989875 - DNA, 15 bp, Homo sapiens
ccagcttcagtctcc

SEQ ID NO: 989876 - DNA, 15 bp, Homo sapiens
cagcttcagtctccc

SEQ ID NO: 989877 - DNA, 15 bp, Homo sapiens
agcttcagtctccct

SEQ ID NO: 989878 - DNA, 15 bp, Homo sapiens
gcttcagtctccctt

SEQ ID NO: 989879 - DNA, 15 bp, Homo sapiens
cttcagtctcccttt

SEQ ID NO: 989880 - DNA, 15 bp, Homo sapiens
ttcagtctccctttc

SEQ ID NO: 989881 - DNA, 15 bp, Homo sapiens
tcagtctccctttcc

SEQ ID NO: 989882 - DNA, 15 bp, Homo sapiens
cagtctccctttccc

SEQ ID NO: 989883 - DNA, 15 bp, Homo sapiens
agtctccctttcccc

SEQ ID NO: 989884 - DNA, 15 bp, Homo sapiens
gtctccctttcccca

SEQ ID NO: 989885 - DNA, 15 bp, Homo sapiens
tctccctttccccat

SEQ ID NO: 989886 - DNA, 15 bp, Homo sapiens
ctccctttccccatc

SEQ ID NO: 989887 - DNA, 15 bp, Homo sapiens
tccctttccccatca

SEQ ID NO: 989888 - DNA, 15 bp, Homo sapiens
ccctttccccatcag

SEQ ID NO: 989889 - DNA, 15 bp, Homo sapiens
cctttccccatcagc

SEQ ID NO: 989890 - DNA, 15 bp, Homo sapiens
ctttccccatcagct

SEQ ID NO: 989891 - DNA, 15 bp, Homo sapiens
tttccccatcagctc

SEQ ID NO: 989892 - DNA, 15 bp, Homo sapiens
ttccccatcagctcg

SEQ ID NO: 989893 - DNA, 15 bp, Homo sapiens
tccccatcagctcgc

SEQ ID NO: 989894 - DNA, 15 bp, Homo sapiens
ccccatcagctcgcc

SEQ ID NO: 989895 - DNA, 15 bp, Homo sapiens
cccatcagctcgccc

SEQ ID NO: 989896 - DNA, 15 bp, Homo sapiens
ccatcagctcgcccc

SEQ ID NO: 989897 - DNA, 15 bp, Homo sapiens
catcagctcgcccct

SEQ ID NO: 989898 - DNA, 15 bp, Homo sapiens
atcagctcgcccctg

SEQ ID NO: 989899 - DNA, 15 bp, Homo sapiens
tcagctcgcccctgc

SEQ ID NO: 989900 - DNA, 15 bp, Homo sapiens
cagctcgcccctgca

SEQ ID NO: 989901 - DNA, 15 bp, Homo sapiens
agctcgcccctgcag

SEQ ID NO: 989902 - DNA, 15 bp, Homo sapiens
gctcgcccctgcagg

SEQ ID NO: 989903 - DNA, 15 bp, Homo sapiens
ctcgcccctgcaggc

SEQ ID NO: 989904 - DNA, 15 bp, Homo sapiens
tcgcccctgcaggca

SEQ ID NO: 989905 - DNA, 15 bp, Homo sapiens
cgcccctgcaggcag

SEQ ID NO: 989906 - DNA, 15 bp, Homo sapiens
gcccctgcaggcagc

SEQ ID NO: 989907 - DNA, 15 bp, Homo sapiens
cccctgcaggcagcg

SEQ ID NO: 989908 - DNA, 15 bp, Homo sapiens
ccctgcaggcagcgt

SEQ ID NO: 989909 - DNA, 15 bp, Homo sapiens
cctgcaggcagcgtc

SEQ ID NO: 989910 - DNA, 15 bp, Homo sapiens
ctgcaggcagcgtcc

SEQ ID NO: 989911 - DNA, 15 bp, Homo sapiens
tgcaggcagcgtcca

SEQ ID NO: 989912 - DNA, 15 bp, Homo sapiens
gcaggcagcgtccat

SEQ ID NO: 989913 - DNA, 15 bp, Homo sapiens
caggcagcgtccata

SEQ ID NO: 989914 - DNA, 15 bp, Homo sapiens
aggcagcgtccatat

SEQ ID NO: 989915 - DNA, 15 bp, Homo sapiens
ggcagcgtccatata

SEQ ID NO: 989916 - DNA, 15 bp, Homo sapiens
gcagcgtccatatat

SEQ ID NO: 989917 - DNA, 15 bp, Homo sapiens
cagcgtccatatatg

SEQ ID NO: 989918 - DNA, 15 bp, Homo sapiens
agcgtccatatatgg

SEQ ID NO: 989919 - DNA, 15 bp, Homo sapiens
gcgtccatatatgga

SEQ ID NO: 989920 - DNA, 15 bp, Homo sapiens
cgtccatatatggag

SEQ ID NO: 989921 - DNA, 15 bp, Homo sapiens
gtccatatatggagc

SEQ ID NO: 989922 - DNA, 15 bp, Homo sapiens
tccatatatggagca

SEQ ID NO: 989923 - DNA, 15 bp, Homo sapiens
ccatatatggagcat

SEQ ID NO: 989924 - DNA, 15 bp, Homo sapiens
catatatggagcatc

SEQ ID NO: 989925 - DNA, 15 bp, Homo sapiens
atatatggagcatcc

SEQ ID NO: 989926 - DNA, 15 bp, Homo sapiens
tatatggagcatcct

SEQ ID NO: 989927 - DNA, 15 bp, Homo sapiens
atatggagcatccta

SEQ ID NO: 989928 - DNA, 15 bp, Homo sapiens
tatggagcatcctac

SEQ ID NO: 989929 - DNA, 15 bp, Homo sapiens
atggagcatcctacc

SEQ ID NO: 989930 - DNA, 15 bp, Homo sapiens
tggagcatcctaccc

SEQ ID NO: 989931 - DNA, 15 bp, Homo sapiens
ggagcatcctacccg

SEQ ID NO: 989932 - DNA, 15 bp, Homo sapiens
gagcatcctacccgt

SEQ ID NO: 989933 - DNA, 15 bp, Homo sapiens
agcatcctacccgtt

SEQ ID NO: 989934 - DNA, 15 bp, Homo sapiens
gcatcctacccgttc

SEQ ID NO: 989935 - DNA, 15 bp, Homo sapiens
catcctacccgttcc

SEQ ID NO: 989936 - DNA, 15 bp, Homo sapiens
atcctacccgttcca

SEQ ID NO: 989937 - DNA, 15 bp, Homo sapiens
tcctacccgttccat

SEQ ID NO: 989938 - DNA, 15 bp, Homo sapiens
cctacccgttccata

SEQ ID NO: 989939 - DNA, 15 bp, Homo sapiens
ctacccgttccatag

SEQ ID NO: 989940 - DNA, 15 bp, Homo sapiens
tacccgttccataga

SEQ ID NO: 989941 - DNA, 15 bp, Homo sapiens
acccgttccatagac

SEQ ID NO: 989942 - DNA, 15 bp, Homo sapiens
cccgttccatagacc

SEQ ID NO: 989943 - DNA, 15 bp, Homo sapiens
ccgttccatagacct

SEQ ID NO: 989944 - DNA, 15 bp, Homo sapiens
cgttccatagacctg

SEQ ID NO: 989945 - DNA, 15 bp, Homo sapiens
gttccatagacctgt

SEQ ID NO: 989946 - DNA, 15 bp, Homo sapiens
ttccatagacctgtg

SEQ ID NO: 989947 - DNA, 15 bp, Homo sapiens
tccatagacctgtgc

SEQ ID NO: 989948 - DNA, 15 bp, Homo sapiens
ccatagacctgtgct

SEQ ID NO: 989949 - DNA, 15 bp, Homo sapiens
catagacctgtgctt

SEQ ID NO: 989950 - DNA, 15 bp, Homo sapiens
atagacctgtgcttc

SEQ ID NO: 989951 - DNA, 15 bp, Homo sapiens
tagacctgtgcttcc

SEQ ID NO: 989952 - DNA, 15 bp, Homo sapiens
agacctgtgcttccc

SEQ ID NO: 989953 - DNA, 15 bp, Homo sapiens
gacctgtgcttccca

SEQ ID NO: 989954 - DNA, 15 bp, Homo sapiens
acctgtgcttcccat

SEQ ID NO: 989955 - DNA, 15 bp, Homo sapiens
cctgtgcttcccatc

SEQ ID NO: 989956 - DNA, 15 bp, Homo sapiens
ctgtgcttcccatcc

SEQ ID NO: 989957 - DNA, 15 bp, Homo sapiens
tgtgcttcccatccc

SEQ ID NO: 989958 - DNA, 15 bp, Homo sapiens
gtgcttcccatcccg

SEQ ID NO: 989959 - DNA, 15 bp, Homo sapiens
tgcttcccatcccgc

SEQ ID NO: 989960 - DNA, 15 bp, Homo sapiens
gcttcccatcccgcc

SEQ ID NO: 989961 - DNA, 15 bp, Homo sapiens
cttcccatcccgcct

SEQ ID NO: 989962 - DNA, 15 bp, Homo sapiens
ttcccatcccgcctg

SEQ ID NO: 989963 - DNA, 15 bp, Homo sapiens
tcccatcccgcctgt

SEQ ID NO: 989964 - DNA, 15 bp, Homo sapiens
cccatcccgcctgtg

SEQ ID NO: 989965 - DNA, 15 bp, Homo sapiens
ccatcccgcctgtgg

SEQ ID NO: 989966 - DNA, 15 bp, Homo sapiens
catcccgcctgtggg

SEQ ID NO: 989967 - DNA, 15 bp, Homo sapiens
atcccgcctgtggga

SEQ ID NO: 989968 - DNA, 15 bp, Homo sapiens
tcccgcctgtgggac

SEQ ID NO: 989969 - DNA, 15 bp, Homo sapiens
cccgcctgtgggact

SEQ ID NO: 989970 - DNA, 15 bp, Homo sapiens
ccgcctgtgggactc

SEQ ID NO: 989971 - DNA, 15 bp, Homo sapiens
cgcctgtgggactct

SEQ ID NO: 989972 - DNA, 15 bp, Homo sapiens
gcctgtgggactcta

SEQ ID NO: 989973 - DNA, 15 bp, Homo sapiens
cctgtgggactctat

SEQ ID NO: 989974 - DNA, 15 bp, Homo sapiens
ctgtgggactctatg

SEQ ID NO: 989975 - DNA, 15 bp, Homo sapiens
tgtgggactctatgc

SEQ ID NO: 989976 - DNA, 15 bp, Homo sapiens
gtgggactctatgcc

SEQ ID NO: 989977 - DNA, 15 bp, Homo sapiens
tgggactctatgcca

SEQ ID NO: 989978 - DNA, 15 bp, Homo sapiens
gggactctatgccac

SEQ ID NO: 989979 - DNA, 15 bp, Homo sapiens
ggactctatgccacg

SEQ ID NO: 989980 - DNA, 15 bp, Homo sapiens
gactctatgccacgc

SEQ ID NO: 989981 - DNA, 15 bp, Homo sapiens
actctatgccacgcc

SEQ ID NO: 989982 - DNA, 15 bp, Homo sapiens
ctctatgccacgcca

SEQ ID NO: 989983 - DNA, 15 bp, Homo sapiens
tctatgccacgccag

SEQ ID NO: 989984 - DNA, 15 bp, Homo sapiens
ctatgccacgccagt

SEQ ID NO: 989985 - DNA, 15 bp, Homo sapiens
tatgccacgccagtg

SEQ ID NO: 989986 - DNA, 15 bp, Homo sapiens
atgccacgccagtgg

SEQ ID NO: 989987 - DNA, 15 bp, Homo sapiens
tgccacgccagtggg

SEQ ID NO: 989988 - DNA, 15 bp, Homo sapiens
gccacgccagtggga

SEQ ID NO: 989989 - DNA, 15 bp, Homo sapiens
ccacgccagtgggat

SEQ ID NO: 989990 - DNA, 15 bp, Homo sapiens
cacgccagtgggata

SEQ ID NO: 989991 - DNA, 15 bp, Homo sapiens
acgccagtgggatat

SEQ ID NO: 989992 - DNA, 15 bp, Homo sapiens
cgccagtgggatatg

SEQ ID NO: 989993 - DNA, 15 bp, Homo sapiens
gccagtgggatatgg

SEQ ID NO: 989994 - DNA, 15 bp, Homo sapiens
ccagtgggatatggc

SEQ ID NO: 989995 - DNA, 15 bp, Homo sapiens
cagtgggatatggca

SEQ ID NO: 989996 - DNA, 15 bp, Homo sapiens
agtgggatatggcat

SEQ ID NO: 989997 - DNA, 15 bp, Homo sapiens
gtgggatatggcatg

SEQ ID NO: 989998 - DNA, 15 bp, Homo sapiens
tgggatatggcatgt

SEQ ID NO: 989999 - DNA, 15 bp, Homo sapiens
gggatatggcatgta

SEQ ID NO: 990000 - DNA, 15 bp, Homo sapiens
ggatatggcatgtac

SEQ ID NO: 990001 - DNA, 15 bp, Homo sapiens
gatatggcatgtacc

SEQ ID NO: 990002 - DNA, 15 bp, Homo sapiens
atatggcatgtacca

SEQ ID NO: 990003 - DNA, 15 bp, Homo sapiens
tatggcatgtaccac

SEQ ID NO: 990004 - DNA, 15 bp, Homo sapiens
atggcatgtaccacc

SEQ ID NO: 990005 - DNA, 15 bp, Homo sapiens
tggcatgtaccacct

SEQ ID NO: 990006 - DNA, 15 bp, Homo sapiens
ggcatgtaccacctg

SEQ ID NO: 990007 - DNA, 15 bp, Homo sapiens
gcatgtaccacctgt

SEQ ID NO: 990008 - DNA, 15 bp, Homo sapiens
catgtaccacctgtc

SEQ ID NO: 990009 - DNA, 15 bp, Homo sapiens
atgtaccacctgtcc

SEQ ID NO: 990010 - DNA, 15 bp, Homo sapiens
tgtaccacctgtcct

SEQ ID NO: 990011 - DNA, 15 bp, Homo sapiens
gtaccacctgtccta

SEQ ID NO: 990012 - DNA, 15 bp, Homo sapiens
taccacctgtcctaa

SEQ ID NO: 990013 - DNA, 15 bp, Homo sapiens
accacctgtcctaag

SEQ ID NO: 990014 - DNA, 15 bp, Homo sapiens
ccacctgtcctaagg

SEQ ID NO: 990015 - DNA, 15 bp, Homo sapiens
cacctgtcctaagga

SEQ ID NO: 990016 - DNA, 15 bp, Homo sapiens
acctgtcctaaggaa

SEQ ID NO: 990017 - DNA, 15 bp, Homo sapiens
cctgtcctaaggaag

SEQ ID NO: 990018 - DNA, 15 bp, Homo sapiens
ctgtcctaaggaaga

SEQ ID NO: 990019 - DNA, 15 bp, Homo sapiens
tgtcctaaggaagac

SEQ ID NO: 990020 - DNA, 15 bp, Homo sapiens
gtcctaaggaagacc

SEQ ID NO: 990021 - DNA, 15 bp, Homo sapiens
tcctaaggaagacca

SEQ ID NO: 990022 - DNA, 15 bp, Homo sapiens
cctaaggaagaccag

SEQ ID NO: 990023 - DNA, 15 bp, Homo sapiens
ctaaggaagaccaga

SEQ ID NO: 990024 - DNA, 15 bp, Homo sapiens
taaggaagaccagat

SEQ ID NO: 990025 - DNA, 15 bp, Homo sapiens
aaggaagaccagatc

SEQ ID NO: 990026 - DNA, 15 bp, Homo sapiens
aggaagaccagatca

SEQ ID NO: 990027 - DNA, 15 bp, Homo sapiens
ggaagaccagatcaa

SEQ ID NO: 990028 - DNA, 15 bp, Homo sapiens
gaagaccagatcaat

SEQ ID NO: 990029 - DNA, 15 bp, Homo sapiens
aagaccagatcaata

SEQ ID NO: 990030 - DNA, 15 bp, Homo sapiens
agaccagatcaatag

SEQ ID NO: 990031 - DNA, 15 bp, Homo sapiens
gaccagatcaataga

SEQ ID NO: 990032 - DNA, 15 bp, Homo sapiens
accagatcaatagac

SEQ ID NO: 990033 - DNA, 15 bp, Homo sapiens
ccagatcaatagact

SEQ ID NO: 990034 - DNA, 15 bp, Homo sapiens
cagatcaatagactc

SEQ ID NO: 990035 - DNA, 15 bp, Homo sapiens
agatcaatagactcc

SEQ ID NO: 990036 - DNA, 15 bp, Homo sapiens
gatcaatagactcca

SEQ ID NO: 990037 - DNA, 15 bp, Homo sapiens
atcaatagactccat

SEQ ID NO: 990038 - DNA, 15 bp, Homo sapiens
tcaatagactccatg

SEQ ID NO: 990039 - DNA, 15 bp, Homo sapiens
caatagactccatga

SEQ ID NO: 990040 - DNA, 15 bp, Homo sapiens
aatagactccatgat

SEQ ID NO: 990041 - DNA, 15 bp, Homo sapiens
atagactccatgatg

SEQ ID NO: 990042 - DNA, 15 bp, Homo sapiens
tagactccatgatgg

SEQ ID NO: 990043 - DNA, 15 bp, Homo sapiens
agactccatgatgga

SEQ ID NO: 990044 - DNA, 15 bp, Homo sapiens
gactccatgatggat

SEQ ID NO: 990045 - DNA, 15 bp, Homo sapiens
actccatgatggatg

SEQ ID NO: 990046 - DNA, 15 bp, Homo sapiens
ctccatgatggatgc

SEQ ID NO: 990047 - DNA, 15 bp, Homo sapiens
tccatgatggatgct

SEQ ID NO: 990048 - DNA, 15 bp, Homo sapiens
ccatgatggatgctt

SEQ ID NO: 990049 - DNA, 15 bp, Homo sapiens
catgatggatgcttg

SEQ ID NO: 990050 - DNA, 15 bp, Homo sapiens
atgatggatgcttgt

SEQ ID NO: 990051 - DNA, 15 bp, Homo sapiens
tgatggatgcttgtt

SEQ ID NO: 990052 - DNA, 15 bp, Homo sapiens
gatggatgcttgttt

SEQ ID NO: 990053 - DNA, 15 bp, Homo sapiens
atggatgcttgtttc

SEQ ID NO: 990054 - DNA, 15 bp, Homo sapiens
tggatgcttgtttca

SEQ ID NO: 990055 - DNA, 15 bp, Homo sapiens
ggatgcttgtttcaa

SEQ ID NO: 990056 - DNA, 15 bp, Homo sapiens
gatgcttgtttcaaa

SEQ ID NO: 990057 - DNA, 15 bp, Homo sapiens
atgcttgtttcaaag

SEQ ID NO: 990058 - DNA, 15 bp, Homo sapiens
tgcttgtttcaaagg

SEQ ID NO: 990059 - DNA, 15 bp, Homo sapiens
gcttgtttcaaaggg

SEQ ID NO: 990060 - DNA, 15 bp, Homo sapiens
cttgtttcaaagggt

SEQ ID NO: 990061 - DNA, 15 bp, Homo sapiens
ttgtttcaaagggtt

SEQ ID NO: 990062 - DNA, 15 bp, Homo sapiens
tgtttcaaagggttt

SEQ ID NO: 990063 - DNA, 15 bp, Homo sapiens
gtttcaaagggtttc

SEQ ID NO: 990064 - DNA, 15 bp, Homo sapiens
tttcaaagggtttcc

SEQ ID NO: 990065 - DNA, 15 bp, Homo sapiens
ttcaaagggtttcct

SEQ ID NO: 990066 - DNA, 15 bp, Homo sapiens
tcaaagggtttcctc

SEQ ID NO: 990067 - DNA, 15 bp, Homo sapiens
caaagggtttcctct

SEQ ID NO: 990068 - DNA, 15 bp, Homo sapiens
aaagggtttcctctc

SEQ ID NO: 990069 - DNA, 15 bp, Homo sapiens
aagggtttcctctcc

SEQ ID NO: 990070 - DNA, 15 bp, Homo sapiens
agggtttcctctccc

SEQ ID NO: 990071 - DNA, 15 bp, Homo sapiens
gggtttcctctccct

SEQ ID NO: 990072 - DNA, 15 bp, Homo sapiens
ggtttcctctccctc

SEQ ID NO: 990073 - DNA, 15 bp, Homo sapiens
gtttcctctccctct

SEQ ID NO: 990074 - DNA, 15 bp, Homo sapiens
tttcctctccctctc

SEQ ID NO: 990075 - DNA, 15 bp, Homo sapiens
ttcctctccctctcc

SEQ ID NO: 990076 - DNA, 15 bp, Homo sapiens
tcctctccctctcca

SEQ ID NO: 990077 - DNA, 15 bp, Homo sapiens
cctctccctctccac

SEQ ID NO: 990078 - DNA, 15 bp, Homo sapiens
ctctccctctccacg

SEQ ID NO: 990079 - DNA, 15 bp, Homo sapiens
tctccctctccacga

SEQ ID NO: 990080 - DNA, 15 bp, Homo sapiens
ctccctctccacgaa

SEQ ID NO: 990081 - DNA, 15 bp, Homo sapiens
tccctctccacgaag

SEQ ID NO: 990082 - DNA, 15 bp, Homo sapiens
ccctctccacgaagg

SEQ ID NO: 990083 - DNA, 15 bp, Homo sapiens
cctctccacgaaggc

SEQ ID NO: 990084 - DNA, 15 bp, Homo sapiens
ctctccacgaaggca

SEQ ID NO: 990085 - DNA, 15 bp, Homo sapiens
tctccacgaaggcag

SEQ ID NO: 990086 - DNA, 15 bp, Homo sapiens
ctccacgaaggcagt

SEQ ID NO: 990087 - DNA, 15 bp, Homo sapiens
tccacgaaggcagta

SEQ ID NO: 990088 - DNA, 15 bp, Homo sapiens
ccacgaaggcagtac

SEQ ID NO: 990089 - DNA, 15 bp, Homo sapiens
cacgaaggcagtacc

SEQ ID NO: 990090 - DNA, 15 bp, Homo sapiens
acgaaggcagtacca

SEQ ID NO: 990091 - DNA, 15 bp, Homo sapiens
cgaaggcagtaccag

SEQ ID NO: 990092 - DNA, 15 bp, Homo sapiens
gaaggcagtaccagc

SEQ ID NO: 990093 - DNA, 15 bp, Homo sapiens
aaggcagtaccagcc

SEQ ID NO: 990094 - DNA, 15 bp, Homo sapiens
aggcagtaccagcca

SEQ ID NO: 990095 - DNA, 15 bp, Homo sapiens
ggcagtaccagccag

SEQ ID NO: 990096 - DNA, 15 bp, Homo sapiens
gcagtaccagccagt

SEQ ID NO: 990097 - DNA, 15 bp, Homo sapiens
cagtaccagccagta

SEQ ID NO: 990098 - DNA, 15 bp, Homo sapiens
agtaccagccagtac

SEQ ID NO: 990099 - DNA, 15 bp, Homo sapiens
gtaccagccagtact

SEQ ID NO: 990100 - DNA, 15 bp, Homo sapiens
taccagccagtactc

SEQ ID NO: 990101 - DNA, 15 bp, Homo sapiens
accagccagtactcc

SEQ ID NO: 990102 - DNA, 15 bp, Homo sapiens
ccagccagtactcct

SEQ ID NO: 990103 - DNA, 15 bp, Homo sapiens
cagccagtactcctg

SEQ ID NO: 990104 - DNA, 15 bp, Homo sapiens
agccagtactcctgc

SEQ ID NO: 990105 - DNA, 15 bp, Homo sapiens
gccagtactcctgct

SEQ ID NO: 990106 - DNA, 15 bp, Homo sapiens
ccagtactcctgctc

SEQ ID NO: 990107 - DNA, 15 bp, Homo sapiens
cagtactcctgctct

SEQ ID NO: 990108 - DNA, 15 bp, Homo sapiens
agtactcctgctctg

SEQ ID NO: 990109 - DNA, 15 bp, Homo sapiens
gtactcctgctctgc

SEQ ID NO: 990110 - DNA, 15 bp, Homo sapiens
tactcctgctctgct

SEQ ID NO: 990111 - DNA, 15 bp, Homo sapiens
actcctgctctgcta

SEQ ID NO: 990112 - DNA, 15 bp, Homo sapiens
ctcctgctctgctaa

SEQ ID NO: 990113 - DNA, 15 bp, Homo sapiens
tcctgctctgctaac

SEQ ID NO: 990114 - DNA, 15 bp, Homo sapiens
cctgctctgctaacc

SEQ ID NO: 990115 - DNA, 15 bp, Homo sapiens
ctgctctgctaaccc

SEQ ID NO: 990116 - DNA, 15 bp, Homo sapiens
tgctctgctaaccct

SEQ ID NO: 990117 - DNA, 15 bp, Homo sapiens
gctctgctaaccctg

SEQ ID NO: 990118 - DNA, 15 bp, Homo sapiens
ctctgctaaccctgc

SEQ ID NO: 990119 - DNA, 15 bp, Homo sapiens
tctgctaaccctgcg

SEQ ID NO: 990120 - DNA, 15 bp, Homo sapiens
ctgctaaccctgcgt

SEQ ID NO: 990121 - DNA, 15 bp, Homo sapiens
tgctaaccctgcgtg

SEQ ID NO: 990122 - DNA, 15 bp, Homo sapiens
gctaaccctgcgtgc

SEQ ID NO: 990123 - DNA, 15 bp, Homo sapiens
ctaaccctgcgtgca

SEQ ID NO: 990124 - DNA, 15 bp, Homo sapiens
taaccctgcgtgcac

SEQ ID NO: 990125 - DNA, 15 bp, Homo sapiens
aaccctgcgtgcacc

SEQ ID NO: 990126 - DNA, 15 bp, Homo sapiens
accctgcgtgcacca

SEQ ID NO: 990127 - DNA, 15 bp, Homo sapiens
ccctgcgtgcaccac

SEQ ID NO: 990128 - DNA, 15 bp, Homo sapiens
cctgcgtgcaccacc

SEQ ID NO: 990129 - DNA, 15 bp, Homo sapiens
ctgcgtgcaccaccc

SEQ ID NO: 990130 - DNA, 15 bp, Homo sapiens
tgcgtgcaccaccct

SEQ ID NO: 990131 - DNA, 15 bp, Homo sapiens
gcgtgcaccacccta

SEQ ID NO: 990132 - DNA, 15 bp, Homo sapiens
cgtgcaccaccctaa

SEQ ID NO: 990133 - DNA, 15 bp, Homo sapiens
gtgcaccaccctaag

SEQ ID NO: 990134 - DNA, 15 bp, Homo sapiens
tgcaccaccctaagc

SEQ ID NO: 990135 - DNA, 15 bp, Homo sapiens
gcaccaccctaagcg

SEQ ID NO: 990136 - DNA, 15 bp, Homo sapiens
caccaccctaagcgg

SEQ ID NO: 990137 - DNA, 15 bp, Homo sapiens
accaccctaagcggc

SEQ ID NO: 990138 - DNA, 15 bp, Homo sapiens
ccaccctaagcggct

SEQ ID NO: 990139 - DNA, 15 bp, Homo sapiens
caccctaagcggcta

SEQ ID NO: 990140 - DNA, 15 bp, Homo sapiens
accctaagcggctag

SEQ ID NO: 990141 - DNA, 15 bp, Homo sapiens
ccctaagcggctagg

SEQ ID NO: 990142 - DNA, 15 bp, Homo sapiens
cctaagcggctaggc

SEQ ID NO: 990143 - DNA, 15 bp, Homo sapiens
ctaagcggctaggct

SEQ ID NO: 990144 - DNA, 15 bp, Homo sapiens
taagcggctaggctg

SEQ ID NO: 990145 - DNA, 15 bp, Homo sapiens
aagcggctaggctga

SEQ ID NO: 990146 - DNA, 15 bp, Homo sapiens
agcggctaggctgac

SEQ ID NO: 990147 - DNA, 15 bp, Homo sapiens
gcggctaggctgaca

SEQ ID NO: 990148 - DNA, 15 bp, Homo sapiens
cggctaggctgacag

SEQ ID NO: 990149 - DNA, 15 bp, Homo sapiens
ggctaggctgacagg

SEQ ID NO: 990150 - DNA, 15 bp, Homo sapiens
gctaggctgacaggg

SEQ ID NO: 990151 - DNA, 15 bp, Homo sapiens
ctaggctgacagggc

SEQ ID NO: 990152 - DNA, 15 bp, Homo sapiens
taggctgacagggcc

SEQ ID NO: 990153 - DNA, 15 bp, Homo sapiens
aggctgacagggcca

SEQ ID NO: 990154 - DNA, 15 bp, Homo sapiens
ggctgacagggccac

SEQ ID NO: 990155 - DNA, 15 bp, Homo sapiens
gctgacagggccaca

SEQ ID NO: 990156 - DNA, 15 bp, Homo sapiens
ctgacagggccacac

SEQ ID NO: 990157 - DNA, 15 bp, Homo sapiens
tgacagggccacacg

SEQ ID NO: 990158 - DNA, 15 bp, Homo sapiens
gacagggccacacga

SEQ ID NO: 990159 - DNA, 15 bp, Homo sapiens
acagggccacacgac

SEQ ID NO: 990160 - DNA, 15 bp, Homo sapiens
cagggccacacgaca

SEQ ID NO: 990161 - DNA, 15 bp, Homo sapiens
agggccacacgacat

SEQ ID NO: 990162 - DNA, 15 bp, Homo sapiens
gggccacacgacata

SEQ ID NO: 990163 - DNA, 15 bp, Homo sapiens
ggccacacgacatag

SEQ ID NO: 990164 - DNA, 15 bp, Homo sapiens
gccacacgacatagc

SEQ ID NO: 990165 - DNA, 15 bp, Homo sapiens
ccacacgacatagct

SEQ ID NO: 990166 - DNA, 15 bp, Homo sapiens
cacacgacatagctg

SEQ ID NO: 990167 - DNA, 15 bp, Homo sapiens
acacgacatagctga

SEQ ID NO: 990168 - DNA, 15 bp, Homo sapiens
cacgacatagctgaa

SEQ ID NO: 990169 - DNA, 15 bp, Homo sapiens
acgacatagctgaaa

SEQ ID NO: 990170 - DNA, 15 bp, Homo sapiens
cgacatagctgaaat

SEQ ID NO: 990171 - DNA, 15 bp, Homo sapiens
gacatagctgaaatt

SEQ ID NO: 990172 - DNA, 15 bp, Homo sapiens
acatagctgaaattt

SEQ ID NO: 990173 - DNA, 15 bp, Homo sapiens
catagctgaaatttg

SEQ ID NO: 990174 - DNA, 15 bp, Homo sapiens
atagctgaaatttgt

SEQ ID NO: 990175 - DNA, 15 bp, Homo sapiens
tagctgaaatttgtt

SEQ ID NO: 990176 - DNA, 15 bp, Homo sapiens
agctgaaatttgttc

SEQ ID NO: 990177 - DNA, 15 bp, Homo sapiens
gctgaaatttgttct

SEQ ID NO: 990178 - DNA, 15 bp, Homo sapiens
ctgaaatttgttctg

SEQ ID NO: 990179 - DNA, 15 bp, Homo sapiens
tgaaatttgttctgt

SEQ ID NO: 990180 - DNA, 15 bp, Homo sapiens
gaaatttgttctgta

SEQ ID NO: 990181 - DNA, 15 bp, Homo sapiens
aaatttgttctgtag

SEQ ID NO: 990182 - DNA, 15 bp, Homo sapiens
aatttgttctgtagg

SEQ ID NO: 990183 - DNA, 15 bp, Homo sapiens
atttgttctgtaggc

SEQ ID NO: 990184 - DNA, 15 bp, Homo sapiens
tttgttctgtaggcg

SEQ ID NO: 990185 - DNA, 15 bp, Homo sapiens
ttgttctgtaggcgg

SEQ ID NO: 990186 - DNA, 15 bp, Homo sapiens
tgttctgtaggcgga

SEQ ID NO: 990187 - DNA, 15 bp, Homo sapiens
gttctgtaggcggag

SEQ ID NO: 990188 - DNA, 15 bp, Homo sapiens
ttctgtaggcggagg

SEQ ID NO: 990189 - DNA, 15 bp, Homo sapiens
tctgtaggcggaggc

SEQ ID NO: 990190 - DNA, 15 bp, Homo sapiens
ctgtaggcggaggca

SEQ ID NO: 990191 - DNA, 15 bp, Homo sapiens
tgtaggcggaggcac

SEQ ID NO: 990192 - DNA, 15 bp, Homo sapiens
gtaggcggaggcacc

SEQ ID NO: 990193 - DNA, 15 bp, Homo sapiens
taggcggaggcacca

SEQ ID NO: 990194 - DNA, 15 bp, Homo sapiens
aggcggaggcaccaa

SEQ ID NO: 990195 - DNA, 15 bp, Homo sapiens
ggcggaggcaccaag

SEQ ID NO: 990196 - DNA, 15 bp, Homo sapiens
gcggaggcaccaagc

SEQ ID NO: 990197 - DNA, 15 bp, Homo sapiens
cggaggcaccaagcc

SEQ ID NO: 990198 - DNA, 15 bp, Homo sapiens
ggaggcaccaagccc

SEQ ID NO: 990199 - DNA, 15 bp, Homo sapiens
gaggcaccaagccct

SEQ ID NO: 990200 - DNA, 15 bp, Homo sapiens
aggcaccaagccctg

SEQ ID NO: 990201 - DNA, 15 bp, Homo sapiens
ggcaccaagccctgt

SEQ ID NO: 990202 - DNA, 15 bp, Homo sapiens
gcaccaagccctgtt

SEQ ID NO: 990203 - DNA, 15 bp, Homo sapiens
caccaagccctgttt

SEQ ID NO: 990204 - DNA, 15 bp, Homo sapiens
accaagccctgtttt

SEQ ID NO: 990205 - DNA, 15 bp, Homo sapiens
ccaagccctgttttc

SEQ ID NO: 990206 - DNA, 15 bp, Homo sapiens
caagccctgttttct

SEQ ID NO: 990207 - DNA, 15 bp, Homo sapiens
aagccctgttttctt

SEQ ID NO: 990208 - DNA, 15 bp, Homo sapiens
agccctgttttcttg

SEQ ID NO: 990209 - DNA, 15 bp, Homo sapiens
gccctgttttcttgg

SEQ ID NO: 990210 - DNA, 15 bp, Homo sapiens
ccctgttttcttggt

SEQ ID NO: 990211 - DNA, 15 bp, Homo sapiens
cctgttttcttggtg

SEQ ID NO: 990212 - DNA, 15 bp, Homo sapiens
ctgttttcttggtgt

SEQ ID NO: 990213 - DNA, 15 bp, Homo sapiens
tgttttcttggtgta

SEQ ID NO: 990214 - DNA, 15 bp, Homo sapiens
gttttcttggtgtaa

SEQ ID NO: 990215 - DNA, 15 bp, Homo sapiens
ttttcttggtgtaat

SEQ ID NO: 990216 - DNA, 15 bp, Homo sapiens
tttcttggtgtaatc

SEQ ID NO: 990217 - DNA, 15 bp, Homo sapiens
ttcttggtgtaatct

SEQ ID NO: 990218 - DNA, 15 bp, Homo sapiens
tcttggtgtaatctt

SEQ ID NO: 990219 - DNA, 15 bp, Homo sapiens
cttggtgtaatcttc

SEQ ID NO: 990220 - DNA, 15 bp, Homo sapiens
ttggtgtaatcttcc

SEQ ID NO: 990221 - DNA, 15 bp, Homo sapiens
tggtgtaatcttcca

SEQ ID NO: 990222 - DNA, 15 bp, Homo sapiens
ggtgtaatcttccag

SEQ ID NO: 990223 - DNA, 15 bp, Homo sapiens
gtgtaatcttccaga

SEQ ID NO: 990224 - DNA, 15 bp, Homo sapiens
tgtaatcttccagat

SEQ ID NO: 990225 - DNA, 15 bp, Homo sapiens
gtaatcttccagatg

SEQ ID NO: 990226 - DNA, 15 bp, Homo sapiens
taatcttccagatgc

SEQ ID NO: 990227 - DNA, 15 bp, Homo sapiens
aatcttccagatgcc

SEQ ID NO: 990228 - DNA, 15 bp, Homo sapiens
atcttccagatgccc

SEQ ID NO: 990229 - DNA, 15 bp, Homo sapiens
tcttccagatgcccc

SEQ ID NO: 990230 - DNA, 15 bp, Homo sapiens
cttccagatgccccc

SEQ ID NO: 990231 - DNA, 15 bp, Homo sapiens
ttccagatgccccct

SEQ ID NO: 990232 - DNA, 15 bp, Homo sapiens
tccagatgccccctt

SEQ ID NO: 990233 - DNA, 15 bp, Homo sapiens
ccagatgcccccttt

SEQ ID NO: 990234 - DNA, 15 bp, Homo sapiens
cagatgccccctttt

SEQ ID NO: 990235 - DNA, 15 bp, Homo sapiens
agatgcccccttttc

SEQ ID NO: 990236 - DNA, 15 bp, Homo sapiens
gatgcccccttttcc

SEQ ID NO: 990237 - DNA, 15 bp, Homo sapiens
atgcccccttttcct

SEQ ID NO: 990238 - DNA, 15 bp, Homo sapiens
tgcccccttttcctt

SEQ ID NO: 990239 - DNA, 15 bp, Homo sapiens
gcccccttttccttt

SEQ ID NO: 990240 - DNA, 15 bp, Homo sapiens
cccccttttcctttc

SEQ ID NO: 990241 - DNA, 15 bp, Homo sapiens
ccccttttcctttca

SEQ ID NO: 990242 - DNA, 15 bp, Homo sapiens
cccttttcctttcac

SEQ ID NO: 990243 - DNA, 15 bp, Homo sapiens
ccttttcctttcaca

SEQ ID NO: 990244 - DNA, 15 bp, Homo sapiens
cttttcctttcacaa

SEQ ID NO: 990245 - DNA, 15 bp, Homo sapiens
ttttcctttcacaaa

SEQ ID NO: 990246 - DNA, 15 bp, Homo sapiens
tttcctttcacaaag

SEQ ID NO: 990247 - DNA, 15 bp, Homo sapiens
ttcctttcacaaaga

SEQ ID NO: 990248 - DNA, 15 bp, Homo sapiens
tcctttcacaaagat

SEQ ID NO: 990249 - DNA, 15 bp, Homo sapiens
cctttcacaaagatt

SEQ ID NO: 990250 - DNA, 15 bp, Homo sapiens
ctttcacaaagattg

SEQ ID NO: 990251 - DNA, 15 bp, Homo sapiens
tttcacaaagattgg

SEQ ID NO: 990252 - DNA, 15 bp, Homo sapiens
ttcacaaagattggc

SEQ ID NO: 990253 - DNA, 15 bp, Homo sapiens
tcacaaagattggct

SEQ ID NO: 990254 - DNA, 15 bp, Homo sapiens
cacaaagattggctc

SEQ ID NO: 990255 - DNA, 15 bp, Homo sapiens
acaaagattggctct

SEQ ID NO: 990256 - DNA, 15 bp, Homo sapiens
caaagattggctctg

SEQ ID NO: 990257 - DNA, 15 bp, Homo sapiens
aaagattggctctga

SEQ ID NO: 990258 - DNA, 15 bp, Homo sapiens
aagattggctctgat

SEQ ID NO: 990259 - DNA, 15 bp, Homo sapiens
agattggctctgatg

SEQ ID NO: 990260 - DNA, 15 bp, Homo sapiens
gattggctctgatgg

SEQ ID NO: 990261 - DNA, 15 bp, Homo sapiens
attggctctgatggt

SEQ ID NO: 990262 - DNA, 15 bp, Homo sapiens
ttggctctgatggtt

SEQ ID NO: 990263 - DNA, 15 bp, Homo sapiens
tggctctgatggttt

SEQ ID NO: 990264 - DNA, 15 bp, Homo sapiens
ggctctgatggtttt

SEQ ID NO: 990265 - DNA, 15 bp, Homo sapiens
gctctgatggttttt

SEQ ID NO: 990266 - DNA, 15 bp, Homo sapiens
ctctgatggttttta

SEQ ID NO: 990267 - DNA, 15 bp, Homo sapiens
tctgatggtttttat

SEQ ID NO: 990268 - DNA, 15 bp, Homo sapiens
ctgatggtttttatg

SEQ ID NO: 990269 - DNA, 15 bp, Homo sapiens
tgatggtttttatgt

SEQ ID NO: 990270 - DNA, 15 bp, Homo sapiens
gatggtttttatgta

SEQ ID NO: 990271 - DNA, 15 bp, Homo sapiens
atggtttttatgtat

SEQ ID NO: 990272 - DNA, 15 bp, Homo sapiens
tggtttttatgtata

SEQ ID NO: 990273 - DNA, 15 bp, Homo sapiens
ggtttttatgtataa

SEQ ID NO: 990274 - DNA, 15 bp, Homo sapiens
gtttttatgtataaa

SEQ ID NO: 990275 - DNA, 15 bp, Homo sapiens
tttttatgtataaat

SEQ ID NO: 990276 - DNA, 15 bp, Homo sapiens
ttttatgtataaata

SEQ ID NO: 990277 - DNA, 15 bp, Homo sapiens
tttatgtataaatat

SEQ ID NO: 990278 - DNA, 15 bp, Homo sapiens
ttatgtataaatata

SEQ ID NO: 990279 - DNA, 15 bp, Homo sapiens
tatgtataaatatat

SEQ ID NO: 990280 - DNA, 15 bp, Homo sapiens
atgtataaatatata

SEQ ID NO: 990281 - DNA, 15 bp, Homo sapiens
tgtataaatatatat

SEQ ID NO: 990282 - DNA, 15 bp, Homo sapiens
gtataaatatatata

SEQ ID NO: 990283 - DNA, 15 bp, Homo sapiens
tataaatatatatat

SEQ ID NO: 990284 - DNA, 15 bp, Homo sapiens
ataaatatatatata

SEQ ID NO: 990285 - DNA, 15 bp, Homo sapiens
taaatatatatatat

SEQ ID NO: 990286 - DNA, 15 bp, Homo sapiens
aaatatatatatata

SEQ ID NO: 990287 - DNA, 15 bp, Homo sapiens
aatatatatatataa

SEQ ID NO: 990288 - DNA, 15 bp, Homo sapiens
atatatatatataat

SEQ ID NO: 990289 - DNA, 15 bp, Homo sapiens
tatatatatataata

SEQ ID NO: 990290 - DNA, 15 bp, Homo sapiens
atatatatataataa

SEQ ID NO: 990291 - DNA, 15 bp, Homo sapiens
tatatatataataaa

SEQ ID NO: 990292 - DNA, 15 bp, Homo sapiens
atatatataataaaa

SEQ ID NO: 990293 - DNA, 15 bp, Homo sapiens
tatatataataaaat

SEQ ID NO: 990294 - DNA, 15 bp, Homo sapiens
atatataataaaata

SEQ ID NO: 990295 - DNA, 15 bp, Homo sapiens
tatataataaaatat

SEQ ID NO: 990296 - DNA, 15 bp, Homo sapiens
atataataaaatata

SEQ ID NO: 990297 - DNA, 15 bp, Homo sapiens
tataataaaatataa

SEQ ID NO: 990298 - DNA, 15 bp, Homo sapiens
ataataaaatataat

SEQ ID NO: 990299 - DNA, 15 bp, Homo sapiens
taataaaatataata

SEQ ID NO: 990300 - DNA, 15 bp, Homo sapiens
aataaaatataatac

SEQ ID NO: 990301 - DNA, 15 bp, Homo sapiens
ataaaatataataca

SEQ ID NO: 990302 - DNA, 15 bp, Homo sapiens
taaaatataatacat

SEQ ID NO: 990303 - DNA, 15 bp, Homo sapiens
aaaatataatacatt

SEQ ID NO: 990304 - DNA, 15 bp, Homo sapiens
aaatataatacattt

SEQ ID NO: 990305 - DNA, 15 bp, Homo sapiens
aatataatacatttt

SEQ ID NO: 990306 - DNA, 15 bp, Homo sapiens
atataatacattttt

SEQ ID NO: 990307 - DNA, 15 bp, Homo sapiens
tataatacattttta

SEQ ID NO: 990308 - DNA, 15 bp, Homo sapiens
ataatacatttttat

SEQ ID NO: 990309 - DNA, 15 bp, Homo sapiens
taatacatttttata

SEQ ID NO: 990310 - DNA, 15 bp, Homo sapiens
aatacatttttatac

SEQ ID NO: 990311 - DNA, 15 bp, Homo sapiens
atacatttttataca

SEQ ID NO: 990312 - DNA, 15 bp, Homo sapiens
tacatttttatacag

SEQ ID NO: 990313 - DNA, 15 bp, Homo sapiens
acatttttatacagc

SEQ ID NO: 990314 - DNA, 15 bp, Homo sapiens
catttttatacagca

SEQ ID NO: 990315 - DNA, 15 bp, Homo sapiens
atttttatacagcag

SEQ ID NO: 990316 - DNA, 15 bp, Homo sapiens
tttttatacagcaga

SEQ ID NO: 990317 - DNA, 15 bp, Homo sapiens
ttttatacagcagac

SEQ ID NO: 990318 - DNA, 15 bp, Homo sapiens
tttatacagcagacg

SEQ ID NO: 990319 - DNA, 15 bp, Homo sapiens
ttatacagcagacgt

SEQ ID NO: 990320 - DNA, 15 bp, Homo sapiens
tatacagcagacgta

SEQ ID NO: 990321 - DNA, 15 bp, Homo sapiens
atacagcagacgtaa

SEQ ID NO: 990322 - DNA, 15 bp, Homo sapiens
tacagcagacgtaaa

SEQ ID NO: 990323 - DNA, 15 bp, Homo sapiens
acagcagacgtaaaa

SEQ ID NO: 990324 - DNA, 15 bp, Homo sapiens
cagcagacgtaaaaa

SEQ ID NO: 990325 - DNA, 15 bp, Homo sapiens
agcagacgtaaaaat

SEQ ID NO: 990326 - DNA, 15 bp, Homo sapiens
gcagacgtaaaaatt

SEQ ID NO: 990327 - DNA, 15 bp, Homo sapiens
cagacgtaaaaattc

SEQ ID NO: 990328 - DNA, 15 bp, Homo sapiens
agacgtaaaaattca

SEQ ID NO: 990329 - DNA, 15 bp, Homo sapiens
gacgtaaaaattcaa

SEQ ID NO: 990330 - DNA, 15 bp, Homo sapiens
acgtaaaaattcaaa

SEQ ID NO: 990331 - DNA, 15 bp, Homo sapiens
cgtaaaaattcaaat

SEQ ID NO: 990332 - DNA, 15 bp, Homo sapiens
gtaaaaattcaaatt

SEQ ID NO: 990333 - DNA, 15 bp, Homo sapiens
taaaaattcaaatta

SEQ ID NO: 990334 - DNA, 15 bp, Homo sapiens
aaaaattcaaattat

SEQ ID NO: 990335 - DNA, 15 bp, Homo sapiens
aaaattcaaattatt

SEQ ID NO: 990336 - DNA, 15 bp, Homo sapiens
aaattcaaattattt

SEQ ID NO: 990337 - DNA, 15 bp, Homo sapiens
aattcaaattatttt

SEQ ID NO: 990338 - DNA, 15 bp, Homo sapiens
attcaaattatttta

SEQ ID NO: 990339 - DNA, 15 bp, Homo sapiens
ttcaaattattttaa

SEQ ID NO: 990340 - DNA, 15 bp, Homo sapiens
tcaaattattttaaa

SEQ ID NO: 990341 - DNA, 15 bp, Homo sapiens
caaattattttaaaa

SEQ ID NO: 990342 - DNA, 15 bp, Homo sapiens
aaattattttaaaag

SEQ ID NO: 990343 - DNA, 15 bp, Homo sapiens
aattattttaaaagg

SEQ ID NO: 990344 - DNA, 15 bp, Homo sapiens
attattttaaaaggc

SEQ ID NO: 990345 - DNA, 15 bp, Homo sapiens
ttattttaaaaggca

SEQ ID NO: 990346 - DNA, 15 bp, Homo sapiens
tattttaaaaggcaa

SEQ ID NO: 990347 - DNA, 15 bp, Homo sapiens
attttaaaaggcaaa

SEQ ID NO: 990348 - DNA, 15 bp, Homo sapiens
ttttaaaaggcaaaa

SEQ ID NO: 990349 - DNA, 15 bp, Homo sapiens
tttaaaaggcaaaat

SEQ ID NO: 990350 - DNA, 15 bp, Homo sapiens
ttaaaaggcaaaatt

SEQ ID NO: 990351 - DNA, 15 bp, Homo sapiens
taaaaggcaaaattt

SEQ ID NO: 990352 - DNA, 15 bp, Homo sapiens
aaaaggcaaaattta

SEQ ID NO: 990353 - DNA, 15 bp, Homo sapiens
aaaggcaaaatttat

SEQ ID NO: 990354 - DNA, 15 bp, Homo sapiens
aaggcaaaatttata

SEQ ID NO: 990355 - DNA, 15 bp, Homo sapiens
aggcaaaatttatat

SEQ ID NO: 990356 - DNA, 15 bp, Homo sapiens
ggcaaaatttatata

SEQ ID NO: 990357 - DNA, 15 bp, Homo sapiens
gcaaaatttatatac

SEQ ID NO: 990358 - DNA, 15 bp, Homo sapiens
caaaatttatataca

SEQ ID NO: 990359 - DNA, 15 bp, Homo sapiens
aaaatttatatacat

SEQ ID NO: 990360 - DNA, 15 bp, Homo sapiens
aaatttatatacata

SEQ ID NO: 990361 - DNA, 15 bp, Homo sapiens
aatttatatacatat

SEQ ID NO: 990362 - DNA, 15 bp, Homo sapiens
atttatatacatatg

SEQ ID NO: 990363 - DNA, 15 bp, Homo sapiens
tttatatacatatgt

SEQ ID NO: 990364 - DNA, 15 bp, Homo sapiens
ttatatacatatgtg

SEQ ID NO: 990365 - DNA, 15 bp, Homo sapiens
tatatacatatgtgc

SEQ ID NO: 990366 - DNA, 15 bp, Homo sapiens
atatacatatgtgct

SEQ ID NO: 990367 - DNA, 15 bp, Homo sapiens
tatacatatgtgctt

SEQ ID NO: 990368 - DNA, 15 bp, Homo sapiens
atacatatgtgcttt

SEQ ID NO: 990369 - DNA, 15 bp, Homo sapiens
tacatatgtgctttt

SEQ ID NO: 990370 - DNA, 15 bp, Homo sapiens
acatatgtgcttttt

SEQ ID NO: 990371 - DNA, 15 bp, Homo sapiens
catatgtgctttttt

SEQ ID NO: 990372 - DNA, 15 bp, Homo sapiens
atatgtgcttttttt

SEQ ID NO: 990373 - DNA, 15 bp, Homo sapiens
tatgtgctttttttc

SEQ ID NO: 990374 - DNA, 15 bp, Homo sapiens
atgtgctttttttct

SEQ ID NO: 990375 - DNA, 15 bp, Homo sapiens
tgtgctttttttcta

SEQ ID NO: 990376 - DNA, 15 bp, Homo sapiens
gtgctttttttctat

SEQ ID NO: 990377 - DNA, 15 bp, Homo sapiens
tgctttttttctata

SEQ ID NO: 990378 - DNA, 15 bp, Homo sapiens
gctttttttctatat

SEQ ID NO: 990379 - DNA, 15 bp, Homo sapiens
ctttttttctatatc

SEQ ID NO: 990380 - DNA, 15 bp, Homo sapiens
tttttttctatatct

SEQ ID NO: 990381 - DNA, 15 bp, Homo sapiens
ttttttctatatctc

SEQ ID NO: 990382 - DNA, 15 bp, Homo sapiens
tttttctatatctca

SEQ ID NO: 990383 - DNA, 15 bp, Homo sapiens
ttttctatatctcac

SEQ ID NO: 990384 - DNA, 15 bp, Homo sapiens
tttctatatctcacc

SEQ ID NO: 990385 - DNA, 15 bp, Homo sapiens
ttctatatctcacct

SEQ ID NO: 990386 - DNA, 15 bp, Homo sapiens
tctatatctcacctt

SEQ ID NO: 990387 - DNA, 15 bp, Homo sapiens
ctatatctcaccttc

SEQ ID NO: 990388 - DNA, 15 bp, Homo sapiens
tatatctcaccttcc

SEQ ID NO: 990389 - DNA, 15 bp, Homo sapiens
atatctcaccttccc

SEQ ID NO: 990390 - DNA, 15 bp, Homo sapiens
tatctcaccttccca

SEQ ID NO: 990391 - DNA, 15 bp, Homo sapiens
atctcaccttcccaa

SEQ ID NO: 990392 - DNA, 15 bp, Homo sapiens
tctcaccttcccaaa

SEQ ID NO: 990393 - DNA, 15 bp, Homo sapiens
ctcaccttcccaaaa

SEQ ID NO: 990394 - DNA, 15 bp, Homo sapiens
tcaccttcccaaaag

SEQ ID NO: 990395 - DNA, 15 bp, Homo sapiens
caccttcccaaaaga

SEQ ID NO: 990396 - DNA, 15 bp, Homo sapiens
accttcccaaaagac

SEQ ID NO: 990397 - DNA, 15 bp, Homo sapiens
ccttcccaaaagaca

SEQ ID NO: 990398 - DNA, 15 bp, Homo sapiens
cttcccaaaagacac

SEQ ID NO: 990399 - DNA, 15 bp, Homo sapiens
ttcccaaaagacact

SEQ ID NO: 990400 - DNA, 15 bp, Homo sapiens
tcccaaaagacactg

SEQ ID NO: 990401 - DNA, 15 bp, Homo sapiens
cccaaaagacactgt

SEQ ID NO: 990402 - DNA, 15 bp, Homo sapiens
ccaaaagacactgtg

SEQ ID NO: 990403 - DNA, 15 bp, Homo sapiens
caaaagacactgtgt

SEQ ID NO: 990404 - DNA, 15 bp, Homo sapiens
aaaagacactgtgta

SEQ ID NO: 990405 - DNA, 15 bp, Homo sapiens
aaagacactgtgtaa

SEQ ID NO: 990406 - DNA, 15 bp, Homo sapiens
aagacactgtgtaag

SEQ ID NO: 990407 - DNA, 15 bp, Homo sapiens
agacactgtgtaagt

SEQ ID NO: 990408 - DNA, 15 bp, Homo sapiens
gacactgtgtaagtc

SEQ ID NO: 990409 - DNA, 15 bp, Homo sapiens
acactgtgtaagtcc

SEQ ID NO: 990410 - DNA, 15 bp, Homo sapiens
cactgtgtaagtcca

SEQ ID NO: 990411 - DNA, 15 bp, Homo sapiens
actgtgtaagtccat

SEQ ID NO: 990412 - DNA, 15 bp, Homo sapiens
ctgtgtaagtccatt

SEQ ID NO: 990413 - DNA, 15 bp, Homo sapiens
tgtgtaagtccattt

SEQ ID NO: 990414 - DNA, 15 bp, Homo sapiens
gtgtaagtccatttg

SEQ ID NO: 990415 - DNA, 15 bp, Homo sapiens
tgtaagtccatttgt

SEQ ID NO: 990416 - DNA, 15 bp, Homo sapiens
gtaagtccatttgtt

SEQ ID NO: 990417 - DNA, 15 bp, Homo sapiens
taagtccatttgttg

SEQ ID NO: 990418 - DNA, 15 bp, Homo sapiens
aagtccatttgttgt

SEQ ID NO: 990419 - DNA, 15 bp, Homo sapiens
agtccatttgttgta

SEQ ID NO: 990420 - DNA, 15 bp, Homo sapiens
gtccatttgttgtat

SEQ ID NO: 990421 - DNA, 15 bp, Homo sapiens
tccatttgttgtatt

SEQ ID NO: 990422 - DNA, 15 bp, Homo sapiens
ccatttgttgtattt

SEQ ID NO: 990423 - DNA, 15 bp, Homo sapiens
catttgttgtatttt

SEQ ID NO: 990424 - DNA, 15 bp, Homo sapiens
atttgttgtattttc

SEQ ID NO: 990425 - DNA, 15 bp, Homo sapiens
tttgttgtattttct

SEQ ID NO: 990426 - DNA, 15 bp, Homo sapiens
ttgttgtattttctt

SEQ ID NO: 990427 - DNA, 15 bp, Homo sapiens
tgttgtattttctta

SEQ ID NO: 990428 - DNA, 15 bp, Homo sapiens
gttgtattttcttaa

SEQ ID NO: 990429 - DNA, 15 bp, Homo sapiens
ttgtattttcttaaa

SEQ ID NO: 990430 - DNA, 15 bp, Homo sapiens
tgtattttcttaaag

SEQ ID NO: 990431 - DNA, 15 bp, Homo sapiens
gtattttcttaaaga

SEQ ID NO: 990432 - DNA, 15 bp, Homo sapiens
tattttcttaaagag

SEQ ID NO: 990433 - DNA, 15 bp, Homo sapiens
attttcttaaagagg

SEQ ID NO: 990434 - DNA, 15 bp, Homo sapiens
ttttcttaaagaggg

SEQ ID NO: 990435 - DNA, 15 bp, Homo sapiens
tttcttaaagaggga

SEQ ID NO: 990436 - DNA, 15 bp, Homo sapiens
ttcttaaagagggag

SEQ ID NO: 990437 - DNA, 15 bp, Homo sapiens
tcttaaagagggaga

SEQ ID NO: 990438 - DNA, 15 bp, Homo sapiens
cttaaagagggagac

SEQ ID NO: 990439 - DNA, 15 bp, Homo sapiens
ttaaagagggagaca

SEQ ID NO: 990440 - DNA, 15 bp, Homo sapiens
taaagagggagacaa

SEQ ID NO: 990441 - DNA, 15 bp, Homo sapiens
aaagagggagacaaa

SEQ ID NO: 990442 - DNA, 15 bp, Homo sapiens
aagagggagacaaat

SEQ ID NO: 990443 - DNA, 15 bp, Homo sapiens
agagggagacaaatt

SEQ ID NO: 990444 - DNA, 15 bp, Homo sapiens
gagggagacaaatta

SEQ ID NO: 990445 - DNA, 15 bp, Homo sapiens
agggagacaaattat

SEQ ID NO: 990446 - DNA, 15 bp, Homo sapiens
gggagacaaattatt

SEQ ID NO: 990447 - DNA, 15 bp, Homo sapiens
ggagacaaattattt

SEQ ID NO: 990448 - DNA, 15 bp, Homo sapiens
gagacaaattatttg

SEQ ID NO: 990449 - DNA, 15 bp, Homo sapiens
agacaaattatttgc

SEQ ID NO: 990450 - DNA, 15 bp, Homo sapiens
gacaaattatttgca

SEQ ID NO: 990451 - DNA, 15 bp, Homo sapiens
acaaattatttgcaa

SEQ ID NO: 990452 - DNA, 15 bp, Homo sapiens
caaattatttgcaaa

SEQ ID NO: 990453 - DNA, 15 bp, Homo sapiens
aaattatttgcaaaa

SEQ ID NO: 990454 - DNA, 15 bp, Homo sapiens
aattatttgcaaaat

SEQ ID NO: 990455 - DNA, 15 bp, Homo sapiens
attatttgcaaaatg

SEQ ID NO: 990456 - DNA, 15 bp, Homo sapiens
ttatttgcaaaatgt

SEQ ID NO: 990457 - DNA, 15 bp, Homo sapiens
tatttgcaaaatgtg

SEQ ID NO: 990458 - DNA, 15 bp, Homo sapiens
atttgcaaaatgtgc

SEQ ID NO: 990459 - DNA, 15 bp, Homo sapiens
tttgcaaaatgtgct

SEQ ID NO: 990460 - DNA, 15 bp, Homo sapiens
ttgcaaaatgtgcta

SEQ ID NO: 990461 - DNA, 15 bp, Homo sapiens
tgcaaaatgtgctaa

SEQ ID NO: 990462 - DNA, 15 bp, Homo sapiens
gcaaaatgtgctaaa

SEQ ID NO: 990463 - DNA, 15 bp, Homo sapiens
caaaatgtgctaaag

SEQ ID NO: 990464 - DNA, 15 bp, Homo sapiens
aaaatgtgctaaagt

SEQ ID NO: 990465 - DNA, 15 bp, Homo sapiens
aaatgtgctaaagtc

SEQ ID NO: 990466 - DNA, 15 bp, Homo sapiens
aatgtgctaaagtca

SEQ ID NO: 990467 - DNA, 15 bp, Homo sapiens
atgtgctaaagtcaa

SEQ ID NO: 990468 - DNA, 15 bp, Homo sapiens
tgtgctaaagtcaat

SEQ ID NO: 990469 - DNA, 15 bp, Homo sapiens
gtgctaaagtcaatg

SEQ ID NO: 990470 - DNA, 15 bp, Homo sapiens
tgctaaagtcaatga

SEQ ID NO: 990471 - DNA, 15 bp, Homo sapiens
gctaaagtcaatgat

SEQ ID NO: 990472 - DNA, 15 bp, Homo sapiens
ctaaagtcaatgatt

SEQ ID NO: 990473 - DNA, 15 bp, Homo sapiens
taaagtcaatgattt

SEQ ID NO: 990474 - DNA, 15 bp, Homo sapiens
aaagtcaatgatttt

SEQ ID NO: 990475 - DNA, 15 bp, Homo sapiens
aagtcaatgattttt

SEQ ID NO: 990476 - DNA, 15 bp, Homo sapiens
agtcaatgattttta

SEQ ID NO: 990477 - DNA, 15 bp, Homo sapiens
gtcaatgatttttac

SEQ ID NO: 990478 - DNA, 15 bp, Homo sapiens
tcaatgatttttacg

SEQ ID NO: 990479 - DNA, 15 bp, Homo sapiens
caatgatttttacgg

SEQ ID NO: 990480 - DNA, 15 bp, Homo sapiens
aatgatttttacggg

SEQ ID NO: 990481 - DNA, 15 bp, Homo sapiens
atgatttttacggga

SEQ ID NO: 990482 - DNA, 15 bp, Homo sapiens
tgatttttacgggat

SEQ ID NO: 990483 - DNA, 15 bp, Homo sapiens
gatttttacgggatt

SEQ ID NO: 990484 - DNA, 15 bp, Homo sapiens
atttttacgggatta

SEQ ID NO: 990485 - DNA, 15 bp, Homo sapiens
tttttacgggattat

SEQ ID NO: 990486 - DNA, 15 bp, Homo sapiens
ttttacgggattatt

SEQ ID NO: 990487 - DNA, 15 bp, Homo sapiens
tttacgggattattg

SEQ ID NO: 990488 - DNA, 15 bp, Homo sapiens
ttacgggattattga

SEQ ID NO: 990489 - DNA, 15 bp, Homo sapiens
tacgggattattgac

SEQ ID NO: 990490 - DNA, 15 bp, Homo sapiens
acgggattattgact

SEQ ID NO: 990491 - DNA, 15 bp, Homo sapiens
cgggattattgactt

SEQ ID NO: 990492 - DNA, 15 bp, Homo sapiens
gggattattgacttc

SEQ ID NO: 990493 - DNA, 15 bp, Homo sapiens
ggattattgacttct

SEQ ID NO: 990494 - DNA, 15 bp, Homo sapiens
gattattgacttctg

SEQ ID NO: 990495 - DNA, 15 bp, Homo sapiens
attattgacttctgc

SEQ ID NO: 990496 - DNA, 15 bp, Homo sapiens
ttattgacttctgct

SEQ ID NO: 990497 - DNA, 15 bp, Homo sapiens
tattgacttctgctt

SEQ ID NO: 990498 - DNA, 15 bp, Homo sapiens
attgacttctgctta

SEQ ID NO: 990499 - DNA, 15 bp, Homo sapiens
ttgacttctgcttat

SEQ ID NO: 990500 - DNA, 15 bp, Homo sapiens
tgacttctgcttatg

SEQ ID NO: 990501 - DNA, 15 bp, Homo sapiens
gacttctgcttatgg

SEQ ID NO: 990502 - DNA, 15 bp, Homo sapiens
acttctgcttatgga

SEQ ID NO: 990503 - DNA, 15 bp, Homo sapiens
cttctgcttatggaa

SEQ ID NO: 990504 - DNA, 15 bp, Homo sapiens
ttctgcttatggaaa

SEQ ID NO: 990505 - DNA, 15 bp, Homo sapiens
tctgcttatggaaaa

SEQ ID NO: 990506 - DNA, 15 bp, Homo sapiens
ctgcttatggaaaac

SEQ ID NO: 990507 - DNA, 15 bp, Homo sapiens
tgcttatggaaaaca

SEQ ID NO: 990508 - DNA, 15 bp, Homo sapiens
gcttatggaaaacaa

SEQ ID NO: 990509 - DNA, 15 bp, Homo sapiens
cttatggaaaacaaa

SEQ ID NO: 990510 - DNA, 15 bp, Homo sapiens
ttatggaaaacaaag

SEQ ID NO: 990511 - DNA, 15 bp, Homo sapiens
tatggaaaacaaaga

SEQ ID NO: 990512 - DNA, 15 bp, Homo sapiens
atggaaaacaaagaa

SEQ ID NO: 990513 - DNA, 15 bp, Homo sapiens
tggaaaacaaagaaa

SEQ ID NO: 990514 - DNA, 15 bp, Homo sapiens
ggaaaacaaagaaac

SEQ ID NO: 990515 - DNA, 15 bp, Homo sapiens
gaaaacaaagaaaca

SEQ ID NO: 990516 - DNA, 15 bp, Homo sapiens
aaaacaaagaaacag

SEQ ID NO: 990517 - DNA, 15 bp, Homo sapiens
aaacaaagaaacaga

SEQ ID NO: 990518 - DNA, 15 bp, Homo sapiens
aacaaagaaacagac

SEQ ID NO: 990519 - DNA, 15 bp, Homo sapiens
acaaagaaacagaca

SEQ ID NO: 990520 - DNA, 15 bp, Homo sapiens
caaagaaacagacac

SEQ ID NO: 990521 - DNA, 15 bp, Homo sapiens
aaagaaacagacaca

SEQ ID NO: 990522 - DNA, 15 bp, Homo sapiens
aagaaacagacacaa

SEQ ID NO: 990523 - DNA, 15 bp, Homo sapiens
agaaacagacacaat

SEQ ID NO: 990524 - DNA, 15 bp, Homo sapiens
gaaacagacacaatg

SEQ ID NO: 990525 - DNA, 15 bp, Homo sapiens
aaacagacacaatgc

SEQ ID NO: 990526 - DNA, 15 bp, Homo sapiens
aacagacacaatgca

SEQ ID NO: 990527 - DNA, 15 bp, Homo sapiens
acagacacaatgcac

SEQ ID NO: 990528 - DNA, 15 bp, Homo sapiens
cagacacaatgcaca

SEQ ID NO: 990529 - DNA, 15 bp, Homo sapiens
agacacaatgcacac

SEQ ID NO: 990530 - DNA, 15 bp, Homo sapiens
gacacaatgcacaca

SEQ ID NO: 990531 - DNA, 15 bp, Homo sapiens
acacaatgcacacag

SEQ ID NO: 990532 - DNA, 15 bp, Homo sapiens
cacaatgcacacaga

SEQ ID NO: 990533 - DNA, 15 bp, Homo sapiens
acaatgcacacagaa

SEQ ID NO: 990534 - DNA, 15 bp, Homo sapiens
caatgcacacagaaa

SEQ ID NO: 990535 - DNA, 15 bp, Homo sapiens
aatgcacacagaaaa

SEQ ID NO: 990536 - DNA, 15 bp, Homo sapiens
atgcacacagaaaat

SEQ ID NO: 990537 - DNA, 15 bp, Homo sapiens
tgcacacagaaaata

SEQ ID NO: 990538 - DNA, 15 bp, Homo sapiens
gcacacagaaaatat

SEQ ID NO: 990539 - DNA, 15 bp, Homo sapiens
cacacagaaaatatt

SEQ ID NO: 990540 - DNA, 15 bp, Homo sapiens
acacagaaaatatta

SEQ ID NO: 990541 - DNA, 15 bp, Homo sapiens
cacagaaaatattag

SEQ ID NO: 990542 - DNA, 15 bp, Homo sapiens
acagaaaatattaga

SEQ ID NO: 990543 - DNA, 15 bp, Homo sapiens
cagaaaatattagat

SEQ ID NO: 990544 - DNA, 15 bp, Homo sapiens
agaaaatattagata

SEQ ID NO: 990545 - DNA, 15 bp, Homo sapiens
gaaaatattagatat

SEQ ID NO: 990546 - DNA, 15 bp, Homo sapiens
aaaatattagatatg

SEQ ID NO: 990547 - DNA, 15 bp, Homo sapiens
aaatattagatatgg

SEQ ID NO: 990548 - DNA, 15 bp, Homo sapiens
aatattagatatgga

SEQ ID NO: 990549 - DNA, 15 bp, Homo sapiens
atattagatatggag

SEQ ID NO: 990550 - DNA, 15 bp, Homo sapiens
tattagatatggaga

SEQ ID NO: 990551 - DNA, 15 bp, Homo sapiens
attagatatggagag

SEQ ID NO: 990552 - DNA, 15 bp, Homo sapiens
ttagatatggagaga

SEQ ID NO: 990553 - DNA, 15 bp, Homo sapiens
tagatatggagagat

SEQ ID NO: 990554 - DNA, 15 bp, Homo sapiens
agatatggagagatt

SEQ ID NO: 990555 - DNA, 15 bp, Homo sapiens
gatatggagagatta

SEQ ID NO: 990556 - DNA, 15 bp, Homo sapiens
atatggagagattat

SEQ ID NO: 990557 - DNA, 15 bp, Homo sapiens
tatggagagattatt

SEQ ID NO: 990558 - DNA, 15 bp, Homo sapiens
atggagagattattc

SEQ ID NO: 990559 - DNA, 15 bp, Homo sapiens
tggagagattattca

SEQ ID NO: 990560 - DNA, 15 bp, Homo sapiens
ggagagattattcaa

SEQ ID NO: 990561 - DNA, 15 bp, Homo sapiens
gagagattattcaaa

SEQ ID NO: 990562 - DNA, 15 bp, Homo sapiens
agagattattcaaag

SEQ ID NO: 990563 - DNA, 15 bp, Homo sapiens
gagattattcaaagt

SEQ ID NO: 990564 - DNA, 15 bp, Homo sapiens
agattattcaaagtg

SEQ ID NO: 990565 - DNA, 15 bp, Homo sapiens
gattattcaaagtga

SEQ ID NO: 990566 - DNA, 15 bp, Homo sapiens
attattcaaagtgaa

SEQ ID NO: 990567 - DNA, 15 bp, Homo sapiens
ttattcaaagtgaag

SEQ ID NO: 990568 - DNA, 15 bp, Homo sapiens
tattcaaagtgaagg

SEQ ID NO: 990569 - DNA, 15 bp, Homo sapiens
attcaaagtgaaggg

SEQ ID NO: 990570 - DNA, 15 bp, Homo sapiens
ttcaaagtgaagggg

SEQ ID NO: 990571 - DNA, 15 bp, Homo sapiens
tcaaagtgaagggga

SEQ ID NO: 990572 - DNA, 15 bp, Homo sapiens
caaagtgaaggggac

SEQ ID NO: 990573 - DNA, 15 bp, Homo sapiens
aaagtgaaggggaca

SEQ ID NO: 990574 - DNA, 15 bp, Homo sapiens
aagtgaaggggacac

SEQ ID NO: 990575 - DNA, 15 bp, Homo sapiens
agtgaaggggacaca

SEQ ID NO: 990576 - DNA, 15 bp, Homo sapiens
gtgaaggggacacat

SEQ ID NO: 990577 - DNA, 15 bp, Homo sapiens
tgaaggggacacatc

SEQ ID NO: 990578 - DNA, 15 bp, Homo sapiens
gaaggggacacatca

SEQ ID NO: 990579 - DNA, 15 bp, Homo sapiens
aaggggacacatcat

SEQ ID NO: 990580 - DNA, 15 bp, Homo sapiens
aggggacacatcata

SEQ ID NO: 990581 - DNA, 15 bp, Homo sapiens
ggggacacatcatat

SEQ ID NO: 990582 - DNA, 15 bp, Homo sapiens
gggacacatcatatt

SEQ ID NO: 990583 - DNA, 15 bp, Homo sapiens
ggacacatcatattt

SEQ ID NO: 990584 - DNA, 15 bp, Homo sapiens
gacacatcatatttc

SEQ ID NO: 990585 - DNA, 15 bp, Homo sapiens
acacatcatatttct

SEQ ID NO: 990586 - DNA, 15 bp, Homo sapiens
cacatcatatttctg

SEQ ID NO: 990587 - DNA, 15 bp, Homo sapiens
acatcatatttctgc

SEQ ID NO: 990588 - DNA, 15 bp, Homo sapiens
catcatatttctgca

SEQ ID NO: 990589 - DNA, 15 bp, Homo sapiens
atcatatttctgcat

SEQ ID NO: 990590 - DNA, 15 bp, Homo sapiens
tcatatttctgcatt

SEQ ID NO: 990591 - DNA, 15 bp, Homo sapiens
catatttctgcattt

SEQ ID NO: 990592 - DNA, 15 bp, Homo sapiens
atatttctgcatttt

SEQ ID NO: 990593 - DNA, 15 bp, Homo sapiens
tatttctgcatttta

SEQ ID NO: 990594 - DNA, 15 bp, Homo sapiens
atttctgcattttac

SEQ ID NO: 990595 - DNA, 15 bp, Homo sapiens
tttctgcattttact

SEQ ID NO: 990596 - DNA, 15 bp, Homo sapiens
ttctgcattttactt

SEQ ID NO: 990597 - DNA, 15 bp, Homo sapiens
tctgcattttacttg

SEQ ID NO: 990598 - DNA, 15 bp, Homo sapiens
ctgcattttacttgc

SEQ ID NO: 990599 - DNA, 15 bp, Homo sapiens
tgcattttacttgca

SEQ ID NO: 990600 - DNA, 15 bp, Homo sapiens
gcattttacttgcat

SEQ ID NO: 990601 - DNA, 15 bp, Homo sapiens
cattttacttgcatt

SEQ ID NO: 990602 - DNA, 15 bp, Homo sapiens
attttacttgcatta

SEQ ID NO: 990603 - DNA, 15 bp, Homo sapiens
ttttacttgcattaa

SEQ ID NO: 990604 - DNA, 15 bp, Homo sapiens
tttacttgcattaaa

SEQ ID NO: 990605 - DNA, 15 bp, Homo sapiens
ttacttgcattaaaa

SEQ ID NO: 990606 - DNA, 15 bp, Homo sapiens
tacttgcattaaaag

SEQ ID NO: 990607 - DNA, 15 bp, Homo sapiens
acttgcattaaaaga

SEQ ID NO: 990608 - DNA, 15 bp, Homo sapiens
cttgcattaaaagaa

SEQ ID NO: 990609 - DNA, 15 bp, Homo sapiens
ttgcattaaaagaaa

SEQ ID NO: 990610 - DNA, 15 bp, Homo sapiens
tgcattaaaagaaac

SEQ ID NO: 990611 - DNA, 15 bp, Homo sapiens
gcattaaaagaaacc

SEQ ID NO: 990612 - DNA, 15 bp, Homo sapiens
cattaaaagaaacct

SEQ ID NO: 990613 - DNA, 15 bp, Homo sapiens
attaaaagaaacctc

SEQ ID NO: 990614 - DNA, 15 bp, Homo sapiens
ttaaaagaaacctct

SEQ ID NO: 990615 - DNA, 15 bp, Homo sapiens
taaaagaaacctctt

SEQ ID NO: 990616 - DNA, 15 bp, Homo sapiens
aaaagaaacctcttt

SEQ ID NO: 990617 - DNA, 15 bp, Homo sapiens
aaagaaacctcttta

SEQ ID NO: 990618 - DNA, 15 bp, Homo sapiens
aagaaacctctttat

SEQ ID NO: 990619 - DNA, 15 bp, Homo sapiens
agaaacctctttata

SEQ ID NO: 990620 - DNA, 15 bp, Homo sapiens
gaaacctctttatat

SEQ ID NO: 990621 - DNA, 15 bp, Homo sapiens
aaacctctttatata

SEQ ID NO: 990622 - DNA, 15 bp, Homo sapiens
aacctctttatatac

SEQ ID NO: 990623 - DNA, 15 bp, Homo sapiens
acctctttatatact

SEQ ID NO: 990624 - DNA, 15 bp, Homo sapiens
cctctttatatacta

SEQ ID NO: 990625 - DNA, 15 bp, Homo sapiens
ctctttatatactac

SEQ ID NO: 990626 - DNA, 15 bp, Homo sapiens
tctttatatactaca

SEQ ID NO: 990627 - DNA, 15 bp, Homo sapiens
ctttatatactacag

SEQ ID NO: 990628 - DNA, 15 bp, Homo sapiens
tttatatactacagt

SEQ ID NO: 990629 - DNA, 15 bp, Homo sapiens
ttatatactacagtt

SEQ ID NO: 990630 - DNA, 15 bp, Homo sapiens
tatatactacagttg

SEQ ID NO: 990631 - DNA, 15 bp, Homo sapiens
atatactacagttgt

SEQ ID NO: 990632 - DNA, 15 bp, Homo sapiens
tatactacagttgtt

SEQ ID NO: 990633 - DNA, 15 bp, Homo sapiens
atactacagttgttc

SEQ ID NO: 990634 - DNA, 15 bp, Homo sapiens
tactacagttgttcc

SEQ ID NO: 990635 - DNA, 15 bp, Homo sapiens
actacagttgttcct

SEQ ID NO: 990636 - DNA, 15 bp, Homo sapiens
ctacagttgttccta

SEQ ID NO: 990637 - DNA, 15 bp, Homo sapiens
tacagttgttcctat

SEQ ID NO: 990638 - DNA, 15 bp, Homo sapiens
acagttgttcctatc

SEQ ID NO: 990639 - DNA, 15 bp, Homo sapiens
cagttgttcctatct

SEQ ID NO: 990640 - DNA, 15 bp, Homo sapiens
agttgttcctatctc

SEQ ID NO: 990641 - DNA, 15 bp, Homo sapiens
gttgttcctatctct

SEQ ID NO: 990642 - DNA, 15 bp, Homo sapiens
ttgttcctatctctc

SEQ ID NO: 990643 - DNA, 15 bp, Homo sapiens
tgttcctatctctcc

SEQ ID NO: 990644 - DNA, 15 bp, Homo sapiens
gttcctatctctccc

SEQ ID NO: 990645 - DNA, 15 bp, Homo sapiens
ttcctatctctcccc

SEQ ID NO: 990646 - DNA, 15 bp, Homo sapiens
tcctatctctccccc

SEQ ID NO: 990647 - DNA, 15 bp, Homo sapiens
cctatctctcccccg

SEQ ID NO: 990648 - DNA, 15 bp, Homo sapiens
ctatctctcccccgc

SEQ ID NO: 990649 - DNA, 15 bp, Homo sapiens
tatctctcccccgcc

SEQ ID NO: 990650 - DNA, 15 bp, Homo sapiens
atctctcccccgccc

SEQ ID NO: 990651 - DNA, 15 bp, Homo sapiens
tctctcccccgcccc

SEQ ID NO: 990652 - DNA, 15 bp, Homo sapiens
ctctcccccgccccc

SEQ ID NO: 990653 - DNA, 15 bp, Homo sapiens
tctcccccgcccccc

SEQ ID NO: 990654 - DNA, 15 bp, Homo sapiens
ctcccccgcccccca

SEQ ID NO: 990655 - DNA, 15 bp, Homo sapiens
tcccccgccccccac

SEQ ID NO: 990656 - DNA, 15 bp, Homo sapiens
cccccgccccccacc

SEQ ID NO: 990657 - DNA, 15 bp, Homo sapiens
ccccgccccccaccg

SEQ ID NO: 990658 - DNA, 15 bp, Homo sapiens
cccgccccccaccgc

SEQ ID NO: 990659 - DNA, 15 bp, Homo sapiens
ccgccccccaccgcc

SEQ ID NO: 990660 - DNA, 15 bp, Homo sapiens
cgccccccaccgccc

SEQ ID NO: 990661 - DNA, 15 bp, Homo sapiens
gccccccaccgcccc

SEQ ID NO: 990662 - DNA, 15 bp, Homo sapiens
ccccccaccgcccca

SEQ ID NO: 990663 - DNA, 15 bp, Homo sapiens
cccccaccgccccac

SEQ ID NO: 990664 - DNA, 15 bp, Homo sapiens
ccccaccgccccacc

SEQ ID NO: 990665 - DNA, 15 bp, Homo sapiens
cccaccgccccacca

SEQ ID NO: 990666 - DNA, 15 bp, Homo sapiens
ccaccgccccaccac

SEQ ID NO: 990667 - DNA, 15 bp, Homo sapiens
caccgccccaccaca

SEQ ID NO: 990668 - DNA, 15 bp, Homo sapiens
accgccccaccacac

SEQ ID NO: 990669 - DNA, 15 bp, Homo sapiens
ccgccccaccacaca

SEQ ID NO: 990670 - DNA, 15 bp, Homo sapiens
cgccccaccacacac

SEQ ID NO: 990671 - DNA, 15 bp, Homo sapiens
gccccaccacacaca

SEQ ID NO: 990672 - DNA, 15 bp, Homo sapiens
ccccaccacacacat

SEQ ID NO: 990673 - DNA, 15 bp, Homo sapiens
cccaccacacacata

SEQ ID NO: 990674 - DNA, 15 bp, Homo sapiens
ccaccacacacatat

SEQ ID NO: 990675 - DNA, 15 bp, Homo sapiens
caccacacacatatt

SEQ ID NO: 990676 - DNA, 15 bp, Homo sapiens
accacacacatattt

SEQ ID NO: 990677 - DNA, 15 bp, Homo sapiens
ccacacacatatttt

SEQ ID NO: 990678 - DNA, 15 bp, Homo sapiens
cacacacatattttt

SEQ ID NO: 990679 - DNA, 15 bp, Homo sapiens
acacacatattttta

SEQ ID NO: 990680 - DNA, 15 bp, Homo sapiens
cacacatatttttaa

SEQ ID NO: 990681 - DNA, 15 bp, Homo sapiens
acacatatttttaaa

SEQ ID NO: 990682 - DNA, 15 bp, Homo sapiens
cacatatttttaaag

SEQ ID NO: 990683 - DNA, 15 bp, Homo sapiens
acatatttttaaagt

SEQ ID NO: 990684 - DNA, 15 bp, Homo sapiens
catatttttaaagtt

SEQ ID NO: 990685 - DNA, 15 bp, Homo sapiens
atatttttaaagttt

SEQ ID NO: 990686 - DNA, 15 bp, Homo sapiens
tatttttaaagtttt

SEQ ID NO: 990687 - DNA, 15 bp, Homo sapiens
atttttaaagttttt

SEQ ID NO: 990688 - DNA, 15 bp, Homo sapiens
tttttaaagtttttc

SEQ ID NO: 990689 - DNA, 15 bp, Homo sapiens
ttttaaagtttttcc

SEQ ID NO: 990690 - DNA, 15 bp, Homo sapiens
tttaaagtttttcct

SEQ ID NO: 990691 - DNA, 15 bp, Homo sapiens
ttaaagtttttcctt

SEQ ID NO: 990692 - DNA, 15 bp, Homo sapiens
taaagtttttccttt

SEQ ID NO: 990693 - DNA, 15 bp, Homo sapiens
aaagtttttcctttt

SEQ ID NO: 990694 - DNA, 15 bp, Homo sapiens
aagtttttccttttt

SEQ ID NO: 990695 - DNA, 15 bp, Homo sapiens
agtttttcctttttt

SEQ ID NO: 990696 - DNA, 15 bp, Homo sapiens
gtttttcctttttta

SEQ ID NO: 990697 - DNA, 15 bp, Homo sapiens
tttttccttttttaa

SEQ ID NO: 990698 - DNA, 15 bp, Homo sapiens
ttttccttttttaag

SEQ ID NO: 990699 - DNA, 15 bp, Homo sapiens
tttccttttttaaga

SEQ ID NO: 990700 - DNA, 15 bp, Homo sapiens
ttccttttttaagaa

SEQ ID NO: 990701 - DNA, 15 bp, Homo sapiens
tccttttttaagaat

SEQ ID NO: 990702 - DNA, 15 bp, Homo sapiens
ccttttttaagaata

SEQ ID NO: 990703 - DNA, 15 bp, Homo sapiens
cttttttaagaatat

SEQ ID NO: 990704 - DNA, 15 bp, Homo sapiens
ttttttaagaatatt

SEQ ID NO: 990705 - DNA, 15 bp, Homo sapiens
tttttaagaatattt

SEQ ID NO: 990706 - DNA, 15 bp, Homo sapiens
ttttaagaatatttt

SEQ ID NO: 990707 - DNA, 15 bp, Homo sapiens
tttaagaatattttt

SEQ ID NO: 990708 - DNA, 15 bp, Homo sapiens
ttaagaatatttttg

SEQ ID NO: 990709 - DNA, 15 bp, Homo sapiens
taagaatatttttgt

SEQ ID NO: 990710 - DNA, 15 bp, Homo sapiens
aagaatatttttgta

SEQ ID NO: 990711 - DNA, 15 bp, Homo sapiens
agaatatttttgtaa

SEQ ID NO: 990712 - DNA, 15 bp, Homo sapiens
gaatatttttgtaag

SEQ ID NO: 990713 - DNA, 15 bp, Homo sapiens
aatatttttgtaaga

SEQ ID NO: 990714 - DNA, 15 bp, Homo sapiens
atatttttgtaagac

SEQ ID NO: 990715 - DNA, 15 bp, Homo sapiens
tatttttgtaagacc

SEQ ID NO: 990716 - DNA, 15 bp, Homo sapiens
atttttgtaagacca

SEQ ID NO: 990717 - DNA, 15 bp, Homo sapiens
tttttgtaagaccaa

SEQ ID NO: 990718 - DNA, 15 bp, Homo sapiens
ttttgtaagaccaat

SEQ ID NO: 990719 - DNA, 15 bp, Homo sapiens
tttgtaagaccaata

SEQ ID NO: 990720 - DNA, 15 bp, Homo sapiens
ttgtaagaccaatac

SEQ ID NO: 990721 - DNA, 15 bp, Homo sapiens
tgtaagaccaatacc

SEQ ID NO: 990722 - DNA, 15 bp, Homo sapiens
gtaagaccaatacct

SEQ ID NO: 990723 - DNA, 15 bp, Homo sapiens
taagaccaatacctg

SEQ ID NO: 990724 - DNA, 15 bp, Homo sapiens
aagaccaatacctgg

SEQ ID NO: 990725 - DNA, 15 bp, Homo sapiens
agaccaatacctggg

SEQ ID NO: 990726 - DNA, 15 bp, Homo sapiens
gaccaatacctggga

SEQ ID NO: 990727 - DNA, 15 bp, Homo sapiens
accaatacctgggat

SEQ ID NO: 990728 - DNA, 15 bp, Homo sapiens
ccaatacctgggatg

SEQ ID NO: 990729 - DNA, 15 bp, Homo sapiens
caatacctgggatga

SEQ ID NO: 990730 - DNA, 15 bp, Homo sapiens
aatacctgggatgag

SEQ ID NO: 990731 - DNA, 15 bp, Homo sapiens
atacctgggatgaga

SEQ ID NO: 990732 - DNA, 15 bp, Homo sapiens
tacctgggatgagaa

SEQ ID NO: 990733 - DNA, 15 bp, Homo sapiens
acctgggatgagaag

SEQ ID NO: 990734 - DNA, 15 bp, Homo sapiens
cctgggatgagaaga

SEQ ID NO: 990735 - DNA, 15 bp, Homo sapiens
ctgggatgagaagaa

SEQ ID NO: 990736 - DNA, 15 bp, Homo sapiens
tgggatgagaagaat

SEQ ID NO: 990737 - DNA, 15 bp, Homo sapiens
gggatgagaagaatc

SEQ ID NO: 990738 - DNA, 15 bp, Homo sapiens
ggatgagaagaatcc

SEQ ID NO: 990739 - DNA, 15 bp, Homo sapiens
gatgagaagaatcct

SEQ ID NO: 990740 - DNA, 15 bp, Homo sapiens
atgagaagaatcctg

SEQ ID NO: 990741 - DNA, 15 bp, Homo sapiens
tgagaagaatcctga

SEQ ID NO: 990742 - DNA, 15 bp, Homo sapiens
gagaagaatcctgag

SEQ ID NO: 990743 - DNA, 15 bp, Homo sapiens
agaagaatcctgaga

SEQ ID NO: 990744 - DNA, 15 bp, Homo sapiens
gaagaatcctgagac

SEQ ID NO: 990745 - DNA, 15 bp, Homo sapiens
aagaatcctgagact

SEQ ID NO: 990746 - DNA, 15 bp, Homo sapiens
agaatcctgagactg

SEQ ID NO: 990747 - DNA, 15 bp, Homo sapiens
gaatcctgagactgc

SEQ ID NO: 990748 - DNA, 15 bp, Homo sapiens
aatcctgagactgcc

SEQ ID NO: 990749 - DNA, 15 bp, Homo sapiens
atcctgagactgcct

SEQ ID NO: 990750 - DNA, 15 bp, Homo sapiens
tcctgagactgcctg

SEQ ID NO: 990751 - DNA, 15 bp, Homo sapiens
cctgagactgcctgg

SEQ ID NO: 990752 - DNA, 15 bp, Homo sapiens
ctgagactgcctgga

SEQ ID NO: 990753 - DNA, 15 bp, Homo sapiens
tgagactgcctggag

SEQ ID NO: 990754 - DNA, 15 bp, Homo sapiens
gagactgcctggagg

SEQ ID NO: 990755 - DNA, 15 bp, Homo sapiens
agactgcctggaggt

SEQ ID NO: 990756 - DNA, 15 bp, Homo sapiens
gactgcctggaggtg

SEQ ID NO: 990757 - DNA, 15 bp, Homo sapiens
actgcctggaggtga

SEQ ID NO: 990758 - DNA, 15 bp, Homo sapiens
ctgcctggaggtgag

SEQ ID NO: 990759 - DNA, 15 bp, Homo sapiens
tgcctggaggtgagg

SEQ ID NO: 990760 - DNA, 15 bp, Homo sapiens
gcctggaggtgaggt

SEQ ID NO: 990761 - DNA, 15 bp, Homo sapiens
cctggaggtgaggta

SEQ ID NO: 990762 - DNA, 15 bp, Homo sapiens
ctggaggtgaggtag

SEQ ID NO: 990763 - DNA, 15 bp, Homo sapiens
tggaggtgaggtaga

SEQ ID NO: 990764 - DNA, 15 bp, Homo sapiens
ggaggtgaggtagaa

SEQ ID NO: 990765 - DNA, 15 bp, Homo sapiens
gaggtgaggtagaaa

SEQ ID NO: 990766 - DNA, 15 bp, Homo sapiens
aggtgaggtagaaaa

SEQ ID NO: 990767 - DNA, 15 bp, Homo sapiens
ggtgaggtagaaaat

SEQ ID NO: 990768 - DNA, 15 bp, Homo sapiens
gtgaggtagaaaatt

SEQ ID NO: 990769 - DNA, 15 bp, Homo sapiens
tgaggtagaaaatta

SEQ ID NO: 990770 - DNA, 15 bp, Homo sapiens
gaggtagaaaattag

SEQ ID NO: 990771 - DNA, 15 bp, Homo sapiens
aggtagaaaattaga

SEQ ID NO: 990772 - DNA, 15 bp, Homo sapiens
ggtagaaaattagaa

SEQ ID NO: 990773 - DNA, 15 bp, Homo sapiens
gtagaaaattagaaa

SEQ ID NO: 990774 - DNA, 15 bp, Homo sapiens
tagaaaattagaaat

SEQ ID NO: 990775 - DNA, 15 bp, Homo sapiens
agaaaattagaaata

SEQ ID NO: 990776 - DNA, 15 bp, Homo sapiens
gaaaattagaaatac

SEQ ID NO: 990777 - DNA, 15 bp, Homo sapiens
aaaattagaaatact

SEQ ID NO: 990778 - DNA, 15 bp, Homo sapiens
aaattagaaatactt

SEQ ID NO: 990779 - DNA, 15 bp, Homo sapiens
aattagaaatacttc

SEQ ID NO: 990780 - DNA, 15 bp, Homo sapiens
attagaaatacttcc

SEQ ID NO: 990781 - DNA, 15 bp, Homo sapiens
ttagaaatacttcct

SEQ ID NO: 990782 - DNA, 15 bp, Homo sapiens
tagaaatacttccta

SEQ ID NO: 990783 - DNA, 15 bp, Homo sapiens
agaaatacttcctaa

SEQ ID NO: 990784 - DNA, 15 bp, Homo sapiens
gaaatacttcctaat

SEQ ID NO: 990785 - DNA, 15 bp, Homo sapiens
aaatacttcctaatt

SEQ ID NO: 990786 - DNA, 15 bp, Homo sapiens
aatacttcctaattc

SEQ ID NO: 990787 - DNA, 15 bp, Homo sapiens
atacttcctaattct

SEQ ID NO: 990788 - DNA, 15 bp, Homo sapiens
tacttcctaattctt

SEQ ID NO: 990789 - DNA, 15 bp, Homo sapiens
acttcctaattcttc

SEQ ID NO: 990790 - DNA, 15 bp, Homo sapiens
cttcctaattcttct

SEQ ID NO: 990791 - DNA, 15 bp, Homo sapiens
ttcctaattcttctc

SEQ ID NO: 990792 - DNA, 15 bp, Homo sapiens
tcctaattcttctca

SEQ ID NO: 990793 - DNA, 15 bp, Homo sapiens
cctaattcttctcaa

SEQ ID NO: 990794 - DNA, 15 bp, Homo sapiens
ctaattcttctcaag

SEQ ID NO: 990795 - DNA, 15 bp, Homo sapiens
taattcttctcaagg

SEQ ID NO: 990796 - DNA, 15 bp, Homo sapiens
aattcttctcaaggc

SEQ ID NO: 990797 - DNA, 15 bp, Homo sapiens
attcttctcaaggct

SEQ ID NO: 990798 - DNA, 15 bp, Homo sapiens
ttcttctcaaggctg

SEQ ID NO: 990799 - DNA, 15 bp, Homo sapiens
tcttctcaaggctgt

SEQ ID NO: 990800 - DNA, 15 bp, Homo sapiens
cttctcaaggctgtt

SEQ ID NO: 990801 - DNA, 15 bp, Homo sapiens
ttctcaaggctgttg

SEQ ID NO: 990802 - DNA, 15 bp, Homo sapiens
tctcaaggctgttgg

SEQ ID NO: 990803 - DNA, 15 bp, Homo sapiens
ctcaaggctgttggt

SEQ ID NO: 990804 - DNA, 15 bp, Homo sapiens
tcaaggctgttggta

SEQ ID NO: 990805 - DNA, 15 bp, Homo sapiens
caaggctgttggtaa

SEQ ID NO: 990806 - DNA, 15 bp, Homo sapiens
aaggctgttggtaac

SEQ ID NO: 990807 - DNA, 15 bp, Homo sapiens
aggctgttggtaact

SEQ ID NO: 990808 - DNA, 15 bp, Homo sapiens
ggctgttggtaactt

SEQ ID NO: 990809 - DNA, 15 bp, Homo sapiens
gctgttggtaacttt

SEQ ID NO: 990810 - DNA, 15 bp, Homo sapiens
ctgttggtaacttta

SEQ ID NO: 990811 - DNA, 15 bp, Homo sapiens
tgttggtaactttat

SEQ ID NO: 990812 - DNA, 15 bp, Homo sapiens
gttggtaactttatt

SEQ ID NO: 990813 - DNA, 15 bp, Homo sapiens
ttggtaactttattt

SEQ ID NO: 990814 - DNA, 15 bp, Homo sapiens
tggtaactttatttc

SEQ ID NO: 990815 - DNA, 15 bp, Homo sapiens
ggtaactttatttca

SEQ ID NO: 990816 - DNA, 15 bp, Homo sapiens
gtaactttatttcag

SEQ ID NO: 990817 - DNA, 15 bp, Homo sapiens
taactttatttcaga

SEQ ID NO: 990818 - DNA, 15 bp, Homo sapiens
aactttatttcagat

SEQ ID NO: 990819 - DNA, 15 bp, Homo sapiens
actttatttcagata

SEQ ID NO: 990820 - DNA, 15 bp, Homo sapiens
ctttatttcagataa

SEQ ID NO: 990821 - DNA, 15 bp, Homo sapiens
tttatttcagataat

SEQ ID NO: 990822 - DNA, 15 bp, Homo sapiens
ttatttcagataatt

SEQ ID NO: 990823 - DNA, 15 bp, Homo sapiens
tatttcagataattg

SEQ ID NO: 990824 - DNA, 15 bp, Homo sapiens
atttcagataattgg

SEQ ID NO: 990825 - DNA, 15 bp, Homo sapiens
tttcagataattgga

SEQ ID NO: 990826 - DNA, 15 bp, Homo sapiens
ttcagataattggag

SEQ ID NO: 990827 - DNA, 15 bp, Homo sapiens
tcagataattggaga

SEQ ID NO: 990828 - DNA, 15 bp, Homo sapiens
cagataattggagag

SEQ ID NO: 990829 - DNA, 15 bp, Homo sapiens
agataattggagagt

SEQ ID NO: 990830 - DNA, 15 bp, Homo sapiens
gataattggagagta

SEQ ID NO: 990831 - DNA, 15 bp, Homo sapiens
ataattggagagtaa

SEQ ID NO: 990832 - DNA, 15 bp, Homo sapiens
taattggagagtaaa

SEQ ID NO: 990833 - DNA, 15 bp, Homo sapiens
aattggagagtaaaa

SEQ ID NO: 990834 - DNA, 15 bp, Homo sapiens
attggagagtaaaat

SEQ ID NO: 990835 - DNA, 15 bp, Homo sapiens
ttggagagtaaaatg

SEQ ID NO: 990836 - DNA, 15 bp, Homo sapiens
tggagagtaaaatgt

SEQ ID NO: 990837 - DNA, 15 bp, Homo sapiens
ggagagtaaaatgtt

SEQ ID NO: 990838 - DNA, 15 bp, Homo sapiens
gagagtaaaatgtta

SEQ ID NO: 990839 - DNA, 15 bp, Homo sapiens
agagtaaaatgttaa

SEQ ID NO: 990840 - DNA, 15 bp, Homo sapiens
gagtaaaatgttaaa

SEQ ID NO: 990841 - DNA, 15 bp, Homo sapiens
agtaaaatgttaaaa

SEQ ID NO: 990842 - DNA, 15 bp, Homo sapiens
gtaaaatgttaaaac

SEQ ID NO: 990843 - DNA, 15 bp, Homo sapiens
taaaatgttaaaacc

SEQ ID NO: 990844 - DNA, 15 bp, Homo sapiens
aaaatgttaaaacct

SEQ ID NO: 990845 - DNA, 15 bp, Homo sapiens
aaatgttaaaacctg

SEQ ID NO: 990846 - DNA, 15 bp, Homo sapiens
aatgttaaaacctgt

SEQ ID NO: 990847 - DNA, 15 bp, Homo sapiens
atgttaaaacctgtt

SEQ ID NO: 990848 - DNA, 15 bp, Homo sapiens
tgttaaaacctgttg

SEQ ID NO: 990849 - DNA, 15 bp, Homo sapiens
gttaaaacctgttga

SEQ ID NO: 990850 - DNA, 15 bp, Homo sapiens
ttaaaacctgttgag

SEQ ID NO: 990851 - DNA, 15 bp, Homo sapiens
taaaacctgttgaga

SEQ ID NO: 990852 - DNA, 15 bp, Homo sapiens
aaaacctgttgagag

SEQ ID NO: 990853 - DNA, 15 bp, Homo sapiens
aaacctgttgagagg

SEQ ID NO: 990854 - DNA, 15 bp, Homo sapiens
aacctgttgagagga

SEQ ID NO: 990855 - DNA, 15 bp, Homo sapiens
acctgttgagaggaa

SEQ ID NO: 990856 - DNA, 15 bp, Homo sapiens
cctgttgagaggaat

SEQ ID NO: 990857 - DNA, 15 bp, Homo sapiens
ctgttgagaggaatt

SEQ ID NO: 990858 - DNA, 15 bp, Homo sapiens
tgttgagaggaattg

SEQ ID NO: 990859 - DNA, 15 bp, Homo sapiens
gttgagaggaattga

SEQ ID NO: 990860 - DNA, 15 bp, Homo sapiens
ttgagaggaattgat

SEQ ID NO: 990861 - DNA, 15 bp, Homo sapiens
tgagaggaattgatg

SEQ ID NO: 990862 - DNA, 15 bp, Homo sapiens
gagaggaattgatgg

SEQ ID NO: 990863 - DNA, 15 bp, Homo sapiens
agaggaattgatggt

SEQ ID NO: 990864 - DNA, 15 bp, Homo sapiens
gaggaattgatggtt

SEQ ID NO: 990865 - DNA, 15 bp, Homo sapiens
aggaattgatggttt

SEQ ID NO: 990866 - DNA, 15 bp, Homo sapiens
ggaattgatggtttc

SEQ ID NO: 990867 - DNA, 15 bp, Homo sapiens
gaattgatggtttct

SEQ ID NO: 990868 - DNA, 15 bp, Homo sapiens
aattgatggtttctg

SEQ ID NO: 990869 - DNA, 15 bp, Homo sapiens
attgatggtttctga

SEQ ID NO: 990870 - DNA, 15 bp, Homo sapiens
ttgatggtttctgag

SEQ ID NO: 990871 - DNA, 15 bp, Homo sapiens
tgatggtttctgaga

SEQ ID NO: 990872 - DNA, 15 bp, Homo sapiens
gatggtttctgagaa

SEQ ID NO: 990873 - DNA, 15 bp, Homo sapiens
atggtttctgagaaa

SEQ ID NO: 990874 - DNA, 15 bp, Homo sapiens
tggtttctgagaaat

SEQ ID NO: 990875 - DNA, 15 bp, Homo sapiens
ggtttctgagaaata

SEQ ID NO: 990876 - DNA, 15 bp, Homo sapiens
gtttctgagaaatac

SEQ ID NO: 990877 - DNA, 15 bp, Homo sapiens
tttctgagaaatact

SEQ ID NO: 990878 - DNA, 15 bp, Homo sapiens
ttctgagaaatacta

SEQ ID NO: 990879 - DNA, 15 bp, Homo sapiens
tctgagaaatactag

SEQ ID NO: 990880 - DNA, 15 bp, Homo sapiens
ctgagaaatactagg

SEQ ID NO: 990881 - DNA, 15 bp, Homo sapiens
tgagaaatactaggt

SEQ ID NO: 990882 - DNA, 15 bp, Homo sapiens
gagaaatactaggta

SEQ ID NO: 990883 - DNA, 15 bp, Homo sapiens
agaaatactaggtac

SEQ ID NO: 990884 - DNA, 15 bp, Homo sapiens
gaaatactaggtaca

SEQ ID NO: 990885 - DNA, 15 bp, Homo sapiens
aaatactaggtacat

SEQ ID NO: 990886 - DNA, 15 bp, Homo sapiens
aatactaggtacatt

SEQ ID NO: 990887 - DNA, 15 bp, Homo sapiens
atactaggtacattc

SEQ ID NO: 990888 - DNA, 15 bp, Homo sapiens
tactaggtacattca

SEQ ID NO: 990889 - DNA, 15 bp, Homo sapiens
actaggtacattcat

SEQ ID NO: 990890 - DNA, 15 bp, Homo sapiens
ctaggtacattcatc

SEQ ID NO: 990891 - DNA, 15 bp, Homo sapiens
taggtacattcatcc

SEQ ID NO: 990892 - DNA, 15 bp, Homo sapiens
aggtacattcatcct

SEQ ID NO: 990893 - DNA, 15 bp, Homo sapiens
ggtacattcatcctc

SEQ ID NO: 990894 - DNA, 15 bp, Homo sapiens
gtacattcatcctca

SEQ ID NO: 990895 - DNA, 15 bp, Homo sapiens
tacattcatcctcac

SEQ ID NO: 990896 - DNA, 15 bp, Homo sapiens
acattcatcctcaca

SEQ ID NO: 990897 - DNA, 15 bp, Homo sapiens
cattcatcctcacag

SEQ ID NO: 990898 - DNA, 15 bp, Homo sapiens
attcatcctcacaga

SEQ ID NO: 990899 - DNA, 15 bp, Homo sapiens
ttcatcctcacagat

SEQ ID NO: 990900 - DNA, 15 bp, Homo sapiens
tcatcctcacagatt

SEQ ID NO: 990901 - DNA, 15 bp, Homo sapiens
catcctcacagattg

SEQ ID NO: 990902 - DNA, 15 bp, Homo sapiens
atcctcacagattgc

SEQ ID NO: 990903 - DNA, 15 bp, Homo sapiens
tcctcacagattgca

SEQ ID NO: 990904 - DNA, 15 bp, Homo sapiens
cctcacagattgcaa

SEQ ID NO: 990905 - DNA, 15 bp, Homo sapiens
ctcacagattgcaaa

SEQ ID NO: 990906 - DNA, 15 bp, Homo sapiens
tcacagattgcaaag

SEQ ID NO: 990907 - DNA, 15 bp, Homo sapiens
cacagattgcaaagg

SEQ ID NO: 990908 - DNA, 15 bp, Homo sapiens
acagattgcaaaggt

SEQ ID NO: 990909 - DNA, 15 bp, Homo sapiens
cagattgcaaaggtg

SEQ ID NO: 990910 - DNA, 15 bp, Homo sapiens
agattgcaaaggtga

SEQ ID NO: 990911 - DNA, 15 bp, Homo sapiens
gattgcaaaggtgat

SEQ ID NO: 990912 - DNA, 15 bp, Homo sapiens
attgcaaaggtgatt

SEQ ID NO: 990913 - DNA, 15 bp, Homo sapiens
ttgcaaaggtgattt

SEQ ID NO: 990914 - DNA, 15 bp, Homo sapiens
tgcaaaggtgatttg

SEQ ID NO: 990915 - DNA, 15 bp, Homo sapiens
gcaaaggtgatttgg

SEQ ID NO: 990916 - DNA, 15 bp, Homo sapiens
caaaggtgatttggg

SEQ ID NO: 990917 - DNA, 15 bp, Homo sapiens
aaaggtgatttgggt

SEQ ID NO: 990918 - DNA, 15 bp, Homo sapiens
aaggtgatttgggtg

SEQ ID NO: 990919 - DNA, 15 bp, Homo sapiens
aggtgatttgggtgg

SEQ ID NO: 990920 - DNA, 15 bp, Homo sapiens
ggtgatttgggtggg

SEQ ID NO: 990921 - DNA, 15 bp, Homo sapiens
gtgatttgggtgggg

SEQ ID NO: 990922 - DNA, 15 bp, Homo sapiens
tgatttgggtggggg

SEQ ID NO: 990923 - DNA, 15 bp, Homo sapiens
gatttgggtgggggt

SEQ ID NO: 990924 - DNA, 15 bp, Homo sapiens
atttgggtgggggtt

SEQ ID NO: 990925 - DNA, 15 bp, Homo sapiens
tttgggtgggggttt

SEQ ID NO: 990926 - DNA, 15 bp, Homo sapiens
ttgggtgggggttta

SEQ ID NO: 990927 - DNA, 15 bp, Homo sapiens
tgggtgggggtttag

SEQ ID NO: 990928 - DNA, 15 bp, Homo sapiens
gggtgggggtttagt

SEQ ID NO: 990929 - DNA, 15 bp, Homo sapiens
ggtgggggtttagta

SEQ ID NO: 990930 - DNA, 15 bp, Homo sapiens
gtgggggtttagtaa

SEQ ID NO: 990931 - DNA, 15 bp, Homo sapiens
tgggggtttagtaat

SEQ ID NO: 990932 - DNA, 15 bp, Homo sapiens
gggggtttagtaatt

SEQ ID NO: 990933 - DNA, 15 bp, Homo sapiens
ggggtttagtaattt

SEQ ID NO: 990934 - DNA, 15 bp, Homo sapiens
gggtttagtaatttt

SEQ ID NO: 990935 - DNA, 15 bp, Homo sapiens
ggtttagtaattttc

SEQ ID NO: 990936 - DNA, 15 bp, Homo sapiens
gtttagtaattttct

SEQ ID NO: 990937 - DNA, 15 bp, Homo sapiens
tttagtaattttctg

SEQ ID NO: 990938 - DNA, 15 bp, Homo sapiens
ttagtaattttctgc

SEQ ID NO: 990939 - DNA, 15 bp, Homo sapiens
tagtaattttctgct

SEQ ID NO: 990940 - DNA, 15 bp, Homo sapiens
agtaattttctgctt

SEQ ID NO: 990941 - DNA, 15 bp, Homo sapiens
gtaattttctgctta

SEQ ID NO: 990942 - DNA, 15 bp, Homo sapiens
taattttctgcttaa

SEQ ID NO: 990943 - DNA, 15 bp, Homo sapiens
aattttctgcttaaa

SEQ ID NO: 990944 - DNA, 15 bp, Homo sapiens
attttctgcttaaaa

SEQ ID NO: 990945 - DNA, 15 bp, Homo sapiens
ttttctgcttaaaaa

SEQ ID NO: 990946 - DNA, 15 bp, Homo sapiens
tttctgcttaaaaaa

SEQ ID NO: 990947 - DNA, 15 bp, Homo sapiens
ttctgcttaaaaaat

SEQ ID NO: 990948 - DNA, 15 bp, Homo sapiens
tctgcttaaaaaatg

SEQ ID NO: 990949 - DNA, 15 bp, Homo sapiens
ctgcttaaaaaatga

SEQ ID NO: 990950 - DNA, 15 bp, Homo sapiens
tgcttaaaaaatgag

SEQ ID NO: 990951 - DNA, 15 bp, Homo sapiens
gcttaaaaaatgagt

SEQ ID NO: 990952 - DNA, 15 bp, Homo sapiens
cttaaaaaatgagta

SEQ ID NO: 990953 - DNA, 15 bp, Homo sapiens
ttaaaaaatgagtat

SEQ ID NO: 990954 - DNA, 15 bp, Homo sapiens
taaaaaatgagtatc

SEQ ID NO: 990955 - DNA, 15 bp, Homo sapiens
aaaaaatgagtatct

SEQ ID NO: 990956 - DNA, 15 bp, Homo sapiens
aaaaatgagtatctt

SEQ ID NO: 990957 - DNA, 15 bp, Homo sapiens
aaaatgagtatcttg

SEQ ID NO: 990958 - DNA, 15 bp, Homo sapiens
aaatgagtatcttgt

SEQ ID NO: 990959 - DNA, 15 bp, Homo sapiens
aatgagtatcttgta

SEQ ID NO: 990960 - DNA, 15 bp, Homo sapiens
atgagtatcttgtaa

SEQ ID NO: 990961 - DNA, 15 bp, Homo sapiens
tgagtatcttgtaac

SEQ ID NO: 990962 - DNA, 15 bp, Homo sapiens
gagtatcttgtaacc

SEQ ID NO: 990963 - DNA, 15 bp, Homo sapiens
agtatcttgtaacca

SEQ ID NO: 990964 - DNA, 15 bp, Homo sapiens
gtatcttgtaaccat

SEQ ID NO: 990965 - DNA, 15 bp, Homo sapiens
tatcttgtaaccatt

SEQ ID NO: 990966 - DNA, 15 bp, Homo sapiens
atcttgtaaccatta

SEQ ID NO: 990967 - DNA, 15 bp, Homo sapiens
tcttgtaaccattac

SEQ ID NO: 990968 - DNA, 15 bp, Homo sapiens
cttgtaaccattacc

SEQ ID NO: 990969 - DNA, 15 bp, Homo sapiens
ttgtaaccattacct

SEQ ID NO: 990970 - DNA, 15 bp, Homo sapiens
tgtaaccattaccta

SEQ ID NO: 990971 - DNA, 15 bp, Homo sapiens
gtaaccattacctat

SEQ ID NO: 990972 - DNA, 15 bp, Homo sapiens
taaccattacctata

SEQ ID NO: 990973 - DNA, 15 bp, Homo sapiens
aaccattacctatat

SEQ ID NO: 990974 - DNA, 15 bp, Homo sapiens
accattacctatatg

SEQ ID NO: 990975 - DNA, 15 bp, Homo sapiens
ccattacctatatgc

SEQ ID NO: 990976 - DNA, 15 bp, Homo sapiens
cattacctatatgct

SEQ ID NO: 990977 - DNA, 15 bp, Homo sapiens
attacctatatgcta

SEQ ID NO: 990978 - DNA, 15 bp, Homo sapiens
ttacctatatgctaa

SEQ ID NO: 990979 - DNA, 15 bp, Homo sapiens
tacctatatgctaaa

SEQ ID NO: 990980 - DNA, 15 bp, Homo sapiens
acctatatgctaaat

SEQ ID NO: 990981 - DNA, 15 bp, Homo sapiens
cctatatgctaaata

SEQ ID NO: 990982 - DNA, 15 bp, Homo sapiens
ctatatgctaaatat

SEQ ID NO: 990983 - DNA, 15 bp, Homo sapiens
tatatgctaaatatt

SEQ ID NO: 990984 - DNA, 15 bp, Homo sapiens
atatgctaaatattc

SEQ ID NO: 990985 - DNA, 15 bp, Homo sapiens
tatgctaaatattct

SEQ ID NO: 990986 - DNA, 15 bp, Homo sapiens
atgctaaatattctt

SEQ ID NO: 990987 - DNA, 15 bp, Homo sapiens
tgctaaatattcttg

SEQ ID NO: 990988 - DNA, 15 bp, Homo sapiens
gctaaatattcttga

SEQ ID NO: 990989 - DNA, 15 bp, Homo sapiens
ctaaatattcttgaa

SEQ ID NO: 990990 - DNA, 15 bp, Homo sapiens
taaatattcttgaac

SEQ ID NO: 990991 - DNA, 15 bp, Homo sapiens
aaatattcttgaaca

SEQ ID NO: 990992 - DNA, 15 bp, Homo sapiens
aatattcttgaacaa

SEQ ID NO: 990993 - DNA, 15 bp, Homo sapiens
atattcttgaacaat

SEQ ID NO: 990994 - DNA, 15 bp, Homo sapiens
tattcttgaacaatt

SEQ ID NO: 990995 - DNA, 15 bp, Homo sapiens
attcttgaacaatta

SEQ ID NO: 990996 - DNA, 15 bp, Homo sapiens
ttcttgaacaattag

SEQ ID NO: 990997 - DNA, 15 bp, Homo sapiens
tcttgaacaattagt

SEQ ID NO: 990998 - DNA, 15 bp, Homo sapiens
cttgaacaattagta

SEQ ID NO: 990999 - DNA, 15 bp, Homo sapiens
ttgaacaattagtag

SEQ ID NO: 991000 - DNA, 15 bp, Homo sapiens
tgaacaattagtaga

SEQ ID NO: 991001 - DNA, 15 bp, Homo sapiens
gaacaattagtagat

SEQ ID NO: 991002 - DNA, 15 bp, Homo sapiens
aacaattagtagatc

SEQ ID NO: 991003 - DNA, 15 bp, Homo sapiens
acaattagtagatcc

SEQ ID NO: 991004 - DNA, 15 bp, Homo sapiens
caattagtagatcca

SEQ ID NO: 991005 - DNA, 15 bp, Homo sapiens
aattagtagatccag

SEQ ID NO: 991006 - DNA, 15 bp, Homo sapiens
attagtagatccaga

SEQ ID NO: 991007 - DNA, 15 bp, Homo sapiens
ttagtagatccagaa

SEQ ID NO: 991008 - DNA, 15 bp, Homo sapiens
tagtagatccagaaa

SEQ ID NO: 991009 - DNA, 15 bp, Homo sapiens
agtagatccagaaag

SEQ ID NO: 991010 - DNA, 15 bp, Homo sapiens
gtagatccagaaaga

SEQ ID NO: 991011 - DNA, 15 bp, Homo sapiens
tagatccagaaagaa

SEQ ID NO: 991012 - DNA, 15 bp, Homo sapiens
agatccagaaagaaa

SEQ ID NO: 991013 - DNA, 15 bp, Homo sapiens
gatccagaaagaaaa

SEQ ID NO: 991014 - DNA, 15 bp, Homo sapiens
atccagaaagaaaaa

SEQ ID NO: 991015 - DNA, 15 bp, Homo sapiens
tccagaaagaaaaaa

SEQ ID NO: 991016 - DNA, 15 bp, Homo sapiens
ccagaaagaaaaaaa

SEQ ID NO: 991017 - DNA, 15 bp, Homo sapiens
cagaaagaaaaaaaa

SEQ ID NO: 991018 - DNA, 15 bp, Homo sapiens
agaaagaaaaaaaaa

SEQ ID NO: 991019 - DNA, 15 bp, Homo sapiens
gaaagaaaaaaaaat

SEQ ID NO: 991020 - DNA, 15 bp, Homo sapiens
aaagaaaaaaaaata

SEQ ID NO: 991021 - DNA, 15 bp, Homo sapiens
aagaaaaaaaaatat

SEQ ID NO: 991022 - DNA, 15 bp, Homo sapiens
agaaaaaaaaatatg

SEQ ID NO: 991023 - DNA, 15 bp, Homo sapiens
gaaaaaaaaatatgc

SEQ ID NO: 991024 - DNA, 15 bp, Homo sapiens
aaaaaaaaatatgct

SEQ ID NO: 991025 - DNA, 15 bp, Homo sapiens
aaaaaaaatatgctt

SEQ ID NO: 991026 - DNA, 15 bp, Homo sapiens
aaaaaaatatgcttt

SEQ ID NO: 991027 - DNA, 15 bp, Homo sapiens
aaaaaatatgctttc

SEQ ID NO: 991028 - DNA, 15 bp, Homo sapiens
aaaaatatgctttct

SEQ ID NO: 991029 - DNA, 15 bp, Homo sapiens
aaaatatgctttctc

SEQ ID NO: 991030 - DNA, 15 bp, Homo sapiens
aaatatgctttctct

SEQ ID NO: 991031 - DNA, 15 bp, Homo sapiens
aatatgctttctctg

SEQ ID NO: 991032 - DNA, 15 bp, Homo sapiens
atatgctttctctgt

SEQ ID NO: 991033 - DNA, 15 bp, Homo sapiens
tatgctttctctgtg

SEQ ID NO: 991034 - DNA, 15 bp, Homo sapiens
atgctttctctgtgt

SEQ ID NO: 991035 - DNA, 15 bp, Homo sapiens
tgctttctctgtgtg

SEQ ID NO: 991036 - DNA, 15 bp, Homo sapiens
gctttctctgtgtgt

SEQ ID NO: 991037 - DNA, 15 bp, Homo sapiens
ctttctctgtgtgtg

SEQ ID NO: 991038 - DNA, 15 bp, Homo sapiens
tttctctgtgtgtgt

SEQ ID NO: 991039 - DNA, 15 bp, Homo sapiens
ttctctgtgtgtgta

SEQ ID NO: 991040 - DNA, 15 bp, Homo sapiens
tctctgtgtgtgtac

SEQ ID NO: 991041 - DNA, 15 bp, Homo sapiens
ctctgtgtgtgtacc

SEQ ID NO: 991042 - DNA, 15 bp, Homo sapiens
tctgtgtgtgtacct

SEQ ID NO: 991043 - DNA, 15 bp, Homo sapiens
ctgtgtgtgtacctg

SEQ ID NO: 991044 - DNA, 15 bp, Homo sapiens
tgtgtgtgtacctgt

SEQ ID NO: 991045 - DNA, 15 bp, Homo sapiens
gtgtgtgtacctgtt

SEQ ID NO: 991046 - DNA, 15 bp, Homo sapiens
tgtgtgtacctgttg

SEQ ID NO: 991047 - DNA, 15 bp, Homo sapiens
gtgtgtacctgttgt

SEQ ID NO: 991048 - DNA, 15 bp, Homo sapiens
tgtgtacctgttgta

SEQ ID NO: 991049 - DNA, 15 bp, Homo sapiens
gtgtacctgttgtat

SEQ ID NO: 991050 - DNA, 15 bp, Homo sapiens
tgtacctgttgtatg

SEQ ID NO: 991051 - DNA, 15 bp, Homo sapiens
gtacctgttgtatgt

SEQ ID NO: 991052 - DNA, 15 bp, Homo sapiens
tacctgttgtatgtc

SEQ ID NO: 991053 - DNA, 15 bp, Homo sapiens
acctgttgtatgtcc

SEQ ID NO: 991054 - DNA, 15 bp, Homo sapiens
cctgttgtatgtcct

SEQ ID NO: 991055 - DNA, 15 bp, Homo sapiens
ctgttgtatgtccta

SEQ ID NO: 991056 - DNA, 15 bp, Homo sapiens
tgttgtatgtcctaa

SEQ ID NO: 991057 - DNA, 15 bp, Homo sapiens
gttgtatgtcctaaa

SEQ ID NO: 991058 - DNA, 15 bp, Homo sapiens
ttgtatgtcctaaac

SEQ ID NO: 991059 - DNA, 15 bp, Homo sapiens
tgtatgtcctaaact

SEQ ID NO: 991060 - DNA, 15 bp, Homo sapiens
gtatgtcctaaactt

SEQ ID NO: 991061 - DNA, 15 bp, Homo sapiens
tatgtcctaaactta

SEQ ID NO: 991062 - DNA, 15 bp, Homo sapiens
atgtcctaaacttat

SEQ ID NO: 991063 - DNA, 15 bp, Homo sapiens
tgtcctaaacttatt

SEQ ID NO: 991064 - DNA, 15 bp, Homo sapiens
gtcctaaacttatta

SEQ ID NO: 991065 - DNA, 15 bp, Homo sapiens
tcctaaacttattag

SEQ ID NO: 991066 - DNA, 15 bp, Homo sapiens
cctaaacttattaga

SEQ ID NO: 991067 - DNA, 15 bp, Homo sapiens
ctaaacttattagaa

SEQ ID NO: 991068 - DNA, 15 bp, Homo sapiens
taaacttattagaaa

SEQ ID NO: 991069 - DNA, 15 bp, Homo sapiens
aaacttattagaaaa

SEQ ID NO: 991070 - DNA, 15 bp, Homo sapiens
aacttattagaaaat

SEQ ID NO: 991071 - DNA, 15 bp, Homo sapiens
acttattagaaaatt

SEQ ID NO: 991072 - DNA, 15 bp, Homo sapiens
cttattagaaaattt

SEQ ID NO: 991073 - DNA, 15 bp, Homo sapiens
ttattagaaaatttt

SEQ ID NO: 991074 - DNA, 15 bp, Homo sapiens
tattagaaaatttta

SEQ ID NO: 991075 - DNA, 15 bp, Homo sapiens
attagaaaattttat

SEQ ID NO: 991076 - DNA, 15 bp, Homo sapiens
ttagaaaattttata

SEQ ID NO: 991077 - DNA, 15 bp, Homo sapiens
tagaaaattttatat

SEQ ID NO: 991078 - DNA, 15 bp, Homo sapiens
agaaaattttatata

SEQ ID NO: 991079 - DNA, 15 bp, Homo sapiens
gaaaattttatatac

SEQ ID NO: 991080 - DNA, 15 bp, Homo sapiens
aaaattttatatact

SEQ ID NO: 991081 - DNA, 15 bp, Homo sapiens
aaattttatatactt

SEQ ID NO: 991082 - DNA, 15 bp, Homo sapiens
aattttatatacttt

SEQ ID NO: 991083 - DNA, 15 bp, Homo sapiens
attttatatactttt

SEQ ID NO: 991084 - DNA, 15 bp, Homo sapiens
ttttatatacttttt

SEQ ID NO: 991085 - DNA, 15 bp, Homo sapiens
tttatatactttttt

SEQ ID NO: 991086 - DNA, 15 bp, Homo sapiens
ttatatactttttta

SEQ ID NO: 991087 - DNA, 15 bp, Homo sapiens
tatatacttttttac

SEQ ID NO: 991088 - DNA, 15 bp, Homo sapiens
atatacttttttaca

SEQ ID NO: 991089 - DNA, 15 bp, Homo sapiens
tatacttttttacat

SEQ ID NO: 991090 - DNA, 15 bp, Homo sapiens
atacttttttacatg

SEQ ID NO: 991091 - DNA, 15 bp, Homo sapiens
tacttttttacatgt

SEQ ID NO: 991092 - DNA, 15 bp, Homo sapiens
acttttttacatgtt

SEQ ID NO: 991093 - DNA, 15 bp, Homo sapiens
cttttttacatgttg

SEQ ID NO: 991094 - DNA, 15 bp, Homo sapiens
ttttttacatgttgg

SEQ ID NO: 991095 - DNA, 15 bp, Homo sapiens
tttttacatgttggg

SEQ ID NO: 991096 - DNA, 15 bp, Homo sapiens
ttttacatgttgggg

SEQ ID NO: 991097 - DNA, 15 bp, Homo sapiens
tttacatgttggggg

SEQ ID NO: 991098 - DNA, 15 bp, Homo sapiens
ttacatgttgggggg

SEQ ID NO: 991099 - DNA, 15 bp, Homo sapiens
tacatgttggggggc

SEQ ID NO: 991100 - DNA, 15 bp, Homo sapiens
acatgttggggggca

SEQ ID NO: 991101 - DNA, 15 bp, Homo sapiens
catgttggggggcag

SEQ ID NO: 991102 - DNA, 15 bp, Homo sapiens
atgttggggggcaga

SEQ ID NO: 991103 - DNA, 15 bp, Homo sapiens
tgttggggggcagaa

SEQ ID NO: 991104 - DNA, 15 bp, Homo sapiens
gttggggggcagaag

SEQ ID NO: 991105 - DNA, 15 bp, Homo sapiens
ttggggggcagaagg

SEQ ID NO: 991106 - DNA, 15 bp, Homo sapiens
tggggggcagaaggt

SEQ ID NO: 991107 - DNA, 15 bp, Homo sapiens
ggggggcagaaggta

SEQ ID NO: 991108 - DNA, 15 bp, Homo sapiens
gggggcagaaggtaa

SEQ ID NO: 991109 - DNA, 15 bp, Homo sapiens
ggggcagaaggtaaa

SEQ ID NO: 991110 - DNA, 15 bp, Homo sapiens
gggcagaaggtaaag

SEQ ID NO: 991111 - DNA, 15 bp, Homo sapiens
ggcagaaggtaaagc

SEQ ID NO: 991112 - DNA, 15 bp, Homo sapiens
gcagaaggtaaagcc

SEQ ID NO: 991113 - DNA, 15 bp, Homo sapiens
cagaaggtaaagcca

SEQ ID NO: 991114 - DNA, 15 bp, Homo sapiens
agaaggtaaagccat

SEQ ID NO: 991115 - DNA, 15 bp, Homo sapiens
gaaggtaaagccatg

SEQ ID NO: 991116 - DNA, 15 bp, Homo sapiens
aaggtaaagccatgt

SEQ ID NO: 991117 - DNA, 15 bp, Homo sapiens
aggtaaagccatgtt

SEQ ID NO: 991118 - DNA, 15 bp, Homo sapiens
ggtaaagccatgttt

SEQ ID NO: 991119 - DNA, 15 bp, Homo sapiens
gtaaagccatgtttt

SEQ ID NO: 991120 - DNA, 15 bp, Homo sapiens
taaagccatgttttg

SEQ ID NO: 991121 - DNA, 15 bp, Homo sapiens
aaagccatgttttga

SEQ ID NO: 991122 - DNA, 15 bp, Homo sapiens
aagccatgttttgac

SEQ ID NO: 991123 - DNA, 15 bp, Homo sapiens
agccatgttttgact

SEQ ID NO: 991124 - DNA, 15 bp, Homo sapiens
gccatgttttgactt

SEQ ID NO: 991125 - DNA, 15 bp, Homo sapiens
ccatgttttgacttg

SEQ ID NO: 991126 - DNA, 15 bp, Homo sapiens
catgttttgacttgg

SEQ ID NO: 991127 - DNA, 15 bp, Homo sapiens
atgttttgacttggt

SEQ ID NO: 991128 - DNA, 15 bp, Homo sapiens
tgttttgacttggtg

SEQ ID NO: 991129 - DNA, 15 bp, Homo sapiens
gttttgacttggtga

SEQ ID NO: 991130 - DNA, 15 bp, Homo sapiens
ttttgacttggtgaa

SEQ ID NO: 991131 - DNA, 15 bp, Homo sapiens
tttgacttggtgaaa

SEQ ID NO: 991132 - DNA, 15 bp, Homo sapiens
ttgacttggtgaaaa

SEQ ID NO: 991133 - DNA, 15 bp, Homo sapiens
tgacttggtgaaaat

SEQ ID NO: 991134 - DNA, 15 bp, Homo sapiens
gacttggtgaaaatg

SEQ ID NO: 991135 - DNA, 15 bp, Homo sapiens
acttggtgaaaatgg

SEQ ID NO: 991136 - DNA, 15 bp, Homo sapiens
cttggtgaaaatggg

SEQ ID NO: 991137 - DNA, 15 bp, Homo sapiens
ttggtgaaaatggga

SEQ ID NO: 991138 - DNA, 15 bp, Homo sapiens
tggtgaaaatgggat

SEQ ID NO: 991139 - DNA, 15 bp, Homo sapiens
ggtgaaaatgggatt

SEQ ID NO: 991140 - DNA, 15 bp, Homo sapiens
gtgaaaatgggattg

SEQ ID NO: 991141 - DNA, 15 bp, Homo sapiens
tgaaaatgggattgt

SEQ ID NO: 991142 - DNA, 15 bp, Homo sapiens
gaaaatgggattgtc

SEQ ID NO: 991143 - DNA, 15 bp, Homo sapiens
aaaatgggattgtca

SEQ ID NO: 991144 - DNA, 15 bp, Homo sapiens
aaatgggattgtcaa

SEQ ID NO: 991145 - DNA, 15 bp, Homo sapiens
aatgggattgtcaaa

SEQ ID NO: 991146 - DNA, 15 bp, Homo sapiens
atgggattgtcaaac

SEQ ID NO: 991147 - DNA, 15 bp, Homo sapiens
tgggattgtcaaaca

SEQ ID NO: 991148 - DNA, 15 bp, Homo sapiens
gggattgtcaaacag

SEQ ID NO: 991149 - DNA, 15 bp, Homo sapiens
ggattgtcaaacagc

SEQ ID NO: 991150 - DNA, 15 bp, Homo sapiens
gattgtcaaacagcc

SEQ ID NO: 991151 - DNA, 15 bp, Homo sapiens
attgtcaaacagccc

SEQ ID NO: 991152 - DNA, 15 bp, Homo sapiens
ttgtcaaacagccca

SEQ ID NO: 991153 - DNA, 15 bp, Homo sapiens
tgtcaaacagcccat

SEQ ID NO: 991154 - DNA, 15 bp, Homo sapiens
gtcaaacagcccatt

SEQ ID NO: 991155 - DNA, 15 bp, Homo sapiens
tcaaacagcccatta

SEQ ID NO: 991156 - DNA, 15 bp, Homo sapiens
caaacagcccattaa

SEQ ID NO: 991157 - DNA, 15 bp, Homo sapiens
aaacagcccattaag

SEQ ID NO: 991158 - DNA, 15 bp, Homo sapiens
aacagcccattaagt

SEQ ID NO: 991159 - DNA, 15 bp, Homo sapiens
acagcccattaagtt

SEQ ID NO: 991160 - DNA, 15 bp, Homo sapiens
cagcccattaagttc

SEQ ID NO: 991161 - DNA, 15 bp, Homo sapiens
agcccattaagttcc

SEQ ID NO: 991162 - DNA, 15 bp, Homo sapiens
gcccattaagttccc

SEQ ID NO: 991163 - DNA, 15 bp, Homo sapiens
cccattaagttccct

SEQ ID NO: 991164 - DNA, 15 bp, Homo sapiens
ccattaagttccctg

SEQ ID NO: 991165 - DNA, 15 bp, Homo sapiens
cattaagttccctgg

SEQ ID NO: 991166 - DNA, 15 bp, Homo sapiens
attaagttccctggt

SEQ ID NO: 991167 - DNA, 15 bp, Homo sapiens
ttaagttccctggta

SEQ ID NO: 991168 - DNA, 15 bp, Homo sapiens
taagttccctggtat

SEQ ID NO: 991169 - DNA, 15 bp, Homo sapiens
aagttccctggtatt

SEQ ID NO: 991170 - DNA, 15 bp, Homo sapiens
agttccctggtattt

SEQ ID NO: 991171 - DNA, 15 bp, Homo sapiens
gttccctggtatttc

SEQ ID NO: 991172 - DNA, 15 bp, Homo sapiens
ttccctggtatttca

SEQ ID NO: 991173 - DNA, 15 bp, Homo sapiens
tccctggtatttcac

SEQ ID NO: 991174 - DNA, 15 bp, Homo sapiens
ccctggtatttcacc

SEQ ID NO: 991175 - DNA, 15 bp, Homo sapiens
cctggtatttcacct

SEQ ID NO: 991176 - DNA, 15 bp, Homo sapiens
ctggtatttcacctt

SEQ ID NO: 991177 - DNA, 15 bp, Homo sapiens
tggtatttcaccttc

SEQ ID NO: 991178 - DNA, 15 bp, Homo sapiens
ggtatttcaccttcc

SEQ ID NO: 991179 - DNA, 15 bp, Homo sapiens
gtatttcaccttcct

SEQ ID NO: 991180 - DNA, 15 bp, Homo sapiens
tatttcaccttcctg

SEQ ID NO: 991181 - DNA, 15 bp, Homo sapiens
atttcaccttcctgt

SEQ ID NO: 991182 - DNA, 15 bp, Homo sapiens
tttcaccttcctgtc

SEQ ID NO: 991183 - DNA, 15 bp, Homo sapiens
ttcaccttcctgtcc

SEQ ID NO: 991184 - DNA, 15 bp, Homo sapiens
tcaccttcctgtcca

SEQ ID NO: 991185 - DNA, 15 bp, Homo sapiens
caccttcctgtccat

SEQ ID NO: 991186 - DNA, 15 bp, Homo sapiens
accttcctgtccatc

SEQ ID NO: 991187 - DNA, 15 bp, Homo sapiens
ccttcctgtccatct

SEQ ID NO: 991188 - DNA, 15 bp, Homo sapiens
cttcctgtccatctg

SEQ ID NO: 991189 - DNA, 15 bp, Homo sapiens
ttcctgtccatctgt

SEQ ID NO: 991190 - DNA, 15 bp, Homo sapiens
tcctgtccatctgtc

SEQ ID NO: 991191 - DNA, 15 bp, Homo sapiens
cctgtccatctgtcc

SEQ ID NO: 991192 - DNA, 15 bp, Homo sapiens
ctgtccatctgtccc

SEQ ID NO: 991193 - DNA, 15 bp, Homo sapiens
tgtccatctgtcccc

SEQ ID NO: 991194 - DNA, 15 bp, Homo sapiens
gtccatctgtcccct

SEQ ID NO: 991195 - DNA, 15 bp, Homo sapiens
tccatctgtcccctc

SEQ ID NO: 991196 - DNA, 15 bp, Homo sapiens
ccatctgtcccctcc

SEQ ID NO: 991197 - DNA, 15 bp, Homo sapiens
catctgtcccctccc

SEQ ID NO: 991198 - DNA, 15 bp, Homo sapiens
atctgtcccctccct

SEQ ID NO: 991199 - DNA, 15 bp, Homo sapiens
tctgtcccctccctc

SEQ ID NO: 991200 - DNA, 15 bp, Homo sapiens
ctgtcccctccctcc

SEQ ID NO: 991201 - DNA, 15 bp, Homo sapiens
tgtcccctccctccg

SEQ ID NO: 991202 - DNA, 15 bp, Homo sapiens
gtcccctccctccgg

SEQ ID NO: 991203 - DNA, 15 bp, Homo sapiens
tcccctccctccggt

SEQ ID NO: 991204 - DNA, 15 bp, Homo sapiens
cccctccctccggta

SEQ ID NO: 991205 - DNA, 15 bp, Homo sapiens
ccctccctccggtat

SEQ ID NO: 991206 - DNA, 15 bp, Homo sapiens
cctccctccggtata

SEQ ID NO: 991207 - DNA, 15 bp, Homo sapiens
ctccctccggtatac

SEQ ID NO: 991208 - DNA, 15 bp, Homo sapiens
tccctccggtatacc

SEQ ID NO: 991209 - DNA, 15 bp, Homo sapiens
ccctccggtatacct

SEQ ID NO: 991210 - DNA, 15 bp, Homo sapiens
cctccggtatacctt

SEQ ID NO: 991211 - DNA, 15 bp, Homo sapiens
ctccggtataccttt

SEQ ID NO: 991212 - DNA, 15 bp, Homo sapiens
tccggtataccttta

SEQ ID NO: 991213 - DNA, 15 bp, Homo sapiens
ccggtatacctttat

SEQ ID NO: 991214 - DNA, 15 bp, Homo sapiens
cggtatacctttatc

SEQ ID NO: 991215 - DNA, 15 bp, Homo sapiens
ggtatacctttatcc

SEQ ID NO: 991216 - DNA, 15 bp, Homo sapiens
gtatacctttatccc

SEQ ID NO: 991217 - DNA, 15 bp, Homo sapiens
tatacctttatccct

SEQ ID NO: 991218 - DNA, 15 bp, Homo sapiens
atacctttatccctt

SEQ ID NO: 991219 - DNA, 15 bp, Homo sapiens
tacctttatcccttt

SEQ ID NO: 991220 - DNA, 15 bp, Homo sapiens
acctttatccctttg

SEQ ID NO: 991221 - DNA, 15 bp, Homo sapiens
cctttatccctttga

SEQ ID NO: 991222 - DNA, 15 bp, Homo sapiens
ctttatccctttgaa

SEQ ID NO: 991223 - DNA, 15 bp, Homo sapiens
tttatccctttgaaa

SEQ ID NO: 991224 - DNA, 15 bp, Homo sapiens
ttatccctttgaaag

SEQ ID NO: 991225 - DNA, 15 bp, Homo sapiens
tatccctttgaaagg

SEQ ID NO: 991226 - DNA, 15 bp, Homo sapiens
atccctttgaaaggg

SEQ ID NO: 991227 - DNA, 15 bp, Homo sapiens
tccctttgaaagggt

SEQ ID NO: 991228 - DNA, 15 bp, Homo sapiens
ccctttgaaagggtg

SEQ ID NO: 991229 - DNA, 15 bp, Homo sapiens
cctttgaaagggtgc

SEQ ID NO: 991230 - DNA, 15 bp, Homo sapiens
ctttgaaagggtgct

SEQ ID NO: 991231 - DNA, 15 bp, Homo sapiens
tttgaaagggtgctt

SEQ ID NO: 991232 - DNA, 15 bp, Homo sapiens
ttgaaagggtgcttg

SEQ ID NO: 991233 - DNA, 15 bp, Homo sapiens
tgaaagggtgcttgt

SEQ ID NO: 991234 - DNA, 15 bp, Homo sapiens
gaaagggtgcttgta

SEQ ID NO: 991235 - DNA, 15 bp, Homo sapiens
aaagggtgcttgtac

SEQ ID NO: 991236 - DNA, 15 bp, Homo sapiens
aagggtgcttgtaca

SEQ ID NO: 991237 - DNA, 15 bp, Homo sapiens
agggtgcttgtacaa

SEQ ID NO: 991238 - DNA, 15 bp, Homo sapiens
gggtgcttgtacaat

SEQ ID NO: 991239 - DNA, 15 bp, Homo sapiens
ggtgcttgtacaatt

SEQ ID NO: 991240 - DNA, 15 bp, Homo sapiens
gtgcttgtacaattt

SEQ ID NO: 991241 - DNA, 15 bp, Homo sapiens
tgcttgtacaatttg

SEQ ID NO: 991242 - DNA, 15 bp, Homo sapiens
gcttgtacaatttga

SEQ ID NO: 991243 - DNA, 15 bp, Homo sapiens
cttgtacaatttgat

SEQ ID NO: 991244 - DNA, 15 bp, Homo sapiens
ttgtacaatttgata

SEQ ID NO: 991245 - DNA, 15 bp, Homo sapiens
tgtacaatttgatat

SEQ ID NO: 991246 - DNA, 15 bp, Homo sapiens
gtacaatttgatata

SEQ ID NO: 991247 - DNA, 15 bp, Homo sapiens
tacaatttgatatat

SEQ ID NO: 991248 - DNA, 15 bp, Homo sapiens
acaatttgatatatt

SEQ ID NO: 991249 - DNA, 15 bp, Homo sapiens
caatttgatatattt

SEQ ID NO: 991250 - DNA, 15 bp, Homo sapiens
aatttgatatatttt

SEQ ID NO: 991251 - DNA, 15 bp, Homo sapiens
atttgatatatttta

SEQ ID NO: 991252 - DNA, 15 bp, Homo sapiens
tttgatatattttat

SEQ ID NO: 991253 - DNA, 15 bp, Homo sapiens
ttgatatattttatt

SEQ ID NO: 991254 - DNA, 15 bp, Homo sapiens
tgatatattttattg

SEQ ID NO: 991255 - DNA, 15 bp, Homo sapiens
gatatattttattga

SEQ ID NO: 991256 - DNA, 15 bp, Homo sapiens
atatattttattgaa

SEQ ID NO: 991257 - DNA, 15 bp, Homo sapiens
tatattttattgaag

SEQ ID NO: 991258 - DNA, 15 bp, Homo sapiens
atattttattgaaga

SEQ ID NO: 991259 - DNA, 15 bp, Homo sapiens
tattttattgaagag

SEQ ID NO: 991260 - DNA, 15 bp, Homo sapiens
attttattgaagagt

SEQ ID NO: 991261 - DNA, 15 bp, Homo sapiens
ttttattgaagagtt

SEQ ID NO: 991262 - DNA, 15 bp, Homo sapiens
tttattgaagagtta

SEQ ID NO: 991263 - DNA, 15 bp, Homo sapiens
ttattgaagagttat

SEQ ID NO: 991264 - DNA, 15 bp, Homo sapiens
tattgaagagttatc

SEQ ID NO: 991265 - DNA, 15 bp, Homo sapiens
attgaagagttatct

SEQ ID NO: 991266 - DNA, 15 bp, Homo sapiens
ttgaagagttatctc

SEQ ID NO: 991267 - DNA, 15 bp, Homo sapiens
tgaagagttatctct

SEQ ID NO: 991268 - DNA, 15 bp, Homo sapiens
gaagagttatctctt

SEQ ID NO: 991269 - DNA, 15 bp, Homo sapiens
aagagttatctctta

SEQ ID NO: 991270 - DNA, 15 bp, Homo sapiens
agagttatctcttat

SEQ ID NO: 991271 - DNA, 15 bp, Homo sapiens
gagttatctcttatt

SEQ ID NO: 991272 - DNA, 15 bp, Homo sapiens
agttatctcttattc

SEQ ID NO: 991273 - DNA, 15 bp, Homo sapiens
gttatctcttattct

SEQ ID NO: 991274 - DNA, 15 bp, Homo sapiens
ttatctcttattctg

SEQ ID NO: 991275 - DNA, 15 bp, Homo sapiens
tatctcttattctga

SEQ ID NO: 991276 - DNA, 15 bp, Homo sapiens
atctcttattctgaa

SEQ ID NO: 991277 - DNA, 15 bp, Homo sapiens
tctcttattctgaat

SEQ ID NO: 991278 - DNA, 15 bp, Homo sapiens
ctcttattctgaatt

SEQ ID NO: 991279 - DNA, 15 bp, Homo sapiens
tcttattctgaatta

SEQ ID NO: 991280 - DNA, 15 bp, Homo sapiens
cttattctgaattaa

SEQ ID NO: 991281 - DNA, 15 bp, Homo sapiens
ttattctgaattaaa

SEQ ID NO: 991282 - DNA, 15 bp, Homo sapiens
tattctgaattaaat

SEQ ID NO: 991283 - DNA, 15 bp, Homo sapiens
attctgaattaaatt

SEQ ID NO: 991284 - DNA, 15 bp, Homo sapiens
ttctgaattaaatta

SEQ ID NO: 991285 - DNA, 15 bp, Homo sapiens
tctgaattaaattaa

SEQ ID NO: 991286 - DNA, 15 bp, Homo sapiens
ctgaattaaattaag

SEQ ID NO: 991287 - DNA, 15 bp, Homo sapiens
tgaattaaattaagc

SEQ ID NO: 991288 - DNA, 15 bp, Homo sapiens
gaattaaattaagca

SEQ ID NO: 991289 - DNA, 15 bp, Homo sapiens
aattaaattaagcat

SEQ ID NO: 991290 - DNA, 15 bp, Homo sapiens
attaaattaagcatt

SEQ ID NO: 991291 - DNA, 15 bp, Homo sapiens
ttaaattaagcattt

SEQ ID NO: 991292 - DNA, 15 bp, Homo sapiens
taaattaagcatttg

SEQ ID NO: 991293 - DNA, 15 bp, Homo sapiens
aaattaagcatttgt

SEQ ID NO: 991294 - DNA, 15 bp, Homo sapiens
aattaagcatttgtt

SEQ ID NO: 991295 - DNA, 15 bp, Homo sapiens
attaagcatttgttt

SEQ ID NO: 991296 - DNA, 15 bp, Homo sapiens
ttaagcatttgtttt

SEQ ID NO: 991297 - DNA, 15 bp, Homo sapiens
taagcatttgtttta

SEQ ID NO: 991298 - DNA, 15 bp, Homo sapiens
aagcatttgttttat

SEQ ID NO: 991299 - DNA, 15 bp, Homo sapiens
agcatttgttttatt

SEQ ID NO: 991300 - DNA, 15 bp, Homo sapiens
gcatttgttttattg

SEQ ID NO: 991301 - DNA, 15 bp, Homo sapiens
catttgttttattgc

SEQ ID NO: 991302 - DNA, 15 bp, Homo sapiens
atttgttttattgca

SEQ ID NO: 991303 - DNA, 15 bp, Homo sapiens
tttgttttattgcag

SEQ ID NO: 991304 - DNA, 15 bp, Homo sapiens
ttgttttattgcagt

SEQ ID NO: 991305 - DNA, 15 bp, Homo sapiens
tgttttattgcagta

SEQ ID NO: 991306 - DNA, 15 bp, Homo sapiens
gttttattgcagtaa

SEQ ID NO: 991307 - DNA, 15 bp, Homo sapiens
ttttattgcagtaaa

SEQ ID NO: 991308 - DNA, 15 bp, Homo sapiens
tttattgcagtaaag

SEQ ID NO: 991309 - DNA, 15 bp, Homo sapiens
ttattgcagtaaagt

SEQ ID NO: 991310 - DNA, 15 bp, Homo sapiens
tattgcagtaaagtt

SEQ ID NO: 991311 - DNA, 15 bp, Homo sapiens
attgcagtaaagttt

SEQ ID NO: 991312 - DNA, 15 bp, Homo sapiens
ttgcagtaaagtttg

SEQ ID NO: 991313 - DNA, 15 bp, Homo sapiens
tgcagtaaagtttgt

SEQ ID NO: 991314 - DNA, 15 bp, Homo sapiens
gcagtaaagtttgtc

SEQ ID NO: 991315 - DNA, 15 bp, Homo sapiens
cagtaaagtttgtcc

SEQ ID NO: 991316 - DNA, 15 bp, Homo sapiens
agtaaagtttgtcca

SEQ ID NO: 991317 - DNA, 15 bp, Homo sapiens
gtaaagtttgtccaa

SEQ ID NO: 991318 - DNA, 15 bp, Homo sapiens
taaagtttgtccaaa

SEQ ID NO: 991319 - DNA, 15 bp, Homo sapiens
aaagtttgtccaaac

SEQ ID NO: 991320 - DNA, 15 bp, Homo sapiens
aagtttgtccaaact

SEQ ID NO: 991321 - DNA, 15 bp, Homo sapiens
agtttgtccaaactc

SEQ ID NO: 991322 - DNA, 15 bp, Homo sapiens
gtttgtccaaactca

SEQ ID NO: 991323 - DNA, 15 bp, Homo sapiens
tttgtccaaactcac

SEQ ID NO: 991324 - DNA, 15 bp, Homo sapiens
ttgtccaaactcaca

SEQ ID NO: 991325 - DNA, 15 bp, Homo sapiens
tgtccaaactcacaa

SEQ ID NO: 991326 - DNA, 15 bp, Homo sapiens
gtccaaactcacaat

SEQ ID NO: 991327 - DNA, 15 bp, Homo sapiens
tccaaactcacaatt

SEQ ID NO: 991328 - DNA, 15 bp, Homo sapiens
ccaaactcacaatta

SEQ ID NO: 991329 - DNA, 15 bp, Homo sapiens
caaactcacaattat

SEQ ID NO: 991330 - DNA, 15 bp, Homo sapiens
aaactcacaattatt

SEQ ID NO: 991331 - DNA, 15 bp, Homo sapiens
aactcacaattattt

SEQ ID NO: 991332 - DNA, 15 bp, Homo sapiens
actcacaattatttt

SEQ ID NO: 991333 - DNA, 15 bp, Homo sapiens
ctcacaattatttta

SEQ ID NO: 991334 - DNA, 15 bp, Homo sapiens
tcacaattattttaa

SEQ ID NO: 991335 - DNA, 15 bp, Homo sapiens
cacaattattttaag

SEQ ID NO: 991336 - DNA, 15 bp, Homo sapiens
acaattattttaaga

SEQ ID NO: 991337 - DNA, 15 bp, Homo sapiens
caattattttaagag

SEQ ID NO: 991338 - DNA, 15 bp, Homo sapiens
aattattttaagagg

SEQ ID NO: 991339 - DNA, 15 bp, Homo sapiens
attattttaagaggt

SEQ ID NO: 991340 - DNA, 15 bp, Homo sapiens
ttattttaagaggtg

SEQ ID NO: 991341 - DNA, 15 bp, Homo sapiens
tattttaagaggtgt

SEQ ID NO: 991342 - DNA, 15 bp, Homo sapiens
attttaagaggtgtt

SEQ ID NO: 991343 - DNA, 15 bp, Homo sapiens
ttttaagaggtgttc

SEQ ID NO: 991344 - DNA, 15 bp, Homo sapiens
tttaagaggtgttct

SEQ ID NO: 991345 - DNA, 15 bp, Homo sapiens
ttaagaggtgttctc

SEQ ID NO: 991346 - DNA, 15 bp, Homo sapiens
taagaggtgttctct

SEQ ID NO: 991347 - DNA, 15 bp, Homo sapiens
aagaggtgttctctg

SEQ ID NO: 991348 - DNA, 15 bp, Homo sapiens
agaggtgttctctgt

SEQ ID NO: 991349 - DNA, 15 bp, Homo sapiens
gaggtgttctctgtt

SEQ ID NO: 991350 - DNA, 15 bp, Homo sapiens
aggtgttctctgttc

SEQ ID NO: 991351 - DNA, 15 bp, Homo sapiens
ggtgttctctgttct

SEQ ID NO: 991352 - DNA, 15 bp, Homo sapiens
gtgttctctgttctt

SEQ ID NO: 991353 - DNA, 15 bp, Homo sapiens
tgttctctgttctta

SEQ ID NO: 991354 - DNA, 15 bp, Homo sapiens
gttctctgttcttag

SEQ ID NO: 991355 - DNA, 15 bp, Homo sapiens
ttctctgttcttagc

SEQ ID NO: 991356 - DNA, 15 bp, Homo sapiens
tctctgttcttagct

SEQ ID NO: 991357 - DNA, 15 bp, Homo sapiens
ctctgttcttagctg

SEQ ID NO: 991358 - DNA, 15 bp, Homo sapiens
tctgttcttagctgg

SEQ ID NO: 991359 - DNA, 15 bp, Homo sapiens
ctgttcttagctggg

SEQ ID NO: 991360 - DNA, 15 bp, Homo sapiens
tgttcttagctgggc

SEQ ID NO: 991361 - DNA, 15 bp, Homo sapiens
gttcttagctgggct

SEQ ID NO: 991362 - DNA, 15 bp, Homo sapiens
ttcttagctgggctt

SEQ ID NO: 991363 - DNA, 15 bp, Homo sapiens
tcttagctgggctta

SEQ ID NO: 991364 - DNA, 15 bp, Homo sapiens
cttagctgggcttag

SEQ ID NO: 991365 - DNA, 15 bp, Homo sapiens
ttagctgggcttagc

SEQ ID NO: 991366 - DNA, 15 bp, Homo sapiens
tagctgggcttagct

SEQ ID NO: 991367 - DNA, 15 bp, Homo sapiens
agctgggcttagctc

SEQ ID NO: 991368 - DNA, 15 bp, Homo sapiens
gctgggcttagctcg

SEQ ID NO: 991369 - DNA, 15 bp, Homo sapiens
ctgggcttagctcga

SEQ ID NO: 991370 - DNA, 15 bp, Homo sapiens
tgggcttagctcgaa

SEQ ID NO: 991371 - DNA, 15 bp, Homo sapiens
gggcttagctcgaaa

SEQ ID NO: 991372 - DNA, 15 bp, Homo sapiens
ggcttagctcgaaag

SEQ ID NO: 991373 - DNA, 15 bp, Homo sapiens
gcttagctcgaaagt

SEQ ID NO: 991374 - DNA, 15 bp, Homo sapiens
cttagctcgaaagtg

SEQ ID NO: 991375 - DNA, 15 bp, Homo sapiens
ttagctcgaaagtgc

SEQ ID NO: 991376 - DNA, 15 bp, Homo sapiens
tagctcgaaagtgct

SEQ ID NO: 991377 - DNA, 15 bp, Homo sapiens
agctcgaaagtgcta

SEQ ID NO: 991378 - DNA, 15 bp, Homo sapiens
gctcgaaagtgctac

SEQ ID NO: 991379 - DNA, 15 bp, Homo sapiens
ctcgaaagtgctacc

SEQ ID NO: 991380 - DNA, 15 bp, Homo sapiens
tcgaaagtgctaccc

SEQ ID NO: 991381 - DNA, 15 bp, Homo sapiens
cgaaagtgctaccca

SEQ ID NO: 991382 - DNA, 15 bp, Homo sapiens
gaaagtgctacccac

SEQ ID NO: 991383 - DNA, 15 bp, Homo sapiens
aaagtgctacccaca

SEQ ID NO: 991384 - DNA, 15 bp, Homo sapiens
aagtgctacccacat

SEQ ID NO: 991385 - DNA, 15 bp, Homo sapiens
agtgctacccacatg

SEQ ID NO: 991386 - DNA, 15 bp, Homo sapiens
gtgctacccacatga

SEQ ID NO: 991387 - DNA, 15 bp, Homo sapiens
tgctacccacatgag

SEQ ID NO: 991388 - DNA, 15 bp, Homo sapiens
gctacccacatgagg

SEQ ID NO: 991389 - DNA, 15 bp, Homo sapiens
ctacccacatgaggg

SEQ ID NO: 991390 - DNA, 15 bp, Homo sapiens
tacccacatgagggg

SEQ ID NO: 991391 - DNA, 15 bp, Homo sapiens
acccacatgaggggg

SEQ ID NO: 991392 - DNA, 15 bp, Homo sapiens
cccacatgaggggga

SEQ ID NO: 991393 - DNA, 15 bp, Homo sapiens
ccacatgagggggaa

SEQ ID NO: 991394 - DNA, 15 bp, Homo sapiens
cacatgagggggaag

SEQ ID NO: 991395 - DNA, 15 bp, Homo sapiens
acatgagggggaagc

SEQ ID NO: 991396 - DNA, 15 bp, Homo sapiens
catgagggggaagct

SEQ ID NO: 991397 - DNA, 15 bp, Homo sapiens
atgagggggaagctg

SEQ ID NO: 991398 - DNA, 15 bp, Homo sapiens
tgagggggaagctgg

SEQ ID NO: 991399 - DNA, 15 bp, Homo sapiens
gagggggaagctggt

SEQ ID NO: 991400 - DNA, 15 bp, Homo sapiens
agggggaagctggtc

SEQ ID NO: 991401 - DNA, 15 bp, Homo sapiens
gggggaagctggtct

SEQ ID NO: 991402 - DNA, 15 bp, Homo sapiens
ggggaagctggtctt

SEQ ID NO: 991403 - DNA, 15 bp, Homo sapiens
gggaagctggtcttt

SEQ ID NO: 991404 - DNA, 15 bp, Homo sapiens
ggaagctggtctttt

SEQ ID NO: 991405 - DNA, 15 bp, Homo sapiens
gaagctggtcttttt

SEQ ID NO: 991406 - DNA, 15 bp, Homo sapiens
aagctggtctttttt

SEQ ID NO: 991407 - DNA, 15 bp, Homo sapiens
agctggtctttttta

SEQ ID NO: 991408 - DNA, 15 bp, Homo sapiens
gctggtcttttttaa

SEQ ID NO: 991409 - DNA, 15 bp, Homo sapiens
ctggtcttttttaat

SEQ ID NO: 991410 - DNA, 15 bp, Homo sapiens
tggtcttttttaata

SEQ ID NO: 991411 - DNA, 15 bp, Homo sapiens
ggtcttttttaatat

SEQ ID NO: 991412 - DNA, 15 bp, Homo sapiens
gtcttttttaatatt

SEQ ID NO: 991413 - DNA, 15 bp, Homo sapiens
tcttttttaatattt

SEQ ID NO: 991414 - DNA, 15 bp, Homo sapiens
cttttttaatatttt

SEQ ID NO: 991415 - DNA, 15 bp, Homo sapiens
ttttttaatatttta

SEQ ID NO: 991416 - DNA, 15 bp, Homo sapiens
tttttaatattttaa

SEQ ID NO: 991417 - DNA, 15 bp, Homo sapiens
ttttaatattttaat

SEQ ID NO: 991418 - DNA, 15 bp, Homo sapiens
tttaatattttaatg

SEQ ID NO: 991419 - DNA, 15 bp, Homo sapiens
ttaatattttaatgt

SEQ ID NO: 991420 - DNA, 15 bp, Homo sapiens
taatattttaatgta

SEQ ID NO: 991421 - DNA, 15 bp, Homo sapiens
aatattttaatgtaa

SEQ ID NO: 991422 - DNA, 15 bp, Homo sapiens
atattttaatgtaag

SEQ ID NO: 991423 - DNA, 15 bp, Homo sapiens
tattttaatgtaagt

SEQ ID NO: 991424 - DNA, 15 bp, Homo sapiens
attttaatgtaagtc

SEQ ID NO: 991425 - DNA, 15 bp, Homo sapiens
ttttaatgtaagtca

SEQ ID NO: 991426 - DNA, 15 bp, Homo sapiens
tttaatgtaagtcaa

SEQ ID NO: 991427 - DNA, 15 bp, Homo sapiens
ttaatgtaagtcaac

SEQ ID NO: 991428 - DNA, 15 bp, Homo sapiens
taatgtaagtcaacc

SEQ ID NO: 991429 - DNA, 15 bp, Homo sapiens
aatgtaagtcaacca

SEQ ID NO: 991430 - DNA, 15 bp, Homo sapiens
atgtaagtcaaccaa

SEQ ID NO: 991431 - DNA, 15 bp, Homo sapiens
tgtaagtcaaccaag

SEQ ID NO: 991432 - DNA, 15 bp, Homo sapiens
gtaagtcaaccaaga

SEQ ID NO: 991433 - DNA, 15 bp, Homo sapiens
taagtcaaccaagag

SEQ ID NO: 991434 - DNA, 15 bp, Homo sapiens
aagtcaaccaagagt

SEQ ID NO: 991435 - DNA, 15 bp, Homo sapiens
agtcaaccaagagtt

SEQ ID NO: 991436 - DNA, 15 bp, Homo sapiens
gtcaaccaagagttg

SEQ ID NO: 991437 - DNA, 15 bp, Homo sapiens
tcaaccaagagttgt

SEQ ID NO: 991438 - DNA, 15 bp, Homo sapiens
caaccaagagttgtg

SEQ ID NO: 991439 - DNA, 15 bp, Homo sapiens
aaccaagagttgtgg

SEQ ID NO: 991440 - DNA, 15 bp, Homo sapiens
accaagagttgtggc

SEQ ID NO: 991441 - DNA, 15 bp, Homo sapiens
ccaagagttgtggcc

SEQ ID NO: 991442 - DNA, 15 bp, Homo sapiens
caagagttgtggcca

SEQ ID NO: 991443 - DNA, 15 bp, Homo sapiens
aagagttgtggccag

SEQ ID NO: 991444 - DNA, 15 bp, Homo sapiens
agagttgtggccaga

SEQ ID NO: 991445 - DNA, 15 bp, Homo sapiens
gagttgtggccagat

SEQ ID NO: 991446 - DNA, 15 bp, Homo sapiens
agttgtggccagatt

SEQ ID NO: 991447 - DNA, 15 bp, Homo sapiens
gttgtggccagattc

SEQ ID NO: 991448 - DNA, 15 bp, Homo sapiens
ttgtggccagattca

SEQ ID NO: 991449 - DNA, 15 bp, Homo sapiens
tgtggccagattcag

SEQ ID NO: 991450 - DNA, 15 bp, Homo sapiens
gtggccagattcagc

SEQ ID NO: 991451 - DNA, 15 bp, Homo sapiens
tggccagattcagcc

SEQ ID NO: 991452 - DNA, 15 bp, Homo sapiens
ggccagattcagcca

SEQ ID NO: 991453 - DNA, 15 bp, Homo sapiens
gccagattcagccat

SEQ ID NO: 991454 - DNA, 15 bp, Homo sapiens
ccagattcagccatg

SEQ ID NO: 991455 - DNA, 15 bp, Homo sapiens
cagattcagccatgt

SEQ ID NO: 991456 - DNA, 15 bp, Homo sapiens
agattcagccatgtt

SEQ ID NO: 991457 - DNA, 15 bp, Homo sapiens
gattcagccatgttg

SEQ ID NO: 991458 - DNA, 15 bp, Homo sapiens
attcagccatgttgg

SEQ ID NO: 991459 - DNA, 15 bp, Homo sapiens
ttcagccatgttggg

SEQ ID NO: 991460 - DNA, 15 bp, Homo sapiens
tcagccatgttgggg

SEQ ID NO: 991461 - DNA, 15 bp, Homo sapiens
cagccatgttggggt

SEQ ID NO: 991462 - DNA, 15 bp, Homo sapiens
agccatgttggggtg

SEQ ID NO: 991463 - DNA, 15 bp, Homo sapiens
gccatgttggggtga

SEQ ID NO: 991464 - DNA, 15 bp, Homo sapiens
ccatgttggggtgat

SEQ ID NO: 991465 - DNA, 15 bp, Homo sapiens
catgttggggtgatt

SEQ ID NO: 991466 - DNA, 15 bp, Homo sapiens
atgttggggtgattg

SEQ ID NO: 991467 - DNA, 15 bp, Homo sapiens
tgttggggtgattgg

SEQ ID NO: 991468 - DNA, 15 bp, Homo sapiens
gttggggtgattggt

SEQ ID NO: 991469 - DNA, 15 bp, Homo sapiens
ttggggtgattggtg

SEQ ID NO: 991470 - DNA, 15 bp, Homo sapiens
tggggtgattggtgg

SEQ ID NO: 991471 - DNA, 15 bp, Homo sapiens
ggggtgattggtggt

SEQ ID NO: 991472 - DNA, 15 bp, Homo sapiens
gggtgattggtggtg

SEQ ID NO: 991473 - DNA, 15 bp, Homo sapiens
ggtgattggtggtgg

SEQ ID NO: 991474 - DNA, 15 bp, Homo sapiens
gtgattggtggtggt

SEQ ID NO: 991475 - DNA, 15 bp, Homo sapiens
tgattggtggtggtg

SEQ ID NO: 991476 - DNA, 15 bp, Homo sapiens
gattggtggtggtgg

SEQ ID NO: 991477 - DNA, 15 bp, Homo sapiens
attggtggtggtggg

SEQ ID NO: 991478 - DNA, 15 bp, Homo sapiens
ttggtggtggtgggg

SEQ ID NO: 991479 - DNA, 15 bp, Homo sapiens
tggtggtggtgggga

SEQ ID NO: 991480 - DNA, 15 bp, Homo sapiens
ggtggtggtggggag

SEQ ID NO: 991481 - DNA, 15 bp, Homo sapiens
gtggtggtggggagt

SEQ ID NO: 991482 - DNA, 15 bp, Homo sapiens
tggtggtggggagtg

SEQ ID NO: 991483 - DNA, 15 bp, Homo sapiens
ggtggtggggagtga

SEQ ID NO: 991484 - DNA, 15 bp, Homo sapiens
gtggtggggagtgaa

SEQ ID NO: 991485 - DNA, 15 bp, Homo sapiens
tggtggggagtgaac

SEQ ID NO: 991486 - DNA, 15 bp, Homo sapiens
ggtggggagtgaact

SEQ ID NO: 991487 - DNA, 15 bp, Homo sapiens
gtggggagtgaactg

SEQ ID NO: 991488 - DNA, 15 bp, Homo sapiens
tggggagtgaactga

SEQ ID NO: 991489 - DNA, 15 bp, Homo sapiens
ggggagtgaactgaa

SEQ ID NO: 991490 - DNA, 15 bp, Homo sapiens
gggagtgaactgaaa

SEQ ID NO: 991491 - DNA, 15 bp, Homo sapiens
ggagtgaactgaaac

SEQ ID NO: 991492 - DNA, 15 bp, Homo sapiens
gagtgaactgaaact

SEQ ID NO: 991493 - DNA, 15 bp, Homo sapiens
agtgaactgaaacta

SEQ ID NO: 991494 - DNA, 15 bp, Homo sapiens
gtgaactgaaactac

SEQ ID NO: 991495 - DNA, 15 bp, Homo sapiens
tgaactgaaactact

SEQ ID NO: 991496 - DNA, 15 bp, Homo sapiens
gaactgaaactactg

SEQ ID NO: 991497 - DNA, 15 bp, Homo sapiens
aactgaaactactga

SEQ ID NO: 991498 - DNA, 15 bp, Homo sapiens
actgaaactactgaa

SEQ ID NO: 991499 - DNA, 15 bp, Homo sapiens
ctgaaactactgaaa

SEQ ID NO: 991500 - DNA, 15 bp, Homo sapiens
tgaaactactgaaat

SEQ ID NO: 991501 - DNA, 15 bp, Homo sapiens
gaaactactgaaata

SEQ ID NO: 991502 - DNA, 15 bp, Homo sapiens
aaactactgaaatac

SEQ ID NO: 991503 - DNA, 15 bp, Homo sapiens
aactactgaaatact

SEQ ID NO: 991504 - DNA, 15 bp, Homo sapiens
actactgaaatactt

SEQ ID NO: 991505 - DNA, 15 bp, Homo sapiens
ctactgaaatacttt

SEQ ID NO: 991506 - DNA, 15 bp, Homo sapiens
tactgaaatactttg

SEQ ID NO: 991507 - DNA, 15 bp, Homo sapiens
actgaaatactttga

SEQ ID NO: 991508 - DNA, 15 bp, Homo sapiens
ctgaaatactttgaa

SEQ ID NO: 991509 - DNA, 15 bp, Homo sapiens
tgaaatactttgaaa

SEQ ID NO: 991510 - DNA, 15 bp, Homo sapiens
gaaatactttgaaat

SEQ ID NO: 991511 - DNA, 15 bp, Homo sapiens
aaatactttgaaatg

SEQ ID NO: 991512 - DNA, 15 bp, Homo sapiens
aatactttgaaatgt

SEQ ID NO: 991513 - DNA, 15 bp, Homo sapiens
atactttgaaatgtt

SEQ ID NO: 991514 - DNA, 15 bp, Homo sapiens
tactttgaaatgttt

SEQ ID NO: 991515 - DNA, 15 bp, Homo sapiens
actttgaaatgtttc

SEQ ID NO: 991516 - DNA, 15 bp, Homo sapiens
ctttgaaatgtttcc

SEQ ID NO: 991517 - DNA, 15 bp, Homo sapiens
tttgaaatgtttcct

SEQ ID NO: 991518 - DNA, 15 bp, Homo sapiens
ttgaaatgtttcctc

SEQ ID NO: 991519 - DNA, 15 bp, Homo sapiens
tgaaatgtttcctct

SEQ ID NO: 991520 - DNA, 15 bp, Homo sapiens
gaaatgtttcctctg

SEQ ID NO: 991521 - DNA, 15 bp, Homo sapiens
aaatgtttcctctgg

SEQ ID NO: 991522 - DNA, 15 bp, Homo sapiens
aatgtttcctctggc

SEQ ID NO: 991523 - DNA, 15 bp, Homo sapiens
atgtttcctctggca

SEQ ID NO: 991524 - DNA, 15 bp, Homo sapiens
tgtttcctctggcag

SEQ ID NO: 991525 - DNA, 15 bp, Homo sapiens
gtttcctctggcagc

SEQ ID NO: 991526 - DNA, 15 bp, Homo sapiens
tttcctctggcagct

SEQ ID NO: 991527 - DNA, 15 bp, Homo sapiens
ttcctctggcagctt

SEQ ID NO: 991528 - DNA, 15 bp, Homo sapiens
tcctctggcagcttg

SEQ ID NO: 991529 - DNA, 15 bp, Homo sapiens
cctctggcagcttgt

SEQ ID NO: 991530 - DNA, 15 bp, Homo sapiens
ctctggcagcttgtt

SEQ ID NO: 991531 - DNA, 15 bp, Homo sapiens
tctggcagcttgtta

SEQ ID NO: 991532 - DNA, 15 bp, Homo sapiens
ctggcagcttgttac

SEQ ID NO: 991533 - DNA, 15 bp, Homo sapiens
tggcagcttgttact

SEQ ID NO: 991534 - DNA, 15 bp, Homo sapiens
ggcagcttgttactt

SEQ ID NO: 991535 - DNA, 15 bp, Homo sapiens
gcagcttgttactta

SEQ ID NO: 991536 - DNA, 15 bp, Homo sapiens
cagcttgttacttat

SEQ ID NO: 991537 - DNA, 15 bp, Homo sapiens
agcttgttacttatg

SEQ ID NO: 991538 - DNA, 15 bp, Homo sapiens
gcttgttacttatgg

SEQ ID NO: 991539 - DNA, 15 bp, Homo sapiens
cttgttacttatgga

SEQ ID NO: 991540 - DNA, 15 bp, Homo sapiens
ttgttacttatggaa

SEQ ID NO: 991541 - DNA, 15 bp, Homo sapiens
tgttacttatggaaa

SEQ ID NO: 991542 - DNA, 15 bp, Homo sapiens
gttacttatggaaaa

SEQ ID NO: 991543 - DNA, 15 bp, Homo sapiens
ttacttatggaaaag

SEQ ID NO: 991544 - DNA, 15 bp, Homo sapiens
tacttatggaaaaga

SEQ ID NO: 991545 - DNA, 15 bp, Homo sapiens
acttatggaaaagag

SEQ ID NO: 991546 - DNA, 15 bp, Homo sapiens
cttatggaaaagagg

SEQ ID NO: 991547 - DNA, 15 bp, Homo sapiens
ttatggaaaagaggt

SEQ ID NO: 991548 - DNA, 15 bp, Homo sapiens
tatggaaaagaggtg

SEQ ID NO: 991549 - DNA, 15 bp, Homo sapiens
atggaaaagaggtgg

SEQ ID NO: 991550 - DNA, 15 bp, Homo sapiens
tggaaaagaggtgga

SEQ ID NO: 991551 - DNA, 15 bp, Homo sapiens
ggaaaagaggtggaa

SEQ ID NO: 991552 - DNA, 15 bp, Homo sapiens
gaaaagaggtggaat

SEQ ID NO: 991553 - DNA, 15 bp, Homo sapiens
aaaagaggtggaatt

SEQ ID NO: 991554 - DNA, 15 bp, Homo sapiens
aaagaggtggaattg

SEQ ID NO: 991555 - DNA, 15 bp, Homo sapiens
aagaggtggaattgc

SEQ ID NO: 991556 - DNA, 15 bp, Homo sapiens
agaggtggaattgct

SEQ ID NO: 991557 - DNA, 15 bp, Homo sapiens
gaggtggaattgctg

SEQ ID NO: 991558 - DNA, 15 bp, Homo sapiens
aggtggaattgctgc

SEQ ID NO: 991559 - DNA, 15 bp, Homo sapiens
ggtggaattgctgcg

SEQ ID NO: 991560 - DNA, 15 bp, Homo sapiens
gtggaattgctgcga

SEQ ID NO: 991561 - DNA, 15 bp, Homo sapiens
tggaattgctgcgag

SEQ ID NO: 991562 - DNA, 15 bp, Homo sapiens
ggaattgctgcgagg

SEQ ID NO: 991563 - DNA, 15 bp, Homo sapiens
gaattgctgcgagga

SEQ ID NO: 991564 - DNA, 15 bp, Homo sapiens
aattgctgcgaggag

SEQ ID NO: 991565 - DNA, 15 bp, Homo sapiens
attgctgcgaggagt

SEQ ID NO: 991566 - DNA, 15 bp, Homo sapiens
ttgctgcgaggagtt

SEQ ID NO: 991567 - DNA, 15 bp, Homo sapiens
tgctgcgaggagttt

SEQ ID NO: 991568 - DNA, 15 bp, Homo sapiens
gctgcgaggagtttt

SEQ ID NO: 991569 - DNA, 15 bp, Homo sapiens
ctgcgaggagttttt

SEQ ID NO: 991570 - DNA, 15 bp, Homo sapiens
tgcgaggagtttttc

SEQ ID NO: 991571 - DNA, 15 bp, Homo sapiens
gcgaggagtttttca

SEQ ID NO: 991572 - DNA, 15 bp, Homo sapiens
cgaggagtttttcag

SEQ ID NO: 991573 - DNA, 15 bp, Homo sapiens
gaggagtttttcaga

SEQ ID NO: 991574 - DNA, 15 bp, Homo sapiens
aggagtttttcagaa

SEQ ID NO: 991575 - DNA, 15 bp, Homo sapiens
ggagtttttcagaaa

SEQ ID NO: 991576 - DNA, 15 bp, Homo sapiens
gagtttttcagaaaa

SEQ ID NO: 991577 - DNA, 15 bp, Homo sapiens
agtttttcagaaaaa

SEQ ID NO: 991578 - DNA, 15 bp, Homo sapiens
gtttttcagaaaaag

SEQ ID NO: 991579 - DNA, 15 bp, Homo sapiens
tttttcagaaaaagt

SEQ ID NO: 991580 - DNA, 15 bp, Homo sapiens
ttttcagaaaaagta

SEQ ID NO: 991581 - DNA, 15 bp, Homo sapiens
tttcagaaaaagtac

SEQ ID NO: 991582 - DNA, 15 bp, Homo sapiens
ttcagaaaaagtaca

SEQ ID NO: 991583 - DNA, 15 bp, Homo sapiens
tcagaaaaagtacag

SEQ ID NO: 991584 - DNA, 15 bp, Homo sapiens
cagaaaaagtacagt

SEQ ID NO: 991585 - DNA, 15 bp, Homo sapiens
agaaaaagtacagtg

SEQ ID NO: 991586 - DNA, 15 bp, Homo sapiens
gaaaaagtacagtga

SEQ ID NO: 991587 - DNA, 15 bp, Homo sapiens
aaaaagtacagtgaa

SEQ ID NO: 991588 - DNA, 15 bp, Homo sapiens
aaaagtacagtgaaa

SEQ ID NO: 991589 - DNA, 15 bp, Homo sapiens
aaagtacagtgaaag

SEQ ID NO: 991590 - DNA, 15 bp, Homo sapiens
aagtacagtgaaaga

SEQ ID NO: 991591 - DNA, 15 bp, Homo sapiens
agtacagtgaaagat

SEQ ID NO: 991592 - DNA, 15 bp, Homo sapiens
gtacagtgaaagata

SEQ ID NO: 991593 - DNA, 15 bp, Homo sapiens
tacagtgaaagataa

SEQ ID NO: 991594 - DNA, 15 bp, Homo sapiens
acagtgaaagataag

SEQ ID NO: 991595 - DNA, 15 bp, Homo sapiens
cagtgaaagataagc

SEQ ID NO: 991596 - DNA, 15 bp, Homo sapiens
agtgaaagataagct

SEQ ID NO: 991597 - DNA, 15 bp, Homo sapiens
gtgaaagataagctt

SEQ ID NO: 991598 - DNA, 15 bp, Homo sapiens
tgaaagataagcttt

SEQ ID NO: 991599 - DNA, 15 bp, Homo sapiens
gaaagataagcttta

SEQ ID NO: 991600 - DNA, 15 bp, Homo sapiens
aaagataagctttaa

SEQ ID NO: 991601 - DNA, 15 bp, Homo sapiens
aagataagctttaaa

SEQ ID NO: 991602 - DNA, 15 bp, Homo sapiens
agataagctttaaat

SEQ ID NO: 991603 - DNA, 15 bp, Homo sapiens
gataagctttaaata

SEQ ID NO: 991604 - DNA, 15 bp, Homo sapiens
ataagctttaaataa

SEQ ID NO: 991605 - DNA, 15 bp, Homo sapiens
taagctttaaataag

SEQ ID NO: 991606 - DNA, 15 bp, Homo sapiens
aagctttaaataagt

SEQ ID NO: 991607 - DNA, 15 bp, Homo sapiens
agctttaaataagtg

SEQ ID NO: 991608 - DNA, 15 bp, Homo sapiens
gctttaaataagtgg

SEQ ID NO: 991609 - DNA, 15 bp, Homo sapiens
ctttaaataagtggt

SEQ ID NO: 991610 - DNA, 15 bp, Homo sapiens
tttaaataagtggtg

SEQ ID NO: 991611 - DNA, 15 bp, Homo sapiens
ttaaataagtggtga

SEQ ID NO: 991612 - DNA, 15 bp, Homo sapiens
taaataagtggtgag

SEQ ID NO: 991613 - DNA, 15 bp, Homo sapiens
aaataagtggtgagg

SEQ ID NO: 991614 - DNA, 15 bp, Homo sapiens
aataagtggtgaggc

SEQ ID NO: 991615 - DNA, 15 bp, Homo sapiens
ataagtggtgaggcg

SEQ ID NO: 991616 - DNA, 15 bp, Homo sapiens
taagtggtgaggcgg

SEQ ID NO: 991617 - DNA, 15 bp, Homo sapiens
aagtggtgaggcgga

SEQ ID NO: 991618 - DNA, 15 bp, Homo sapiens
agtggtgaggcggag

SEQ ID NO: 991619 - DNA, 15 bp, Homo sapiens
gtggtgaggcggaga

SEQ ID NO: 991620 - DNA, 15 bp, Homo sapiens
tggtgaggcggagat

SEQ ID NO: 991621 - DNA, 15 bp, Homo sapiens
ggtgaggcggagatc

SEQ ID NO: 991622 - DNA, 15 bp, Homo sapiens
gtgaggcggagatcg

SEQ ID NO: 991623 - DNA, 15 bp, Homo sapiens
tgaggcggagatcgg

SEQ ID NO: 991624 - DNA, 15 bp, Homo sapiens
gaggcggagatcggc

SEQ ID NO: 991625 - DNA, 15 bp, Homo sapiens
aggcggagatcggcc

SEQ ID NO: 991626 - DNA, 15 bp, Homo sapiens
ggcggagatcggcca

SEQ ID NO: 991627 - DNA, 15 bp, Homo sapiens
gcggagatcggccag

SEQ ID NO: 991628 - DNA, 15 bp, Homo sapiens
cggagatcggccagc

SEQ ID NO: 991629 - DNA, 15 bp, Homo sapiens
ggagatcggccagca

SEQ ID NO: 991630 - DNA, 15 bp, Homo sapiens
gagatcggccagcat

SEQ ID NO: 991631 - DNA, 15 bp, Homo sapiens
agatcggccagcatc

SEQ ID NO: 991632 - DNA, 15 bp, Homo sapiens
gatcggccagcatct

SEQ ID NO: 991633 - DNA, 15 bp, Homo sapiens
atcggccagcatcta

SEQ ID NO: 991634 - DNA, 15 bp, Homo sapiens
tcggccagcatctaa

SEQ ID NO: 991635 - DNA, 15 bp, Homo sapiens
cggccagcatctaaa

SEQ ID NO: 991636 - DNA, 15 bp, Homo sapiens
ggccagcatctaaat

SEQ ID NO: 991637 - DNA, 15 bp, Homo sapiens
gccagcatctaaatc

SEQ ID NO: 991638 - DNA, 15 bp, Homo sapiens
ccagcatctaaatca

SEQ ID NO: 991639 - DNA, 15 bp, Homo sapiens
cagcatctaaatcat

SEQ ID NO: 991640 - DNA, 15 bp, Homo sapiens
agcatctaaatcatt

SEQ ID NO: 991641 - DNA, 15 bp, Homo sapiens
gcatctaaatcattt

SEQ ID NO: 991642 - DNA, 15 bp, Homo sapiens
catctaaatcatttg

SEQ ID NO: 991643 - DNA, 15 bp, Homo sapiens
atctaaatcatttgt

SEQ ID NO: 991644 - DNA, 15 bp, Homo sapiens
tctaaatcatttgta

SEQ ID NO: 991645 - DNA, 15 bp, Homo sapiens
ctaaatcatttgtac

SEQ ID NO: 991646 - DNA, 15 bp, Homo sapiens
taaatcatttgtaca

SEQ ID NO: 991647 - DNA, 15 bp, Homo sapiens
aaatcatttgtacat

SEQ ID NO: 991648 - DNA, 15 bp, Homo sapiens
aatcatttgtacatg

SEQ ID NO: 991649 - DNA, 15 bp, Homo sapiens
atcatttgtacatga

SEQ ID NO: 991650 - DNA, 15 bp, Homo sapiens
tcatttgtacatgat

SEQ ID NO: 991651 - DNA, 15 bp, Homo sapiens
catttgtacatgatc

SEQ ID NO: 991652 - DNA, 15 bp, Homo sapiens
atttgtacatgatca

SEQ ID NO: 991653 - DNA, 15 bp, Homo sapiens
tttgtacatgatcaa

SEQ ID NO: 991654 - DNA, 15 bp, Homo sapiens
ttgtacatgatcaag

SEQ ID NO: 991655 - DNA, 15 bp, Homo sapiens
tgtacatgatcaagg

SEQ ID NO: 991656 - DNA, 15 bp, Homo sapiens
gtacatgatcaaggg

SEQ ID NO: 991657 - DNA, 15 bp, Homo sapiens
tacatgatcaaggga

SEQ ID NO: 991658 - DNA, 15 bp, Homo sapiens
acatgatcaagggaa

SEQ ID NO: 991659 - DNA, 15 bp, Homo sapiens
catgatcaagggaaa

SEQ ID NO: 991660 - DNA, 15 bp, Homo sapiens
atgatcaagggaaaa

SEQ ID NO: 991661 - DNA, 15 bp, Homo sapiens
tgatcaagggaaaat

SEQ ID NO: 991662 - DNA, 15 bp, Homo sapiens
gatcaagggaaaatc

SEQ ID NO: 991663 - DNA, 15 bp, Homo sapiens
gtgaggtgtgtgagc

SEQ ID NO: 991664 - DNA, 15 bp, Homo sapiens
tgaggtgtgtgagca

SEQ ID NO: 991665 - DNA, 15 bp, Homo sapiens
gaggtgtgtgagcac

SEQ ID NO: 991666 - DNA, 15 bp, Homo sapiens
aggtgtgtgagcaca

SEQ ID NO: 991667 - DNA, 15 bp, Homo sapiens
ggtgtgtgagcacaa

SEQ ID NO: 991668 - DNA, 15 bp, Homo sapiens
gtgtgtgagcacaag

SEQ ID NO: 991669 - DNA, 15 bp, Homo sapiens
tgtgtgagcacaagt

SEQ ID NO: 991670 - DNA, 15 bp, Homo sapiens
gtgtgagcacaagtg

SEQ ID NO: 991671 - DNA, 15 bp, Homo sapiens
tgtgagcacaagtgt

SEQ ID NO: 991672 - DNA, 15 bp, Homo sapiens
gtgagcacaagtgtg

SEQ ID NO: 991673 - DNA, 15 bp, Homo sapiens
tgagcacaagtgtgt

SEQ ID NO: 991674 - DNA, 15 bp, Homo sapiens
gagcacaagtgtgtg

SEQ ID NO: 991675 - DNA, 15 bp, Homo sapiens
agcacaagtgtgtga

SEQ ID NO: 991676 - DNA, 15 bp, Homo sapiens
gcacaagtgtgtgag

SEQ ID NO: 991677 - DNA, 15 bp, Homo sapiens
cacaagtgtgtgagc

SEQ ID NO: 991678 - DNA, 15 bp, Homo sapiens
acaagtgtgtgagca

SEQ ID NO: 991679 - DNA, 15 bp, Homo sapiens
caagtgtgtgagcag

SEQ ID NO: 991680 - DNA, 15 bp, Homo sapiens
aagtgtgtgagcagg

SEQ ID NO: 991681 - DNA, 15 bp, Homo sapiens
agtgtgtgagcaggg

SEQ ID NO: 991682 - DNA, 15 bp, Homo sapiens
gtgtgtgagcagggg

SEQ ID NO: 991683 - DNA, 15 bp, Homo sapiens
tgtgtgagcaggggc

SEQ ID NO: 991684 - DNA, 15 bp, Homo sapiens
gtgtgagcaggggcg

SEQ ID NO: 991685 - DNA, 15 bp, Homo sapiens
tgtgagcaggggcgt

SEQ ID NO: 991686 - DNA, 15 bp, Homo sapiens
gtgagcaggggcgtg

SEQ ID NO: 991687 - DNA, 15 bp, Homo sapiens
tgagcaggggcgtgt

SEQ ID NO: 991688 - DNA, 15 bp, Homo sapiens
gagcaggggcgtgtg

SEQ ID NO: 991689 - DNA, 15 bp, Homo sapiens
agcaggggcgtgtgt

SEQ ID NO: 991690 - DNA, 15 bp, Homo sapiens
gcaggggcgtgtgtg

SEQ ID NO: 991691 - DNA, 15 bp, Homo sapiens
caggggcgtgtgtgt

SEQ ID NO: 991692 - DNA, 15 bp, Homo sapiens
aggggcgtgtgtgtg

SEQ ID NO: 991693 - DNA, 15 bp, Homo sapiens
ggggcgtgtgtgtgt

SEQ ID NO: 991694 - DNA, 15 bp, Homo sapiens
gggcgtgtgtgtgta

SEQ ID NO: 991695 - DNA, 15 bp, Homo sapiens
ggcgtgtgtgtgtag

SEQ ID NO: 991696 - DNA, 15 bp, Homo sapiens
gcgtgtgtgtgtagc

SEQ ID NO: 991697 - DNA, 15 bp, Homo sapiens
cgtgtgtgtgtagct

SEQ ID NO: 991698 - DNA, 15 bp, Homo sapiens
gtgtgtgtgtagctg

SEQ ID NO: 991699 - DNA, 15 bp, Homo sapiens
tgtgtgtgtagctga

SEQ ID NO: 991700 - DNA, 15 bp, Homo sapiens
gtgtgtgtagctgag

SEQ ID NO: 991701 - DNA, 15 bp, Homo sapiens
tgtgtgtagctgagt

SEQ ID NO: 991702 - DNA, 15 bp, Homo sapiens
gtgtgtagctgagta

SEQ ID NO: 991703 - DNA, 15 bp, Homo sapiens
tgtgtagctgagtaa

SEQ ID NO: 991704 - DNA, 15 bp, Homo sapiens
gtgtagctgagtaat

SEQ ID NO: 991705 - DNA, 15 bp, Homo sapiens
tgtagctgagtaatg

SEQ ID NO: 991706 - DNA, 15 bp, Homo sapiens
gtagctgagtaatgt

SEQ ID NO: 991707 - DNA, 15 bp, Homo sapiens
tagctgagtaatgtg

SEQ ID NO: 991708 - DNA, 15 bp, Homo sapiens
agctgagtaatgtga

SEQ ID NO: 991709 - DNA, 15 bp, Homo sapiens
gctgagtaatgtgag

SEQ ID NO: 991710 - DNA, 15 bp, Homo sapiens
ctgagtaatgtgaga

SEQ ID NO: 991711 - DNA, 15 bp, Homo sapiens
tgagtaatgtgagat

SEQ ID NO: 991712 - DNA, 15 bp, Homo sapiens
gagtaatgtgagatg

SEQ ID NO: 991713 - DNA, 15 bp, Homo sapiens
agtaatgtgagatgt

SEQ ID NO: 991714 - DNA, 15 bp, Homo sapiens
gtaatgtgagatgtg

SEQ ID NO: 991715 - DNA, 15 bp, Homo sapiens
taatgtgagatgtgt

SEQ ID NO: 991716 - DNA, 15 bp, Homo sapiens
aatgtgagatgtgtg

SEQ ID NO: 991717 - DNA, 15 bp, Homo sapiens
atgtgagatgtgtgt

SEQ ID NO: 991718 - DNA, 15 bp, Homo sapiens
tgtgagatgtgtgtg

SEQ ID NO: 991719 - DNA, 15 bp, Homo sapiens
gtgagatgtgtgtga

SEQ ID NO: 991720 - DNA, 15 bp, Homo sapiens
tgagatgtgtgtgag

SEQ ID NO: 991721 - DNA, 15 bp, Homo sapiens
gagatgtgtgtgagc

SEQ ID NO: 991722 - DNA, 15 bp, Homo sapiens
agatgtgtgtgagca

SEQ ID NO: 991723 - DNA, 15 bp, Homo sapiens
gatgtgtgtgagcag

SEQ ID NO: 991724 - DNA, 15 bp, Homo sapiens
atgtgtgtgagcagg

SEQ ID NO: 991725 - DNA, 15 bp, Homo sapiens
tgtgtgtgagcaggt

SEQ ID NO: 991726 - DNA, 15 bp, Homo sapiens
tgagcaggtgtgtgc

SEQ ID NO: 991727 - DNA, 15 bp, Homo sapiens
gagcaggtgtgtgcg

SEQ ID NO: 991728 - DNA, 15 bp, Homo sapiens
agcaggtgtgtgcgt

SEQ ID NO: 991729 - DNA, 15 bp, Homo sapiens
gcaggtgtgtgcgtg

SEQ ID NO: 991730 - DNA, 15 bp, Homo sapiens
caggtgtgtgcgtgt

SEQ ID NO: 991731 - DNA, 15 bp, Homo sapiens
aggtgtgtgcgtgtg

SEQ ID NO: 991732 - DNA, 15 bp, Homo sapiens
ggtgtgtgcgtgtgg

SEQ ID NO: 991733 - DNA, 15 bp, Homo sapiens
gtgtgtgcgtgtggg

SEQ ID NO: 991734 - DNA, 15 bp, Homo sapiens
tgtgtgcgtgtgggg

SEQ ID NO: 991735 - DNA, 15 bp, Homo sapiens
gtgtgcgtgtggggc

SEQ ID NO: 991736 - DNA, 15 bp, Homo sapiens
tgtgcgtgtggggct

SEQ ID NO: 991737 - DNA, 15 bp, Homo sapiens
gtgcgtgtggggctg

SEQ ID NO: 991738 - DNA, 15 bp, Homo sapiens
tgcgtgtggggctga

SEQ ID NO: 991739 - DNA, 15 bp, Homo sapiens
gcgtgtggggctgag

SEQ ID NO: 991740 - DNA, 15 bp, Homo sapiens
cgtgtggggctgagt

SEQ ID NO: 991741 - DNA, 15 bp, Homo sapiens
gtgtggggctgagta

SEQ ID NO: 991742 - DNA, 15 bp, Homo sapiens
tgtggggctgagtaa

SEQ ID NO: 991743 - DNA, 15 bp, Homo sapiens
gtggggctgagtaac

SEQ ID NO: 991744 - DNA, 15 bp, Homo sapiens
tggggctgagtaacg

SEQ ID NO: 991745 - DNA, 15 bp, Homo sapiens
ggggctgagtaacgt

SEQ ID NO: 991746 - DNA, 15 bp, Homo sapiens
gggctgagtaacgtg

SEQ ID NO: 991747 - DNA, 15 bp, Homo sapiens
ggctgagtaacgtga

SEQ ID NO: 991748 - DNA, 15 bp, Homo sapiens
gctgagtaacgtgag

SEQ ID NO: 991749 - DNA, 15 bp, Homo sapiens
ctgagtaacgtgaga

SEQ ID NO: 991750 - DNA, 15 bp, Homo sapiens
tgagtaacgtgagat

SEQ ID NO: 991751 - DNA, 15 bp, Homo sapiens
gagtaacgtgagatg

SEQ ID NO: 991752 - DNA, 15 bp, Homo sapiens
agtaacgtgagatgt

SEQ ID NO: 991753 - DNA, 15 bp, Homo sapiens
gtaacgtgagatgtg

SEQ ID NO: 991754 - DNA, 15 bp, Homo sapiens
taacgtgagatgtgt

SEQ ID NO: 991755 - DNA, 15 bp, Homo sapiens
aacgtgagatgtgtg

SEQ ID NO: 991756 - DNA, 15 bp, Homo sapiens
acgtgagatgtgtgt

SEQ ID NO: 991757 - DNA, 15 bp, Homo sapiens
cgtgagatgtgtgta

SEQ ID NO: 991758 - DNA, 15 bp, Homo sapiens
gtgagatgtgtgtaa

SEQ ID NO: 991759 - DNA, 15 bp, Homo sapiens
tgagatgtgtgtaag

SEQ ID NO: 991760 - DNA, 15 bp, Homo sapiens
gagatgtgtgtaagc

SEQ ID NO: 991761 - DNA, 15 bp, Homo sapiens
agatgtgtgtaagca

SEQ ID NO: 991762 - DNA, 15 bp, Homo sapiens
gatgtgtgtaagcag

SEQ ID NO: 991763 - DNA, 15 bp, Homo sapiens
atgtgtgtaagcagg

SEQ ID NO: 991764 - DNA, 15 bp, Homo sapiens
tgtgtgtaagcaggt

SEQ ID NO: 991765 - DNA, 15 bp, Homo sapiens
gtgtgtaagcaggtg

SEQ ID NO: 991766 - DNA, 15 bp, Homo sapiens
tgtgtaagcaggtgt

SEQ ID NO: 991767 - DNA, 15 bp, Homo sapiens
gtgtaagcaggtgtg

SEQ ID NO: 991768 - DNA, 15 bp, Homo sapiens
taagcaggtgtgtgc

SEQ ID NO: 991769 - DNA, 15 bp, Homo sapiens
aagcaggtgtgtgcg

SEQ ID NO: 991770 - DNA, 15 bp, Homo sapiens
caggtgtgtgcgtgc

SEQ ID NO: 991771 - DNA, 15 bp, Homo sapiens
aggtgtgtgcgtgca

SEQ ID NO: 991772 - DNA, 15 bp, Homo sapiens
ggtgtgtgcgtgcaa

SEQ ID NO: 991773 - DNA, 15 bp, Homo sapiens
gtgtgtgcgtgcaag

SEQ ID NO: 991774 - DNA, 15 bp, Homo sapiens
tgtgtgcgtgcaagt

SEQ ID NO: 991775 - DNA, 15 bp, Homo sapiens
gtgtgcgtgcaagtg

SEQ ID NO: 991776 - DNA, 15 bp, Homo sapiens
tgtgcgtgcaagtgt

SEQ ID NO: 991777 - DNA, 15 bp, Homo sapiens
gtgcgtgcaagtgtg

SEQ ID NO: 991778 - DNA, 15 bp, Homo sapiens
tgcgtgcaagtgtgt

SEQ ID NO: 991779 - DNA, 15 bp, Homo sapiens
gcgtgcaagtgtgtg

SEQ ID NO: 991780 - DNA, 15 bp, Homo sapiens
cgtgcaagtgtgtgt

SEQ ID NO: 991781 - DNA, 15 bp, Homo sapiens
gtgcaagtgtgtgtg

SEQ ID NO: 991782 - DNA, 15 bp, Homo sapiens
tgcaagtgtgtgtga

SEQ ID NO: 991783 - DNA, 15 bp, Homo sapiens
gcaagtgtgtgtgag

SEQ ID NO: 991784 - DNA, 15 bp, Homo sapiens
caagtgtgtgtgagg

SEQ ID NO: 991785 - DNA, 15 bp, Homo sapiens
aagtgtgtgtgaggt

SEQ ID NO: 991786 - DNA, 15 bp, Homo sapiens
agtgtgtgtgaggtg

SEQ ID NO: 991787 - DNA, 15 bp, Homo sapiens
gtgtgtgtgaggtgt

SEQ ID NO: 991788 - DNA, 15 bp, Homo sapiens
tgtgtgtgaggtgtg

SEQ ID NO: 991789 - DNA, 15 bp, Homo sapiens
gtgtgtgaggtgtgg

SEQ ID NO: 991790 - DNA, 15 bp, Homo sapiens
tgtgtgaggtgtggg

SEQ ID NO: 991791 - DNA, 15 bp, Homo sapiens
gtgtgaggtgtgggt

SEQ ID NO: 991792 - DNA, 15 bp, Homo sapiens
tgtgaggtgtgggta

SEQ ID NO: 991793 - DNA, 15 bp, Homo sapiens
gtgaggtgtgggtag

SEQ ID NO: 991794 - DNA, 15 bp, Homo sapiens
tgaggtgtgggtagg

SEQ ID NO: 991795 - DNA, 15 bp, Homo sapiens
gaggtgtgggtaggt

SEQ ID NO: 991796 - DNA, 15 bp, Homo sapiens
aggtgtgggtaggtg

SEQ ID NO: 991797 - DNA, 15 bp, Homo sapiens
ggtgtgggtaggtgc

SEQ ID NO: 991798 - DNA, 15 bp, Homo sapiens
gtgtgggtaggtgcg

SEQ ID NO: 991799 - DNA, 15 bp, Homo sapiens
tgtgggtaggtgcga

SEQ ID NO: 991800 - DNA, 15 bp, Homo sapiens
gtgggtaggtgcgat

SEQ ID NO: 991801 - DNA, 15 bp, Homo sapiens
tgggtaggtgcgatc

SEQ ID NO: 991802 - DNA, 15 bp, Homo sapiens
gggtaggtgcgatca

SEQ ID NO: 991803 - DNA, 15 bp, Homo sapiens
ggtaggtgcgatcat

SEQ ID NO: 991804 - DNA, 15 bp, Homo sapiens
gtaggtgcgatcata

SEQ ID NO: 991805 - DNA, 15 bp, Homo sapiens
taggtgcgatcatat

SEQ ID NO: 991806 - DNA, 15 bp, Homo sapiens
aggtgcgatcatatg

SEQ ID NO: 991807 - DNA, 15 bp, Homo sapiens
ggtgcgatcatatgt

SEQ ID NO: 991808 - DNA, 15 bp, Homo sapiens
gtgcgatcatatgtg

SEQ ID NO: 991809 - DNA, 15 bp, Homo sapiens
tgcgatcatatgtga

SEQ ID NO: 991810 - DNA, 15 bp, Homo sapiens
gcgatcatatgtgag

SEQ ID NO: 991811 - DNA, 15 bp, Homo sapiens
cgatcatatgtgagt

SEQ ID NO: 991812 - DNA, 15 bp, Homo sapiens
gatcatatgtgagtg

SEQ ID NO: 991813 - DNA, 15 bp, Homo sapiens
atcatatgtgagtgg

SEQ ID NO: 991814 - DNA, 15 bp, Homo sapiens
tcatatgtgagtgga

SEQ ID NO: 991815 - DNA, 15 bp, Homo sapiens
catatgtgagtggat

SEQ ID NO: 991816 - DNA, 15 bp, Homo sapiens
atatgtgagtggata

SEQ ID NO: 991817 - DNA, 15 bp, Homo sapiens
gagtggatatgtgtg

SEQ ID NO: 991818 - DNA, 15 bp, Homo sapiens
agtggatatgtgtga

SEQ ID NO: 991819 - DNA, 15 bp, Homo sapiens
gtggatatgtgtgag

SEQ ID NO: 991820 - DNA, 15 bp, Homo sapiens
tggatatgtgtgagt

SEQ ID NO: 991821 - DNA, 15 bp, Homo sapiens
ggatatgtgtgagtg

SEQ ID NO: 991822 - DNA, 15 bp, Homo sapiens
gatatgtgtgagtga

SEQ ID NO: 991823 - DNA, 15 bp, Homo sapiens
atatgtgtgagtgaa

SEQ ID NO: 991824 - DNA, 15 bp, Homo sapiens
tatgtgtgagtgaat

SEQ ID NO: 991825 - DNA, 15 bp, Homo sapiens
atgtgtgagtgaatg

SEQ ID NO: 991826 - DNA, 15 bp, Homo sapiens
tgtgtgagtgaatgg

SEQ ID NO: 991827 - DNA, 15 bp, Homo sapiens
gtgtgagtgaatggt

SEQ ID NO: 991828 - DNA, 15 bp, Homo sapiens
tgtgagtgaatggtg

SEQ ID NO: 991829 - DNA, 15 bp, Homo sapiens
gagtgaatggtgtgg

SEQ ID NO: 991830 - DNA, 15 bp, Homo sapiens
agtgaatggtgtggt

SEQ ID NO: 991831 - DNA, 15 bp, Homo sapiens
gtgaatggtgtggtg

SEQ ID NO: 991832 - DNA, 15 bp, Homo sapiens
tgaatggtgtggtgt

SEQ ID NO: 991833 - DNA, 15 bp, Homo sapiens
gaatggtgtggtgta

SEQ ID NO: 991834 - DNA, 15 bp, Homo sapiens
aatggtgtggtgtaa

SEQ ID NO: 991835 - DNA, 15 bp, Homo sapiens
atggtgtggtgtaag

SEQ ID NO: 991836 - DNA, 15 bp, Homo sapiens
tggtgtggtgtaagc

SEQ ID NO: 991837 - DNA, 15 bp, Homo sapiens
ggtgtggtgtaagca

SEQ ID NO: 991838 - DNA, 15 bp, Homo sapiens
gtgtggtgtaagcat

SEQ ID NO: 991839 - DNA, 15 bp, Homo sapiens
tgtggtgtaagcatg

SEQ ID NO: 991840 - DNA, 15 bp, Homo sapiens
gtggtgtaagcatgt

SEQ ID NO: 991841 - DNA, 15 bp, Homo sapiens
tggtgtaagcatgtg

SEQ ID NO: 991842 - DNA, 15 bp, Homo sapiens
ggtgtaagcatgtgt

SEQ ID NO: 991843 - DNA, 15 bp, Homo sapiens
aagcatgtgtgtgtg

SEQ ID NO: 991844 - DNA, 15 bp, Homo sapiens
agcatgtgtgtgtga

SEQ ID NO: 991845 - DNA, 15 bp, Homo sapiens
gcatgtgtgtgtgag

SEQ ID NO: 991846 - DNA, 15 bp, Homo sapiens
catgtgtgtgtgagc

SEQ ID NO: 991847 - DNA, 15 bp, Homo sapiens
atgtgtgtgtgagca

SEQ ID NO: 991848 - DNA, 15 bp, Homo sapiens
tgtgtgtgtgagcag

SEQ ID NO: 991849 - DNA, 15 bp, Homo sapiens
tgtgtgtgagcaggg

SEQ ID NO: 991850 - DNA, 15 bp, Homo sapiens
gtgtgagcaggggca

SEQ ID NO: 991851 - DNA, 15 bp, Homo sapiens
tgtgagcaggggcat

SEQ ID NO: 991852 - DNA, 15 bp, Homo sapiens
gtgagcaggggcatg

SEQ ID NO: 991853 - DNA, 15 bp, Homo sapiens
tgagcaggggcatgt

SEQ ID NO: 991854 - DNA, 15 bp, Homo sapiens
gagcaggggcatgtg

SEQ ID NO: 991855 - DNA, 15 bp, Homo sapiens
agcaggggcatgtgt

SEQ ID NO: 991856 - DNA, 15 bp, Homo sapiens
gcaggggcatgtgtg

SEQ ID NO: 991857 - DNA, 15 bp, Homo sapiens
caggggcatgtgtgt

SEQ ID NO: 991858 - DNA, 15 bp, Homo sapiens
aggggcatgtgtgtg

SEQ ID NO: 991859 - DNA, 15 bp, Homo sapiens
ggggcatgtgtgtgc

SEQ ID NO: 991860 - DNA, 15 bp, Homo sapiens
gggcatgtgtgtgca

SEQ ID NO: 991861 - DNA, 15 bp, Homo sapiens
ggcatgtgtgtgcaa

SEQ ID NO: 991862 - DNA, 15 bp, Homo sapiens
gcatgtgtgtgcaag

SEQ ID NO: 991863 - DNA, 15 bp, Homo sapiens
catgtgtgtgcaagg

SEQ ID NO: 991864 - DNA, 15 bp, Homo sapiens
atgtgtgtgcaaggg

SEQ ID NO: 991865 - DNA, 15 bp, Homo sapiens
tgtgtgtgcaagggt

SEQ ID NO: 991866 - DNA, 15 bp, Homo sapiens
gtgtgtgcaagggtg

SEQ ID NO: 991867 - DNA, 15 bp, Homo sapiens
tgtgtgcaagggtga

SEQ ID NO: 991868 - DNA, 15 bp, Homo sapiens
gtgtgcaagggtgag

SEQ ID NO: 991869 - DNA, 15 bp, Homo sapiens
tgtgcaagggtgagc

SEQ ID NO: 991870 - DNA, 15 bp, Homo sapiens
gtgcaagggtgagca

SEQ ID NO: 991871 - DNA, 15 bp, Homo sapiens
tgcaagggtgagcaa

SEQ ID NO: 991872 - DNA, 15 bp, Homo sapiens
gcaagggtgagcaat

SEQ ID NO: 991873 - DNA, 15 bp, Homo sapiens
caagggtgagcaatg

SEQ ID NO: 991874 - DNA, 15 bp, Homo sapiens
aagggtgagcaatgt

SEQ ID NO: 991875 - DNA, 15 bp, Homo sapiens
agggtgagcaatgta

SEQ ID NO: 991876 - DNA, 15 bp, Homo sapiens
gggtgagcaatgtaa

SEQ ID NO: 991877 - DNA, 15 bp, Homo sapiens
ggtgagcaatgtaag

SEQ ID NO: 991878 - DNA, 15 bp, Homo sapiens
gtgagcaatgtaagg

SEQ ID NO: 991879 - DNA, 15 bp, Homo sapiens
tgagcaatgtaaggt

SEQ ID NO: 991880 - DNA, 15 bp, Homo sapiens
gagcaatgtaaggtg

SEQ ID NO: 991881 - DNA, 15 bp, Homo sapiens
agcaatgtaaggtgt

SEQ ID NO: 991882 - DNA, 15 bp, Homo sapiens
gcaatgtaaggtgtg

SEQ ID NO: 991883 - DNA, 15 bp, Homo sapiens
caatgtaaggtgtga

SEQ ID NO: 991884 - DNA, 15 bp, Homo sapiens
aatgtaaggtgtgag

SEQ ID NO: 991885 - DNA, 15 bp, Homo sapiens
atgtaaggtgtgagg

SEQ ID NO: 991886 - DNA, 15 bp, Homo sapiens
tgtaaggtgtgaggg

SEQ ID NO: 991887 - DNA, 15 bp, Homo sapiens
gtaaggtgtgagggt

SEQ ID NO: 991888 - DNA, 15 bp, Homo sapiens
taaggtgtgagggtg

SEQ ID NO: 991889 - DNA, 15 bp, Homo sapiens
aaggtgtgagggtga

SEQ ID NO: 991890 - DNA, 15 bp, Homo sapiens
aggtgtgagggtgag

SEQ ID NO: 991891 - DNA, 15 bp, Homo sapiens
ggtgtgagggtgagc

SEQ ID NO: 991892 - DNA, 15 bp, Homo sapiens
gtgtgagggtgagca

SEQ ID NO: 991893 - DNA, 15 bp, Homo sapiens
tgtgagggtgagcag

SEQ ID NO: 991894 - DNA, 15 bp, Homo sapiens
gtgagggtgagcagt

SEQ ID NO: 991895 - DNA, 15 bp, Homo sapiens
tgagggtgagcagtg

SEQ ID NO: 991896 - DNA, 15 bp, Homo sapiens
gagggtgagcagtgt

SEQ ID NO: 991897 - DNA, 15 bp, Homo sapiens
agggtgagcagtgta

SEQ ID NO: 991898 - DNA, 15 bp, Homo sapiens
gggtgagcagtgtaa

SEQ ID NO: 991899 - DNA, 15 bp, Homo sapiens
ggtgagcagtgtaag

SEQ ID NO: 991900 - DNA, 15 bp, Homo sapiens
gtgagcagtgtaaga

SEQ ID NO: 991901 - DNA, 15 bp, Homo sapiens
tgagcagtgtaagat

SEQ ID NO: 991902 - DNA, 15 bp, Homo sapiens
gagcagtgtaagatg

SEQ ID NO: 991903 - DNA, 15 bp, Homo sapiens
agcagtgtaagatgt

SEQ ID NO: 991904 - DNA, 15 bp, Homo sapiens
gcagtgtaagatgtg

SEQ ID NO: 991905 - DNA, 15 bp, Homo sapiens
cagtgtaagatgtgt

SEQ ID NO: 991906 - DNA, 15 bp, Homo sapiens
agtgtaagatgtgta

SEQ ID NO: 991907 - DNA, 15 bp, Homo sapiens
gtgtaagatgtgtaa

SEQ ID NO: 991908 - DNA, 15 bp, Homo sapiens
tgtaagatgtgtaag

SEQ ID NO: 991909 - DNA, 15 bp, Homo sapiens
gtaagatgtgtaagc

SEQ ID NO: 991910 - DNA, 15 bp, Homo sapiens
taagatgtgtaagca

SEQ ID NO: 991911 - DNA, 15 bp, Homo sapiens
aagatgtgtaagcag

SEQ ID NO: 991912 - DNA, 15 bp, Homo sapiens
agatgtgtaagcagg

SEQ ID NO: 991913 - DNA, 15 bp, Homo sapiens
gatgtgtaagcaggt

SEQ ID NO: 991914 - DNA, 15 bp, Homo sapiens
atgtgtaagcaggtg

SEQ ID NO: 991915 - DNA, 15 bp, Homo sapiens
gtaagcaggtgtgtt

SEQ ID NO: 991916 - DNA, 15 bp, Homo sapiens
taagcaggtgtgttt

SEQ ID NO: 991917 - DNA, 15 bp, Homo sapiens
aagcaggtgtgtttg

SEQ ID NO: 991918 - DNA, 15 bp, Homo sapiens
agcaggtgtgtttgt

SEQ ID NO: 991919 - DNA, 15 bp, Homo sapiens
gcaggtgtgtttgtg

SEQ ID NO: 991920 - DNA, 15 bp, Homo sapiens
caggtgtgtttgtgc

SEQ ID NO: 991921 - DNA, 15 bp, Homo sapiens
aggtgtgtttgtgca

SEQ ID NO: 991922 - DNA, 15 bp, Homo sapiens
ggtgtgtttgtgcaa

SEQ ID NO: 991923 - DNA, 15 bp, Homo sapiens
gtgtgtttgtgcaag

SEQ ID NO: 991924 - DNA, 15 bp, Homo sapiens
tgtgtttgtgcaagc

SEQ ID NO: 991925 - DNA, 15 bp, Homo sapiens
gtgtttgtgcaagca

SEQ ID NO: 991926 - DNA, 15 bp, Homo sapiens
tgtttgtgcaagcat

SEQ ID NO: 991927 - DNA, 15 bp, Homo sapiens
gtttgtgcaagcatg

SEQ ID NO: 991928 - DNA, 15 bp, Homo sapiens
tttgtgcaagcatgt

SEQ ID NO: 991929 - DNA, 15 bp, Homo sapiens
ttgtgcaagcatgtg

SEQ ID NO: 991930 - DNA, 15 bp, Homo sapiens
tgtgcaagcatgtgt

SEQ ID NO: 991931 - DNA, 15 bp, Homo sapiens
gtgcaagcatgtgta

SEQ ID NO: 991932 - DNA, 15 bp, Homo sapiens
tgcaagcatgtgtaa

SEQ ID NO: 991933 - DNA, 15 bp, Homo sapiens
gcaagcatgtgtaag

SEQ ID NO: 991934 - DNA, 15 bp, Homo sapiens
caagcatgtgtaagc

SEQ ID NO: 991935 - DNA, 15 bp, Homo sapiens
aagcatgtgtaagca

SEQ ID NO: 991936 - DNA, 15 bp, Homo sapiens
agcatgtgtaagcaa

SEQ ID NO: 991937 - DNA, 15 bp, Homo sapiens
gcatgtgtaagcaag

SEQ ID NO: 991938 - DNA, 15 bp, Homo sapiens
catgtgtaagcaagt

SEQ ID NO: 991939 - DNA, 15 bp, Homo sapiens
atgtgtaagcaagta

SEQ ID NO: 991940 - DNA, 15 bp, Homo sapiens
tgtgtaagcaagtat

SEQ ID NO: 991941 - DNA, 15 bp, Homo sapiens
gtgtaagcaagtata

SEQ ID NO: 991942 - DNA, 15 bp, Homo sapiens
tgtaagcaagtataa

SEQ ID NO: 991943 - DNA, 15 bp, Homo sapiens
gtaagcaagtataag

SEQ ID NO: 991944 - DNA, 15 bp, Homo sapiens
taagcaagtataagc

SEQ ID NO: 991945 - DNA, 15 bp, Homo sapiens
aagcaagtataagca

SEQ ID NO: 991946 - DNA, 15 bp, Homo sapiens
agcaagtataagcag

SEQ ID NO: 991947 - DNA, 15 bp, Homo sapiens
gcaagtataagcagg

SEQ ID NO: 991948 - DNA, 15 bp, Homo sapiens
caagtataagcaggt

SEQ ID NO: 991949 - DNA, 15 bp, Homo sapiens
aagtataagcaggtg

SEQ ID NO: 991950 - DNA, 15 bp, Homo sapiens
agtataagcaggtgt

SEQ ID NO: 991951 - DNA, 15 bp, Homo sapiens
gtataagcaggtgtg

SEQ ID NO: 991952 - DNA, 15 bp, Homo sapiens
tataagcaggtgtga

SEQ ID NO: 991953 - DNA, 15 bp, Homo sapiens
ataagcaggtgtgat

SEQ ID NO: 991954 - DNA, 15 bp, Homo sapiens
taagcaggtgtgatt

SEQ ID NO: 991955 - DNA, 15 bp, Homo sapiens
aagcaggtgtgatta

SEQ ID NO: 991956 - DNA, 15 bp, Homo sapiens
agcaggtgtgattat

SEQ ID NO: 991957 - DNA, 15 bp, Homo sapiens
gcaggtgtgattatg

SEQ ID NO: 991958 - DNA, 15 bp, Homo sapiens
caggtgtgattatga

SEQ ID NO: 991959 - DNA, 15 bp, Homo sapiens
aggtgtgattatgag

SEQ ID NO: 991960 - DNA, 15 bp, Homo sapiens
ggtgtgattatgaga

SEQ ID NO: 991961 - DNA, 15 bp, Homo sapiens
gtgtgattatgagac

SEQ ID NO: 991962 - DNA, 15 bp, Homo sapiens
tgtgattatgagacc

SEQ ID NO: 991963 - DNA, 15 bp, Homo sapiens
gtgattatgagacct

SEQ ID NO: 991964 - DNA, 15 bp, Homo sapiens
tgattatgagacctg

SEQ ID NO: 991965 - DNA, 15 bp, Homo sapiens
gattatgagacctgg

SEQ ID NO: 991966 - DNA, 15 bp, Homo sapiens
attatgagacctggt

SEQ ID NO: 991967 - DNA, 15 bp, Homo sapiens
ttatgagacctggtg

SEQ ID NO: 991968 - DNA, 15 bp, Homo sapiens
tatgagacctggtgt

SEQ ID NO: 991969 - DNA, 15 bp, Homo sapiens
atgagacctggtgtg

SEQ ID NO: 991970 - DNA, 15 bp, Homo sapiens
tgagacctggtgtga

SEQ ID NO: 991971 - DNA, 15 bp, Homo sapiens
gagacctggtgtgag

SEQ ID NO: 991972 - DNA, 15 bp, Homo sapiens
agacctggtgtgagg

SEQ ID NO: 991973 - DNA, 15 bp, Homo sapiens
gacctggtgtgaggt

SEQ ID NO: 991974 - DNA, 15 bp, Homo sapiens
acctggtgtgaggtg

SEQ ID NO: 991975 - DNA, 15 bp, Homo sapiens
cctggtgtgaggtgt

SEQ ID NO: 991976 - DNA, 15 bp, Homo sapiens
ctggtgtgaggtgta

SEQ ID NO: 991977 - DNA, 15 bp, Homo sapiens
tggtgtgaggtgtat

SEQ ID NO: 991978 - DNA, 15 bp, Homo sapiens
ggtgtgaggtgtatg

SEQ ID NO: 991979 - DNA, 15 bp, Homo sapiens
gtgtgaggtgtatga

SEQ ID NO: 991980 - DNA, 15 bp, Homo sapiens
tgtgaggtgtatgag

SEQ ID NO: 991981 - DNA, 15 bp, Homo sapiens
gtgaggtgtatgagc

SEQ ID NO: 991982 - DNA, 15 bp, Homo sapiens
tgaggtgtatgagca

SEQ ID NO: 991983 - DNA, 15 bp, Homo sapiens
gaggtgtatgagcag

SEQ ID NO: 991984 - DNA, 15 bp, Homo sapiens
aggtgtatgagcagg

SEQ ID NO: 991985 - DNA, 15 bp, Homo sapiens
ggtgtatgagcaggt

SEQ ID NO: 991986 - DNA, 15 bp, Homo sapiens
gtgtatgagcaggtg

SEQ ID NO: 991987 - DNA, 15 bp, Homo sapiens
tgtatgagcaggtgt

SEQ ID NO: 991988 - DNA, 15 bp, Homo sapiens
gtatgagcaggtgtg

SEQ ID NO: 991989 - DNA, 15 bp, Homo sapiens
tatgagcaggtgtgt

SEQ ID NO: 991990 - DNA, 15 bp, Homo sapiens
atgagcaggtgtgtg

SEQ ID NO: 991991 - DNA, 15 bp, Homo sapiens
tgagcaggtgtgtga

SEQ ID NO: 991992 - DNA, 15 bp, Homo sapiens
gagcaggtgtgtgaa

SEQ ID NO: 991993 - DNA, 15 bp, Homo sapiens
agcaggtgtgtgaac

SEQ ID NO: 991994 - DNA, 15 bp, Homo sapiens
gcaggtgtgtgaaca

SEQ ID NO: 991995 - DNA, 15 bp, Homo sapiens
caggtgtgtgaacat

SEQ ID NO: 991996 - DNA, 15 bp, Homo sapiens
aggtgtgtgaacatg

SEQ ID NO: 991997 - DNA, 15 bp, Homo sapiens
ggtgtgtgaacatga

SEQ ID NO: 991998 - DNA, 15 bp, Homo sapiens
gtgtgtgaacatgag

SEQ ID NO: 991999 - DNA, 15 bp, Homo sapiens
tgtgtgaacatgagt

SEQ ID NO: 992000 - DNA, 15 bp, Homo sapiens
gtgtgaacatgagtg

SEQ ID NO: 992001 - DNA, 15 bp, Homo sapiens
tgtgaacatgagtgt

SEQ ID NO: 992002 - DNA, 15 bp, Homo sapiens
gtgaacatgagtgtg

SEQ ID NO: 992003 - DNA, 15 bp, Homo sapiens
tgaacatgagtgtgt

SEQ ID NO: 992004 - DNA, 15 bp, Homo sapiens
gaacatgagtgtgtg

SEQ ID NO: 992005 - DNA, 15 bp, Homo sapiens
aacatgagtgtgtga

SEQ ID NO: 992006 - DNA, 15 bp, Homo sapiens
acatgagtgtgtgaa

SEQ ID NO: 992007 - DNA, 15 bp, Homo sapiens
catgagtgtgtgaac

SEQ ID NO: 992008 - DNA, 15 bp, Homo sapiens
atgagtgtgtgaacc

SEQ ID NO: 992009 - DNA, 15 bp, Homo sapiens
tgagtgtgtgaacct

SEQ ID NO: 992010 - DNA, 15 bp, Homo sapiens
gagtgtgtgaacctg

SEQ ID NO: 992011 - DNA, 15 bp, Homo sapiens
agtgtgtgaacctgg

SEQ ID NO: 992012 - DNA, 15 bp, Homo sapiens
gtgtgtgaacctggt

SEQ ID NO: 992013 - DNA, 15 bp, Homo sapiens
tgtgtgaacctggtg

SEQ ID NO: 992014 - DNA, 15 bp, Homo sapiens
gtgtgaacctggtgt

SEQ ID NO: 992015 - DNA, 15 bp, Homo sapiens
tgtgaacctggtgtg

SEQ ID NO: 992016 - DNA, 15 bp, Homo sapiens
gtgaacctggtgtga

SEQ ID NO: 992017 - DNA, 15 bp, Homo sapiens
tgaacctggtgtgag

SEQ ID NO: 992018 - DNA, 15 bp, Homo sapiens
gaacctggtgtgagg

SEQ ID NO: 992019 - DNA, 15 bp, Homo sapiens
aacctggtgtgaggt

SEQ ID NO: 992020 - DNA, 15 bp, Homo sapiens
ctggtgtgaggtgtg

SEQ ID NO: 992021 - DNA, 15 bp, Homo sapiens
gtgtgaggtgtgtgt

SEQ ID NO: 992022 - DNA, 15 bp, Homo sapiens
tgtgaggtgtgtgtg

SEQ ID NO: 992023 - DNA, 15 bp, Homo sapiens
gtgaggtgtgtgtga

SEQ ID NO: 992024 - DNA, 15 bp, Homo sapiens
tgaggtgtgtgtgag

SEQ ID NO: 992025 - DNA, 15 bp, Homo sapiens
gaggtgtgtgtgagc

SEQ ID NO: 992026 - DNA, 15 bp, Homo sapiens
tgtgagcaggtgtga

SEQ ID NO: 992027 - DNA, 15 bp, Homo sapiens
tgagcaggtgtgagt

SEQ ID NO: 992028 - DNA, 15 bp, Homo sapiens
gagcaggtgtgagtg

SEQ ID NO: 992029 - DNA, 15 bp, Homo sapiens
agcaggtgtgagtgg

SEQ ID NO: 992030 - DNA, 15 bp, Homo sapiens
gcaggtgtgagtggg

SEQ ID NO: 992031 - DNA, 15 bp, Homo sapiens
caggtgtgagtgggc

SEQ ID NO: 992032 - DNA, 15 bp, Homo sapiens
aggtgtgagtgggca

SEQ ID NO: 992033 - DNA, 15 bp, Homo sapiens
ggtgtgagtgggcat

SEQ ID NO: 992034 - DNA, 15 bp, Homo sapiens
gtgtgagtgggcata

SEQ ID NO: 992035 - DNA, 15 bp, Homo sapiens
tgtgagtgggcatat

SEQ ID NO: 992036 - DNA, 15 bp, Homo sapiens
gtgagtgggcatatg

SEQ ID NO: 992037 - DNA, 15 bp, Homo sapiens
tgagtgggcatatga

SEQ ID NO: 992038 - DNA, 15 bp, Homo sapiens
gagtgggcatatgag

SEQ ID NO: 992039 - DNA, 15 bp, Homo sapiens
agtgggcatatgagt

SEQ ID NO: 992040 - DNA, 15 bp, Homo sapiens
gtgggcatatgagtg

SEQ ID NO: 992041 - DNA, 15 bp, Homo sapiens
tgggcatatgagtgt

SEQ ID NO: 992042 - DNA, 15 bp, Homo sapiens
gggcatatgagtgtg

SEQ ID NO: 992043 - DNA, 15 bp, Homo sapiens
ggcatatgagtgtga

SEQ ID NO: 992044 - DNA, 15 bp, Homo sapiens
gcatatgagtgtgag

SEQ ID NO: 992045 - DNA, 15 bp, Homo sapiens
catatgagtgtgaga

SEQ ID NO: 992046 - DNA, 15 bp, Homo sapiens
atatgagtgtgagaa

SEQ ID NO: 992047 - DNA, 15 bp, Homo sapiens
tatgagtgtgagaag

SEQ ID NO: 992048 - DNA, 15 bp, Homo sapiens
atgagtgtgagaagg

SEQ ID NO: 992049 - DNA, 15 bp, Homo sapiens
tgagtgtgagaaggt

SEQ ID NO: 992050 - DNA, 15 bp, Homo sapiens
gagtgtgagaaggtg

SEQ ID NO: 992051 - DNA, 15 bp, Homo sapiens
agtgtgagaaggtgc

SEQ ID NO: 992052 - DNA, 15 bp, Homo sapiens
gtgtgagaaggtgca

SEQ ID NO: 992053 - DNA, 15 bp, Homo sapiens
tgtgagaaggtgcat

SEQ ID NO: 992054 - DNA, 15 bp, Homo sapiens
gtgagaaggtgcatt

SEQ ID NO: 992055 - DNA, 15 bp, Homo sapiens
tgagaaggtgcattg

SEQ ID NO: 992056 - DNA, 15 bp, Homo sapiens
gagaaggtgcattgg

SEQ ID NO: 992057 - DNA, 15 bp, Homo sapiens
agaaggtgcattggg

SEQ ID NO: 992058 - DNA, 15 bp, Homo sapiens
gaaggtgcattgggt

SEQ ID NO: 992059 - DNA, 15 bp, Homo sapiens
aaggtgcattgggtg

SEQ ID NO: 992060 - DNA, 15 bp, Homo sapiens
aggtgcattgggtgt

SEQ ID NO: 992061 - DNA, 15 bp, Homo sapiens
ggtgcattgggtgtg

SEQ ID NO: 992062 - DNA, 15 bp, Homo sapiens
gtgcattgggtgtga

SEQ ID NO: 992063 - DNA, 15 bp, Homo sapiens
tgcattgggtgtgac

SEQ ID NO: 992064 - DNA, 15 bp, Homo sapiens
gcattgggtgtgacc

SEQ ID NO: 992065 - DNA, 15 bp, Homo sapiens
cattgggtgtgaccg

SEQ ID NO: 992066 - DNA, 15 bp, Homo sapiens
attgggtgtgaccgt

SEQ ID NO: 992067 - DNA, 15 bp, Homo sapiens
ttgggtgtgaccgtg

SEQ ID NO: 992068 - DNA, 15 bp, Homo sapiens
tgggtgtgaccgtgt

SEQ ID NO: 992069 - DNA, 15 bp, Homo sapiens
gggtgtgaccgtgtg

SEQ ID NO: 992070 - DNA, 15 bp, Homo sapiens
ggtgtgaccgtgtgt

SEQ ID NO: 992071 - DNA, 15 bp, Homo sapiens
gtgtgaccgtgtgtg

SEQ ID NO: 992072 - DNA, 15 bp, Homo sapiens
tgtgaccgtgtgtgg

SEQ ID NO: 992073 - DNA, 15 bp, Homo sapiens
gtgaccgtgtgtggg

SEQ ID NO: 992074 - DNA, 15 bp, Homo sapiens
tgaccgtgtgtgggg

SEQ ID NO: 992075 - DNA, 15 bp, Homo sapiens
gaccgtgtgtggggg

SEQ ID NO: 992076 - DNA, 15 bp, Homo sapiens
accgtgtgtgggggc

SEQ ID NO: 992077 - DNA, 15 bp, Homo sapiens
ccgtgtgtgggggca

SEQ ID NO: 992078 - DNA, 15 bp, Homo sapiens
cgtgtgtgggggcag

SEQ ID NO: 992079 - DNA, 15 bp, Homo sapiens
gtgtgtgggggcagt

SEQ ID NO: 992080 - DNA, 15 bp, Homo sapiens
tgtgtgggggcagta

SEQ ID NO: 992081 - DNA, 15 bp, Homo sapiens
gtgtgggggcagtaa

SEQ ID NO: 992082 - DNA, 15 bp, Homo sapiens
tgtgggggcagtaag

SEQ ID NO: 992083 - DNA, 15 bp, Homo sapiens
gtgggggcagtaagt

SEQ ID NO: 992084 - DNA, 15 bp, Homo sapiens
tgggggcagtaagtg

SEQ ID NO: 992085 - DNA, 15 bp, Homo sapiens
gggggcagtaagtgg

SEQ ID NO: 992086 - DNA, 15 bp, Homo sapiens
ggggcagtaagtggg

SEQ ID NO: 992087 - DNA, 15 bp, Homo sapiens
gggcagtaagtgggt

SEQ ID NO: 992088 - DNA, 15 bp, Homo sapiens
ggcagtaagtgggtc

SEQ ID NO: 992089 - DNA, 15 bp, Homo sapiens
gcagtaagtgggtct

SEQ ID NO: 992090 - DNA, 15 bp, Homo sapiens
cagtaagtgggtctg

SEQ ID NO: 992091 - DNA, 15 bp, Homo sapiens
agtaagtgggtctga

SEQ ID NO: 992092 - DNA, 15 bp, Homo sapiens
gtaagtgggtctgag

SEQ ID NO: 992093 - DNA, 15 bp, Homo sapiens
taagtgggtctgagt

SEQ ID NO: 992094 - DNA, 15 bp, Homo sapiens
aagtgggtctgagtg

SEQ ID NO: 992095 - DNA, 15 bp, Homo sapiens
agtgggtctgagtgt

SEQ ID NO: 992096 - DNA, 15 bp, Homo sapiens
gtgggtctgagtgtg

SEQ ID NO: 992097 - DNA, 15 bp, Homo sapiens
tgggtctgagtgtgt

SEQ ID NO: 992098 - DNA, 15 bp, Homo sapiens
gggtctgagtgtgtg

SEQ ID NO: 992099 - DNA, 15 bp, Homo sapiens
ggtctgagtgtgtgt

SEQ ID NO: 992100 - DNA, 15 bp, Homo sapiens
gtctgagtgtgtgtg

SEQ ID NO: 992101 - DNA, 15 bp, Homo sapiens
tctgagtgtgtgtgc

SEQ ID NO: 992102 - DNA, 15 bp, Homo sapiens
ctgagtgtgtgtgca

SEQ ID NO: 992103 - DNA, 15 bp, Homo sapiens
tgagtgtgtgtgcat

SEQ ID NO: 992104 - DNA, 15 bp, Homo sapiens
gagtgtgtgtgcatg

SEQ ID NO: 992105 - DNA, 15 bp, Homo sapiens
agtgtgtgtgcatgt

SEQ ID NO: 992106 - DNA, 15 bp, Homo sapiens
gtgtgtgtgcatgtg

SEQ ID NO: 992107 - DNA, 15 bp, Homo sapiens
tgtgtgtgcatgtgt

SEQ ID NO: 992108 - DNA, 15 bp, Homo sapiens
gtgtgtgcatgtgtg

SEQ ID NO: 992109 - DNA, 15 bp, Homo sapiens
tgtgtgcatgtgtgt

SEQ ID NO: 992110 - DNA, 15 bp, Homo sapiens
gtgcatgtgtgtgag

SEQ ID NO: 992111 - DNA, 15 bp, Homo sapiens
tgcatgtgtgtgagt

SEQ ID NO: 992112 - DNA, 15 bp, Homo sapiens
gcatgtgtgtgagtg

SEQ ID NO: 992113 - DNA, 15 bp, Homo sapiens
catgtgtgtgagtgg

SEQ ID NO: 992114 - DNA, 15 bp, Homo sapiens
atgtgtgtgagtggg

SEQ ID NO: 992115 - DNA, 15 bp, Homo sapiens
tgtgtgagtgggtgc

SEQ ID NO: 992116 - DNA, 15 bp, Homo sapiens
gtgtgagtgggtgca

SEQ ID NO: 992117 - DNA, 15 bp, Homo sapiens
tgtgagtgggtgcat

SEQ ID NO: 992118 - DNA, 15 bp, Homo sapiens
gtgagtgggtgcatt

SEQ ID NO: 992119 - DNA, 15 bp, Homo sapiens
tgagtgggtgcattg

SEQ ID NO: 992120 - DNA, 15 bp, Homo sapiens
gagtgggtgcattgg

SEQ ID NO: 992121 - DNA, 15 bp, Homo sapiens
agtgggtgcattggg

SEQ ID NO: 992122 - DNA, 15 bp, Homo sapiens
gtgggtgcattgggt

SEQ ID NO: 992123 - DNA, 15 bp, Homo sapiens
tgggtgcattgggtg

SEQ ID NO: 992124 - DNA, 15 bp, Homo sapiens
gggtgcattgggtgg

SEQ ID NO: 992125 - DNA, 15 bp, Homo sapiens
ggtgcattgggtggg

SEQ ID NO: 992126 - DNA, 15 bp, Homo sapiens
gtgcattgggtgggt

SEQ ID NO: 992127 - DNA, 15 bp, Homo sapiens
tgcattgggtgggtg

SEQ ID NO: 992128 - DNA, 15 bp, Homo sapiens
gcattgggtgggtgt

SEQ ID NO: 992129 - DNA, 15 bp, Homo sapiens
cattgggtgggtgtg

SEQ ID NO: 992130 - DNA, 15 bp, Homo sapiens
attgggtgggtgtga

SEQ ID NO: 992131 - DNA, 15 bp, Homo sapiens
ttgggtgggtgtgag

SEQ ID NO: 992132 - DNA, 15 bp, Homo sapiens
tgggtgggtgtgagt

SEQ ID NO: 992133 - DNA, 15 bp, Homo sapiens
gggtgggtgtgagtg

SEQ ID NO: 992134 - DNA, 15 bp, Homo sapiens
ggtgggtgtgagtgt

SEQ ID NO: 992135 - DNA, 15 bp, Homo sapiens
gtgggtgtgagtgtg

SEQ ID NO: 992136 - DNA, 15 bp, Homo sapiens
tgggtgtgagtgtgc

SEQ ID NO: 992137 - DNA, 15 bp, Homo sapiens
gggtgtgagtgtgca

SEQ ID NO: 992138 - DNA, 15 bp, Homo sapiens
ggtgtgagtgtgcat

SEQ ID NO: 992139 - DNA, 15 bp, Homo sapiens
gtgtgagtgtgcatg

SEQ ID NO: 992140 - DNA, 15 bp, Homo sapiens
tgtgagtgtgcatgt

SEQ ID NO: 992141 - DNA, 15 bp, Homo sapiens
gtgagtgtgcatgtg

SEQ ID NO: 992142 - DNA, 15 bp, Homo sapiens
tgagtgtgcatgtga

SEQ ID NO: 992143 - DNA, 15 bp, Homo sapiens
gagtgtgcatgtgag

SEQ ID NO: 992144 - DNA, 15 bp, Homo sapiens
agtgtgcatgtgagt

SEQ ID NO: 992145 - DNA, 15 bp, Homo sapiens
gtgtgcatgtgagtg

SEQ ID NO: 992146 - DNA, 15 bp, Homo sapiens
tgtgcatgtgagtgg

SEQ ID NO: 992147 - DNA, 15 bp, Homo sapiens
gtgcatgtgagtggg

SEQ ID NO: 992148 - DNA, 15 bp, Homo sapiens
tgcatgtgagtgggt

SEQ ID NO: 992149 - DNA, 15 bp, Homo sapiens
agtgggtgtgaatga

SEQ ID NO: 992150 - DNA, 15 bp, Homo sapiens
gtgggtgtgaatgag

SEQ ID NO: 992151 - DNA, 15 bp, Homo sapiens
tgggtgtgaatgagg

SEQ ID NO: 992152 - DNA, 15 bp, Homo sapiens
gggtgtgaatgaggt

SEQ ID NO: 992153 - DNA, 15 bp, Homo sapiens
ggtgtgaatgaggtg

SEQ ID NO: 992154 - DNA, 15 bp, Homo sapiens
gtgtgaatgaggtgt

SEQ ID NO: 992155 - DNA, 15 bp, Homo sapiens
tgtgaatgaggtgtg

SEQ ID NO: 992156 - DNA, 15 bp, Homo sapiens
gtgaatgaggtgtga

SEQ ID NO: 992157 - DNA, 15 bp, Homo sapiens
tgaatgaggtgtgag

SEQ ID NO: 992158 - DNA, 15 bp, Homo sapiens
gaatgaggtgtgagc

SEQ ID NO: 992159 - DNA, 15 bp, Homo sapiens
aatgaggtgtgagca

SEQ ID NO: 992160 - DNA, 15 bp, Homo sapiens
gaggtgtgagcatga

SEQ ID NO: 992161 - DNA, 15 bp, Homo sapiens
aggtgtgagcatgag

SEQ ID NO: 992162 - DNA, 15 bp, Homo sapiens
ggtgtgagcatgagt

SEQ ID NO: 992163 - DNA, 15 bp, Homo sapiens
gtgtgagcatgagtg

SEQ ID NO: 992164 - DNA, 15 bp, Homo sapiens
tgtgagcatgagtgg

SEQ ID NO: 992165 - DNA, 15 bp, Homo sapiens
gtgagcatgagtggg

SEQ ID NO: 992166 - DNA, 15 bp, Homo sapiens
tgagcatgagtgggt

SEQ ID NO: 992167 - DNA, 15 bp, Homo sapiens
gagcatgagtgggtg

SEQ ID NO: 992168 - DNA, 15 bp, Homo sapiens
agcatgagtgggtgt

SEQ ID NO: 992169 - DNA, 15 bp, Homo sapiens
gcatgagtgggtgtg

SEQ ID NO: 992170 - DNA, 15 bp, Homo sapiens
catgagtgggtgtga

SEQ ID NO: 992171 - DNA, 15 bp, Homo sapiens
atgagtgggtgtgac

SEQ ID NO: 992172 - DNA, 15 bp, Homo sapiens
tgagtgggtgtgacc

SEQ ID NO: 992173 - DNA, 15 bp, Homo sapiens
gagtgggtgtgacca

SEQ ID NO: 992174 - DNA, 15 bp, Homo sapiens
agtgggtgtgaccag

SEQ ID NO: 992175 - DNA, 15 bp, Homo sapiens
gtgggtgtgaccagg

SEQ ID NO: 992176 - DNA, 15 bp, Homo sapiens
tgggtgtgaccaggt

SEQ ID NO: 992177 - DNA, 15 bp, Homo sapiens
gggtgtgaccaggtg

SEQ ID NO: 992178 - DNA, 15 bp, Homo sapiens
ggtgtgaccaggtgt

SEQ ID NO: 992179 - DNA, 15 bp, Homo sapiens
gtgtgaccaggtgtg

SEQ ID NO: 992180 - DNA, 15 bp, Homo sapiens
tgtgaccaggtgtgt

SEQ ID NO: 992181 - DNA, 15 bp, Homo sapiens
gtgaccaggtgtgtg

SEQ ID NO: 992182 - DNA, 15 bp, Homo sapiens
tgaccaggtgtgtgt

SEQ ID NO: 992183 - DNA, 15 bp, Homo sapiens
gaccaggtgtgtgtg

SEQ ID NO: 992184 - DNA, 15 bp, Homo sapiens
accaggtgtgtgtga

SEQ ID NO: 992185 - DNA, 15 bp, Homo sapiens
ccaggtgtgtgtgag

SEQ ID NO: 992186 - DNA, 15 bp, Homo sapiens
gtgtgtgagtgggtt

SEQ ID NO: 992187 - DNA, 15 bp, Homo sapiens
tgtgtgagtgggttg

SEQ ID NO: 992188 - DNA, 15 bp, Homo sapiens
gtgtgagtgggttgt

SEQ ID NO: 992189 - DNA, 15 bp, Homo sapiens
tgtgagtgggttgtg

SEQ ID NO: 992190 - DNA, 15 bp, Homo sapiens
gtgagtgggttgtga

SEQ ID NO: 992191 - DNA, 15 bp, Homo sapiens
tgagtgggttgtgaa

SEQ ID NO: 992192 - DNA, 15 bp, Homo sapiens
gagtgggttgtgaat

SEQ ID NO: 992193 - DNA, 15 bp, Homo sapiens
agtgggttgtgaatg

SEQ ID NO: 992194 - DNA, 15 bp, Homo sapiens
gtgggttgtgaatgt

SEQ ID NO: 992195 - DNA, 15 bp, Homo sapiens
tgggttgtgaatgtg

SEQ ID NO: 992196 - DNA, 15 bp, Homo sapiens
gggttgtgaatgtgt

SEQ ID NO: 992197 - DNA, 15 bp, Homo sapiens
ggttgtgaatgtgta

SEQ ID NO: 992198 - DNA, 15 bp, Homo sapiens
gttgtgaatgtgtaa

SEQ ID NO: 992199 - DNA, 15 bp, Homo sapiens
ttgtgaatgtgtaag

SEQ ID NO: 992200 - DNA, 15 bp, Homo sapiens
tgtgaatgtgtaagc

SEQ ID NO: 992201 - DNA, 15 bp, Homo sapiens
gtgaatgtgtaagca

SEQ ID NO: 992202 - DNA, 15 bp, Homo sapiens
tgaatgtgtaagcag

SEQ ID NO: 992203 - DNA, 15 bp, Homo sapiens
gaatgtgtaagcaga

SEQ ID NO: 992204 - DNA, 15 bp, Homo sapiens
aatgtgtaagcagat

SEQ ID NO: 992205 - DNA, 15 bp, Homo sapiens
atgtgtaagcagatg

SEQ ID NO: 992206 - DNA, 15 bp, Homo sapiens
tgtgtaagcagatgc

SEQ ID NO: 992207 - DNA, 15 bp, Homo sapiens
gtgtaagcagatgca

SEQ ID NO: 992208 - DNA, 15 bp, Homo sapiens
tgtaagcagatgcag

SEQ ID NO: 992209 - DNA, 15 bp, Homo sapiens
gtaagcagatgcagt

SEQ ID NO: 992210 - DNA, 15 bp, Homo sapiens
taagcagatgcagtg

SEQ ID NO: 992211 - DNA, 15 bp, Homo sapiens
aagcagatgcagtgt

SEQ ID NO: 992212 - DNA, 15 bp, Homo sapiens
agcagatgcagtgtg

SEQ ID NO: 992213 - DNA, 15 bp, Homo sapiens
gcagatgcagtgtgg

SEQ ID NO: 992214 - DNA, 15 bp, Homo sapiens
cagatgcagtgtggg

SEQ ID NO: 992215 - DNA, 15 bp, Homo sapiens
agatgcagtgtgggt

SEQ ID NO: 992216 - DNA, 15 bp, Homo sapiens
gatgcagtgtgggtt

SEQ ID NO: 992217 - DNA, 15 bp, Homo sapiens
atgcagtgtgggttt

SEQ ID NO: 992218 - DNA, 15 bp, Homo sapiens
tgcagtgtgggtttg

SEQ ID NO: 992219 - DNA, 15 bp, Homo sapiens
gcagtgtgggtttga

SEQ ID NO: 992220 - DNA, 15 bp, Homo sapiens
cagtgtgggtttgaa

SEQ ID NO: 992221 - DNA, 15 bp, Homo sapiens
agtgtgggtttgaac

SEQ ID NO: 992222 - DNA, 15 bp, Homo sapiens
gtgtgggtttgaaca

SEQ ID NO: 992223 - DNA, 15 bp, Homo sapiens
tgtgggtttgaacat

SEQ ID NO: 992224 - DNA, 15 bp, Homo sapiens
gtgggtttgaacatg

SEQ ID NO: 992225 - DNA, 15 bp, Homo sapiens
tgggtttgaacatgt

SEQ ID NO: 992226 - DNA, 15 bp, Homo sapiens
gggtttgaacatgtg

SEQ ID NO: 992227 - DNA, 15 bp, Homo sapiens
ggtttgaacatgtgg

SEQ ID NO: 992228 - DNA, 15 bp, Homo sapiens
gtttgaacatgtggg

SEQ ID NO: 992229 - DNA, 15 bp, Homo sapiens
tttgaacatgtgggt

SEQ ID NO: 992230 - DNA, 15 bp, Homo sapiens
ttgaacatgtgggtg

SEQ ID NO: 992231 - DNA, 15 bp, Homo sapiens
tgaacatgtgggtgg

SEQ ID NO: 992232 - DNA, 15 bp, Homo sapiens
gaacatgtgggtggg

SEQ ID NO: 992233 - DNA, 15 bp, Homo sapiens
aacatgtgggtgggt

SEQ ID NO: 992234 - DNA, 15 bp, Homo sapiens
acatgtgggtgggtg

SEQ ID NO: 992235 - DNA, 15 bp, Homo sapiens
catgtgggtgggtgc

SEQ ID NO: 992236 - DNA, 15 bp, Homo sapiens
atgtgggtgggtgca

SEQ ID NO: 992237 - DNA, 15 bp, Homo sapiens
tgtgggtgggtgcaa

SEQ ID NO: 992238 - DNA, 15 bp, Homo sapiens
gtgggtgggtgcaag

SEQ ID NO: 992239 - DNA, 15 bp, Homo sapiens
tgggtgggtgcaagc

SEQ ID NO: 992240 - DNA, 15 bp, Homo sapiens
gggtgggtgcaagca

SEQ ID NO: 992241 - DNA, 15 bp, Homo sapiens
ggtgggtgcaagcat

SEQ ID NO: 992242 - DNA, 15 bp, Homo sapiens
gtgggtgcaagcatg

SEQ ID NO: 992243 - DNA, 15 bp, Homo sapiens
tgggtgcaagcatgt

SEQ ID NO: 992244 - DNA, 15 bp, Homo sapiens
gggtgcaagcatgtg

SEQ ID NO: 992245 - DNA, 15 bp, Homo sapiens
ggtgcaagcatgtga

SEQ ID NO: 992246 - DNA, 15 bp, Homo sapiens
gtgcaagcatgtgag

SEQ ID NO: 992247 - DNA, 15 bp, Homo sapiens
tgcaagcatgtgagt

SEQ ID NO: 992248 - DNA, 15 bp, Homo sapiens
gcaagcatgtgagtg

SEQ ID NO: 992249 - DNA, 15 bp, Homo sapiens
caagcatgtgagtgg

SEQ ID NO: 992250 - DNA, 15 bp, Homo sapiens
aagcatgtgagtggg

SEQ ID NO: 992251 - DNA, 15 bp, Homo sapiens
gtgagtgggtgtgtc

SEQ ID NO: 992252 - DNA, 15 bp, Homo sapiens
tgagtgggtgtgtcg

SEQ ID NO: 992253 - DNA, 15 bp, Homo sapiens
gagtgggtgtgtcgt

SEQ ID NO: 992254 - DNA, 15 bp, Homo sapiens
agtgggtgtgtcgtg

SEQ ID NO: 992255 - DNA, 15 bp, Homo sapiens
gtgggtgtgtcgtgt

SEQ ID NO: 992256 - DNA, 15 bp, Homo sapiens
tgggtgtgtcgtgtg

SEQ ID NO: 992257 - DNA, 15 bp, Homo sapiens
gggtgtgtcgtgtgg

SEQ ID NO: 992258 - DNA, 15 bp, Homo sapiens
ggtgtgtcgtgtggg

SEQ ID NO: 992259 - DNA, 15 bp, Homo sapiens
gtgtgtcgtgtgggt

SEQ ID NO: 992260 - DNA, 15 bp, Homo sapiens
tgtgtcgtgtgggtg

SEQ ID NO: 992261 - DNA, 15 bp, Homo sapiens
gtgtcgtgtgggtgc

SEQ ID NO: 992262 - DNA, 15 bp, Homo sapiens
tgtcgtgtgggtgcc

SEQ ID NO: 992263 - DNA, 15 bp, Homo sapiens
gtcgtgtgggtgcca

SEQ ID NO: 992264 - DNA, 15 bp, Homo sapiens
tcgtgtgggtgccag

SEQ ID NO: 992265 - DNA, 15 bp, Homo sapiens
cgtgtgggtgccagt

SEQ ID NO: 992266 - DNA, 15 bp, Homo sapiens
gtgtgggtgccagtg

SEQ ID NO: 992267 - DNA, 15 bp, Homo sapiens
tgtgggtgccagtgt

SEQ ID NO: 992268 - DNA, 15 bp, Homo sapiens
gtgggtgccagtgtg

SEQ ID NO: 992269 - DNA, 15 bp, Homo sapiens
tgggtgccagtgtgt

SEQ ID NO: 992270 - DNA, 15 bp, Homo sapiens
gggtgccagtgtgtg

SEQ ID NO: 992271 - DNA, 15 bp, Homo sapiens
ggtgccagtgtgtgg

SEQ ID NO: 992272 - DNA, 15 bp, Homo sapiens
gtgccagtgtgtggg

SEQ ID NO: 992273 - DNA, 15 bp, Homo sapiens
tgccagtgtgtgggg

SEQ ID NO: 992274 - DNA, 15 bp, Homo sapiens
gccagtgtgtggggg

SEQ ID NO: 992275 - DNA, 15 bp, Homo sapiens
ccagtgtgtgggggc

SEQ ID NO: 992276 - DNA, 15 bp, Homo sapiens
cagtgtgtgggggca

SEQ ID NO: 992277 - DNA, 15 bp, Homo sapiens
agtgtgtgggggcat

SEQ ID NO: 992278 - DNA, 15 bp, Homo sapiens
gtgtgtgggggcatg

SEQ ID NO: 992279 - DNA, 15 bp, Homo sapiens
tgtgtgggggcatgt

SEQ ID NO: 992280 - DNA, 15 bp, Homo sapiens
gtgtgggggcatgtt

SEQ ID NO: 992281 - DNA, 15 bp, Homo sapiens
tgtgggggcatgtta

SEQ ID NO: 992282 - DNA, 15 bp, Homo sapiens
gtgggggcatgttag

SEQ ID NO: 992283 - DNA, 15 bp, Homo sapiens
tgggggcatgttagt

SEQ ID NO: 992284 - DNA, 15 bp, Homo sapiens
gggggcatgttagtg

SEQ ID NO: 992285 - DNA, 15 bp, Homo sapiens
ggggcatgttagtga

SEQ ID NO: 992286 - DNA, 15 bp, Homo sapiens
gggcatgttagtgaa

SEQ ID NO: 992287 - DNA, 15 bp, Homo sapiens
ggcatgttagtgaat

SEQ ID NO: 992288 - DNA, 15 bp, Homo sapiens
gcatgttagtgaatg

SEQ ID NO: 992289 - DNA, 15 bp, Homo sapiens
catgttagtgaatga

SEQ ID NO: 992290 - DNA, 15 bp, Homo sapiens
atgttagtgaatgag

SEQ ID NO: 992291 - DNA, 15 bp, Homo sapiens
tgttagtgaatgagt

SEQ ID NO: 992292 - DNA, 15 bp, Homo sapiens
gttagtgaatgagtg

SEQ ID NO: 992293 - DNA, 15 bp, Homo sapiens
ttagtgaatgagtgt

SEQ ID NO: 992294 - DNA, 15 bp, Homo sapiens
tagtgaatgagtgtg

SEQ ID NO: 992295 - DNA, 15 bp, Homo sapiens
agtgaatgagtgtgt

SEQ ID NO: 992296 - DNA, 15 bp, Homo sapiens
agtgtgtgagcatgt

SEQ ID NO: 992297 - DNA, 15 bp, Homo sapiens
gtgtgtgagcatgtg

SEQ ID NO: 992298 - DNA, 15 bp, Homo sapiens
agcatgtgtgtgagt

SEQ ID NO: 992299 - DNA, 15 bp, Homo sapiens
catgtgtgtgagtgt

SEQ ID NO: 992300 - DNA, 15 bp, Homo sapiens
atgtgtgtgagtgtg

SEQ ID NO: 992301 - DNA, 15 bp, Homo sapiens
tgtgtgtgagtgtga

SEQ ID NO: 992302 - DNA, 15 bp, Homo sapiens
gtgtgtgagtgtgag

SEQ ID NO: 992303 - DNA, 15 bp, Homo sapiens
tgtgtgagtgtgagc

SEQ ID NO: 992304 - DNA, 15 bp, Homo sapiens
gtgtgagtgtgagct

SEQ ID NO: 992305 - DNA, 15 bp, Homo sapiens
tgtgagtgtgagctg

SEQ ID NO: 992306 - DNA, 15 bp, Homo sapiens
gtgagtgtgagctgg

SEQ ID NO: 992307 - DNA, 15 bp, Homo sapiens
tgagtgtgagctggt

SEQ ID NO: 992308 - DNA, 15 bp, Homo sapiens
gagtgtgagctggtg

SEQ ID NO: 992309 - DNA, 15 bp, Homo sapiens
agtgtgagctggtgc

SEQ ID NO: 992310 - DNA, 15 bp, Homo sapiens
gtgtgagctggtgca

SEQ ID NO: 992311 - DNA, 15 bp, Homo sapiens
tgtgagctggtgcat

SEQ ID NO: 992312 - DNA, 15 bp, Homo sapiens
gtgagctggtgcatt

SEQ ID NO: 992313 - DNA, 15 bp, Homo sapiens
tgagctggtgcattg

SEQ ID NO: 992314 - DNA, 15 bp, Homo sapiens
gagctggtgcattgt

SEQ ID NO: 992315 - DNA, 15 bp, Homo sapiens
agctggtgcattgtg

SEQ ID NO: 992316 - DNA, 15 bp, Homo sapiens
gctggtgcattgtgt

SEQ ID NO: 992317 - DNA, 15 bp, Homo sapiens
ctggtgcattgtgtg

SEQ ID NO: 992318 - DNA, 15 bp, Homo sapiens
tggtgcattgtgtgg

SEQ ID NO: 992319 - DNA, 15 bp, Homo sapiens
ggtgcattgtgtggg

SEQ ID NO: 992320 - DNA, 15 bp, Homo sapiens
gtgcattgtgtgggt

SEQ ID NO: 992321 - DNA, 15 bp, Homo sapiens
tgcattgtgtgggtg

SEQ ID NO: 992322 - DNA, 15 bp, Homo sapiens
gcattgtgtgggtgt

SEQ ID NO: 992323 - DNA, 15 bp, Homo sapiens
cattgtgtgggtgtg

SEQ ID NO: 992324 - DNA, 15 bp, Homo sapiens
attgtgtgggtgtgt

SEQ ID NO: 992325 - DNA, 15 bp, Homo sapiens
ttgtgtgggtgtgtg

SEQ ID NO: 992326 - DNA, 15 bp, Homo sapiens
tgtgtgggtgtgtga

SEQ ID NO: 992327 - DNA, 15 bp, Homo sapiens
gtgtgggtgtgtgag

SEQ ID NO: 992328 - DNA, 15 bp, Homo sapiens
tgtgggtgtgtgaga

SEQ ID NO: 992329 - DNA, 15 bp, Homo sapiens
tgggtgtgtgagaaa

SEQ ID NO: 992330 - DNA, 15 bp, Homo sapiens
gggtgtgtgagaaag

SEQ ID NO: 992331 - DNA, 15 bp, Homo sapiens
ggtgtgtgagaaagt

SEQ ID NO: 992332 - DNA, 15 bp, Homo sapiens
gtgtgtgagaaagtg

SEQ ID NO: 992333 - DNA, 15 bp, Homo sapiens
tgtgtgagaaagtga

SEQ ID NO: 992334 - DNA, 15 bp, Homo sapiens
gtgtgagaaagtgac

SEQ ID NO: 992335 - DNA, 15 bp, Homo sapiens
tgtgagaaagtgaca

SEQ ID NO: 992336 - DNA, 15 bp, Homo sapiens
gtgagaaagtgacag

SEQ ID NO: 992337 - DNA, 15 bp, Homo sapiens
tgagaaagtgacagt

SEQ ID NO: 992338 - DNA, 15 bp, Homo sapiens
gagaaagtgacagtg

SEQ ID NO: 992339 - DNA, 15 bp, Homo sapiens
agaaagtgacagtgt

SEQ ID NO: 992340 - DNA, 15 bp, Homo sapiens
gaaagtgacagtgtg

SEQ ID NO: 992341 - DNA, 15 bp, Homo sapiens
aaagtgacagtgtgt

SEQ ID NO: 992342 - DNA, 15 bp, Homo sapiens
aagtgacagtgtgtg

SEQ ID NO: 992343 - DNA, 15 bp, Homo sapiens
agtgacagtgtgtga

SEQ ID NO: 992344 - DNA, 15 bp, Homo sapiens
gtgacagtgtgtgag

SEQ ID NO: 992345 - DNA, 15 bp, Homo sapiens
tgacagtgtgtgagg

SEQ ID NO: 992346 - DNA, 15 bp, Homo sapiens
gacagtgtgtgaggg

SEQ ID NO: 992347 - DNA, 15 bp, Homo sapiens
acagtgtgtgagggc

SEQ ID NO: 992348 - DNA, 15 bp, Homo sapiens
cagtgtgtgagggca

SEQ ID NO: 992349 - DNA, 15 bp, Homo sapiens
agtgtgtgagggcag

SEQ ID NO: 992350 - DNA, 15 bp, Homo sapiens
gtgtgtgagggcaga

SEQ ID NO: 992351 - DNA, 15 bp, Homo sapiens
tgtgtgagggcagat

SEQ ID NO: 992352 - DNA, 15 bp, Homo sapiens
gtgtgagggcagatg

SEQ ID NO: 992353 - DNA, 15 bp, Homo sapiens
tgtgagggcagatgt

SEQ ID NO: 992354 - DNA, 15 bp, Homo sapiens
gtgagggcagatgtg

SEQ ID NO: 992355 - DNA, 15 bp, Homo sapiens
tgagggcagatgtgg

SEQ ID NO: 992356 - DNA, 15 bp, Homo sapiens
gagggcagatgtggg

SEQ ID NO: 992357 - DNA, 15 bp, Homo sapiens
agggcagatgtgggt

SEQ ID NO: 992358 - DNA, 15 bp, Homo sapiens
gggcagatgtgggtg

SEQ ID NO: 992359 - DNA, 15 bp, Homo sapiens
ggcagatgtgggtgt

SEQ ID NO: 992360 - DNA, 15 bp, Homo sapiens
gcagatgtgggtgtg

SEQ ID NO: 992361 - DNA, 15 bp, Homo sapiens
cagatgtgggtgtga

SEQ ID NO: 992362 - DNA, 15 bp, Homo sapiens
agatgtgggtgtgaa

SEQ ID NO: 992363 - DNA, 15 bp, Homo sapiens
gatgtgggtgtgaat

SEQ ID NO: 992364 - DNA, 15 bp, Homo sapiens
atgtgggtgtgaatg

SEQ ID NO: 992365 - DNA, 15 bp, Homo sapiens
tgtgggtgtgaatgt

SEQ ID NO: 992366 - DNA, 15 bp, Homo sapiens
tgggtgtgaatgtgc

SEQ ID NO: 992367 - DNA, 15 bp, Homo sapiens
gggtgtgaatgtgca

SEQ ID NO: 992368 - DNA, 15 bp, Homo sapiens
ggtgtgaatgtgcaa

SEQ ID NO: 992369 - DNA, 15 bp, Homo sapiens
gtgtgaatgtgcaag

SEQ ID NO: 992370 - DNA, 15 bp, Homo sapiens
tgtgaatgtgcaagt

SEQ ID NO: 992371 - DNA, 15 bp, Homo sapiens
gtgaatgtgcaagtg

SEQ ID NO: 992372 - DNA, 15 bp, Homo sapiens
tgaatgtgcaagtgg

SEQ ID NO: 992373 - DNA, 15 bp, Homo sapiens
gaatgtgcaagtggg

SEQ ID NO: 992374 - DNA, 15 bp, Homo sapiens
aatgtgcaagtgggt

SEQ ID NO: 992375 - DNA, 15 bp, Homo sapiens
atgtgcaagtgggtg

SEQ ID NO: 992376 - DNA, 15 bp, Homo sapiens
tgtgcaagtgggtgg

SEQ ID NO: 992377 - DNA, 15 bp, Homo sapiens
gtgcaagtgggtggg

SEQ ID NO: 992378 - DNA, 15 bp, Homo sapiens
tgcaagtgggtgggt

SEQ ID NO: 992379 - DNA, 15 bp, Homo sapiens
gcaagtgggtgggtg

SEQ ID NO: 992380 - DNA, 15 bp, Homo sapiens
caagtgggtgggtgt

SEQ ID NO: 992381 - DNA, 15 bp, Homo sapiens
aagtgggtgggtgtg

SEQ ID NO: 992382 - DNA, 15 bp, Homo sapiens
agtgggtgggtgtgg

SEQ ID NO: 992383 - DNA, 15 bp, Homo sapiens
gtgggtgggtgtggg

SEQ ID NO: 992384 - DNA, 15 bp, Homo sapiens
tgggtgggtgtgggt

SEQ ID NO: 992385 - DNA, 15 bp, Homo sapiens
gggtgggtgtgggtg

SEQ ID NO: 992386 - DNA, 15 bp, Homo sapiens
ggtgggtgtgggtgc

SEQ ID NO: 992387 - DNA, 15 bp, Homo sapiens
gtgggtgtgggtgca

SEQ ID NO: 992388 - DNA, 15 bp, Homo sapiens
tgggtgtgggtgcaa

SEQ ID NO: 992389 - DNA, 15 bp, Homo sapiens
gggtgtgggtgcaat

SEQ ID NO: 992390 - DNA, 15 bp, Homo sapiens
ggtgtgggtgcaatc

SEQ ID NO: 992391 - DNA, 15 bp, Homo sapiens
gtgtgggtgcaatct

SEQ ID NO: 992392 - DNA, 15 bp, Homo sapiens
tgtgggtgcaatctg

SEQ ID NO: 992393 - DNA, 15 bp, Homo sapiens
gtgggtgcaatctgg

SEQ ID NO: 992394 - DNA, 15 bp, Homo sapiens
tgggtgcaatctggc

SEQ ID NO: 992395 - DNA, 15 bp, Homo sapiens
gggtgcaatctggcg

SEQ ID NO: 992396 - DNA, 15 bp, Homo sapiens
ggtgcaatctggcgt

SEQ ID NO: 992397 - DNA, 15 bp, Homo sapiens
gtgcaatctggcgtt

SEQ ID NO: 992398 - DNA, 15 bp, Homo sapiens
tgcaatctggcgttt

SEQ ID NO: 992399 - DNA, 15 bp, Homo sapiens
gcaatctggcgtttg

SEQ ID NO: 992400 - DNA, 15 bp, Homo sapiens
caatctggcgtttgg

SEQ ID NO: 992401 - DNA, 15 bp, Homo sapiens
aatctggcgtttggg

SEQ ID NO: 992402 - DNA, 15 bp, Homo sapiens
atctggcgtttgggt

SEQ ID NO: 992403 - DNA, 15 bp, Homo sapiens
tctggcgtttgggtg

SEQ ID NO: 992404 - DNA, 15 bp, Homo sapiens
ctggcgtttgggtgc

SEQ ID NO: 992405 - DNA, 15 bp, Homo sapiens
tggcgtttgggtgca

SEQ ID NO: 992406 - DNA, 15 bp, Homo sapiens
ggcgtttgggtgcat

SEQ ID NO: 992407 - DNA, 15 bp, Homo sapiens
gcgtttgggtgcatt

SEQ ID NO: 992408 - DNA, 15 bp, Homo sapiens
cgtttgggtgcattg

SEQ ID NO: 992409 - DNA, 15 bp, Homo sapiens
gtttgggtgcattgc

SEQ ID NO: 992410 - DNA, 15 bp, Homo sapiens
tttgggtgcattgca

SEQ ID NO: 992411 - DNA, 15 bp, Homo sapiens
ttgggtgcattgcac

SEQ ID NO: 992412 - DNA, 15 bp, Homo sapiens
tgggtgcattgcaca

SEQ ID NO: 992413 - DNA, 15 bp, Homo sapiens
gggtgcattgcacaa

SEQ ID NO: 992414 - DNA, 15 bp, Homo sapiens
ggtgcattgcacaag

SEQ ID NO: 992415 - DNA, 15 bp, Homo sapiens
gtgcattgcacaagc

SEQ ID NO: 992416 - DNA, 15 bp, Homo sapiens
tgcattgcacaagca

SEQ ID NO: 992417 - DNA, 15 bp, Homo sapiens
gcattgcacaagcat

SEQ ID NO: 992418 - DNA, 15 bp, Homo sapiens
cattgcacaagcatg

SEQ ID NO: 992419 - DNA, 15 bp, Homo sapiens
attgcacaagcatgt

SEQ ID NO: 992420 - DNA, 15 bp, Homo sapiens
ttgcacaagcatgtg

SEQ ID NO: 992421 - DNA, 15 bp, Homo sapiens
tgcacaagcatgtgt

SEQ ID NO: 992422 - DNA, 15 bp, Homo sapiens
gcacaagcatgtgtg

SEQ ID NO: 992423 - DNA, 15 bp, Homo sapiens
cacaagcatgtgtgt

SEQ ID NO: 992424 - DNA, 15 bp, Homo sapiens
acaagcatgtgtgtg

SEQ ID NO: 992425 - DNA, 15 bp, Homo sapiens
caagcatgtgtgtga

SEQ ID NO: 992426 - DNA, 15 bp, Homo sapiens
aagcatgtgtgtgag

SEQ ID NO: 992427 - DNA, 15 bp, Homo sapiens
tgtgtgtgagcatgt

SEQ ID NO: 992428 - DNA, 15 bp, Homo sapiens
tgtgtgagcatgtgg

SEQ ID NO: 992429 - DNA, 15 bp, Homo sapiens
gtgtgagcatgtggg

SEQ ID NO: 992430 - DNA, 15 bp, Homo sapiens
tgtgagcatgtgggt

SEQ ID NO: 992431 - DNA, 15 bp, Homo sapiens
gtgagcatgtgggtg

SEQ ID NO: 992432 - DNA, 15 bp, Homo sapiens
tgagcatgtgggtgt

SEQ ID NO: 992433 - DNA, 15 bp, Homo sapiens
gagcatgtgggtgtg

SEQ ID NO: 992434 - DNA, 15 bp, Homo sapiens
agcatgtgggtgtga

SEQ ID NO: 992435 - DNA, 15 bp, Homo sapiens
gcatgtgggtgtgag

SEQ ID NO: 992436 - DNA, 15 bp, Homo sapiens
catgtgggtgtgagt

SEQ ID NO: 992437 - DNA, 15 bp, Homo sapiens
atgtgggtgtgagtc

SEQ ID NO: 992438 - DNA, 15 bp, Homo sapiens
tgtgggtgtgagtct

SEQ ID NO: 992439 - DNA, 15 bp, Homo sapiens
gtgggtgtgagtctg

SEQ ID NO: 992440 - DNA, 15 bp, Homo sapiens
tgggtgtgagtctgt

SEQ ID NO: 992441 - DNA, 15 bp, Homo sapiens
gggtgtgagtctgtg

SEQ ID NO: 992442 - DNA, 15 bp, Homo sapiens
ggtgtgagtctgtga

SEQ ID NO: 992443 - DNA, 15 bp, Homo sapiens
gtgtgagtctgtgag

SEQ ID NO: 992444 - DNA, 15 bp, Homo sapiens
tgtgagtctgtgagc

SEQ ID NO: 992445 - DNA, 15 bp, Homo sapiens
gtgagtctgtgagca

SEQ ID NO: 992446 - DNA, 15 bp, Homo sapiens
tgagtctgtgagcac

SEQ ID NO: 992447 - DNA, 15 bp, Homo sapiens
gagtctgtgagcacg

SEQ ID NO: 992448 - DNA, 15 bp, Homo sapiens
agtctgtgagcacgt

SEQ ID NO: 992449 - DNA, 15 bp, Homo sapiens
gtctgtgagcacgtg

SEQ ID NO: 992450 - DNA, 15 bp, Homo sapiens
tctgtgagcacgtgc

SEQ ID NO: 992451 - DNA, 15 bp, Homo sapiens
ctgtgagcacgtgca

SEQ ID NO: 992452 - DNA, 15 bp, Homo sapiens
tgtgagcacgtgcat

SEQ ID NO: 992453 - DNA, 15 bp, Homo sapiens
gtgagcacgtgcatt

SEQ ID NO: 992454 - DNA, 15 bp, Homo sapiens
tgagcacgtgcattg

SEQ ID NO: 992455 - DNA, 15 bp, Homo sapiens
gagcacgtgcattgt

SEQ ID NO: 992456 - DNA, 15 bp, Homo sapiens
agcacgtgcattgtg

SEQ ID NO: 992457 - DNA, 15 bp, Homo sapiens
gcacgtgcattgtgt

SEQ ID NO: 992458 - DNA, 15 bp, Homo sapiens
cacgtgcattgtgtg

SEQ ID NO: 992459 - DNA, 15 bp, Homo sapiens
acgtgcattgtgtgt

SEQ ID NO: 992460 - DNA, 15 bp, Homo sapiens
cgtgcattgtgtgtg

SEQ ID NO: 992461 - DNA, 15 bp, Homo sapiens
gtgcattgtgtgtgc

SEQ ID NO: 992462 - DNA, 15 bp, Homo sapiens
tgcattgtgtgtgca

SEQ ID NO: 992463 - DNA, 15 bp, Homo sapiens
gcattgtgtgtgcat

SEQ ID NO: 992464 - DNA, 15 bp, Homo sapiens
cattgtgtgtgcatg

SEQ ID NO: 992465 - DNA, 15 bp, Homo sapiens
attgtgtgtgcatgt

SEQ ID NO: 992466 - DNA, 15 bp, Homo sapiens
ttgtgtgtgcatgtg

SEQ ID NO: 992467 - DNA, 15 bp, Homo sapiens
gtgcatgtgtgtgac

SEQ ID NO: 992468 - DNA, 15 bp, Homo sapiens
tgcatgtgtgtgaca

SEQ ID NO: 992469 - DNA, 15 bp, Homo sapiens
gcatgtgtgtgacag

SEQ ID NO: 992470 - DNA, 15 bp, Homo sapiens
catgtgtgtgacagc

SEQ ID NO: 992471 - DNA, 15 bp, Homo sapiens
atgtgtgtgacagca

SEQ ID NO: 992472 - DNA, 15 bp, Homo sapiens
tgtgtgtgacagcat

SEQ ID NO: 992473 - DNA, 15 bp, Homo sapiens
gtgtgtgacagcatg

SEQ ID NO: 992474 - DNA, 15 bp, Homo sapiens
tgtgtgacagcatgt

SEQ ID NO: 992475 - DNA, 15 bp, Homo sapiens
gtgtgacagcatgtg

SEQ ID NO: 992476 - DNA, 15 bp, Homo sapiens
tgtgacagcatgtgt

SEQ ID NO: 992477 - DNA, 15 bp, Homo sapiens
gtgacagcatgtgtg

SEQ ID NO: 992478 - DNA, 15 bp, Homo sapiens
tgacagcatgtgtgt

SEQ ID NO: 992479 - DNA, 15 bp, Homo sapiens
gacagcatgtgtgtg

SEQ ID NO: 992480 - DNA, 15 bp, Homo sapiens
acagcatgtgtgtga

SEQ ID NO: 992481 - DNA, 15 bp, Homo sapiens
cagcatgtgtgtgat

SEQ ID NO: 992482 - DNA, 15 bp, Homo sapiens
agcatgtgtgtgatc

SEQ ID NO: 992483 - DNA, 15 bp, Homo sapiens
gcatgtgtgtgatca

SEQ ID NO: 992484 - DNA, 15 bp, Homo sapiens
catgtgtgtgatcag

SEQ ID NO: 992485 - DNA, 15 bp, Homo sapiens
atgtgtgtgatcaga

SEQ ID NO: 992486 - DNA, 15 bp, Homo sapiens
tgtgtgtgatcagat

SEQ ID NO: 992487 - DNA, 15 bp, Homo sapiens
gtgtgtgatcagata

SEQ ID NO: 992488 - DNA, 15 bp, Homo sapiens
tgtgtgatcagatac

SEQ ID NO: 992489 - DNA, 15 bp, Homo sapiens
gtgtgatcagataca

SEQ ID NO: 992490 - DNA, 15 bp, Homo sapiens
tgtgatcagatacat

SEQ ID NO: 992491 - DNA, 15 bp, Homo sapiens
gtgatcagatacatt

SEQ ID NO: 992492 - DNA, 15 bp, Homo sapiens
tgatcagatacattg

SEQ ID NO: 992493 - DNA, 15 bp, Homo sapiens
gatcagatacattgt

SEQ ID NO: 992494 - DNA, 15 bp, Homo sapiens
atcagatacattgta

SEQ ID NO: 992495 - DNA, 15 bp, Homo sapiens
tcagatacattgtac

SEQ ID NO: 992496 - DNA, 15 bp, Homo sapiens
cagatacattgtacg

SEQ ID NO: 992497 - DNA, 15 bp, Homo sapiens
agatacattgtacgt

SEQ ID NO: 992498 - DNA, 15 bp, Homo sapiens
gatacattgtacgtg

SEQ ID NO: 992499 - DNA, 15 bp, Homo sapiens
atacattgtacgtgt

SEQ ID NO: 992500 - DNA, 15 bp, Homo sapiens
tacattgtacgtgtg

SEQ ID NO: 992501 - DNA, 15 bp, Homo sapiens
acattgtacgtgtga

SEQ ID NO: 992502 - DNA, 15 bp, Homo sapiens
cattgtacgtgtgag

SEQ ID NO: 992503 - DNA, 15 bp, Homo sapiens
attgtacgtgtgagc

SEQ ID NO: 992504 - DNA, 15 bp, Homo sapiens
ttgtacgtgtgagcg

SEQ ID NO: 992505 - DNA, 15 bp, Homo sapiens
tgtacgtgtgagcgt

SEQ ID NO: 992506 - DNA, 15 bp, Homo sapiens
gtacgtgtgagcgtg

SEQ ID NO: 992507 - DNA, 15 bp, Homo sapiens
tacgtgtgagcgtgt

SEQ ID NO: 992508 - DNA, 15 bp, Homo sapiens
acgtgtgagcgtgtg

SEQ ID NO: 992509 - DNA, 15 bp, Homo sapiens
cgtgtgagcgtgtgt

SEQ ID NO: 992510 - DNA, 15 bp, Homo sapiens
gtgtgagcgtgtgtg

SEQ ID NO: 992511 - DNA, 15 bp, Homo sapiens
tgtgagcgtgtgtgg

SEQ ID NO: 992512 - DNA, 15 bp, Homo sapiens
gtgagcgtgtgtggg

SEQ ID NO: 992513 - DNA, 15 bp, Homo sapiens
tgagcgtgtgtgggt

SEQ ID NO: 992514 - DNA, 15 bp, Homo sapiens
gagcgtgtgtgggtg

SEQ ID NO: 992515 - DNA, 15 bp, Homo sapiens
agcgtgtgtgggtgt

SEQ ID NO: 992516 - DNA, 15 bp, Homo sapiens
gcgtgtgtgggtgtg

SEQ ID NO: 992517 - DNA, 15 bp, Homo sapiens
cgtgtgtgggtgtga

SEQ ID NO: 992518 - DNA, 15 bp, Homo sapiens
gtgtgtgggtgtgag

SEQ ID NO: 992519 - DNA, 15 bp, Homo sapiens
tgtgtgggtgtgagc

SEQ ID NO: 992520 - DNA, 15 bp, Homo sapiens
gtgtgggtgtgagca

SEQ ID NO: 992521 - DNA, 15 bp, Homo sapiens
tgtgggtgtgagcat

SEQ ID NO: 992522 - DNA, 15 bp, Homo sapiens
gtgggtgtgagcatg

SEQ ID NO: 992523 - DNA, 15 bp, Homo sapiens
tgggtgtgagcatga

SEQ ID NO: 992524 - DNA, 15 bp, Homo sapiens
gggtgtgagcatgag

SEQ ID NO: 992525 - DNA, 15 bp, Homo sapiens
tgtgagcatgagtga

SEQ ID NO: 992526 - DNA, 15 bp, Homo sapiens
gtgagcatgagtgag

SEQ ID NO: 992527 - DNA, 15 bp, Homo sapiens
tgagcatgagtgagt

SEQ ID NO: 992528 - DNA, 15 bp, Homo sapiens
gagcatgagtgagtg

SEQ ID NO: 992529 - DNA, 15 bp, Homo sapiens
agcatgagtgagtgg

SEQ ID NO: 992530 - DNA, 15 bp, Homo sapiens
gcatgagtgagtggt

SEQ ID NO: 992531 - DNA, 15 bp, Homo sapiens
catgagtgagtggtt

SEQ ID NO: 992532 - DNA, 15 bp, Homo sapiens
atgagtgagtggttg

SEQ ID NO: 992533 - DNA, 15 bp, Homo sapiens
tgagtgagtggttgc

SEQ ID NO: 992534 - DNA, 15 bp, Homo sapiens
gagtgagtggttgca

SEQ ID NO: 992535 - DNA, 15 bp, Homo sapiens
agtgagtggttgcat

SEQ ID NO: 992536 - DNA, 15 bp, Homo sapiens
gtgagtggttgcatt

SEQ ID NO: 992537 - DNA, 15 bp, Homo sapiens
tgagtggttgcattg

SEQ ID NO: 992538 - DNA, 15 bp, Homo sapiens
gagtggttgcattgt

SEQ ID NO: 992539 - DNA, 15 bp, Homo sapiens
agtggttgcattgtg

SEQ ID NO: 992540 - DNA, 15 bp, Homo sapiens
gtggttgcattgtgt

SEQ ID NO: 992541 - DNA, 15 bp, Homo sapiens
tggttgcattgtgtt

SEQ ID NO: 992542 - DNA, 15 bp, Homo sapiens
ggttgcattgtgttt

SEQ ID NO: 992543 - DNA, 15 bp, Homo sapiens
gttgcattgtgttta

SEQ ID NO: 992544 - DNA, 15 bp, Homo sapiens
ttgcattgtgtttaa

SEQ ID NO: 992545 - DNA, 15 bp, Homo sapiens
tgcattgtgtttaag

SEQ ID NO: 992546 - DNA, 15 bp, Homo sapiens
gcattgtgtttaagc

SEQ ID NO: 992547 - DNA, 15 bp, Homo sapiens
cattgtgtttaagca

SEQ ID NO: 992548 - DNA, 15 bp, Homo sapiens
attgtgtttaagcat

SEQ ID NO: 992549 - DNA, 15 bp, Homo sapiens
ttgtgtttaagcatg

SEQ ID NO: 992550 - DNA, 15 bp, Homo sapiens
tgtgtttaagcatga

SEQ ID NO: 992551 - DNA, 15 bp, Homo sapiens
gtgtttaagcatgag

SEQ ID NO: 992552 - DNA, 15 bp, Homo sapiens
tgtttaagcatgagt

SEQ ID NO: 992553 - DNA, 15 bp, Homo sapiens
gtttaagcatgagtg

SEQ ID NO: 992554 - DNA, 15 bp, Homo sapiens
tttaagcatgagtgt

SEQ ID NO: 992555 - DNA, 15 bp, Homo sapiens
ttaagcatgagtgtg

SEQ ID NO: 992556 - DNA, 15 bp, Homo sapiens
taagcatgagtgtga

SEQ ID NO: 992557 - DNA, 15 bp, Homo sapiens
aagcatgagtgtgag

SEQ ID NO: 992558 - DNA, 15 bp, Homo sapiens
agcatgagtgtgagt

SEQ ID NO: 992559 - DNA, 15 bp, Homo sapiens
gcatgagtgtgagtg

SEQ ID NO: 992560 - DNA, 15 bp, Homo sapiens
catgagtgtgagtgg

SEQ ID NO: 992561 - DNA, 15 bp, Homo sapiens
atgagtgtgagtggg

SEQ ID NO: 992562 - DNA, 15 bp, Homo sapiens
tgagtgtgagtgggt

SEQ ID NO: 992563 - DNA, 15 bp, Homo sapiens
gagtgtgagtgggtg

SEQ ID NO: 992564 - DNA, 15 bp, Homo sapiens
agtgtgagtgggtgt

SEQ ID NO: 992565 - DNA, 15 bp, Homo sapiens
gagtgggtgtgagaa

SEQ ID NO: 992566 - DNA, 15 bp, Homo sapiens
agtgggtgtgagaag

SEQ ID NO: 992567 - DNA, 15 bp, Homo sapiens
gtgggtgtgagaagg

SEQ ID NO: 992568 - DNA, 15 bp, Homo sapiens
tgggtgtgagaaggt

SEQ ID NO: 992569 - DNA, 15 bp, Homo sapiens
gggtgtgagaaggtg

SEQ ID NO: 992570 - DNA, 15 bp, Homo sapiens
ggtgtgagaaggtgc

SEQ ID NO: 992571 - DNA, 15 bp, Homo sapiens
gtgtgagaaggtgcg

SEQ ID NO: 992572 - DNA, 15 bp, Homo sapiens
tgtgagaaggtgcgt

SEQ ID NO: 992573 - DNA, 15 bp, Homo sapiens
gtgagaaggtgcgtt

SEQ ID NO: 992574 - DNA, 15 bp, Homo sapiens
tgagaaggtgcgttg

SEQ ID NO: 992575 - DNA, 15 bp, Homo sapiens
gagaaggtgcgttgt

SEQ ID NO: 992576 - DNA, 15 bp, Homo sapiens
agaaggtgcgttgtg

SEQ ID NO: 992577 - DNA, 15 bp, Homo sapiens
gaaggtgcgttgtgt

SEQ ID NO: 992578 - DNA, 15 bp, Homo sapiens
aaggtgcgttgtgtg

SEQ ID NO: 992579 - DNA, 15 bp, Homo sapiens
aggtgcgttgtgtga

SEQ ID NO: 992580 - DNA, 15 bp, Homo sapiens
ggtgcgttgtgtgag

SEQ ID NO: 992581 - DNA, 15 bp, Homo sapiens
gtgcgttgtgtgagc

SEQ ID NO: 992582 - DNA, 15 bp, Homo sapiens
tgcgttgtgtgagca

SEQ ID NO: 992583 - DNA, 15 bp, Homo sapiens
gcgttgtgtgagcac

SEQ ID NO: 992584 - DNA, 15 bp, Homo sapiens
cgttgtgtgagcacg

SEQ ID NO: 992585 - DNA, 15 bp, Homo sapiens
gttgtgtgagcacgt

SEQ ID NO: 992586 - DNA, 15 bp, Homo sapiens
ttgtgtgagcacgtg

SEQ ID NO: 992587 - DNA, 15 bp, Homo sapiens
tgtgtgagcacgtgt

SEQ ID NO: 992588 - DNA, 15 bp, Homo sapiens
gtgtgagcacgtgtg

SEQ ID NO: 992589 - DNA, 15 bp, Homo sapiens
tgtgagcacgtgtgt

SEQ ID NO: 992590 - DNA, 15 bp, Homo sapiens
gtgagcacgtgtgtg

SEQ ID NO: 992591 - DNA, 15 bp, Homo sapiens
tgagcacgtgtgtga

SEQ ID NO: 992592 - DNA, 15 bp, Homo sapiens
gagcacgtgtgtgag

SEQ ID NO: 992593 - DNA, 15 bp, Homo sapiens
agcacgtgtgtgagt

SEQ ID NO: 992594 - DNA, 15 bp, Homo sapiens
gcacgtgtgtgagtg

SEQ ID NO: 992595 - DNA, 15 bp, Homo sapiens
cacgtgtgtgagtgg

SEQ ID NO: 992596 - DNA, 15 bp, Homo sapiens
acgtgtgtgagtggg

SEQ ID NO: 992597 - DNA, 15 bp, Homo sapiens
cgtgtgtgagtgggt

SEQ ID NO: 992598 - DNA, 15 bp, Homo sapiens
tgtgagtgggtgtgg

SEQ ID NO: 992599 - DNA, 15 bp, Homo sapiens
gtgagtgggtgtggg

SEQ ID NO: 992600 - DNA, 15 bp, Homo sapiens
tgagtgggtgtgggc

SEQ ID NO: 992601 - DNA, 15 bp, Homo sapiens
gagtgggtgtgggcg

SEQ ID NO: 992602 - DNA, 15 bp, Homo sapiens
agtgggtgtgggcgt

SEQ ID NO: 992603 - DNA, 15 bp, Homo sapiens
gtgggtgtgggcgtg

SEQ ID NO: 992604 - DNA, 15 bp, Homo sapiens
tgggtgtgggcgtga

SEQ ID NO: 992605 - DNA, 15 bp, Homo sapiens
gggtgtgggcgtgat

SEQ ID NO: 992606 - DNA, 15 bp, Homo sapiens
ggtgtgggcgtgatg

SEQ ID NO: 992607 - DNA, 15 bp, Homo sapiens
gtgtgggcgtgatgt

SEQ ID NO: 992608 - DNA, 15 bp, Homo sapiens
tgtgggcgtgatgtg

SEQ ID NO: 992609 - DNA, 15 bp, Homo sapiens
gtgggcgtgatgtgt

SEQ ID NO: 992610 - DNA, 15 bp, Homo sapiens
tgggcgtgatgtgtg

SEQ ID NO: 992611 - DNA, 15 bp, Homo sapiens
gggcgtgatgtgtga

SEQ ID NO: 992612 - DNA, 15 bp, Homo sapiens
ggcgtgatgtgtgag

SEQ ID NO: 992613 - DNA, 15 bp, Homo sapiens
gcgtgatgtgtgagc

SEQ ID NO: 992614 - DNA, 15 bp, Homo sapiens
cgtgatgtgtgagca

SEQ ID NO: 992615 - DNA, 15 bp, Homo sapiens
tgatgtgtgagcatg

SEQ ID NO: 992616 - DNA, 15 bp, Homo sapiens
gatgtgtgagcatgt

SEQ ID NO: 992617 - DNA, 15 bp, Homo sapiens
gtgtgagcatgtgta

SEQ ID NO: 992618 - DNA, 15 bp, Homo sapiens
tgtgagcatgtgtaa

SEQ ID NO: 992619 - DNA, 15 bp, Homo sapiens
gtgagcatgtgtaag

SEQ ID NO: 992620 - DNA, 15 bp, Homo sapiens
tgagcatgtgtaagg

SEQ ID NO: 992621 - DNA, 15 bp, Homo sapiens
gagcatgtgtaagga

SEQ ID NO: 992622 - DNA, 15 bp, Homo sapiens
agcatgtgtaaggag

SEQ ID NO: 992623 - DNA, 15 bp, Homo sapiens
gcatgtgtaaggagg

SEQ ID NO: 992624 - DNA, 15 bp, Homo sapiens
catgtgtaaggaggt

SEQ ID NO: 992625 - DNA, 15 bp, Homo sapiens
atgtgtaaggaggtg

SEQ ID NO: 992626 - DNA, 15 bp, Homo sapiens
tgtgtaaggaggtgt

SEQ ID NO: 992627 - DNA, 15 bp, Homo sapiens
gtgtaaggaggtgtg

SEQ ID NO: 992628 - DNA, 15 bp, Homo sapiens
tgtaaggaggtgtgg

SEQ ID NO: 992629 - DNA, 15 bp, Homo sapiens
gtaaggaggtgtggg

SEQ ID NO: 992630 - DNA, 15 bp, Homo sapiens
taaggaggtgtgggt

SEQ ID NO: 992631 - DNA, 15 bp, Homo sapiens
aaggaggtgtgggtg

SEQ ID NO: 992632 - DNA, 15 bp, Homo sapiens
aggaggtgtgggtgc

SEQ ID NO: 992633 - DNA, 15 bp, Homo sapiens
ggaggtgtgggtgcg

SEQ ID NO: 992634 - DNA, 15 bp, Homo sapiens
gaggtgtgggtgcgt

SEQ ID NO: 992635 - DNA, 15 bp, Homo sapiens
aggtgtgggtgcgtt

SEQ ID NO: 992636 - DNA, 15 bp, Homo sapiens
ggtgtgggtgcgtta

SEQ ID NO: 992637 - DNA, 15 bp, Homo sapiens
gtgtgggtgcgttat

SEQ ID NO: 992638 - DNA, 15 bp, Homo sapiens
tgtgggtgcgttatg

SEQ ID NO: 992639 - DNA, 15 bp, Homo sapiens
gtgggtgcgttatgt

SEQ ID NO: 992640 - DNA, 15 bp, Homo sapiens
tgggtgcgttatgtg

SEQ ID NO: 992641 - DNA, 15 bp, Homo sapiens
gggtgcgttatgtgg

SEQ ID NO: 992642 - DNA, 15 bp, Homo sapiens
ggtgcgttatgtgga

SEQ ID NO: 992643 - DNA, 15 bp, Homo sapiens
gtgcgttatgtggat

SEQ ID NO: 992644 - DNA, 15 bp, Homo sapiens
tgcgttatgtggatg

SEQ ID NO: 992645 - DNA, 15 bp, Homo sapiens
gcgttatgtggatgt

SEQ ID NO: 992646 - DNA, 15 bp, Homo sapiens
cgttatgtggatgtg

SEQ ID NO: 992647 - DNA, 15 bp, Homo sapiens
gttatgtggatgtga

SEQ ID NO: 992648 - DNA, 15 bp, Homo sapiens
ttatgtggatgtgag

SEQ ID NO: 992649 - DNA, 15 bp, Homo sapiens
tatgtggatgtgagc

SEQ ID NO: 992650 - DNA, 15 bp, Homo sapiens
atgtggatgtgagca

SEQ ID NO: 992651 - DNA, 15 bp, Homo sapiens
tgtggatgtgagcat

SEQ ID NO: 992652 - DNA, 15 bp, Homo sapiens
gtggatgtgagcatg

SEQ ID NO: 992653 - DNA, 15 bp, Homo sapiens
tggatgtgagcatgt

SEQ ID NO: 992654 - DNA, 15 bp, Homo sapiens
ggatgtgagcatgtg

SEQ ID NO: 992655 - DNA, 15 bp, Homo sapiens
gagcatgtgtgtgta

SEQ ID NO: 992656 - DNA, 15 bp, Homo sapiens
agcatgtgtgtgtac

SEQ ID NO: 992657 - DNA, 15 bp, Homo sapiens
gcatgtgtgtgtact

SEQ ID NO: 992658 - DNA, 15 bp, Homo sapiens
catgtgtgtgtactt

SEQ ID NO: 992659 - DNA, 15 bp, Homo sapiens
atgtgtgtgtacttg

SEQ ID NO: 992660 - DNA, 15 bp, Homo sapiens
tgtgtgtgtacttgg

SEQ ID NO: 992661 - DNA, 15 bp, Homo sapiens
gtgtgtgtacttggt

SEQ ID NO: 992662 - DNA, 15 bp, Homo sapiens
tgtgtgtacttggtg

SEQ ID NO: 992663 - DNA, 15 bp, Homo sapiens
gtgtgtacttggtgc

SEQ ID NO: 992664 - DNA, 15 bp, Homo sapiens
tgtgtacttggtgca

SEQ ID NO: 992665 - DNA, 15 bp, Homo sapiens
gtgtacttggtgcac

SEQ ID NO: 992666 - DNA, 15 bp, Homo sapiens
tgtacttggtgcact

SEQ ID NO: 992667 - DNA, 15 bp, Homo sapiens
gtacttggtgcactg

SEQ ID NO: 992668 - DNA, 15 bp, Homo sapiens
tacttggtgcactgt

SEQ ID NO: 992669 - DNA, 15 bp, Homo sapiens
acttggtgcactgtg

SEQ ID NO: 992670 - DNA, 15 bp, Homo sapiens
cttggtgcactgtgt

SEQ ID NO: 992671 - DNA, 15 bp, Homo sapiens
ttggtgcactgtgtg

SEQ ID NO: 992672 - DNA, 15 bp, Homo sapiens
tggtgcactgtgtgg

SEQ ID NO: 992673 - DNA, 15 bp, Homo sapiens
ggtgcactgtgtggg

SEQ ID NO: 992674 - DNA, 15 bp, Homo sapiens
gtgcactgtgtgggt

SEQ ID NO: 992675 - DNA, 15 bp, Homo sapiens
tgcactgtgtgggtg

SEQ ID NO: 992676 - DNA, 15 bp, Homo sapiens
gcactgtgtgggtgc

SEQ ID NO: 992677 - DNA, 15 bp, Homo sapiens
cactgtgtgggtgcg

SEQ ID NO: 992678 - DNA, 15 bp, Homo sapiens
actgtgtgggtgcga

SEQ ID NO: 992679 - DNA, 15 bp, Homo sapiens
ctgtgtgggtgcgag

SEQ ID NO: 992680 - DNA, 15 bp, Homo sapiens
tgtgtgggtgcgagt

SEQ ID NO: 992681 - DNA, 15 bp, Homo sapiens
gtgtgggtgcgagtg

SEQ ID NO: 992682 - DNA, 15 bp, Homo sapiens
tgtgggtgcgagtgt

SEQ ID NO: 992683 - DNA, 15 bp, Homo sapiens
gtgggtgcgagtgtg

SEQ ID NO: 992684 - DNA, 15 bp, Homo sapiens
tgggtgcgagtgtgt

SEQ ID NO: 992685 - DNA, 15 bp, Homo sapiens
gggtgcgagtgtgtg

SEQ ID NO: 992686 - DNA, 15 bp, Homo sapiens
ggtgcgagtgtgtgc

SEQ ID NO: 992687 - DNA, 15 bp, Homo sapiens
gtgcgagtgtgtgcg

SEQ ID NO: 992688 - DNA, 15 bp, Homo sapiens
tgcgagtgtgtgcgc

SEQ ID NO: 992689 - DNA, 15 bp, Homo sapiens
gcgagtgtgtgcgcg

SEQ ID NO: 992690 - DNA, 15 bp, Homo sapiens
cgagtgtgtgcgcgt

SEQ ID NO: 992691 - DNA, 15 bp, Homo sapiens
gagtgtgtgcgcgtg

SEQ ID NO: 992692 - DNA, 15 bp, Homo sapiens
agtgtgtgcgcgtgg

SEQ ID NO: 992693 - DNA, 15 bp, Homo sapiens
gtgtgtgcgcgtggg

SEQ ID NO: 992694 - DNA, 15 bp, Homo sapiens
tgtgtgcgcgtgggg

SEQ ID NO: 992695 - DNA, 15 bp, Homo sapiens
gtgtgcgcgtggggg

SEQ ID NO: 992696 - DNA, 15 bp, Homo sapiens
tgtgcgcgtgggggg

SEQ ID NO: 992697 - DNA, 15 bp, Homo sapiens
gtgcgcgtggggggg

SEQ ID NO: 992698 - DNA, 15 bp, Homo sapiens
tgcgcgtgggggggg

SEQ ID NO: 992699 - DNA, 15 bp, Homo sapiens
gcgcgtggggggggt

SEQ ID NO: 992700 - DNA, 15 bp, Homo sapiens
cgcgtggggggggtg

SEQ ID NO: 992701 - DNA, 15 bp, Homo sapiens
gcgtggggggggtga

SEQ ID NO: 992702 - DNA, 15 bp, Homo sapiens
cgtggggggggtgag

SEQ ID NO: 992703 - DNA, 15 bp, Homo sapiens
gtggggggggtgagt

SEQ ID NO: 992704 - DNA, 15 bp, Homo sapiens
tggggggggtgagtg

SEQ ID NO: 992705 - DNA, 15 bp, Homo sapiens
ggggggggtgagtgc

SEQ ID NO: 992706 - DNA, 15 bp, Homo sapiens
gggggggtgagtgcg

SEQ ID NO: 992707 - DNA, 15 bp, Homo sapiens
ggggggtgagtgcgt

SEQ ID NO: 992708 - DNA, 15 bp, Homo sapiens
gggggtgagtgcgtg

SEQ ID NO: 992709 - DNA, 15 bp, Homo sapiens
ggggtgagtgcgtgg

SEQ ID NO: 992710 - DNA, 15 bp, Homo sapiens
gggtgagtgcgtggg

SEQ ID NO: 992711 - DNA, 15 bp, Homo sapiens
ggtgagtgcgtgggt

SEQ ID NO: 992712 - DNA, 15 bp, Homo sapiens
gtgagtgcgtgggtg

SEQ ID NO: 992713 - DNA, 15 bp, Homo sapiens
tgagtgcgtgggtgt

SEQ ID NO: 992714 - DNA, 15 bp, Homo sapiens
gagtgcgtgggtgtg

SEQ ID NO: 992715 - DNA, 15 bp, Homo sapiens
agtgcgtgggtgtga

SEQ ID NO: 992716 - DNA, 15 bp, Homo sapiens
gtgcgtgggtgtgag

SEQ ID NO: 992717 - DNA, 15 bp, Homo sapiens
tgcgtgggtgtgagt

SEQ ID NO: 992718 - DNA, 15 bp, Homo sapiens
gcgtgggtgtgagtg

SEQ ID NO: 992719 - DNA, 15 bp, Homo sapiens
cgtgggtgtgagtgg

SEQ ID NO: 992720 - DNA, 15 bp, Homo sapiens
gtgggtgtgagtggg

SEQ ID NO: 992721 - DNA, 15 bp, Homo sapiens
tgggtgtgagtgggt

SEQ ID NO: 992722 - DNA, 15 bp, Homo sapiens
gggtgtgagtgggtg

SEQ ID NO: 992723 - DNA, 15 bp, Homo sapiens
ggtgtgagtgggtgt

SEQ ID NO: 992724 - DNA, 15 bp, Homo sapiens
tgagtgggtgtgtgt

SEQ ID NO: 992725 - DNA, 15 bp, Homo sapiens
gagtgggtgtgtgtg

SEQ ID NO: 992726 - DNA, 15 bp, Homo sapiens
agtgggtgtgtgtga

SEQ ID NO: 992727 - DNA, 15 bp, Homo sapiens
gtgggtgtgtgtgaa

SEQ ID NO: 992728 - DNA, 15 bp, Homo sapiens
tgggtgtgtgtgaac

SEQ ID NO: 992729 - DNA, 15 bp, Homo sapiens
gggtgtgtgtgaacg

SEQ ID NO: 992730 - DNA, 15 bp, Homo sapiens
ggtgtgtgtgaacgc

SEQ ID NO: 992731 - DNA, 15 bp, Homo sapiens
gtgtgtgtgaacgcc

SEQ ID NO: 992732 - DNA, 15 bp, Homo sapiens
tgtgtgtgaacgcct

SEQ ID NO: 992733 - DNA, 15 bp, Homo sapiens
gtgtgtgaacgcctg

SEQ ID NO: 992734 - DNA, 15 bp, Homo sapiens
tgtgtgaacgcctgt

SEQ ID NO: 992735 - DNA, 15 bp, Homo sapiens
gtgtgaacgcctgtg

SEQ ID NO: 992736 - DNA, 15 bp, Homo sapiens
tgtgaacgcctgtgt

SEQ ID NO: 992737 - DNA, 15 bp, Homo sapiens
gtgaacgcctgtgtg

SEQ ID NO: 992738 - DNA, 15 bp, Homo sapiens
tgaacgcctgtgtgt

SEQ ID NO: 992739 - DNA, 15 bp, Homo sapiens
gaacgcctgtgtgtg

SEQ ID NO: 992740 - DNA, 15 bp, Homo sapiens
aacgcctgtgtgtgc

SEQ ID NO: 992741 - DNA, 15 bp, Homo sapiens
acgcctgtgtgtgcg

SEQ ID NO: 992742 - DNA, 15 bp, Homo sapiens
cgcctgtgtgtgcgc

SEQ ID NO: 992743 - DNA, 15 bp, Homo sapiens
gcctgtgtgtgcgca

SEQ ID NO: 992744 - DNA, 15 bp, Homo sapiens
cctgtgtgtgcgcaa

SEQ ID NO: 992745 - DNA, 15 bp, Homo sapiens
ctgtgtgtgcgcaag

SEQ ID NO: 992746 - DNA, 15 bp, Homo sapiens
tgtgtgtgcgcaagc

SEQ ID NO: 992747 - DNA, 15 bp, Homo sapiens
gtgtgtgcgcaagca

SEQ ID NO: 992748 - DNA, 15 bp, Homo sapiens
tgtgtgcgcaagcat

SEQ ID NO: 992749 - DNA, 15 bp, Homo sapiens
gtgtgcgcaagcatg

SEQ ID NO: 992750 - DNA, 15 bp, Homo sapiens
tgtgcgcaagcatgt

SEQ ID NO: 992751 - DNA, 15 bp, Homo sapiens
gtgcgcaagcatgtg

SEQ ID NO: 992752 - DNA, 15 bp, Homo sapiens
tgcgcaagcatgtgt

SEQ ID NO: 992753 - DNA, 15 bp, Homo sapiens
gcgcaagcatgtgtg

SEQ ID NO: 992754 - DNA, 15 bp, Homo sapiens
cgcaagcatgtgtgt

SEQ ID NO: 992755 - DNA, 15 bp, Homo sapiens
gcaagcatgtgtgtg

SEQ ID NO: 992756 - DNA, 15 bp, Homo sapiens
caagcatgtgtgtgt

SEQ ID NO: 992757 - DNA, 15 bp, Homo sapiens
agcatgtgtgtgtgt

SEQ ID NO: 992758 - DNA, 15 bp, Homo sapiens
gcatgtgtgtgtgtg

SEQ ID NO: 992759 - DNA, 15 bp, Homo sapiens
catgtgtgtgtgtgt

SEQ ID NO: 992760 - DNA, 15 bp, Homo sapiens
atgtgtgtgtgtgtg

SEQ ID NO: 992761 - DNA, 15 bp, Homo sapiens
tgtgtgtgtgtgtga

SEQ ID NO: 992762 - DNA, 15 bp, Homo sapiens
tgtgtgtgtgtgagt

SEQ ID NO: 992763 - DNA, 15 bp, Homo sapiens
gtgtgtgtgtgagtg

SEQ ID NO: 992764 - DNA, 15 bp, Homo sapiens
tgtgtgtgtgagtgt

SEQ ID NO: 992765 - DNA, 15 bp, Homo sapiens
gtgtgtgtgagtgtg

SEQ ID NO: 992766 - DNA, 15 bp, Homo sapiens
tgtgtgtgagtgtgg

SEQ ID NO: 992767 - DNA, 15 bp, Homo sapiens
gtgtgtgagtgtggg

SEQ ID NO: 992768 - DNA, 15 bp, Homo sapiens
tgtgtgagtgtgggt

SEQ ID NO: 992769 - DNA, 15 bp, Homo sapiens
gtgtgagtgtgggtg

SEQ ID NO: 992770 - DNA, 15 bp, Homo sapiens
tgtgagtgtgggtgc

SEQ ID NO: 992771 - DNA, 15 bp, Homo sapiens
gtgagtgtgggtgcg

SEQ ID NO: 992772 - DNA, 15 bp, Homo sapiens
tgagtgtgggtgcgt

SEQ ID NO: 992773 - DNA, 15 bp, Homo sapiens
gagtgtgggtgcgtt

SEQ ID NO: 992774 - DNA, 15 bp, Homo sapiens
agtgtgggtgcgttg

SEQ ID NO: 992775 - DNA, 15 bp, Homo sapiens
gtgtgggtgcgttgt

SEQ ID NO: 992776 - DNA, 15 bp, Homo sapiens
tgtgggtgcgttgtg

SEQ ID NO: 992777 - DNA, 15 bp, Homo sapiens
gtgggtgcgttgtgt

SEQ ID NO: 992778 - DNA, 15 bp, Homo sapiens
tgggtgcgttgtgta

SEQ ID NO: 992779 - DNA, 15 bp, Homo sapiens
gggtgcgttgtgtat

SEQ ID NO: 992780 - DNA, 15 bp, Homo sapiens
ggtgcgttgtgtatg

SEQ ID NO: 992781 - DNA, 15 bp, Homo sapiens
gtgcgttgtgtatgc

SEQ ID NO: 992782 - DNA, 15 bp, Homo sapiens
tgcgttgtgtatgca

SEQ ID NO: 992783 - DNA, 15 bp, Homo sapiens
gcgttgtgtatgcac

SEQ ID NO: 992784 - DNA, 15 bp, Homo sapiens
cgttgtgtatgcacg

SEQ ID NO: 992785 - DNA, 15 bp, Homo sapiens
gttgtgtatgcacgc

SEQ ID NO: 992786 - DNA, 15 bp, Homo sapiens
ttgtgtatgcacgcc

SEQ ID NO: 992787 - DNA, 15 bp, Homo sapiens
tgtgtatgcacgccc

SEQ ID NO: 992788 - DNA, 15 bp, Homo sapiens
gtgtatgcacgcccg

SEQ ID NO: 992789 - DNA, 15 bp, Homo sapiens
tgtatgcacgcccgg

SEQ ID NO: 992790 - DNA, 15 bp, Homo sapiens
gtatgcacgcccggc

SEQ ID NO: 992791 - DNA, 15 bp, Homo sapiens
tatgcacgcccggcg

SEQ ID NO: 992792 - DNA, 15 bp, Homo sapiens
atgcacgcccggcgc

SEQ ID NO: 992793 - DNA, 15 bp, Homo sapiens
tgcacgcccggcgcg

SEQ ID NO: 992794 - DNA, 15 bp, Homo sapiens
gcacgcccggcgcgg

SEQ ID NO: 992795 - DNA, 15 bp, Homo sapiens
cacgcccggcgcggg

SEQ ID NO: 992796 - DNA, 15 bp, Homo sapiens
acgcccggcgcgggc

SEQ ID NO: 992797 - DNA, 15 bp, Homo sapiens
cgcccggcgcgggct

SEQ ID NO: 992798 - DNA, 15 bp, Homo sapiens
gcccggcgcgggctg

SEQ ID NO: 992799 - DNA, 15 bp, Homo sapiens
cccggcgcgggctgg

SEQ ID NO: 992800 - DNA, 15 bp, Homo sapiens
ccggcgcgggctggg

SEQ ID NO: 992801 - DNA, 15 bp, Homo sapiens
cggcgcgggctgggg

SEQ ID NO: 992802 - DNA, 15 bp, Homo sapiens
ggcgcgggctggggc

SEQ ID NO: 992803 - DNA, 15 bp, Homo sapiens
gcgcgggctggggca

SEQ ID NO: 992804 - DNA, 15 bp, Homo sapiens
cgcgggctggggcag

SEQ ID NO: 992805 - DNA, 15 bp, Homo sapiens
gcgggctggggcagc

SEQ ID NO: 992806 - DNA, 15 bp, Homo sapiens
cgggctggggcagcc

SEQ ID NO: 992807 - DNA, 15 bp, Homo sapiens
gggctggggcagccg

SEQ ID NO: 992808 - DNA, 15 bp, Homo sapiens
ggctggggcagccgt

SEQ ID NO: 992809 - DNA, 15 bp, Homo sapiens
gctggggcagccgtt

SEQ ID NO: 992810 - DNA, 15 bp, Homo sapiens
ctggggcagccgttc

SEQ ID NO: 992811 - DNA, 15 bp, Homo sapiens
tggggcagccgttcc

SEQ ID NO: 992812 - DNA, 15 bp, Homo sapiens
ggggcagccgttccc

SEQ ID NO: 992813 - DNA, 15 bp, Homo sapiens
gggcagccgttcccc

SEQ ID NO: 992814 - DNA, 15 bp, Homo sapiens
ggcagccgttcccct

SEQ ID NO: 992815 - DNA, 15 bp, Homo sapiens
gcagccgttcccctg

SEQ ID NO: 992816 - DNA, 15 bp, Homo sapiens
cagccgttcccctgc

SEQ ID NO: 992817 - DNA, 15 bp, Homo sapiens
agccgttcccctgcc

SEQ ID NO: 992818 - DNA, 15 bp, Homo sapiens
gccgttcccctgccc

SEQ ID NO: 992819 - DNA, 15 bp, Homo sapiens
ccgttcccctgccct

SEQ ID NO: 992820 - DNA, 15 bp, Homo sapiens
cgttcccctgccctt

SEQ ID NO: 992821 - DNA, 15 bp, Homo sapiens
gttcccctgcccttc

SEQ ID NO: 992822 - DNA, 15 bp, Homo sapiens
ttcccctgcccttcc

SEQ ID NO: 992823 - DNA, 15 bp, Homo sapiens
tcccctgcccttccc

SEQ ID NO: 992824 - DNA, 15 bp, Homo sapiens
cccctgcccttcccg

SEQ ID NO: 992825 - DNA, 15 bp, Homo sapiens
ccctgcccttcccgg

SEQ ID NO: 992826 - DNA, 15 bp, Homo sapiens
cctgcccttcccggc

SEQ ID NO: 992827 - DNA, 15 bp, Homo sapiens
ctgcccttcccggcc

SEQ ID NO: 992828 - DNA, 15 bp, Homo sapiens
tgcccttcccggcca

SEQ ID NO: 992829 - DNA, 15 bp, Homo sapiens
gcccttcccggccac

SEQ ID NO: 992830 - DNA, 15 bp, Homo sapiens
cccttcccggccacc

SEQ ID NO: 992831 - DNA, 15 bp, Homo sapiens
ccttcccggccaccc

SEQ ID NO: 992832 - DNA, 15 bp, Homo sapiens
cttcccggccacccc

SEQ ID NO: 992833 - DNA, 15 bp, Homo sapiens
ttcccggccaccccg

SEQ ID NO: 992834 - DNA, 15 bp, Homo sapiens
tcccggccaccccgt

SEQ ID NO: 992835 - DNA, 15 bp, Homo sapiens
cccggccaccccgtc

SEQ ID NO: 992836 - DNA, 15 bp, Homo sapiens
ccggccaccccgtcc

SEQ ID NO: 992837 - DNA, 15 bp, Homo sapiens
cggccaccccgtccc

SEQ ID NO: 992838 - DNA, 15 bp, Homo sapiens
ggccaccccgtcccc

SEQ ID NO: 992839 - DNA, 15 bp, Homo sapiens
gccaccccgtccccg

SEQ ID NO: 992840 - DNA, 15 bp, Homo sapiens
ccaccccgtccccgg

SEQ ID NO: 992841 - DNA, 15 bp, Homo sapiens
caccccgtccccggg

SEQ ID NO: 992842 - DNA, 15 bp, Homo sapiens
accccgtccccgggc

SEQ ID NO: 992843 - DNA, 15 bp, Homo sapiens
ccccgtccccgggcc

SEQ ID NO: 992844 - DNA, 15 bp, Homo sapiens
cccgtccccgggccc

SEQ ID NO: 992845 - DNA, 15 bp, Homo sapiens
ccgtccccgggcccc

SEQ ID NO: 992846 - DNA, 15 bp, Homo sapiens
cgtccccgggcccct

SEQ ID NO: 992847 - DNA, 15 bp, Homo sapiens
gtccccgggcccctg

SEQ ID NO: 992848 - DNA, 15 bp, Homo sapiens
tccccgggcccctgt

SEQ ID NO: 992849 - DNA, 15 bp, Homo sapiens
ccccgggcccctgtg

SEQ ID NO: 992850 - DNA, 15 bp, Homo sapiens
cccgggcccctgtgc

SEQ ID NO: 992851 - DNA, 15 bp, Homo sapiens
ccgggcccctgtgcg

SEQ ID NO: 992852 - DNA, 15 bp, Homo sapiens
cgggcccctgtgcgt

SEQ ID NO: 992853 - DNA, 15 bp, Homo sapiens
gggcccctgtgcgta

SEQ ID NO: 992854 - DNA, 15 bp, Homo sapiens
ggcccctgtgcgtac

SEQ ID NO: 992855 - DNA, 15 bp, Homo sapiens
gcccctgtgcgtacg

SEQ ID NO: 992856 - DNA, 15 bp, Homo sapiens
cccctgtgcgtacgc

SEQ ID NO: 992857 - DNA, 15 bp, Homo sapiens
ccctgtgcgtacgca

SEQ ID NO: 992858 - DNA, 15 bp, Homo sapiens
cctgtgcgtacgcaa

SEQ ID NO: 992859 - DNA, 15 bp, Homo sapiens
ctgtgcgtacgcaag

SEQ ID NO: 992860 - DNA, 15 bp, Homo sapiens
tgtgcgtacgcaagg

SEQ ID NO: 992861 - DNA, 15 bp, Homo sapiens
gtgcgtacgcaaggc

SEQ ID NO: 992862 - DNA, 15 bp, Homo sapiens
tgcgtacgcaaggcg

SEQ ID NO: 992863 - DNA, 15 bp, Homo sapiens
gcgtacgcaaggcgg

SEQ ID NO: 992864 - DNA, 15 bp, Homo sapiens
cgtacgcaaggcggt

SEQ ID NO: 992865 - DNA, 15 bp, Homo sapiens
gtacgcaaggcggtg

SEQ ID NO: 992866 - DNA, 15 bp, Homo sapiens
tacgcaaggcggtgg

SEQ ID NO: 992867 - DNA, 15 bp, Homo sapiens
acgcaaggcggtggg

SEQ ID NO: 992868 - DNA, 15 bp, Homo sapiens
cgcaaggcggtgggg

SEQ ID NO: 992869 - DNA, 15 bp, Homo sapiens
gcaaggcggtggggg

SEQ ID NO: 992870 - DNA, 15 bp, Homo sapiens
caaggcggtgggggc

SEQ ID NO: 992871 - DNA, 15 bp, Homo sapiens
aaggcggtgggggcg

SEQ ID NO: 992872 - DNA, 15 bp, Homo sapiens
aggcggtgggggcgg

SEQ ID NO: 992873 - DNA, 15 bp, Homo sapiens
ggcggtgggggcggc

SEQ ID NO: 992874 - DNA, 15 bp, Homo sapiens
gcggtgggggcggct

SEQ ID NO: 992875 - DNA, 15 bp, Homo sapiens
cggtgggggcggctc

SEQ ID NO: 992876 - DNA, 15 bp, Homo sapiens
ggtgggggcggctcc

SEQ ID NO: 992877 - DNA, 15 bp, Homo sapiens
gtgggggcggctccc

SEQ ID NO: 992878 - DNA, 15 bp, Homo sapiens
tgggggcggctccca

SEQ ID NO: 992879 - DNA, 15 bp, Homo sapiens
gggggcggctcccat

SEQ ID NO: 992880 - DNA, 15 bp, Homo sapiens
ggggcggctcccatg

SEQ ID NO: 992881 - DNA, 15 bp, Homo sapiens
gggcggctcccatgt

SEQ ID NO: 992882 - DNA, 15 bp, Homo sapiens
ggcggctcccatgtg

SEQ ID NO: 992883 - DNA, 15 bp, Homo sapiens
gcggctcccatgtgg

SEQ ID NO: 992884 - DNA, 15 bp, Homo sapiens
cggctcccatgtggg

SEQ ID NO: 992885 - DNA, 15 bp, Homo sapiens
ggctcccatgtgggc

SEQ ID NO: 992886 - DNA, 15 bp, Homo sapiens
gctcccatgtgggcc

SEQ ID NO: 992887 - DNA, 15 bp, Homo sapiens
ctcccatgtgggccc

SEQ ID NO: 992888 - DNA, 15 bp, Homo sapiens
tcccatgtgggcccc

SEQ ID NO: 992889 - DNA, 15 bp, Homo sapiens
cccatgtgggccccg

SEQ ID NO: 992890 - DNA, 15 bp, Homo sapiens
ccatgtgggccccgg

SEQ ID NO: 992891 - DNA, 15 bp, Homo sapiens
catgtgggccccggg

SEQ ID NO: 992892 - DNA, 15 bp, Homo sapiens
atgtgggccccgggc

SEQ ID NO: 992893 - DNA, 15 bp, Homo sapiens
tgtgggccccgggcc

SEQ ID NO: 992894 - DNA, 15 bp, Homo sapiens
gtgggccccgggccc

SEQ ID NO: 992895 - DNA, 15 bp, Homo sapiens
tgggccccgggcccc

SEQ ID NO: 992896 - DNA, 15 bp, Homo sapiens
gggccccgggccccc

SEQ ID NO: 992897 - DNA, 15 bp, Homo sapiens
ggccccgggccccct

SEQ ID NO: 992898 - DNA, 15 bp, Homo sapiens
gccccgggccccctc

SEQ ID NO: 992899 - DNA, 15 bp, Homo sapiens
ccccgggccccctcc

SEQ ID NO: 992900 - DNA, 15 bp, Homo sapiens
cccgggccccctccc

SEQ ID NO: 992901 - DNA, 15 bp, Homo sapiens
ccgggccccctccca

SEQ ID NO: 992902 - DNA, 15 bp, Homo sapiens
cgggccccctcccac

SEQ ID NO: 992903 - DNA, 15 bp, Homo sapiens
gggccccctcccacc

SEQ ID NO: 992904 - DNA, 15 bp, Homo sapiens
ggccccctcccaccg

SEQ ID NO: 992905 - DNA, 15 bp, Homo sapiens
gccccctcccaccgg

SEQ ID NO: 992906 - DNA, 15 bp, Homo sapiens
ccccctcccaccggg

SEQ ID NO: 992907 - DNA, 15 bp, Homo sapiens
cccctcccaccgggc

SEQ ID NO: 992908 - DNA, 15 bp, Homo sapiens
ccctcccaccgggcc

SEQ ID NO: 992909 - DNA, 15 bp, Homo sapiens
cctcccaccgggccc

SEQ ID NO: 992910 - DNA, 15 bp, Homo sapiens
ctcccaccgggccct

SEQ ID NO: 992911 - DNA, 15 bp, Homo sapiens
tcccaccgggccctc

SEQ ID NO: 992912 - DNA, 15 bp, Homo sapiens
cccaccgggccctcc

SEQ ID NO: 992913 - DNA, 15 bp, Homo sapiens
ccaccgggccctccc

SEQ ID NO: 992914 - DNA, 15 bp, Homo sapiens
caccgggccctcccc

SEQ ID NO: 992915 - DNA, 15 bp, Homo sapiens
accgggccctccccc

SEQ ID NO: 992916 - DNA, 15 bp, Homo sapiens
ccgggccctcccccc

SEQ ID NO: 992917 - DNA, 15 bp, Homo sapiens
cgggccctccccccc

SEQ ID NO: 992918 - DNA, 15 bp, Homo sapiens
gggccctcccccccg

SEQ ID NO: 992919 - DNA, 15 bp, Homo sapiens
ggccctcccccccgc

SEQ ID NO: 992920 - DNA, 15 bp, Homo sapiens
gccctcccccccgca

SEQ ID NO: 992921 - DNA, 15 bp, Homo sapiens
ccctcccccccgcag

SEQ ID NO: 992922 - DNA, 15 bp, Homo sapiens
cctcccccccgcagg

SEQ ID NO: 992923 - DNA, 15 bp, Homo sapiens
ctcccccccgcaggc

SEQ ID NO: 992924 - DNA, 15 bp, Homo sapiens
tcccccccgcaggca

SEQ ID NO: 992925 - DNA, 15 bp, Homo sapiens
cccccccgcaggcag

SEQ ID NO: 992926 - DNA, 15 bp, Homo sapiens
ccccccgcaggcagc

SEQ ID NO: 992927 - DNA, 15 bp, Homo sapiens
cccccgcaggcagca

SEQ ID NO: 992928 - DNA, 15 bp, Homo sapiens
ccccgcaggcagcaa

SEQ ID NO: 992929 - DNA, 15 bp, Homo sapiens
cccgcaggcagcaag

SEQ ID NO: 992930 - DNA, 15 bp, Homo sapiens
ccgcaggcagcaaga

SEQ ID NO: 992931 - DNA, 15 bp, Homo sapiens
cgcaggcagcaagaa

SEQ ID NO: 992932 - DNA, 15 bp, Homo sapiens
gcaggcagcaagaag

SEQ ID NO: 992933 - DNA, 15 bp, Homo sapiens
caggcagcaagaaga

SEQ ID NO: 992934 - DNA, 15 bp, Homo sapiens
aggcagcaagaagaa

SEQ ID NO: 992935 - DNA, 15 bp, Homo sapiens
ggcagcaagaagaag

SEQ ID NO: 992936 - DNA, 15 bp, Homo sapiens
gcagcaagaagaaga

SEQ ID NO: 992937 - DNA, 15 bp, Homo sapiens
cagcaagaagaagat

SEQ ID NO: 992938 - DNA, 15 bp, Homo sapiens
agcaagaagaagatc

SEQ ID NO: 992939 - DNA, 15 bp, Homo sapiens
gcaagaagaagatcc

SEQ ID NO: 992940 - DNA, 15 bp, Homo sapiens
caagaagaagatccg

SEQ ID NO: 992941 - DNA, 15 bp, Homo sapiens
aagaagaagatccgc

SEQ ID NO: 992942 - DNA, 15 bp, Homo sapiens
agaagaagatccgcc

SEQ ID NO: 992943 - DNA, 15 bp, Homo sapiens
gaagaagatccgcct

SEQ ID NO: 992944 - DNA, 15 bp, Homo sapiens
aagaagatccgcctg

SEQ ID NO: 992945 - DNA, 15 bp, Homo sapiens
agaagatccgcctgt

SEQ ID NO: 992946 - DNA, 15 bp, Homo sapiens
gaagatccgcctgta

SEQ ID NO: 992947 - DNA, 15 bp, Homo sapiens
aagatccgcctgtac

SEQ ID NO: 992948 - DNA, 15 bp, Homo sapiens
agatccgcctgtacc

SEQ ID NO: 992949 - DNA, 15 bp, Homo sapiens
gatccgcctgtacca

SEQ ID NO: 992950 - DNA, 15 bp, Homo sapiens
atccgcctgtaccag

SEQ ID NO: 992951 - DNA, 15 bp, Homo sapiens
tccgcctgtaccagt

SEQ ID NO: 992952 - DNA, 15 bp, Homo sapiens
ccgcctgtaccagtt

SEQ ID NO: 992953 - DNA, 15 bp, Homo sapiens
cgcctgtaccagttc

SEQ ID NO: 992954 - DNA, 15 bp, Homo sapiens
gcctgtaccagttcc

SEQ ID NO: 992955 - DNA, 15 bp, Homo sapiens
cctgtaccagttcct

SEQ ID NO: 992956 - DNA, 15 bp, Homo sapiens
ctgtaccagttcctg

SEQ ID NO: 992957 - DNA, 15 bp, Homo sapiens
tgtaccagttcctgt

SEQ ID NO: 992958 - DNA, 15 bp, Homo sapiens
gtaccagttcctgtt

SEQ ID NO: 992959 - DNA, 15 bp, Homo sapiens
taccagttcctgttg

SEQ ID NO: 992960 - DNA, 15 bp, Homo sapiens
accagttcctgttgg

SEQ ID NO: 992961 - DNA, 15 bp, Homo sapiens
ccagttcctgttgga

SEQ ID NO: 992962 - DNA, 15 bp, Homo sapiens
cagttcctgttggac

SEQ ID NO: 992963 - DNA, 15 bp, Homo sapiens
agttcctgttggacc

SEQ ID NO: 992964 - DNA, 15 bp, Homo sapiens
gttcctgttggacct

SEQ ID NO: 992965 - DNA, 15 bp, Homo sapiens
ttcctgttggacctg

SEQ ID NO: 992966 - DNA, 15 bp, Homo sapiens
tcctgttggacctgc

SEQ ID NO: 992967 - DNA, 15 bp, Homo sapiens
cctgttggacctgct

SEQ ID NO: 992968 - DNA, 15 bp, Homo sapiens
ctgttggacctgctc

SEQ ID NO: 992969 - DNA, 15 bp, Homo sapiens
tgttggacctgctcc

SEQ ID NO: 992970 - DNA, 15 bp, Homo sapiens
gttggacctgctccg

SEQ ID NO: 992971 - DNA, 15 bp, Homo sapiens
ttggacctgctccgc

SEQ ID NO: 992972 - DNA, 15 bp, Homo sapiens
tggacctgctccgca

SEQ ID NO: 992973 - DNA, 15 bp, Homo sapiens
ggacctgctccgcag

SEQ ID NO: 992974 - DNA, 15 bp, Homo sapiens
gacctgctccgcagc

SEQ ID NO: 992975 - DNA, 15 bp, Homo sapiens
acctgctccgcagcg

SEQ ID NO: 992976 - DNA, 15 bp, Homo sapiens
cctgctccgcagcgg

SEQ ID NO: 992977 - DNA, 15 bp, Homo sapiens
ctgctccgcagcggc

SEQ ID NO: 992978 - DNA, 15 bp, Homo sapiens
tgctccgcagcggcg

SEQ ID NO: 992979 - DNA, 15 bp, Homo sapiens
gctccgcagcggcga

SEQ ID NO: 992980 - DNA, 15 bp, Homo sapiens
ctccgcagcggcgac

SEQ ID NO: 992981 - DNA, 15 bp, Homo sapiens
tccgcagcggcgaca

SEQ ID NO: 992982 - DNA, 15 bp, Homo sapiens
ccgcagcggcgacat

SEQ ID NO: 992983 - DNA, 15 bp, Homo sapiens
cgcagcggcgacatg

SEQ ID NO: 992984 - DNA, 15 bp, Homo sapiens
gcagcggcgacatga

SEQ ID NO: 992985 - DNA, 15 bp, Homo sapiens
cagcggcgacatgaa

SEQ ID NO: 992986 - DNA, 15 bp, Homo sapiens
agcggcgacatgaag

SEQ ID NO: 992987 - DNA, 15 bp, Homo sapiens
gcggcgacatgaagg

SEQ ID NO: 992988 - DNA, 15 bp, Homo sapiens
cggcgacatgaagga

SEQ ID NO: 992989 - DNA, 15 bp, Homo sapiens
ggcgacatgaaggac

SEQ ID NO: 992990 - DNA, 15 bp, Homo sapiens
gcgacatgaaggaca

SEQ ID NO: 992991 - DNA, 15 bp, Homo sapiens
cgacatgaaggacag

SEQ ID NO: 992992 - DNA, 15 bp, Homo sapiens
gacatgaaggacagc

SEQ ID NO: 992993 - DNA, 15 bp, Homo sapiens
acatgaaggacagca

SEQ ID NO: 992994 - DNA, 15 bp, Homo sapiens
catgaaggacagcat

SEQ ID NO: 992995 - DNA, 15 bp, Homo sapiens
atgaaggacagcatc

SEQ ID NO: 992996 - DNA, 15 bp, Homo sapiens
tgaaggacagcatct

SEQ ID NO: 992997 - DNA, 15 bp, Homo sapiens
gaaggacagcatctg

SEQ ID NO: 992998 - DNA, 15 bp, Homo sapiens
aaggacagcatctgg

SEQ ID NO: 992999 - DNA, 15 bp, Homo sapiens
aggacagcatctggt

SEQ ID NO: 993000 - DNA, 15 bp, Homo sapiens
ggacagcatctggtg

SEQ ID NO: 993001 - DNA, 15 bp, Homo sapiens
gacagcatctggtgg

SEQ ID NO: 993002 - DNA, 15 bp, Homo sapiens
acagcatctggtggg

SEQ ID NO: 993003 - DNA, 15 bp, Homo sapiens
cagcatctggtgggt

SEQ ID NO: 993004 - DNA, 15 bp, Homo sapiens
agcatctggtgggtg

SEQ ID NO: 993005 - DNA, 15 bp, Homo sapiens
gcatctggtgggtgg

SEQ ID NO: 993006 - DNA, 15 bp, Homo sapiens
catctggtgggtgga

SEQ ID NO: 993007 - DNA, 15 bp, Homo sapiens
atctggtgggtggac

SEQ ID NO: 993008 - DNA, 15 bp, Homo sapiens
tctggtgggtggaca

SEQ ID NO: 993009 - DNA, 15 bp, Homo sapiens
ctggtgggtggacaa

SEQ ID NO: 993010 - DNA, 15 bp, Homo sapiens
tggtgggtggacaag

SEQ ID NO: 993011 - DNA, 15 bp, Homo sapiens
ggtgggtggacaagg

SEQ ID NO: 993012 - DNA, 15 bp, Homo sapiens
gtgggtggacaagga

SEQ ID NO: 993013 - DNA, 15 bp, Homo sapiens
tgggtggacaaggac

SEQ ID NO: 993014 - DNA, 15 bp, Homo sapiens
gggtggacaaggaca

SEQ ID NO: 993015 - DNA, 15 bp, Homo sapiens
ggtggacaaggacaa

SEQ ID NO: 993016 - DNA, 15 bp, Homo sapiens
gtggacaaggacaag

SEQ ID NO: 993017 - DNA, 15 bp, Homo sapiens
tggacaaggacaagg

SEQ ID NO: 993018 - DNA, 15 bp, Homo sapiens
ggacaaggacaaggg

SEQ ID NO: 993019 - DNA, 15 bp, Homo sapiens
gacaaggacaagggc

SEQ ID NO: 993020 - DNA, 15 bp, Homo sapiens
acaaggacaagggca

SEQ ID NO: 993021 - DNA, 15 bp, Homo sapiens
caaggacaagggcac

SEQ ID NO: 993022 - DNA, 15 bp, Homo sapiens
aaggacaagggcacc

SEQ ID NO: 993023 - DNA, 15 bp, Homo sapiens
aggacaagggcacct

SEQ ID NO: 993024 - DNA, 15 bp, Homo sapiens
ggacaagggcacctt

SEQ ID NO: 993025 - DNA, 15 bp, Homo sapiens
gacaagggcaccttc

SEQ ID NO: 993026 - DNA, 15 bp, Homo sapiens
acaagggcaccttcc

SEQ ID NO: 993027 - DNA, 15 bp, Homo sapiens
caagggcaccttcca

SEQ ID NO: 993028 - DNA, 15 bp, Homo sapiens
aagggcaccttccag

SEQ ID NO: 993029 - DNA, 15 bp, Homo sapiens
agggcaccttccagt

SEQ ID NO: 993030 - DNA, 15 bp, Homo sapiens
gggcaccttccagtt

SEQ ID NO: 993031 - DNA, 15 bp, Homo sapiens
ggcaccttccagttc

SEQ ID NO: 993032 - DNA, 15 bp, Homo sapiens
gcaccttccagttct

SEQ ID NO: 993033 - DNA, 15 bp, Homo sapiens
caccttccagttctc

SEQ ID NO: 993034 - DNA, 15 bp, Homo sapiens
accttccagttctcg

SEQ ID NO: 993035 - DNA, 15 bp, Homo sapiens
ccttccagttctcgt

SEQ ID NO: 993036 - DNA, 15 bp, Homo sapiens
cttccagttctcgtc

SEQ ID NO: 993037 - DNA, 15 bp, Homo sapiens
ttccagttctcgtcc

SEQ ID NO: 993038 - DNA, 15 bp, Homo sapiens
tccagttctcgtcca

SEQ ID NO: 993039 - DNA, 15 bp, Homo sapiens
ccagttctcgtccaa

SEQ ID NO: 993040 - DNA, 15 bp, Homo sapiens
cagttctcgtccaag

SEQ ID NO: 993041 - DNA, 15 bp, Homo sapiens
agttctcgtccaagc

SEQ ID NO: 993042 - DNA, 15 bp, Homo sapiens
gttctcgtccaagca

SEQ ID NO: 993043 - DNA, 15 bp, Homo sapiens
ttctcgtccaagcac

SEQ ID NO: 993044 - DNA, 15 bp, Homo sapiens
tctcgtccaagcaca

SEQ ID NO: 993045 - DNA, 15 bp, Homo sapiens
ctcgtccaagcacaa

SEQ ID NO: 993046 - DNA, 15 bp, Homo sapiens
tcgtccaagcacaag

SEQ ID NO: 993047 - DNA, 15 bp, Homo sapiens
cgtccaagcacaagg

SEQ ID NO: 993048 - DNA, 15 bp, Homo sapiens
gtccaagcacaagga

SEQ ID NO: 993049 - DNA, 15 bp, Homo sapiens
tccaagcacaaggag

SEQ ID NO: 993050 - DNA, 15 bp, Homo sapiens
ccaagcacaaggagg

SEQ ID NO: 993051 - DNA, 15 bp, Homo sapiens
caagcacaaggaggc

SEQ ID NO: 993052 - DNA, 15 bp, Homo sapiens
aagcacaaggaggcg

SEQ ID NO: 993053 - DNA, 15 bp, Homo sapiens
agcacaaggaggcgc

SEQ ID NO: 993054 - DNA, 15 bp, Homo sapiens
gcacaaggaggcgct

SEQ ID NO: 993055 - DNA, 15 bp, Homo sapiens
cacaaggaggcgctg

SEQ ID NO: 993056 - DNA, 15 bp, Homo sapiens
acaaggaggcgctgg

SEQ ID NO: 993057 - DNA, 15 bp, Homo sapiens
caaggaggcgctggc

SEQ ID NO: 993058 - DNA, 15 bp, Homo sapiens
aaggaggcgctggcg

SEQ ID NO: 993059 - DNA, 15 bp, Homo sapiens
aggaggcgctggcgc

SEQ ID NO: 993060 - DNA, 15 bp, Homo sapiens
ggaggcgctggcgca

SEQ ID NO: 993061 - DNA, 15 bp, Homo sapiens
gaggcgctggcgcac

SEQ ID NO: 993062 - DNA, 15 bp, Homo sapiens
aggcgctggcgcacc

SEQ ID NO: 993063 - DNA, 15 bp, Homo sapiens
ggcgctggcgcaccg

SEQ ID NO: 993064 - DNA, 15 bp, Homo sapiens
gcgctggcgcaccgc

SEQ ID NO: 993065 - DNA, 15 bp, Homo sapiens
cgctggcgcaccgct

SEQ ID NO: 993066 - DNA, 15 bp, Homo sapiens
gctggcgcaccgctg

SEQ ID NO: 993067 - DNA, 15 bp, Homo sapiens
ctggcgcaccgctgg

SEQ ID NO: 993068 - DNA, 15 bp, Homo sapiens
tggcgcaccgctggg

SEQ ID NO: 993069 - DNA, 15 bp, Homo sapiens
ggcgcaccgctgggg

SEQ ID NO: 993070 - DNA, 15 bp, Homo sapiens
gcgcaccgctggggc

SEQ ID NO: 993071 - DNA, 15 bp, Homo sapiens
cgcaccgctggggca

SEQ ID NO: 993072 - DNA, 15 bp, Homo sapiens
gcaccgctggggcat

SEQ ID NO: 993073 - DNA, 15 bp, Homo sapiens
caccgctggggcatc

SEQ ID NO: 993074 - DNA, 15 bp, Homo sapiens
accgctggggcatcc

SEQ ID NO: 993075 - DNA, 15 bp, Homo sapiens
ccgctggggcatcca

SEQ ID NO: 993076 - DNA, 15 bp, Homo sapiens
cgctggggcatccag

SEQ ID NO: 993077 - DNA, 15 bp, Homo sapiens
gctggggcatccaga

SEQ ID NO: 993078 - DNA, 15 bp, Homo sapiens
ctggggcatccagaa

SEQ ID NO: 993079 - DNA, 15 bp, Homo sapiens
tggggcatccagaag

SEQ ID NO: 993080 - DNA, 15 bp, Homo sapiens
ggggcatccagaagg

SEQ ID NO: 993081 - DNA, 15 bp, Homo sapiens
gggcatccagaaggg

SEQ ID NO: 993082 - DNA, 15 bp, Homo sapiens
ggcatccagaagggc

SEQ ID NO: 993083 - DNA, 15 bp, Homo sapiens
gcatccagaagggca

SEQ ID NO: 993084 - DNA, 15 bp, Homo sapiens
catccagaagggcaa

SEQ ID NO: 993085 - DNA, 15 bp, Homo sapiens
atccagaagggcaac

SEQ ID NO: 993086 - DNA, 15 bp, Homo sapiens
tccagaagggcaacc

SEQ ID NO: 993087 - DNA, 15 bp, Homo sapiens
ccagaagggcaaccg

SEQ ID NO: 993088 - DNA, 15 bp, Homo sapiens
cagaagggcaaccgc

SEQ ID NO: 993089 - DNA, 15 bp, Homo sapiens
agaagggcaaccgca

SEQ ID NO: 993090 - DNA, 15 bp, Homo sapiens
gaagggcaaccgcaa

SEQ ID NO: 993091 - DNA, 15 bp, Homo sapiens
aagggcaaccgcaag

SEQ ID NO: 993092 - DNA, 15 bp, Homo sapiens
agggcaaccgcaaga

SEQ ID NO: 993093 - DNA, 15 bp, Homo sapiens
gggcaaccgcaagaa

SEQ ID NO: 993094 - DNA, 15 bp, Homo sapiens
ggcaaccgcaagaag

SEQ ID NO: 993095 - DNA, 15 bp, Homo sapiens
gcaaccgcaagaaga

SEQ ID NO: 993096 - DNA, 15 bp, Homo sapiens
caaccgcaagaagat

SEQ ID NO: 993097 - DNA, 15 bp, Homo sapiens
aaccgcaagaagatg

SEQ ID NO: 993098 - DNA, 15 bp, Homo sapiens
accgcaagaagatga

SEQ ID NO: 993099 - DNA, 15 bp, Homo sapiens
ccgcaagaagatgac

SEQ ID NO: 993100 - DNA, 15 bp, Homo sapiens
cgcaagaagatgacc

SEQ ID NO: 993101 - DNA, 15 bp, Homo sapiens
gcaagaagatgacct

SEQ ID NO: 993102 - DNA, 15 bp, Homo sapiens
caagaagatgaccta

SEQ ID NO: 993103 - DNA, 15 bp, Homo sapiens
aagaagatgacctac

SEQ ID NO: 993104 - DNA, 15 bp, Homo sapiens
agaagatgacctacc

SEQ ID NO: 993105 - DNA, 15 bp, Homo sapiens
gaagatgacctacca

SEQ ID NO: 993106 - DNA, 15 bp, Homo sapiens
aagatgacctaccag

SEQ ID NO: 993107 - DNA, 15 bp, Homo sapiens
agatgacctaccaga

SEQ ID NO: 993108 - DNA, 15 bp, Homo sapiens
gatgacctaccagaa

SEQ ID NO: 993109 - DNA, 15 bp, Homo sapiens
atgacctaccagaag

SEQ ID NO: 993110 - DNA, 15 bp, Homo sapiens
tgacctaccagaaga

SEQ ID NO: 993111 - DNA, 15 bp, Homo sapiens
gacctaccagaagat

SEQ ID NO: 993112 - DNA, 15 bp, Homo sapiens
acctaccagaagatg

SEQ ID NO: 993113 - DNA, 15 bp, Homo sapiens
cctaccagaagatgg

SEQ ID NO: 993114 - DNA, 15 bp, Homo sapiens
ctaccagaagatggc

SEQ ID NO: 993115 - DNA, 15 bp, Homo sapiens
taccagaagatggcg

SEQ ID NO: 993116 - DNA, 15 bp, Homo sapiens
accagaagatggcgc

SEQ ID NO: 993117 - DNA, 15 bp, Homo sapiens
ccagaagatggcgcg

SEQ ID NO: 993118 - DNA, 15 bp, Homo sapiens
cagaagatggcgcgc

SEQ ID NO: 993119 - DNA, 15 bp, Homo sapiens
agaagatggcgcgcg

SEQ ID NO: 993120 - DNA, 15 bp, Homo sapiens
gaagatggcgcgcgc

SEQ ID NO: 993121 - DNA, 15 bp, Homo sapiens
aagatggcgcgcgcg

SEQ ID NO: 993122 - DNA, 15 bp, Homo sapiens
agatggcgcgcgcgc

SEQ ID NO: 993123 - DNA, 15 bp, Homo sapiens
gatggcgcgcgcgct

SEQ ID NO: 993124 - DNA, 15 bp, Homo sapiens
atggcgcgcgcgctg

SEQ ID NO: 993125 - DNA, 15 bp, Homo sapiens
tggcgcgcgcgctgc

SEQ ID NO: 993126 - DNA, 15 bp, Homo sapiens
ggcgcgcgcgctgcg

SEQ ID NO: 993127 - DNA, 15 bp, Homo sapiens
gcgcgcgcgctgcgc

SEQ ID NO: 993128 - DNA, 15 bp, Homo sapiens
cgcgcgcgctgcgca

SEQ ID NO: 993129 - DNA, 15 bp, Homo sapiens
gcgcgcgctgcgcaa

SEQ ID NO: 993130 - DNA, 15 bp, Homo sapiens
cgcgcgctgcgcaac

SEQ ID NO: 993131 - DNA, 15 bp, Homo sapiens
gcgcgctgcgcaact

SEQ ID NO: 993132 - DNA, 15 bp, Homo sapiens
cgcgctgcgcaacta

SEQ ID NO: 993133 - DNA, 15 bp, Homo sapiens
gcgctgcgcaactac

SEQ ID NO: 993134 - DNA, 15 bp, Homo sapiens
cgctgcgcaactacg

SEQ ID NO: 993135 - DNA, 15 bp, Homo sapiens
gctgcgcaactacgg

SEQ ID NO: 993136 - DNA, 15 bp, Homo sapiens
ctgcgcaactacggc

SEQ ID NO: 993137 - DNA, 15 bp, Homo sapiens
tgcgcaactacggca

SEQ ID NO: 993138 - DNA, 15 bp, Homo sapiens
gcgcaactacggcaa

SEQ ID NO: 993139 - DNA, 15 bp, Homo sapiens
cgcaactacggcaag

SEQ ID NO: 993140 - DNA, 15 bp, Homo sapiens
gcaactacggcaaga

SEQ ID NO: 993141 - DNA, 15 bp, Homo sapiens
caactacggcaagac

SEQ ID NO: 993142 - DNA, 15 bp, Homo sapiens
aactacggcaagacg

SEQ ID NO: 993143 - DNA, 15 bp, Homo sapiens
actacggcaagacgg

SEQ ID NO: 993144 - DNA, 15 bp, Homo sapiens
ctacggcaagacggg

SEQ ID NO: 993145 - DNA, 15 bp, Homo sapiens
tacggcaagacgggc

SEQ ID NO: 993146 - DNA, 15 bp, Homo sapiens
acggcaagacgggcg

SEQ ID NO: 993147 - DNA, 15 bp, Homo sapiens
cggcaagacgggcga

SEQ ID NO: 993148 - DNA, 15 bp, Homo sapiens
ggcaagacgggcgag

SEQ ID NO: 993149 - DNA, 15 bp, Homo sapiens
gcaagacgggcgagg

SEQ ID NO: 993150 - DNA, 15 bp, Homo sapiens
caagacgggcgaggt

SEQ ID NO: 993151 - DNA, 15 bp, Homo sapiens
aagacgggcgaggtc

SEQ ID NO: 993152 - DNA, 15 bp, Homo sapiens
agacgggcgaggtca

SEQ ID NO: 993153 - DNA, 15 bp, Homo sapiens
gacgggcgaggtcaa

SEQ ID NO: 993154 - DNA, 15 bp, Homo sapiens
acgggcgaggtcaag

SEQ ID NO: 993155 - DNA, 15 bp, Homo sapiens
cgggcgaggtcaaga

SEQ ID NO: 993156 - DNA, 15 bp, Homo sapiens
gggcgaggtcaagaa

SEQ ID NO: 993157 - DNA, 15 bp, Homo sapiens
ggcgaggtcaagaag

SEQ ID NO: 993158 - DNA, 15 bp, Homo sapiens
gcgaggtcaagaagg

SEQ ID NO: 993159 - DNA, 15 bp, Homo sapiens
cgaggtcaagaaggt

SEQ ID NO: 993160 - DNA, 15 bp, Homo sapiens
gaggtcaagaaggtg

SEQ ID NO: 993161 - DNA, 15 bp, Homo sapiens
aggtcaagaaggtga

SEQ ID NO: 993162 - DNA, 15 bp, Homo sapiens
ggtcaagaaggtgaa

SEQ ID NO: 993163 - DNA, 15 bp, Homo sapiens
gtcaagaaggtgaag

SEQ ID NO: 993164 - DNA, 15 bp, Homo sapiens
tcaagaaggtgaaga

SEQ ID NO: 993165 - DNA, 15 bp, Homo sapiens
caagaaggtgaagaa

SEQ ID NO: 993166 - DNA, 15 bp, Homo sapiens
aagaaggtgaagaag

SEQ ID NO: 993167 - DNA, 15 bp, Homo sapiens
agaaggtgaagaaga

SEQ ID NO: 993168 - DNA, 15 bp, Homo sapiens
gaaggtgaagaagaa

SEQ ID NO: 993169 - DNA, 15 bp, Homo sapiens
aaggtgaagaagaag

SEQ ID NO: 993170 - DNA, 15 bp, Homo sapiens
aggtgaagaagaagc

SEQ ID NO: 993171 - DNA, 15 bp, Homo sapiens
ggtgaagaagaagct

SEQ ID NO: 993172 - DNA, 15 bp, Homo sapiens
gtgaagaagaagctc

SEQ ID NO: 993173 - DNA, 15 bp, Homo sapiens
tgaagaagaagctca

SEQ ID NO: 993174 - DNA, 15 bp, Homo sapiens
gaagaagaagctcac

SEQ ID NO: 993175 - DNA, 15 bp, Homo sapiens
aagaagaagctcacc

SEQ ID NO: 993176 - DNA, 15 bp, Homo sapiens
agaagaagctcacct

SEQ ID NO: 993177 - DNA, 15 bp, Homo sapiens
gaagaagctcaccta

SEQ ID NO: 993178 - DNA, 15 bp, Homo sapiens
aagaagctcacctac

SEQ ID NO: 993179 - DNA, 15 bp, Homo sapiens
agaagctcacctacc

SEQ ID NO: 993180 - DNA, 15 bp, Homo sapiens
gaagctcacctacca

SEQ ID NO: 993181 - DNA, 15 bp, Homo sapiens
aagctcacctaccag

SEQ ID NO: 993182 - DNA, 15 bp, Homo sapiens
agctcacctaccagt

SEQ ID NO: 993183 - DNA, 15 bp, Homo sapiens
gctcacctaccagtt

SEQ ID NO: 993184 - DNA, 15 bp, Homo sapiens
ctcacctaccagttc

SEQ ID NO: 993185 - DNA, 15 bp, Homo sapiens
tcacctaccagttca

SEQ ID NO: 993186 - DNA, 15 bp, Homo sapiens
cacctaccagttcag

SEQ ID NO: 993187 - DNA, 15 bp, Homo sapiens
acctaccagttcagc

SEQ ID NO: 993188 - DNA, 15 bp, Homo sapiens
cctaccagttcagcg

SEQ ID NO: 993189 - DNA, 15 bp, Homo sapiens
ctaccagttcagcgg

SEQ ID NO: 993190 - DNA, 15 bp, Homo sapiens
taccagttcagcggc

SEQ ID NO: 993191 - DNA, 15 bp, Homo sapiens
accagttcagcggcg

SEQ ID NO: 993192 - DNA, 15 bp, Homo sapiens
ccagttcagcggcga

SEQ ID NO: 993193 - DNA, 15 bp, Homo sapiens
cagttcagcggcgaa

SEQ ID NO: 993194 - DNA, 15 bp, Homo sapiens
agttcagcggcgaag

SEQ ID NO: 993195 - DNA, 15 bp, Homo sapiens
gttcagcggcgaagt

SEQ ID NO: 993196 - DNA, 15 bp, Homo sapiens
ttcagcggcgaagtg

SEQ ID NO: 993197 - DNA, 15 bp, Homo sapiens
tcagcggcgaagtgc

SEQ ID NO: 993198 - DNA, 15 bp, Homo sapiens
cagcggcgaagtgct

SEQ ID NO: 993199 - DNA, 15 bp, Homo sapiens
agcggcgaagtgctg

SEQ ID NO: 993200 - DNA, 15 bp, Homo sapiens
gcggcgaagtgctgg

SEQ ID NO: 993201 - DNA, 15 bp, Homo sapiens
cggcgaagtgctggg

SEQ ID NO: 993202 - DNA, 15 bp, Homo sapiens
ggcgaagtgctgggc

SEQ ID NO: 993203 - DNA, 15 bp, Homo sapiens
gcgaagtgctgggcc

SEQ ID NO: 993204 - DNA, 15 bp, Homo sapiens
cgaagtgctgggccg

SEQ ID NO: 993205 - DNA, 15 bp, Homo sapiens
gaagtgctgggccgc

SEQ ID NO: 993206 - DNA, 15 bp, Homo sapiens
aagtgctgggccgcg

SEQ ID NO: 993207 - DNA, 15 bp, Homo sapiens
agtgctgggccgcgg

SEQ ID NO: 993208 - DNA, 15 bp, Homo sapiens
gtgctgggccgcggg

SEQ ID NO: 993209 - DNA, 15 bp, Homo sapiens
tgctgggccgcgggg

SEQ ID NO: 993210 - DNA, 15 bp, Homo sapiens
gctgggccgcggggg

SEQ ID NO: 993211 - DNA, 15 bp, Homo sapiens
ctgggccgcgggggc

SEQ ID NO: 993212 - DNA, 15 bp, Homo sapiens
tgggccgcgggggcc

SEQ ID NO: 993213 - DNA, 15 bp, Homo sapiens
gggccgcgggggcct

SEQ ID NO: 993214 - DNA, 15 bp, Homo sapiens
ggccgcgggggcctg

SEQ ID NO: 993215 - DNA, 15 bp, Homo sapiens
gccgcgggggcctgg

SEQ ID NO: 993216 - DNA, 15 bp, Homo sapiens
ccgcgggggcctggc

SEQ ID NO: 993217 - DNA, 15 bp, Homo sapiens
cgcgggggcctggcc

SEQ ID NO: 993218 - DNA, 15 bp, Homo sapiens
gcgggggcctggccg

SEQ ID NO: 993219 - DNA, 15 bp, Homo sapiens
cgggggcctggccga

SEQ ID NO: 993220 - DNA, 15 bp, Homo sapiens
gggggcctggccgag

SEQ ID NO: 993221 - DNA, 15 bp, Homo sapiens
ggggcctggccgagc

SEQ ID NO: 993222 - DNA, 15 bp, Homo sapiens
gggcctggccgagcg

SEQ ID NO: 993223 - DNA, 15 bp, Homo sapiens
ggcctggccgagcgg

SEQ ID NO: 993224 - DNA, 15 bp, Homo sapiens
gcctggccgagcggc

SEQ ID NO: 993225 - DNA, 15 bp, Homo sapiens
cctggccgagcggcg

SEQ ID NO: 993226 - DNA, 15 bp, Homo sapiens
ctggccgagcggcgc

SEQ ID NO: 993227 - DNA, 15 bp, Homo sapiens
tggccgagcggcgcc

SEQ ID NO: 993228 - DNA, 15 bp, Homo sapiens
ggccgagcggcgcca

SEQ ID NO: 993229 - DNA, 15 bp, Homo sapiens
gccgagcggcgccac

SEQ ID NO: 993230 - DNA, 15 bp, Homo sapiens
ccgagcggcgccacc

SEQ ID NO: 993231 - DNA, 15 bp, Homo sapiens
cgagcggcgccaccc

SEQ ID NO: 993232 - DNA, 15 bp, Homo sapiens
gagcggcgccacccg

SEQ ID NO: 993233 - DNA, 15 bp, Homo sapiens
agcggcgccacccgc

SEQ ID NO: 993234 - DNA, 15 bp, Homo sapiens
gcggcgccacccgcc

SEQ ID NO: 993235 - DNA, 15 bp, Homo sapiens
cggcgccacccgccc

SEQ ID NO: 993236 - DNA, 15 bp, Homo sapiens
ggcgccacccgcccc

SEQ ID NO: 993237 - DNA, 15 bp, Homo sapiens
gcgccacccgcccca

SEQ ID NO: 993238 - DNA, 15 bp, Homo sapiens
cgccacccgccccac

SEQ ID NO: 993239 - DNA, 15 bp, Homo sapiens
gccacccgccccact

SEQ ID NO: 993240 - DNA, 15 bp, Homo sapiens
ccacccgccccactg

SEQ ID NO: 993241 - DNA, 15 bp, Homo sapiens
cacccgccccactga

SEQ ID NO: 993242 - DNA, 15 bp, Homo sapiens
acccgccccactgag

SEQ ID NO: 993243 - DNA, 15 bp, Homo sapiens
cccgccccactgagc

SEQ ID NO: 993244 - DNA, 15 bp, Homo sapiens
ccgccccactgagcc

SEQ ID NO: 993245 - DNA, 15 bp, Homo sapiens
cgccccactgagccc

SEQ ID NO: 993246 - DNA, 15 bp, Homo sapiens
gccccactgagcccg

SEQ ID NO: 993247 - DNA, 15 bp, Homo sapiens
ccccactgagcccgc

SEQ ID NO: 993248 - DNA, 15 bp, Homo sapiens
cccactgagcccgca

SEQ ID NO: 993249 - DNA, 15 bp, Homo sapiens
ccactgagcccgcag

SEQ ID NO: 993250 - DNA, 15 bp, Homo sapiens
cactgagcccgcagc

SEQ ID NO: 993251 - DNA, 15 bp, Homo sapiens
actgagcccgcagcc

SEQ ID NO: 993252 - DNA, 15 bp, Homo sapiens
ctgagcccgcagccc

SEQ ID NO: 993253 - DNA, 15 bp, Homo sapiens
tgagcccgcagcccc

SEQ ID NO: 993254 - DNA, 15 bp, Homo sapiens
gagcccgcagccccc

SEQ ID NO: 993255 - DNA, 15 bp, Homo sapiens
agcccgcagcccccg

SEQ ID NO: 993256 - DNA, 15 bp, Homo sapiens
gcccgcagcccccgc

SEQ ID NO: 993257 - DNA, 15 bp, Homo sapiens
cccgcagcccccgcc

SEQ ID NO: 993258 - DNA, 15 bp, Homo sapiens
ccgcagcccccgccg

SEQ ID NO: 993259 - DNA, 15 bp, Homo sapiens
cgcagcccccgccgg

SEQ ID NO: 993260 - DNA, 15 bp, Homo sapiens
gcagcccccgccggg

SEQ ID NO: 993261 - DNA, 15 bp, Homo sapiens
cagcccccgccgggc

SEQ ID NO: 993262 - DNA, 15 bp, Homo sapiens
agcccccgccgggcc

SEQ ID NO: 993263 - DNA, 15 bp, Homo sapiens
gcccccgccgggccc

SEQ ID NO: 993264 - DNA, 15 bp, Homo sapiens
cccccgccgggcccc

SEQ ID NO: 993265 - DNA, 15 bp, Homo sapiens
ccccgccgggccccg

SEQ ID NO: 993266 - DNA, 15 bp, Homo sapiens
cccgccgggccccgc

SEQ ID NO: 993267 - DNA, 15 bp, Homo sapiens
ccgccgggccccgcc

SEQ ID NO: 993268 - DNA, 15 bp, Homo sapiens
cgccgggccccgcca

SEQ ID NO: 993269 - DNA, 15 bp, Homo sapiens
gccgggccccgccag

SEQ ID NO: 993270 - DNA, 15 bp, Homo sapiens
ccgggccccgccagg

SEQ ID NO: 993271 - DNA, 15 bp, Homo sapiens
cgggccccgccaggc

SEQ ID NO: 993272 - DNA, 15 bp, Homo sapiens
gggccccgccaggcc

SEQ ID NO: 993273 - DNA, 15 bp, Homo sapiens
ggccccgccaggcct

SEQ ID NO: 993274 - DNA, 15 bp, Homo sapiens
gccccgccaggcctc

SEQ ID NO: 993275 - DNA, 15 bp, Homo sapiens
ccccgccaggcctcc

SEQ ID NO: 993276 - DNA, 15 bp, Homo sapiens
cccgccaggcctccc

SEQ ID NO: 993277 - DNA, 15 bp, Homo sapiens
ccgccaggcctcccc

SEQ ID NO: 993278 - DNA, 15 bp, Homo sapiens
cgccaggcctccccg

SEQ ID NO: 993279 - DNA, 15 bp, Homo sapiens
gccaggcctccccgc

SEQ ID NO: 993280 - DNA, 15 bp, Homo sapiens
ccaggcctccccgct

SEQ ID NO: 993281 - DNA, 15 bp, Homo sapiens
caggcctccccgctg

SEQ ID NO: 993282 - DNA, 15 bp, Homo sapiens
aggcctccccgctgg

SEQ ID NO: 993283 - DNA, 15 bp, Homo sapiens
ggcctccccgctggc

SEQ ID NO: 993284 - DNA, 15 bp, Homo sapiens
gcctccccgctggcc

SEQ ID NO: 993285 - DNA, 15 bp, Homo sapiens
cctccccgctggcca

SEQ ID NO: 993286 - DNA, 15 bp, Homo sapiens
ctccccgctggccat

SEQ ID NO: 993287 - DNA, 15 bp, Homo sapiens
tccccgctggccata

SEQ ID NO: 993288 - DNA, 15 bp, Homo sapiens
ccccgctggccatag

SEQ ID NO: 993289 - DNA, 15 bp, Homo sapiens
cccgctggccatagc

SEQ ID NO: 993290 - DNA, 15 bp, Homo sapiens
ccgctggccatagca

SEQ ID NO: 993291 - DNA, 15 bp, Homo sapiens
cgctggccatagcat

SEQ ID NO: 993292 - DNA, 15 bp, Homo sapiens
gctggccatagcatt

SEQ ID NO: 993293 - DNA, 15 bp, Homo sapiens
ctggccatagcatta

SEQ ID NO: 993294 - DNA, 15 bp, Homo sapiens
tggccatagcattaa

SEQ ID NO: 993295 - DNA, 15 bp, Homo sapiens
ggccatagcattaag

SEQ ID NO: 993296 - DNA, 15 bp, Homo sapiens
gccatagcattaagc

SEQ ID NO: 993297 - DNA, 15 bp, Homo sapiens
ccatagcattaagcc

SEQ ID NO: 993298 - DNA, 15 bp, Homo sapiens
catagcattaagccc

SEQ ID NO: 993299 - DNA, 15 bp, Homo sapiens
atagcattaagccct

SEQ ID NO: 993300 - DNA, 15 bp, Homo sapiens
tagcattaagccctc

SEQ ID NO: 993301 - DNA, 15 bp, Homo sapiens
agcattaagccctcg

SEQ ID NO: 993302 - DNA, 15 bp, Homo sapiens
gcattaagccctcgc

SEQ ID NO: 993303 - DNA, 15 bp, Homo sapiens
cattaagccctcgcc

SEQ ID NO: 993304 - DNA, 15 bp, Homo sapiens
attaagccctcgccc

SEQ ID NO: 993305 - DNA, 15 bp, Homo sapiens
ttaagccctcgcccg

SEQ ID NO: 993306 - DNA, 15 bp, Homo sapiens
taagccctcgcccgg

SEQ ID NO: 993307 - DNA, 15 bp, Homo sapiens
aagccctcgcccggc

SEQ ID NO: 993308 - DNA, 15 bp, Homo sapiens
agccctcgcccggcc

SEQ ID NO: 993309 - DNA, 15 bp, Homo sapiens
gccctcgcccggccc

SEQ ID NO: 993310 - DNA, 15 bp, Homo sapiens
ccctcgcccggcccg

SEQ ID NO: 993311 - DNA, 15 bp, Homo sapiens
cctcgcccggcccgg

SEQ ID NO: 993312 - DNA, 15 bp, Homo sapiens
ctcgcccggcccgga

SEQ ID NO: 993313 - DNA, 15 bp, Homo sapiens
tcgcccggcccggac

SEQ ID NO: 993314 - DNA, 15 bp, Homo sapiens
cgcccggcccggaca

SEQ ID NO: 993315 - DNA, 15 bp, Homo sapiens
gcccggcccggacac

SEQ ID NO: 993316 - DNA, 15 bp, Homo sapiens
cccggcccggacaca

SEQ ID NO: 993317 - DNA, 15 bp, Homo sapiens
ccggcccggacacag

SEQ ID NO: 993318 - DNA, 15 bp, Homo sapiens
cggcccggacacagg

SEQ ID NO: 993319 - DNA, 15 bp, Homo sapiens
ggcccggacacaggg

SEQ ID NO: 993320 - DNA, 15 bp, Homo sapiens
gcccggacacaggga

SEQ ID NO: 993321 - DNA, 15 bp, Homo sapiens
cccggacacagggag

SEQ ID NO: 993322 - DNA, 15 bp, Homo sapiens
ccggacacagggagg

SEQ ID NO: 993323 - DNA, 15 bp, Homo sapiens
cggacacagggagga

SEQ ID NO: 993324 - DNA, 15 bp, Homo sapiens
ggacacagggaggac

SEQ ID NO: 993325 - DNA, 15 bp, Homo sapiens
gacacagggaggacg

SEQ ID NO: 993326 - DNA, 15 bp, Homo sapiens
acacagggaggacgc

SEQ ID NO: 993327 - DNA, 15 bp, Homo sapiens
cacagggaggacgct

SEQ ID NO: 993328 - DNA, 15 bp, Homo sapiens
acagggaggacgctc

SEQ ID NO: 993329 - DNA, 15 bp, Homo sapiens
cagggaggacgctcc

SEQ ID NO: 993330 - DNA, 15 bp, Homo sapiens
agggaggacgctccc

SEQ ID NO: 993331 - DNA, 15 bp, Homo sapiens
gggaggacgctcccg

SEQ ID NO: 993332 - DNA, 15 bp, Homo sapiens
ggaggacgctcccgg

SEQ ID NO: 993333 - DNA, 15 bp, Homo sapiens
gaggacgctcccggg

SEQ ID NO: 993334 - DNA, 15 bp, Homo sapiens
aggacgctcccgggg

SEQ ID NO: 993335 - DNA, 15 bp, Homo sapiens
ggacgctcccggggc

SEQ ID NO: 993336 - DNA, 15 bp, Homo sapiens
gacgctcccggggcc

SEQ ID NO: 993337 - DNA, 15 bp, Homo sapiens
acgctcccggggccc

SEQ ID NO: 993338 - DNA, 15 bp, Homo sapiens
cgctcccggggccca

SEQ ID NO: 993339 - DNA, 15 bp, Homo sapiens
gctcccggggcccag

SEQ ID NO: 993340 - DNA, 15 bp, Homo sapiens
ctcccggggcccaga

SEQ ID NO: 993341 - DNA, 15 bp, Homo sapiens
tcccggggcccagag

SEQ ID NO: 993342 - DNA, 15 bp, Homo sapiens
cccggggcccagagg

SEQ ID NO: 993343 - DNA, 15 bp, Homo sapiens
ccggggcccagaggc

SEQ ID NO: 993344 - DNA, 15 bp, Homo sapiens
cggggcccagaggca

SEQ ID NO: 993345 - DNA, 15 bp, Homo sapiens
ggggcccagaggcag

SEQ ID NO: 993346 - DNA, 15 bp, Homo sapiens
gggcccagaggcagg

SEQ ID NO: 993347 - DNA, 15 bp, Homo sapiens
ggcccagaggcagga

SEQ ID NO: 993348 - DNA, 15 bp, Homo sapiens
gcccagaggcaggac

SEQ ID NO: 993349 - DNA, 15 bp, Homo sapiens
cccagaggcaggact

SEQ ID NO: 993350 - DNA, 15 bp, Homo sapiens
ccagaggcaggactg

SEQ ID NO: 993351 - DNA, 15 bp, Homo sapiens
cagaggcaggactgt

SEQ ID NO: 993352 - DNA, 15 bp, Homo sapiens
agaggcaggactgtg

SEQ ID NO: 993353 - DNA, 15 bp, Homo sapiens
gaggcaggactgtgg

SEQ ID NO: 993354 - DNA, 15 bp, Homo sapiens
aggcaggactgtggc

SEQ ID NO: 993355 - DNA, 15 bp, Homo sapiens
ggcaggactgtggcg

SEQ ID NO: 993356 - DNA, 15 bp, Homo sapiens
gcaggactgtggcgg

SEQ ID NO: 993357 - DNA, 15 bp, Homo sapiens
caggactgtggcggg

SEQ ID NO: 993358 - DNA, 15 bp, Homo sapiens
aggactgtggcgggc

SEQ ID NO: 993359 - DNA, 15 bp, Homo sapiens
ggactgtggcgggcc

SEQ ID NO: 993360 - DNA, 15 bp, Homo sapiens
gactgtggcgggccg

SEQ ID NO: 993361 - DNA, 15 bp, Homo sapiens
actgtggcgggccgg

SEQ ID NO: 993362 - DNA, 15 bp, Homo sapiens
ctgtggcgggccggg

SEQ ID NO: 993363 - DNA, 15 bp, Homo sapiens
tgtggcgggccgggc

SEQ ID NO: 993364 - DNA, 15 bp, Homo sapiens
gtggcgggccgggcc

SEQ ID NO: 993365 - DNA, 15 bp, Homo sapiens
tggcgggccgggcct

SEQ ID NO: 993366 - DNA, 15 bp, Homo sapiens
ggcgggccgggcctc

SEQ ID NO: 993367 - DNA, 15 bp, Homo sapiens
gcgggccgggcctcg

SEQ ID NO: 993368 - DNA, 15 bp, Homo sapiens
cgggccgggcctcgc

SEQ ID NO: 993369 - DNA, 15 bp, Homo sapiens
gggccgggcctcgcc

SEQ ID NO: 993370 - DNA, 15 bp, Homo sapiens
ggccgggcctcgcct

SEQ ID NO: 993371 - DNA, 15 bp, Homo sapiens
gccgggcctcgcctc

SEQ ID NO: 993372 - DNA, 15 bp, Homo sapiens
ccgggcctcgcctca

SEQ ID NO: 993373 - DNA, 15 bp, Homo sapiens
cgggcctcgcctcac

SEQ ID NO: 993374 - DNA, 15 bp, Homo sapiens
gggcctcgcctcacc

SEQ ID NO: 993375 - DNA, 15 bp, Homo sapiens
ggcctcgcctcaccc

SEQ ID NO: 993376 - DNA, 15 bp, Homo sapiens
gcctcgcctcacccg

SEQ ID NO: 993377 - DNA, 15 bp, Homo sapiens
cctcgcctcacccgc

SEQ ID NO: 993378 - DNA, 15 bp, Homo sapiens
ctcgcctcacccgcc

SEQ ID NO: 993379 - DNA, 15 bp, Homo sapiens
tcgcctcacccgccc

SEQ ID NO: 993380 - DNA, 15 bp, Homo sapiens
cgcctcacccgcccc

SEQ ID NO: 993381 - DNA, 15 bp, Homo sapiens
gcctcacccgccccc

SEQ ID NO: 993382 - DNA, 15 bp, Homo sapiens
cctcacccgccccct

SEQ ID NO: 993383 - DNA, 15 bp, Homo sapiens
ctcacccgccccctc

SEQ ID NO: 993384 - DNA, 15 bp, Homo sapiens
tcacccgccccctcc

SEQ ID NO: 993385 - DNA, 15 bp, Homo sapiens
cacccgccccctccc

SEQ ID NO: 993386 - DNA, 15 bp, Homo sapiens
acccgccccctcccc

SEQ ID NO: 993387 - DNA, 15 bp, Homo sapiens
cccgccccctccccc

SEQ ID NO: 993388 - DNA, 15 bp, Homo sapiens
ccgccccctcccccc

SEQ ID NO: 993389 - DNA, 15 bp, Homo sapiens
cgccccctcccccca

SEQ ID NO: 993390 - DNA, 15 bp, Homo sapiens
gccccctccccccac

SEQ ID NO: 993391 - DNA, 15 bp, Homo sapiens
ccccctccccccact

SEQ ID NO: 993392 - DNA, 15 bp, Homo sapiens
cccctccccccactc

SEQ ID NO: 993393 - DNA, 15 bp, Homo sapiens
ccctccccccactcc

SEQ ID NO: 993394 - DNA, 15 bp, Homo sapiens
cctccccccactcca

SEQ ID NO: 993395 - DNA, 15 bp, Homo sapiens
ctccccccactccag

SEQ ID NO: 993396 - DNA, 15 bp, Homo sapiens
tccccccactccagg

SEQ ID NO: 993397 - DNA, 15 bp, Homo sapiens
ccccccactccaggc

SEQ ID NO: 993398 - DNA, 15 bp, Homo sapiens
cccccactccaggcc

SEQ ID NO: 993399 - DNA, 15 bp, Homo sapiens
ccccactccaggccc

SEQ ID NO: 993400 - DNA, 15 bp, Homo sapiens
cccactccaggcccc

SEQ ID NO: 993401 - DNA, 15 bp, Homo sapiens
ccactccaggccccc

SEQ ID NO: 993402 - DNA, 15 bp, Homo sapiens
cactccaggccccct

SEQ ID NO: 993403 - DNA, 15 bp, Homo sapiens
actccaggccccctc

SEQ ID NO: 993404 - DNA, 15 bp, Homo sapiens
ctccaggccccctcc

SEQ ID NO: 993405 - DNA, 15 bp, Homo sapiens
tccaggccccctcca

SEQ ID NO: 993406 - DNA, 15 bp, Homo sapiens
ccaggccccctccac

SEQ ID NO: 993407 - DNA, 15 bp, Homo sapiens
caggccccctccaca

SEQ ID NO: 993408 - DNA, 15 bp, Homo sapiens
aggccccctccacat

SEQ ID NO: 993409 - DNA, 15 bp, Homo sapiens
ggccccctccacatc

SEQ ID NO: 993410 - DNA, 15 bp, Homo sapiens
gccccctccacatcc

SEQ ID NO: 993411 - DNA, 15 bp, Homo sapiens
ccccctccacatccc

SEQ ID NO: 993412 - DNA, 15 bp, Homo sapiens
cccctccacatcccg

SEQ ID NO: 993413 - DNA, 15 bp, Homo sapiens
ccctccacatcccgc

SEQ ID NO: 993414 - DNA, 15 bp, Homo sapiens
cctccacatcccgct

SEQ ID NO: 993415 - DNA, 15 bp, Homo sapiens
ctccacatcccgctt

SEQ ID NO: 993416 - DNA, 15 bp, Homo sapiens
tccacatcccgcttc

SEQ ID NO: 993417 - DNA, 15 bp, Homo sapiens
ccacatcccgcttcg

SEQ ID NO: 993418 - DNA, 15 bp, Homo sapiens
cacatcccgcttcgc

SEQ ID NO: 993419 - DNA, 15 bp, Homo sapiens
acatcccgcttcgcc

SEQ ID NO: 993420 - DNA, 15 bp, Homo sapiens
catcccgcttcgcct

SEQ ID NO: 993421 - DNA, 15 bp, Homo sapiens
atcccgcttcgcctc

SEQ ID NO: 993422 - DNA, 15 bp, Homo sapiens
tcccgcttcgcctcc

SEQ ID NO: 993423 - DNA, 15 bp, Homo sapiens
cccgcttcgcctccc

SEQ ID NO: 993424 - DNA, 15 bp, Homo sapiens
ccgcttcgcctccct

SEQ ID NO: 993425 - DNA, 15 bp, Homo sapiens
cgcttcgcctccctc

SEQ ID NO: 993426 - DNA, 15 bp, Homo sapiens
gcttcgcctccctcc

SEQ ID NO: 993427 - DNA, 15 bp, Homo sapiens
cttcgcctccctcca

SEQ ID NO: 993428 - DNA, 15 bp, Homo sapiens
ttcgcctccctccag

SEQ ID NO: 993429 - DNA, 15 bp, Homo sapiens
tcgcctccctccagg

SEQ ID NO: 993430 - DNA, 15 bp, Homo sapiens
cgcctccctccagga

SEQ ID NO: 993431 - DNA, 15 bp, Homo sapiens
gcctccctccaggac

SEQ ID NO: 993432 - DNA, 15 bp, Homo sapiens
cctccctccaggact

SEQ ID NO: 993433 - DNA, 15 bp, Homo sapiens
ctccctccaggactc

SEQ ID NO: 993434 - DNA, 15 bp, Homo sapiens
tccctccaggactcc

SEQ ID NO: 993435 - DNA, 15 bp, Homo sapiens
ccctccaggactcca

SEQ ID NO: 993436 - DNA, 15 bp, Homo sapiens
cctccaggactccac

SEQ ID NO: 993437 - DNA, 15 bp, Homo sapiens
ctccaggactccacc

SEQ ID NO: 993438 - DNA, 15 bp, Homo sapiens
tccaggactccaccc

SEQ ID NO: 993439 - DNA, 15 bp, Homo sapiens
ccaggactccacccc

SEQ ID NO: 993440 - DNA, 15 bp, Homo sapiens
caggactccaccccg

SEQ ID NO: 993441 - DNA, 15 bp, Homo sapiens
aggactccaccccgg

SEQ ID NO: 993442 - DNA, 15 bp, Homo sapiens
ggactccaccccggc

SEQ ID NO: 993443 - DNA, 15 bp, Homo sapiens
gactccaccccggct

SEQ ID NO: 993444 - DNA, 15 bp, Homo sapiens
actccaccccggctc

SEQ ID NO: 993445 - DNA, 15 bp, Homo sapiens
ctccaccccggctcc

SEQ ID NO: 993446 - DNA, 15 bp, Homo sapiens
tccaccccggctccc

SEQ ID NO: 993447 - DNA, 15 bp, Homo sapiens
ccaccccggctcccg

SEQ ID NO: 993448 - DNA, 15 bp, Homo sapiens
caccccggctcccgg

SEQ ID NO: 993449 - DNA, 15 bp, Homo sapiens
accccggctcccgga

SEQ ID NO: 993450 - DNA, 15 bp, Homo sapiens
ccccggctcccggac

SEQ ID NO: 993451 - DNA, 15 bp, Homo sapiens
cccggctcccggacg

SEQ ID NO: 993452 - DNA, 15 bp, Homo sapiens
ccggctcccggacgc

SEQ ID NO: 993453 - DNA, 15 bp, Homo sapiens
cggctcccggacgcc

SEQ ID NO: 993454 - DNA, 15 bp, Homo sapiens
ggctcccggacgcca

SEQ ID NO: 993455 - DNA, 15 bp, Homo sapiens
gctcccggacgccag

SEQ ID NO: 993456 - DNA, 15 bp, Homo sapiens
ctcccggacgccagc

SEQ ID NO: 993457 - DNA, 15 bp, Homo sapiens
tcccggacgccagct

SEQ ID NO: 993458 - DNA, 15 bp, Homo sapiens
cccggacgccagctg

SEQ ID NO: 993459 - DNA, 15 bp, Homo sapiens
ccggacgccagctgg

SEQ ID NO: 993460 - DNA, 15 bp, Homo sapiens
cggacgccagctggg

SEQ ID NO: 993461 - DNA, 15 bp, Homo sapiens
ggacgccagctgggc

SEQ ID NO: 993462 - DNA, 15 bp, Homo sapiens
gacgccagctgggcg

SEQ ID NO: 993463 - DNA, 15 bp, Homo sapiens
acgccagctgggcgt

SEQ ID NO: 993464 - DNA, 15 bp, Homo sapiens
cgccagctgggcgtc

SEQ ID NO: 993465 - DNA, 15 bp, Homo sapiens
gccagctgggcgtca

SEQ ID NO: 993466 - DNA, 15 bp, Homo sapiens
ccagctgggcgtcag

SEQ ID NO: 993467 - DNA, 15 bp, Homo sapiens
cagctgggcgtcaga

SEQ ID NO: 993468 - DNA, 15 bp, Homo sapiens
agctgggcgtcagac

SEQ ID NO: 993469 - DNA, 15 bp, Homo sapiens
gctgggcgtcagacc

SEQ ID NO: 993470 - DNA, 15 bp, Homo sapiens
ctgggcgtcagaccc

SEQ ID NO: 993471 - DNA, 15 bp, Homo sapiens
tgggcgtcagacccc

SEQ ID NO: 993472 - DNA, 15 bp, Homo sapiens
gggcgtcagacccca

SEQ ID NO: 993473 - DNA, 15 bp, Homo sapiens
ggcgtcagaccccac

SEQ ID NO: 993474 - DNA, 15 bp, Homo sapiens
gcgtcagaccccacc

SEQ ID NO: 993475 - DNA, 15 bp, Homo sapiens
cgtcagaccccaccg

SEQ ID NO: 993476 - DNA, 15 bp, Homo sapiens
gtcagaccccaccgg

SEQ ID NO: 993477 - DNA, 15 bp, Homo sapiens
tcagaccccaccggg

SEQ ID NO: 993478 - DNA, 15 bp, Homo sapiens
cagaccccaccgggg

SEQ ID NO: 993479 - DNA, 15 bp, Homo sapiens
agaccccaccggggc

SEQ ID NO: 993480 - DNA, 15 bp, Homo sapiens
gaccccaccggggca

SEQ ID NO: 993481 - DNA, 15 bp, Homo sapiens
accccaccggggcaa

SEQ ID NO: 993482 - DNA, 15 bp, Homo sapiens
ccccaccggggcaac

SEQ ID NO: 993483 - DNA, 15 bp, Homo sapiens
cccaccggggcaacc

SEQ ID NO: 993484 - DNA, 15 bp, Homo sapiens
ccaccggggcaacct

SEQ ID NO: 993485 - DNA, 15 bp, Homo sapiens
caccggggcaacctt

SEQ ID NO: 993486 - DNA, 15 bp, Homo sapiens
accggggcaaccttg

SEQ ID NO: 993487 - DNA, 15 bp, Homo sapiens
ccggggcaaccttgc

SEQ ID NO: 993488 - DNA, 15 bp, Homo sapiens
cggggcaaccttgca

SEQ ID NO: 993489 - DNA, 15 bp, Homo sapiens
ggggcaaccttgcag

SEQ ID NO: 993490 - DNA, 15 bp, Homo sapiens
gggcaaccttgcaga

SEQ ID NO: 993491 - DNA, 15 bp, Homo sapiens
ggcaaccttgcagag

SEQ ID NO: 993492 - DNA, 15 bp, Homo sapiens
gcaaccttgcagagg

SEQ ID NO: 993493 - DNA, 15 bp, Homo sapiens
caaccttgcagagga

SEQ ID NO: 993494 - DNA, 15 bp, Homo sapiens
aaccttgcagaggac

SEQ ID NO: 993495 - DNA, 15 bp, Homo sapiens
accttgcagaggacg

SEQ ID NO: 993496 - DNA, 15 bp, Homo sapiens
ccttgcagaggacga

SEQ ID NO: 993497 - DNA, 15 bp, Homo sapiens
cttgcagaggacgac

SEQ ID NO: 993498 - DNA, 15 bp, Homo sapiens
ttgcagaggacgacc

SEQ ID NO: 993499 - DNA, 15 bp, Homo sapiens
tgcagaggacgaccc

SEQ ID NO: 993500 - DNA, 15 bp, Homo sapiens
gcagaggacgacccg

SEQ ID NO: 993501 - DNA, 15 bp, Homo sapiens
cagaggacgacccgg

SEQ ID NO: 993502 - DNA, 15 bp, Homo sapiens
agaggacgacccggg

SEQ ID NO: 993503 - DNA, 15 bp, Homo sapiens
gaggacgacccgggg

SEQ ID NO: 993504 - DNA, 15 bp, Homo sapiens
aggacgacccggggt

SEQ ID NO: 993505 - DNA, 15 bp, Homo sapiens
ggacgacccggggta

SEQ ID NO: 993506 - DNA, 15 bp, Homo sapiens
gacgacccggggtac

SEQ ID NO: 993507 - DNA, 15 bp, Homo sapiens
acgacccggggtact

SEQ ID NO: 993508 - DNA, 15 bp, Homo sapiens
cgacccggggtactg

SEQ ID NO: 993509 - DNA, 15 bp, Homo sapiens
gacccggggtactgc

SEQ ID NO: 993510 - DNA, 15 bp, Homo sapiens
acccggggtactgcc

SEQ ID NO: 993511 - DNA, 15 bp, Homo sapiens
cccggggtactgcct

SEQ ID NO: 993512 - DNA, 15 bp, Homo sapiens
ccggggtactgcctt

SEQ ID NO: 993513 - DNA, 15 bp, Homo sapiens
cggggtactgccttg

SEQ ID NO: 993514 - DNA, 15 bp, Homo sapiens
ggggtactgccttgg

SEQ ID NO: 993515 - DNA, 15 bp, Homo sapiens
gggtactgccttggg

SEQ ID NO: 993516 - DNA, 15 bp, Homo sapiens
ggtactgccttggga

SEQ ID NO: 993517 - DNA, 15 bp, Homo sapiens
gtactgccttgggag

SEQ ID NO: 993518 - DNA, 15 bp, Homo sapiens
tactgccttgggagt

SEQ ID NO: 993519 - DNA, 15 bp, Homo sapiens
actgccttgggagtc

SEQ ID NO: 993520 - DNA, 15 bp, Homo sapiens
ctgccttgggagtct

SEQ ID NO: 993521 - DNA, 15 bp, Homo sapiens
tgccttgggagtctc

SEQ ID NO: 993522 - DNA, 15 bp, Homo sapiens
gccttgggagtctca

SEQ ID NO: 993523 - DNA, 15 bp, Homo sapiens
ccttgggagtctcaa

SEQ ID NO: 993524 - DNA, 15 bp, Homo sapiens
cttgggagtctcaag

SEQ ID NO: 993525 - DNA, 15 bp, Homo sapiens
ttgggagtctcaagt

SEQ ID NO: 993526 - DNA, 15 bp, Homo sapiens
tgggagtctcaagtc

SEQ ID NO: 993527 - DNA, 15 bp, Homo sapiens
gggagtctcaagtcc

SEQ ID NO: 993528 - DNA, 15 bp, Homo sapiens
ggagtctcaagtccg

SEQ ID NO: 993529 - DNA, 15 bp, Homo sapiens
gagtctcaagtccgt

SEQ ID NO: 993530 - DNA, 15 bp, Homo sapiens
agtctcaagtccgta

SEQ ID NO: 993531 - DNA, 15 bp, Homo sapiens
gtctcaagtccgtat

SEQ ID NO: 993532 - DNA, 15 bp, Homo sapiens
tctcaagtccgtatg

SEQ ID NO: 993533 - DNA, 15 bp, Homo sapiens
ctcaagtccgtatgt

SEQ ID NO: 993534 - DNA, 15 bp, Homo sapiens
tcaagtccgtatgta

SEQ ID NO: 993535 - DNA, 15 bp, Homo sapiens
caagtccgtatgtaa

SEQ ID NO: 993536 - DNA, 15 bp, Homo sapiens
aagtccgtatgtaaa

SEQ ID NO: 993537 - DNA, 15 bp, Homo sapiens
agtccgtatgtaaat

SEQ ID NO: 993538 - DNA, 15 bp, Homo sapiens
gtccgtatgtaaatc

SEQ ID NO: 993539 - DNA, 15 bp, Homo sapiens
tccgtatgtaaatca

SEQ ID NO: 993540 - DNA, 15 bp, Homo sapiens
ccgtatgtaaatcag

SEQ ID NO: 993541 - DNA, 15 bp, Homo sapiens
cgtatgtaaatcaga

SEQ ID NO: 993542 - DNA, 15 bp, Homo sapiens
gtatgtaaatcagat

SEQ ID NO: 993543 - DNA, 15 bp, Homo sapiens
tatgtaaatcagatc

SEQ ID NO: 993544 - DNA, 15 bp, Homo sapiens
atgtaaatcagatct

SEQ ID NO: 993545 - DNA, 15 bp, Homo sapiens
tgtaaatcagatctc

SEQ ID NO: 993546 - DNA, 15 bp, Homo sapiens
gtaaatcagatctcc

SEQ ID NO: 993547 - DNA, 15 bp, Homo sapiens
taaatcagatctccc

SEQ ID NO: 993548 - DNA, 15 bp, Homo sapiens
aaatcagatctcccc

SEQ ID NO: 993549 - DNA, 15 bp, Homo sapiens
aatcagatctcccct

SEQ ID NO: 993550 - DNA, 15 bp, Homo sapiens
atcagatctcccctc

SEQ ID NO: 993551 - DNA, 15 bp, Homo sapiens
tcagatctcccctct

SEQ ID NO: 993552 - DNA, 15 bp, Homo sapiens
cagatctcccctctc

SEQ ID NO: 993553 - DNA, 15 bp, Homo sapiens
agatctcccctctca

SEQ ID NO: 993554 - DNA, 15 bp, Homo sapiens
gatctcccctctcac

SEQ ID NO: 993555 - DNA, 15 bp, Homo sapiens
atctcccctctcacc

SEQ ID NO: 993556 - DNA, 15 bp, Homo sapiens
tctcccctctcaccc

SEQ ID NO: 993557 - DNA, 15 bp, Homo sapiens
ctcccctctcacccc

SEQ ID NO: 993558 - DNA, 15 bp, Homo sapiens
tcccctctcacccct

SEQ ID NO: 993559 - DNA, 15 bp, Homo sapiens
cccctctcacccctc

SEQ ID NO: 993560 - DNA, 15 bp, Homo sapiens
ccctctcacccctcc

SEQ ID NO: 993561 - DNA, 15 bp, Homo sapiens
cctctcacccctccc

SEQ ID NO: 993562 - DNA, 15 bp, Homo sapiens
ctctcacccctccca

SEQ ID NO: 993563 - DNA, 15 bp, Homo sapiens
tctcacccctcccac

SEQ ID NO: 993564 - DNA, 15 bp, Homo sapiens
ctcacccctcccacc

SEQ ID NO: 993565 - DNA, 15 bp, Homo sapiens
tcacccctcccaccc

SEQ ID NO: 993566 - DNA, 15 bp, Homo sapiens
cacccctcccaccca

SEQ ID NO: 993567 - DNA, 15 bp, Homo sapiens
acccctcccacccat

SEQ ID NO: 993568 - DNA, 15 bp, Homo sapiens
cccctcccacccatt

SEQ ID NO: 993569 - DNA, 15 bp, Homo sapiens
ccctcccacccatta

SEQ ID NO: 993570 - DNA, 15 bp, Homo sapiens
cctcccacccattaa

SEQ ID NO: 993571 - DNA, 15 bp, Homo sapiens
ctcccacccattaac

SEQ ID NO: 993572 - DNA, 15 bp, Homo sapiens
tcccacccattaacc

SEQ ID NO: 993573 - DNA, 15 bp, Homo sapiens
cccacccattaacct

SEQ ID NO: 993574 - DNA, 15 bp, Homo sapiens
ccacccattaacctc

SEQ ID NO: 993575 - DNA, 15 bp, Homo sapiens
cacccattaacctcc

SEQ ID NO: 993576 - DNA, 15 bp, Homo sapiens
acccattaacctcct

SEQ ID NO: 993577 - DNA, 15 bp, Homo sapiens
cccattaacctcctc

SEQ ID NO: 993578 - DNA, 15 bp, Homo sapiens
ccattaacctcctcc

SEQ ID NO: 993579 - DNA, 15 bp, Homo sapiens
cattaacctcctccc

SEQ ID NO: 993580 - DNA, 15 bp, Homo sapiens
attaacctcctccca

SEQ ID NO: 993581 - DNA, 15 bp, Homo sapiens
ttaacctcctcccaa

SEQ ID NO: 993582 - DNA, 15 bp, Homo sapiens
taacctcctcccaaa

SEQ ID NO: 993583 - DNA, 15 bp, Homo sapiens
aacctcctcccaaaa

SEQ ID NO: 993584 - DNA, 15 bp, Homo sapiens
acctcctcccaaaaa

SEQ ID NO: 993585 - DNA, 15 bp, Homo sapiens
cctcctcccaaaaaa

SEQ ID NO: 993586 - DNA, 15 bp, Homo sapiens
ctcctcccaaaaaac

SEQ ID NO: 993587 - DNA, 15 bp, Homo sapiens
tcctcccaaaaaaca

SEQ ID NO: 993588 - DNA, 15 bp, Homo sapiens
cctcccaaaaaacaa

SEQ ID NO: 993589 - DNA, 15 bp, Homo sapiens
ctcccaaaaaacaag

SEQ ID NO: 993590 - DNA, 15 bp, Homo sapiens
tcccaaaaaacaagt

SEQ ID NO: 993591 - DNA, 15 bp, Homo sapiens
cccaaaaaacaagta

SEQ ID NO: 993592 - DNA, 15 bp, Homo sapiens
ccaaaaaacaagtaa

SEQ ID NO: 993593 - DNA, 15 bp, Homo sapiens
caaaaaacaagtaaa

SEQ ID NO: 993594 - DNA, 15 bp, Homo sapiens
aaaaaacaagtaaag

SEQ ID NO: 993595 - DNA, 15 bp, Homo sapiens
aaaaacaagtaaagt

SEQ ID NO: 993596 - DNA, 15 bp, Homo sapiens
aaaacaagtaaagtt

SEQ ID NO: 993597 - DNA, 15 bp, Homo sapiens
aaacaagtaaagtta

SEQ ID NO: 993598 - DNA, 15 bp, Homo sapiens
aacaagtaaagttat

SEQ ID NO: 993599 - DNA, 15 bp, Homo sapiens
acaagtaaagttatt

SEQ ID NO: 993600 - DNA, 15 bp, Homo sapiens
caagtaaagttattc

SEQ ID NO: 993601 - DNA, 15 bp, Homo sapiens
aagtaaagttattct

SEQ ID NO: 993602 - DNA, 15 bp, Homo sapiens
agtaaagttattctc

SEQ ID NO: 993603 - DNA, 15 bp, Homo sapiens
gtaaagttattctca

SEQ ID NO: 993604 - DNA, 15 bp, Homo sapiens
taaagttattctcaa

SEQ ID NO: 993605 - DNA, 15 bp, Homo sapiens
aaagttattctcaat

SEQ ID NO: 993606 - DNA, 15 bp, Homo sapiens
aagttattctcaatc

SEQ ID NO: 993607 - DNA, 15 bp, Homo sapiens
agttattctcaatcc

SEQ ID NO: 993608 - DNA, 15 bp, Homo sapiens
gttattctcaatcca

SEQ ID NO: 993609 - DNA, 15 bp, Homo sapiens
ttattctcaatccat

SEQ ID NO: 993610 - DNA, 15 bp, Homo sapiens
tattctcaatccatc

SEQ ID NO: 993611 - DNA, 15 bp, Homo sapiens
attctcaatccatcc

SEQ ID NO: 993612 - DNA, 15 bp, Homo sapiens
ttctcaatccatcct

SEQ ID NO: 993613 - DNA, 15 bp, Homo sapiens
tctcaatccatcctc

SEQ ID NO: 993614 - DNA, 15 bp, Homo sapiens
ctcaatccatcctct

SEQ ID NO: 993615 - DNA, 15 bp, Homo sapiens
tcaatccatcctctt

SEQ ID NO: 993616 - DNA, 15 bp, Homo sapiens
caatccatcctcttg

SEQ ID NO: 993617 - DNA, 15 bp, Homo sapiens
aatccatcctcttgc

SEQ ID NO: 993618 - DNA, 15 bp, Homo sapiens
atccatcctcttgca

SEQ ID NO: 993619 - DNA, 15 bp, Homo sapiens
tccatcctcttgcag

SEQ ID NO: 993620 - DNA, 15 bp, Homo sapiens
ccatcctcttgcagc

SEQ ID NO: 993621 - DNA, 15 bp, Homo sapiens
catcctcttgcagca

SEQ ID NO: 993622 - DNA, 15 bp, Homo sapiens
atcctcttgcagcac

SEQ ID NO: 993623 - DNA, 15 bp, Homo sapiens
tcctcttgcagcaca

SEQ ID NO: 993624 - DNA, 15 bp, Homo sapiens
cctcttgcagcacag

SEQ ID NO: 993625 - DNA, 15 bp, Homo sapiens
ctcttgcagcacaga

SEQ ID NO: 993626 - DNA, 15 bp, Homo sapiens
tcttgcagcacagag

SEQ ID NO: 993627 - DNA, 15 bp, Homo sapiens
cttgcagcacagagt

SEQ ID NO: 993628 - DNA, 15 bp, Homo sapiens
ttgcagcacagagtc

SEQ ID NO: 993629 - DNA, 15 bp, Homo sapiens
tgcagcacagagtct

SEQ ID NO: 993630 - DNA, 15 bp, Homo sapiens
gcagcacagagtctc

SEQ ID NO: 993631 - DNA, 15 bp, Homo sapiens
cagcacagagtctct

SEQ ID NO: 993632 - DNA, 15 bp, Homo sapiens
agcacagagtctctt

SEQ ID NO: 993633 - DNA, 15 bp, Homo sapiens
gcacagagtctcttt

SEQ ID NO: 993634 - DNA, 15 bp, Homo sapiens
cacagagtctctttt

SEQ ID NO: 993635 - DNA, 15 bp, Homo sapiens
acagagtctctttta

SEQ ID NO: 993636 - DNA, 15 bp, Homo sapiens
cagagtctcttttaa

SEQ ID NO: 993637 - DNA, 15 bp, Homo sapiens
agagtctcttttaaa

SEQ ID NO: 993638 - DNA, 15 bp, Homo sapiens
gagtctcttttaaaa

SEQ ID NO: 993639 - DNA, 15 bp, Homo sapiens
agtctcttttaaaat

SEQ ID NO: 993640 - DNA, 15 bp, Homo sapiens
gtctcttttaaaatt

SEQ ID NO: 993641 - DNA, 15 bp, Homo sapiens
tctcttttaaaattt

SEQ ID NO: 993642 - DNA, 15 bp, Homo sapiens
ctcttttaaaatttg

SEQ ID NO: 993643 - DNA, 15 bp, Homo sapiens
tcttttaaaatttgt

SEQ ID NO: 993644 - DNA, 15 bp, Homo sapiens
cttttaaaatttgtt

SEQ ID NO: 993645 - DNA, 15 bp, Homo sapiens
ttttaaaatttgttg

SEQ ID NO: 993646 - DNA, 15 bp, Homo sapiens
tttaaaatttgttgt

SEQ ID NO: 993647 - DNA, 15 bp, Homo sapiens
ttaaaatttgttgtg

SEQ ID NO: 993648 - DNA, 15 bp, Homo sapiens
taaaatttgttgtgt

SEQ ID NO: 993649 - DNA, 15 bp, Homo sapiens
aaaatttgttgtgta

SEQ ID NO: 993650 - DNA, 15 bp, Homo sapiens
aaatttgttgtgtat

SEQ ID NO: 993651 - DNA, 15 bp, Homo sapiens
aatttgttgtgtatc

SEQ ID NO: 993652 - DNA, 15 bp, Homo sapiens
atttgttgtgtatct

SEQ ID NO: 993653 - DNA, 15 bp, Homo sapiens
tttgttgtgtatctc

SEQ ID NO: 993654 - DNA, 15 bp, Homo sapiens
ttgttgtgtatctct

SEQ ID NO: 993655 - DNA, 15 bp, Homo sapiens
tgttgtgtatctctt

SEQ ID NO: 993656 - DNA, 15 bp, Homo sapiens
gttgtgtatctcttt

SEQ ID NO: 993657 - DNA, 15 bp, Homo sapiens
ttgtgtatctctttt

SEQ ID NO: 993658 - DNA, 15 bp, Homo sapiens
tgtgtatctcttttg

SEQ ID NO: 993659 - DNA, 15 bp, Homo sapiens
gtgtatctcttttgg

SEQ ID NO: 993660 - DNA, 15 bp, Homo sapiens
tgtatctcttttggc

SEQ ID NO: 993661 - DNA, 15 bp, Homo sapiens
gtatctcttttggcc

SEQ ID NO: 993662 - DNA, 15 bp, Homo sapiens
tatctcttttggccc

SEQ ID NO: 993663 - DNA, 15 bp, Homo sapiens
atctcttttggcccc

SEQ ID NO: 993664 - DNA, 15 bp, Homo sapiens
tctcttttggcccct

SEQ ID NO: 993665 - DNA, 15 bp, Homo sapiens
ctcttttggcccctg

SEQ ID NO: 993666 - DNA, 15 bp, Homo sapiens
tcttttggcccctgt

SEQ ID NO: 993667 - DNA, 15 bp, Homo sapiens
cttttggcccctgtg

SEQ ID NO: 993668 - DNA, 15 bp, Homo sapiens
ttttggcccctgtgt

SEQ ID NO: 993669 - DNA, 15 bp, Homo sapiens
tttggcccctgtgtg

SEQ ID NO: 993670 - DNA, 15 bp, Homo sapiens
ttggcccctgtgtgc

SEQ ID NO: 993671 - DNA, 15 bp, Homo sapiens
tggcccctgtgtgct

SEQ ID NO: 993672 - DNA, 15 bp, Homo sapiens
ggcccctgtgtgctg

SEQ ID NO: 993673 - DNA, 15 bp, Homo sapiens
gcccctgtgtgctgc

SEQ ID NO: 993674 - DNA, 15 bp, Homo sapiens
cccctgtgtgctgcg

SEQ ID NO: 993675 - DNA, 15 bp, Homo sapiens
ccctgtgtgctgcga

SEQ ID NO: 993676 - DNA, 15 bp, Homo sapiens
cctgtgtgctgcgac

SEQ ID NO: 993677 - DNA, 15 bp, Homo sapiens
ctgtgtgctgcgacg

SEQ ID NO: 993678 - DNA, 15 bp, Homo sapiens
tgtgtgctgcgacgt

SEQ ID NO: 993679 - DNA, 15 bp, Homo sapiens
gtgtgctgcgacgtc

SEQ ID NO: 993680 - DNA, 15 bp, Homo sapiens
tgtgctgcgacgtct

SEQ ID NO: 993681 - DNA, 15 bp, Homo sapiens
gtgctgcgacgtctc

SEQ ID NO: 993682 - DNA, 15 bp, Homo sapiens
tgctgcgacgtctct

SEQ ID NO: 993683 - DNA, 15 bp, Homo sapiens
gctgcgacgtctctt

SEQ ID NO: 993684 - DNA, 15 bp, Homo sapiens
ctgcgacgtctcttt

SEQ ID NO: 993685 - DNA, 15 bp, Homo sapiens
tgcgacgtctctttt

SEQ ID NO: 993686 - DNA, 15 bp, Homo sapiens
gcgacgtctcttttt

SEQ ID NO: 993687 - DNA, 15 bp, Homo sapiens
cgacgtctctttttg

SEQ ID NO: 993688 - DNA, 15 bp, Homo sapiens
gacgtctctttttgt

SEQ ID NO: 993689 - DNA, 15 bp, Homo sapiens
acgtctctttttgtc

SEQ ID NO: 993690 - DNA, 15 bp, Homo sapiens
cgtctctttttgtca

SEQ ID NO: 993691 - DNA, 15 bp, Homo sapiens
gtctctttttgtcat

SEQ ID NO: 993692 - DNA, 15 bp, Homo sapiens
tctctttttgtcatt

SEQ ID NO: 993693 - DNA, 15 bp, Homo sapiens
ctctttttgtcattt

SEQ ID NO: 993694 - DNA, 15 bp, Homo sapiens
tctttttgtcatttg

SEQ ID NO: 993695 - DNA, 15 bp, Homo sapiens
ctttttgtcatttgt

SEQ ID NO: 993696 - DNA, 15 bp, Homo sapiens
tttttgtcatttgtc

SEQ ID NO: 993697 - DNA, 15 bp, Homo sapiens
ttttgtcatttgtcc

SEQ ID NO: 993698 - DNA, 15 bp, Homo sapiens
tttgtcatttgtcca

SEQ ID NO: 993699 - DNA, 15 bp, Homo sapiens
ttgtcatttgtccat

SEQ ID NO: 993700 - DNA, 15 bp, Homo sapiens
tgtcatttgtccatc

SEQ ID NO: 993701 - DNA, 15 bp, Homo sapiens
gtcatttgtccatcg

SEQ ID NO: 993702 - DNA, 15 bp, Homo sapiens
tcatttgtccatcgg

SEQ ID NO: 993703 - DNA, 15 bp, Homo sapiens
catttgtccatcggg

SEQ ID NO: 993704 - DNA, 15 bp, Homo sapiens
atttgtccatcgggt

SEQ ID NO: 993705 - DNA, 15 bp, Homo sapiens
tttgtccatcgggtg

SEQ ID NO: 993706 - DNA, 15 bp, Homo sapiens
ttgtccatcgggtgt

SEQ ID NO: 993707 - DNA, 15 bp, Homo sapiens
tgtccatcgggtgtt

SEQ ID NO: 993708 - DNA, 15 bp, Homo sapiens
gtccatcgggtgttt

SEQ ID NO: 993709 - DNA, 15 bp, Homo sapiens
tccatcgggtgttta

SEQ ID NO: 993710 - DNA, 15 bp, Homo sapiens
ccatcgggtgtttac

SEQ ID NO: 993711 - DNA, 15 bp, Homo sapiens
catcgggtgtttacc

SEQ ID NO: 993712 - DNA, 15 bp, Homo sapiens
atcgggtgtttaccg

SEQ ID NO: 993713 - DNA, 15 bp, Homo sapiens
tcgggtgtttaccga

SEQ ID NO: 993714 - DNA, 15 bp, Homo sapiens
cgggtgtttaccgag

SEQ ID NO: 993715 - DNA, 15 bp, Homo sapiens
gggtgtttaccgagg

SEQ ID NO: 993716 - DNA, 15 bp, Homo sapiens
ggtgtttaccgagga

SEQ ID NO: 993717 - DNA, 15 bp, Homo sapiens
gtgtttaccgaggac

SEQ ID NO: 993718 - DNA, 15 bp, Homo sapiens
tgtttaccgaggact

SEQ ID NO: 993719 - DNA, 15 bp, Homo sapiens
gtttaccgaggactg

SEQ ID NO: 993720 - DNA, 15 bp, Homo sapiens
tttaccgaggactgt

SEQ ID NO: 993721 - DNA, 15 bp, Homo sapiens
ttaccgaggactgta

SEQ ID NO: 993722 - DNA, 15 bp, Homo sapiens
taccgaggactgtac

SEQ ID NO: 993723 - DNA, 15 bp, Homo sapiens
accgaggactgtacc

SEQ ID NO: 993724 - DNA, 15 bp, Homo sapiens
ccgaggactgtaccc

SEQ ID NO: 993725 - DNA, 15 bp, Homo sapiens
cgaggactgtaccca

SEQ ID NO: 993726 - DNA, 15 bp, Homo sapiens
gaggactgtacccaa

SEQ ID NO: 993727 - DNA, 15 bp, Homo sapiens
aggactgtacccaat

SEQ ID NO: 993728 - DNA, 15 bp, Homo sapiens
ggactgtacccaatg

SEQ ID NO: 993729 - DNA, 15 bp, Homo sapiens
gactgtacccaatgc

SEQ ID NO: 993730 - DNA, 15 bp, Homo sapiens
actgtacccaatgct

SEQ ID NO: 993731 - DNA, 15 bp, Homo sapiens
ctgtacccaatgctg

SEQ ID NO: 993732 - DNA, 15 bp, Homo sapiens
tgtacccaatgctgg

SEQ ID NO: 993733 - DNA, 15 bp, Homo sapiens
gtacccaatgctgga

SEQ ID NO: 993734 - DNA, 15 bp, Homo sapiens
tacccaatgctggac

SEQ ID NO: 993735 - DNA, 15 bp, Homo sapiens
acccaatgctggacc

SEQ ID NO: 993736 - DNA, 15 bp, Homo sapiens
cccaatgctggaccc

SEQ ID NO: 993737 - DNA, 15 bp, Homo sapiens
ccaatgctggaccct

SEQ ID NO: 993738 - DNA, 15 bp, Homo sapiens
caatgctggaccctg

SEQ ID NO: 993739 - DNA, 15 bp, Homo sapiens
aatgctggaccctgg

SEQ ID NO: 993740 - DNA, 15 bp, Homo sapiens
atgctggaccctggg

SEQ ID NO: 993741 - DNA, 15 bp, Homo sapiens
tgctggaccctggga

SEQ ID NO: 993742 - DNA, 15 bp, Homo sapiens
gctggaccctgggaa

SEQ ID NO: 993743 - DNA, 15 bp, Homo sapiens
ctggaccctgggaac

SEQ ID NO: 993744 - DNA, 15 bp, Homo sapiens
tggaccctgggaaca

SEQ ID NO: 993745 - DNA, 15 bp, Homo sapiens
ggaccctgggaacat

SEQ ID NO: 993746 - DNA, 15 bp, Homo sapiens
gaccctgggaacatg

SEQ ID NO: 993747 - DNA, 15 bp, Homo sapiens
accctgggaacatga

SEQ ID NO: 993748 - DNA, 15 bp, Homo sapiens
ccctgggaacatgag

SEQ ID NO: 993749 - DNA, 15 bp, Homo sapiens
cctgggaacatgagg

SEQ ID NO: 993750 - DNA, 15 bp, Homo sapiens
ctgggaacatgagga

SEQ ID NO: 993751 - DNA, 15 bp, Homo sapiens
tgggaacatgaggac

SEQ ID NO: 993752 - DNA, 15 bp, Homo sapiens
gggaacatgaggacc

SEQ ID NO: 993753 - DNA, 15 bp, Homo sapiens
ggaacatgaggacca

SEQ ID NO: 993754 - DNA, 15 bp, Homo sapiens
gaacatgaggaccaa

SEQ ID NO: 993755 - DNA, 15 bp, Homo sapiens
aacatgaggaccaat

SEQ ID NO: 993756 - DNA, 15 bp, Homo sapiens
acatgaggaccaatg

SEQ ID NO: 993757 - DNA, 15 bp, Homo sapiens
catgaggaccaatga

SEQ ID NO: 993758 - DNA, 15 bp, Homo sapiens
atgaggaccaatgac

SEQ ID NO: 993759 - DNA, 15 bp, Homo sapiens
tgaggaccaatgaca

SEQ ID NO: 993760 - DNA, 15 bp, Homo sapiens
gaggaccaatgacac

SEQ ID NO: 993761 - DNA, 15 bp, Homo sapiens
aggaccaatgacaca

SEQ ID NO: 993762 - DNA, 15 bp, Homo sapiens
ggaccaatgacacag

SEQ ID NO: 993763 - DNA, 15 bp, Homo sapiens
gaccaatgacacaga

SEQ ID NO: 993764 - DNA, 15 bp, Homo sapiens
accaatgacacagag

SEQ ID NO: 993765 - DNA, 15 bp, Homo sapiens
ccaatgacacagagc

SEQ ID NO: 993766 - DNA, 15 bp, Homo sapiens
caatgacacagagcg

SEQ ID NO: 993767 - DNA, 15 bp, Homo sapiens
aatgacacagagcgc

SEQ ID NO: 993768 - DNA, 15 bp, Homo sapiens
atgacacagagcgcc

SEQ ID NO: 993769 - DNA, 15 bp, Homo sapiens
tgacacagagcgcct

SEQ ID NO: 993770 - DNA, 15 bp, Homo sapiens
gacacagagcgcctg

SEQ ID NO: 993771 - DNA, 15 bp, Homo sapiens
acacagagcgcctga

SEQ ID NO: 993772 - DNA, 15 bp, Homo sapiens
cacagagcgcctgaa

SEQ ID NO: 993773 - DNA, 15 bp, Homo sapiens
acagagcgcctgaac

SEQ ID NO: 993774 - DNA, 15 bp, Homo sapiens
cagagcgcctgaaca

SEQ ID NO: 993775 - DNA, 15 bp, Homo sapiens
agagcgcctgaacag

SEQ ID NO: 993776 - DNA, 15 bp, Homo sapiens
gagcgcctgaacagg

SEQ ID NO: 993777 - DNA, 15 bp, Homo sapiens
agcgcctgaacagga

SEQ ID NO: 993778 - DNA, 15 bp, Homo sapiens
gcgcctgaacaggag

SEQ ID NO: 993779 - DNA, 15 bp, Homo sapiens
cgcctgaacaggagt

SEQ ID NO: 993780 - DNA, 15 bp, Homo sapiens
gcctgaacaggagtt

SEQ ID NO: 993781 - DNA, 15 bp, Homo sapiens
cctgaacaggagtta

SEQ ID NO: 993782 - DNA, 15 bp, Homo sapiens
ctgaacaggagttag

SEQ ID NO: 993783 - DNA, 15 bp, Homo sapiens
tgaacaggagttaga

SEQ ID NO: 993784 - DNA, 15 bp, Homo sapiens
gaacaggagttagag

SEQ ID NO: 993785 - DNA, 15 bp, Homo sapiens
aacaggagttagagt

SEQ ID NO: 993786 - DNA, 15 bp, Homo sapiens
acaggagttagagtt

SEQ ID NO: 993787 - DNA, 15 bp, Homo sapiens
caggagttagagttt

SEQ ID NO: 993788 - DNA, 15 bp, Homo sapiens
aggagttagagtttg

SEQ ID NO: 993789 - DNA, 15 bp, Homo sapiens
ggagttagagtttgg

SEQ ID NO: 993790 - DNA, 15 bp, Homo sapiens
gagttagagtttggt

SEQ ID NO: 993791 - DNA, 15 bp, Homo sapiens
agttagagtttggtg

SEQ ID NO: 993792 - DNA, 15 bp, Homo sapiens
gttagagtttggtgg

SEQ ID NO: 993793 - DNA, 15 bp, Homo sapiens
ttagagtttggtgga

SEQ ID NO: 993794 - DNA, 15 bp, Homo sapiens
tagagtttggtggaa

SEQ ID NO: 993795 - DNA, 15 bp, Homo sapiens
agagtttggtggaaa

SEQ ID NO: 993796 - DNA, 15 bp, Homo sapiens
gagtttggtggaaag

SEQ ID NO: 993797 - DNA, 15 bp, Homo sapiens
agtttggtggaaaga

SEQ ID NO: 993798 - DNA, 15 bp, Homo sapiens
gtttggtggaaagaa

SEQ ID NO: 993799 - DNA, 15 bp, Homo sapiens
tttggtggaaagaac

SEQ ID NO: 993800 - DNA, 15 bp, Homo sapiens
ttggtggaaagaaca

SEQ ID NO: 993801 - DNA, 15 bp, Homo sapiens
tggtggaaagaacaa

SEQ ID NO: 993802 - DNA, 15 bp, Homo sapiens
ggtggaaagaacaag

SEQ ID NO: 993803 - DNA, 15 bp, Homo sapiens
gtggaaagaacaagt

SEQ ID NO: 993804 - DNA, 15 bp, Homo sapiens
tggaaagaacaagtc

SEQ ID NO: 993805 - DNA, 15 bp, Homo sapiens
ggaaagaacaagtcc

SEQ ID NO: 993806 - DNA, 15 bp, Homo sapiens
gaaagaacaagtcct

SEQ ID NO: 993807 - DNA, 15 bp, Homo sapiens
aaagaacaagtcctc

SEQ ID NO: 993808 - DNA, 15 bp, Homo sapiens
aagaacaagtcctca

SEQ ID NO: 993809 - DNA, 15 bp, Homo sapiens
agaacaagtcctcaa

SEQ ID NO: 993810 - DNA, 15 bp, Homo sapiens
gaacaagtcctcaat

SEQ ID NO: 993811 - DNA, 15 bp, Homo sapiens
aacaagtcctcaatt

SEQ ID NO: 993812 - DNA, 15 bp, Homo sapiens
acaagtcctcaattg

SEQ ID NO: 993813 - DNA, 15 bp, Homo sapiens
caagtcctcaattgt

SEQ ID NO: 993814 - DNA, 15 bp, Homo sapiens
aagtcctcaattgtg

SEQ ID NO: 993815 - DNA, 15 bp, Homo sapiens
agtcctcaattgtga

SEQ ID NO: 993816 - DNA, 15 bp, Homo sapiens
gtcctcaattgtgat

SEQ ID NO: 993817 - DNA, 15 bp, Homo sapiens
tcctcaattgtgatt

SEQ ID NO: 993818 - DNA, 15 bp, Homo sapiens
cctcaattgtgatta

SEQ ID NO: 993819 - DNA, 15 bp, Homo sapiens
ctcaattgtgattag

SEQ ID NO: 993820 - DNA, 15 bp, Homo sapiens
tcaattgtgattagg

SEQ ID NO: 993821 - DNA, 15 bp, Homo sapiens
caattgtgattagga

SEQ ID NO: 993822 - DNA, 15 bp, Homo sapiens
aattgtgattaggag

SEQ ID NO: 993823 - DNA, 15 bp, Homo sapiens
attgtgattaggaga

SEQ ID NO: 993824 - DNA, 15 bp, Homo sapiens
ttgtgattaggagag

SEQ ID NO: 993825 - DNA, 15 bp, Homo sapiens
tgtgattaggagagc

SEQ ID NO: 993826 - DNA, 15 bp, Homo sapiens
gtgattaggagagca

SEQ ID NO: 993827 - DNA, 15 bp, Homo sapiens
tgattaggagagcag

SEQ ID NO: 993828 - DNA, 15 bp, Homo sapiens
gattaggagagcaga

SEQ ID NO: 993829 - DNA, 15 bp, Homo sapiens
attaggagagcagat

SEQ ID NO: 993830 - DNA, 15 bp, Homo sapiens
ttaggagagcagatc

SEQ ID NO: 993831 - DNA, 15 bp, Homo sapiens
taggagagcagatcc

SEQ ID NO: 993832 - DNA, 15 bp, Homo sapiens
aggagagcagatcct

SEQ ID NO: 993833 - DNA, 15 bp, Homo sapiens
ggagagcagatccta

SEQ ID NO: 993834 - DNA, 15 bp, Homo sapiens
gagagcagatcctat

SEQ ID NO: 993835 - DNA, 15 bp, Homo sapiens
agagcagatcctatt

SEQ ID NO: 993836 - DNA, 15 bp, Homo sapiens
gagcagatcctattt

SEQ ID NO: 993837 - DNA, 15 bp, Homo sapiens
agcagatcctattta

SEQ ID NO: 993838 - DNA, 15 bp, Homo sapiens
gcagatcctatttaa

SEQ ID NO: 993839 - DNA, 15 bp, Homo sapiens
cagatcctatttaaa

SEQ ID NO: 993840 - DNA, 15 bp, Homo sapiens
agatcctatttaaaa

SEQ ID NO: 993841 - DNA, 15 bp, Homo sapiens
gatcctatttaaaag

SEQ ID NO: 993842 - DNA, 15 bp, Homo sapiens
atcctatttaaaagc

SEQ ID NO: 993843 - DNA, 15 bp, Homo sapiens
tcctatttaaaagct

SEQ ID NO: 993844 - DNA, 15 bp, Homo sapiens
cctatttaaaagctc

SEQ ID NO: 993845 - DNA, 15 bp, Homo sapiens
ctatttaaaagctct

SEQ ID NO: 993846 - DNA, 15 bp, Homo sapiens
tatttaaaagctctc

SEQ ID NO: 993847 - DNA, 15 bp, Homo sapiens
atttaaaagctctct

SEQ ID NO: 993848 - DNA, 15 bp, Homo sapiens
tttaaaagctctcta

SEQ ID NO: 993849 - DNA, 15 bp, Homo sapiens
ttaaaagctctctac

SEQ ID NO: 993850 - DNA, 15 bp, Homo sapiens
taaaagctctctact

SEQ ID NO: 993851 - DNA, 15 bp, Homo sapiens
aaaagctctctactc

SEQ ID NO: 993852 - DNA, 15 bp, Homo sapiens
aaagctctctactcc

SEQ ID NO: 993853 - DNA, 15 bp, Homo sapiens
aagctctctactcct

SEQ ID NO: 993854 - DNA, 15 bp, Homo sapiens
agctctctactcctg

SEQ ID NO: 993855 - DNA, 15 bp, Homo sapiens
gctctctactcctga

SEQ ID NO: 993856 - DNA, 15 bp, Homo sapiens
ctctctactcctgat

SEQ ID NO: 993857 - DNA, 15 bp, Homo sapiens
tctctactcctgata

SEQ ID NO: 993858 - DNA, 15 bp, Homo sapiens
ctctactcctgatag

SEQ ID NO: 993859 - DNA, 15 bp, Homo sapiens
tctactcctgatagt

SEQ ID NO: 993860 - DNA, 15 bp, Homo sapiens
ctactcctgatagtt

SEQ ID NO: 993861 - DNA, 15 bp, Homo sapiens
tactcctgatagttg

SEQ ID NO: 993862 - DNA, 15 bp, Homo sapiens
actcctgatagttgt

SEQ ID NO: 993863 - DNA, 15 bp, Homo sapiens
ctcctgatagttgtt

SEQ ID NO: 993864 - DNA, 15 bp, Homo sapiens
tcctgatagttgttg

SEQ ID NO: 993865 - DNA, 15 bp, Homo sapiens
cctgatagttgttgt

SEQ ID NO: 993866 - DNA, 15 bp, Homo sapiens
ctgatagttgttgtt

SEQ ID NO: 993867 - DNA, 15 bp, Homo sapiens
tgatagttgttgttt

SEQ ID NO: 993868 - DNA, 15 bp, Homo sapiens
gatagttgttgtttt

SEQ ID NO: 993869 - DNA, 15 bp, Homo sapiens
atagttgttgttttt

SEQ ID NO: 993870 - DNA, 15 bp, Homo sapiens
tagttgttgttttta

SEQ ID NO: 993871 - DNA, 15 bp, Homo sapiens
agttgttgtttttaa

SEQ ID NO: 993872 - DNA, 15 bp, Homo sapiens
gttgttgtttttaag

SEQ ID NO: 993873 - DNA, 15 bp, Homo sapiens
ttgttgtttttaagc

SEQ ID NO: 993874 - DNA, 15 bp, Homo sapiens
tgttgtttttaagcc

SEQ ID NO: 993875 - DNA, 15 bp, Homo sapiens
gttgtttttaagcct

SEQ ID NO: 993876 - DNA, 15 bp, Homo sapiens
ttgtttttaagcctt

SEQ ID NO: 993877 - DNA, 15 bp, Homo sapiens
tgtttttaagccttg

SEQ ID NO: 993878 - DNA, 15 bp, Homo sapiens
gtttttaagccttga

SEQ ID NO: 993879 - DNA, 15 bp, Homo sapiens
tttttaagccttgat

SEQ ID NO: 993880 - DNA, 15 bp, Homo sapiens
ttttaagccttgatg

SEQ ID NO: 993881 - DNA, 15 bp, Homo sapiens
tttaagccttgatga

SEQ ID NO: 993882 - DNA, 15 bp, Homo sapiens
ttaagccttgatgag

SEQ ID NO: 993883 - DNA, 15 bp, Homo sapiens
taagccttgatgagg

SEQ ID NO: 993884 - DNA, 15 bp, Homo sapiens
aagccttgatgaggt

SEQ ID NO: 993885 - DNA, 15 bp, Homo sapiens
agccttgatgaggtt

SEQ ID NO: 993886 - DNA, 15 bp, Homo sapiens
gccttgatgaggttt

SEQ ID NO: 993887 - DNA, 15 bp, Homo sapiens
ccttgatgaggtttg

SEQ ID NO: 993888 - DNA, 15 bp, Homo sapiens
cttgatgaggtttga

SEQ ID NO: 993889 - DNA, 15 bp, Homo sapiens
ttgatgaggtttgaa

SEQ ID NO: 993890 - DNA, 15 bp, Homo sapiens
tgatgaggtttgaac

SEQ ID NO: 993891 - DNA, 15 bp, Homo sapiens
gatgaggtttgaact

SEQ ID NO: 993892 - DNA, 15 bp, Homo sapiens
atgaggtttgaactc

SEQ ID NO: 993893 - DNA, 15 bp, Homo sapiens
tgaggtttgaactca

SEQ ID NO: 993894 - DNA, 15 bp, Homo sapiens
gaggtttgaactcat

SEQ ID NO: 993895 - DNA, 15 bp, Homo sapiens
aggtttgaactcatg

SEQ ID NO: 993896 - DNA, 15 bp, Homo sapiens
ggtttgaactcatga

SEQ ID NO: 993897 - DNA, 15 bp, Homo sapiens
gtttgaactcatgat

SEQ ID NO: 993898 - DNA, 15 bp, Homo sapiens
tttgaactcatgatg

SEQ ID NO: 993899 - DNA, 15 bp, Homo sapiens
ttgaactcatgatga

SEQ ID NO: 993900 - DNA, 15 bp, Homo sapiens
tgaactcatgatgat

SEQ ID NO: 993901 - DNA, 15 bp, Homo sapiens
gaactcatgatgatg

SEQ ID NO: 993902 - DNA, 15 bp, Homo sapiens
aactcatgatgatga

SEQ ID NO: 993903 - DNA, 15 bp, Homo sapiens
actcatgatgatgat

SEQ ID NO: 993904 - DNA, 15 bp, Homo sapiens
ctcatgatgatgatg

SEQ ID NO: 993905 - DNA, 15 bp, Homo sapiens
tcatgatgatgatga

SEQ ID NO: 993906 - DNA, 15 bp, Homo sapiens
catgatgatgatgat

SEQ ID NO: 993907 - DNA, 15 bp, Homo sapiens
atgatgatgatgatg

SEQ ID NO: 993908 - DNA, 15 bp, Homo sapiens
tgatgatgatgatga

SEQ ID NO: 993909 - DNA, 15 bp, Homo sapiens
gatgatgatgatgat

SEQ ID NO: 993910 - DNA, 15 bp, Homo sapiens
gatgatgatgatgac

SEQ ID NO: 993911 - DNA, 15 bp, Homo sapiens
atgatgatgatgacc

SEQ ID NO: 993912 - DNA, 15 bp, Homo sapiens
tgatgatgatgacca

SEQ ID NO: 993913 - DNA, 15 bp, Homo sapiens
gatgatgatgaccat

SEQ ID NO: 993914 - DNA, 15 bp, Homo sapiens
atgatgatgaccatg

SEQ ID NO: 993915 - DNA, 15 bp, Homo sapiens
tgatgatgaccatga

SEQ ID NO: 993916 - DNA, 15 bp, Homo sapiens
gatgatgaccatgac

SEQ ID NO: 993917 - DNA, 15 bp, Homo sapiens
atgatgaccatgacc

SEQ ID NO: 993918 - DNA, 15 bp, Homo sapiens
tgatgaccatgacca

SEQ ID NO: 993919 - DNA, 15 bp, Homo sapiens
gatgaccatgaccag

SEQ ID NO: 993920 - DNA, 15 bp, Homo sapiens
atgaccatgaccagc

SEQ ID NO: 993921 - DNA, 15 bp, Homo sapiens
tgaccatgaccagca

SEQ ID NO: 993922 - DNA, 15 bp, Homo sapiens
gaccatgaccagcaa

SEQ ID NO: 993923 - DNA, 15 bp, Homo sapiens
accatgaccagcaac

SEQ ID NO: 993924 - DNA, 15 bp, Homo sapiens
ccatgaccagcaaca

SEQ ID NO: 993925 - DNA, 15 bp, Homo sapiens
catgaccagcaacaa

SEQ ID NO: 993926 - DNA, 15 bp, Homo sapiens
atgaccagcaacaac

SEQ ID NO: 993927 - DNA, 15 bp, Homo sapiens
tgaccagcaacaaca

SEQ ID NO: 993928 - DNA, 15 bp, Homo sapiens
gaccagcaacaacat

SEQ ID NO: 993929 - DNA, 15 bp, Homo sapiens
accagcaacaacatt

SEQ ID NO: 993930 - DNA, 15 bp, Homo sapiens
ccagcaacaacattt

SEQ ID NO: 993931 - DNA, 15 bp, Homo sapiens
cagcaacaacatttg

SEQ ID NO: 993932 - DNA, 15 bp, Homo sapiens
agcaacaacatttga

SEQ ID NO: 993933 - DNA, 15 bp, Homo sapiens
gcaacaacatttgat

SEQ ID NO: 993934 - DNA, 15 bp, Homo sapiens
caacaacatttgata

SEQ ID NO: 993935 - DNA, 15 bp, Homo sapiens
aacaacatttgatat

SEQ ID NO: 993936 - DNA, 15 bp, Homo sapiens
acaacatttgatatt

SEQ ID NO: 993937 - DNA, 15 bp, Homo sapiens
caacatttgatattc

SEQ ID NO: 993938 - DNA, 15 bp, Homo sapiens
aacatttgatattct

SEQ ID NO: 993939 - DNA, 15 bp, Homo sapiens
acatttgatattctg

SEQ ID NO: 993940 - DNA, 15 bp, Homo sapiens
catttgatattctgg

SEQ ID NO: 993941 - DNA, 15 bp, Homo sapiens
atttgatattctggt

SEQ ID NO: 993942 - DNA, 15 bp, Homo sapiens
tttgatattctggtc

SEQ ID NO: 993943 - DNA, 15 bp, Homo sapiens
ttgatattctggtca

SEQ ID NO: 993944 - DNA, 15 bp, Homo sapiens
tgatattctggtcaa

SEQ ID NO: 993945 - DNA, 15 bp, Homo sapiens
gatattctggtcaat

SEQ ID NO: 993946 - DNA, 15 bp, Homo sapiens
atattctggtcaatt

SEQ ID NO: 993947 - DNA, 15 bp, Homo sapiens
tattctggtcaatta

SEQ ID NO: 993948 - DNA, 15 bp, Homo sapiens
attctggtcaattag

SEQ ID NO: 993949 - DNA, 15 bp, Homo sapiens
ttctggtcaattagt

SEQ ID NO: 993950 - DNA, 15 bp, Homo sapiens
tctggtcaattagta

SEQ ID NO: 993951 - DNA, 15 bp, Homo sapiens
ctggtcaattagtat

SEQ ID NO: 993952 - DNA, 15 bp, Homo sapiens
tggtcaattagtatc

SEQ ID NO: 993953 - DNA, 15 bp, Homo sapiens
ggtcaattagtatct

SEQ ID NO: 993954 - DNA, 15 bp, Homo sapiens
gtcaattagtatctg

SEQ ID NO: 993955 - DNA, 15 bp, Homo sapiens
tcaattagtatctgc

SEQ ID NO: 993956 - DNA, 15 bp, Homo sapiens
caattagtatctgcc

SEQ ID NO: 993957 - DNA, 15 bp, Homo sapiens
aattagtatctgcca

SEQ ID NO: 993958 - DNA, 15 bp, Homo sapiens
attagtatctgccaa

SEQ ID NO: 993959 - DNA, 15 bp, Homo sapiens
ttagtatctgccaac

SEQ ID NO: 993960 - DNA, 15 bp, Homo sapiens
tagtatctgccaacc

SEQ ID NO: 993961 - DNA, 15 bp, Homo sapiens
agtatctgccaacct

SEQ ID NO: 993962 - DNA, 15 bp, Homo sapiens
gtatctgccaacctt

SEQ ID NO: 993963 - DNA, 15 bp, Homo sapiens
tatctgccaaccttg

SEQ ID NO: 993964 - DNA, 15 bp, Homo sapiens
atctgccaaccttga

SEQ ID NO: 993965 - DNA, 15 bp, Homo sapiens
tctgccaaccttgag

SEQ ID NO: 993966 - DNA, 15 bp, Homo sapiens
ctgccaaccttgaga

SEQ ID NO: 993967 - DNA, 15 bp, Homo sapiens
tgccaaccttgagat

SEQ ID NO: 993968 - DNA, 15 bp, Homo sapiens
gccaaccttgagatg

SEQ ID NO: 993969 - DNA, 15 bp, Homo sapiens
ccaaccttgagatgt

SEQ ID NO: 993970 - DNA, 15 bp, Homo sapiens
caaccttgagatgtg

SEQ ID NO: 993971 - DNA, 15 bp, Homo sapiens
aaccttgagatgtgg

SEQ ID NO: 993972 - DNA, 15 bp, Homo sapiens
accttgagatgtgga

SEQ ID NO: 993973 - DNA, 15 bp, Homo sapiens
ccttgagatgtggag

SEQ ID NO: 993974 - DNA, 15 bp, Homo sapiens
cttgagatgtggagt

SEQ ID NO: 993975 - DNA, 15 bp, Homo sapiens
ttgagatgtggagtc

SEQ ID NO: 993976 - DNA, 15 bp, Homo sapiens
tgagatgtggagtct

SEQ ID NO: 993977 - DNA, 15 bp, Homo sapiens
gagatgtggagtcta

SEQ ID NO: 993978 - DNA, 15 bp, Homo sapiens
agatgtggagtctaa

SEQ ID NO: 993979 - DNA, 15 bp, Homo sapiens
gatgtggagtctaat

SEQ ID NO: 993980 - DNA, 15 bp, Homo sapiens
atgtggagtctaata

SEQ ID NO: 993981 - DNA, 15 bp, Homo sapiens
tgtggagtctaatat

SEQ ID NO: 993982 - DNA, 15 bp, Homo sapiens
gtggagtctaatatc

SEQ ID NO: 993983 - DNA, 15 bp, Homo sapiens
tggagtctaatatca

SEQ ID NO: 993984 - DNA, 15 bp, Homo sapiens
ggagtctaatatcac

SEQ ID NO: 993985 - DNA, 15 bp, Homo sapiens
gagtctaatatcact

SEQ ID NO: 993986 - DNA, 15 bp, Homo sapiens
agtctaatatcactc

SEQ ID NO: 993987 - DNA, 15 bp, Homo sapiens
gtctaatatcactcc

SEQ ID NO: 993988 - DNA, 15 bp, Homo sapiens
tctaatatcactcca

SEQ ID NO: 993989 - DNA, 15 bp, Homo sapiens
ctaatatcactccat

SEQ ID NO: 993990 - DNA, 15 bp, Homo sapiens
taatatcactccatt

SEQ ID NO: 993991 - DNA, 15 bp, Homo sapiens
aatatcactccattt

SEQ ID NO: 993992 - DNA, 15 bp, Homo sapiens
atatcactccatttt

SEQ ID NO: 993993 - DNA, 15 bp, Homo sapiens
tatcactccatttta

SEQ ID NO: 993994 - DNA, 15 bp, Homo sapiens
atcactccattttat

SEQ ID NO: 993995 - DNA, 15 bp, Homo sapiens
tcactccattttata

SEQ ID NO: 993996 - DNA, 15 bp, Homo sapiens
cactccattttatag

SEQ ID NO: 993997 - DNA, 15 bp, Homo sapiens
actccattttataga

SEQ ID NO: 993998 - DNA, 15 bp, Homo sapiens
ctccattttatagaa

SEQ ID NO: 993999 - DNA, 15 bp, Homo sapiens
tccattttatagaat

SEQ ID NO: 994000 - DNA, 15 bp, Homo sapiens
ccattttatagaatg

SEQ ID NO: 994001 - DNA, 15 bp, Homo sapiens
cattttatagaatgg

SEQ ID NO: 994002 - DNA, 15 bp, Homo sapiens
attttatagaatggg

SEQ ID NO: 994003 - DNA, 15 bp, Homo sapiens
ttttatagaatggga

SEQ ID NO: 994004 - DNA, 15 bp, Homo sapiens
tttatagaatgggaa

SEQ ID NO: 994005 - DNA, 15 bp, Homo sapiens
ttatagaatgggaaa

SEQ ID NO: 994006 - DNA, 15 bp, Homo sapiens
tatagaatgggaaac

SEQ ID NO: 994007 - DNA, 15 bp, Homo sapiens
atagaatgggaaact

SEQ ID NO: 994008 - DNA, 15 bp, Homo sapiens
tagaatgggaaactg

SEQ ID NO: 994009 - DNA, 15 bp, Homo sapiens
agaatgggaaactga

SEQ ID NO: 994010 - DNA, 15 bp, Homo sapiens
gaatgggaaactgag

SEQ ID NO: 994011 - DNA, 15 bp, Homo sapiens
aatgggaaactgagg

SEQ ID NO: 994012 - DNA, 15 bp, Homo sapiens
atgggaaactgaggc

SEQ ID NO: 994013 - DNA, 15 bp, Homo sapiens
tgggaaactgaggct

SEQ ID NO: 994014 - DNA, 15 bp, Homo sapiens
gggaaactgaggctt

SEQ ID NO: 994015 - DNA, 15 bp, Homo sapiens
ggaaactgaggcttg

SEQ ID NO: 994016 - DNA, 15 bp, Homo sapiens
gaaactgaggcttgt

SEQ ID NO: 994017 - DNA, 15 bp, Homo sapiens
aaactgaggcttgta

SEQ ID NO: 994018 - DNA, 15 bp, Homo sapiens
aactgaggcttgtag

SEQ ID NO: 994019 - DNA, 15 bp, Homo sapiens
actgaggcttgtaga

SEQ ID NO: 994020 - DNA, 15 bp, Homo sapiens
ctgaggcttgtagag

SEQ ID NO: 994021 - DNA, 15 bp, Homo sapiens
tgaggcttgtagagg

SEQ ID NO: 994022 - DNA, 15 bp, Homo sapiens
gaggcttgtagaggt

SEQ ID NO: 994023 - DNA, 15 bp, Homo sapiens
aggcttgtagaggtc

SEQ ID NO: 994024 - DNA, 15 bp, Homo sapiens
ggcttgtagaggtca

SEQ ID NO: 994025 - DNA, 15 bp, Homo sapiens
gcttgtagaggtcaa

SEQ ID NO: 994026 - DNA, 15 bp, Homo sapiens
cttgtagaggtcaaa

SEQ ID NO: 994027 - DNA, 15 bp, Homo sapiens
ttgtagaggtcaaat

SEQ ID NO: 994028 - DNA, 15 bp, Homo sapiens
tgtagaggtcaaatt

SEQ ID NO: 994029 - DNA, 15 bp, Homo sapiens
gtagaggtcaaatta

SEQ ID NO: 994030 - DNA, 15 bp, Homo sapiens
tagaggtcaaattat

SEQ ID NO: 994031 - DNA, 15 bp, Homo sapiens
agaggtcaaattatt

SEQ ID NO: 994032 - DNA, 15 bp, Homo sapiens
gaggtcaaattattt

SEQ ID NO: 994033 - DNA, 15 bp, Homo sapiens
aggtcaaattatttc

SEQ ID NO: 994034 - DNA, 15 bp, Homo sapiens
ggtcaaattatttcc

SEQ ID NO: 994035 - DNA, 15 bp, Homo sapiens
gtcaaattatttccc

SEQ ID NO: 994036 - DNA, 15 bp, Homo sapiens
tcaaattatttcccc

SEQ ID NO: 994037 - DNA, 15 bp, Homo sapiens
caaattatttcccca

SEQ ID NO: 994038 - DNA, 15 bp, Homo sapiens
aaattatttccccaa

SEQ ID NO: 994039 - DNA, 15 bp, Homo sapiens
aattatttccccaag

SEQ ID NO: 994040 - DNA, 15 bp, Homo sapiens
attatttccccaagg

SEQ ID NO: 994041 - DNA, 15 bp, Homo sapiens
ttatttccccaaggt

SEQ ID NO: 994042 - DNA, 15 bp, Homo sapiens
tatttccccaaggtc

SEQ ID NO: 994043 - DNA, 15 bp, Homo sapiens
atttccccaaggtca

SEQ ID NO: 994044 - DNA, 15 bp, Homo sapiens
tttccccaaggtcac

SEQ ID NO: 994045 - DNA, 15 bp, Homo sapiens
ttccccaaggtcaca

SEQ ID NO: 994046 - DNA, 15 bp, Homo sapiens
tccccaaggtcacag

SEQ ID NO: 994047 - DNA, 15 bp, Homo sapiens
ccccaaggtcacagc

SEQ ID NO: 994048 - DNA, 15 bp, Homo sapiens
cccaaggtcacagcc

SEQ ID NO: 994049 - DNA, 15 bp, Homo sapiens
ccaaggtcacagccg

SEQ ID NO: 994050 - DNA, 15 bp, Homo sapiens
caaggtcacagccgt

SEQ ID NO: 994051 - DNA, 15 bp, Homo sapiens
aaggtcacagccgtt

SEQ ID NO: 994052 - DNA, 15 bp, Homo sapiens
aggtcacagccgttg

SEQ ID NO: 994053 - DNA, 15 bp, Homo sapiens
ggtcacagccgttga

SEQ ID NO: 994054 - DNA, 15 bp, Homo sapiens
gtcacagccgttgag

SEQ ID NO: 994055 - DNA, 15 bp, Homo sapiens
tcacagccgttgagt

SEQ ID NO: 994056 - DNA, 15 bp, Homo sapiens
cacagccgttgagtg

SEQ ID NO: 994057 - DNA, 15 bp, Homo sapiens
acagccgttgagtgg

SEQ ID NO: 994058 - DNA, 15 bp, Homo sapiens
cagccgttgagtggc

SEQ ID NO: 994059 - DNA, 15 bp, Homo sapiens
agccgttgagtggcc

SEQ ID NO: 994060 - DNA, 15 bp, Homo sapiens
gccgttgagtggcca

SEQ ID NO: 994061 - DNA, 15 bp, Homo sapiens
ccgttgagtggccaa

SEQ ID NO: 994062 - DNA, 15 bp, Homo sapiens
cgttgagtggccaag

SEQ ID NO: 994063 - DNA, 15 bp, Homo sapiens
gttgagtggccaagt

SEQ ID NO: 994064 - DNA, 15 bp, Homo sapiens
ttgagtggccaagtt

SEQ ID NO: 994065 - DNA, 15 bp, Homo sapiens
tgagtggccaagttg

SEQ ID NO: 994066 - DNA, 15 bp, Homo sapiens
gagtggccaagttgg

SEQ ID NO: 994067 - DNA, 15 bp, Homo sapiens
agtggccaagttgga

SEQ ID NO: 994068 - DNA, 15 bp, Homo sapiens
gtggccaagttggat

SEQ ID NO: 994069 - DNA, 15 bp, Homo sapiens
tggccaagttggatc

SEQ ID NO: 994070 - DNA, 15 bp, Homo sapiens
ggccaagttggatca

SEQ ID NO: 994071 - DNA, 15 bp, Homo sapiens
gccaagttggatcac

SEQ ID NO: 994072 - DNA, 15 bp, Homo sapiens
ccaagttggatcaca

SEQ ID NO: 994073 - DNA, 15 bp, Homo sapiens
caagttggatcacac

SEQ ID NO: 994074 - DNA, 15 bp, Homo sapiens
aagttggatcacact

SEQ ID NO: 994075 - DNA, 15 bp, Homo sapiens
agttggatcacactc

SEQ ID NO: 994076 - DNA, 15 bp, Homo sapiens
gttggatcacactcc

SEQ ID NO: 994077 - DNA, 15 bp, Homo sapiens
ttggatcacactcca

SEQ ID NO: 994078 - DNA, 15 bp, Homo sapiens
tggatcacactccag

SEQ ID NO: 994079 - DNA, 15 bp, Homo sapiens
ggatcacactccagg

SEQ ID NO: 994080 - DNA, 15 bp, Homo sapiens
gatcacactccaggt

SEQ ID NO: 994081 - DNA, 15 bp, Homo sapiens
atcacactccaggtc

SEQ ID NO: 994082 - DNA, 15 bp, Homo sapiens
tcacactccaggtct

SEQ ID NO: 994083 - DNA, 15 bp, Homo sapiens
cacactccaggtctg

SEQ ID NO: 994084 - DNA, 15 bp, Homo sapiens
acactccaggtctgt

SEQ ID NO: 994085 - DNA, 15 bp, Homo sapiens
cactccaggtctgtc

SEQ ID NO: 994086 - DNA, 15 bp, Homo sapiens
actccaggtctgtcc

SEQ ID NO: 994087 - DNA, 15 bp, Homo sapiens
ctccaggtctgtccc

SEQ ID NO: 994088 - DNA, 15 bp, Homo sapiens
tccaggtctgtcccg

SEQ ID NO: 994089 - DNA, 15 bp, Homo sapiens
ccaggtctgtcccga

SEQ ID NO: 994090 - DNA, 15 bp, Homo sapiens
caggtctgtcccgac

SEQ ID NO: 994091 - DNA, 15 bp, Homo sapiens
aggtctgtcccgaca

SEQ ID NO: 994092 - DNA, 15 bp, Homo sapiens
ggtctgtcccgacac

SEQ ID NO: 994093 - DNA, 15 bp, Homo sapiens
gtctgtcccgacacg

SEQ ID NO: 994094 - DNA, 15 bp, Homo sapiens
tctgtcccgacacgt

SEQ ID NO: 994095 - DNA, 15 bp, Homo sapiens
ctgtcccgacacgtc

SEQ ID NO: 994096 - DNA, 15 bp, Homo sapiens
tgtcccgacacgtca

SEQ ID NO: 994097 - DNA, 15 bp, Homo sapiens
gtcccgacacgtcaa

SEQ ID NO: 994098 - DNA, 15 bp, Homo sapiens
tcccgacacgtcaac

SEQ ID NO: 994099 - DNA, 15 bp, Homo sapiens
cccgacacgtcaaca

SEQ ID NO: 994100 - DNA, 15 bp, Homo sapiens
ccgacacgtcaacat

SEQ ID NO: 994101 - DNA, 15 bp, Homo sapiens
cgacacgtcaacatg

SEQ ID NO: 994102 - DNA, 15 bp, Homo sapiens
gacacgtcaacatgg

SEQ ID NO: 994103 - DNA, 15 bp, Homo sapiens
acacgtcaacatgga

SEQ ID NO: 994104 - DNA, 15 bp, Homo sapiens
cacgtcaacatggag

SEQ ID NO: 994105 - DNA, 15 bp, Homo sapiens
acgtcaacatggagt

SEQ ID NO: 994106 - DNA, 15 bp, Homo sapiens
cgtcaacatggagtg

SEQ ID NO: 994107 - DNA, 15 bp, Homo sapiens
gtcaacatggagtgg

SEQ ID NO: 994108 - DNA, 15 bp, Homo sapiens
tcaacatggagtggg

SEQ ID NO: 994109 - DNA, 15 bp, Homo sapiens
caacatggagtggga

SEQ ID NO: 994110 - DNA, 15 bp, Homo sapiens
aacatggagtgggag

SEQ ID NO: 994111 - DNA, 15 bp, Homo sapiens
acatggagtgggagg

SEQ ID NO: 994112 - DNA, 15 bp, Homo sapiens
catggagtgggaggc

SEQ ID NO: 994113 - DNA, 15 bp, Homo sapiens
atggagtgggaggcc

SEQ ID NO: 994114 - DNA, 15 bp, Homo sapiens
tggagtgggaggcct

SEQ ID NO: 994115 - DNA, 15 bp, Homo sapiens
ggagtgggaggcctt

SEQ ID NO: 994116 - DNA, 15 bp, Homo sapiens
gagtgggaggccttg

SEQ ID NO: 994117 - DNA, 15 bp, Homo sapiens
agtgggaggccttgc

SEQ ID NO: 994118 - DNA, 15 bp, Homo sapiens
gtgggaggccttgct

SEQ ID NO: 994119 - DNA, 15 bp, Homo sapiens
tgggaggccttgctt

SEQ ID NO: 994120 - DNA, 15 bp, Homo sapiens
gggaggccttgctta

SEQ ID NO: 994121 - DNA, 15 bp, Homo sapiens
ggaggccttgcttat

SEQ ID NO: 994122 - DNA, 15 bp, Homo sapiens
gaggccttgcttatc

SEQ ID NO: 994123 - DNA, 15 bp, Homo sapiens
aggccttgcttatct

SEQ ID NO: 994124 - DNA, 15 bp, Homo sapiens
ggccttgcttatctg

SEQ ID NO: 994125 - DNA, 15 bp, Homo sapiens
gccttgcttatctgg

SEQ ID NO: 994126 - DNA, 15 bp, Homo sapiens
ccttgcttatctgga

SEQ ID NO: 994127 - DNA, 15 bp, Homo sapiens
cttgcttatctggaa

SEQ ID NO: 994128 - DNA, 15 bp, Homo sapiens
ttgcttatctggaag

SEQ ID NO: 994129 - DNA, 15 bp, Homo sapiens
tgcttatctggaaga

SEQ ID NO: 994130 - DNA, 15 bp, Homo sapiens
gcttatctggaagag

SEQ ID NO: 994131 - DNA, 15 bp, Homo sapiens
cttatctggaagagg

SEQ ID NO: 994132 - DNA, 15 bp, Homo sapiens
ttatctggaagagga

SEQ ID NO: 994133 - DNA, 15 bp, Homo sapiens
tatctggaagaggat

SEQ ID NO: 994134 - DNA, 15 bp, Homo sapiens
atctggaagaggata

SEQ ID NO: 994135 - DNA, 15 bp, Homo sapiens
tctggaagaggatac

SEQ ID NO: 994136 - DNA, 15 bp, Homo sapiens
ctggaagaggatact

SEQ ID NO: 994137 - DNA, 15 bp, Homo sapiens
tggaagaggatactc

SEQ ID NO: 994138 - DNA, 15 bp, Homo sapiens
ggaagaggatactct

SEQ ID NO: 994139 - DNA, 15 bp, Homo sapiens
gaagaggatactctt

SEQ ID NO: 994140 - DNA, 15 bp, Homo sapiens
aagaggatactcttc

SEQ ID NO: 994141 - DNA, 15 bp, Homo sapiens
agaggatactcttca

SEQ ID NO: 994142 - DNA, 15 bp, Homo sapiens
gaggatactcttcag

SEQ ID NO: 994143 - DNA, 15 bp, Homo sapiens
aggatactcttcagc

SEQ ID NO: 994144 - DNA, 15 bp, Homo sapiens
ggatactcttcagca

SEQ ID NO: 994145 - DNA, 15 bp, Homo sapiens
gatactcttcagcat

SEQ ID NO: 994146 - DNA, 15 bp, Homo sapiens
atactcttcagcatt

SEQ ID NO: 994147 - DNA, 15 bp, Homo sapiens
tactcttcagcattc

SEQ ID NO: 994148 - DNA, 15 bp, Homo sapiens
actcttcagcattcc

SEQ ID NO: 994149 - DNA, 15 bp, Homo sapiens
ctcttcagcattccg

SEQ ID NO: 994150 - DNA, 15 bp, Homo sapiens
tcttcagcattccga

SEQ ID NO: 994151 - DNA, 15 bp, Homo sapiens
cttcagcattccgag

SEQ ID NO: 994152 - DNA, 15 bp, Homo sapiens
ttcagcattccgagg

SEQ ID NO: 994153 - DNA, 15 bp, Homo sapiens
tcagcattccgagga

SEQ ID NO: 994154 - DNA, 15 bp, Homo sapiens
cagcattccgaggac

SEQ ID NO: 994155 - DNA, 15 bp, Homo sapiens
agcattccgaggaca

SEQ ID NO: 994156 - DNA, 15 bp, Homo sapiens
gcattccgaggacag

SEQ ID NO: 994157 - DNA, 15 bp, Homo sapiens
cattccgaggacagg

SEQ ID NO: 994158 - DNA, 15 bp, Homo sapiens
attccgaggacagga

SEQ ID NO: 994159 - DNA, 15 bp, Homo sapiens
ttccgaggacaggaa

SEQ ID NO: 994160 - DNA, 15 bp, Homo sapiens
tccgaggacaggaat

SEQ ID NO: 994161 - DNA, 15 bp, Homo sapiens
ccgaggacaggaatt

SEQ ID NO: 994162 - DNA, 15 bp, Homo sapiens
cgaggacaggaatta

SEQ ID NO: 994163 - DNA, 15 bp, Homo sapiens
gaggacaggaattaa

SEQ ID NO: 994164 - DNA, 15 bp, Homo sapiens
aggacaggaattaag

SEQ ID NO: 994165 - DNA, 15 bp, Homo sapiens
ggacaggaattaagc

SEQ ID NO: 994166 - DNA, 15 bp, Homo sapiens
gacaggaattaagcc

SEQ ID NO: 994167 - DNA, 15 bp, Homo sapiens
acaggaattaagccc

SEQ ID NO: 994168 - DNA, 15 bp, Homo sapiens
caggaattaagcccc

SEQ ID NO: 994169 - DNA, 15 bp, Homo sapiens
aggaattaagcccca

SEQ ID NO: 994170 - DNA, 15 bp, Homo sapiens
ggaattaagccccaa

SEQ ID NO: 994171 - DNA, 15 bp, Homo sapiens
gaattaagccccaaa

SEQ ID NO: 994172 - DNA, 15 bp, Homo sapiens
aattaagccccaaag

SEQ ID NO: 994173 - DNA, 15 bp, Homo sapiens
attaagccccaaagc

SEQ ID NO: 994174 - DNA, 15 bp, Homo sapiens
ttaagccccaaagct

SEQ ID NO: 994175 - DNA, 15 bp, Homo sapiens
taagccccaaagctc

SEQ ID NO: 994176 - DNA, 15 bp, Homo sapiens
aagccccaaagctcc

SEQ ID NO: 994177 - DNA, 15 bp, Homo sapiens
agccccaaagctcct

SEQ ID NO: 994178 - DNA, 15 bp, Homo sapiens
gccccaaagctcctg

SEQ ID NO: 994179 - DNA, 15 bp, Homo sapiens
ccccaaagctcctgt

SEQ ID NO: 994180 - DNA, 15 bp, Homo sapiens
cccaaagctcctgtg

SEQ ID NO: 994181 - DNA, 15 bp, Homo sapiens
ccaaagctcctgtgg

SEQ ID NO: 994182 - DNA, 15 bp, Homo sapiens
caaagctcctgtggg

SEQ ID NO: 994183 - DNA, 15 bp, Homo sapiens
aaagctcctgtgggc

SEQ ID NO: 994184 - DNA, 15 bp, Homo sapiens
aagctcctgtgggcc

SEQ ID NO: 994185 - DNA, 15 bp, Homo sapiens
agctcctgtgggccg

SEQ ID NO: 994186 - DNA, 15 bp, Homo sapiens
gctcctgtgggccgc

SEQ ID NO: 994187 - DNA, 15 bp, Homo sapiens
ctcctgtgggccgca

SEQ ID NO: 994188 - DNA, 15 bp, Homo sapiens
tcctgtgggccgcaa

SEQ ID NO: 994189 - DNA, 15 bp, Homo sapiens
cctgtgggccgcaaa

SEQ ID NO: 994190 - DNA, 15 bp, Homo sapiens
ctgtgggccgcaaag

SEQ ID NO: 994191 - DNA, 15 bp, Homo sapiens
tgtgggccgcaaagg

SEQ ID NO: 994192 - DNA, 15 bp, Homo sapiens
gtgggccgcaaaggg

SEQ ID NO: 994193 - DNA, 15 bp, Homo sapiens
tgggccgcaaagggt

SEQ ID NO: 994194 - DNA, 15 bp, Homo sapiens
gggccgcaaagggtt

SEQ ID NO: 994195 - DNA, 15 bp, Homo sapiens
ggccgcaaagggttc

SEQ ID NO: 994196 - DNA, 15 bp, Homo sapiens
gccgcaaagggttct

SEQ ID NO: 994197 - DNA, 15 bp, Homo sapiens
ccgcaaagggttctc

SEQ ID NO: 994198 - DNA, 15 bp, Homo sapiens
cgcaaagggttctca

SEQ ID NO: 994199 - DNA, 15 bp, Homo sapiens
gcaaagggttctcac

SEQ ID NO: 994200 - DNA, 15 bp, Homo sapiens
caaagggttctcacg

SEQ ID NO: 994201 - DNA, 15 bp, Homo sapiens
aaagggttctcacga

SEQ ID NO: 994202 - DNA, 15 bp, Homo sapiens
aagggttctcacgag

SEQ ID NO: 994203 - DNA, 15 bp, Homo sapiens
agggttctcacgagc

SEQ ID NO: 994204 - DNA, 15 bp, Homo sapiens
gggttctcacgagct

SEQ ID NO: 994205 - DNA, 15 bp, Homo sapiens
ggttctcacgagctg

SEQ ID NO: 994206 - DNA, 15 bp, Homo sapiens
gttctcacgagctgc

SEQ ID NO: 994207 - DNA, 15 bp, Homo sapiens
ttctcacgagctgca

SEQ ID NO: 994208 - DNA, 15 bp, Homo sapiens
tctcacgagctgcac

SEQ ID NO: 994209 - DNA, 15 bp, Homo sapiens
ctcacgagctgcacg

SEQ ID NO: 994210 - DNA, 15 bp, Homo sapiens
tcacgagctgcacgc

SEQ ID NO: 994211 - DNA, 15 bp, Homo sapiens
cacgagctgcacgcc

SEQ ID NO: 994212 - DNA, 15 bp, Homo sapiens
acgagctgcacgccc

SEQ ID NO: 994213 - DNA, 15 bp, Homo sapiens
cgagctgcacgccca

SEQ ID NO: 994214 - DNA, 15 bp, Homo sapiens
gagctgcacgcccag

SEQ ID NO: 994215 - DNA, 15 bp, Homo sapiens
agctgcacgcccagc

SEQ ID NO: 994216 - DNA, 15 bp, Homo sapiens
gctgcacgcccagca

SEQ ID NO: 994217 - DNA, 15 bp, Homo sapiens
ctgcacgcccagcag

SEQ ID NO: 994218 - DNA, 15 bp, Homo sapiens
tgcacgcccagcagg

SEQ ID NO: 994219 - DNA, 15 bp, Homo sapiens
gcacgcccagcagga

SEQ ID NO: 994220 - DNA, 15 bp, Homo sapiens
cacgcccagcaggac

SEQ ID NO: 994221 - DNA, 15 bp, Homo sapiens
acgcccagcaggact

SEQ ID NO: 994222 - DNA, 15 bp, Homo sapiens
cgcccagcaggactt

SEQ ID NO: 994223 - DNA, 15 bp, Homo sapiens
gcccagcaggacttt

SEQ ID NO: 994224 - DNA, 15 bp, Homo sapiens
cccagcaggacttta

SEQ ID NO: 994225 - DNA, 15 bp, Homo sapiens
ccagcaggactttag

SEQ ID NO: 994226 - DNA, 15 bp, Homo sapiens
cagcaggactttaga

SEQ ID NO: 994227 - DNA, 15 bp, Homo sapiens
agcaggactttagac

SEQ ID NO: 994228 - DNA, 15 bp, Homo sapiens
gcaggactttagacc

SEQ ID NO: 994229 - DNA, 15 bp, Homo sapiens
caggactttagaccc

SEQ ID NO: 994230 - DNA, 15 bp, Homo sapiens
aggactttagaccca

SEQ ID NO: 994231 - DNA, 15 bp, Homo sapiens
ggactttagacccaa

SEQ ID NO: 994232 - DNA, 15 bp, Homo sapiens
gactttagacccaag

SEQ ID NO: 994233 - DNA, 15 bp, Homo sapiens
actttagacccaagt

SEQ ID NO: 994234 - DNA, 15 bp, Homo sapiens
ctttagacccaagtg

SEQ ID NO: 994235 - DNA, 15 bp, Homo sapiens
tttagacccaagtga

SEQ ID NO: 994236 - DNA, 15 bp, Homo sapiens
ttagacccaagtgaa

SEQ ID NO: 994237 - DNA, 15 bp, Homo sapiens
tagacccaagtgaat

SEQ ID NO: 994238 - DNA, 15 bp, Homo sapiens
agacccaagtgaatc

SEQ ID NO: 994239 - DNA, 15 bp, Homo sapiens
gacccaagtgaatcc

SEQ ID NO: 994240 - DNA, 15 bp, Homo sapiens
acccaagtgaatccc

SEQ ID NO: 994241 - DNA, 15 bp, Homo sapiens
cccaagtgaatccct

SEQ ID NO: 994242 - DNA, 15 bp, Homo sapiens
ccaagtgaatccctg

SEQ ID NO: 994243 - DNA, 15 bp, Homo sapiens
caagtgaatccctgg

SEQ ID NO: 994244 - DNA, 15 bp, Homo sapiens
aagtgaatccctggt

SEQ ID NO: 994245 - DNA, 15 bp, Homo sapiens
agtgaatccctggtg

SEQ ID NO: 994246 - DNA, 15 bp, Homo sapiens
gtgaatccctggtgg

SEQ ID NO: 994247 - DNA, 15 bp, Homo sapiens
tgaatccctggtggg

SEQ ID NO: 994248 - DNA, 15 bp, Homo sapiens
gaatccctggtggga

SEQ ID NO: 994249 - DNA, 15 bp, Homo sapiens
aatccctggtgggac

SEQ ID NO: 994250 - DNA, 15 bp, Homo sapiens
atccctggtgggacc

SEQ ID NO: 994251 - DNA, 15 bp, Homo sapiens
tccctggtgggaccc

SEQ ID NO: 994252 - DNA, 15 bp, Homo sapiens
ccctggtgggacccc

SEQ ID NO: 994253 - DNA, 15 bp, Homo sapiens
cctggtgggaccccc

SEQ ID NO: 994254 - DNA, 15 bp, Homo sapiens
ctggtgggaccccca

SEQ ID NO: 994255 - DNA, 15 bp, Homo sapiens
tggtgggacccccag

SEQ ID NO: 994256 - DNA, 15 bp, Homo sapiens
ggtgggacccccagg

SEQ ID NO: 994257 - DNA, 15 bp, Homo sapiens
gtgggacccccaggt

SEQ ID NO: 994258 - DNA, 15 bp, Homo sapiens
tgggacccccaggtt

SEQ ID NO: 994259 - DNA, 15 bp, Homo sapiens
gggacccccaggttc

SEQ ID NO: 994260 - DNA, 15 bp, Homo sapiens
ggacccccaggttct

SEQ ID NO: 994261 - DNA, 15 bp, Homo sapiens
gacccccaggttcta

SEQ ID NO: 994262 - DNA, 15 bp, Homo sapiens
acccccaggttctat

SEQ ID NO: 994263 - DNA, 15 bp, Homo sapiens
cccccaggttctatt

SEQ ID NO: 994264 - DNA, 15 bp, Homo sapiens
ccccaggttctattt

SEQ ID NO: 994265 - DNA, 15 bp, Homo sapiens
cccaggttctatttg

SEQ ID NO: 994266 - DNA, 15 bp, Homo sapiens
ccaggttctatttgc

SEQ ID NO: 994267 - DNA, 15 bp, Homo sapiens
caggttctatttgct

SEQ ID NO: 994268 - DNA, 15 bp, Homo sapiens
aggttctatttgctt

SEQ ID NO: 994269 - DNA, 15 bp, Homo sapiens
ggttctatttgcttt

SEQ ID NO: 994270 - DNA, 15 bp, Homo sapiens
gttctatttgctttc

SEQ ID NO: 994271 - DNA, 15 bp, Homo sapiens
ttctatttgctttct

SEQ ID NO: 994272 - DNA, 15 bp, Homo sapiens
tctatttgctttcta

SEQ ID NO: 994273 - DNA, 15 bp, Homo sapiens
ctatttgctttctag

SEQ ID NO: 994274 - DNA, 15 bp, Homo sapiens
tatttgctttctagc

SEQ ID NO: 994275 - DNA, 15 bp, Homo sapiens
atttgctttctagct

SEQ ID NO: 994276 - DNA, 15 bp, Homo sapiens
tttgctttctagctc

SEQ ID NO: 994277 - DNA, 15 bp, Homo sapiens
ttgctttctagctcc

SEQ ID NO: 994278 - DNA, 15 bp, Homo sapiens
tgctttctagctcct

SEQ ID NO: 994279 - DNA, 15 bp, Homo sapiens
gctttctagctccta

SEQ ID NO: 994280 - DNA, 15 bp, Homo sapiens
ctttctagctcctag

SEQ ID NO: 994281 - DNA, 15 bp, Homo sapiens
tttctagctcctagc

SEQ ID NO: 994282 - DNA, 15 bp, Homo sapiens
ttctagctcctagcc

SEQ ID NO: 994283 - DNA, 15 bp, Homo sapiens
tctagctcctagcca

SEQ ID NO: 994284 - DNA, 15 bp, Homo sapiens
ctagctcctagccac

SEQ ID NO: 994285 - DNA, 15 bp, Homo sapiens
tagctcctagccaca

SEQ ID NO: 994286 - DNA, 15 bp, Homo sapiens
agctcctagccacag

SEQ ID NO: 994287 - DNA, 15 bp, Homo sapiens
gctcctagccacagc

SEQ ID NO: 994288 - DNA, 15 bp, Homo sapiens
ctcctagccacagca

SEQ ID NO: 994289 - DNA, 15 bp, Homo sapiens
tcctagccacagcag

SEQ ID NO: 994290 - DNA, 15 bp, Homo sapiens
cctagccacagcagg

SEQ ID NO: 994291 - DNA, 15 bp, Homo sapiens
ctagccacagcaggg

SEQ ID NO: 994292 - DNA, 15 bp, Homo sapiens
tagccacagcagggg

SEQ ID NO: 994293 - DNA, 15 bp, Homo sapiens
agccacagcagggga

SEQ ID NO: 994294 - DNA, 15 bp, Homo sapiens
gccacagcaggggag

SEQ ID NO: 994295 - DNA, 15 bp, Homo sapiens
ccacagcaggggaga

SEQ ID NO: 994296 - DNA, 15 bp, Homo sapiens
cacagcaggggagaa

SEQ ID NO: 994297 - DNA, 15 bp, Homo sapiens
acagcaggggagaaa

SEQ ID NO: 994298 - DNA, 15 bp, Homo sapiens
cagcaggggagaaac

SEQ ID NO: 994299 - DNA, 15 bp, Homo sapiens
agcaggggagaaaca

SEQ ID NO: 994300 - DNA, 15 bp, Homo sapiens
gcaggggagaaacag

SEQ ID NO: 994301 - DNA, 15 bp, Homo sapiens
caggggagaaacaga

SEQ ID NO: 994302 - DNA, 15 bp, Homo sapiens
aggggagaaacagac

SEQ ID NO: 994303 - DNA, 15 bp, Homo sapiens
ggggagaaacagacc

SEQ ID NO: 994304 - DNA, 15 bp, Homo sapiens
gggagaaacagacca

SEQ ID NO: 994305 - DNA, 15 bp, Homo sapiens
ggagaaacagaccaa

SEQ ID NO: 994306 - DNA, 15 bp, Homo sapiens
gagaaacagaccaag

SEQ ID NO: 994307 - DNA, 15 bp, Homo sapiens
agaaacagaccaagc

SEQ ID NO: 994308 - DNA, 15 bp, Homo sapiens
gaaacagaccaagct

SEQ ID NO: 994309 - DNA, 15 bp, Homo sapiens
aaacagaccaagctg

SEQ ID NO: 994310 - DNA, 15 bp, Homo sapiens
aacagaccaagctga

SEQ ID NO: 994311 - DNA, 15 bp, Homo sapiens
acagaccaagctgag

SEQ ID NO: 994312 - DNA, 15 bp, Homo sapiens
cagaccaagctgagc

SEQ ID NO: 994313 - DNA, 15 bp, Homo sapiens
agaccaagctgagcg

SEQ ID NO: 994314 - DNA, 15 bp, Homo sapiens
gaccaagctgagcgg

SEQ ID NO: 994315 - DNA, 15 bp, Homo sapiens
accaagctgagcgga

SEQ ID NO: 994316 - DNA, 15 bp, Homo sapiens
ccaagctgagcggag

SEQ ID NO: 994317 - DNA, 15 bp, Homo sapiens
caagctgagcggaga

SEQ ID NO: 994318 - DNA, 15 bp, Homo sapiens
aagctgagcggagaa

SEQ ID NO: 994319 - DNA, 15 bp, Homo sapiens
agctgagcggagaag

SEQ ID NO: 994320 - DNA, 15 bp, Homo sapiens
gctgagcggagaagc

SEQ ID NO: 994321 - DNA, 15 bp, Homo sapiens
ctgagcggagaagcc

SEQ ID NO: 994322 - DNA, 15 bp, Homo sapiens
tgagcggagaagcct

SEQ ID NO: 994323 - DNA, 15 bp, Homo sapiens
gagcggagaagcctg

SEQ ID NO: 994324 - DNA, 15 bp, Homo sapiens
agcggagaagcctgt

SEQ ID NO: 994325 - DNA, 15 bp, Homo sapiens
gcggagaagcctgta

SEQ ID NO: 994326 - DNA, 15 bp, Homo sapiens
cggagaagcctgtaa

SEQ ID NO: 994327 - DNA, 15 bp, Homo sapiens
ggagaagcctgtaag

SEQ ID NO: 994328 - DNA, 15 bp, Homo sapiens
gagaagcctgtaagt

SEQ ID NO: 994329 - DNA, 15 bp, Homo sapiens
agaagcctgtaagtc

SEQ ID NO: 994330 - DNA, 15 bp, Homo sapiens
gaagcctgtaagtcc

SEQ ID NO: 994331 - DNA, 15 bp, Homo sapiens
aagcctgtaagtcct

SEQ ID NO: 994332 - DNA, 15 bp, Homo sapiens
agcctgtaagtcctg

SEQ ID NO: 994333 - DNA, 15 bp, Homo sapiens
gcctgtaagtcctgt

SEQ ID NO: 994334 - DNA, 15 bp, Homo sapiens
cctgtaagtcctgtg

SEQ ID NO: 994335 - DNA, 15 bp, Homo sapiens
ctgtaagtcctgtgt

SEQ ID NO: 994336 - DNA, 15 bp, Homo sapiens
tgtaagtcctgtgtt

SEQ ID NO: 994337 - DNA, 15 bp, Homo sapiens
gtaagtcctgtgttt

SEQ ID NO: 994338 - DNA, 15 bp, Homo sapiens
taagtcctgtgtttt

SEQ ID NO: 994339 - DNA, 15 bp, Homo sapiens
aagtcctgtgttttc

SEQ ID NO: 994340 - DNA, 15 bp, Homo sapiens
agtcctgtgttttcc

SEQ ID NO: 994341 - DNA, 15 bp, Homo sapiens
gtcctgtgttttcct

SEQ ID NO: 994342 - DNA, 15 bp, Homo sapiens
tcctgtgttttcctc

SEQ ID NO: 994343 - DNA, 15 bp, Homo sapiens
cctgtgttttcctcc

SEQ ID NO: 994344 - DNA, 15 bp, Homo sapiens
ctgtgttttcctcca

SEQ ID NO: 994345 - DNA, 15 bp, Homo sapiens
tgtgttttcctccag

SEQ ID NO: 994346 - DNA, 15 bp, Homo sapiens
gtgttttcctccaga

SEQ ID NO: 994347 - DNA, 15 bp, Homo sapiens
tgttttcctccagac

SEQ ID NO: 994348 - DNA, 15 bp, Homo sapiens
gttttcctccagacg

SEQ ID NO: 994349 - DNA, 15 bp, Homo sapiens
ttttcctccagacgg

SEQ ID NO: 994350 - DNA, 15 bp, Homo sapiens
tttcctccagacggt

SEQ ID NO: 994351 - DNA, 15 bp, Homo sapiens
ttcctccagacggta

SEQ ID NO: 994352 - DNA, 15 bp, Homo sapiens
tcctccagacggtag

SEQ ID NO: 994353 - DNA, 15 bp, Homo sapiens
cctccagacggtagc

SEQ ID NO: 994354 - DNA, 15 bp, Homo sapiens
ctccagacggtagca

SEQ ID NO: 994355 - DNA, 15 bp, Homo sapiens
tccagacggtagcaa

SEQ ID NO: 994356 - DNA, 15 bp, Homo sapiens
ccagacggtagcaag

SEQ ID NO: 994357 - DNA, 15 bp, Homo sapiens
cagacggtagcaagt

SEQ ID NO: 994358 - DNA, 15 bp, Homo sapiens
agacggtagcaagta

SEQ ID NO: 994359 - DNA, 15 bp, Homo sapiens
gacggtagcaagtag

SEQ ID NO: 994360 - DNA, 15 bp, Homo sapiens
acggtagcaagtagt

SEQ ID NO: 994361 - DNA, 15 bp, Homo sapiens
cggtagcaagtagtg

SEQ ID NO: 994362 - DNA, 15 bp, Homo sapiens
ggtagcaagtagtgg

SEQ ID NO: 994363 - DNA, 15 bp, Homo sapiens
gtagcaagtagtggc

SEQ ID NO: 994364 - DNA, 15 bp, Homo sapiens
tagcaagtagtggca

SEQ ID NO: 994365 - DNA, 15 bp, Homo sapiens
agcaagtagtggcag

SEQ ID NO: 994366 - DNA, 15 bp, Homo sapiens
gcaagtagtggcagt

SEQ ID NO: 994367 - DNA, 15 bp, Homo sapiens
caagtagtggcagta

SEQ ID NO: 994368 - DNA, 15 bp, Homo sapiens
aagtagtggcagtag

SEQ ID NO: 994369 - DNA, 15 bp, Homo sapiens
agtagtggcagtaga

SEQ ID NO: 994370 - DNA, 15 bp, Homo sapiens
gtagtggcagtagac

SEQ ID NO: 994371 - DNA, 15 bp, Homo sapiens
tagtggcagtagaca

SEQ ID NO: 994372 - DNA, 15 bp, Homo sapiens
agtggcagtagacag

SEQ ID NO: 994373 - DNA, 15 bp, Homo sapiens
gtggcagtagacagc

SEQ ID NO: 994374 - DNA, 15 bp, Homo sapiens
tggcagtagacagcc

SEQ ID NO: 994375 - DNA, 15 bp, Homo sapiens
ggcagtagacagcct

SEQ ID NO: 994376 - DNA, 15 bp, Homo sapiens
gcagtagacagcctg

SEQ ID NO: 994377 - DNA, 15 bp, Homo sapiens
cagtagacagcctgg

SEQ ID NO: 994378 - DNA, 15 bp, Homo sapiens
agtagacagcctggg

SEQ ID NO: 994379 - DNA, 15 bp, Homo sapiens
gtagacagcctggga

SEQ ID NO: 994380 - DNA, 15 bp, Homo sapiens
tagacagcctgggag

SEQ ID NO: 994381 - DNA, 15 bp, Homo sapiens
agacagcctgggagt

SEQ ID NO: 994382 - DNA, 15 bp, Homo sapiens
gacagcctgggagtg

SEQ ID NO: 994383 - DNA, 15 bp, Homo sapiens
acagcctgggagtga

SEQ ID NO: 994384 - DNA, 15 bp, Homo sapiens
cagcctgggagtgag

SEQ ID NO: 994385 - DNA, 15 bp, Homo sapiens
agcctgggagtgagg

SEQ ID NO: 994386 - DNA, 15 bp, Homo sapiens
gcctgggagtgaggg

SEQ ID NO: 994387 - DNA, 15 bp, Homo sapiens
cctgggagtgaggga

SEQ ID NO: 994388 - DNA, 15 bp, Homo sapiens
ctgggagtgagggac

SEQ ID NO: 994389 - DNA, 15 bp, Homo sapiens
tgggagtgagggact

SEQ ID NO: 994390 - DNA, 15 bp, Homo sapiens
gggagtgagggactt

SEQ ID NO: 994391 - DNA, 15 bp, Homo sapiens
ggagtgagggacttc

SEQ ID NO: 994392 - DNA, 15 bp, Homo sapiens
gagtgagggacttcc

SEQ ID NO: 994393 - DNA, 15 bp, Homo sapiens
agtgagggacttccc

SEQ ID NO: 994394 - DNA, 15 bp, Homo sapiens
gtgagggacttccca

SEQ ID NO: 994395 - DNA, 15 bp, Homo sapiens
tgagggacttcccaa

SEQ ID NO: 994396 - DNA, 15 bp, Homo sapiens
gagggacttcccaac

SEQ ID NO: 994397 - DNA, 15 bp, Homo sapiens
agggacttcccaacg

SEQ ID NO: 994398 - DNA, 15 bp, Homo sapiens
gggacttcccaacgc

SEQ ID NO: 994399 - DNA, 15 bp, Homo sapiens
ggacttcccaacgct

SEQ ID NO: 994400 - DNA, 15 bp, Homo sapiens
gacttcccaacgctg

SEQ ID NO: 994401 - DNA, 15 bp, Homo sapiens
acttcccaacgctgt

SEQ ID NO: 994402 - DNA, 15 bp, Homo sapiens
cttcccaacgctgtc

SEQ ID NO: 994403 - DNA, 15 bp, Homo sapiens
ttcccaacgctgtca

SEQ ID NO: 994404 - DNA, 15 bp, Homo sapiens
tcccaacgctgtcaa

SEQ ID NO: 994405 - DNA, 15 bp, Homo sapiens
cccaacgctgtcaaa

SEQ ID NO: 994406 - DNA, 15 bp, Homo sapiens
ccaacgctgtcaaag

SEQ ID NO: 994407 - DNA, 15 bp, Homo sapiens
caacgctgtcaaaga

SEQ ID NO: 994408 - DNA, 15 bp, Homo sapiens
aacgctgtcaaagac

SEQ ID NO: 994409 - DNA, 15 bp, Homo sapiens
acgctgtcaaagacc

SEQ ID NO: 994410 - DNA, 15 bp, Homo sapiens
cgctgtcaaagacct

SEQ ID NO: 994411 - DNA, 15 bp, Homo sapiens
gctgtcaaagacctt

SEQ ID NO: 994412 - DNA, 15 bp, Homo sapiens
ctgtcaaagacctta

SEQ ID NO: 994413 - DNA, 15 bp, Homo sapiens
tgtcaaagaccttag

SEQ ID NO: 994414 - DNA, 15 bp, Homo sapiens
gtcaaagaccttagg

SEQ ID NO: 994415 - DNA, 15 bp, Homo sapiens
tcaaagaccttaggg

SEQ ID NO: 994416 - DNA, 15 bp, Homo sapiens
caaagaccttaggga

SEQ ID NO: 994417 - DNA, 15 bp, Homo sapiens
aaagaccttagggaa

SEQ ID NO: 994418 - DNA, 15 bp, Homo sapiens
aagaccttagggaac

SEQ ID NO: 994419 - DNA, 15 bp, Homo sapiens
agaccttagggaacc

SEQ ID NO: 994420 - DNA, 15 bp, Homo sapiens
gaccttagggaaccc

SEQ ID NO: 994421 - DNA, 15 bp, Homo sapiens
accttagggaaccca

SEQ ID NO: 994422 - DNA, 15 bp, Homo sapiens
ccttagggaacccag

SEQ ID NO: 994423 - DNA, 15 bp, Homo sapiens
cttagggaacccaga

SEQ ID NO: 994424 - DNA, 15 bp, Homo sapiens
ttagggaacccagat

SEQ ID NO: 994425 - DNA, 15 bp, Homo sapiens
tagggaacccagatt

SEQ ID NO: 994426 - DNA, 15 bp, Homo sapiens
agggaacccagattc

SEQ ID NO: 994427 - DNA, 15 bp, Homo sapiens
gggaacccagattct

SEQ ID NO: 994428 - DNA, 15 bp, Homo sapiens
ggaacccagattctg

SEQ ID NO: 994429 - DNA, 15 bp, Homo sapiens
gaacccagattctgg

SEQ ID NO: 994430 - DNA, 15 bp, Homo sapiens
aacccagattctggg

SEQ ID NO: 994431 - DNA, 15 bp, Homo sapiens
acccagattctgggg

SEQ ID NO: 994432 - DNA, 15 bp, Homo sapiens
cccagattctggggc

SEQ ID NO: 994433 - DNA, 15 bp, Homo sapiens
ccagattctggggcc

SEQ ID NO: 994434 - DNA, 15 bp, Homo sapiens
cagattctggggcca

SEQ ID NO: 994435 - DNA, 15 bp, Homo sapiens
agattctggggccat

SEQ ID NO: 994436 - DNA, 15 bp, Homo sapiens
gattctggggccatt

SEQ ID NO: 994437 - DNA, 15 bp, Homo sapiens
attctggggccatta

SEQ ID NO: 994438 - DNA, 15 bp, Homo sapiens
ttctggggccattat

SEQ ID NO: 994439 - DNA, 15 bp, Homo sapiens
tctggggccattatc

SEQ ID NO: 994440 - DNA, 15 bp, Homo sapiens
ctggggccattatcg

SEQ ID NO: 994441 - DNA, 15 bp, Homo sapiens
tggggccattatcgt

SEQ ID NO: 994442 - DNA, 15 bp, Homo sapiens
ggggccattatcgta

SEQ ID NO: 994443 - DNA, 15 bp, Homo sapiens
gggccattatcgtag

SEQ ID NO: 994444 - DNA, 15 bp, Homo sapiens
ggccattatcgtagg

SEQ ID NO: 994445 - DNA, 15 bp, Homo sapiens
gccattatcgtaggg

SEQ ID NO: 994446 - DNA, 15 bp, Homo sapiens
ccattatcgtaggga

SEQ ID NO: 994447 - DNA, 15 bp, Homo sapiens
cattatcgtagggac

SEQ ID NO: 994448 - DNA, 15 bp, Homo sapiens
attatcgtagggaca

SEQ ID NO: 994449 - DNA, 15 bp, Homo sapiens
ttatcgtagggacaa

SEQ ID NO: 994450 - DNA, 15 bp, Homo sapiens
tatcgtagggacaaa

SEQ ID NO: 994451 - DNA, 15 bp, Homo sapiens
atcgtagggacaaat

SEQ ID NO: 994452 - DNA, 15 bp, Homo sapiens
tcgtagggacaaata

SEQ ID NO: 994453 - DNA, 15 bp, Homo sapiens
cgtagggacaaatac

SEQ ID NO: 994454 - DNA, 15 bp, Homo sapiens
gtagggacaaatacc

SEQ ID NO: 994455 - DNA, 15 bp, Homo sapiens
tagggacaaataccc

SEQ ID NO: 994456 - DNA, 15 bp, Homo sapiens
agggacaaatacccg

SEQ ID NO: 994457 - DNA, 15 bp, Homo sapiens
gggacaaatacccgc

SEQ ID NO: 994458 - DNA, 15 bp, Homo sapiens
ggacaaatacccgcc

SEQ ID NO: 994459 - DNA, 15 bp, Homo sapiens
gacaaatacccgccc

SEQ ID NO: 994460 - DNA, 15 bp, Homo sapiens
acaaatacccgcccc

SEQ ID NO: 994461 - DNA, 15 bp, Homo sapiens
caaatacccgcccca

SEQ ID NO: 994462 - DNA, 15 bp, Homo sapiens
aaatacccgccccac

SEQ ID NO: 994463 - DNA, 15 bp, Homo sapiens
aatacccgccccaca

SEQ ID NO: 994464 - DNA, 15 bp, Homo sapiens
atacccgccccacac

SEQ ID NO: 994465 - DNA, 15 bp, Homo sapiens
tacccgccccacacc

SEQ ID NO: 994466 - DNA, 15 bp, Homo sapiens
acccgccccacacct

SEQ ID NO: 994467 - DNA, 15 bp, Homo sapiens
cccgccccacacctc

SEQ ID NO: 994468 - DNA, 15 bp, Homo sapiens
ccgccccacacctcc

SEQ ID NO: 994469 - DNA, 15 bp, Homo sapiens
cgccccacacctcct

SEQ ID NO: 994470 - DNA, 15 bp, Homo sapiens
gccccacacctcctc

SEQ ID NO: 994471 - DNA, 15 bp, Homo sapiens
ccccacacctcctca

SEQ ID NO: 994472 - DNA, 15 bp, Homo sapiens
cccacacctcctcaa

SEQ ID NO: 994473 - DNA, 15 bp, Homo sapiens
ccacacctcctcaac

SEQ ID NO: 994474 - DNA, 15 bp, Homo sapiens
cacacctcctcaacc

SEQ ID NO: 994475 - DNA, 15 bp, Homo sapiens
acacctcctcaaccc

SEQ ID NO: 994476 - DNA, 15 bp, Homo sapiens
cacctcctcaacccc

SEQ ID NO: 994477 - DNA, 15 bp, Homo sapiens
acctcctcaacccca

SEQ ID NO: 994478 - DNA, 15 bp, Homo sapiens
cctcctcaaccccag

SEQ ID NO: 994479 - DNA, 15 bp, Homo sapiens
ctcctcaaccccaga

SEQ ID NO: 994480 - DNA, 15 bp, Homo sapiens
tcctcaaccccagag

SEQ ID NO: 994481 - DNA, 15 bp, Homo sapiens
cctcaaccccagagg

SEQ ID NO: 994482 - DNA, 15 bp, Homo sapiens
ctcaaccccagaggg

SEQ ID NO: 994483 - DNA, 15 bp, Homo sapiens
tcaaccccagagggc

SEQ ID NO: 994484 - DNA, 15 bp, Homo sapiens
caaccccagagggct

SEQ ID NO: 994485 - DNA, 15 bp, Homo sapiens
aaccccagagggctc

SEQ ID NO: 994486 - DNA, 15 bp, Homo sapiens
accccagagggctca

SEQ ID NO: 994487 - DNA, 15 bp, Homo sapiens
ccccagagggctcac

SEQ ID NO: 994488 - DNA, 15 bp, Homo sapiens
cccagagggctcact

SEQ ID NO: 994489 - DNA, 15 bp, Homo sapiens
ccagagggctcactg

SEQ ID NO: 994490 - DNA, 15 bp, Homo sapiens
cagagggctcactgc

SEQ ID NO: 994491 - DNA, 15 bp, Homo sapiens
agagggctcactgca

SEQ ID NO: 994492 - DNA, 15 bp, Homo sapiens
gagggctcactgcag

SEQ ID NO: 994493 - DNA, 15 bp, Homo sapiens
agggctcactgcagc

SEQ ID NO: 994494 - DNA, 15 bp, Homo sapiens
gggctcactgcagcc

SEQ ID NO: 994495 - DNA, 15 bp, Homo sapiens
ggctcactgcagccc

SEQ ID NO: 994496 - DNA, 15 bp, Homo sapiens
gctcactgcagccca

SEQ ID NO: 994497 - DNA, 15 bp, Homo sapiens
ctcactgcagcccaa

SEQ ID NO: 994498 - DNA, 15 bp, Homo sapiens
tcactgcagcccaac

SEQ ID NO: 994499 - DNA, 15 bp, Homo sapiens
cactgcagcccaacc

SEQ ID NO: 994500 - DNA, 15 bp, Homo sapiens
actgcagcccaaccc

SEQ ID NO: 994501 - DNA, 15 bp, Homo sapiens
ctgcagcccaaccct

SEQ ID NO: 994502 - DNA, 15 bp, Homo sapiens
tgcagcccaaccctg

SEQ ID NO: 994503 - DNA, 15 bp, Homo sapiens
gcagcccaaccctgc

SEQ ID NO: 994504 - DNA, 15 bp, Homo sapiens
cagcccaaccctgca

SEQ ID NO: 994505 - DNA, 15 bp, Homo sapiens
agcccaaccctgcag

SEQ ID NO: 994506 - DNA, 15 bp, Homo sapiens
gcccaaccctgcagc

SEQ ID NO: 994507 - DNA, 15 bp, Homo sapiens
cccaaccctgcagct

SEQ ID NO: 994508 - DNA, 15 bp, Homo sapiens
ccaaccctgcagctc

SEQ ID NO: 994509 - DNA, 15 bp, Homo sapiens
caaccctgcagctcc

SEQ ID NO: 994510 - DNA, 15 bp, Homo sapiens
aaccctgcagctccc

SEQ ID NO: 994511 - DNA, 15 bp, Homo sapiens
accctgcagctccct

SEQ ID NO: 994512 - DNA, 15 bp, Homo sapiens
ccctgcagctcccta

SEQ ID NO: 994513 - DNA, 15 bp, Homo sapiens
cctgcagctccctag

SEQ ID NO: 994514 - DNA, 15 bp, Homo sapiens
ctgcagctccctagt

SEQ ID NO: 994515 - DNA, 15 bp, Homo sapiens
tgcagctccctagtc

SEQ ID NO: 994516 - DNA, 15 bp, Homo sapiens
gcagctccctagtcc

SEQ ID NO: 994517 - DNA, 15 bp, Homo sapiens
cagctccctagtcct

SEQ ID NO: 994518 - DNA, 15 bp, Homo sapiens
agctccctagtccta

SEQ ID NO: 994519 - DNA, 15 bp, Homo sapiens
gctccctagtcctac

SEQ ID NO: 994520 - DNA, 15 bp, Homo sapiens
ctccctagtcctact

SEQ ID NO: 994521 - DNA, 15 bp, Homo sapiens
tccctagtcctactg

SEQ ID NO: 994522 - DNA, 15 bp, Homo sapiens
ccctagtcctactgc

SEQ ID NO: 994523 - DNA, 15 bp, Homo sapiens
cctagtcctactgca

SEQ ID NO: 994524 - DNA, 15 bp, Homo sapiens
ctagtcctactgcag

SEQ ID NO: 994525 - DNA, 15 bp, Homo sapiens
tagtcctactgcagg

SEQ ID NO: 994526 - DNA, 15 bp, Homo sapiens
agtcctactgcaggg

SEQ ID NO: 994527 - DNA, 15 bp, Homo sapiens
gtcctactgcagggc

SEQ ID NO: 994528 - DNA, 15 bp, Homo sapiens
tcctactgcagggcc

SEQ ID NO: 994529 - DNA, 15 bp, Homo sapiens
cctactgcagggcca

SEQ ID NO: 994530 - DNA, 15 bp, Homo sapiens
ctactgcagggccac

SEQ ID NO: 994531 - DNA, 15 bp, Homo sapiens
tactgcagggccaca

SEQ ID NO: 994532 - DNA, 15 bp, Homo sapiens
actgcagggccacaa

SEQ ID NO: 994533 - DNA, 15 bp, Homo sapiens
ctgcagggccacaag

SEQ ID NO: 994534 - DNA, 15 bp, Homo sapiens
tgcagggccacaaga

SEQ ID NO: 994535 - DNA, 15 bp, Homo sapiens
gcagggccacaagag

SEQ ID NO: 994536 - DNA, 15 bp, Homo sapiens
cagggccacaagaga

SEQ ID NO: 994537 - DNA, 15 bp, Homo sapiens
agggccacaagagaa

SEQ ID NO: 994538 - DNA, 15 bp, Homo sapiens
gggccacaagagaag

SEQ ID NO: 994539 - DNA, 15 bp, Homo sapiens
ggccacaagagaagg

SEQ ID NO: 994540 - DNA, 15 bp, Homo sapiens
gccacaagagaaggc

SEQ ID NO: 994541 - DNA, 15 bp, Homo sapiens
ccacaagagaaggca

SEQ ID NO: 994542 - DNA, 15 bp, Homo sapiens
cacaagagaaggcaa

SEQ ID NO: 994543 - DNA, 15 bp, Homo sapiens
acaagagaaggcaaa

SEQ ID NO: 994544 - DNA, 15 bp, Homo sapiens
caagagaaggcaaaa

SEQ ID NO: 994545 - DNA, 15 bp, Homo sapiens
aagagaaggcaaaat

SEQ ID NO: 994546 - DNA, 15 bp, Homo sapiens
agagaaggcaaaatg

SEQ ID NO: 994547 - DNA, 15 bp, Homo sapiens
gagaaggcaaaatgg

SEQ ID NO: 994548 - DNA, 15 bp, Homo sapiens
agaaggcaaaatggt

SEQ ID NO: 994549 - DNA, 15 bp, Homo sapiens
gaaggcaaaatggtg

SEQ ID NO: 994550 - DNA, 15 bp, Homo sapiens
aaggcaaaatggtgt

SEQ ID NO: 994551 - DNA, 15 bp, Homo sapiens
aggcaaaatggtgtt

SEQ ID NO: 994552 - DNA, 15 bp, Homo sapiens
ggcaaaatggtgttg

SEQ ID NO: 994553 - DNA, 15 bp, Homo sapiens
gcaaaatggtgttgt

SEQ ID NO: 994554 - DNA, 15 bp, Homo sapiens
caaaatggtgttgtg

SEQ ID NO: 994555 - DNA, 15 bp, Homo sapiens
aaaatggtgttgtgt

SEQ ID NO: 994556 - DNA, 15 bp, Homo sapiens
aaatggtgttgtgtc

SEQ ID NO: 994557 - DNA, 15 bp, Homo sapiens
aatggtgttgtgtct

SEQ ID NO: 994558 - DNA, 15 bp, Homo sapiens
atggtgttgtgtctt

SEQ ID NO: 994559 - DNA, 15 bp, Homo sapiens
tggtgttgtgtcttc

SEQ ID NO: 994560 - DNA, 15 bp, Homo sapiens
ggtgttgtgtcttca

SEQ ID NO: 994561 - DNA, 15 bp, Homo sapiens
gtgttgtgtcttcat

SEQ ID NO: 994562 - DNA, 15 bp, Homo sapiens
tgttgtgtcttcatt

SEQ ID NO: 994563 - DNA, 15 bp, Homo sapiens
gttgtgtcttcattc

SEQ ID NO: 994564 - DNA, 15 bp, Homo sapiens
ttgtgtcttcattct

SEQ ID NO: 994565 - DNA, 15 bp, Homo sapiens
tgtgtcttcattctt

SEQ ID NO: 994566 - DNA, 15 bp, Homo sapiens
gtgtcttcattcttc

SEQ ID NO: 994567 - DNA, 15 bp, Homo sapiens
tgtcttcattcttct

SEQ ID NO: 994568 - DNA, 15 bp, Homo sapiens
gtcttcattcttcta

SEQ ID NO: 994569 - DNA, 15 bp, Homo sapiens
tcttcattcttctat

SEQ ID NO: 994570 - DNA, 15 bp, Homo sapiens
cttcattcttctatt

SEQ ID NO: 994571 - DNA, 15 bp, Homo sapiens
ttcattcttctattt

SEQ ID NO: 994572 - DNA, 15 bp, Homo sapiens
tcattcttctatttt

SEQ ID NO: 994573 - DNA, 15 bp, Homo sapiens
cattcttctattttt

SEQ ID NO: 994574 - DNA, 15 bp, Homo sapiens
attcttctattttta

SEQ ID NO: 994575 - DNA, 15 bp, Homo sapiens
ttcttctatttttat

SEQ ID NO: 994576 - DNA, 15 bp, Homo sapiens
tcttctatttttatt

SEQ ID NO: 994577 - DNA, 15 bp, Homo sapiens
cttctatttttattt

SEQ ID NO: 994578 - DNA, 15 bp, Homo sapiens
ttctatttttatttt

SEQ ID NO: 994579 - DNA, 15 bp, Homo sapiens
tctatttttattttt

SEQ ID NO: 994580 - DNA, 15 bp, Homo sapiens
ctatttttatttttt

SEQ ID NO: 994581 - DNA, 15 bp, Homo sapiens
tatttttattttttt

SEQ ID NO: 994582 - DNA, 15 bp, Homo sapiens
atttttatttttttt

SEQ ID NO: 994583 - DNA, 15 bp, Homo sapiens
tttttattttttttt

SEQ ID NO: 994584 - DNA, 15 bp, Homo sapiens
ttttatttttttttt

SEQ ID NO: 994585 - DNA, 15 bp, Homo sapiens
tttattttttttttt

SEQ ID NO: 994586 - DNA, 15 bp, Homo sapiens
ttatttttttttttt

SEQ ID NO: 994587 - DNA, 15 bp, Homo sapiens
tattttttttttttt

SEQ ID NO: 994588 - DNA, 15 bp, Homo sapiens
atttttttttttttg

SEQ ID NO: 994589 - DNA, 15 bp, Homo sapiens
ttttttttttgagac

SEQ ID NO: 994590 - DNA, 15 bp, Homo sapiens
tttttttttgagaca

SEQ ID NO: 994591 - DNA, 15 bp, Homo sapiens
ttttttttgagacag

SEQ ID NO: 994592 - DNA, 15 bp, Homo sapiens
tttttttgagacagg

SEQ ID NO: 994593 - DNA, 15 bp, Homo sapiens
ttttttgagacaggg

SEQ ID NO: 994594 - DNA, 15 bp, Homo sapiens
tttttgagacagggt

SEQ ID NO: 994595 - DNA, 15 bp, Homo sapiens
ttttgagacagggtc

SEQ ID NO: 994596 - DNA, 15 bp, Homo sapiens
tttgagacagggtct

SEQ ID NO: 994597 - DNA, 15 bp, Homo sapiens
ttgagacagggtctt

SEQ ID NO: 994598 - DNA, 15 bp, Homo sapiens
tgagacagggtctta

SEQ ID NO: 994599 - DNA, 15 bp, Homo sapiens
gagacagggtcttac

SEQ ID NO: 994600 - DNA, 15 bp, Homo sapiens
agacagggtcttact

SEQ ID NO: 994601 - DNA, 15 bp, Homo sapiens
gacagggtcttactt

SEQ ID NO: 994602 - DNA, 15 bp, Homo sapiens
acagggtcttacttt

SEQ ID NO: 994603 - DNA, 15 bp, Homo sapiens
cagggtcttactttg

SEQ ID NO: 994604 - DNA, 15 bp, Homo sapiens
agggtcttactttgt

SEQ ID NO: 994605 - DNA, 15 bp, Homo sapiens
gggtcttactttgtt

SEQ ID NO: 994606 - DNA, 15 bp, Homo sapiens
ggtcttactttgttg

SEQ ID NO: 994607 - DNA, 15 bp, Homo sapiens
gtcttactttgttgc

SEQ ID NO: 994608 - DNA, 15 bp, Homo sapiens
tcttactttgttgcc

SEQ ID NO: 994609 - DNA, 15 bp, Homo sapiens
cttactttgttgccc

SEQ ID NO: 994610 - DNA, 15 bp, Homo sapiens
ttactttgttgccca

SEQ ID NO: 994611 - DNA, 15 bp, Homo sapiens
tactttgttgcccag

SEQ ID NO: 994612 - DNA, 15 bp, Homo sapiens
actttgttgcccagg

SEQ ID NO: 994613 - DNA, 15 bp, Homo sapiens
ctttgttgcccaggc

SEQ ID NO: 994614 - DNA, 15 bp, Homo sapiens
tttgttgcccaggct

SEQ ID NO: 994615 - DNA, 15 bp, Homo sapiens
ttgttgcccaggctg

SEQ ID NO: 994616 - DNA, 15 bp, Homo sapiens
tgttgcccaggctgg

SEQ ID NO: 994617 - DNA, 15 bp, Homo sapiens
gttgcccaggctgga

SEQ ID NO: 994618 - DNA, 15 bp, Homo sapiens
ttgcccaggctggag

SEQ ID NO: 994619 - DNA, 15 bp, Homo sapiens
tgcccaggctggagt

SEQ ID NO: 994620 - DNA, 15 bp, Homo sapiens
tggagtgcagtggca

SEQ ID NO: 994621 - DNA, 15 bp, Homo sapiens
ggagtgcagtggcac

SEQ ID NO: 994622 - DNA, 15 bp, Homo sapiens
gagtgcagtggcacg

SEQ ID NO: 994623 - DNA, 15 bp, Homo sapiens
agtgcagtggcacga

SEQ ID NO: 994624 - DNA, 15 bp, Homo sapiens
gtgcagtggcacgaa

SEQ ID NO: 994625 - DNA, 15 bp, Homo sapiens
tgcagtggcacgaac

SEQ ID NO: 994626 - DNA, 15 bp, Homo sapiens
gcagtggcacgaaca

SEQ ID NO: 994627 - DNA, 15 bp, Homo sapiens
cagtggcacgaacat

SEQ ID NO: 994628 - DNA, 15 bp, Homo sapiens
agtggcacgaacatg

SEQ ID NO: 994629 - DNA, 15 bp, Homo sapiens
gtggcacgaacatgg

SEQ ID NO: 994630 - DNA, 15 bp, Homo sapiens
tggcacgaacatggc

SEQ ID NO: 994631 - DNA, 15 bp, Homo sapiens
ggcacgaacatggct

SEQ ID NO: 994632 - DNA, 15 bp, Homo sapiens
gcacgaacatggctc

SEQ ID NO: 994633 - DNA, 15 bp, Homo sapiens
cacgaacatggctca

SEQ ID NO: 994634 - DNA, 15 bp, Homo sapiens
acgaacatggctcac

SEQ ID NO: 994635 - DNA, 15 bp, Homo sapiens
cgaacatggctcact

SEQ ID NO: 994636 - DNA, 15 bp, Homo sapiens
gaacatggctcactg

SEQ ID NO: 994637 - DNA, 15 bp, Homo sapiens
aacatggctcactgc

SEQ ID NO: 994638 - DNA, 15 bp, Homo sapiens
acatggctcactgca

SEQ ID NO: 994639 - DNA, 15 bp, Homo sapiens
catggctcactgcag

SEQ ID NO: 994640 - DNA, 15 bp, Homo sapiens
atggctcactgcagc

SEQ ID NO: 994641 - DNA, 15 bp, Homo sapiens
tggctcactgcagcc

SEQ ID NO: 994642 - DNA, 15 bp, Homo sapiens
gctcactgcagccct

SEQ ID NO: 994643 - DNA, 15 bp, Homo sapiens
ctcactgcagccctg

SEQ ID NO: 994644 - DNA, 15 bp, Homo sapiens
tcactgcagccctga

SEQ ID NO: 994645 - DNA, 15 bp, Homo sapiens
cactgcagccctgac

SEQ ID NO: 994646 - DNA, 15 bp, Homo sapiens
actgcagccctgacc

SEQ ID NO: 994647 - DNA, 15 bp, Homo sapiens
ctgcagccctgaccc

SEQ ID NO: 994648 - DNA, 15 bp, Homo sapiens
tgcagccctgacccc

SEQ ID NO: 994649 - DNA, 15 bp, Homo sapiens
gcagccctgaccccc

SEQ ID NO: 994650 - DNA, 15 bp, Homo sapiens
cagccctgacccccc

SEQ ID NO: 994651 - DNA, 15 bp, Homo sapiens
agccctgaccccccg

SEQ ID NO: 994652 - DNA, 15 bp, Homo sapiens
gccctgaccccccgg

SEQ ID NO: 994653 - DNA, 15 bp, Homo sapiens
ccctgaccccccggg

SEQ ID NO: 994654 - DNA, 15 bp, Homo sapiens
cctgaccccccgggc

SEQ ID NO: 994655 - DNA, 15 bp, Homo sapiens
ctgaccccccgggct

SEQ ID NO: 994656 - DNA, 15 bp, Homo sapiens
tgaccccccgggctc

SEQ ID NO: 994657 - DNA, 15 bp, Homo sapiens
gaccccccgggctca

SEQ ID NO: 994658 - DNA, 15 bp, Homo sapiens
accccccgggctcaa

SEQ ID NO: 994659 - DNA, 15 bp, Homo sapiens
ccccccgggctcaag

SEQ ID NO: 994660 - DNA, 15 bp, Homo sapiens
cccccgggctcaagt

SEQ ID NO: 994661 - DNA, 15 bp, Homo sapiens
ccccgggctcaagtg

SEQ ID NO: 994662 - DNA, 15 bp, Homo sapiens
cccgggctcaagtga

SEQ ID NO: 994663 - DNA, 15 bp, Homo sapiens
ccgggctcaagtgat

SEQ ID NO: 994664 - DNA, 15 bp, Homo sapiens
cgggctcaagtgatt

SEQ ID NO: 994665 - DNA, 15 bp, Homo sapiens
gggctcaagtgattc

SEQ ID NO: 994666 - DNA, 15 bp, Homo sapiens
ggctcaagtgattct

SEQ ID NO: 994667 - DNA, 15 bp, Homo sapiens
gctcaagtgattctc

SEQ ID NO: 994668 - DNA, 15 bp, Homo sapiens
ctcaagtgattctcc

SEQ ID NO: 994669 - DNA, 15 bp, Homo sapiens
tcaagtgattctcct

SEQ ID NO: 994670 - DNA, 15 bp, Homo sapiens
caagtgattctcctg

SEQ ID NO: 994671 - DNA, 15 bp, Homo sapiens
aagtgattctcctgc

SEQ ID NO: 994672 - DNA, 15 bp, Homo sapiens
agtgattctcctgcc

SEQ ID NO: 994673 - DNA, 15 bp, Homo sapiens
gtgattctcctgcct

SEQ ID NO: 994674 - DNA, 15 bp, Homo sapiens
tgattctcctgcctc

SEQ ID NO: 994675 - DNA, 15 bp, Homo sapiens
tgcctcagcctcccg

SEQ ID NO: 994676 - DNA, 15 bp, Homo sapiens
gcctcagcctcccga

SEQ ID NO: 994677 - DNA, 15 bp, Homo sapiens
cctcagcctcccgag

SEQ ID NO: 994678 - DNA, 15 bp, Homo sapiens
ctcagcctcccgagc

SEQ ID NO: 994679 - DNA, 15 bp, Homo sapiens
tcagcctcccgagca

SEQ ID NO: 994680 - DNA, 15 bp, Homo sapiens
cagcctcccgagcat

SEQ ID NO: 994681 - DNA, 15 bp, Homo sapiens
agcctcccgagcatc

SEQ ID NO: 994682 - DNA, 15 bp, Homo sapiens
gcctcccgagcatct

SEQ ID NO: 994683 - DNA, 15 bp, Homo sapiens
cctcccgagcatctg

SEQ ID NO: 994684 - DNA, 15 bp, Homo sapiens
ctcccgagcatctgg

SEQ ID NO: 994685 - DNA, 15 bp, Homo sapiens
tcccgagcatctggg

SEQ ID NO: 994686 - DNA, 15 bp, Homo sapiens
cccgagcatctggga

SEQ ID NO: 994687 - DNA, 15 bp, Homo sapiens
ccgagcatctgggac

SEQ ID NO: 994688 - DNA, 15 bp, Homo sapiens
cgagcatctgggact

SEQ ID NO: 994689 - DNA, 15 bp, Homo sapiens
gagcatctgggacta

SEQ ID NO: 994690 - DNA, 15 bp, Homo sapiens
agcatctgggactac

SEQ ID NO: 994691 - DNA, 15 bp, Homo sapiens
gcatctgggactaca

SEQ ID NO: 994692 - DNA, 15 bp, Homo sapiens
catctgggactacag

SEQ ID NO: 994693 - DNA, 15 bp, Homo sapiens
atctgggactacagg

SEQ ID NO: 994694 - DNA, 15 bp, Homo sapiens
tctgggactacaggt

SEQ ID NO: 994695 - DNA, 15 bp, Homo sapiens
ctgggactacaggtg

SEQ ID NO: 994696 - DNA, 15 bp, Homo sapiens
tgggactacaggtgt

SEQ ID NO: 994697 - DNA, 15 bp, Homo sapiens
gggactacaggtgtg

SEQ ID NO: 994698 - DNA, 15 bp, Homo sapiens
ggactacaggtgtgc

SEQ ID NO: 994699 - DNA, 15 bp, Homo sapiens
gactacaggtgtgcg

SEQ ID NO: 994700 - DNA, 15 bp, Homo sapiens
actacaggtgtgcgt

SEQ ID NO: 994701 - DNA, 15 bp, Homo sapiens
ctacaggtgtgcgtc

SEQ ID NO: 994702 - DNA, 15 bp, Homo sapiens
tacaggtgtgcgtca

SEQ ID NO: 994703 - DNA, 15 bp, Homo sapiens
acaggtgtgcgtcac

SEQ ID NO: 994704 - DNA, 15 bp, Homo sapiens
caggtgtgcgtcaca

SEQ ID NO: 994705 - DNA, 15 bp, Homo sapiens
aggtgtgcgtcacat

SEQ ID NO: 994706 - DNA, 15 bp, Homo sapiens
ggtgtgcgtcacatg

SEQ ID NO: 994707 - DNA, 15 bp, Homo sapiens
gtgtgcgtcacatgc

SEQ ID NO: 994708 - DNA, 15 bp, Homo sapiens
tgtgcgtcacatgcc

SEQ ID NO: 994709 - DNA, 15 bp, Homo sapiens
gtgcgtcacatgcct

SEQ ID NO: 994710 - DNA, 15 bp, Homo sapiens
tgcgtcacatgcctg

SEQ ID NO: 994711 - DNA, 15 bp, Homo sapiens
gcgtcacatgcctga

SEQ ID NO: 994712 - DNA, 15 bp, Homo sapiens
cgtcacatgcctgac

SEQ ID NO: 994713 - DNA, 15 bp, Homo sapiens
gtcacatgcctgact

SEQ ID NO: 994714 - DNA, 15 bp, Homo sapiens
tcacatgcctgactg

SEQ ID NO: 994715 - DNA, 15 bp, Homo sapiens
cacatgcctgactga

SEQ ID NO: 994716 - DNA, 15 bp, Homo sapiens
acatgcctgactgat

SEQ ID NO: 994717 - DNA, 15 bp, Homo sapiens
catgcctgactgatt

SEQ ID NO: 994718 - DNA, 15 bp, Homo sapiens
atgcctgactgattt

SEQ ID NO: 994719 - DNA, 15 bp, Homo sapiens
tgcctgactgatttt

SEQ ID NO: 994720 - DNA, 15 bp, Homo sapiens
gcctgactgattttt

SEQ ID NO: 994721 - DNA, 15 bp, Homo sapiens
cctgactgatttttg

SEQ ID NO: 994722 - DNA, 15 bp, Homo sapiens
ctgactgatttttgt

SEQ ID NO: 994723 - DNA, 15 bp, Homo sapiens
tgactgatttttgta

SEQ ID NO: 994724 - DNA, 15 bp, Homo sapiens
gactgatttttgtat

SEQ ID NO: 994725 - DNA, 15 bp, Homo sapiens
actgatttttgtatt

SEQ ID NO: 994726 - DNA, 15 bp, Homo sapiens
ctgatttttgtattt

SEQ ID NO: 994727 - DNA, 15 bp, Homo sapiens
tgatttttgtatttt

SEQ ID NO: 994728 - DNA, 15 bp, Homo sapiens
gatttttgtattttt

SEQ ID NO: 994729 - DNA, 15 bp, Homo sapiens
atttttgtatttttt

SEQ ID NO: 994730 - DNA, 15 bp, Homo sapiens
tttttgtattttttg

SEQ ID NO: 994731 - DNA, 15 bp, Homo sapiens
ttttgtattttttgt

SEQ ID NO: 994732 - DNA, 15 bp, Homo sapiens
tttgtattttttgta

SEQ ID NO: 994733 - DNA, 15 bp, Homo sapiens
ttgtattttttgtac

SEQ ID NO: 994734 - DNA, 15 bp, Homo sapiens
tgtattttttgtaca

SEQ ID NO: 994735 - DNA, 15 bp, Homo sapiens
gtattttttgtacag

SEQ ID NO: 994736 - DNA, 15 bp, Homo sapiens
tattttttgtacaga

SEQ ID NO: 994737 - DNA, 15 bp, Homo sapiens
attttttgtacagat

SEQ ID NO: 994738 - DNA, 15 bp, Homo sapiens
ttttttgtacagatg

SEQ ID NO: 994739 - DNA, 15 bp, Homo sapiens
tttttgtacagatgg

SEQ ID NO: 994740 - DNA, 15 bp, Homo sapiens
ttttgtacagatggg

SEQ ID NO: 994741 - DNA, 15 bp, Homo sapiens
tttgtacagatgggg

SEQ ID NO: 994742 - DNA, 15 bp, Homo sapiens
ttgtacagatggggt

SEQ ID NO: 994743 - DNA, 15 bp, Homo sapiens
tgtacagatggggtt

SEQ ID NO: 994744 - DNA, 15 bp, Homo sapiens
gtacagatggggttt

SEQ ID NO: 994745 - DNA, 15 bp, Homo sapiens
tacagatggggtttc

SEQ ID NO: 994746 - DNA, 15 bp, Homo sapiens
acagatggggtttca

SEQ ID NO: 994747 - DNA, 15 bp, Homo sapiens
cagatggggtttcat

SEQ ID NO: 994748 - DNA, 15 bp, Homo sapiens
agatggggtttcatc

SEQ ID NO: 994749 - DNA, 15 bp, Homo sapiens
gatggggtttcatca

SEQ ID NO: 994750 - DNA, 15 bp, Homo sapiens
atggggtttcatcat

SEQ ID NO: 994751 - DNA, 15 bp, Homo sapiens
tggggtttcatcatg

SEQ ID NO: 994752 - DNA, 15 bp, Homo sapiens
gtttcatcatgttgc

SEQ ID NO: 994753 - DNA, 15 bp, Homo sapiens
tttcatcatgttgcc

SEQ ID NO: 994754 - DNA, 15 bp, Homo sapiens
ttcatcatgttgccc

SEQ ID NO: 994755 - DNA, 15 bp, Homo sapiens
tcatcatgttgccca

SEQ ID NO: 994756 - DNA, 15 bp, Homo sapiens
catcatgttgcccag

SEQ ID NO: 994757 - DNA, 15 bp, Homo sapiens
atcatgttgcccagg

SEQ ID NO: 994758 - DNA, 15 bp, Homo sapiens
tcatgttgcccaggc

SEQ ID NO: 994759 - DNA, 15 bp, Homo sapiens
catgttgcccaggct

SEQ ID NO: 994760 - DNA, 15 bp, Homo sapiens
atgttgcccaggctg

SEQ ID NO: 994761 - DNA, 15 bp, Homo sapiens
gttgcccaggctggt

SEQ ID NO: 994762 - DNA, 15 bp, Homo sapiens
ttgcccaggctggtc

SEQ ID NO: 994763 - DNA, 15 bp, Homo sapiens
tgcccaggctggtct

SEQ ID NO: 994764 - DNA, 15 bp, Homo sapiens
gcccaggctggtctc

SEQ ID NO: 994765 - DNA, 15 bp, Homo sapiens
cccaggctggtctcg

SEQ ID NO: 994766 - DNA, 15 bp, Homo sapiens
ccaggctggtctcga

SEQ ID NO: 994767 - DNA, 15 bp, Homo sapiens
caggctggtctcgaa

SEQ ID NO: 994768 - DNA, 15 bp, Homo sapiens
aggctggtctcgaac

SEQ ID NO: 994769 - DNA, 15 bp, Homo sapiens
ggctggtctcgaact

SEQ ID NO: 994770 - DNA, 15 bp, Homo sapiens
gctggtctcgaactc

SEQ ID NO: 994771 - DNA, 15 bp, Homo sapiens
ctggtctcgaactcc

SEQ ID NO: 994772 - DNA, 15 bp, Homo sapiens
tggtctcgaactcct

SEQ ID NO: 994773 - DNA, 15 bp, Homo sapiens
ggtctcgaactcctg

SEQ ID NO: 994774 - DNA, 15 bp, Homo sapiens
gtctcgaactcctga

SEQ ID NO: 994775 - DNA, 15 bp, Homo sapiens
tctcgaactcctgag

SEQ ID NO: 994776 - DNA, 15 bp, Homo sapiens
ctcgaactcctgagc

SEQ ID NO: 994777 - DNA, 15 bp, Homo sapiens
tcgaactcctgagct

SEQ ID NO: 994778 - DNA, 15 bp, Homo sapiens
cgaactcctgagctc

SEQ ID NO: 994779 - DNA, 15 bp, Homo sapiens
gaactcctgagctca

SEQ ID NO: 994780 - DNA, 15 bp, Homo sapiens
aactcctgagctcaa

SEQ ID NO: 994781 - DNA, 15 bp, Homo sapiens
actcctgagctcaag

SEQ ID NO: 994782 - DNA, 15 bp, Homo sapiens
ctcctgagctcaagt

SEQ ID NO: 994783 - DNA, 15 bp, Homo sapiens
tcctgagctcaagtg

SEQ ID NO: 994784 - DNA, 15 bp, Homo sapiens
cctgagctcaagtga

SEQ ID NO: 994785 - DNA, 15 bp, Homo sapiens
ctgagctcaagtgat

SEQ ID NO: 994786 - DNA, 15 bp, Homo sapiens
tgagctcaagtgatc

SEQ ID NO: 994787 - DNA, 15 bp, Homo sapiens
gagctcaagtgatct

SEQ ID NO: 994788 - DNA, 15 bp, Homo sapiens
agctcaagtgatctg

SEQ ID NO: 994789 - DNA, 15 bp, Homo sapiens
gctcaagtgatctgc

SEQ ID NO: 994790 - DNA, 15 bp, Homo sapiens
ctcaagtgatctgcc

SEQ ID NO: 994791 - DNA, 15 bp, Homo sapiens
tcaagtgatctgccc

SEQ ID NO: 994792 - DNA, 15 bp, Homo sapiens
caagtgatctgcccg

SEQ ID NO: 994793 - DNA, 15 bp, Homo sapiens
aagtgatctgcccgc

SEQ ID NO: 994794 - DNA, 15 bp, Homo sapiens
agtgatctgcccgcc

SEQ ID NO: 994795 - DNA, 15 bp, Homo sapiens
gtgatctgcccgcct

SEQ ID NO: 994796 - DNA, 15 bp, Homo sapiens
tgatctgcccgcctc

SEQ ID NO: 994797 - DNA, 15 bp, Homo sapiens
gatctgcccgcctca

SEQ ID NO: 994798 - DNA, 15 bp, Homo sapiens
atctgcccgcctcag

SEQ ID NO: 994799 - DNA, 15 bp, Homo sapiens
tctgcccgcctcagc

SEQ ID NO: 994800 - DNA, 15 bp, Homo sapiens
ctgcccgcctcagcc

SEQ ID NO: 994801 - DNA, 15 bp, Homo sapiens
tgcccgcctcagcct

SEQ ID NO: 994802 - DNA, 15 bp, Homo sapiens
gcccgcctcagcctc

SEQ ID NO: 994803 - DNA, 15 bp, Homo sapiens
cccgcctcagcctcc

SEQ ID NO: 994804 - DNA, 15 bp, Homo sapiens
ccgcctcagcctccc

SEQ ID NO: 994805 - DNA, 15 bp, Homo sapiens
cgcctcagcctccca

SEQ ID NO: 994806 - DNA, 15 bp, Homo sapiens
gcctcagcctcccaa

SEQ ID NO: 994807 - DNA, 15 bp, Homo sapiens
cctcagcctcccaaa

SEQ ID NO: 994808 - DNA, 15 bp, Homo sapiens
ctcagcctcccaaag

SEQ ID NO: 994809 - DNA, 15 bp, Homo sapiens
tcagcctcccaaagt

SEQ ID NO: 994810 - DNA, 15 bp, Homo sapiens
cagcctcccaaagtg

SEQ ID NO: 994811 - DNA, 15 bp, Homo sapiens
agcctcccaaagtgc

SEQ ID NO: 994812 - DNA, 15 bp, Homo sapiens
gctgggattacaggt

SEQ ID NO: 994813 - DNA, 15 bp, Homo sapiens
ctgggattacaggtg

SEQ ID NO: 994814 - DNA, 15 bp, Homo sapiens
tgggattacaggtgt

SEQ ID NO: 994815 - DNA, 15 bp, Homo sapiens
gggattacaggtgtg

SEQ ID NO: 994816 - DNA, 15 bp, Homo sapiens
ggattacaggtgtga

SEQ ID NO: 994817 - DNA, 15 bp, Homo sapiens
gattacaggtgtgag

SEQ ID NO: 994818 - DNA, 15 bp, Homo sapiens
attacaggtgtgagc

SEQ ID NO: 994819 - DNA, 15 bp, Homo sapiens
ttacaggtgtgagcc

SEQ ID NO: 994820 - DNA, 15 bp, Homo sapiens
tacaggtgtgagcca

SEQ ID NO: 994821 - DNA, 15 bp, Homo sapiens
acaggtgtgagccac

SEQ ID NO: 994822 - DNA, 15 bp, Homo sapiens
caggtgtgagccact

SEQ ID NO: 994823 - DNA, 15 bp, Homo sapiens
aggtgtgagccactt

SEQ ID NO: 994824 - DNA, 15 bp, Homo sapiens
ggtgtgagccacttc

SEQ ID NO: 994825 - DNA, 15 bp, Homo sapiens
gtgtgagccacttcg

SEQ ID NO: 994826 - DNA, 15 bp, Homo sapiens
tgtgagccacttcgc

SEQ ID NO: 994827 - DNA, 15 bp, Homo sapiens
gtgagccacttcgcc

SEQ ID NO: 994828 - DNA, 15 bp, Homo sapiens
tgagccacttcgccc

SEQ ID NO: 994829 - DNA, 15 bp, Homo sapiens
gagccacttcgccca

SEQ ID NO: 994830 - DNA, 15 bp, Homo sapiens
agccacttcgcccag

SEQ ID NO: 994831 - DNA, 15 bp, Homo sapiens
gccacttcgcccagc

SEQ ID NO: 994832 - DNA, 15 bp, Homo sapiens
ccacttcgcccagcc

SEQ ID NO: 994833 - DNA, 15 bp, Homo sapiens
cacttcgcccagccc

SEQ ID NO: 994834 - DNA, 15 bp, Homo sapiens
acttcgcccagccca

SEQ ID NO: 994835 - DNA, 15 bp, Homo sapiens
cttcgcccagcccat

SEQ ID NO: 994836 - DNA, 15 bp, Homo sapiens
ttcgcccagcccatt

SEQ ID NO: 994837 - DNA, 15 bp, Homo sapiens
tcgcccagcccattt

SEQ ID NO: 994838 - DNA, 15 bp, Homo sapiens
cgcccagcccatttt

SEQ ID NO: 994839 - DNA, 15 bp, Homo sapiens
gcccagcccattttt

SEQ ID NO: 994840 - DNA, 15 bp, Homo sapiens
cccagcccattttta

SEQ ID NO: 994841 - DNA, 15 bp, Homo sapiens
ccagcccatttttat

SEQ ID NO: 994842 - DNA, 15 bp, Homo sapiens
cagcccatttttatt

SEQ ID NO: 994843 - DNA, 15 bp, Homo sapiens
agcccatttttattt

SEQ ID NO: 994844 - DNA, 15 bp, Homo sapiens
gcccatttttatttt

SEQ ID NO: 994845 - DNA, 15 bp, Homo sapiens
cccatttttattttt

SEQ ID NO: 994846 - DNA, 15 bp, Homo sapiens
ccatttttatttttt

SEQ ID NO: 994847 - DNA, 15 bp, Homo sapiens
catttttattttttt

SEQ ID NO: 994848 - DNA, 15 bp, Homo sapiens
atttttattttttta

SEQ ID NO: 994849 - DNA, 15 bp, Homo sapiens
tttttatttttttat

SEQ ID NO: 994850 - DNA, 15 bp, Homo sapiens
ttttatttttttatt

SEQ ID NO: 994851 - DNA, 15 bp, Homo sapiens
tttatttttttatta

SEQ ID NO: 994852 - DNA, 15 bp, Homo sapiens
ttatttttttattat

SEQ ID NO: 994853 - DNA, 15 bp, Homo sapiens
tatttttttattatt

SEQ ID NO: 994854 - DNA, 15 bp, Homo sapiens
atttttttattatta

SEQ ID NO: 994855 - DNA, 15 bp, Homo sapiens
tttttttattattat

SEQ ID NO: 994856 - DNA, 15 bp, Homo sapiens
ttttttattattatt

SEQ ID NO: 994857 - DNA, 15 bp, Homo sapiens
tttttattattattc

SEQ ID NO: 994858 - DNA, 15 bp, Homo sapiens
ttttattattattct

SEQ ID NO: 994859 - DNA, 15 bp, Homo sapiens
tttattattattctt

SEQ ID NO: 994860 - DNA, 15 bp, Homo sapiens
ttattattattcttt

SEQ ID NO: 994861 - DNA, 15 bp, Homo sapiens
tattattattctttg

SEQ ID NO: 994862 - DNA, 15 bp, Homo sapiens
attattattctttga

SEQ ID NO: 994863 - DNA, 15 bp, Homo sapiens
ttattattctttgag

SEQ ID NO: 994864 - DNA, 15 bp, Homo sapiens
tattattctttgaga

SEQ ID NO: 994865 - DNA, 15 bp, Homo sapiens
attattctttgagat

SEQ ID NO: 994866 - DNA, 15 bp, Homo sapiens
ttattctttgagata

SEQ ID NO: 994867 - DNA, 15 bp, Homo sapiens
tattctttgagatat

SEQ ID NO: 994868 - DNA, 15 bp, Homo sapiens
attctttgagatatt

SEQ ID NO: 994869 - DNA, 15 bp, Homo sapiens
ttctttgagatatta

SEQ ID NO: 994870 - DNA, 15 bp, Homo sapiens
tctttgagatattaa

SEQ ID NO: 994871 - DNA, 15 bp, Homo sapiens
ctttgagatattaat

SEQ ID NO: 994872 - DNA, 15 bp, Homo sapiens
tttgagatattaata

SEQ ID NO: 994873 - DNA, 15 bp, Homo sapiens
ttgagatattaataa

SEQ ID NO: 994874 - DNA, 15 bp, Homo sapiens
tgagatattaataat

SEQ ID NO: 994875 - DNA, 15 bp, Homo sapiens
gagatattaataata

SEQ ID NO: 994876 - DNA, 15 bp, Homo sapiens
agatattaataataa

SEQ ID NO: 994877 - DNA, 15 bp, Homo sapiens
gatattaataataaa

SEQ ID NO: 994878 - DNA, 15 bp, Homo sapiens
atattaataataaaa

SEQ ID NO: 994879 - DNA, 15 bp, Homo sapiens
tattaataataaaaa

SEQ ID NO: 994880 - DNA, 15 bp, Homo sapiens
attaataataaaaaa

SEQ ID NO: 994881 - DNA, 15 bp, Homo sapiens
ttaataataaaaaat

SEQ ID NO: 994882 - DNA, 15 bp, Homo sapiens
taataataaaaaata

SEQ ID NO: 994883 - DNA, 15 bp, Homo sapiens
aataataaaaaataa

SEQ ID NO: 994884 - DNA, 15 bp, Homo sapiens
ataataaaaaataat

SEQ ID NO: 994885 - DNA, 15 bp, Homo sapiens
taataaaaaataata

SEQ ID NO: 994886 - DNA, 15 bp, Homo sapiens
aataaaaaataataa

SEQ ID NO: 994887 - DNA, 15 bp, Homo sapiens
ataaaaaataataat

SEQ ID NO: 994888 - DNA, 15 bp, Homo sapiens
taaaaaataataata

SEQ ID NO: 994889 - DNA, 15 bp, Homo sapiens
aaaaaataataataa

SEQ ID NO: 994890 - DNA, 15 bp, Homo sapiens
aaaaataataataaa

SEQ ID NO: 994891 - DNA, 15 bp, Homo sapiens
aaaataataataaat

SEQ ID NO: 994892 - DNA, 15 bp, Homo sapiens
aaataataataaata

SEQ ID NO: 994893 - DNA, 15 bp, Homo sapiens
aataataataaataa

SEQ ID NO: 994894 - DNA, 15 bp, Homo sapiens
ataataataaataat

SEQ ID NO: 994895 - DNA, 15 bp, Homo sapiens
taataataaataata

SEQ ID NO: 994896 - DNA, 15 bp, Homo sapiens
aataataaataatat

SEQ ID NO: 994897 - DNA, 15 bp, Homo sapiens
ataataaataatatt

SEQ ID NO: 994898 - DNA, 15 bp, Homo sapiens
taataaataatattt

SEQ ID NO: 994899 - DNA, 15 bp, Homo sapiens
aataaataatatttt

SEQ ID NO: 994900 - DNA, 15 bp, Homo sapiens
ataaataatattttt

SEQ ID NO: 994901 - DNA, 15 bp, Homo sapiens
taaataatattttta

SEQ ID NO: 994902 - DNA, 15 bp, Homo sapiens
aaataatatttttat

SEQ ID NO: 994903 - DNA, 15 bp, Homo sapiens
aataatatttttatt

SEQ ID NO: 994904 - DNA, 15 bp, Homo sapiens
ataatatttttatta

SEQ ID NO: 994905 - DNA, 15 bp, Homo sapiens
taatatttttattat

SEQ ID NO: 994906 - DNA, 15 bp, Homo sapiens
aatatttttattatt

SEQ ID NO: 994907 - DNA, 15 bp, Homo sapiens
atatttttattatta

SEQ ID NO: 994908 - DNA, 15 bp, Homo sapiens
tatttttattattat

SEQ ID NO: 994909 - DNA, 15 bp, Homo sapiens
atttttattattatt

SEQ ID NO: 994910 - DNA, 15 bp, Homo sapiens
tttttattattatta

SEQ ID NO: 994911 - DNA, 15 bp, Homo sapiens
ttttattattattat

SEQ ID NO: 994912 - DNA, 15 bp, Homo sapiens
tttattattattatc

SEQ ID NO: 994913 - DNA, 15 bp, Homo sapiens
ttattattattatca

SEQ ID NO: 994914 - DNA, 15 bp, Homo sapiens
tattattattatcac

SEQ ID NO: 994915 - DNA, 15 bp, Homo sapiens
attattattatcact

SEQ ID NO: 994916 - DNA, 15 bp, Homo sapiens
ttattattatcactc

SEQ ID NO: 994917 - DNA, 15 bp, Homo sapiens
tattattatcactct

SEQ ID NO: 994918 - DNA, 15 bp, Homo sapiens
attattatcactctg

SEQ ID NO: 994919 - DNA, 15 bp, Homo sapiens
ttattatcactctgt

SEQ ID NO: 994920 - DNA, 15 bp, Homo sapiens
tattatcactctgtc

SEQ ID NO: 994921 - DNA, 15 bp, Homo sapiens
attatcactctgtca

SEQ ID NO: 994922 - DNA, 15 bp, Homo sapiens
ttatcactctgtcac

SEQ ID NO: 994923 - DNA, 15 bp, Homo sapiens
tatcactctgtcacc

SEQ ID NO: 994924 - DNA, 15 bp, Homo sapiens
atcactctgtcaccc

SEQ ID NO: 994925 - DNA, 15 bp, Homo sapiens
tgtcacccaggctgc

SEQ ID NO: 994926 - DNA, 15 bp, Homo sapiens
gtcacccaggctgca

SEQ ID NO: 994927 - DNA, 15 bp, Homo sapiens
tcacccaggctgcag

SEQ ID NO: 994928 - DNA, 15 bp, Homo sapiens
cacccaggctgcagt

SEQ ID NO: 994929 - DNA, 15 bp, Homo sapiens
acccaggctgcagtg

SEQ ID NO: 994930 - DNA, 15 bp, Homo sapiens
cccaggctgcagtgc

SEQ ID NO: 994931 - DNA, 15 bp, Homo sapiens
ccaggctgcagtgca

SEQ ID NO: 994932 - DNA, 15 bp, Homo sapiens
caggctgcagtgcag

SEQ ID NO: 994933 - DNA, 15 bp, Homo sapiens
aggctgcagtgcagt

SEQ ID NO: 994934 - DNA, 15 bp, Homo sapiens
ggctgcagtgcagtg

SEQ ID NO: 994935 - DNA, 15 bp, Homo sapiens
gctgcagtgcagtgg

SEQ ID NO: 994936 - DNA, 15 bp, Homo sapiens
ctgcagtgcagtggt

SEQ ID NO: 994937 - DNA, 15 bp, Homo sapiens
tgcagtgcagtggtg

SEQ ID NO: 994938 - DNA, 15 bp, Homo sapiens
gcagtgcagtggtgc

SEQ ID NO: 994939 - DNA, 15 bp, Homo sapiens
cagtgcagtggtgcg

SEQ ID NO: 994940 - DNA, 15 bp, Homo sapiens
agtgcagtggtgcga

SEQ ID NO: 994941 - DNA, 15 bp, Homo sapiens
gtgcagtggtgcgat

SEQ ID NO: 994942 - DNA, 15 bp, Homo sapiens
tgcagtggtgcgatt

SEQ ID NO: 994943 - DNA, 15 bp, Homo sapiens
gcagtggtgcgattt

SEQ ID NO: 994944 - DNA, 15 bp, Homo sapiens
cagtggtgcgatttt

SEQ ID NO: 994945 - DNA, 15 bp, Homo sapiens
agtggtgcgattttg

SEQ ID NO: 994946 - DNA, 15 bp, Homo sapiens
gtggtgcgattttgg

SEQ ID NO: 994947 - DNA, 15 bp, Homo sapiens
tggtgcgattttggc

SEQ ID NO: 994948 - DNA, 15 bp, Homo sapiens
ggtgcgattttggct

SEQ ID NO: 994949 - DNA, 15 bp, Homo sapiens
gtgcgattttggctc

SEQ ID NO: 994950 - DNA, 15 bp, Homo sapiens
tgcgattttggctca

SEQ ID NO: 994951 - DNA, 15 bp, Homo sapiens
gcgattttggctcac

SEQ ID NO: 994952 - DNA, 15 bp, Homo sapiens
cgattttggctcact

SEQ ID NO: 994953 - DNA, 15 bp, Homo sapiens
gattttggctcactg

SEQ ID NO: 994954 - DNA, 15 bp, Homo sapiens
attttggctcactgc

SEQ ID NO: 994955 - DNA, 15 bp, Homo sapiens
ttttggctcactgca

SEQ ID NO: 994956 - DNA, 15 bp, Homo sapiens
tttggctcactgcag

SEQ ID NO: 994957 - DNA, 15 bp, Homo sapiens
ttggctcactgcagc

SEQ ID NO: 994958 - DNA, 15 bp, Homo sapiens
gctcactgcagcccg

SEQ ID NO: 994959 - DNA, 15 bp, Homo sapiens
ctcactgcagcccgg

SEQ ID NO: 994960 - DNA, 15 bp, Homo sapiens
tcactgcagcccgga

SEQ ID NO: 994961 - DNA, 15 bp, Homo sapiens
cactgcagcccggaa

SEQ ID NO: 994962 - DNA, 15 bp, Homo sapiens
actgcagcccggaac

SEQ ID NO: 994963 - DNA, 15 bp, Homo sapiens
ctgcagcccggaact

SEQ ID NO: 994964 - DNA, 15 bp, Homo sapiens
tgcagcccggaactc

SEQ ID NO: 994965 - DNA, 15 bp, Homo sapiens
gcagcccggaactcc

SEQ ID NO: 994966 - DNA, 15 bp, Homo sapiens
cagcccggaactcct

SEQ ID NO: 994967 - DNA, 15 bp, Homo sapiens
agcccggaactcctt

SEQ ID NO: 994968 - DNA, 15 bp, Homo sapiens
gcccggaactccttg

SEQ ID NO: 994969 - DNA, 15 bp, Homo sapiens
cccggaactccttgg

SEQ ID NO: 994970 - DNA, 15 bp, Homo sapiens
ccggaactccttgga

SEQ ID NO: 994971 - DNA, 15 bp, Homo sapiens
cggaactccttggac

SEQ ID NO: 994972 - DNA, 15 bp, Homo sapiens
ggaactccttggact

SEQ ID NO: 994973 - DNA, 15 bp, Homo sapiens
gaactccttggactc

SEQ ID NO: 994974 - DNA, 15 bp, Homo sapiens
aactccttggactca

SEQ ID NO: 994975 - DNA, 15 bp, Homo sapiens
actccttggactcaa

SEQ ID NO: 994976 - DNA, 15 bp, Homo sapiens
ctccttggactcaag

SEQ ID NO: 994977 - DNA, 15 bp, Homo sapiens
tccttggactcaagc

SEQ ID NO: 994978 - DNA, 15 bp, Homo sapiens
ccttggactcaagcg

SEQ ID NO: 994979 - DNA, 15 bp, Homo sapiens
cttggactcaagcga

SEQ ID NO: 994980 - DNA, 15 bp, Homo sapiens
ttggactcaagcgat

SEQ ID NO: 994981 - DNA, 15 bp, Homo sapiens
tggactcaagcgatc

SEQ ID NO: 994982 - DNA, 15 bp, Homo sapiens
ggactcaagcgatcc

SEQ ID NO: 994983 - DNA, 15 bp, Homo sapiens
gactcaagcgatcct

SEQ ID NO: 994984 - DNA, 15 bp, Homo sapiens
actcaagcgatcctc

SEQ ID NO: 994985 - DNA, 15 bp, Homo sapiens
ctcaagcgatcctcc

SEQ ID NO: 994986 - DNA, 15 bp, Homo sapiens
tcaagcgatcctccc

SEQ ID NO: 994987 - DNA, 15 bp, Homo sapiens
caagcgatcctccca

SEQ ID NO: 994988 - DNA, 15 bp, Homo sapiens
aagcgatcctcccac

SEQ ID NO: 994989 - DNA, 15 bp, Homo sapiens
agcgatcctcccacc

SEQ ID NO: 994990 - DNA, 15 bp, Homo sapiens
gcgatcctcccacct

SEQ ID NO: 994991 - DNA, 15 bp, Homo sapiens
cgatcctcccacctc

SEQ ID NO: 994992 - DNA, 15 bp, Homo sapiens
gatcctcccacctca

SEQ ID NO: 994993 - DNA, 15 bp, Homo sapiens
atcctcccacctcag

SEQ ID NO: 994994 - DNA, 15 bp, Homo sapiens
tcctcccacctcagc

SEQ ID NO: 994995 - DNA, 15 bp, Homo sapiens
cctcccacctcagcc

SEQ ID NO: 994996 - DNA, 15 bp, Homo sapiens
ctcccacctcagcct

SEQ ID NO: 994997 - DNA, 15 bp, Homo sapiens
tcccacctcagcctc

SEQ ID NO: 994998 - DNA, 15 bp, Homo sapiens
cccacctcagcctcc

SEQ ID NO: 994999 - DNA, 15 bp, Homo sapiens
ccacctcagcctcct

SEQ ID NO: 995000 - DNA, 15 bp, Homo sapiens
cacctcagcctcctg

SEQ ID NO: 995001 - DNA, 15 bp, Homo sapiens
acctcagcctcctgg

SEQ ID NO: 995002 - DNA, 15 bp, Homo sapiens
cctcagcctcctggg

SEQ ID NO: 995003 - DNA, 15 bp, Homo sapiens
ctcagcctcctgggt

SEQ ID NO: 995004 - DNA, 15 bp, Homo sapiens
tcagcctcctgggta

SEQ ID NO: 995005 - DNA, 15 bp, Homo sapiens
ctcctgggtagctga

SEQ ID NO: 995006 - DNA, 15 bp, Homo sapiens
tcctgggtagctgat

SEQ ID NO: 995007 - DNA, 15 bp, Homo sapiens
cctgggtagctgata

SEQ ID NO: 995008 - DNA, 15 bp, Homo sapiens
ctgggtagctgatac

SEQ ID NO: 995009 - DNA, 15 bp, Homo sapiens
tgggtagctgatact

SEQ ID NO: 995010 - DNA, 15 bp, Homo sapiens
gggtagctgatacta

SEQ ID NO: 995011 - DNA, 15 bp, Homo sapiens
ggtagctgatactac

SEQ ID NO: 995012 - DNA, 15 bp, Homo sapiens
gtagctgatactaca

SEQ ID NO: 995013 - DNA, 15 bp, Homo sapiens
tagctgatactacag

SEQ ID NO: 995014 - DNA, 15 bp, Homo sapiens
agctgatactacagg

SEQ ID NO: 995015 - DNA, 15 bp, Homo sapiens
gctgatactacaggt

SEQ ID NO: 995016 - DNA, 15 bp, Homo sapiens
ctgatactacaggtc

SEQ ID NO: 995017 - DNA, 15 bp, Homo sapiens
tgatactacaggtcc

SEQ ID NO: 995018 - DNA, 15 bp, Homo sapiens
gatactacaggtcca

SEQ ID NO: 995019 - DNA, 15 bp, Homo sapiens
atactacaggtccac

SEQ ID NO: 995020 - DNA, 15 bp, Homo sapiens
tactacaggtccaca

SEQ ID NO: 995021 - DNA, 15 bp, Homo sapiens
actacaggtccacac

SEQ ID NO: 995022 - DNA, 15 bp, Homo sapiens
ctacaggtccacacc

SEQ ID NO: 995023 - DNA, 15 bp, Homo sapiens
tacaggtccacacca

SEQ ID NO: 995024 - DNA, 15 bp, Homo sapiens
acaggtccacaccac

SEQ ID NO: 995025 - DNA, 15 bp, Homo sapiens
caggtccacaccacc

SEQ ID NO: 995026 - DNA, 15 bp, Homo sapiens
aggtccacaccacca

SEQ ID NO: 995027 - DNA, 15 bp, Homo sapiens
ggtccacaccaccac

SEQ ID NO: 995028 - DNA, 15 bp, Homo sapiens
gtccacaccaccaca

SEQ ID NO: 995029 - DNA, 15 bp, Homo sapiens
tccacaccaccacac

SEQ ID NO: 995030 - DNA, 15 bp, Homo sapiens
ccacaccaccacacc

SEQ ID NO: 995031 - DNA, 15 bp, Homo sapiens
cacaccaccacacct

SEQ ID NO: 995032 - DNA, 15 bp, Homo sapiens
acaccaccacacctg

SEQ ID NO: 995033 - DNA, 15 bp, Homo sapiens
caccaccacacctgg

SEQ ID NO: 995034 - DNA, 15 bp, Homo sapiens
accaccacacctggc

SEQ ID NO: 995035 - DNA, 15 bp, Homo sapiens
ccaccacacctggct

SEQ ID NO: 995036 - DNA, 15 bp, Homo sapiens
caccacacctggcta

SEQ ID NO: 995037 - DNA, 15 bp, Homo sapiens
accacacctggctaa

SEQ ID NO: 995038 - DNA, 15 bp, Homo sapiens
ccacacctggctaat

SEQ ID NO: 995039 - DNA, 15 bp, Homo sapiens
cacacctggctaatt

SEQ ID NO: 995040 - DNA, 15 bp, Homo sapiens
acacctggctaattt

SEQ ID NO: 995041 - DNA, 15 bp, Homo sapiens
cacctggctaatttg

SEQ ID NO: 995042 - DNA, 15 bp, Homo sapiens
acctggctaatttgt

SEQ ID NO: 995043 - DNA, 15 bp, Homo sapiens
cctggctaatttgtg

SEQ ID NO: 995044 - DNA, 15 bp, Homo sapiens
ctggctaatttgtgt

SEQ ID NO: 995045 - DNA, 15 bp, Homo sapiens
tggctaatttgtgtg

SEQ ID NO: 995046 - DNA, 15 bp, Homo sapiens
ggctaatttgtgtgt

SEQ ID NO: 995047 - DNA, 15 bp, Homo sapiens
gctaatttgtgtgtg

SEQ ID NO: 995048 - DNA, 15 bp, Homo sapiens
ctaatttgtgtgtgt

SEQ ID NO: 995049 - DNA, 15 bp, Homo sapiens
taatttgtgtgtgtg

SEQ ID NO: 995050 - DNA, 15 bp, Homo sapiens
aatttgtgtgtgtgt

SEQ ID NO: 995051 - DNA, 15 bp, Homo sapiens
atttgtgtgtgtgtg

SEQ ID NO: 995052 - DNA, 15 bp, Homo sapiens
tttgtgtgtgtgtgt

SEQ ID NO: 995053 - DNA, 15 bp, Homo sapiens
ttgtgtgtgtgtgtg

SEQ ID NO: 995054 - DNA, 15 bp, Homo sapiens
tgtgtgtgtgtgtgt

SEQ ID NO: 995055 - DNA, 15 bp, Homo sapiens
gtgtgtgtgtgtgta

SEQ ID NO: 995056 - DNA, 15 bp, Homo sapiens
tgtgtgtgtgtgtat

SEQ ID NO: 995057 - DNA, 15 bp, Homo sapiens
gtgtgtgtgtgtatt

SEQ ID NO: 995058 - DNA, 15 bp, Homo sapiens
tgtgtgtgtgtattt

SEQ ID NO: 995059 - DNA, 15 bp, Homo sapiens
gtgtgtgtgtattta

SEQ ID NO: 995060 - DNA, 15 bp, Homo sapiens
tgtgtgtgtatttat

SEQ ID NO: 995061 - DNA, 15 bp, Homo sapiens
gtgtgtgtatttatt

SEQ ID NO: 995062 - DNA, 15 bp, Homo sapiens
tgtgtgtatttattt

SEQ ID NO: 995063 - DNA, 15 bp, Homo sapiens
gtgtgtatttatttt

SEQ ID NO: 995064 - DNA, 15 bp, Homo sapiens
tgtgtatttatttta

SEQ ID NO: 995065 - DNA, 15 bp, Homo sapiens
gtgtatttattttat

SEQ ID NO: 995066 - DNA, 15 bp, Homo sapiens
tgtatttattttatt

SEQ ID NO: 995067 - DNA, 15 bp, Homo sapiens
gtatttattttattt

SEQ ID NO: 995068 - DNA, 15 bp, Homo sapiens
tatttattttatttt

SEQ ID NO: 995069 - DNA, 15 bp, Homo sapiens
atttattttattttt

SEQ ID NO: 995070 - DNA, 15 bp, Homo sapiens
tttattttatttttt

SEQ ID NO: 995071 - DNA, 15 bp, Homo sapiens
ttattttatttttta

SEQ ID NO: 995072 - DNA, 15 bp, Homo sapiens
tattttattttttat

SEQ ID NO: 995073 - DNA, 15 bp, Homo sapiens
attttattttttatt

SEQ ID NO: 995074 - DNA, 15 bp, Homo sapiens
ttttattttttattt

SEQ ID NO: 995075 - DNA, 15 bp, Homo sapiens
tttattttttatttt

SEQ ID NO: 995076 - DNA, 15 bp, Homo sapiens
ttattttttattttt

SEQ ID NO: 995077 - DNA, 15 bp, Homo sapiens
tattttttatttttt

SEQ ID NO: 995078 - DNA, 15 bp, Homo sapiens
attttttattttttt

SEQ ID NO: 995079 - DNA, 15 bp, Homo sapiens
ttttttattttttta

SEQ ID NO: 995080 - DNA, 15 bp, Homo sapiens
tttttatttttttag

SEQ ID NO: 995081 - DNA, 15 bp, Homo sapiens
ttttatttttttagt

SEQ ID NO: 995082 - DNA, 15 bp, Homo sapiens
tttatttttttagta

SEQ ID NO: 995083 - DNA, 15 bp, Homo sapiens
ttatttttttagtag

SEQ ID NO: 995084 - DNA, 15 bp, Homo sapiens
tatttttttagtaga

SEQ ID NO: 995085 - DNA, 15 bp, Homo sapiens
atttttttagtagag

SEQ ID NO: 995086 - DNA, 15 bp, Homo sapiens
tttttttagtagaga

SEQ ID NO: 995087 - DNA, 15 bp, Homo sapiens
ttttttagtagagat

SEQ ID NO: 995088 - DNA, 15 bp, Homo sapiens
tttttagtagagatg

SEQ ID NO: 995089 - DNA, 15 bp, Homo sapiens
ttagtagagatgggg

SEQ ID NO: 995090 - DNA, 15 bp, Homo sapiens
tagtagagatggggt

SEQ ID NO: 995091 - DNA, 15 bp, Homo sapiens
agtagagatggggtt

SEQ ID NO: 995092 - DNA, 15 bp, Homo sapiens
gtagagatggggttt

SEQ ID NO: 995093 - DNA, 15 bp, Homo sapiens
tagagatggggtttt

SEQ ID NO: 995094 - DNA, 15 bp, Homo sapiens
agagatggggttttg

SEQ ID NO: 995095 - DNA, 15 bp, Homo sapiens
gagatggggttttgc

SEQ ID NO: 995096 - DNA, 15 bp, Homo sapiens
agatggggttttgcc

SEQ ID NO: 995097 - DNA, 15 bp, Homo sapiens
gatggggttttgcca

SEQ ID NO: 995098 - DNA, 15 bp, Homo sapiens
atggggttttgccat

SEQ ID NO: 995099 - DNA, 15 bp, Homo sapiens
tggggttttgccatg

SEQ ID NO: 995100 - DNA, 15 bp, Homo sapiens
ggggttttgccatgt

SEQ ID NO: 995101 - DNA, 15 bp, Homo sapiens
gggttttgccatgtt

SEQ ID NO: 995102 - DNA, 15 bp, Homo sapiens
ggttttgccatgttg

SEQ ID NO: 995103 - DNA, 15 bp, Homo sapiens
gttttgccatgttgc

SEQ ID NO: 995104 - DNA, 15 bp, Homo sapiens
ttttgccatgttgcc

SEQ ID NO: 995105 - DNA, 15 bp, Homo sapiens
tttgccatgttgccc

SEQ ID NO: 995106 - DNA, 15 bp, Homo sapiens
ttgccatgttgccca

SEQ ID NO: 995107 - DNA, 15 bp, Homo sapiens
tgccatgttgcccag

SEQ ID NO: 995108 - DNA, 15 bp, Homo sapiens
gccatgttgcccagg

SEQ ID NO: 995109 - DNA, 15 bp, Homo sapiens
ccatgttgcccaggc

SEQ ID NO: 995110 - DNA, 15 bp, Homo sapiens
cccaggctggtctca

SEQ ID NO: 995111 - DNA, 15 bp, Homo sapiens
tctcaaactcctggc

SEQ ID NO: 995112 - DNA, 15 bp, Homo sapiens
ctcaaactcctggcc

SEQ ID NO: 995113 - DNA, 15 bp, Homo sapiens
tcaaactcctggcct

SEQ ID NO: 995114 - DNA, 15 bp, Homo sapiens
caaactcctggcctc

SEQ ID NO: 995115 - DNA, 15 bp, Homo sapiens
aaactcctggcctca

SEQ ID NO: 995116 - DNA, 15 bp, Homo sapiens
aactcctggcctcaa

SEQ ID NO: 995117 - DNA, 15 bp, Homo sapiens
actcctggcctcaaa

SEQ ID NO: 995118 - DNA, 15 bp, Homo sapiens
ctcctggcctcaaat

SEQ ID NO: 995119 - DNA, 15 bp, Homo sapiens
tcctggcctcaaata

SEQ ID NO: 995120 - DNA, 15 bp, Homo sapiens
cctggcctcaaataa

SEQ ID NO: 995121 - DNA, 15 bp, Homo sapiens
ctggcctcaaataat

SEQ ID NO: 995122 - DNA, 15 bp, Homo sapiens
tggcctcaaataatc

SEQ ID NO: 995123 - DNA, 15 bp, Homo sapiens
ggcctcaaataatct

SEQ ID NO: 995124 - DNA, 15 bp, Homo sapiens
gcctcaaataatctg

SEQ ID NO: 995125 - DNA, 15 bp, Homo sapiens
cctcaaataatctgc

SEQ ID NO: 995126 - DNA, 15 bp, Homo sapiens
ctcaaataatctgcc

SEQ ID NO: 995127 - DNA, 15 bp, Homo sapiens
tcaaataatctgcct

SEQ ID NO: 995128 - DNA, 15 bp, Homo sapiens
caaataatctgcctg

SEQ ID NO: 995129 - DNA, 15 bp, Homo sapiens
aaataatctgcctgc

SEQ ID NO: 995130 - DNA, 15 bp, Homo sapiens
aataatctgcctgcc

SEQ ID NO: 995131 - DNA, 15 bp, Homo sapiens
ataatctgcctgcct

SEQ ID NO: 995132 - DNA, 15 bp, Homo sapiens
taatctgcctgcctc

SEQ ID NO: 995133 - DNA, 15 bp, Homo sapiens
aatctgcctgcctcg

SEQ ID NO: 995134 - DNA, 15 bp, Homo sapiens
atctgcctgcctcgg

SEQ ID NO: 995135 - DNA, 15 bp, Homo sapiens
tctgcctgcctcggc

SEQ ID NO: 995136 - DNA, 15 bp, Homo sapiens
ctgcctgcctcggcc

SEQ ID NO: 995137 - DNA, 15 bp, Homo sapiens
tgcctgcctcggcct

SEQ ID NO: 995138 - DNA, 15 bp, Homo sapiens
gcctgcctcggcctc

SEQ ID NO: 995139 - DNA, 15 bp, Homo sapiens
cctgcctcggcctcc

SEQ ID NO: 995140 - DNA, 15 bp, Homo sapiens
ctgcctcggcctccc

SEQ ID NO: 995141 - DNA, 15 bp, Homo sapiens
tgcctcggcctccca

SEQ ID NO: 995142 - DNA, 15 bp, Homo sapiens
gcctcggcctcccaa

SEQ ID NO: 995143 - DNA, 15 bp, Homo sapiens
tgctgggattacaga

SEQ ID NO: 995144 - DNA, 15 bp, Homo sapiens
gctgggattacagat

SEQ ID NO: 995145 - DNA, 15 bp, Homo sapiens
ctgggattacagatg

SEQ ID NO: 995146 - DNA, 15 bp, Homo sapiens
tgggattacagatga

SEQ ID NO: 995147 - DNA, 15 bp, Homo sapiens
gggattacagatgag

SEQ ID NO: 995148 - DNA, 15 bp, Homo sapiens
ggattacagatgagc

SEQ ID NO: 995149 - DNA, 15 bp, Homo sapiens
gattacagatgagcc

SEQ ID NO: 995150 - DNA, 15 bp, Homo sapiens
attacagatgagcca

SEQ ID NO: 995151 - DNA, 15 bp, Homo sapiens
ttacagatgagccac

SEQ ID NO: 995152 - DNA, 15 bp, Homo sapiens
tacagatgagccacc

SEQ ID NO: 995153 - DNA, 15 bp, Homo sapiens
acagatgagccacca

SEQ ID NO: 995154 - DNA, 15 bp, Homo sapiens
cagatgagccaccac

SEQ ID NO: 995155 - DNA, 15 bp, Homo sapiens
agatgagccaccaca

SEQ ID NO: 995156 - DNA, 15 bp, Homo sapiens
gatgagccaccacac

SEQ ID NO: 995157 - DNA, 15 bp, Homo sapiens
atgagccaccacacc

SEQ ID NO: 995158 - DNA, 15 bp, Homo sapiens
tgagccaccacaccc

SEQ ID NO: 995159 - DNA, 15 bp, Homo sapiens
gagccaccacacccg

SEQ ID NO: 995160 - DNA, 15 bp, Homo sapiens
agccaccacacccgg

SEQ ID NO: 995161 - DNA, 15 bp, Homo sapiens
gccaccacacccggc

SEQ ID NO: 995162 - DNA, 15 bp, Homo sapiens
ccaccacacccggcc

SEQ ID NO: 995163 - DNA, 15 bp, Homo sapiens
caccacacccggcct

SEQ ID NO: 995164 - DNA, 15 bp, Homo sapiens
accacacccggccta

SEQ ID NO: 995165 - DNA, 15 bp, Homo sapiens
ccacacccggcctaa

SEQ ID NO: 995166 - DNA, 15 bp, Homo sapiens
cacacccggcctaac

SEQ ID NO: 995167 - DNA, 15 bp, Homo sapiens
acacccggcctaaca

SEQ ID NO: 995168 - DNA, 15 bp, Homo sapiens
cacccggcctaacat

SEQ ID NO: 995169 - DNA, 15 bp, Homo sapiens
acccggcctaacatt

SEQ ID NO: 995170 - DNA, 15 bp, Homo sapiens
cccggcctaacattt

SEQ ID NO: 995171 - DNA, 15 bp, Homo sapiens
ccggcctaacatttt

SEQ ID NO: 995172 - DNA, 15 bp, Homo sapiens
cggcctaacattttt

SEQ ID NO: 995173 - DNA, 15 bp, Homo sapiens
ggcctaacattttta

SEQ ID NO: 995174 - DNA, 15 bp, Homo sapiens
gcctaacatttttaa

SEQ ID NO: 995175 - DNA, 15 bp, Homo sapiens
cctaacatttttaaa

SEQ ID NO: 995176 - DNA, 15 bp, Homo sapiens
ctaacatttttaaaa

SEQ ID NO: 995177 - DNA, 15 bp, Homo sapiens
taacatttttaaaat

SEQ ID NO: 995178 - DNA, 15 bp, Homo sapiens
aacatttttaaaatt

SEQ ID NO: 995179 - DNA, 15 bp, Homo sapiens
acatttttaaaatta

SEQ ID NO: 995180 - DNA, 15 bp, Homo sapiens
catttttaaaattat

SEQ ID NO: 995181 - DNA, 15 bp, Homo sapiens
atttttaaaattata

SEQ ID NO: 995182 - DNA, 15 bp, Homo sapiens
tttttaaaattataa

SEQ ID NO: 995183 - DNA, 15 bp, Homo sapiens
ttttaaaattataaa

SEQ ID NO: 995184 - DNA, 15 bp, Homo sapiens
tttaaaattataaac

SEQ ID NO: 995185 - DNA, 15 bp, Homo sapiens
ttaaaattataaacc

SEQ ID NO: 995186 - DNA, 15 bp, Homo sapiens
taaaattataaaccc

SEQ ID NO: 995187 - DNA, 15 bp, Homo sapiens
aaaattataaaccca

SEQ ID NO: 995188 - DNA, 15 bp, Homo sapiens
aaattataaacccac

SEQ ID NO: 995189 - DNA, 15 bp, Homo sapiens
aattataaacccact

SEQ ID NO: 995190 - DNA, 15 bp, Homo sapiens
attataaacccactt

SEQ ID NO: 995191 - DNA, 15 bp, Homo sapiens
ttataaacccacttc

SEQ ID NO: 995192 - DNA, 15 bp, Homo sapiens
tataaacccacttca

SEQ ID NO: 995193 - DNA, 15 bp, Homo sapiens
ataaacccacttcat

SEQ ID NO: 995194 - DNA, 15 bp, Homo sapiens
taaacccacttcata

SEQ ID NO: 995195 - DNA, 15 bp, Homo sapiens
aaacccacttcatac

SEQ ID NO: 995196 - DNA, 15 bp, Homo sapiens
aacccacttcatacg

SEQ ID NO: 995197 - DNA, 15 bp, Homo sapiens
acccacttcatacgt

SEQ ID NO: 995198 - DNA, 15 bp, Homo sapiens
cccacttcatacgtg

SEQ ID NO: 995199 - DNA, 15 bp, Homo sapiens
ccacttcatacgtgt

SEQ ID NO: 995200 - DNA, 15 bp, Homo sapiens
cacttcatacgtgtg

SEQ ID NO: 995201 - DNA, 15 bp, Homo sapiens
acttcatacgtgtga

SEQ ID NO: 995202 - DNA, 15 bp, Homo sapiens
cttcatacgtgtgac

SEQ ID NO: 995203 - DNA, 15 bp, Homo sapiens
ttcatacgtgtgaca

SEQ ID NO: 995204 - DNA, 15 bp, Homo sapiens
tcatacgtgtgacaa

SEQ ID NO: 995205 - DNA, 15 bp, Homo sapiens
catacgtgtgacaat

SEQ ID NO: 995206 - DNA, 15 bp, Homo sapiens
atacgtgtgacaatc

SEQ ID NO: 995207 - DNA, 15 bp, Homo sapiens
tacgtgtgacaatcc

SEQ ID NO: 995208 - DNA, 15 bp, Homo sapiens
acgtgtgacaatcct

SEQ ID NO: 995209 - DNA, 15 bp, Homo sapiens
cgtgtgacaatcctg

SEQ ID NO: 995210 - DNA, 15 bp, Homo sapiens
gtgtgacaatcctgt

SEQ ID NO: 995211 - DNA, 15 bp, Homo sapiens
tgtgacaatcctgtg

SEQ ID NO: 995212 - DNA, 15 bp, Homo sapiens
gtgacaatcctgtgc

SEQ ID NO: 995213 - DNA, 15 bp, Homo sapiens
tgacaatcctgtgca

SEQ ID NO: 995214 - DNA, 15 bp, Homo sapiens
gacaatcctgtgcag

SEQ ID NO: 995215 - DNA, 15 bp, Homo sapiens
acaatcctgtgcagt

SEQ ID NO: 995216 - DNA, 15 bp, Homo sapiens
caatcctgtgcagtg

SEQ ID NO: 995217 - DNA, 15 bp, Homo sapiens
aatcctgtgcagtgg

SEQ ID NO: 995218 - DNA, 15 bp, Homo sapiens
atcctgtgcagtggg

SEQ ID NO: 995219 - DNA, 15 bp, Homo sapiens
tcctgtgcagtgggt

SEQ ID NO: 995220 - DNA, 15 bp, Homo sapiens
cctgtgcagtgggtg

SEQ ID NO: 995221 - DNA, 15 bp, Homo sapiens
ctgtgcagtgggtgc

SEQ ID NO: 995222 - DNA, 15 bp, Homo sapiens
tgtgcagtgggtgct

SEQ ID NO: 995223 - DNA, 15 bp, Homo sapiens
gtgcagtgggtgctg

SEQ ID NO: 995224 - DNA, 15 bp, Homo sapiens
tgcagtgggtgctgc

SEQ ID NO: 995225 - DNA, 15 bp, Homo sapiens
gcagtgggtgctgct

SEQ ID NO: 995226 - DNA, 15 bp, Homo sapiens
cagtgggtgctgctt

SEQ ID NO: 995227 - DNA, 15 bp, Homo sapiens
agtgggtgctgcttt

SEQ ID NO: 995228 - DNA, 15 bp, Homo sapiens
gtgggtgctgctttc

SEQ ID NO: 995229 - DNA, 15 bp, Homo sapiens
tgggtgctgctttca

SEQ ID NO: 995230 - DNA, 15 bp, Homo sapiens
gggtgctgctttcac

SEQ ID NO: 995231 - DNA, 15 bp, Homo sapiens
ggtgctgctttcacc

SEQ ID NO: 995232 - DNA, 15 bp, Homo sapiens
gtgctgctttcaccc

SEQ ID NO: 995233 - DNA, 15 bp, Homo sapiens
tgctgctttcaccca

SEQ ID NO: 995234 - DNA, 15 bp, Homo sapiens
gctgctttcacccac

SEQ ID NO: 995235 - DNA, 15 bp, Homo sapiens
ctgctttcacccacc

SEQ ID NO: 995236 - DNA, 15 bp, Homo sapiens
tgctttcacccaccc

SEQ ID NO: 995237 - DNA, 15 bp, Homo sapiens
gctttcacccacccc

SEQ ID NO: 995238 - DNA, 15 bp, Homo sapiens
ctttcacccaccccg

SEQ ID NO: 995239 - DNA, 15 bp, Homo sapiens
tttcacccaccccgc

SEQ ID NO: 995240 - DNA, 15 bp, Homo sapiens
ttcacccaccccgct

SEQ ID NO: 995241 - DNA, 15 bp, Homo sapiens
tcacccaccccgctt

SEQ ID NO: 995242 - DNA, 15 bp, Homo sapiens
cacccaccccgcttt

SEQ ID NO: 995243 - DNA, 15 bp, Homo sapiens
acccaccccgcttta

SEQ ID NO: 995244 - DNA, 15 bp, Homo sapiens
cccaccccgctttac

SEQ ID NO: 995245 - DNA, 15 bp, Homo sapiens
ccaccccgctttaca

SEQ ID NO: 995246 - DNA, 15 bp, Homo sapiens
caccccgctttacag

SEQ ID NO: 995247 - DNA, 15 bp, Homo sapiens
accccgctttacaga

SEQ ID NO: 995248 - DNA, 15 bp, Homo sapiens
ccccgctttacagat

SEQ ID NO: 995249 - DNA, 15 bp, Homo sapiens
cccgctttacagatg

SEQ ID NO: 995250 - DNA, 15 bp, Homo sapiens
ccgctttacagatga

SEQ ID NO: 995251 - DNA, 15 bp, Homo sapiens
cgctttacagatgag

SEQ ID NO: 995252 - DNA, 15 bp, Homo sapiens
gctttacagatgagg

SEQ ID NO: 995253 - DNA, 15 bp, Homo sapiens
ctttacagatgagga

SEQ ID NO: 995254 - DNA, 15 bp, Homo sapiens
tttacagatgaggaa

SEQ ID NO: 995255 - DNA, 15 bp, Homo sapiens
ttacagatgaggaaa

SEQ ID NO: 995256 - DNA, 15 bp, Homo sapiens
tacagatgaggaaac

SEQ ID NO: 995257 - DNA, 15 bp, Homo sapiens
acagatgaggaaacc

SEQ ID NO: 995258 - DNA, 15 bp, Homo sapiens
cagatgaggaaacca

SEQ ID NO: 995259 - DNA, 15 bp, Homo sapiens
agatgaggaaaccag

SEQ ID NO: 995260 - DNA, 15 bp, Homo sapiens
gatgaggaaaccagg

SEQ ID NO: 995261 - DNA, 15 bp, Homo sapiens
atgaggaaaccaggt

SEQ ID NO: 995262 - DNA, 15 bp, Homo sapiens
tgaggaaaccaggtg

SEQ ID NO: 995263 - DNA, 15 bp, Homo sapiens
gaggaaaccaggtgc

SEQ ID NO: 995264 - DNA, 15 bp, Homo sapiens
aggaaaccaggtgct

SEQ ID NO: 995265 - DNA, 15 bp, Homo sapiens
ggaaaccaggtgctt

SEQ ID NO: 995266 - DNA, 15 bp, Homo sapiens
gaaaccaggtgcttt

SEQ ID NO: 995267 - DNA, 15 bp, Homo sapiens
aaaccaggtgctttg

SEQ ID NO: 995268 - DNA, 15 bp, Homo sapiens
aaccaggtgctttga

SEQ ID NO: 995269 - DNA, 15 bp, Homo sapiens
accaggtgctttgag

SEQ ID NO: 995270 - DNA, 15 bp, Homo sapiens
ccaggtgctttgaga

SEQ ID NO: 995271 - DNA, 15 bp, Homo sapiens
caggtgctttgagat

SEQ ID NO: 995272 - DNA, 15 bp, Homo sapiens
aggtgctttgagatt

SEQ ID NO: 995273 - DNA, 15 bp, Homo sapiens
ggtgctttgagatta

SEQ ID NO: 995274 - DNA, 15 bp, Homo sapiens
gtgctttgagattaa

SEQ ID NO: 995275 - DNA, 15 bp, Homo sapiens
tgctttgagattaaa

SEQ ID NO: 995276 - DNA, 15 bp, Homo sapiens
gctttgagattaaag

SEQ ID NO: 995277 - DNA, 15 bp, Homo sapiens
ctttgagattaaaga

SEQ ID NO: 995278 - DNA, 15 bp, Homo sapiens
tttgagattaaagag

SEQ ID NO: 995279 - DNA, 15 bp, Homo sapiens
ttgagattaaagaga

SEQ ID NO: 995280 - DNA, 15 bp, Homo sapiens
tgagattaaagagat

SEQ ID NO: 995281 - DNA, 15 bp, Homo sapiens
gagattaaagagatg

SEQ ID NO: 995282 - DNA, 15 bp, Homo sapiens
agattaaagagatgg

SEQ ID NO: 995283 - DNA, 15 bp, Homo sapiens
gattaaagagatggc

SEQ ID NO: 995284 - DNA, 15 bp, Homo sapiens
attaaagagatggca

SEQ ID NO: 995285 - DNA, 15 bp, Homo sapiens
ttaaagagatggcag

SEQ ID NO: 995286 - DNA, 15 bp, Homo sapiens
taaagagatggcagt

SEQ ID NO: 995287 - DNA, 15 bp, Homo sapiens
aaagagatggcagtg

SEQ ID NO: 995288 - DNA, 15 bp, Homo sapiens
aagagatggcagtgc

SEQ ID NO: 995289 - DNA, 15 bp, Homo sapiens
agagatggcagtgct

SEQ ID NO: 995290 - DNA, 15 bp, Homo sapiens
gagatggcagtgcta

SEQ ID NO: 995291 - DNA, 15 bp, Homo sapiens
agatggcagtgctag

SEQ ID NO: 995292 - DNA, 15 bp, Homo sapiens
gatggcagtgctagg

SEQ ID NO: 995293 - DNA, 15 bp, Homo sapiens
atggcagtgctagga

SEQ ID NO: 995294 - DNA, 15 bp, Homo sapiens
tggcagtgctaggac

SEQ ID NO: 995295 - DNA, 15 bp, Homo sapiens
ggcagtgctaggact

SEQ ID NO: 995296 - DNA, 15 bp, Homo sapiens
gcagtgctaggactc

SEQ ID NO: 995297 - DNA, 15 bp, Homo sapiens
cagtgctaggactca

SEQ ID NO: 995298 - DNA, 15 bp, Homo sapiens
agtgctaggactcag

SEQ ID NO: 995299 - DNA, 15 bp, Homo sapiens
gtgctaggactcaga

SEQ ID NO: 995300 - DNA, 15 bp, Homo sapiens
tgctaggactcagag

SEQ ID NO: 995301 - DNA, 15 bp, Homo sapiens
gctaggactcagaga

SEQ ID NO: 995302 - DNA, 15 bp, Homo sapiens
ctaggactcagagac

SEQ ID NO: 995303 - DNA, 15 bp, Homo sapiens
taggactcagagaca

SEQ ID NO: 995304 - DNA, 15 bp, Homo sapiens
aggactcagagacac

SEQ ID NO: 995305 - DNA, 15 bp, Homo sapiens
ggactcagagacacc

SEQ ID NO: 995306 - DNA, 15 bp, Homo sapiens
gactcagagacaccc

SEQ ID NO: 995307 - DNA, 15 bp, Homo sapiens
actcagagacaccct

SEQ ID NO: 995308 - DNA, 15 bp, Homo sapiens
ctcagagacaccctg

SEQ ID NO: 995309 - DNA, 15 bp, Homo sapiens
tcagagacaccctgg

SEQ ID NO: 995310 - DNA, 15 bp, Homo sapiens
cagagacaccctggc

SEQ ID NO: 995311 - DNA, 15 bp, Homo sapiens
agagacaccctggcc

SEQ ID NO: 995312 - DNA, 15 bp, Homo sapiens
gagacaccctggccc

SEQ ID NO: 995313 - DNA, 15 bp, Homo sapiens
agacaccctggcccc

SEQ ID NO: 995314 - DNA, 15 bp, Homo sapiens
gacaccctggcccca

SEQ ID NO: 995315 - DNA, 15 bp, Homo sapiens
acaccctggccccag

SEQ ID NO: 995316 - DNA, 15 bp, Homo sapiens
caccctggccccagg

SEQ ID NO: 995317 - DNA, 15 bp, Homo sapiens
accctggccccaggg

SEQ ID NO: 995318 - DNA, 15 bp, Homo sapiens
ccctggccccagggt

SEQ ID NO: 995319 - DNA, 15 bp, Homo sapiens
cctggccccagggtc

SEQ ID NO: 995320 - DNA, 15 bp, Homo sapiens
ctggccccagggtct

SEQ ID NO: 995321 - DNA, 15 bp, Homo sapiens
tggccccagggtctg

SEQ ID NO: 995322 - DNA, 15 bp, Homo sapiens
ggccccagggtctgt

SEQ ID NO: 995323 - DNA, 15 bp, Homo sapiens
gccccagggtctgtg

SEQ ID NO: 995324 - DNA, 15 bp, Homo sapiens
ccccagggtctgtgg

SEQ ID NO: 995325 - DNA, 15 bp, Homo sapiens
cccagggtctgtgga

SEQ ID NO: 995326 - DNA, 15 bp, Homo sapiens
ccagggtctgtggac

SEQ ID NO: 995327 - DNA, 15 bp, Homo sapiens
cagggtctgtggaca

SEQ ID NO: 995328 - DNA, 15 bp, Homo sapiens
agggtctgtggacat

SEQ ID NO: 995329 - DNA, 15 bp, Homo sapiens
gggtctgtggacatg

SEQ ID NO: 995330 - DNA, 15 bp, Homo sapiens
ggtctgtggacatga

SEQ ID NO: 995331 - DNA, 15 bp, Homo sapiens
gtctgtggacatgac

SEQ ID NO: 995332 - DNA, 15 bp, Homo sapiens
tctgtggacatgacc

SEQ ID NO: 995333 - DNA, 15 bp, Homo sapiens
ctgtggacatgacca

SEQ ID NO: 995334 - DNA, 15 bp, Homo sapiens
tgtggacatgaccac

SEQ ID NO: 995335 - DNA, 15 bp, Homo sapiens
gtggacatgaccact

SEQ ID NO: 995336 - DNA, 15 bp, Homo sapiens
tggacatgaccactg

SEQ ID NO: 995337 - DNA, 15 bp, Homo sapiens
ggacatgaccactgc

SEQ ID NO: 995338 - DNA, 15 bp, Homo sapiens
gacatgaccactgcc

SEQ ID NO: 995339 - DNA, 15 bp, Homo sapiens
acatgaccactgcct

SEQ ID NO: 995340 - DNA, 15 bp, Homo sapiens
catgaccactgcctg

SEQ ID NO: 995341 - DNA, 15 bp, Homo sapiens
atgaccactgcctga

SEQ ID NO: 995342 - DNA, 15 bp, Homo sapiens
tgaccactgcctgaa

SEQ ID NO: 995343 - DNA, 15 bp, Homo sapiens
gaccactgcctgaac

SEQ ID NO: 995344 - DNA, 15 bp, Homo sapiens
accactgcctgaact

SEQ ID NO: 995345 - DNA, 15 bp, Homo sapiens
ccactgcctgaactg

SEQ ID NO: 995346 - DNA, 15 bp, Homo sapiens
cactgcctgaactgc

SEQ ID NO: 995347 - DNA, 15 bp, Homo sapiens
actgcctgaactgcc

SEQ ID NO: 995348 - DNA, 15 bp, Homo sapiens
ctgcctgaactgcct

SEQ ID NO: 995349 - DNA, 15 bp, Homo sapiens
tgcctgaactgcctg

SEQ ID NO: 995350 - DNA, 15 bp, Homo sapiens
gcctgaactgcctgc

SEQ ID NO: 995351 - DNA, 15 bp, Homo sapiens
cctgaactgcctgcg

SEQ ID NO: 995352 - DNA, 15 bp, Homo sapiens
ctgaactgcctgcga

SEQ ID NO: 995353 - DNA, 15 bp, Homo sapiens
tgaactgcctgcgag

SEQ ID NO: 995354 - DNA, 15 bp, Homo sapiens
gaactgcctgcgagg

SEQ ID NO: 995355 - DNA, 15 bp, Homo sapiens
aactgcctgcgagga

SEQ ID NO: 995356 - DNA, 15 bp, Homo sapiens
actgcctgcgaggat

SEQ ID NO: 995357 - DNA, 15 bp, Homo sapiens
ctgcctgcgaggatg

SEQ ID NO: 995358 - DNA, 15 bp, Homo sapiens
tgcctgcgaggatgc

SEQ ID NO: 995359 - DNA, 15 bp, Homo sapiens
gcctgcgaggatgct

SEQ ID NO: 995360 - DNA, 15 bp, Homo sapiens
cctgcgaggatgctc

SEQ ID NO: 995361 - DNA, 15 bp, Homo sapiens
ctgcgaggatgctcc

SEQ ID NO: 995362 - DNA, 15 bp, Homo sapiens
tgcgaggatgctcct

SEQ ID NO: 995363 - DNA, 15 bp, Homo sapiens
gcgaggatgctcctg

SEQ ID NO: 995364 - DNA, 15 bp, Homo sapiens
cgaggatgctcctga

SEQ ID NO: 995365 - DNA, 15 bp, Homo sapiens
gaggatgctcctgac

SEQ ID NO: 995366 - DNA, 15 bp, Homo sapiens
aggatgctcctgacc

SEQ ID NO: 995367 - DNA, 15 bp, Homo sapiens
ggatgctcctgaccc

SEQ ID NO: 995368 - DNA, 15 bp, Homo sapiens
gatgctcctgacccg

SEQ ID NO: 995369 - DNA, 15 bp, Homo sapiens
atgctcctgacccgt

SEQ ID NO: 995370 - DNA, 15 bp, Homo sapiens
tgctcctgacccgtt

SEQ ID NO: 995371 - DNA, 15 bp, Homo sapiens
gctcctgacccgtta

SEQ ID NO: 995372 - DNA, 15 bp, Homo sapiens
ctcctgacccgttag

SEQ ID NO: 995373 - DNA, 15 bp, Homo sapiens
tcctgacccgttagc

SEQ ID NO: 995374 - DNA, 15 bp, Homo sapiens
cctgacccgttagcc

SEQ ID NO: 995375 - DNA, 15 bp, Homo sapiens
ctgacccgttagcct

SEQ ID NO: 995376 - DNA, 15 bp, Homo sapiens
tgacccgttagcctt

SEQ ID NO: 995377 - DNA, 15 bp, Homo sapiens
gacccgttagcctta

SEQ ID NO: 995378 - DNA, 15 bp, Homo sapiens
acccgttagccttag

SEQ ID NO: 995379 - DNA, 15 bp, Homo sapiens
cccgttagccttagg

SEQ ID NO: 995380 - DNA, 15 bp, Homo sapiens
ccgttagccttaggg

SEQ ID NO: 995381 - DNA, 15 bp, Homo sapiens
cgttagccttagggt

SEQ ID NO: 995382 - DNA, 15 bp, Homo sapiens
gttagccttagggtt

SEQ ID NO: 995383 - DNA, 15 bp, Homo sapiens
ttagccttagggtta

SEQ ID NO: 995384 - DNA, 15 bp, Homo sapiens
tagccttagggttat

SEQ ID NO: 995385 - DNA, 15 bp, Homo sapiens
agccttagggttatg

SEQ ID NO: 995386 - DNA, 15 bp, Homo sapiens
gccttagggttatgg

SEQ ID NO: 995387 - DNA, 15 bp, Homo sapiens
ccttagggttatggg

SEQ ID NO: 995388 - DNA, 15 bp, Homo sapiens
cttagggttatgggc

SEQ ID NO: 995389 - DNA, 15 bp, Homo sapiens
ttagggttatgggcc

SEQ ID NO: 995390 - DNA, 15 bp, Homo sapiens
tagggttatgggccc

SEQ ID NO: 995391 - DNA, 15 bp, Homo sapiens
agggttatgggccca

SEQ ID NO: 995392 - DNA, 15 bp, Homo sapiens
gggttatgggcccag

SEQ ID NO: 995393 - DNA, 15 bp, Homo sapiens
ggttatgggcccagc

SEQ ID NO: 995394 - DNA, 15 bp, Homo sapiens
gttatgggcccagca

SEQ ID NO: 995395 - DNA, 15 bp, Homo sapiens
ttatgggcccagcat

SEQ ID NO: 995396 - DNA, 15 bp, Homo sapiens
tatgggcccagcatg

SEQ ID NO: 995397 - DNA, 15 bp, Homo sapiens
atgggcccagcatgc

SEQ ID NO: 995398 - DNA, 15 bp, Homo sapiens
tgggcccagcatgct

SEQ ID NO: 995399 - DNA, 15 bp, Homo sapiens
gggcccagcatgctc

SEQ ID NO: 995400 - DNA, 15 bp, Homo sapiens
ggcccagcatgctcc

SEQ ID NO: 995401 - DNA, 15 bp, Homo sapiens
gcccagcatgctccc

SEQ ID NO: 995402 - DNA, 15 bp, Homo sapiens
cccagcatgctccca

SEQ ID NO: 995403 - DNA, 15 bp, Homo sapiens
ccagcatgctcccac

SEQ ID NO: 995404 - DNA, 15 bp, Homo sapiens
cagcatgctcccacc

SEQ ID NO: 995405 - DNA, 15 bp, Homo sapiens
agcatgctcccaccg

SEQ ID NO: 995406 - DNA, 15 bp, Homo sapiens
gcatgctcccaccgt

SEQ ID NO: 995407 - DNA, 15 bp, Homo sapiens
catgctcccaccgta

SEQ ID NO: 995408 - DNA, 15 bp, Homo sapiens
atgctcccaccgtac

SEQ ID NO: 995409 - DNA, 15 bp, Homo sapiens
tgctcccaccgtaca

SEQ ID NO: 995410 - DNA, 15 bp, Homo sapiens
gctcccaccgtacaa

SEQ ID NO: 995411 - DNA, 15 bp, Homo sapiens
ctcccaccgtacaat

SEQ ID NO: 995412 - DNA, 15 bp, Homo sapiens
tcccaccgtacaatt

SEQ ID NO: 995413 - DNA, 15 bp, Homo sapiens
cccaccgtacaattt

SEQ ID NO: 995414 - DNA, 15 bp, Homo sapiens
ccaccgtacaatttg

SEQ ID NO: 995415 - DNA, 15 bp, Homo sapiens
caccgtacaatttgc

SEQ ID NO: 995416 - DNA, 15 bp, Homo sapiens
accgtacaatttgct

SEQ ID NO: 995417 - DNA, 15 bp, Homo sapiens
ccgtacaatttgctg

SEQ ID NO: 995418 - DNA, 15 bp, Homo sapiens
cgtacaatttgctgt

SEQ ID NO: 995419 - DNA, 15 bp, Homo sapiens
gtacaatttgctgta

SEQ ID NO: 995420 - DNA, 15 bp, Homo sapiens
tacaatttgctgtaa

SEQ ID NO: 995421 - DNA, 15 bp, Homo sapiens
acaatttgctgtaag

SEQ ID NO: 995422 - DNA, 15 bp, Homo sapiens
caatttgctgtaaga

SEQ ID NO: 995423 - DNA, 15 bp, Homo sapiens
aatttgctgtaagag

SEQ ID NO: 995424 - DNA, 15 bp, Homo sapiens
atttgctgtaagagg

SEQ ID NO: 995425 - DNA, 15 bp, Homo sapiens
tttgctgtaagaggg

SEQ ID NO: 995426 - DNA, 15 bp, Homo sapiens
ttgctgtaagaggga

SEQ ID NO: 995427 - DNA, 15 bp, Homo sapiens
tgctgtaagagggac

SEQ ID NO: 995428 - DNA, 15 bp, Homo sapiens
gctgtaagagggaca

SEQ ID NO: 995429 - DNA, 15 bp, Homo sapiens
ctgtaagagggacac

SEQ ID NO: 995430 - DNA, 15 bp, Homo sapiens
tgtaagagggacaca

SEQ ID NO: 995431 - DNA, 15 bp, Homo sapiens
gtaagagggacacac

SEQ ID NO: 995432 - DNA, 15 bp, Homo sapiens
taagagggacacaca

SEQ ID NO: 995433 - DNA, 15 bp, Homo sapiens
aagagggacacacac

SEQ ID NO: 995434 - DNA, 15 bp, Homo sapiens
agagggacacacacg

SEQ ID NO: 995435 - DNA, 15 bp, Homo sapiens
gagggacacacacgg

SEQ ID NO: 995436 - DNA, 15 bp, Homo sapiens
agggacacacacggg

SEQ ID NO: 995437 - DNA, 15 bp, Homo sapiens
gggacacacacgggg

SEQ ID NO: 995438 - DNA, 15 bp, Homo sapiens
ggacacacacggggc

SEQ ID NO: 995439 - DNA, 15 bp, Homo sapiens
gacacacacggggct

SEQ ID NO: 995440 - DNA, 15 bp, Homo sapiens
acacacacggggctt

SEQ ID NO: 995441 - DNA, 15 bp, Homo sapiens
cacacacggggcttg

SEQ ID NO: 995442 - DNA, 15 bp, Homo sapiens
acacacggggcttgg

SEQ ID NO: 995443 - DNA, 15 bp, Homo sapiens
cacacggggcttgga

SEQ ID NO: 995444 - DNA, 15 bp, Homo sapiens
acacggggcttggag

SEQ ID NO: 995445 - DNA, 15 bp, Homo sapiens
cacggggcttggagt

SEQ ID NO: 995446 - DNA, 15 bp, Homo sapiens
acggggcttggagta

SEQ ID NO: 995447 - DNA, 15 bp, Homo sapiens
cggggcttggagtac

SEQ ID NO: 995448 - DNA, 15 bp, Homo sapiens
ggggcttggagtacc

SEQ ID NO: 995449 - DNA, 15 bp, Homo sapiens
gggcttggagtaccc

SEQ ID NO: 995450 - DNA, 15 bp, Homo sapiens
ggcttggagtacccc

SEQ ID NO: 995451 - DNA, 15 bp, Homo sapiens
gcttggagtacccct

SEQ ID NO: 995452 - DNA, 15 bp, Homo sapiens
cttggagtacccctg

SEQ ID NO: 995453 - DNA, 15 bp, Homo sapiens
ttggagtacccctga

SEQ ID NO: 995454 - DNA, 15 bp, Homo sapiens
tggagtacccctgag

SEQ ID NO: 995455 - DNA, 15 bp, Homo sapiens
ggagtacccctgagg

SEQ ID NO: 995456 - DNA, 15 bp, Homo sapiens
gagtacccctgaggc

SEQ ID NO: 995457 - DNA, 15 bp, Homo sapiens
agtacccctgaggct

SEQ ID NO: 995458 - DNA, 15 bp, Homo sapiens
gtacccctgaggctt

SEQ ID NO: 995459 - DNA, 15 bp, Homo sapiens
tacccctgaggcttg

SEQ ID NO: 995460 - DNA, 15 bp, Homo sapiens
acccctgaggcttgc

SEQ ID NO: 995461 - DNA, 15 bp, Homo sapiens
cccctgaggcttgcc

SEQ ID NO: 995462 - DNA, 15 bp, Homo sapiens
ccctgaggcttgcca

SEQ ID NO: 995463 - DNA, 15 bp, Homo sapiens
cctgaggcttgccaa

SEQ ID NO: 995464 - DNA, 15 bp, Homo sapiens
ctgaggcttgccaaa

SEQ ID NO: 995465 - DNA, 15 bp, Homo sapiens
tgaggcttgccaaag

SEQ ID NO: 995466 - DNA, 15 bp, Homo sapiens
gaggcttgccaaagg

SEQ ID NO: 995467 - DNA, 15 bp, Homo sapiens
aggcttgccaaaggt

SEQ ID NO: 995468 - DNA, 15 bp, Homo sapiens
ggcttgccaaaggtt

SEQ ID NO: 995469 - DNA, 15 bp, Homo sapiens
gcttgccaaaggttg

SEQ ID NO: 995470 - DNA, 15 bp, Homo sapiens
cttgccaaaggttgg

SEQ ID NO: 995471 - DNA, 15 bp, Homo sapiens
ttgccaaaggttggg

SEQ ID NO: 995472 - DNA, 15 bp, Homo sapiens
tgccaaaggttgggg

SEQ ID NO: 995473 - DNA, 15 bp, Homo sapiens
gccaaaggttgggga

SEQ ID NO: 995474 - DNA, 15 bp, Homo sapiens
ccaaaggttggggag

SEQ ID NO: 995475 - DNA, 15 bp, Homo sapiens
caaaggttggggagg

SEQ ID NO: 995476 - DNA, 15 bp, Homo sapiens
aaaggttggggaggc

SEQ ID NO: 995477 - DNA, 15 bp, Homo sapiens
aaggttggggaggca

SEQ ID NO: 995478 - DNA, 15 bp, Homo sapiens
aggttggggaggcag

SEQ ID NO: 995479 - DNA, 15 bp, Homo sapiens
ggttggggaggcaga

SEQ ID NO: 995480 - DNA, 15 bp, Homo sapiens
gttggggaggcagaa

SEQ ID NO: 995481 - DNA, 15 bp, Homo sapiens
ttggggaggcagaat

SEQ ID NO: 995482 - DNA, 15 bp, Homo sapiens
tggggaggcagaatt

SEQ ID NO: 995483 - DNA, 15 bp, Homo sapiens
ggggaggcagaattg

SEQ ID NO: 995484 - DNA, 15 bp, Homo sapiens
gggaggcagaattgt

SEQ ID NO: 995485 - DNA, 15 bp, Homo sapiens
ggaggcagaattgtg

SEQ ID NO: 995486 - DNA, 15 bp, Homo sapiens
gaggcagaattgtgc

SEQ ID NO: 995487 - DNA, 15 bp, Homo sapiens
aggcagaattgtgct

SEQ ID NO: 995488 - DNA, 15 bp, Homo sapiens
ggcagaattgtgctg

SEQ ID NO: 995489 - DNA, 15 bp, Homo sapiens
gcagaattgtgctgc

SEQ ID NO: 995490 - DNA, 15 bp, Homo sapiens
cagaattgtgctgcg

SEQ ID NO: 995491 - DNA, 15 bp, Homo sapiens
agaattgtgctgcgg

SEQ ID NO: 995492 - DNA, 15 bp, Homo sapiens
gaattgtgctgcggg

SEQ ID NO: 995493 - DNA, 15 bp, Homo sapiens
aattgtgctgcgggg

SEQ ID NO: 995494 - DNA, 15 bp, Homo sapiens
attgtgctgcggggg

SEQ ID NO: 995495 - DNA, 15 bp, Homo sapiens
ttgtgctgcgggggg

SEQ ID NO: 995496 - DNA, 15 bp, Homo sapiens
tgtgctgcggggggt

SEQ ID NO: 995497 - DNA, 15 bp, Homo sapiens
gtgctgcggggggtg

SEQ ID NO: 995498 - DNA, 15 bp, Homo sapiens
tgctgcggggggtga

SEQ ID NO: 995499 - DNA, 15 bp, Homo sapiens
gctgcggggggtgag

SEQ ID NO: 995500 - DNA, 15 bp, Homo sapiens
ctgcggggggtgagg

SEQ ID NO: 995501 - DNA, 15 bp, Homo sapiens
tgcggggggtgaggg

SEQ ID NO: 995502 - DNA, 15 bp, Homo sapiens
gcggggggtgagggg

SEQ ID NO: 995503 - DNA, 15 bp, Homo sapiens
cggggggtgaggggg

SEQ ID NO: 995504 - DNA, 15 bp, Homo sapiens
ggggggtgagggggg

SEQ ID NO: 995505 - DNA, 15 bp, Homo sapiens
gggggtgagggggga

SEQ ID NO: 995506 - DNA, 15 bp, Homo sapiens
ggggtgaggggggaa

SEQ ID NO: 995507 - DNA, 15 bp, Homo sapiens
gggtgaggggggaag

SEQ ID NO: 995508 - DNA, 15 bp, Homo sapiens
ggtgaggggggaagg

SEQ ID NO: 995509 - DNA, 15 bp, Homo sapiens
gtgaggggggaaggg

SEQ ID NO: 995510 - DNA, 15 bp, Homo sapiens
tgaggggggaaggga

SEQ ID NO: 995511 - DNA, 15 bp, Homo sapiens
gaggggggaagggac

SEQ ID NO: 995512 - DNA, 15 bp, Homo sapiens
aggggggaagggaca

SEQ ID NO: 995513 - DNA, 15 bp, Homo sapiens
ggggggaagggacag

SEQ ID NO: 995514 - DNA, 15 bp, Homo sapiens
gggggaagggacagg

SEQ ID NO: 995515 - DNA, 15 bp, Homo sapiens
ggggaagggacagga

SEQ ID NO: 995516 - DNA, 15 bp, Homo sapiens
gggaagggacaggag

SEQ ID NO: 995517 - DNA, 15 bp, Homo sapiens
ggaagggacaggagc

SEQ ID NO: 995518 - DNA, 15 bp, Homo sapiens
gaagggacaggagcc

SEQ ID NO: 995519 - DNA, 15 bp, Homo sapiens
aagggacaggagcca

SEQ ID NO: 995520 - DNA, 15 bp, Homo sapiens
agggacaggagccag

SEQ ID NO: 995521 - DNA, 15 bp, Homo sapiens
gggacaggagccagc

SEQ ID NO: 995522 - DNA, 15 bp, Homo sapiens
ggacaggagccagcc

SEQ ID NO: 995523 - DNA, 15 bp, Homo sapiens
gacaggagccagcca

SEQ ID NO: 995524 - DNA, 15 bp, Homo sapiens
acaggagccagccag

SEQ ID NO: 995525 - DNA, 15 bp, Homo sapiens
caggagccagccagg

SEQ ID NO: 995526 - DNA, 15 bp, Homo sapiens
acatgatcagaaatg

SEQ ID NO: 995527 - DNA, 15 bp, Homo sapiens
catgatcagaaatgc

SEQ ID NO: 995528 - DNA, 15 bp, Homo sapiens
atgatcagaaatgca

SEQ ID NO: 995529 - DNA, 15 bp, Homo sapiens
tgatcagaaatgcat

SEQ ID NO: 995530 - DNA, 15 bp, Homo sapiens
gatcagaaatgcatc

SEQ ID NO: 995531 - DNA, 15 bp, Homo sapiens
atcagaaatgcatcc

SEQ ID NO: 995532 - DNA, 15 bp, Homo sapiens
tcagaaatgcatcct

SEQ ID NO: 995533 - DNA, 15 bp, Homo sapiens
cagaaatgcatcctg

SEQ ID NO: 995534 - DNA, 15 bp, Homo sapiens
agaaatgcatcctgt

SEQ ID NO: 995535 - DNA, 15 bp, Homo sapiens
gaaatgcatcctgtt

SEQ ID NO: 995536 - DNA, 15 bp, Homo sapiens
aaatgcatcctgttg

SEQ ID NO: 995537 - DNA, 15 bp, Homo sapiens
aatgcatcctgttga

SEQ ID NO: 995538 - DNA, 15 bp, Homo sapiens
atgcatcctgttgag

SEQ ID NO: 995539 - DNA, 15 bp, Homo sapiens
tgcatcctgttgaga

SEQ ID NO: 995540 - DNA, 15 bp, Homo sapiens
gcatcctgttgagac

SEQ ID NO: 995541 - DNA, 15 bp, Homo sapiens
catcctgttgagacc

SEQ ID NO: 995542 - DNA, 15 bp, Homo sapiens
atcctgttgagaccc

SEQ ID NO: 995543 - DNA, 15 bp, Homo sapiens
tcctgttgagaccca

SEQ ID NO: 995544 - DNA, 15 bp, Homo sapiens
cctgttgagacccag

SEQ ID NO: 995545 - DNA, 15 bp, Homo sapiens
ctgttgagacccagc

SEQ ID NO: 995546 - DNA, 15 bp, Homo sapiens
tgttgagacccagcc

SEQ ID NO: 995547 - DNA, 15 bp, Homo sapiens
gttgagacccagcct

SEQ ID NO: 995548 - DNA, 15 bp, Homo sapiens
ttgagacccagcctg

SEQ ID NO: 995549 - DNA, 15 bp, Homo sapiens
tgagacccagcctgg

SEQ ID NO: 995550 - DNA, 15 bp, Homo sapiens
gagacccagcctgga

SEQ ID NO: 995551 - DNA, 15 bp, Homo sapiens
agacccagcctggac

SEQ ID NO: 995552 - DNA, 15 bp, Homo sapiens
gacccagcctggaca

SEQ ID NO: 995553 - DNA, 15 bp, Homo sapiens
acccagcctggacaa

SEQ ID NO: 995554 - DNA, 15 bp, Homo sapiens
cccagcctggacaac

SEQ ID NO: 995555 - DNA, 15 bp, Homo sapiens
ccagcctggacaaca

SEQ ID NO: 995556 - DNA, 15 bp, Homo sapiens
cagcctggacaacac

SEQ ID NO: 995557 - DNA, 15 bp, Homo sapiens
agcctggacaacaca

SEQ ID NO: 995558 - DNA, 15 bp, Homo sapiens
gcctggacaacacag

SEQ ID NO: 995559 - DNA, 15 bp, Homo sapiens
cctggacaacacagt

SEQ ID NO: 995560 - DNA, 15 bp, Homo sapiens
ctggacaacacagtg

SEQ ID NO: 995561 - DNA, 15 bp, Homo sapiens
tggacaacacagtga

SEQ ID NO: 995562 - DNA, 15 bp, Homo sapiens
ggacaacacagtgag

SEQ ID NO: 995563 - DNA, 15 bp, Homo sapiens
gacaacacagtgaga

SEQ ID NO: 995564 - DNA, 15 bp, Homo sapiens
acaacacagtgagac

SEQ ID NO: 995565 - DNA, 15 bp, Homo sapiens
caacacagtgagact

SEQ ID NO: 995566 - DNA, 15 bp, Homo sapiens
aacacagtgagactc

SEQ ID NO: 995567 - DNA, 15 bp, Homo sapiens
acacagtgagactcc

SEQ ID NO: 995568 - DNA, 15 bp, Homo sapiens
cacagtgagactcca

SEQ ID NO: 995569 - DNA, 15 bp, Homo sapiens
acagtgagactccat

SEQ ID NO: 995570 - DNA, 15 bp, Homo sapiens
cagtgagactccata

SEQ ID NO: 995571 - DNA, 15 bp, Homo sapiens
agtgagactccatat

SEQ ID NO: 995572 - DNA, 15 bp, Homo sapiens
gtgagactccatatc

SEQ ID NO: 995573 - DNA, 15 bp, Homo sapiens
tgagactccatatca

SEQ ID NO: 995574 - DNA, 15 bp, Homo sapiens
gagactccatatcac

SEQ ID NO: 995575 - DNA, 15 bp, Homo sapiens
agactccatatcact

SEQ ID NO: 995576 - DNA, 15 bp, Homo sapiens
gactccatatcacta

SEQ ID NO: 995577 - DNA, 15 bp, Homo sapiens
actccatatcactaa

SEQ ID NO: 995578 - DNA, 15 bp, Homo sapiens
ctccatatcactaaa

SEQ ID NO: 995579 - DNA, 15 bp, Homo sapiens
tccatatcactaaaa

SEQ ID NO: 995580 - DNA, 15 bp, Homo sapiens
ccatatcactaaaaa

SEQ ID NO: 995581 - DNA, 15 bp, Homo sapiens
catatcactaaaaaa

SEQ ID NO: 995582 - DNA, 15 bp, Homo sapiens
atatcactaaaaaaa

SEQ ID NO: 995583 - DNA, 15 bp, Homo sapiens
tatcactaaaaaaaa

SEQ ID NO: 995584 - DNA, 15 bp, Homo sapiens
atcactaaaaaaaaa

SEQ ID NO: 995585 - DNA, 15 bp, Homo sapiens
tcactaaaaaaaaaa

SEQ ID NO: 995586 - DNA, 15 bp, Homo sapiens
cactaaaaaaaaaaa

SEQ ID NO: 995587 - DNA, 15 bp, Homo sapiens
actaaaaaaaaaaaa

SEQ ID NO: 995588 - DNA, 15 bp, Homo sapiens
ctaaaaaaaaaaaaa

SEQ ID NO: 995589 - DNA, 15 bp, Homo sapiens
taaaaaaaaaaaaaa

SEQ ID NO: 995590 - DNA, 15 bp, Homo sapiens
aaaaaaaaaaaaagg

SEQ ID NO: 995591 - DNA, 15 bp, Homo sapiens
aaaaaaaaaaaagga

SEQ ID NO: 995592 - DNA, 15 bp, Homo sapiens
aaaaaaaaaaaggaa

SEQ ID NO: 995593 - DNA, 15 bp, Homo sapiens
aaaaaaaaaaggaaa

SEQ ID NO: 995594 - DNA, 15 bp, Homo sapiens
aaaaaaaaaggaaaa

SEQ ID NO: 995595 - DNA, 15 bp, Homo sapiens
aaaaaaaaggaaaag

SEQ ID NO: 995596 - DNA, 15 bp, Homo sapiens
aaaaaaaggaaaaga

SEQ ID NO: 995597 - DNA, 15 bp, Homo sapiens
aaaaaaggaaaagaa

SEQ ID NO: 995598 - DNA, 15 bp, Homo sapiens
aaaaaggaaaagaag

SEQ ID NO: 995599 - DNA, 15 bp, Homo sapiens
aaaaggaaaagaaga

SEQ ID NO: 995600 - DNA, 15 bp, Homo sapiens
aaaggaaaagaagaa

SEQ ID NO: 995601 - DNA, 15 bp, Homo sapiens
aaggaaaagaagaaa

SEQ ID NO: 995602 - DNA, 15 bp, Homo sapiens
aggaaaagaagaaag

SEQ ID NO: 995603 - DNA, 15 bp, Homo sapiens
ggaaaagaagaaaga

SEQ ID NO: 995604 - DNA, 15 bp, Homo sapiens
gaaaagaagaaagaa

SEQ ID NO: 995605 - DNA, 15 bp, Homo sapiens
aaaagaagaaagaaa

SEQ ID NO: 995606 - DNA, 15 bp, Homo sapiens
aaagaagaaagaaat

SEQ ID NO: 995607 - DNA, 15 bp, Homo sapiens
aagaagaaagaaatg

SEQ ID NO: 995608 - DNA, 15 bp, Homo sapiens
agaagaaagaaatgc

SEQ ID NO: 995609 - DNA, 15 bp, Homo sapiens
gaagaaagaaatgca

SEQ ID NO: 995610 - DNA, 15 bp, Homo sapiens
aagaaagaaatgcat

SEQ ID NO: 995611 - DNA, 15 bp, Homo sapiens
agaaagaaatgcatt

SEQ ID NO: 995612 - DNA, 15 bp, Homo sapiens
gaaagaaatgcattc

SEQ ID NO: 995613 - DNA, 15 bp, Homo sapiens
aaagaaatgcattct

SEQ ID NO: 995614 - DNA, 15 bp, Homo sapiens
aagaaatgcattcta

SEQ ID NO: 995615 - DNA, 15 bp, Homo sapiens
agaaatgcattctag

SEQ ID NO: 995616 - DNA, 15 bp, Homo sapiens
gaaatgcattctaga

SEQ ID NO: 995617 - DNA, 15 bp, Homo sapiens
aaatgcattctagaa

SEQ ID NO: 995618 - DNA, 15 bp, Homo sapiens
aatgcattctagaaa

SEQ ID NO: 995619 - DNA, 15 bp, Homo sapiens
atgcattctagaaag

SEQ ID NO: 995620 - DNA, 15 bp, Homo sapiens
tgcattctagaaaga

SEQ ID NO: 995621 - DNA, 15 bp, Homo sapiens
gcattctagaaagat

SEQ ID NO: 995622 - DNA, 15 bp, Homo sapiens
cattctagaaagatc

SEQ ID NO: 995623 - DNA, 15 bp, Homo sapiens
attctagaaagatct

SEQ ID NO: 995624 - DNA, 15 bp, Homo sapiens
ttctagaaagatctc

SEQ ID NO: 995625 - DNA, 15 bp, Homo sapiens
tctagaaagatctct

SEQ ID NO: 995626 - DNA, 15 bp, Homo sapiens
ctagaaagatctctt

SEQ ID NO: 995627 - DNA, 15 bp, Homo sapiens
tagaaagatctcttt

SEQ ID NO: 995628 - DNA, 15 bp, Homo sapiens
agaaagatctctttg

SEQ ID NO: 995629 - DNA, 15 bp, Homo sapiens
gaaagatctctttgg

SEQ ID NO: 995630 - DNA, 15 bp, Homo sapiens
aaagatctctttgga

SEQ ID NO: 995631 - DNA, 15 bp, Homo sapiens
aagatctctttggat

SEQ ID NO: 995632 - DNA, 15 bp, Homo sapiens
agatctctttggatc

SEQ ID NO: 995633 - DNA, 15 bp, Homo sapiens
gatctctttggatct

SEQ ID NO: 995634 - DNA, 15 bp, Homo sapiens
atctctttggatctg

SEQ ID NO: 995635 - DNA, 15 bp, Homo sapiens
tctctttggatctgg

SEQ ID NO: 995636 - DNA, 15 bp, Homo sapiens
ctctttggatctggg

SEQ ID NO: 995637 - DNA, 15 bp, Homo sapiens
tctttggatctgggg

SEQ ID NO: 995638 - DNA, 15 bp, Homo sapiens
ctttggatctggggg

SEQ ID NO: 995639 - DNA, 15 bp, Homo sapiens
tttggatctgggggt

SEQ ID NO: 995640 - DNA, 15 bp, Homo sapiens
ttggatctgggggtg

SEQ ID NO: 995641 - DNA, 15 bp, Homo sapiens
tggatctgggggtgg

SEQ ID NO: 995642 - DNA, 15 bp, Homo sapiens
ggatctgggggtggt

SEQ ID NO: 995643 - DNA, 15 bp, Homo sapiens
gatctgggggtggtg

SEQ ID NO: 995644 - DNA, 15 bp, Homo sapiens
atctgggggtggtgg

SEQ ID NO: 995645 - DNA, 15 bp, Homo sapiens
tctgggggtggtggg

SEQ ID NO: 995646 - DNA, 15 bp, Homo sapiens
ctgggggtggtgggg

SEQ ID NO: 995647 - DNA, 15 bp, Homo sapiens
tgggggtggtggggg

SEQ ID NO: 995648 - DNA, 15 bp, Homo sapiens
gggggtggtgggggc

SEQ ID NO: 995649 - DNA, 15 bp, Homo sapiens
ggggtggtgggggca

SEQ ID NO: 995650 - DNA, 15 bp, Homo sapiens
gggtggtgggggcag

SEQ ID NO: 995651 - DNA, 15 bp, Homo sapiens
ggtggtgggggcagc

SEQ ID NO: 995652 - DNA, 15 bp, Homo sapiens
gtggtgggggcagcc

SEQ ID NO: 995653 - DNA, 15 bp, Homo sapiens
tggtgggggcagcct

SEQ ID NO: 995654 - DNA, 15 bp, Homo sapiens
ggtgggggcagcctg

SEQ ID NO: 995655 - DNA, 15 bp, Homo sapiens
gtgggggcagcctgt

SEQ ID NO: 995656 - DNA, 15 bp, Homo sapiens
tgggggcagcctgtg

SEQ ID NO: 995657 - DNA, 15 bp, Homo sapiens
gggggcagcctgtgg

SEQ ID NO: 995658 - DNA, 15 bp, Homo sapiens
ggggcagcctgtggc

SEQ ID NO: 995659 - DNA, 15 bp, Homo sapiens
gggcagcctgtggcg

SEQ ID NO: 995660 - DNA, 15 bp, Homo sapiens
ggcagcctgtggcgg

SEQ ID NO: 995661 - DNA, 15 bp, Homo sapiens
gcagcctgtggcggt

SEQ ID NO: 995662 - DNA, 15 bp, Homo sapiens
cagcctgtggcggtt

SEQ ID NO: 995663 - DNA, 15 bp, Homo sapiens
agcctgtggcggtta

SEQ ID NO: 995664 - DNA, 15 bp, Homo sapiens
gcctgtggcggttag

SEQ ID NO: 995665 - DNA, 15 bp, Homo sapiens
cctgtggcggttagt

SEQ ID NO: 995666 - DNA, 15 bp, Homo sapiens
ctgtggcggttagtt

SEQ ID NO: 995667 - DNA, 15 bp, Homo sapiens
tgtggcggttagttg

SEQ ID NO: 995668 - DNA, 15 bp, Homo sapiens
gtggcggttagttgg

SEQ ID NO: 995669 - DNA, 15 bp, Homo sapiens
tggcggttagttgga

SEQ ID NO: 995670 - DNA, 15 bp, Homo sapiens
ggcggttagttggag

SEQ ID NO: 995671 - DNA, 15 bp, Homo sapiens
gcggttagttggagt

SEQ ID NO: 995672 - DNA, 15 bp, Homo sapiens
cggttagttggagtg

SEQ ID NO: 995673 - DNA, 15 bp, Homo sapiens
ggttagttggagtgg

SEQ ID NO: 995674 - DNA, 15 bp, Homo sapiens
gttagttggagtggg

SEQ ID NO: 995675 - DNA, 15 bp, Homo sapiens
ttagttggagtggga

SEQ ID NO: 995676 - DNA, 15 bp, Homo sapiens
tagttggagtgggaa

SEQ ID NO: 995677 - DNA, 15 bp, Homo sapiens
agttggagtgggaag

SEQ ID NO: 995678 - DNA, 15 bp, Homo sapiens
gttggagtgggaagg

SEQ ID NO: 995679 - DNA, 15 bp, Homo sapiens
ttggagtgggaaggg

SEQ ID NO: 995680 - DNA, 15 bp, Homo sapiens
tggagtgggaagggg

SEQ ID NO: 995681 - DNA, 15 bp, Homo sapiens
ggagtgggaagggga

SEQ ID NO: 995682 - DNA, 15 bp, Homo sapiens
gagtgggaaggggac

SEQ ID NO: 995683 - DNA, 15 bp, Homo sapiens
agtgggaaggggacg

SEQ ID NO: 995684 - DNA, 15 bp, Homo sapiens
gtgggaaggggacga

SEQ ID NO: 995685 - DNA, 15 bp, Homo sapiens
tgggaaggggacgag

SEQ ID NO: 995686 - DNA, 15 bp, Homo sapiens
gggaaggggacgagc

SEQ ID NO: 995687 - DNA, 15 bp, Homo sapiens
ggaaggggacgagca

SEQ ID NO: 995688 - DNA, 15 bp, Homo sapiens
gaaggggacgagcaa

SEQ ID NO: 995689 - DNA, 15 bp, Homo sapiens
aaggggacgagcaac

SEQ ID NO: 995690 - DNA, 15 bp, Homo sapiens
aggggacgagcaacg

SEQ ID NO: 995691 - DNA, 15 bp, Homo sapiens
ggggacgagcaacgt

SEQ ID NO: 995692 - DNA, 15 bp, Homo sapiens
gggacgagcaacgtt

SEQ ID NO: 995693 - DNA, 15 bp, Homo sapiens
ggacgagcaacgtta

SEQ ID NO: 995694 - DNA, 15 bp, Homo sapiens
gacgagcaacgttac

SEQ ID NO: 995695 - DNA, 15 bp, Homo sapiens
acgagcaacgttact

SEQ ID NO: 995696 - DNA, 15 bp, Homo sapiens
cgagcaacgttactc

SEQ ID NO: 995697 - DNA, 15 bp, Homo sapiens
gagcaacgttactca

SEQ ID NO: 995698 - DNA, 15 bp, Homo sapiens
agcaacgttactcaa

SEQ ID NO: 995699 - DNA, 15 bp, Homo sapiens
gcaacgttactcaag

SEQ ID NO: 995700 - DNA, 15 bp, Homo sapiens
caacgttactcaagg

SEQ ID NO: 995701 - DNA, 15 bp, Homo sapiens
aacgttactcaaggc

SEQ ID NO: 995702 - DNA, 15 bp, Homo sapiens
acgttactcaaggcc

SEQ ID NO: 995703 - DNA, 15 bp, Homo sapiens
cgttactcaaggccc

SEQ ID NO: 995704 - DNA, 15 bp, Homo sapiens
gttactcaaggccct

SEQ ID NO: 995705 - DNA, 15 bp, Homo sapiens
ttactcaaggccctg

SEQ ID NO: 995706 - DNA, 15 bp, Homo sapiens
tactcaaggccctga

SEQ ID NO: 995707 - DNA, 15 bp, Homo sapiens
actcaaggccctgag

SEQ ID NO: 995708 - DNA, 15 bp, Homo sapiens
ctcaaggccctgagc

SEQ ID NO: 995709 - DNA, 15 bp, Homo sapiens
tcaaggccctgagcg

SEQ ID NO: 995710 - DNA, 15 bp, Homo sapiens
caaggccctgagcgg

SEQ ID NO: 995711 - DNA, 15 bp, Homo sapiens
aaggccctgagcggg

SEQ ID NO: 995712 - DNA, 15 bp, Homo sapiens
aggccctgagcgggg

SEQ ID NO: 995713 - DNA, 15 bp, Homo sapiens
ggccctgagcggggc

SEQ ID NO: 995714 - DNA, 15 bp, Homo sapiens
gccctgagcggggca

SEQ ID NO: 995715 - DNA, 15 bp, Homo sapiens
ccctgagcggggcag

SEQ ID NO: 995716 - DNA, 15 bp, Homo sapiens
cctgagcggggcagg

SEQ ID NO: 995717 - DNA, 15 bp, Homo sapiens
ctgagcggggcaggg

SEQ ID NO: 995718 - DNA, 15 bp, Homo sapiens
tgagcggggcagggc

SEQ ID NO: 995719 - DNA, 15 bp, Homo sapiens
gagcggggcagggct

SEQ ID NO: 995720 - DNA, 15 bp, Homo sapiens
agcggggcagggctg

SEQ ID NO: 995721 - DNA, 15 bp, Homo sapiens
gcggggcagggctga

SEQ ID NO: 995722 - DNA, 15 bp, Homo sapiens
cggggcagggctgat

SEQ ID NO: 995723 - DNA, 15 bp, Homo sapiens
ggggcagggctgatg

SEQ ID NO: 995724 - DNA, 15 bp, Homo sapiens
gggcagggctgatgt

SEQ ID NO: 995725 - DNA, 15 bp, Homo sapiens
ggcagggctgatgtg

SEQ ID NO: 995726 - DNA, 15 bp, Homo sapiens
gcagggctgatgtgg

SEQ ID NO: 995727 - DNA, 15 bp, Homo sapiens
cagggctgatgtggg

SEQ ID NO: 995728 - DNA, 15 bp, Homo sapiens
agggctgatgtgggt

SEQ ID NO: 995729 - DNA, 15 bp, Homo sapiens
gggctgatgtgggtc

SEQ ID NO: 995730 - DNA, 15 bp, Homo sapiens
ggctgatgtgggtcc

SEQ ID NO: 995731 - DNA, 15 bp, Homo sapiens
gctgatgtgggtcca

SEQ ID NO: 995732 - DNA, 15 bp, Homo sapiens
ctgatgtgggtccat

SEQ ID NO: 995733 - DNA, 15 bp, Homo sapiens
tgatgtgggtccatc

SEQ ID NO: 995734 - DNA, 15 bp, Homo sapiens
gatgtgggtccatcc

SEQ ID NO: 995735 - DNA, 15 bp, Homo sapiens
atgtgggtccatccc

SEQ ID NO: 995736 - DNA, 15 bp, Homo sapiens
tgtgggtccatccca

SEQ ID NO: 995737 - DNA, 15 bp, Homo sapiens
gtgggtccatcccac

SEQ ID NO: 995738 - DNA, 15 bp, Homo sapiens
tgggtccatcccacc

SEQ ID NO: 995739 - DNA, 15 bp, Homo sapiens
gggtccatcccaccc

SEQ ID NO: 995740 - DNA, 15 bp, Homo sapiens
ggtccatcccacccc

SEQ ID NO: 995741 - DNA, 15 bp, Homo sapiens
gtccatcccacccca

SEQ ID NO: 995742 - DNA, 15 bp, Homo sapiens
tccatcccaccccat

SEQ ID NO: 995743 - DNA, 15 bp, Homo sapiens
ccatcccaccccatc

SEQ ID NO: 995744 - DNA, 15 bp, Homo sapiens
catcccaccccatcc

SEQ ID NO: 995745 - DNA, 15 bp, Homo sapiens
atcccaccccatcca

SEQ ID NO: 995746 - DNA, 15 bp, Homo sapiens
tcccaccccatccag

SEQ ID NO: 995747 - DNA, 15 bp, Homo sapiens
cccaccccatccaga

SEQ ID NO: 995748 - DNA, 15 bp, Homo sapiens
ccaccccatccagac

SEQ ID NO: 995749 - DNA, 15 bp, Homo sapiens
caccccatccagacg

SEQ ID NO: 995750 - DNA, 15 bp, Homo sapiens
accccatccagacgt

SEQ ID NO: 995751 - DNA, 15 bp, Homo sapiens
ccccatccagacgtg

SEQ ID NO: 995752 - DNA, 15 bp, Homo sapiens
cccatccagacgtgc

SEQ ID NO: 995753 - DNA, 15 bp, Homo sapiens
ccatccagacgtgcc

SEQ ID NO: 995754 - DNA, 15 bp, Homo sapiens
catccagacgtgcca

SEQ ID NO: 995755 - DNA, 15 bp, Homo sapiens
atccagacgtgccag

SEQ ID NO: 995756 - DNA, 15 bp, Homo sapiens
tccagacgtgccaga

SEQ ID NO: 995757 - DNA, 15 bp, Homo sapiens
ccagacgtgccagac

SEQ ID NO: 995758 - DNA, 15 bp, Homo sapiens
cagacgtgccagacg

SEQ ID NO: 995759 - DNA, 15 bp, Homo sapiens
agacgtgccagacgc

SEQ ID NO: 995760 - DNA, 15 bp, Homo sapiens
gacgtgccagacgca

SEQ ID NO: 995761 - DNA, 15 bp, Homo sapiens
acgtgccagacgcac

SEQ ID NO: 995762 - DNA, 15 bp, Homo sapiens
cgtgccagacgcacc

SEQ ID NO: 995763 - DNA, 15 bp, Homo sapiens
gtgccagacgcacct

SEQ ID NO: 995764 - DNA, 15 bp, Homo sapiens
tgccagacgcacctg

SEQ ID NO: 995765 - DNA, 15 bp, Homo sapiens
gccagacgcacctgc

SEQ ID NO: 995766 - DNA, 15 bp, Homo sapiens
ccagacgcacctgcg

SEQ ID NO: 995767 - DNA, 15 bp, Homo sapiens
cagacgcacctgcgg

SEQ ID NO: 995768 - DNA, 15 bp, Homo sapiens
agacgcacctgcggc

SEQ ID NO: 995769 - DNA, 15 bp, Homo sapiens
gacgcacctgcggcc

SEQ ID NO: 995770 - DNA, 15 bp, Homo sapiens
acgcacctgcggccc

SEQ ID NO: 995771 - DNA, 15 bp, Homo sapiens
cgcacctgcggcccc

SEQ ID NO: 995772 - DNA, 15 bp, Homo sapiens
gcacctgcggccccc

SEQ ID NO: 995773 - DNA, 15 bp, Homo sapiens
cacctgcggccccca

SEQ ID NO: 995774 - DNA, 15 bp, Homo sapiens
acctgcggcccccaa

SEQ ID NO: 995775 - DNA, 15 bp, Homo sapiens
cctgcggcccccaag

SEQ ID NO: 995776 - DNA, 15 bp, Homo sapiens
ctgcggcccccaaga

SEQ ID NO: 995777 - DNA, 15 bp, Homo sapiens
tgcggcccccaagat

SEQ ID NO: 995778 - DNA, 15 bp, Homo sapiens
gcggcccccaagatc

SEQ ID NO: 995779 - DNA, 15 bp, Homo sapiens
cggcccccaagatca

SEQ ID NO: 995780 - DNA, 15 bp, Homo sapiens
ggcccccaagatcag

SEQ ID NO: 995781 - DNA, 15 bp, Homo sapiens
gcccccaagatcagc

SEQ ID NO: 995782 - DNA, 15 bp, Homo sapiens
cccccaagatcagca

SEQ ID NO: 995783 - DNA, 15 bp, Homo sapiens
ccccaagatcagcaa

SEQ ID NO: 995784 - DNA, 15 bp, Homo sapiens
cccaagatcagcaac

SEQ ID NO: 995785 - DNA, 15 bp, Homo sapiens
ccaagatcagcaacg

SEQ ID NO: 995786 - DNA, 15 bp, Homo sapiens
caagatcagcaacgt

SEQ ID NO: 995787 - DNA, 15 bp, Homo sapiens
aagatcagcaacgtg

SEQ ID NO: 995788 - DNA, 15 bp, Homo sapiens
agatcagcaacgtgg

SEQ ID NO: 995789 - DNA, 15 bp, Homo sapiens
gatcagcaacgtggg

SEQ ID NO: 995790 - DNA, 15 bp, Homo sapiens
atcagcaacgtggga

SEQ ID NO: 995791 - DNA, 15 bp, Homo sapiens
tcagcaacgtgggag

SEQ ID NO: 995792 - DNA, 15 bp, Homo sapiens
cagcaacgtgggaga

SEQ ID NO: 995793 - DNA, 15 bp, Homo sapiens
agcaacgtgggagag

SEQ ID NO: 995794 - DNA, 15 bp, Homo sapiens
gcaacgtgggagagg

SEQ ID NO: 995795 - DNA, 15 bp, Homo sapiens
caacgtgggagagga

SEQ ID NO: 995796 - DNA, 15 bp, Homo sapiens
aacgtgggagaggac

SEQ ID NO: 995797 - DNA, 15 bp, Homo sapiens
acgtgggagaggact

SEQ ID NO: 995798 - DNA, 15 bp, Homo sapiens
cgtgggagaggactc

SEQ ID NO: 995799 - DNA, 15 bp, Homo sapiens
gtgggagaggactcc

SEQ ID NO: 995800 - DNA, 15 bp, Homo sapiens
tgggagaggactcct

SEQ ID NO: 995801 - DNA, 15 bp, Homo sapiens
gggagaggactcctg

SEQ ID NO: 995802 - DNA, 15 bp, Homo sapiens
ggagaggactcctgc

SEQ ID NO: 995803 - DNA, 15 bp, Homo sapiens
gagaggactcctgca

SEQ ID NO: 995804 - DNA, 15 bp, Homo sapiens
agaggactcctgcac

SEQ ID NO: 995805 - DNA, 15 bp, Homo sapiens
gaggactcctgcaca

SEQ ID NO: 995806 - DNA, 15 bp, Homo sapiens
aggactcctgcacag

SEQ ID NO: 995807 - DNA, 15 bp, Homo sapiens
ggactcctgcacagt

SEQ ID NO: 995808 - DNA, 15 bp, Homo sapiens
gactcctgcacagta

SEQ ID NO: 995809 - DNA, 15 bp, Homo sapiens
actcctgcacagtac

SEQ ID NO: 995810 - DNA, 15 bp, Homo sapiens
ctcctgcacagtaca

SEQ ID NO: 995811 - DNA, 15 bp, Homo sapiens
tcctgcacagtacag

SEQ ID NO: 995812 - DNA, 15 bp, Homo sapiens
cctgcacagtacagt

SEQ ID NO: 995813 - DNA, 15 bp, Homo sapiens
ctgcacagtacagtg

SEQ ID NO: 995814 - DNA, 15 bp, Homo sapiens
tgcacagtacagtgg

SEQ ID NO: 995815 - DNA, 15 bp, Homo sapiens
gcacagtacagtggg

SEQ ID NO: 995816 - DNA, 15 bp, Homo sapiens
cacagtacagtggga

SEQ ID NO: 995817 - DNA, 15 bp, Homo sapiens
acagtacagtgggag

SEQ ID NO: 995818 - DNA, 15 bp, Homo sapiens
cagtacagtgggagc

SEQ ID NO: 995819 - DNA, 15 bp, Homo sapiens
agtacagtgggagcc

SEQ ID NO: 995820 - DNA, 15 bp, Homo sapiens
gtacagtgggagccg

SEQ ID NO: 995821 - DNA, 15 bp, Homo sapiens
tacagtgggagccgc

SEQ ID NO: 995822 - DNA, 15 bp, Homo sapiens
acagtgggagccgcc

SEQ ID NO: 995823 - DNA, 15 bp, Homo sapiens
cagtgggagccgcct

SEQ ID NO: 995824 - DNA, 15 bp, Homo sapiens
agtgggagccgcctg

SEQ ID NO: 995825 - DNA, 15 bp, Homo sapiens
gtgggagccgcctgc

SEQ ID NO: 995826 - DNA, 15 bp, Homo sapiens
tgggagccgcctgcc

SEQ ID NO: 995827 - DNA, 15 bp, Homo sapiens
gggagccgcctgcct

SEQ ID NO: 995828 - DNA, 15 bp, Homo sapiens
ggagccgcctgccta

SEQ ID NO: 995829 - DNA, 15 bp, Homo sapiens
gagccgcctgcctac

SEQ ID NO: 995830 - DNA, 15 bp, Homo sapiens
agccgcctgcctacg

SEQ ID NO: 995831 - DNA, 15 bp, Homo sapiens
gccgcctgcctacga

SEQ ID NO: 995832 - DNA, 15 bp, Homo sapiens
ccgcctgcctacgat

SEQ ID NO: 995833 - DNA, 15 bp, Homo sapiens
cgcctgcctacgatg

SEQ ID NO: 995834 - DNA, 15 bp, Homo sapiens
gcctgcctacgatgg

SEQ ID NO: 995835 - DNA, 15 bp, Homo sapiens
cctgcctacgatggc

SEQ ID NO: 995836 - DNA, 15 bp, Homo sapiens
ctgcctacgatggcg

SEQ ID NO: 995837 - DNA, 15 bp, Homo sapiens
tgcctacgatggcgg

SEQ ID NO: 995838 - DNA, 15 bp, Homo sapiens
gcctacgatggcggg

SEQ ID NO: 995839 - DNA, 15 bp, Homo sapiens
cctacgatggcgggc

SEQ ID NO: 995840 - DNA, 15 bp, Homo sapiens
ctacgatggcgggca

SEQ ID NO: 995841 - DNA, 15 bp, Homo sapiens
tacgatggcgggcag

SEQ ID NO: 995842 - DNA, 15 bp, Homo sapiens
acgatggcgggcagc

SEQ ID NO: 995843 - DNA, 15 bp, Homo sapiens
cgatggcgggcagcc

SEQ ID NO: 995844 - DNA, 15 bp, Homo sapiens
gatggcgggcagccc

SEQ ID NO: 995845 - DNA, 15 bp, Homo sapiens
atggcgggcagccca

SEQ ID NO: 995846 - DNA, 15 bp, Homo sapiens
tggcgggcagcccat

SEQ ID NO: 995847 - DNA, 15 bp, Homo sapiens
ggcgggcagcccatc

SEQ ID NO: 995848 - DNA, 15 bp, Homo sapiens
gcgggcagcccatcc

SEQ ID NO: 995849 - DNA, 15 bp, Homo sapiens
cgggcagcccatcct

SEQ ID NO: 995850 - DNA, 15 bp, Homo sapiens
gggcagcccatcctg

SEQ ID NO: 995851 - DNA, 15 bp, Homo sapiens
ggcagcccatcctgg

SEQ ID NO: 995852 - DNA, 15 bp, Homo sapiens
gcagcccatcctggg

SEQ ID NO: 995853 - DNA, 15 bp, Homo sapiens
cagcccatcctgggt

SEQ ID NO: 995854 - DNA, 15 bp, Homo sapiens
agcccatcctgggtg

SEQ ID NO: 995855 - DNA, 15 bp, Homo sapiens
gcccatcctgggtga

SEQ ID NO: 995856 - DNA, 15 bp, Homo sapiens
cccatcctgggtgag

SEQ ID NO: 995857 - DNA, 15 bp, Homo sapiens
ccatcctgggtgagt

SEQ ID NO: 995858 - DNA, 15 bp, Homo sapiens
catcctgggtgagtg

SEQ ID NO: 995859 - DNA, 15 bp, Homo sapiens
atcctgggtgagtgc

SEQ ID NO: 995860 - DNA, 15 bp, Homo sapiens
tcctgggtgagtgca

SEQ ID NO: 995861 - DNA, 15 bp, Homo sapiens
cctgggtgagtgcaa

SEQ ID NO: 995862 - DNA, 15 bp, Homo sapiens
ctgggtgagtgcaag

SEQ ID NO: 995863 - DNA, 15 bp, Homo sapiens
tgggtgagtgcaagg

SEQ ID NO: 995864 - DNA, 15 bp, Homo sapiens
gggtgagtgcaaggg

SEQ ID NO: 995865 - DNA, 15 bp, Homo sapiens
ggtgagtgcaagggc

SEQ ID NO: 995866 - DNA, 15 bp, Homo sapiens
gtgagtgcaagggca

SEQ ID NO: 995867 - DNA, 15 bp, Homo sapiens
tgagtgcaagggcac

SEQ ID NO: 995868 - DNA, 15 bp, Homo sapiens
gagtgcaagggcacc

SEQ ID NO: 995869 - DNA, 15 bp, Homo sapiens
agtgcaagggcaccg

SEQ ID NO: 995870 - DNA, 15 bp, Homo sapiens
gtgcaagggcaccgg

SEQ ID NO: 995871 - DNA, 15 bp, Homo sapiens
tgcaagggcaccgga

SEQ ID NO: 995872 - DNA, 15 bp, Homo sapiens
gcaagggcaccggat

SEQ ID NO: 995873 - DNA, 15 bp, Homo sapiens
caagggcaccggatg

SEQ ID NO: 995874 - DNA, 15 bp, Homo sapiens
aagggcaccggatgg

SEQ ID NO: 995875 - DNA, 15 bp, Homo sapiens
agggcaccggatgga

SEQ ID NO: 995876 - DNA, 15 bp, Homo sapiens
gggcaccggatggag

SEQ ID NO: 995877 - DNA, 15 bp, Homo sapiens
ggcaccggatggagg

SEQ ID NO: 995878 - DNA, 15 bp, Homo sapiens
gcaccggatggaggt

SEQ ID NO: 995879 - DNA, 15 bp, Homo sapiens
caccggatggaggtg

SEQ ID NO: 995880 - DNA, 15 bp, Homo sapiens
accggatggaggtgt

SEQ ID NO: 995881 - DNA, 15 bp, Homo sapiens
ccggatggaggtgtg

SEQ ID NO: 995882 - DNA, 15 bp, Homo sapiens
cggatggaggtgtga

SEQ ID NO: 995883 - DNA, 15 bp, Homo sapiens
ggatggaggtgtgag

SEQ ID NO: 995884 - DNA, 15 bp, Homo sapiens
gatggaggtgtgagg

SEQ ID NO: 995885 - DNA, 15 bp, Homo sapiens
atggaggtgtgaggg

SEQ ID NO: 995886 - DNA, 15 bp, Homo sapiens
tggaggtgtgagggc

SEQ ID NO: 995887 - DNA, 15 bp, Homo sapiens
ggaggtgtgagggcg

SEQ ID NO: 995888 - DNA, 15 bp, Homo sapiens
gaggtgtgagggcgc

SEQ ID NO: 995889 - DNA, 15 bp, Homo sapiens
aggtgtgagggcgcc

SEQ ID NO: 995890 - DNA, 15 bp, Homo sapiens
ggtgtgagggcgcca

SEQ ID NO: 995891 - DNA, 15 bp, Homo sapiens
gtgtgagggcgccaa

SEQ ID NO: 995892 - DNA, 15 bp, Homo sapiens
tgtgagggcgccaaa

SEQ ID NO: 995893 - DNA, 15 bp, Homo sapiens
gtgagggcgccaaac

SEQ ID NO: 995894 - DNA, 15 bp, Homo sapiens
tgagggcgccaaaca

SEQ ID NO: 995895 - DNA, 15 bp, Homo sapiens
gagggcgccaaacag

SEQ ID NO: 995896 - DNA, 15 bp, Homo sapiens
agggcgccaaacaga

SEQ ID NO: 995897 - DNA, 15 bp, Homo sapiens
gggcgccaaacagat

SEQ ID NO: 995898 - DNA, 15 bp, Homo sapiens
ggcgccaaacagatc

SEQ ID NO: 995899 - DNA, 15 bp, Homo sapiens
gcgccaaacagatcc

SEQ ID NO: 995900 - DNA, 15 bp, Homo sapiens
cgccaaacagatccg

SEQ ID NO: 995901 - DNA, 15 bp, Homo sapiens
gccaaacagatccga

SEQ ID NO: 995902 - DNA, 15 bp, Homo sapiens
ccaaacagatccgag

SEQ ID NO: 995903 - DNA, 15 bp, Homo sapiens
caaacagatccgagg

SEQ ID NO: 995904 - DNA, 15 bp, Homo sapiens
aaacagatccgaggg

SEQ ID NO: 995905 - DNA, 15 bp, Homo sapiens
aacagatccgaggga

SEQ ID NO: 995906 - DNA, 15 bp, Homo sapiens
acagatccgagggaa

SEQ ID NO: 995907 - DNA, 15 bp, Homo sapiens
cagatccgagggaag

SEQ ID NO: 995908 - DNA, 15 bp, Homo sapiens
agatccgagggaagg

SEQ ID NO: 995909 - DNA, 15 bp, Homo sapiens
gatccgagggaaggt

SEQ ID NO: 995910 - DNA, 15 bp, Homo sapiens
atccgagggaaggtg

SEQ ID NO: 995911 - DNA, 15 bp, Homo sapiens
tccgagggaaggtgg

SEQ ID NO: 995912 - DNA, 15 bp, Homo sapiens
ccgagggaaggtggt

SEQ ID NO: 995913 - DNA, 15 bp, Homo sapiens
cgagggaaggtggtg

SEQ ID NO: 995914 - DNA, 15 bp, Homo sapiens
gagggaaggtggtgt

SEQ ID NO: 995915 - DNA, 15 bp, Homo sapiens
agggaaggtggtgtg

SEQ ID NO: 995916 - DNA, 15 bp, Homo sapiens
gggaaggtggtgtgg

SEQ ID NO: 995917 - DNA, 15 bp, Homo sapiens
ggaaggtggtgtggg

SEQ ID NO: 995918 - DNA, 15 bp, Homo sapiens
gaaggtggtgtgggg

SEQ ID NO: 995919 - DNA, 15 bp, Homo sapiens
aaggtggtgtgggga

SEQ ID NO: 995920 - DNA, 15 bp, Homo sapiens
aggtggtgtggggat

SEQ ID NO: 995921 - DNA, 15 bp, Homo sapiens
ggtggtgtggggatg

SEQ ID NO: 995922 - DNA, 15 bp, Homo sapiens
gtggtgtggggatgc

SEQ ID NO: 995923 - DNA, 15 bp, Homo sapiens
tggtgtggggatgcc

SEQ ID NO: 995924 - DNA, 15 bp, Homo sapiens
ggtgtggggatgcct

SEQ ID NO: 995925 - DNA, 15 bp, Homo sapiens
gtgtggggatgcctg

SEQ ID NO: 995926 - DNA, 15 bp, Homo sapiens
tgtggggatgcctgg

SEQ ID NO: 995927 - DNA, 15 bp, Homo sapiens
gtggggatgcctggg

SEQ ID NO: 995928 - DNA, 15 bp, Homo sapiens
tggggatgcctgggt

SEQ ID NO: 995929 - DNA, 15 bp, Homo sapiens
ggggatgcctgggtt

SEQ ID NO: 995930 - DNA, 15 bp, Homo sapiens
gggatgcctgggttc

SEQ ID NO: 995931 - DNA, 15 bp, Homo sapiens
ggatgcctgggttcc

SEQ ID NO: 995932 - DNA, 15 bp, Homo sapiens
gatgcctgggttcca

SEQ ID NO: 995933 - DNA, 15 bp, Homo sapiens
atgcctgggttccag

SEQ ID NO: 995934 - DNA, 15 bp, Homo sapiens
tgcctgggttccaga

SEQ ID NO: 995935 - DNA, 15 bp, Homo sapiens
gcctgggttccagac

SEQ ID NO: 995936 - DNA, 15 bp, Homo sapiens
cctgggttccagacc

SEQ ID NO: 995937 - DNA, 15 bp, Homo sapiens
ctgggttccagacca

SEQ ID NO: 995938 - DNA, 15 bp, Homo sapiens
tgggttccagaccag

SEQ ID NO: 995939 - DNA, 15 bp, Homo sapiens
gggttccagaccaga

SEQ ID NO: 995940 - DNA, 15 bp, Homo sapiens
ggttccagaccagag

SEQ ID NO: 995941 - DNA, 15 bp, Homo sapiens
gttccagaccagagc

SEQ ID NO: 995942 - DNA, 15 bp, Homo sapiens
ttccagaccagagct

SEQ ID NO: 995943 - DNA, 15 bp, Homo sapiens
tccagaccagagctg

SEQ ID NO: 995944 - DNA, 15 bp, Homo sapiens
ccagaccagagctgc

SEQ ID NO: 995945 - DNA, 15 bp, Homo sapiens
cagaccagagctgcc

SEQ ID NO: 995946 - DNA, 15 bp, Homo sapiens
agaccagagctgcca

SEQ ID NO: 995947 - DNA, 15 bp, Homo sapiens
gaccagagctgccac

SEQ ID NO: 995948 - DNA, 15 bp, Homo sapiens
accagagctgccacc

SEQ ID NO: 995949 - DNA, 15 bp, Homo sapiens
ccagagctgccacct

SEQ ID NO: 995950 - DNA, 15 bp, Homo sapiens
cagagctgccacctc

SEQ ID NO: 995951 - DNA, 15 bp, Homo sapiens
agagctgccacctcc

SEQ ID NO: 995952 - DNA, 15 bp, Homo sapiens
gagctgccacctccc

SEQ ID NO: 995953 - DNA, 15 bp, Homo sapiens
agctgccacctcccc

SEQ ID NO: 995954 - DNA, 15 bp, Homo sapiens
gctgccacctcccct

SEQ ID NO: 995955 - DNA, 15 bp, Homo sapiens
ctgccacctcccctg

SEQ ID NO: 995956 - DNA, 15 bp, Homo sapiens
tgccacctcccctga

SEQ ID NO: 995957 - DNA, 15 bp, Homo sapiens
gccacctcccctgag

SEQ ID NO: 995958 - DNA, 15 bp, Homo sapiens
ccacctcccctgagc

SEQ ID NO: 995959 - DNA, 15 bp, Homo sapiens
cacctcccctgagcc

SEQ ID NO: 995960 - DNA, 15 bp, Homo sapiens
acctcccctgagcca

SEQ ID NO: 995961 - DNA, 15 bp, Homo sapiens
cctcccctgagccag

SEQ ID NO: 995962 - DNA, 15 bp, Homo sapiens
ctcccctgagccagg

SEQ ID NO: 995963 - DNA, 15 bp, Homo sapiens
tcccctgagccaggc

SEQ ID NO: 995964 - DNA, 15 bp, Homo sapiens
cccctgagccaggct

SEQ ID NO: 995965 - DNA, 15 bp, Homo sapiens
ccctgagccaggcta

SEQ ID NO: 995966 - DNA, 15 bp, Homo sapiens
cctgagccaggctac

SEQ ID NO: 995967 - DNA, 15 bp, Homo sapiens
ctgagccaggctaca

SEQ ID NO: 995968 - DNA, 15 bp, Homo sapiens
tgagccaggctacat

SEQ ID NO: 995969 - DNA, 15 bp, Homo sapiens
gagccaggctacatc

SEQ ID NO: 995970 - DNA, 15 bp, Homo sapiens
agccaggctacatcc

SEQ ID NO: 995971 - DNA, 15 bp, Homo sapiens
gccaggctacatcct

SEQ ID NO: 995972 - DNA, 15 bp, Homo sapiens
ccaggctacatcctg

SEQ ID NO: 995973 - DNA, 15 bp, Homo sapiens
caggctacatcctgg

SEQ ID NO: 995974 - DNA, 15 bp, Homo sapiens
aggctacatcctgga

SEQ ID NO: 995975 - DNA, 15 bp, Homo sapiens
ggctacatcctggag

SEQ ID NO: 995976 - DNA, 15 bp, Homo sapiens
gctacatcctggagc

SEQ ID NO: 995977 - DNA, 15 bp, Homo sapiens
ctacatcctggagcg

SEQ ID NO: 995978 - DNA, 15 bp, Homo sapiens
tacatcctggagcgc

SEQ ID NO: 995979 - DNA, 15 bp, Homo sapiens
acatcctggagcgca

SEQ ID NO: 995980 - DNA, 15 bp, Homo sapiens
catcctggagcgcaa

SEQ ID NO: 995981 - DNA, 15 bp, Homo sapiens
atcctggagcgcaag

SEQ ID NO: 995982 - DNA, 15 bp, Homo sapiens
tcctggagcgcaaga

SEQ ID NO: 995983 - DNA, 15 bp, Homo sapiens
cctggagcgcaagaa

SEQ ID NO: 995984 - DNA, 15 bp, Homo sapiens
ctggagcgcaagaag

SEQ ID NO: 995985 - DNA, 15 bp, Homo sapiens
tggagcgcaagaaga

SEQ ID NO: 995986 - DNA, 15 bp, Homo sapiens
ggagcgcaagaagaa

SEQ ID NO: 995987 - DNA, 15 bp, Homo sapiens
gagcgcaagaagaag

SEQ ID NO: 995988 - DNA, 15 bp, Homo sapiens
agcgcaagaagaaga

SEQ ID NO: 995989 - DNA, 15 bp, Homo sapiens
gcgcaagaagaagaa

SEQ ID NO: 995990 - DNA, 15 bp, Homo sapiens
cgcaagaagaagaag

SEQ ID NO: 995991 - DNA, 15 bp, Homo sapiens
gcaagaagaagaaga

SEQ ID NO: 995992 - DNA, 15 bp, Homo sapiens
caagaagaagaagag

SEQ ID NO: 995993 - DNA, 15 bp, Homo sapiens
aagaagaagaagagc

SEQ ID NO: 995994 - DNA, 15 bp, Homo sapiens
agaagaagaagagct

SEQ ID NO: 995995 - DNA, 15 bp, Homo sapiens
gaagaagaagagcta

SEQ ID NO: 995996 - DNA, 15 bp, Homo sapiens
aagaagaagagctac

SEQ ID NO: 995997 - DNA, 15 bp, Homo sapiens
agaagaagagctacc

SEQ ID NO: 995998 - DNA, 15 bp, Homo sapiens
gaagaagagctaccg

SEQ ID NO: 995999 - DNA, 15 bp, Homo sapiens
aagaagagctaccgg

SEQ ID NO: 996000 - DNA, 15 bp, Homo sapiens
agaagagctaccggt

SEQ ID NO: 996001 - DNA, 15 bp, Homo sapiens
gaagagctaccggtg

SEQ ID NO: 996002 - DNA, 15 bp, Homo sapiens
aagagctaccggtgg

SEQ ID NO: 996003 - DNA, 15 bp, Homo sapiens
agagctaccggtgga

SEQ ID NO: 996004 - DNA, 15 bp, Homo sapiens
gagctaccggtggat

SEQ ID NO: 996005 - DNA, 15 bp, Homo sapiens
agctaccggtggatg

SEQ ID NO: 996006 - DNA, 15 bp, Homo sapiens
gctaccggtggatgc

SEQ ID NO: 996007 - DNA, 15 bp, Homo sapiens
ctaccggtggatgcg

SEQ ID NO: 996008 - DNA, 15 bp, Homo sapiens
taccggtggatgcgg

SEQ ID NO: 996009 - DNA, 15 bp, Homo sapiens
accggtggatgcggc

SEQ ID NO: 996010 - DNA, 15 bp, Homo sapiens
ccggtggatgcggct

SEQ ID NO: 996011 - DNA, 15 bp, Homo sapiens
cggtggatgcggctg

SEQ ID NO: 996012 - DNA, 15 bp, Homo sapiens
ggtggatgcggctga

SEQ ID NO: 996013 - DNA, 15 bp, Homo sapiens
gtggatgcggctgaa

SEQ ID NO: 996014 - DNA, 15 bp, Homo sapiens
tggatgcggctgaac

SEQ ID NO: 996015 - DNA, 15 bp, Homo sapiens
ggatgcggctgaact

SEQ ID NO: 996016 - DNA, 15 bp, Homo sapiens
gatgcggctgaactt

SEQ ID NO: 996017 - DNA, 15 bp, Homo sapiens
atgcggctgaacttc

SEQ ID NO: 996018 - DNA, 15 bp, Homo sapiens
tgcggctgaacttcg

SEQ ID NO: 996019 - DNA, 15 bp, Homo sapiens
gcggctgaacttcga

SEQ ID NO: 996020 - DNA, 15 bp, Homo sapiens
cggctgaacttcgac

SEQ ID NO: 996021 - DNA, 15 bp, Homo sapiens
ggctgaacttcgacc

SEQ ID NO: 996022 - DNA, 15 bp, Homo sapiens
gctgaacttcgacct

SEQ ID NO: 996023 - DNA, 15 bp, Homo sapiens
ctgaacttcgacctg

SEQ ID NO: 996024 - DNA, 15 bp, Homo sapiens
tgaacttcgacctga

SEQ ID NO: 996025 - DNA, 15 bp, Homo sapiens
gaacttcgacctgat

SEQ ID NO: 996026 - DNA, 15 bp, Homo sapiens
aacttcgacctgatt

SEQ ID NO: 996027 - DNA, 15 bp, Homo sapiens
acttcgacctgattc

SEQ ID NO: 996028 - DNA, 15 bp, Homo sapiens
cttcgacctgattca

SEQ ID NO: 996029 - DNA, 15 bp, Homo sapiens
ttcgacctgattcag

SEQ ID NO: 996030 - DNA, 15 bp, Homo sapiens
tcgacctgattcagg

SEQ ID NO: 996031 - DNA, 15 bp, Homo sapiens
cgacctgattcagga

SEQ ID NO: 996032 - DNA, 15 bp, Homo sapiens
gacctgattcaggag

SEQ ID NO: 996033 - DNA, 15 bp, Homo sapiens
acctgattcaggagc

SEQ ID NO: 996034 - DNA, 15 bp, Homo sapiens
cctgattcaggagct

SEQ ID NO: 996035 - DNA, 15 bp, Homo sapiens
ctgattcaggagctg

SEQ ID NO: 996036 - DNA, 15 bp, Homo sapiens
tgattcaggagctga

SEQ ID NO: 996037 - DNA, 15 bp, Homo sapiens
gattcaggagctgag

SEQ ID NO: 996038 - DNA, 15 bp, Homo sapiens
attcaggagctgagt

SEQ ID NO: 996039 - DNA, 15 bp, Homo sapiens
ttcaggagctgagtc

SEQ ID NO: 996040 - DNA, 15 bp, Homo sapiens
tcaggagctgagtca

SEQ ID NO: 996041 - DNA, 15 bp, Homo sapiens
caggagctgagtcat

SEQ ID NO: 996042 - DNA, 15 bp, Homo sapiens
aggagctgagtcatg

SEQ ID NO: 996043 - DNA, 15 bp, Homo sapiens
ggagctgagtcatga

SEQ ID NO: 996044 - DNA, 15 bp, Homo sapiens
gagctgagtcatgaa

SEQ ID NO: 996045 - DNA, 15 bp, Homo sapiens
agctgagtcatgaag

SEQ ID NO: 996046 - DNA, 15 bp, Homo sapiens
gctgagtcatgaagc

SEQ ID NO: 996047 - DNA, 15 bp, Homo sapiens
ctgagtcatgaagcg

SEQ ID NO: 996048 - DNA, 15 bp, Homo sapiens
tgagtcatgaagcgc

SEQ ID NO: 996049 - DNA, 15 bp, Homo sapiens
gagtcatgaagcgcg

SEQ ID NO: 996050 - DNA, 15 bp, Homo sapiens
agtcatgaagcgcgg

SEQ ID NO: 996051 - DNA, 15 bp, Homo sapiens
gtcatgaagcgcggc

SEQ ID NO: 996052 - DNA, 15 bp, Homo sapiens
tcatgaagcgcggcg

SEQ ID NO: 996053 - DNA, 15 bp, Homo sapiens
catgaagcgcggcgc

SEQ ID NO: 996054 - DNA, 15 bp, Homo sapiens
atgaagcgcggcgca

SEQ ID NO: 996055 - DNA, 15 bp, Homo sapiens
tgaagcgcggcgcat

SEQ ID NO: 996056 - DNA, 15 bp, Homo sapiens
gaagcgcggcgcatg

SEQ ID NO: 996057 - DNA, 15 bp, Homo sapiens
aagcgcggcgcatga

SEQ ID NO: 996058 - DNA, 15 bp, Homo sapiens
agcgcggcgcatgat

SEQ ID NO: 996059 - DNA, 15 bp, Homo sapiens
gcgcggcgcatgatc

SEQ ID NO: 996060 - DNA, 15 bp, Homo sapiens
cgcggcgcatgatcg

SEQ ID NO: 996061 - DNA, 15 bp, Homo sapiens
gcggcgcatgatcga

SEQ ID NO: 996062 - DNA, 15 bp, Homo sapiens
cggcgcatgatcgag

SEQ ID NO: 996063 - DNA, 15 bp, Homo sapiens
ggcgcatgatcgagg

SEQ ID NO: 996064 - DNA, 15 bp, Homo sapiens
gcgcatgatcgaggg

SEQ ID NO: 996065 - DNA, 15 bp, Homo sapiens
cgcatgatcgagggc

SEQ ID NO: 996066 - DNA, 15 bp, Homo sapiens
gcatgatcgagggcg

SEQ ID NO: 996067 - DNA, 15 bp, Homo sapiens
catgatcgagggcgt

SEQ ID NO: 996068 - DNA, 15 bp, Homo sapiens
atgatcgagggcgtg

SEQ ID NO: 996069 - DNA, 15 bp, Homo sapiens
tgatcgagggcgtgg

SEQ ID NO: 996070 - DNA, 15 bp, Homo sapiens
gatcgagggcgtggt

SEQ ID NO: 996071 - DNA, 15 bp, Homo sapiens
atcgagggcgtggtg

SEQ ID NO: 996072 - DNA, 15 bp, Homo sapiens
tcgagggcgtggtgt

SEQ ID NO: 996073 - DNA, 15 bp, Homo sapiens
cgagggcgtggtgta

SEQ ID NO: 996074 - DNA, 15 bp, Homo sapiens
gagggcgtggtgtac

SEQ ID NO: 996075 - DNA, 15 bp, Homo sapiens
agggcgtggtgtacg

SEQ ID NO: 996076 - DNA, 15 bp, Homo sapiens
gggcgtggtgtacga

SEQ ID NO: 996077 - DNA, 15 bp, Homo sapiens
ggcgtggtgtacgag

SEQ ID NO: 996078 - DNA, 15 bp, Homo sapiens
gcgtggtgtacgaga

SEQ ID NO: 996079 - DNA, 15 bp, Homo sapiens
cgtggtgtacgagat

SEQ ID NO: 996080 - DNA, 15 bp, Homo sapiens
gtggtgtacgagatg

SEQ ID NO: 996081 - DNA, 15 bp, Homo sapiens
tggtgtacgagatgc

SEQ ID NO: 996082 - DNA, 15 bp, Homo sapiens
ggtgtacgagatgcg

SEQ ID NO: 996083 - DNA, 15 bp, Homo sapiens
gtgtacgagatgcgc

SEQ ID NO: 996084 - DNA, 15 bp, Homo sapiens
tgtacgagatgcgcg

SEQ ID NO: 996085 - DNA, 15 bp, Homo sapiens
gtacgagatgcgcgt

SEQ ID NO: 996086 - DNA, 15 bp, Homo sapiens
tacgagatgcgcgtc

SEQ ID NO: 996087 - DNA, 15 bp, Homo sapiens
acgagatgcgcgtct

SEQ ID NO: 996088 - DNA, 15 bp, Homo sapiens
cgagatgcgcgtcta

SEQ ID NO: 996089 - DNA, 15 bp, Homo sapiens
gagatgcgcgtctac

SEQ ID NO: 996090 - DNA, 15 bp, Homo sapiens
agatgcgcgtctacg

SEQ ID NO: 996091 - DNA, 15 bp, Homo sapiens
gatgcgcgtctacgc

SEQ ID NO: 996092 - DNA, 15 bp, Homo sapiens
atgcgcgtctacgcg

SEQ ID NO: 996093 - DNA, 15 bp, Homo sapiens
tgcgcgtctacgcgg

SEQ ID NO: 996094 - DNA, 15 bp, Homo sapiens
gcgcgtctacgcggt

SEQ ID NO: 996095 - DNA, 15 bp, Homo sapiens
cgcgtctacgcggtc

SEQ ID NO: 996096 - DNA, 15 bp, Homo sapiens
gcgtctacgcggtca

SEQ ID NO: 996097 - DNA, 15 bp, Homo sapiens
cgtctacgcggtcaa

SEQ ID NO: 996098 - DNA, 15 bp, Homo sapiens
gtctacgcggtcaac

SEQ ID NO: 996099 - DNA, 15 bp, Homo sapiens
tctacgcggtcaacg

SEQ ID NO: 996100 - DNA, 15 bp, Homo sapiens
ctacgcggtcaacgc

SEQ ID NO: 996101 - DNA, 15 bp, Homo sapiens
tacgcggtcaacgcc

SEQ ID NO: 996102 - DNA, 15 bp, Homo sapiens
acgcggtcaacgcca

SEQ ID NO: 996103 - DNA, 15 bp, Homo sapiens
cgcggtcaacgccat

SEQ ID NO: 996104 - DNA, 15 bp, Homo sapiens
gcggtcaacgccatc

SEQ ID NO: 996105 - DNA, 15 bp, Homo sapiens
cggtcaacgccatcg

SEQ ID NO: 996106 - DNA, 15 bp, Homo sapiens
ggtcaacgccatcgg

SEQ ID NO: 996107 - DNA, 15 bp, Homo sapiens
gtcaacgccatcggc

SEQ ID NO: 996108 - DNA, 15 bp, Homo sapiens
tcaacgccatcggca

SEQ ID NO: 996109 - DNA, 15 bp, Homo sapiens
caacgccatcggcat

SEQ ID NO: 996110 - DNA, 15 bp, Homo sapiens
aacgccatcggcatg

SEQ ID NO: 996111 - DNA, 15 bp, Homo sapiens
acgccatcggcatgt

SEQ ID NO: 996112 - DNA, 15 bp, Homo sapiens
cgccatcggcatgtc

SEQ ID NO: 996113 - DNA, 15 bp, Homo sapiens
gccatcggcatgtcc

SEQ ID NO: 996114 - DNA, 15 bp, Homo sapiens
ccatcggcatgtcca

SEQ ID NO: 996115 - DNA, 15 bp, Homo sapiens
catcggcatgtccag

SEQ ID NO: 996116 - DNA, 15 bp, Homo sapiens
atcggcatgtccagg

SEQ ID NO: 996117 - DNA, 15 bp, Homo sapiens
tcggcatgtccaggc

SEQ ID NO: 996118 - DNA, 15 bp, Homo sapiens
cggcatgtccaggcc

SEQ ID NO: 996119 - DNA, 15 bp, Homo sapiens
ggcatgtccaggccc

SEQ ID NO: 996120 - DNA, 15 bp, Homo sapiens
gcatgtccaggccca

SEQ ID NO: 996121 - DNA, 15 bp, Homo sapiens
catgtccaggcccag

SEQ ID NO: 996122 - DNA, 15 bp, Homo sapiens
atgtccaggcccagc

SEQ ID NO: 996123 - DNA, 15 bp, Homo sapiens
tgtccaggcccagcc

SEQ ID NO: 996124 - DNA, 15 bp, Homo sapiens
gtccaggcccagccc

SEQ ID NO: 996125 - DNA, 15 bp, Homo sapiens
tccaggcccagccct

SEQ ID NO: 996126 - DNA, 15 bp, Homo sapiens
ccaggcccagccctg

SEQ ID NO: 996127 - DNA, 15 bp, Homo sapiens
caggcccagccctgc

SEQ ID NO: 996128 - DNA, 15 bp, Homo sapiens
aggcccagccctgcc

SEQ ID NO: 996129 - DNA, 15 bp, Homo sapiens
ggcccagccctgcct

SEQ ID NO: 996130 - DNA, 15 bp, Homo sapiens
gcccagccctgcctc

SEQ ID NO: 996131 - DNA, 15 bp, Homo sapiens
cccagccctgcctcc

SEQ ID NO: 996132 - DNA, 15 bp, Homo sapiens
ccagccctgcctccc

SEQ ID NO: 996133 - DNA, 15 bp, Homo sapiens
cagccctgcctccca

SEQ ID NO: 996134 - DNA, 15 bp, Homo sapiens
agccctgcctcccag

SEQ ID NO: 996135 - DNA, 15 bp, Homo sapiens
gccctgcctcccagc

SEQ ID NO: 996136 - DNA, 15 bp, Homo sapiens
ccctgcctcccagcc

SEQ ID NO: 996137 - DNA, 15 bp, Homo sapiens
cctgcctcccagccc

SEQ ID NO: 996138 - DNA, 15 bp, Homo sapiens
ctgcctcccagccct

SEQ ID NO: 996139 - DNA, 15 bp, Homo sapiens
tgcctcccagccctt

SEQ ID NO: 996140 - DNA, 15 bp, Homo sapiens
gcctcccagcccttc

SEQ ID NO: 996141 - DNA, 15 bp, Homo sapiens
cctcccagcccttca

SEQ ID NO: 996142 - DNA, 15 bp, Homo sapiens
ctcccagcccttcat

SEQ ID NO: 996143 - DNA, 15 bp, Homo sapiens
tcccagcccttcatg

SEQ ID NO: 996144 - DNA, 15 bp, Homo sapiens
cccagcccttcatgc

SEQ ID NO: 996145 - DNA, 15 bp, Homo sapiens
ccagcccttcatgcc

SEQ ID NO: 996146 - DNA, 15 bp, Homo sapiens
cagcccttcatgcct

SEQ ID NO: 996147 - DNA, 15 bp, Homo sapiens
agcccttcatgccta

SEQ ID NO: 996148 - DNA, 15 bp, Homo sapiens
gcccttcatgcctat

SEQ ID NO: 996149 - DNA, 15 bp, Homo sapiens
cccttcatgcctatc

SEQ ID NO: 996150 - DNA, 15 bp, Homo sapiens
ccttcatgcctatcg

SEQ ID NO: 996151 - DNA, 15 bp, Homo sapiens
cttcatgcctatcgg

SEQ ID NO: 996152 - DNA, 15 bp, Homo sapiens
ttcatgcctatcggt

SEQ ID NO: 996153 - DNA, 15 bp, Homo sapiens
tcatgcctatcggtg

SEQ ID NO: 996154 - DNA, 15 bp, Homo sapiens
catgcctatcggtga

SEQ ID NO: 996155 - DNA, 15 bp, Homo sapiens
atgcctatcggtgag

SEQ ID NO: 996156 - DNA, 15 bp, Homo sapiens
tgcctatcggtgagc

SEQ ID NO: 996157 - DNA, 15 bp, Homo sapiens
gcctatcggtgagcc

SEQ ID NO: 996158 - DNA, 15 bp, Homo sapiens
cctatcggtgagcct

SEQ ID NO: 996159 - DNA, 15 bp, Homo sapiens
ctatcggtgagcctg

SEQ ID NO: 996160 - DNA, 15 bp, Homo sapiens
tatcggtgagcctgc

SEQ ID NO: 996161 - DNA, 15 bp, Homo sapiens
atcggtgagcctgcc

SEQ ID NO: 996162 - DNA, 15 bp, Homo sapiens
tcggtgagcctgcct

SEQ ID NO: 996163 - DNA, 15 bp, Homo sapiens
cggtgagcctgcctg

SEQ ID NO: 996164 - DNA, 15 bp, Homo sapiens
ggtgagcctgcctgg

SEQ ID NO: 996165 - DNA, 15 bp, Homo sapiens
gtgagcctgcctggc

SEQ ID NO: 996166 - DNA, 15 bp, Homo sapiens
tgagcctgcctggcc

SEQ ID NO: 996167 - DNA, 15 bp, Homo sapiens
gagcctgcctggcct

SEQ ID NO: 996168 - DNA, 15 bp, Homo sapiens
agcctgcctggcctg

SEQ ID NO: 996169 - DNA, 15 bp, Homo sapiens
gcctgcctggcctgg

SEQ ID NO: 996170 - DNA, 15 bp, Homo sapiens
cctgcctggcctggt

SEQ ID NO: 996171 - DNA, 15 bp, Homo sapiens
ctgcctggcctggtc

SEQ ID NO: 996172 - DNA, 15 bp, Homo sapiens
tgcctggcctggtcc

SEQ ID NO: 996173 - DNA, 15 bp, Homo sapiens
gcctggcctggtcct

SEQ ID NO: 996174 - DNA, 15 bp, Homo sapiens
cctggcctggtcctg

SEQ ID NO: 996175 - DNA, 15 bp, Homo sapiens
ctggcctggtcctgc

SEQ ID NO: 996176 - DNA, 15 bp, Homo sapiens
tggcctggtcctgcc

SEQ ID NO: 996177 - DNA, 15 bp, Homo sapiens
ggcctggtcctgccc

SEQ ID NO: 996178 - DNA, 15 bp, Homo sapiens
gcctggtcctgcccc

SEQ ID NO: 996179 - DNA, 15 bp, Homo sapiens
cctggtcctgccccc

SEQ ID NO: 996180 - DNA, 15 bp, Homo sapiens
ctggtcctgcccccc

SEQ ID NO: 996181 - DNA, 15 bp, Homo sapiens
tggtcctgccccccg

SEQ ID NO: 996182 - DNA, 15 bp, Homo sapiens
ggtcctgccccccgc

SEQ ID NO: 996183 - DNA, 15 bp, Homo sapiens
gtcctgccccccgcc

SEQ ID NO: 996184 - DNA, 15 bp, Homo sapiens
tcctgccccccgccc

SEQ ID NO: 996185 - DNA, 15 bp, Homo sapiens
cctgccccccgcccc

SEQ ID NO: 996186 - DNA, 15 bp, Homo sapiens
ctgccccccgccccc

SEQ ID NO: 996187 - DNA, 15 bp, Homo sapiens
tgccccccgccccct

SEQ ID NO: 996188 - DNA, 15 bp, Homo sapiens
gccccccgccccctc

SEQ ID NO: 996189 - DNA, 15 bp, Homo sapiens
ccccccgccccctcc

SEQ ID NO: 996190 - DNA, 15 bp, Homo sapiens
cccccgccccctccc

SEQ ID NO: 996191 - DNA, 15 bp, Homo sapiens
ccccgccccctcccc

SEQ ID NO: 996192 - DNA, 15 bp, Homo sapiens
cccgccccctcccca

SEQ ID NO: 996193 - DNA, 15 bp, Homo sapiens
ccgccccctccccag

SEQ ID NO: 996194 - DNA, 15 bp, Homo sapiens
cgccccctccccagt

SEQ ID NO: 996195 - DNA, 15 bp, Homo sapiens
gccccctccccagtt

SEQ ID NO: 996196 - DNA, 15 bp, Homo sapiens
ccccctccccagtta

SEQ ID NO: 996197 - DNA, 15 bp, Homo sapiens
cccctccccagttaa

SEQ ID NO: 996198 - DNA, 15 bp, Homo sapiens
ccctccccagttaaa

SEQ ID NO: 996199 - DNA, 15 bp, Homo sapiens
cctccccagttaaaa

SEQ ID NO: 996200 - DNA, 15 bp, Homo sapiens
ctccccagttaaaaa

SEQ ID NO: 996201 - DNA, 15 bp, Homo sapiens
tccccagttaaaaac

SEQ ID NO: 996202 - DNA, 15 bp, Homo sapiens
ccccagttaaaaacc

SEQ ID NO: 996203 - DNA, 15 bp, Homo sapiens
cccagttaaaaacct

SEQ ID NO: 996204 - DNA, 15 bp, Homo sapiens
ccagttaaaaacctc

SEQ ID NO: 996205 - DNA, 15 bp, Homo sapiens
cagttaaaaacctcc

SEQ ID NO: 996206 - DNA, 15 bp, Homo sapiens
agttaaaaacctcca

SEQ ID NO: 996207 - DNA, 15 bp, Homo sapiens
gttaaaaacctccaa

SEQ ID NO: 996208 - DNA, 15 bp, Homo sapiens
ttaaaaacctccaat

SEQ ID NO: 996209 - DNA, 15 bp, Homo sapiens
taaaaacctccaata

SEQ ID NO: 996210 - DNA, 15 bp, Homo sapiens
aaaaacctccaataa

SEQ ID NO: 996211 - DNA, 15 bp, Homo sapiens
aaaacctccaataat

SEQ ID NO: 996212 - DNA, 15 bp, Homo sapiens
aaacctccaataata

SEQ ID NO: 996213 - DNA, 15 bp, Homo sapiens
aacctccaataatag

SEQ ID NO: 996214 - DNA, 15 bp, Homo sapiens
acctccaataatagc

SEQ ID NO: 996215 - DNA, 15 bp, Homo sapiens
cctccaataatagca

SEQ ID NO: 996216 - DNA, 15 bp, Homo sapiens
ctccaataatagcag

SEQ ID NO: 996217 - DNA, 15 bp, Homo sapiens
tccaataatagcagg

SEQ ID NO: 996218 - DNA, 15 bp, Homo sapiens
ccaataatagcaggt

SEQ ID NO: 996219 - DNA, 15 bp, Homo sapiens
caataatagcaggtg

SEQ ID NO: 996220 - DNA, 15 bp, Homo sapiens
aataatagcaggtgc

SEQ ID NO: 996221 - DNA, 15 bp, Homo sapiens
ataatagcaggtgct

SEQ ID NO: 996222 - DNA, 15 bp, Homo sapiens
taatagcaggtgctc

SEQ ID NO: 996223 - DNA, 15 bp, Homo sapiens
aatagcaggtgctct

SEQ ID NO: 996224 - DNA, 15 bp, Homo sapiens
atagcaggtgctctg

SEQ ID NO: 996225 - DNA, 15 bp, Homo sapiens
tagcaggtgctctgc

SEQ ID NO: 996226 - DNA, 15 bp, Homo sapiens
agcaggtgctctgca

SEQ ID NO: 996227 - DNA, 15 bp, Homo sapiens
gcaggtgctctgcag

SEQ ID NO: 996228 - DNA, 15 bp, Homo sapiens
caggtgctctgcagg

SEQ ID NO: 996229 - DNA, 15 bp, Homo sapiens
aggtgctctgcaggc

SEQ ID NO: 996230 - DNA, 15 bp, Homo sapiens
ggtgctctgcaggca

SEQ ID NO: 996231 - DNA, 15 bp, Homo sapiens
gtgctctgcaggcag

SEQ ID NO: 996232 - DNA, 15 bp, Homo sapiens
tgctctgcaggcagc

SEQ ID NO: 996233 - DNA, 15 bp, Homo sapiens
gctctgcaggcagcc

SEQ ID NO: 996234 - DNA, 15 bp, Homo sapiens
ctctgcaggcagcca

SEQ ID NO: 996235 - DNA, 15 bp, Homo sapiens
tctgcaggcagccat

SEQ ID NO: 996236 - DNA, 15 bp, Homo sapiens
ctgcaggcagccatg

SEQ ID NO: 996237 - DNA, 15 bp, Homo sapiens
tgcaggcagccatgc

SEQ ID NO: 996238 - DNA, 15 bp, Homo sapiens
gcaggcagccatgct

SEQ ID NO: 996239 - DNA, 15 bp, Homo sapiens
caggcagccatgcta

SEQ ID NO: 996240 - DNA, 15 bp, Homo sapiens
aggcagccatgctag

SEQ ID NO: 996241 - DNA, 15 bp, Homo sapiens
ggcagccatgctaga

SEQ ID NO: 996242 - DNA, 15 bp, Homo sapiens
gcagccatgctagac

SEQ ID NO: 996243 - DNA, 15 bp, Homo sapiens
cagccatgctagaca

SEQ ID NO: 996244 - DNA, 15 bp, Homo sapiens
agccatgctagacac

SEQ ID NO: 996245 - DNA, 15 bp, Homo sapiens
gccatgctagacact

SEQ ID NO: 996246 - DNA, 15 bp, Homo sapiens
ccatgctagacactc

SEQ ID NO: 996247 - DNA, 15 bp, Homo sapiens
catgctagacactca

SEQ ID NO: 996248 - DNA, 15 bp, Homo sapiens
atgctagacactcac

SEQ ID NO: 996249 - DNA, 15 bp, Homo sapiens
tgctagacactcaca

SEQ ID NO: 996250 - DNA, 15 bp, Homo sapiens
gctagacactcacat

SEQ ID NO: 996251 - DNA, 15 bp, Homo sapiens
ctagacactcacatc

SEQ ID NO: 996252 - DNA, 15 bp, Homo sapiens
tagacactcacatcc

SEQ ID NO: 996253 - DNA, 15 bp, Homo sapiens
agacactcacatcca

SEQ ID NO: 996254 - DNA, 15 bp, Homo sapiens
gacactcacatccac

SEQ ID NO: 996255 - DNA, 15 bp, Homo sapiens
acactcacatccaca

SEQ ID NO: 996256 - DNA, 15 bp, Homo sapiens
cactcacatccacag

SEQ ID NO: 996257 - DNA, 15 bp, Homo sapiens
actcacatccacagt

SEQ ID NO: 996258 - DNA, 15 bp, Homo sapiens
ctcacatccacagtc

SEQ ID NO: 996259 - DNA, 15 bp, Homo sapiens
tcacatccacagtct

SEQ ID NO: 996260 - DNA, 15 bp, Homo sapiens
cacatccacagtctc

SEQ ID NO: 996261 - DNA, 15 bp, Homo sapiens
acatccacagtctcc

SEQ ID NO: 996262 - DNA, 15 bp, Homo sapiens
catccacagtctcct

SEQ ID NO: 996263 - DNA, 15 bp, Homo sapiens
atccacagtctcctt

SEQ ID NO: 996264 - DNA, 15 bp, Homo sapiens
tccacagtctccttt

SEQ ID NO: 996265 - DNA, 15 bp, Homo sapiens
ccacagtctcctttc

SEQ ID NO: 996266 - DNA, 15 bp, Homo sapiens
cacagtctcctttca

SEQ ID NO: 996267 - DNA, 15 bp, Homo sapiens
acagtctcctttcat

SEQ ID NO: 996268 - DNA, 15 bp, Homo sapiens
cagtctcctttcatc

SEQ ID NO: 996269 - DNA, 15 bp, Homo sapiens
agtctcctttcatcc

SEQ ID NO: 996270 - DNA, 15 bp, Homo sapiens
gtctcctttcatcct

SEQ ID NO: 996271 - DNA, 15 bp, Homo sapiens
tctcctttcatcctc

SEQ ID NO: 996272 - DNA, 15 bp, Homo sapiens
ctcctttcatcctcg

SEQ ID NO: 996273 - DNA, 15 bp, Homo sapiens
tcctttcatcctcga

SEQ ID NO: 996274 - DNA, 15 bp, Homo sapiens
cctttcatcctcgac

SEQ ID NO: 996275 - DNA, 15 bp, Homo sapiens
ctttcatcctcgact

SEQ ID NO: 996276 - DNA, 15 bp, Homo sapiens
tttcatcctcgactg

SEQ ID NO: 996277 - DNA, 15 bp, Homo sapiens
ttcatcctcgactgg

SEQ ID NO: 996278 - DNA, 15 bp, Homo sapiens
tcatcctcgactggg

SEQ ID NO: 996279 - DNA, 15 bp, Homo sapiens
catcctcgactgggg

SEQ ID NO: 996280 - DNA, 15 bp, Homo sapiens
atcctcgactgggga

SEQ ID NO: 996281 - DNA, 15 bp, Homo sapiens
tcctcgactggggat

SEQ ID NO: 996282 - DNA, 15 bp, Homo sapiens
cctcgactggggata

SEQ ID NO: 996283 - DNA, 15 bp, Homo sapiens
ctcgactggggatac

SEQ ID NO: 996284 - DNA, 15 bp, Homo sapiens
tcgactggggatact

SEQ ID NO: 996285 - DNA, 15 bp, Homo sapiens
cgactggggatactc

SEQ ID NO: 996286 - DNA, 15 bp, Homo sapiens
gactggggatactca

SEQ ID NO: 996287 - DNA, 15 bp, Homo sapiens
actggggatactcag

SEQ ID NO: 996288 - DNA, 15 bp, Homo sapiens
ctggggatactcagc

SEQ ID NO: 996289 - DNA, 15 bp, Homo sapiens
tggggatactcagcc

SEQ ID NO: 996290 - DNA, 15 bp, Homo sapiens
ggggatactcagccg

SEQ ID NO: 996291 - DNA, 15 bp, Homo sapiens
gggatactcagccgc

SEQ ID NO: 996292 - DNA, 15 bp, Homo sapiens
ggatactcagccgca

SEQ ID NO: 996293 - DNA, 15 bp, Homo sapiens
gatactcagccgcat

SEQ ID NO: 996294 - DNA, 15 bp, Homo sapiens
atactcagccgcatt

SEQ ID NO: 996295 - DNA, 15 bp, Homo sapiens
tactcagccgcattt

SEQ ID NO: 996296 - DNA, 15 bp, Homo sapiens
actcagccgcatttt

SEQ ID NO: 996297 - DNA, 15 bp, Homo sapiens
ctcagccgcatttta

SEQ ID NO: 996298 - DNA, 15 bp, Homo sapiens
tcagccgcattttac

SEQ ID NO: 996299 - DNA, 15 bp, Homo sapiens
cagccgcattttaca

SEQ ID NO: 996300 - DNA, 15 bp, Homo sapiens
agccgcattttacag

SEQ ID NO: 996301 - DNA, 15 bp, Homo sapiens
gccgcattttacaga

SEQ ID NO: 996302 - DNA, 15 bp, Homo sapiens
ccgcattttacagat

SEQ ID NO: 996303 - DNA, 15 bp, Homo sapiens
cgcattttacagatg

SEQ ID NO: 996304 - DNA, 15 bp, Homo sapiens
gcattttacagatga

SEQ ID NO: 996305 - DNA, 15 bp, Homo sapiens
cattttacagatgag

SEQ ID NO: 996306 - DNA, 15 bp, Homo sapiens
attttacagatgagg

SEQ ID NO: 996307 - DNA, 15 bp, Homo sapiens
ttttacagatgagga

SEQ ID NO: 996308 - DNA, 15 bp, Homo sapiens
acagatgaggaaaca

SEQ ID NO: 996309 - DNA, 15 bp, Homo sapiens
cagatgaggaaacag

SEQ ID NO: 996310 - DNA, 15 bp, Homo sapiens
agatgaggaaacagg

SEQ ID NO: 996311 - DNA, 15 bp, Homo sapiens
gatgaggaaacaggc

SEQ ID NO: 996312 - DNA, 15 bp, Homo sapiens
atgaggaaacaggct

SEQ ID NO: 996313 - DNA, 15 bp, Homo sapiens
tgaggaaacaggctc

SEQ ID NO: 996314 - DNA, 15 bp, Homo sapiens
gaggaaacaggctcc

SEQ ID NO: 996315 - DNA, 15 bp, Homo sapiens
aggaaacaggctcca

SEQ ID NO: 996316 - DNA, 15 bp, Homo sapiens
ggaaacaggctccaa

SEQ ID NO: 996317 - DNA, 15 bp, Homo sapiens
gaaacaggctccaag

SEQ ID NO: 996318 - DNA, 15 bp, Homo sapiens
aaacaggctccaagc

SEQ ID NO: 996319 - DNA, 15 bp, Homo sapiens
aacaggctccaagca

SEQ ID NO: 996320 - DNA, 15 bp, Homo sapiens
acaggctccaagcag

SEQ ID NO: 996321 - DNA, 15 bp, Homo sapiens
caggctccaagcagt

SEQ ID NO: 996322 - DNA, 15 bp, Homo sapiens
aggctccaagcagtt

SEQ ID NO: 996323 - DNA, 15 bp, Homo sapiens
ggctccaagcagtta

SEQ ID NO: 996324 - DNA, 15 bp, Homo sapiens
gctccaagcagttaa

SEQ ID NO: 996325 - DNA, 15 bp, Homo sapiens
ctccaagcagttaaa

SEQ ID NO: 996326 - DNA, 15 bp, Homo sapiens
tccaagcagttaaat

SEQ ID NO: 996327 - DNA, 15 bp, Homo sapiens
ccaagcagttaaatg

SEQ ID NO: 996328 - DNA, 15 bp, Homo sapiens
caagcagttaaatga

SEQ ID NO: 996329 - DNA, 15 bp, Homo sapiens
aagcagttaaatgac

SEQ ID NO: 996330 - DNA, 15 bp, Homo sapiens
agcagttaaatgacc

SEQ ID NO: 996331 - DNA, 15 bp, Homo sapiens
gcagttaaatgacct

SEQ ID NO: 996332 - DNA, 15 bp, Homo sapiens
cagttaaatgacctg

SEQ ID NO: 996333 - DNA, 15 bp, Homo sapiens
agttaaatgacctgc

SEQ ID NO: 996334 - DNA, 15 bp, Homo sapiens
gttaaatgacctgct

SEQ ID NO: 996335 - DNA, 15 bp, Homo sapiens
ttaaatgacctgctt

SEQ ID NO: 996336 - DNA, 15 bp, Homo sapiens
taaatgacctgcttg

SEQ ID NO: 996337 - DNA, 15 bp, Homo sapiens
aaatgacctgcttga

SEQ ID NO: 996338 - DNA, 15 bp, Homo sapiens
aatgacctgcttgag

SEQ ID NO: 996339 - DNA, 15 bp, Homo sapiens
atgacctgcttgaga

SEQ ID NO: 996340 - DNA, 15 bp, Homo sapiens
tgacctgcttgagat

SEQ ID NO: 996341 - DNA, 15 bp, Homo sapiens
gacctgcttgagatc

SEQ ID NO: 996342 - DNA, 15 bp, Homo sapiens
acctgcttgagatct

SEQ ID NO: 996343 - DNA, 15 bp, Homo sapiens
cctgcttgagatctc

SEQ ID NO: 996344 - DNA, 15 bp, Homo sapiens
ctgcttgagatctcc

SEQ ID NO: 996345 - DNA, 15 bp, Homo sapiens
tgcttgagatctccc

SEQ ID NO: 996346 - DNA, 15 bp, Homo sapiens
gcttgagatctccca

SEQ ID NO: 996347 - DNA, 15 bp, Homo sapiens
cttgagatctcccag

SEQ ID NO: 996348 - DNA, 15 bp, Homo sapiens
ttgagatctcccagc

SEQ ID NO: 996349 - DNA, 15 bp, Homo sapiens
tgagatctcccagct

SEQ ID NO: 996350 - DNA, 15 bp, Homo sapiens
gagatctcccagctg

SEQ ID NO: 996351 - DNA, 15 bp, Homo sapiens
agatctcccagctgg

SEQ ID NO: 996352 - DNA, 15 bp, Homo sapiens
gatctcccagctggt

SEQ ID NO: 996353 - DNA, 15 bp, Homo sapiens
atctcccagctggtt

SEQ ID NO: 996354 - DNA, 15 bp, Homo sapiens
tctcccagctggttg

SEQ ID NO: 996355 - DNA, 15 bp, Homo sapiens
ctcccagctggttgg

SEQ ID NO: 996356 - DNA, 15 bp, Homo sapiens
tcccagctggttggg

SEQ ID NO: 996357 - DNA, 15 bp, Homo sapiens
cccagctggttgggg

SEQ ID NO: 996358 - DNA, 15 bp, Homo sapiens
ccagctggttggggt

SEQ ID NO: 996359 - DNA, 15 bp, Homo sapiens
cagctggttggggtg

SEQ ID NO: 996360 - DNA, 15 bp, Homo sapiens
agctggttggggtgg

SEQ ID NO: 996361 - DNA, 15 bp, Homo sapiens
gctggttggggtgga

SEQ ID NO: 996362 - DNA, 15 bp, Homo sapiens
ctggttggggtggag

SEQ ID NO: 996363 - DNA, 15 bp, Homo sapiens
tggttggggtggagc

SEQ ID NO: 996364 - DNA, 15 bp, Homo sapiens
ggttggggtggagct

SEQ ID NO: 996365 - DNA, 15 bp, Homo sapiens
gttggggtggagctg

SEQ ID NO: 996366 - DNA, 15 bp, Homo sapiens
ttggggtggagctga

SEQ ID NO: 996367 - DNA, 15 bp, Homo sapiens
tggggtggagctgac

SEQ ID NO: 996368 - DNA, 15 bp, Homo sapiens
ggggtggagctgact

SEQ ID NO: 996369 - DNA, 15 bp, Homo sapiens
gggtggagctgactc

SEQ ID NO: 996370 - DNA, 15 bp, Homo sapiens
ggtggagctgactct

SEQ ID NO: 996371 - DNA, 15 bp, Homo sapiens
gtggagctgactctc

SEQ ID NO: 996372 - DNA, 15 bp, Homo sapiens
tggagctgactctca

SEQ ID NO: 996373 - DNA, 15 bp, Homo sapiens
ggagctgactctcac

SEQ ID NO: 996374 - DNA, 15 bp, Homo sapiens
gagctgactctcaca

SEQ ID NO: 996375 - DNA, 15 bp, Homo sapiens
agctgactctcacac

SEQ ID NO: 996376 - DNA, 15 bp, Homo sapiens
gctgactctcacact

SEQ ID NO: 996377 - DNA, 15 bp, Homo sapiens
ctgactctcacacta

SEQ ID NO: 996378 - DNA, 15 bp, Homo sapiens
tgactctcacactac

SEQ ID NO: 996379 - DNA, 15 bp, Homo sapiens
gactctcacactacg

SEQ ID NO: 996380 - DNA, 15 bp, Homo sapiens
actctcacactacgc

SEQ ID NO: 996381 - DNA, 15 bp, Homo sapiens
ctctcacactacgcc

SEQ ID NO: 996382 - DNA, 15 bp, Homo sapiens
tctcacactacgccg

SEQ ID NO: 996383 - DNA, 15 bp, Homo sapiens
ctcacactacgccga

SEQ ID NO: 996384 - DNA, 15 bp, Homo sapiens
tcacactacgccgac

SEQ ID NO: 996385 - DNA, 15 bp, Homo sapiens
cacactacgccgacc

SEQ ID NO: 996386 - DNA, 15 bp, Homo sapiens
acactacgccgaccc

SEQ ID NO: 996387 - DNA, 15 bp, Homo sapiens
cactacgccgacccc

SEQ ID NO: 996388 - DNA, 15 bp, Homo sapiens
actacgccgacccct

SEQ ID NO: 996389 - DNA, 15 bp, Homo sapiens
ctacgccgaccccta

SEQ ID NO: 996390 - DNA, 15 bp, Homo sapiens
tacgccgacccctag

SEQ ID NO: 996391 - DNA, 15 bp, Homo sapiens
acgccgacccctagt

SEQ ID NO: 996392 - DNA, 15 bp, Homo sapiens
cgccgacccctagtt

SEQ ID NO: 996393 - DNA, 15 bp, Homo sapiens
gccgacccctagttc

SEQ ID NO: 996394 - DNA, 15 bp, Homo sapiens
ccgacccctagttca

SEQ ID NO: 996395 - DNA, 15 bp, Homo sapiens
cgacccctagttcac

SEQ ID NO: 996396 - DNA, 15 bp, Homo sapiens
gacccctagttcacg

SEQ ID NO: 996397 - DNA, 15 bp, Homo sapiens
acccctagttcacgt

SEQ ID NO: 996398 - DNA, 15 bp, Homo sapiens
cccctagttcacgtt

SEQ ID NO: 996399 - DNA, 15 bp, Homo sapiens
ccctagttcacgttt

SEQ ID NO: 996400 - DNA, 15 bp, Homo sapiens
cctagttcacgtttc

SEQ ID NO: 996401 - DNA, 15 bp, Homo sapiens
ctagttcacgtttca

SEQ ID NO: 996402 - DNA, 15 bp, Homo sapiens
tagttcacgtttcaa

SEQ ID NO: 996403 - DNA, 15 bp, Homo sapiens
agttcacgtttcaag

SEQ ID NO: 996404 - DNA, 15 bp, Homo sapiens
gttcacgtttcaagc

SEQ ID NO: 996405 - DNA, 15 bp, Homo sapiens
ttcacgtttcaagcc

SEQ ID NO: 996406 - DNA, 15 bp, Homo sapiens
tcacgtttcaagcct

SEQ ID NO: 996407 - DNA, 15 bp, Homo sapiens
cacgtttcaagcctc

SEQ ID NO: 996408 - DNA, 15 bp, Homo sapiens
acgtttcaagcctct

SEQ ID NO: 996409 - DNA, 15 bp, Homo sapiens
cgtttcaagcctctc

SEQ ID NO: 996410 - DNA, 15 bp, Homo sapiens
gtttcaagcctctct

SEQ ID NO: 996411 - DNA, 15 bp, Homo sapiens
tttcaagcctctctt

SEQ ID NO: 996412 - DNA, 15 bp, Homo sapiens
ttcaagcctctcttt

SEQ ID NO: 996413 - DNA, 15 bp, Homo sapiens
tcaagcctctctttc

SEQ ID NO: 996414 - DNA, 15 bp, Homo sapiens
caagcctctctttcc

SEQ ID NO: 996415 - DNA, 15 bp, Homo sapiens
aagcctctctttcca

SEQ ID NO: 996416 - DNA, 15 bp, Homo sapiens
agcctctctttccat

SEQ ID NO: 996417 - DNA, 15 bp, Homo sapiens
gcctctctttccatg

SEQ ID NO: 996418 - DNA, 15 bp, Homo sapiens
cctctctttccatgt

SEQ ID NO: 996419 - DNA, 15 bp, Homo sapiens
ctctctttccatgtc

SEQ ID NO: 996420 - DNA, 15 bp, Homo sapiens
tctctttccatgtct

SEQ ID NO: 996421 - DNA, 15 bp, Homo sapiens
ctctttccatgtcta

SEQ ID NO: 996422 - DNA, 15 bp, Homo sapiens
tctttccatgtctac

SEQ ID NO: 996423 - DNA, 15 bp, Homo sapiens
ctttccatgtctaca

SEQ ID NO: 996424 - DNA, 15 bp, Homo sapiens
tttccatgtctacaa

SEQ ID NO: 996425 - DNA, 15 bp, Homo sapiens
ttccatgtctacaaa

SEQ ID NO: 996426 - DNA, 15 bp, Homo sapiens
tccatgtctacaaaa

SEQ ID NO: 996427 - DNA, 15 bp, Homo sapiens
ccatgtctacaaaat

SEQ ID NO: 996428 - DNA, 15 bp, Homo sapiens
catgtctacaaaatg

SEQ ID NO: 996429 - DNA, 15 bp, Homo sapiens
atgtctacaaaatgg

SEQ ID NO: 996430 - DNA, 15 bp, Homo sapiens
tgtctacaaaatggg

SEQ ID NO: 996431 - DNA, 15 bp, Homo sapiens
gtctacaaaatggga

SEQ ID NO: 996432 - DNA, 15 bp, Homo sapiens
tctacaaaatgggaa

SEQ ID NO: 996433 - DNA, 15 bp, Homo sapiens
ctacaaaatgggaat

SEQ ID NO: 996434 - DNA, 15 bp, Homo sapiens
tacaaaatgggaata

SEQ ID NO: 996435 - DNA, 15 bp, Homo sapiens
acaaaatgggaataa

SEQ ID NO: 996436 - DNA, 15 bp, Homo sapiens
caaaatgggaataat

SEQ ID NO: 996437 - DNA, 15 bp, Homo sapiens
aaaatgggaataatg

SEQ ID NO: 996438 - DNA, 15 bp, Homo sapiens
aaatgggaataatga

SEQ ID NO: 996439 - DNA, 15 bp, Homo sapiens
aatgggaataatgac

SEQ ID NO: 996440 - DNA, 15 bp, Homo sapiens
atgggaataatgaca

SEQ ID NO: 996441 - DNA, 15 bp, Homo sapiens
tgggaataatgacac

SEQ ID NO: 996442 - DNA, 15 bp, Homo sapiens
gggaataatgacact

SEQ ID NO: 996443 - DNA, 15 bp, Homo sapiens
ggaataatgacactg

SEQ ID NO: 996444 - DNA, 15 bp, Homo sapiens
gaataatgacactgc

SEQ ID NO: 996445 - DNA, 15 bp, Homo sapiens
aataatgacactgcc

SEQ ID NO: 996446 - DNA, 15 bp, Homo sapiens
ataatgacactgcct

SEQ ID NO: 996447 - DNA, 15 bp, Homo sapiens
taatgacactgccta

SEQ ID NO: 996448 - DNA, 15 bp, Homo sapiens
aatgacactgcctat

SEQ ID NO: 996449 - DNA, 15 bp, Homo sapiens
atgacactgcctatc

SEQ ID NO: 996450 - DNA, 15 bp, Homo sapiens
tgacactgcctatct

SEQ ID NO: 996451 - DNA, 15 bp, Homo sapiens
gacactgcctatctc

SEQ ID NO: 996452 - DNA, 15 bp, Homo sapiens
acactgcctatctca

SEQ ID NO: 996453 - DNA, 15 bp, Homo sapiens
cactgcctatctcag

SEQ ID NO: 996454 - DNA, 15 bp, Homo sapiens
actgcctatctcaga

SEQ ID NO: 996455 - DNA, 15 bp, Homo sapiens
ctgcctatctcagag

SEQ ID NO: 996456 - DNA, 15 bp, Homo sapiens
tgcctatctcagaga

SEQ ID NO: 996457 - DNA, 15 bp, Homo sapiens
gcctatctcagagag

SEQ ID NO: 996458 - DNA, 15 bp, Homo sapiens
cctatctcagagagc

SEQ ID NO: 996459 - DNA, 15 bp, Homo sapiens
ctatctcagagagct

SEQ ID NO: 996460 - DNA, 15 bp, Homo sapiens
tatctcagagagctg

SEQ ID NO: 996461 - DNA, 15 bp, Homo sapiens
atctcagagagctgt

SEQ ID NO: 996462 - DNA, 15 bp, Homo sapiens
tctcagagagctgtt

SEQ ID NO: 996463 - DNA, 15 bp, Homo sapiens
ctcagagagctgtta

SEQ ID NO: 996464 - DNA, 15 bp, Homo sapiens
tcagagagctgttag

SEQ ID NO: 996465 - DNA, 15 bp, Homo sapiens
cagagagctgttagg

SEQ ID NO: 996466 - DNA, 15 bp, Homo sapiens
agagagctgttagga

SEQ ID NO: 996467 - DNA, 15 bp, Homo sapiens
gagagctgttaggat

SEQ ID NO: 996468 - DNA, 15 bp, Homo sapiens
agagctgttaggatg

SEQ ID NO: 996469 - DNA, 15 bp, Homo sapiens
gagctgttaggatga

SEQ ID NO: 996470 - DNA, 15 bp, Homo sapiens
agctgttaggatgat

SEQ ID NO: 996471 - DNA, 15 bp, Homo sapiens
gctgttaggatgata

SEQ ID NO: 996472 - DNA, 15 bp, Homo sapiens
ctgttaggatgatat

SEQ ID NO: 996473 - DNA, 15 bp, Homo sapiens
tgttaggatgatatg

SEQ ID NO: 996474 - DNA, 15 bp, Homo sapiens
gttaggatgatatgg

SEQ ID NO: 996475 - DNA, 15 bp, Homo sapiens
ttaggatgatatggg

SEQ ID NO: 996476 - DNA, 15 bp, Homo sapiens
taggatgatatggga

SEQ ID NO: 996477 - DNA, 15 bp, Homo sapiens
aggatgatatgggat

SEQ ID NO: 996478 - DNA, 15 bp, Homo sapiens
ggatgatatgggatg

SEQ ID NO: 996479 - DNA, 15 bp, Homo sapiens
gatgatatgggatga

SEQ ID NO: 996480 - DNA, 15 bp, Homo sapiens
atgatatgggatgac

SEQ ID NO: 996481 - DNA, 15 bp, Homo sapiens
tgatatgggatgacc

SEQ ID NO: 996482 - DNA, 15 bp, Homo sapiens
gatatgggatgacca

SEQ ID NO: 996483 - DNA, 15 bp, Homo sapiens
atatgggatgaccag

SEQ ID NO: 996484 - DNA, 15 bp, Homo sapiens
tatgggatgaccagg

SEQ ID NO: 996485 - DNA, 15 bp, Homo sapiens
atgggatgaccaggc

SEQ ID NO: 996486 - DNA, 15 bp, Homo sapiens
tgggatgaccaggca

SEQ ID NO: 996487 - DNA, 15 bp, Homo sapiens
gggatgaccaggcag

SEQ ID NO: 996488 - DNA, 15 bp, Homo sapiens
ggatgaccaggcagg

SEQ ID NO: 996489 - DNA, 15 bp, Homo sapiens
gatgaccaggcaggc

SEQ ID NO: 996490 - DNA, 15 bp, Homo sapiens
atgaccaggcaggcc

SEQ ID NO: 996491 - DNA, 15 bp, Homo sapiens
tgaccaggcaggcca

SEQ ID NO: 996492 - DNA, 15 bp, Homo sapiens
gaccaggcaggccat

SEQ ID NO: 996493 - DNA, 15 bp, Homo sapiens
accaggcaggccatc

SEQ ID NO: 996494 - DNA, 15 bp, Homo sapiens
ccaggcaggccatct

SEQ ID NO: 996495 - DNA, 15 bp, Homo sapiens
caggcaggccatctg

SEQ ID NO: 996496 - DNA, 15 bp, Homo sapiens
aggcaggccatctgg

SEQ ID NO: 996497 - DNA, 15 bp, Homo sapiens
ggcaggccatctggc

SEQ ID NO: 996498 - DNA, 15 bp, Homo sapiens
gcaggccatctggca

SEQ ID NO: 996499 - DNA, 15 bp, Homo sapiens
caggccatctggcat

SEQ ID NO: 996500 - DNA, 15 bp, Homo sapiens
aggccatctggcatc

SEQ ID NO: 996501 - DNA, 15 bp, Homo sapiens
ggccatctggcatct

SEQ ID NO: 996502 - DNA, 15 bp, Homo sapiens
gccatctggcatcta

SEQ ID NO: 996503 - DNA, 15 bp, Homo sapiens
ccatctggcatctaa

SEQ ID NO: 996504 - DNA, 15 bp, Homo sapiens
catctggcatctaac

SEQ ID NO: 996505 - DNA, 15 bp, Homo sapiens
atctggcatctaaca

SEQ ID NO: 996506 - DNA, 15 bp, Homo sapiens
tctggcatctaacag

SEQ ID NO: 996507 - DNA, 15 bp, Homo sapiens
ctggcatctaacagg

SEQ ID NO: 996508 - DNA, 15 bp, Homo sapiens
tggcatctaacaggt

SEQ ID NO: 996509 - DNA, 15 bp, Homo sapiens
ggcatctaacaggtg

SEQ ID NO: 996510 - DNA, 15 bp, Homo sapiens
gcatctaacaggtgc

SEQ ID NO: 996511 - DNA, 15 bp, Homo sapiens
catctaacaggtgct

SEQ ID NO: 996512 - DNA, 15 bp, Homo sapiens
atctaacaggtgctc

SEQ ID NO: 996513 - DNA, 15 bp, Homo sapiens
tctaacaggtgctca

SEQ ID NO: 996514 - DNA, 15 bp, Homo sapiens
ctaacaggtgctcaa

SEQ ID NO: 996515 - DNA, 15 bp, Homo sapiens
taacaggtgctcaat

SEQ ID NO: 996516 - DNA, 15 bp, Homo sapiens
aacaggtgctcaata

SEQ ID NO: 996517 - DNA, 15 bp, Homo sapiens
acaggtgctcaataa

SEQ ID NO: 996518 - DNA, 15 bp, Homo sapiens
caggtgctcaataaa

SEQ ID NO: 996519 - DNA, 15 bp, Homo sapiens
aggtgctcaataaat

SEQ ID NO: 996520 - DNA, 15 bp, Homo sapiens
ggtgctcaataaatg

SEQ ID NO: 996521 - DNA, 15 bp, Homo sapiens
gtgctcaataaatgt

SEQ ID NO: 996522 - DNA, 15 bp, Homo sapiens
tgctcaataaatgtt

SEQ ID NO: 996523 - DNA, 15 bp, Homo sapiens
gctcaataaatgttc

SEQ ID NO: 996524 - DNA, 15 bp, Homo sapiens
ctcaataaatgttca

SEQ ID NO: 996525 - DNA, 15 bp, Homo sapiens
tcaataaatgttcat

SEQ ID NO: 996526 - DNA, 15 bp, Homo sapiens
caataaatgttcatt

SEQ ID NO: 996527 - DNA, 15 bp, Homo sapiens
aataaatgttcattg

SEQ ID NO: 996528 - DNA, 15 bp, Homo sapiens
ataaatgttcattgt

SEQ ID NO: 996529 - DNA, 15 bp, Homo sapiens
taaatgttcattgtc

SEQ ID NO: 996530 - DNA, 15 bp, Homo sapiens
aaatgttcattgtcc

SEQ ID NO: 996531 - DNA, 15 bp, Homo sapiens
aatgttcattgtccc

SEQ ID NO: 996532 - DNA, 15 bp, Homo sapiens
atgttcattgtcccc

SEQ ID NO: 996533 - DNA, 15 bp, Homo sapiens
tgttcattgtcccct

SEQ ID NO: 996534 - DNA, 15 bp, Homo sapiens
gttcattgtcccctg

SEQ ID NO: 996535 - DNA, 15 bp, Homo sapiens
ttcattgtcccctgt

SEQ ID NO: 996536 - DNA, 15 bp, Homo sapiens
tcattgtcccctgtt

SEQ ID NO: 996537 - DNA, 15 bp, Homo sapiens
cattgtcccctgttc

SEQ ID NO: 996538 - DNA, 15 bp, Homo sapiens
attgtcccctgttct

SEQ ID NO: 996539 - DNA, 15 bp, Homo sapiens
ttgtcccctgttctc

SEQ ID NO: 996540 - DNA, 15 bp, Homo sapiens
tgtcccctgttctcc

SEQ ID NO: 996541 - DNA, 15 bp, Homo sapiens
gtcccctgttctcca

SEQ ID NO: 996542 - DNA, 15 bp, Homo sapiens
tcccctgttctccac

SEQ ID NO: 996543 - DNA, 15 bp, Homo sapiens
cccctgttctccaca

SEQ ID NO: 996544 - DNA, 15 bp, Homo sapiens
ccctgttctccacac

SEQ ID NO: 996545 - DNA, 15 bp, Homo sapiens
cctgttctccacacc

SEQ ID NO: 996546 - DNA, 15 bp, Homo sapiens
ctgttctccacaccc

SEQ ID NO: 996547 - DNA, 15 bp, Homo sapiens
tgttctccacaccct

SEQ ID NO: 996548 - DNA, 15 bp, Homo sapiens
gttctccacaccctt

SEQ ID NO: 996549 - DNA, 15 bp, Homo sapiens
ttctccacacccttc

SEQ ID NO: 996550 - DNA, 15 bp, Homo sapiens
tctccacacccttca

SEQ ID NO: 996551 - DNA, 15 bp, Homo sapiens
ctccacacccttcaa

SEQ ID NO: 996552 - DNA, 15 bp, Homo sapiens
tccacacccttcaac

SEQ ID NO: 996553 - DNA, 15 bp, Homo sapiens
ccacacccttcaacc

SEQ ID NO: 996554 - DNA, 15 bp, Homo sapiens
cacacccttcaaccc

SEQ ID NO: 996555 - DNA, 15 bp, Homo sapiens
acacccttcaaccca

SEQ ID NO: 996556 - DNA, 15 bp, Homo sapiens
cacccttcaacccag

SEQ ID NO: 996557 - DNA, 15 bp, Homo sapiens
acccttcaacccagg

SEQ ID NO: 996558 - DNA, 15 bp, Homo sapiens
cccttcaacccaggg

SEQ ID NO: 996559 - DNA, 15 bp, Homo sapiens
ccttcaacccagggt

SEQ ID NO: 996560 - DNA, 15 bp, Homo sapiens
cttcaacccagggtt

SEQ ID NO: 996561 - DNA, 15 bp, Homo sapiens
ttcaacccagggttt

SEQ ID NO: 996562 - DNA, 15 bp, Homo sapiens
tcaacccagggtttt

SEQ ID NO: 996563 - DNA, 15 bp, Homo sapiens
caacccagggttttc

SEQ ID NO: 996564 - DNA, 15 bp, Homo sapiens
aacccagggttttca

SEQ ID NO: 996565 - DNA, 15 bp, Homo sapiens
acccagggttttcac

SEQ ID NO: 996566 - DNA, 15 bp, Homo sapiens
cccagggttttcacc

SEQ ID NO: 996567 - DNA, 15 bp, Homo sapiens
ccagggttttcacct

SEQ ID NO: 996568 - DNA, 15 bp, Homo sapiens
cagggttttcaccta

SEQ ID NO: 996569 - DNA, 15 bp, Homo sapiens
agggttttcacctat

SEQ ID NO: 996570 - DNA, 15 bp, Homo sapiens
gggttttcacctatg

SEQ ID NO: 996571 - DNA, 15 bp, Homo sapiens
ggttttcacctatgg

SEQ ID NO: 996572 - DNA, 15 bp, Homo sapiens
gttttcacctatggg

SEQ ID NO: 996573 - DNA, 15 bp, Homo sapiens
ttttcacctatggga

SEQ ID NO: 996574 - DNA, 15 bp, Homo sapiens
tttcacctatgggat

SEQ ID NO: 996575 - DNA, 15 bp, Homo sapiens
ttcacctatgggatg

SEQ ID NO: 996576 - DNA, 15 bp, Homo sapiens
tcacctatgggatgg

SEQ ID NO: 996577 - DNA, 15 bp, Homo sapiens
cacctatgggatggg

SEQ ID NO: 996578 - DNA, 15 bp, Homo sapiens
acctatgggatgggg

SEQ ID NO: 996579 - DNA, 15 bp, Homo sapiens
cctatgggatggggc

SEQ ID NO: 996580 - DNA, 15 bp, Homo sapiens
ctatgggatggggca

SEQ ID NO: 996581 - DNA, 15 bp, Homo sapiens
tatgggatggggcaa

SEQ ID NO: 996582 - DNA, 15 bp, Homo sapiens
atgggatggggcaag

SEQ ID NO: 996583 - DNA, 15 bp, Homo sapiens
tgggatggggcaagg

SEQ ID NO: 996584 - DNA, 15 bp, Homo sapiens
gggatggggcaaggg

SEQ ID NO: 996585 - DNA, 15 bp, Homo sapiens
ggatggggcaagggc

SEQ ID NO: 996586 - DNA, 15 bp, Homo sapiens
gatggggcaagggct

SEQ ID NO: 996587 - DNA, 15 bp, Homo sapiens
atggggcaagggctg

SEQ ID NO: 996588 - DNA, 15 bp, Homo sapiens
tggggcaagggctgt

SEQ ID NO: 996589 - DNA, 15 bp, Homo sapiens
ggggcaagggctgta

SEQ ID NO: 996590 - DNA, 15 bp, Homo sapiens
gggcaagggctgtag

SEQ ID NO: 996591 - DNA, 15 bp, Homo sapiens
ggcaagggctgtagt

SEQ ID NO: 996592 - DNA, 15 bp, Homo sapiens
gcaagggctgtagtt

SEQ ID NO: 996593 - DNA, 15 bp, Homo sapiens
caagggctgtagtta

SEQ ID NO: 996594 - DNA, 15 bp, Homo sapiens
aagggctgtagttag

SEQ ID NO: 996595 - DNA, 15 bp, Homo sapiens
agggctgtagttagt

SEQ ID NO: 996596 - DNA, 15 bp, Homo sapiens
gggctgtagttagtg

SEQ ID NO: 996597 - DNA, 15 bp, Homo sapiens
ggctgtagttagtgg

SEQ ID NO: 996598 - DNA, 15 bp, Homo sapiens
gctgtagttagtgga

SEQ ID NO: 996599 - DNA, 15 bp, Homo sapiens
ctgtagttagtggag

SEQ ID NO: 996600 - DNA, 15 bp, Homo sapiens
tgtagttagtggagg

SEQ ID NO: 996601 - DNA, 15 bp, Homo sapiens
gtagttagtggaggg

SEQ ID NO: 996602 - DNA, 15 bp, Homo sapiens
tagttagtggagggg

SEQ ID NO: 996603 - DNA, 15 bp, Homo sapiens
agttagtggaggggt

SEQ ID NO: 996604 - DNA, 15 bp, Homo sapiens
gttagtggaggggtc

SEQ ID NO: 996605 - DNA, 15 bp, Homo sapiens
ttagtggaggggtct

SEQ ID NO: 996606 - DNA, 15 bp, Homo sapiens
tagtggaggggtctc

SEQ ID NO: 996607 - DNA, 15 bp, Homo sapiens
agtggaggggtctca

SEQ ID NO: 996608 - DNA, 15 bp, Homo sapiens
gtggaggggtctcag

SEQ ID NO: 996609 - DNA, 15 bp, Homo sapiens
tggaggggtctcagg

SEQ ID NO: 996610 - DNA, 15 bp, Homo sapiens
ggaggggtctcaggg

SEQ ID NO: 996611 - DNA, 15 bp, Homo sapiens
gaggggtctcagggg

SEQ ID NO: 996612 - DNA, 15 bp, Homo sapiens
aggggtctcaggggc

SEQ ID NO: 996613 - DNA, 15 bp, Homo sapiens
ggggtctcaggggca

SEQ ID NO: 996614 - DNA, 15 bp, Homo sapiens
gggtctcaggggcat

SEQ ID NO: 996615 - DNA, 15 bp, Homo sapiens
ggtctcaggggcatc

SEQ ID NO: 996616 - DNA, 15 bp, Homo sapiens
gtctcaggggcatct

SEQ ID NO: 996617 - DNA, 15 bp, Homo sapiens
tctcaggggcatctg

SEQ ID NO: 996618 - DNA, 15 bp, Homo sapiens
ctcaggggcatctgt

SEQ ID NO: 996619 - DNA, 15 bp, Homo sapiens
tcaggggcatctgtc

SEQ ID NO: 996620 - DNA, 15 bp, Homo sapiens
caggggcatctgtct

SEQ ID NO: 996621 - DNA, 15 bp, Homo sapiens
aggggcatctgtctg

SEQ ID NO: 996622 - DNA, 15 bp, Homo sapiens
ggggcatctgtctgt

SEQ ID NO: 996623 - DNA, 15 bp, Homo sapiens
gggcatctgtctgtg

SEQ ID NO: 996624 - DNA, 15 bp, Homo sapiens
ggcatctgtctgtgg

SEQ ID NO: 996625 - DNA, 15 bp, Homo sapiens
gcatctgtctgtgga

SEQ ID NO: 996626 - DNA, 15 bp, Homo sapiens
catctgtctgtggaa

SEQ ID NO: 996627 - DNA, 15 bp, Homo sapiens
atctgtctgtggaaa

SEQ ID NO: 996628 - DNA, 15 bp, Homo sapiens
tctgtctgtggaaag

SEQ ID NO: 996629 - DNA, 15 bp, Homo sapiens
ctgtctgtggaaaga

SEQ ID NO: 996630 - DNA, 15 bp, Homo sapiens
tgtctgtggaaagag

SEQ ID NO: 996631 - DNA, 15 bp, Homo sapiens
gtctgtggaaagagt

SEQ ID NO: 996632 - DNA, 15 bp, Homo sapiens
tctgtggaaagagtc

SEQ ID NO: 996633 - DNA, 15 bp, Homo sapiens
ctgtggaaagagtcc

SEQ ID NO: 996634 - DNA, 15 bp, Homo sapiens
tgtggaaagagtcct

SEQ ID NO: 996635 - DNA, 15 bp, Homo sapiens
gtggaaagagtcctg

SEQ ID NO: 996636 - DNA, 15 bp, Homo sapiens
tggaaagagtcctgg

SEQ ID NO: 996637 - DNA, 15 bp, Homo sapiens
ggaaagagtcctgga

SEQ ID NO: 996638 - DNA, 15 bp, Homo sapiens
gaaagagtcctggac

SEQ ID NO: 996639 - DNA, 15 bp, Homo sapiens
aaagagtcctggacc

SEQ ID NO: 996640 - DNA, 15 bp, Homo sapiens
aagagtcctggacca

SEQ ID NO: 996641 - DNA, 15 bp, Homo sapiens
agagtcctggaccaa

SEQ ID NO: 996642 - DNA, 15 bp, Homo sapiens
gagtcctggaccaag

SEQ ID NO: 996643 - DNA, 15 bp, Homo sapiens
agtcctggaccaaga

SEQ ID NO: 996644 - DNA, 15 bp, Homo sapiens
gtcctggaccaagac

SEQ ID NO: 996645 - DNA, 15 bp, Homo sapiens
tcctggaccaagact

SEQ ID NO: 996646 - DNA, 15 bp, Homo sapiens
cctggaccaagactc

SEQ ID NO: 996647 - DNA, 15 bp, Homo sapiens
ctggaccaagactca

SEQ ID NO: 996648 - DNA, 15 bp, Homo sapiens
tggaccaagactcag

SEQ ID NO: 996649 - DNA, 15 bp, Homo sapiens
ggaccaagactcaga

SEQ ID NO: 996650 - DNA, 15 bp, Homo sapiens
gaccaagactcagag

SEQ ID NO: 996651 - DNA, 15 bp, Homo sapiens
accaagactcagaga

SEQ ID NO: 996652 - DNA, 15 bp, Homo sapiens
ccaagactcagagat

SEQ ID NO: 996653 - DNA, 15 bp, Homo sapiens
caagactcagagatg

SEQ ID NO: 996654 - DNA, 15 bp, Homo sapiens
aagactcagagatgg

SEQ ID NO: 996655 - DNA, 15 bp, Homo sapiens
agactcagagatggc

SEQ ID NO: 996656 - DNA, 15 bp, Homo sapiens
gactcagagatggca

SEQ ID NO: 996657 - DNA, 15 bp, Homo sapiens
actcagagatggcag

SEQ ID NO: 996658 - DNA, 15 bp, Homo sapiens
ctcagagatggcaga

SEQ ID NO: 996659 - DNA, 15 bp, Homo sapiens
tcagagatggcagag

SEQ ID NO: 996660 - DNA, 15 bp, Homo sapiens
cagagatggcagagg

SEQ ID NO: 996661 - DNA, 15 bp, Homo sapiens
agagatggcagaggc

SEQ ID NO: 996662 - DNA, 15 bp, Homo sapiens
gagatggcagaggca

SEQ ID NO: 996663 - DNA, 15 bp, Homo sapiens
agatggcagaggcag

SEQ ID NO: 996664 - DNA, 15 bp, Homo sapiens
gatggcagaggcagc

SEQ ID NO: 996665 - DNA, 15 bp, Homo sapiens
atggcagaggcagct

SEQ ID NO: 996666 - DNA, 15 bp, Homo sapiens
tggcagaggcagctc

SEQ ID NO: 996667 - DNA, 15 bp, Homo sapiens
ggcagaggcagctcc

SEQ ID NO: 996668 - DNA, 15 bp, Homo sapiens
gcagaggcagctcca

SEQ ID NO: 996669 - DNA, 15 bp, Homo sapiens
cagaggcagctccat

SEQ ID NO: 996670 - DNA, 15 bp, Homo sapiens
agaggcagctccatg

SEQ ID NO: 996671 - DNA, 15 bp, Homo sapiens
gaggcagctccatgg

SEQ ID NO: 996672 - DNA, 15 bp, Homo sapiens
aggcagctccatggt

SEQ ID NO: 996673 - DNA, 15 bp, Homo sapiens
ggcagctccatggtc

SEQ ID NO: 996674 - DNA, 15 bp, Homo sapiens
gcagctccatggtcc

SEQ ID NO: 996675 - DNA, 15 bp, Homo sapiens
cagctccatggtccc

SEQ ID NO: 996676 - DNA, 15 bp, Homo sapiens
agctccatggtcccc

SEQ ID NO: 996677 - DNA, 15 bp, Homo sapiens
gctccatggtccccg

SEQ ID NO: 996678 - DNA, 15 bp, Homo sapiens
ctccatggtccccgg

SEQ ID NO: 996679 - DNA, 15 bp, Homo sapiens
tccatggtccccggg

SEQ ID NO: 996680 - DNA, 15 bp, Homo sapiens
ccatggtccccgggg

SEQ ID NO: 996681 - DNA, 15 bp, Homo sapiens
catggtccccggggg

SEQ ID NO: 996682 - DNA, 15 bp, Homo sapiens
atggtccccgggggg

SEQ ID NO: 996683 - DNA, 15 bp, Homo sapiens
tggtccccggggggc

SEQ ID NO: 996684 - DNA, 15 bp, Homo sapiens
ggtccccggggggcc

SEQ ID NO: 996685 - DNA, 15 bp, Homo sapiens
gtccccggggggcca

SEQ ID NO: 996686 - DNA, 15 bp, Homo sapiens
tccccggggggccaa

SEQ ID NO: 996687 - DNA, 15 bp, Homo sapiens
ccccggggggccaac

SEQ ID NO: 996688 - DNA, 15 bp, Homo sapiens
cccggggggccaact

SEQ ID NO: 996689 - DNA, 15 bp, Homo sapiens
ccggggggccaactg

SEQ ID NO: 996690 - DNA, 15 bp, Homo sapiens
cggggggccaactgg

SEQ ID NO: 996691 - DNA, 15 bp, Homo sapiens
ggggggccaactgga

SEQ ID NO: 996692 - DNA, 15 bp, Homo sapiens
gggggccaactggag

SEQ ID NO: 996693 - DNA, 15 bp, Homo sapiens
ggggccaactggagt

SEQ ID NO: 996694 - DNA, 15 bp, Homo sapiens
gggccaactggagtc

SEQ ID NO: 996695 - DNA, 15 bp, Homo sapiens
ggccaactggagtca

SEQ ID NO: 996696 - DNA, 15 bp, Homo sapiens
gccaactggagtcat

SEQ ID NO: 996697 - DNA, 15 bp, Homo sapiens
ccaactggagtcatc

SEQ ID NO: 996698 - DNA, 15 bp, Homo sapiens
caactggagtcatcc

SEQ ID NO: 996699 - DNA, 15 bp, Homo sapiens
aactggagtcatccc

SEQ ID NO: 996700 - DNA, 15 bp, Homo sapiens
actggagtcatccct

SEQ ID NO: 996701 - DNA, 15 bp, Homo sapiens
ctggagtcatccctc

SEQ ID NO: 996702 - DNA, 15 bp, Homo sapiens
tggagtcatccctcc

SEQ ID NO: 996703 - DNA, 15 bp, Homo sapiens
ggagtcatccctccc

SEQ ID NO: 996704 - DNA, 15 bp, Homo sapiens
gagtcatccctccct

SEQ ID NO: 996705 - DNA, 15 bp, Homo sapiens
agtcatccctccctg

SEQ ID NO: 996706 - DNA, 15 bp, Homo sapiens
gtcatccctccctga

SEQ ID NO: 996707 - DNA, 15 bp, Homo sapiens
tcatccctccctgaa

SEQ ID NO: 996708 - DNA, 15 bp, Homo sapiens
catccctccctgaag

SEQ ID NO: 996709 - DNA, 15 bp, Homo sapiens
atccctccctgaagc

SEQ ID NO: 996710 - DNA, 15 bp, Homo sapiens
tccctccctgaagcc

SEQ ID NO: 996711 - DNA, 15 bp, Homo sapiens
ccctccctgaagcct

SEQ ID NO: 996712 - DNA, 15 bp, Homo sapiens
cctccctgaagcctc

SEQ ID NO: 996713 - DNA, 15 bp, Homo sapiens
ctccctgaagcctca

SEQ ID NO: 996714 - DNA, 15 bp, Homo sapiens
tccctgaagcctcag

SEQ ID NO: 996715 - DNA, 15 bp, Homo sapiens
ccctgaagcctcagc

SEQ ID NO: 996716 - DNA, 15 bp, Homo sapiens
cctgaagcctcagct

SEQ ID NO: 996717 - DNA, 15 bp, Homo sapiens
ctgaagcctcagctt

SEQ ID NO: 996718 - DNA, 15 bp, Homo sapiens
tgaagcctcagcttc

SEQ ID NO: 996719 - DNA, 15 bp, Homo sapiens
gaagcctcagcttcc

SEQ ID NO: 996720 - DNA, 15 bp, Homo sapiens
aagcctcagcttcct

SEQ ID NO: 996721 - DNA, 15 bp, Homo sapiens
agcctcagcttcctc

SEQ ID NO: 996722 - DNA, 15 bp, Homo sapiens
gcctcagcttcctca

SEQ ID NO: 996723 - DNA, 15 bp, Homo sapiens
cctcagcttcctcat

SEQ ID NO: 996724 - DNA, 15 bp, Homo sapiens
ctcagcttcctcatc

SEQ ID NO: 996725 - DNA, 15 bp, Homo sapiens
tcagcttcctcatct

SEQ ID NO: 996726 - DNA, 15 bp, Homo sapiens
cagcttcctcatctg

SEQ ID NO: 996727 - DNA, 15 bp, Homo sapiens
agcttcctcatctgt

SEQ ID NO: 996728 - DNA, 15 bp, Homo sapiens
gcttcctcatctgta

SEQ ID NO: 996729 - DNA, 15 bp, Homo sapiens
cttcctcatctgtat

SEQ ID NO: 996730 - DNA, 15 bp, Homo sapiens
ttcctcatctgtata

SEQ ID NO: 996731 - DNA, 15 bp, Homo sapiens
tcctcatctgtataa

SEQ ID NO: 996732 - DNA, 15 bp, Homo sapiens
cctcatctgtataat

SEQ ID NO: 996733 - DNA, 15 bp, Homo sapiens
ctcatctgtataatg

SEQ ID NO: 996734 - DNA, 15 bp, Homo sapiens
tcatctgtataatgg

SEQ ID NO: 996735 - DNA, 15 bp, Homo sapiens
catctgtataatggg

SEQ ID NO: 996736 - DNA, 15 bp, Homo sapiens
atctgtataatgggg

SEQ ID NO: 996737 - DNA, 15 bp, Homo sapiens
tctgtataatggggt

SEQ ID NO: 996738 - DNA, 15 bp, Homo sapiens
ctgtataatggggtc

SEQ ID NO: 996739 - DNA, 15 bp, Homo sapiens
tgtataatggggtct

SEQ ID NO: 996740 - DNA, 15 bp, Homo sapiens
gtataatggggtctg

SEQ ID NO: 996741 - DNA, 15 bp, Homo sapiens
tataatggggtctga

SEQ ID NO: 996742 - DNA, 15 bp, Homo sapiens
ataatggggtctgag

SEQ ID NO: 996743 - DNA, 15 bp, Homo sapiens
taatggggtctgagt

SEQ ID NO: 996744 - DNA, 15 bp, Homo sapiens
aatggggtctgagtg

SEQ ID NO: 996745 - DNA, 15 bp, Homo sapiens
atggggtctgagtgg

SEQ ID NO: 996746 - DNA, 15 bp, Homo sapiens
tggggtctgagtggg

SEQ ID NO: 996747 - DNA, 15 bp, Homo sapiens
ggggtctgagtgggc

SEQ ID NO: 996748 - DNA, 15 bp, Homo sapiens
gggtctgagtgggca

SEQ ID NO: 996749 - DNA, 15 bp, Homo sapiens
ggtctgagtgggcag

SEQ ID NO: 996750 - DNA, 15 bp, Homo sapiens
gtctgagtgggcaga

SEQ ID NO: 996751 - DNA, 15 bp, Homo sapiens
tctgagtgggcagaa

SEQ ID NO: 996752 - DNA, 15 bp, Homo sapiens
ctgagtgggcagaac

SEQ ID NO: 996753 - DNA, 15 bp, Homo sapiens
tgagtgggcagaaca

SEQ ID NO: 996754 - DNA, 15 bp, Homo sapiens
gagtgggcagaacag

SEQ ID NO: 996755 - DNA, 15 bp, Homo sapiens
agtgggcagaacagg

SEQ ID NO: 996756 - DNA, 15 bp, Homo sapiens
gtgggcagaacaggt

SEQ ID NO: 996757 - DNA, 15 bp, Homo sapiens
tgggcagaacaggtg

SEQ ID NO: 996758 - DNA, 15 bp, Homo sapiens
gggcagaacaggtgt

SEQ ID NO: 996759 - DNA, 15 bp, Homo sapiens
ggcagaacaggtgtt

SEQ ID NO: 996760 - DNA, 15 bp, Homo sapiens
gcagaacaggtgttg

SEQ ID NO: 996761 - DNA, 15 bp, Homo sapiens
cagaacaggtgttga

SEQ ID NO: 996762 - DNA, 15 bp, Homo sapiens
agaacaggtgttgag

SEQ ID NO: 996763 - DNA, 15 bp, Homo sapiens
gaacaggtgttgaga

SEQ ID NO: 996764 - DNA, 15 bp, Homo sapiens
aacaggtgttgagac

SEQ ID NO: 996765 - DNA, 15 bp, Homo sapiens
acaggtgttgagact

SEQ ID NO: 996766 - DNA, 15 bp, Homo sapiens
caggtgttgagactg

SEQ ID NO: 996767 - DNA, 15 bp, Homo sapiens
aggtgttgagactgt

SEQ ID NO: 996768 - DNA, 15 bp, Homo sapiens
ggtgttgagactgtg

SEQ ID NO: 996769 - DNA, 15 bp, Homo sapiens
gtgttgagactgtgg

SEQ ID NO: 996770 - DNA, 15 bp, Homo sapiens
tgttgagactgtggc

SEQ ID NO: 996771 - DNA, 15 bp, Homo sapiens
gttgagactgtggca

SEQ ID NO: 996772 - DNA, 15 bp, Homo sapiens
ttgagactgtggcag

SEQ ID NO: 996773 - DNA, 15 bp, Homo sapiens
tgagactgtggcagg

SEQ ID NO: 996774 - DNA, 15 bp, Homo sapiens
gagactgtggcaggg

SEQ ID NO: 996775 - DNA, 15 bp, Homo sapiens
agactgtggcagggc

SEQ ID NO: 996776 - DNA, 15 bp, Homo sapiens
gactgtggcagggct

SEQ ID NO: 996777 - DNA, 15 bp, Homo sapiens
actgtggcagggctc

SEQ ID NO: 996778 - DNA, 15 bp, Homo sapiens
ctgtggcagggctca

SEQ ID NO: 996779 - DNA, 15 bp, Homo sapiens
tgtggcagggctcag

SEQ ID NO: 996780 - DNA, 15 bp, Homo sapiens
gtggcagggctcagg

SEQ ID NO: 996781 - DNA, 15 bp, Homo sapiens
tggcagggctcagga

SEQ ID NO: 996782 - DNA, 15 bp, Homo sapiens
ggcagggctcaggag

SEQ ID NO: 996783 - DNA, 15 bp, Homo sapiens
gcagggctcaggagg

SEQ ID NO: 996784 - DNA, 15 bp, Homo sapiens
cagggctcaggagga

SEQ ID NO: 996785 - DNA, 15 bp, Homo sapiens
agggctcaggaggac

SEQ ID NO: 996786 - DNA, 15 bp, Homo sapiens
gggctcaggaggaca

SEQ ID NO: 996787 - DNA, 15 bp, Homo sapiens
ggctcaggaggacac

SEQ ID NO: 996788 - DNA, 15 bp, Homo sapiens
gctcaggaggacacc

SEQ ID NO: 996789 - DNA, 15 bp, Homo sapiens
ctcaggaggacacct

SEQ ID NO: 996790 - DNA, 15 bp, Homo sapiens
tcaggaggacacctg

SEQ ID NO: 996791 - DNA, 15 bp, Homo sapiens
caggaggacacctgt

SEQ ID NO: 996792 - DNA, 15 bp, Homo sapiens
aggaggacacctgtt

SEQ ID NO: 996793 - DNA, 15 bp, Homo sapiens
ggaggacacctgttc

SEQ ID NO: 996794 - DNA, 15 bp, Homo sapiens
gaggacacctgttcc

SEQ ID NO: 996795 - DNA, 15 bp, Homo sapiens
aggacacctgttccc

SEQ ID NO: 996796 - DNA, 15 bp, Homo sapiens
ggacacctgttccca

SEQ ID NO: 996797 - DNA, 15 bp, Homo sapiens
gacacctgttcccac

SEQ ID NO: 996798 - DNA, 15 bp, Homo sapiens
acacctgttcccact

SEQ ID NO: 996799 - DNA, 15 bp, Homo sapiens
cacctgttcccacta

SEQ ID NO: 996800 - DNA, 15 bp, Homo sapiens
acctgttcccactag

SEQ ID NO: 996801 - DNA, 15 bp, Homo sapiens
cctgttcccactagg

SEQ ID NO: 996802 - DNA, 15 bp, Homo sapiens
ctgttcccactaggg

SEQ ID NO: 996803 - DNA, 15 bp, Homo sapiens
tgttcccactagggt

SEQ ID NO: 996804 - DNA, 15 bp, Homo sapiens
gttcccactagggtg

SEQ ID NO: 996805 - DNA, 15 bp, Homo sapiens
ttcccactagggtgg

SEQ ID NO: 996806 - DNA, 15 bp, Homo sapiens
tcccactagggtggg

SEQ ID NO: 996807 - DNA, 15 bp, Homo sapiens
cccactagggtgggt

SEQ ID NO: 996808 - DNA, 15 bp, Homo sapiens
ccactagggtgggtg

SEQ ID NO: 996809 - DNA, 15 bp, Homo sapiens
cactagggtgggtga

SEQ ID NO: 996810 - DNA, 15 bp, Homo sapiens
actagggtgggtgag

SEQ ID NO: 996811 - DNA, 15 bp, Homo sapiens
ctagggtgggtgagt

SEQ ID NO: 996812 - DNA, 15 bp, Homo sapiens
tagggtgggtgagtc

SEQ ID NO: 996813 - DNA, 15 bp, Homo sapiens
agggtgggtgagtcc

SEQ ID NO: 996814 - DNA, 15 bp, Homo sapiens
gggtgggtgagtccg

SEQ ID NO: 996815 - DNA, 15 bp, Homo sapiens
ggtgggtgagtccgg

SEQ ID NO: 996816 - DNA, 15 bp, Homo sapiens
gtgggtgagtccggg

SEQ ID NO: 996817 - DNA, 15 bp, Homo sapiens
tgggtgagtccgggg

SEQ ID NO: 996818 - DNA, 15 bp, Homo sapiens
gggtgagtccggggg

SEQ ID NO: 996819 - DNA, 15 bp, Homo sapiens
ggtgagtccgggggc

SEQ ID NO: 996820 - DNA, 15 bp, Homo sapiens
gtgagtccgggggca

SEQ ID NO: 996821 - DNA, 15 bp, Homo sapiens
tgagtccgggggcag

SEQ ID NO: 996822 - DNA, 15 bp, Homo sapiens
gagtccgggggcagc

SEQ ID NO: 996823 - DNA, 15 bp, Homo sapiens
agtccgggggcagct

SEQ ID NO: 996824 - DNA, 15 bp, Homo sapiens
gtccgggggcagctg

SEQ ID NO: 996825 - DNA, 15 bp, Homo sapiens
tccgggggcagctgc

SEQ ID NO: 996826 - DNA, 15 bp, Homo sapiens
ccgggggcagctgcc

SEQ ID NO: 996827 - DNA, 15 bp, Homo sapiens
cgggggcagctgcct

SEQ ID NO: 996828 - DNA, 15 bp, Homo sapiens
gggggcagctgcctg

SEQ ID NO: 996829 - DNA, 15 bp, Homo sapiens
ggggcagctgcctgt

SEQ ID NO: 996830 - DNA, 15 bp, Homo sapiens
gggcagctgcctgtg

SEQ ID NO: 996831 - DNA, 15 bp, Homo sapiens
ggcagctgcctgtgg

SEQ ID NO: 996832 - DNA, 15 bp, Homo sapiens
gcagctgcctgtggc

SEQ ID NO: 996833 - DNA, 15 bp, Homo sapiens
cagctgcctgtggca

SEQ ID NO: 996834 - DNA, 15 bp, Homo sapiens
agctgcctgtggcaa

SEQ ID NO: 996835 - DNA, 15 bp, Homo sapiens
gctgcctgtggcaag

SEQ ID NO: 996836 - DNA, 15 bp, Homo sapiens
ctgcctgtggcaagg

SEQ ID NO: 996837 - DNA, 15 bp, Homo sapiens
tgcctgtggcaaggg

SEQ ID NO: 996838 - DNA, 15 bp, Homo sapiens
gcctgtggcaagggc

SEQ ID NO: 996839 - DNA, 15 bp, Homo sapiens
cctgtggcaagggca

SEQ ID NO: 996840 - DNA, 15 bp, Homo sapiens
ctgtggcaagggcag

SEQ ID NO: 996841 - DNA, 15 bp, Homo sapiens
tgtggcaagggcagg

SEQ ID NO: 996842 - DNA, 15 bp, Homo sapiens
gtggcaagggcaggc

SEQ ID NO: 996843 - DNA, 15 bp, Homo sapiens
tggcaagggcaggcc

SEQ ID NO: 996844 - DNA, 15 bp, Homo sapiens
ggcaagggcaggcca

SEQ ID NO: 996845 - DNA, 15 bp, Homo sapiens
gcaagggcaggccaa

SEQ ID NO: 996846 - DNA, 15 bp, Homo sapiens
caagggcaggccaag

SEQ ID NO: 996847 - DNA, 15 bp, Homo sapiens
aagggcaggccaagg

SEQ ID NO: 996848 - DNA, 15 bp, Homo sapiens
agggcaggccaagga

SEQ ID NO: 996849 - DNA, 15 bp, Homo sapiens
gggcaggccaaggac

SEQ ID NO: 996850 - DNA, 15 bp, Homo sapiens
ggcaggccaaggacc

SEQ ID NO: 996851 - DNA, 15 bp, Homo sapiens
gcaggccaaggaccc

SEQ ID NO: 996852 - DNA, 15 bp, Homo sapiens
caggccaaggacccc

SEQ ID NO: 996853 - DNA, 15 bp, Homo sapiens
aggccaaggacccct

SEQ ID NO: 996854 - DNA, 15 bp, Homo sapiens
ggccaaggacccctg

SEQ ID NO: 996855 - DNA, 15 bp, Homo sapiens
gccaaggacccctgg

SEQ ID NO: 996856 - DNA, 15 bp, Homo sapiens
ccaaggacccctggg

SEQ ID NO: 996857 - DNA, 15 bp, Homo sapiens
caaggacccctgggc

SEQ ID NO: 996858 - DNA, 15 bp, Homo sapiens
aaggacccctgggcc

SEQ ID NO: 996859 - DNA, 15 bp, Homo sapiens
aggacccctgggccc

SEQ ID NO: 996860 - DNA, 15 bp, Homo sapiens
ggacccctgggccca

SEQ ID NO: 996861 - DNA, 15 bp, Homo sapiens
gacccctgggcccag

SEQ ID NO: 996862 - DNA, 15 bp, Homo sapiens
acccctgggcccagg

SEQ ID NO: 996863 - DNA, 15 bp, Homo sapiens
cccctgggcccaggg

SEQ ID NO: 996864 - DNA, 15 bp, Homo sapiens
ccctgggcccaggga

SEQ ID NO: 996865 - DNA, 15 bp, Homo sapiens
cctgggcccagggat

SEQ ID NO: 996866 - DNA, 15 bp, Homo sapiens
ctgggcccagggatg

SEQ ID NO: 996867 - DNA, 15 bp, Homo sapiens
tgggcccagggatgg

SEQ ID NO: 996868 - DNA, 15 bp, Homo sapiens
gggcccagggatggg

SEQ ID NO: 996869 - DNA, 15 bp, Homo sapiens
ggcccagggatgggg

SEQ ID NO: 996870 - DNA, 15 bp, Homo sapiens
gcccagggatggggc

SEQ ID NO: 996871 - DNA, 15 bp, Homo sapiens
cccagggatggggca

SEQ ID NO: 996872 - DNA, 15 bp, Homo sapiens
ccagggatggggcac

SEQ ID NO: 996873 - DNA, 15 bp, Homo sapiens
cagggatggggcaca

SEQ ID NO: 996874 - DNA, 15 bp, Homo sapiens
agggatggggcacag

SEQ ID NO: 996875 - DNA, 15 bp, Homo sapiens
gggatggggcacagc

SEQ ID NO: 996876 - DNA, 15 bp, Homo sapiens
ggatggggcacagct

SEQ ID NO: 996877 - DNA, 15 bp, Homo sapiens
gatggggcacagctt

SEQ ID NO: 996878 - DNA, 15 bp, Homo sapiens
atggggcacagcttg

SEQ ID NO: 996879 - DNA, 15 bp, Homo sapiens
tggggcacagcttgg

SEQ ID NO: 996880 - DNA, 15 bp, Homo sapiens
ggggcacagcttggg

SEQ ID NO: 996881 - DNA, 15 bp, Homo sapiens
gggcacagcttggga

SEQ ID NO: 996882 - DNA, 15 bp, Homo sapiens
ggcacagcttgggaa

SEQ ID NO: 996883 - DNA, 15 bp, Homo sapiens
gcacagcttgggaag

SEQ ID NO: 996884 - DNA, 15 bp, Homo sapiens
cacagcttgggaaga

SEQ ID NO: 996885 - DNA, 15 bp, Homo sapiens
acagcttgggaagat

SEQ ID NO: 996886 - DNA, 15 bp, Homo sapiens
cagcttgggaagatg

SEQ ID NO: 996887 - DNA, 15 bp, Homo sapiens
agcttgggaagatgg

SEQ ID NO: 996888 - DNA, 15 bp, Homo sapiens
gcttgggaagatggc

SEQ ID NO: 996889 - DNA, 15 bp, Homo sapiens
cttgggaagatggca

SEQ ID NO: 996890 - DNA, 15 bp, Homo sapiens
ttgggaagatggcag

SEQ ID NO: 996891 - DNA, 15 bp, Homo sapiens
tgggaagatggcagg

SEQ ID NO: 996892 - DNA, 15 bp, Homo sapiens
gggaagatggcagga

SEQ ID NO: 996893 - DNA, 15 bp, Homo sapiens
ggaagatggcaggaa

SEQ ID NO: 996894 - DNA, 15 bp, Homo sapiens
gaagatggcaggaat

SEQ ID NO: 996895 - DNA, 15 bp, Homo sapiens
aagatggcaggaatc

SEQ ID NO: 996896 - DNA, 15 bp, Homo sapiens
agatggcaggaatcg

SEQ ID NO: 996897 - DNA, 15 bp, Homo sapiens
gatggcaggaatcgg

SEQ ID NO: 996898 - DNA, 15 bp, Homo sapiens
atggcaggaatcggg

SEQ ID NO: 996899 - DNA, 15 bp, Homo sapiens
tggcaggaatcgggg

SEQ ID NO: 996900 - DNA, 15 bp, Homo sapiens
ggcaggaatcggggc

SEQ ID NO: 996901 - DNA, 15 bp, Homo sapiens
gcaggaatcggggcc

SEQ ID NO: 996902 - DNA, 15 bp, Homo sapiens
caggaatcggggcct

SEQ ID NO: 996903 - DNA, 15 bp, Homo sapiens
aggaatcggggcctg

SEQ ID NO: 996904 - DNA, 15 bp, Homo sapiens
ggaatcggggcctgt

SEQ ID NO: 996905 - DNA, 15 bp, Homo sapiens
gaatcggggcctgtg

SEQ ID NO: 996906 - DNA, 15 bp, Homo sapiens
aatcggggcctgtgg

SEQ ID NO: 996907 - DNA, 15 bp, Homo sapiens
atcggggcctgtggg

SEQ ID NO: 996908 - DNA, 15 bp, Homo sapiens
tcggggcctgtgggg

SEQ ID NO: 996909 - DNA, 15 bp, Homo sapiens
cggggcctgtgggga

SEQ ID NO: 996910 - DNA, 15 bp, Homo sapiens
ggggcctgtggggag

SEQ ID NO: 996911 - DNA, 15 bp, Homo sapiens
gggcctgtggggaga

SEQ ID NO: 996912 - DNA, 15 bp, Homo sapiens
ggcctgtggggagaa

SEQ ID NO: 996913 - DNA, 15 bp, Homo sapiens
gcctgtggggagaag

SEQ ID NO: 996914 - DNA, 15 bp, Homo sapiens
cctgtggggagaagg

SEQ ID NO: 996915 - DNA, 15 bp, Homo sapiens
ctgtggggagaaggg

SEQ ID NO: 996916 - DNA, 15 bp, Homo sapiens
tgtggggagaagggt

SEQ ID NO: 996917 - DNA, 15 bp, Homo sapiens
gtggggagaagggtc

SEQ ID NO: 996918 - DNA, 15 bp, Homo sapiens
tggggagaagggtcc

SEQ ID NO: 996919 - DNA, 15 bp, Homo sapiens
ggggagaagggtcca

SEQ ID NO: 996920 - DNA, 15 bp, Homo sapiens
gggagaagggtccag

SEQ ID NO: 996921 - DNA, 15 bp, Homo sapiens
ggagaagggtccagg

SEQ ID NO: 996922 - DNA, 15 bp, Homo sapiens
gagaagggtccaggc

SEQ ID NO: 996923 - DNA, 15 bp, Homo sapiens
agaagggtccaggcc

SEQ ID NO: 996924 - DNA, 15 bp, Homo sapiens
gaagggtccaggcct

SEQ ID NO: 996925 - DNA, 15 bp, Homo sapiens
aagggtccaggcctc

SEQ ID NO: 996926 - DNA, 15 bp, Homo sapiens
agggtccaggcctct

SEQ ID NO: 996927 - DNA, 15 bp, Homo sapiens
gggtccaggcctctc

SEQ ID NO: 996928 - DNA, 15 bp, Homo sapiens
ggtccaggcctctcg

SEQ ID NO: 996929 - DNA, 15 bp, Homo sapiens
gtccaggcctctcgt

SEQ ID NO: 996930 - DNA, 15 bp, Homo sapiens
tccaggcctctcgtt

SEQ ID NO: 996931 - DNA, 15 bp, Homo sapiens
ccaggcctctcgttt

SEQ ID NO: 996932 - DNA, 15 bp, Homo sapiens
caggcctctcgtttt

SEQ ID NO: 996933 - DNA, 15 bp, Homo sapiens
aggcctctcgtttta

SEQ ID NO: 996934 - DNA, 15 bp, Homo sapiens
ggcctctcgttttag

SEQ ID NO: 996935 - DNA, 15 bp, Homo sapiens
gcctctcgttttagg

SEQ ID NO: 996936 - DNA, 15 bp, Homo sapiens
cctctcgttttaggg

SEQ ID NO: 996937 - DNA, 15 bp, Homo sapiens
ctctcgttttaggga

SEQ ID NO: 996938 - DNA, 15 bp, Homo sapiens
tctcgttttagggac

SEQ ID NO: 996939 - DNA, 15 bp, Homo sapiens
ctcgttttagggact

SEQ ID NO: 996940 - DNA, 15 bp, Homo sapiens
tcgttttagggactg

SEQ ID NO: 996941 - DNA, 15 bp, Homo sapiens
cgttttagggactga

SEQ ID NO: 996942 - DNA, 15 bp, Homo sapiens
gttttagggactgat

SEQ ID NO: 996943 - DNA, 15 bp, Homo sapiens
ttttagggactgatt

SEQ ID NO: 996944 - DNA, 15 bp, Homo sapiens
tttagggactgattc

SEQ ID NO: 996945 - DNA, 15 bp, Homo sapiens
ttagggactgattcc

SEQ ID NO: 996946 - DNA, 15 bp, Homo sapiens
tagggactgattcct

SEQ ID NO: 996947 - DNA, 15 bp, Homo sapiens
agggactgattcctg

SEQ ID NO: 996948 - DNA, 15 bp, Homo sapiens
gggactgattcctgg

SEQ ID NO: 996949 - DNA, 15 bp, Homo sapiens
ggactgattcctggt

SEQ ID NO: 996950 - DNA, 15 bp, Homo sapiens
gactgattcctggtt

SEQ ID NO: 996951 - DNA, 15 bp, Homo sapiens
actgattcctggttt

SEQ ID NO: 996952 - DNA, 15 bp, Homo sapiens
ctgattcctggtttg

SEQ ID NO: 996953 - DNA, 15 bp, Homo sapiens
tgattcctggtttgt

SEQ ID NO: 996954 - DNA, 15 bp, Homo sapiens
gattcctggtttgtt

SEQ ID NO: 996955 - DNA, 15 bp, Homo sapiens
attcctggtttgttc

SEQ ID NO: 996956 - DNA, 15 bp, Homo sapiens
ttcctggtttgttca

SEQ ID NO: 996957 - DNA, 15 bp, Homo sapiens
tcctggtttgttcag

SEQ ID NO: 996958 - DNA, 15 bp, Homo sapiens
cctggtttgttcagt

SEQ ID NO: 996959 - DNA, 15 bp, Homo sapiens
ctggtttgttcagtt

SEQ ID NO: 996960 - DNA, 15 bp, Homo sapiens
tggtttgttcagttc

SEQ ID NO: 996961 - DNA, 15 bp, Homo sapiens
ggtttgttcagttct

SEQ ID NO: 996962 - DNA, 15 bp, Homo sapiens
gtttgttcagttctt

SEQ ID NO: 996963 - DNA, 15 bp, Homo sapiens
tttgttcagttctta

SEQ ID NO: 996964 - DNA, 15 bp, Homo sapiens
ttgttcagttcttag

SEQ ID NO: 996965 - DNA, 15 bp, Homo sapiens
tgttcagttcttagt

SEQ ID NO: 996966 - DNA, 15 bp, Homo sapiens
gttcagttcttagtc

SEQ ID NO: 996967 - DNA, 15 bp, Homo sapiens
ttcagttcttagtca

SEQ ID NO: 996968 - DNA, 15 bp, Homo sapiens
tcagttcttagtcaa

SEQ ID NO: 996969 - DNA, 15 bp, Homo sapiens
cagttcttagtcaac

SEQ ID NO: 996970 - DNA, 15 bp, Homo sapiens
agttcttagtcaact

SEQ ID NO: 996971 - DNA, 15 bp, Homo sapiens
gttcttagtcaactc

SEQ ID NO: 996972 - DNA, 15 bp, Homo sapiens
ttcttagtcaactca

SEQ ID NO: 996973 - DNA, 15 bp, Homo sapiens
tcttagtcaactcac

SEQ ID NO: 996974 - DNA, 15 bp, Homo sapiens
cttagtcaactcacc

SEQ ID NO: 996975 - DNA, 15 bp, Homo sapiens
ttagtcaactcacct

SEQ ID NO: 996976 - DNA, 15 bp, Homo sapiens
tagtcaactcaccta

SEQ ID NO: 996977 - DNA, 15 bp, Homo sapiens
agtcaactcacctaa

SEQ ID NO: 996978 - DNA, 15 bp, Homo sapiens
gtcaactcacctaat

SEQ ID NO: 996979 - DNA, 15 bp, Homo sapiens
tcaactcacctaatc

SEQ ID NO: 996980 - DNA, 15 bp, Homo sapiens
caactcacctaatca

SEQ ID NO: 996981 - DNA, 15 bp, Homo sapiens
aactcacctaatcat

SEQ ID NO: 996982 - DNA, 15 bp, Homo sapiens
actcacctaatcata

SEQ ID NO: 996983 - DNA, 15 bp, Homo sapiens
ctcacctaatcatac

SEQ ID NO: 996984 - DNA, 15 bp, Homo sapiens
tcacctaatcatacg

SEQ ID NO: 996985 - DNA, 15 bp, Homo sapiens
cacctaatcatacgt

SEQ ID NO: 996986 - DNA, 15 bp, Homo sapiens
acctaatcatacgtg

SEQ ID NO: 996987 - DNA, 15 bp, Homo sapiens
cctaatcatacgtgc

SEQ ID NO: 996988 - DNA, 15 bp, Homo sapiens
ctaatcatacgtgcc

SEQ ID NO: 996989 - DNA, 15 bp, Homo sapiens
taatcatacgtgcca

SEQ ID NO: 996990 - DNA, 15 bp, Homo sapiens
aatcatacgtgccag

SEQ ID NO: 996991 - DNA, 15 bp, Homo sapiens
atcatacgtgccagg

SEQ ID NO: 996992 - DNA, 15 bp, Homo sapiens
tcatacgtgccagga

SEQ ID NO: 996993 - DNA, 15 bp, Homo sapiens
catacgtgccaggaa

SEQ ID NO: 996994 - DNA, 15 bp, Homo sapiens
atacgtgccaggaaa

SEQ ID NO: 996995 - DNA, 15 bp, Homo sapiens
tacgtgccaggaaat

SEQ ID NO: 996996 - DNA, 15 bp, Homo sapiens
acgtgccaggaaatt

SEQ ID NO: 996997 - DNA, 15 bp, Homo sapiens
cgtgccaggaaattc

SEQ ID NO: 996998 - DNA, 15 bp, Homo sapiens
gtgccaggaaattcc

SEQ ID NO: 996999 - DNA, 15 bp, Homo sapiens
tgccaggaaattccc

SEQ ID NO: 997000 - DNA, 15 bp, Homo sapiens
gccaggaaattccca

SEQ ID NO: 997001 - DNA, 15 bp, Homo sapiens
ccaggaaattcccat

SEQ ID NO: 997002 - DNA, 15 bp, Homo sapiens
caggaaattcccatg

SEQ ID NO: 997003 - DNA, 15 bp, Homo sapiens
aggaaattcccatgt

SEQ ID NO: 997004 - DNA, 15 bp, Homo sapiens
ggaaattcccatgtt

SEQ ID NO: 997005 - DNA, 15 bp, Homo sapiens
gaaattcccatgttt

SEQ ID NO: 997006 - DNA, 15 bp, Homo sapiens
aaattcccatgtttt

SEQ ID NO: 997007 - DNA, 15 bp, Homo sapiens
aattcccatgttttc

SEQ ID NO: 997008 - DNA, 15 bp, Homo sapiens
attcccatgttttct

SEQ ID NO: 997009 - DNA, 15 bp, Homo sapiens
ttcccatgttttctg

SEQ ID NO: 997010 - DNA, 15 bp, Homo sapiens
tcccatgttttctgt

SEQ ID NO: 997011 - DNA, 15 bp, Homo sapiens
cccatgttttctgta

SEQ ID NO: 997012 - DNA, 15 bp, Homo sapiens
ccatgttttctgtag

SEQ ID NO: 997013 - DNA, 15 bp, Homo sapiens
catgttttctgtagt

SEQ ID NO: 997014 - DNA, 15 bp, Homo sapiens
atgttttctgtagtt

SEQ ID NO: 997015 - DNA, 15 bp, Homo sapiens
tgttttctgtagttt

SEQ ID NO: 997016 - DNA, 15 bp, Homo sapiens
gttttctgtagtttt

SEQ ID NO: 997017 - DNA, 15 bp, Homo sapiens
ttttctgtagtttta

SEQ ID NO: 997018 - DNA, 15 bp, Homo sapiens
tttctgtagttttag

SEQ ID NO: 997019 - DNA, 15 bp, Homo sapiens
ttctgtagttttagt

SEQ ID NO: 997020 - DNA, 15 bp, Homo sapiens
tctgtagttttagtt

SEQ ID NO: 997021 - DNA, 15 bp, Homo sapiens
ctgtagttttagttt

SEQ ID NO: 997022 - DNA, 15 bp, Homo sapiens
tgtagttttagtttt

SEQ ID NO: 997023 - DNA, 15 bp, Homo sapiens
gtagttttagtttta

SEQ ID NO: 997024 - DNA, 15 bp, Homo sapiens
tagttttagttttag

SEQ ID NO: 997025 - DNA, 15 bp, Homo sapiens
agttttagttttagt

SEQ ID NO: 997026 - DNA, 15 bp, Homo sapiens
gttttagttttagtt

SEQ ID NO: 997027 - DNA, 15 bp, Homo sapiens
ttttagttttagttt

SEQ ID NO: 997028 - DNA, 15 bp, Homo sapiens
tttagttttagtttt

SEQ ID NO: 997029 - DNA, 15 bp, Homo sapiens
ttagttttagttttt

SEQ ID NO: 997030 - DNA, 15 bp, Homo sapiens
tagttttagtttttt

SEQ ID NO: 997031 - DNA, 15 bp, Homo sapiens
agttttagttttttt

SEQ ID NO: 997032 - DNA, 15 bp, Homo sapiens
gttttagtttttttt

SEQ ID NO: 997033 - DNA, 15 bp, Homo sapiens
ttttagttttttttt

SEQ ID NO: 997034 - DNA, 15 bp, Homo sapiens
tttagtttttttttt

SEQ ID NO: 997035 - DNA, 15 bp, Homo sapiens
ttagttttttttttt

SEQ ID NO: 997036 - DNA, 15 bp, Homo sapiens
tagtttttttttttt

SEQ ID NO: 997037 - DNA, 15 bp, Homo sapiens
gtttttttttttttt

SEQ ID NO: 997038 - DNA, 15 bp, Homo sapiens
tgagatggagtctcg

SEQ ID NO: 997039 - DNA, 15 bp, Homo sapiens
gagatggagtctcgc

SEQ ID NO: 997040 - DNA, 15 bp, Homo sapiens
agatggagtctcgct

SEQ ID NO: 997041 - DNA, 15 bp, Homo sapiens
gatggagtctcgctc

SEQ ID NO: 997042 - DNA, 15 bp, Homo sapiens
atggagtctcgctct

SEQ ID NO: 997043 - DNA, 15 bp, Homo sapiens
tggagtctcgctctg

SEQ ID NO: 997044 - DNA, 15 bp, Homo sapiens
ggagtctcgctctgt

SEQ ID NO: 997045 - DNA, 15 bp, Homo sapiens
gagtctcgctctgtc

SEQ ID NO: 997046 - DNA, 15 bp, Homo sapiens
agtctcgctctgtca

SEQ ID NO: 997047 - DNA, 15 bp, Homo sapiens
gtctcgctctgtcac

SEQ ID NO: 997048 - DNA, 15 bp, Homo sapiens
tctcgctctgtcacc

SEQ ID NO: 997049 - DNA, 15 bp, Homo sapiens
ctcgctctgtcaccc

SEQ ID NO: 997050 - DNA, 15 bp, Homo sapiens
tcgctctgtcaccca

SEQ ID NO: 997051 - DNA, 15 bp, Homo sapiens
cgctctgtcacccag

SEQ ID NO: 997052 - DNA, 15 bp, Homo sapiens
gctctgtcacccaga

SEQ ID NO: 997053 - DNA, 15 bp, Homo sapiens
ctctgtcacccagac

SEQ ID NO: 997054 - DNA, 15 bp, Homo sapiens
tctgtcacccagact

SEQ ID NO: 997055 - DNA, 15 bp, Homo sapiens
ctgtcacccagactg

SEQ ID NO: 997056 - DNA, 15 bp, Homo sapiens
tgtcacccagactgg

SEQ ID NO: 997057 - DNA, 15 bp, Homo sapiens
gtcacccagactgga

SEQ ID NO: 997058 - DNA, 15 bp, Homo sapiens
tcacccagactggag

SEQ ID NO: 997059 - DNA, 15 bp, Homo sapiens
cacccagactggagt

SEQ ID NO: 997060 - DNA, 15 bp, Homo sapiens
acccagactggagtg

SEQ ID NO: 997061 - DNA, 15 bp, Homo sapiens
cccagactggagtgc

SEQ ID NO: 997062 - DNA, 15 bp, Homo sapiens
ccagactggagtgca

SEQ ID NO: 997063 - DNA, 15 bp, Homo sapiens
cagactggagtgcag

SEQ ID NO: 997064 - DNA, 15 bp, Homo sapiens
agactggagtgcagt

SEQ ID NO: 997065 - DNA, 15 bp, Homo sapiens
gactggagtgcagtc

SEQ ID NO: 997066 - DNA, 15 bp, Homo sapiens
actggagtgcagtcc

SEQ ID NO: 997067 - DNA, 15 bp, Homo sapiens
ctggagtgcagtcct

SEQ ID NO: 997068 - DNA, 15 bp, Homo sapiens
tggagtgcagtcctg

SEQ ID NO: 997069 - DNA, 15 bp, Homo sapiens
ggagtgcagtcctgg

SEQ ID NO: 997070 - DNA, 15 bp, Homo sapiens
gagtgcagtcctggc

SEQ ID NO: 997071 - DNA, 15 bp, Homo sapiens
agtgcagtcctggcg

SEQ ID NO: 997072 - DNA, 15 bp, Homo sapiens
gtgcagtcctggcgc

SEQ ID NO: 997073 - DNA, 15 bp, Homo sapiens
tgcagtcctggcgcg

SEQ ID NO: 997074 - DNA, 15 bp, Homo sapiens
gcagtcctggcgcga

SEQ ID NO: 997075 - DNA, 15 bp, Homo sapiens
cagtcctggcgcgat

SEQ ID NO: 997076 - DNA, 15 bp, Homo sapiens
agtcctggcgcgatc

SEQ ID NO: 997077 - DNA, 15 bp, Homo sapiens
gtcctggcgcgatct

SEQ ID NO: 997078 - DNA, 15 bp, Homo sapiens
tcctggcgcgatctg

SEQ ID NO: 997079 - DNA, 15 bp, Homo sapiens
cctggcgcgatctgg

SEQ ID NO: 997080 - DNA, 15 bp, Homo sapiens
ctggcgcgatctggg

SEQ ID NO: 997081 - DNA, 15 bp, Homo sapiens
tggcgcgatctgggg

SEQ ID NO: 997082 - DNA, 15 bp, Homo sapiens
ggcgcgatctggggt

SEQ ID NO: 997083 - DNA, 15 bp, Homo sapiens
gcgcgatctggggtc

SEQ ID NO: 997084 - DNA, 15 bp, Homo sapiens
cgcgatctggggtca

SEQ ID NO: 997085 - DNA, 15 bp, Homo sapiens
gcgatctggggtcac

SEQ ID NO: 997086 - DNA, 15 bp, Homo sapiens
cgatctggggtcact

SEQ ID NO: 997087 - DNA, 15 bp, Homo sapiens
gatctggggtcactg

SEQ ID NO: 997088 - DNA, 15 bp, Homo sapiens
atctggggtcactgt

SEQ ID NO: 997089 - DNA, 15 bp, Homo sapiens
tctggggtcactgta

SEQ ID NO: 997090 - DNA, 15 bp, Homo sapiens
ctggggtcactgtaa

SEQ ID NO: 997091 - DNA, 15 bp, Homo sapiens
tggggtcactgtaac

SEQ ID NO: 997092 - DNA, 15 bp, Homo sapiens
ggggtcactgtaacc

SEQ ID NO: 997093 - DNA, 15 bp, Homo sapiens
gggtcactgtaacct

SEQ ID NO: 997094 - DNA, 15 bp, Homo sapiens
ggtcactgtaacctt

SEQ ID NO: 997095 - DNA, 15 bp, Homo sapiens
gtcactgtaaccttc

SEQ ID NO: 997096 - DNA, 15 bp, Homo sapiens
tcactgtaaccttca

SEQ ID NO: 997097 - DNA, 15 bp, Homo sapiens
cactgtaaccttcac

SEQ ID NO: 997098 - DNA, 15 bp, Homo sapiens
actgtaaccttcacc

SEQ ID NO: 997099 - DNA, 15 bp, Homo sapiens
ctgtaaccttcacct

SEQ ID NO: 997100 - DNA, 15 bp, Homo sapiens
tgtaaccttcacctc

SEQ ID NO: 997101 - DNA, 15 bp, Homo sapiens
gtaaccttcacctcc

SEQ ID NO: 997102 - DNA, 15 bp, Homo sapiens
taaccttcacctccc

SEQ ID NO: 997103 - DNA, 15 bp, Homo sapiens
aaccttcacctccca

SEQ ID NO: 997104 - DNA, 15 bp, Homo sapiens
accttcacctcccag

SEQ ID NO: 997105 - DNA, 15 bp, Homo sapiens
ccttcacctcccagg

SEQ ID NO: 997106 - DNA, 15 bp, Homo sapiens
cttcacctcccaggt

SEQ ID NO: 997107 - DNA, 15 bp, Homo sapiens
ttcacctcccaggtt

SEQ ID NO: 997108 - DNA, 15 bp, Homo sapiens
tcacctcccaggttc

SEQ ID NO: 997109 - DNA, 15 bp, Homo sapiens
cacctcccaggttca

SEQ ID NO: 997110 - DNA, 15 bp, Homo sapiens
acctcccaggttcaa

SEQ ID NO: 997111 - DNA, 15 bp, Homo sapiens
tcccaggttcaagca

SEQ ID NO: 997112 - DNA, 15 bp, Homo sapiens
cccaggttcaagcaa

SEQ ID NO: 997113 - DNA, 15 bp, Homo sapiens
ccaggttcaagcaat

SEQ ID NO: 997114 - DNA, 15 bp, Homo sapiens
caggttcaagcaatt

SEQ ID NO: 997115 - DNA, 15 bp, Homo sapiens
aggttcaagcaattc

SEQ ID NO: 997116 - DNA, 15 bp, Homo sapiens
ggttcaagcaattct

SEQ ID NO: 997117 - DNA, 15 bp, Homo sapiens
gttcaagcaattctc

SEQ ID NO: 997118 - DNA, 15 bp, Homo sapiens
ttcaagcaattctcc

SEQ ID NO: 997119 - DNA, 15 bp, Homo sapiens
tcaagcaattctccc

SEQ ID NO: 997120 - DNA, 15 bp, Homo sapiens
caagcaattctccca

SEQ ID NO: 997121 - DNA, 15 bp, Homo sapiens
aagcaattctcccac

SEQ ID NO: 997122 - DNA, 15 bp, Homo sapiens
agcaattctcccacc

SEQ ID NO: 997123 - DNA, 15 bp, Homo sapiens
gcaattctcccacct

SEQ ID NO: 997124 - DNA, 15 bp, Homo sapiens
caattctcccacctc

SEQ ID NO: 997125 - DNA, 15 bp, Homo sapiens
aattctcccacctca

SEQ ID NO: 997126 - DNA, 15 bp, Homo sapiens
tcccacctcagcctt

SEQ ID NO: 997127 - DNA, 15 bp, Homo sapiens
cccacctcagccttc

SEQ ID NO: 997128 - DNA, 15 bp, Homo sapiens
ccacctcagccttct

SEQ ID NO: 997129 - DNA, 15 bp, Homo sapiens
cacctcagccttctg

SEQ ID NO: 997130 - DNA, 15 bp, Homo sapiens
acctcagccttctga

SEQ ID NO: 997131 - DNA, 15 bp, Homo sapiens
cctcagccttctgag

SEQ ID NO: 997132 - DNA, 15 bp, Homo sapiens
ctcagccttctgagt

SEQ ID NO: 997133 - DNA, 15 bp, Homo sapiens
tcagccttctgagta

SEQ ID NO: 997134 - DNA, 15 bp, Homo sapiens
cagccttctgagtag

SEQ ID NO: 997135 - DNA, 15 bp, Homo sapiens
agccttctgagtagc

SEQ ID NO: 997136 - DNA, 15 bp, Homo sapiens
gccttctgagtagct

SEQ ID NO: 997137 - DNA, 15 bp, Homo sapiens
ccttctgagtagctg

SEQ ID NO: 997138 - DNA, 15 bp, Homo sapiens
cttctgagtagctgg

SEQ ID NO: 997139 - DNA, 15 bp, Homo sapiens
ttctgagtagctggg

SEQ ID NO: 997140 - DNA, 15 bp, Homo sapiens
tctgagtagctggga

SEQ ID NO: 997141 - DNA, 15 bp, Homo sapiens
tgggattacaggcat

SEQ ID NO: 997142 - DNA, 15 bp, Homo sapiens
gggattacaggcatc

SEQ ID NO: 997143 - DNA, 15 bp, Homo sapiens
ggattacaggcatcc

SEQ ID NO: 997144 - DNA, 15 bp, Homo sapiens
gattacaggcatcca

SEQ ID NO: 997145 - DNA, 15 bp, Homo sapiens
attacaggcatccac

SEQ ID NO: 997146 - DNA, 15 bp, Homo sapiens
ttacaggcatccacc

SEQ ID NO: 997147 - DNA, 15 bp, Homo sapiens
tacaggcatccacca

SEQ ID NO: 997148 - DNA, 15 bp, Homo sapiens
acaggcatccaccac

SEQ ID NO: 997149 - DNA, 15 bp, Homo sapiens
caggcatccaccacc

SEQ ID NO: 997150 - DNA, 15 bp, Homo sapiens
aggcatccaccacca

SEQ ID NO: 997151 - DNA, 15 bp, Homo sapiens
ggcatccaccaccat

SEQ ID NO: 997152 - DNA, 15 bp, Homo sapiens
gcatccaccaccatg

SEQ ID NO: 997153 - DNA, 15 bp, Homo sapiens
catccaccaccatgc

SEQ ID NO: 997154 - DNA, 15 bp, Homo sapiens
atccaccaccatgcc

SEQ ID NO: 997155 - DNA, 15 bp, Homo sapiens
tccaccaccatgccc

SEQ ID NO: 997156 - DNA, 15 bp, Homo sapiens
ccaccaccatgccca

SEQ ID NO: 997157 - DNA, 15 bp, Homo sapiens
caccaccatgcccag

SEQ ID NO: 997158 - DNA, 15 bp, Homo sapiens
accaccatgcccagc

SEQ ID NO: 997159 - DNA, 15 bp, Homo sapiens
atgcccagctaattt

SEQ ID NO: 997160 - DNA, 15 bp, Homo sapiens
tgcccagctaatttt

SEQ ID NO: 997161 - DNA, 15 bp, Homo sapiens
aatttttgtattttt

SEQ ID NO: 997162 - DNA, 15 bp, Homo sapiens
atttttgtatttttg

SEQ ID NO: 997163 - DNA, 15 bp, Homo sapiens
tttttgtatttttgt

SEQ ID NO: 997164 - DNA, 15 bp, Homo sapiens
ttttgtatttttgta

SEQ ID NO: 997165 - DNA, 15 bp, Homo sapiens
tttgtatttttgtag

SEQ ID NO: 997166 - DNA, 15 bp, Homo sapiens
ttgtatttttgtaga

SEQ ID NO: 997167 - DNA, 15 bp, Homo sapiens
tgtatttttgtagag

SEQ ID NO: 997168 - DNA, 15 bp, Homo sapiens
gtatttttgtagaga

SEQ ID NO: 997169 - DNA, 15 bp, Homo sapiens
ttttgtagagacgga

SEQ ID NO: 997170 - DNA, 15 bp, Homo sapiens
tttgtagagacggag

SEQ ID NO: 997171 - DNA, 15 bp, Homo sapiens
ttgtagagacggagt

SEQ ID NO: 997172 - DNA, 15 bp, Homo sapiens
tgtagagacggagtt

SEQ ID NO: 997173 - DNA, 15 bp, Homo sapiens
gtagagacggagttt

SEQ ID NO: 997174 - DNA, 15 bp, Homo sapiens
tagagacggagtttc

SEQ ID NO: 997175 - DNA, 15 bp, Homo sapiens
agagacggagtttca

SEQ ID NO: 997176 - DNA, 15 bp, Homo sapiens
gagacggagtttcac

SEQ ID NO: 997177 - DNA, 15 bp, Homo sapiens
agacggagtttcacc

SEQ ID NO: 997178 - DNA, 15 bp, Homo sapiens
gacggagtttcacca

SEQ ID NO: 997179 - DNA, 15 bp, Homo sapiens
acggagtttcaccat

SEQ ID NO: 997180 - DNA, 15 bp, Homo sapiens
cggagtttcaccatg

SEQ ID NO: 997181 - DNA, 15 bp, Homo sapiens
ggagtttcaccatgt

SEQ ID NO: 997182 - DNA, 15 bp, Homo sapiens
gagtttcaccatgtt

SEQ ID NO: 997183 - DNA, 15 bp, Homo sapiens
agtttcaccatgttg

SEQ ID NO: 997184 - DNA, 15 bp, Homo sapiens
gtttcaccatgttgg

SEQ ID NO: 997185 - DNA, 15 bp, Homo sapiens
tttcaccatgttggc

SEQ ID NO: 997186 - DNA, 15 bp, Homo sapiens
ttcaccatgttggcc

SEQ ID NO: 997187 - DNA, 15 bp, Homo sapiens
tcaccatgttggcca

SEQ ID NO: 997188 - DNA, 15 bp, Homo sapiens
caccatgttggccag

SEQ ID NO: 997189 - DNA, 15 bp, Homo sapiens
accatgttggccagg

SEQ ID NO: 997190 - DNA, 15 bp, Homo sapiens
ccatgttggccaggc

SEQ ID NO: 997191 - DNA, 15 bp, Homo sapiens
catgttggccaggct

SEQ ID NO: 997192 - DNA, 15 bp, Homo sapiens
ggccaggctggtctt

SEQ ID NO: 997193 - DNA, 15 bp, Homo sapiens
gccaggctggtcttg

SEQ ID NO: 997194 - DNA, 15 bp, Homo sapiens
ccaggctggtcttga

SEQ ID NO: 997195 - DNA, 15 bp, Homo sapiens
caggctggtcttgaa

SEQ ID NO: 997196 - DNA, 15 bp, Homo sapiens
aggctggtcttgaac

SEQ ID NO: 997197 - DNA, 15 bp, Homo sapiens
ggctggtcttgaact

SEQ ID NO: 997198 - DNA, 15 bp, Homo sapiens
gctggtcttgaactc

SEQ ID NO: 997199 - DNA, 15 bp, Homo sapiens
ctggtcttgaactcc

SEQ ID NO: 997200 - DNA, 15 bp, Homo sapiens
tggtcttgaactcct

SEQ ID NO: 997201 - DNA, 15 bp, Homo sapiens
ggtcttgaactcctg

SEQ ID NO: 997202 - DNA, 15 bp, Homo sapiens
gtcttgaactcctga

SEQ ID NO: 997203 - DNA, 15 bp, Homo sapiens
tcttgaactcctgac

SEQ ID NO: 997204 - DNA, 15 bp, Homo sapiens
cttgaactcctgacc

SEQ ID NO: 997205 - DNA, 15 bp, Homo sapiens
ttgaactcctgacct

SEQ ID NO: 997206 - DNA, 15 bp, Homo sapiens
tgaactcctgacctc

SEQ ID NO: 997207 - DNA, 15 bp, Homo sapiens
gaactcctgacctca

SEQ ID NO: 997208 - DNA, 15 bp, Homo sapiens
aactcctgacctcag

SEQ ID NO: 997209 - DNA, 15 bp, Homo sapiens
tgacctcaggtgatc

SEQ ID NO: 997210 - DNA, 15 bp, Homo sapiens
gacctcaggtgatcc

SEQ ID NO: 997211 - DNA, 15 bp, Homo sapiens
acctcaggtgatcct

SEQ ID NO: 997212 - DNA, 15 bp, Homo sapiens
cctcaggtgatcctc

SEQ ID NO: 997213 - DNA, 15 bp, Homo sapiens
ctcaggtgatcctcc

SEQ ID NO: 997214 - DNA, 15 bp, Homo sapiens
tcaggtgatcctccc

SEQ ID NO: 997215 - DNA, 15 bp, Homo sapiens
caggtgatcctccca

SEQ ID NO: 997216 - DNA, 15 bp, Homo sapiens
aggtgatcctcccac

SEQ ID NO: 997217 - DNA, 15 bp, Homo sapiens
ggtgatcctcccacc

SEQ ID NO: 997218 - DNA, 15 bp, Homo sapiens
gtgatcctcccacct

SEQ ID NO: 997219 - DNA, 15 bp, Homo sapiens
tgatcctcccacctc

SEQ ID NO: 997220 - DNA, 15 bp, Homo sapiens
gatcctcccacctcg

SEQ ID NO: 997221 - DNA, 15 bp, Homo sapiens
atcctcccacctcgg

SEQ ID NO: 997222 - DNA, 15 bp, Homo sapiens
tcctcccacctcggc

SEQ ID NO: 997223 - DNA, 15 bp, Homo sapiens
cctcccacctcggcc

SEQ ID NO: 997224 - DNA, 15 bp, Homo sapiens
ctcccacctcggcct

SEQ ID NO: 997225 - DNA, 15 bp, Homo sapiens
tcccacctcggcctc

SEQ ID NO: 997226 - DNA, 15 bp, Homo sapiens
ggcgtgagccaccgt

SEQ ID NO: 997227 - DNA, 15 bp, Homo sapiens
gcgtgagccaccgtg

SEQ ID NO: 997228 - DNA, 15 bp, Homo sapiens
cgtgagccaccgtgc

SEQ ID NO: 997229 - DNA, 15 bp, Homo sapiens
gtgagccaccgtgcc

SEQ ID NO: 997230 - DNA, 15 bp, Homo sapiens
tgagccaccgtgcct

SEQ ID NO: 997231 - DNA, 15 bp, Homo sapiens
gagccaccgtgcctg

SEQ ID NO: 997232 - DNA, 15 bp, Homo sapiens
agccaccgtgcctgg

SEQ ID NO: 997233 - DNA, 15 bp, Homo sapiens
gccaccgtgcctggc

SEQ ID NO: 997234 - DNA, 15 bp, Homo sapiens
ccaccgtgcctggct

SEQ ID NO: 997235 - DNA, 15 bp, Homo sapiens
caccgtgcctggctg

SEQ ID NO: 997236 - DNA, 15 bp, Homo sapiens
accgtgcctggctgc

SEQ ID NO: 997237 - DNA, 15 bp, Homo sapiens
ccgtgcctggctgct

SEQ ID NO: 997238 - DNA, 15 bp, Homo sapiens
cgtgcctggctgctg

SEQ ID NO: 997239 - DNA, 15 bp, Homo sapiens
gtgcctggctgctgt

SEQ ID NO: 997240 - DNA, 15 bp, Homo sapiens
tgcctggctgctgtt

SEQ ID NO: 997241 - DNA, 15 bp, Homo sapiens
gcctggctgctgttg

SEQ ID NO: 997242 - DNA, 15 bp, Homo sapiens
cctggctgctgttgc

SEQ ID NO: 997243 - DNA, 15 bp, Homo sapiens
ctggctgctgttgct

SEQ ID NO: 997244 - DNA, 15 bp, Homo sapiens
tggctgctgttgctg

SEQ ID NO: 997245 - DNA, 15 bp, Homo sapiens
ggctgctgttgctgt

SEQ ID NO: 997246 - DNA, 15 bp, Homo sapiens
gctgctgttgctgtt

SEQ ID NO: 997247 - DNA, 15 bp, Homo sapiens
ctgctgttgctgttt

SEQ ID NO: 997248 - DNA, 15 bp, Homo sapiens
tgctgttgctgtttg

SEQ ID NO: 997249 - DNA, 15 bp, Homo sapiens
gctgttgctgtttgt

SEQ ID NO: 997250 - DNA, 15 bp, Homo sapiens
ctgttgctgtttgtt

SEQ ID NO: 997251 - DNA, 15 bp, Homo sapiens
tgttgctgtttgttt

SEQ ID NO: 997252 - DNA, 15 bp, Homo sapiens
gttgctgtttgtttt

SEQ ID NO: 997253 - DNA, 15 bp, Homo sapiens
ttgctgtttgttttt

SEQ ID NO: 997254 - DNA, 15 bp, Homo sapiens
tgctgtttgttttta

SEQ ID NO: 997255 - DNA, 15 bp, Homo sapiens
gctgtttgtttttaa

SEQ ID NO: 997256 - DNA, 15 bp, Homo sapiens
ctgtttgtttttaag

SEQ ID NO: 997257 - DNA, 15 bp, Homo sapiens
tgtttgtttttaagc

SEQ ID NO: 997258 - DNA, 15 bp, Homo sapiens
gtttgtttttaagcc

SEQ ID NO: 997259 - DNA, 15 bp, Homo sapiens
tttgtttttaagcca

SEQ ID NO: 997260 - DNA, 15 bp, Homo sapiens
ttgtttttaagccaa

SEQ ID NO: 997261 - DNA, 15 bp, Homo sapiens
tgtttttaagccaat

SEQ ID NO: 997262 - DNA, 15 bp, Homo sapiens
gtttttaagccaatc

SEQ ID NO: 997263 - DNA, 15 bp, Homo sapiens
tttttaagccaatct

SEQ ID NO: 997264 - DNA, 15 bp, Homo sapiens
ttttaagccaatcta

SEQ ID NO: 997265 - DNA, 15 bp, Homo sapiens
tttaagccaatctac

SEQ ID NO: 997266 - DNA, 15 bp, Homo sapiens
ttaagccaatctaca

SEQ ID NO: 997267 - DNA, 15 bp, Homo sapiens
taagccaatctacag

SEQ ID NO: 997268 - DNA, 15 bp, Homo sapiens
aagccaatctacaga

SEQ ID NO: 997269 - DNA, 15 bp, Homo sapiens
agccaatctacagac

SEQ ID NO: 997270 - DNA, 15 bp, Homo sapiens
gccaatctacagaca

SEQ ID NO: 997271 - DNA, 15 bp, Homo sapiens
ccaatctacagacat

SEQ ID NO: 997272 - DNA, 15 bp, Homo sapiens
caatctacagacatg

SEQ ID NO: 997273 - DNA, 15 bp, Homo sapiens
aatctacagacatgt

SEQ ID NO: 997274 - DNA, 15 bp, Homo sapiens
atctacagacatgtc

SEQ ID NO: 997275 - DNA, 15 bp, Homo sapiens
tctacagacatgtct

SEQ ID NO: 997276 - DNA, 15 bp, Homo sapiens
ctacagacatgtctt

SEQ ID NO: 997277 - DNA, 15 bp, Homo sapiens
tacagacatgtcttg

SEQ ID NO: 997278 - DNA, 15 bp, Homo sapiens
acagacatgtcttgt

SEQ ID NO: 997279 - DNA, 15 bp, Homo sapiens
cagacatgtcttgta

SEQ ID NO: 997280 - DNA, 15 bp, Homo sapiens
agacatgtcttgtaa

SEQ ID NO: 997281 - DNA, 15 bp, Homo sapiens
gacatgtcttgtaac

SEQ ID NO: 997282 - DNA, 15 bp, Homo sapiens
acatgtcttgtaaca

SEQ ID NO: 997283 - DNA, 15 bp, Homo sapiens
catgtcttgtaacag

SEQ ID NO: 997284 - DNA, 15 bp, Homo sapiens
atgtcttgtaacagg

SEQ ID NO: 997285 - DNA, 15 bp, Homo sapiens
tgtcttgtaacaggg

SEQ ID NO: 997286 - DNA, 15 bp, Homo sapiens
gtcttgtaacaggga

SEQ ID NO: 997287 - DNA, 15 bp, Homo sapiens
tcttgtaacagggac

SEQ ID NO: 997288 - DNA, 15 bp, Homo sapiens
cttgtaacagggaca

SEQ ID NO: 997289 - DNA, 15 bp, Homo sapiens
ttgtaacagggacaa

SEQ ID NO: 997290 - DNA, 15 bp, Homo sapiens
tgtaacagggacaaa

SEQ ID NO: 997291 - DNA, 15 bp, Homo sapiens
gtaacagggacaaaa

SEQ ID NO: 997292 - DNA, 15 bp, Homo sapiens
taacagggacaaaat

SEQ ID NO: 997293 - DNA, 15 bp, Homo sapiens
aacagggacaaaata

SEQ ID NO: 997294 - DNA, 15 bp, Homo sapiens
acagggacaaaatat

SEQ ID NO: 997295 - DNA, 15 bp, Homo sapiens
cagggacaaaatatt

SEQ ID NO: 997296 - DNA, 15 bp, Homo sapiens
agggacaaaatattc

SEQ ID NO: 997297 - DNA, 15 bp, Homo sapiens
gggacaaaatattcc

SEQ ID NO: 997298 - DNA, 15 bp, Homo sapiens
ggacaaaatattcct

SEQ ID NO: 997299 - DNA, 15 bp, Homo sapiens
gacaaaatattcctt

SEQ ID NO: 997300 - DNA, 15 bp, Homo sapiens
acaaaatattcctta

SEQ ID NO: 997301 - DNA, 15 bp, Homo sapiens
caaaatattccttaa

SEQ ID NO: 997302 - DNA, 15 bp, Homo sapiens
aaaatattccttaaa

SEQ ID NO: 997303 - DNA, 15 bp, Homo sapiens
aaatattccttaaag

SEQ ID NO: 997304 - DNA, 15 bp, Homo sapiens
aatattccttaaagt

SEQ ID NO: 997305 - DNA, 15 bp, Homo sapiens
atattccttaaagtg

SEQ ID NO: 997306 - DNA, 15 bp, Homo sapiens
tattccttaaagtgg

SEQ ID NO: 997307 - DNA, 15 bp, Homo sapiens
attccttaaagtggc

SEQ ID NO: 997308 - DNA, 15 bp, Homo sapiens
ttccttaaagtggcc

SEQ ID NO: 997309 - DNA, 15 bp, Homo sapiens
tccttaaagtggcca

SEQ ID NO: 997310 - DNA, 15 bp, Homo sapiens
ccttaaagtggccaa

SEQ ID NO: 997311 - DNA, 15 bp, Homo sapiens
cttaaagtggccaaa

SEQ ID NO: 997312 - DNA, 15 bp, Homo sapiens
ttaaagtggccaaaa

SEQ ID NO: 997313 - DNA, 15 bp, Homo sapiens
taaagtggccaaaag

SEQ ID NO: 997314 - DNA, 15 bp, Homo sapiens
aaagtggccaaaagc

SEQ ID NO: 997315 - DNA, 15 bp, Homo sapiens
aagtggccaaaagcc

SEQ ID NO: 997316 - DNA, 15 bp, Homo sapiens
agtggccaaaagcca

SEQ ID NO: 997317 - DNA, 15 bp, Homo sapiens
gtggccaaaagccag

SEQ ID NO: 997318 - DNA, 15 bp, Homo sapiens
tggccaaaagccagc

SEQ ID NO: 997319 - DNA, 15 bp, Homo sapiens
ggccaaaagccagct

SEQ ID NO: 997320 - DNA, 15 bp, Homo sapiens
gccaaaagccagctg

SEQ ID NO: 997321 - DNA, 15 bp, Homo sapiens
ccaaaagccagctga

SEQ ID NO: 997322 - DNA, 15 bp, Homo sapiens
caaaagccagctgaa

SEQ ID NO: 997323 - DNA, 15 bp, Homo sapiens
aaaagccagctgaac

SEQ ID NO: 997324 - DNA, 15 bp, Homo sapiens
aaagccagctgaaca

SEQ ID NO: 997325 - DNA, 15 bp, Homo sapiens
aagccagctgaacag

SEQ ID NO: 997326 - DNA, 15 bp, Homo sapiens
agccagctgaacagg

SEQ ID NO: 997327 - DNA, 15 bp, Homo sapiens
gccagctgaacagga

SEQ ID NO: 997328 - DNA, 15 bp, Homo sapiens
ccagctgaacaggaa

SEQ ID NO: 997329 - DNA, 15 bp, Homo sapiens
cagctgaacaggaag

SEQ ID NO: 997330 - DNA, 15 bp, Homo sapiens
agctgaacaggaagt

SEQ ID NO: 997331 - DNA, 15 bp, Homo sapiens
gctgaacaggaagtg

SEQ ID NO: 997332 - DNA, 15 bp, Homo sapiens
ctgaacaggaagtgc

SEQ ID NO: 997333 - DNA, 15 bp, Homo sapiens
tgaacaggaagtgcc

SEQ ID NO: 997334 - DNA, 15 bp, Homo sapiens
gaacaggaagtgccc

SEQ ID NO: 997335 - DNA, 15 bp, Homo sapiens
aacaggaagtgcccc

SEQ ID NO: 997336 - DNA, 15 bp, Homo sapiens
acaggaagtgccccc

SEQ ID NO: 997337 - DNA, 15 bp, Homo sapiens
caggaagtgccccct

SEQ ID NO: 997338 - DNA, 15 bp, Homo sapiens
aggaagtgcccccta

SEQ ID NO: 997339 - DNA, 15 bp, Homo sapiens
ggaagtgccccctat

SEQ ID NO: 997340 - DNA, 15 bp, Homo sapiens
gaagtgccccctatg

SEQ ID NO: 997341 - DNA, 15 bp, Homo sapiens
aagtgccccctatgt

SEQ ID NO: 997342 - DNA, 15 bp, Homo sapiens
agtgccccctatgtg

SEQ ID NO: 997343 - DNA, 15 bp, Homo sapiens
gtgccccctatgtga

SEQ ID NO: 997344 - DNA, 15 bp, Homo sapiens
tgccccctatgtgac

SEQ ID NO: 997345 - DNA, 15 bp, Homo sapiens
gccccctatgtgacc

SEQ ID NO: 997346 - DNA, 15 bp, Homo sapiens
ccccctatgtgacca

SEQ ID NO: 997347 - DNA, 15 bp, Homo sapiens
cccctatgtgaccag

SEQ ID NO: 997348 - DNA, 15 bp, Homo sapiens
ccctatgtgaccagt

SEQ ID NO: 997349 - DNA, 15 bp, Homo sapiens
cctatgtgaccagtg

SEQ ID NO: 997350 - DNA, 15 bp, Homo sapiens
ctatgtgaccagtgg

SEQ ID NO: 997351 - DNA, 15 bp, Homo sapiens
tatgtgaccagtggg

SEQ ID NO: 997352 - DNA, 15 bp, Homo sapiens
atgtgaccagtgggc

SEQ ID NO: 997353 - DNA, 15 bp, Homo sapiens
tgtgaccagtgggca

SEQ ID NO: 997354 - DNA, 15 bp, Homo sapiens
gtgaccagtgggcag

SEQ ID NO: 997355 - DNA, 15 bp, Homo sapiens
tgaccagtgggcagt

SEQ ID NO: 997356 - DNA, 15 bp, Homo sapiens
gaccagtgggcagtt

SEQ ID NO: 997357 - DNA, 15 bp, Homo sapiens
accagtgggcagttc

SEQ ID NO: 997358 - DNA, 15 bp, Homo sapiens
ccagtgggcagttca

SEQ ID NO: 997359 - DNA, 15 bp, Homo sapiens
cagtgggcagttcag

SEQ ID NO: 997360 - DNA, 15 bp, Homo sapiens
agtgggcagttcaga

SEQ ID NO: 997361 - DNA, 15 bp, Homo sapiens
gtgggcagttcagag

SEQ ID NO: 997362 - DNA, 15 bp, Homo sapiens
tgggcagttcagagt

SEQ ID NO: 997363 - DNA, 15 bp, Homo sapiens
gggcagttcagagtc

SEQ ID NO: 997364 - DNA, 15 bp, Homo sapiens
ggcagttcagagtct

SEQ ID NO: 997365 - DNA, 15 bp, Homo sapiens
gcagttcagagtcta

SEQ ID NO: 997366 - DNA, 15 bp, Homo sapiens
cagttcagagtctag

SEQ ID NO: 997367 - DNA, 15 bp, Homo sapiens
agttcagagtctagg

SEQ ID NO: 997368 - DNA, 15 bp, Homo sapiens
gttcagagtctaggg

SEQ ID NO: 997369 - DNA, 15 bp, Homo sapiens
ttcagagtctagggc

SEQ ID NO: 997370 - DNA, 15 bp, Homo sapiens
tcagagtctagggca

SEQ ID NO: 997371 - DNA, 15 bp, Homo sapiens
cagagtctagggcat

SEQ ID NO: 997372 - DNA, 15 bp, Homo sapiens
agagtctagggcatg

SEQ ID NO: 997373 - DNA, 15 bp, Homo sapiens
gagtctagggcatgg

SEQ ID NO: 997374 - DNA, 15 bp, Homo sapiens
agtctagggcatgga

SEQ ID NO: 997375 - DNA, 15 bp, Homo sapiens
gtctagggcatggat

SEQ ID NO: 997376 - DNA, 15 bp, Homo sapiens
tctagggcatggatc

SEQ ID NO: 997377 - DNA, 15 bp, Homo sapiens
ctagggcatggatct

SEQ ID NO: 997378 - DNA, 15 bp, Homo sapiens
tagggcatggatctc

SEQ ID NO: 997379 - DNA, 15 bp, Homo sapiens
agggcatggatctcc

SEQ ID NO: 997380 - DNA, 15 bp, Homo sapiens
gggcatggatctcca

SEQ ID NO: 997381 - DNA, 15 bp, Homo sapiens
ggcatggatctccag

SEQ ID NO: 997382 - DNA, 15 bp, Homo sapiens
gcatggatctccagc

SEQ ID NO: 997383 - DNA, 15 bp, Homo sapiens
catggatctccagct

SEQ ID NO: 997384 - DNA, 15 bp, Homo sapiens
atggatctccagctt

SEQ ID NO: 997385 - DNA, 15 bp, Homo sapiens
tggatctccagcttc

SEQ ID NO: 997386 - DNA, 15 bp, Homo sapiens
ggatctccagcttcc

SEQ ID NO: 997387 - DNA, 15 bp, Homo sapiens
gatctccagcttccc

SEQ ID NO: 997388 - DNA, 15 bp, Homo sapiens
atctccagcttcccc

SEQ ID NO: 997389 - DNA, 15 bp, Homo sapiens
tctccagcttcccca

SEQ ID NO: 997390 - DNA, 15 bp, Homo sapiens
ctccagcttccccag

SEQ ID NO: 997391 - DNA, 15 bp, Homo sapiens
tccagcttccccagg

SEQ ID NO: 997392 - DNA, 15 bp, Homo sapiens
ccagcttccccaggc

SEQ ID NO: 997393 - DNA, 15 bp, Homo sapiens
cagcttccccaggct

SEQ ID NO: 997394 - DNA, 15 bp, Homo sapiens
agcttccccaggctt

SEQ ID NO: 997395 - DNA, 15 bp, Homo sapiens
gcttccccaggcttg

SEQ ID NO: 997396 - DNA, 15 bp, Homo sapiens
cttccccaggcttgc

SEQ ID NO: 997397 - DNA, 15 bp, Homo sapiens
ttccccaggcttgct

SEQ ID NO: 997398 - DNA, 15 bp, Homo sapiens
tccccaggcttgctc

SEQ ID NO: 997399 - DNA, 15 bp, Homo sapiens
ccccaggcttgctca

SEQ ID NO: 997400 - DNA, 15 bp, Homo sapiens
cccaggcttgctcag

SEQ ID NO: 997401 - DNA, 15 bp, Homo sapiens
ccaggcttgctcaga

SEQ ID NO: 997402 - DNA, 15 bp, Homo sapiens
caggcttgctcagac

SEQ ID NO: 997403 - DNA, 15 bp, Homo sapiens
aggcttgctcagacc

SEQ ID NO: 997404 - DNA, 15 bp, Homo sapiens
ggcttgctcagaccc

SEQ ID NO: 997405 - DNA, 15 bp, Homo sapiens
gcttgctcagacccc

SEQ ID NO: 997406 - DNA, 15 bp, Homo sapiens
cttgctcagacccct

SEQ ID NO: 997407 - DNA, 15 bp, Homo sapiens
ttgctcagacccctc

SEQ ID NO: 997408 - DNA, 15 bp, Homo sapiens
tgctcagacccctct

SEQ ID NO: 997409 - DNA, 15 bp, Homo sapiens
gctcagacccctctc

SEQ ID NO: 997410 - DNA, 15 bp, Homo sapiens
ctcagacccctctct

SEQ ID NO: 997411 - DNA, 15 bp, Homo sapiens
tcagacccctctctg

SEQ ID NO: 997412 - DNA, 15 bp, Homo sapiens
cagacccctctctga

SEQ ID NO: 997413 - DNA, 15 bp, Homo sapiens
agacccctctctgac

SEQ ID NO: 997414 - DNA, 15 bp, Homo sapiens
gacccctctctgacc

SEQ ID NO: 997415 - DNA, 15 bp, Homo sapiens
acccctctctgacct

SEQ ID NO: 997416 - DNA, 15 bp, Homo sapiens
cccctctctgacctc

SEQ ID NO: 997417 - DNA, 15 bp, Homo sapiens
ccctctctgacctct

SEQ ID NO: 997418 - DNA, 15 bp, Homo sapiens
cctctctgacctctc

SEQ ID NO: 997419 - DNA, 15 bp, Homo sapiens
ctctctgacctctcc

SEQ ID NO: 997420 - DNA, 15 bp, Homo sapiens
tctctgacctctcct

SEQ ID NO: 997421 - DNA, 15 bp, Homo sapiens
ctctgacctctcctc

SEQ ID NO: 997422 - DNA, 15 bp, Homo sapiens
tctgacctctcctct

SEQ ID NO: 997423 - DNA, 15 bp, Homo sapiens
ctgacctctcctctg

SEQ ID NO: 997424 - DNA, 15 bp, Homo sapiens
tgacctctcctctgc

SEQ ID NO: 997425 - DNA, 15 bp, Homo sapiens
gacctctcctctgcc

SEQ ID NO: 997426 - DNA, 15 bp, Homo sapiens
acctctcctctgccc

SEQ ID NO: 997427 - DNA, 15 bp, Homo sapiens
cctctcctctgccca

SEQ ID NO: 997428 - DNA, 15 bp, Homo sapiens
ctctcctctgcccag

SEQ ID NO: 997429 - DNA, 15 bp, Homo sapiens
tctcctctgcccagg

SEQ ID NO: 997430 - DNA, 15 bp, Homo sapiens
ctcctctgcccaggt

SEQ ID NO: 997431 - DNA, 15 bp, Homo sapiens
tcctctgcccaggtc

SEQ ID NO: 997432 - DNA, 15 bp, Homo sapiens
cctctgcccaggtcc

SEQ ID NO: 997433 - DNA, 15 bp, Homo sapiens
ctctgcccaggtccc

SEQ ID NO: 997434 - DNA, 15 bp, Homo sapiens
tctgcccaggtcccc

SEQ ID NO: 997435 - DNA, 15 bp, Homo sapiens
ctgcccaggtccccc

SEQ ID NO: 997436 - DNA, 15 bp, Homo sapiens
tgcccaggtcccccc

SEQ ID NO: 997437 - DNA, 15 bp, Homo sapiens
gcccaggtcccccca

SEQ ID NO: 997438 - DNA, 15 bp, Homo sapiens
cccaggtccccccag

SEQ ID NO: 997439 - DNA, 15 bp, Homo sapiens
ccaggtccccccagc

SEQ ID NO: 997440 - DNA, 15 bp, Homo sapiens
caggtccccccagcg

SEQ ID NO: 997441 - DNA, 15 bp, Homo sapiens
aggtccccccagcga

SEQ ID NO: 997442 - DNA, 15 bp, Homo sapiens
ggtccccccagcgaa

SEQ ID NO: 997443 - DNA, 15 bp, Homo sapiens
gtccccccagcgaac

SEQ ID NO: 997444 - DNA, 15 bp, Homo sapiens
tccccccagcgaacc

SEQ ID NO: 997445 - DNA, 15 bp, Homo sapiens
ccccccagcgaaccc

SEQ ID NO: 997446 - DNA, 15 bp, Homo sapiens
cccccagcgaaccca

SEQ ID NO: 997447 - DNA, 15 bp, Homo sapiens
ccccagcgaacccac

SEQ ID NO: 997448 - DNA, 15 bp, Homo sapiens
cccagcgaacccacc

SEQ ID NO: 997449 - DNA, 15 bp, Homo sapiens
ccagcgaacccaccc

SEQ ID NO: 997450 - DNA, 15 bp, Homo sapiens
cagcgaacccaccca

SEQ ID NO: 997451 - DNA, 15 bp, Homo sapiens
agcgaacccacccac

SEQ ID NO: 997452 - DNA, 15 bp, Homo sapiens
gcgaacccacccacc

SEQ ID NO: 997453 - DNA, 15 bp, Homo sapiens
cgaacccacccacct

SEQ ID NO: 997454 - DNA, 15 bp, Homo sapiens
gaacccacccacctg

SEQ ID NO: 997455 - DNA, 15 bp, Homo sapiens
aacccacccacctgg

SEQ ID NO: 997456 - DNA, 15 bp, Homo sapiens
acccacccacctggc

SEQ ID NO: 997457 - DNA, 15 bp, Homo sapiens
cccacccacctggca

SEQ ID NO: 997458 - DNA, 15 bp, Homo sapiens
ccacccacctggcag

SEQ ID NO: 997459 - DNA, 15 bp, Homo sapiens
cacccacctggcagt

SEQ ID NO: 997460 - DNA, 15 bp, Homo sapiens
acccacctggcagta

SEQ ID NO: 997461 - DNA, 15 bp, Homo sapiens
cccacctggcagtag

SEQ ID NO: 997462 - DNA, 15 bp, Homo sapiens
ccacctggcagtaga

SEQ ID NO: 997463 - DNA, 15 bp, Homo sapiens
cacctggcagtagag

SEQ ID NO: 997464 - DNA, 15 bp, Homo sapiens
acctggcagtagagg

SEQ ID NO: 997465 - DNA, 15 bp, Homo sapiens
cctggcagtagagga

SEQ ID NO: 997466 - DNA, 15 bp, Homo sapiens
ctggcagtagaggac

SEQ ID NO: 997467 - DNA, 15 bp, Homo sapiens
tggcagtagaggacg

SEQ ID NO: 997468 - DNA, 15 bp, Homo sapiens
ggcagtagaggacgt

SEQ ID NO: 997469 - DNA, 15 bp, Homo sapiens
gcagtagaggacgtc

SEQ ID NO: 997470 - DNA, 15 bp, Homo sapiens
cagtagaggacgtct

SEQ ID NO: 997471 - DNA, 15 bp, Homo sapiens
agtagaggacgtctc

SEQ ID NO: 997472 - DNA, 15 bp, Homo sapiens
gtagaggacgtctct

SEQ ID NO: 997473 - DNA, 15 bp, Homo sapiens
tagaggacgtctctg

SEQ ID NO: 997474 - DNA, 15 bp, Homo sapiens
agaggacgtctctga

SEQ ID NO: 997475 - DNA, 15 bp, Homo sapiens
gaggacgtctctgac

SEQ ID NO: 997476 - DNA, 15 bp, Homo sapiens
aggacgtctctgaca

SEQ ID NO: 997477 - DNA, 15 bp, Homo sapiens
ggacgtctctgacac

SEQ ID NO: 997478 - DNA, 15 bp, Homo sapiens
gacgtctctgacacc

SEQ ID NO: 997479 - DNA, 15 bp, Homo sapiens
acgtctctgacacca

SEQ ID NO: 997480 - DNA, 15 bp, Homo sapiens
cgtctctgacaccac

SEQ ID NO: 997481 - DNA, 15 bp, Homo sapiens
gtctctgacaccacg

SEQ ID NO: 997482 - DNA, 15 bp, Homo sapiens
tctctgacaccacgg

SEQ ID NO: 997483 - DNA, 15 bp, Homo sapiens
ctctgacaccacggt

SEQ ID NO: 997484 - DNA, 15 bp, Homo sapiens
tctgacaccacggtc

SEQ ID NO: 997485 - DNA, 15 bp, Homo sapiens
ctgacaccacggtct

SEQ ID NO: 997486 - DNA, 15 bp, Homo sapiens
tgacaccacggtctc

SEQ ID NO: 997487 - DNA, 15 bp, Homo sapiens
gacaccacggtctcc

SEQ ID NO: 997488 - DNA, 15 bp, Homo sapiens
acaccacggtctccc

SEQ ID NO: 997489 - DNA, 15 bp, Homo sapiens
caccacggtctccct

SEQ ID NO: 997490 - DNA, 15 bp, Homo sapiens
accacggtctccctc

SEQ ID NO: 997491 - DNA, 15 bp, Homo sapiens
ccacggtctccctca

SEQ ID NO: 997492 - DNA, 15 bp, Homo sapiens
cacggtctccctcaa

SEQ ID NO: 997493 - DNA, 15 bp, Homo sapiens
acggtctccctcaag

SEQ ID NO: 997494 - DNA, 15 bp, Homo sapiens
cggtctccctcaagt

SEQ ID NO: 997495 - DNA, 15 bp, Homo sapiens
ggtctccctcaagtg

SEQ ID NO: 997496 - DNA, 15 bp, Homo sapiens
gtctccctcaagtgg

SEQ ID NO: 997497 - DNA, 15 bp, Homo sapiens
tctccctcaagtggc

SEQ ID NO: 997498 - DNA, 15 bp, Homo sapiens
ctccctcaagtggcg

SEQ ID NO: 997499 - DNA, 15 bp, Homo sapiens
tccctcaagtggcgg

SEQ ID NO: 997500 - DNA, 15 bp, Homo sapiens
ccctcaagtggcggc

SEQ ID NO: 997501 - DNA, 15 bp, Homo sapiens
cctcaagtggcggcc

SEQ ID NO: 997502 - DNA, 15 bp, Homo sapiens
ctcaagtggcggccc

SEQ ID NO: 997503 - DNA, 15 bp, Homo sapiens
tcaagtggcggcccc

SEQ ID NO: 997504 - DNA, 15 bp, Homo sapiens
caagtggcggccccc

SEQ ID NO: 997505 - DNA, 15 bp, Homo sapiens
aagtggcggccccca

SEQ ID NO: 997506 - DNA, 15 bp, Homo sapiens
agtggcggcccccag

SEQ ID NO: 997507 - DNA, 15 bp, Homo sapiens
gtggcggcccccaga

SEQ ID NO: 997508 - DNA, 15 bp, Homo sapiens
tggcggcccccagag

SEQ ID NO: 997509 - DNA, 15 bp, Homo sapiens
ggcggcccccagagc

SEQ ID NO: 997510 - DNA, 15 bp, Homo sapiens
gcggcccccagagcg

SEQ ID NO: 997511 - DNA, 15 bp, Homo sapiens
cggcccccagagcgc

SEQ ID NO: 997512 - DNA, 15 bp, Homo sapiens
ggcccccagagcgcg

SEQ ID NO: 997513 - DNA, 15 bp, Homo sapiens
gcccccagagcgcgt

SEQ ID NO: 997514 - DNA, 15 bp, Homo sapiens
cccccagagcgcgtg

SEQ ID NO: 997515 - DNA, 15 bp, Homo sapiens
ccccagagcgcgtgg

SEQ ID NO: 997516 - DNA, 15 bp, Homo sapiens
cccagagcgcgtggg

SEQ ID NO: 997517 - DNA, 15 bp, Homo sapiens
ccagagcgcgtggga

SEQ ID NO: 997518 - DNA, 15 bp, Homo sapiens
cagagcgcgtgggag

SEQ ID NO: 997519 - DNA, 15 bp, Homo sapiens
agagcgcgtgggagc

SEQ ID NO: 997520 - DNA, 15 bp, Homo sapiens
gagcgcgtgggagca

SEQ ID NO: 997521 - DNA, 15 bp, Homo sapiens
agcgcgtgggagcag

SEQ ID NO: 997522 - DNA, 15 bp, Homo sapiens
gcgcgtgggagcagg

SEQ ID NO: 997523 - DNA, 15 bp, Homo sapiens
cgcgtgggagcagga

SEQ ID NO: 997524 - DNA, 15 bp, Homo sapiens
gcgtgggagcaggag

SEQ ID NO: 997525 - DNA, 15 bp, Homo sapiens
cgtgggagcaggagg

SEQ ID NO: 997526 - DNA, 15 bp, Homo sapiens
gtgggagcaggaggc

SEQ ID NO: 997527 - DNA, 15 bp, Homo sapiens
tgggagcaggaggcc

SEQ ID NO: 997528 - DNA, 15 bp, Homo sapiens
gggagcaggaggcct

SEQ ID NO: 997529 - DNA, 15 bp, Homo sapiens
ggagcaggaggcctg

SEQ ID NO: 997530 - DNA, 15 bp, Homo sapiens
gagcaggaggcctgg

SEQ ID NO: 997531 - DNA, 15 bp, Homo sapiens
agcaggaggcctgga

SEQ ID NO: 997532 - DNA, 15 bp, Homo sapiens
gcaggaggcctggat

SEQ ID NO: 997533 - DNA, 15 bp, Homo sapiens
caggaggcctggatg

SEQ ID NO: 997534 - DNA, 15 bp, Homo sapiens
aggaggcctggatgg

SEQ ID NO: 997535 - DNA, 15 bp, Homo sapiens
ggaggcctggatggc

SEQ ID NO: 997536 - DNA, 15 bp, Homo sapiens
gaggcctggatggct

SEQ ID NO: 997537 - DNA, 15 bp, Homo sapiens
aggcctggatggcta

SEQ ID NO: 997538 - DNA, 15 bp, Homo sapiens
ggcctggatggctac

SEQ ID NO: 997539 - DNA, 15 bp, Homo sapiens
gcctggatggctaca

SEQ ID NO: 997540 - DNA, 15 bp, Homo sapiens
cctggatggctacag

SEQ ID NO: 997541 - DNA, 15 bp, Homo sapiens
ctggatggctacagc

SEQ ID NO: 997542 - DNA, 15 bp, Homo sapiens
tggatggctacagcg

SEQ ID NO: 997543 - DNA, 15 bp, Homo sapiens
ggatggctacagcgt

SEQ ID NO: 997544 - DNA, 15 bp, Homo sapiens
gatggctacagcgtg

SEQ ID NO: 997545 - DNA, 15 bp, Homo sapiens
atggctacagcgtgg

SEQ ID NO: 997546 - DNA, 15 bp, Homo sapiens
tggctacagcgtgga

SEQ ID NO: 997547 - DNA, 15 bp, Homo sapiens
ggctacagcgtggag

SEQ ID NO: 997548 - DNA, 15 bp, Homo sapiens
gctacagcgtggagt

SEQ ID NO: 997549 - DNA, 15 bp, Homo sapiens
ctacagcgtggagta

SEQ ID NO: 997550 - DNA, 15 bp, Homo sapiens
tacagcgtggagtac

SEQ ID NO: 997551 - DNA, 15 bp, Homo sapiens
acagcgtggagtact

SEQ ID NO: 997552 - DNA, 15 bp, Homo sapiens
cagcgtggagtactg

SEQ ID NO: 997553 - DNA, 15 bp, Homo sapiens
agcgtggagtactgc

SEQ ID NO: 997554 - DNA, 15 bp, Homo sapiens
gcgtggagtactgcc

SEQ ID NO: 997555 - DNA, 15 bp, Homo sapiens
cgtggagtactgccc

SEQ ID NO: 997556 - DNA, 15 bp, Homo sapiens
gtggagtactgccca

SEQ ID NO: 997557 - DNA, 15 bp, Homo sapiens
tggagtactgcccag

SEQ ID NO: 997558 - DNA, 15 bp, Homo sapiens
ggagtactgcccaga

SEQ ID NO: 997559 - DNA, 15 bp, Homo sapiens
gagtactgcccagag

SEQ ID NO: 997560 - DNA, 15 bp, Homo sapiens
agtactgcccagagg

SEQ ID NO: 997561 - DNA, 15 bp, Homo sapiens
gtactgcccagaggg

SEQ ID NO: 997562 - DNA, 15 bp, Homo sapiens
tactgcccagagggc

SEQ ID NO: 997563 - DNA, 15 bp, Homo sapiens
actgcccagagggct

SEQ ID NO: 997564 - DNA, 15 bp, Homo sapiens
ctgcccagagggctg

SEQ ID NO: 997565 - DNA, 15 bp, Homo sapiens
tgcccagagggctgt

SEQ ID NO: 997566 - DNA, 15 bp, Homo sapiens
gcccagagggctgtg

SEQ ID NO: 997567 - DNA, 15 bp, Homo sapiens
cccagagggctgtga

SEQ ID NO: 997568 - DNA, 15 bp, Homo sapiens
ccagagggctgtgag

SEQ ID NO: 997569 - DNA, 15 bp, Homo sapiens
cagagggctgtgagt

SEQ ID NO: 997570 - DNA, 15 bp, Homo sapiens
agagggctgtgagtg

SEQ ID NO: 997571 - DNA, 15 bp, Homo sapiens
gagggctgtgagtgt

SEQ ID NO: 997572 - DNA, 15 bp, Homo sapiens
agggctgtgagtgtc

SEQ ID NO: 997573 - DNA, 15 bp, Homo sapiens
gggctgtgagtgtcc

SEQ ID NO: 997574 - DNA, 15 bp, Homo sapiens
ggctgtgagtgtccc

SEQ ID NO: 997575 - DNA, 15 bp, Homo sapiens
gctgtgagtgtcccc

SEQ ID NO: 997576 - DNA, 15 bp, Homo sapiens
ctgtgagtgtccccg

SEQ ID NO: 997577 - DNA, 15 bp, Homo sapiens
tgtgagtgtccccgc

SEQ ID NO: 997578 - DNA, 15 bp, Homo sapiens
gtgagtgtccccgcc

SEQ ID NO: 997579 - DNA, 15 bp, Homo sapiens
tgagtgtccccgccc

SEQ ID NO: 997580 - DNA, 15 bp, Homo sapiens
gagtgtccccgcccc

SEQ ID NO: 997581 - DNA, 15 bp, Homo sapiens
agtgtccccgccccc

SEQ ID NO: 997582 - DNA, 15 bp, Homo sapiens
gtgtccccgccccca

SEQ ID NO: 997583 - DNA, 15 bp, Homo sapiens
tgtccccgcccccaa

SEQ ID NO: 997584 - DNA, 15 bp, Homo sapiens
gtccccgcccccaac

SEQ ID NO: 997585 - DNA, 15 bp, Homo sapiens
tccccgcccccaacc

SEQ ID NO: 997586 - DNA, 15 bp, Homo sapiens
ccccgcccccaaccc

SEQ ID NO: 997587 - DNA, 15 bp, Homo sapiens
cccgcccccaacccc

SEQ ID NO: 997588 - DNA, 15 bp, Homo sapiens
ccgcccccaaccccc

SEQ ID NO: 997589 - DNA, 15 bp, Homo sapiens
cgcccccaacccccc

SEQ ID NO: 997590 - DNA, 15 bp, Homo sapiens
gcccccaacccccct

SEQ ID NO: 997591 - DNA, 15 bp, Homo sapiens
cccccaacccccctc

SEQ ID NO: 997592 - DNA, 15 bp, Homo sapiens
ccccaacccccctcc

SEQ ID NO: 997593 - DNA, 15 bp, Homo sapiens
cccaacccccctccc

SEQ ID NO: 997594 - DNA, 15 bp, Homo sapiens
ccaacccccctcccc

SEQ ID NO: 997595 - DNA, 15 bp, Homo sapiens
caacccccctcccca

SEQ ID NO: 997596 - DNA, 15 bp, Homo sapiens
aacccccctccccaa

SEQ ID NO: 997597 - DNA, 15 bp, Homo sapiens
acccccctccccaaa

SEQ ID NO: 997598 - DNA, 15 bp, Homo sapiens
cccccctccccaaag

SEQ ID NO: 997599 - DNA, 15 bp, Homo sapiens
ccccctccccaaagg

SEQ ID NO: 997600 - DNA, 15 bp, Homo sapiens
cccctccccaaagga

SEQ ID NO: 997601 - DNA, 15 bp, Homo sapiens
ccctccccaaaggaa

SEQ ID NO: 997602 - DNA, 15 bp, Homo sapiens
cctccccaaaggaag

SEQ ID NO: 997603 - DNA, 15 bp, Homo sapiens
ctccccaaaggaaga

SEQ ID NO: 997604 - DNA, 15 bp, Homo sapiens
tccccaaaggaagaa

SEQ ID NO: 997605 - DNA, 15 bp, Homo sapiens
ccccaaaggaagaac

SEQ ID NO: 997606 - DNA, 15 bp, Homo sapiens
cccaaaggaagaaca

SEQ ID NO: 997607 - DNA, 15 bp, Homo sapiens
ccaaaggaagaacat

SEQ ID NO: 997608 - DNA, 15 bp, Homo sapiens
caaaggaagaacatg

SEQ ID NO: 997609 - DNA, 15 bp, Homo sapiens
aaaggaagaacatgc

SEQ ID NO: 997610 - DNA, 15 bp, Homo sapiens
aaggaagaacatgct

SEQ ID NO: 997611 - DNA, 15 bp, Homo sapiens
aggaagaacatgctc

SEQ ID NO: 997612 - DNA, 15 bp, Homo sapiens
ggaagaacatgctca

SEQ ID NO: 997613 - DNA, 15 bp, Homo sapiens
gaagaacatgctcac

SEQ ID NO: 997614 - DNA, 15 bp, Homo sapiens
aagaacatgctcacc

SEQ ID NO: 997615 - DNA, 15 bp, Homo sapiens
agaacatgctcacct

SEQ ID NO: 997616 - DNA, 15 bp, Homo sapiens
gaacatgctcacctt

SEQ ID NO: 997617 - DNA, 15 bp, Homo sapiens
aacatgctcaccttg

SEQ ID NO: 997618 - DNA, 15 bp, Homo sapiens
acatgctcaccttgc

SEQ ID NO: 997619 - DNA, 15 bp, Homo sapiens
catgctcaccttgcc

SEQ ID NO: 997620 - DNA, 15 bp, Homo sapiens
atgctcaccttgcca

SEQ ID NO: 997621 - DNA, 15 bp, Homo sapiens
tgctcaccttgccat

SEQ ID NO: 997622 - DNA, 15 bp, Homo sapiens
gctcaccttgccatt

SEQ ID NO: 997623 - DNA, 15 bp, Homo sapiens
ctcaccttgccattg

SEQ ID NO: 997624 - DNA, 15 bp, Homo sapiens
tcaccttgccattga

SEQ ID NO: 997625 - DNA, 15 bp, Homo sapiens
caccttgccattgag

SEQ ID NO: 997626 - DNA, 15 bp, Homo sapiens
accttgccattgagc

SEQ ID NO: 997627 - DNA, 15 bp, Homo sapiens
ccttgccattgagca

SEQ ID NO: 997628 - DNA, 15 bp, Homo sapiens
cttgccattgagcag

SEQ ID NO: 997629 - DNA, 15 bp, Homo sapiens
ttgccattgagcaga

SEQ ID NO: 997630 - DNA, 15 bp, Homo sapiens
tgccattgagcagat

SEQ ID NO: 997631 - DNA, 15 bp, Homo sapiens
gccattgagcagatt

SEQ ID NO: 997632 - DNA, 15 bp, Homo sapiens
ccattgagcagattc

SEQ ID NO: 997633 - DNA, 15 bp, Homo sapiens
cattgagcagattca

SEQ ID NO: 997634 - DNA, 15 bp, Homo sapiens
attgagcagattcac

SEQ ID NO: 997635 - DNA, 15 bp, Homo sapiens
ttgagcagattcacc

SEQ ID NO: 997636 - DNA, 15 bp, Homo sapiens
tgagcagattcacct

SEQ ID NO: 997637 - DNA, 15 bp, Homo sapiens
gagcagattcacctg

SEQ ID NO: 997638 - DNA, 15 bp, Homo sapiens
agcagattcacctgt

SEQ ID NO: 997639 - DNA, 15 bp, Homo sapiens
gcagattcacctgta

SEQ ID NO: 997640 - DNA, 15 bp, Homo sapiens
cagattcacctgtag

SEQ ID NO: 997641 - DNA, 15 bp, Homo sapiens
agattcacctgtagt

SEQ ID NO: 997642 - DNA, 15 bp, Homo sapiens
gattcacctgtagtc

SEQ ID NO: 997643 - DNA, 15 bp, Homo sapiens
attcacctgtagtca

SEQ ID NO: 997644 - DNA, 15 bp, Homo sapiens
ttcacctgtagtcaa

SEQ ID NO: 997645 - DNA, 15 bp, Homo sapiens
tcacctgtagtcaag

SEQ ID NO: 997646 - DNA, 15 bp, Homo sapiens
cacctgtagtcaagt

SEQ ID NO: 997647 - DNA, 15 bp, Homo sapiens
acctgtagtcaagtt

SEQ ID NO: 997648 - DNA, 15 bp, Homo sapiens
cctgtagtcaagttt

SEQ ID NO: 997649 - DNA, 15 bp, Homo sapiens
ctgtagtcaagtttt

SEQ ID NO: 997650 - DNA, 15 bp, Homo sapiens
tgtagtcaagttttt

SEQ ID NO: 997651 - DNA, 15 bp, Homo sapiens
gtagtcaagtttttt

SEQ ID NO: 997652 - DNA, 15 bp, Homo sapiens
tagtcaagtttttta

SEQ ID NO: 997653 - DNA, 15 bp, Homo sapiens
agtcaagttttttag

SEQ ID NO: 997654 - DNA, 15 bp, Homo sapiens
gtcaagttttttagg

SEQ ID NO: 997655 - DNA, 15 bp, Homo sapiens
tcaagttttttaggc

SEQ ID NO: 997656 - DNA, 15 bp, Homo sapiens
caagttttttaggcc

SEQ ID NO: 997657 - DNA, 15 bp, Homo sapiens
aagttttttaggccc

SEQ ID NO: 997658 - DNA, 15 bp, Homo sapiens
agttttttaggccca

SEQ ID NO: 997659 - DNA, 15 bp, Homo sapiens
gttttttaggcccac

SEQ ID NO: 997660 - DNA, 15 bp, Homo sapiens
ttttttaggcccact

SEQ ID NO: 997661 - DNA, 15 bp, Homo sapiens
tttttaggcccactt

SEQ ID NO: 997662 - DNA, 15 bp, Homo sapiens
ttttaggcccacttt

SEQ ID NO: 997663 - DNA, 15 bp, Homo sapiens
tttaggcccactttt

SEQ ID NO: 997664 - DNA, 15 bp, Homo sapiens
ttaggcccacttttg

SEQ ID NO: 997665 - DNA, 15 bp, Homo sapiens
taggcccacttttgc

SEQ ID NO: 997666 - DNA, 15 bp, Homo sapiens
aggcccacttttgcc

SEQ ID NO: 997667 - DNA, 15 bp, Homo sapiens
ggcccacttttgccg

SEQ ID NO: 997668 - DNA, 15 bp, Homo sapiens
gcccacttttgccga

SEQ ID NO: 997669 - DNA, 15 bp, Homo sapiens
cccacttttgccgaa

SEQ ID NO: 997670 - DNA, 15 bp, Homo sapiens
ccacttttgccgaaa

SEQ ID NO: 997671 - DNA, 15 bp, Homo sapiens
cacttttgccgaaag

SEQ ID NO: 997672 - DNA, 15 bp, Homo sapiens
acttttgccgaaagt

SEQ ID NO: 997673 - DNA, 15 bp, Homo sapiens
cttttgccgaaagtt

SEQ ID NO: 997674 - DNA, 15 bp, Homo sapiens
ttttgccgaaagttg

SEQ ID NO: 997675 - DNA, 15 bp, Homo sapiens
tttgccgaaagttga

SEQ ID NO: 997676 - DNA, 15 bp, Homo sapiens
ttgccgaaagttgag

SEQ ID NO: 997677 - DNA, 15 bp, Homo sapiens
tgccgaaagttgagg

SEQ ID NO: 997678 - DNA, 15 bp, Homo sapiens
gccgaaagttgagga

SEQ ID NO: 997679 - DNA, 15 bp, Homo sapiens
ccgaaagttgaggac

SEQ ID NO: 997680 - DNA, 15 bp, Homo sapiens
cgaaagttgaggaca

SEQ ID NO: 997681 - DNA, 15 bp, Homo sapiens
gaaagttgaggacac

SEQ ID NO: 997682 - DNA, 15 bp, Homo sapiens
aaagttgaggacacc

SEQ ID NO: 997683 - DNA, 15 bp, Homo sapiens
aagttgaggacaccc

SEQ ID NO: 997684 - DNA, 15 bp, Homo sapiens
agttgaggacaccca

SEQ ID NO: 997685 - DNA, 15 bp, Homo sapiens
gttgaggacacccag

SEQ ID NO: 997686 - DNA, 15 bp, Homo sapiens
ttgaggacacccaga

SEQ ID NO: 997687 - DNA, 15 bp, Homo sapiens
tgaggacacccagag

SEQ ID NO: 997688 - DNA, 15 bp, Homo sapiens
gaggacacccagaga

SEQ ID NO: 997689 - DNA, 15 bp, Homo sapiens
aggacacccagagaa

SEQ ID NO: 997690 - DNA, 15 bp, Homo sapiens
ggacacccagagaaa

SEQ ID NO: 997691 - DNA, 15 bp, Homo sapiens
gacacccagagaaat

SEQ ID NO: 997692 - DNA, 15 bp, Homo sapiens
acacccagagaaata

SEQ ID NO: 997693 - DNA, 15 bp, Homo sapiens
cacccagagaaatat

SEQ ID NO: 997694 - DNA, 15 bp, Homo sapiens
acccagagaaatatc

SEQ ID NO: 997695 - DNA, 15 bp, Homo sapiens
cccagagaaatatct

SEQ ID NO: 997696 - DNA, 15 bp, Homo sapiens
ccagagaaatatctg

SEQ ID NO: 997697 - DNA, 15 bp, Homo sapiens
cagagaaatatctgt

SEQ ID NO: 997698 - DNA, 15 bp, Homo sapiens
agagaaatatctgtc

SEQ ID NO: 997699 - DNA, 15 bp, Homo sapiens
gagaaatatctgtcc

SEQ ID NO: 997700 - DNA, 15 bp, Homo sapiens
agaaatatctgtcct

SEQ ID NO: 997701 - DNA, 15 bp, Homo sapiens
gaaatatctgtcctg

SEQ ID NO: 997702 - DNA, 15 bp, Homo sapiens
aaatatctgtcctgt

SEQ ID NO: 997703 - DNA, 15 bp, Homo sapiens
aatatctgtcctgtt

SEQ ID NO: 997704 - DNA, 15 bp, Homo sapiens
atatctgtcctgttt

SEQ ID NO: 997705 - DNA, 15 bp, Homo sapiens
tatctgtcctgtttt

SEQ ID NO: 997706 - DNA, 15 bp, Homo sapiens
atctgtcctgttttc

SEQ ID NO: 997707 - DNA, 15 bp, Homo sapiens
tctgtcctgttttca

SEQ ID NO: 997708 - DNA, 15 bp, Homo sapiens
ctgtcctgttttcag

SEQ ID NO: 997709 - DNA, 15 bp, Homo sapiens
tgtcctgttttcaga

SEQ ID NO: 997710 - DNA, 15 bp, Homo sapiens
gtcctgttttcagaa

SEQ ID NO: 997711 - DNA, 15 bp, Homo sapiens
tcctgttttcagaag

SEQ ID NO: 997712 - DNA, 15 bp, Homo sapiens
cctgttttcagaagt

SEQ ID NO: 997713 - DNA, 15 bp, Homo sapiens
ctgttttcagaagta

SEQ ID NO: 997714 - DNA, 15 bp, Homo sapiens
tgttttcagaagtaa

SEQ ID NO: 997715 - DNA, 15 bp, Homo sapiens
gttttcagaagtaaa

SEQ ID NO: 997716 - DNA, 15 bp, Homo sapiens
ttttcagaagtaaaa

SEQ ID NO: 997717 - DNA, 15 bp, Homo sapiens
tttcagaagtaaaaa

SEQ ID NO: 997718 - DNA, 15 bp, Homo sapiens
ttcagaagtaaaaaa

SEQ ID NO: 997719 - DNA, 15 bp, Homo sapiens
tcagaagtaaaaaag

SEQ ID NO: 997720 - DNA, 15 bp, Homo sapiens
cagaagtaaaaaagc

SEQ ID NO: 997721 - DNA, 15 bp, Homo sapiens
agaagtaaaaaagct

SEQ ID NO: 997722 - DNA, 15 bp, Homo sapiens
gaagtaaaaaagctt

SEQ ID NO: 997723 - DNA, 15 bp, Homo sapiens
aagtaaaaaagcttg

SEQ ID NO: 997724 - DNA, 15 bp, Homo sapiens
agtaaaaaagcttgc

SEQ ID NO: 997725 - DNA, 15 bp, Homo sapiens
gtaaaaaagcttgcc

SEQ ID NO: 997726 - DNA, 15 bp, Homo sapiens
taaaaaagcttgcct

SEQ ID NO: 997727 - DNA, 15 bp, Homo sapiens
aaaaaagcttgccta

SEQ ID NO: 997728 - DNA, 15 bp, Homo sapiens
aaaaagcttgcctag

SEQ ID NO: 997729 - DNA, 15 bp, Homo sapiens
aaaagcttgcctagt

SEQ ID NO: 997730 - DNA, 15 bp, Homo sapiens
aaagcttgcctagtg

SEQ ID NO: 997731 - DNA, 15 bp, Homo sapiens
aagcttgcctagtga

SEQ ID NO: 997732 - DNA, 15 bp, Homo sapiens
agcttgcctagtgaa

SEQ ID NO: 997733 - DNA, 15 bp, Homo sapiens
gcttgcctagtgaaa

SEQ ID NO: 997734 - DNA, 15 bp, Homo sapiens
cttgcctagtgaaaa

SEQ ID NO: 997735 - DNA, 15 bp, Homo sapiens
ttgcctagtgaaaaa

SEQ ID NO: 997736 - DNA, 15 bp, Homo sapiens
tgcctagtgaaaaac

SEQ ID NO: 997737 - DNA, 15 bp, Homo sapiens
gcctagtgaaaaaca

SEQ ID NO: 997738 - DNA, 15 bp, Homo sapiens
cctagtgaaaaacaa

SEQ ID NO: 997739 - DNA, 15 bp, Homo sapiens
ctagtgaaaaacaaa

SEQ ID NO: 997740 - DNA, 15 bp, Homo sapiens
tagtgaaaaacaaat

SEQ ID NO: 997741 - DNA, 15 bp, Homo sapiens
agtgaaaaacaaatg

SEQ ID NO: 997742 - DNA, 15 bp, Homo sapiens
gtgaaaaacaaatgc

SEQ ID NO: 997743 - DNA, 15 bp, Homo sapiens
tgaaaaacaaatgca

SEQ ID NO: 997744 - DNA, 15 bp, Homo sapiens
gaaaaacaaatgcag

SEQ ID NO: 997745 - DNA, 15 bp, Homo sapiens
aaaaacaaatgcaga

SEQ ID NO: 997746 - DNA, 15 bp, Homo sapiens
aaaacaaatgcagag

SEQ ID NO: 997747 - DNA, 15 bp, Homo sapiens
aaacaaatgcagagt

SEQ ID NO: 997748 - DNA, 15 bp, Homo sapiens
aacaaatgcagagta

SEQ ID NO: 997749 - DNA, 15 bp, Homo sapiens
acaaatgcagagtaa

SEQ ID NO: 997750 - DNA, 15 bp, Homo sapiens
caaatgcagagtaaa

SEQ ID NO: 997751 - DNA, 15 bp, Homo sapiens
aaatgcagagtaaag

SEQ ID NO: 997752 - DNA, 15 bp, Homo sapiens
aatgcagagtaaagc

SEQ ID NO: 997753 - DNA, 15 bp, Homo sapiens
atgcagagtaaagct

SEQ ID NO: 997754 - DNA, 15 bp, Homo sapiens
tgcagagtaaagctg

SEQ ID NO: 997755 - DNA, 15 bp, Homo sapiens
gcagagtaaagctga

SEQ ID NO: 997756 - DNA, 15 bp, Homo sapiens
cagagtaaagctgac

SEQ ID NO: 997757 - DNA, 15 bp, Homo sapiens
agagtaaagctgact

SEQ ID NO: 997758 - DNA, 15 bp, Homo sapiens
gagtaaagctgactg

SEQ ID NO: 997759 - DNA, 15 bp, Homo sapiens
agtaaagctgactgt

SEQ ID NO: 997760 - DNA, 15 bp, Homo sapiens
gtaaagctgactgta

SEQ ID NO: 997761 - DNA, 15 bp, Homo sapiens
taaagctgactgtaa

SEQ ID NO: 997762 - DNA, 15 bp, Homo sapiens
aaagctgactgtaac

SEQ ID NO: 997763 - DNA, 15 bp, Homo sapiens
aagctgactgtaaca

SEQ ID NO: 997764 - DNA, 15 bp, Homo sapiens
agctgactgtaacac

SEQ ID NO: 997765 - DNA, 15 bp, Homo sapiens
gctgactgtaacact

SEQ ID NO: 997766 - DNA, 15 bp, Homo sapiens
ctgactgtaacactt

SEQ ID NO: 997767 - DNA, 15 bp, Homo sapiens
tgactgtaacacttc

SEQ ID NO: 997768 - DNA, 15 bp, Homo sapiens
gactgtaacacttct

SEQ ID NO: 997769 - DNA, 15 bp, Homo sapiens
actgtaacacttctt

SEQ ID NO: 997770 - DNA, 15 bp, Homo sapiens
ctgtaacacttcttt

SEQ ID NO: 997771 - DNA, 15 bp, Homo sapiens
tgtaacacttctttg

SEQ ID NO: 997772 - DNA, 15 bp, Homo sapiens
gtaacacttctttga

SEQ ID NO: 997773 - DNA, 15 bp, Homo sapiens
taacacttctttgag

SEQ ID NO: 997774 - DNA, 15 bp, Homo sapiens
aacacttctttgagc

SEQ ID NO: 997775 - DNA, 15 bp, Homo sapiens
acacttctttgagca

SEQ ID NO: 997776 - DNA, 15 bp, Homo sapiens
cacttctttgagcag

SEQ ID NO: 997777 - DNA, 15 bp, Homo sapiens
acttctttgagcagt

SEQ ID NO: 997778 - DNA, 15 bp, Homo sapiens
cttctttgagcagtg

SEQ ID NO: 997779 - DNA, 15 bp, Homo sapiens
ttctttgagcagtgc

SEQ ID NO: 997780 - DNA, 15 bp, Homo sapiens
tctttgagcagtgcg

SEQ ID NO: 997781 - DNA, 15 bp, Homo sapiens
ctttgagcagtgcga

SEQ ID NO: 997782 - DNA, 15 bp, Homo sapiens
tttgagcagtgcgaa

SEQ ID NO: 997783 - DNA, 15 bp, Homo sapiens
ttgagcagtgcgaaa

SEQ ID NO: 997784 - DNA, 15 bp, Homo sapiens
tgagcagtgcgaaat

SEQ ID NO: 997785 - DNA, 15 bp, Homo sapiens
gagcagtgcgaaatc

SEQ ID NO: 997786 - DNA, 15 bp, Homo sapiens
agcagtgcgaaatca

SEQ ID NO: 997787 - DNA, 15 bp, Homo sapiens
gcagtgcgaaatcag

SEQ ID NO: 997788 - DNA, 15 bp, Homo sapiens
cagtgcgaaatcagc

SEQ ID NO: 997789 - DNA, 15 bp, Homo sapiens
agtgcgaaatcagca

SEQ ID NO: 997790 - DNA, 15 bp, Homo sapiens
gtgcgaaatcagcaa

SEQ ID NO: 997791 - DNA, 15 bp, Homo sapiens
tgcgaaatcagcaac

SEQ ID NO: 997792 - DNA, 15 bp, Homo sapiens
gcgaaatcagcaact

SEQ ID NO: 997793 - DNA, 15 bp, Homo sapiens
cgaaatcagcaacta

SEQ ID NO: 997794 - DNA, 15 bp, Homo sapiens
gaaatcagcaactac

SEQ ID NO: 997795 - DNA, 15 bp, Homo sapiens
aaatcagcaactaca

SEQ ID NO: 997796 - DNA, 15 bp, Homo sapiens
aatcagcaactacat

SEQ ID NO: 997797 - DNA, 15 bp, Homo sapiens
atcagcaactacatt

SEQ ID NO: 997798 - DNA, 15 bp, Homo sapiens
tcagcaactacattt

SEQ ID NO: 997799 - DNA, 15 bp, Homo sapiens
cagcaactacatttt

SEQ ID NO: 997800 - DNA, 15 bp, Homo sapiens
agcaactacatttta

SEQ ID NO: 997801 - DNA, 15 bp, Homo sapiens
gcaactacattttaa

SEQ ID NO: 997802 - DNA, 15 bp, Homo sapiens
caactacattttaaa

SEQ ID NO: 997803 - DNA, 15 bp, Homo sapiens
aactacattttaaaa

SEQ ID NO: 997804 - DNA, 15 bp, Homo sapiens
actacattttaaaaa

SEQ ID NO: 997805 - DNA, 15 bp, Homo sapiens
ctacattttaaaaac

SEQ ID NO: 997806 - DNA, 15 bp, Homo sapiens
tacattttaaaaaca

SEQ ID NO: 997807 - DNA, 15 bp, Homo sapiens
acattttaaaaacat

SEQ ID NO: 997808 - DNA, 15 bp, Homo sapiens
cattttaaaaacata

SEQ ID NO: 997809 - DNA, 15 bp, Homo sapiens
attttaaaaacatat

SEQ ID NO: 997810 - DNA, 15 bp, Homo sapiens
ttttaaaaacatatt

SEQ ID NO: 997811 - DNA, 15 bp, Homo sapiens
tttaaaaacatattt

SEQ ID NO: 997812 - DNA, 15 bp, Homo sapiens
ttaaaaacatattta

SEQ ID NO: 997813 - DNA, 15 bp, Homo sapiens
taaaaacatatttaa

SEQ ID NO: 997814 - DNA, 15 bp, Homo sapiens
aaaaacatatttaag

SEQ ID NO: 997815 - DNA, 15 bp, Homo sapiens
aaaacatatttaagg

SEQ ID NO: 997816 - DNA, 15 bp, Homo sapiens
aaacatatttaaggc

SEQ ID NO: 997817 - DNA, 15 bp, Homo sapiens
aacatatttaaggcc

SEQ ID NO: 997818 - DNA, 15 bp, Homo sapiens
acatatttaaggcca

SEQ ID NO: 997819 - DNA, 15 bp, Homo sapiens
catatttaaggccag

SEQ ID NO: 997820 - DNA, 15 bp, Homo sapiens
atatttaaggccagg

SEQ ID NO: 997821 - DNA, 15 bp, Homo sapiens
tatttaaggccaggc

SEQ ID NO: 997822 - DNA, 15 bp, Homo sapiens
atttaaggccaggcg

SEQ ID NO: 997823 - DNA, 15 bp, Homo sapiens
tttaaggccaggcgc

SEQ ID NO: 997824 - DNA, 15 bp, Homo sapiens
ttaaggccaggcgcg

SEQ ID NO: 997825 - DNA, 15 bp, Homo sapiens
taaggccaggcgcga

SEQ ID NO: 997826 - DNA, 15 bp, Homo sapiens
aaggccaggcgcgat

SEQ ID NO: 997827 - DNA, 15 bp, Homo sapiens
aggccaggcgcgatg

SEQ ID NO: 997828 - DNA, 15 bp, Homo sapiens
ggccaggcgcgatgg

SEQ ID NO: 997829 - DNA, 15 bp, Homo sapiens
gccaggcgcgatggc

SEQ ID NO: 997830 - DNA, 15 bp, Homo sapiens
ccaggcgcgatggct

SEQ ID NO: 997831 - DNA, 15 bp, Homo sapiens
caggcgcgatggctt

SEQ ID NO: 997832 - DNA, 15 bp, Homo sapiens
aggcgcgatggctta

SEQ ID NO: 997833 - DNA, 15 bp, Homo sapiens
ggcgcgatggcttac

SEQ ID NO: 997834 - DNA, 15 bp, Homo sapiens
gcgcgatggcttacg

SEQ ID NO: 997835 - DNA, 15 bp, Homo sapiens
cgcgatggcttacgc

SEQ ID NO: 997836 - DNA, 15 bp, Homo sapiens
gcgatggcttacgcc

SEQ ID NO: 997837 - DNA, 15 bp, Homo sapiens
cgatggcttacgcct

SEQ ID NO: 997838 - DNA, 15 bp, Homo sapiens
gatggcttacgcctg

SEQ ID NO: 997839 - DNA, 15 bp, Homo sapiens
atggcttacgcctgt

SEQ ID NO: 997840 - DNA, 15 bp, Homo sapiens
tggcttacgcctgta

SEQ ID NO: 997841 - DNA, 15 bp, Homo sapiens
ggcttacgcctgtaa

SEQ ID NO: 997842 - DNA, 15 bp, Homo sapiens
gcttacgcctgtaat

SEQ ID NO: 997843 - DNA, 15 bp, Homo sapiens
cttacgcctgtaatc

SEQ ID NO: 997844 - DNA, 15 bp, Homo sapiens
ttacgcctgtaatcc

SEQ ID NO: 997845 - DNA, 15 bp, Homo sapiens
tacgcctgtaatccc

SEQ ID NO: 997846 - DNA, 15 bp, Homo sapiens
cactttgggaggcca

SEQ ID NO: 997847 - DNA, 15 bp, Homo sapiens
actttgggaggccaa

SEQ ID NO: 997848 - DNA, 15 bp, Homo sapiens
ctttgggaggccaag

SEQ ID NO: 997849 - DNA, 15 bp, Homo sapiens
tttgggaggccaagg

SEQ ID NO: 997850 - DNA, 15 bp, Homo sapiens
ttgggaggccaaggt

SEQ ID NO: 997851 - DNA, 15 bp, Homo sapiens
tgggaggccaaggtg

SEQ ID NO: 997852 - DNA, 15 bp, Homo sapiens
gggaggccaaggtgg

SEQ ID NO: 997853 - DNA, 15 bp, Homo sapiens
ggaggccaaggtggg

SEQ ID NO: 997854 - DNA, 15 bp, Homo sapiens
gaggccaaggtgggc

SEQ ID NO: 997855 - DNA, 15 bp, Homo sapiens
aggccaaggtgggcg

SEQ ID NO: 997856 - DNA, 15 bp, Homo sapiens
ggccaaggtgggcgg

SEQ ID NO: 997857 - DNA, 15 bp, Homo sapiens
gccaaggtgggcgga

SEQ ID NO: 997858 - DNA, 15 bp, Homo sapiens
ccaaggtgggcggat

SEQ ID NO: 997859 - DNA, 15 bp, Homo sapiens
caaggtgggcggatc

SEQ ID NO: 997860 - DNA, 15 bp, Homo sapiens
aaggtgggcggatca

SEQ ID NO: 997861 - DNA, 15 bp, Homo sapiens
aggtgggcggatcac

SEQ ID NO: 997862 - DNA, 15 bp, Homo sapiens
ggtgggcggatcacc

SEQ ID NO: 997863 - DNA, 15 bp, Homo sapiens
gtgggcggatcacct

SEQ ID NO: 997864 - DNA, 15 bp, Homo sapiens
tgggcggatcacctg

SEQ ID NO: 997865 - DNA, 15 bp, Homo sapiens
gggcggatcacctga

SEQ ID NO: 997866 - DNA, 15 bp, Homo sapiens
gatcacctgaggtcg

SEQ ID NO: 997867 - DNA, 15 bp, Homo sapiens
atcacctgaggtcgg

SEQ ID NO: 997868 - DNA, 15 bp, Homo sapiens
tcacctgaggtcggg

SEQ ID NO: 997869 - DNA, 15 bp, Homo sapiens
cacctgaggtcggga

SEQ ID NO: 997870 - DNA, 15 bp, Homo sapiens
acctgaggtcgggag

SEQ ID NO: 997871 - DNA, 15 bp, Homo sapiens
cctgaggtcgggagt

SEQ ID NO: 997872 - DNA, 15 bp, Homo sapiens
ctgaggtcgggagtt

SEQ ID NO: 997873 - DNA, 15 bp, Homo sapiens
tgaggtcgggagttc

SEQ ID NO: 997874 - DNA, 15 bp, Homo sapiens
gaggtcgggagttcg

SEQ ID NO: 997875 - DNA, 15 bp, Homo sapiens
aggtcgggagttcga

SEQ ID NO: 997876 - DNA, 15 bp, Homo sapiens
ggtcgggagttcgag

SEQ ID NO: 997877 - DNA, 15 bp, Homo sapiens
gtcgggagttcgaga

SEQ ID NO: 997878 - DNA, 15 bp, Homo sapiens
tcgggagttcgagac

SEQ ID NO: 997879 - DNA, 15 bp, Homo sapiens
cgggagttcgagacc

SEQ ID NO: 997880 - DNA, 15 bp, Homo sapiens
gggagttcgagacca

SEQ ID NO: 997881 - DNA, 15 bp, Homo sapiens
ggagttcgagaccag

SEQ ID NO: 997882 - DNA, 15 bp, Homo sapiens
gagttcgagaccagt

SEQ ID NO: 997883 - DNA, 15 bp, Homo sapiens
agttcgagaccagtc

SEQ ID NO: 997884 - DNA, 15 bp, Homo sapiens
gttcgagaccagtct

SEQ ID NO: 997885 - DNA, 15 bp, Homo sapiens
ttcgagaccagtctg

SEQ ID NO: 997886 - DNA, 15 bp, Homo sapiens
tcgagaccagtctga

SEQ ID NO: 997887 - DNA, 15 bp, Homo sapiens
cgagaccagtctgac

SEQ ID NO: 997888 - DNA, 15 bp, Homo sapiens
gagaccagtctgacc

SEQ ID NO: 997889 - DNA, 15 bp, Homo sapiens
agaccagtctgacca

SEQ ID NO: 997890 - DNA, 15 bp, Homo sapiens
gaccagtctgaccaa

SEQ ID NO: 997891 - DNA, 15 bp, Homo sapiens
accagtctgaccaac

SEQ ID NO: 997892 - DNA, 15 bp, Homo sapiens
ccagtctgaccaacg

SEQ ID NO: 997893 - DNA, 15 bp, Homo sapiens
cagtctgaccaacgt

SEQ ID NO: 997894 - DNA, 15 bp, Homo sapiens
agtctgaccaacgtg

SEQ ID NO: 997895 - DNA, 15 bp, Homo sapiens
gtctgaccaacgtgg

SEQ ID NO: 997896 - DNA, 15 bp, Homo sapiens
tctgaccaacgtgga

SEQ ID NO: 997897 - DNA, 15 bp, Homo sapiens
ctgaccaacgtggag

SEQ ID NO: 997898 - DNA, 15 bp, Homo sapiens
tgaccaacgtggaga

SEQ ID NO: 997899 - DNA, 15 bp, Homo sapiens
gaccaacgtggagaa

SEQ ID NO: 997900 - DNA, 15 bp, Homo sapiens
accaacgtggagaaa

SEQ ID NO: 997901 - DNA, 15 bp, Homo sapiens
ccaacgtggagaaac

SEQ ID NO: 997902 - DNA, 15 bp, Homo sapiens
caacgtggagaaacc

SEQ ID NO: 997903 - DNA, 15 bp, Homo sapiens
aacgtggagaaaccc

SEQ ID NO: 997904 - DNA, 15 bp, Homo sapiens
acgtggagaaacccc

SEQ ID NO: 997905 - DNA, 15 bp, Homo sapiens
cgtggagaaaccccg

SEQ ID NO: 997906 - DNA, 15 bp, Homo sapiens
gtggagaaaccccgt

SEQ ID NO: 997907 - DNA, 15 bp, Homo sapiens
tggagaaaccccgtc

SEQ ID NO: 997908 - DNA, 15 bp, Homo sapiens
ggagaaaccccgtct

SEQ ID NO: 997909 - DNA, 15 bp, Homo sapiens
gagaaaccccgtctc

SEQ ID NO: 997910 - DNA, 15 bp, Homo sapiens
agaaaccccgtctct

SEQ ID NO: 997911 - DNA, 15 bp, Homo sapiens
aaaatacaaaattag

SEQ ID NO: 997912 - DNA, 15 bp, Homo sapiens
aaatacaaaattagc

SEQ ID NO: 997913 - DNA, 15 bp, Homo sapiens
aatacaaaattagcc

SEQ ID NO: 997914 - DNA, 15 bp, Homo sapiens
atacaaaattagccg

SEQ ID NO: 997915 - DNA, 15 bp, Homo sapiens
tacaaaattagccgg

SEQ ID NO: 997916 - DNA, 15 bp, Homo sapiens
acaaaattagccggg

SEQ ID NO: 997917 - DNA, 15 bp, Homo sapiens
caaaattagccgggt

SEQ ID NO: 997918 - DNA, 15 bp, Homo sapiens
aaaattagccgggtg

SEQ ID NO: 997919 - DNA, 15 bp, Homo sapiens
aaattagccgggtgt

SEQ ID NO: 997920 - DNA, 15 bp, Homo sapiens
aattagccgggtgtg

SEQ ID NO: 997921 - DNA, 15 bp, Homo sapiens
attagccgggtgtgg

SEQ ID NO: 997922 - DNA, 15 bp, Homo sapiens
ttagccgggtgtggt

SEQ ID NO: 997923 - DNA, 15 bp, Homo sapiens
tagccgggtgtggtg

SEQ ID NO: 997924 - DNA, 15 bp, Homo sapiens
agccgggtgtggtgg

SEQ ID NO: 997925 - DNA, 15 bp, Homo sapiens
gccgggtgtggtggt

SEQ ID NO: 997926 - DNA, 15 bp, Homo sapiens
ccgggtgtggtggtg

SEQ ID NO: 997927 - DNA, 15 bp, Homo sapiens
cgggtgtggtggtgg

SEQ ID NO: 997928 - DNA, 15 bp, Homo sapiens
gggtgtggtggtggg

SEQ ID NO: 997929 - DNA, 15 bp, Homo sapiens
ggtgtggtggtgggc

SEQ ID NO: 997930 - DNA, 15 bp, Homo sapiens
gtgtggtggtgggca

SEQ ID NO: 997931 - DNA, 15 bp, Homo sapiens
tgtggtggtgggcac

SEQ ID NO: 997932 - DNA, 15 bp, Homo sapiens
gtggtggtgggcacc

SEQ ID NO: 997933 - DNA, 15 bp, Homo sapiens
tggtggtgggcacct

SEQ ID NO: 997934 - DNA, 15 bp, Homo sapiens
ggtggtgggcacctg

SEQ ID NO: 997935 - DNA, 15 bp, Homo sapiens
gtggtgggcacctgt

SEQ ID NO: 997936 - DNA, 15 bp, Homo sapiens
tggtgggcacctgtg

SEQ ID NO: 997937 - DNA, 15 bp, Homo sapiens
ggtgggcacctgtga

SEQ ID NO: 997938 - DNA, 15 bp, Homo sapiens
gtgggcacctgtgat

SEQ ID NO: 997939 - DNA, 15 bp, Homo sapiens
tgggcacctgtgatc

SEQ ID NO: 997940 - DNA, 15 bp, Homo sapiens
gggcacctgtgatcc

SEQ ID NO: 997941 - DNA, 15 bp, Homo sapiens
ggcacctgtgatccc

SEQ ID NO: 997942 - DNA, 15 bp, Homo sapiens
gcacctgtgatccca

SEQ ID NO: 997943 - DNA, 15 bp, Homo sapiens
cacctgtgatcccag

SEQ ID NO: 997944 - DNA, 15 bp, Homo sapiens
acctgtgatcccagc

SEQ ID NO: 997945 - DNA, 15 bp, Homo sapiens
cctgtgatcccagct

SEQ ID NO: 997946 - DNA, 15 bp, Homo sapiens
ctgtgatcccagcta

SEQ ID NO: 997947 - DNA, 15 bp, Homo sapiens
tgtgatcccagctac

SEQ ID NO: 997948 - DNA, 15 bp, Homo sapiens
gtgatcccagctacg

SEQ ID NO: 997949 - DNA, 15 bp, Homo sapiens
tgatcccagctacgc

SEQ ID NO: 997950 - DNA, 15 bp, Homo sapiens
gatcccagctacgcg

SEQ ID NO: 997951 - DNA, 15 bp, Homo sapiens
atcccagctacgcgg

SEQ ID NO: 997952 - DNA, 15 bp, Homo sapiens
tcccagctacgcggg

SEQ ID NO: 997953 - DNA, 15 bp, Homo sapiens
cccagctacgcggga

SEQ ID NO: 997954 - DNA, 15 bp, Homo sapiens
ccagctacgcgggag

SEQ ID NO: 997955 - DNA, 15 bp, Homo sapiens
cagctacgcgggagg

SEQ ID NO: 997956 - DNA, 15 bp, Homo sapiens
agctacgcgggaggc

SEQ ID NO: 997957 - DNA, 15 bp, Homo sapiens
gctacgcgggaggct

SEQ ID NO: 997958 - DNA, 15 bp, Homo sapiens
ctacgcgggaggctg

SEQ ID NO: 997959 - DNA, 15 bp, Homo sapiens
tacgcgggaggctga

SEQ ID NO: 997960 - DNA, 15 bp, Homo sapiens
acgcgggaggctgag

SEQ ID NO: 997961 - DNA, 15 bp, Homo sapiens
cgcgggaggctgagg

SEQ ID NO: 997962 - DNA, 15 bp, Homo sapiens
gcgggaggctgaggc

SEQ ID NO: 997963 - DNA, 15 bp, Homo sapiens
agaatcacttgaact

SEQ ID NO: 997964 - DNA, 15 bp, Homo sapiens
gaatcacttgaactc

SEQ ID NO: 997965 - DNA, 15 bp, Homo sapiens
aatcacttgaactcg

SEQ ID NO: 997966 - DNA, 15 bp, Homo sapiens
atcacttgaactcgg

SEQ ID NO: 997967 - DNA, 15 bp, Homo sapiens
tcacttgaactcggg

SEQ ID NO: 997968 - DNA, 15 bp, Homo sapiens
cacttgaactcggga

SEQ ID NO: 997969 - DNA, 15 bp, Homo sapiens
acttgaactcgggag

SEQ ID NO: 997970 - DNA, 15 bp, Homo sapiens
cttgaactcgggagg

SEQ ID NO: 997971 - DNA, 15 bp, Homo sapiens
ttgaactcgggaggc

SEQ ID NO: 997972 - DNA, 15 bp, Homo sapiens
tgaactcgggaggca

SEQ ID NO: 997973 - DNA, 15 bp, Homo sapiens
gaactcgggaggcag

SEQ ID NO: 997974 - DNA, 15 bp, Homo sapiens
aactcgggaggcaga

SEQ ID NO: 997975 - DNA, 15 bp, Homo sapiens
actcgggaggcagaa

SEQ ID NO: 997976 - DNA, 15 bp, Homo sapiens
ctcgggaggcagaag

SEQ ID NO: 997977 - DNA, 15 bp, Homo sapiens
tcgggaggcagaagt

SEQ ID NO: 997978 - DNA, 15 bp, Homo sapiens
cgggaggcagaagtt

SEQ ID NO: 997979 - DNA, 15 bp, Homo sapiens
gggaggcagaagttg

SEQ ID NO: 997980 - DNA, 15 bp, Homo sapiens
ggaggcagaagttgc

SEQ ID NO: 997981 - DNA, 15 bp, Homo sapiens
gaggcagaagttgcg

SEQ ID NO: 997982 - DNA, 15 bp, Homo sapiens
aggcagaagttgcgg

SEQ ID NO: 997983 - DNA, 15 bp, Homo sapiens
ggcagaagttgcggt

SEQ ID NO: 997984 - DNA, 15 bp, Homo sapiens
gcagaagttgcggtg

SEQ ID NO: 997985 - DNA, 15 bp, Homo sapiens
cagaagttgcggtga

SEQ ID NO: 997986 - DNA, 15 bp, Homo sapiens
agaagttgcggtgag

SEQ ID NO: 997987 - DNA, 15 bp, Homo sapiens
gaagttgcggtgagc

SEQ ID NO: 997988 - DNA, 15 bp, Homo sapiens
aagttgcggtgagcc

SEQ ID NO: 997989 - DNA, 15 bp, Homo sapiens
agttgcggtgagcca

SEQ ID NO: 997990 - DNA, 15 bp, Homo sapiens
gttgcggtgagccaa

SEQ ID NO: 997991 - DNA, 15 bp, Homo sapiens
ttgcggtgagccaag

SEQ ID NO: 997992 - DNA, 15 bp, Homo sapiens
tgcggtgagccaaga

SEQ ID NO: 997993 - DNA, 15 bp, Homo sapiens
gcggtgagccaagat

SEQ ID NO: 997994 - DNA, 15 bp, Homo sapiens
cggtgagccaagatc

SEQ ID NO: 997995 - DNA, 15 bp, Homo sapiens
ggtgagccaagatca

SEQ ID NO: 997996 - DNA, 15 bp, Homo sapiens
gtgagccaagatcat

SEQ ID NO: 997997 - DNA, 15 bp, Homo sapiens
tgagccaagatcatg

SEQ ID NO: 997998 - DNA, 15 bp, Homo sapiens
gagccaagatcatgc

SEQ ID NO: 997999 - DNA, 15 bp, Homo sapiens
agccaagatcatgcc

SEQ ID NO: 998000 - DNA, 15 bp, Homo sapiens
gccaagatcatgcca

SEQ ID NO: 998001 - DNA, 15 bp, Homo sapiens
ccaagatcatgccat

SEQ ID NO: 998002 - DNA, 15 bp, Homo sapiens
caagatcatgccatt

SEQ ID NO: 998003 - DNA, 15 bp, Homo sapiens
aagatcatgccattg

SEQ ID NO: 998004 - DNA, 15 bp, Homo sapiens
agatcatgccattgc

SEQ ID NO: 998005 - DNA, 15 bp, Homo sapiens
gatcatgccattgca

SEQ ID NO: 998006 - DNA, 15 bp, Homo sapiens
atcatgccattgcac

SEQ ID NO: 998007 - DNA, 15 bp, Homo sapiens
tcatgccattgcact

SEQ ID NO: 998008 - DNA, 15 bp, Homo sapiens
catgccattgcactc

SEQ ID NO: 998009 - DNA, 15 bp, Homo sapiens
atgccattgcactcc

SEQ ID NO: 998010 - DNA, 15 bp, Homo sapiens
cactccagcctggga

SEQ ID NO: 998011 - DNA, 15 bp, Homo sapiens
actccagcctgggag

SEQ ID NO: 998012 - DNA, 15 bp, Homo sapiens
ctccagcctgggaga

SEQ ID NO: 998013 - DNA, 15 bp, Homo sapiens
tccagcctgggagac

SEQ ID NO: 998014 - DNA, 15 bp, Homo sapiens
ccagcctgggagaca

SEQ ID NO: 998015 - DNA, 15 bp, Homo sapiens
cagcctgggagacaa

SEQ ID NO: 998016 - DNA, 15 bp, Homo sapiens
agcctgggagacaag

SEQ ID NO: 998017 - DNA, 15 bp, Homo sapiens
gcctgggagacaaga

SEQ ID NO: 998018 - DNA, 15 bp, Homo sapiens
cctgggagacaagag

SEQ ID NO: 998019 - DNA, 15 bp, Homo sapiens
ctgggagacaagagc

SEQ ID NO: 998020 - DNA, 15 bp, Homo sapiens
tgggagacaagagcg

SEQ ID NO: 998021 - DNA, 15 bp, Homo sapiens
gggagacaagagcga

SEQ ID NO: 998022 - DNA, 15 bp, Homo sapiens
ggagacaagagcgaa

SEQ ID NO: 998023 - DNA, 15 bp, Homo sapiens
gagacaagagcgaaa

SEQ ID NO: 998024 - DNA, 15 bp, Homo sapiens
agacaagagcgaaac

SEQ ID NO: 998025 - DNA, 15 bp, Homo sapiens
gacaagagcgaaact

SEQ ID NO: 998026 - DNA, 15 bp, Homo sapiens
acaagagcgaaactc

SEQ ID NO: 998027 - DNA, 15 bp, Homo sapiens
caagagcgaaactcc

SEQ ID NO: 998028 - DNA, 15 bp, Homo sapiens
aagagcgaaactcca

SEQ ID NO: 998029 - DNA, 15 bp, Homo sapiens
agagcgaaactccat

SEQ ID NO: 998030 - DNA, 15 bp, Homo sapiens
gagcgaaactccatc

SEQ ID NO: 998031 - DNA, 15 bp, Homo sapiens
agcgaaactccatct

SEQ ID NO: 998032 - DNA, 15 bp, Homo sapiens
gcgaaactccatctc

SEQ ID NO: 998033 - DNA, 15 bp, Homo sapiens
cgaaactccatctca

SEQ ID NO: 998034 - DNA, 15 bp, Homo sapiens
gaaactccatctcaa

SEQ ID NO: 998035 - DNA, 15 bp, Homo sapiens
aaactccatctcaaa

SEQ ID NO: 998036 - DNA, 15 bp, Homo sapiens
ctccatctcaaaaat

SEQ ID NO: 998037 - DNA, 15 bp, Homo sapiens
tccatctcaaaaata

SEQ ID NO: 998038 - DNA, 15 bp, Homo sapiens
ccatctcaaaaataa

SEQ ID NO: 998039 - DNA, 15 bp, Homo sapiens
catctcaaaaataaa

SEQ ID NO: 998040 - DNA, 15 bp, Homo sapiens
atctcaaaaataaat

SEQ ID NO: 998041 - DNA, 15 bp, Homo sapiens
tctcaaaaataaata

SEQ ID NO: 998042 - DNA, 15 bp, Homo sapiens
ctcaaaaataaataa

SEQ ID NO: 998043 - DNA, 15 bp, Homo sapiens
tcaaaaataaataaa

SEQ ID NO: 998044 - DNA, 15 bp, Homo sapiens
caaaaataaataaac

SEQ ID NO: 998045 - DNA, 15 bp, Homo sapiens
aaaaataaataaaca

SEQ ID NO: 998046 - DNA, 15 bp, Homo sapiens
aaaataaataaacaa

SEQ ID NO: 998047 - DNA, 15 bp, Homo sapiens
aaataaataaacaaa

SEQ ID NO: 998048 - DNA, 15 bp, Homo sapiens
aataaataaacaaat

SEQ ID NO: 998049 - DNA, 15 bp, Homo sapiens
ataaataaacaaata

SEQ ID NO: 998050 - DNA, 15 bp, Homo sapiens
taaataaacaaataa

SEQ ID NO: 998051 - DNA, 15 bp, Homo sapiens
aaataaacaaataaa

SEQ ID NO: 998052 - DNA, 15 bp, Homo sapiens
aataaacaaataaaa

SEQ ID NO: 998053 - DNA, 15 bp, Homo sapiens
ataaacaaataaaaa

SEQ ID NO: 998054 - DNA, 15 bp, Homo sapiens
taaacaaataaaaat

SEQ ID NO: 998055 - DNA, 15 bp, Homo sapiens
aaacaaataaaaatt

SEQ ID NO: 998056 - DNA, 15 bp, Homo sapiens
aacaaataaaaattt

SEQ ID NO: 998057 - DNA, 15 bp, Homo sapiens
acaaataaaaattta

SEQ ID NO: 998058 - DNA, 15 bp, Homo sapiens
caaataaaaatttaa

SEQ ID NO: 998059 - DNA, 15 bp, Homo sapiens
aaataaaaatttaaa

SEQ ID NO: 998060 - DNA, 15 bp, Homo sapiens
aataaaaatttaaaa

SEQ ID NO: 998061 - DNA, 15 bp, Homo sapiens
ataaaaatttaaaaa

SEQ ID NO: 998062 - DNA, 15 bp, Homo sapiens
taaaaatttaaaaaa

SEQ ID NO: 998063 - DNA, 15 bp, Homo sapiens
aaaaatttaaaaaaa

SEQ ID NO: 998064 - DNA, 15 bp, Homo sapiens
aaaatttaaaaaaac

SEQ ID NO: 998065 - DNA, 15 bp, Homo sapiens
aaatttaaaaaaaca

SEQ ID NO: 998066 - DNA, 15 bp, Homo sapiens
aatttaaaaaaacat

SEQ ID NO: 998067 - DNA, 15 bp, Homo sapiens
atttaaaaaaacata

SEQ ID NO: 998068 - DNA, 15 bp, Homo sapiens
tttaaaaaaacatat

SEQ ID NO: 998069 - DNA, 15 bp, Homo sapiens
ttaaaaaaacatatt

SEQ ID NO: 998070 - DNA, 15 bp, Homo sapiens
taaaaaaacatattt

SEQ ID NO: 998071 - DNA, 15 bp, Homo sapiens
aaaaaaacatattta

SEQ ID NO: 998072 - DNA, 15 bp, Homo sapiens
aaaaaacatatttaa

SEQ ID NO: 998073 - DNA, 15 bp, Homo sapiens
aaaaacatatttaaa

SEQ ID NO: 998074 - DNA, 15 bp, Homo sapiens
aaaacatatttaaat

SEQ ID NO: 998075 - DNA, 15 bp, Homo sapiens
aaacatatttaaatc

SEQ ID NO: 998076 - DNA, 15 bp, Homo sapiens
aacatatttaaatcc

SEQ ID NO: 998077 - DNA, 15 bp, Homo sapiens
acatatttaaatcct

SEQ ID NO: 998078 - DNA, 15 bp, Homo sapiens
catatttaaatcctg

SEQ ID NO: 998079 - DNA, 15 bp, Homo sapiens
atatttaaatcctgg

SEQ ID NO: 998080 - DNA, 15 bp, Homo sapiens
tatttaaatcctgga

SEQ ID NO: 998081 - DNA, 15 bp, Homo sapiens
atttaaatcctggag

SEQ ID NO: 998082 - DNA, 15 bp, Homo sapiens
tttaaatcctggaga

SEQ ID NO: 998083 - DNA, 15 bp, Homo sapiens
ttaaatcctggagat

SEQ ID NO: 998084 - DNA, 15 bp, Homo sapiens
taaatcctggagatt

SEQ ID NO: 998085 - DNA, 15 bp, Homo sapiens
aaatcctggagattc

SEQ ID NO: 998086 - DNA, 15 bp, Homo sapiens
aatcctggagattcc

SEQ ID NO: 998087 - DNA, 15 bp, Homo sapiens
atcctggagattcct

SEQ ID NO: 998088 - DNA, 15 bp, Homo sapiens
tcctggagattccta

SEQ ID NO: 998089 - DNA, 15 bp, Homo sapiens
cctggagattcctat

SEQ ID NO: 998090 - DNA, 15 bp, Homo sapiens
ctggagattcctatc

SEQ ID NO: 998091 - DNA, 15 bp, Homo sapiens
tggagattcctatca

SEQ ID NO: 998092 - DNA, 15 bp, Homo sapiens
ggagattcctatcag

SEQ ID NO: 998093 - DNA, 15 bp, Homo sapiens
gagattcctatcaga

SEQ ID NO: 998094 - DNA, 15 bp, Homo sapiens
agattcctatcagag

SEQ ID NO: 998095 - DNA, 15 bp, Homo sapiens
gattcctatcagagg

SEQ ID NO: 998096 - DNA, 15 bp, Homo sapiens
attcctatcagagga

SEQ ID NO: 998097 - DNA, 15 bp, Homo sapiens
ttcctatcagaggag

SEQ ID NO: 998098 - DNA, 15 bp, Homo sapiens
tcctatcagaggagt

SEQ ID NO: 998099 - DNA, 15 bp, Homo sapiens
cctatcagaggagtg

SEQ ID NO: 998100 - DNA, 15 bp, Homo sapiens
ctatcagaggagtgg

SEQ ID NO: 998101 - DNA, 15 bp, Homo sapiens
tatcagaggagtggg

SEQ ID NO: 998102 - DNA, 15 bp, Homo sapiens
atcagaggagtgggc

SEQ ID NO: 998103 - DNA, 15 bp, Homo sapiens
tcagaggagtgggca

SEQ ID NO: 998104 - DNA, 15 bp, Homo sapiens
cagaggagtgggcag

SEQ ID NO: 998105 - DNA, 15 bp, Homo sapiens
agaggagtgggcagt

SEQ ID NO: 998106 - DNA, 15 bp, Homo sapiens
gaggagtgggcagtg

SEQ ID NO: 998107 - DNA, 15 bp, Homo sapiens
aggagtgggcagtgg

SEQ ID NO: 998108 - DNA, 15 bp, Homo sapiens
ggagtgggcagtggg

SEQ ID NO: 998109 - DNA, 15 bp, Homo sapiens
gagtgggcagtggga

SEQ ID NO: 998110 - DNA, 15 bp, Homo sapiens
agtgggcagtgggag

SEQ ID NO: 998111 - DNA, 15 bp, Homo sapiens
gtgggcagtgggagt

SEQ ID NO: 998112 - DNA, 15 bp, Homo sapiens
tgggcagtgggagtg

SEQ ID NO: 998113 - DNA, 15 bp, Homo sapiens
gggcagtgggagtgg

SEQ ID NO: 998114 - DNA, 15 bp, Homo sapiens
ggcagtgggagtggg

SEQ ID NO: 998115 - DNA, 15 bp, Homo sapiens
gcagtgggagtgggg

SEQ ID NO: 998116 - DNA, 15 bp, Homo sapiens
cagtgggagtggggt

SEQ ID NO: 998117 - DNA, 15 bp, Homo sapiens
agtgggagtggggtg

SEQ ID NO: 998118 - DNA, 15 bp, Homo sapiens
gtgggagtggggtgt

SEQ ID NO: 998119 - DNA, 15 bp, Homo sapiens
tgggagtggggtgtc

SEQ ID NO: 998120 - DNA, 15 bp, Homo sapiens
gggagtggggtgtca

SEQ ID NO: 998121 - DNA, 15 bp, Homo sapiens
ggagtggggtgtcag

SEQ ID NO: 998122 - DNA, 15 bp, Homo sapiens
gagtggggtgtcagt

SEQ ID NO: 998123 - DNA, 15 bp, Homo sapiens
agtggggtgtcagtg

SEQ ID NO: 998124 - DNA, 15 bp, Homo sapiens
gtggggtgtcagtgg

SEQ ID NO: 998125 - DNA, 15 bp, Homo sapiens
tggggtgtcagtggt

SEQ ID NO: 998126 - DNA, 15 bp, Homo sapiens
ggggtgtcagtggtg

SEQ ID NO: 998127 - DNA, 15 bp, Homo sapiens
gggtgtcagtggtga

SEQ ID NO: 998128 - DNA, 15 bp, Homo sapiens
ggtgtcagtggtgac

SEQ ID NO: 998129 - DNA, 15 bp, Homo sapiens
gtgtcagtggtgaca

SEQ ID NO: 998130 - DNA, 15 bp, Homo sapiens
tgtcagtggtgacac

SEQ ID NO: 998131 - DNA, 15 bp, Homo sapiens
gtcagtggtgacaca

SEQ ID NO: 998132 - DNA, 15 bp, Homo sapiens
tcagtggtgacacag

SEQ ID NO: 998133 - DNA, 15 bp, Homo sapiens
cagtggtgacacagc

SEQ ID NO: 998134 - DNA, 15 bp, Homo sapiens
agtggtgacacagcc

SEQ ID NO: 998135 - DNA, 15 bp, Homo sapiens
gtggtgacacagcct

SEQ ID NO: 998136 - DNA, 15 bp, Homo sapiens
tggtgacacagcctg

SEQ ID NO: 998137 - DNA, 15 bp, Homo sapiens
ggtgacacagcctgt

SEQ ID NO: 998138 - DNA, 15 bp, Homo sapiens
gtgacacagcctgtg

SEQ ID NO: 998139 - DNA, 15 bp, Homo sapiens
tgacacagcctgtgg

SEQ ID NO: 998140 - DNA, 15 bp, Homo sapiens
gacacagcctgtggc

SEQ ID NO: 998141 - DNA, 15 bp, Homo sapiens
acacagcctgtggcc

SEQ ID NO: 998142 - DNA, 15 bp, Homo sapiens
cacagcctgtggcct

SEQ ID NO: 998143 - DNA, 15 bp, Homo sapiens
acagcctgtggcctt

SEQ ID NO: 998144 - DNA, 15 bp, Homo sapiens
cagcctgtggccttg

SEQ ID NO: 998145 - DNA, 15 bp, Homo sapiens
agcctgtggccttgc

SEQ ID NO: 998146 - DNA, 15 bp, Homo sapiens
gcctgtggccttgcc

SEQ ID NO: 998147 - DNA, 15 bp, Homo sapiens
cctgtggccttgcct

SEQ ID NO: 998148 - DNA, 15 bp, Homo sapiens
ctgtggccttgcctc

SEQ ID NO: 998149 - DNA, 15 bp, Homo sapiens
tgtggccttgcctcc

SEQ ID NO: 998150 - DNA, 15 bp, Homo sapiens
gtggccttgcctccc

SEQ ID NO: 998151 - DNA, 15 bp, Homo sapiens
tggccttgcctcccc

SEQ ID NO: 998152 - DNA, 15 bp, Homo sapiens
ggccttgcctccccc

SEQ ID NO: 998153 - DNA, 15 bp, Homo sapiens
gccttgcctccccct

SEQ ID NO: 998154 - DNA, 15 bp, Homo sapiens
ccttgcctccccctc

SEQ ID NO: 998155 - DNA, 15 bp, Homo sapiens
cttgcctccccctcc

SEQ ID NO: 998156 - DNA, 15 bp, Homo sapiens
ttgcctccccctccc

SEQ ID NO: 998157 - DNA, 15 bp, Homo sapiens
tgcctccccctcccc

SEQ ID NO: 998158 - DNA, 15 bp, Homo sapiens
gcctccccctcccca

SEQ ID NO: 998159 - DNA, 15 bp, Homo sapiens
cctccccctccccac

SEQ ID NO: 998160 - DNA, 15 bp, Homo sapiens
ctccccctccccacc

SEQ ID NO: 998161 - DNA, 15 bp, Homo sapiens
tccccctccccaccc

SEQ ID NO: 998162 - DNA, 15 bp, Homo sapiens
ccccctccccacccc

SEQ ID NO: 998163 - DNA, 15 bp, Homo sapiens
cccctccccaccccc

SEQ ID NO: 998164 - DNA, 15 bp, Homo sapiens
ccctccccaccccca

SEQ ID NO: 998165 - DNA, 15 bp, Homo sapiens
cctccccacccccag

SEQ ID NO: 998166 - DNA, 15 bp, Homo sapiens
ctccccacccccagg

SEQ ID NO: 998167 - DNA, 15 bp, Homo sapiens
tccccacccccaggc

SEQ ID NO: 998168 - DNA, 15 bp, Homo sapiens
ccccacccccaggct

SEQ ID NO: 998169 - DNA, 15 bp, Homo sapiens
cccacccccaggctc

SEQ ID NO: 998170 - DNA, 15 bp, Homo sapiens
ccacccccaggctca

SEQ ID NO: 998171 - DNA, 15 bp, Homo sapiens
cacccccaggctcag

SEQ ID NO: 998172 - DNA, 15 bp, Homo sapiens
acccccaggctcaga

SEQ ID NO: 998173 - DNA, 15 bp, Homo sapiens
cccccaggctcagag

SEQ ID NO: 998174 - DNA, 15 bp, Homo sapiens
ccccaggctcagagt

SEQ ID NO: 998175 - DNA, 15 bp, Homo sapiens
cccaggctcagagtg

SEQ ID NO: 998176 - DNA, 15 bp, Homo sapiens
ccaggctcagagtgg

SEQ ID NO: 998177 - DNA, 15 bp, Homo sapiens
caggctcagagtggg

SEQ ID NO: 998178 - DNA, 15 bp, Homo sapiens
aggctcagagtgggt

SEQ ID NO: 998179 - DNA, 15 bp, Homo sapiens
ggctcagagtgggtg

SEQ ID NO: 998180 - DNA, 15 bp, Homo sapiens
gctcagagtgggtgg

SEQ ID NO: 998181 - DNA, 15 bp, Homo sapiens
ctcagagtgggtggc

SEQ ID NO: 998182 - DNA, 15 bp, Homo sapiens
tcagagtgggtggct

SEQ ID NO: 998183 - DNA, 15 bp, Homo sapiens
cagagtgggtggctg

SEQ ID NO: 998184 - DNA, 15 bp, Homo sapiens
agagtgggtggctgc

SEQ ID NO: 998185 - DNA, 15 bp, Homo sapiens
gagtgggtggctgcc

SEQ ID NO: 998186 - DNA, 15 bp, Homo sapiens
agtgggtggctgccc

SEQ ID NO: 998187 - DNA, 15 bp, Homo sapiens
gtgggtggctgccct

SEQ ID NO: 998188 - DNA, 15 bp, Homo sapiens
tgggtggctgccctg

SEQ ID NO: 998189 - DNA, 15 bp, Homo sapiens
gggtggctgccctgc

SEQ ID NO: 998190 - DNA, 15 bp, Homo sapiens
ggtggctgccctgca

SEQ ID NO: 998191 - DNA, 15 bp, Homo sapiens
gtggctgccctgcag

SEQ ID NO: 998192 - DNA, 15 bp, Homo sapiens
tggctgccctgcagg

SEQ ID NO: 998193 - DNA, 15 bp, Homo sapiens
ggctgccctgcaggg

SEQ ID NO: 998194 - DNA, 15 bp, Homo sapiens
gctgccctgcagggg

SEQ ID NO: 998195 - DNA, 15 bp, Homo sapiens
ctgccctgcaggggc

SEQ ID NO: 998196 - DNA, 15 bp, Homo sapiens
tgccctgcaggggct

SEQ ID NO: 998197 - DNA, 15 bp, Homo sapiens
gccctgcaggggctg

SEQ ID NO: 998198 - DNA, 15 bp, Homo sapiens
ccctgcaggggctga

SEQ ID NO: 998199 - DNA, 15 bp, Homo sapiens
cctgcaggggctgac

SEQ ID NO: 998200 - DNA, 15 bp, Homo sapiens
ctgcaggggctgaca

SEQ ID NO: 998201 - DNA, 15 bp, Homo sapiens
tgcaggggctgacag

SEQ ID NO: 998202 - DNA, 15 bp, Homo sapiens
gcaggggctgacaga

SEQ ID NO: 998203 - DNA, 15 bp, Homo sapiens
caggggctgacagag

SEQ ID NO: 998204 - DNA, 15 bp, Homo sapiens
aggggctgacagagc

SEQ ID NO: 998205 - DNA, 15 bp, Homo sapiens
ggggctgacagagca

SEQ ID NO: 998206 - DNA, 15 bp, Homo sapiens
gggctgacagagcac

SEQ ID NO: 998207 - DNA, 15 bp, Homo sapiens
ggctgacagagcaca

SEQ ID NO: 998208 - DNA, 15 bp, Homo sapiens
gctgacagagcacac

SEQ ID NO: 998209 - DNA, 15 bp, Homo sapiens
ctgacagagcacaca

SEQ ID NO: 998210 - DNA, 15 bp, Homo sapiens
tgacagagcacacat

SEQ ID NO: 998211 - DNA, 15 bp, Homo sapiens
gacagagcacacatc

SEQ ID NO: 998212 - DNA, 15 bp, Homo sapiens
acagagcacacatcg

SEQ ID NO: 998213 - DNA, 15 bp, Homo sapiens
cagagcacacatcga

SEQ ID NO: 998214 - DNA, 15 bp, Homo sapiens
agagcacacatcgat

SEQ ID NO: 998215 - DNA, 15 bp, Homo sapiens
gagcacacatcgata

SEQ ID NO: 998216 - DNA, 15 bp, Homo sapiens
agcacacatcgatac

SEQ ID NO: 998217 - DNA, 15 bp, Homo sapiens
gcacacatcgatact

SEQ ID NO: 998218 - DNA, 15 bp, Homo sapiens
cacacatcgatactg

SEQ ID NO: 998219 - DNA, 15 bp, Homo sapiens
acacatcgatactgg

SEQ ID NO: 998220 - DNA, 15 bp, Homo sapiens
cacatcgatactggt

SEQ ID NO: 998221 - DNA, 15 bp, Homo sapiens
acatcgatactggtg

SEQ ID NO: 998222 - DNA, 15 bp, Homo sapiens
catcgatactggtga

SEQ ID NO: 998223 - DNA, 15 bp, Homo sapiens
atcgatactggtgaa

SEQ ID NO: 998224 - DNA, 15 bp, Homo sapiens
tcgatactggtgaag

SEQ ID NO: 998225 - DNA, 15 bp, Homo sapiens
cgatactggtgaagg

SEQ ID NO: 998226 - DNA, 15 bp, Homo sapiens
gatactggtgaagga

SEQ ID NO: 998227 - DNA, 15 bp, Homo sapiens
atactggtgaaggac

SEQ ID NO: 998228 - DNA, 15 bp, Homo sapiens
tactggtgaaggacc

SEQ ID NO: 998229 - DNA, 15 bp, Homo sapiens
actggtgaaggacct

SEQ ID NO: 998230 - DNA, 15 bp, Homo sapiens
ctggtgaaggacctg

SEQ ID NO: 998231 - DNA, 15 bp, Homo sapiens
tggtgaaggacctgc

SEQ ID NO: 998232 - DNA, 15 bp, Homo sapiens
ggtgaaggacctgcc

SEQ ID NO: 998233 - DNA, 15 bp, Homo sapiens
gtgaaggacctgccc

SEQ ID NO: 998234 - DNA, 15 bp, Homo sapiens
tgaaggacctgccca

SEQ ID NO: 998235 - DNA, 15 bp, Homo sapiens
gaaggacctgcccac

SEQ ID NO: 998236 - DNA, 15 bp, Homo sapiens
aaggacctgcccacg

SEQ ID NO: 998237 - DNA, 15 bp, Homo sapiens
aggacctgcccacgg

SEQ ID NO: 998238 - DNA, 15 bp, Homo sapiens
ggacctgcccacggg

SEQ ID NO: 998239 - DNA, 15 bp, Homo sapiens
gacctgcccacgggg

SEQ ID NO: 998240 - DNA, 15 bp, Homo sapiens
acctgcccacggggg

SEQ ID NO: 998241 - DNA, 15 bp, Homo sapiens
cctgcccacgggggc

SEQ ID NO: 998242 - DNA, 15 bp, Homo sapiens
ctgcccacgggggcc

SEQ ID NO: 998243 - DNA, 15 bp, Homo sapiens
tgcccacgggggccc

SEQ ID NO: 998244 - DNA, 15 bp, Homo sapiens
gcccacgggggcccg

SEQ ID NO: 998245 - DNA, 15 bp, Homo sapiens
cccacgggggcccgg

SEQ ID NO: 998246 - DNA, 15 bp, Homo sapiens
ccacgggggcccggc

SEQ ID NO: 998247 - DNA, 15 bp, Homo sapiens
cacgggggcccggct

SEQ ID NO: 998248 - DNA, 15 bp, Homo sapiens
acgggggcccggctg

SEQ ID NO: 998249 - DNA, 15 bp, Homo sapiens
cgggggcccggctgc

SEQ ID NO: 998250 - DNA, 15 bp, Homo sapiens
gggggcccggctgct

SEQ ID NO: 998251 - DNA, 15 bp, Homo sapiens
ggggcccggctgctt

SEQ ID NO: 998252 - DNA, 15 bp, Homo sapiens
gggcccggctgcttt

SEQ ID NO: 998253 - DNA, 15 bp, Homo sapiens
ggcccggctgctttt

SEQ ID NO: 998254 - DNA, 15 bp, Homo sapiens
gcccggctgcttttc

SEQ ID NO: 998255 - DNA, 15 bp, Homo sapiens
cccggctgcttttcc

SEQ ID NO: 998256 - DNA, 15 bp, Homo sapiens
ccggctgcttttccg

SEQ ID NO: 998257 - DNA, 15 bp, Homo sapiens
cggctgcttttccga

SEQ ID NO: 998258 - DNA, 15 bp, Homo sapiens
ggctgcttttccgag

SEQ ID NO: 998259 - DNA, 15 bp, Homo sapiens
gctgcttttccgagt

SEQ ID NO: 998260 - DNA, 15 bp, Homo sapiens
ctgcttttccgagtg

SEQ ID NO: 998261 - DNA, 15 bp, Homo sapiens
tgcttttccgagtgc

SEQ ID NO: 998262 - DNA, 15 bp, Homo sapiens
gcttttccgagtgcg

SEQ ID NO: 998263 - DNA, 15 bp, Homo sapiens
cttttccgagtgcgg

SEQ ID NO: 998264 - DNA, 15 bp, Homo sapiens
ttttccgagtgcggg

SEQ ID NO: 998265 - DNA, 15 bp, Homo sapiens
tttccgagtgcgggc

SEQ ID NO: 998266 - DNA, 15 bp, Homo sapiens
ttccgagtgcgggca

SEQ ID NO: 998267 - DNA, 15 bp, Homo sapiens
tccgagtgcgggcac

SEQ ID NO: 998268 - DNA, 15 bp, Homo sapiens
ccgagtgcgggcaca

SEQ ID NO: 998269 - DNA, 15 bp, Homo sapiens
cgagtgcgggcacac

SEQ ID NO: 998270 - DNA, 15 bp, Homo sapiens
gagtgcgggcacaca

SEQ ID NO: 998271 - DNA, 15 bp, Homo sapiens
agtgcgggcacacaa

SEQ ID NO: 998272 - DNA, 15 bp, Homo sapiens
gtgcgggcacacaat

SEQ ID NO: 998273 - DNA, 15 bp, Homo sapiens
tgcgggcacacaata

SEQ ID NO: 998274 - DNA, 15 bp, Homo sapiens
gcgggcacacaatat

SEQ ID NO: 998275 - DNA, 15 bp, Homo sapiens
cgggcacacaatatg

SEQ ID NO: 998276 - DNA, 15 bp, Homo sapiens
gggcacacaatatgg

SEQ ID NO: 998277 - DNA, 15 bp, Homo sapiens
ggcacacaatatggc

SEQ ID NO: 998278 - DNA, 15 bp, Homo sapiens
gcacacaatatggca

SEQ ID NO: 998279 - DNA, 15 bp, Homo sapiens
cacacaatatggcag

SEQ ID NO: 998280 - DNA, 15 bp, Homo sapiens
acacaatatggcagg

SEQ ID NO: 998281 - DNA, 15 bp, Homo sapiens
cacaatatggcaggg

SEQ ID NO: 998282 - DNA, 15 bp, Homo sapiens
acaatatggcagggc

SEQ ID NO: 998283 - DNA, 15 bp, Homo sapiens
caatatggcagggcc

SEQ ID NO: 998284 - DNA, 15 bp, Homo sapiens
aatatggcagggcct

SEQ ID NO: 998285 - DNA, 15 bp, Homo sapiens
atatggcagggcctg

SEQ ID NO: 998286 - DNA, 15 bp, Homo sapiens
tatggcagggcctgg

SEQ ID NO: 998287 - DNA, 15 bp, Homo sapiens
atggcagggcctgga

SEQ ID NO: 998288 - DNA, 15 bp, Homo sapiens
tggcagggcctggag

SEQ ID NO: 998289 - DNA, 15 bp, Homo sapiens
ggcagggcctggagc

SEQ ID NO: 998290 - DNA, 15 bp, Homo sapiens
gcagggcctggagcc

SEQ ID NO: 998291 - DNA, 15 bp, Homo sapiens
cagggcctggagccc

SEQ ID NO: 998292 - DNA, 15 bp, Homo sapiens
agggcctggagcccc

SEQ ID NO: 998293 - DNA, 15 bp, Homo sapiens
gggcctggagcccct

SEQ ID NO: 998294 - DNA, 15 bp, Homo sapiens
ggcctggagcccctg

SEQ ID NO: 998295 - DNA, 15 bp, Homo sapiens
gcctggagcccctgt

SEQ ID NO: 998296 - DNA, 15 bp, Homo sapiens
cctggagcccctgtt

SEQ ID NO: 998297 - DNA, 15 bp, Homo sapiens
ctggagcccctgtta

SEQ ID NO: 998298 - DNA, 15 bp, Homo sapiens
tggagcccctgttac

SEQ ID NO: 998299 - DNA, 15 bp, Homo sapiens
ggagcccctgttacc

SEQ ID NO: 998300 - DNA, 15 bp, Homo sapiens
gagcccctgttacca

SEQ ID NO: 998301 - DNA, 15 bp, Homo sapiens
agcccctgttaccac

SEQ ID NO: 998302 - DNA, 15 bp, Homo sapiens
gcccctgttaccacc

SEQ ID NO: 998303 - DNA, 15 bp, Homo sapiens
cccctgttaccacca

SEQ ID NO: 998304 - DNA, 15 bp, Homo sapiens
ccctgttaccaccac

SEQ ID NO: 998305 - DNA, 15 bp, Homo sapiens
cctgttaccaccacg

SEQ ID NO: 998306 - DNA, 15 bp, Homo sapiens
ctgttaccaccacgg

SEQ ID NO: 998307 - DNA, 15 bp, Homo sapiens
tgttaccaccacgga

SEQ ID NO: 998308 - DNA, 15 bp, Homo sapiens
gttaccaccacggag

SEQ ID NO: 998309 - DNA, 15 bp, Homo sapiens
ttaccaccacggagc

SEQ ID NO: 998310 - DNA, 15 bp, Homo sapiens
taccaccacggagcc

SEQ ID NO: 998311 - DNA, 15 bp, Homo sapiens
accaccacggagccg

SEQ ID NO: 998312 - DNA, 15 bp, Homo sapiens
ccaccacggagccgg

SEQ ID NO: 998313 - DNA, 15 bp, Homo sapiens
caccacggagccggt

SEQ ID NO: 998314 - DNA, 15 bp, Homo sapiens
accacggagccggtg

SEQ ID NO: 998315 - DNA, 15 bp, Homo sapiens
ccacggagccggtga

SEQ ID NO: 998316 - DNA, 15 bp, Homo sapiens
cacggagccggtgac

SEQ ID NO: 998317 - DNA, 15 bp, Homo sapiens
acggagccggtgaca

SEQ ID NO: 998318 - DNA, 15 bp, Homo sapiens
cggagccggtgacag

SEQ ID NO: 998319 - DNA, 15 bp, Homo sapiens
ggagccggtgacagt

SEQ ID NO: 998320 - DNA, 15 bp, Homo sapiens
gagccggtgacagtg

SEQ ID NO: 998321 - DNA, 15 bp, Homo sapiens
agccggtgacagtgc

SEQ ID NO: 998322 - DNA, 15 bp, Homo sapiens
gccggtgacagtgca

SEQ ID NO: 998323 - DNA, 15 bp, Homo sapiens
ccggtgacagtgcag

SEQ ID NO: 998324 - DNA, 15 bp, Homo sapiens
cggtgacagtgcagg

SEQ ID NO: 998325 - DNA, 15 bp, Homo sapiens
ggtgacagtgcagga

SEQ ID NO: 998326 - DNA, 15 bp, Homo sapiens
gtgacagtgcaggag

SEQ ID NO: 998327 - DNA, 15 bp, Homo sapiens
tgacagtgcaggaga

SEQ ID NO: 998328 - DNA, 15 bp, Homo sapiens
gacagtgcaggagat

SEQ ID NO: 998329 - DNA, 15 bp, Homo sapiens
acagtgcaggagatc

SEQ ID NO: 998330 - DNA, 15 bp, Homo sapiens
cagtgcaggagatcc

SEQ ID NO: 998331 - DNA, 15 bp, Homo sapiens
agtgcaggagatcct

SEQ ID NO: 998332 - DNA, 15 bp, Homo sapiens
gtgcaggagatcctg

SEQ ID NO: 998333 - DNA, 15 bp, Homo sapiens
tgcaggagatcctgc

SEQ ID NO: 998334 - DNA, 15 bp, Homo sapiens
gcaggagatcctgcg

SEQ ID NO: 998335 - DNA, 15 bp, Homo sapiens
caggagatcctgcgt

SEQ ID NO: 998336 - DNA, 15 bp, Homo sapiens
aggagatcctgcgtg

SEQ ID NO: 998337 - DNA, 15 bp, Homo sapiens
ggagatcctgcgtga

SEQ ID NO: 998338 - DNA, 15 bp, Homo sapiens
gagatcctgcgtgag

SEQ ID NO: 998339 - DNA, 15 bp, Homo sapiens
agatcctgcgtgagt

SEQ ID NO: 998340 - DNA, 15 bp, Homo sapiens
gatcctgcgtgagtg

SEQ ID NO: 998341 - DNA, 15 bp, Homo sapiens
atcctgcgtgagtgc

SEQ ID NO: 998342 - DNA, 15 bp, Homo sapiens
tcctgcgtgagtgcc

SEQ ID NO: 998343 - DNA, 15 bp, Homo sapiens
cctgcgtgagtgccc

SEQ ID NO: 998344 - DNA, 15 bp, Homo sapiens
ctgcgtgagtgcccc

SEQ ID NO: 998345 - DNA, 15 bp, Homo sapiens
tgcgtgagtgcccct

SEQ ID NO: 998346 - DNA, 15 bp, Homo sapiens
gcgtgagtgcccctt

SEQ ID NO: 998347 - DNA, 15 bp, Homo sapiens
cgtgagtgccccttt

SEQ ID NO: 998348 - DNA, 15 bp, Homo sapiens
gtgagtgcccctttg

SEQ ID NO: 998349 - DNA, 15 bp, Homo sapiens
tgagtgcccctttgt

SEQ ID NO: 998350 - DNA, 15 bp, Homo sapiens
gagtgcccctttgtg

SEQ ID NO: 998351 - DNA, 15 bp, Homo sapiens
agtgcccctttgtgc

SEQ ID NO: 998352 - DNA, 15 bp, Homo sapiens
gtgcccctttgtgca

SEQ ID NO: 998353 - DNA, 15 bp, Homo sapiens
tgcccctttgtgcag

SEQ ID NO: 998354 - DNA, 15 bp, Homo sapiens
gcccctttgtgcagt

SEQ ID NO: 998355 - DNA, 15 bp, Homo sapiens
cccctttgtgcagtc

SEQ ID NO: 998356 - DNA, 15 bp, Homo sapiens
ccctttgtgcagtca

SEQ ID NO: 998357 - DNA, 15 bp, Homo sapiens
cctttgtgcagtcac

SEQ ID NO: 998358 - DNA, 15 bp, Homo sapiens
ctttgtgcagtcaca

SEQ ID NO: 998359 - DNA, 15 bp, Homo sapiens
tttgtgcagtcacaa

SEQ ID NO: 998360 - DNA, 15 bp, Homo sapiens
ttgtgcagtcacaag

SEQ ID NO: 998361 - DNA, 15 bp, Homo sapiens
tgtgcagtcacaaga

SEQ ID NO: 998362 - DNA, 15 bp, Homo sapiens
gtgcagtcacaagac

SEQ ID NO: 998363 - DNA, 15 bp, Homo sapiens
tgcagtcacaagacc

SEQ ID NO: 998364 - DNA, 15 bp, Homo sapiens
gcagtcacaagaccc

SEQ ID NO: 998365 - DNA, 15 bp, Homo sapiens
cagtcacaagacccg

SEQ ID NO: 998366 - DNA, 15 bp, Homo sapiens
agtcacaagacccgc

SEQ ID NO: 998367 - DNA, 15 bp, Homo sapiens
gtcacaagacccgcc

SEQ ID NO: 998368 - DNA, 15 bp, Homo sapiens
tcacaagacccgcca

SEQ ID NO: 998369 - DNA, 15 bp, Homo sapiens
cacaagacccgccat

SEQ ID NO: 998370 - DNA, 15 bp, Homo sapiens
acaagacccgccatt

SEQ ID NO: 998371 - DNA, 15 bp, Homo sapiens
caagacccgccattg

SEQ ID NO: 998372 - DNA, 15 bp, Homo sapiens
aagacccgccattga

SEQ ID NO: 998373 - DNA, 15 bp, Homo sapiens
agacccgccattgac

SEQ ID NO: 998374 - DNA, 15 bp, Homo sapiens
gacccgccattgaca

SEQ ID NO: 998375 - DNA, 15 bp, Homo sapiens
acccgccattgacac

SEQ ID NO: 998376 - DNA, 15 bp, Homo sapiens
cccgccattgacacc

SEQ ID NO: 998377 - DNA, 15 bp, Homo sapiens
ccgccattgacaccc

SEQ ID NO: 998378 - DNA, 15 bp, Homo sapiens
cgccattgacacccc

SEQ ID NO: 998379 - DNA, 15 bp, Homo sapiens
gccattgacacccca

SEQ ID NO: 998380 - DNA, 15 bp, Homo sapiens
ccattgacaccccag

SEQ ID NO: 998381 - DNA, 15 bp, Homo sapiens
cattgacaccccagg

SEQ ID NO: 998382 - DNA, 15 bp, Homo sapiens
attgacaccccaggc

SEQ ID NO: 998383 - DNA, 15 bp, Homo sapiens
ttgacaccccaggcc

SEQ ID NO: 998384 - DNA, 15 bp, Homo sapiens
tgacaccccaggccc

SEQ ID NO: 998385 - DNA, 15 bp, Homo sapiens
gacaccccaggccct

SEQ ID NO: 998386 - DNA, 15 bp, Homo sapiens
acaccccaggccctt

SEQ ID NO: 998387 - DNA, 15 bp, Homo sapiens
caccccaggcccttg

SEQ ID NO: 998388 - DNA, 15 bp, Homo sapiens
accccaggcccttgg

SEQ ID NO: 998389 - DNA, 15 bp, Homo sapiens
ccccaggcccttggt

SEQ ID NO: 998390 - DNA, 15 bp, Homo sapiens
cccaggcccttggtg

SEQ ID NO: 998391 - DNA, 15 bp, Homo sapiens
ccaggcccttggtgt

SEQ ID NO: 998392 - DNA, 15 bp, Homo sapiens
caggcccttggtgtc

SEQ ID NO: 998393 - DNA, 15 bp, Homo sapiens
aggcccttggtgtcc

SEQ ID NO: 998394 - DNA, 15 bp, Homo sapiens
ggcccttggtgtcca

SEQ ID NO: 998395 - DNA, 15 bp, Homo sapiens
gcccttggtgtccag

SEQ ID NO: 998396 - DNA, 15 bp, Homo sapiens
cccttggtgtccagt

SEQ ID NO: 998397 - DNA, 15 bp, Homo sapiens
ccttggtgtccagtg

SEQ ID NO: 998398 - DNA, 15 bp, Homo sapiens
cttggtgtccagtgg

SEQ ID NO: 998399 - DNA, 15 bp, Homo sapiens
ttggtgtccagtgga

SEQ ID NO: 998400 - DNA, 15 bp, Homo sapiens
tggtgtccagtggag

SEQ ID NO: 998401 - DNA, 15 bp, Homo sapiens
ggtgtccagtggagg

SEQ ID NO: 998402 - DNA, 15 bp, Homo sapiens
gtgtccagtggaggt

SEQ ID NO: 998403 - DNA, 15 bp, Homo sapiens
tgtccagtggaggtg

SEQ ID NO: 998404 - DNA, 15 bp, Homo sapiens
gtccagtggaggtgg

SEQ ID NO: 998405 - DNA, 15 bp, Homo sapiens
tccagtggaggtggg

SEQ ID NO: 998406 - DNA, 15 bp, Homo sapiens
ccagtggaggtgggg

SEQ ID NO: 998407 - DNA, 15 bp, Homo sapiens
cagtggaggtgggga

SEQ ID NO: 998408 - DNA, 15 bp, Homo sapiens
agtggaggtggggac

SEQ ID NO: 998409 - DNA, 15 bp, Homo sapiens
gtggaggtggggaca

SEQ ID NO: 998410 - DNA, 15 bp, Homo sapiens
tggaggtggggacag

SEQ ID NO: 998411 - DNA, 15 bp, Homo sapiens
ggaggtggggacagt

SEQ ID NO: 998412 - DNA, 15 bp, Homo sapiens
gaggtggggacagtt

SEQ ID NO: 998413 - DNA, 15 bp, Homo sapiens
aggtggggacagttg

SEQ ID NO: 998414 - DNA, 15 bp, Homo sapiens
ggtggggacagttgg

SEQ ID NO: 998415 - DNA, 15 bp, Homo sapiens
gtggggacagttggg

SEQ ID NO: 998416 - DNA, 15 bp, Homo sapiens
tggggacagttgggg

SEQ ID NO: 998417 - DNA, 15 bp, Homo sapiens
ggggacagttgggga

SEQ ID NO: 998418 - DNA, 15 bp, Homo sapiens
gggacagttggggag

SEQ ID NO: 998419 - DNA, 15 bp, Homo sapiens
ggacagttggggagg

SEQ ID NO: 998420 - DNA, 15 bp, Homo sapiens
gacagttggggaggc

SEQ ID NO: 998421 - DNA, 15 bp, Homo sapiens
acagttggggaggcc

SEQ ID NO: 998422 - DNA, 15 bp, Homo sapiens
cagttggggaggccc

SEQ ID NO: 998423 - DNA, 15 bp, Homo sapiens
agttggggaggccca

SEQ ID NO: 998424 - DNA, 15 bp, Homo sapiens
gttggggaggcccag

SEQ ID NO: 998425 - DNA, 15 bp, Homo sapiens
ttggggaggcccaga

SEQ ID NO: 998426 - DNA, 15 bp, Homo sapiens
tggggaggcccagaa

SEQ ID NO: 998427 - DNA, 15 bp, Homo sapiens
ggggaggcccagaat

SEQ ID NO: 998428 - DNA, 15 bp, Homo sapiens
gggaggcccagaatg

SEQ ID NO: 998429 - DNA, 15 bp, Homo sapiens
ggaggcccagaatgc

SEQ ID NO: 998430 - DNA, 15 bp, Homo sapiens
gaggcccagaatgct

SEQ ID NO: 998431 - DNA, 15 bp, Homo sapiens
aggcccagaatgctc

SEQ ID NO: 998432 - DNA, 15 bp, Homo sapiens
ggcccagaatgctct

SEQ ID NO: 998433 - DNA, 15 bp, Homo sapiens
gcccagaatgctctg

SEQ ID NO: 998434 - DNA, 15 bp, Homo sapiens
cccagaatgctctgc

SEQ ID NO: 998435 - DNA, 15 bp, Homo sapiens
ccagaatgctctgcc

SEQ ID NO: 998436 - DNA, 15 bp, Homo sapiens
cagaatgctctgccc

SEQ ID NO: 998437 - DNA, 15 bp, Homo sapiens
agaatgctctgccca

SEQ ID NO: 998438 - DNA, 15 bp, Homo sapiens
gaatgctctgcccag

SEQ ID NO: 998439 - DNA, 15 bp, Homo sapiens
aatgctctgcccaga

SEQ ID NO: 998440 - DNA, 15 bp, Homo sapiens
atgctctgcccagaa

SEQ ID NO: 998441 - DNA, 15 bp, Homo sapiens
tgctctgcccagaac

SEQ ID NO: 998442 - DNA, 15 bp, Homo sapiens
gctctgcccagaacg

SEQ ID NO: 998443 - DNA, 15 bp, Homo sapiens
ctctgcccagaacgc

SEQ ID NO: 998444 - DNA, 15 bp, Homo sapiens
tctgcccagaacgct

SEQ ID NO: 998445 - DNA, 15 bp, Homo sapiens
ctgcccagaacgctg

SEQ ID NO: 998446 - DNA, 15 bp, Homo sapiens
tgcccagaacgctgg

SEQ ID NO: 998447 - DNA, 15 bp, Homo sapiens
gcccagaacgctggg

SEQ ID NO: 998448 - DNA, 15 bp, Homo sapiens
cccagaacgctgggc

SEQ ID NO: 998449 - DNA, 15 bp, Homo sapiens
ccagaacgctgggca

SEQ ID NO: 998450 - DNA, 15 bp, Homo sapiens
cagaacgctgggcag

SEQ ID NO: 998451 - DNA, 15 bp, Homo sapiens
agaacgctgggcaga

SEQ ID NO: 998452 - DNA, 15 bp, Homo sapiens
gaacgctgggcagag

SEQ ID NO: 998453 - DNA, 15 bp, Homo sapiens
aacgctgggcagaga

SEQ ID NO: 998454 - DNA, 15 bp, Homo sapiens
acgctgggcagagac

SEQ ID NO: 998455 - DNA, 15 bp, Homo sapiens
cgctgggcagagaca

SEQ ID NO: 998456 - DNA, 15 bp, Homo sapiens
gctgggcagagacag

SEQ ID NO: 998457 - DNA, 15 bp, Homo sapiens
ctgggcagagacagg

SEQ ID NO: 998458 - DNA, 15 bp, Homo sapiens
tgggcagagacagga

SEQ ID NO: 998459 - DNA, 15 bp, Homo sapiens
gggcagagacaggag

SEQ ID NO: 998460 - DNA, 15 bp, Homo sapiens
ggcagagacaggagg

SEQ ID NO: 998461 - DNA, 15 bp, Homo sapiens
gcagagacaggaggg

SEQ ID NO: 998462 - DNA, 15 bp, Homo sapiens
cagagacaggagggg

SEQ ID NO: 998463 - DNA, 15 bp, Homo sapiens
agagacaggaggggt

SEQ ID NO: 998464 - DNA, 15 bp, Homo sapiens
gagacaggaggggtt

SEQ ID NO: 998465 - DNA, 15 bp, Homo sapiens
agacaggaggggttg

SEQ ID NO: 998466 - DNA, 15 bp, Homo sapiens
gacaggaggggttgg

SEQ ID NO: 998467 - DNA, 15 bp, Homo sapiens
acaggaggggttgga

SEQ ID NO: 998468 - DNA, 15 bp, Homo sapiens
caggaggggttggag

SEQ ID NO: 998469 - DNA, 15 bp, Homo sapiens
aggaggggttggagc

SEQ ID NO: 998470 - DNA, 15 bp, Homo sapiens
ggaggggttggagcc

SEQ ID NO: 998471 - DNA, 15 bp, Homo sapiens
gaggggttggagcca

SEQ ID NO: 998472 - DNA, 15 bp, Homo sapiens
aggggttggagccat

SEQ ID NO: 998473 - DNA, 15 bp, Homo sapiens
ggggttggagccatc

SEQ ID NO: 998474 - DNA, 15 bp, Homo sapiens
gggttggagccatcg

SEQ ID NO: 998475 - DNA, 15 bp, Homo sapiens
ggttggagccatcgt

SEQ ID NO: 998476 - DNA, 15 bp, Homo sapiens
gttggagccatcgtc

SEQ ID NO: 998477 - DNA, 15 bp, Homo sapiens
ttggagccatcgtcc

SEQ ID NO: 998478 - DNA, 15 bp, Homo sapiens
tggagccatcgtcca

SEQ ID NO: 998479 - DNA, 15 bp, Homo sapiens
ggagccatcgtccat

SEQ ID NO: 998480 - DNA, 15 bp, Homo sapiens
gagccatcgtccatg

SEQ ID NO: 998481 - DNA, 15 bp, Homo sapiens
agccatcgtccatgc

SEQ ID NO: 998482 - DNA, 15 bp, Homo sapiens
gccatcgtccatgcg

SEQ ID NO: 998483 - DNA, 15 bp, Homo sapiens
ccatcgtccatgcgc

SEQ ID NO: 998484 - DNA, 15 bp, Homo sapiens
catcgtccatgcgct

SEQ ID NO: 998485 - DNA, 15 bp, Homo sapiens
atcgtccatgcgcta

SEQ ID NO: 998486 - DNA, 15 bp, Homo sapiens
tcgtccatgcgctag

SEQ ID NO: 998487 - DNA, 15 bp, Homo sapiens
cgtccatgcgctagg

SEQ ID NO: 998488 - DNA, 15 bp, Homo sapiens
gtccatgcgctaggc

SEQ ID NO: 998489 - DNA, 15 bp, Homo sapiens
tccatgcgctaggcc

SEQ ID NO: 998490 - DNA, 15 bp, Homo sapiens
ccatgcgctaggcct

SEQ ID NO: 998491 - DNA, 15 bp, Homo sapiens
catgcgctaggccta

SEQ ID NO: 998492 - DNA, 15 bp, Homo sapiens
atgcgctaggcctag

SEQ ID NO: 998493 - DNA, 15 bp, Homo sapiens
tgcgctaggcctagg

SEQ ID NO: 998494 - DNA, 15 bp, Homo sapiens
gcgctaggcctaggg

SEQ ID NO: 998495 - DNA, 15 bp, Homo sapiens
cgctaggcctaggga

SEQ ID NO: 998496 - DNA, 15 bp, Homo sapiens
gctaggcctagggaa

SEQ ID NO: 998497 - DNA, 15 bp, Homo sapiens
ctaggcctagggaaa

SEQ ID NO: 998498 - DNA, 15 bp, Homo sapiens
taggcctagggaaaa

SEQ ID NO: 998499 - DNA, 15 bp, Homo sapiens
aggcctagggaaaaa

SEQ ID NO: 998500 - DNA, 15 bp, Homo sapiens
ggcctagggaaaaag

SEQ ID NO: 998501 - DNA, 15 bp, Homo sapiens
gcctagggaaaaagt

SEQ ID NO: 998502 - DNA, 15 bp, Homo sapiens
cctagggaaaaagtg

SEQ ID NO: 998503 - DNA, 15 bp, Homo sapiens
ctagggaaaaagtgc

SEQ ID NO: 998504 - DNA, 15 bp, Homo sapiens
tagggaaaaagtgca

SEQ ID NO: 998505 - DNA, 15 bp, Homo sapiens
agggaaaaagtgcag

SEQ ID NO: 998506 - DNA, 15 bp, Homo sapiens
gggaaaaagtgcaga

SEQ ID NO: 998507 - DNA, 15 bp, Homo sapiens
ggaaaaagtgcagag

SEQ ID NO: 998508 - DNA, 15 bp, Homo sapiens
gaaaaagtgcagaga

SEQ ID NO: 998509 - DNA, 15 bp, Homo sapiens
aaaaagtgcagagag

SEQ ID NO: 998510 - DNA, 15 bp, Homo sapiens
aaaagtgcagagagg

SEQ ID NO: 998511 - DNA, 15 bp, Homo sapiens
aaagtgcagagaggg

SEQ ID NO: 998512 - DNA, 15 bp, Homo sapiens
aagtgcagagagggt

SEQ ID NO: 998513 - DNA, 15 bp, Homo sapiens
agtgcagagagggtg

SEQ ID NO: 998514 - DNA, 15 bp, Homo sapiens
gtgcagagagggtgg

SEQ ID NO: 998515 - DNA, 15 bp, Homo sapiens
tgcagagagggtggc

SEQ ID NO: 998516 - DNA, 15 bp, Homo sapiens
gcagagagggtggcc

SEQ ID NO: 998517 - DNA, 15 bp, Homo sapiens
cagagagggtggcca

SEQ ID NO: 998518 - DNA, 15 bp, Homo sapiens
agagagggtggccag

SEQ ID NO: 998519 - DNA, 15 bp, Homo sapiens
gagagggtggccagg

SEQ ID NO: 998520 - DNA, 15 bp, Homo sapiens
agagggtggccaggc

SEQ ID NO: 998521 - DNA, 15 bp, Homo sapiens
gagggtggccaggca

SEQ ID NO: 998522 - DNA, 15 bp, Homo sapiens
agggtggccaggcac

SEQ ID NO: 998523 - DNA, 15 bp, Homo sapiens
gggtggccaggcaca

SEQ ID NO: 998524 - DNA, 15 bp, Homo sapiens
ggtggccaggcacag

SEQ ID NO: 998525 - DNA, 15 bp, Homo sapiens
gtggccaggcacagt

SEQ ID NO: 998526 - DNA, 15 bp, Homo sapiens
tggccaggcacagtg

SEQ ID NO: 998527 - DNA, 15 bp, Homo sapiens
ggccaggcacagtgg

SEQ ID NO: 998528 - DNA, 15 bp, Homo sapiens
gccaggcacagtggc

SEQ ID NO: 998529 - DNA, 15 bp, Homo sapiens
ccaggcacagtggct

SEQ ID NO: 998530 - DNA, 15 bp, Homo sapiens
caggcacagtggctc

SEQ ID NO: 998531 - DNA, 15 bp, Homo sapiens
aggcacagtggctca

SEQ ID NO: 998532 - DNA, 15 bp, Homo sapiens
ggcacagtggctcaa

SEQ ID NO: 998533 - DNA, 15 bp, Homo sapiens
gcacagtggctcaag

SEQ ID NO: 998534 - DNA, 15 bp, Homo sapiens
cacagtggctcaagc

SEQ ID NO: 998535 - DNA, 15 bp, Homo sapiens
acagtggctcaagcc

SEQ ID NO: 998536 - DNA, 15 bp, Homo sapiens
aatcccagcacttta

SEQ ID NO: 998537 - DNA, 15 bp, Homo sapiens
atcccagcactttag

SEQ ID NO: 998538 - DNA, 15 bp, Homo sapiens
tcccagcactttagg

SEQ ID NO: 998539 - DNA, 15 bp, Homo sapiens
cccagcactttagga

SEQ ID NO: 998540 - DNA, 15 bp, Homo sapiens
ccagcactttaggag

SEQ ID NO: 998541 - DNA, 15 bp, Homo sapiens
cagcactttaggagg

SEQ ID NO: 998542 - DNA, 15 bp, Homo sapiens
agcactttaggaggc

SEQ ID NO: 998543 - DNA, 15 bp, Homo sapiens
gcactttaggaggcc

SEQ ID NO: 998544 - DNA, 15 bp, Homo sapiens
cactttaggaggcca

SEQ ID NO: 998545 - DNA, 15 bp, Homo sapiens
actttaggaggccaa

SEQ ID NO: 998546 - DNA, 15 bp, Homo sapiens
ctttaggaggccaag

SEQ ID NO: 998547 - DNA, 15 bp, Homo sapiens
tttaggaggccaagg

SEQ ID NO: 998548 - DNA, 15 bp, Homo sapiens
ttaggaggccaaggc

SEQ ID NO: 998549 - DNA, 15 bp, Homo sapiens
taggaggccaaggca

SEQ ID NO: 998550 - DNA, 15 bp, Homo sapiens
aggaggccaaggcag

SEQ ID NO: 998551 - DNA, 15 bp, Homo sapiens
ggaggccaaggcagg

SEQ ID NO: 998552 - DNA, 15 bp, Homo sapiens
gaggccaaggcaggc

SEQ ID NO: 998553 - DNA, 15 bp, Homo sapiens
aggccaaggcaggca

SEQ ID NO: 998554 - DNA, 15 bp, Homo sapiens
ggccaaggcaggcag

SEQ ID NO: 998555 - DNA, 15 bp, Homo sapiens
gccaaggcaggcaga

SEQ ID NO: 998556 - DNA, 15 bp, Homo sapiens
ccaaggcaggcagat

SEQ ID NO: 998557 - DNA, 15 bp, Homo sapiens
caaggcaggcagatc

SEQ ID NO: 998558 - DNA, 15 bp, Homo sapiens
aaggcaggcagatca

SEQ ID NO: 998559 - DNA, 15 bp, Homo sapiens
aggcaggcagatcac

SEQ ID NO: 998560 - DNA, 15 bp, Homo sapiens
ggcaggcagatcact

SEQ ID NO: 998561 - DNA, 15 bp, Homo sapiens
gcaggcagatcactt

SEQ ID NO: 998562 - DNA, 15 bp, Homo sapiens
caggcagatcacttg

SEQ ID NO: 998563 - DNA, 15 bp, Homo sapiens
aggcagatcacttga

SEQ ID NO: 998564 - DNA, 15 bp, Homo sapiens
ggcagatcacttgag

SEQ ID NO: 998565 - DNA, 15 bp, Homo sapiens
gcagatcacttgagg

SEQ ID NO: 998566 - DNA, 15 bp, Homo sapiens
cagatcacttgaggt

SEQ ID NO: 998567 - DNA, 15 bp, Homo sapiens
agatcacttgaggtc

SEQ ID NO: 998568 - DNA, 15 bp, Homo sapiens
gatcacttgaggtca

SEQ ID NO: 998569 - DNA, 15 bp, Homo sapiens
atcacttgaggtcag

SEQ ID NO: 998570 - DNA, 15 bp, Homo sapiens
tcacttgaggtcagg

SEQ ID NO: 998571 - DNA, 15 bp, Homo sapiens
cacttgaggtcagga

SEQ ID NO: 998572 - DNA, 15 bp, Homo sapiens
acttgaggtcaggag

SEQ ID NO: 998573 - DNA, 15 bp, Homo sapiens
cttgaggtcaggagt

SEQ ID NO: 998574 - DNA, 15 bp, Homo sapiens
ttgaggtcaggagtt

SEQ ID NO: 998575 - DNA, 15 bp, Homo sapiens
tgaggtcaggagttt

SEQ ID NO: 998576 - DNA, 15 bp, Homo sapiens
gaggtcaggagtttg

SEQ ID NO: 998577 - DNA, 15 bp, Homo sapiens
aggtcaggagtttga

SEQ ID NO: 998578 - DNA, 15 bp, Homo sapiens
ggtcaggagtttgag

SEQ ID NO: 998579 - DNA, 15 bp, Homo sapiens
gtcaggagtttgaga

SEQ ID NO: 998580 - DNA, 15 bp, Homo sapiens
tcaggagtttgagac

SEQ ID NO: 998581 - DNA, 15 bp, Homo sapiens
caggagtttgagacc

SEQ ID NO: 998582 - DNA, 15 bp, Homo sapiens
aggagtttgagacca

SEQ ID NO: 998583 - DNA, 15 bp, Homo sapiens
ggagtttgagaccag

SEQ ID NO: 998584 - DNA, 15 bp, Homo sapiens
gagtttgagaccagc

SEQ ID NO: 998585 - DNA, 15 bp, Homo sapiens
agtttgagaccagcc

SEQ ID NO: 998586 - DNA, 15 bp, Homo sapiens
gtttgagaccagcct

SEQ ID NO: 998587 - DNA, 15 bp, Homo sapiens
tttgagaccagcctg

SEQ ID NO: 998588 - DNA, 15 bp, Homo sapiens
ttgagaccagcctgg

SEQ ID NO: 998589 - DNA, 15 bp, Homo sapiens
tgagaccagcctggc

SEQ ID NO: 998590 - DNA, 15 bp, Homo sapiens
agcctggccaacata

SEQ ID NO: 998591 - DNA, 15 bp, Homo sapiens
gcctggccaacatag

SEQ ID NO: 998592 - DNA, 15 bp, Homo sapiens
cctggccaacatagt

SEQ ID NO: 998593 - DNA, 15 bp, Homo sapiens
ctggccaacatagtg

SEQ ID NO: 998594 - DNA, 15 bp, Homo sapiens
tggccaacatagtga

SEQ ID NO: 998595 - DNA, 15 bp, Homo sapiens
ggccaacatagtgaa

SEQ ID NO: 998596 - DNA, 15 bp, Homo sapiens
gccaacatagtgaaa

SEQ ID NO: 998597 - DNA, 15 bp, Homo sapiens
ccaacatagtgaaac

SEQ ID NO: 998598 - DNA, 15 bp, Homo sapiens
caacatagtgaaacc

SEQ ID NO: 998599 - DNA, 15 bp, Homo sapiens
aacatagtgaaaccc

SEQ ID NO: 998600 - DNA, 15 bp, Homo sapiens
acatagtgaaaccct

SEQ ID NO: 998601 - DNA, 15 bp, Homo sapiens
catagtgaaaccctg

SEQ ID NO: 998602 - DNA, 15 bp, Homo sapiens
atagtgaaaccctgt

SEQ ID NO: 998603 - DNA, 15 bp, Homo sapiens
tagtgaaaccctgtc

SEQ ID NO: 998604 - DNA, 15 bp, Homo sapiens
agtgaaaccctgtct

SEQ ID NO: 998605 - DNA, 15 bp, Homo sapiens
gtgaaaccctgtctc

SEQ ID NO: 998606 - DNA, 15 bp, Homo sapiens
tgaaaccctgtctct

SEQ ID NO: 998607 - DNA, 15 bp, Homo sapiens
gaaaccctgtctcta

SEQ ID NO: 998608 - DNA, 15 bp, Homo sapiens
aaaccctgtctctac

SEQ ID NO: 998609 - DNA, 15 bp, Homo sapiens
aaccctgtctctact

SEQ ID NO: 998610 - DNA, 15 bp, Homo sapiens
accctgtctctacta

SEQ ID NO: 998611 - DNA, 15 bp, Homo sapiens
ccctgtctctactaa

SEQ ID NO: 998612 - DNA, 15 bp, Homo sapiens
cctgtctctactaaa

SEQ ID NO: 998613 - DNA, 15 bp, Homo sapiens
ctgtctctactaaaa

SEQ ID NO: 998614 - DNA, 15 bp, Homo sapiens
tgtctctactaaaaa

SEQ ID NO: 998615 - DNA, 15 bp, Homo sapiens
taaaaatacaaaaac

SEQ ID NO: 998616 - DNA, 15 bp, Homo sapiens
aaaaatacaaaaact

SEQ ID NO: 998617 - DNA, 15 bp, Homo sapiens
aaaatacaaaaacta

SEQ ID NO: 998618 - DNA, 15 bp, Homo sapiens
aaatacaaaaactag

SEQ ID NO: 998619 - DNA, 15 bp, Homo sapiens
aatacaaaaactagc

SEQ ID NO: 998620 - DNA, 15 bp, Homo sapiens
atacaaaaactagcc

SEQ ID NO: 998621 - DNA, 15 bp, Homo sapiens
tacaaaaactagcca

SEQ ID NO: 998622 - DNA, 15 bp, Homo sapiens
acaaaaactagccag

SEQ ID NO: 998623 - DNA, 15 bp, Homo sapiens
caaaaactagccagg

SEQ ID NO: 998624 - DNA, 15 bp, Homo sapiens
aaaaactagccaggt

SEQ ID NO: 998625 - DNA, 15 bp, Homo sapiens
aaaactagccaggtg

SEQ ID NO: 998626 - DNA, 15 bp, Homo sapiens
aaactagccaggtgt

SEQ ID NO: 998627 - DNA, 15 bp, Homo sapiens
aactagccaggtgtg

SEQ ID NO: 998628 - DNA, 15 bp, Homo sapiens
actagccaggtgtgg

SEQ ID NO: 998629 - DNA, 15 bp, Homo sapiens
ctagccaggtgtggt

SEQ ID NO: 998630 - DNA, 15 bp, Homo sapiens
tagccaggtgtggtg

SEQ ID NO: 998631 - DNA, 15 bp, Homo sapiens
agccaggtgtggtgg

SEQ ID NO: 998632 - DNA, 15 bp, Homo sapiens
gccaggtgtggtggc

SEQ ID NO: 998633 - DNA, 15 bp, Homo sapiens
ccaggtgtggtggcg

SEQ ID NO: 998634 - DNA, 15 bp, Homo sapiens
caggtgtggtggcgc

SEQ ID NO: 998635 - DNA, 15 bp, Homo sapiens
aggtgtggtggcgcg

SEQ ID NO: 998636 - DNA, 15 bp, Homo sapiens
ggtgtggtggcgcgt

SEQ ID NO: 998637 - DNA, 15 bp, Homo sapiens
gtgtggtggcgcgtg

SEQ ID NO: 998638 - DNA, 15 bp, Homo sapiens
tgtggtggcgcgtgc

SEQ ID NO: 998639 - DNA, 15 bp, Homo sapiens
gtggtggcgcgtgcc

SEQ ID NO: 998640 - DNA, 15 bp, Homo sapiens
tggtggcgcgtgcct

SEQ ID NO: 998641 - DNA, 15 bp, Homo sapiens
ggtggcgcgtgcctg

SEQ ID NO: 998642 - DNA, 15 bp, Homo sapiens
gtggcgcgtgcctgt

SEQ ID NO: 998643 - DNA, 15 bp, Homo sapiens
tggcgcgtgcctgta

SEQ ID NO: 998644 - DNA, 15 bp, Homo sapiens
ggcgcgtgcctgtag

SEQ ID NO: 998645 - DNA, 15 bp, Homo sapiens
gcgcgtgcctgtagt

SEQ ID NO: 998646 - DNA, 15 bp, Homo sapiens
cgcgtgcctgtagtc

SEQ ID NO: 998647 - DNA, 15 bp, Homo sapiens
gcgtgcctgtagtcc

SEQ ID NO: 998648 - DNA, 15 bp, Homo sapiens
cgtgcctgtagtccc

SEQ ID NO: 998649 - DNA, 15 bp, Homo sapiens
gtgcctgtagtccct

SEQ ID NO: 998650 - DNA, 15 bp, Homo sapiens
tgcctgtagtccctc

SEQ ID NO: 998651 - DNA, 15 bp, Homo sapiens
gcctgtagtccctca

SEQ ID NO: 998652 - DNA, 15 bp, Homo sapiens
cctgtagtccctcaa

SEQ ID NO: 998653 - DNA, 15 bp, Homo sapiens
ctgtagtccctcaac

SEQ ID NO: 998654 - DNA, 15 bp, Homo sapiens
tgtagtccctcaact

SEQ ID NO: 998655 - DNA, 15 bp, Homo sapiens
gtagtccctcaacta

SEQ ID NO: 998656 - DNA, 15 bp, Homo sapiens
tagtccctcaactac

SEQ ID NO: 998657 - DNA, 15 bp, Homo sapiens
agtccctcaactact

SEQ ID NO: 998658 - DNA, 15 bp, Homo sapiens
gtccctcaactactt

SEQ ID NO: 998659 - DNA, 15 bp, Homo sapiens
tccctcaactacttg

SEQ ID NO: 998660 - DNA, 15 bp, Homo sapiens
ccctcaactacttgg

SEQ ID NO: 998661 - DNA, 15 bp, Homo sapiens
cctcaactacttggg

SEQ ID NO: 998662 - DNA, 15 bp, Homo sapiens
ctcaactacttggga

SEQ ID NO: 998663 - DNA, 15 bp, Homo sapiens
tcaactacttgggag

SEQ ID NO: 998664 - DNA, 15 bp, Homo sapiens
caactacttgggagg

SEQ ID NO: 998665 - DNA, 15 bp, Homo sapiens
aactacttgggaggc

SEQ ID NO: 998666 - DNA, 15 bp, Homo sapiens
actacttgggaggct

SEQ ID NO: 998667 - DNA, 15 bp, Homo sapiens
ggaggctgaggcaga

SEQ ID NO: 998668 - DNA, 15 bp, Homo sapiens
gaggctgaggcagaa

SEQ ID NO: 998669 - DNA, 15 bp, Homo sapiens
aggctgaggcagaag

SEQ ID NO: 998670 - DNA, 15 bp, Homo sapiens
ggctgaggcagaaga

SEQ ID NO: 998671 - DNA, 15 bp, Homo sapiens
gctgaggcagaagaa

SEQ ID NO: 998672 - DNA, 15 bp, Homo sapiens
ctgaggcagaagaat

SEQ ID NO: 998673 - DNA, 15 bp, Homo sapiens
tgaggcagaagaatc

SEQ ID NO: 998674 - DNA, 15 bp, Homo sapiens
gaggcagaagaatcg

SEQ ID NO: 998675 - DNA, 15 bp, Homo sapiens
aggcagaagaatcgc

SEQ ID NO: 998676 - DNA, 15 bp, Homo sapiens
ggcagaagaatcgct

SEQ ID NO: 998677 - DNA, 15 bp, Homo sapiens
gcagaagaatcgctt

SEQ ID NO: 998678 - DNA, 15 bp, Homo sapiens
cagaagaatcgcttg

SEQ ID NO: 998679 - DNA, 15 bp, Homo sapiens
agaagaatcgcttgg

SEQ ID NO: 998680 - DNA, 15 bp, Homo sapiens
gaagaatcgcttgga

SEQ ID NO: 998681 - DNA, 15 bp, Homo sapiens
aagaatcgcttggac

SEQ ID NO: 998682 - DNA, 15 bp, Homo sapiens
agaatcgcttggacc

SEQ ID NO: 998683 - DNA, 15 bp, Homo sapiens
gaatcgcttggaccc

SEQ ID NO: 998684 - DNA, 15 bp, Homo sapiens
aatcgcttggacccg

SEQ ID NO: 998685 - DNA, 15 bp, Homo sapiens
atcgcttggacccgg

SEQ ID NO: 998686 - DNA, 15 bp, Homo sapiens
tcgcttggacccggg

SEQ ID NO: 998687 - DNA, 15 bp, Homo sapiens
cgcttggacccggga

SEQ ID NO: 998688 - DNA, 15 bp, Homo sapiens
gcttggacccgggag

SEQ ID NO: 998689 - DNA, 15 bp, Homo sapiens
cttggacccgggagg

SEQ ID NO: 998690 - DNA, 15 bp, Homo sapiens
ttggacccgggaggt

SEQ ID NO: 998691 - DNA, 15 bp, Homo sapiens
tggacccgggaggtg

SEQ ID NO: 998692 - DNA, 15 bp, Homo sapiens
ggacccgggaggtgg

SEQ ID NO: 998693 - DNA, 15 bp, Homo sapiens
gacccgggaggtggc

SEQ ID NO: 998694 - DNA, 15 bp, Homo sapiens
acccgggaggtggca

SEQ ID NO: 998695 - DNA, 15 bp, Homo sapiens
cccgggaggtggcag

SEQ ID NO: 998696 - DNA, 15 bp, Homo sapiens
ccgggaggtggcagt

SEQ ID NO: 998697 - DNA, 15 bp, Homo sapiens
cgggaggtggcagtt

SEQ ID NO: 998698 - DNA, 15 bp, Homo sapiens
gggaggtggcagttg

SEQ ID NO: 998699 - DNA, 15 bp, Homo sapiens
ggaggtggcagttgc

SEQ ID NO: 998700 - DNA, 15 bp, Homo sapiens
gaggtggcagttgca

SEQ ID NO: 998701 - DNA, 15 bp, Homo sapiens
aggtggcagttgcaa

SEQ ID NO: 998702 - DNA, 15 bp, Homo sapiens
ggtggcagttgcaat

SEQ ID NO: 998703 - DNA, 15 bp, Homo sapiens
gtggcagttgcaatg

SEQ ID NO: 998704 - DNA, 15 bp, Homo sapiens
tggcagttgcaatga

SEQ ID NO: 998705 - DNA, 15 bp, Homo sapiens
ggcagttgcaatgag

SEQ ID NO: 998706 - DNA, 15 bp, Homo sapiens
gcagttgcaatgagc

SEQ ID NO: 998707 - DNA, 15 bp, Homo sapiens
cagttgcaatgagct

SEQ ID NO: 998708 - DNA, 15 bp, Homo sapiens
agttgcaatgagctg

SEQ ID NO: 998709 - DNA, 15 bp, Homo sapiens
gttgcaatgagctga

SEQ ID NO: 998710 - DNA, 15 bp, Homo sapiens
ttgcaatgagctgag

SEQ ID NO: 998711 - DNA, 15 bp, Homo sapiens
tgcaatgagctgaga

SEQ ID NO: 998712 - DNA, 15 bp, Homo sapiens
gcaatgagctgagat

SEQ ID NO: 998713 - DNA, 15 bp, Homo sapiens
caatgagctgagatc

SEQ ID NO: 998714 - DNA, 15 bp, Homo sapiens
aatgagctgagatca

SEQ ID NO: 998715 - DNA, 15 bp, Homo sapiens
atgagctgagatcac

SEQ ID NO: 998716 - DNA, 15 bp, Homo sapiens
tgagctgagatcaca

SEQ ID NO: 998717 - DNA, 15 bp, Homo sapiens
gagctgagatcacac

SEQ ID NO: 998718 - DNA, 15 bp, Homo sapiens
agctgagatcacact

SEQ ID NO: 998719 - DNA, 15 bp, Homo sapiens
gctgagatcacacta

SEQ ID NO: 998720 - DNA, 15 bp, Homo sapiens
ctgagatcacactat

SEQ ID NO: 998721 - DNA, 15 bp, Homo sapiens
tgagatcacactatt

SEQ ID NO: 998722 - DNA, 15 bp, Homo sapiens
gagatcacactattg

SEQ ID NO: 998723 - DNA, 15 bp, Homo sapiens
agatcacactattgc

SEQ ID NO: 998724 - DNA, 15 bp, Homo sapiens
gatcacactattgca

SEQ ID NO: 998725 - DNA, 15 bp, Homo sapiens
atcacactattgcac

SEQ ID NO: 998726 - DNA, 15 bp, Homo sapiens
tcacactattgcact

SEQ ID NO: 998727 - DNA, 15 bp, Homo sapiens
cacactattgcactc

SEQ ID NO: 998728 - DNA, 15 bp, Homo sapiens
acactattgcactcc

SEQ ID NO: 998729 - DNA, 15 bp, Homo sapiens
cactattgcactcca

SEQ ID NO: 998730 - DNA, 15 bp, Homo sapiens
actattgcactccag

SEQ ID NO: 998731 - DNA, 15 bp, Homo sapiens
ctattgcactccagt

SEQ ID NO: 998732 - DNA, 15 bp, Homo sapiens
tattgcactccagtc

SEQ ID NO: 998733 - DNA, 15 bp, Homo sapiens
attgcactccagtct

SEQ ID NO: 998734 - DNA, 15 bp, Homo sapiens
ttgcactccagtctg

SEQ ID NO: 998735 - DNA, 15 bp, Homo sapiens
tgcactccagtctgg

SEQ ID NO: 998736 - DNA, 15 bp, Homo sapiens
gcactccagtctggg

SEQ ID NO: 998737 - DNA, 15 bp, Homo sapiens
cactccagtctgggt

SEQ ID NO: 998738 - DNA, 15 bp, Homo sapiens
actccagtctgggtg

SEQ ID NO: 998739 - DNA, 15 bp, Homo sapiens
ctccagtctgggtga

SEQ ID NO: 998740 - DNA, 15 bp, Homo sapiens
tccagtctgggtgac

SEQ ID NO: 998741 - DNA, 15 bp, Homo sapiens
ccagtctgggtgaca

SEQ ID NO: 998742 - DNA, 15 bp, Homo sapiens
cagtctgggtgacag

SEQ ID NO: 998743 - DNA, 15 bp, Homo sapiens
agtctgggtgacaga

SEQ ID NO: 998744 - DNA, 15 bp, Homo sapiens
gtctgggtgacagag

SEQ ID NO: 998745 - DNA, 15 bp, Homo sapiens
tctgggtgacagagt

SEQ ID NO: 998746 - DNA, 15 bp, Homo sapiens
ctgggtgacagagtg

SEQ ID NO: 998747 - DNA, 15 bp, Homo sapiens
tgggtgacagagtga

SEQ ID NO: 998748 - DNA, 15 bp, Homo sapiens
gggtgacagagtgag

SEQ ID NO: 998749 - DNA, 15 bp, Homo sapiens
ggtgacagagtgaga

SEQ ID NO: 998750 - DNA, 15 bp, Homo sapiens
gtgacagagtgagac

SEQ ID NO: 998751 - DNA, 15 bp, Homo sapiens
tgacagagtgagaca

SEQ ID NO: 998752 - DNA, 15 bp, Homo sapiens
gacagagtgagacaa

SEQ ID NO: 998753 - DNA, 15 bp, Homo sapiens
acagagtgagacaac

SEQ ID NO: 998754 - DNA, 15 bp, Homo sapiens
cagagtgagacaacg

SEQ ID NO: 998755 - DNA, 15 bp, Homo sapiens
agagtgagacaacgt

SEQ ID NO: 998756 - DNA, 15 bp, Homo sapiens
gagtgagacaacgtc

SEQ ID NO: 998757 - DNA, 15 bp, Homo sapiens
agtgagacaacgtct

SEQ ID NO: 998758 - DNA, 15 bp, Homo sapiens
gtgagacaacgtctc

SEQ ID NO: 998759 - DNA, 15 bp, Homo sapiens
tgagacaacgtctca

SEQ ID NO: 998760 - DNA, 15 bp, Homo sapiens
gagacaacgtctcaa

SEQ ID NO: 998761 - DNA, 15 bp, Homo sapiens
agacaacgtctcaaa

SEQ ID NO: 998762 - DNA, 15 bp, Homo sapiens
gacaacgtctcaaaa

SEQ ID NO: 998763 - DNA, 15 bp, Homo sapiens
acaacgtctcaaaaa

SEQ ID NO: 998764 - DNA, 15 bp, Homo sapiens
caacgtctcaaaaaa

SEQ ID NO: 998765 - DNA, 15 bp, Homo sapiens
aacgtctcaaaaaaa

SEQ ID NO: 998766 - DNA, 15 bp, Homo sapiens
acgtctcaaaaaaaa

SEQ ID NO: 998767 - DNA, 15 bp, Homo sapiens
cgtctcaaaaaaaaa

SEQ ID NO: 998768 - DNA, 15 bp, Homo sapiens
gtctcaaaaaaaaaa

SEQ ID NO: 998769 - DNA, 15 bp, Homo sapiens
tctcaaaaaaaaaaa

SEQ ID NO: 998770 - DNA, 15 bp, Homo sapiens
ctcaaaaaaaaaaaa

SEQ ID NO: 998771 - DNA, 15 bp, Homo sapiens
tcaaaaaaaaaaaaa

SEQ ID NO: 998772 - DNA, 15 bp, Homo sapiens
caaaaaaaaaaaaag

SEQ ID NO: 998773 - DNA, 15 bp, Homo sapiens
aaaaaaaaaaaaagt

SEQ ID NO: 998774 - DNA, 15 bp, Homo sapiens
aaaaaaaaaaaagtg

SEQ ID NO: 998775 - DNA, 15 bp, Homo sapiens
aaaaaaaaaaagtgc

SEQ ID NO: 998776 - DNA, 15 bp, Homo sapiens
aaaaaaaaaagtgca

SEQ ID NO: 998777 - DNA, 15 bp, Homo sapiens
aaaaaaaaagtgcag

SEQ ID NO: 998778 - DNA, 15 bp, Homo sapiens
aaaaaaaagtgcaga

SEQ ID NO: 998779 - DNA, 15 bp, Homo sapiens
aaaaaaagtgcagaa

SEQ ID NO: 998780 - DNA, 15 bp, Homo sapiens
aaaaaagtgcagaaa

SEQ ID NO: 998781 - DNA, 15 bp, Homo sapiens
aaaaagtgcagaaag

SEQ ID NO: 998782 - DNA, 15 bp, Homo sapiens
aaaagtgcagaaagg

SEQ ID NO: 998783 - DNA, 15 bp, Homo sapiens
aaagtgcagaaaggg

SEQ ID NO: 998784 - DNA, 15 bp, Homo sapiens
aagtgcagaaagggc

SEQ ID NO: 998785 - DNA, 15 bp, Homo sapiens
agtgcagaaagggct

SEQ ID NO: 998786 - DNA, 15 bp, Homo sapiens
gtgcagaaagggctc

SEQ ID NO: 998787 - DNA, 15 bp, Homo sapiens
tgcagaaagggctct

SEQ ID NO: 998788 - DNA, 15 bp, Homo sapiens
gcagaaagggctctc

SEQ ID NO: 998789 - DNA, 15 bp, Homo sapiens
cagaaagggctctct

SEQ ID NO: 998790 - DNA, 15 bp, Homo sapiens
agaaagggctctctt

SEQ ID NO: 998791 - DNA, 15 bp, Homo sapiens
gaaagggctctcttg

SEQ ID NO: 998792 - DNA, 15 bp, Homo sapiens
aaagggctctcttgg

SEQ ID NO: 998793 - DNA, 15 bp, Homo sapiens
aagggctctcttggt

SEQ ID NO: 998794 - DNA, 15 bp, Homo sapiens
agggctctcttggtg

SEQ ID NO: 998795 - DNA, 15 bp, Homo sapiens
gggctctcttggtgt

SEQ ID NO: 998796 - DNA, 15 bp, Homo sapiens
ggctctcttggtgta

SEQ ID NO: 998797 - DNA, 15 bp, Homo sapiens
gctctcttggtgtat

SEQ ID NO: 998798 - DNA, 15 bp, Homo sapiens
ctctcttggtgtatg

SEQ ID NO: 998799 - DNA, 15 bp, Homo sapiens
tctcttggtgtatgt

SEQ ID NO: 998800 - DNA, 15 bp, Homo sapiens
ctcttggtgtatgtc

SEQ ID NO: 998801 - DNA, 15 bp, Homo sapiens
tcttggtgtatgtca

SEQ ID NO: 998802 - DNA, 15 bp, Homo sapiens
cttggtgtatgtcag

SEQ ID NO: 998803 - DNA, 15 bp, Homo sapiens
ttggtgtatgtcagt

SEQ ID NO: 998804 - DNA, 15 bp, Homo sapiens
tggtgtatgtcagtc

SEQ ID NO: 998805 - DNA, 15 bp, Homo sapiens
ggtgtatgtcagtcc

SEQ ID NO: 998806 - DNA, 15 bp, Homo sapiens
gtgtatgtcagtccc

SEQ ID NO: 998807 - DNA, 15 bp, Homo sapiens
tgtatgtcagtccct

SEQ ID NO: 998808 - DNA, 15 bp, Homo sapiens
gtatgtcagtccctt

SEQ ID NO: 998809 - DNA, 15 bp, Homo sapiens
tatgtcagtccctta

SEQ ID NO: 998810 - DNA, 15 bp, Homo sapiens
atgtcagtcccttag

SEQ ID NO: 998811 - DNA, 15 bp, Homo sapiens
tgtcagtcccttagt

SEQ ID NO: 998812 - DNA, 15 bp, Homo sapiens
gtcagtcccttagtt

SEQ ID NO: 998813 - DNA, 15 bp, Homo sapiens
tcagtcccttagttc

SEQ ID NO: 998814 - DNA, 15 bp, Homo sapiens
cagtcccttagttct

SEQ ID NO: 998815 - DNA, 15 bp, Homo sapiens
agtcccttagttctg

SEQ ID NO: 998816 - DNA, 15 bp, Homo sapiens
gtcccttagttctgg

SEQ ID NO: 998817 - DNA, 15 bp, Homo sapiens
tcccttagttctgga

SEQ ID NO: 998818 - DNA, 15 bp, Homo sapiens
cccttagttctggaa

SEQ ID NO: 998819 - DNA, 15 bp, Homo sapiens
ccttagttctggaac

SEQ ID NO: 998820 - DNA, 15 bp, Homo sapiens
cttagttctggaaca

SEQ ID NO: 998821 - DNA, 15 bp, Homo sapiens
ttagttctggaacag

SEQ ID NO: 998822 - DNA, 15 bp, Homo sapiens
tagttctggaacagg

SEQ ID NO: 998823 - DNA, 15 bp, Homo sapiens
agttctggaacaggg

SEQ ID NO: 998824 - DNA, 15 bp, Homo sapiens
gttctggaacaggga

SEQ ID NO: 998825 - DNA, 15 bp, Homo sapiens
ttctggaacagggaa

SEQ ID NO: 998826 - DNA, 15 bp, Homo sapiens
tctggaacagggaaa

SEQ ID NO: 998827 - DNA, 15 bp, Homo sapiens
ctggaacagggaaag

SEQ ID NO: 998828 - DNA, 15 bp, Homo sapiens
tggaacagggaaagt

SEQ ID NO: 998829 - DNA, 15 bp, Homo sapiens
ggaacagggaaagta

SEQ ID NO: 998830 - DNA, 15 bp, Homo sapiens
gaacagggaaagtaa

SEQ ID NO: 998831 - DNA, 15 bp, Homo sapiens
aacagggaaagtaaa

SEQ ID NO: 998832 - DNA, 15 bp, Homo sapiens
acagggaaagtaaaa

SEQ ID NO: 998833 - DNA, 15 bp, Homo sapiens
cagggaaagtaaaag

SEQ ID NO: 998834 - DNA, 15 bp, Homo sapiens
agggaaagtaaaagc

SEQ ID NO: 998835 - DNA, 15 bp, Homo sapiens
gggaaagtaaaagcc

SEQ ID NO: 998836 - DNA, 15 bp, Homo sapiens
ggaaagtaaaagcca

SEQ ID NO: 998837 - DNA, 15 bp, Homo sapiens
gaaagtaaaagccac

SEQ ID NO: 998838 - DNA, 15 bp, Homo sapiens
aaagtaaaagccaca

SEQ ID NO: 998839 - DNA, 15 bp, Homo sapiens
aagtaaaagccacag

SEQ ID NO: 998840 - DNA, 15 bp, Homo sapiens
agtaaaagccacagt

SEQ ID NO: 998841 - DNA, 15 bp, Homo sapiens
gtaaaagccacagta

SEQ ID NO: 998842 - DNA, 15 bp, Homo sapiens
taaaagccacagtac

SEQ ID NO: 998843 - DNA, 15 bp, Homo sapiens
aaaagccacagtacc

SEQ ID NO: 998844 - DNA, 15 bp, Homo sapiens
aaagccacagtaccc

SEQ ID NO: 998845 - DNA, 15 bp, Homo sapiens
aagccacagtaccca

SEQ ID NO: 998846 - DNA, 15 bp, Homo sapiens
agccacagtacccaa

SEQ ID NO: 998847 - DNA, 15 bp, Homo sapiens
gccacagtacccaag

SEQ ID NO: 998848 - DNA, 15 bp, Homo sapiens
ccacagtacccaagc

SEQ ID NO: 998849 - DNA, 15 bp, Homo sapiens
cacagtacccaagct

SEQ ID NO: 998850 - DNA, 15 bp, Homo sapiens
acagtacccaagctc

SEQ ID NO: 998851 - DNA, 15 bp, Homo sapiens
cagtacccaagctct

SEQ ID NO: 998852 - DNA, 15 bp, Homo sapiens
agtacccaagctctc

SEQ ID NO: 998853 - DNA, 15 bp, Homo sapiens
gtacccaagctctct

SEQ ID NO: 998854 - DNA, 15 bp, Homo sapiens
tacccaagctctctt

SEQ ID NO: 998855 - DNA, 15 bp, Homo sapiens
acccaagctctcttc

SEQ ID NO: 998856 - DNA, 15 bp, Homo sapiens
cccaagctctcttcc

SEQ ID NO: 998857 - DNA, 15 bp, Homo sapiens
ccaagctctcttcca

SEQ ID NO: 998858 - DNA, 15 bp, Homo sapiens
caagctctcttccag

SEQ ID NO: 998859 - DNA, 15 bp, Homo sapiens
aagctctcttccagg

SEQ ID NO: 998860 - DNA, 15 bp, Homo sapiens
agctctcttccagga

SEQ ID NO: 998861 - DNA, 15 bp, Homo sapiens
gctctcttccaggag

SEQ ID NO: 998862 - DNA, 15 bp, Homo sapiens
ctctcttccaggagt

SEQ ID NO: 998863 - DNA, 15 bp, Homo sapiens
tctcttccaggagtg

SEQ ID NO: 998864 - DNA, 15 bp, Homo sapiens
ctcttccaggagtgt

SEQ ID NO: 998865 - DNA, 15 bp, Homo sapiens
tcttccaggagtgtc

SEQ ID NO: 998866 - DNA, 15 bp, Homo sapiens
cttccaggagtgtct

SEQ ID NO: 998867 - DNA, 15 bp, Homo sapiens
ttccaggagtgtctc

SEQ ID NO: 998868 - DNA, 15 bp, Homo sapiens
tccaggagtgtctca

SEQ ID NO: 998869 - DNA, 15 bp, Homo sapiens
ccaggagtgtctcag

SEQ ID NO: 998870 - DNA, 15 bp, Homo sapiens
caggagtgtctcagc

SEQ ID NO: 998871 - DNA, 15 bp, Homo sapiens
aggagtgtctcagct

SEQ ID NO: 998872 - DNA, 15 bp, Homo sapiens
ggagtgtctcagctc

SEQ ID NO: 998873 - DNA, 15 bp, Homo sapiens
gagtgtctcagctcc

SEQ ID NO: 998874 - DNA, 15 bp, Homo sapiens
agtgtctcagctcca

SEQ ID NO: 998875 - DNA, 15 bp, Homo sapiens
gtgtctcagctccaa

SEQ ID NO: 998876 - DNA, 15 bp, Homo sapiens
tgtctcagctccaac

SEQ ID NO: 998877 - DNA, 15 bp, Homo sapiens
gtctcagctccaaca

SEQ ID NO: 998878 - DNA, 15 bp, Homo sapiens
tctcagctccaacag

SEQ ID NO: 998879 - DNA, 15 bp, Homo sapiens
ctcagctccaacagg

SEQ ID NO: 998880 - DNA, 15 bp, Homo sapiens
tcagctccaacaggt

SEQ ID NO: 998881 - DNA, 15 bp, Homo sapiens
cagctccaacaggta

SEQ ID NO: 998882 - DNA, 15 bp, Homo sapiens
agctccaacaggtaa

SEQ ID NO: 998883 - DNA, 15 bp, Homo sapiens
gctccaacaggtaaa

SEQ ID NO: 998884 - DNA, 15 bp, Homo sapiens
ctccaacaggtaaat

SEQ ID NO: 998885 - DNA, 15 bp, Homo sapiens
tccaacaggtaaata

SEQ ID NO: 998886 - DNA, 15 bp, Homo sapiens
ccaacaggtaaatat

SEQ ID NO: 998887 - DNA, 15 bp, Homo sapiens
caacaggtaaatatt

SEQ ID NO: 998888 - DNA, 15 bp, Homo sapiens
aacaggtaaatattg

SEQ ID NO: 998889 - DNA, 15 bp, Homo sapiens
acaggtaaatattgt

SEQ ID NO: 998890 - DNA, 15 bp, Homo sapiens
caggtaaatattgtc

SEQ ID NO: 998891 - DNA, 15 bp, Homo sapiens
aggtaaatattgtct

SEQ ID NO: 998892 - DNA, 15 bp, Homo sapiens
ggtaaatattgtcta

SEQ ID NO: 998893 - DNA, 15 bp, Homo sapiens
gtaaatattgtctat

SEQ ID NO: 998894 - DNA, 15 bp, Homo sapiens
taaatattgtctatg

SEQ ID NO: 998895 - DNA, 15 bp, Homo sapiens
aaatattgtctatgt

SEQ ID NO: 998896 - DNA, 15 bp, Homo sapiens
aatattgtctatgta

SEQ ID NO: 998897 - DNA, 15 bp, Homo sapiens
atattgtctatgtag

SEQ ID NO: 998898 - DNA, 15 bp, Homo sapiens
tattgtctatgtagt

SEQ ID NO: 998899 - DNA, 15 bp, Homo sapiens
attgtctatgtagtc

SEQ ID NO: 998900 - DNA, 15 bp, Homo sapiens
ttgtctatgtagtca

SEQ ID NO: 998901 - DNA, 15 bp, Homo sapiens
tgtctatgtagtcag

SEQ ID NO: 998902 - DNA, 15 bp, Homo sapiens
gtctatgtagtcaga

SEQ ID NO: 998903 - DNA, 15 bp, Homo sapiens
tctatgtagtcagat

SEQ ID NO: 998904 - DNA, 15 bp, Homo sapiens
ctatgtagtcagatt

SEQ ID NO: 998905 - DNA, 15 bp, Homo sapiens
tatgtagtcagattg

SEQ ID NO: 998906 - DNA, 15 bp, Homo sapiens
atgtagtcagattgg

SEQ ID NO: 998907 - DNA, 15 bp, Homo sapiens
tgtagtcagattggt

SEQ ID NO: 998908 - DNA, 15 bp, Homo sapiens
gtagtcagattggtc

SEQ ID NO: 998909 - DNA, 15 bp, Homo sapiens
tagtcagattggtcc

SEQ ID NO: 998910 - DNA, 15 bp, Homo sapiens
agtcagattggtccc

SEQ ID NO: 998911 - DNA, 15 bp, Homo sapiens
gtcagattggtccct

SEQ ID NO: 998912 - DNA, 15 bp, Homo sapiens
tcagattggtccctc

SEQ ID NO: 998913 - DNA, 15 bp, Homo sapiens
cagattggtccctct

SEQ ID NO: 998914 - DNA, 15 bp, Homo sapiens
agattggtccctctg

SEQ ID NO: 998915 - DNA, 15 bp, Homo sapiens
gattggtccctctgg

SEQ ID NO: 998916 - DNA, 15 bp, Homo sapiens
attggtccctctggg

SEQ ID NO: 998917 - DNA, 15 bp, Homo sapiens
ttggtccctctggga

SEQ ID NO: 998918 - DNA, 15 bp, Homo sapiens
tggtccctctgggat

SEQ ID NO: 998919 - DNA, 15 bp, Homo sapiens
ggtccctctgggatc

SEQ ID NO: 998920 - DNA, 15 bp, Homo sapiens
gtccctctgggatcc

SEQ ID NO: 998921 - DNA, 15 bp, Homo sapiens
tccctctgggatcca

SEQ ID NO: 998922 - DNA, 15 bp, Homo sapiens
ccctctgggatccac

SEQ ID NO: 998923 - DNA, 15 bp, Homo sapiens
cctctgggatccact

SEQ ID NO: 998924 - DNA, 15 bp, Homo sapiens
ctctgggatccactt

SEQ ID NO: 998925 - DNA, 15 bp, Homo sapiens
tctgggatccacttc

SEQ ID NO: 998926 - DNA, 15 bp, Homo sapiens
ctgggatccacttcc

SEQ ID NO: 998927 - DNA, 15 bp, Homo sapiens
tgggatccacttccc

SEQ ID NO: 998928 - DNA, 15 bp, Homo sapiens
gggatccacttccca

SEQ ID NO: 998929 - DNA, 15 bp, Homo sapiens
ggatccacttcccat

SEQ ID NO: 998930 - DNA, 15 bp, Homo sapiens
gatccacttcccatt

SEQ ID NO: 998931 - DNA, 15 bp, Homo sapiens
atccacttcccattc

SEQ ID NO: 998932 - DNA, 15 bp, Homo sapiens
tccacttcccattcc

SEQ ID NO: 998933 - DNA, 15 bp, Homo sapiens
ccacttcccattcct

SEQ ID NO: 998934 - DNA, 15 bp, Homo sapiens
cacttcccattcctt

SEQ ID NO: 998935 - DNA, 15 bp, Homo sapiens
acttcccattccttt

SEQ ID NO: 998936 - DNA, 15 bp, Homo sapiens
cttcccattcctttg

SEQ ID NO: 998937 - DNA, 15 bp, Homo sapiens
ttcccattcctttgt

SEQ ID NO: 998938 - DNA, 15 bp, Homo sapiens
tcccattcctttgtt

SEQ ID NO: 998939 - DNA, 15 bp, Homo sapiens
cccattcctttgttc

SEQ ID NO: 998940 - DNA, 15 bp, Homo sapiens
ccattcctttgttcc

SEQ ID NO: 998941 - DNA, 15 bp, Homo sapiens
cattcctttgttcct

SEQ ID NO: 998942 - DNA, 15 bp, Homo sapiens
attcctttgttcctt

SEQ ID NO: 998943 - DNA, 15 bp, Homo sapiens
ttcctttgttccttg

SEQ ID NO: 998944 - DNA, 15 bp, Homo sapiens
tcctttgttccttgt

SEQ ID NO: 998945 - DNA, 15 bp, Homo sapiens
cctttgttccttgtc

SEQ ID NO: 998946 - DNA, 15 bp, Homo sapiens
ctttgttccttgtcc

SEQ ID NO: 998947 - DNA, 15 bp, Homo sapiens
tttgttccttgtccc

SEQ ID NO: 998948 - DNA, 15 bp, Homo sapiens
ttgttccttgtccca

SEQ ID NO: 998949 - DNA, 15 bp, Homo sapiens
tgttccttgtcccaa

SEQ ID NO: 998950 - DNA, 15 bp, Homo sapiens
gttccttgtcccaac

SEQ ID NO: 998951 - DNA, 15 bp, Homo sapiens
ttccttgtcccaaca

SEQ ID NO: 998952 - DNA, 15 bp, Homo sapiens
tccttgtcccaacaa

SEQ ID NO: 998953 - DNA, 15 bp, Homo sapiens
ccttgtcccaacaaa

SEQ ID NO: 998954 - DNA, 15 bp, Homo sapiens
cttgtcccaacaaag

SEQ ID NO: 998955 - DNA, 15 bp, Homo sapiens
ttgtcccaacaaagg

SEQ ID NO: 998956 - DNA, 15 bp, Homo sapiens
tgtcccaacaaaggg

SEQ ID NO: 998957 - DNA, 15 bp, Homo sapiens
gtcccaacaaagggt

SEQ ID NO: 998958 - DNA, 15 bp, Homo sapiens
tcccaacaaagggtc

SEQ ID NO: 998959 - DNA, 15 bp, Homo sapiens
cccaacaaagggtcc

SEQ ID NO: 998960 - DNA, 15 bp, Homo sapiens
ccaacaaagggtcca

SEQ ID NO: 998961 - DNA, 15 bp, Homo sapiens
caacaaagggtccat

SEQ ID NO: 998962 - DNA, 15 bp, Homo sapiens
aacaaagggtccatc

SEQ ID NO: 998963 - DNA, 15 bp, Homo sapiens
acaaagggtccatct

SEQ ID NO: 998964 - DNA, 15 bp, Homo sapiens
caaagggtccatctt

SEQ ID NO: 998965 - DNA, 15 bp, Homo sapiens
aaagggtccatcttt

SEQ ID NO: 998966 - DNA, 15 bp, Homo sapiens
aagggtccatctttt

SEQ ID NO: 998967 - DNA, 15 bp, Homo sapiens
agggtccatcttttg

SEQ ID NO: 998968 - DNA, 15 bp, Homo sapiens
gggtccatcttttgt

SEQ ID NO: 998969 - DNA, 15 bp, Homo sapiens
ggtccatcttttgta

SEQ ID NO: 998970 - DNA, 15 bp, Homo sapiens
gtccatcttttgtaa

SEQ ID NO: 998971 - DNA, 15 bp, Homo sapiens
tccatcttttgtaag

SEQ ID NO: 998972 - DNA, 15 bp, Homo sapiens
ccatcttttgtaagg

SEQ ID NO: 998973 - DNA, 15 bp, Homo sapiens
catcttttgtaagga

SEQ ID NO: 998974 - DNA, 15 bp, Homo sapiens
atcttttgtaaggat

SEQ ID NO: 998975 - DNA, 15 bp, Homo sapiens
tcttttgtaaggatt

SEQ ID NO: 998976 - DNA, 15 bp, Homo sapiens
cttttgtaaggattg

SEQ ID NO: 998977 - DNA, 15 bp, Homo sapiens
ttttgtaaggattgg

SEQ ID NO: 998978 - DNA, 15 bp, Homo sapiens
tttgtaaggattggt

SEQ ID NO: 998979 - DNA, 15 bp, Homo sapiens
ttgtaaggattggtt

SEQ ID NO: 998980 - DNA, 15 bp, Homo sapiens
tgtaaggattggttc

SEQ ID NO: 998981 - DNA, 15 bp, Homo sapiens
gtaaggattggttct

SEQ ID NO: 998982 - DNA, 15 bp, Homo sapiens
taaggattggttctc

SEQ ID NO: 998983 - DNA, 15 bp, Homo sapiens
aaggattggttctca

SEQ ID NO: 998984 - DNA, 15 bp, Homo sapiens
aggattggttctcaa

SEQ ID NO: 998985 - DNA, 15 bp, Homo sapiens
ggattggttctcaaa

SEQ ID NO: 998986 - DNA, 15 bp, Homo sapiens
gattggttctcaaag

SEQ ID NO: 998987 - DNA, 15 bp, Homo sapiens
attggttctcaaagc

SEQ ID NO: 998988 - DNA, 15 bp, Homo sapiens
ttggttctcaaagct

SEQ ID NO: 998989 - DNA, 15 bp, Homo sapiens
tggttctcaaagctg

SEQ ID NO: 998990 - DNA, 15 bp, Homo sapiens
ggttctcaaagctgg

SEQ ID NO: 998991 - DNA, 15 bp, Homo sapiens
gttctcaaagctgga

SEQ ID NO: 998992 - DNA, 15 bp, Homo sapiens
ttctcaaagctggaa

SEQ ID NO: 998993 - DNA, 15 bp, Homo sapiens
tctcaaagctggaac

SEQ ID NO: 998994 - DNA, 15 bp, Homo sapiens
ctcaaagctggaacg

SEQ ID NO: 998995 - DNA, 15 bp, Homo sapiens
tcaaagctggaacga

SEQ ID NO: 998996 - DNA, 15 bp, Homo sapiens
caaagctggaacgag

SEQ ID NO: 998997 - DNA, 15 bp, Homo sapiens
aaagctggaacgagg

SEQ ID NO: 998998 - DNA, 15 bp, Homo sapiens
aagctggaacgaggc

SEQ ID NO: 998999 - DNA, 15 bp, Homo sapiens
agctggaacgaggca

SEQ ID NO: 999000 - DNA, 15 bp, Homo sapiens
gctggaacgaggcag

SEQ ID NO: 999001 - DNA, 15 bp, Homo sapiens
ctggaacgaggcagc

SEQ ID NO: 999002 - DNA, 15 bp, Homo sapiens
tggaacgaggcagca

SEQ ID NO: 999003 - DNA, 15 bp, Homo sapiens
ggaacgaggcagcaa

SEQ ID NO: 999004 - DNA, 15 bp, Homo sapiens
gaacgaggcagcaaa

SEQ ID NO: 999005 - DNA, 15 bp, Homo sapiens
aacgaggcagcaaac

SEQ ID NO: 999006 - DNA, 15 bp, Homo sapiens
acgaggcagcaaact

SEQ ID NO: 999007 - DNA, 15 bp, Homo sapiens
cgaggcagcaaactc

SEQ ID NO: 999008 - DNA, 15 bp, Homo sapiens
gaggcagcaaactca

SEQ ID NO: 999009 - DNA, 15 bp, Homo sapiens
aggcagcaaactcag

SEQ ID NO: 999010 - DNA, 15 bp, Homo sapiens
ggcagcaaactcagg

SEQ ID NO: 999011 - DNA, 15 bp, Homo sapiens
gcagcaaactcaggt

SEQ ID NO: 999012 - DNA, 15 bp, Homo sapiens
cagcaaactcaggtg

SEQ ID NO: 999013 - DNA, 15 bp, Homo sapiens
agcaaactcaggtgg

SEQ ID NO: 999014 - DNA, 15 bp, Homo sapiens
gcaaactcaggtggt

SEQ ID NO: 999015 - DNA, 15 bp, Homo sapiens
caaactcaggtggta

SEQ ID NO: 999016 - DNA, 15 bp, Homo sapiens
aaactcaggtggtaa

SEQ ID NO: 999017 - DNA, 15 bp, Homo sapiens
aactcaggtggtaac

SEQ ID NO: 999018 - DNA, 15 bp, Homo sapiens
ccaccttggggtgta

SEQ ID NO: 999019 - DNA, 15 bp, Homo sapiens
caccttggggtgtat

SEQ ID NO: 999020 - DNA, 15 bp, Homo sapiens
accttggggtgtatg

SEQ ID NO: 999021 - DNA, 15 bp, Homo sapiens
ccttggggtgtatgg

SEQ ID NO: 999022 - DNA, 15 bp, Homo sapiens
cttggggtgtatgga

SEQ ID NO: 999023 - DNA, 15 bp, Homo sapiens
ttggggtgtatggac

SEQ ID NO: 999024 - DNA, 15 bp, Homo sapiens
tggggtgtatggacc

SEQ ID NO: 999025 - DNA, 15 bp, Homo sapiens
ggggtgtatggaccg

SEQ ID NO: 999026 - DNA, 15 bp, Homo sapiens
gggtgtatggaccgg

SEQ ID NO: 999027 - DNA, 15 bp, Homo sapiens
ggtgtatggaccggg

SEQ ID NO: 999028 - DNA, 15 bp, Homo sapiens
gtgtatggaccgggt

SEQ ID NO: 999029 - DNA, 15 bp, Homo sapiens
tgtatggaccgggtt

SEQ ID NO: 999030 - DNA, 15 bp, Homo sapiens
gtatggaccgggttc

SEQ ID NO: 999031 - DNA, 15 bp, Homo sapiens
tatggaccgggttcc

SEQ ID NO: 999032 - DNA, 15 bp, Homo sapiens
atggaccgggttcct

SEQ ID NO: 999033 - DNA, 15 bp, Homo sapiens
tggaccgggttcctc

SEQ ID NO: 999034 - DNA, 15 bp, Homo sapiens
ggaccgggttcctcc

SEQ ID NO: 999035 - DNA, 15 bp, Homo sapiens
gaccgggttcctccc

SEQ ID NO: 999036 - DNA, 15 bp, Homo sapiens
accgggttcctcccc

SEQ ID NO: 999037 - DNA, 15 bp, Homo sapiens
ccgggttcctccccc

SEQ ID NO: 999038 - DNA, 15 bp, Homo sapiens
cgggttcctccccct

SEQ ID NO: 999039 - DNA, 15 bp, Homo sapiens
gggttcctccccctg

SEQ ID NO: 999040 - DNA, 15 bp, Homo sapiens
ggttcctccccctgg

SEQ ID NO: 999041 - DNA, 15 bp, Homo sapiens
gttcctccccctggg

SEQ ID NO: 999042 - DNA, 15 bp, Homo sapiens
ttcctccccctgggc

SEQ ID NO: 999043 - DNA, 15 bp, Homo sapiens
tcctccccctgggca

SEQ ID NO: 999044 - DNA, 15 bp, Homo sapiens
cctccccctgggcag

SEQ ID NO: 999045 - DNA, 15 bp, Homo sapiens
ctccccctgggcagg

SEQ ID NO: 999046 - DNA, 15 bp, Homo sapiens
tccccctgggcaggg

SEQ ID NO: 999047 - DNA, 15 bp, Homo sapiens
ccccctgggcagggc

SEQ ID NO: 999048 - DNA, 15 bp, Homo sapiens
cccctgggcagggcc

SEQ ID NO: 999049 - DNA, 15 bp, Homo sapiens
ccctgggcagggcca

SEQ ID NO: 999050 - DNA, 15 bp, Homo sapiens
cctgggcagggccat

SEQ ID NO: 999051 - DNA, 15 bp, Homo sapiens
ctgggcagggccatg

SEQ ID NO: 999052 - DNA, 15 bp, Homo sapiens
tgggcagggccatgg

SEQ ID NO: 999053 - DNA, 15 bp, Homo sapiens
gggcagggccatggt

SEQ ID NO: 999054 - DNA, 15 bp, Homo sapiens
ggcagggccatggta

SEQ ID NO: 999055 - DNA, 15 bp, Homo sapiens
gcagggccatggtac

SEQ ID NO: 999056 - DNA, 15 bp, Homo sapiens
cagggccatggtact

SEQ ID NO: 999057 - DNA, 15 bp, Homo sapiens
agggccatggtactc

SEQ ID NO: 999058 - DNA, 15 bp, Homo sapiens
gggccatggtactca

SEQ ID NO: 999059 - DNA, 15 bp, Homo sapiens
ggccatggtactcac

SEQ ID NO: 999060 - DNA, 15 bp, Homo sapiens
gccatggtactcact

SEQ ID NO: 999061 - DNA, 15 bp, Homo sapiens
ccatggtactcactc

SEQ ID NO: 999062 - DNA, 15 bp, Homo sapiens
catggtactcactct

SEQ ID NO: 999063 - DNA, 15 bp, Homo sapiens
atggtactcactctt

SEQ ID NO: 999064 - DNA, 15 bp, Homo sapiens
tggtactcactcttg

SEQ ID NO: 999065 - DNA, 15 bp, Homo sapiens
ggtactcactcttgg

SEQ ID NO: 999066 - DNA, 15 bp, Homo sapiens
gtactcactcttggt

SEQ ID NO: 999067 - DNA, 15 bp, Homo sapiens
tactcactcttggtt

SEQ ID NO: 999068 - DNA, 15 bp, Homo sapiens
actcactcttggttc

SEQ ID NO: 999069 - DNA, 15 bp, Homo sapiens
ctcactcttggttcc

SEQ ID NO: 999070 - DNA, 15 bp, Homo sapiens
tcactcttggttcca

SEQ ID NO: 999071 - DNA, 15 bp, Homo sapiens
cactcttggttccat

SEQ ID NO: 999072 - DNA, 15 bp, Homo sapiens
actcttggttccatg

SEQ ID NO: 999073 - DNA, 15 bp, Homo sapiens
ctcttggttccatgt

SEQ ID NO: 999074 - DNA, 15 bp, Homo sapiens
tcttggttccatgtt

SEQ ID NO: 999075 - DNA, 15 bp, Homo sapiens
cttggttccatgttt

SEQ ID NO: 999076 - DNA, 15 bp, Homo sapiens
ttggttccatgtttg

SEQ ID NO: 999077 - DNA, 15 bp, Homo sapiens
tggttccatgtttgt

SEQ ID NO: 999078 - DNA, 15 bp, Homo sapiens
ggttccatgtttgtt

SEQ ID NO: 999079 - DNA, 15 bp, Homo sapiens
gttccatgtttgttt

SEQ ID NO: 999080 - DNA, 15 bp, Homo sapiens
ttccatgtttgtttc

SEQ ID NO: 999081 - DNA, 15 bp, Homo sapiens
tccatgtttgtttcc

SEQ ID NO: 999082 - DNA, 15 bp, Homo sapiens
ccatgtttgtttcca

SEQ ID NO: 999083 - DNA, 15 bp, Homo sapiens
catgtttgtttccag

SEQ ID NO: 999084 - DNA, 15 bp, Homo sapiens
atgtttgtttccagc

SEQ ID NO: 999085 - DNA, 15 bp, Homo sapiens
tgtttgtttccagcc

SEQ ID NO: 999086 - DNA, 15 bp, Homo sapiens
gtttgtttccagcct

SEQ ID NO: 999087 - DNA, 15 bp, Homo sapiens
tttgtttccagcctt

SEQ ID NO: 999088 - DNA, 15 bp, Homo sapiens
ttgtttccagccttg

SEQ ID NO: 999089 - DNA, 15 bp, Homo sapiens
tgtttccagccttgg

SEQ ID NO: 999090 - DNA, 15 bp, Homo sapiens
gtttccagccttggg

SEQ ID NO: 999091 - DNA, 15 bp, Homo sapiens
tttccagccttgggc

SEQ ID NO: 999092 - DNA, 15 bp, Homo sapiens
ttccagccttgggca

SEQ ID NO: 999093 - DNA, 15 bp, Homo sapiens
tccagccttgggcat

SEQ ID NO: 999094 - DNA, 15 bp, Homo sapiens
ccagccttgggcata

SEQ ID NO: 999095 - DNA, 15 bp, Homo sapiens
cagccttgggcatag

SEQ ID NO: 999096 - DNA, 15 bp, Homo sapiens
agccttgggcatagt

SEQ ID NO: 999097 - DNA, 15 bp, Homo sapiens
gccttgggcatagtc

SEQ ID NO: 999098 - DNA, 15 bp, Homo sapiens
ccttgggcatagtca

SEQ ID NO: 999099 - DNA, 15 bp, Homo sapiens
cttgggcatagtcag

SEQ ID NO: 999100 - DNA, 15 bp, Homo sapiens
ttgggcatagtcagg

SEQ ID NO: 999101 - DNA, 15 bp, Homo sapiens
tgggcatagtcaggg

SEQ ID NO: 999102 - DNA, 15 bp, Homo sapiens
gggcatagtcaggga

SEQ ID NO: 999103 - DNA, 15 bp, Homo sapiens
ggcatagtcagggac

SEQ ID NO: 999104 - DNA, 15 bp, Homo sapiens
gcatagtcagggact

SEQ ID NO: 999105 - DNA, 15 bp, Homo sapiens
catagtcagggactc

SEQ ID NO: 999106 - DNA, 15 bp, Homo sapiens
atagtcagggactct

SEQ ID NO: 999107 - DNA, 15 bp, Homo sapiens
tagtcagggactctc

SEQ ID NO: 999108 - DNA, 15 bp, Homo sapiens
agtcagggactctcg

SEQ ID NO: 999109 - DNA, 15 bp, Homo sapiens
gtcagggactctcgt

SEQ ID NO: 999110 - DNA, 15 bp, Homo sapiens
tcagggactctcgtg

SEQ ID NO: 999111 - DNA, 15 bp, Homo sapiens
cagggactctcgtgg

SEQ ID NO: 999112 - DNA, 15 bp, Homo sapiens
agggactctcgtggg

SEQ ID NO: 999113 - DNA, 15 bp, Homo sapiens
gggactctcgtggga

SEQ ID NO: 999114 - DNA, 15 bp, Homo sapiens
ggactctcgtgggac

SEQ ID NO: 999115 - DNA, 15 bp, Homo sapiens
gactctcgtgggacc

SEQ ID NO: 999116 - DNA, 15 bp, Homo sapiens
actctcgtgggaccc

SEQ ID NO: 999117 - DNA, 15 bp, Homo sapiens
ctctcgtgggacccc

SEQ ID NO: 999118 - DNA, 15 bp, Homo sapiens
tctcgtgggaccccc

SEQ ID NO: 999119 - DNA, 15 bp, Homo sapiens
ctcgtgggacccccc

SEQ ID NO: 999120 - DNA, 15 bp, Homo sapiens
tcgtgggaccccccg

SEQ ID NO: 999121 - DNA, 15 bp, Homo sapiens
cgtgggaccccccga

SEQ ID NO: 999122 - DNA, 15 bp, Homo sapiens
gtgggaccccccgag

SEQ ID NO: 999123 - DNA, 15 bp, Homo sapiens
tgggaccccccgagt

SEQ ID NO: 999124 - DNA, 15 bp, Homo sapiens
gggaccccccgagta

SEQ ID NO: 999125 - DNA, 15 bp, Homo sapiens
ggaccccccgagtag

SEQ ID NO: 999126 - DNA, 15 bp, Homo sapiens
gaccccccgagtaga

SEQ ID NO: 999127 - DNA, 15 bp, Homo sapiens
accccccgagtagaa

SEQ ID NO: 999128 - DNA, 15 bp, Homo sapiens
ccccccgagtagaaa

SEQ ID NO: 999129 - DNA, 15 bp, Homo sapiens
cccccgagtagaaac

SEQ ID NO: 999130 - DNA, 15 bp, Homo sapiens
ccccgagtagaaaca

SEQ ID NO: 999131 - DNA, 15 bp, Homo sapiens
cccgagtagaaacac

SEQ ID NO: 999132 - DNA, 15 bp, Homo sapiens
ccgagtagaaacaca

SEQ ID NO: 999133 - DNA, 15 bp, Homo sapiens
cgagtagaaacacag

SEQ ID NO: 999134 - DNA, 15 bp, Homo sapiens
gagtagaaacacaga

SEQ ID NO: 999135 - DNA, 15 bp, Homo sapiens
agtagaaacacagat

SEQ ID NO: 999136 - DNA, 15 bp, Homo sapiens
gtagaaacacagatg

SEQ ID NO: 999137 - DNA, 15 bp, Homo sapiens
tagaaacacagatgt

SEQ ID NO: 999138 - DNA, 15 bp, Homo sapiens
agaaacacagatgtg

SEQ ID NO: 999139 - DNA, 15 bp, Homo sapiens
gaaacacagatgtgt

SEQ ID NO: 999140 - DNA, 15 bp, Homo sapiens
aaacacagatgtgtc

SEQ ID NO: 999141 - DNA, 15 bp, Homo sapiens
aacacagatgtgtct

SEQ ID NO: 999142 - DNA, 15 bp, Homo sapiens
acacagatgtgtctc

SEQ ID NO: 999143 - DNA, 15 bp, Homo sapiens
cacagatgtgtctcc

SEQ ID NO: 999144 - DNA, 15 bp, Homo sapiens
acagatgtgtctccc

SEQ ID NO: 999145 - DNA, 15 bp, Homo sapiens
cagatgtgtctccct

SEQ ID NO: 999146 - DNA, 15 bp, Homo sapiens
agatgtgtctccctg

SEQ ID NO: 999147 - DNA, 15 bp, Homo sapiens
gatgtgtctccctgg

SEQ ID NO: 999148 - DNA, 15 bp, Homo sapiens
atgtgtctccctggg

SEQ ID NO: 999149 - DNA, 15 bp, Homo sapiens
tgtgtctccctgggt

SEQ ID NO: 999150 - DNA, 15 bp, Homo sapiens
gtgtctccctgggtc

SEQ ID NO: 999151 - DNA, 15 bp, Homo sapiens
tgtctccctgggtcc

SEQ ID NO: 999152 - DNA, 15 bp, Homo sapiens
gtctccctgggtccc

SEQ ID NO: 999153 - DNA, 15 bp, Homo sapiens
tctccctgggtccct

SEQ ID NO: 999154 - DNA, 15 bp, Homo sapiens
ctccctgggtccctg

SEQ ID NO: 999155 - DNA, 15 bp, Homo sapiens
tccctgggtccctgc

SEQ ID NO: 999156 - DNA, 15 bp, Homo sapiens
ccctgggtccctgcc

SEQ ID NO: 999157 - DNA, 15 bp, Homo sapiens
cctgggtccctgcca

SEQ ID NO: 999158 - DNA, 15 bp, Homo sapiens
ctgggtccctgccag

SEQ ID NO: 999159 - DNA, 15 bp, Homo sapiens
tgggtccctgccagg

SEQ ID NO: 999160 - DNA, 15 bp, Homo sapiens
gggtccctgccaggt

SEQ ID NO: 999161 - DNA, 15 bp, Homo sapiens
ggtccctgccaggtc

SEQ ID NO: 999162 - DNA, 15 bp, Homo sapiens
gtccctgccaggtcc

SEQ ID NO: 999163 - DNA, 15 bp, Homo sapiens
tccctgccaggtccc

SEQ ID NO: 999164 - DNA, 15 bp, Homo sapiens
ccctgccaggtcccc

SEQ ID NO: 999165 - DNA, 15 bp, Homo sapiens
cctgccaggtcccct

SEQ ID NO: 999166 - DNA, 15 bp, Homo sapiens
ctgccaggtcccctc

SEQ ID NO: 999167 - DNA, 15 bp, Homo sapiens
tgccaggtcccctct

SEQ ID NO: 999168 - DNA, 15 bp, Homo sapiens
gccaggtcccctctc

SEQ ID NO: 999169 - DNA, 15 bp, Homo sapiens
ccaggtcccctctca

SEQ ID NO: 999170 - DNA, 15 bp, Homo sapiens
caggtcccctctcag

SEQ ID NO: 999171 - DNA, 15 bp, Homo sapiens
aggtcccctctcagc

SEQ ID NO: 999172 - DNA, 15 bp, Homo sapiens
ggtcccctctcagcc

SEQ ID NO: 999173 - DNA, 15 bp, Homo sapiens
gtcccctctcagcct

SEQ ID NO: 999174 - DNA, 15 bp, Homo sapiens
tcccctctcagcctg

SEQ ID NO: 999175 - DNA, 15 bp, Homo sapiens
cccctctcagcctgg

SEQ ID NO: 999176 - DNA, 15 bp, Homo sapiens
ccctctcagcctgga

SEQ ID NO: 999177 - DNA, 15 bp, Homo sapiens
cctctcagcctggat

SEQ ID NO: 999178 - DNA, 15 bp, Homo sapiens
ctctcagcctggatg

SEQ ID NO: 999179 - DNA, 15 bp, Homo sapiens
tctcagcctggatgg

SEQ ID NO: 999180 - DNA, 15 bp, Homo sapiens
ctcagcctggatggc

SEQ ID NO: 999181 - DNA, 15 bp, Homo sapiens
tcagcctggatggct

SEQ ID NO: 999182 - DNA, 15 bp, Homo sapiens
cagcctggatggctt

SEQ ID NO: 999183 - DNA, 15 bp, Homo sapiens
agcctggatggcttc

SEQ ID NO: 999184 - DNA, 15 bp, Homo sapiens
gcctggatggcttcc

SEQ ID NO: 999185 - DNA, 15 bp, Homo sapiens
cctggatggcttccc

SEQ ID NO: 999186 - DNA, 15 bp, Homo sapiens
ctggatggcttccct

SEQ ID NO: 999187 - DNA, 15 bp, Homo sapiens
tggatggcttccctc

SEQ ID NO: 999188 - DNA, 15 bp, Homo sapiens
ggatggcttccctcc

SEQ ID NO: 999189 - DNA, 15 bp, Homo sapiens
gatggcttccctccc

SEQ ID NO: 999190 - DNA, 15 bp, Homo sapiens
atggcttccctccct

SEQ ID NO: 999191 - DNA, 15 bp, Homo sapiens
tggcttccctccctc

SEQ ID NO: 999192 - DNA, 15 bp, Homo sapiens
ggcttccctccctct

SEQ ID NO: 999193 - DNA, 15 bp, Homo sapiens
gcttccctccctctc

SEQ ID NO: 999194 - DNA, 15 bp, Homo sapiens
cttccctccctctct

SEQ ID NO: 999195 - DNA, 15 bp, Homo sapiens
ttccctccctctctt

SEQ ID NO: 999196 - DNA, 15 bp, Homo sapiens
tccctccctctcttt

SEQ ID NO: 999197 - DNA, 15 bp, Homo sapiens
ccctccctctcttta

SEQ ID NO: 999198 - DNA, 15 bp, Homo sapiens
cctccctctctttac

SEQ ID NO: 999199 - DNA, 15 bp, Homo sapiens
ctccctctctttacc

SEQ ID NO: 999200 - DNA, 15 bp, Homo sapiens
tccctctctttacct

SEQ ID NO: 999201 - DNA, 15 bp, Homo sapiens
ccctctctttacctt

SEQ ID NO: 999202 - DNA, 15 bp, Homo sapiens
cctctctttacctta

SEQ ID NO: 999203 - DNA, 15 bp, Homo sapiens
ctctctttaccttat

SEQ ID NO: 999204 - DNA, 15 bp, Homo sapiens
tctctttaccttatt

SEQ ID NO: 999205 - DNA, 15 bp, Homo sapiens
ctctttaccttattt

SEQ ID NO: 999206 - DNA, 15 bp, Homo sapiens
tctttaccttattta

SEQ ID NO: 999207 - DNA, 15 bp, Homo sapiens
ctttaccttatttat

SEQ ID NO: 999208 - DNA, 15 bp, Homo sapiens
tttaccttatttata

SEQ ID NO: 999209 - DNA, 15 bp, Homo sapiens
ttaccttatttatag

SEQ ID NO: 999210 - DNA, 15 bp, Homo sapiens
taccttatttatagc

SEQ ID NO: 999211 - DNA, 15 bp, Homo sapiens
accttatttatagcc

SEQ ID NO: 999212 - DNA, 15 bp, Homo sapiens
ccttatttatagccc

SEQ ID NO: 999213 - DNA, 15 bp, Homo sapiens
cttatttatagccca

SEQ ID NO: 999214 - DNA, 15 bp, Homo sapiens
ttatttatagcccaa

SEQ ID NO: 999215 - DNA, 15 bp, Homo sapiens
tatttatagcccaag

SEQ ID NO: 999216 - DNA, 15 bp, Homo sapiens
atttatagcccaaga

SEQ ID NO: 999217 - DNA, 15 bp, Homo sapiens
tttatagcccaagat

SEQ ID NO: 999218 - DNA, 15 bp, Homo sapiens
ttatagcccaagatt

SEQ ID NO: 999219 - DNA, 15 bp, Homo sapiens
tatagcccaagattt

SEQ ID NO: 999220 - DNA, 15 bp, Homo sapiens
atagcccaagatttc

SEQ ID NO: 999221 - DNA, 15 bp, Homo sapiens
tagcccaagatttcc

SEQ ID NO: 999222 - DNA, 15 bp, Homo sapiens
agcccaagatttcct

SEQ ID NO: 999223 - DNA, 15 bp, Homo sapiens
gcccaagatttcctg

SEQ ID NO: 999224 - DNA, 15 bp, Homo sapiens
cccaagatttcctgg

SEQ ID NO: 999225 - DNA, 15 bp, Homo sapiens
ccaagatttcctggt

SEQ ID NO: 999226 - DNA, 15 bp, Homo sapiens
caagatttcctggtt

SEQ ID NO: 999227 - DNA, 15 bp, Homo sapiens
aagatttcctggttc

SEQ ID NO: 999228 - DNA, 15 bp, Homo sapiens
agatttcctggttca

SEQ ID NO: 999229 - DNA, 15 bp, Homo sapiens
gatttcctggttcaa

SEQ ID NO: 999230 - DNA, 15 bp, Homo sapiens
atttcctggttcaag

SEQ ID NO: 999231 - DNA, 15 bp, Homo sapiens
tttcctggttcaaga

SEQ ID NO: 999232 - DNA, 15 bp, Homo sapiens
ttcctggttcaagaa

SEQ ID NO: 999233 - DNA, 15 bp, Homo sapiens
tcctggttcaagaat

SEQ ID NO: 999234 - DNA, 15 bp, Homo sapiens
cctggttcaagaatg

SEQ ID NO: 999235 - DNA, 15 bp, Homo sapiens
ctggttcaagaatgg

SEQ ID NO: 999236 - DNA, 15 bp, Homo sapiens
tggttcaagaatggc

SEQ ID NO: 999237 - DNA, 15 bp, Homo sapiens
ggttcaagaatggcc

SEQ ID NO: 999238 - DNA, 15 bp, Homo sapiens
gttcaagaatggcct

SEQ ID NO: 999239 - DNA, 15 bp, Homo sapiens
ttcaagaatggcctg

SEQ ID NO: 999240 - DNA, 15 bp, Homo sapiens
tcaagaatggcctgg

SEQ ID NO: 999241 - DNA, 15 bp, Homo sapiens
caagaatggcctgga

SEQ ID NO: 999242 - DNA, 15 bp, Homo sapiens
aagaatggcctggac

SEQ ID NO: 999243 - DNA, 15 bp, Homo sapiens
agaatggcctggacc

SEQ ID NO: 999244 - DNA, 15 bp, Homo sapiens
gaatggcctggacct

SEQ ID NO: 999245 - DNA, 15 bp, Homo sapiens
aatggcctggacctg

SEQ ID NO: 999246 - DNA, 15 bp, Homo sapiens
atggcctggacctgg

SEQ ID NO: 999247 - DNA, 15 bp, Homo sapiens
tggcctggacctggg

SEQ ID NO: 999248 - DNA, 15 bp, Homo sapiens
ggcctggacctggga

SEQ ID NO: 999249 - DNA, 15 bp, Homo sapiens
gcctggacctgggag

SEQ ID NO: 999250 - DNA, 15 bp, Homo sapiens
cctggacctgggaga

SEQ ID NO: 999251 - DNA, 15 bp, Homo sapiens
ctggacctgggagaa

SEQ ID NO: 999252 - DNA, 15 bp, Homo sapiens
tggacctgggagaag

SEQ ID NO: 999253 - DNA, 15 bp, Homo sapiens
ggacctgggagaaga

SEQ ID NO: 999254 - DNA, 15 bp, Homo sapiens
gacctgggagaagac

SEQ ID NO: 999255 - DNA, 15 bp, Homo sapiens
acctgggagaagacg

SEQ ID NO: 999256 - DNA, 15 bp, Homo sapiens
cctgggagaagacgc

SEQ ID NO: 999257 - DNA, 15 bp, Homo sapiens
ctgggagaagacgcc

SEQ ID NO: 999258 - DNA, 15 bp, Homo sapiens
tgggagaagacgccc

SEQ ID NO: 999259 - DNA, 15 bp, Homo sapiens
gggagaagacgcccg

SEQ ID NO: 999260 - DNA, 15 bp, Homo sapiens
ggagaagacgcccgc

SEQ ID NO: 999261 - DNA, 15 bp, Homo sapiens
gagaagacgcccgct

SEQ ID NO: 999262 - DNA, 15 bp, Homo sapiens
agaagacgcccgctt

SEQ ID NO: 999263 - DNA, 15 bp, Homo sapiens
gaagacgcccgcttc

SEQ ID NO: 999264 - DNA, 15 bp, Homo sapiens
aagacgcccgcttcc

SEQ ID NO: 999265 - DNA, 15 bp, Homo sapiens
agacgcccgcttccg

SEQ ID NO: 999266 - DNA, 15 bp, Homo sapiens
gacgcccgcttccgc

SEQ ID NO: 999267 - DNA, 15 bp, Homo sapiens
acgcccgcttccgca

SEQ ID NO: 999268 - DNA, 15 bp, Homo sapiens
cgcccgcttccgcat

SEQ ID NO: 999269 - DNA, 15 bp, Homo sapiens
gcccgcttccgcatg

SEQ ID NO: 999270 - DNA, 15 bp, Homo sapiens
cccgcttccgcatgt

SEQ ID NO: 999271 - DNA, 15 bp, Homo sapiens
ccgcttccgcatgtt

SEQ ID NO: 999272 - DNA, 15 bp, Homo sapiens
cgcttccgcatgttc

SEQ ID NO: 999273 - DNA, 15 bp, Homo sapiens
gcttccgcatgttca

SEQ ID NO: 999274 - DNA, 15 bp, Homo sapiens
cttccgcatgttcag

SEQ ID NO: 999275 - DNA, 15 bp, Homo sapiens
ttccgcatgttcagc

SEQ ID NO: 999276 - DNA, 15 bp, Homo sapiens
tccgcatgttcagca

SEQ ID NO: 999277 - DNA, 15 bp, Homo sapiens
ccgcatgttcagcaa

SEQ ID NO: 999278 - DNA, 15 bp, Homo sapiens
cgcatgttcagcaag

SEQ ID NO: 999279 - DNA, 15 bp, Homo sapiens
gcatgttcagcaagc

SEQ ID NO: 999280 - DNA, 15 bp, Homo sapiens
catgttcagcaagca

SEQ ID NO: 999281 - DNA, 15 bp, Homo sapiens
atgttcagcaagcag

SEQ ID NO: 999282 - DNA, 15 bp, Homo sapiens
tgttcagcaagcagg

SEQ ID NO: 999283 - DNA, 15 bp, Homo sapiens
gttcagcaagcaggg

SEQ ID NO: 999284 - DNA, 15 bp, Homo sapiens
ttcagcaagcaggga

SEQ ID NO: 999285 - DNA, 15 bp, Homo sapiens
tcagcaagcagggag

SEQ ID NO: 999286 - DNA, 15 bp, Homo sapiens
cagcaagcagggagt

SEQ ID NO: 999287 - DNA, 15 bp, Homo sapiens
agcaagcagggagtg

SEQ ID NO: 999288 - DNA, 15 bp, Homo sapiens
gcaagcagggagtgt

SEQ ID NO: 999289 - DNA, 15 bp, Homo sapiens
caagcagggagtgtt

SEQ ID NO: 999290 - DNA, 15 bp, Homo sapiens
aagcagggagtgttg

SEQ ID NO: 999291 - DNA, 15 bp, Homo sapiens
agcagggagtgttga

SEQ ID NO: 999292 - DNA, 15 bp, Homo sapiens
gcagggagtgttgac

SEQ ID NO: 999293 - DNA, 15 bp, Homo sapiens
cagggagtgttgact

SEQ ID NO: 999294 - DNA, 15 bp, Homo sapiens
agggagtgttgactc

SEQ ID NO: 999295 - DNA, 15 bp, Homo sapiens
gggagtgttgactct

SEQ ID NO: 999296 - DNA, 15 bp, Homo sapiens
ggagtgttgactctg

SEQ ID NO: 999297 - DNA, 15 bp, Homo sapiens
gagtgttgactctgg

SEQ ID NO: 999298 - DNA, 15 bp, Homo sapiens
agtgttgactctgga

SEQ ID NO: 999299 - DNA, 15 bp, Homo sapiens
gtgttgactctggag

SEQ ID NO: 999300 - DNA, 15 bp, Homo sapiens
tgttgactctggaga

SEQ ID NO: 999301 - DNA, 15 bp, Homo sapiens
gttgactctggagat

SEQ ID NO: 999302 - DNA, 15 bp, Homo sapiens
ttgactctggagatt

SEQ ID NO: 999303 - DNA, 15 bp, Homo sapiens
tgactctggagatta

SEQ ID NO: 999304 - DNA, 15 bp, Homo sapiens
gactctggagattag

SEQ ID NO: 999305 - DNA, 15 bp, Homo sapiens
actctggagattaga

SEQ ID NO: 999306 - DNA, 15 bp, Homo sapiens
ctctggagattagaa

SEQ ID NO: 999307 - DNA, 15 bp, Homo sapiens
tctggagattagaaa

SEQ ID NO: 999308 - DNA, 15 bp, Homo sapiens
ctggagattagaaag

SEQ ID NO: 999309 - DNA, 15 bp, Homo sapiens
tggagattagaaagc

SEQ ID NO: 999310 - DNA, 15 bp, Homo sapiens
ggagattagaaagcc

SEQ ID NO: 999311 - DNA, 15 bp, Homo sapiens
gagattagaaagccc

SEQ ID NO: 999312 - DNA, 15 bp, Homo sapiens
agattagaaagccct

SEQ ID NO: 999313 - DNA, 15 bp, Homo sapiens
gattagaaagccctg

SEQ ID NO: 999314 - DNA, 15 bp, Homo sapiens
attagaaagccctgc

SEQ ID NO: 999315 - DNA, 15 bp, Homo sapiens
ttagaaagccctgcc

SEQ ID NO: 999316 - DNA, 15 bp, Homo sapiens
tagaaagccctgccc

SEQ ID NO: 999317 - DNA, 15 bp, Homo sapiens
agaaagccctgcccc

SEQ ID NO: 999318 - DNA, 15 bp, Homo sapiens
gaaagccctgcccct

SEQ ID NO: 999319 - DNA, 15 bp, Homo sapiens
aaagccctgcccctt

SEQ ID NO: 999320 - DNA, 15 bp, Homo sapiens
aagccctgccccttt

SEQ ID NO: 999321 - DNA, 15 bp, Homo sapiens
agccctgcccctttg

SEQ ID NO: 999322 - DNA, 15 bp, Homo sapiens
gccctgcccctttga

SEQ ID NO: 999323 - DNA, 15 bp, Homo sapiens
ccctgcccctttgac

SEQ ID NO: 999324 - DNA, 15 bp, Homo sapiens
cctgcccctttgacg

SEQ ID NO: 999325 - DNA, 15 bp, Homo sapiens
ctgcccctttgacgg

SEQ ID NO: 999326 - DNA, 15 bp, Homo sapiens
tgcccctttgacggg

SEQ ID NO: 999327 - DNA, 15 bp, Homo sapiens
gcccctttgacgggg

SEQ ID NO: 999328 - DNA, 15 bp, Homo sapiens
cccctttgacggggg

SEQ ID NO: 999329 - DNA, 15 bp, Homo sapiens
ccctttgacgggggc

SEQ ID NO: 999330 - DNA, 15 bp, Homo sapiens
cctttgacgggggca

SEQ ID NO: 999331 - DNA, 15 bp, Homo sapiens
ctttgacgggggcat

SEQ ID NO: 999332 - DNA, 15 bp, Homo sapiens
tttgacgggggcatc

SEQ ID NO: 999333 - DNA, 15 bp, Homo sapiens
ttgacgggggcatct

SEQ ID NO: 999334 - DNA, 15 bp, Homo sapiens
tgacgggggcatcta

SEQ ID NO: 999335 - DNA, 15 bp, Homo sapiens
gacgggggcatctat

SEQ ID NO: 999336 - DNA, 15 bp, Homo sapiens
acgggggcatctatg

SEQ ID NO: 999337 - DNA, 15 bp, Homo sapiens
cgggggcatctatgt

SEQ ID NO: 999338 - DNA, 15 bp, Homo sapiens
gggggcatctatgtc

SEQ ID NO: 999339 - DNA, 15 bp, Homo sapiens
ggggcatctatgtct

SEQ ID NO: 999340 - DNA, 15 bp, Homo sapiens
gggcatctatgtctg

SEQ ID NO: 999341 - DNA, 15 bp, Homo sapiens
ggcatctatgtctgc

SEQ ID NO: 999342 - DNA, 15 bp, Homo sapiens
gcatctatgtctgca

SEQ ID NO: 999343 - DNA, 15 bp, Homo sapiens
catctatgtctgcag

SEQ ID NO: 999344 - DNA, 15 bp, Homo sapiens
atctatgtctgcagg

SEQ ID NO: 999345 - DNA, 15 bp, Homo sapiens
tctatgtctgcaggg

SEQ ID NO: 999346 - DNA, 15 bp, Homo sapiens
ctatgtctgcagggc

SEQ ID NO: 999347 - DNA, 15 bp, Homo sapiens
tatgtctgcagggcc

SEQ ID NO: 999348 - DNA, 15 bp, Homo sapiens
atgtctgcagggcca

SEQ ID NO: 999349 - DNA, 15 bp, Homo sapiens
tgtctgcagggccac

SEQ ID NO: 999350 - DNA, 15 bp, Homo sapiens
gtctgcagggccacc

SEQ ID NO: 999351 - DNA, 15 bp, Homo sapiens
tctgcagggccacca

SEQ ID NO: 999352 - DNA, 15 bp, Homo sapiens
ggacattggtccttc

SEQ ID NO: 999353 - DNA, 15 bp, Homo sapiens
gacattggtccttct

SEQ ID NO: 999354 - DNA, 15 bp, Homo sapiens
acattggtccttctt

SEQ ID NO: 999355 - DNA, 15 bp, Homo sapiens
cattggtccttctta

SEQ ID NO: 999356 - DNA, 15 bp, Homo sapiens
attggtccttcttac

SEQ ID NO: 999357 - DNA, 15 bp, Homo sapiens
ttggtccttcttaca

SEQ ID NO: 999358 - DNA, 15 bp, Homo sapiens
tggtccttcttacag

SEQ ID NO: 999359 - DNA, 15 bp, Homo sapiens
ggtccttcttacaga

SEQ ID NO: 999360 - DNA, 15 bp, Homo sapiens
gtccttcttacagat

SEQ ID NO: 999361 - DNA, 15 bp, Homo sapiens
tccttcttacagatg

SEQ ID NO: 999362 - DNA, 15 bp, Homo sapiens
ccttcttacagatgg

SEQ ID NO: 999363 - DNA, 15 bp, Homo sapiens
cttcttacagatgga

SEQ ID NO: 999364 - DNA, 15 bp, Homo sapiens
ttcttacagatggaa

SEQ ID NO: 999365 - DNA, 15 bp, Homo sapiens
tcttacagatggaac

SEQ ID NO: 999366 - DNA, 15 bp, Homo sapiens
cttacagatggaacg

SEQ ID NO: 999367 - DNA, 15 bp, Homo sapiens
ttacagatggaacga

SEQ ID NO: 999368 - DNA, 15 bp, Homo sapiens
tacagatggaacgac

SEQ ID NO: 999369 - DNA, 15 bp, Homo sapiens
acagatggaacgaca

SEQ ID NO: 999370 - DNA, 15 bp, Homo sapiens
cagatggaacgacag

SEQ ID NO: 999371 - DNA, 15 bp, Homo sapiens
agatggaacgacagg

SEQ ID NO: 999372 - DNA, 15 bp, Homo sapiens
gatggaacgacaggg

SEQ ID NO: 999373 - DNA, 15 bp, Homo sapiens
atggaacgacaggga

SEQ ID NO: 999374 - DNA, 15 bp, Homo sapiens
tggaacgacagggag

SEQ ID NO: 999375 - DNA, 15 bp, Homo sapiens
ggaacgacagggagc

SEQ ID NO: 999376 - DNA, 15 bp, Homo sapiens
gaacgacagggagcc

SEQ ID NO: 999377 - DNA, 15 bp, Homo sapiens
aacgacagggagcct

SEQ ID NO: 999378 - DNA, 15 bp, Homo sapiens
acgacagggagcctc

SEQ ID NO: 999379 - DNA, 15 bp, Homo sapiens
cgacagggagcctcg

SEQ ID NO: 999380 - DNA, 15 bp, Homo sapiens
gacagggagcctcgt

SEQ ID NO: 999381 - DNA, 15 bp, Homo sapiens
acagggagcctcgtg

SEQ ID NO: 999382 - DNA, 15 bp, Homo sapiens
cagggagcctcgtgc

SEQ ID NO: 999383 - DNA, 15 bp, Homo sapiens
agggagcctcgtgct

SEQ ID NO: 999384 - DNA, 15 bp, Homo sapiens
gggagcctcgtgctg

SEQ ID NO: 999385 - DNA, 15 bp, Homo sapiens
ggagcctcgtgctgc

SEQ ID NO: 999386 - DNA, 15 bp, Homo sapiens
gagcctcgtgctgcc

SEQ ID NO: 999387 - DNA, 15 bp, Homo sapiens
agcctcgtgctgccg

SEQ ID NO: 999388 - DNA, 15 bp, Homo sapiens
gcctcgtgctgccgc

SEQ ID NO: 999389 - DNA, 15 bp, Homo sapiens
cctcgtgctgccgct

SEQ ID NO: 999390 - DNA, 15 bp, Homo sapiens
ctcgtgctgccgctc

SEQ ID NO: 999391 - DNA, 15 bp, Homo sapiens
tcgtgctgccgctcg

SEQ ID NO: 999392 - DNA, 15 bp, Homo sapiens
cgtgctgccgctcgc

SEQ ID NO: 999393 - DNA, 15 bp, Homo sapiens
gtgctgccgctcgca

SEQ ID NO: 999394 - DNA, 15 bp, Homo sapiens
tgctgccgctcgcac

SEQ ID NO: 999395 - DNA, 15 bp, Homo sapiens
gctgccgctcgcacc

SEQ ID NO: 999396 - DNA, 15 bp, Homo sapiens
ctgccgctcgcacct

SEQ ID NO: 999397 - DNA, 15 bp, Homo sapiens
tgccgctcgcaccta

SEQ ID NO: 999398 - DNA, 15 bp, Homo sapiens
gccgctcgcacctac

SEQ ID NO: 999399 - DNA, 15 bp, Homo sapiens
ccgctcgcacctacc

SEQ ID NO: 999400 - DNA, 15 bp, Homo sapiens
cgctcgcacctacct

SEQ ID NO: 999401 - DNA, 15 bp, Homo sapiens
gctcgcacctacctg

SEQ ID NO: 999402 - DNA, 15 bp, Homo sapiens
ctcgcacctacctga

SEQ ID NO: 999403 - DNA, 15 bp, Homo sapiens
tcgcacctacctgat

SEQ ID NO: 999404 - DNA, 15 bp, Homo sapiens
cgcacctacctgatt

SEQ ID NO: 999405 - DNA, 15 bp, Homo sapiens
gcacctacctgattg

SEQ ID NO: 999406 - DNA, 15 bp, Homo sapiens
cacctacctgattgt

SEQ ID NO: 999407 - DNA, 15 bp, Homo sapiens
acctacctgattgtg

SEQ ID NO: 999408 - DNA, 15 bp, Homo sapiens
cctacctgattgtgc

SEQ ID NO: 999409 - DNA, 15 bp, Homo sapiens
ctacctgattgtgca

SEQ ID NO: 999410 - DNA, 15 bp, Homo sapiens
tacctgattgtgcat

SEQ ID NO: 999411 - DNA, 15 bp, Homo sapiens
acctgattgtgcatg

SEQ ID NO: 999412 - DNA, 15 bp, Homo sapiens
cctgattgtgcatga

SEQ ID NO: 999413 - DNA, 15 bp, Homo sapiens
ctgattgtgcatgaa

SEQ ID NO: 999414 - DNA, 15 bp, Homo sapiens
tgattgtgcatgaat

SEQ ID NO: 999415 - DNA, 15 bp, Homo sapiens
gattgtgcatgaatt

SEQ ID NO: 999416 - DNA, 15 bp, Homo sapiens
attgtgcatgaattt

SEQ ID NO: 999417 - DNA, 15 bp, Homo sapiens
ttgtgcatgaatttg

SEQ ID NO: 999418 - DNA, 15 bp, Homo sapiens
tgtgcatgaatttga

SEQ ID NO: 999419 - DNA, 15 bp, Homo sapiens
gtgcatgaatttgag

SEQ ID NO: 999420 - DNA, 15 bp, Homo sapiens
tgcatgaatttgagg

SEQ ID NO: 999421 - DNA, 15 bp, Homo sapiens
gcatgaatttgaggt

SEQ ID NO: 999422 - DNA, 15 bp, Homo sapiens
catgaatttgaggtt

SEQ ID NO: 999423 - DNA, 15 bp, Homo sapiens
atgaatttgaggttg

SEQ ID NO: 999424 - DNA, 15 bp, Homo sapiens
tgaatttgaggttga

SEQ ID NO: 999425 - DNA, 15 bp, Homo sapiens
gaatttgaggttgat

SEQ ID NO: 999426 - DNA, 15 bp, Homo sapiens
aatttgaggttgatc

SEQ ID NO: 999427 - DNA, 15 bp, Homo sapiens
atttgaggttgatcc

SEQ ID NO: 999428 - DNA, 15 bp, Homo sapiens
tttgaggttgatccc

SEQ ID NO: 999429 - DNA, 15 bp, Homo sapiens
ttgaggttgatccct

SEQ ID NO: 999430 - DNA, 15 bp, Homo sapiens
tgaggttgatccctt

SEQ ID NO: 999431 - DNA, 15 bp, Homo sapiens
gaggttgatcccttc

SEQ ID NO: 999432 - DNA, 15 bp, Homo sapiens
aggttgatcccttcc

SEQ ID NO: 999433 - DNA, 15 bp, Homo sapiens
ggttgatcccttcca

SEQ ID NO: 999434 - DNA, 15 bp, Homo sapiens
gttgatcccttccag

SEQ ID NO: 999435 - DNA, 15 bp, Homo sapiens
ttgatcccttccagg

SEQ ID NO: 999436 - DNA, 15 bp, Homo sapiens
tgatcccttccaggg

SEQ ID NO: 999437 - DNA, 15 bp, Homo sapiens
gatcccttccagggt

SEQ ID NO: 999438 - DNA, 15 bp, Homo sapiens
atcccttccagggtc

SEQ ID NO: 999439 - DNA, 15 bp, Homo sapiens
tcccttccagggtca

SEQ ID NO: 999440 - DNA, 15 bp, Homo sapiens
cccttccagggtcac

SEQ ID NO: 999441 - DNA, 15 bp, Homo sapiens
ccttccagggtcacc

SEQ ID NO: 999442 - DNA, 15 bp, Homo sapiens
cttccagggtcacct

SEQ ID NO: 999443 - DNA, 15 bp, Homo sapiens
ttccagggtcacctg

SEQ ID NO: 999444 - DNA, 15 bp, Homo sapiens
tccagggtcacctgc

SEQ ID NO: 999445 - DNA, 15 bp, Homo sapiens
ccagggtcacctgca

SEQ ID NO: 999446 - DNA, 15 bp, Homo sapiens
cagggtcacctgcag

SEQ ID NO: 999447 - DNA, 15 bp, Homo sapiens
agggtcacctgcagc

SEQ ID NO: 999448 - DNA, 15 bp, Homo sapiens
gggtcacctgcagca

SEQ ID NO: 999449 - DNA, 15 bp, Homo sapiens
ggtcacctgcagcag

SEQ ID NO: 999450 - DNA, 15 bp, Homo sapiens
gtcacctgcagcagg

SEQ ID NO: 999451 - DNA, 15 bp, Homo sapiens
tcacctgcagcaggc

SEQ ID NO: 999452 - DNA, 15 bp, Homo sapiens
cacctgcagcaggcc

SEQ ID NO: 999453 - DNA, 15 bp, Homo sapiens
acctgcagcaggcca

SEQ ID NO: 999454 - DNA, 15 bp, Homo sapiens
cctgcagcaggccac

SEQ ID NO: 999455 - DNA, 15 bp, Homo sapiens
ctgcagcaggccacc

SEQ ID NO: 999456 - DNA, 15 bp, Homo sapiens
tgcagcaggccaccc

SEQ ID NO: 999457 - DNA, 15 bp, Homo sapiens
gcagcaggccaccct

SEQ ID NO: 999458 - DNA, 15 bp, Homo sapiens
cagcaggccaccctc

SEQ ID NO: 999459 - DNA, 15 bp, Homo sapiens
agcaggccaccctca

SEQ ID NO: 999460 - DNA, 15 bp, Homo sapiens
gcaggccaccctcac

SEQ ID NO: 999461 - DNA, 15 bp, Homo sapiens
caggccaccctcacc

SEQ ID NO: 999462 - DNA, 15 bp, Homo sapiens
aggccaccctcacca

SEQ ID NO: 999463 - DNA, 15 bp, Homo sapiens
ggccaccctcaccag

SEQ ID NO: 999464 - DNA, 15 bp, Homo sapiens
gccaccctcaccagt

SEQ ID NO: 999465 - DNA, 15 bp, Homo sapiens
ccaccctcaccagtc

SEQ ID NO: 999466 - DNA, 15 bp, Homo sapiens
caccctcaccagtct

SEQ ID NO: 999467 - DNA, 15 bp, Homo sapiens
accctcaccagtctt

SEQ ID NO: 999468 - DNA, 15 bp, Homo sapiens
ccctcaccagtcttc

SEQ ID NO: 999469 - DNA, 15 bp, Homo sapiens
cctcaccagtcttca

SEQ ID NO: 999470 - DNA, 15 bp, Homo sapiens
ctcaccagtcttcag

SEQ ID NO: 999471 - DNA, 15 bp, Homo sapiens
tcaccagtcttcagg

SEQ ID NO: 999472 - DNA, 15 bp, Homo sapiens
caccagtcttcaggt

SEQ ID NO: 999473 - DNA, 15 bp, Homo sapiens
accagtcttcaggtc

SEQ ID NO: 999474 - DNA, 15 bp, Homo sapiens
ccagtcttcaggtcc

SEQ ID NO: 999475 - DNA, 15 bp, Homo sapiens
cagtcttcaggtcct

SEQ ID NO: 999476 - DNA, 15 bp, Homo sapiens
agtcttcaggtcctg

SEQ ID NO: 999477 - DNA, 15 bp, Homo sapiens
gtcttcaggtcctgc

SEQ ID NO: 999478 - DNA, 15 bp, Homo sapiens
tcttcaggtcctgca

SEQ ID NO: 999479 - DNA, 15 bp, Homo sapiens
cttcaggtcctgcac

SEQ ID NO: 999480 - DNA, 15 bp, Homo sapiens
ttcaggtcctgcaca

SEQ ID NO: 999481 - DNA, 15 bp, Homo sapiens
tcaggtcctgcacag

SEQ ID NO: 999482 - DNA, 15 bp, Homo sapiens
caggtcctgcacagg

SEQ ID NO: 999483 - DNA, 15 bp, Homo sapiens
aggtcctgcacaggg

SEQ ID NO: 999484 - DNA, 15 bp, Homo sapiens
ggtcctgcacaggga

SEQ ID NO: 999485 - DNA, 15 bp, Homo sapiens
gtcctgcacagggaa

SEQ ID NO: 999486 - DNA, 15 bp, Homo sapiens
tcctgcacagggaac

SEQ ID NO: 999487 - DNA, 15 bp, Homo sapiens
cctgcacagggaact

SEQ ID NO: 999488 - DNA, 15 bp, Homo sapiens
ctgcacagggaactc

SEQ ID NO: 999489 - DNA, 15 bp, Homo sapiens
tgcacagggaactcg

SEQ ID NO: 999490 - DNA, 15 bp, Homo sapiens
gcacagggaactcgc

SEQ ID NO: 999491 - DNA, 15 bp, Homo sapiens
cacagggaactcgcc

SEQ ID NO: 999492 - DNA, 15 bp, Homo sapiens
acagggaactcgcca

SEQ ID NO: 999493 - DNA, 15 bp, Homo sapiens
cagggaactcgccac

SEQ ID NO: 999494 - DNA, 15 bp, Homo sapiens
agggaactcgccacc

SEQ ID NO: 999495 - DNA, 15 bp, Homo sapiens
gggaactcgccaccc

SEQ ID NO: 999496 - DNA, 15 bp, Homo sapiens
ggaactcgccaccca

SEQ ID NO: 999497 - DNA, 15 bp, Homo sapiens
gaactcgccacccaa

SEQ ID NO: 999498 - DNA, 15 bp, Homo sapiens
aactcgccacccaat

SEQ ID NO: 999499 - DNA, 15 bp, Homo sapiens
actcgccacccaatt

SEQ ID NO: 999500 - DNA, 15 bp, Homo sapiens
ctcgccacccaattc

SEQ ID NO: 999501 - DNA, 15 bp, Homo sapiens
tcgccacccaattca

SEQ ID NO: 999502 - DNA, 15 bp, Homo sapiens
cgccacccaattcag

SEQ ID NO: 999503 - DNA, 15 bp, Homo sapiens
gccacccaattcagg

SEQ ID NO: 999504 - DNA, 15 bp, Homo sapiens
ccacccaattcaggt

SEQ ID NO: 999505 - DNA, 15 bp, Homo sapiens
cacccaattcaggtc

SEQ ID NO: 999506 - DNA, 15 bp, Homo sapiens
acccaattcaggtcc

SEQ ID NO: 999507 - DNA, 15 bp, Homo sapiens
cccaattcaggtcct

SEQ ID NO: 999508 - DNA, 15 bp, Homo sapiens
ccaattcaggtcctg

SEQ ID NO: 999509 - DNA, 15 bp, Homo sapiens
caattcaggtcctgt

SEQ ID NO: 999510 - DNA, 15 bp, Homo sapiens
aattcaggtcctgtg

SEQ ID NO: 999511 - DNA, 15 bp, Homo sapiens
attcaggtcctgtgg

SEQ ID NO: 999512 - DNA, 15 bp, Homo sapiens
ttcaggtcctgtggt

SEQ ID NO: 999513 - DNA, 15 bp, Homo sapiens
tcaggtcctgtggtg

SEQ ID NO: 999514 - DNA, 15 bp, Homo sapiens
caggtcctgtggtga

SEQ ID NO: 999515 - DNA, 15 bp, Homo sapiens
aggtcctgtggtgag

SEQ ID NO: 999516 - DNA, 15 bp, Homo sapiens
ggtcctgtggtgagg

SEQ ID NO: 999517 - DNA, 15 bp, Homo sapiens
gtcctgtggtgaggg

SEQ ID NO: 999518 - DNA, 15 bp, Homo sapiens
tcctgtggtgaggga

SEQ ID NO: 999519 - DNA, 15 bp, Homo sapiens
cctgtggtgagggag

SEQ ID NO: 999520 - DNA, 15 bp, Homo sapiens
ctgtggtgagggagg

SEQ ID NO: 999521 - DNA, 15 bp, Homo sapiens
tgtggtgagggaggg

SEQ ID NO: 999522 - DNA, 15 bp, Homo sapiens
gtggtgagggagggg

SEQ ID NO: 999523 - DNA, 15 bp, Homo sapiens
tggtgagggaggggg

SEQ ID NO: 999524 - DNA, 15 bp, Homo sapiens
ggtgagggagggggc

SEQ ID NO: 999525 - DNA, 15 bp, Homo sapiens
gtgagggagggggct

SEQ ID NO: 999526 - DNA, 15 bp, Homo sapiens
tgagggagggggcta

SEQ ID NO: 999527 - DNA, 15 bp, Homo sapiens
gagggagggggctat

SEQ ID NO: 999528 - DNA, 15 bp, Homo sapiens
agggagggggctatc

SEQ ID NO: 999529 - DNA, 15 bp, Homo sapiens
gggagggggctatca

SEQ ID NO: 999530 - DNA, 15 bp, Homo sapiens
ggagggggctatcag

SEQ ID NO: 999531 - DNA, 15 bp, Homo sapiens
gagggggctatcagc

SEQ ID NO: 999532 - DNA, 15 bp, Homo sapiens
agggggctatcagct

SEQ ID NO: 999533 - DNA, 15 bp, Homo sapiens
gggggctatcagctc

SEQ ID NO: 999534 - DNA, 15 bp, Homo sapiens
ggggctatcagctca

SEQ ID NO: 999535 - DNA, 15 bp, Homo sapiens
gggctatcagctcac

SEQ ID NO: 999536 - DNA, 15 bp, Homo sapiens
ggctatcagctcact

SEQ ID NO: 999537 - DNA, 15 bp, Homo sapiens
gctatcagctcactg

SEQ ID NO: 999538 - DNA, 15 bp, Homo sapiens
ctatcagctcactgg

SEQ ID NO: 999539 - DNA, 15 bp, Homo sapiens
tatcagctcactggt

SEQ ID NO: 999540 - DNA, 15 bp, Homo sapiens
atcagctcactggtg

SEQ ID NO: 999541 - DNA, 15 bp, Homo sapiens
tcagctcactggtga

SEQ ID NO: 999542 - DNA, 15 bp, Homo sapiens
cagctcactggtgag

SEQ ID NO: 999543 - DNA, 15 bp, Homo sapiens
agctcactggtgagg

SEQ ID NO: 999544 - DNA, 15 bp, Homo sapiens
gctcactggtgaggt

SEQ ID NO: 999545 - DNA, 15 bp, Homo sapiens
ctcactggtgaggtg

SEQ ID NO: 999546 - DNA, 15 bp, Homo sapiens
tcactggtgaggtgg

SEQ ID NO: 999547 - DNA, 15 bp, Homo sapiens
cactggtgaggtggg

SEQ ID NO: 999548 - DNA, 15 bp, Homo sapiens
actggtgaggtgggg

SEQ ID NO: 999549 - DNA, 15 bp, Homo sapiens
ctggtgaggtgggga

SEQ ID NO: 999550 - DNA, 15 bp, Homo sapiens
tggtgaggtggggaa

SEQ ID NO: 999551 - DNA, 15 bp, Homo sapiens
ggtgaggtggggaat

SEQ ID NO: 999552 - DNA, 15 bp, Homo sapiens
gtgaggtggggaatc

SEQ ID NO: 999553 - DNA, 15 bp, Homo sapiens
tgaggtggggaatcc

SEQ ID NO: 999554 - DNA, 15 bp, Homo sapiens
gaggtggggaatccc

SEQ ID NO: 999555 - DNA, 15 bp, Homo sapiens
aggtggggaatccca

SEQ ID NO: 999556 - DNA, 15 bp, Homo sapiens
ggtggggaatcccac

SEQ ID NO: 999557 - DNA, 15 bp, Homo sapiens
gtggggaatcccacc

SEQ ID NO: 999558 - DNA, 15 bp, Homo sapiens
tggggaatcccaccc

SEQ ID NO: 999559 - DNA, 15 bp, Homo sapiens
ggggaatcccacccc

SEQ ID NO: 999560 - DNA, 15 bp, Homo sapiens
gggaatcccacccct

SEQ ID NO: 999561 - DNA, 15 bp, Homo sapiens
ggaatcccacccctg

SEQ ID NO: 999562 - DNA, 15 bp, Homo sapiens
gaatcccacccctga

SEQ ID NO: 999563 - DNA, 15 bp, Homo sapiens
aatcccacccctgac

SEQ ID NO: 999564 - DNA, 15 bp, Homo sapiens
atcccacccctgact

SEQ ID NO: 999565 - DNA, 15 bp, Homo sapiens
tcccacccctgactt

SEQ ID NO: 999566 - DNA, 15 bp, Homo sapiens
cccacccctgacttc

SEQ ID NO: 999567 - DNA, 15 bp, Homo sapiens
ccacccctgacttcc

SEQ ID NO: 999568 - DNA, 15 bp, Homo sapiens
cacccctgacttccc

SEQ ID NO: 999569 - DNA, 15 bp, Homo sapiens
acccctgacttccct

SEQ ID NO: 999570 - DNA, 15 bp, Homo sapiens
cccctgacttccctg

SEQ ID NO: 999571 - DNA, 15 bp, Homo sapiens
ccctgacttccctgc

SEQ ID NO: 999572 - DNA, 15 bp, Homo sapiens
cctgacttccctgcc

SEQ ID NO: 999573 - DNA, 15 bp, Homo sapiens
ctgacttccctgcca

SEQ ID NO: 999574 - DNA, 15 bp, Homo sapiens
tgacttccctgccag

SEQ ID NO: 999575 - DNA, 15 bp, Homo sapiens
gacttccctgccagg

SEQ ID NO: 999576 - DNA, 15 bp, Homo sapiens
acttccctgccaggc

SEQ ID NO: 999577 - DNA, 15 bp, Homo sapiens
cttccctgccaggcc

SEQ ID NO: 999578 - DNA, 15 bp, Homo sapiens
ttccctgccaggccc

SEQ ID NO: 999579 - DNA, 15 bp, Homo sapiens
tccctgccaggcccc

SEQ ID NO: 999580 - DNA, 15 bp, Homo sapiens
ccctgccaggcccct

SEQ ID NO: 999581 - DNA, 15 bp, Homo sapiens
cctgccaggcccctg

SEQ ID NO: 999582 - DNA, 15 bp, Homo sapiens
ctgccaggcccctga

SEQ ID NO: 999583 - DNA, 15 bp, Homo sapiens
tgccaggcccctgac

SEQ ID NO: 999584 - DNA, 15 bp, Homo sapiens
gccaggcccctgaca

SEQ ID NO: 999585 - DNA, 15 bp, Homo sapiens
ccaggcccctgacac

SEQ ID NO: 999586 - DNA, 15 bp, Homo sapiens
caggcccctgacact

SEQ ID NO: 999587 - DNA, 15 bp, Homo sapiens
aggcccctgacactc

SEQ ID NO: 999588 - DNA, 15 bp, Homo sapiens
ggcccctgacactca

SEQ ID NO: 999589 - DNA, 15 bp, Homo sapiens
gcccctgacactcag

SEQ ID NO: 999590 - DNA, 15 bp, Homo sapiens
cccctgacactcaga

SEQ ID NO: 999591 - DNA, 15 bp, Homo sapiens
ccctgacactcagaa

SEQ ID NO: 999592 - DNA, 15 bp, Homo sapiens
cctgacactcagaag

SEQ ID NO: 999593 - DNA, 15 bp, Homo sapiens
ctgacactcagaagg

SEQ ID NO: 999594 - DNA, 15 bp, Homo sapiens
tgacactcagaagga

SEQ ID NO: 999595 - DNA, 15 bp, Homo sapiens
gacactcagaaggac

SEQ ID NO: 999596 - DNA, 15 bp, Homo sapiens
acactcagaaggact

SEQ ID NO: 999597 - DNA, 15 bp, Homo sapiens
cactcagaaggactg

SEQ ID NO: 999598 - DNA, 15 bp, Homo sapiens
actcagaaggactgg

SEQ ID NO: 999599 - DNA, 15 bp, Homo sapiens
ctcagaaggactggt

SEQ ID NO: 999600 - DNA, 15 bp, Homo sapiens
tcagaaggactggta

SEQ ID NO: 999601 - DNA, 15 bp, Homo sapiens
cagaaggactggtag

SEQ ID NO: 999602 - DNA, 15 bp, Homo sapiens
agaaggactggtaga

SEQ ID NO: 999603 - DNA, 15 bp, Homo sapiens
gaaggactggtagaa

SEQ ID NO: 999604 - DNA, 15 bp, Homo sapiens
aaggactggtagaaa

SEQ ID NO: 999605 - DNA, 15 bp, Homo sapiens
aggactggtagaaac

SEQ ID NO: 999606 - DNA, 15 bp, Homo sapiens
ggactggtagaaaca

SEQ ID NO: 999607 - DNA, 15 bp, Homo sapiens
gactggtagaaacag

SEQ ID NO: 999608 - DNA, 15 bp, Homo sapiens
actggtagaaacagg

SEQ ID NO: 999609 - DNA, 15 bp, Homo sapiens
ctggtagaaacaggg

SEQ ID NO: 999610 - DNA, 15 bp, Homo sapiens
tggtagaaacaggga

SEQ ID NO: 999611 - DNA, 15 bp, Homo sapiens
ggtagaaacagggaa

SEQ ID NO: 999612 - DNA, 15 bp, Homo sapiens
gtagaaacagggaag

SEQ ID NO: 999613 - DNA, 15 bp, Homo sapiens
tagaaacagggaaga

SEQ ID NO: 999614 - DNA, 15 bp, Homo sapiens
agaaacagggaagac

SEQ ID NO: 999615 - DNA, 15 bp, Homo sapiens
gaaacagggaagaca

SEQ ID NO: 999616 - DNA, 15 bp, Homo sapiens
aaacagggaagacac

SEQ ID NO: 999617 - DNA, 15 bp, Homo sapiens
aacagggaagacact

SEQ ID NO: 999618 - DNA, 15 bp, Homo sapiens
acagggaagacactc

SEQ ID NO: 999619 - DNA, 15 bp, Homo sapiens
cagggaagacactct

SEQ ID NO: 999620 - DNA, 15 bp, Homo sapiens
agggaagacactctc

SEQ ID NO: 999621 - DNA, 15 bp, Homo sapiens
gggaagacactctca

SEQ ID NO: 999622 - DNA, 15 bp, Homo sapiens
ggaagacactctcag

SEQ ID NO: 999623 - DNA, 15 bp, Homo sapiens
gaagacactctcagg

SEQ ID NO: 999624 - DNA, 15 bp, Homo sapiens
aagacactctcagga

SEQ ID NO: 999625 - DNA, 15 bp, Homo sapiens
agacactctcaggaa

SEQ ID NO: 999626 - DNA, 15 bp, Homo sapiens
gacactctcaggaaa

SEQ ID NO: 999627 - DNA, 15 bp, Homo sapiens
acactctcaggaaaa

SEQ ID NO: 999628 - DNA, 15 bp, Homo sapiens
cactctcaggaaaaa

SEQ ID NO: 999629 - DNA, 15 bp, Homo sapiens
actctcaggaaaaac

SEQ ID NO: 999630 - DNA, 15 bp, Homo sapiens
ctctcaggaaaaact

SEQ ID NO: 999631 - DNA, 15 bp, Homo sapiens
tctcaggaaaaactc

SEQ ID NO: 999632 - DNA, 15 bp, Homo sapiens
ctcaggaaaaactct

SEQ ID NO: 999633 - DNA, 15 bp, Homo sapiens
tcaggaaaaactctc

SEQ ID NO: 999634 - DNA, 15 bp, Homo sapiens
caggaaaaactctcc

SEQ ID NO: 999635 - DNA, 15 bp, Homo sapiens
aggaaaaactctcct

SEQ ID NO: 999636 - DNA, 15 bp, Homo sapiens
ggaaaaactctcctc

SEQ ID NO: 999637 - DNA, 15 bp, Homo sapiens
gaaaaactctcctca

SEQ ID NO: 999638 - DNA, 15 bp, Homo sapiens
aaaaactctcctcac

SEQ ID NO: 999639 - DNA, 15 bp, Homo sapiens
aaaactctcctcacc

SEQ ID NO: 999640 - DNA, 15 bp, Homo sapiens
aaactctcctcaccg

SEQ ID NO: 999641 - DNA, 15 bp, Homo sapiens
aactctcctcaccgg

SEQ ID NO: 999642 - DNA, 15 bp, Homo sapiens
actctcctcaccggg

SEQ ID NO: 999643 - DNA, 15 bp, Homo sapiens
ctctcctcaccgggt

SEQ ID NO: 999644 - DNA, 15 bp, Homo sapiens
tctcctcaccgggtt

SEQ ID NO: 999645 - DNA, 15 bp, Homo sapiens
ctcctcaccgggttt

SEQ ID NO: 999646 - DNA, 15 bp, Homo sapiens
tcctcaccgggtttg

SEQ ID NO: 999647 - DNA, 15 bp, Homo sapiens
cctcaccgggtttga

SEQ ID NO: 999648 - DNA, 15 bp, Homo sapiens
ctcaccgggtttgat

SEQ ID NO: 999649 - DNA, 15 bp, Homo sapiens
tcaccgggtttgatg

SEQ ID NO: 999650 - DNA, 15 bp, Homo sapiens
caccgggtttgatgc

SEQ ID NO: 999651 - DNA, 15 bp, Homo sapiens
accgggtttgatgct

SEQ ID NO: 999652 - DNA, 15 bp, Homo sapiens
ccgggtttgatgctt

SEQ ID NO: 999653 - DNA, 15 bp, Homo sapiens
cgggtttgatgcttt

SEQ ID NO: 999654 - DNA, 15 bp, Homo sapiens
gggtttgatgctttg

SEQ ID NO: 999655 - DNA, 15 bp, Homo sapiens
ggtttgatgctttgc

SEQ ID NO: 999656 - DNA, 15 bp, Homo sapiens
gtttgatgctttgct

SEQ ID NO: 999657 - DNA, 15 bp, Homo sapiens
tttgatgctttgctg

SEQ ID NO: 999658 - DNA, 15 bp, Homo sapiens
ttgatgctttgctgt

SEQ ID NO: 999659 - DNA, 15 bp, Homo sapiens
tgatgctttgctgtc

SEQ ID NO: 999660 - DNA, 15 bp, Homo sapiens
gatgctttgctgtcg

SEQ ID NO: 999661 - DNA, 15 bp, Homo sapiens
atgctttgctgtcgg

SEQ ID NO: 999662 - DNA, 15 bp, Homo sapiens
tgctttgctgtcggg

SEQ ID NO: 999663 - DNA, 15 bp, Homo sapiens
gctttgctgtcgggc

SEQ ID NO: 999664 - DNA, 15 bp, Homo sapiens
ctttgctgtcgggcg

SEQ ID NO: 999665 - DNA, 15 bp, Homo sapiens
tttgctgtcgggcgg

SEQ ID NO: 999666 - DNA, 15 bp, Homo sapiens
ttgctgtcgggcggc

SEQ ID NO: 999667 - DNA, 15 bp, Homo sapiens
tgctgtcgggcggca

SEQ ID NO: 999668 - DNA, 15 bp, Homo sapiens
gctgtcgggcggcag

SEQ ID NO: 999669 - DNA, 15 bp, Homo sapiens
ctgtcgggcggcagc

SEQ ID NO: 999670 - DNA, 15 bp, Homo sapiens
tgtcgggcggcagcg

SEQ ID NO: 999671 - DNA, 15 bp, Homo sapiens
gtcgggcggcagcgc

SEQ ID NO: 999672 - DNA, 15 bp, Homo sapiens
tcgggcggcagcgcg

SEQ ID NO: 999673 - DNA, 15 bp, Homo sapiens
cgggcggcagcgcgc

SEQ ID NO: 999674 - DNA, 15 bp, Homo sapiens
gggcggcagcgcgct

SEQ ID NO: 999675 - DNA, 15 bp, Homo sapiens
ggcggcagcgcgctc

SEQ ID NO: 999676 - DNA, 15 bp, Homo sapiens
gcggcagcgcgctcc

SEQ ID NO: 999677 - DNA, 15 bp, Homo sapiens
cggcagcgcgctcca

SEQ ID NO: 999678 - DNA, 15 bp, Homo sapiens
ggcagcgcgctccat

SEQ ID NO: 999679 - DNA, 15 bp, Homo sapiens
gcagcgcgctccatg

SEQ ID NO: 999680 - DNA, 15 bp, Homo sapiens
cagcgcgctccatgc

SEQ ID NO: 999681 - DNA, 15 bp, Homo sapiens
agcgcgctccatgct

SEQ ID NO: 999682 - DNA, 15 bp, Homo sapiens
gcgcgctccatgctg

SEQ ID NO: 999683 - DNA, 15 bp, Homo sapiens
cgcgctccatgctgt

SEQ ID NO: 999684 - DNA, 15 bp, Homo sapiens
gcgctccatgctgtc

SEQ ID NO: 999685 - DNA, 15 bp, Homo sapiens
cgctccatgctgtcc

SEQ ID NO: 999686 - DNA, 15 bp, Homo sapiens
gctccatgctgtcct

SEQ ID NO: 999687 - DNA, 15 bp, Homo sapiens
ctccatgctgtcctt

SEQ ID NO: 999688 - DNA, 15 bp, Homo sapiens
tccatgctgtccttc

SEQ ID NO: 999689 - DNA, 15 bp, Homo sapiens
ccatgctgtccttca

SEQ ID NO: 999690 - DNA, 15 bp, Homo sapiens
catgctgtccttcac

SEQ ID NO: 999691 - DNA, 15 bp, Homo sapiens
atgctgtccttcaca

SEQ ID NO: 999692 - DNA, 15 bp, Homo sapiens
tgctgtccttcacac

SEQ ID NO: 999693 - DNA, 15 bp, Homo sapiens
gctgtccttcacaca

SEQ ID NO: 999694 - DNA, 15 bp, Homo sapiens
ctgtccttcacacag

SEQ ID NO: 999695 - DNA, 15 bp, Homo sapiens
tgtccttcacacagt

SEQ ID NO: 999696 - DNA, 15 bp, Homo sapiens
gtccttcacacagta

SEQ ID NO: 999697 - DNA, 15 bp, Homo sapiens
tccttcacacagtag

SEQ ID NO: 999698 - DNA, 15 bp, Homo sapiens
ccttcacacagtagt

SEQ ID NO: 999699 - DNA, 15 bp, Homo sapiens
cttcacacagtagta

SEQ ID NO: 999700 - DNA, 15 bp, Homo sapiens
ttcacacagtagtac

SEQ ID NO: 999701 - DNA, 15 bp, Homo sapiens
tcacacagtagtaca

SEQ ID NO: 999702 - DNA, 15 bp, Homo sapiens
cacacagtagtacag

SEQ ID NO: 999703 - DNA, 15 bp, Homo sapiens
acacagtagtacagc

SEQ ID NO: 999704 - DNA, 15 bp, Homo sapiens
cacagtagtacagct

SEQ ID NO: 999705 - DNA, 15 bp, Homo sapiens
acagtagtacagctc

SEQ ID NO: 999706 - DNA, 15 bp, Homo sapiens
cagtagtacagctcc

SEQ ID NO: 999707 - DNA, 15 bp, Homo sapiens
agtagtacagctccc

SEQ ID NO: 999708 - DNA, 15 bp, Homo sapiens
gtagtacagctcccg

SEQ ID NO: 999709 - DNA, 15 bp, Homo sapiens
tagtacagctcccga

SEQ ID NO: 999710 - DNA, 15 bp, Homo sapiens
agtacagctcccgac

SEQ ID NO: 999711 - DNA, 15 bp, Homo sapiens
gtacagctcccgaca

SEQ ID NO: 999712 - DNA, 15 bp, Homo sapiens
tacagctcccgacac

SEQ ID NO: 999713 - DNA, 15 bp, Homo sapiens
acagctcccgacact

SEQ ID NO: 999714 - DNA, 15 bp, Homo sapiens
cagctcccgacactg

SEQ ID NO: 999715 - DNA, 15 bp, Homo sapiens
agctcccgacactgt

SEQ ID NO: 999716 - DNA, 15 bp, Homo sapiens
gctcccgacactgtg

SEQ ID NO: 999717 - DNA, 15 bp, Homo sapiens
ctcccgacactgtgg

SEQ ID NO: 999718 - DNA, 15 bp, Homo sapiens
tcccgacactgtggc

SEQ ID NO: 999719 - DNA, 15 bp, Homo sapiens
cccgacactgtggca

SEQ ID NO: 999720 - DNA, 15 bp, Homo sapiens
ccgacactgtggcac

SEQ ID NO: 999721 - DNA, 15 bp, Homo sapiens
cgacactgtggcaca

SEQ ID NO: 999722 - DNA, 15 bp, Homo sapiens
gacactgtggcacag

SEQ ID NO: 999723 - DNA, 15 bp, Homo sapiens
acactgtggcacagg

SEQ ID NO: 999724 - DNA, 15 bp, Homo sapiens
cactgtggcacaggg

SEQ ID NO: 999725 - DNA, 15 bp, Homo sapiens
actgtggcacagggg

SEQ ID NO: 999726 - DNA, 15 bp, Homo sapiens
ctgtggcacaggggg

SEQ ID NO: 999727 - DNA, 15 bp, Homo sapiens
tgtggcacaggggga

SEQ ID NO: 999728 - DNA, 15 bp, Homo sapiens
gtggcacagggggag

SEQ ID NO: 999729 - DNA, 15 bp, Homo sapiens
tggcacagggggaga

SEQ ID NO: 999730 - DNA, 15 bp, Homo sapiens
ggcacagggggagag

SEQ ID NO: 999731 - DNA, 15 bp, Homo sapiens
gcacagggggagagt

SEQ ID NO: 999732 - DNA, 15 bp, Homo sapiens
cacagggggagagtg

SEQ ID NO: 999733 - DNA, 15 bp, Homo sapiens
acagggggagagtgg

SEQ ID NO: 999734 - DNA, 15 bp, Homo sapiens
cagggggagagtggt

SEQ ID NO: 999735 - DNA, 15 bp, Homo sapiens
agggggagagtggtc

SEQ ID NO: 999736 - DNA, 15 bp, Homo sapiens
gggggagagtggtcc

SEQ ID NO: 999737 - DNA, 15 bp, Homo sapiens
ggggagagtggtccc

SEQ ID NO: 999738 - DNA, 15 bp, Homo sapiens
gggagagtggtccca

SEQ ID NO: 999739 - DNA, 15 bp, Homo sapiens
ggagagtggtcccat

SEQ ID NO: 999740 - DNA, 15 bp, Homo sapiens
gagagtggtcccatc

SEQ ID NO: 999741 - DNA, 15 bp, Homo sapiens
agagtggtcccatca

SEQ ID NO: 999742 - DNA, 15 bp, Homo sapiens
gagtggtcccatcat

SEQ ID NO: 999743 - DNA, 15 bp, Homo sapiens
agtggtcccatcatg

SEQ ID NO: 999744 - DNA, 15 bp, Homo sapiens
gtggtcccatcatga

SEQ ID NO: 999745 - DNA, 15 bp, Homo sapiens
tggtcccatcatgag

SEQ ID NO: 999746 - DNA, 15 bp, Homo sapiens
ggtcccatcatgagg

SEQ ID NO: 999747 - DNA, 15 bp, Homo sapiens
gtcccatcatgaggg

SEQ ID NO: 999748 - DNA, 15 bp, Homo sapiens
tcccatcatgagggc

SEQ ID NO: 999749 - DNA, 15 bp, Homo sapiens
cccatcatgagggct

SEQ ID NO: 999750 - DNA, 15 bp, Homo sapiens
ccatcatgagggctg

SEQ ID NO: 999751 - DNA, 15 bp, Homo sapiens
catcatgagggctgt

SEQ ID NO: 999752 - DNA, 15 bp, Homo sapiens
atcatgagggctgtc

SEQ ID NO: 999753 - DNA, 15 bp, Homo sapiens
tcatgagggctgtcc

SEQ ID NO: 999754 - DNA, 15 bp, Homo sapiens
catgagggctgtcca

SEQ ID NO: 999755 - DNA, 15 bp, Homo sapiens
atgagggctgtccag

SEQ ID NO: 999756 - DNA, 15 bp, Homo sapiens
tgagggctgtccagg

SEQ ID NO: 999757 - DNA, 15 bp, Homo sapiens
gagggctgtccaggg

SEQ ID NO: 999758 - DNA, 15 bp, Homo sapiens
agggctgtccagggt

SEQ ID NO: 999759 - DNA, 15 bp, Homo sapiens
gggctgtccagggtt

SEQ ID NO: 999760 - DNA, 15 bp, Homo sapiens
ggctgtccagggttc

SEQ ID NO: 999761 - DNA, 15 bp, Homo sapiens
gctgtccagggttcc

SEQ ID NO: 999762 - DNA, 15 bp, Homo sapiens
ctgtccagggttccc

SEQ ID NO: 999763 - DNA, 15 bp, Homo sapiens
tgtccagggttcccc

SEQ ID NO: 999764 - DNA, 15 bp, Homo sapiens
gtccagggttcccca

SEQ ID NO: 999765 - DNA, 15 bp, Homo sapiens
tccagggttccccac

SEQ ID NO: 999766 - DNA, 15 bp, Homo sapiens
ccagggttccccacc

SEQ ID NO: 999767 - DNA, 15 bp, Homo sapiens
cagggttccccaccc

SEQ ID NO: 999768 - DNA, 15 bp, Homo sapiens
agggttccccaccca

SEQ ID NO: 999769 - DNA, 15 bp, Homo sapiens
gggttccccacccac

SEQ ID NO: 999770 - DNA, 15 bp, Homo sapiens
ggttccccacccact

SEQ ID NO: 999771 - DNA, 15 bp, Homo sapiens
gttccccacccactg

SEQ ID NO: 999772 - DNA, 15 bp, Homo sapiens
ttccccacccactgc

SEQ ID NO: 999773 - DNA, 15 bp, Homo sapiens
tccccacccactgct

SEQ ID NO: 999774 - DNA, 15 bp, Homo sapiens
ccccacccactgctc

SEQ ID NO: 999775 - DNA, 15 bp, Homo sapiens
cccacccactgctct

SEQ ID NO: 999776 - DNA, 15 bp, Homo sapiens
ccacccactgctcta

SEQ ID NO: 999777 - DNA, 15 bp, Homo sapiens
cacccactgctctat

SEQ ID NO: 999778 - DNA, 15 bp, Homo sapiens
acccactgctctata

SEQ ID NO: 999779 - DNA, 15 bp, Homo sapiens
cccactgctctataa

SEQ ID NO: 999780 - DNA, 15 bp, Homo sapiens
ccactgctctataat

SEQ ID NO: 999781 - DNA, 15 bp, Homo sapiens
cactgctctataatg

SEQ ID NO: 999782 - DNA, 15 bp, Homo sapiens
actgctctataatgg

SEQ ID NO: 999783 - DNA, 15 bp, Homo sapiens
ctgctctataatggc

SEQ ID NO: 999784 - DNA, 15 bp, Homo sapiens
tgctctataatggcc

SEQ ID NO: 999785 - DNA, 15 bp, Homo sapiens
gctctataatggcca

SEQ ID NO: 999786 - DNA, 15 bp, Homo sapiens
ctctataatggccac

SEQ ID NO: 999787 - DNA, 15 bp, Homo sapiens
tctataatggccact

SEQ ID NO: 999788 - DNA, 15 bp, Homo sapiens
ctataatggccactg

SEQ ID NO: 999789 - DNA, 15 bp, Homo sapiens
tataatggccactga

SEQ ID NO: 999790 - DNA, 15 bp, Homo sapiens
ataatggccactgaa

SEQ ID NO: 999791 - DNA, 15 bp, Homo sapiens
taatggccactgaag

SEQ ID NO: 999792 - DNA, 15 bp, Homo sapiens
aatggccactgaagg

SEQ ID NO: 999793 - DNA, 15 bp, Homo sapiens
atggccactgaaggc

SEQ ID NO: 999794 - DNA, 15 bp, Homo sapiens
tggccactgaaggct

SEQ ID NO: 999795 - DNA, 15 bp, Homo sapiens
ggccactgaaggctg

SEQ ID NO: 999796 - DNA, 15 bp, Homo sapiens
gccactgaaggctgg

SEQ ID NO: 999797 - DNA, 15 bp, Homo sapiens
ccactgaaggctgga

SEQ ID NO: 999798 - DNA, 15 bp, Homo sapiens
cactgaaggctggag

SEQ ID NO: 999799 - DNA, 15 bp, Homo sapiens
actgaaggctggagg

SEQ ID NO: 999800 - DNA, 15 bp, Homo sapiens
ctgaaggctggaggt

SEQ ID NO: 999801 - DNA, 15 bp, Homo sapiens
tgaaggctggaggtt

SEQ ID NO: 999802 - DNA, 15 bp, Homo sapiens
gaaggctggaggttg

SEQ ID NO: 999803 - DNA, 15 bp, Homo sapiens
aaggctggaggttga

SEQ ID NO: 999804 - DNA, 15 bp, Homo sapiens
aggctggaggttgaa

SEQ ID NO: 999805 - DNA, 15 bp, Homo sapiens
ggctggaggttgaag

SEQ ID NO: 999806 - DNA, 15 bp, Homo sapiens
gctggaggttgaagt

SEQ ID NO: 999807 - DNA, 15 bp, Homo sapiens
ctggaggttgaagtg

SEQ ID NO: 999808 - DNA, 15 bp, Homo sapiens
tggaggttgaagtga

SEQ ID NO: 999809 - DNA, 15 bp, Homo sapiens
ggaggttgaagtgag

SEQ ID NO: 999810 - DNA, 15 bp, Homo sapiens
gaggttgaagtgagg

SEQ ID NO: 999811 - DNA, 15 bp, Homo sapiens
aggttgaagtgaggg

SEQ ID NO: 999812 - DNA, 15 bp, Homo sapiens
ggttgaagtgagggg

SEQ ID NO: 999813 - DNA, 15 bp, Homo sapiens
gttgaagtgaggggt

SEQ ID NO: 999814 - DNA, 15 bp, Homo sapiens
ttgaagtgaggggta

SEQ ID NO: 999815 - DNA, 15 bp, Homo sapiens
tgaagtgaggggtaa

SEQ ID NO: 999816 - DNA, 15 bp, Homo sapiens
gaagtgaggggtaaa

SEQ ID NO: 999817 - DNA, 15 bp, Homo sapiens
aagtgaggggtaaaa

SEQ ID NO: 999818 - DNA, 15 bp, Homo sapiens
agtgaggggtaaaat

SEQ ID NO: 999819 - DNA, 15 bp, Homo sapiens
gtgaggggtaaaatt

SEQ ID NO: 999820 - DNA, 15 bp, Homo sapiens
tgaggggtaaaattt

SEQ ID NO: 999821 - DNA, 15 bp, Homo sapiens
gaggggtaaaatttt

SEQ ID NO: 999822 - DNA, 15 bp, Homo sapiens
aggggtaaaatttta

SEQ ID NO: 999823 - DNA, 15 bp, Homo sapiens
ggggtaaaattttaa

SEQ ID NO: 999824 - DNA, 15 bp, Homo sapiens
gggtaaaattttaag

SEQ ID NO: 999825 - DNA, 15 bp, Homo sapiens
ggtaaaattttaagt

SEQ ID NO: 999826 - DNA, 15 bp, Homo sapiens
gtaaaattttaagta

SEQ ID NO: 999827 - DNA, 15 bp, Homo sapiens
taaaattttaagtag

SEQ ID NO: 999828 - DNA, 15 bp, Homo sapiens
aaaattttaagtagt

SEQ ID NO: 999829 - DNA, 15 bp, Homo sapiens
aaattttaagtagtc

SEQ ID NO: 999830 - DNA, 15 bp, Homo sapiens
aattttaagtagtcc

SEQ ID NO: 999831 - DNA, 15 bp, Homo sapiens
attttaagtagtcct

SEQ ID NO: 999832 - DNA, 15 bp, Homo sapiens
ttttaagtagtcctc

SEQ ID NO: 999833 - DNA, 15 bp, Homo sapiens
tttaagtagtcctcc

SEQ ID NO: 999834 - DNA, 15 bp, Homo sapiens
ttaagtagtcctcct

SEQ ID NO: 999835 - DNA, 15 bp, Homo sapiens
taagtagtcctccta

SEQ ID NO: 999836 - DNA, 15 bp, Homo sapiens
aagtagtcctcctat

SEQ ID NO: 999837 - DNA, 15 bp, Homo sapiens
agtagtcctcctatt

SEQ ID NO: 999838 - DNA, 15 bp, Homo sapiens
gtagtcctcctattt

SEQ ID NO: 999839 - DNA, 15 bp, Homo sapiens
tagtcctcctatttt

SEQ ID NO: 999840 - DNA, 15 bp, Homo sapiens
agtcctcctattttt

SEQ ID NO: 999841 - DNA, 15 bp, Homo sapiens
gtcctcctatttttc

SEQ ID NO: 999842 - DNA, 15 bp, Homo sapiens
tcctcctatttttcg

SEQ ID NO: 999843 - DNA, 15 bp, Homo sapiens
cctcctatttttcgg

SEQ ID NO: 999844 - DNA, 15 bp, Homo sapiens
ctcctatttttcgga

SEQ ID NO: 999845 - DNA, 15 bp, Homo sapiens
tcctatttttcggat

SEQ ID NO: 999846 - DNA, 15 bp, Homo sapiens
cctatttttcggatg

SEQ ID NO: 999847 - DNA, 15 bp, Homo sapiens
ctatttttcggatgt

SEQ ID NO: 999848 - DNA, 15 bp, Homo sapiens
tatttttcggatgtc

SEQ ID NO: 999849 - DNA, 15 bp, Homo sapiens
atttttcggatgtct

SEQ ID NO: 999850 - DNA, 15 bp, Homo sapiens
tttttcggatgtctt

SEQ ID NO: 999851 - DNA, 15 bp, Homo sapiens
ttttcggatgtctta

SEQ ID NO: 999852 - DNA, 15 bp, Homo sapiens
tttcggatgtcttat

SEQ ID NO: 999853 - DNA, 15 bp, Homo sapiens
ttcggatgtcttatt

SEQ ID NO: 999854 - DNA, 15 bp, Homo sapiens
tcggatgtcttattc

SEQ ID NO: 999855 - DNA, 15 bp, Homo sapiens
cggatgtcttattca

SEQ ID NO: 999856 - DNA, 15 bp, Homo sapiens
ggatgtcttattcat

SEQ ID NO: 999857 - DNA, 15 bp, Homo sapiens
gatgtcttattcatt

SEQ ID NO: 999858 - DNA, 15 bp, Homo sapiens
atgtcttattcattg

SEQ ID NO: 999859 - DNA, 15 bp, Homo sapiens
tgtcttattcattgt

SEQ ID NO: 999860 - DNA, 15 bp, Homo sapiens
gtcttattcattgtt

SEQ ID NO: 999861 - DNA, 15 bp, Homo sapiens
tcttattcattgttg

SEQ ID NO: 999862 - DNA, 15 bp, Homo sapiens
cttattcattgttga

SEQ ID NO: 999863 - DNA, 15 bp, Homo sapiens
ttattcattgttgag

SEQ ID NO: 999864 - DNA, 15 bp, Homo sapiens
tattcattgttgagg

SEQ ID NO: 999865 - DNA, 15 bp, Homo sapiens
attcattgttgaggt

SEQ ID NO: 999866 - DNA, 15 bp, Homo sapiens
ttcattgttgaggtt

SEQ ID NO: 999867 - DNA, 15 bp, Homo sapiens
tcattgttgaggtta

SEQ ID NO: 999868 - DNA, 15 bp, Homo sapiens
cattgttgaggttat

SEQ ID NO: 999869 - DNA, 15 bp, Homo sapiens
attgttgaggttatg

SEQ ID NO: 999870 - DNA, 15 bp, Homo sapiens
ttgttgaggttatga

SEQ ID NO: 999871 - DNA, 15 bp, Homo sapiens
tgttgaggttatgaa

SEQ ID NO: 999872 - DNA, 15 bp, Homo sapiens
gttgaggttatgaat

SEQ ID NO: 999873 - DNA, 15 bp, Homo sapiens
ttgaggttatgaatg

SEQ ID NO: 999874 - DNA, 15 bp, Homo sapiens
tgaggttatgaatga

SEQ ID NO: 999875 - DNA, 15 bp, Homo sapiens
gaggttatgaatgat

SEQ ID NO: 999876 - DNA, 15 bp, Homo sapiens
aggttatgaatgata

SEQ ID NO: 999877 - DNA, 15 bp, Homo sapiens
ggttatgaatgatag

SEQ ID NO: 999878 - DNA, 15 bp, Homo sapiens
gttatgaatgataga

SEQ ID NO: 999879 - DNA, 15 bp, Homo sapiens
ttatgaatgatagat

SEQ ID NO: 999880 - DNA, 15 bp, Homo sapiens
tatgaatgatagatc

SEQ ID NO: 999881 - DNA, 15 bp, Homo sapiens
atgaatgatagatcc

SEQ ID NO: 999882 - DNA, 15 bp, Homo sapiens
tgaatgatagatccg

SEQ ID NO: 999883 - DNA, 15 bp, Homo sapiens
gaatgatagatccgg

SEQ ID NO: 999884 - DNA, 15 bp, Homo sapiens
aatgatagatccgga

SEQ ID NO: 999885 - DNA, 15 bp, Homo sapiens
atgatagatccggag

SEQ ID NO: 999886 - DNA, 15 bp, Homo sapiens
tgatagatccggagc

SEQ ID NO: 999887 - DNA, 15 bp, Homo sapiens
gatagatccggagca

SEQ ID NO: 999888 - DNA, 15 bp, Homo sapiens
atagatccggagcat

SEQ ID NO: 999889 - DNA, 15 bp, Homo sapiens
tagatccggagcata

SEQ ID NO: 999890 - DNA, 15 bp, Homo sapiens
agatccggagcatat

SEQ ID NO: 999891 - DNA, 15 bp, Homo sapiens
gatccggagcatatg

SEQ ID NO: 999892 - DNA, 15 bp, Homo sapiens
atccggagcatatga

SEQ ID NO: 999893 - DNA, 15 bp, Homo sapiens
tccggagcatatgaa

SEQ ID NO: 999894 - DNA, 15 bp, Homo sapiens
ccggagcatatgaat

SEQ ID NO: 999895 - DNA, 15 bp, Homo sapiens
cggagcatatgaata

SEQ ID NO: 999896 - DNA, 15 bp, Homo sapiens
ggagcatatgaatag

SEQ ID NO: 999897 - DNA, 15 bp, Homo sapiens
gagcatatgaatagt

SEQ ID NO: 999898 - DNA, 15 bp, Homo sapiens
agcatatgaatagta

SEQ ID NO: 999899 - DNA, 15 bp, Homo sapiens
gcatatgaatagtat

SEQ ID NO: 999900 - DNA, 15 bp, Homo sapiens
catatgaatagtatg

SEQ ID NO: 999901 - DNA, 15 bp, Homo sapiens
atatgaatagtatgg

SEQ ID NO: 999902 - DNA, 15 bp, Homo sapiens
tatgaatagtatggc

SEQ ID NO: 999903 - DNA, 15 bp, Homo sapiens
atgaatagtatggct

SEQ ID NO: 999904 - DNA, 15 bp, Homo sapiens
tgaatagtatggctt

SEQ ID NO: 999905 - DNA, 15 bp, Homo sapiens
gaatagtatggcttt

SEQ ID NO: 999906 - DNA, 15 bp, Homo sapiens
aatagtatggcttta

SEQ ID NO: 999907 - DNA, 15 bp, Homo sapiens
atagtatggctttaa

SEQ ID NO: 999908 - DNA, 15 bp, Homo sapiens
tagtatggctttaaa

SEQ ID NO: 999909 - DNA, 15 bp, Homo sapiens
agtatggctttaaag

SEQ ID NO: 999910 - DNA, 15 bp, Homo sapiens
gtatggctttaaaga

SEQ ID NO: 999911 - DNA, 15 bp, Homo sapiens
tatggctttaaagaa

SEQ ID NO: 999912 - DNA, 15 bp, Homo sapiens
atggctttaaagaag

SEQ ID NO: 999913 - DNA, 15 bp, Homo sapiens
tggctttaaagaagg

SEQ ID NO: 999914 - DNA, 15 bp, Homo sapiens
ggctttaaagaaggc

SEQ ID NO: 999915 - DNA, 15 bp, Homo sapiens
gctttaaagaaggca

SEQ ID NO: 999916 - DNA, 15 bp, Homo sapiens
ctttaaagaaggcat

SEQ ID NO: 999917 - DNA, 15 bp, Homo sapiens
tttaaagaaggcatg

SEQ ID NO: 999918 - DNA, 15 bp, Homo sapiens
ttaaagaaggcatgg

SEQ ID NO: 999919 - DNA, 15 bp, Homo sapiens
taaagaaggcatggg

SEQ ID NO: 999920 - DNA, 15 bp, Homo sapiens
aaagaaggcatgggt

SEQ ID NO: 999921 - DNA, 15 bp, Homo sapiens
aagaaggcatgggta

SEQ ID NO: 999922 - DNA, 15 bp, Homo sapiens
agaaggcatgggtac

SEQ ID NO: 999923 - DNA, 15 bp, Homo sapiens
gaaggcatgggtaca

SEQ ID NO: 999924 - DNA, 15 bp, Homo sapiens
aaggcatgggtacag

SEQ ID NO: 999925 - DNA, 15 bp, Homo sapiens
aggcatgggtacaga

SEQ ID NO: 999926 - DNA, 15 bp, Homo sapiens
ggcatgggtacagat

SEQ ID NO: 999927 - DNA, 15 bp, Homo sapiens
gcatgggtacagatg

SEQ ID NO: 999928 - DNA, 15 bp, Homo sapiens
catgggtacagatgt

SEQ ID NO: 999929 - DNA, 15 bp, Homo sapiens
atgggtacagatgtg

SEQ ID NO: 999930 - DNA, 15 bp, Homo sapiens
tgggtacagatgtgt

SEQ ID NO: 999931 - DNA, 15 bp, Homo sapiens
gggtacagatgtgta

SEQ ID NO: 999932 - DNA, 15 bp, Homo sapiens
ggtacagatgtgtag

SEQ ID NO: 999933 - DNA, 15 bp, Homo sapiens
gtacagatgtgtagg

SEQ ID NO: 999934 - DNA, 15 bp, Homo sapiens
tacagatgtgtagga

SEQ ID NO: 999935 - DNA, 15 bp, Homo sapiens
acagatgtgtaggaa

SEQ ID NO: 999936 - DNA, 15 bp, Homo sapiens
cagatgtgtaggaat

SEQ ID NO: 999937 - DNA, 15 bp, Homo sapiens
agatgtgtaggaatg

SEQ ID NO: 999938 - DNA, 15 bp, Homo sapiens
gatgtgtaggaatgc

SEQ ID NO: 999939 - DNA, 15 bp, Homo sapiens
atgtgtaggaatgct

SEQ ID NO: 999940 - DNA, 15 bp, Homo sapiens
tgtgtaggaatgcta

SEQ ID NO: 999941 - DNA, 15 bp, Homo sapiens
gtgtaggaatgctag

SEQ ID NO: 999942 - DNA, 15 bp, Homo sapiens
tgtaggaatgctaga

SEQ ID NO: 999943 - DNA, 15 bp, Homo sapiens
gtaggaatgctagat

SEQ ID NO: 999944 - DNA, 15 bp, Homo sapiens
taggaatgctagata

SEQ ID NO: 999945 - DNA, 15 bp, Homo sapiens
aggaatgctagatat

SEQ ID NO: 999946 - DNA, 15 bp, Homo sapiens
ggaatgctagatatg

SEQ ID NO: 999947 - DNA, 15 bp, Homo sapiens
gaatgctagatatgg

SEQ ID NO: 999948 - DNA, 15 bp, Homo sapiens
aatgctagatatggt

SEQ ID NO: 999949 - DNA, 15 bp, Homo sapiens
atgctagatatggtt

SEQ ID NO: 999950 - DNA, 15 bp, Homo sapiens
tgctagatatggttg

SEQ ID NO: 999951 - DNA, 15 bp, Homo sapiens
gctagatatggttgg

SEQ ID NO: 999952 - DNA, 15 bp, Homo sapiens
ctagatatggttggt

SEQ ID NO: 999953 - DNA, 15 bp, Homo sapiens
tagatatggttggtt

SEQ ID NO: 999954 - DNA, 15 bp, Homo sapiens
agatatggttggtta

SEQ ID NO: 999955 - DNA, 15 bp, Homo sapiens
gatatggttggttaa

SEQ ID NO: 999956 - DNA, 15 bp, Homo sapiens
atatggttggttaat

SEQ ID NO: 999957 - DNA, 15 bp, Homo sapiens
tatggttggttaata

SEQ ID NO: 999958 - DNA, 15 bp, Homo sapiens
atggttggttaatac

SEQ ID NO: 999959 - DNA, 15 bp, Homo sapiens
tggttggttaatacc

SEQ ID NO: 999960 - DNA, 15 bp, Homo sapiens
ggttggttaataccg

SEQ ID NO: 999961 - DNA, 15 bp, Homo sapiens
gttggttaataccga

SEQ ID NO: 999962 - DNA, 15 bp, Homo sapiens
ttggttaataccgat

SEQ ID NO: 999963 - DNA, 15 bp, Homo sapiens
tggttaataccgatt

SEQ ID NO: 999964 - DNA, 15 bp, Homo sapiens
ggttaataccgattg

SEQ ID NO: 999965 - DNA, 15 bp, Homo sapiens
gttaataccgattgt

SEQ ID NO: 999966 - DNA, 15 bp, Homo sapiens
ttaataccgattgtg

SEQ ID NO: 999967 - DNA, 15 bp, Homo sapiens
taataccgattgtga

SEQ ID NO: 999968 - DNA, 15 bp, Homo sapiens
aataccgattgtgac

SEQ ID NO: 999969 - DNA, 15 bp, Homo sapiens
ataccgattgtgact

SEQ ID NO: 999970 - DNA, 15 bp, Homo sapiens
taccgattgtgacta

SEQ ID NO: 999971 - DNA, 15 bp, Homo sapiens
accgattgtgactac

SEQ ID NO: 999972 - DNA, 15 bp, Homo sapiens
ccgattgtgactact

SEQ ID NO: 999973 - DNA, 15 bp, Homo sapiens
cgattgtgactacta

SEQ ID NO: 999974 - DNA, 15 bp, Homo sapiens
gattgtgactactat

SEQ ID NO: 999975 - DNA, 15 bp, Homo sapiens
attgtgactactatt

SEQ ID NO: 999976 - DNA, 15 bp, Homo sapiens
ttgtgactactatta

SEQ ID NO: 999977 - DNA, 15 bp, Homo sapiens
tgtgactactattag

SEQ ID NO: 999978 - DNA, 15 bp, Homo sapiens
gtgactactattagg

SEQ ID NO: 999979 - DNA, 15 bp, Homo sapiens
tgactactattaggc

SEQ ID NO: 999980 - DNA, 15 bp, Homo sapiens
gactactattaggcc

SEQ ID NO: 999981 - DNA, 15 bp, Homo sapiens
actactattaggcct

SEQ ID NO: 999982 - DNA, 15 bp, Homo sapiens
ctactattaggccta

SEQ ID NO: 999983 - DNA, 15 bp, Homo sapiens
tactattaggcctag

SEQ ID NO: 999984 - DNA, 15 bp, Homo sapiens
actattaggcctagt

SEQ ID NO: 999985 - DNA, 15 bp, Homo sapiens
ctattaggcctagtt

SEQ ID NO: 999986 - DNA, 15 bp, Homo sapiens
tattaggcctagttg

SEQ ID NO: 999987 - DNA, 15 bp, Homo sapiens
attaggcctagttgg

SEQ ID NO: 999988 - DNA, 15 bp, Homo sapiens
ttaggcctagttggc

SEQ ID NO: 999989 - DNA, 15 bp, Homo sapiens
taggcctagttggct

SEQ ID NO: 999990 - DNA, 15 bp, Homo sapiens
aggcctagttggctt

SEQ ID NO: 999991 - DNA, 15 bp, Homo sapiens
ggcctagttggcttg

SEQ ID NO: 999992 - DNA, 15 bp, Homo sapiens
gcctagttggcttga

SEQ ID NO: 999993 - DNA, 15 bp, Homo sapiens
cctagttggcttgac

SEQ ID NO: 999994 - DNA, 15 bp, Homo sapiens
ctagttggcttgaca

SEQ ID NO: 999995 - DNA, 15 bp, Homo sapiens
tagttggcttgacag

SEQ ID NO: 999996 - DNA, 15 bp, Homo sapiens
agttggcttgacaga

SEQ ID NO: 999997 - DNA, 15 bp, Homo sapiens
gttggcttgacagag

SEQ ID NO: 999998 - DNA, 15 bp, Homo sapiens
ttggcttgacagaga

SEQ ID NO: 999999 - DNA, 15 bp, Homo sapiens
tggcttgacagagac

SEQ ID NO: 1000000 - DNA, 15 bp, Homo sapiens
ggcttgacagagaca

SEQ ID NO: 1000001 - DNA, 15 bp, Homo sapiens
gcttgacagagacag

SEQ ID NO: 1000002 - DNA, 15 bp, Homo sapiens
cttgacagagacagc

SEQ ID NO: 1000003 - DNA, 15 bp, Homo sapiens
ttgacagagacagct

SEQ ID NO: 1000004 - DNA, 15 bp, Homo sapiens
tgacagagacagctt

SEQ ID NO: 1000005 - DNA, 15 bp, Homo sapiens
gacagagacagcttt

SEQ ID NO: 1000006 - DNA, 15 bp, Homo sapiens
acagagacagcttta

SEQ ID NO: 1000007 - DNA, 15 bp, Homo sapiens
cagagacagctttag

SEQ ID NO: 1000008 - DNA, 15 bp, Homo sapiens
agagacagctttagg

SEQ ID NO: 1000009 - DNA, 15 bp, Homo sapiens
gagacagctttaggt

SEQ ID NO: 1000010 - DNA, 15 bp, Homo sapiens
agacagctttaggta

SEQ ID NO: 1000011 - DNA, 15 bp, Homo sapiens
gacagctttaggtac

SEQ ID NO: 1000012 - DNA, 15 bp, Homo sapiens
acagctttaggtact

SEQ ID NO: 1000013 - DNA, 15 bp, Homo sapiens
cagctttaggtactc

SEQ ID NO: 1000014 - DNA, 15 bp, Homo sapiens
agctttaggtactcc

SEQ ID NO: 1000015 - DNA, 15 bp, Homo sapiens
gctttaggtactcca

SEQ ID NO: 1000016 - DNA, 15 bp, Homo sapiens
ctttaggtactccac

SEQ ID NO: 1000017 - DNA, 15 bp, Homo sapiens
tttaggtactccacc

SEQ ID NO: 1000018 - DNA, 15 bp, Homo sapiens
ttaggtactccaccc

SEQ ID NO: 1000019 - DNA, 15 bp, Homo sapiens
taggtactccaccca

SEQ ID NO: 1000020 - DNA, 15 bp, Homo sapiens
aggtactccacccaa

SEQ ID NO: 1000021 - DNA, 15 bp, Homo sapiens
ggtactccacccaac

SEQ ID NO: 1000022 - DNA, 15 bp, Homo sapiens
gtactccacccaaca

SEQ ID NO: 1000023 - DNA, 15 bp, Homo sapiens
tactccacccaacag

SEQ ID NO: 1000024 - DNA, 15 bp, Homo sapiens
actccacccaacagc

SEQ ID NO: 1000025 - DNA, 15 bp, Homo sapiens
ctccacccaacagct

SEQ ID NO: 1000026 - DNA, 15 bp, Homo sapiens
tccacccaacagctg

SEQ ID NO: 1000027 - DNA, 15 bp, Homo sapiens
ccacccaacagctgg

SEQ ID NO: 1000028 - DNA, 15 bp, Homo sapiens
cacccaacagctgga

SEQ ID NO: 1000029 - DNA, 15 bp, Homo sapiens
acccaacagctggag

SEQ ID NO: 1000030 - DNA, 15 bp, Homo sapiens
cccaacagctggaga

SEQ ID NO: 1000031 - DNA, 15 bp, Homo sapiens
ccaacagctggagac

SEQ ID NO: 1000032 - DNA, 15 bp, Homo sapiens
caacagctggagaca

SEQ ID NO: 1000033 - DNA, 15 bp, Homo sapiens
aacagctggagacag

SEQ ID NO: 1000034 - DNA, 15 bp, Homo sapiens
acagctggagacaga

SEQ ID NO: 1000035 - DNA, 15 bp, Homo sapiens
cagctggagacagaa

SEQ ID NO: 1000036 - DNA, 15 bp, Homo sapiens
agctggagacagaag

SEQ ID NO: 1000037 - DNA, 15 bp, Homo sapiens
gctggagacagaagt

SEQ ID NO: 1000038 - DNA, 15 bp, Homo sapiens
ctggagacagaagtg

SEQ ID NO: 1000039 - DNA, 15 bp, Homo sapiens
tggagacagaagtgt

SEQ ID NO: 1000040 - DNA, 15 bp, Homo sapiens
ggagacagaagtgtg

SEQ ID NO: 1000041 - DNA, 15 bp, Homo sapiens
gagacagaagtgtgg

SEQ ID NO: 1000042 - DNA, 15 bp, Homo sapiens
agacagaagtgtggc

SEQ ID NO: 1000043 - DNA, 15 bp, Homo sapiens
gacagaagtgtggct

SEQ ID NO: 1000044 - DNA, 15 bp, Homo sapiens
acagaagtgtggctc

SEQ ID NO: 1000045 - DNA, 15 bp, Homo sapiens
cagaagtgtggctcc

SEQ ID NO: 1000046 - DNA, 15 bp, Homo sapiens
agaagtgtggctcca

SEQ ID NO: 1000047 - DNA, 15 bp, Homo sapiens
gaagtgtggctccag

SEQ ID NO: 1000048 - DNA, 15 bp, Homo sapiens
aagtgtggctccaga

SEQ ID NO: 1000049 - DNA, 15 bp, Homo sapiens
agtgtggctccagat

SEQ ID NO: 1000050 - DNA, 15 bp, Homo sapiens
gtgtggctccagatg

SEQ ID NO: 1000051 - DNA, 15 bp, Homo sapiens
tgtggctccagatgt

SEQ ID NO: 1000052 - DNA, 15 bp, Homo sapiens
gtggctccagatgtg

SEQ ID NO: 1000053 - DNA, 15 bp, Homo sapiens
tggctccagatgtgt

SEQ ID NO: 1000054 - DNA, 15 bp, Homo sapiens
ggctccagatgtgtg

SEQ ID NO: 1000055 - DNA, 15 bp, Homo sapiens
gctccagatgtgtgt

SEQ ID NO: 1000056 - DNA, 15 bp, Homo sapiens
ctccagatgtgtgtt

SEQ ID NO: 1000057 - DNA, 15 bp, Homo sapiens
tccagatgtgtgttt

SEQ ID NO: 1000058 - DNA, 15 bp, Homo sapiens
ccagatgtgtgtttt

SEQ ID NO: 1000059 - DNA, 15 bp, Homo sapiens
cagatgtgtgttttg

SEQ ID NO: 1000060 - DNA, 15 bp, Homo sapiens
agatgtgtgttttgg

SEQ ID NO: 1000061 - DNA, 15 bp, Homo sapiens
gatgtgtgttttgga

SEQ ID NO: 1000062 - DNA, 15 bp, Homo sapiens
atgtgtgttttggaa

SEQ ID NO: 1000063 - DNA, 15 bp, Homo sapiens
tgtgtgttttggaat

SEQ ID NO: 1000064 - DNA, 15 bp, Homo sapiens
gtgtgttttggaatt

SEQ ID NO: 1000065 - DNA, 15 bp, Homo sapiens
tgtgttttggaattt

SEQ ID NO: 1000066 - DNA, 15 bp, Homo sapiens
gtgttttggaatttt

SEQ ID NO: 1000067 - DNA, 15 bp, Homo sapiens
tgttttggaatttta

SEQ ID NO: 1000068 - DNA, 15 bp, Homo sapiens
gttttggaattttaa

SEQ ID NO: 1000069 - DNA, 15 bp, Homo sapiens
ttttggaattttaac

SEQ ID NO: 1000070 - DNA, 15 bp, Homo sapiens
tttggaattttaact

SEQ ID NO: 1000071 - DNA, 15 bp, Homo sapiens
ttggaattttaactt

SEQ ID NO: 1000072 - DNA, 15 bp, Homo sapiens
tggaattttaacttc

SEQ ID NO: 1000073 - DNA, 15 bp, Homo sapiens
ggaattttaacttcc

SEQ ID NO: 1000074 - DNA, 15 bp, Homo sapiens
gaattttaacttccc

SEQ ID NO: 1000075 - DNA, 15 bp, Homo sapiens
aattttaacttccca

SEQ ID NO: 1000076 - DNA, 15 bp, Homo sapiens
attttaacttcccaa

SEQ ID NO: 1000077 - DNA, 15 bp, Homo sapiens
ttttaacttcccaaa

SEQ ID NO: 1000078 - DNA, 15 bp, Homo sapiens
tttaacttcccaaag

SEQ ID NO: 1000079 - DNA, 15 bp, Homo sapiens
ttaacttcccaaaga

SEQ ID NO: 1000080 - DNA, 15 bp, Homo sapiens
taacttcccaaagag

SEQ ID NO: 1000081 - DNA, 15 bp, Homo sapiens
aacttcccaaagaga

SEQ ID NO: 1000082 - DNA, 15 bp, Homo sapiens
acttcccaaagagaa

SEQ ID NO: 1000083 - DNA, 15 bp, Homo sapiens
cttcccaaagagaaa

SEQ ID NO: 1000084 - DNA, 15 bp, Homo sapiens
ttcccaaagagaaat

SEQ ID NO: 1000085 - DNA, 15 bp, Homo sapiens
tcccaaagagaaatt

SEQ ID NO: 1000086 - DNA, 15 bp, Homo sapiens
cccaaagagaaattc

SEQ ID NO: 1000087 - DNA, 15 bp, Homo sapiens
ccaaagagaaattca

SEQ ID NO: 1000088 - DNA, 15 bp, Homo sapiens
caaagagaaattcac

SEQ ID NO: 1000089 - DNA, 15 bp, Homo sapiens
aaagagaaattcact

SEQ ID NO: 1000090 - DNA, 15 bp, Homo sapiens
aagagaaattcacta

SEQ ID NO: 1000091 - DNA, 15 bp, Homo sapiens
agagaaattcactat

SEQ ID NO: 1000092 - DNA, 15 bp, Homo sapiens
gagaaattcactatt

SEQ ID NO: 1000093 - DNA, 15 bp, Homo sapiens
agaaattcactattt

SEQ ID NO: 1000094 - DNA, 15 bp, Homo sapiens
gaaattcactatttg

SEQ ID NO: 1000095 - DNA, 15 bp, Homo sapiens
aaattcactatttgg

SEQ ID NO: 1000096 - DNA, 15 bp, Homo sapiens
aattcactatttggt

SEQ ID NO: 1000097 - DNA, 15 bp, Homo sapiens
attcactatttggtc

SEQ ID NO: 1000098 - DNA, 15 bp, Homo sapiens
ttcactatttggtct

SEQ ID NO: 1000099 - DNA, 15 bp, Homo sapiens
tcactatttggtctt

SEQ ID NO: 1000100 - DNA, 15 bp, Homo sapiens
cactatttggtcttc

SEQ ID NO: 1000101 - DNA, 15 bp, Homo sapiens
actatttggtcttca

SEQ ID NO: 1000102 - DNA, 15 bp, Homo sapiens
ctatttggtcttcaa

SEQ ID NO: 1000103 - DNA, 15 bp, Homo sapiens
tatttggtcttcaat

SEQ ID NO: 1000104 - DNA, 15 bp, Homo sapiens
atttggtcttcaatg

SEQ ID NO: 1000105 - DNA, 15 bp, Homo sapiens
tttggtcttcaatgc

SEQ ID NO: 1000106 - DNA, 15 bp, Homo sapiens
ttggtcttcaatgcc

SEQ ID NO: 1000107 - DNA, 15 bp, Homo sapiens
tggtcttcaatgcct

SEQ ID NO: 1000108 - DNA, 15 bp, Homo sapiens
ggtcttcaatgccta

SEQ ID NO: 1000109 - DNA, 15 bp, Homo sapiens
gtcttcaatgcctac

SEQ ID NO: 1000110 - DNA, 15 bp, Homo sapiens
tcttcaatgcctact

SEQ ID NO: 1000111 - DNA, 15 bp, Homo sapiens
cttcaatgcctacta

SEQ ID NO: 1000112 - DNA, 15 bp, Homo sapiens
ttcaatgcctactag

SEQ ID NO: 1000113 - DNA, 15 bp, Homo sapiens
tcaatgcctactagc

SEQ ID NO: 1000114 - DNA, 15 bp, Homo sapiens
caatgcctactagcc

SEQ ID NO: 1000115 - DNA, 15 bp, Homo sapiens
aatgcctactagccc

SEQ ID NO: 1000116 - DNA, 15 bp, Homo sapiens
atgcctactagcccc

SEQ ID NO: 1000117 - DNA, 15 bp, Homo sapiens
tgcctactagcccca

SEQ ID NO: 1000118 - DNA, 15 bp, Homo sapiens
gcctactagccccaa

SEQ ID NO: 1000119 - DNA, 15 bp, Homo sapiens
cctactagccccaac

SEQ ID NO: 1000120 - DNA, 15 bp, Homo sapiens
ctactagccccaacc

SEQ ID NO: 1000121 - DNA, 15 bp, Homo sapiens
tactagccccaaccc

SEQ ID NO: 1000122 - DNA, 15 bp, Homo sapiens
actagccccaaccca

SEQ ID NO: 1000123 - DNA, 15 bp, Homo sapiens
ctagccccaacccaa

SEQ ID NO: 1000124 - DNA, 15 bp, Homo sapiens
tagccccaacccaaa

SEQ ID NO: 1000125 - DNA, 15 bp, Homo sapiens
agccccaacccaaac

SEQ ID NO: 1000126 - DNA, 15 bp, Homo sapiens
gccccaacccaaaca

SEQ ID NO: 1000127 - DNA, 15 bp, Homo sapiens
ccccaacccaaacac

SEQ ID NO: 1000128 - DNA, 15 bp, Homo sapiens
cccaacccaaacaca

SEQ ID NO: 1000129 - DNA, 15 bp, Homo sapiens
ccaacccaaacacag

SEQ ID NO: 1000130 - DNA, 15 bp, Homo sapiens
caacccaaacacaga

SEQ ID NO: 1000131 - DNA, 15 bp, Homo sapiens
aacccaaacacagat

SEQ ID NO: 1000132 - DNA, 15 bp, Homo sapiens
acccaaacacagatc

SEQ ID NO: 1000133 - DNA, 15 bp, Homo sapiens
cccaaacacagatcc

SEQ ID NO: 1000134 - DNA, 15 bp, Homo sapiens
ccaaacacagatcct

SEQ ID NO: 1000135 - DNA, 15 bp, Homo sapiens
caaacacagatcctg

SEQ ID NO: 1000136 - DNA, 15 bp, Homo sapiens
aaacacagatcctgc

SEQ ID NO: 1000137 - DNA, 15 bp, Homo sapiens
aacacagatcctgcg

SEQ ID NO: 1000138 - DNA, 15 bp, Homo sapiens
acacagatcctgcgt

SEQ ID NO: 1000139 - DNA, 15 bp, Homo sapiens
cacagatcctgcgta

SEQ ID NO: 1000140 - DNA, 15 bp, Homo sapiens
acagatcctgcgtac

SEQ ID NO: 1000141 - DNA, 15 bp, Homo sapiens
cagatcctgcgtacc

SEQ ID NO: 1000142 - DNA, 15 bp, Homo sapiens
agatcctgcgtacct

SEQ ID NO: 1000143 - DNA, 15 bp, Homo sapiens
gatcctgcgtacctt

SEQ ID NO: 1000144 - DNA, 15 bp, Homo sapiens
atcctgcgtaccttt

SEQ ID NO: 1000145 - DNA, 15 bp, Homo sapiens
tcctgcgtacctttt

SEQ ID NO: 1000146 - DNA, 15 bp, Homo sapiens
cctgcgtaccttttt

SEQ ID NO: 1000147 - DNA, 15 bp, Homo sapiens
ctgcgtaccttttta

SEQ ID NO: 1000148 - DNA, 15 bp, Homo sapiens
tgcgtacctttttag

SEQ ID NO: 1000149 - DNA, 15 bp, Homo sapiens
gcgtacctttttagt

SEQ ID NO: 1000150 - DNA, 15 bp, Homo sapiens
cgtacctttttagta

SEQ ID NO: 1000151 - DNA, 15 bp, Homo sapiens
gtacctttttagtat

SEQ ID NO: 1000152 - DNA, 15 bp, Homo sapiens
tacctttttagtata

SEQ ID NO: 1000153 - DNA, 15 bp, Homo sapiens
acctttttagtatag

SEQ ID NO: 1000154 - DNA, 15 bp, Homo sapiens
cctttttagtataga

SEQ ID NO: 1000155 - DNA, 15 bp, Homo sapiens
ctttttagtatagaa

SEQ ID NO: 1000156 - DNA, 15 bp, Homo sapiens
tttttagtatagaac

SEQ ID NO: 1000157 - DNA, 15 bp, Homo sapiens
ttttagtatagaact

SEQ ID NO: 1000158 - DNA, 15 bp, Homo sapiens
tttagtatagaactt

SEQ ID NO: 1000159 - DNA, 15 bp, Homo sapiens
ttagtatagaacttg

SEQ ID NO: 1000160 - DNA, 15 bp, Homo sapiens
tagtatagaacttgt

SEQ ID NO: 1000161 - DNA, 15 bp, Homo sapiens
agtatagaacttgtt

SEQ ID NO: 1000162 - DNA, 15 bp, Homo sapiens
gtatagaacttgttg

SEQ ID NO: 1000163 - DNA, 15 bp, Homo sapiens
tatagaacttgttga

SEQ ID NO: 1000164 - DNA, 15 bp, Homo sapiens
atagaacttgttgag

SEQ ID NO: 1000165 - DNA, 15 bp, Homo sapiens
tagaacttgttgagc

SEQ ID NO: 1000166 - DNA, 15 bp, Homo sapiens
agaacttgttgagct

SEQ ID NO: 1000167 - DNA, 15 bp, Homo sapiens
gaacttgttgagctg

SEQ ID NO: 1000168 - DNA, 15 bp, Homo sapiens
aacttgttgagctgg

SEQ ID NO: 1000169 - DNA, 15 bp, Homo sapiens
acttgttgagctggg

SEQ ID NO: 1000170 - DNA, 15 bp, Homo sapiens
cttgttgagctgggt

SEQ ID NO: 1000171 - DNA, 15 bp, Homo sapiens
ttgttgagctgggtc

SEQ ID NO: 1000172 - DNA, 15 bp, Homo sapiens
tgttgagctgggtct

SEQ ID NO: 1000173 - DNA, 15 bp, Homo sapiens
gttgagctgggtctc

SEQ ID NO: 1000174 - DNA, 15 bp, Homo sapiens
ttgagctgggtctca

SEQ ID NO: 1000175 - DNA, 15 bp, Homo sapiens
tgagctgggtctcag

SEQ ID NO: 1000176 - DNA, 15 bp, Homo sapiens
gagctgggtctcaga

SEQ ID NO: 1000177 - DNA, 15 bp, Homo sapiens
agctgggtctcagag

SEQ ID NO: 1000178 - DNA, 15 bp, Homo sapiens
gctgggtctcagagc

SEQ ID NO: 1000179 - DNA, 15 bp, Homo sapiens
ctgggtctcagagcc

SEQ ID NO: 1000180 - DNA, 15 bp, Homo sapiens
tgggtctcagagcca

SEQ ID NO: 1000181 - DNA, 15 bp, Homo sapiens
gggtctcagagccat

SEQ ID NO: 1000182 - DNA, 15 bp, Homo sapiens
ggtctcagagccatt

SEQ ID NO: 1000183 - DNA, 15 bp, Homo sapiens
gtctcagagccattt

SEQ ID NO: 1000184 - DNA, 15 bp, Homo sapiens
tctcagagccatttc

SEQ ID NO: 1000185 - DNA, 15 bp, Homo sapiens
ctcagagccatttct

SEQ ID NO: 1000186 - DNA, 15 bp, Homo sapiens
tcagagccatttcta

SEQ ID NO: 1000187 - DNA, 15 bp, Homo sapiens
cagagccatttctac

SEQ ID NO: 1000188 - DNA, 15 bp, Homo sapiens
agagccatttctacg

SEQ ID NO: 1000189 - DNA, 15 bp, Homo sapiens
gagccatttctacgc

SEQ ID NO: 1000190 - DNA, 15 bp, Homo sapiens
agccatttctacgcc

SEQ ID NO: 1000191 - DNA, 15 bp, Homo sapiens
gccatttctacgcca

SEQ ID NO: 1000192 - DNA, 15 bp, Homo sapiens
ccatttctacgccac

SEQ ID NO: 1000193 - DNA, 15 bp, Homo sapiens
catttctacgccaca

SEQ ID NO: 1000194 - DNA, 15 bp, Homo sapiens
atttctacgccacaa

SEQ ID NO: 1000195 - DNA, 15 bp, Homo sapiens
tttctacgccacaag

SEQ ID NO: 1000196 - DNA, 15 bp, Homo sapiens
ttctacgccacaagc

SEQ ID NO: 1000197 - DNA, 15 bp, Homo sapiens
tctacgccacaagca

SEQ ID NO: 1000198 - DNA, 15 bp, Homo sapiens
ctacgccacaagcac

SEQ ID NO: 1000199 - DNA, 15 bp, Homo sapiens
tacgccacaagcaca

SEQ ID NO: 1000200 - DNA, 15 bp, Homo sapiens
acgccacaagcacaa

SEQ ID NO: 1000201 - DNA, 15 bp, Homo sapiens
cgccacaagcacaac

SEQ ID NO: 1000202 - DNA, 15 bp, Homo sapiens
gccacaagcacaaca

SEQ ID NO: 1000203 - DNA, 15 bp, Homo sapiens
ccacaagcacaacac

SEQ ID NO: 1000204 - DNA, 15 bp, Homo sapiens
cacaagcacaacacc

SEQ ID NO: 1000205 - DNA, 15 bp, Homo sapiens
acaagcacaacacct

SEQ ID NO: 1000206 - DNA, 15 bp, Homo sapiens
caagcacaacacctt

SEQ ID NO: 1000207 - DNA, 15 bp, Homo sapiens
aagcacaacaccttc

SEQ ID NO: 1000208 - DNA, 15 bp, Homo sapiens
agcacaacaccttcg

SEQ ID NO: 1000209 - DNA, 15 bp, Homo sapiens
gcacaacaccttcgt

SEQ ID NO: 1000210 - DNA, 15 bp, Homo sapiens
cacaacaccttcgtc

SEQ ID NO: 1000211 - DNA, 15 bp, Homo sapiens
acaacaccttcgtct

SEQ ID NO: 1000212 - DNA, 15 bp, Homo sapiens
caacaccttcgtctt

SEQ ID NO: 1000213 - DNA, 15 bp, Homo sapiens
aacaccttcgtcttg

SEQ ID NO: 1000214 - DNA, 15 bp, Homo sapiens
acaccttcgtcttgg

SEQ ID NO: 1000215 - DNA, 15 bp, Homo sapiens
caccttcgtcttggg

SEQ ID NO: 1000216 - DNA, 15 bp, Homo sapiens
accttcgtcttggga

SEQ ID NO: 1000217 - DNA, 15 bp, Homo sapiens
ccttcgtcttgggac

SEQ ID NO: 1000218 - DNA, 15 bp, Homo sapiens
cttcgtcttgggaca

SEQ ID NO: 1000219 - DNA, 15 bp, Homo sapiens
ttcgtcttgggacag

SEQ ID NO: 1000220 - DNA, 15 bp, Homo sapiens
tcgtcttgggacagt

SEQ ID NO: 1000221 - DNA, 15 bp, Homo sapiens
cgtcttgggacagta

SEQ ID NO: 1000222 - DNA, 15 bp, Homo sapiens
gtcttgggacagtag

SEQ ID NO: 1000223 - DNA, 15 bp, Homo sapiens
tcttgggacagtagg

SEQ ID NO: 1000224 - DNA, 15 bp, Homo sapiens
cttgggacagtaggt

SEQ ID NO: 1000225 - DNA, 15 bp, Homo sapiens
ttgggacagtaggtc

SEQ ID NO: 1000226 - DNA, 15 bp, Homo sapiens
tgggacagtaggtca

SEQ ID NO: 1000227 - DNA, 15 bp, Homo sapiens
gggacagtaggtcat

SEQ ID NO: 1000228 - DNA, 15 bp, Homo sapiens
ggacagtaggtcatg

SEQ ID NO: 1000229 - DNA, 15 bp, Homo sapiens
gacagtaggtcatgt

SEQ ID NO: 1000230 - DNA, 15 bp, Homo sapiens
acagtaggtcatgtt

SEQ ID NO: 1000231 - DNA, 15 bp, Homo sapiens
cagtaggtcatgttg

SEQ ID NO: 1000232 - DNA, 15 bp, Homo sapiens
agtaggtcatgttga

SEQ ID NO: 1000233 - DNA, 15 bp, Homo sapiens
gtaggtcatgttgat

SEQ ID NO: 1000234 - DNA, 15 bp, Homo sapiens
taggtcatgttgatg

SEQ ID NO: 1000235 - DNA, 15 bp, Homo sapiens
aggtcatgttgatga

SEQ ID NO: 1000236 - DNA, 15 bp, Homo sapiens
ggtcatgttgatgag

SEQ ID NO: 1000237 - DNA, 15 bp, Homo sapiens
gtcatgttgatgagc

SEQ ID NO: 1000238 - DNA, 15 bp, Homo sapiens
tcatgttgatgagct

SEQ ID NO: 1000239 - DNA, 15 bp, Homo sapiens
catgttgatgagctt

SEQ ID NO: 1000240 - DNA, 15 bp, Homo sapiens
atgttgatgagcttc

SEQ ID NO: 1000241 - DNA, 15 bp, Homo sapiens
tgttgatgagcttct

SEQ ID NO: 1000242 - DNA, 15 bp, Homo sapiens
gttgatgagcttctc

SEQ ID NO: 1000243 - DNA, 15 bp, Homo sapiens
ttgatgagcttctcg

SEQ ID NO: 1000244 - DNA, 15 bp, Homo sapiens
tgatgagcttctcgt

SEQ ID NO: 1000245 - DNA, 15 bp, Homo sapiens
gatgagcttctcgta

SEQ ID NO: 1000246 - DNA, 15 bp, Homo sapiens
atgagcttctcgtac

SEQ ID NO: 1000247 - DNA, 15 bp, Homo sapiens
tgagcttctcgtacc

SEQ ID NO: 1000248 - DNA, 15 bp, Homo sapiens
gagcttctcgtacca

SEQ ID NO: 1000249 - DNA, 15 bp, Homo sapiens
agcttctcgtaccac

SEQ ID NO: 1000250 - DNA, 15 bp, Homo sapiens
gcttctcgtaccacc

SEQ ID NO: 1000251 - DNA, 15 bp, Homo sapiens
cttctcgtaccacca

SEQ ID NO: 1000252 - DNA, 15 bp, Homo sapiens
ttctcgtaccaccag

SEQ ID NO: 1000253 - DNA, 15 bp, Homo sapiens
tctcgtaccaccagc

SEQ ID NO: 1000254 - DNA, 15 bp, Homo sapiens
ctcgtaccaccagcg

SEQ ID NO: 1000255 - DNA, 15 bp, Homo sapiens
tcgtaccaccagcgc

SEQ ID NO: 1000256 - DNA, 15 bp, Homo sapiens
cgtaccaccagcgct

SEQ ID NO: 1000257 - DNA, 15 bp, Homo sapiens
gtaccaccagcgctc

SEQ ID NO: 1000258 - DNA, 15 bp, Homo sapiens
taccaccagcgctca

SEQ ID NO: 1000259 - DNA, 15 bp, Homo sapiens
accaccagcgctcat

SEQ ID NO: 1000260 - DNA, 15 bp, Homo sapiens
ccaccagcgctcata

SEQ ID NO: 1000261 - DNA, 15 bp, Homo sapiens
caccagcgctcatac

SEQ ID NO: 1000262 - DNA, 15 bp, Homo sapiens
accagcgctcataca

SEQ ID NO: 1000263 - DNA, 15 bp, Homo sapiens
ccagcgctcatacac

SEQ ID NO: 1000264 - DNA, 15 bp, Homo sapiens
cagcgctcatacact

SEQ ID NO: 1000265 - DNA, 15 bp, Homo sapiens
agcgctcatacactg

SEQ ID NO: 1000266 - DNA, 15 bp, Homo sapiens
gcgctcatacactgt

SEQ ID NO: 1000267 - DNA, 15 bp, Homo sapiens
cgctcatacactgtt

SEQ ID NO: 1000268 - DNA, 15 bp, Homo sapiens
gctcatacactgttc

SEQ ID NO: 1000269 - DNA, 15 bp, Homo sapiens
ctcatacactgttcc

SEQ ID NO: 1000270 - DNA, 15 bp, Homo sapiens
tcatacactgttccg

SEQ ID NO: 1000271 - DNA, 15 bp, Homo sapiens
catacactgttccga

SEQ ID NO: 1000272 - DNA, 15 bp, Homo sapiens
atacactgttccgat

SEQ ID NO: 1000273 - DNA, 15 bp, Homo sapiens
tacactgttccgatg

SEQ ID NO: 1000274 - DNA, 15 bp, Homo sapiens
acactgttccgatgt

SEQ ID NO: 1000275 - DNA, 15 bp, Homo sapiens
cactgttccgatgtt

SEQ ID NO: 1000276 - DNA, 15 bp, Homo sapiens
actgttccgatgtta

SEQ ID NO: 1000277 - DNA, 15 bp, Homo sapiens
ctgttccgatgttac

SEQ ID NO: 1000278 - DNA, 15 bp, Homo sapiens
tgttccgatgttact

SEQ ID NO: 1000279 - DNA, 15 bp, Homo sapiens
gttccgatgttacta

SEQ ID NO: 1000280 - DNA, 15 bp, Homo sapiens
ttccgatgttactac

SEQ ID NO: 1000281 - DNA, 15 bp, Homo sapiens
tccgatgttactacg

SEQ ID NO: 1000282 - DNA, 15 bp, Homo sapiens
ccgatgttactacgc

SEQ ID NO: 1000283 - DNA, 15 bp, Homo sapiens
cgatgttactacgca

SEQ ID NO: 1000284 - DNA, 15 bp, Homo sapiens
gatgttactacgcaa

SEQ ID NO: 1000285 - DNA, 15 bp, Homo sapiens
atgttactacgcaac

SEQ ID NO: 1000286 - DNA, 15 bp, Homo sapiens
tgttactacgcaaca

SEQ ID NO: 1000287 - DNA, 15 bp, Homo sapiens
gttactacgcaacac

SEQ ID NO: 1000288 - DNA, 15 bp, Homo sapiens
ttactacgcaacacc

SEQ ID NO: 1000289 - DNA, 15 bp, Homo sapiens
tactacgcaacacca

SEQ ID NO: 1000290 - DNA, 15 bp, Homo sapiens
actacgcaacaccac

SEQ ID NO: 1000291 - DNA, 15 bp, Homo sapiens
ctacgcaacaccaca

SEQ ID NO: 1000292 - DNA, 15 bp, Homo sapiens
tacgcaacaccacac

SEQ ID NO: 1000293 - DNA, 15 bp, Homo sapiens
acgcaacaccacaca

SEQ ID NO: 1000294 - DNA, 15 bp, Homo sapiens
cgcaacaccacacag

SEQ ID NO: 1000295 - DNA, 15 bp, Homo sapiens
gcaacaccacacagt

SEQ ID NO: 1000296 - DNA, 15 bp, Homo sapiens
caacaccacacagtc

SEQ ID NO: 1000297 - DNA, 15 bp, Homo sapiens
aacaccacacagtca

SEQ ID NO: 1000298 - DNA, 15 bp, Homo sapiens
acaccacacagtcat

SEQ ID NO: 1000299 - DNA, 15 bp, Homo sapiens
caccacacagtcatc

SEQ ID NO: 1000300 - DNA, 15 bp, Homo sapiens
accacacagtcatcg

SEQ ID NO: 1000301 - DNA, 15 bp, Homo sapiens
ccacacagtcatcgc

SEQ ID NO: 1000302 - DNA, 15 bp, Homo sapiens
cacacagtcatcgca

SEQ ID NO: 1000303 - DNA, 15 bp, Homo sapiens
acacagtcatcgcac

SEQ ID NO: 1000304 - DNA, 15 bp, Homo sapiens
cacagtcatcgcaca

SEQ ID NO: 1000305 - DNA, 15 bp, Homo sapiens
acagtcatcgcacac

SEQ ID NO: 1000306 - DNA, 15 bp, Homo sapiens
cagtcatcgcacacc

SEQ ID NO: 1000307 - DNA, 15 bp, Homo sapiens
agtcatcgcacacct

SEQ ID NO: 1000308 - DNA, 15 bp, Homo sapiens
gtcatcgcacacctg

SEQ ID NO: 1000309 - DNA, 15 bp, Homo sapiens
tcatcgcacacctgg

SEQ ID NO: 1000310 - DNA, 15 bp, Homo sapiens
catcgcacacctgga

SEQ ID NO: 1000311 - DNA, 15 bp, Homo sapiens
atcgcacacctggag

SEQ ID NO: 1000312 - DNA, 15 bp, Homo sapiens
tcgcacacctggaga

SEQ ID NO: 1000313 - DNA, 15 bp, Homo sapiens
cgcacacctggagaa

SEQ ID NO: 1000314 - DNA, 15 bp, Homo sapiens
gcacacctggagaag

SEQ ID NO: 1000315 - DNA, 15 bp, Homo sapiens
cacacctggagaagt

SEQ ID NO: 1000316 - DNA, 15 bp, Homo sapiens
acacctggagaagtg

SEQ ID NO: 1000317 - DNA, 15 bp, Homo sapiens
cacctggagaagtgc

SEQ ID NO: 1000318 - DNA, 15 bp, Homo sapiens
acctggagaagtgca

SEQ ID NO: 1000319 - DNA, 15 bp, Homo sapiens
cctggagaagtgcac

SEQ ID NO: 1000320 - DNA, 15 bp, Homo sapiens
ctggagaagtgcaca

SEQ ID NO: 1000321 - DNA, 15 bp, Homo sapiens
tggagaagtgcacaa

SEQ ID NO: 1000322 - DNA, 15 bp, Homo sapiens
ggagaagtgcacaaa

SEQ ID NO: 1000323 - DNA, 15 bp, Homo sapiens
gagaagtgcacaaag

SEQ ID NO: 1000324 - DNA, 15 bp, Homo sapiens
agaagtgcacaaagc

SEQ ID NO: 1000325 - DNA, 15 bp, Homo sapiens
gaagtgcacaaagcg

SEQ ID NO: 1000326 - DNA, 15 bp, Homo sapiens
aagtgcacaaagcgg

SEQ ID NO: 1000327 - DNA, 15 bp, Homo sapiens
agtgcacaaagcggc

SEQ ID NO: 1000328 - DNA, 15 bp, Homo sapiens
gtgcacaaagcggct

SEQ ID NO: 1000329 - DNA, 15 bp, Homo sapiens
tgcacaaagcggctc

SEQ ID NO: 1000330 - DNA, 15 bp, Homo sapiens
gcacaaagcggctca

SEQ ID NO: 1000331 - DNA, 15 bp, Homo sapiens
cacaaagcggctcag

SEQ ID NO: 1000332 - DNA, 15 bp, Homo sapiens
acaaagcggctcagt

SEQ ID NO: 1000333 - DNA, 15 bp, Homo sapiens
caaagcggctcagtg

SEQ ID NO: 1000334 - DNA, 15 bp, Homo sapiens
aaagcggctcagtgg

SEQ ID NO: 1000335 - DNA, 15 bp, Homo sapiens
aagcggctcagtggt

SEQ ID NO: 1000336 - DNA, 15 bp, Homo sapiens
agcggctcagtggtt

SEQ ID NO: 1000337 - DNA, 15 bp, Homo sapiens
gcggctcagtggttc

SEQ ID NO: 1000338 - DNA, 15 bp, Homo sapiens
cggctcagtggttcc

SEQ ID NO: 1000339 - DNA, 15 bp, Homo sapiens
ggctcagtggttcct

SEQ ID NO: 1000340 - DNA, 15 bp, Homo sapiens
gctcagtggttcctg

SEQ ID NO: 1000341 - DNA, 15 bp, Homo sapiens
ctcagtggttcctgt

SEQ ID NO: 1000342 - DNA, 15 bp, Homo sapiens
tcagtggttcctgtc

SEQ ID NO: 1000343 - DNA, 15 bp, Homo sapiens
cagtggttcctgtct

SEQ ID NO: 1000344 - DNA, 15 bp, Homo sapiens
agtggttcctgtctc

SEQ ID NO: 1000345 - DNA, 15 bp, Homo sapiens
gtggttcctgtctct

SEQ ID NO: 1000346 - DNA, 15 bp, Homo sapiens
tggttcctgtctctg

SEQ ID NO: 1000347 - DNA, 15 bp, Homo sapiens
ggttcctgtctctga

SEQ ID NO: 1000348 - DNA, 15 bp, Homo sapiens
gttcctgtctctgac

SEQ ID NO: 1000349 - DNA, 15 bp, Homo sapiens
ttcctgtctctgaca

SEQ ID NO: 1000350 - DNA, 15 bp, Homo sapiens
tcctgtctctgacag

SEQ ID NO: 1000351 - DNA, 15 bp, Homo sapiens
cctgtctctgacagc

SEQ ID NO: 1000352 - DNA, 15 bp, Homo sapiens
ctgtctctgacagcc

SEQ ID NO: 1000353 - DNA, 15 bp, Homo sapiens
tgtctctgacagcct

SEQ ID NO: 1000354 - DNA, 15 bp, Homo sapiens
gtctctgacagcctc

SEQ ID NO: 1000355 - DNA, 15 bp, Homo sapiens
tctctgacagcctct

SEQ ID NO: 1000356 - DNA, 15 bp, Homo sapiens
ctctgacagcctctc

SEQ ID NO: 1000357 - DNA, 15 bp, Homo sapiens
tctgacagcctctcc

SEQ ID NO: 1000358 - DNA, 15 bp, Homo sapiens
ctgacagcctctccc

SEQ ID NO: 1000359 - DNA, 15 bp, Homo sapiens
tgacagcctctccct

SEQ ID NO: 1000360 - DNA, 15 bp, Homo sapiens
gacagcctctcccta

SEQ ID NO: 1000361 - DNA, 15 bp, Homo sapiens
acagcctctccctag

SEQ ID NO: 1000362 - DNA, 15 bp, Homo sapiens
cagcctctccctaga

SEQ ID NO: 1000363 - DNA, 15 bp, Homo sapiens
agcctctccctagac

SEQ ID NO: 1000364 - DNA, 15 bp, Homo sapiens
gcctctccctagact

SEQ ID NO: 1000365 - DNA, 15 bp, Homo sapiens
cctctccctagactg

SEQ ID NO: 1000366 - DNA, 15 bp, Homo sapiens
ctctccctagactgt

SEQ ID NO: 1000367 - DNA, 15 bp, Homo sapiens
tctccctagactgtt

SEQ ID NO: 1000368 - DNA, 15 bp, Homo sapiens
ctccctagactgttt

SEQ ID NO: 1000369 - DNA, 15 bp, Homo sapiens
tccctagactgtttc

SEQ ID NO: 1000370 - DNA, 15 bp, Homo sapiens
ccctagactgtttcc

SEQ ID NO: 1000371 - DNA, 15 bp, Homo sapiens
cctagactgtttcct

SEQ ID NO: 1000372 - DNA, 15 bp, Homo sapiens
ctagactgtttccta

SEQ ID NO: 1000373 - DNA, 15 bp, Homo sapiens
tagactgtttcctac

SEQ ID NO: 1000374 - DNA, 15 bp, Homo sapiens
agactgtttcctaca

SEQ ID NO: 1000375 - DNA, 15 bp, Homo sapiens
gactgtttcctacag

SEQ ID NO: 1000376 - DNA, 15 bp, Homo sapiens
actgtttcctacagg

SEQ ID NO: 1000377 - DNA, 15 bp, Homo sapiens
ctgtttcctacaggg

SEQ ID NO: 1000378 - DNA, 15 bp, Homo sapiens
tgtttcctacaggga

SEQ ID NO: 1000379 - DNA, 15 bp, Homo sapiens
gtttcctacagggaa

SEQ ID NO: 1000380 - DNA, 15 bp, Homo sapiens
tttcctacagggaaa

SEQ ID NO: 1000381 - DNA, 15 bp, Homo sapiens
ttcctacagggaaag

SEQ ID NO: 1000382 - DNA, 15 bp, Homo sapiens
tcctacagggaaagg

SEQ ID NO: 1000383 - DNA, 15 bp, Homo sapiens
cctacagggaaaggt

SEQ ID NO: 1000384 - DNA, 15 bp, Homo sapiens
ctacagggaaaggtg

SEQ ID NO: 1000385 - DNA, 15 bp, Homo sapiens
tacagggaaaggtgg

SEQ ID NO: 1000386 - DNA, 15 bp, Homo sapiens
acagggaaaggtggt

SEQ ID NO: 1000387 - DNA, 15 bp, Homo sapiens
cagggaaaggtggtc

SEQ ID NO: 1000388 - DNA, 15 bp, Homo sapiens
agggaaaggtggtcc

SEQ ID NO: 1000389 - DNA, 15 bp, Homo sapiens
gggaaaggtggtcct

SEQ ID NO: 1000390 - DNA, 15 bp, Homo sapiens
ggaaaggtggtcctg

SEQ ID NO: 1000391 - DNA, 15 bp, Homo sapiens
gaaaggtggtcctgg

SEQ ID NO: 1000392 - DNA, 15 bp, Homo sapiens
aaaggtggtcctggg

SEQ ID NO: 1000393 - DNA, 15 bp, Homo sapiens
aaggtggtcctgggg

SEQ ID NO: 1000394 - DNA, 15 bp, Homo sapiens
aggtggtcctggggc

SEQ ID NO: 1000395 - DNA, 15 bp, Homo sapiens
ggtggtcctggggca

SEQ ID NO: 1000396 - DNA, 15 bp, Homo sapiens
gtggtcctggggcat

SEQ ID NO: 1000397 - DNA, 15 bp, Homo sapiens
tggtcctggggcatc

SEQ ID NO: 1000398 - DNA, 15 bp, Homo sapiens
ggtcctggggcatcc

SEQ ID NO: 1000399 - DNA, 15 bp, Homo sapiens
gtcctggggcatccc

SEQ ID NO: 1000400 - DNA, 15 bp, Homo sapiens
tcctggggcatcccc

SEQ ID NO: 1000401 - DNA, 15 bp, Homo sapiens
cctggggcatcccca

SEQ ID NO: 1000402 - DNA, 15 bp, Homo sapiens
ctggggcatccccat

SEQ ID NO: 1000403 - DNA, 15 bp, Homo sapiens
tggggcatccccatg

SEQ ID NO: 1000404 - DNA, 15 bp, Homo sapiens
ggggcatccccatgg

SEQ ID NO: 1000405 - DNA, 15 bp, Homo sapiens
gggcatccccatggt

SEQ ID NO: 1000406 - DNA, 15 bp, Homo sapiens
ggcatccccatggtc

SEQ ID NO: 1000407 - DNA, 15 bp, Homo sapiens
gcatccccatggtca

SEQ ID NO: 1000408 - DNA, 15 bp, Homo sapiens
catccccatggtcag

SEQ ID NO: 1000409 - DNA, 15 bp, Homo sapiens
atccccatggtcagg

SEQ ID NO: 1000410 - DNA, 15 bp, Homo sapiens
tccccatggtcaggt

SEQ ID NO: 1000411 - DNA, 15 bp, Homo sapiens
ccccatggtcaggtt

SEQ ID NO: 1000412 - DNA, 15 bp, Homo sapiens
cccatggtcaggttt

SEQ ID NO: 1000413 - DNA, 15 bp, Homo sapiens
ccatggtcaggtttt

SEQ ID NO: 1000414 - DNA, 15 bp, Homo sapiens
catggtcaggttttc

SEQ ID NO: 1000415 - DNA, 15 bp, Homo sapiens
atggtcaggttttct

SEQ ID NO: 1000416 - DNA, 15 bp, Homo sapiens
tggtcaggttttctg

SEQ ID NO: 1000417 - DNA, 15 bp, Homo sapiens
ggtcaggttttctgc

SEQ ID NO: 1000418 - DNA, 15 bp, Homo sapiens
gtcaggttttctgcc

SEQ ID NO: 1000419 - DNA, 15 bp, Homo sapiens
tcaggttttctgcct

SEQ ID NO: 1000420 - DNA, 15 bp, Homo sapiens
caggttttctgcctt

SEQ ID NO: 1000421 - DNA, 15 bp, Homo sapiens
aggttttctgcctta

SEQ ID NO: 1000422 - DNA, 15 bp, Homo sapiens
ggttttctgccttac

SEQ ID NO: 1000423 - DNA, 15 bp, Homo sapiens
gttttctgccttacg

SEQ ID NO: 1000424 - DNA, 15 bp, Homo sapiens
ttttctgccttacgc

SEQ ID NO: 1000425 - DNA, 15 bp, Homo sapiens
tttctgccttacgct

SEQ ID NO: 1000426 - DNA, 15 bp, Homo sapiens
ttctgccttacgctc

SEQ ID NO: 1000427 - DNA, 15 bp, Homo sapiens
tctgccttacgctca

SEQ ID NO: 1000428 - DNA, 15 bp, Homo sapiens
ctgccttacgctcat

SEQ ID NO: 1000429 - DNA, 15 bp, Homo sapiens
tgccttacgctcatg

SEQ ID NO: 1000430 - DNA, 15 bp, Homo sapiens
gccttacgctcatgg

SEQ ID NO: 1000431 - DNA, 15 bp, Homo sapiens
ccttacgctcatggt

SEQ ID NO: 1000432 - DNA, 15 bp, Homo sapiens
cttacgctcatggtt

SEQ ID NO: 1000433 - DNA, 15 bp, Homo sapiens
ttacgctcatggttt

SEQ ID NO: 1000434 - DNA, 15 bp, Homo sapiens
tacgctcatggtttc

SEQ ID NO: 1000435 - DNA, 15 bp, Homo sapiens
acgctcatggtttcc

SEQ ID NO: 1000436 - DNA, 15 bp, Homo sapiens
cgctcatggtttccc

SEQ ID NO: 1000437 - DNA, 15 bp, Homo sapiens
gctcatggtttccct

SEQ ID NO: 1000438 - DNA, 15 bp, Homo sapiens
ctcatggtttcccta

SEQ ID NO: 1000439 - DNA, 15 bp, Homo sapiens
tcatggtttccctag

SEQ ID NO: 1000440 - DNA, 15 bp, Homo sapiens
catggtttccctagg

SEQ ID NO: 1000441 - DNA, 15 bp, Homo sapiens
atggtttccctaggt

SEQ ID NO: 1000442 - DNA, 15 bp, Homo sapiens
tggtttccctaggtg

SEQ ID NO: 1000443 - DNA, 15 bp, Homo sapiens
ggtttccctaggtga

SEQ ID NO: 1000444 - DNA, 15 bp, Homo sapiens
gtttccctaggtgaa

SEQ ID NO: 1000445 - DNA, 15 bp, Homo sapiens
tttccctaggtgaag

SEQ ID NO: 1000446 - DNA, 15 bp, Homo sapiens
ttccctaggtgaaga

SEQ ID NO: 1000447 - DNA, 15 bp, Homo sapiens
tccctaggtgaagac

SEQ ID NO: 1000448 - DNA, 15 bp, Homo sapiens
ccctaggtgaagaca

SEQ ID NO: 1000449 - DNA, 15 bp, Homo sapiens
cctaggtgaagacac

SEQ ID NO: 1000450 - DNA, 15 bp, Homo sapiens
ctaggtgaagacaca

SEQ ID NO: 1000451 - DNA, 15 bp, Homo sapiens
taggtgaagacacaa

SEQ ID NO: 1000452 - DNA, 15 bp, Homo sapiens
aggtgaagacacaaa

SEQ ID NO: 1000453 - DNA, 15 bp, Homo sapiens
ggtgaagacacaaaa

SEQ ID NO: 1000454 - DNA, 15 bp, Homo sapiens
gtgaagacacaaaac

SEQ ID NO: 1000455 - DNA, 15 bp, Homo sapiens
tgaagacacaaaaca

SEQ ID NO: 1000456 - DNA, 15 bp, Homo sapiens
gaagacacaaaacag

SEQ ID NO: 1000457 - DNA, 15 bp, Homo sapiens
aagacacaaaacaga

SEQ ID NO: 1000458 - DNA, 15 bp, Homo sapiens
agacacaaaacagaa

SEQ ID NO: 1000459 - DNA, 15 bp, Homo sapiens
gacacaaaacagaac

SEQ ID NO: 1000460 - DNA, 15 bp, Homo sapiens
acacaaaacagaact

SEQ ID NO: 1000461 - DNA, 15 bp, Homo sapiens
cacaaaacagaacta

SEQ ID NO: 1000462 - DNA, 15 bp, Homo sapiens
acaaaacagaactac

SEQ ID NO: 1000463 - DNA, 15 bp, Homo sapiens
caaaacagaactact

SEQ ID NO: 1000464 - DNA, 15 bp, Homo sapiens
aaaacagaactactg

SEQ ID NO: 1000465 - DNA, 15 bp, Homo sapiens
aaacagaactactga

SEQ ID NO: 1000466 - DNA, 15 bp, Homo sapiens
aacagaactactgac

SEQ ID NO: 1000467 - DNA, 15 bp, Homo sapiens
acagaactactgaca

SEQ ID NO: 1000468 - DNA, 15 bp, Homo sapiens
cagaactactgacat

SEQ ID NO: 1000469 - DNA, 15 bp, Homo sapiens
agaactactgacatg

SEQ ID NO: 1000470 - DNA, 15 bp, Homo sapiens
gaactactgacatgc

SEQ ID NO: 1000471 - DNA, 15 bp, Homo sapiens
aactactgacatgct

SEQ ID NO: 1000472 - DNA, 15 bp, Homo sapiens
actactgacatgctg

SEQ ID NO: 1000473 - DNA, 15 bp, Homo sapiens
ctactgacatgctgc

SEQ ID NO: 1000474 - DNA, 15 bp, Homo sapiens
tactgacatgctgcc

SEQ ID NO: 1000475 - DNA, 15 bp, Homo sapiens
actgacatgctgcct

SEQ ID NO: 1000476 - DNA, 15 bp, Homo sapiens
ctgacatgctgcctg

SEQ ID NO: 1000477 - DNA, 15 bp, Homo sapiens
tgacatgctgcctgc

SEQ ID NO: 1000478 - DNA, 15 bp, Homo sapiens
gacatgctgcctgct

SEQ ID NO: 1000479 - DNA, 15 bp, Homo sapiens
acatgctgcctgcta

SEQ ID NO: 1000480 - DNA, 15 bp, Homo sapiens
catgctgcctgctac

SEQ ID NO: 1000481 - DNA, 15 bp, Homo sapiens
atgctgcctgctaca

SEQ ID NO: 1000482 - DNA, 15 bp, Homo sapiens
tgctgcctgctacaa

SEQ ID NO: 1000483 - DNA, 15 bp, Homo sapiens
gctgcctgctacaag

SEQ ID NO: 1000484 - DNA, 15 bp, Homo sapiens
ctgcctgctacaagg

SEQ ID NO: 1000485 - DNA, 15 bp, Homo sapiens
tgcctgctacaagga

SEQ ID NO: 1000486 - DNA, 15 bp, Homo sapiens
gcctgctacaaggat

SEQ ID NO: 1000487 - DNA, 15 bp, Homo sapiens
cctgctacaaggatt

SEQ ID NO: 1000488 - DNA, 15 bp, Homo sapiens
ctgctacaaggattg

SEQ ID NO: 1000489 - DNA, 15 bp, Homo sapiens
tgctacaaggattgt

SEQ ID NO: 1000490 - DNA, 15 bp, Homo sapiens
gctacaaggattgtt

SEQ ID NO: 1000491 - DNA, 15 bp, Homo sapiens
ctacaaggattgttg

SEQ ID NO: 1000492 - DNA, 15 bp, Homo sapiens
tacaaggattgttgg

SEQ ID NO: 1000493 - DNA, 15 bp, Homo sapiens
acaaggattgttgga

SEQ ID NO: 1000494 - DNA, 15 bp, Homo sapiens
caaggattgttggaa

SEQ ID NO: 1000495 - DNA, 15 bp, Homo sapiens
aaggattgttggaag

SEQ ID NO: 1000496 - DNA, 15 bp, Homo sapiens
aggattgttggaaga

SEQ ID NO: 1000497 - DNA, 15 bp, Homo sapiens
ggattgttggaagag

SEQ ID NO: 1000498 - DNA, 15 bp, Homo sapiens
gattgttggaagaga

SEQ ID NO: 1000499 - DNA, 15 bp, Homo sapiens
attgttggaagagat

SEQ ID NO: 1000500 - DNA, 15 bp, Homo sapiens
ttgttggaagagatg

SEQ ID NO: 1000501 - DNA, 15 bp, Homo sapiens
tgttggaagagatgg

SEQ ID NO: 1000502 - DNA, 15 bp, Homo sapiens
gttggaagagatgga

SEQ ID NO: 1000503 - DNA, 15 bp, Homo sapiens
ttggaagagatggag

SEQ ID NO: 1000504 - DNA, 15 bp, Homo sapiens
tggaagagatggagt

SEQ ID NO: 1000505 - DNA, 15 bp, Homo sapiens
ggaagagatggagtc

SEQ ID NO: 1000506 - DNA, 15 bp, Homo sapiens
gaagagatggagtca

SEQ ID NO: 1000507 - DNA, 15 bp, Homo sapiens
aagagatggagtcat

SEQ ID NO: 1000508 - DNA, 15 bp, Homo sapiens
agagatggagtcatt

SEQ ID NO: 1000509 - DNA, 15 bp, Homo sapiens
gagatggagtcatta

SEQ ID NO: 1000510 - DNA, 15 bp, Homo sapiens
agatggagtcattag

SEQ ID NO: 1000511 - DNA, 15 bp, Homo sapiens
gatggagtcattaga

SEQ ID NO: 1000512 - DNA, 15 bp, Homo sapiens
atggagtcattagaa

SEQ ID NO: 1000513 - DNA, 15 bp, Homo sapiens
tggagtcattagaag

SEQ ID NO: 1000514 - DNA, 15 bp, Homo sapiens
ggagtcattagaagg

SEQ ID NO: 1000515 - DNA, 15 bp, Homo sapiens
gagtcattagaagga

SEQ ID NO: 1000516 - DNA, 15 bp, Homo sapiens
agtcattagaaggaa

SEQ ID NO: 1000517 - DNA, 15 bp, Homo sapiens
gtcattagaaggaac

SEQ ID NO: 1000518 - DNA, 15 bp, Homo sapiens
tcattagaaggaacc

SEQ ID NO: 1000519 - DNA, 15 bp, Homo sapiens
cattagaaggaaccg

SEQ ID NO: 1000520 - DNA, 15 bp, Homo sapiens
attagaaggaaccga

SEQ ID NO: 1000521 - DNA, 15 bp, Homo sapiens
ttagaaggaaccgat

SEQ ID NO: 1000522 - DNA, 15 bp, Homo sapiens
tagaaggaaccgatg

SEQ ID NO: 1000523 - DNA, 15 bp, Homo sapiens
agaaggaaccgatgt

SEQ ID NO: 1000524 - DNA, 15 bp, Homo sapiens
gaaggaaccgatgta

SEQ ID NO: 1000525 - DNA, 15 bp, Homo sapiens
aaggaaccgatgtat

SEQ ID NO: 1000526 - DNA, 15 bp, Homo sapiens
aggaaccgatgtata

SEQ ID NO: 1000527 - DNA, 15 bp, Homo sapiens
ggaaccgatgtataa

SEQ ID NO: 1000528 - DNA, 15 bp, Homo sapiens
gaaccgatgtataag

SEQ ID NO: 1000529 - DNA, 15 bp, Homo sapiens
aaccgatgtataagg

SEQ ID NO: 1000530 - DNA, 15 bp, Homo sapiens
accgatgtataaggg

SEQ ID NO: 1000531 - DNA, 15 bp, Homo sapiens
ccgatgtataaggga

SEQ ID NO: 1000532 - DNA, 15 bp, Homo sapiens
cgatgtataagggag

SEQ ID NO: 1000533 - DNA, 15 bp, Homo sapiens
gatgtataagggagg

SEQ ID NO: 1000534 - DNA, 15 bp, Homo sapiens
atgtataagggagga

SEQ ID NO: 1000535 - DNA, 15 bp, Homo sapiens
tgtataagggaggag

SEQ ID NO: 1000536 - DNA, 15 bp, Homo sapiens
gtataagggaggagg

SEQ ID NO: 1000537 - DNA, 15 bp, Homo sapiens
tataagggaggaggc

SEQ ID NO: 1000538 - DNA, 15 bp, Homo sapiens
ataagggaggaggca

SEQ ID NO: 1000539 - DNA, 15 bp, Homo sapiens
taagggaggaggcac

SEQ ID NO: 1000540 - DNA, 15 bp, Homo sapiens
aagggaggaggcaca

SEQ ID NO: 1000541 - DNA, 15 bp, Homo sapiens
agggaggaggcacaa

SEQ ID NO: 1000542 - DNA, 15 bp, Homo sapiens
gggaggaggcacaaa

SEQ ID NO: 1000543 - DNA, 15 bp, Homo sapiens
ggaggaggcacaaat

SEQ ID NO: 1000544 - DNA, 15 bp, Homo sapiens
gaggaggcacaaatc

SEQ ID NO: 1000545 - DNA, 15 bp, Homo sapiens
aggaggcacaaatca

SEQ ID NO: 1000546 - DNA, 15 bp, Homo sapiens
ggaggcacaaatcaa

SEQ ID NO: 1000547 - DNA, 15 bp, Homo sapiens
gaggcacaaatcaat

SEQ ID NO: 1000548 - DNA, 15 bp, Homo sapiens
aggcacaaatcaatc

SEQ ID NO: 1000549 - DNA, 15 bp, Homo sapiens
ggcacaaatcaatca

SEQ ID NO: 1000550 - DNA, 15 bp, Homo sapiens
gcacaaatcaatcag

SEQ ID NO: 1000551 - DNA, 15 bp, Homo sapiens
cacaaatcaatcagt

SEQ ID NO: 1000552 - DNA, 15 bp, Homo sapiens
acaaatcaatcagtt

SEQ ID NO: 1000553 - DNA, 15 bp, Homo sapiens
caaatcaatcagtta

SEQ ID NO: 1000554 - DNA, 15 bp, Homo sapiens
aaatcaatcagttat

SEQ ID NO: 1000555 - DNA, 15 bp, Homo sapiens
aatcaatcagttatt

SEQ ID NO: 1000556 - DNA, 15 bp, Homo sapiens
atcaatcagttattt

SEQ ID NO: 1000557 - DNA, 15 bp, Homo sapiens
tcaatcagttattta

SEQ ID NO: 1000558 - DNA, 15 bp, Homo sapiens
caatcagttatttat

SEQ ID NO: 1000559 - DNA, 15 bp, Homo sapiens
aatcagttatttatt

SEQ ID NO: 1000560 - DNA, 15 bp, Homo sapiens
atcagttatttatta

SEQ ID NO: 1000561 - DNA, 15 bp, Homo sapiens
tcagttatttattac

SEQ ID NO: 1000562 - DNA, 15 bp, Homo sapiens
cagttatttattacc

SEQ ID NO: 1000563 - DNA, 15 bp, Homo sapiens
agttatttattacct

SEQ ID NO: 1000564 - DNA, 15 bp, Homo sapiens
gttatttattacctc

SEQ ID NO: 1000565 - DNA, 15 bp, Homo sapiens
ttatttattacctct

SEQ ID NO: 1000566 - DNA, 15 bp, Homo sapiens
tatttattacctctt

SEQ ID NO: 1000567 - DNA, 15 bp, Homo sapiens
atttattacctcttt

SEQ ID NO: 1000568 - DNA, 15 bp, Homo sapiens
tttattacctctttt

SEQ ID NO: 1000569 - DNA, 15 bp, Homo sapiens
ttattacctcttttt

SEQ ID NO: 1000570 - DNA, 15 bp, Homo sapiens
tattacctctttttt

SEQ ID NO: 1000571 - DNA, 15 bp, Homo sapiens
attacctcttttttt

SEQ ID NO: 1000572 - DNA, 15 bp, Homo sapiens
ttacctctttttttt

SEQ ID NO: 1000573 - DNA, 15 bp, Homo sapiens
tacctcttttttttt

SEQ ID NO: 1000574 - DNA, 15 bp, Homo sapiens
acctctttttttttt

SEQ ID NO: 1000575 - DNA, 15 bp, Homo sapiens
cctcttttttttttt

SEQ ID NO: 1000576 - DNA, 15 bp, Homo sapiens
ctctttttttttttt

SEQ ID NO: 1000577 - DNA, 15 bp, Homo sapiens
tcttttttttttttt

SEQ ID NO: 1000578 - DNA, 15 bp, Homo sapiens
tgagacagggtctca

SEQ ID NO: 1000579 - DNA, 15 bp, Homo sapiens
gacagggtctcactt

SEQ ID NO: 1000580 - DNA, 15 bp, Homo sapiens
acagggtctcacttt

SEQ ID NO: 1000581 - DNA, 15 bp, Homo sapiens
cagggtctcactttg

SEQ ID NO: 1000582 - DNA, 15 bp, Homo sapiens
agggtctcactttgt

SEQ ID NO: 1000583 - DNA, 15 bp, Homo sapiens
gggtctcactttgta

SEQ ID NO: 1000584 - DNA, 15 bp, Homo sapiens
ggtctcactttgtac

SEQ ID NO: 1000585 - DNA, 15 bp, Homo sapiens
gtctcactttgtacc

SEQ ID NO: 1000586 - DNA, 15 bp, Homo sapiens
tctcactttgtaccc

SEQ ID NO: 1000587 - DNA, 15 bp, Homo sapiens
ctcactttgtacccc

SEQ ID NO: 1000588 - DNA, 15 bp, Homo sapiens
tcactttgtacccca

SEQ ID NO: 1000589 - DNA, 15 bp, Homo sapiens
cactttgtaccccag

SEQ ID NO: 1000590 - DNA, 15 bp, Homo sapiens
actttgtaccccagg

SEQ ID NO: 1000591 - DNA, 15 bp, Homo sapiens
ctttgtaccccaggc

SEQ ID NO: 1000592 - DNA, 15 bp, Homo sapiens
tttgtaccccaggct

SEQ ID NO: 1000593 - DNA, 15 bp, Homo sapiens
ttgtaccccaggctt

SEQ ID NO: 1000594 - DNA, 15 bp, Homo sapiens
tgtaccccaggcttg

SEQ ID NO: 1000595 - DNA, 15 bp, Homo sapiens
gtaccccaggcttga

SEQ ID NO: 1000596 - DNA, 15 bp, Homo sapiens
taccccaggcttgac

SEQ ID NO: 1000597 - DNA, 15 bp, Homo sapiens
accccaggcttgact

SEQ ID NO: 1000598 - DNA, 15 bp, Homo sapiens
ccccaggcttgactg

SEQ ID NO: 1000599 - DNA, 15 bp, Homo sapiens
cccaggcttgactgc

SEQ ID NO: 1000600 - DNA, 15 bp, Homo sapiens
ccaggcttgactgca

SEQ ID NO: 1000601 - DNA, 15 bp, Homo sapiens
caggcttgactgcag

SEQ ID NO: 1000602 - DNA, 15 bp, Homo sapiens
aggcttgactgcagt

SEQ ID NO: 1000603 - DNA, 15 bp, Homo sapiens
ggcttgactgcagtg

SEQ ID NO: 1000604 - DNA, 15 bp, Homo sapiens
gcttgactgcagtgg

SEQ ID NO: 1000605 - DNA, 15 bp, Homo sapiens
cttgactgcagtggc

SEQ ID NO: 1000606 - DNA, 15 bp, Homo sapiens
ttgactgcagtggcg

SEQ ID NO: 1000607 - DNA, 15 bp, Homo sapiens
tgactgcagtggcgc

SEQ ID NO: 1000608 - DNA, 15 bp, Homo sapiens
gactgcagtggcgcc

SEQ ID NO: 1000609 - DNA, 15 bp, Homo sapiens
actgcagtggcgcca

SEQ ID NO: 1000610 - DNA, 15 bp, Homo sapiens
ctgcagtggcgccat

SEQ ID NO: 1000611 - DNA, 15 bp, Homo sapiens
tgcagtggcgccatc

SEQ ID NO: 1000612 - DNA, 15 bp, Homo sapiens
gcagtggcgccatct

SEQ ID NO: 1000613 - DNA, 15 bp, Homo sapiens
cagtggcgccatctc

SEQ ID NO: 1000614 - DNA, 15 bp, Homo sapiens
agtggcgccatctca

SEQ ID NO: 1000615 - DNA, 15 bp, Homo sapiens
gtggcgccatctcag

SEQ ID NO: 1000616 - DNA, 15 bp, Homo sapiens
tggcgccatctcagc

SEQ ID NO: 1000617 - DNA, 15 bp, Homo sapiens
ggcgccatctcagct

SEQ ID NO: 1000618 - DNA, 15 bp, Homo sapiens
gcgccatctcagctc

SEQ ID NO: 1000619 - DNA, 15 bp, Homo sapiens
cgccatctcagctca

SEQ ID NO: 1000620 - DNA, 15 bp, Homo sapiens
gccatctcagctcac

SEQ ID NO: 1000621 - DNA, 15 bp, Homo sapiens
ccatctcagctcact

SEQ ID NO: 1000622 - DNA, 15 bp, Homo sapiens
catctcagctcactg

SEQ ID NO: 1000623 - DNA, 15 bp, Homo sapiens
atctcagctcactgc

SEQ ID NO: 1000624 - DNA, 15 bp, Homo sapiens
tctcagctcactgca

SEQ ID NO: 1000625 - DNA, 15 bp, Homo sapiens
ctcagctcactgcag

SEQ ID NO: 1000626 - DNA, 15 bp, Homo sapiens
tcagctcactgcagc

SEQ ID NO: 1000627 - DNA, 15 bp, Homo sapiens
cagctcactgcagcc

SEQ ID NO: 1000628 - DNA, 15 bp, Homo sapiens
ctcactgcagcctcg

SEQ ID NO: 1000629 - DNA, 15 bp, Homo sapiens
tcactgcagcctcga

SEQ ID NO: 1000630 - DNA, 15 bp, Homo sapiens
cactgcagcctcgac

SEQ ID NO: 1000631 - DNA, 15 bp, Homo sapiens
actgcagcctcgacc

SEQ ID NO: 1000632 - DNA, 15 bp, Homo sapiens
ctgcagcctcgacca

SEQ ID NO: 1000633 - DNA, 15 bp, Homo sapiens
tgcagcctcgaccag

SEQ ID NO: 1000634 - DNA, 15 bp, Homo sapiens
gcagcctcgaccagc

SEQ ID NO: 1000635 - DNA, 15 bp, Homo sapiens
cagcctcgaccagcc

SEQ ID NO: 1000636 - DNA, 15 bp, Homo sapiens
agcctcgaccagcca

SEQ ID NO: 1000637 - DNA, 15 bp, Homo sapiens
gcctcgaccagccag

SEQ ID NO: 1000638 - DNA, 15 bp, Homo sapiens
cctcgaccagccagg

SEQ ID NO: 1000639 - DNA, 15 bp, Homo sapiens
ctcgaccagccaggt

SEQ ID NO: 1000640 - DNA, 15 bp, Homo sapiens
tcgaccagccaggtt

SEQ ID NO: 1000641 - DNA, 15 bp, Homo sapiens
cgaccagccaggttc

SEQ ID NO: 1000642 - DNA, 15 bp, Homo sapiens
gaccagccaggttct

SEQ ID NO: 1000643 - DNA, 15 bp, Homo sapiens
accagccaggttctt

SEQ ID NO: 1000644 - DNA, 15 bp, Homo sapiens
ccagccaggttcttc

SEQ ID NO: 1000645 - DNA, 15 bp, Homo sapiens
cagccaggttcttcc

SEQ ID NO: 1000646 - DNA, 15 bp, Homo sapiens
agccaggttcttcct

SEQ ID NO: 1000647 - DNA, 15 bp, Homo sapiens
gccaggttcttcctg

SEQ ID NO: 1000648 - DNA, 15 bp, Homo sapiens
ccaggttcttcctgc

SEQ ID NO: 1000649 - DNA, 15 bp, Homo sapiens
caggttcttcctgcc

SEQ ID NO: 1000650 - DNA, 15 bp, Homo sapiens
aggttcttcctgcct

SEQ ID NO: 1000651 - DNA, 15 bp, Homo sapiens
ggttcttcctgcctc

SEQ ID NO: 1000652 - DNA, 15 bp, Homo sapiens
gttcttcctgcctca

SEQ ID NO: 1000653 - DNA, 15 bp, Homo sapiens
ttcttcctgcctcag

SEQ ID NO: 1000654 - DNA, 15 bp, Homo sapiens
tcttcctgcctcagc

SEQ ID NO: 1000655 - DNA, 15 bp, Homo sapiens
cttcctgcctcagcc

SEQ ID NO: 1000656 - DNA, 15 bp, Homo sapiens
ttcctgcctcagccc

SEQ ID NO: 1000657 - DNA, 15 bp, Homo sapiens
tcctgcctcagcccc

SEQ ID NO: 1000658 - DNA, 15 bp, Homo sapiens
cctgcctcagccccc

SEQ ID NO: 1000659 - DNA, 15 bp, Homo sapiens
ctgcctcagccccca

SEQ ID NO: 1000660 - DNA, 15 bp, Homo sapiens
tgcctcagcccccaa

SEQ ID NO: 1000661 - DNA, 15 bp, Homo sapiens
gcctcagcccccaaa

SEQ ID NO: 1000662 - DNA, 15 bp, Homo sapiens
cctcagcccccaaag

SEQ ID NO: 1000663 - DNA, 15 bp, Homo sapiens
ctcagcccccaaagt

SEQ ID NO: 1000664 - DNA, 15 bp, Homo sapiens
tcagcccccaaagta

SEQ ID NO: 1000665 - DNA, 15 bp, Homo sapiens
cagcccccaaagtag

SEQ ID NO: 1000666 - DNA, 15 bp, Homo sapiens
agcccccaaagtagc

SEQ ID NO: 1000667 - DNA, 15 bp, Homo sapiens
gcccccaaagtagca

SEQ ID NO: 1000668 - DNA, 15 bp, Homo sapiens
cccccaaagtagcag

SEQ ID NO: 1000669 - DNA, 15 bp, Homo sapiens
ccccaaagtagcagg

SEQ ID NO: 1000670 - DNA, 15 bp, Homo sapiens
cccaaagtagcaggg

SEQ ID NO: 1000671 - DNA, 15 bp, Homo sapiens
ccaaagtagcaggga

SEQ ID NO: 1000672 - DNA, 15 bp, Homo sapiens
caaagtagcagggac

SEQ ID NO: 1000673 - DNA, 15 bp, Homo sapiens
aaagtagcagggact

SEQ ID NO: 1000674 - DNA, 15 bp, Homo sapiens
aagtagcagggacta

SEQ ID NO: 1000675 - DNA, 15 bp, Homo sapiens
agtagcagggactac

SEQ ID NO: 1000676 - DNA, 15 bp, Homo sapiens
gtagcagggactaca

SEQ ID NO: 1000677 - DNA, 15 bp, Homo sapiens
tagcagggactacag

SEQ ID NO: 1000678 - DNA, 15 bp, Homo sapiens
agcagggactacagg

SEQ ID NO: 1000679 - DNA, 15 bp, Homo sapiens
gcagggactacaggt

SEQ ID NO: 1000680 - DNA, 15 bp, Homo sapiens
cagggactacaggtg

SEQ ID NO: 1000681 - DNA, 15 bp, Homo sapiens
agggactacaggtgc

SEQ ID NO: 1000682 - DNA, 15 bp, Homo sapiens
gggactacaggtgca

SEQ ID NO: 1000683 - DNA, 15 bp, Homo sapiens
ggactacaggtgcac

SEQ ID NO: 1000684 - DNA, 15 bp, Homo sapiens
gactacaggtgcaca

SEQ ID NO: 1000685 - DNA, 15 bp, Homo sapiens
actacaggtgcacac

SEQ ID NO: 1000686 - DNA, 15 bp, Homo sapiens
ctacaggtgcacacc

SEQ ID NO: 1000687 - DNA, 15 bp, Homo sapiens
tacaggtgcacacca

SEQ ID NO: 1000688 - DNA, 15 bp, Homo sapiens
acaggtgcacaccat

SEQ ID NO: 1000689 - DNA, 15 bp, Homo sapiens
caggtgcacaccatc

SEQ ID NO: 1000690 - DNA, 15 bp, Homo sapiens
aggtgcacaccatca

SEQ ID NO: 1000691 - DNA, 15 bp, Homo sapiens
ggtgcacaccatcac

SEQ ID NO: 1000692 - DNA, 15 bp, Homo sapiens
gtgcacaccatcaca

SEQ ID NO: 1000693 - DNA, 15 bp, Homo sapiens
tgcacaccatcacat

SEQ ID NO: 1000694 - DNA, 15 bp, Homo sapiens
gcacaccatcacatt

SEQ ID NO: 1000695 - DNA, 15 bp, Homo sapiens
cacaccatcacattg

SEQ ID NO: 1000696 - DNA, 15 bp, Homo sapiens
acaccatcacattgg

SEQ ID NO: 1000697 - DNA, 15 bp, Homo sapiens
caccatcacattggc

SEQ ID NO: 1000698 - DNA, 15 bp, Homo sapiens
accatcacattggct

SEQ ID NO: 1000699 - DNA, 15 bp, Homo sapiens
ccatcacattggcta

SEQ ID NO: 1000700 - DNA, 15 bp, Homo sapiens
catcacattggctat

SEQ ID NO: 1000701 - DNA, 15 bp, Homo sapiens
atcacattggctata

SEQ ID NO: 1000702 - DNA, 15 bp, Homo sapiens
tcacattggctataa

SEQ ID NO: 1000703 - DNA, 15 bp, Homo sapiens
cacattggctataat

SEQ ID NO: 1000704 - DNA, 15 bp, Homo sapiens
acattggctataatt

SEQ ID NO: 1000705 - DNA, 15 bp, Homo sapiens
cattggctataattt

SEQ ID NO: 1000706 - DNA, 15 bp, Homo sapiens
attggctataatttt

SEQ ID NO: 1000707 - DNA, 15 bp, Homo sapiens
ttggctataattttt

SEQ ID NO: 1000708 - DNA, 15 bp, Homo sapiens
tggctataatttttt

SEQ ID NO: 1000709 - DNA, 15 bp, Homo sapiens
ggctataattttttt

SEQ ID NO: 1000710 - DNA, 15 bp, Homo sapiens
gctataatttttttt

SEQ ID NO: 1000711 - DNA, 15 bp, Homo sapiens
ctataattttttttt

SEQ ID NO: 1000712 - DNA, 15 bp, Homo sapiens
tataatttttttttt

SEQ ID NO: 1000713 - DNA, 15 bp, Homo sapiens
ataattttttttttt

SEQ ID NO: 1000714 - DNA, 15 bp, Homo sapiens
taatttttttttttt

SEQ ID NO: 1000715 - DNA, 15 bp, Homo sapiens
aattttttttttttt

SEQ ID NO: 1000716 - DNA, 15 bp, Homo sapiens
atttttttttttttt

SEQ ID NO: 1000717 - DNA, 15 bp, Homo sapiens
tttgagatggagtcc

SEQ ID NO: 1000718 - DNA, 15 bp, Homo sapiens
ttgagatggagtccc

SEQ ID NO: 1000719 - DNA, 15 bp, Homo sapiens
tgagatggagtccca

SEQ ID NO: 1000720 - DNA, 15 bp, Homo sapiens
gagatggagtcccac

SEQ ID NO: 1000721 - DNA, 15 bp, Homo sapiens
agatggagtcccact

SEQ ID NO: 1000722 - DNA, 15 bp, Homo sapiens
gatggagtcccactc

SEQ ID NO: 1000723 - DNA, 15 bp, Homo sapiens
atggagtcccactct

SEQ ID NO: 1000724 - DNA, 15 bp, Homo sapiens
tggagtcccactctg

SEQ ID NO: 1000725 - DNA, 15 bp, Homo sapiens
ggagtcccactctgt

SEQ ID NO: 1000726 - DNA, 15 bp, Homo sapiens
gagtcccactctgtt

SEQ ID NO: 1000727 - DNA, 15 bp, Homo sapiens
agtcccactctgttg

SEQ ID NO: 1000728 - DNA, 15 bp, Homo sapiens
gtcccactctgttgc

SEQ ID NO: 1000729 - DNA, 15 bp, Homo sapiens
tcccactctgttgcc

SEQ ID NO: 1000730 - DNA, 15 bp, Homo sapiens
cccactctgttgccc

SEQ ID NO: 1000731 - DNA, 15 bp, Homo sapiens
ccactctgttgccca

SEQ ID NO: 1000732 - DNA, 15 bp, Homo sapiens
cactctgttgcccag

SEQ ID NO: 1000733 - DNA, 15 bp, Homo sapiens
actctgttgcccagg

SEQ ID NO: 1000734 - DNA, 15 bp, Homo sapiens
ctctgttgcccaggc

SEQ ID NO: 1000735 - DNA, 15 bp, Homo sapiens
tctgttgcccaggct

SEQ ID NO: 1000736 - DNA, 15 bp, Homo sapiens
ctgttgcccaggctg

SEQ ID NO: 1000737 - DNA, 15 bp, Homo sapiens
ggagtgcagtggtgc

SEQ ID NO: 1000738 - DNA, 15 bp, Homo sapiens
gagtgcagtggtgca

SEQ ID NO: 1000739 - DNA, 15 bp, Homo sapiens
agtgcagtggtgcaa

SEQ ID NO: 1000740 - DNA, 15 bp, Homo sapiens
gtgcagtggtgcaat

SEQ ID NO: 1000741 - DNA, 15 bp, Homo sapiens
tgcagtggtgcaatc

SEQ ID NO: 1000742 - DNA, 15 bp, Homo sapiens
gcagtggtgcaatct

SEQ ID NO: 1000743 - DNA, 15 bp, Homo sapiens
cagtggtgcaatctc

SEQ ID NO: 1000744 - DNA, 15 bp, Homo sapiens
agtggtgcaatctcg

SEQ ID NO: 1000745 - DNA, 15 bp, Homo sapiens
gtggtgcaatctcga

SEQ ID NO: 1000746 - DNA, 15 bp, Homo sapiens
tggtgcaatctcgac

SEQ ID NO: 1000747 - DNA, 15 bp, Homo sapiens
ggtgcaatctcgact

SEQ ID NO: 1000748 - DNA, 15 bp, Homo sapiens
gtgcaatctcgactc

SEQ ID NO: 1000749 - DNA, 15 bp, Homo sapiens
tgcaatctcgactca

SEQ ID NO: 1000750 - DNA, 15 bp, Homo sapiens
gcaatctcgactcac

SEQ ID NO: 1000751 - DNA, 15 bp, Homo sapiens
caatctcgactcact

SEQ ID NO: 1000752 - DNA, 15 bp, Homo sapiens
aatctcgactcactg

SEQ ID NO: 1000753 - DNA, 15 bp, Homo sapiens
atctcgactcactgc

SEQ ID NO: 1000754 - DNA, 15 bp, Homo sapiens
tctcgactcactgca

SEQ ID NO: 1000755 - DNA, 15 bp, Homo sapiens
ctcgactcactgcaa

SEQ ID NO: 1000756 - DNA, 15 bp, Homo sapiens
tcgactcactgcaac

SEQ ID NO: 1000757 - DNA, 15 bp, Homo sapiens
cgactcactgcaacc

SEQ ID NO: 1000758 - DNA, 15 bp, Homo sapiens
gactcactgcaacct

SEQ ID NO: 1000759 - DNA, 15 bp, Homo sapiens
actcactgcaacctc

SEQ ID NO: 1000760 - DNA, 15 bp, Homo sapiens
ctcactgcaacctct

SEQ ID NO: 1000761 - DNA, 15 bp, Homo sapiens
tcactgcaacctctg

SEQ ID NO: 1000762 - DNA, 15 bp, Homo sapiens
cactgcaacctctgc

SEQ ID NO: 1000763 - DNA, 15 bp, Homo sapiens
actgcaacctctgcc

SEQ ID NO: 1000764 - DNA, 15 bp, Homo sapiens
ctgcaacctctgcct

SEQ ID NO: 1000765 - DNA, 15 bp, Homo sapiens
tgcaacctctgcctt

SEQ ID NO: 1000766 - DNA, 15 bp, Homo sapiens
gcaacctctgccttg

SEQ ID NO: 1000767 - DNA, 15 bp, Homo sapiens
caacctctgccttgt

SEQ ID NO: 1000768 - DNA, 15 bp, Homo sapiens
aacctctgccttgtg

SEQ ID NO: 1000769 - DNA, 15 bp, Homo sapiens
acctctgccttgtgg

SEQ ID NO: 1000770 - DNA, 15 bp, Homo sapiens
cctctgccttgtggg

SEQ ID NO: 1000771 - DNA, 15 bp, Homo sapiens
ctctgccttgtgggt

SEQ ID NO: 1000772 - DNA, 15 bp, Homo sapiens
tctgccttgtgggtt

SEQ ID NO: 1000773 - DNA, 15 bp, Homo sapiens
ctgccttgtgggtta

SEQ ID NO: 1000774 - DNA, 15 bp, Homo sapiens
tgccttgtgggttaa

SEQ ID NO: 1000775 - DNA, 15 bp, Homo sapiens
gccttgtgggttaaa

SEQ ID NO: 1000776 - DNA, 15 bp, Homo sapiens
ccttgtgggttaaaa

SEQ ID NO: 1000777 - DNA, 15 bp, Homo sapiens
cttgtgggttaaaat

SEQ ID NO: 1000778 - DNA, 15 bp, Homo sapiens
ttgtgggttaaaatg

SEQ ID NO: 1000779 - DNA, 15 bp, Homo sapiens
tgtgggttaaaatga

SEQ ID NO: 1000780 - DNA, 15 bp, Homo sapiens
gtgggttaaaatgat

SEQ ID NO: 1000781 - DNA, 15 bp, Homo sapiens
tgggttaaaatgatt

SEQ ID NO: 1000782 - DNA, 15 bp, Homo sapiens
gggttaaaatgattc

SEQ ID NO: 1000783 - DNA, 15 bp, Homo sapiens
ggttaaaatgattct

SEQ ID NO: 1000784 - DNA, 15 bp, Homo sapiens
gttaaaatgattctc

SEQ ID NO: 1000785 - DNA, 15 bp, Homo sapiens
ttaaaatgattctcc

SEQ ID NO: 1000786 - DNA, 15 bp, Homo sapiens
taaaatgattctcct

SEQ ID NO: 1000787 - DNA, 15 bp, Homo sapiens
aaaatgattctcctg

SEQ ID NO: 1000788 - DNA, 15 bp, Homo sapiens
aaatgattctcctgc

SEQ ID NO: 1000789 - DNA, 15 bp, Homo sapiens
aatgattctcctgcc

SEQ ID NO: 1000790 - DNA, 15 bp, Homo sapiens
atgattctcctgcct

SEQ ID NO: 1000791 - DNA, 15 bp, Homo sapiens
tcccgagtagctgag

SEQ ID NO: 1000792 - DNA, 15 bp, Homo sapiens
cccgagtagctgaga

SEQ ID NO: 1000793 - DNA, 15 bp, Homo sapiens
ccgagtagctgagat

SEQ ID NO: 1000794 - DNA, 15 bp, Homo sapiens
cgagtagctgagatt

SEQ ID NO: 1000795 - DNA, 15 bp, Homo sapiens
gagtagctgagatta

SEQ ID NO: 1000796 - DNA, 15 bp, Homo sapiens
agtagctgagattac

SEQ ID NO: 1000797 - DNA, 15 bp, Homo sapiens
gtagctgagattaca

SEQ ID NO: 1000798 - DNA, 15 bp, Homo sapiens
tagctgagattacag

SEQ ID NO: 1000799 - DNA, 15 bp, Homo sapiens
agctgagattacagg

SEQ ID NO: 1000800 - DNA, 15 bp, Homo sapiens
gctgagattacaggc

SEQ ID NO: 1000801 - DNA, 15 bp, Homo sapiens
ctgagattacaggca

SEQ ID NO: 1000802 - DNA, 15 bp, Homo sapiens
tgagattacaggcac

SEQ ID NO: 1000803 - DNA, 15 bp, Homo sapiens
gagattacaggcaca

SEQ ID NO: 1000804 - DNA, 15 bp, Homo sapiens
agattacaggcacac

SEQ ID NO: 1000805 - DNA, 15 bp, Homo sapiens
gattacaggcacaca

SEQ ID NO: 1000806 - DNA, 15 bp, Homo sapiens
attacaggcacacat

SEQ ID NO: 1000807 - DNA, 15 bp, Homo sapiens
ttacaggcacacatc

SEQ ID NO: 1000808 - DNA, 15 bp, Homo sapiens
tacaggcacacatca

SEQ ID NO: 1000809 - DNA, 15 bp, Homo sapiens
acaggcacacatcac

SEQ ID NO: 1000810 - DNA, 15 bp, Homo sapiens
caggcacacatcacc

SEQ ID NO: 1000811 - DNA, 15 bp, Homo sapiens
aggcacacatcacca

SEQ ID NO: 1000812 - DNA, 15 bp, Homo sapiens
ggcacacatcaccat

SEQ ID NO: 1000813 - DNA, 15 bp, Homo sapiens
gcacacatcaccatg

SEQ ID NO: 1000814 - DNA, 15 bp, Homo sapiens
cacacatcaccatgc

SEQ ID NO: 1000815 - DNA, 15 bp, Homo sapiens
acacatcaccatgct

SEQ ID NO: 1000816 - DNA, 15 bp, Homo sapiens
cacatcaccatgctc

SEQ ID NO: 1000817 - DNA, 15 bp, Homo sapiens
acatcaccatgctca

SEQ ID NO: 1000818 - DNA, 15 bp, Homo sapiens
catcaccatgctcag

SEQ ID NO: 1000819 - DNA, 15 bp, Homo sapiens
atcaccatgctcagc

SEQ ID NO: 1000820 - DNA, 15 bp, Homo sapiens
tcaccatgctcagct

SEQ ID NO: 1000821 - DNA, 15 bp, Homo sapiens
caccatgctcagcta

SEQ ID NO: 1000822 - DNA, 15 bp, Homo sapiens
accatgctcagctaa

SEQ ID NO: 1000823 - DNA, 15 bp, Homo sapiens
ccatgctcagctaat

SEQ ID NO: 1000824 - DNA, 15 bp, Homo sapiens
catgctcagctaatt

SEQ ID NO: 1000825 - DNA, 15 bp, Homo sapiens
atgctcagctaattt

SEQ ID NO: 1000826 - DNA, 15 bp, Homo sapiens
tgctcagctaatttt

SEQ ID NO: 1000827 - DNA, 15 bp, Homo sapiens
gctcagctaattttt

SEQ ID NO: 1000828 - DNA, 15 bp, Homo sapiens
ctcagctaatttttg

SEQ ID NO: 1000829 - DNA, 15 bp, Homo sapiens
tcagctaatttttgt

SEQ ID NO: 1000830 - DNA, 15 bp, Homo sapiens
atttttgtattttta

SEQ ID NO: 1000831 - DNA, 15 bp, Homo sapiens
tttttagtagagaca

SEQ ID NO: 1000832 - DNA, 15 bp, Homo sapiens
ttttagtagagacag

SEQ ID NO: 1000833 - DNA, 15 bp, Homo sapiens
tttagtagagacagg

SEQ ID NO: 1000834 - DNA, 15 bp, Homo sapiens
ttagtagagacaggg

SEQ ID NO: 1000835 - DNA, 15 bp, Homo sapiens
tagtagagacagggt

SEQ ID NO: 1000836 - DNA, 15 bp, Homo sapiens
agtagagacagggtt

SEQ ID NO: 1000837 - DNA, 15 bp, Homo sapiens
gtagagacagggttt

SEQ ID NO: 1000838 - DNA, 15 bp, Homo sapiens
tagagacagggtttc

SEQ ID NO: 1000839 - DNA, 15 bp, Homo sapiens
agagacagggtttca

SEQ ID NO: 1000840 - DNA, 15 bp, Homo sapiens
gagacagggtttcac

SEQ ID NO: 1000841 - DNA, 15 bp, Homo sapiens
agacagggtttcacc

SEQ ID NO: 1000842 - DNA, 15 bp, Homo sapiens
gacagggtttcacca

SEQ ID NO: 1000843 - DNA, 15 bp, Homo sapiens
acagggtttcaccat

SEQ ID NO: 1000844 - DNA, 15 bp, Homo sapiens
cagggtttcaccatg

SEQ ID NO: 1000845 - DNA, 15 bp, Homo sapiens
agggtttcaccatgt

SEQ ID NO: 1000846 - DNA, 15 bp, Homo sapiens
ggtttcaccatgttg

SEQ ID NO: 1000847 - DNA, 15 bp, Homo sapiens
gccaggctggtctcg

SEQ ID NO: 1000848 - DNA, 15 bp, Homo sapiens
tctcgaactcctgac

SEQ ID NO: 1000849 - DNA, 15 bp, Homo sapiens
ctcgaactcctgacc

SEQ ID NO: 1000850 - DNA, 15 bp, Homo sapiens
tcgaactcctgacct

SEQ ID NO: 1000851 - DNA, 15 bp, Homo sapiens
cgaactcctgacctc

SEQ ID NO: 1000852 - DNA, 15 bp, Homo sapiens
aactcctgacctcaa

SEQ ID NO: 1000853 - DNA, 15 bp, Homo sapiens
actcctgacctcaag

SEQ ID NO: 1000854 - DNA, 15 bp, Homo sapiens
ctcctgacctcaagt

SEQ ID NO: 1000855 - DNA, 15 bp, Homo sapiens
tcctgacctcaagtg

SEQ ID NO: 1000856 - DNA, 15 bp, Homo sapiens
cctgacctcaagtga

SEQ ID NO: 1000857 - DNA, 15 bp, Homo sapiens
ctgacctcaagtgat

SEQ ID NO: 1000858 - DNA, 15 bp, Homo sapiens
tgacctcaagtgata

SEQ ID NO: 1000859 - DNA, 15 bp, Homo sapiens
gacctcaagtgatac

SEQ ID NO: 1000860 - DNA, 15 bp, Homo sapiens
acctcaagtgataca

SEQ ID NO: 1000861 - DNA, 15 bp, Homo sapiens
cctcaagtgatacac

SEQ ID NO: 1000862 - DNA, 15 bp, Homo sapiens
ctcaagtgatacacc

SEQ ID NO: 1000863 - DNA, 15 bp, Homo sapiens
tcaagtgatacaccc

SEQ ID NO: 1000864 - DNA, 15 bp, Homo sapiens
caagtgatacacccg

SEQ ID NO: 1000865 - DNA, 15 bp, Homo sapiens
aagtgatacacccgt

SEQ ID NO: 1000866 - DNA, 15 bp, Homo sapiens
agtgatacacccgtc

SEQ ID NO: 1000867 - DNA, 15 bp, Homo sapiens
gtgatacacccgtct

SEQ ID NO: 1000868 - DNA, 15 bp, Homo sapiens
tgatacacccgtctt

SEQ ID NO: 1000869 - DNA, 15 bp, Homo sapiens
gatacacccgtcttg

SEQ ID NO: 1000870 - DNA, 15 bp, Homo sapiens
atacacccgtcttgg

SEQ ID NO: 1000871 - DNA, 15 bp, Homo sapiens
tacacccgtcttggc

SEQ ID NO: 1000872 - DNA, 15 bp, Homo sapiens
acacccgtcttggcc

SEQ ID NO: 1000873 - DNA, 15 bp, Homo sapiens
cacccgtcttggcct

SEQ ID NO: 1000874 - DNA, 15 bp, Homo sapiens
acccgtcttggcctc

SEQ ID NO: 1000875 - DNA, 15 bp, Homo sapiens
cccgtcttggcctcc

SEQ ID NO: 1000876 - DNA, 15 bp, Homo sapiens
ccgtcttggcctccc

SEQ ID NO: 1000877 - DNA, 15 bp, Homo sapiens
cgtcttggcctccca

SEQ ID NO: 1000878 - DNA, 15 bp, Homo sapiens
gtcttggcctcccaa

SEQ ID NO: 1000879 - DNA, 15 bp, Homo sapiens
tcttggcctcccaaa

SEQ ID NO: 1000880 - DNA, 15 bp, Homo sapiens
gtgagccaccgcgcc

SEQ ID NO: 1000881 - DNA, 15 bp, Homo sapiens
caccgcgcccggccc

SEQ ID NO: 1000882 - DNA, 15 bp, Homo sapiens
accgcgcccggccca

SEQ ID NO: 1000883 - DNA, 15 bp, Homo sapiens
ccgcgcccggcccag

SEQ ID NO: 1000884 - DNA, 15 bp, Homo sapiens
cgcgcccggcccagt

SEQ ID NO: 1000885 - DNA, 15 bp, Homo sapiens
gcgcccggcccagtt

SEQ ID NO: 1000886 - DNA, 15 bp, Homo sapiens
cgcccggcccagtta

SEQ ID NO: 1000887 - DNA, 15 bp, Homo sapiens
gcccggcccagttat

SEQ ID NO: 1000888 - DNA, 15 bp, Homo sapiens
cccggcccagttatt

SEQ ID NO: 1000889 - DNA, 15 bp, Homo sapiens
ccggcccagttattt

SEQ ID NO: 1000890 - DNA, 15 bp, Homo sapiens
cggcccagttattta

SEQ ID NO: 1000891 - DNA, 15 bp, Homo sapiens
ggcccagttatttat

SEQ ID NO: 1000892 - DNA, 15 bp, Homo sapiens
gcccagttatttatt

SEQ ID NO: 1000893 - DNA, 15 bp, Homo sapiens
cccagttatttatta

SEQ ID NO: 1000894 - DNA, 15 bp, Homo sapiens
ccagttatttattac

SEQ ID NO: 1000895 - DNA, 15 bp, Homo sapiens
atttattacctctta

SEQ ID NO: 1000896 - DNA, 15 bp, Homo sapiens
tttattacctcttat

SEQ ID NO: 1000897 - DNA, 15 bp, Homo sapiens
ttattacctcttatg

SEQ ID NO: 1000898 - DNA, 15 bp, Homo sapiens
tattacctcttatgt

SEQ ID NO: 1000899 - DNA, 15 bp, Homo sapiens
attacctcttatgtg

SEQ ID NO: 1000900 - DNA, 15 bp, Homo sapiens
ttacctcttatgtgc

SEQ ID NO: 1000901 - DNA, 15 bp, Homo sapiens
tacctcttatgtgct

SEQ ID NO: 1000902 - DNA, 15 bp, Homo sapiens
acctcttatgtgctc

SEQ ID NO: 1000903 - DNA, 15 bp, Homo sapiens
cctcttatgtgctct

SEQ ID NO: 1000904 - DNA, 15 bp, Homo sapiens
ctcttatgtgctcta

SEQ ID NO: 1000905 - DNA, 15 bp, Homo sapiens
tcttatgtgctctac

SEQ ID NO: 1000906 - DNA, 15 bp, Homo sapiens
cttatgtgctctacg

SEQ ID NO: 1000907 - DNA, 15 bp, Homo sapiens
ttatgtgctctacgg

SEQ ID NO: 1000908 - DNA, 15 bp, Homo sapiens
tatgtgctctacgga

SEQ ID NO: 1000909 - DNA, 15 bp, Homo sapiens
atgtgctctacggac

SEQ ID NO: 1000910 - DNA, 15 bp, Homo sapiens
tgtgctctacggact

SEQ ID NO: 1000911 - DNA, 15 bp, Homo sapiens
gtgctctacggactt

SEQ ID NO: 1000912 - DNA, 15 bp, Homo sapiens
tgctctacggactta

SEQ ID NO: 1000913 - DNA, 15 bp, Homo sapiens
gctctacggacttaa

SEQ ID NO: 1000914 - DNA, 15 bp, Homo sapiens
ctctacggacttaaa

SEQ ID NO: 1000915 - DNA, 15 bp, Homo sapiens
tctacggacttaaag

SEQ ID NO: 1000916 - DNA, 15 bp, Homo sapiens
ctacggacttaaagt

SEQ ID NO: 1000917 - DNA, 15 bp, Homo sapiens
tacggacttaaagta

SEQ ID NO: 1000918 - DNA, 15 bp, Homo sapiens
acggacttaaagtat

SEQ ID NO: 1000919 - DNA, 15 bp, Homo sapiens
cggacttaaagtatt

SEQ ID NO: 1000920 - DNA, 15 bp, Homo sapiens
ggacttaaagtattt

SEQ ID NO: 1000921 - DNA, 15 bp, Homo sapiens
gacttaaagtatttg

SEQ ID NO: 1000922 - DNA, 15 bp, Homo sapiens
acttaaagtatttgg

SEQ ID NO: 1000923 - DNA, 15 bp, Homo sapiens
cttaaagtatttgga

SEQ ID NO: 1000924 - DNA, 15 bp, Homo sapiens
ttaaagtatttggag

SEQ ID NO: 1000925 - DNA, 15 bp, Homo sapiens
taaagtatttggagg

SEQ ID NO: 1000926 - DNA, 15 bp, Homo sapiens
aaagtatttggagga

SEQ ID NO: 1000927 - DNA, 15 bp, Homo sapiens
aagtatttggaggag

SEQ ID NO: 1000928 - DNA, 15 bp, Homo sapiens
agtatttggaggaga

SEQ ID NO: 1000929 - DNA, 15 bp, Homo sapiens
gtatttggaggagat

SEQ ID NO: 1000930 - DNA, 15 bp, Homo sapiens
tatttggaggagatc

SEQ ID NO: 1000931 - DNA, 15 bp, Homo sapiens
atttggaggagatct

SEQ ID NO: 1000932 - DNA, 15 bp, Homo sapiens
tttggaggagatctc

SEQ ID NO: 1000933 - DNA, 15 bp, Homo sapiens
ttggaggagatctca

SEQ ID NO: 1000934 - DNA, 15 bp, Homo sapiens
tggaggagatctcat

SEQ ID NO: 1000935 - DNA, 15 bp, Homo sapiens
ggaggagatctcatg

SEQ ID NO: 1000936 - DNA, 15 bp, Homo sapiens
gaggagatctcatgc

SEQ ID NO: 1000937 - DNA, 15 bp, Homo sapiens
aggagatctcatgcc

SEQ ID NO: 1000938 - DNA, 15 bp, Homo sapiens
ggagatctcatgcct

SEQ ID NO: 1000939 - DNA, 15 bp, Homo sapiens
gagatctcatgcctc

SEQ ID NO: 1000940 - DNA, 15 bp, Homo sapiens
agatctcatgcctcc

SEQ ID NO: 1000941 - DNA, 15 bp, Homo sapiens
gatctcatgcctcca

SEQ ID NO: 1000942 - DNA, 15 bp, Homo sapiens
atctcatgcctccat

SEQ ID NO: 1000943 - DNA, 15 bp, Homo sapiens
tctcatgcctccatc

SEQ ID NO: 1000944 - DNA, 15 bp, Homo sapiens
ctcatgcctccatct

SEQ ID NO: 1000945 - DNA, 15 bp, Homo sapiens
tcatgcctccatctt

SEQ ID NO: 1000946 - DNA, 15 bp, Homo sapiens
catgcctccatctta

SEQ ID NO: 1000947 - DNA, 15 bp, Homo sapiens
atgcctccatcttac

SEQ ID NO: 1000948 - DNA, 15 bp, Homo sapiens
tgcctccatcttaca

SEQ ID NO: 1000949 - DNA, 15 bp, Homo sapiens
gcctccatcttacaa

SEQ ID NO: 1000950 - DNA, 15 bp, Homo sapiens
cctccatcttacaag

SEQ ID NO: 1000951 - DNA, 15 bp, Homo sapiens
ctccatcttacaagc

SEQ ID NO: 1000952 - DNA, 15 bp, Homo sapiens
tccatcttacaagct

SEQ ID NO: 1000953 - DNA, 15 bp, Homo sapiens
ccatcttacaagctc

SEQ ID NO: 1000954 - DNA, 15 bp, Homo sapiens
catcttacaagctca

SEQ ID NO: 1000955 - DNA, 15 bp, Homo sapiens
atcttacaagctcag

SEQ ID NO: 1000956 - DNA, 15 bp, Homo sapiens
tcttacaagctcagg

SEQ ID NO: 1000957 - DNA, 15 bp, Homo sapiens
cttacaagctcagga

SEQ ID NO: 1000958 - DNA, 15 bp, Homo sapiens
ttacaagctcaggaa

SEQ ID NO: 1000959 - DNA, 15 bp, Homo sapiens
tacaagctcaggaat

SEQ ID NO: 1000960 - DNA, 15 bp, Homo sapiens
acaagctcaggaatc

SEQ ID NO: 1000961 - DNA, 15 bp, Homo sapiens
caagctcaggaatca

SEQ ID NO: 1000962 - DNA, 15 bp, Homo sapiens
aagctcaggaatcat

SEQ ID NO: 1000963 - DNA, 15 bp, Homo sapiens
agctcaggaatcatc

SEQ ID NO: 1000964 - DNA, 15 bp, Homo sapiens
gctcaggaatcatct

SEQ ID NO: 1000965 - DNA, 15 bp, Homo sapiens
ctcaggaatcatctt

SEQ ID NO: 1000966 - DNA, 15 bp, Homo sapiens
tcaggaatcatcttt

SEQ ID NO: 1000967 - DNA, 15 bp, Homo sapiens
caggaatcatctttg

SEQ ID NO: 1000968 - DNA, 15 bp, Homo sapiens
aggaatcatctttgt

SEQ ID NO: 1000969 - DNA, 15 bp, Homo sapiens
ggaatcatctttgtt

SEQ ID NO: 1000970 - DNA, 15 bp, Homo sapiens
gaatcatctttgttg

SEQ ID NO: 1000971 - DNA, 15 bp, Homo sapiens
aatcatctttgttga

SEQ ID NO: 1000972 - DNA, 15 bp, Homo sapiens
atcatctttgttgac

SEQ ID NO: 1000973 - DNA, 15 bp, Homo sapiens
tcatctttgttgaca

SEQ ID NO: 1000974 - DNA, 15 bp, Homo sapiens
catctttgttgacaa

SEQ ID NO: 1000975 - DNA, 15 bp, Homo sapiens
atctttgttgacaaa

SEQ ID NO: 1000976 - DNA, 15 bp, Homo sapiens
tctttgttgacaaac

SEQ ID NO: 1000977 - DNA, 15 bp, Homo sapiens
ctttgttgacaaaca

SEQ ID NO: 1000978 - DNA, 15 bp, Homo sapiens
tttgttgacaaacac

SEQ ID NO: 1000979 - DNA, 15 bp, Homo sapiens
ttgttgacaaacaca

SEQ ID NO: 1000980 - DNA, 15 bp, Homo sapiens
tgttgacaaacacaa

SEQ ID NO: 1000981 - DNA, 15 bp, Homo sapiens
gttgacaaacacaaa

SEQ ID NO: 1000982 - DNA, 15 bp, Homo sapiens
ttgacaaacacaaag

SEQ ID NO: 1000983 - DNA, 15 bp, Homo sapiens
tgacaaacacaaagg

SEQ ID NO: 1000984 - DNA, 15 bp, Homo sapiens
gacaaacacaaaggt

SEQ ID NO: 1000985 - DNA, 15 bp, Homo sapiens
acaaacacaaaggta

SEQ ID NO: 1000986 - DNA, 15 bp, Homo sapiens
caaacacaaaggtag

SEQ ID NO: 1000987 - DNA, 15 bp, Homo sapiens
aaacacaaaggtagg

SEQ ID NO: 1000988 - DNA, 15 bp, Homo sapiens
aacacaaaggtagga

SEQ ID NO: 1000989 - DNA, 15 bp, Homo sapiens
acacaaaggtaggag

SEQ ID NO: 1000990 - DNA, 15 bp, Homo sapiens
cacaaaggtaggaga

SEQ ID NO: 1000991 - DNA, 15 bp, Homo sapiens
acaaaggtaggagat

SEQ ID NO: 1000992 - DNA, 15 bp, Homo sapiens
caaaggtaggagatc

SEQ ID NO: 1000993 - DNA, 15 bp, Homo sapiens
aaaggtaggagatca

SEQ ID NO: 1000994 - DNA, 15 bp, Homo sapiens
aaggtaggagatcat

SEQ ID NO: 1000995 - DNA, 15 bp, Homo sapiens
aggtaggagatcatg

SEQ ID NO: 1000996 - DNA, 15 bp, Homo sapiens
ggtaggagatcatga

SEQ ID NO: 1000997 - DNA, 15 bp, Homo sapiens
gtaggagatcatgac

SEQ ID NO: 1000998 - DNA, 15 bp, Homo sapiens
taggagatcatgaca

SEQ ID NO: 1000999 - DNA, 15 bp, Homo sapiens
aggagatcatgacag

SEQ ID NO: 1001000 - DNA, 15 bp, Homo sapiens
ggagatcatgacaga

SEQ ID NO: 1001001 - DNA, 15 bp, Homo sapiens
gagatcatgacagac

SEQ ID NO: 1001002 - DNA, 15 bp, Homo sapiens
agatcatgacagact

SEQ ID NO: 1001003 - DNA, 15 bp, Homo sapiens
gatcatgacagactt

SEQ ID NO: 1001004 - DNA, 15 bp, Homo sapiens
atcatgacagactta

SEQ ID NO: 1001005 - DNA, 15 bp, Homo sapiens
tcatgacagacttaa

SEQ ID NO: 1001006 - DNA, 15 bp, Homo sapiens
catgacagacttaac

SEQ ID NO: 1001007 - DNA, 15 bp, Homo sapiens
atgacagacttaacc

SEQ ID NO: 1001008 - DNA, 15 bp, Homo sapiens
tgacagacttaacca

SEQ ID NO: 1001009 - DNA, 15 bp, Homo sapiens
gacagacttaaccaa

SEQ ID NO: 1001010 - DNA, 15 bp, Homo sapiens
acagacttaaccaag

SEQ ID NO: 1001011 - DNA, 15 bp, Homo sapiens
cagacttaaccaagg

SEQ ID NO: 1001012 - DNA, 15 bp, Homo sapiens
agacttaaccaagga

SEQ ID NO: 1001013 - DNA, 15 bp, Homo sapiens
gacttaaccaaggag

SEQ ID NO: 1001014 - DNA, 15 bp, Homo sapiens
acttaaccaaggaga

SEQ ID NO: 1001015 - DNA, 15 bp, Homo sapiens
cttaaccaaggagaa

SEQ ID NO: 1001016 - DNA, 15 bp, Homo sapiens
ttaaccaaggagaaa

SEQ ID NO: 1001017 - DNA, 15 bp, Homo sapiens
taaccaaggagaaaa

SEQ ID NO: 1001018 - DNA, 15 bp, Homo sapiens
aaccaaggagaaaaa

SEQ ID NO: 1001019 - DNA, 15 bp, Homo sapiens
accaaggagaaaaat

SEQ ID NO: 1001020 - DNA, 15 bp, Homo sapiens
ccaaggagaaaaatg

SEQ ID NO: 1001021 - DNA, 15 bp, Homo sapiens
caaggagaaaaatgg

SEQ ID NO: 1001022 - DNA, 15 bp, Homo sapiens
aaggagaaaaatgga

SEQ ID NO: 1001023 - DNA, 15 bp, Homo sapiens
aggagaaaaatggag

SEQ ID NO: 1001024 - DNA, 15 bp, Homo sapiens
ggagaaaaatggagc

SEQ ID NO: 1001025 - DNA, 15 bp, Homo sapiens
gagaaaaatggagct

SEQ ID NO: 1001026 - DNA, 15 bp, Homo sapiens
agaaaaatggagctg

SEQ ID NO: 1001027 - DNA, 15 bp, Homo sapiens
gaaaaatggagctga

SEQ ID NO: 1001028 - DNA, 15 bp, Homo sapiens
aaaaatggagctgat

SEQ ID NO: 1001029 - DNA, 15 bp, Homo sapiens
aaaatggagctgatg

SEQ ID NO: 1001030 - DNA, 15 bp, Homo sapiens
aaatggagctgatgc

SEQ ID NO: 1001031 - DNA, 15 bp, Homo sapiens
aatggagctgatgca

SEQ ID NO: 1001032 - DNA, 15 bp, Homo sapiens
atggagctgatgcac

SEQ ID NO: 1001033 - DNA, 15 bp, Homo sapiens
tggagctgatgcact

SEQ ID NO: 1001034 - DNA, 15 bp, Homo sapiens
ggagctgatgcactt

SEQ ID NO: 1001035 - DNA, 15 bp, Homo sapiens
gagctgatgcacttt

SEQ ID NO: 1001036 - DNA, 15 bp, Homo sapiens
agctgatgcactttc

SEQ ID NO: 1001037 - DNA, 15 bp, Homo sapiens
gctgatgcactttct

SEQ ID NO: 1001038 - DNA, 15 bp, Homo sapiens
ctgatgcactttcta

SEQ ID NO: 1001039 - DNA, 15 bp, Homo sapiens
tgatgcactttctaa

SEQ ID NO: 1001040 - DNA, 15 bp, Homo sapiens
gatgcactttctaat

SEQ ID NO: 1001041 - DNA, 15 bp, Homo sapiens
atgcactttctaatc

SEQ ID NO: 1001042 - DNA, 15 bp, Homo sapiens
tgcactttctaatcc

SEQ ID NO: 1001043 - DNA, 15 bp, Homo sapiens
gcactttctaatcct

SEQ ID NO: 1001044 - DNA, 15 bp, Homo sapiens
cactttctaatcctg

SEQ ID NO: 1001045 - DNA, 15 bp, Homo sapiens
actttctaatcctgg

SEQ ID NO: 1001046 - DNA, 15 bp, Homo sapiens
ctttctaatcctggg

SEQ ID NO: 1001047 - DNA, 15 bp, Homo sapiens
tttctaatcctgggt

SEQ ID NO: 1001048 - DNA, 15 bp, Homo sapiens
ttctaatcctgggtc

SEQ ID NO: 1001049 - DNA, 15 bp, Homo sapiens
tctaatcctgggtct

SEQ ID NO: 1001050 - DNA, 15 bp, Homo sapiens
ctaatcctgggtcta

SEQ ID NO: 1001051 - DNA, 15 bp, Homo sapiens
taatcctgggtctac

SEQ ID NO: 1001052 - DNA, 15 bp, Homo sapiens
aatcctgggtctacc

SEQ ID NO: 1001053 - DNA, 15 bp, Homo sapiens
atcctgggtctaccc

SEQ ID NO: 1001054 - DNA, 15 bp, Homo sapiens
tcctgggtctaccct

SEQ ID NO: 1001055 - DNA, 15 bp, Homo sapiens
cctgggtctaccctt

SEQ ID NO: 1001056 - DNA, 15 bp, Homo sapiens
ctgggtctacccttt

SEQ ID NO: 1001057 - DNA, 15 bp, Homo sapiens
tgggtctaccctttt

SEQ ID NO: 1001058 - DNA, 15 bp, Homo sapiens
gggtctacccttttt

SEQ ID NO: 1001059 - DNA, 15 bp, Homo sapiens
ggtctaccctttttc

SEQ ID NO: 1001060 - DNA, 15 bp, Homo sapiens
gtctaccctttttct

SEQ ID NO: 1001061 - DNA, 15 bp, Homo sapiens
tctaccctttttcta

SEQ ID NO: 1001062 - DNA, 15 bp, Homo sapiens
ctaccctttttctat

SEQ ID NO: 1001063 - DNA, 15 bp, Homo sapiens
taccctttttctata

SEQ ID NO: 1001064 - DNA, 15 bp, Homo sapiens
accctttttctataa

SEQ ID NO: 1001065 - DNA, 15 bp, Homo sapiens
ccctttttctataaa

SEQ ID NO: 1001066 - DNA, 15 bp, Homo sapiens
cctttttctataaaa

SEQ ID NO: 1001067 - DNA, 15 bp, Homo sapiens
ctttttctataaaaa

SEQ ID NO: 1001068 - DNA, 15 bp, Homo sapiens
tttttctataaaaat

SEQ ID NO: 1001069 - DNA, 15 bp, Homo sapiens
ttttctataaaaata

SEQ ID NO: 1001070 - DNA, 15 bp, Homo sapiens
tttctataaaaatat

SEQ ID NO: 1001071 - DNA, 15 bp, Homo sapiens
ttctataaaaatatt

SEQ ID NO: 1001072 - DNA, 15 bp, Homo sapiens
tctataaaaatattt

SEQ ID NO: 1001073 - DNA, 15 bp, Homo sapiens
ctataaaaatatttt

SEQ ID NO: 1001074 - DNA, 15 bp, Homo sapiens
tataaaaatattttt

SEQ ID NO: 1001075 - DNA, 15 bp, Homo sapiens
ataaaaatattttta

SEQ ID NO: 1001076 - DNA, 15 bp, Homo sapiens
taaaaatatttttaa

SEQ ID NO: 1001077 - DNA, 15 bp, Homo sapiens
aaaaatatttttaaa

SEQ ID NO: 1001078 - DNA, 15 bp, Homo sapiens
aaaatatttttaaaa

SEQ ID NO: 1001079 - DNA, 15 bp, Homo sapiens
aaatatttttaaaaa

SEQ ID NO: 1001080 - DNA, 15 bp, Homo sapiens
aatatttttaaaaat

SEQ ID NO: 1001081 - DNA, 15 bp, Homo sapiens
atatttttaaaaatt

SEQ ID NO: 1001082 - DNA, 15 bp, Homo sapiens
tatttttaaaaatta

SEQ ID NO: 1001083 - DNA, 15 bp, Homo sapiens
atttttaaaaattaa

SEQ ID NO: 1001084 - DNA, 15 bp, Homo sapiens
tttttaaaaattaat

SEQ ID NO: 1001085 - DNA, 15 bp, Homo sapiens
ttttaaaaattaatt

SEQ ID NO: 1001086 - DNA, 15 bp, Homo sapiens
tttaaaaattaatta

SEQ ID NO: 1001087 - DNA, 15 bp, Homo sapiens
ttaaaaattaattac

SEQ ID NO: 1001088 - DNA, 15 bp, Homo sapiens
taaaaattaattaca

SEQ ID NO: 1001089 - DNA, 15 bp, Homo sapiens
aaaaattaattacac

SEQ ID NO: 1001090 - DNA, 15 bp, Homo sapiens
aaaattaattacaca

SEQ ID NO: 1001091 - DNA, 15 bp, Homo sapiens
aaattaattacacaa

SEQ ID NO: 1001092 - DNA, 15 bp, Homo sapiens
aattaattacacaag

SEQ ID NO: 1001093 - DNA, 15 bp, Homo sapiens
attaattacacaagt

SEQ ID NO: 1001094 - DNA, 15 bp, Homo sapiens
ttaattacacaagtg

SEQ ID NO: 1001095 - DNA, 15 bp, Homo sapiens
taattacacaagtga

SEQ ID NO: 1001096 - DNA, 15 bp, Homo sapiens
aattacacaagtgac

SEQ ID NO: 1001097 - DNA, 15 bp, Homo sapiens
attacacaagtgaca

SEQ ID NO: 1001098 - DNA, 15 bp, Homo sapiens
ttacacaagtgacac

SEQ ID NO: 1001099 - DNA, 15 bp, Homo sapiens
tacacaagtgacaca

SEQ ID NO: 1001100 - DNA, 15 bp, Homo sapiens
acacaagtgacacat

SEQ ID NO: 1001101 - DNA, 15 bp, Homo sapiens
cacaagtgacacatg

SEQ ID NO: 1001102 - DNA, 15 bp, Homo sapiens
acaagtgacacatga

SEQ ID NO: 1001103 - DNA, 15 bp, Homo sapiens
caagtgacacatgaa

SEQ ID NO: 1001104 - DNA, 15 bp, Homo sapiens
aagtgacacatgaac

SEQ ID NO: 1001105 - DNA, 15 bp, Homo sapiens
agtgacacatgaaca

SEQ ID NO: 1001106 - DNA, 15 bp, Homo sapiens
gtgacacatgaacaa

SEQ ID NO: 1001107 - DNA, 15 bp, Homo sapiens
tgacacatgaacaat

SEQ ID NO: 1001108 - DNA, 15 bp, Homo sapiens
gacacatgaacaatg

SEQ ID NO: 1001109 - DNA, 15 bp, Homo sapiens
acacatgaacaatgc

SEQ ID NO: 1001110 - DNA, 15 bp, Homo sapiens
cacatgaacaatgct

SEQ ID NO: 1001111 - DNA, 15 bp, Homo sapiens
acatgaacaatgctt

SEQ ID NO: 1001112 - DNA, 15 bp, Homo sapiens
catgaacaatgctta

SEQ ID NO: 1001113 - DNA, 15 bp, Homo sapiens
atgaacaatgcttat

SEQ ID NO: 1001114 - DNA, 15 bp, Homo sapiens
tgaacaatgcttatt

SEQ ID NO: 1001115 - DNA, 15 bp, Homo sapiens
gaacaatgcttatta

SEQ ID NO: 1001116 - DNA, 15 bp, Homo sapiens
aacaatgcttattac

SEQ ID NO: 1001117 - DNA, 15 bp, Homo sapiens
acaatgcttattaca

SEQ ID NO: 1001118 - DNA, 15 bp, Homo sapiens
caatgcttattacat

SEQ ID NO: 1001119 - DNA, 15 bp, Homo sapiens
aatgcttattacata

SEQ ID NO: 1001120 - DNA, 15 bp, Homo sapiens
atgcttattacataa

SEQ ID NO: 1001121 - DNA, 15 bp, Homo sapiens
tgcttattacataaa

SEQ ID NO: 1001122 - DNA, 15 bp, Homo sapiens
gcttattacataaaa

SEQ ID NO: 1001123 - DNA, 15 bp, Homo sapiens
cttattacataaaaa

SEQ ID NO: 1001124 - DNA, 15 bp, Homo sapiens
ttattacataaaaat

SEQ ID NO: 1001125 - DNA, 15 bp, Homo sapiens
tattacataaaaatg

SEQ ID NO: 1001126 - DNA, 15 bp, Homo sapiens
attacataaaaatga

SEQ ID NO: 1001127 - DNA, 15 bp, Homo sapiens
ttacataaaaatgat

SEQ ID NO: 1001128 - DNA, 15 bp, Homo sapiens
tacataaaaatgata

SEQ ID NO: 1001129 - DNA, 15 bp, Homo sapiens
acataaaaatgatac

SEQ ID NO: 1001130 - DNA, 15 bp, Homo sapiens
cataaaaatgataca

SEQ ID NO: 1001131 - DNA, 15 bp, Homo sapiens
ataaaaatgatacaa

SEQ ID NO: 1001132 - DNA, 15 bp, Homo sapiens
taaaaatgatacaat

SEQ ID NO: 1001133 - DNA, 15 bp, Homo sapiens
aaaaatgatacaata

SEQ ID NO: 1001134 - DNA, 15 bp, Homo sapiens
aaaatgatacaatac

SEQ ID NO: 1001135 - DNA, 15 bp, Homo sapiens
aaatgatacaataca

SEQ ID NO: 1001136 - DNA, 15 bp, Homo sapiens
aatgatacaatacag

SEQ ID NO: 1001137 - DNA, 15 bp, Homo sapiens
atgatacaatacagg

SEQ ID NO: 1001138 - DNA, 15 bp, Homo sapiens
tgatacaatacagga

SEQ ID NO: 1001139 - DNA, 15 bp, Homo sapiens
gatacaatacaggat

SEQ ID NO: 1001140 - DNA, 15 bp, Homo sapiens
atacaatacaggatg

SEQ ID NO: 1001141 - DNA, 15 bp, Homo sapiens
tacaatacaggatga

SEQ ID NO: 1001142 - DNA, 15 bp, Homo sapiens
acaatacaggatgat

SEQ ID NO: 1001143 - DNA, 15 bp, Homo sapiens
caatacaggatgata

SEQ ID NO: 1001144 - DNA, 15 bp, Homo sapiens
aatacaggatgatat

SEQ ID NO: 1001145 - DNA, 15 bp, Homo sapiens
atacaggatgatata

SEQ ID NO: 1001146 - DNA, 15 bp, Homo sapiens
tacaggatgatataa

SEQ ID NO: 1001147 - DNA, 15 bp, Homo sapiens
acaggatgatataaa

SEQ ID NO: 1001148 - DNA, 15 bp, Homo sapiens
caggatgatataaat

SEQ ID NO: 1001149 - DNA, 15 bp, Homo sapiens
aggatgatataaatt

SEQ ID NO: 1001150 - DNA, 15 bp, Homo sapiens
ggatgatataaatta

SEQ ID NO: 1001151 - DNA, 15 bp, Homo sapiens
gatgatataaattaa

SEQ ID NO: 1001152 - DNA, 15 bp, Homo sapiens
atgatataaattaaa

SEQ ID NO: 1001153 - DNA, 15 bp, Homo sapiens
tgatataaattaaaa

SEQ ID NO: 1001154 - DNA, 15 bp, Homo sapiens
gatataaattaaaaa

SEQ ID NO: 1001155 - DNA, 15 bp, Homo sapiens
atataaattaaaaag

SEQ ID NO: 1001156 - DNA, 15 bp, Homo sapiens
tataaattaaaaagc

SEQ ID NO: 1001157 - DNA, 15 bp, Homo sapiens
ataaattaaaaagca

SEQ ID NO: 1001158 - DNA, 15 bp, Homo sapiens
taaattaaaaagcaa

SEQ ID NO: 1001159 - DNA, 15 bp, Homo sapiens
aaattaaaaagcaaa

SEQ ID NO: 1001160 - DNA, 15 bp, Homo sapiens
aattaaaaagcaaat

SEQ ID NO: 1001161 - DNA, 15 bp, Homo sapiens
attaaaaagcaaata

SEQ ID NO: 1001162 - DNA, 15 bp, Homo sapiens
ttaaaaagcaaatat

SEQ ID NO: 1001163 - DNA, 15 bp, Homo sapiens
taaaaagcaaatatc

SEQ ID NO: 1001164 - DNA, 15 bp, Homo sapiens
aaaaagcaaatatct

SEQ ID NO: 1001165 - DNA, 15 bp, Homo sapiens
aaaagcaaatatctt

SEQ ID NO: 1001166 - DNA, 15 bp, Homo sapiens
aaagcaaatatcttt

SEQ ID NO: 1001167 - DNA, 15 bp, Homo sapiens
aagcaaatatctttg

SEQ ID NO: 1001168 - DNA, 15 bp, Homo sapiens
agcaaatatctttga

SEQ ID NO: 1001169 - DNA, 15 bp, Homo sapiens
gcaaatatctttgac

SEQ ID NO: 1001170 - DNA, 15 bp, Homo sapiens
caaatatctttgaca

SEQ ID NO: 1001171 - DNA, 15 bp, Homo sapiens
aaatatctttgacac

SEQ ID NO: 1001172 - DNA, 15 bp, Homo sapiens
aatatctttgacacc

SEQ ID NO: 1001173 - DNA, 15 bp, Homo sapiens
atatctttgacacct

SEQ ID NO: 1001174 - DNA, 15 bp, Homo sapiens
tatctttgacacctt

SEQ ID NO: 1001175 - DNA, 15 bp, Homo sapiens
atctttgacaccttc

SEQ ID NO: 1001176 - DNA, 15 bp, Homo sapiens
tctttgacaccttct

SEQ ID NO: 1001177 - DNA, 15 bp, Homo sapiens
ctttgacaccttctt

SEQ ID NO: 1001178 - DNA, 15 bp, Homo sapiens
tttgacaccttcttg

SEQ ID NO: 1001179 - DNA, 15 bp, Homo sapiens
ttgacaccttcttgt

SEQ ID NO: 1001180 - DNA, 15 bp, Homo sapiens
tgacaccttcttgtt

SEQ ID NO: 1001181 - DNA, 15 bp, Homo sapiens
gacaccttcttgttc

SEQ ID NO: 1001182 - DNA, 15 bp, Homo sapiens
acaccttcttgttca

SEQ ID NO: 1001183 - DNA, 15 bp, Homo sapiens
caccttcttgttcaa

SEQ ID NO: 1001184 - DNA, 15 bp, Homo sapiens
accttcttgttcaac

SEQ ID NO: 1001185 - DNA, 15 bp, Homo sapiens
ccttcttgttcaaca

SEQ ID NO: 1001186 - DNA, 15 bp, Homo sapiens
cttcttgttcaacat

SEQ ID NO: 1001187 - DNA, 15 bp, Homo sapiens
ttcttgttcaacatt

SEQ ID NO: 1001188 - DNA, 15 bp, Homo sapiens
tcttgttcaacattc

SEQ ID NO: 1001189 - DNA, 15 bp, Homo sapiens
cttgttcaacattct

SEQ ID NO: 1001190 - DNA, 15 bp, Homo sapiens
ttgttcaacattctc

SEQ ID NO: 1001191 - DNA, 15 bp, Homo sapiens
tgttcaacattctct

SEQ ID NO: 1001192 - DNA, 15 bp, Homo sapiens
gttcaacattctctt

SEQ ID NO: 1001193 - DNA, 15 bp, Homo sapiens
ttcaacattctcttt

SEQ ID NO: 1001194 - DNA, 15 bp, Homo sapiens
tcaacattctctttc

SEQ ID NO: 1001195 - DNA, 15 bp, Homo sapiens
caacattctctttca

SEQ ID NO: 1001196 - DNA, 15 bp, Homo sapiens
aacattctctttcag

SEQ ID NO: 1001197 - DNA, 15 bp, Homo sapiens
acattctctttcagg

SEQ ID NO: 1001198 - DNA, 15 bp, Homo sapiens
cattctctttcaggt

SEQ ID NO: 1001199 - DNA, 15 bp, Homo sapiens
attctctttcaggtg

SEQ ID NO: 1001200 - DNA, 15 bp, Homo sapiens
ttctctttcaggtga

SEQ ID NO: 1001201 - DNA, 15 bp, Homo sapiens
tctctttcaggtgaa

SEQ ID NO: 1001202 - DNA, 15 bp, Homo sapiens
ctctttcaggtgaag

SEQ ID NO: 1001203 - DNA, 15 bp, Homo sapiens
tctttcaggtgaagt

SEQ ID NO: 1001204 - DNA, 15 bp, Homo sapiens
ctttcaggtgaagtt

SEQ ID NO: 1001205 - DNA, 15 bp, Homo sapiens
tttcaggtgaagtta

SEQ ID NO: 1001206 - DNA, 15 bp, Homo sapiens
ttcaggtgaagttat

SEQ ID NO: 1001207 - DNA, 15 bp, Homo sapiens
tcaggtgaagttatc

SEQ ID NO: 1001208 - DNA, 15 bp, Homo sapiens
caggtgaagttatct

SEQ ID NO: 1001209 - DNA, 15 bp, Homo sapiens
aggtgaagttatctg

SEQ ID NO: 1001210 - DNA, 15 bp, Homo sapiens
ggtgaagttatctgt

SEQ ID NO: 1001211 - DNA, 15 bp, Homo sapiens
gtgaagttatctgtt

SEQ ID NO: 1001212 - DNA, 15 bp, Homo sapiens
tgaagttatctgttc

SEQ ID NO: 1001213 - DNA, 15 bp, Homo sapiens
gaagttatctgttct

SEQ ID NO: 1001214 - DNA, 15 bp, Homo sapiens
aagttatctgttctt

SEQ ID NO: 1001215 - DNA, 15 bp, Homo sapiens
agttatctgttcttc

SEQ ID NO: 1001216 - DNA, 15 bp, Homo sapiens
gttatctgttcttct

SEQ ID NO: 1001217 - DNA, 15 bp, Homo sapiens
ttatctgttcttctt

SEQ ID NO: 1001218 - DNA, 15 bp, Homo sapiens
tatctgttcttcttt

SEQ ID NO: 1001219 - DNA, 15 bp, Homo sapiens
atctgttcttctttt

SEQ ID NO: 1001220 - DNA, 15 bp, Homo sapiens
tctgttcttcttttt

SEQ ID NO: 1001221 - DNA, 15 bp, Homo sapiens
ctgttcttctttttg

SEQ ID NO: 1001222 - DNA, 15 bp, Homo sapiens
tgttcttctttttga

SEQ ID NO: 1001223 - DNA, 15 bp, Homo sapiens
gttcttctttttgag

SEQ ID NO: 1001224 - DNA, 15 bp, Homo sapiens
ttcttctttttgaga

SEQ ID NO: 1001225 - DNA, 15 bp, Homo sapiens
tcttctttttgagac

SEQ ID NO: 1001226 - DNA, 15 bp, Homo sapiens
cttctttttgagacg

SEQ ID NO: 1001227 - DNA, 15 bp, Homo sapiens
ctttttgagacggat

SEQ ID NO: 1001228 - DNA, 15 bp, Homo sapiens
tttttgagacggatc

SEQ ID NO: 1001229 - DNA, 15 bp, Homo sapiens
ttttgagacggatct

SEQ ID NO: 1001230 - DNA, 15 bp, Homo sapiens
tttgagacggatctc

SEQ ID NO: 1001231 - DNA, 15 bp, Homo sapiens
ttgagacggatctcg

SEQ ID NO: 1001232 - DNA, 15 bp, Homo sapiens
tgagacggatctcgc

SEQ ID NO: 1001233 - DNA, 15 bp, Homo sapiens
gagacggatctcgct

SEQ ID NO: 1001234 - DNA, 15 bp, Homo sapiens
agacggatctcgctc

SEQ ID NO: 1001235 - DNA, 15 bp, Homo sapiens
gacggatctcgctct

SEQ ID NO: 1001236 - DNA, 15 bp, Homo sapiens
acggatctcgctctg

SEQ ID NO: 1001237 - DNA, 15 bp, Homo sapiens
cggatctcgctctgt

SEQ ID NO: 1001238 - DNA, 15 bp, Homo sapiens
ggatctcgctctgtc

SEQ ID NO: 1001239 - DNA, 15 bp, Homo sapiens
gatctcgctctgtcg

SEQ ID NO: 1001240 - DNA, 15 bp, Homo sapiens
atctcgctctgtcgc

SEQ ID NO: 1001241 - DNA, 15 bp, Homo sapiens
tctcgctctgtcgcc

SEQ ID NO: 1001242 - DNA, 15 bp, Homo sapiens
ctcgctctgtcgccc

SEQ ID NO: 1001243 - DNA, 15 bp, Homo sapiens
tcgctctgtcgccca

SEQ ID NO: 1001244 - DNA, 15 bp, Homo sapiens
cgctctgtcgcccag

SEQ ID NO: 1001245 - DNA, 15 bp, Homo sapiens
gctctgtcgcccagg

SEQ ID NO: 1001246 - DNA, 15 bp, Homo sapiens
ctctgtcgcccaggc

SEQ ID NO: 1001247 - DNA, 15 bp, Homo sapiens
tctgtcgcccaggct

SEQ ID NO: 1001248 - DNA, 15 bp, Homo sapiens
ctgtcgcccaggctg

SEQ ID NO: 1001249 - DNA, 15 bp, Homo sapiens
tgtcgcccaggctgg

SEQ ID NO: 1001250 - DNA, 15 bp, Homo sapiens
gcagtggcgcaatcc

SEQ ID NO: 1001251 - DNA, 15 bp, Homo sapiens
cagtggcgcaatccc

SEQ ID NO: 1001252 - DNA, 15 bp, Homo sapiens
agtggcgcaatcccg

SEQ ID NO: 1001253 - DNA, 15 bp, Homo sapiens
gtggcgcaatcccgt

SEQ ID NO: 1001254 - DNA, 15 bp, Homo sapiens
tggcgcaatcccgtc

SEQ ID NO: 1001255 - DNA, 15 bp, Homo sapiens
ggcgcaatcccgtct

SEQ ID NO: 1001256 - DNA, 15 bp, Homo sapiens
gcgcaatcccgtctc

SEQ ID NO: 1001257 - DNA, 15 bp, Homo sapiens
cgcaatcccgtctca

SEQ ID NO: 1001258 - DNA, 15 bp, Homo sapiens
gcaatcccgtctcac

SEQ ID NO: 1001259 - DNA, 15 bp, Homo sapiens
caatcccgtctcact

SEQ ID NO: 1001260 - DNA, 15 bp, Homo sapiens
aatcccgtctcactg

SEQ ID NO: 1001261 - DNA, 15 bp, Homo sapiens
atcccgtctcactgc

SEQ ID NO: 1001262 - DNA, 15 bp, Homo sapiens
tcccgtctcactgca

SEQ ID NO: 1001263 - DNA, 15 bp, Homo sapiens
cccgtctcactgcaa

SEQ ID NO: 1001264 - DNA, 15 bp, Homo sapiens
ccgtctcactgcaag

SEQ ID NO: 1001265 - DNA, 15 bp, Homo sapiens
cgtctcactgcaagc

SEQ ID NO: 1001266 - DNA, 15 bp, Homo sapiens
gtctcactgcaagct

SEQ ID NO: 1001267 - DNA, 15 bp, Homo sapiens
tctcactgcaagctc

SEQ ID NO: 1001268 - DNA, 15 bp, Homo sapiens
cctcccaggttcacg

SEQ ID NO: 1001269 - DNA, 15 bp, Homo sapiens
ctcccaggttcacgc

SEQ ID NO: 1001270 - DNA, 15 bp, Homo sapiens
tcccaggttcacgcc

SEQ ID NO: 1001271 - DNA, 15 bp, Homo sapiens
cccaggttcacgcca

SEQ ID NO: 1001272 - DNA, 15 bp, Homo sapiens
ccaggttcacgccat

SEQ ID NO: 1001273 - DNA, 15 bp, Homo sapiens
caggttcacgccatt

SEQ ID NO: 1001274 - DNA, 15 bp, Homo sapiens
aggttcacgccattc

SEQ ID NO: 1001275 - DNA, 15 bp, Homo sapiens
ggttcacgccattct

SEQ ID NO: 1001276 - DNA, 15 bp, Homo sapiens
gttcacgccattctc

SEQ ID NO: 1001277 - DNA, 15 bp, Homo sapiens
ttcacgccattctcc

SEQ ID NO: 1001278 - DNA, 15 bp, Homo sapiens
tcacgccattctcct

SEQ ID NO: 1001279 - DNA, 15 bp, Homo sapiens
cacgccattctcctg

SEQ ID NO: 1001280 - DNA, 15 bp, Homo sapiens
acgccattctcctgc

SEQ ID NO: 1001281 - DNA, 15 bp, Homo sapiens
cgccattctcctgcc

SEQ ID NO: 1001282 - DNA, 15 bp, Homo sapiens
gccattctcctgcct

SEQ ID NO: 1001283 - DNA, 15 bp, Homo sapiens
cctgcctcagcctct

SEQ ID NO: 1001284 - DNA, 15 bp, Homo sapiens
ctgcctcagcctctc

SEQ ID NO: 1001285 - DNA, 15 bp, Homo sapiens
tgcctcagcctctcg

SEQ ID NO: 1001286 - DNA, 15 bp, Homo sapiens
gcctcagcctctcga

SEQ ID NO: 1001287 - DNA, 15 bp, Homo sapiens
cctcagcctctcgag

SEQ ID NO: 1001288 - DNA, 15 bp, Homo sapiens
ctcagcctctcgagt

SEQ ID NO: 1001289 - DNA, 15 bp, Homo sapiens
tcagcctctcgagta

SEQ ID NO: 1001290 - DNA, 15 bp, Homo sapiens
cagcctctcgagtag

SEQ ID NO: 1001291 - DNA, 15 bp, Homo sapiens
agcctctcgagtagc

SEQ ID NO: 1001292 - DNA, 15 bp, Homo sapiens
gcctctcgagtagct

SEQ ID NO: 1001293 - DNA, 15 bp, Homo sapiens
cctctcgagtagctg

SEQ ID NO: 1001294 - DNA, 15 bp, Homo sapiens
ctctcgagtagctgg

SEQ ID NO: 1001295 - DNA, 15 bp, Homo sapiens
tctcgagtagctggg

SEQ ID NO: 1001296 - DNA, 15 bp, Homo sapiens
ctcgagtagctggga

SEQ ID NO: 1001297 - DNA, 15 bp, Homo sapiens
tcgagtagctgggac

SEQ ID NO: 1001298 - DNA, 15 bp, Homo sapiens
cgagtagctgggact

SEQ ID NO: 1001299 - DNA, 15 bp, Homo sapiens
gactacaggcaccca

SEQ ID NO: 1001300 - DNA, 15 bp, Homo sapiens
actacaggcacccac

SEQ ID NO: 1001301 - DNA, 15 bp, Homo sapiens
ctacaggcacccacc

SEQ ID NO: 1001302 - DNA, 15 bp, Homo sapiens
tacaggcacccacca

SEQ ID NO: 1001303 - DNA, 15 bp, Homo sapiens
acaggcacccaccac

SEQ ID NO: 1001304 - DNA, 15 bp, Homo sapiens
caggcacccaccacc

SEQ ID NO: 1001305 - DNA, 15 bp, Homo sapiens
aggcacccaccacca

SEQ ID NO: 1001306 - DNA, 15 bp, Homo sapiens
ggcacccaccaccat

SEQ ID NO: 1001307 - DNA, 15 bp, Homo sapiens
gcacccaccaccatg

SEQ ID NO: 1001308 - DNA, 15 bp, Homo sapiens
cacccaccaccatgc

SEQ ID NO: 1001309 - DNA, 15 bp, Homo sapiens
acccaccaccatgcc

SEQ ID NO: 1001310 - DNA, 15 bp, Homo sapiens
cccaccaccatgccc

SEQ ID NO: 1001311 - DNA, 15 bp, Homo sapiens
ccaccaccatgcccg

SEQ ID NO: 1001312 - DNA, 15 bp, Homo sapiens
caccaccatgcccgg

SEQ ID NO: 1001313 - DNA, 15 bp, Homo sapiens
accaccatgcccggc

SEQ ID NO: 1001314 - DNA, 15 bp, Homo sapiens
ccaccatgcccggct

SEQ ID NO: 1001315 - DNA, 15 bp, Homo sapiens
caccatgcccggcta

SEQ ID NO: 1001316 - DNA, 15 bp, Homo sapiens
accatgcccggctaa

SEQ ID NO: 1001317 - DNA, 15 bp, Homo sapiens
ccatgcccggctaat

SEQ ID NO: 1001318 - DNA, 15 bp, Homo sapiens
catgcccggctaatt

SEQ ID NO: 1001319 - DNA, 15 bp, Homo sapiens
atgcccggctaattt

SEQ ID NO: 1001320 - DNA, 15 bp, Homo sapiens
tgcccggctaatttt

SEQ ID NO: 1001321 - DNA, 15 bp, Homo sapiens
gcccggctaattttt

SEQ ID NO: 1001322 - DNA, 15 bp, Homo sapiens
cccggctaatttttt

SEQ ID NO: 1001323 - DNA, 15 bp, Homo sapiens
ccggctaatttttta

SEQ ID NO: 1001324 - DNA, 15 bp, Homo sapiens
cggctaattttttat

SEQ ID NO: 1001325 - DNA, 15 bp, Homo sapiens
ggctaattttttata

SEQ ID NO: 1001326 - DNA, 15 bp, Homo sapiens
gctaattttttatat

SEQ ID NO: 1001327 - DNA, 15 bp, Homo sapiens
ctaattttttatata

SEQ ID NO: 1001328 - DNA, 15 bp, Homo sapiens
taattttttatatat

SEQ ID NO: 1001329 - DNA, 15 bp, Homo sapiens
aattttttatatatt

SEQ ID NO: 1001330 - DNA, 15 bp, Homo sapiens
attttttatatattt

SEQ ID NO: 1001331 - DNA, 15 bp, Homo sapiens
ttttttatatatttt

SEQ ID NO: 1001332 - DNA, 15 bp, Homo sapiens
tttttatatattttt

SEQ ID NO: 1001333 - DNA, 15 bp, Homo sapiens
ttttatatatttttt

SEQ ID NO: 1001334 - DNA, 15 bp, Homo sapiens
tttatatattttttt

SEQ ID NO: 1001335 - DNA, 15 bp, Homo sapiens
ttatatattttttta

SEQ ID NO: 1001336 - DNA, 15 bp, Homo sapiens
tatatatttttttaa

SEQ ID NO: 1001337 - DNA, 15 bp, Homo sapiens
atatatttttttaag

SEQ ID NO: 1001338 - DNA, 15 bp, Homo sapiens
tatatttttttaagt

SEQ ID NO: 1001339 - DNA, 15 bp, Homo sapiens
atatttttttaagta

SEQ ID NO: 1001340 - DNA, 15 bp, Homo sapiens
tatttttttaagtag

SEQ ID NO: 1001341 - DNA, 15 bp, Homo sapiens
atttttttaagtaga

SEQ ID NO: 1001342 - DNA, 15 bp, Homo sapiens
tttttttaagtagag

SEQ ID NO: 1001343 - DNA, 15 bp, Homo sapiens
ttttttaagtagaga

SEQ ID NO: 1001344 - DNA, 15 bp, Homo sapiens
tttttaagtagagac

SEQ ID NO: 1001345 - DNA, 15 bp, Homo sapiens
ttttaagtagagacg

SEQ ID NO: 1001346 - DNA, 15 bp, Homo sapiens
tttaagtagagacgg

SEQ ID NO: 1001347 - DNA, 15 bp, Homo sapiens
ttaagtagagacggg

SEQ ID NO: 1001348 - DNA, 15 bp, Homo sapiens
taagtagagacgggg

SEQ ID NO: 1001349 - DNA, 15 bp, Homo sapiens
aagtagagacggggt

SEQ ID NO: 1001350 - DNA, 15 bp, Homo sapiens
gacggggtttcaccg

SEQ ID NO: 1001351 - DNA, 15 bp, Homo sapiens
acggggtttcaccgt

SEQ ID NO: 1001352 - DNA, 15 bp, Homo sapiens
cggggtttcaccgtg

SEQ ID NO: 1001353 - DNA, 15 bp, Homo sapiens
ggggtttcaccgtgt

SEQ ID NO: 1001354 - DNA, 15 bp, Homo sapiens
gggtttcaccgtgtt

SEQ ID NO: 1001355 - DNA, 15 bp, Homo sapiens
ggtttcaccgtgtta

SEQ ID NO: 1001356 - DNA, 15 bp, Homo sapiens
gtttcaccgtgttag

SEQ ID NO: 1001357 - DNA, 15 bp, Homo sapiens
tttcaccgtgttagc

SEQ ID NO: 1001358 - DNA, 15 bp, Homo sapiens
ttcaccgtgttagca

SEQ ID NO: 1001359 - DNA, 15 bp, Homo sapiens
tcaccgtgttagcaa

SEQ ID NO: 1001360 - DNA, 15 bp, Homo sapiens
caccgtgttagcaag

SEQ ID NO: 1001361 - DNA, 15 bp, Homo sapiens
accgtgttagcaagg

SEQ ID NO: 1001362 - DNA, 15 bp, Homo sapiens
ccgtgttagcaagga

SEQ ID NO: 1001363 - DNA, 15 bp, Homo sapiens
cgtgttagcaaggat

SEQ ID NO: 1001364 - DNA, 15 bp, Homo sapiens
gtgttagcaaggata

SEQ ID NO: 1001365 - DNA, 15 bp, Homo sapiens
tgttagcaaggatag

SEQ ID NO: 1001366 - DNA, 15 bp, Homo sapiens
gttagcaaggatagt

SEQ ID NO: 1001367 - DNA, 15 bp, Homo sapiens
ttagcaaggatagtc

SEQ ID NO: 1001368 - DNA, 15 bp, Homo sapiens
tagcaaggatagtct

SEQ ID NO: 1001369 - DNA, 15 bp, Homo sapiens
agcaaggatagtctt

SEQ ID NO: 1001370 - DNA, 15 bp, Homo sapiens
gcaaggatagtcttg

SEQ ID NO: 1001371 - DNA, 15 bp, Homo sapiens
caaggatagtcttga

SEQ ID NO: 1001372 - DNA, 15 bp, Homo sapiens
aaggatagtcttgat

SEQ ID NO: 1001373 - DNA, 15 bp, Homo sapiens
aggatagtcttgatc

SEQ ID NO: 1001374 - DNA, 15 bp, Homo sapiens
ggatagtcttgatct

SEQ ID NO: 1001375 - DNA, 15 bp, Homo sapiens
gatagtcttgatctc

SEQ ID NO: 1001376 - DNA, 15 bp, Homo sapiens
atagtcttgatctcc

SEQ ID NO: 1001377 - DNA, 15 bp, Homo sapiens
tagtcttgatctcct

SEQ ID NO: 1001378 - DNA, 15 bp, Homo sapiens
agtcttgatctcctg

SEQ ID NO: 1001379 - DNA, 15 bp, Homo sapiens
cttgatctcctgact

SEQ ID NO: 1001380 - DNA, 15 bp, Homo sapiens
ttgatctcctgactt

SEQ ID NO: 1001381 - DNA, 15 bp, Homo sapiens
tgatctcctgacttc

SEQ ID NO: 1001382 - DNA, 15 bp, Homo sapiens
gatctcctgacttca

SEQ ID NO: 1001383 - DNA, 15 bp, Homo sapiens
atctcctgacttcat

SEQ ID NO: 1001384 - DNA, 15 bp, Homo sapiens
tctcctgacttcatg

SEQ ID NO: 1001385 - DNA, 15 bp, Homo sapiens
ctcctgacttcatga

SEQ ID NO: 1001386 - DNA, 15 bp, Homo sapiens
tcctgacttcatgat

SEQ ID NO: 1001387 - DNA, 15 bp, Homo sapiens
cctgacttcatgatc

SEQ ID NO: 1001388 - DNA, 15 bp, Homo sapiens
ctgacttcatgatcc

SEQ ID NO: 1001389 - DNA, 15 bp, Homo sapiens
tgacttcatgatccg

SEQ ID NO: 1001390 - DNA, 15 bp, Homo sapiens
gacttcatgatccgc

SEQ ID NO: 1001391 - DNA, 15 bp, Homo sapiens
acttcatgatccgcc

SEQ ID NO: 1001392 - DNA, 15 bp, Homo sapiens
cttcatgatccgccc

SEQ ID NO: 1001393 - DNA, 15 bp, Homo sapiens
ttcatgatccgcccg

SEQ ID NO: 1001394 - DNA, 15 bp, Homo sapiens
gatccgcccgcctcg

SEQ ID NO: 1001395 - DNA, 15 bp, Homo sapiens
atccgcccgcctcgg

SEQ ID NO: 1001396 - DNA, 15 bp, Homo sapiens
tccgcccgcctcggc

SEQ ID NO: 1001397 - DNA, 15 bp, Homo sapiens
ccgcccgcctcggcc

SEQ ID NO: 1001398 - DNA, 15 bp, Homo sapiens
cgcccgcctcggcct

SEQ ID NO: 1001399 - DNA, 15 bp, Homo sapiens
gcccgcctcggcctc

SEQ ID NO: 1001400 - DNA, 15 bp, Homo sapiens
cccgcctcggcctcc

SEQ ID NO: 1001401 - DNA, 15 bp, Homo sapiens
ccgcctcggcctccc

SEQ ID NO: 1001402 - DNA, 15 bp, Homo sapiens
cgcctcggcctccca

SEQ ID NO: 1001403 - DNA, 15 bp, Homo sapiens
gctgggattacagac

SEQ ID NO: 1001404 - DNA, 15 bp, Homo sapiens
ctgggattacagacg

SEQ ID NO: 1001405 - DNA, 15 bp, Homo sapiens
tgggattacagacgt

SEQ ID NO: 1001406 - DNA, 15 bp, Homo sapiens
gggattacagacgtg

SEQ ID NO: 1001407 - DNA, 15 bp, Homo sapiens
ggattacagacgtga

SEQ ID NO: 1001408 - DNA, 15 bp, Homo sapiens
gattacagacgtgag

SEQ ID NO: 1001409 - DNA, 15 bp, Homo sapiens
attacagacgtgagc

SEQ ID NO: 1001410 - DNA, 15 bp, Homo sapiens
ttacagacgtgagcc

SEQ ID NO: 1001411 - DNA, 15 bp, Homo sapiens
tacagacgtgagcca

SEQ ID NO: 1001412 - DNA, 15 bp, Homo sapiens
acagacgtgagccac

SEQ ID NO: 1001413 - DNA, 15 bp, Homo sapiens
cagacgtgagccacc

SEQ ID NO: 1001414 - DNA, 15 bp, Homo sapiens
agacgtgagccacca

SEQ ID NO: 1001415 - DNA, 15 bp, Homo sapiens
gacgtgagccaccat

SEQ ID NO: 1001416 - DNA, 15 bp, Homo sapiens
acgtgagccaccatg

SEQ ID NO: 1001417 - DNA, 15 bp, Homo sapiens
cgtgagccaccatgc

SEQ ID NO: 1001418 - DNA, 15 bp, Homo sapiens
gtgagccaccatgcg

SEQ ID NO: 1001419 - DNA, 15 bp, Homo sapiens
tgagccaccatgcgc

SEQ ID NO: 1001420 - DNA, 15 bp, Homo sapiens
gagccaccatgcgca

SEQ ID NO: 1001421 - DNA, 15 bp, Homo sapiens
agccaccatgcgcag

SEQ ID NO: 1001422 - DNA, 15 bp, Homo sapiens
gccaccatgcgcagc

SEQ ID NO: 1001423 - DNA, 15 bp, Homo sapiens
ccaccatgcgcagcc

SEQ ID NO: 1001424 - DNA, 15 bp, Homo sapiens
caccatgcgcagcca

SEQ ID NO: 1001425 - DNA, 15 bp, Homo sapiens
accatgcgcagccag

SEQ ID NO: 1001426 - DNA, 15 bp, Homo sapiens
ccatgcgcagccagt

SEQ ID NO: 1001427 - DNA, 15 bp, Homo sapiens
catgcgcagccagtt

SEQ ID NO: 1001428 - DNA, 15 bp, Homo sapiens
atgcgcagccagtta

SEQ ID NO: 1001429 - DNA, 15 bp, Homo sapiens
tgcgcagccagttat

SEQ ID NO: 1001430 - DNA, 15 bp, Homo sapiens
gcgcagccagttatc

SEQ ID NO: 1001431 - DNA, 15 bp, Homo sapiens
cgcagccagttatcc

SEQ ID NO: 1001432 - DNA, 15 bp, Homo sapiens
gcagccagttatccg

SEQ ID NO: 1001433 - DNA, 15 bp, Homo sapiens
cagccagttatccgt

SEQ ID NO: 1001434 - DNA, 15 bp, Homo sapiens
agccagttatccgtt

SEQ ID NO: 1001435 - DNA, 15 bp, Homo sapiens
gccagttatccgttc

SEQ ID NO: 1001436 - DNA, 15 bp, Homo sapiens
ccagttatccgttct

SEQ ID NO: 1001437 - DNA, 15 bp, Homo sapiens
cagttatccgttctt

SEQ ID NO: 1001438 - DNA, 15 bp, Homo sapiens
agttatccgttctta

SEQ ID NO: 1001439 - DNA, 15 bp, Homo sapiens
gttatccgttcttaa

SEQ ID NO: 1001440 - DNA, 15 bp, Homo sapiens
ttatccgttcttaag

SEQ ID NO: 1001441 - DNA, 15 bp, Homo sapiens
tatccgttcttaagg

SEQ ID NO: 1001442 - DNA, 15 bp, Homo sapiens
atccgttcttaaggc

SEQ ID NO: 1001443 - DNA, 15 bp, Homo sapiens
tccgttcttaaggct

SEQ ID NO: 1001444 - DNA, 15 bp, Homo sapiens
ccgttcttaaggctt

SEQ ID NO: 1001445 - DNA, 15 bp, Homo sapiens
cgttcttaaggcttc

SEQ ID NO: 1001446 - DNA, 15 bp, Homo sapiens
gttcttaaggcttca

SEQ ID NO: 1001447 - DNA, 15 bp, Homo sapiens
ttcttaaggcttcaa

SEQ ID NO: 1001448 - DNA, 15 bp, Homo sapiens
tcttaaggcttcaaa

SEQ ID NO: 1001449 - DNA, 15 bp, Homo sapiens
cttaaggcttcaaat

SEQ ID NO: 1001450 - DNA, 15 bp, Homo sapiens
ttaaggcttcaaatg

SEQ ID NO: 1001451 - DNA, 15 bp, Homo sapiens
taaggcttcaaatgt

SEQ ID NO: 1001452 - DNA, 15 bp, Homo sapiens
aaggcttcaaatgtt

SEQ ID NO: 1001453 - DNA, 15 bp, Homo sapiens
aggcttcaaatgtta

SEQ ID NO: 1001454 - DNA, 15 bp, Homo sapiens
ggcttcaaatgttac

SEQ ID NO: 1001455 - DNA, 15 bp, Homo sapiens
gcttcaaatgttacg

SEQ ID NO: 1001456 - DNA, 15 bp, Homo sapiens
cttcaaatgttacgg

SEQ ID NO: 1001457 - DNA, 15 bp, Homo sapiens
ttcaaatgttacggg

SEQ ID NO: 1001458 - DNA, 15 bp, Homo sapiens
tcaaatgttacggga

SEQ ID NO: 1001459 - DNA, 15 bp, Homo sapiens
caaatgttacgggag

SEQ ID NO: 1001460 - DNA, 15 bp, Homo sapiens
aaatgttacgggaga

SEQ ID NO: 1001461 - DNA, 15 bp, Homo sapiens
aatgttacgggagac

SEQ ID NO: 1001462 - DNA, 15 bp, Homo sapiens
atgttacgggagaca

SEQ ID NO: 1001463 - DNA, 15 bp, Homo sapiens
tgttacgggagacat

SEQ ID NO: 1001464 - DNA, 15 bp, Homo sapiens
gttacgggagacatt

SEQ ID NO: 1001465 - DNA, 15 bp, Homo sapiens
ttacgggagacatta

SEQ ID NO: 1001466 - DNA, 15 bp, Homo sapiens
tacgggagacattac

SEQ ID NO: 1001467 - DNA, 15 bp, Homo sapiens
acgggagacattaca

SEQ ID NO: 1001468 - DNA, 15 bp, Homo sapiens
cgggagacattacag

SEQ ID NO: 1001469 - DNA, 15 bp, Homo sapiens
gggagacattacagc

SEQ ID NO: 1001470 - DNA, 15 bp, Homo sapiens
ggagacattacagca

SEQ ID NO: 1001471 - DNA, 15 bp, Homo sapiens
gagacattacagcac

SEQ ID NO: 1001472 - DNA, 15 bp, Homo sapiens
agacattacagcaca

SEQ ID NO: 1001473 - DNA, 15 bp, Homo sapiens
gacattacagcacaa

SEQ ID NO: 1001474 - DNA, 15 bp, Homo sapiens
acattacagcacaat

SEQ ID NO: 1001475 - DNA, 15 bp, Homo sapiens
cattacagcacaatg

SEQ ID NO: 1001476 - DNA, 15 bp, Homo sapiens
attacagcacaatgg

SEQ ID NO: 1001477 - DNA, 15 bp, Homo sapiens
ttacagcacaatggt

SEQ ID NO: 1001478 - DNA, 15 bp, Homo sapiens
tacagcacaatggtg

SEQ ID NO: 1001479 - DNA, 15 bp, Homo sapiens
acagcacaatggtga

SEQ ID NO: 1001480 - DNA, 15 bp, Homo sapiens
cagcacaatggtgaa

SEQ ID NO: 1001481 - DNA, 15 bp, Homo sapiens
agcacaatggtgaag

SEQ ID NO: 1001482 - DNA, 15 bp, Homo sapiens
gcacaatggtgaagg

SEQ ID NO: 1001483 - DNA, 15 bp, Homo sapiens
cacaatggtgaaggg

SEQ ID NO: 1001484 - DNA, 15 bp, Homo sapiens
acaatggtgaagggc

SEQ ID NO: 1001485 - DNA, 15 bp, Homo sapiens
caatggtgaagggca

SEQ ID NO: 1001486 - DNA, 15 bp, Homo sapiens
aatggtgaagggcac

SEQ ID NO: 1001487 - DNA, 15 bp, Homo sapiens
atggtgaagggcaca

SEQ ID NO: 1001488 - DNA, 15 bp, Homo sapiens
tggtgaagggcacag

SEQ ID NO: 1001489 - DNA, 15 bp, Homo sapiens
ggtgaagggcacagg

SEQ ID NO: 1001490 - DNA, 15 bp, Homo sapiens
gtgaagggcacaggt

SEQ ID NO: 1001491 - DNA, 15 bp, Homo sapiens
tgaagggcacaggtc

SEQ ID NO: 1001492 - DNA, 15 bp, Homo sapiens
gaagggcacaggtct

SEQ ID NO: 1001493 - DNA, 15 bp, Homo sapiens
aagggcacaggtcta

SEQ ID NO: 1001494 - DNA, 15 bp, Homo sapiens
agggcacaggtctaa

SEQ ID NO: 1001495 - DNA, 15 bp, Homo sapiens
gggcacaggtctaaa

SEQ ID NO: 1001496 - DNA, 15 bp, Homo sapiens
ggcacaggtctaaag

SEQ ID NO: 1001497 - DNA, 15 bp, Homo sapiens
gcacaggtctaaagt

SEQ ID NO: 1001498 - DNA, 15 bp, Homo sapiens
cacaggtctaaagtc

SEQ ID NO: 1001499 - DNA, 15 bp, Homo sapiens
acaggtctaaagtca

SEQ ID NO: 1001500 - DNA, 15 bp, Homo sapiens
caggtctaaagtcag

SEQ ID NO: 1001501 - DNA, 15 bp, Homo sapiens
aggtctaaagtcagc

SEQ ID NO: 1001502 - DNA, 15 bp, Homo sapiens
ggtctaaagtcagcc

SEQ ID NO: 1001503 - DNA, 15 bp, Homo sapiens
gtctaaagtcagcct

SEQ ID NO: 1001504 - DNA, 15 bp, Homo sapiens
tctaaagtcagcctg

SEQ ID NO: 1001505 - DNA, 15 bp, Homo sapiens
ctaaagtcagcctga

SEQ ID NO: 1001506 - DNA, 15 bp, Homo sapiens
taaagtcagcctgag

SEQ ID NO: 1001507 - DNA, 15 bp, Homo sapiens
aaagtcagcctgagt

SEQ ID NO: 1001508 - DNA, 15 bp, Homo sapiens
aagtcagcctgagtt

SEQ ID NO: 1001509 - DNA, 15 bp, Homo sapiens
agtcagcctgagttt

SEQ ID NO: 1001510 - DNA, 15 bp, Homo sapiens
gtcagcctgagttta

SEQ ID NO: 1001511 - DNA, 15 bp, Homo sapiens
tcagcctgagtttag

SEQ ID NO: 1001512 - DNA, 15 bp, Homo sapiens
cagcctgagtttaga

SEQ ID NO: 1001513 - DNA, 15 bp, Homo sapiens
agcctgagtttagat

SEQ ID NO: 1001514 - DNA, 15 bp, Homo sapiens
gcctgagtttagatt

SEQ ID NO: 1001515 - DNA, 15 bp, Homo sapiens
cctgagtttagattc

SEQ ID NO: 1001516 - DNA, 15 bp, Homo sapiens
ctgagtttagattcc

SEQ ID NO: 1001517 - DNA, 15 bp, Homo sapiens
tgagtttagattcca

SEQ ID NO: 1001518 - DNA, 15 bp, Homo sapiens
gagtttagattccag

SEQ ID NO: 1001519 - DNA, 15 bp, Homo sapiens
agtttagattccagc

SEQ ID NO: 1001520 - DNA, 15 bp, Homo sapiens
gtttagattccagct

SEQ ID NO: 1001521 - DNA, 15 bp, Homo sapiens
tttagattccagctc

SEQ ID NO: 1001522 - DNA, 15 bp, Homo sapiens
ttagattccagctct

SEQ ID NO: 1001523 - DNA, 15 bp, Homo sapiens
tagattccagctctg

SEQ ID NO: 1001524 - DNA, 15 bp, Homo sapiens
agattccagctctgc

SEQ ID NO: 1001525 - DNA, 15 bp, Homo sapiens
gattccagctctgcc

SEQ ID NO: 1001526 - DNA, 15 bp, Homo sapiens
attccagctctgcca

SEQ ID NO: 1001527 - DNA, 15 bp, Homo sapiens
ttccagctctgccat

SEQ ID NO: 1001528 - DNA, 15 bp, Homo sapiens
tccagctctgccatt

SEQ ID NO: 1001529 - DNA, 15 bp, Homo sapiens
ccagctctgccatta

SEQ ID NO: 1001530 - DNA, 15 bp, Homo sapiens
cagctctgccattac

SEQ ID NO: 1001531 - DNA, 15 bp, Homo sapiens
agctctgccattact

SEQ ID NO: 1001532 - DNA, 15 bp, Homo sapiens
gctctgccattactg

SEQ ID NO: 1001533 - DNA, 15 bp, Homo sapiens
ctctgccattactga

SEQ ID NO: 1001534 - DNA, 15 bp, Homo sapiens
tctgccattactgag

SEQ ID NO: 1001535 - DNA, 15 bp, Homo sapiens
ctgccattactgagc

SEQ ID NO: 1001536 - DNA, 15 bp, Homo sapiens
tgccattactgagct

SEQ ID NO: 1001537 - DNA, 15 bp, Homo sapiens
gccattactgagctg

SEQ ID NO: 1001538 - DNA, 15 bp, Homo sapiens
ccattactgagctgt

SEQ ID NO: 1001539 - DNA, 15 bp, Homo sapiens
cattactgagctgtg

SEQ ID NO: 1001540 - DNA, 15 bp, Homo sapiens
attactgagctgtgc

SEQ ID NO: 1001541 - DNA, 15 bp, Homo sapiens
ttactgagctgtgcc

SEQ ID NO: 1001542 - DNA, 15 bp, Homo sapiens
tactgagctgtgcca

SEQ ID NO: 1001543 - DNA, 15 bp, Homo sapiens
actgagctgtgccac

SEQ ID NO: 1001544 - DNA, 15 bp, Homo sapiens
ctgagctgtgccacc

SEQ ID NO: 1001545 - DNA, 15 bp, Homo sapiens
tgagctgtgccaccc

SEQ ID NO: 1001546 - DNA, 15 bp, Homo sapiens
gagctgtgccaccct

SEQ ID NO: 1001547 - DNA, 15 bp, Homo sapiens
agctgtgccaccctg

SEQ ID NO: 1001548 - DNA, 15 bp, Homo sapiens
gctgtgccaccctga

SEQ ID NO: 1001549 - DNA, 15 bp, Homo sapiens
ctgtgccaccctgag

SEQ ID NO: 1001550 - DNA, 15 bp, Homo sapiens
tgtgccaccctgagc

SEQ ID NO: 1001551 - DNA, 15 bp, Homo sapiens
gtgccaccctgagca

SEQ ID NO: 1001552 - DNA, 15 bp, Homo sapiens
tgccaccctgagcaa

SEQ ID NO: 1001553 - DNA, 15 bp, Homo sapiens
gccaccctgagcaag

SEQ ID NO: 1001554 - DNA, 15 bp, Homo sapiens
ccaccctgagcaagt

SEQ ID NO: 1001555 - DNA, 15 bp, Homo sapiens
caccctgagcaagtt

SEQ ID NO: 1001556 - DNA, 15 bp, Homo sapiens
accctgagcaagttc

SEQ ID NO: 1001557 - DNA, 15 bp, Homo sapiens
ccctgagcaagttca

SEQ ID NO: 1001558 - DNA, 15 bp, Homo sapiens
cctgagcaagttcat

SEQ ID NO: 1001559 - DNA, 15 bp, Homo sapiens
ctgagcaagttcatc

SEQ ID NO: 1001560 - DNA, 15 bp, Homo sapiens
tgagcaagttcatct

SEQ ID NO: 1001561 - DNA, 15 bp, Homo sapiens
gagcaagttcatctg

SEQ ID NO: 1001562 - DNA, 15 bp, Homo sapiens
agcaagttcatctgt

SEQ ID NO: 1001563 - DNA, 15 bp, Homo sapiens
gcaagttcatctgtg

SEQ ID NO: 1001564 - DNA, 15 bp, Homo sapiens
caagttcatctgtgt

SEQ ID NO: 1001565 - DNA, 15 bp, Homo sapiens
aagttcatctgtgtc

SEQ ID NO: 1001566 - DNA, 15 bp, Homo sapiens
agttcatctgtgtcc

SEQ ID NO: 1001567 - DNA, 15 bp, Homo sapiens
gttcatctgtgtcca

SEQ ID NO: 1001568 - DNA, 15 bp, Homo sapiens
ttcatctgtgtccac

SEQ ID NO: 1001569 - DNA, 15 bp, Homo sapiens
tcatctgtgtccaca

SEQ ID NO: 1001570 - DNA, 15 bp, Homo sapiens
catctgtgtccacaa

SEQ ID NO: 1001571 - DNA, 15 bp, Homo sapiens
atctgtgtccacaat

SEQ ID NO: 1001572 - DNA, 15 bp, Homo sapiens
tctgtgtccacaatt

SEQ ID NO: 1001573 - DNA, 15 bp, Homo sapiens
ctgtgtccacaattc

SEQ ID NO: 1001574 - DNA, 15 bp, Homo sapiens
tgtgtccacaattcc

SEQ ID NO: 1001575 - DNA, 15 bp, Homo sapiens
gtgtccacaattcct

SEQ ID NO: 1001576 - DNA, 15 bp, Homo sapiens
tgtccacaattcctc

SEQ ID NO: 1001577 - DNA, 15 bp, Homo sapiens
gtccacaattcctca

SEQ ID NO: 1001578 - DNA, 15 bp, Homo sapiens
tccacaattcctcac

SEQ ID NO: 1001579 - DNA, 15 bp, Homo sapiens
ccacaattcctcaca

SEQ ID NO: 1001580 - DNA, 15 bp, Homo sapiens
cacaattcctcacag

SEQ ID NO: 1001581 - DNA, 15 bp, Homo sapiens
acaattcctcacagg

SEQ ID NO: 1001582 - DNA, 15 bp, Homo sapiens
caattcctcacaggt

SEQ ID NO: 1001583 - DNA, 15 bp, Homo sapiens
aattcctcacaggta

SEQ ID NO: 1001584 - DNA, 15 bp, Homo sapiens
attcctcacaggtaa

SEQ ID NO: 1001585 - DNA, 15 bp, Homo sapiens
ttcctcacaggtaag

SEQ ID NO: 1001586 - DNA, 15 bp, Homo sapiens
tcctcacaggtaaga

SEQ ID NO: 1001587 - DNA, 15 bp, Homo sapiens
cctcacaggtaagat

SEQ ID NO: 1001588 - DNA, 15 bp, Homo sapiens
ctcacaggtaagatg

SEQ ID NO: 1001589 - DNA, 15 bp, Homo sapiens
tcacaggtaagatgg

SEQ ID NO: 1001590 - DNA, 15 bp, Homo sapiens
cacaggtaagatggg

SEQ ID NO: 1001591 - DNA, 15 bp, Homo sapiens
acaggtaagatgggg

SEQ ID NO: 1001592 - DNA, 15 bp, Homo sapiens
caggtaagatgggga

SEQ ID NO: 1001593 - DNA, 15 bp, Homo sapiens
aggtaagatggggat

SEQ ID NO: 1001594 - DNA, 15 bp, Homo sapiens
ggtaagatggggata

SEQ ID NO: 1001595 - DNA, 15 bp, Homo sapiens
gtaagatggggatag

SEQ ID NO: 1001596 - DNA, 15 bp, Homo sapiens
taagatggggatagt

SEQ ID NO: 1001597 - DNA, 15 bp, Homo sapiens
aagatggggatagta

SEQ ID NO: 1001598 - DNA, 15 bp, Homo sapiens
agatggggatagtaa

SEQ ID NO: 1001599 - DNA, 15 bp, Homo sapiens
gatggggatagtaac

SEQ ID NO: 1001600 - DNA, 15 bp, Homo sapiens
atggggatagtaaca

SEQ ID NO: 1001601 - DNA, 15 bp, Homo sapiens
tggggatagtaacag

SEQ ID NO: 1001602 - DNA, 15 bp, Homo sapiens
ggggatagtaacagt

SEQ ID NO: 1001603 - DNA, 15 bp, Homo sapiens
gggatagtaacagta

SEQ ID NO: 1001604 - DNA, 15 bp, Homo sapiens
ggatagtaacagtaa

SEQ ID NO: 1001605 - DNA, 15 bp, Homo sapiens
gatagtaacagtaat

SEQ ID NO: 1001606 - DNA, 15 bp, Homo sapiens
atagtaacagtaata

SEQ ID NO: 1001607 - DNA, 15 bp, Homo sapiens
tagtaacagtaataa

SEQ ID NO: 1001608 - DNA, 15 bp, Homo sapiens
agtaacagtaataac

SEQ ID NO: 1001609 - DNA, 15 bp, Homo sapiens
gtaacagtaataact

SEQ ID NO: 1001610 - DNA, 15 bp, Homo sapiens
taacagtaataactt

SEQ ID NO: 1001611 - DNA, 15 bp, Homo sapiens
aacagtaataacttc

SEQ ID NO: 1001612 - DNA, 15 bp, Homo sapiens
acagtaataacttcc

SEQ ID NO: 1001613 - DNA, 15 bp, Homo sapiens
cagtaataacttcct

SEQ ID NO: 1001614 - DNA, 15 bp, Homo sapiens
agtaataacttccta

SEQ ID NO: 1001615 - DNA, 15 bp, Homo sapiens
gtaataacttcctac

SEQ ID NO: 1001616 - DNA, 15 bp, Homo sapiens
taataacttcctaca

SEQ ID NO: 1001617 - DNA, 15 bp, Homo sapiens
aataacttcctacag

SEQ ID NO: 1001618 - DNA, 15 bp, Homo sapiens
ataacttcctacagt

SEQ ID NO: 1001619 - DNA, 15 bp, Homo sapiens
taacttcctacagtt

SEQ ID NO: 1001620 - DNA, 15 bp, Homo sapiens
aacttcctacagtta

SEQ ID NO: 1001621 - DNA, 15 bp, Homo sapiens
acttcctacagttac

SEQ ID NO: 1001622 - DNA, 15 bp, Homo sapiens
cttcctacagttact

SEQ ID NO: 1001623 - DNA, 15 bp, Homo sapiens
ttcctacagttacta

SEQ ID NO: 1001624 - DNA, 15 bp, Homo sapiens
tcctacagttactat

SEQ ID NO: 1001625 - DNA, 15 bp, Homo sapiens
cctacagttactatg

SEQ ID NO: 1001626 - DNA, 15 bp, Homo sapiens
ctacagttactatga

SEQ ID NO: 1001627 - DNA, 15 bp, Homo sapiens
tacagttactatgaa

SEQ ID NO: 1001628 - DNA, 15 bp, Homo sapiens
acagttactatgaag

SEQ ID NO: 1001629 - DNA, 15 bp, Homo sapiens
cagttactatgaaga

SEQ ID NO: 1001630 - DNA, 15 bp, Homo sapiens
agttactatgaagac

SEQ ID NO: 1001631 - DNA, 15 bp, Homo sapiens
gttactatgaagact

SEQ ID NO: 1001632 - DNA, 15 bp, Homo sapiens
ttactatgaagacta

SEQ ID NO: 1001633 - DNA, 15 bp, Homo sapiens
tactatgaagactaa

SEQ ID NO: 1001634 - DNA, 15 bp, Homo sapiens
actatgaagactaaa

SEQ ID NO: 1001635 - DNA, 15 bp, Homo sapiens
ctatgaagactaaat

SEQ ID NO: 1001636 - DNA, 15 bp, Homo sapiens
tatgaagactaaatg

SEQ ID NO: 1001637 - DNA, 15 bp, Homo sapiens
atgaagactaaatga

SEQ ID NO: 1001638 - DNA, 15 bp, Homo sapiens
tgaagactaaatgag

SEQ ID NO: 1001639 - DNA, 15 bp, Homo sapiens
gaagactaaatgagt

SEQ ID NO: 1001640 - DNA, 15 bp, Homo sapiens
aagactaaatgagtt

SEQ ID NO: 1001641 - DNA, 15 bp, Homo sapiens
agactaaatgagtta

SEQ ID NO: 1001642 - DNA, 15 bp, Homo sapiens
gactaaatgagttaa

SEQ ID NO: 1001643 - DNA, 15 bp, Homo sapiens
actaaatgagttaat

SEQ ID NO: 1001644 - DNA, 15 bp, Homo sapiens
ctaaatgagttaatg

SEQ ID NO: 1001645 - DNA, 15 bp, Homo sapiens
taaatgagttaatgt

SEQ ID NO: 1001646 - DNA, 15 bp, Homo sapiens
aaatgagttaatgtg

SEQ ID NO: 1001647 - DNA, 15 bp, Homo sapiens
aatgagttaatgtgc

SEQ ID NO: 1001648 - DNA, 15 bp, Homo sapiens
atgagttaatgtgca

SEQ ID NO: 1001649 - DNA, 15 bp, Homo sapiens
tgagttaatgtgcat

SEQ ID NO: 1001650 - DNA, 15 bp, Homo sapiens
gagttaatgtgcata

SEQ ID NO: 1001651 - DNA, 15 bp, Homo sapiens
agttaatgtgcataa

SEQ ID NO: 1001652 - DNA, 15 bp, Homo sapiens
gttaatgtgcataaa

SEQ ID NO: 1001653 - DNA, 15 bp, Homo sapiens
ttaatgtgcataaag

SEQ ID NO: 1001654 - DNA, 15 bp, Homo sapiens
taatgtgcataaagt

SEQ ID NO: 1001655 - DNA, 15 bp, Homo sapiens
aatgtgcataaagta

SEQ ID NO: 1001656 - DNA, 15 bp, Homo sapiens
atgtgcataaagtat

SEQ ID NO: 1001657 - DNA, 15 bp, Homo sapiens
tgtgcataaagtatt

SEQ ID NO: 1001658 - DNA, 15 bp, Homo sapiens
gtgcataaagtattt

SEQ ID NO: 1001659 - DNA, 15 bp, Homo sapiens
tgcataaagtattta

SEQ ID NO: 1001660 - DNA, 15 bp, Homo sapiens
gcataaagtatttaa

SEQ ID NO: 1001661 - DNA, 15 bp, Homo sapiens
cataaagtatttaag

SEQ ID NO: 1001662 - DNA, 15 bp, Homo sapiens
ataaagtatttaagg

SEQ ID NO: 1001663 - DNA, 15 bp, Homo sapiens
taaagtatttaaggt

SEQ ID NO: 1001664 - DNA, 15 bp, Homo sapiens
aaagtatttaaggtg

SEQ ID NO: 1001665 - DNA, 15 bp, Homo sapiens
aagtatttaaggtgc

SEQ ID NO: 1001666 - DNA, 15 bp, Homo sapiens
agtatttaaggtgca

SEQ ID NO: 1001667 - DNA, 15 bp, Homo sapiens
gtatttaaggtgcac

SEQ ID NO: 1001668 - DNA, 15 bp, Homo sapiens
tatttaaggtgcaca

SEQ ID NO: 1001669 - DNA, 15 bp, Homo sapiens
atttaaggtgcacac

SEQ ID NO: 1001670 - DNA, 15 bp, Homo sapiens
tttaaggtgcacaca

SEQ ID NO: 1001671 - DNA, 15 bp, Homo sapiens
ttaaggtgcacacaa

SEQ ID NO: 1001672 - DNA, 15 bp, Homo sapiens
taaggtgcacacaaa

SEQ ID NO: 1001673 - DNA, 15 bp, Homo sapiens
aaggtgcacacaaag

SEQ ID NO: 1001674 - DNA, 15 bp, Homo sapiens
aggtgcacacaaagc

SEQ ID NO: 1001675 - DNA, 15 bp, Homo sapiens
ggtgcacacaaagcc

SEQ ID NO: 1001676 - DNA, 15 bp, Homo sapiens
gtgcacacaaagcca

SEQ ID NO: 1001677 - DNA, 15 bp, Homo sapiens
tgcacacaaagccag

SEQ ID NO: 1001678 - DNA, 15 bp, Homo sapiens
gcacacaaagccagg

SEQ ID NO: 1001679 - DNA, 15 bp, Homo sapiens
cacacaaagccaggc

SEQ ID NO: 1001680 - DNA, 15 bp, Homo sapiens
acacaaagccaggca

SEQ ID NO: 1001681 - DNA, 15 bp, Homo sapiens
cacaaagccaggcac

SEQ ID NO: 1001682 - DNA, 15 bp, Homo sapiens
acaaagccaggcaca

SEQ ID NO: 1001683 - DNA, 15 bp, Homo sapiens
caaagccaggcacac

SEQ ID NO: 1001684 - DNA, 15 bp, Homo sapiens
aaagccaggcacaca

SEQ ID NO: 1001685 - DNA, 15 bp, Homo sapiens
aagccaggcacacag

SEQ ID NO: 1001686 - DNA, 15 bp, Homo sapiens
agccaggcacacaga

SEQ ID NO: 1001687 - DNA, 15 bp, Homo sapiens
gccaggcacacagaa

SEQ ID NO: 1001688 - DNA, 15 bp, Homo sapiens
ccaggcacacagaaa

SEQ ID NO: 1001689 - DNA, 15 bp, Homo sapiens
caggcacacagaaag

SEQ ID NO: 1001690 - DNA, 15 bp, Homo sapiens
aggcacacagaaagt

SEQ ID NO: 1001691 - DNA, 15 bp, Homo sapiens
ggcacacagaaagta

SEQ ID NO: 1001692 - DNA, 15 bp, Homo sapiens
gcacacagaaagtac

SEQ ID NO: 1001693 - DNA, 15 bp, Homo sapiens
cacacagaaagtacc

SEQ ID NO: 1001694 - DNA, 15 bp, Homo sapiens
acacagaaagtaccc

SEQ ID NO: 1001695 - DNA, 15 bp, Homo sapiens
cacagaaagtaccct

SEQ ID NO: 1001696 - DNA, 15 bp, Homo sapiens
acagaaagtacccta

SEQ ID NO: 1001697 - DNA, 15 bp, Homo sapiens
cagaaagtaccctaa

SEQ ID NO: 1001698 - DNA, 15 bp, Homo sapiens
agaaagtaccctaat

SEQ ID NO: 1001699 - DNA, 15 bp, Homo sapiens
gaaagtaccctaatt

SEQ ID NO: 1001700 - DNA, 15 bp, Homo sapiens
aaagtaccctaatta

SEQ ID NO: 1001701 - DNA, 15 bp, Homo sapiens
aagtaccctaattag

SEQ ID NO: 1001702 - DNA, 15 bp, Homo sapiens
agtaccctaattagc

SEQ ID NO: 1001703 - DNA, 15 bp, Homo sapiens
gtaccctaattagct

SEQ ID NO: 1001704 - DNA, 15 bp, Homo sapiens
taccctaattagcta

SEQ ID NO: 1001705 - DNA, 15 bp, Homo sapiens
accctaattagctac

SEQ ID NO: 1001706 - DNA, 15 bp, Homo sapiens
ccctaattagctact

SEQ ID NO: 1001707 - DNA, 15 bp, Homo sapiens
cctaattagctacta

SEQ ID NO: 1001708 - DNA, 15 bp, Homo sapiens
ctaattagctactag

SEQ ID NO: 1001709 - DNA, 15 bp, Homo sapiens
taattagctactaga

SEQ ID NO: 1001710 - DNA, 15 bp, Homo sapiens
aattagctactagat

SEQ ID NO: 1001711 - DNA, 15 bp, Homo sapiens
attagctactagata

SEQ ID NO: 1001712 - DNA, 15 bp, Homo sapiens
ttagctactagatat

SEQ ID NO: 1001713 - DNA, 15 bp, Homo sapiens
tagctactagatatc

SEQ ID NO: 1001714 - DNA, 15 bp, Homo sapiens
agctactagatatca

SEQ ID NO: 1001715 - DNA, 15 bp, Homo sapiens
gctactagatatcag

SEQ ID NO: 1001716 - DNA, 15 bp, Homo sapiens
ctactagatatcaga

SEQ ID NO: 1001717 - DNA, 15 bp, Homo sapiens
tactagatatcagaa

SEQ ID NO: 1001718 - DNA, 15 bp, Homo sapiens
actagatatcagaac

SEQ ID NO: 1001719 - DNA, 15 bp, Homo sapiens
ctagatatcagaact

SEQ ID NO: 1001720 - DNA, 15 bp, Homo sapiens
tagatatcagaacta

SEQ ID NO: 1001721 - DNA, 15 bp, Homo sapiens
agatatcagaactat

SEQ ID NO: 1001722 - DNA, 15 bp, Homo sapiens
gatatcagaactatg

SEQ ID NO: 1001723 - DNA, 15 bp, Homo sapiens
atatcagaactatga

SEQ ID NO: 1001724 - DNA, 15 bp, Homo sapiens
tatcagaactatgat

SEQ ID NO: 1001725 - DNA, 15 bp, Homo sapiens
atcagaactatgata

SEQ ID NO: 1001726 - DNA, 15 bp, Homo sapiens
tcagaactatgatac

SEQ ID NO: 1001727 - DNA, 15 bp, Homo sapiens
cagaactatgatact

SEQ ID NO: 1001728 - DNA, 15 bp, Homo sapiens
agaactatgatacta

SEQ ID NO: 1001729 - DNA, 15 bp, Homo sapiens
gaactatgatactaa

SEQ ID NO: 1001730 - DNA, 15 bp, Homo sapiens
aactatgatactaat

SEQ ID NO: 1001731 - DNA, 15 bp, Homo sapiens
actatgatactaatg

SEQ ID NO: 1001732 - DNA, 15 bp, Homo sapiens
ctatgatactaatga

SEQ ID NO: 1001733 - DNA, 15 bp, Homo sapiens
tatgatactaatgat

SEQ ID NO: 1001734 - DNA, 15 bp, Homo sapiens
atgatactaatgatt

SEQ ID NO: 1001735 - DNA, 15 bp, Homo sapiens
tgatactaatgatta

SEQ ID NO: 1001736 - DNA, 15 bp, Homo sapiens
gatactaatgattat

SEQ ID NO: 1001737 - DNA, 15 bp, Homo sapiens
atactaatgattatt

SEQ ID NO: 1001738 - DNA, 15 bp, Homo sapiens
tactaatgattatta

SEQ ID NO: 1001739 - DNA, 15 bp, Homo sapiens
actaatgattattac

SEQ ID NO: 1001740 - DNA, 15 bp, Homo sapiens
ctaatgattattacc

SEQ ID NO: 1001741 - DNA, 15 bp, Homo sapiens
taatgattattacca

SEQ ID NO: 1001742 - DNA, 15 bp, Homo sapiens
aatgattattaccat

SEQ ID NO: 1001743 - DNA, 15 bp, Homo sapiens
atgattattaccatg

SEQ ID NO: 1001744 - DNA, 15 bp, Homo sapiens
tgattattaccatgt

SEQ ID NO: 1001745 - DNA, 15 bp, Homo sapiens
gattattaccatgtt

SEQ ID NO: 1001746 - DNA, 15 bp, Homo sapiens
attattaccatgttg

SEQ ID NO: 1001747 - DNA, 15 bp, Homo sapiens
ttattaccatgttga

SEQ ID NO: 1001748 - DNA, 15 bp, Homo sapiens
tattaccatgttgat

SEQ ID NO: 1001749 - DNA, 15 bp, Homo sapiens
attaccatgttgatg

SEQ ID NO: 1001750 - DNA, 15 bp, Homo sapiens
ttaccatgttgatgg

SEQ ID NO: 1001751 - DNA, 15 bp, Homo sapiens
taccatgttgatggt

SEQ ID NO: 1001752 - DNA, 15 bp, Homo sapiens
accatgttgatggtt

SEQ ID NO: 1001753 - DNA, 15 bp, Homo sapiens
ccatgttgatggttc

SEQ ID NO: 1001754 - DNA, 15 bp, Homo sapiens
catgttgatggttct

SEQ ID NO: 1001755 - DNA, 15 bp, Homo sapiens
atgttgatggttctt

SEQ ID NO: 1001756 - DNA, 15 bp, Homo sapiens
tgttgatggttctta

SEQ ID NO: 1001757 - DNA, 15 bp, Homo sapiens
gttgatggttcttac

SEQ ID NO: 1001758 - DNA, 15 bp, Homo sapiens
ttgatggttcttacc

SEQ ID NO: 1001759 - DNA, 15 bp, Homo sapiens
tgatggttcttacct

SEQ ID NO: 1001760 - DNA, 15 bp, Homo sapiens
gatggttcttacctt

SEQ ID NO: 1001761 - DNA, 15 bp, Homo sapiens
atggttcttaccttt

SEQ ID NO: 1001762 - DNA, 15 bp, Homo sapiens
tggttcttacctttc

SEQ ID NO: 1001763 - DNA, 15 bp, Homo sapiens
ggttcttacctttct

SEQ ID NO: 1001764 - DNA, 15 bp, Homo sapiens
gttcttacctttctc

SEQ ID NO: 1001765 - DNA, 15 bp, Homo sapiens
ttcttacctttctcc

SEQ ID NO: 1001766 - DNA, 15 bp, Homo sapiens
tcttacctttctcca

SEQ ID NO: 1001767 - DNA, 15 bp, Homo sapiens
cttacctttctccat

SEQ ID NO: 1001768 - DNA, 15 bp, Homo sapiens
ttacctttctccatc

SEQ ID NO: 1001769 - DNA, 15 bp, Homo sapiens
tacctttctccatct

SEQ ID NO: 1001770 - DNA, 15 bp, Homo sapiens
acctttctccatctt

SEQ ID NO: 1001771 - DNA, 15 bp, Homo sapiens
cctttctccatctta

SEQ ID NO: 1001772 - DNA, 15 bp, Homo sapiens
ctttctccatcttag

SEQ ID NO: 1001773 - DNA, 15 bp, Homo sapiens
tttctccatcttaga

SEQ ID NO: 1001774 - DNA, 15 bp, Homo sapiens
ttctccatcttagac

SEQ ID NO: 1001775 - DNA, 15 bp, Homo sapiens
tctccatcttagacc

SEQ ID NO: 1001776 - DNA, 15 bp, Homo sapiens
ctccatcttagacct

SEQ ID NO: 1001777 - DNA, 15 bp, Homo sapiens
tccatcttagacctc

SEQ ID NO: 1001778 - DNA, 15 bp, Homo sapiens
ccatcttagacctct

SEQ ID NO: 1001779 - DNA, 15 bp, Homo sapiens
catcttagacctctc

SEQ ID NO: 1001780 - DNA, 15 bp, Homo sapiens
atcttagacctctct

SEQ ID NO: 1001781 - DNA, 15 bp, Homo sapiens
tcttagacctctctt

SEQ ID NO: 1001782 - DNA, 15 bp, Homo sapiens
cttagacctctcttc

SEQ ID NO: 1001783 - DNA, 15 bp, Homo sapiens
ttagacctctcttcc

SEQ ID NO: 1001784 - DNA, 15 bp, Homo sapiens
tagacctctcttcct

SEQ ID NO: 1001785 - DNA, 15 bp, Homo sapiens
agacctctcttcctg

SEQ ID NO: 1001786 - DNA, 15 bp, Homo sapiens
gacctctcttcctga

SEQ ID NO: 1001787 - DNA, 15 bp, Homo sapiens
acctctcttcctgag

SEQ ID NO: 1001788 - DNA, 15 bp, Homo sapiens
cctctcttcctgagc

SEQ ID NO: 1001789 - DNA, 15 bp, Homo sapiens
ctctcttcctgagct

SEQ ID NO: 1001790 - DNA, 15 bp, Homo sapiens
tctcttcctgagctc

SEQ ID NO: 1001791 - DNA, 15 bp, Homo sapiens
ctcttcctgagctcc

SEQ ID NO: 1001792 - DNA, 15 bp, Homo sapiens
tcttcctgagctcct

SEQ ID NO: 1001793 - DNA, 15 bp, Homo sapiens
cttcctgagctcctg

SEQ ID NO: 1001794 - DNA, 15 bp, Homo sapiens
ttcctgagctcctga

SEQ ID NO: 1001795 - DNA, 15 bp, Homo sapiens
tcctgagctcctgag

SEQ ID NO: 1001796 - DNA, 15 bp, Homo sapiens
cctgagctcctgagc

SEQ ID NO: 1001797 - DNA, 15 bp, Homo sapiens
ctgagctcctgagct

SEQ ID NO: 1001798 - DNA, 15 bp, Homo sapiens
tgagctcctgagctt

SEQ ID NO: 1001799 - DNA, 15 bp, Homo sapiens
gagctcctgagcttc

SEQ ID NO: 1001800 - DNA, 15 bp, Homo sapiens
agctcctgagcttct

SEQ ID NO: 1001801 - DNA, 15 bp, Homo sapiens
gctcctgagcttctc

SEQ ID NO: 1001802 - DNA, 15 bp, Homo sapiens
ctcctgagcttctca

SEQ ID NO: 1001803 - DNA, 15 bp, Homo sapiens
tcctgagcttctcag

SEQ ID NO: 1001804 - DNA, 15 bp, Homo sapiens
cctgagcttctcagt

SEQ ID NO: 1001805 - DNA, 15 bp, Homo sapiens
ctgagcttctcagtg

SEQ ID NO: 1001806 - DNA, 15 bp, Homo sapiens
tgagcttctcagtgt

SEQ ID NO: 1001807 - DNA, 15 bp, Homo sapiens
gagcttctcagtgtc

SEQ ID NO: 1001808 - DNA, 15 bp, Homo sapiens
agcttctcagtgtct

SEQ ID NO: 1001809 - DNA, 15 bp, Homo sapiens
gcttctcagtgtctg

SEQ ID NO: 1001810 - DNA, 15 bp, Homo sapiens
cttctcagtgtctgg

SEQ ID NO: 1001811 - DNA, 15 bp, Homo sapiens
ttctcagtgtctgga

SEQ ID NO: 1001812 - DNA, 15 bp, Homo sapiens
tctcagtgtctggat

SEQ ID NO: 1001813 - DNA, 15 bp, Homo sapiens
ctcagtgtctggatg

SEQ ID NO: 1001814 - DNA, 15 bp, Homo sapiens
tcagtgtctggatgc

SEQ ID NO: 1001815 - DNA, 15 bp, Homo sapiens
cagtgtctggatgct

SEQ ID NO: 1001816 - DNA, 15 bp, Homo sapiens
agtgtctggatgctt

SEQ ID NO: 1001817 - DNA, 15 bp, Homo sapiens
gtgtctggatgcttc

SEQ ID NO: 1001818 - DNA, 15 bp, Homo sapiens
tgtctggatgcttca

SEQ ID NO: 1001819 - DNA, 15 bp, Homo sapiens
gtctggatgcttcac

SEQ ID NO: 1001820 - DNA, 15 bp, Homo sapiens
tctggatgcttcaca

SEQ ID NO: 1001821 - DNA, 15 bp, Homo sapiens
ctggatgcttcacat

SEQ ID NO: 1001822 - DNA, 15 bp, Homo sapiens
tggatgcttcacatg

SEQ ID NO: 1001823 - DNA, 15 bp, Homo sapiens
ggatgcttcacatgt

SEQ ID NO: 1001824 - DNA, 15 bp, Homo sapiens
gatgcttcacatgta

SEQ ID NO: 1001825 - DNA, 15 bp, Homo sapiens
aaacaccgtctctac

SEQ ID NO: 1001826 - DNA, 15 bp, Homo sapiens
aacaccgtctctact

SEQ ID NO: 1001827 - DNA, 15 bp, Homo sapiens
acaccgtctctacta

SEQ ID NO: 1001828 - DNA, 15 bp, Homo sapiens
caccgtctctactaa

SEQ ID NO: 1001829 - DNA, 15 bp, Homo sapiens
accgtctctactaaa

SEQ ID NO: 1001830 - DNA, 15 bp, Homo sapiens
ccgtctctactaaaa

SEQ ID NO: 1001831 - DNA, 15 bp, Homo sapiens
cgtctctactaaaaa

SEQ ID NO: 1001832 - DNA, 15 bp, Homo sapiens
aaaatacaaaaatta

SEQ ID NO: 1001833 - DNA, 15 bp, Homo sapiens
tacaaaaattagccg

SEQ ID NO: 1001834 - DNA, 15 bp, Homo sapiens
acaaaaattagccgg

SEQ ID NO: 1001835 - DNA, 15 bp, Homo sapiens
caaaaattagccggc

SEQ ID NO: 1001836 - DNA, 15 bp, Homo sapiens
aaaaattagccggct

SEQ ID NO: 1001837 - DNA, 15 bp, Homo sapiens
aaaattagccggctg

SEQ ID NO: 1001838 - DNA, 15 bp, Homo sapiens
aaattagccggctgt

SEQ ID NO: 1001839 - DNA, 15 bp, Homo sapiens
aattagccggctgtg

SEQ ID NO: 1001840 - DNA, 15 bp, Homo sapiens
attagccggctgtgg

SEQ ID NO: 1001841 - DNA, 15 bp, Homo sapiens
ttagccggctgtggt

SEQ ID NO: 1001842 - DNA, 15 bp, Homo sapiens
tagccggctgtggtg

SEQ ID NO: 1001843 - DNA, 15 bp, Homo sapiens
agccggctgtggtgg

SEQ ID NO: 1001844 - DNA, 15 bp, Homo sapiens
gccggctgtggtggc

SEQ ID NO: 1001845 - DNA, 15 bp, Homo sapiens
ccggctgtggtggcg

SEQ ID NO: 1001846 - DNA, 15 bp, Homo sapiens
cggctgtggtggcgc

SEQ ID NO: 1001847 - DNA, 15 bp, Homo sapiens
ggctgtggtggcgca

SEQ ID NO: 1001848 - DNA, 15 bp, Homo sapiens
gctgtggtggcgcat

SEQ ID NO: 1001849 - DNA, 15 bp, Homo sapiens
ctgtggtggcgcatg

SEQ ID NO: 1001850 - DNA, 15 bp, Homo sapiens
tgtggtggcgcatgc

SEQ ID NO: 1001851 - DNA, 15 bp, Homo sapiens
gtggtggcgcatgcc

SEQ ID NO: 1001852 - DNA, 15 bp, Homo sapiens
tggtggcgcatgcct

SEQ ID NO: 1001853 - DNA, 15 bp, Homo sapiens
ggtggcgcatgcctg

SEQ ID NO: 1001854 - DNA, 15 bp, Homo sapiens
gtggcgcatgcctgt

SEQ ID NO: 1001855 - DNA, 15 bp, Homo sapiens
tggcgcatgcctgta

SEQ ID NO: 1001856 - DNA, 15 bp, Homo sapiens
ggcgcatgcctgtag

SEQ ID NO: 1001857 - DNA, 15 bp, Homo sapiens
gcgcatgcctgtagt

SEQ ID NO: 1001858 - DNA, 15 bp, Homo sapiens
cgcatgcctgtagtc

SEQ ID NO: 1001859 - DNA, 15 bp, Homo sapiens
gcatgcctgtagtcc

SEQ ID NO: 1001860 - DNA, 15 bp, Homo sapiens
catgcctgtagtccc

SEQ ID NO: 1001861 - DNA, 15 bp, Homo sapiens
atgcctgtagtccca

SEQ ID NO: 1001862 - DNA, 15 bp, Homo sapiens
agtcccagctactcg

SEQ ID NO: 1001863 - DNA, 15 bp, Homo sapiens
gtcccagctactcgg

SEQ ID NO: 1001864 - DNA, 15 bp, Homo sapiens
tcccagctactcggg

SEQ ID NO: 1001865 - DNA, 15 bp, Homo sapiens
cccagctactcggga

SEQ ID NO: 1001866 - DNA, 15 bp, Homo sapiens
ccagctactcgggag

SEQ ID NO: 1001867 - DNA, 15 bp, Homo sapiens
cagctactcgggagg

SEQ ID NO: 1001868 - DNA, 15 bp, Homo sapiens
agctactcgggaggc

SEQ ID NO: 1001869 - DNA, 15 bp, Homo sapiens
gctactcgggaggct

SEQ ID NO: 1001870 - DNA, 15 bp, Homo sapiens
ctactcgggaggctg

SEQ ID NO: 1001871 - DNA, 15 bp, Homo sapiens
tactcgggaggctga

SEQ ID NO: 1001872 - DNA, 15 bp, Homo sapiens
actcgggaggctgag

SEQ ID NO: 1001873 - DNA, 15 bp, Homo sapiens
ctcgggaggctgagg

SEQ ID NO: 1001874 - DNA, 15 bp, Homo sapiens
tcgggaggctgaggc

SEQ ID NO: 1001875 - DNA, 15 bp, Homo sapiens
cgggaggctgaggca

SEQ ID NO: 1001876 - DNA, 15 bp, Homo sapiens
ggaggctgaggcaga

SEQ ID NO: 1001877 - DNA, 15 bp, Homo sapiens
gaggctgaggcagaa

SEQ ID NO: 1001878 - DNA, 15 bp, Homo sapiens
aggctgaggcagaag

SEQ ID NO: 1001879 - DNA, 15 bp, Homo sapiens
ggctgaggcagaaga

SEQ ID NO: 1001880 - DNA, 15 bp, Homo sapiens
gctgaggcagaagaa

SEQ ID NO: 1001881 - DNA, 15 bp, Homo sapiens
ctgaggcagaagaat

SEQ ID NO: 1001882 - DNA, 15 bp, Homo sapiens
tgaggcagaagaatc

SEQ ID NO: 1001883 - DNA, 15 bp, Homo sapiens
gaggcagaagaatca

SEQ ID NO: 1001884 - DNA, 15 bp, Homo sapiens
aggcagaagaatcac

SEQ ID NO: 1001885 - DNA, 15 bp, Homo sapiens
ggcagaagaatcact

SEQ ID NO: 1001886 - DNA, 15 bp, Homo sapiens
gcagaagaatcactt

SEQ ID NO: 1001887 - DNA, 15 bp, Homo sapiens
cagaagaatcacttc

SEQ ID NO: 1001888 - DNA, 15 bp, Homo sapiens
agaagaatcacttca

SEQ ID NO: 1001889 - DNA, 15 bp, Homo sapiens
gaagaatcacttcaa

SEQ ID NO: 1001890 - DNA, 15 bp, Homo sapiens
aagaatcacttcaac

SEQ ID NO: 1001891 - DNA, 15 bp, Homo sapiens
agaatcacttcaacc

SEQ ID NO: 1001892 - DNA, 15 bp, Homo sapiens
gaatcacttcaaccg

SEQ ID NO: 1001893 - DNA, 15 bp, Homo sapiens
aatcacttcaaccgg

SEQ ID NO: 1001894 - DNA, 15 bp, Homo sapiens
atcacttcaaccggg

SEQ ID NO: 1001895 - DNA, 15 bp, Homo sapiens
tcacttcaaccggga

SEQ ID NO: 1001896 - DNA, 15 bp, Homo sapiens
cacttcaaccgggag

SEQ ID NO: 1001897 - DNA, 15 bp, Homo sapiens
acttcaaccgggagg

SEQ ID NO: 1001898 - DNA, 15 bp, Homo sapiens
cttcaaccgggaggc

SEQ ID NO: 1001899 - DNA, 15 bp, Homo sapiens
ttcaaccgggaggcg

SEQ ID NO: 1001900 - DNA, 15 bp, Homo sapiens
tcaaccgggaggcgg

SEQ ID NO: 1001901 - DNA, 15 bp, Homo sapiens
caaccgggaggcgga

SEQ ID NO: 1001902 - DNA, 15 bp, Homo sapiens
aaccgggaggcggag

SEQ ID NO: 1001903 - DNA, 15 bp, Homo sapiens
accgggaggcggagg

SEQ ID NO: 1001904 - DNA, 15 bp, Homo sapiens
ccgggaggcggaggt

SEQ ID NO: 1001905 - DNA, 15 bp, Homo sapiens
cgggaggcggaggtt

SEQ ID NO: 1001906 - DNA, 15 bp, Homo sapiens
gggaggcggaggttg

SEQ ID NO: 1001907 - DNA, 15 bp, Homo sapiens
ggaggcggaggttgc

SEQ ID NO: 1001908 - DNA, 15 bp, Homo sapiens
gaggcggaggttgca

SEQ ID NO: 1001909 - DNA, 15 bp, Homo sapiens
aggcggaggttgcag

SEQ ID NO: 1001910 - DNA, 15 bp, Homo sapiens
ggcggaggttgcagt

SEQ ID NO: 1001911 - DNA, 15 bp, Homo sapiens
gcggaggttgcagtg

SEQ ID NO: 1001912 - DNA, 15 bp, Homo sapiens
cggaggttgcagtga

SEQ ID NO: 1001913 - DNA, 15 bp, Homo sapiens
ggttgcagtgagccg

SEQ ID NO: 1001914 - DNA, 15 bp, Homo sapiens
gttgcagtgagccga

SEQ ID NO: 1001915 - DNA, 15 bp, Homo sapiens
ttgcagtgagccgag

SEQ ID NO: 1001916 - DNA, 15 bp, Homo sapiens
tgcagtgagccgaga

SEQ ID NO: 1001917 - DNA, 15 bp, Homo sapiens
gcagtgagccgagat

SEQ ID NO: 1001918 - DNA, 15 bp, Homo sapiens
cagtgagccgagatc

SEQ ID NO: 1001919 - DNA, 15 bp, Homo sapiens
agtgagccgagatcg

SEQ ID NO: 1001920 - DNA, 15 bp, Homo sapiens
gtgagccgagatcgc

SEQ ID NO: 1001921 - DNA, 15 bp, Homo sapiens
tgagccgagatcgcg

SEQ ID NO: 1001922 - DNA, 15 bp, Homo sapiens
gagccgagatcgcgc

SEQ ID NO: 1001923 - DNA, 15 bp, Homo sapiens
agccgagatcgcgcc

SEQ ID NO: 1001924 - DNA, 15 bp, Homo sapiens
gccgagatcgcgcct

SEQ ID NO: 1001925 - DNA, 15 bp, Homo sapiens
ccgagatcgcgcctc

SEQ ID NO: 1001926 - DNA, 15 bp, Homo sapiens
cgagatcgcgcctct

SEQ ID NO: 1001927 - DNA, 15 bp, Homo sapiens
gagatcgcgcctctg

SEQ ID NO: 1001928 - DNA, 15 bp, Homo sapiens
agatcgcgcctctgc

SEQ ID NO: 1001929 - DNA, 15 bp, Homo sapiens
gatcgcgcctctgca

SEQ ID NO: 1001930 - DNA, 15 bp, Homo sapiens
atcgcgcctctgcac

SEQ ID NO: 1001931 - DNA, 15 bp, Homo sapiens
tcgcgcctctgcact

SEQ ID NO: 1001932 - DNA, 15 bp, Homo sapiens
cgcgcctctgcactc

SEQ ID NO: 1001933 - DNA, 15 bp, Homo sapiens
gcgcctctgcactcc

SEQ ID NO: 1001934 - DNA, 15 bp, Homo sapiens
cgcctctgcactcca

SEQ ID NO: 1001935 - DNA, 15 bp, Homo sapiens
gcctctgcactccag

SEQ ID NO: 1001936 - DNA, 15 bp, Homo sapiens
cctctgcactccagc

SEQ ID NO: 1001937 - DNA, 15 bp, Homo sapiens
ctctgcactccagcc

SEQ ID NO: 1001938 - DNA, 15 bp, Homo sapiens
tctgcactccagcct

SEQ ID NO: 1001939 - DNA, 15 bp, Homo sapiens
cactccagcctgggt

SEQ ID NO: 1001940 - DNA, 15 bp, Homo sapiens
agcctgggtgacagg

SEQ ID NO: 1001941 - DNA, 15 bp, Homo sapiens
gcctgggtgacaggg

SEQ ID NO: 1001942 - DNA, 15 bp, Homo sapiens
cctgggtgacagggt

SEQ ID NO: 1001943 - DNA, 15 bp, Homo sapiens
ctgggtgacagggtg

SEQ ID NO: 1001944 - DNA, 15 bp, Homo sapiens
tgggtgacagggtga

SEQ ID NO: 1001945 - DNA, 15 bp, Homo sapiens
gggtgacagggtgag

SEQ ID NO: 1001946 - DNA, 15 bp, Homo sapiens
ggtgacagggtgaga

SEQ ID NO: 1001947 - DNA, 15 bp, Homo sapiens
gtgacagggtgagac

SEQ ID NO: 1001948 - DNA, 15 bp, Homo sapiens
tgacagggtgagact

SEQ ID NO: 1001949 - DNA, 15 bp, Homo sapiens
gacagggtgagactc

SEQ ID NO: 1001950 - DNA, 15 bp, Homo sapiens
acagggtgagactct

SEQ ID NO: 1001951 - DNA, 15 bp, Homo sapiens
cagggtgagactctg

SEQ ID NO: 1001952 - DNA, 15 bp, Homo sapiens
agggtgagactctgt

SEQ ID NO: 1001953 - DNA, 15 bp, Homo sapiens
gggtgagactctgtc

SEQ ID NO: 1001954 - DNA, 15 bp, Homo sapiens
ggtgagactctgtct

SEQ ID NO: 1001955 - DNA, 15 bp, Homo sapiens
gtgagactctgtctt

SEQ ID NO: 1001956 - DNA, 15 bp, Homo sapiens
tgagactctgtctta

SEQ ID NO: 1001957 - DNA, 15 bp, Homo sapiens
gagactctgtcttaa

SEQ ID NO: 1001958 - DNA, 15 bp, Homo sapiens
agactctgtcttaaa

SEQ ID NO: 1001959 - DNA, 15 bp, Homo sapiens
gactctgtcttaaaa

SEQ ID NO: 1001960 - DNA, 15 bp, Homo sapiens
actctgtcttaaaaa

SEQ ID NO: 1001961 - DNA, 15 bp, Homo sapiens
ctctgtcttaaaaaa

SEQ ID NO: 1001962 - DNA, 15 bp, Homo sapiens
tctgtcttaaaaaaa

SEQ ID NO: 1001963 - DNA, 15 bp, Homo sapiens
ctgtcttaaaaaaaa

SEQ ID NO: 1001964 - DNA, 15 bp, Homo sapiens
tgtcttaaaaaaaaa

SEQ ID NO: 1001965 - DNA, 15 bp, Homo sapiens
gtcttaaaaaaaaaa

SEQ ID NO: 1001966 - DNA, 15 bp, Homo sapiens
tcttaaaaaaaaaaa

SEQ ID NO: 1001967 - DNA, 15 bp, Homo sapiens
cttaaaaaaaaaaaa

SEQ ID NO: 1001968 - DNA, 15 bp, Homo sapiens
ttaaaaaaaaaaaaa

SEQ ID NO: 1001969 - DNA, 15 bp, Homo sapiens
taaaaaaaaaaaaaa

SEQ ID NO: 1001970 - DNA, 15 bp, Homo sapiens
aaaaaaaaattagtc

SEQ ID NO: 1001971 - DNA, 15 bp, Homo sapiens
aaaaaaaattagtca

SEQ ID NO: 1001972 - DNA, 15 bp, Homo sapiens
aaaaaaattagtcat

SEQ ID NO: 1001973 - DNA, 15 bp, Homo sapiens
aaaaaattagtcatt

SEQ ID NO: 1001974 - DNA, 15 bp, Homo sapiens
aaaaattagtcattc

SEQ ID NO: 1001975 - DNA, 15 bp, Homo sapiens
aaaattagtcattcc

SEQ ID NO: 1001976 - DNA, 15 bp, Homo sapiens
aaattagtcattcca

SEQ ID NO: 1001977 - DNA, 15 bp, Homo sapiens
aattagtcattccaa

SEQ ID NO: 1001978 - DNA, 15 bp, Homo sapiens
attagtcattccaaa

SEQ ID NO: 1001979 - DNA, 15 bp, Homo sapiens
ttagtcattccaaag

SEQ ID NO: 1001980 - DNA, 15 bp, Homo sapiens
tagtcattccaaagt

SEQ ID NO: 1001981 - DNA, 15 bp, Homo sapiens
agtcattccaaagtc

SEQ ID NO: 1001982 - DNA, 15 bp, Homo sapiens
gtcattccaaagtcc

SEQ ID NO: 1001983 - DNA, 15 bp, Homo sapiens
tcattccaaagtcca

SEQ ID NO: 1001984 - DNA, 15 bp, Homo sapiens
cattccaaagtccaa

SEQ ID NO: 1001985 - DNA, 15 bp, Homo sapiens
attccaaagtccaat

SEQ ID NO: 1001986 - DNA, 15 bp, Homo sapiens
ttccaaagtccaatg

SEQ ID NO: 1001987 - DNA, 15 bp, Homo sapiens
tccaaagtccaatgt

SEQ ID NO: 1001988 - DNA, 15 bp, Homo sapiens
ccaaagtccaatgtc

SEQ ID NO: 1001989 - DNA, 15 bp, Homo sapiens
caaagtccaatgtca

SEQ ID NO: 1001990 - DNA, 15 bp, Homo sapiens
aaagtccaatgtcag

SEQ ID NO: 1001991 - DNA, 15 bp, Homo sapiens
aagtccaatgtcaga

SEQ ID NO: 1001992 - DNA, 15 bp, Homo sapiens
agtccaatgtcagac

SEQ ID NO: 1001993 - DNA, 15 bp, Homo sapiens
gtccaatgtcagaca

SEQ ID NO: 1001994 - DNA, 15 bp, Homo sapiens
tccaatgtcagacat

SEQ ID NO: 1001995 - DNA, 15 bp, Homo sapiens
ccaatgtcagacata

SEQ ID NO: 1001996 - DNA, 15 bp, Homo sapiens
caatgtcagacatag

SEQ ID NO: 1001997 - DNA, 15 bp, Homo sapiens
aatgtcagacataga

SEQ ID NO: 1001998 - DNA, 15 bp, Homo sapiens
atgtcagacatagat

SEQ ID NO: 1001999 - DNA, 15 bp, Homo sapiens
tgtcagacatagatt

SEQ ID NO: 1002000 - DNA, 15 bp, Homo sapiens
gtcagacatagatta

SEQ ID NO: 1002001 - DNA, 15 bp, Homo sapiens
tcagacatagattat

SEQ ID NO: 1002002 - DNA, 15 bp, Homo sapiens
cagacatagattatc

SEQ ID NO: 1002003 - DNA, 15 bp, Homo sapiens
agacatagattatcc

SEQ ID NO: 1002004 - DNA, 15 bp, Homo sapiens
gacatagattatccg

SEQ ID NO: 1002005 - DNA, 15 bp, Homo sapiens
acatagattatccgt

SEQ ID NO: 1002006 - DNA, 15 bp, Homo sapiens
catagattatccgtt

SEQ ID NO: 1002007 - DNA, 15 bp, Homo sapiens
atagattatccgttg

SEQ ID NO: 1002008 - DNA, 15 bp, Homo sapiens
tagattatccgttgt

SEQ ID NO: 1002009 - DNA, 15 bp, Homo sapiens
agattatccgttgtt

SEQ ID NO: 1002010 - DNA, 15 bp, Homo sapiens
gattatccgttgttt

SEQ ID NO: 1002011 - DNA, 15 bp, Homo sapiens
attatccgttgtttt

SEQ ID NO: 1002012 - DNA, 15 bp, Homo sapiens
ttatccgttgttttg

SEQ ID NO: 1002013 - DNA, 15 bp, Homo sapiens
tatccgttgttttgg

SEQ ID NO: 1002014 - DNA, 15 bp, Homo sapiens
atccgttgttttgga

SEQ ID NO: 1002015 - DNA, 15 bp, Homo sapiens
tccgttgttttggat

SEQ ID NO: 1002016 - DNA, 15 bp, Homo sapiens
ccgttgttttggatg

SEQ ID NO: 1002017 - DNA, 15 bp, Homo sapiens
cgttgttttggatgt

SEQ ID NO: 1002018 - DNA, 15 bp, Homo sapiens
gttgttttggatgta

SEQ ID NO: 1002019 - DNA, 15 bp, Homo sapiens
ttgttttggatgtaa

SEQ ID NO: 1002020 - DNA, 15 bp, Homo sapiens
tgttttggatgtaat

SEQ ID NO: 1002021 - DNA, 15 bp, Homo sapiens
gttttggatgtaatc

SEQ ID NO: 1002022 - DNA, 15 bp, Homo sapiens
ttttggatgtaatcc

SEQ ID NO: 1002023 - DNA, 15 bp, Homo sapiens
tttggatgtaatcct

SEQ ID NO: 1002024 - DNA, 15 bp, Homo sapiens
ttggatgtaatcctc

SEQ ID NO: 1002025 - DNA, 15 bp, Homo sapiens
tggatgtaatcctct

SEQ ID NO: 1002026 - DNA, 15 bp, Homo sapiens
ggatgtaatcctctt

SEQ ID NO: 1002027 - DNA, 15 bp, Homo sapiens
gatgtaatcctcttc

SEQ ID NO: 1002028 - DNA, 15 bp, Homo sapiens
atgtaatcctcttcc

SEQ ID NO: 1002029 - DNA, 15 bp, Homo sapiens
tgtaatcctcttcct

SEQ ID NO: 1002030 - DNA, 15 bp, Homo sapiens
gtaatcctcttcctg

SEQ ID NO: 1002031 - DNA, 15 bp, Homo sapiens
taatcctcttcctgg

SEQ ID NO: 1002032 - DNA, 15 bp, Homo sapiens
aatcctcttcctgga

SEQ ID NO: 1002033 - DNA, 15 bp, Homo sapiens
atcctcttcctggaa

SEQ ID NO: 1002034 - DNA, 15 bp, Homo sapiens
tcctcttcctggaaa

SEQ ID NO: 1002035 - DNA, 15 bp, Homo sapiens
cctcttcctggaaaa

SEQ ID NO: 1002036 - DNA, 15 bp, Homo sapiens
ctcttcctggaaaac

SEQ ID NO: 1002037 - DNA, 15 bp, Homo sapiens
tcttcctggaaaact

SEQ ID NO: 1002038 - DNA, 15 bp, Homo sapiens
cttcctggaaaactg

SEQ ID NO: 1002039 - DNA, 15 bp, Homo sapiens
ttcctggaaaactgg

SEQ ID NO: 1002040 - DNA, 15 bp, Homo sapiens
tcctggaaaactggc

SEQ ID NO: 1002041 - DNA, 15 bp, Homo sapiens
cctggaaaactggca

SEQ ID NO: 1002042 - DNA, 15 bp, Homo sapiens
ctggaaaactggcac

SEQ ID NO: 1002043 - DNA, 15 bp, Homo sapiens
tggaaaactggcaca

SEQ ID NO: 1002044 - DNA, 15 bp, Homo sapiens
ggaaaactggcacaa

SEQ ID NO: 1002045 - DNA, 15 bp, Homo sapiens
gaaaactggcacaac

SEQ ID NO: 1002046 - DNA, 15 bp, Homo sapiens
aaaactggcacaacc

SEQ ID NO: 1002047 - DNA, 15 bp, Homo sapiens
aaactggcacaaccc

SEQ ID NO: 1002048 - DNA, 15 bp, Homo sapiens
aactggcacaaccca

SEQ ID NO: 1002049 - DNA, 15 bp, Homo sapiens
actggcacaacccaa

SEQ ID NO: 1002050 - DNA, 15 bp, Homo sapiens
ctggcacaacccaat

SEQ ID NO: 1002051 - DNA, 15 bp, Homo sapiens
tggcacaacccaatt

SEQ ID NO: 1002052 - DNA, 15 bp, Homo sapiens
ggcacaacccaatta

SEQ ID NO: 1002053 - DNA, 15 bp, Homo sapiens
gcacaacccaattac

SEQ ID NO: 1002054 - DNA, 15 bp, Homo sapiens
cacaacccaattaca

SEQ ID NO: 1002055 - DNA, 15 bp, Homo sapiens
acaacccaattacac

SEQ ID NO: 1002056 - DNA, 15 bp, Homo sapiens
caacccaattacaca

SEQ ID NO: 1002057 - DNA, 15 bp, Homo sapiens
aacccaattacacat

SEQ ID NO: 1002058 - DNA, 15 bp, Homo sapiens
acccaattacacatg

SEQ ID NO: 1002059 - DNA, 15 bp, Homo sapiens
cccaattacacatga

SEQ ID NO: 1002060 - DNA, 15 bp, Homo sapiens
ccaattacacatgaa

SEQ ID NO: 1002061 - DNA, 15 bp, Homo sapiens
caattacacatgaaa

SEQ ID NO: 1002062 - DNA, 15 bp, Homo sapiens
aattacacatgaaat

SEQ ID NO: 1002063 - DNA, 15 bp, Homo sapiens
attacacatgaaatc

SEQ ID NO: 1002064 - DNA, 15 bp, Homo sapiens
ttacacatgaaatcc

SEQ ID NO: 1002065 - DNA, 15 bp, Homo sapiens
tacacatgaaatcct

SEQ ID NO: 1002066 - DNA, 15 bp, Homo sapiens
acacatgaaatcctt

SEQ ID NO: 1002067 - DNA, 15 bp, Homo sapiens
cacatgaaatccttt

SEQ ID NO: 1002068 - DNA, 15 bp, Homo sapiens
acatgaaatcctttc

SEQ ID NO: 1002069 - DNA, 15 bp, Homo sapiens
catgaaatcctttca

SEQ ID NO: 1002070 - DNA, 15 bp, Homo sapiens
atgaaatcctttcaa

SEQ ID NO: 1002071 - DNA, 15 bp, Homo sapiens
tgaaatcctttcaac

SEQ ID NO: 1002072 - DNA, 15 bp, Homo sapiens
gaaatcctttcaact

SEQ ID NO: 1002073 - DNA, 15 bp, Homo sapiens
aaatcctttcaactc

SEQ ID NO: 1002074 - DNA, 15 bp, Homo sapiens
aatcctttcaactct

SEQ ID NO: 1002075 - DNA, 15 bp, Homo sapiens
atcctttcaactctg

SEQ ID NO: 1002076 - DNA, 15 bp, Homo sapiens
tcctttcaactctgg

SEQ ID NO: 1002077 - DNA, 15 bp, Homo sapiens
cctttcaactctggt

SEQ ID NO: 1002078 - DNA, 15 bp, Homo sapiens
ctttcaactctggta

SEQ ID NO: 1002079 - DNA, 15 bp, Homo sapiens
tttcaactctggtat

SEQ ID NO: 1002080 - DNA, 15 bp, Homo sapiens
ttcaactctggtatt

SEQ ID NO: 1002081 - DNA, 15 bp, Homo sapiens
tcaactctggtattg

SEQ ID NO: 1002082 - DNA, 15 bp, Homo sapiens
caactctggtattgg

SEQ ID NO: 1002083 - DNA, 15 bp, Homo sapiens
aactctggtattgga

SEQ ID NO: 1002084 - DNA, 15 bp, Homo sapiens
actctggtattggag

SEQ ID NO: 1002085 - DNA, 15 bp, Homo sapiens
ctctggtattggagg

SEQ ID NO: 1002086 - DNA, 15 bp, Homo sapiens
tctggtattggaggt

SEQ ID NO: 1002087 - DNA, 15 bp, Homo sapiens
ctggtattggaggta

SEQ ID NO: 1002088 - DNA, 15 bp, Homo sapiens
tggtattggaggtat

SEQ ID NO: 1002089 - DNA, 15 bp, Homo sapiens
ggtattggaggtata

SEQ ID NO: 1002090 - DNA, 15 bp, Homo sapiens
gtattggaggtatag

SEQ ID NO: 1002091 - DNA, 15 bp, Homo sapiens
tattggaggtatagg

SEQ ID NO: 1002092 - DNA, 15 bp, Homo sapiens
attggaggtataggg

SEQ ID NO: 1002093 - DNA, 15 bp, Homo sapiens
ttggaggtataggga

SEQ ID NO: 1002094 - DNA, 15 bp, Homo sapiens
tggaggtatagggaa

SEQ ID NO: 1002095 - DNA, 15 bp, Homo sapiens
ggaggtatagggaag

SEQ ID NO: 1002096 - DNA, 15 bp, Homo sapiens
gaggtatagggaagg

SEQ ID NO: 1002097 - DNA, 15 bp, Homo sapiens
aggtatagggaagga

SEQ ID NO: 1002098 - DNA, 15 bp, Homo sapiens
ggtatagggaaggac

SEQ ID NO: 1002099 - DNA, 15 bp, Homo sapiens
gtatagggaaggact

SEQ ID NO: 1002100 - DNA, 15 bp, Homo sapiens
tatagggaaggactt

SEQ ID NO: 1002101 - DNA, 15 bp, Homo sapiens
atagggaaggacttt

SEQ ID NO: 1002102 - DNA, 15 bp, Homo sapiens
tagggaaggactttg

SEQ ID NO: 1002103 - DNA, 15 bp, Homo sapiens
agggaaggactttgt

SEQ ID NO: 1002104 - DNA, 15 bp, Homo sapiens
gggaaggactttgtt

SEQ ID NO: 1002105 - DNA, 15 bp, Homo sapiens
ggaaggactttgttt

SEQ ID NO: 1002106 - DNA, 15 bp, Homo sapiens
gaaggactttgtttt

SEQ ID NO: 1002107 - DNA, 15 bp, Homo sapiens
aaggactttgtttta

SEQ ID NO: 1002108 - DNA, 15 bp, Homo sapiens
aggactttgttttag

SEQ ID NO: 1002109 - DNA, 15 bp, Homo sapiens
ggactttgttttagg

SEQ ID NO: 1002110 - DNA, 15 bp, Homo sapiens
gactttgttttagga

SEQ ID NO: 1002111 - DNA, 15 bp, Homo sapiens
actttgttttaggag

SEQ ID NO: 1002112 - DNA, 15 bp, Homo sapiens
ctttgttttaggaga

SEQ ID NO: 1002113 - DNA, 15 bp, Homo sapiens
tttgttttaggagac

SEQ ID NO: 1002114 - DNA, 15 bp, Homo sapiens
ttgttttaggagacc

SEQ ID NO: 1002115 - DNA, 15 bp, Homo sapiens
tgttttaggagaccc

SEQ ID NO: 1002116 - DNA, 15 bp, Homo sapiens
gttttaggagaccca

SEQ ID NO: 1002117 - DNA, 15 bp, Homo sapiens
ttttaggagacccat

SEQ ID NO: 1002118 - DNA, 15 bp, Homo sapiens
tttaggagacccata

SEQ ID NO: 1002119 - DNA, 15 bp, Homo sapiens
ttaggagacccatag

SEQ ID NO: 1002120 - DNA, 15 bp, Homo sapiens
taggagacccatagt

SEQ ID NO: 1002121 - DNA, 15 bp, Homo sapiens
aggagacccatagtc

SEQ ID NO: 1002122 - DNA, 15 bp, Homo sapiens
ggagacccatagtct

SEQ ID NO: 1002123 - DNA, 15 bp, Homo sapiens
gagacccatagtcta

SEQ ID NO: 1002124 - DNA, 15 bp, Homo sapiens
agacccatagtctac

SEQ ID NO: 1002125 - DNA, 15 bp, Homo sapiens
gacccatagtctacc

SEQ ID NO: 1002126 - DNA, 15 bp, Homo sapiens
acccatagtctacct

SEQ ID NO: 1002127 - DNA, 15 bp, Homo sapiens
cccatagtctacctc

SEQ ID NO: 1002128 - DNA, 15 bp, Homo sapiens
ccatagtctacctct

SEQ ID NO: 1002129 - DNA, 15 bp, Homo sapiens
catagtctacctcta

SEQ ID NO: 1002130 - DNA, 15 bp, Homo sapiens
atagtctacctctat

SEQ ID NO: 1002131 - DNA, 15 bp, Homo sapiens
tagtctacctctatt

SEQ ID NO: 1002132 - DNA, 15 bp, Homo sapiens
agtctacctctattg

SEQ ID NO: 1002133 - DNA, 15 bp, Homo sapiens
gtctacctctattgt

SEQ ID NO: 1002134 - DNA, 15 bp, Homo sapiens
tctacctctattgtt

SEQ ID NO: 1002135 - DNA, 15 bp, Homo sapiens
ctacctctattgttc

SEQ ID NO: 1002136 - DNA, 15 bp, Homo sapiens
tacctctattgttct

SEQ ID NO: 1002137 - DNA, 15 bp, Homo sapiens
acctctattgttcta

SEQ ID NO: 1002138 - DNA, 15 bp, Homo sapiens
cctctattgttctag

SEQ ID NO: 1002139 - DNA, 15 bp, Homo sapiens
ctctattgttctagg

SEQ ID NO: 1002140 - DNA, 15 bp, Homo sapiens
tctattgttctagga

SEQ ID NO: 1002141 - DNA, 15 bp, Homo sapiens
ctattgttctaggag

SEQ ID NO: 1002142 - DNA, 15 bp, Homo sapiens
tattgttctaggagt

SEQ ID NO: 1002143 - DNA, 15 bp, Homo sapiens
attgttctaggagtt

SEQ ID NO: 1002144 - DNA, 15 bp, Homo sapiens
ttgttctaggagtta

SEQ ID NO: 1002145 - DNA, 15 bp, Homo sapiens
tgttctaggagttaa

SEQ ID NO: 1002146 - DNA, 15 bp, Homo sapiens
gttctaggagttaaa

SEQ ID NO: 1002147 - DNA, 15 bp, Homo sapiens
ttctaggagttaaac

SEQ ID NO: 1002148 - DNA, 15 bp, Homo sapiens
tctaggagttaaacc

SEQ ID NO: 1002149 - DNA, 15 bp, Homo sapiens
ctaggagttaaacca

SEQ ID NO: 1002150 - DNA, 15 bp, Homo sapiens
taggagttaaaccac

SEQ ID NO: 1002151 - DNA, 15 bp, Homo sapiens
aggagttaaaccacg

SEQ ID NO: 1002152 - DNA, 15 bp, Homo sapiens
ggagttaaaccacgt

SEQ ID NO: 1002153 - DNA, 15 bp, Homo sapiens
gagttaaaccacgtt

SEQ ID NO: 1002154 - DNA, 15 bp, Homo sapiens
agttaaaccacgttg

SEQ ID NO: 1002155 - DNA, 15 bp, Homo sapiens
gttaaaccacgttgg

SEQ ID NO: 1002156 - DNA, 15 bp, Homo sapiens
ttaaaccacgttggt

SEQ ID NO: 1002157 - DNA, 15 bp, Homo sapiens
taaaccacgttggtt

SEQ ID NO: 1002158 - DNA, 15 bp, Homo sapiens
aaaccacgttggttt

SEQ ID NO: 1002159 - DNA, 15 bp, Homo sapiens
aaccacgttggttta

SEQ ID NO: 1002160 - DNA, 15 bp, Homo sapiens
accacgttggtttac

SEQ ID NO: 1002161 - DNA, 15 bp, Homo sapiens
ccacgttggtttaca

SEQ ID NO: 1002162 - DNA, 15 bp, Homo sapiens
cacgttggtttacat

SEQ ID NO: 1002163 - DNA, 15 bp, Homo sapiens
acgttggtttacatc

SEQ ID NO: 1002164 - DNA, 15 bp, Homo sapiens
cgttggtttacatcc

SEQ ID NO: 1002165 - DNA, 15 bp, Homo sapiens
gttggtttacatcct

SEQ ID NO: 1002166 - DNA, 15 bp, Homo sapiens
ttggtttacatcctg

SEQ ID NO: 1002167 - DNA, 15 bp, Homo sapiens
tggtttacatcctga

SEQ ID NO: 1002168 - DNA, 15 bp, Homo sapiens
ggtttacatcctgac

SEQ ID NO: 1002169 - DNA, 15 bp, Homo sapiens
gtttacatcctgact

SEQ ID NO: 1002170 - DNA, 15 bp, Homo sapiens
tttacatcctgactt

SEQ ID NO: 1002171 - DNA, 15 bp, Homo sapiens
ttacatcctgacttt

SEQ ID NO: 1002172 - DNA, 15 bp, Homo sapiens
tacatcctgactttg

SEQ ID NO: 1002173 - DNA, 15 bp, Homo sapiens
acatcctgactttgc

SEQ ID NO: 1002174 - DNA, 15 bp, Homo sapiens
catcctgactttgcc

SEQ ID NO: 1002175 - DNA, 15 bp, Homo sapiens
atcctgactttgcca

SEQ ID NO: 1002176 - DNA, 15 bp, Homo sapiens
tcctgactttgccac

SEQ ID NO: 1002177 - DNA, 15 bp, Homo sapiens
cctgactttgccacc

SEQ ID NO: 1002178 - DNA, 15 bp, Homo sapiens
ctgactttgccacct

SEQ ID NO: 1002179 - DNA, 15 bp, Homo sapiens
tgactttgccacctg

SEQ ID NO: 1002180 - DNA, 15 bp, Homo sapiens
gactttgccacctgt

SEQ ID NO: 1002181 - DNA, 15 bp, Homo sapiens
actttgccacctgtc

SEQ ID NO: 1002182 - DNA, 15 bp, Homo sapiens
ctttgccacctgtca

SEQ ID NO: 1002183 - DNA, 15 bp, Homo sapiens
tttgccacctgtcaa

SEQ ID NO: 1002184 - DNA, 15 bp, Homo sapiens
ttgccacctgtcaac

SEQ ID NO: 1002185 - DNA, 15 bp, Homo sapiens
tgccacctgtcaact

SEQ ID NO: 1002186 - DNA, 15 bp, Homo sapiens
gccacctgtcaactc

SEQ ID NO: 1002187 - DNA, 15 bp, Homo sapiens
ccacctgtcaactca

SEQ ID NO: 1002188 - DNA, 15 bp, Homo sapiens
cacctgtcaactcag

SEQ ID NO: 1002189 - DNA, 15 bp, Homo sapiens
acctgtcaactcaga

SEQ ID NO: 1002190 - DNA, 15 bp, Homo sapiens
cctgtcaactcagac

SEQ ID NO: 1002191 - DNA, 15 bp, Homo sapiens
ctgtcaactcagacc

SEQ ID NO: 1002192 - DNA, 15 bp, Homo sapiens
tgtcaactcagacct

SEQ ID NO: 1002193 - DNA, 15 bp, Homo sapiens
gtcaactcagacctt

SEQ ID NO: 1002194 - DNA, 15 bp, Homo sapiens
tcaactcagaccttg

SEQ ID NO: 1002195 - DNA, 15 bp, Homo sapiens
caactcagaccttgg

SEQ ID NO: 1002196 - DNA, 15 bp, Homo sapiens
aactcagaccttggg

SEQ ID NO: 1002197 - DNA, 15 bp, Homo sapiens
actcagaccttgggc

SEQ ID NO: 1002198 - DNA, 15 bp, Homo sapiens
ctcagaccttgggca

SEQ ID NO: 1002199 - DNA, 15 bp, Homo sapiens
tcagaccttgggcaa

SEQ ID NO: 1002200 - DNA, 15 bp, Homo sapiens
cagaccttgggcaaa

SEQ ID NO: 1002201 - DNA, 15 bp, Homo sapiens
agaccttgggcaaat

SEQ ID NO: 1002202 - DNA, 15 bp, Homo sapiens
gaccttgggcaaatc

SEQ ID NO: 1002203 - DNA, 15 bp, Homo sapiens
accttgggcaaatca

SEQ ID NO: 1002204 - DNA, 15 bp, Homo sapiens
ccttgggcaaatcaa

SEQ ID NO: 1002205 - DNA, 15 bp, Homo sapiens
cttgggcaaatcaaa

SEQ ID NO: 1002206 - DNA, 15 bp, Homo sapiens
ttgggcaaatcaaag

SEQ ID NO: 1002207 - DNA, 15 bp, Homo sapiens
tgggcaaatcaaagg

SEQ ID NO: 1002208 - DNA, 15 bp, Homo sapiens
gggcaaatcaaaggt

SEQ ID NO: 1002209 - DNA, 15 bp, Homo sapiens
ggcaaatcaaaggtc

SEQ ID NO: 1002210 - DNA, 15 bp, Homo sapiens
gcaaatcaaaggtct

SEQ ID NO: 1002211 - DNA, 15 bp, Homo sapiens
caaatcaaaggtctg

SEQ ID NO: 1002212 - DNA, 15 bp, Homo sapiens
aaatcaaaggtctga

SEQ ID NO: 1002213 - DNA, 15 bp, Homo sapiens
aatcaaaggtctgag

SEQ ID NO: 1002214 - DNA, 15 bp, Homo sapiens
atcaaaggtctgagg

SEQ ID NO: 1002215 - DNA, 15 bp, Homo sapiens
tcaaaggtctgaggg

SEQ ID NO: 1002216 - DNA, 15 bp, Homo sapiens
caaaggtctgaggga

SEQ ID NO: 1002217 - DNA, 15 bp, Homo sapiens
aaaggtctgagggag

SEQ ID NO: 1002218 - DNA, 15 bp, Homo sapiens
aaggtctgagggagg

SEQ ID NO: 1002219 - DNA, 15 bp, Homo sapiens
aggtctgagggagga

SEQ ID NO: 1002220 - DNA, 15 bp, Homo sapiens
ggtctgagggaggag

SEQ ID NO: 1002221 - DNA, 15 bp, Homo sapiens
gtctgagggaggagt

SEQ ID NO: 1002222 - DNA, 15 bp, Homo sapiens
tctgagggaggagtg

SEQ ID NO: 1002223 - DNA, 15 bp, Homo sapiens
ctgagggaggagtgc

SEQ ID NO: 1002224 - DNA, 15 bp, Homo sapiens
tgagggaggagtgca

SEQ ID NO: 1002225 - DNA, 15 bp, Homo sapiens
gagggaggagtgcag

SEQ ID NO: 1002226 - DNA, 15 bp, Homo sapiens
agggaggagtgcagg

SEQ ID NO: 1002227 - DNA, 15 bp, Homo sapiens
gggaggagtgcaggc

SEQ ID NO: 1002228 - DNA, 15 bp, Homo sapiens
ggaggagtgcaggct

SEQ ID NO: 1002229 - DNA, 15 bp, Homo sapiens
gaggagtgcaggctc

SEQ ID NO: 1002230 - DNA, 15 bp, Homo sapiens
aggagtgcaggctcc

SEQ ID NO: 1002231 - DNA, 15 bp, Homo sapiens
ggagtgcaggctccc

SEQ ID NO: 1002232 - DNA, 15 bp, Homo sapiens
gagtgcaggctccca

SEQ ID NO: 1002233 - DNA, 15 bp, Homo sapiens
agtgcaggctcccag

SEQ ID NO: 1002234 - DNA, 15 bp, Homo sapiens
gtgcaggctcccagc

SEQ ID NO: 1002235 - DNA, 15 bp, Homo sapiens
tgcaggctcccagcg

SEQ ID NO: 1002236 - DNA, 15 bp, Homo sapiens
gcaggctcccagcgt

SEQ ID NO: 1002237 - DNA, 15 bp, Homo sapiens
caggctcccagcgtt

SEQ ID NO: 1002238 - DNA, 15 bp, Homo sapiens
aggctcccagcgttc

SEQ ID NO: 1002239 - DNA, 15 bp, Homo sapiens
ggctcccagcgttcc

SEQ ID NO: 1002240 - DNA, 15 bp, Homo sapiens
gctcccagcgttccc

SEQ ID NO: 1002241 - DNA, 15 bp, Homo sapiens
ctcccagcgttccca

SEQ ID NO: 1002242 - DNA, 15 bp, Homo sapiens
tcccagcgttcccac

SEQ ID NO: 1002243 - DNA, 15 bp, Homo sapiens
cccagcgttcccacg

SEQ ID NO: 1002244 - DNA, 15 bp, Homo sapiens
ccagcgttcccacgg

SEQ ID NO: 1002245 - DNA, 15 bp, Homo sapiens
cagcgttcccacggg

SEQ ID NO: 1002246 - DNA, 15 bp, Homo sapiens
agcgttcccacgggg

SEQ ID NO: 1002247 - DNA, 15 bp, Homo sapiens
gcgttcccacggggg

SEQ ID NO: 1002248 - DNA, 15 bp, Homo sapiens
cgttcccacgggggt

SEQ ID NO: 1002249 - DNA, 15 bp, Homo sapiens
gttcccacgggggtg

SEQ ID NO: 1002250 - DNA, 15 bp, Homo sapiens
ttcccacgggggtgg

SEQ ID NO: 1002251 - DNA, 15 bp, Homo sapiens
tcccacgggggtggg

SEQ ID NO: 1002252 - DNA, 15 bp, Homo sapiens
cccacgggggtgggg

SEQ ID NO: 1002253 - DNA, 15 bp, Homo sapiens
ccacgggggtgggga

SEQ ID NO: 1002254 - DNA, 15 bp, Homo sapiens
cacgggggtggggac

SEQ ID NO: 1002255 - DNA, 15 bp, Homo sapiens
acgggggtggggacg

SEQ ID NO: 1002256 - DNA, 15 bp, Homo sapiens
cgggggtggggacgt

SEQ ID NO: 1002257 - DNA, 15 bp, Homo sapiens
gggggtggggacgtg

SEQ ID NO: 1002258 - DNA, 15 bp, Homo sapiens
ggggtggggacgtga

SEQ ID NO: 1002259 - DNA, 15 bp, Homo sapiens
gggtggggacgtgac

SEQ ID NO: 1002260 - DNA, 15 bp, Homo sapiens
ggtggggacgtgacg

SEQ ID NO: 1002261 - DNA, 15 bp, Homo sapiens
gtggggacgtgacgt

SEQ ID NO: 1002262 - DNA, 15 bp, Homo sapiens
tggggacgtgacgta

SEQ ID NO: 1002263 - DNA, 15 bp, Homo sapiens
ggggacgtgacgtat

SEQ ID NO: 1002264 - DNA, 15 bp, Homo sapiens
gggacgtgacgtatt

SEQ ID NO: 1002265 - DNA, 15 bp, Homo sapiens
ggacgtgacgtattc

SEQ ID NO: 1002266 - DNA, 15 bp, Homo sapiens
gacgtgacgtattca

SEQ ID NO: 1002267 - DNA, 15 bp, Homo sapiens
acgtgacgtattcat

SEQ ID NO: 1002268 - DNA, 15 bp, Homo sapiens
cgtgacgtattcatc

SEQ ID NO: 1002269 - DNA, 15 bp, Homo sapiens
gtgacgtattcatca

SEQ ID NO: 1002270 - DNA, 15 bp, Homo sapiens
tgacgtattcatcag

SEQ ID NO: 1002271 - DNA, 15 bp, Homo sapiens
gacgtattcatcagt

SEQ ID NO: 1002272 - DNA, 15 bp, Homo sapiens
acgtattcatcagtt

SEQ ID NO: 1002273 - DNA, 15 bp, Homo sapiens
cgtattcatcagttc

SEQ ID NO: 1002274 - DNA, 15 bp, Homo sapiens
gtattcatcagttca

SEQ ID NO: 1002275 - DNA, 15 bp, Homo sapiens
tattcatcagttcat

SEQ ID NO: 1002276 - DNA, 15 bp, Homo sapiens
attcatcagttcatg

SEQ ID NO: 1002277 - DNA, 15 bp, Homo sapiens
ttcatcagttcatga

SEQ ID NO: 1002278 - DNA, 15 bp, Homo sapiens
tcatcagttcatgaa

SEQ ID NO: 1002279 - DNA, 15 bp, Homo sapiens
catcagttcatgaag

SEQ ID NO: 1002280 - DNA, 15 bp, Homo sapiens
atcagttcatgaagt

SEQ ID NO: 1002281 - DNA, 15 bp, Homo sapiens
tcagttcatgaagtt

SEQ ID NO: 1002282 - DNA, 15 bp, Homo sapiens
cagttcatgaagtta

SEQ ID NO: 1002283 - DNA, 15 bp, Homo sapiens
agttcatgaagttaa

SEQ ID NO: 1002284 - DNA, 15 bp, Homo sapiens
gttcatgaagttaat

SEQ ID NO: 1002285 - DNA, 15 bp, Homo sapiens
ttcatgaagttaatg

SEQ ID NO: 1002286 - DNA, 15 bp, Homo sapiens
tcatgaagttaatga

SEQ ID NO: 1002287 - DNA, 15 bp, Homo sapiens
catgaagttaatgat

SEQ ID NO: 1002288 - DNA, 15 bp, Homo sapiens
atgaagttaatgata

SEQ ID NO: 1002289 - DNA, 15 bp, Homo sapiens
tgaagttaatgatat

SEQ ID NO: 1002290 - DNA, 15 bp, Homo sapiens
gaagttaatgatatg

SEQ ID NO: 1002291 - DNA, 15 bp, Homo sapiens
aagttaatgatatgt

SEQ ID NO: 1002292 - DNA, 15 bp, Homo sapiens
agttaatgatatgta

SEQ ID NO: 1002293 - DNA, 15 bp, Homo sapiens
gttaatgatatgtat

SEQ ID NO: 1002294 - DNA, 15 bp, Homo sapiens
ttaatgatatgtatt

SEQ ID NO: 1002295 - DNA, 15 bp, Homo sapiens
taatgatatgtattg

SEQ ID NO: 1002296 - DNA, 15 bp, Homo sapiens
aatgatatgtattga

SEQ ID NO: 1002297 - DNA, 15 bp, Homo sapiens
atgatatgtattgaa

SEQ ID NO: 1002298 - DNA, 15 bp, Homo sapiens
tgatatgtattgaaa

SEQ ID NO: 1002299 - DNA, 15 bp, Homo sapiens
gatatgtattgaaaa

SEQ ID NO: 1002300 - DNA, 15 bp, Homo sapiens
atatgtattgaaaag

SEQ ID NO: 1002301 - DNA, 15 bp, Homo sapiens
tatgtattgaaaagg

SEQ ID NO: 1002302 - DNA, 15 bp, Homo sapiens
atgtattgaaaaggt

SEQ ID NO: 1002303 - DNA, 15 bp, Homo sapiens
tgtattgaaaaggtt

SEQ ID NO: 1002304 - DNA, 15 bp, Homo sapiens
gtattgaaaaggttt

SEQ ID NO: 1002305 - DNA, 15 bp, Homo sapiens
tattgaaaaggtttg

SEQ ID NO: 1002306 - DNA, 15 bp, Homo sapiens
attgaaaaggtttgt

SEQ ID NO: 1002307 - DNA, 15 bp, Homo sapiens
ttgaaaaggtttgtt

SEQ ID NO: 1002308 - DNA, 15 bp, Homo sapiens
tgaaaaggtttgttc

SEQ ID NO: 1002309 - DNA, 15 bp, Homo sapiens
gaaaaggtttgttca

SEQ ID NO: 1002310 - DNA, 15 bp, Homo sapiens
aaaaggtttgttcaa

SEQ ID NO: 1002311 - DNA, 15 bp, Homo sapiens
aaaggtttgttcaag

SEQ ID NO: 1002312 - DNA, 15 bp, Homo sapiens
aaggtttgttcaagg

SEQ ID NO: 1002313 - DNA, 15 bp, Homo sapiens
aggtttgttcaagga

SEQ ID NO: 1002314 - DNA, 15 bp, Homo sapiens
ggtttgttcaaggat

SEQ ID NO: 1002315 - DNA, 15 bp, Homo sapiens
gtttgttcaaggatt

SEQ ID NO: 1002316 - DNA, 15 bp, Homo sapiens
tttgttcaaggattt

SEQ ID NO: 1002317 - DNA, 15 bp, Homo sapiens
ttgttcaaggattta

SEQ ID NO: 1002318 - DNA, 15 bp, Homo sapiens
tgttcaaggatttaa

SEQ ID NO: 1002319 - DNA, 15 bp, Homo sapiens
gttcaaggatttaaa

SEQ ID NO: 1002320 - DNA, 15 bp, Homo sapiens
ttcaaggatttaaat

SEQ ID NO: 1002321 - DNA, 15 bp, Homo sapiens
tcaaggatttaaata

SEQ ID NO: 1002322 - DNA, 15 bp, Homo sapiens
caaggatttaaataa

SEQ ID NO: 1002323 - DNA, 15 bp, Homo sapiens
aaggatttaaataag

SEQ ID NO: 1002324 - DNA, 15 bp, Homo sapiens
aggatttaaataaga

SEQ ID NO: 1002325 - DNA, 15 bp, Homo sapiens
ggatttaaataagac

SEQ ID NO: 1002326 - DNA, 15 bp, Homo sapiens
gatttaaataagacg

SEQ ID NO: 1002327 - DNA, 15 bp, Homo sapiens
atttaaataagacga

SEQ ID NO: 1002328 - DNA, 15 bp, Homo sapiens
tttaaataagacgat

SEQ ID NO: 1002329 - DNA, 15 bp, Homo sapiens
ttaaataagacgatg

SEQ ID NO: 1002330 - DNA, 15 bp, Homo sapiens
taaataagacgatga

SEQ ID NO: 1002331 - DNA, 15 bp, Homo sapiens
aaataagacgatgaa

SEQ ID NO: 1002332 - DNA, 15 bp, Homo sapiens
aataagacgatgaat

SEQ ID NO: 1002333 - DNA, 15 bp, Homo sapiens
ataagacgatgaata

SEQ ID NO: 1002334 - DNA, 15 bp, Homo sapiens
taagacgatgaatat

SEQ ID NO: 1002335 - DNA, 15 bp, Homo sapiens
aagacgatgaatata

SEQ ID NO: 1002336 - DNA, 15 bp, Homo sapiens
agacgatgaatatat

SEQ ID NO: 1002337 - DNA, 15 bp, Homo sapiens
gacgatgaatatatt

SEQ ID NO: 1002338 - DNA, 15 bp, Homo sapiens
acgatgaatatattg

SEQ ID NO: 1002339 - DNA, 15 bp, Homo sapiens
cgatgaatatattga

SEQ ID NO: 1002340 - DNA, 15 bp, Homo sapiens
gatgaatatattgaa

SEQ ID NO: 1002341 - DNA, 15 bp, Homo sapiens
atgaatatattgaat

SEQ ID NO: 1002342 - DNA, 15 bp, Homo sapiens
tgaatatattgaatt

SEQ ID NO: 1002343 - DNA, 15 bp, Homo sapiens
gaatatattgaatta

SEQ ID NO: 1002344 - DNA, 15 bp, Homo sapiens
aatatattgaattaa

SEQ ID NO: 1002345 - DNA, 15 bp, Homo sapiens
atatattgaattaat

SEQ ID NO: 1002346 - DNA, 15 bp, Homo sapiens
tatattgaattaata

SEQ ID NO: 1002347 - DNA, 15 bp, Homo sapiens
atattgaattaataa

SEQ ID NO: 1002348 - DNA, 15 bp, Homo sapiens
tattgaattaataat

SEQ ID NO: 1002349 - DNA, 15 bp, Homo sapiens
attgaattaataatg

SEQ ID NO: 1002350 - DNA, 15 bp, Homo sapiens
ttgaattaataatga

SEQ ID NO: 1002351 - DNA, 15 bp, Homo sapiens
tgaattaataatgaa

SEQ ID NO: 1002352 - DNA, 15 bp, Homo sapiens
gaattaataatgaat

SEQ ID NO: 1002353 - DNA, 15 bp, Homo sapiens
aattaataatgaatg

SEQ ID NO: 1002354 - DNA, 15 bp, Homo sapiens
attaataatgaatgc

SEQ ID NO: 1002355 - DNA, 15 bp, Homo sapiens
ttaataatgaatgca

SEQ ID NO: 1002356 - DNA, 15 bp, Homo sapiens
taataatgaatgcaa

SEQ ID NO: 1002357 - DNA, 15 bp, Homo sapiens
aataatgaatgcaag

SEQ ID NO: 1002358 - DNA, 15 bp, Homo sapiens
ataatgaatgcaagg

SEQ ID NO: 1002359 - DNA, 15 bp, Homo sapiens
taatgaatgcaaggc

SEQ ID NO: 1002360 - DNA, 15 bp, Homo sapiens
aatgaatgcaaggcc

SEQ ID NO: 1002361 - DNA, 15 bp, Homo sapiens
atgaatgcaaggcct

SEQ ID NO: 1002362 - DNA, 15 bp, Homo sapiens
tgaatgcaaggcctt

SEQ ID NO: 1002363 - DNA, 15 bp, Homo sapiens
gaatgcaaggcctta

SEQ ID NO: 1002364 - DNA, 15 bp, Homo sapiens
aatgcaaggccttaa

SEQ ID NO: 1002365 - DNA, 15 bp, Homo sapiens
atgcaaggccttaaa

SEQ ID NO: 1002366 - DNA, 15 bp, Homo sapiens
tgcaaggccttaaag

SEQ ID NO: 1002367 - DNA, 15 bp, Homo sapiens
gcaaggccttaaagg

SEQ ID NO: 1002368 - DNA, 15 bp, Homo sapiens
caaggccttaaaggt

SEQ ID NO: 1002369 - DNA, 15 bp, Homo sapiens
aaggccttaaaggtg

SEQ ID NO: 1002370 - DNA, 15 bp, Homo sapiens
aggccttaaaggtgt

SEQ ID NO: 1002371 - DNA, 15 bp, Homo sapiens
ggccttaaaggtgtt

SEQ ID NO: 1002372 - DNA, 15 bp, Homo sapiens
gccttaaaggtgttt

SEQ ID NO: 1002373 - DNA, 15 bp, Homo sapiens
ccttaaaggtgtttt

SEQ ID NO: 1002374 - DNA, 15 bp, Homo sapiens
cttaaaggtgttttg

SEQ ID NO: 1002375 - DNA, 15 bp, Homo sapiens
ttaaaggtgttttga

SEQ ID NO: 1002376 - DNA, 15 bp, Homo sapiens
taaaggtgttttgag

SEQ ID NO: 1002377 - DNA, 15 bp, Homo sapiens
aaaggtgttttgagg

SEQ ID NO: 1002378 - DNA, 15 bp, Homo sapiens
aaggtgttttgaggg

SEQ ID NO: 1002379 - DNA, 15 bp, Homo sapiens
aggtgttttgagggt

SEQ ID NO: 1002380 - DNA, 15 bp, Homo sapiens
ggtgttttgagggtg

SEQ ID NO: 1002381 - DNA, 15 bp, Homo sapiens
gtgttttgagggtgg

SEQ ID NO: 1002382 - DNA, 15 bp, Homo sapiens
tgttttgagggtggt

SEQ ID NO: 1002383 - DNA, 15 bp, Homo sapiens
gttttgagggtggtg

SEQ ID NO: 1002384 - DNA, 15 bp, Homo sapiens
ttttgagggtggtga

SEQ ID NO: 1002385 - DNA, 15 bp, Homo sapiens
tttgagggtggtgaa

SEQ ID NO: 1002386 - DNA, 15 bp, Homo sapiens
ttgagggtggtgaaa

SEQ ID NO: 1002387 - DNA, 15 bp, Homo sapiens
tgagggtggtgaaac

SEQ ID NO: 1002388 - DNA, 15 bp, Homo sapiens
gagggtggtgaaact

SEQ ID NO: 1002389 - DNA, 15 bp, Homo sapiens
agggtggtgaaactt

SEQ ID NO: 1002390 - DNA, 15 bp, Homo sapiens
gggtggtgaaacttg

SEQ ID NO: 1002391 - DNA, 15 bp, Homo sapiens
ggtggtgaaacttga

SEQ ID NO: 1002392 - DNA, 15 bp, Homo sapiens
gtggtgaaacttgaa

SEQ ID NO: 1002393 - DNA, 15 bp, Homo sapiens
tggtgaaacttgaat

SEQ ID NO: 1002394 - DNA, 15 bp, Homo sapiens
ggtgaaacttgaatc

SEQ ID NO: 1002395 - DNA, 15 bp, Homo sapiens
gtgaaacttgaatct

SEQ ID NO: 1002396 - DNA, 15 bp, Homo sapiens
tgaaacttgaatctc

SEQ ID NO: 1002397 - DNA, 15 bp, Homo sapiens
gaaacttgaatctct

SEQ ID NO: 1002398 - DNA, 15 bp, Homo sapiens
aaacttgaatctctc

SEQ ID NO: 1002399 - DNA, 15 bp, Homo sapiens
aacttgaatctctca

SEQ ID NO: 1002400 - DNA, 15 bp, Homo sapiens
acttgaatctctcat

SEQ ID NO: 1002401 - DNA, 15 bp, Homo sapiens
cttgaatctctcatc

SEQ ID NO: 1002402 - DNA, 15 bp, Homo sapiens
ttgaatctctcatca

SEQ ID NO: 1002403 - DNA, 15 bp, Homo sapiens
tgaatctctcatcaa

SEQ ID NO: 1002404 - DNA, 15 bp, Homo sapiens
gaatctctcatcaac

SEQ ID NO: 1002405 - DNA, 15 bp, Homo sapiens
aatctctcatcaact

SEQ ID NO: 1002406 - DNA, 15 bp, Homo sapiens
atctctcatcaactg

SEQ ID NO: 1002407 - DNA, 15 bp, Homo sapiens
tctctcatcaactgt

SEQ ID NO: 1002408 - DNA, 15 bp, Homo sapiens
ctctcatcaactgtg

SEQ ID NO: 1002409 - DNA, 15 bp, Homo sapiens
tctcatcaactgtgc

SEQ ID NO: 1002410 - DNA, 15 bp, Homo sapiens
ctcatcaactgtgca

SEQ ID NO: 1002411 - DNA, 15 bp, Homo sapiens
tcatcaactgtgcaa

SEQ ID NO: 1002412 - DNA, 15 bp, Homo sapiens
catcaactgtgcaat

SEQ ID NO: 1002413 - DNA, 15 bp, Homo sapiens
atcaactgtgcaata

SEQ ID NO: 1002414 - DNA, 15 bp, Homo sapiens
tcaactgtgcaatag

SEQ ID NO: 1002415 - DNA, 15 bp, Homo sapiens
caactgtgcaatagt

SEQ ID NO: 1002416 - DNA, 15 bp, Homo sapiens
aactgtgcaatagtt

SEQ ID NO: 1002417 - DNA, 15 bp, Homo sapiens
actgtgcaatagtta

SEQ ID NO: 1002418 - DNA, 15 bp, Homo sapiens
ctgtgcaatagttat

SEQ ID NO: 1002419 - DNA, 15 bp, Homo sapiens
tgtgcaatagttata

SEQ ID NO: 1002420 - DNA, 15 bp, Homo sapiens
gtgcaatagttatat

SEQ ID NO: 1002421 - DNA, 15 bp, Homo sapiens
tgcaatagttatatt

SEQ ID NO: 1002422 - DNA, 15 bp, Homo sapiens
gcaatagttatatta

SEQ ID NO: 1002423 - DNA, 15 bp, Homo sapiens
caatagttatattaa

SEQ ID NO: 1002424 - DNA, 15 bp, Homo sapiens
aatagttatattaac

SEQ ID NO: 1002425 - DNA, 15 bp, Homo sapiens
atagttatattaact

SEQ ID NO: 1002426 - DNA, 15 bp, Homo sapiens
tagttatattaactt

SEQ ID NO: 1002427 - DNA, 15 bp, Homo sapiens
agttatattaacttg

SEQ ID NO: 1002428 - DNA, 15 bp, Homo sapiens
gttatattaacttgg

SEQ ID NO: 1002429 - DNA, 15 bp, Homo sapiens
ttatattaacttgga

SEQ ID NO: 1002430 - DNA, 15 bp, Homo sapiens
tatattaacttggat

SEQ ID NO: 1002431 - DNA, 15 bp, Homo sapiens
atattaacttggatg

SEQ ID NO: 1002432 - DNA, 15 bp, Homo sapiens
tattaacttggatgg

SEQ ID NO: 1002433 - DNA, 15 bp, Homo sapiens
attaacttggatggc

SEQ ID NO: 1002434 - DNA, 15 bp, Homo sapiens
ttaacttggatggct

SEQ ID NO: 1002435 - DNA, 15 bp, Homo sapiens
taacttggatggcta

SEQ ID NO: 1002436 - DNA, 15 bp, Homo sapiens
aacttggatggctat

SEQ ID NO: 1002437 - DNA, 15 bp, Homo sapiens
acttggatggctatg

SEQ ID NO: 1002438 - DNA, 15 bp, Homo sapiens
cttggatggctatga

SEQ ID NO: 1002439 - DNA, 15 bp, Homo sapiens
ttggatggctatgag

SEQ ID NO: 1002440 - DNA, 15 bp, Homo sapiens
tggatggctatgagt

SEQ ID NO: 1002441 - DNA, 15 bp, Homo sapiens
ggatggctatgagtt

SEQ ID NO: 1002442 - DNA, 15 bp, Homo sapiens
gatggctatgagttt

SEQ ID NO: 1002443 - DNA, 15 bp, Homo sapiens
atggctatgagtttt

SEQ ID NO: 1002444 - DNA, 15 bp, Homo sapiens
tggctatgagttttg

SEQ ID NO: 1002445 - DNA, 15 bp, Homo sapiens
ggctatgagttttgc

SEQ ID NO: 1002446 - DNA, 15 bp, Homo sapiens
gctatgagttttgca

SEQ ID NO: 1002447 - DNA, 15 bp, Homo sapiens
ctatgagttttgcag

SEQ ID NO: 1002448 - DNA, 15 bp, Homo sapiens
tatgagttttgcaga

SEQ ID NO: 1002449 - DNA, 15 bp, Homo sapiens
atgagttttgcagag

SEQ ID NO: 1002450 - DNA, 15 bp, Homo sapiens
tgagttttgcagagg

SEQ ID NO: 1002451 - DNA, 15 bp, Homo sapiens
gagttttgcagagga

SEQ ID NO: 1002452 - DNA, 15 bp, Homo sapiens
agttttgcagaggaa

SEQ ID NO: 1002453 - DNA, 15 bp, Homo sapiens
gttttgcagaggaaa

SEQ ID NO: 1002454 - DNA, 15 bp, Homo sapiens
ttttgcagaggaaag

SEQ ID NO: 1002455 - DNA, 15 bp, Homo sapiens
tttgcagaggaaagc

SEQ ID NO: 1002456 - DNA, 15 bp, Homo sapiens
ttgcagaggaaagct

SEQ ID NO: 1002457 - DNA, 15 bp, Homo sapiens
tgcagaggaaagctg

SEQ ID NO: 1002458 - DNA, 15 bp, Homo sapiens
gcagaggaaagctgg

SEQ ID NO: 1002459 - DNA, 15 bp, Homo sapiens
cagaggaaagctggg

SEQ ID NO: 1002460 - DNA, 15 bp, Homo sapiens
agaggaaagctgggc

SEQ ID NO: 1002461 - DNA, 15 bp, Homo sapiens
gaggaaagctgggct

SEQ ID NO: 1002462 - DNA, 15 bp, Homo sapiens
aggaaagctgggctt

SEQ ID NO: 1002463 - DNA, 15 bp, Homo sapiens
ggaaagctgggctta

SEQ ID NO: 1002464 - DNA, 15 bp, Homo sapiens
gaaagctgggcttaa

SEQ ID NO: 1002465 - DNA, 15 bp, Homo sapiens
aaagctgggcttaaa

SEQ ID NO: 1002466 - DNA, 15 bp, Homo sapiens
aagctgggcttaaat

SEQ ID NO: 1002467 - DNA, 15 bp, Homo sapiens
agctgggcttaaatc

SEQ ID NO: 1002468 - DNA, 15 bp, Homo sapiens
gctgggcttaaatcc

SEQ ID NO: 1002469 - DNA, 15 bp, Homo sapiens
ctgggcttaaatccc

SEQ ID NO: 1002470 - DNA, 15 bp, Homo sapiens
tgggcttaaatccca

SEQ ID NO: 1002471 - DNA, 15 bp, Homo sapiens
gggcttaaatcccaa

SEQ ID NO: 1002472 - DNA, 15 bp, Homo sapiens
ggcttaaatcccaat

SEQ ID NO: 1002473 - DNA, 15 bp, Homo sapiens
gcttaaatcccaatg

SEQ ID NO: 1002474 - DNA, 15 bp, Homo sapiens
cttaaatcccaatgc

SEQ ID NO: 1002475 - DNA, 15 bp, Homo sapiens
ttaaatcccaatgct

SEQ ID NO: 1002476 - DNA, 15 bp, Homo sapiens
taaatcccaatgcta

SEQ ID NO: 1002477 - DNA, 15 bp, Homo sapiens
aaatcccaatgctag

SEQ ID NO: 1002478 - DNA, 15 bp, Homo sapiens
aatcccaatgctaga

SEQ ID NO: 1002479 - DNA, 15 bp, Homo sapiens
atcccaatgctagac

SEQ ID NO: 1002480 - DNA, 15 bp, Homo sapiens
tcccaatgctagacc

SEQ ID NO: 1002481 - DNA, 15 bp, Homo sapiens
cccaatgctagacct

SEQ ID NO: 1002482 - DNA, 15 bp, Homo sapiens
ccaatgctagacctg

SEQ ID NO: 1002483 - DNA, 15 bp, Homo sapiens
caatgctagacctgg

SEQ ID NO: 1002484 - DNA, 15 bp, Homo sapiens
aatgctagacctggt

SEQ ID NO: 1002485 - DNA, 15 bp, Homo sapiens
atgctagacctggtg

SEQ ID NO: 1002486 - DNA, 15 bp, Homo sapiens
tgctagacctggtgg

SEQ ID NO: 1002487 - DNA, 15 bp, Homo sapiens
gctagacctggtggc

SEQ ID NO: 1002488 - DNA, 15 bp, Homo sapiens
ctagacctggtggct

SEQ ID NO: 1002489 - DNA, 15 bp, Homo sapiens
tagacctggtggcta

SEQ ID NO: 1002490 - DNA, 15 bp, Homo sapiens
agacctggtggctag

SEQ ID NO: 1002491 - DNA, 15 bp, Homo sapiens
gacctggtggctaga

SEQ ID NO: 1002492 - DNA, 15 bp, Homo sapiens
acctggtggctagac

SEQ ID NO: 1002493 - DNA, 15 bp, Homo sapiens
cctggtggctagacc

SEQ ID NO: 1002494 - DNA, 15 bp, Homo sapiens
ctggtggctagacct

SEQ ID NO: 1002495 - DNA, 15 bp, Homo sapiens
tggtggctagacctt

SEQ ID NO: 1002496 - DNA, 15 bp, Homo sapiens
ggtggctagaccttg

SEQ ID NO: 1002497 - DNA, 15 bp, Homo sapiens
gtggctagaccttga

SEQ ID NO: 1002498 - DNA, 15 bp, Homo sapiens
tggctagaccttgat

SEQ ID NO: 1002499 - DNA, 15 bp, Homo sapiens
ggctagaccttgatt

SEQ ID NO: 1002500 - DNA, 15 bp, Homo sapiens
gctagaccttgattg

SEQ ID NO: 1002501 - DNA, 15 bp, Homo sapiens
ctagaccttgattgc

SEQ ID NO: 1002502 - DNA, 15 bp, Homo sapiens
tagaccttgattgcc

SEQ ID NO: 1002503 - DNA, 15 bp, Homo sapiens
agaccttgattgcca

SEQ ID NO: 1002504 - DNA, 15 bp, Homo sapiens
gaccttgattgccac

SEQ ID NO: 1002505 - DNA, 15 bp, Homo sapiens
accttgattgccacc

SEQ ID NO: 1002506 - DNA, 15 bp, Homo sapiens
ccttgattgccaccg

SEQ ID NO: 1002507 - DNA, 15 bp, Homo sapiens
cttgattgccaccgg

SEQ ID NO: 1002508 - DNA, 15 bp, Homo sapiens
ttgattgccaccggg

SEQ ID NO: 1002509 - DNA, 15 bp, Homo sapiens
tgattgccaccgggt

SEQ ID NO: 1002510 - DNA, 15 bp, Homo sapiens
gattgccaccgggtc

SEQ ID NO: 1002511 - DNA, 15 bp, Homo sapiens
attgccaccgggtct

SEQ ID NO: 1002512 - DNA, 15 bp, Homo sapiens
ttgccaccgggtcta

SEQ ID NO: 1002513 - DNA, 15 bp, Homo sapiens
tgccaccgggtctag

SEQ ID NO: 1002514 - DNA, 15 bp, Homo sapiens
gccaccgggtctagc

SEQ ID NO: 1002515 - DNA, 15 bp, Homo sapiens
ccaccgggtctagca

SEQ ID NO: 1002516 - DNA, 15 bp, Homo sapiens
caccgggtctagcat

SEQ ID NO: 1002517 - DNA, 15 bp, Homo sapiens
accgggtctagcatt

SEQ ID NO: 1002518 - DNA, 15 bp, Homo sapiens
ccgggtctagcattg

SEQ ID NO: 1002519 - DNA, 15 bp, Homo sapiens
cgggtctagcattgg

SEQ ID NO: 1002520 - DNA, 15 bp, Homo sapiens
gggtctagcattggg

SEQ ID NO: 1002521 - DNA, 15 bp, Homo sapiens
ggtctagcattggga

SEQ ID NO: 1002522 - DNA, 15 bp, Homo sapiens
gtctagcattgggat

SEQ ID NO: 1002523 - DNA, 15 bp, Homo sapiens
tctagcattgggatt

SEQ ID NO: 1002524 - DNA, 15 bp, Homo sapiens
ctagcattgggattt

SEQ ID NO: 1002525 - DNA, 15 bp, Homo sapiens
tagcattgggattta

SEQ ID NO: 1002526 - DNA, 15 bp, Homo sapiens
agcattgggatttaa

SEQ ID NO: 1002527 - DNA, 15 bp, Homo sapiens
gcattgggatttaag

SEQ ID NO: 1002528 - DNA, 15 bp, Homo sapiens
cattgggatttaagc

SEQ ID NO: 1002529 - DNA, 15 bp, Homo sapiens
attgggatttaagcg

SEQ ID NO: 1002530 - DNA, 15 bp, Homo sapiens
ttgggatttaagcga

SEQ ID NO: 1002531 - DNA, 15 bp, Homo sapiens
tgggatttaagcgac

SEQ ID NO: 1002532 - DNA, 15 bp, Homo sapiens
gggatttaagcgacc

SEQ ID NO: 1002533 - DNA, 15 bp, Homo sapiens
ggatttaagcgacct

SEQ ID NO: 1002534 - DNA, 15 bp, Homo sapiens
gatttaagcgacctc

SEQ ID NO: 1002535 - DNA, 15 bp, Homo sapiens
atttaagcgacctct

SEQ ID NO: 1002536 - DNA, 15 bp, Homo sapiens
tttaagcgacctcta

SEQ ID NO: 1002537 - DNA, 15 bp, Homo sapiens
ttaagcgacctctaa

SEQ ID NO: 1002538 - DNA, 15 bp, Homo sapiens
taagcgacctctaaa

SEQ ID NO: 1002539 - DNA, 15 bp, Homo sapiens
aagcgacctctaaaa

SEQ ID NO: 1002540 - DNA, 15 bp, Homo sapiens
agcgacctctaaaaa

SEQ ID NO: 1002541 - DNA, 15 bp, Homo sapiens
gcgacctctaaaaaa

SEQ ID NO: 1002542 - DNA, 15 bp, Homo sapiens
cgacctctaaaaaaa

SEQ ID NO: 1002543 - DNA, 15 bp, Homo sapiens
gacctctaaaaaaaa

SEQ ID NO: 1002544 - DNA, 15 bp, Homo sapiens
acctctaaaaaaaaa

SEQ ID NO: 1002545 - DNA, 15 bp, Homo sapiens
cctctaaaaaaaaaa

SEQ ID NO: 1002546 - DNA, 15 bp, Homo sapiens
ctctaaaaaaaaaaa

SEQ ID NO: 1002547 - DNA, 15 bp, Homo sapiens
tctaaaaaaaaaaaa

SEQ ID NO: 1002548 - DNA, 15 bp, Homo sapiens
ctaaaaaaaaaaaat

SEQ ID NO: 1002549 - DNA, 15 bp, Homo sapiens
taaaaaaaaaaaatc

SEQ ID NO: 1002550 - DNA, 15 bp, Homo sapiens
aaaaaaaaaaaatca

SEQ ID NO: 1002551 - DNA, 15 bp, Homo sapiens
aaaaaaaaaaatcac

SEQ ID NO: 1002552 - DNA, 15 bp, Homo sapiens
aaaaaaaaaatcacg

SEQ ID NO: 1002553 - DNA, 15 bp, Homo sapiens
aaaaaaaaatcacgg

SEQ ID NO: 1002554 - DNA, 15 bp, Homo sapiens
aaaaaaaatcacgga

SEQ ID NO: 1002555 - DNA, 15 bp, Homo sapiens
aaaaaaatcacggaa

SEQ ID NO: 1002556 - DNA, 15 bp, Homo sapiens
aaaaaatcacggaat

SEQ ID NO: 1002557 - DNA, 15 bp, Homo sapiens
aaaaatcacggaatc

SEQ ID NO: 1002558 - DNA, 15 bp, Homo sapiens
aaaatcacggaatct

SEQ ID NO: 1002559 - DNA, 15 bp, Homo sapiens
aaatcacggaatctc

SEQ ID NO: 1002560 - DNA, 15 bp, Homo sapiens
aatcacggaatctct

SEQ ID NO: 1002561 - DNA, 15 bp, Homo sapiens
atcacggaatctctc

SEQ ID NO: 1002562 - DNA, 15 bp, Homo sapiens
tcacggaatctctct

SEQ ID NO: 1002563 - DNA, 15 bp, Homo sapiens
cacggaatctctctt

SEQ ID NO: 1002564 - DNA, 15 bp, Homo sapiens
acggaatctctcttt

SEQ ID NO: 1002565 - DNA, 15 bp, Homo sapiens
cggaatctctctttg

SEQ ID NO: 1002566 - DNA, 15 bp, Homo sapiens
ggaatctctctttgg

SEQ ID NO: 1002567 - DNA, 15 bp, Homo sapiens
gaatctctctttggc

SEQ ID NO: 1002568 - DNA, 15 bp, Homo sapiens
aatctctctttggcc

SEQ ID NO: 1002569 - DNA, 15 bp, Homo sapiens
atctctctttggcct

SEQ ID NO: 1002570 - DNA, 15 bp, Homo sapiens
tctctctttggcctt

SEQ ID NO: 1002571 - DNA, 15 bp, Homo sapiens
ctctctttggccttc

SEQ ID NO: 1002572 - DNA, 15 bp, Homo sapiens
tctctttggccttcc

SEQ ID NO: 1002573 - DNA, 15 bp, Homo sapiens
ctctttggccttcct

SEQ ID NO: 1002574 - DNA, 15 bp, Homo sapiens
tctttggccttcctt

SEQ ID NO: 1002575 - DNA, 15 bp, Homo sapiens
ctttggccttccttt

SEQ ID NO: 1002576 - DNA, 15 bp, Homo sapiens
tttggccttcctttt

SEQ ID NO: 1002577 - DNA, 15 bp, Homo sapiens
ttggccttccttttt

SEQ ID NO: 1002578 - DNA, 15 bp, Homo sapiens
tggccttcctttttt

SEQ ID NO: 1002579 - DNA, 15 bp, Homo sapiens
ggccttccttttttg

SEQ ID NO: 1002580 - DNA, 15 bp, Homo sapiens
gccttccttttttgt

SEQ ID NO: 1002581 - DNA, 15 bp, Homo sapiens
ccttccttttttgtt

SEQ ID NO: 1002582 - DNA, 15 bp, Homo sapiens
cttccttttttgttt

SEQ ID NO: 1002583 - DNA, 15 bp, Homo sapiens
ttccttttttgtttc

SEQ ID NO: 1002584 - DNA, 15 bp, Homo sapiens
tccttttttgtttct

SEQ ID NO: 1002585 - DNA, 15 bp, Homo sapiens
ccttttttgtttctc

SEQ ID NO: 1002586 - DNA, 15 bp, Homo sapiens
cttttttgtttctca

SEQ ID NO: 1002587 - DNA, 15 bp, Homo sapiens
ttttttgtttctcag

SEQ ID NO: 1002588 - DNA, 15 bp, Homo sapiens
tttttgtttctcagc

SEQ ID NO: 1002589 - DNA, 15 bp, Homo sapiens
ttttgtttctcagca

SEQ ID NO: 1002590 - DNA, 15 bp, Homo sapiens
tttgtttctcagcag

SEQ ID NO: 1002591 - DNA, 15 bp, Homo sapiens
ttgtttctcagcagt

SEQ ID NO: 1002592 - DNA, 15 bp, Homo sapiens
tgtttctcagcagtc

SEQ ID NO: 1002593 - DNA, 15 bp, Homo sapiens
gtttctcagcagtct

SEQ ID NO: 1002594 - DNA, 15 bp, Homo sapiens
tttctcagcagtcta

SEQ ID NO: 1002595 - DNA, 15 bp, Homo sapiens
ttctcagcagtctac

SEQ ID NO: 1002596 - DNA, 15 bp, Homo sapiens
tctcagcagtctacc

SEQ ID NO: 1002597 - DNA, 15 bp, Homo sapiens
ctcagcagtctacca

SEQ ID NO: 1002598 - DNA, 15 bp, Homo sapiens
tcagcagtctaccaa

SEQ ID NO: 1002599 - DNA, 15 bp, Homo sapiens
cagcagtctaccaag

SEQ ID NO: 1002600 - DNA, 15 bp, Homo sapiens
agcagtctaccaagc

SEQ ID NO: 1002601 - DNA, 15 bp, Homo sapiens
gcagtctaccaagct

SEQ ID NO: 1002602 - DNA, 15 bp, Homo sapiens
cagtctaccaagcta

SEQ ID NO: 1002603 - DNA, 15 bp, Homo sapiens
agtctaccaagctac

SEQ ID NO: 1002604 - DNA, 15 bp, Homo sapiens
gtctaccaagctacg

SEQ ID NO: 1002605 - DNA, 15 bp, Homo sapiens
tctaccaagctacga

SEQ ID NO: 1002606 - DNA, 15 bp, Homo sapiens
ctaccaagctacgaa

SEQ ID NO: 1002607 - DNA, 15 bp, Homo sapiens
taccaagctacgaag

SEQ ID NO: 1002608 - DNA, 15 bp, Homo sapiens
accaagctacgaaga

SEQ ID NO: 1002609 - DNA, 15 bp, Homo sapiens
ccaagctacgaagaa

SEQ ID NO: 1002610 - DNA, 15 bp, Homo sapiens
caagctacgaagaac

SEQ ID NO: 1002611 - DNA, 15 bp, Homo sapiens
aagctacgaagaacc

SEQ ID NO: 1002612 - DNA, 15 bp, Homo sapiens
agctacgaagaacct

SEQ ID NO: 1002613 - DNA, 15 bp, Homo sapiens
gctacgaagaacctg

SEQ ID NO: 1002614 - DNA, 15 bp, Homo sapiens
ctacgaagaacctga

SEQ ID NO: 1002615 - DNA, 15 bp, Homo sapiens
tacgaagaacctgaa

SEQ ID NO: 1002616 - DNA, 15 bp, Homo sapiens
acgaagaacctgaaa

SEQ ID NO: 1002617 - DNA, 15 bp, Homo sapiens
cgaagaacctgaaaa

SEQ ID NO: 1002618 - DNA, 15 bp, Homo sapiens
gaagaacctgaaaat

SEQ ID NO: 1002619 - DNA, 15 bp, Homo sapiens
aagaacctgaaaatc

SEQ ID NO: 1002620 - DNA, 15 bp, Homo sapiens
agaacctgaaaatcg

SEQ ID NO: 1002621 - DNA, 15 bp, Homo sapiens
gaacctgaaaatcgg

SEQ ID NO: 1002622 - DNA, 15 bp, Homo sapiens
aacctgaaaatcgga

SEQ ID NO: 1002623 - DNA, 15 bp, Homo sapiens
acctgaaaatcggag

SEQ ID NO: 1002624 - DNA, 15 bp, Homo sapiens
cctgaaaatcggagg

SEQ ID NO: 1002625 - DNA, 15 bp, Homo sapiens
ctgaaaatcggaggt

SEQ ID NO: 1002626 - DNA, 15 bp, Homo sapiens
tgaaaatcggaggtc

SEQ ID NO: 1002627 - DNA, 15 bp, Homo sapiens
gaaaatcggaggtcg

SEQ ID NO: 1002628 - DNA, 15 bp, Homo sapiens
aaaatcggaggtcgt

SEQ ID NO: 1002629 - DNA, 15 bp, Homo sapiens
aaatcggaggtcgtg

SEQ ID NO: 1002630 - DNA, 15 bp, Homo sapiens
aatcggaggtcgtgt

SEQ ID NO: 1002631 - DNA, 15 bp, Homo sapiens
atcggaggtcgtgta

SEQ ID NO: 1002632 - DNA, 15 bp, Homo sapiens
tcggaggtcgtgtac

SEQ ID NO: 1002633 - DNA, 15 bp, Homo sapiens
cggaggtcgtgtacc

SEQ ID NO: 1002634 - DNA, 15 bp, Homo sapiens
ggaggtcgtgtacct

SEQ ID NO: 1002635 - DNA, 15 bp, Homo sapiens
gaggtcgtgtacctt

SEQ ID NO: 1002636 - DNA, 15 bp, Homo sapiens
aggtcgtgtacctta

SEQ ID NO: 1002637 - DNA, 15 bp, Homo sapiens
ggtcgtgtaccttat

SEQ ID NO: 1002638 - DNA, 15 bp, Homo sapiens
gtcgtgtaccttatt

SEQ ID NO: 1002639 - DNA, 15 bp, Homo sapiens
tcgtgtaccttattt

SEQ ID NO: 1002640 - DNA, 15 bp, Homo sapiens
cgtgtaccttatttt

SEQ ID NO: 1002641 - DNA, 15 bp, Homo sapiens
gtgtaccttattttt

SEQ ID NO: 1002642 - DNA, 15 bp, Homo sapiens
tgtaccttatttttt

SEQ ID NO: 1002643 - DNA, 15 bp, Homo sapiens
gtaccttattttttc

SEQ ID NO: 1002644 - DNA, 15 bp, Homo sapiens
taccttattttttct

SEQ ID NO: 1002645 - DNA, 15 bp, Homo sapiens
accttattttttctg

SEQ ID NO: 1002646 - DNA, 15 bp, Homo sapiens
ccttattttttctga

SEQ ID NO: 1002647 - DNA, 15 bp, Homo sapiens
cttattttttctgag

SEQ ID NO: 1002648 - DNA, 15 bp, Homo sapiens
ttattttttctgaga

SEQ ID NO: 1002649 - DNA, 15 bp, Homo sapiens
tattttttctgagag

SEQ ID NO: 1002650 - DNA, 15 bp, Homo sapiens
attttttctgagagc

SEQ ID NO: 1002651 - DNA, 15 bp, Homo sapiens
ttttttctgagagct

SEQ ID NO: 1002652 - DNA, 15 bp, Homo sapiens
tttttctgagagctt

SEQ ID NO: 1002653 - DNA, 15 bp, Homo sapiens
ttttctgagagctta

SEQ ID NO: 1002654 - DNA, 15 bp, Homo sapiens
tttctgagagcttaa

SEQ ID NO: 1002655 - DNA, 15 bp, Homo sapiens
ttctgagagcttaag

SEQ ID NO: 1002656 - DNA, 15 bp, Homo sapiens
tctgagagcttaagc

SEQ ID NO: 1002657 - DNA, 15 bp, Homo sapiens
ctgagagcttaagct

SEQ ID NO: 1002658 - DNA, 15 bp, Homo sapiens
tgagagcttaagctg

SEQ ID NO: 1002659 - DNA, 15 bp, Homo sapiens
gagagcttaagctga

SEQ ID NO: 1002660 - DNA, 15 bp, Homo sapiens
agagcttaagctgag

SEQ ID NO: 1002661 - DNA, 15 bp, Homo sapiens
gagcttaagctgaga

SEQ ID NO: 1002662 - DNA, 15 bp, Homo sapiens
agcttaagctgagag

SEQ ID NO: 1002663 - DNA, 15 bp, Homo sapiens
gcttaagctgagagc

SEQ ID NO: 1002664 - DNA, 15 bp, Homo sapiens
cttaagctgagagca

SEQ ID NO: 1002665 - DNA, 15 bp, Homo sapiens
ttaagctgagagcac

SEQ ID NO: 1002666 - DNA, 15 bp, Homo sapiens
taagctgagagcaca

SEQ ID NO: 1002667 - DNA, 15 bp, Homo sapiens
aagctgagagcacag

SEQ ID NO: 1002668 - DNA, 15 bp, Homo sapiens
agctgagagcacagc

SEQ ID NO: 1002669 - DNA, 15 bp, Homo sapiens
gctgagagcacagcc

SEQ ID NO: 1002670 - DNA, 15 bp, Homo sapiens
ctgagagcacagcct

SEQ ID NO: 1002671 - DNA, 15 bp, Homo sapiens
tgagagcacagcctc

SEQ ID NO: 1002672 - DNA, 15 bp, Homo sapiens
gagagcacagcctcc

SEQ ID NO: 1002673 - DNA, 15 bp, Homo sapiens
agagcacagcctccc

SEQ ID NO: 1002674 - DNA, 15 bp, Homo sapiens
gagcacagcctcccc

SEQ ID NO: 1002675 - DNA, 15 bp, Homo sapiens
agcacagcctcccca

SEQ ID NO: 1002676 - DNA, 15 bp, Homo sapiens
gcacagcctccccag

SEQ ID NO: 1002677 - DNA, 15 bp, Homo sapiens
cacagcctccccagg

SEQ ID NO: 1002678 - DNA, 15 bp, Homo sapiens
acagcctccccagga

SEQ ID NO: 1002679 - DNA, 15 bp, Homo sapiens
cagcctccccaggag

SEQ ID NO: 1002680 - DNA, 15 bp, Homo sapiens
agcctccccaggaga

SEQ ID NO: 1002681 - DNA, 15 bp, Homo sapiens
gcctccccaggagat

SEQ ID NO: 1002682 - DNA, 15 bp, Homo sapiens
cctccccaggagatt

SEQ ID NO: 1002683 - DNA, 15 bp, Homo sapiens
ctccccaggagatta

SEQ ID NO: 1002684 - DNA, 15 bp, Homo sapiens
tccccaggagattag

SEQ ID NO: 1002685 - DNA, 15 bp, Homo sapiens
ccccaggagattagc

SEQ ID NO: 1002686 - DNA, 15 bp, Homo sapiens
cccaggagattagcg

SEQ ID NO: 1002687 - DNA, 15 bp, Homo sapiens
ccaggagattagcgg

SEQ ID NO: 1002688 - DNA, 15 bp, Homo sapiens
caggagattagcggc

SEQ ID NO: 1002689 - DNA, 15 bp, Homo sapiens
aggagattagcggca

SEQ ID NO: 1002690 - DNA, 15 bp, Homo sapiens
ggagattagcggcag

SEQ ID NO: 1002691 - DNA, 15 bp, Homo sapiens
gagattagcggcaga

SEQ ID NO: 1002692 - DNA, 15 bp, Homo sapiens
agattagcggcagag

SEQ ID NO: 1002693 - DNA, 15 bp, Homo sapiens
gattagcggcagaga

SEQ ID NO: 1002694 - DNA, 15 bp, Homo sapiens
attagcggcagagat

SEQ ID NO: 1002695 - DNA, 15 bp, Homo sapiens
ttagcggcagagatc

SEQ ID NO: 1002696 - DNA, 15 bp, Homo sapiens
tagcggcagagatcc

SEQ ID NO: 1002697 - DNA, 15 bp, Homo sapiens
agcggcagagatccg

SEQ ID NO: 1002698 - DNA, 15 bp, Homo sapiens
gcggcagagatccgc

SEQ ID NO: 1002699 - DNA, 15 bp, Homo sapiens
cggcagagatccgcg

SEQ ID NO: 1002700 - DNA, 15 bp, Homo sapiens
ggcagagatccgcgc

SEQ ID NO: 1002701 - DNA, 15 bp, Homo sapiens
gcagagatccgcgcg

SEQ ID NO: 1002702 - DNA, 15 bp, Homo sapiens
cagagatccgcgcgc

SEQ ID NO: 1002703 - DNA, 15 bp, Homo sapiens
agagatccgcgcgct

SEQ ID NO: 1002704 - DNA, 15 bp, Homo sapiens
gagatccgcgcgctg

SEQ ID NO: 1002705 - DNA, 15 bp, Homo sapiens
agatccgcgcgctgg

SEQ ID NO: 1002706 - DNA, 15 bp, Homo sapiens
gatccgcgcgctggg

SEQ ID NO: 1002707 - DNA, 15 bp, Homo sapiens
atccgcgcgctggga

SEQ ID NO: 1002708 - DNA, 15 bp, Homo sapiens
tccgcgcgctgggag

SEQ ID NO: 1002709 - DNA, 15 bp, Homo sapiens
ccgcgcgctgggaga

SEQ ID NO: 1002710 - DNA, 15 bp, Homo sapiens
cgcgcgctgggagaa

SEQ ID NO: 1002711 - DNA, 15 bp, Homo sapiens
gcgcgctgggagaaa

SEQ ID NO: 1002712 - DNA, 15 bp, Homo sapiens
cgcgctgggagaaag

SEQ ID NO: 1002713 - DNA, 15 bp, Homo sapiens
gcgctgggagaaagg

SEQ ID NO: 1002714 - DNA, 15 bp, Homo sapiens
cgctgggagaaaggc

SEQ ID NO: 1002715 - DNA, 15 bp, Homo sapiens
gctgggagaaaggct

SEQ ID NO: 1002716 - DNA, 15 bp, Homo sapiens
ctgggagaaaggcta

SEQ ID NO: 1002717 - DNA, 15 bp, Homo sapiens
tgggagaaaggctag

SEQ ID NO: 1002718 - DNA, 15 bp, Homo sapiens
gggagaaaggctagc

SEQ ID NO: 1002719 - DNA, 15 bp, Homo sapiens
ggagaaaggctagcc

SEQ ID NO: 1002720 - DNA, 15 bp, Homo sapiens
gagaaaggctagccc

SEQ ID NO: 1002721 - DNA, 15 bp, Homo sapiens
agaaaggctagcccc

SEQ ID NO: 1002722 - DNA, 15 bp, Homo sapiens
gaaaggctagcccca

SEQ ID NO: 1002723 - DNA, 15 bp, Homo sapiens
aaaggctagccccag

SEQ ID NO: 1002724 - DNA, 15 bp, Homo sapiens
aaggctagccccagg

SEQ ID NO: 1002725 - DNA, 15 bp, Homo sapiens
aggctagccccaggg

SEQ ID NO: 1002726 - DNA, 15 bp, Homo sapiens
ggctagccccagggc

SEQ ID NO: 1002727 - DNA, 15 bp, Homo sapiens
gctagccccagggcg

SEQ ID NO: 1002728 - DNA, 15 bp, Homo sapiens
ctagccccagggcgc

SEQ ID NO: 1002729 - DNA, 15 bp, Homo sapiens
tagccccagggcgcc

SEQ ID NO: 1002730 - DNA, 15 bp, Homo sapiens
agccccagggcgccc

SEQ ID NO: 1002731 - DNA, 15 bp, Homo sapiens
gccccagggcgccct

SEQ ID NO: 1002732 - DNA, 15 bp, Homo sapiens
ccccagggcgcccta

SEQ ID NO: 1002733 - DNA, 15 bp, Homo sapiens
cccagggcgccctaa

SEQ ID NO: 1002734 - DNA, 15 bp, Homo sapiens
ccagggcgccctaac

SEQ ID NO: 1002735 - DNA, 15 bp, Homo sapiens
cagggcgccctaact

SEQ ID NO: 1002736 - DNA, 15 bp, Homo sapiens
agggcgccctaactt

SEQ ID NO: 1002737 - DNA, 15 bp, Homo sapiens
gggcgccctaacttc

SEQ ID NO: 1002738 - DNA, 15 bp, Homo sapiens
ggcgccctaacttcc

SEQ ID NO: 1002739 - DNA, 15 bp, Homo sapiens
gcgccctaacttcca

SEQ ID NO: 1002740 - DNA, 15 bp, Homo sapiens
cgccctaacttccaa

SEQ ID NO: 1002741 - DNA, 15 bp, Homo sapiens
gccctaacttccaac

SEQ ID NO: 1002742 - DNA, 15 bp, Homo sapiens
ccctaacttccaact

SEQ ID NO: 1002743 - DNA, 15 bp, Homo sapiens
cctaacttccaactc

SEQ ID NO: 1002744 - DNA, 15 bp, Homo sapiens
ctaacttccaactcc

SEQ ID NO: 1002745 - DNA, 15 bp, Homo sapiens
taacttccaactccg

SEQ ID NO: 1002746 - DNA, 15 bp, Homo sapiens
aacttccaactccgg

SEQ ID NO: 1002747 - DNA, 15 bp, Homo sapiens
acttccaactccggg

SEQ ID NO: 1002748 - DNA, 15 bp, Homo sapiens
cttccaactccggga

SEQ ID NO: 1002749 - DNA, 15 bp, Homo sapiens
ttccaactccgggag

SEQ ID NO: 1002750 - DNA, 15 bp, Homo sapiens
tccaactccgggagc

SEQ ID NO: 1002751 - DNA, 15 bp, Homo sapiens
ccaactccgggagca

SEQ ID NO: 1002752 - DNA, 15 bp, Homo sapiens
caactccgggagcaa

SEQ ID NO: 1002753 - DNA, 15 bp, Homo sapiens
aactccgggagcaat

SEQ ID NO: 1002754 - DNA, 15 bp, Homo sapiens
actccgggagcaatc

SEQ ID NO: 1002755 - DNA, 15 bp, Homo sapiens
ctccgggagcaatcc

SEQ ID NO: 1002756 - DNA, 15 bp, Homo sapiens
tccgggagcaatcca

SEQ ID NO: 1002757 - DNA, 15 bp, Homo sapiens
ccgggagcaatccaa

SEQ ID NO: 1002758 - DNA, 15 bp, Homo sapiens
cgggagcaatccaaa

SEQ ID NO: 1002759 - DNA, 15 bp, Homo sapiens
gggagcaatccaaac

SEQ ID NO: 1002760 - DNA, 15 bp, Homo sapiens
ggagcaatccaaacc

SEQ ID NO: 1002761 - DNA, 15 bp, Homo sapiens
gagcaatccaaaccc

SEQ ID NO: 1002762 - DNA, 15 bp, Homo sapiens
agcaatccaaacccg

SEQ ID NO: 1002763 - DNA, 15 bp, Homo sapiens
gcaatccaaacccgg

SEQ ID NO: 1002764 - DNA, 15 bp, Homo sapiens
caatccaaacccgga

SEQ ID NO: 1002765 - DNA, 15 bp, Homo sapiens
aatccaaacccggag

SEQ ID NO: 1002766 - DNA, 15 bp, Homo sapiens
atccaaacccggagg

SEQ ID NO: 1002767 - DNA, 15 bp, Homo sapiens
tccaaacccggaggc

SEQ ID NO: 1002768 - DNA, 15 bp, Homo sapiens
ccaaacccggaggcc

SEQ ID NO: 1002769 - DNA, 15 bp, Homo sapiens
caaacccggaggccg

SEQ ID NO: 1002770 - DNA, 15 bp, Homo sapiens
aaacccggaggccgg

SEQ ID NO: 1002771 - DNA, 15 bp, Homo sapiens
aacccggaggccggc

SEQ ID NO: 1002772 - DNA, 15 bp, Homo sapiens
acccggaggccggcg

SEQ ID NO: 1002773 - DNA, 15 bp, Homo sapiens
cccggaggccggcgg

SEQ ID NO: 1002774 - DNA, 15 bp, Homo sapiens
ccggaggccggcggg

SEQ ID NO: 1002775 - DNA, 15 bp, Homo sapiens
cggaggccggcgggg

SEQ ID NO: 1002776 - DNA, 15 bp, Homo sapiens
ggaggccggcggggg

SEQ ID NO: 1002777 - DNA, 15 bp, Homo sapiens
gaggccggcggggga

SEQ ID NO: 1002778 - DNA, 15 bp, Homo sapiens
aggccggcgggggag

SEQ ID NO: 1002779 - DNA, 15 bp, Homo sapiens
ggccggcgggggagg

SEQ ID NO: 1002780 - DNA, 15 bp, Homo sapiens
gccggcgggggaggg

SEQ ID NO: 1002781 - DNA, 15 bp, Homo sapiens
ccggcgggggagggg

SEQ ID NO: 1002782 - DNA, 15 bp, Homo sapiens
cggcgggggagggga

SEQ ID NO: 1002783 - DNA, 15 bp, Homo sapiens
ggcgggggaggggac

SEQ ID NO: 1002784 - DNA, 15 bp, Homo sapiens
gcgggggaggggaca

SEQ ID NO: 1002785 - DNA, 15 bp, Homo sapiens
cgggggaggggacag

SEQ ID NO: 1002786 - DNA, 15 bp, Homo sapiens
gggggaggggacagc

SEQ ID NO: 1002787 - DNA, 15 bp, Homo sapiens
ggggaggggacagct

SEQ ID NO: 1002788 - DNA, 15 bp, Homo sapiens
gggaggggacagctg

SEQ ID NO: 1002789 - DNA, 15 bp, Homo sapiens
ggaggggacagctgt

SEQ ID NO: 1002790 - DNA, 15 bp, Homo sapiens
gaggggacagctgta

SEQ ID NO: 1002791 - DNA, 15 bp, Homo sapiens
aggggacagctgtag

SEQ ID NO: 1002792 - DNA, 15 bp, Homo sapiens
ggggacagctgtagg

SEQ ID NO: 1002793 - DNA, 15 bp, Homo sapiens
gggacagctgtaggg

SEQ ID NO: 1002794 - DNA, 15 bp, Homo sapiens
ggacagctgtagggg

SEQ ID NO: 1002795 - DNA, 15 bp, Homo sapiens
gacagctgtaggggg

SEQ ID NO: 1002796 - DNA, 15 bp, Homo sapiens
acagctgtagggggc

SEQ ID NO: 1002797 - DNA, 15 bp, Homo sapiens
cagctgtagggggcg

SEQ ID NO: 1002798 - DNA, 15 bp, Homo sapiens
agctgtagggggcgg

SEQ ID NO: 1002799 - DNA, 15 bp, Homo sapiens
gctgtagggggcggt

SEQ ID NO: 1002800 - DNA, 15 bp, Homo sapiens
ctgtagggggcggtg

SEQ ID NO: 1002801 - DNA, 15 bp, Homo sapiens
tgtagggggcggtgg

SEQ ID NO: 1002802 - DNA, 15 bp, Homo sapiens
gtagggggcggtggg

SEQ ID NO: 1002803 - DNA, 15 bp, Homo sapiens
tagggggcggtgggg

SEQ ID NO: 1002804 - DNA, 15 bp, Homo sapiens
agggggcggtgggga

SEQ ID NO: 1002805 - DNA, 15 bp, Homo sapiens
gggggcggtggggat

SEQ ID NO: 1002806 - DNA, 15 bp, Homo sapiens
ggggcggtggggatg

SEQ ID NO: 1002807 - DNA, 15 bp, Homo sapiens
gggcggtggggatgg

SEQ ID NO: 1002808 - DNA, 15 bp, Homo sapiens
ggcggtggggatggg

SEQ ID NO: 1002809 - DNA, 15 bp, Homo sapiens
gcggtggggatggga

SEQ ID NO: 1002810 - DNA, 15 bp, Homo sapiens
cggtggggatgggag

SEQ ID NO: 1002811 - DNA, 15 bp, Homo sapiens
ggtggggatgggagt

SEQ ID NO: 1002812 - DNA, 15 bp, Homo sapiens
gtggggatgggagtg

SEQ ID NO: 1002813 - DNA, 15 bp, Homo sapiens
tggggatgggagtgg

SEQ ID NO: 1002814 - DNA, 15 bp, Homo sapiens
ggggatgggagtgga

SEQ ID NO: 1002815 - DNA, 15 bp, Homo sapiens
gggatgggagtggat

SEQ ID NO: 1002816 - DNA, 15 bp, Homo sapiens
ggatgggagtggatg

SEQ ID NO: 1002817 - DNA, 15 bp, Homo sapiens
gatgggagtggatgc

SEQ ID NO: 1002818 - DNA, 15 bp, Homo sapiens
atgggagtggatgct

SEQ ID NO: 1002819 - DNA, 15 bp, Homo sapiens
tgggagtggatgctc

SEQ ID NO: 1002820 - DNA, 15 bp, Homo sapiens
gggagtggatgctcc

SEQ ID NO: 1002821 - DNA, 15 bp, Homo sapiens
ggagtggatgctccc

SEQ ID NO: 1002822 - DNA, 15 bp, Homo sapiens
gagtggatgctcccg

SEQ ID NO: 1002823 - DNA, 15 bp, Homo sapiens
agtggatgctcccgg

SEQ ID NO: 1002824 - DNA, 15 bp, Homo sapiens
gtggatgctcccggg

SEQ ID NO: 1002825 - DNA, 15 bp, Homo sapiens
tggatgctcccgggt

SEQ ID NO: 1002826 - DNA, 15 bp, Homo sapiens
ggatgctcccgggtc

SEQ ID NO: 1002827 - DNA, 15 bp, Homo sapiens
gatgctcccgggtca

SEQ ID NO: 1002828 - DNA, 15 bp, Homo sapiens
atgctcccgggtcag

SEQ ID NO: 1002829 - DNA, 15 bp, Homo sapiens
tgctcccgggtcagc

SEQ ID NO: 1002830 - DNA, 15 bp, Homo sapiens
gctcccgggtcagct

SEQ ID NO: 1002831 - DNA, 15 bp, Homo sapiens
ctcccgggtcagctc

SEQ ID NO: 1002832 - DNA, 15 bp, Homo sapiens
tcccgggtcagctct

SEQ ID NO: 1002833 - DNA, 15 bp, Homo sapiens
cccgggtcagctctg

SEQ ID NO: 1002834 - DNA, 15 bp, Homo sapiens
ccgggtcagctctgg

SEQ ID NO: 1002835 - DNA, 15 bp, Homo sapiens
cgggtcagctctggc

SEQ ID NO: 1002836 - DNA, 15 bp, Homo sapiens
gggtcagctctggca

SEQ ID NO: 1002837 - DNA, 15 bp, Homo sapiens
ggtcagctctggcac

SEQ ID NO: 1002838 - DNA, 15 bp, Homo sapiens
gtcagctctggcact

SEQ ID NO: 1002839 - DNA, 15 bp, Homo sapiens
tcagctctggcactc

SEQ ID NO: 1002840 - DNA, 15 bp, Homo sapiens
cagctctggcactcg

SEQ ID NO: 1002841 - DNA, 15 bp, Homo sapiens
agctctggcactcgc

SEQ ID NO: 1002842 - DNA, 15 bp, Homo sapiens
gctctggcactcgcc

SEQ ID NO: 1002843 - DNA, 15 bp, Homo sapiens
ctctggcactcgcca

SEQ ID NO: 1002844 - DNA, 15 bp, Homo sapiens
tctggcactcgccag

SEQ ID NO: 1002845 - DNA, 15 bp, Homo sapiens
ctggcactcgccagc

SEQ ID NO: 1002846 - DNA, 15 bp, Homo sapiens
tggcactcgccagct

SEQ ID NO: 1002847 - DNA, 15 bp, Homo sapiens
ggcactcgccagctg

SEQ ID NO: 1002848 - DNA, 15 bp, Homo sapiens
gcactcgccagctga

SEQ ID NO: 1002849 - DNA, 15 bp, Homo sapiens
cactcgccagctgag

SEQ ID NO: 1002850 - DNA, 15 bp, Homo sapiens
actcgccagctgagc

SEQ ID NO: 1002851 - DNA, 15 bp, Homo sapiens
ctcgccagctgagcc

SEQ ID NO: 1002852 - DNA, 15 bp, Homo sapiens
tcgccagctgagccc

SEQ ID NO: 1002853 - DNA, 15 bp, Homo sapiens
cgccagctgagccca

SEQ ID NO: 1002854 - DNA, 15 bp, Homo sapiens
gccagctgagcccag

SEQ ID NO: 1002855 - DNA, 15 bp, Homo sapiens
ccagctgagcccagc

SEQ ID NO: 1002856 - DNA, 15 bp, Homo sapiens
cagctgagcccagcg

SEQ ID NO: 1002857 - DNA, 15 bp, Homo sapiens
agctgagcccagcgc

SEQ ID NO: 1002858 - DNA, 15 bp, Homo sapiens
gctgagcccagcgcc

SEQ ID NO: 1002859 - DNA, 15 bp, Homo sapiens
ctgagcccagcgcca

SEQ ID NO: 1002860 - DNA, 15 bp, Homo sapiens
tgagcccagcgccag

SEQ ID NO: 1002861 - DNA, 15 bp, Homo sapiens
gagcccagcgccagt

SEQ ID NO: 1002862 - DNA, 15 bp, Homo sapiens
agcccagcgccagtc

SEQ ID NO: 1002863 - DNA, 15 bp, Homo sapiens
gcccagcgccagtct

SEQ ID NO: 1002864 - DNA, 15 bp, Homo sapiens
cccagcgccagtcta

SEQ ID NO: 1002865 - DNA, 15 bp, Homo sapiens
ccagcgccagtctag

SEQ ID NO: 1002866 - DNA, 15 bp, Homo sapiens
cagcgccagtctagg

SEQ ID NO: 1002867 - DNA, 15 bp, Homo sapiens
agcgccagtctaggt

SEQ ID NO: 1002868 - DNA, 15 bp, Homo sapiens
gcgccagtctaggtg

SEQ ID NO: 1002869 - DNA, 15 bp, Homo sapiens
cgccagtctaggtga

SEQ ID NO: 1002870 - DNA, 15 bp, Homo sapiens
gccagtctaggtgag

SEQ ID NO: 1002871 - DNA, 15 bp, Homo sapiens
ccagtctaggtgagc

SEQ ID NO: 1002872 - DNA, 15 bp, Homo sapiens
cagtctaggtgagcc

SEQ ID NO: 1002873 - DNA, 15 bp, Homo sapiens
agtctaggtgagccc

SEQ ID NO: 1002874 - DNA, 15 bp, Homo sapiens
gtctaggtgagcccc

SEQ ID NO: 1002875 - DNA, 15 bp, Homo sapiens
tctaggtgagcccca

SEQ ID NO: 1002876 - DNA, 15 bp, Homo sapiens
ctaggtgagccccac

SEQ ID NO: 1002877 - DNA, 15 bp, Homo sapiens
taggtgagccccacg

SEQ ID NO: 1002878 - DNA, 15 bp, Homo sapiens
aggtgagccccacgg

SEQ ID NO: 1002879 - DNA, 15 bp, Homo sapiens
ggtgagccccacggc

SEQ ID NO: 1002880 - DNA, 15 bp, Homo sapiens
gtgagccccacggcg

SEQ ID NO: 1002881 - DNA, 15 bp, Homo sapiens
tgagccccacggcgg

SEQ ID NO: 1002882 - DNA, 15 bp, Homo sapiens
gagccccacggcggt

SEQ ID NO: 1002883 - DNA, 15 bp, Homo sapiens
agccccacggcggtg

SEQ ID NO: 1002884 - DNA, 15 bp, Homo sapiens
gccccacggcggtga

SEQ ID NO: 1002885 - DNA, 15 bp, Homo sapiens
ccccacggcggtgag

SEQ ID NO: 1002886 - DNA, 15 bp, Homo sapiens
cccacggcggtgagg

SEQ ID NO: 1002887 - DNA, 15 bp, Homo sapiens
ccacggcggtgaggg

SEQ ID NO: 1002888 - DNA, 15 bp, Homo sapiens
cacggcggtgaggga

SEQ ID NO: 1002889 - DNA, 15 bp, Homo sapiens
acggcggtgagggac

SEQ ID NO: 1002890 - DNA, 15 bp, Homo sapiens
cggcggtgagggacg

SEQ ID NO: 1002891 - DNA, 15 bp, Homo sapiens
ggcggtgagggacgc

SEQ ID NO: 1002892 - DNA, 15 bp, Homo sapiens
gcggtgagggacgct

SEQ ID NO: 1002893 - DNA, 15 bp, Homo sapiens
cggtgagggacgctc

SEQ ID NO: 1002894 - DNA, 15 bp, Homo sapiens
ggtgagggacgctcg

SEQ ID NO: 1002895 - DNA, 15 bp, Homo sapiens
gtgagggacgctcgc

SEQ ID NO: 1002896 - DNA, 15 bp, Homo sapiens
tgagggacgctcgcc

SEQ ID NO: 1002897 - DNA, 15 bp, Homo sapiens
gagggacgctcgcca

SEQ ID NO: 1002898 - DNA, 15 bp, Homo sapiens
agggacgctcgccag

SEQ ID NO: 1002899 - DNA, 15 bp, Homo sapiens
gggacgctcgccaga

SEQ ID NO: 1002900 - DNA, 15 bp, Homo sapiens
ggacgctcgccagac

SEQ ID NO: 1002901 - DNA, 15 bp, Homo sapiens
gacgctcgccagacg

SEQ ID NO: 1002902 - DNA, 15 bp, Homo sapiens
acgctcgccagacgg

SEQ ID NO: 1002903 - DNA, 15 bp, Homo sapiens
cgctcgccagacggc

SEQ ID NO: 1002904 - DNA, 15 bp, Homo sapiens
gctcgccagacggcc

SEQ ID NO: 1002905 - DNA, 15 bp, Homo sapiens
ctcgccagacggccc

SEQ ID NO: 1002906 - DNA, 15 bp, Homo sapiens
tcgccagacggccca

SEQ ID NO: 1002907 - DNA, 15 bp, Homo sapiens
cgccagacggcccag

SEQ ID NO: 1002908 - DNA, 15 bp, Homo sapiens
gccagacggcccaga

SEQ ID NO: 1002909 - DNA, 15 bp, Homo sapiens
ccagacggcccagag

SEQ ID NO: 1002910 - DNA, 15 bp, Homo sapiens
cagacggcccagagg

SEQ ID NO: 1002911 - DNA, 15 bp, Homo sapiens
agacggcccagagga

SEQ ID NO: 1002912 - DNA, 15 bp, Homo sapiens
gacggcccagaggag

SEQ ID NO: 1002913 - DNA, 15 bp, Homo sapiens
acggcccagaggagt

SEQ ID NO: 1002914 - DNA, 15 bp, Homo sapiens
cggcccagaggagtt

SEQ ID NO: 1002915 - DNA, 15 bp, Homo sapiens
ggcccagaggagtta

SEQ ID NO: 1002916 - DNA, 15 bp, Homo sapiens
gcccagaggagttag

SEQ ID NO: 1002917 - DNA, 15 bp, Homo sapiens
cccagaggagttaga

SEQ ID NO: 1002918 - DNA, 15 bp, Homo sapiens
ccagaggagttagat

SEQ ID NO: 1002919 - DNA, 15 bp, Homo sapiens
cagaggagttagatg

SEQ ID NO: 1002920 - DNA, 15 bp, Homo sapiens
agaggagttagatga

SEQ ID NO: 1002921 - DNA, 15 bp, Homo sapiens
gaggagttagatgac

SEQ ID NO: 1002922 - DNA, 15 bp, Homo sapiens
aggagttagatgacg

SEQ ID NO: 1002923 - DNA, 15 bp, Homo sapiens
ggagttagatgacgt

SEQ ID NO: 1002924 - DNA, 15 bp, Homo sapiens
gagttagatgacgtc

SEQ ID NO: 1002925 - DNA, 15 bp, Homo sapiens
agttagatgacgtca

SEQ ID NO: 1002926 - DNA, 15 bp, Homo sapiens
gttagatgacgtcac

SEQ ID NO: 1002927 - DNA, 15 bp, Homo sapiens
ttagatgacgtcacc

SEQ ID NO: 1002928 - DNA, 15 bp, Homo sapiens
tagatgacgtcacct

SEQ ID NO: 1002929 - DNA, 15 bp, Homo sapiens
agatgacgtcacctc

SEQ ID NO: 1002930 - DNA, 15 bp, Homo sapiens
gatgacgtcacctcc

SEQ ID NO: 1002931 - DNA, 15 bp, Homo sapiens
atgacgtcacctcca

SEQ ID NO: 1002932 - DNA, 15 bp, Homo sapiens
tgacgtcacctccag

SEQ ID NO: 1002933 - DNA, 15 bp, Homo sapiens
gacgtcacctccagg

SEQ ID NO: 1002934 - DNA, 15 bp, Homo sapiens
acgtcacctccagga

SEQ ID NO: 1002935 - DNA, 15 bp, Homo sapiens
cgtcacctccaggag

SEQ ID NO: 1002936 - DNA, 15 bp, Homo sapiens
gtcacctccaggagg

SEQ ID NO: 1002937 - DNA, 15 bp, Homo sapiens
tcacctccaggagga

SEQ ID NO: 1002938 - DNA, 15 bp, Homo sapiens
cacctccaggaggac

SEQ ID NO: 1002939 - DNA, 15 bp, Homo sapiens
acctccaggaggact

SEQ ID NO: 1002940 - DNA, 15 bp, Homo sapiens
cctccaggaggactc

SEQ ID NO: 1002941 - DNA, 15 bp, Homo sapiens
ctccaggaggactcg

SEQ ID NO: 1002942 - DNA, 15 bp, Homo sapiens
tccaggaggactcgc

SEQ ID NO: 1002943 - DNA, 15 bp, Homo sapiens
ccaggaggactcgct

SEQ ID NO: 1002944 - DNA, 15 bp, Homo sapiens
caggaggactcgctt

SEQ ID NO: 1002945 - DNA, 15 bp, Homo sapiens
aggaggactcgcttt

SEQ ID NO: 1002946 - DNA, 15 bp, Homo sapiens
ggaggactcgctttt

SEQ ID NO: 1002947 - DNA, 15 bp, Homo sapiens
gaggactcgcttttt

SEQ ID NO: 1002948 - DNA, 15 bp, Homo sapiens
aggactcgctttttc

SEQ ID NO: 1002949 - DNA, 15 bp, Homo sapiens
ggactcgctttttca

SEQ ID NO: 1002950 - DNA, 15 bp, Homo sapiens
gactcgctttttcat

SEQ ID NO: 1002951 - DNA, 15 bp, Homo sapiens
actcgctttttcatt

SEQ ID NO: 1002952 - DNA, 15 bp, Homo sapiens
ctcgctttttcatta

SEQ ID NO: 1002953 - DNA, 15 bp, Homo sapiens
tcgctttttcattaa

SEQ ID NO: 1002954 - DNA, 15 bp, Homo sapiens
cgctttttcattaat

SEQ ID NO: 1002955 - DNA, 15 bp, Homo sapiens
gctttttcattaatg

SEQ ID NO: 1002956 - DNA, 15 bp, Homo sapiens
ctttttcattaatga

SEQ ID NO: 1002957 - DNA, 15 bp, Homo sapiens
tttttcattaatgaa

SEQ ID NO: 1002958 - DNA, 15 bp, Homo sapiens
ttttcattaatgaaa

SEQ ID NO: 1002959 - DNA, 15 bp, Homo sapiens
tttcattaatgaaac

SEQ ID NO: 1002960 - DNA, 15 bp, Homo sapiens
ttcattaatgaaacc

SEQ ID NO: 1002961 - DNA, 15 bp, Homo sapiens
tcattaatgaaaccg

SEQ ID NO: 1002962 - DNA, 15 bp, Homo sapiens
cattaatgaaaccgg

SEQ ID NO: 1002963 - DNA, 15 bp, Homo sapiens
attaatgaaaccggc

SEQ ID NO: 1002964 - DNA, 15 bp, Homo sapiens
ttaatgaaaccggcc

SEQ ID NO: 1002965 - DNA, 15 bp, Homo sapiens
taatgaaaccggccg

SEQ ID NO: 1002966 - DNA, 15 bp, Homo sapiens
aatgaaaccggccgg

SEQ ID NO: 1002967 - DNA, 15 bp, Homo sapiens
atgaaaccggccggc

SEQ ID NO: 1002968 - DNA, 15 bp, Homo sapiens
tgaaaccggccggcg

SEQ ID NO: 1002969 - DNA, 15 bp, Homo sapiens
gaaaccggccggcgc

SEQ ID NO: 1002970 - DNA, 15 bp, Homo sapiens
aaaccggccggcgcg

SEQ ID NO: 1002971 - DNA, 15 bp, Homo sapiens
aaccggccggcgcgg

SEQ ID NO: 1002972 - DNA, 15 bp, Homo sapiens
accggccggcgcggg

SEQ ID NO: 1002973 - DNA, 15 bp, Homo sapiens
ccggccggcgcgggc

SEQ ID NO: 1002974 - DNA, 15 bp, Homo sapiens
cggccggcgcgggcg

SEQ ID NO: 1002975 - DNA, 15 bp, Homo sapiens
ggccggcgcgggcgc

SEQ ID NO: 1002976 - DNA, 15 bp, Homo sapiens
gccggcgcgggcgca

SEQ ID NO: 1002977 - DNA, 15 bp, Homo sapiens
ccggcgcgggcgcat

SEQ ID NO: 1002978 - DNA, 15 bp, Homo sapiens
cggcgcgggcgcatg

SEQ ID NO: 1002979 - DNA, 15 bp, Homo sapiens
ggcgcgggcgcatgc

SEQ ID NO: 1002980 - DNA, 15 bp, Homo sapiens
gcgcgggcgcatgcg

SEQ ID NO: 1002981 - DNA, 15 bp, Homo sapiens
cgcgggcgcatgcgc

SEQ ID NO: 1002982 - DNA, 15 bp, Homo sapiens
gcgggcgcatgcgcg

SEQ ID NO: 1002983 - DNA, 15 bp, Homo sapiens
cgggcgcatgcgcgg

SEQ ID NO: 1002984 - DNA, 15 bp, Homo sapiens
gggcgcatgcgcggc

SEQ ID NO: 1002985 - DNA, 15 bp, Homo sapiens
ggcgcatgcgcggca

SEQ ID NO: 1002986 - DNA, 15 bp, Homo sapiens
gcgcatgcgcggcag

SEQ ID NO: 1002987 - DNA, 15 bp, Homo sapiens
cgcatgcgcggcagg

SEQ ID NO: 1002988 - DNA, 15 bp, Homo sapiens
gcatgcgcggcaggc

SEQ ID NO: 1002989 - DNA, 15 bp, Homo sapiens
catgcgcggcaggcc

SEQ ID NO: 1002990 - DNA, 15 bp, Homo sapiens
atgcgcggcaggccg

SEQ ID NO: 1002991 - DNA, 15 bp, Homo sapiens
tgcgcggcaggccgc

SEQ ID NO: 1002992 - DNA, 15 bp, Homo sapiens
gcgcggcaggccgcc

SEQ ID NO: 1002993 - DNA, 15 bp, Homo sapiens
cgcggcaggccgcct

SEQ ID NO: 1002994 - DNA, 15 bp, Homo sapiens
gcggcaggccgcctt

SEQ ID NO: 1002995 - DNA, 15 bp, Homo sapiens
cggcaggccgccttc

SEQ ID NO: 1002996 - DNA, 15 bp, Homo sapiens
ggcaggccgccttcc

SEQ ID NO: 1002997 - DNA, 15 bp, Homo sapiens
gcaggccgccttccc

SEQ ID NO: 1002998 - DNA, 15 bp, Homo sapiens
caggccgccttccct

SEQ ID NO: 1002999 - DNA, 15 bp, Homo sapiens
aggccgccttccctc

SEQ ID NO: 1003000 - DNA, 15 bp, Homo sapiens
ggccgccttccctct

SEQ ID NO: 1003001 - DNA, 15 bp, Homo sapiens
gccgccttccctctc

SEQ ID NO: 1003002 - DNA, 15 bp, Homo sapiens
ccgccttccctctcg

SEQ ID NO: 1003003 - DNA, 15 bp, Homo sapiens
cgccttccctctcgc

SEQ ID NO: 1003004 - DNA, 15 bp, Homo sapiens
gccttccctctcgct

SEQ ID NO: 1003005 - DNA, 15 bp, Homo sapiens
ccttccctctcgctt

SEQ ID NO: 1003006 - DNA, 15 bp, Homo sapiens
cttccctctcgcttc

SEQ ID NO: 1003007 - DNA, 15 bp, Homo sapiens
ttccctctcgcttcc

SEQ ID NO: 1003008 - DNA, 15 bp, Homo sapiens
tccctctcgcttccc

SEQ ID NO: 1003009 - DNA, 15 bp, Homo sapiens
ccctctcgcttcccc

SEQ ID NO: 1003010 - DNA, 15 bp, Homo sapiens
cctctcgcttccccc

SEQ ID NO: 1003011 - DNA, 15 bp, Homo sapiens
ctctcgcttccccct

SEQ ID NO: 1003012 - DNA, 15 bp, Homo sapiens
tctcgcttccccctc

SEQ ID NO: 1003013 - DNA, 15 bp, Homo sapiens
ctcgcttccccctcc

SEQ ID NO: 1003014 - DNA, 15 bp, Homo sapiens
tcgcttccccctccc

SEQ ID NO: 1003015 - DNA, 15 bp, Homo sapiens
cgcttccccctcccc

SEQ ID NO: 1003016 - DNA, 15 bp, Homo sapiens
gcttccccctcccct

SEQ ID NO: 1003017 - DNA, 15 bp, Homo sapiens
cttccccctcccctt

SEQ ID NO: 1003018 - DNA, 15 bp, Homo sapiens
ttccccctccccttt

SEQ ID NO: 1003019 - DNA, 15 bp, Homo sapiens
tccccctcccctttc

SEQ ID NO: 1003020 - DNA, 15 bp, Homo sapiens
ccccctcccctttcc

SEQ ID NO: 1003021 - DNA, 15 bp, Homo sapiens
cccctcccctttccc

SEQ ID NO: 1003022 - DNA, 15 bp, Homo sapiens
ccctcccctttccca

SEQ ID NO: 1003023 - DNA, 15 bp, Homo sapiens
cctcccctttcccag

SEQ ID NO: 1003024 - DNA, 15 bp, Homo sapiens
ctcccctttcccagc

SEQ ID NO: 1003025 - DNA, 15 bp, Homo sapiens
tcccctttcccagcc

SEQ ID NO: 1003026 - DNA, 15 bp, Homo sapiens
cccctttcccagccg

SEQ ID NO: 1003027 - DNA, 15 bp, Homo sapiens
ccctttcccagccgc

SEQ ID NO: 1003028 - DNA, 15 bp, Homo sapiens
cctttcccagccgcg

SEQ ID NO: 1003029 - DNA, 15 bp, Homo sapiens
ctttcccagccgcgc

SEQ ID NO: 1003030 - DNA, 15 bp, Homo sapiens
tttcccagccgcgct

SEQ ID NO: 1003031 - DNA, 15 bp, Homo sapiens
ttcccagccgcgctc

SEQ ID NO: 1003032 - DNA, 15 bp, Homo sapiens
tcccagccgcgctct

SEQ ID NO: 1003033 - DNA, 15 bp, Homo sapiens
cccagccgcgctctc

SEQ ID NO: 1003034 - DNA, 15 bp, Homo sapiens
ccagccgcgctctca

SEQ ID NO: 1003035 - DNA, 15 bp, Homo sapiens
cagccgcgctctcaa

SEQ ID NO: 1003036 - DNA, 15 bp, Homo sapiens
agccgcgctctcaat

SEQ ID NO: 1003037 - DNA, 15 bp, Homo sapiens
gccgcgctctcaatc

SEQ ID NO: 1003038 - DNA, 15 bp, Homo sapiens
ccgcgctctcaatct

SEQ ID NO: 1003039 - DNA, 15 bp, Homo sapiens
cgcgctctcaatctc

SEQ ID NO: 1003040 - DNA, 15 bp, Homo sapiens
gcgctctcaatctct

SEQ ID NO: 1003041 - DNA, 15 bp, Homo sapiens
cgctctcaatctcta

SEQ ID NO: 1003042 - DNA, 15 bp, Homo sapiens
gctctcaatctctag

SEQ ID NO: 1003043 - DNA, 15 bp, Homo sapiens
ctctcaatctctagc

SEQ ID NO: 1003044 - DNA, 15 bp, Homo sapiens
tctcaatctctagct

SEQ ID NO: 1003045 - DNA, 15 bp, Homo sapiens
ctcaatctctagctc

SEQ ID NO: 1003046 - DNA, 15 bp, Homo sapiens
tcaatctctagctcg

SEQ ID NO: 1003047 - DNA, 15 bp, Homo sapiens
caatctctagctcgc

SEQ ID NO: 1003048 - DNA, 15 bp, Homo sapiens
aatctctagctcgct

SEQ ID NO: 1003049 - DNA, 15 bp, Homo sapiens
atctctagctcgctc

SEQ ID NO: 1003050 - DNA, 15 bp, Homo sapiens
tctctagctcgctcg

SEQ ID NO: 1003051 - DNA, 15 bp, Homo sapiens
ctctagctcgctcgc

SEQ ID NO: 1003052 - DNA, 15 bp, Homo sapiens
tctagctcgctcgcg

SEQ ID NO: 1003053 - DNA, 15 bp, Homo sapiens
ctagctcgctcgcgc

SEQ ID NO: 1003054 - DNA, 15 bp, Homo sapiens
tagctcgctcgcgct

SEQ ID NO: 1003055 - DNA, 15 bp, Homo sapiens
agctcgctcgcgctc

SEQ ID NO: 1003056 - DNA, 15 bp, Homo sapiens
gctcgctcgcgctcc

SEQ ID NO: 1003057 - DNA, 15 bp, Homo sapiens
ctcgctcgcgctccc

SEQ ID NO: 1003058 - DNA, 15 bp, Homo sapiens
tcgctcgcgctccct

SEQ ID NO: 1003059 - DNA, 15 bp, Homo sapiens
cgctcgcgctccctc

SEQ ID NO: 1003060 - DNA, 15 bp, Homo sapiens
gctcgcgctccctct

SEQ ID NO: 1003061 - DNA, 15 bp, Homo sapiens
ctcgcgctccctctc

SEQ ID NO: 1003062 - DNA, 15 bp, Homo sapiens
tcgcgctccctctcc

SEQ ID NO: 1003063 - DNA, 15 bp, Homo sapiens
cgcgctccctctccc

SEQ ID NO: 1003064 - DNA, 15 bp, Homo sapiens
gcgctccctctcccc

SEQ ID NO: 1003065 - DNA, 15 bp, Homo sapiens
cgctccctctccccg

SEQ ID NO: 1003066 - DNA, 15 bp, Homo sapiens
gctccctctccccgg

SEQ ID NO: 1003067 - DNA, 15 bp, Homo sapiens
ctccctctccccggg

SEQ ID NO: 1003068 - DNA, 15 bp, Homo sapiens
tccctctccccgggc

SEQ ID NO: 1003069 - DNA, 15 bp, Homo sapiens
ccctctccccgggcc

SEQ ID NO: 1003070 - DNA, 15 bp, Homo sapiens
cctctccccgggccg

SEQ ID NO: 1003071 - DNA, 15 bp, Homo sapiens
ctctccccgggccgt

SEQ ID NO: 1003072 - DNA, 15 bp, Homo sapiens
tctccccgggccgtg

SEQ ID NO: 1003073 - DNA, 15 bp, Homo sapiens
ctccccgggccgtgg

SEQ ID NO: 1003074 - DNA, 15 bp, Homo sapiens
tccccgggccgtgga

SEQ ID NO: 1003075 - DNA, 15 bp, Homo sapiens
ccccgggccgtggaa

SEQ ID NO: 1003076 - DNA, 15 bp, Homo sapiens
cccgggccgtggaaa

SEQ ID NO: 1003077 - DNA, 15 bp, Homo sapiens
ccgggccgtggaaag

SEQ ID NO: 1003078 - DNA, 15 bp, Homo sapiens
cgggccgtggaaagg

SEQ ID NO: 1003079 - DNA, 15 bp, Homo sapiens
gggccgtggaaagga

SEQ ID NO: 1003080 - DNA, 15 bp, Homo sapiens
ggccgtggaaaggat

SEQ ID NO: 1003081 - DNA, 15 bp, Homo sapiens
gccgtggaaaggatc

SEQ ID NO: 1003082 - DNA, 15 bp, Homo sapiens
ccgtggaaaggatcc

SEQ ID NO: 1003083 - DNA, 15 bp, Homo sapiens
cgtggaaaggatccc

SEQ ID NO: 1003084 - DNA, 15 bp, Homo sapiens
gtggaaaggatccca

SEQ ID NO: 1003085 - DNA, 15 bp, Homo sapiens
tggaaaggatcccac

SEQ ID NO: 1003086 - DNA, 15 bp, Homo sapiens
ggaaaggatcccact

SEQ ID NO: 1003087 - DNA, 15 bp, Homo sapiens
gaaaggatcccactt

SEQ ID NO: 1003088 - DNA, 15 bp, Homo sapiens
aaaggatcccacttc

SEQ ID NO: 1003089 - DNA, 15 bp, Homo sapiens
aaggatcccacttcc

SEQ ID NO: 1003090 - DNA, 15 bp, Homo sapiens
aggatcccacttccg

SEQ ID NO: 1003091 - DNA, 15 bp, Homo sapiens
ggatcccacttccgg

SEQ ID NO: 1003092 - DNA, 15 bp, Homo sapiens
gatcccacttccggt

SEQ ID NO: 1003093 - DNA, 15 bp, Homo sapiens
atcccacttccggtg

SEQ ID NO: 1003094 - DNA, 15 bp, Homo sapiens
tcccacttccggtgg

SEQ ID NO: 1003095 - DNA, 15 bp, Homo sapiens
cccacttccggtggg

SEQ ID NO: 1003096 - DNA, 15 bp, Homo sapiens
ccacttccggtgggg

SEQ ID NO: 1003097 - DNA, 15 bp, Homo sapiens
cacttccggtggggt

SEQ ID NO: 1003098 - DNA, 15 bp, Homo sapiens
acttccggtggggtg

SEQ ID NO: 1003099 - DNA, 15 bp, Homo sapiens
cttccggtggggtgt

SEQ ID NO: 1003100 - DNA, 15 bp, Homo sapiens
ttccggtggggtgtc

SEQ ID NO: 1003101 - DNA, 15 bp, Homo sapiens
tccggtggggtgtca

SEQ ID NO: 1003102 - DNA, 15 bp, Homo sapiens
ccggtggggtgtcat

SEQ ID NO: 1003103 - DNA, 15 bp, Homo sapiens
cggtggggtgtcatg

SEQ ID NO: 1003104 - DNA, 15 bp, Homo sapiens
ggtggggtgtcatgg

SEQ ID NO: 1003105 - DNA, 15 bp, Homo sapiens
gtggggtgtcatggc

SEQ ID NO: 1003106 - DNA, 15 bp, Homo sapiens
tggggtgtcatggcg

SEQ ID NO: 1003107 - DNA, 15 bp, Homo sapiens
ggggtgtcatggcgg

SEQ ID NO: 1003108 - DNA, 15 bp, Homo sapiens
gggtgtcatggcggc

SEQ ID NO: 1003109 - DNA, 15 bp, Homo sapiens
ggtgtcatggcggcg

SEQ ID NO: 1003110 - DNA, 15 bp, Homo sapiens
gtgtcatggcggcgt

SEQ ID NO: 1003111 - DNA, 15 bp, Homo sapiens
tgtcatggcggcgtc

SEQ ID NO: 1003112 - DNA, 15 bp, Homo sapiens
gtcatggcggcgtct

SEQ ID NO: 1003113 - DNA, 15 bp, Homo sapiens
tcatggcggcgtctc

SEQ ID NO: 1003114 - DNA, 15 bp, Homo sapiens
catggcggcgtctcg

SEQ ID NO: 1003115 - DNA, 15 bp, Homo sapiens
atggcggcgtctcgg

SEQ ID NO: 1003116 - DNA, 15 bp, Homo sapiens
tggcggcgtctcgga

SEQ ID NO: 1003117 - DNA, 15 bp, Homo sapiens
ggcggcgtctcggac

SEQ ID NO: 1003118 - DNA, 15 bp, Homo sapiens
gcggcgtctcggact

SEQ ID NO: 1003119 - DNA, 15 bp, Homo sapiens
cggcgtctcggactg

SEQ ID NO: 1003120 - DNA, 15 bp, Homo sapiens
ggcgtctcggactgt

SEQ ID NO: 1003121 - DNA, 15 bp, Homo sapiens
gcgtctcggactgtg

SEQ ID NO: 1003122 - DNA, 15 bp, Homo sapiens
cgtctcggactgtga

SEQ ID NO: 1003123 - DNA, 15 bp, Homo sapiens
gtctcggactgtgat

SEQ ID NO: 1003124 - DNA, 15 bp, Homo sapiens
tctcggactgtgatg

SEQ ID NO: 1003125 - DNA, 15 bp, Homo sapiens
ctcggactgtgatgg

SEQ ID NO: 1003126 - DNA, 15 bp, Homo sapiens
tcggactgtgatggc

SEQ ID NO: 1003127 - DNA, 15 bp, Homo sapiens
cggactgtgatggct

SEQ ID NO: 1003128 - DNA, 15 bp, Homo sapiens
ggactgtgatggctg

SEQ ID NO: 1003129 - DNA, 15 bp, Homo sapiens
gactgtgatggctgt

SEQ ID NO: 1003130 - DNA, 15 bp, Homo sapiens
actgtgatggctgtg

SEQ ID NO: 1003131 - DNA, 15 bp, Homo sapiens
ctgtgatggctgtgg

SEQ ID NO: 1003132 - DNA, 15 bp, Homo sapiens
tgtgatggctgtggg

SEQ ID NO: 1003133 - DNA, 15 bp, Homo sapiens
gtgatggctgtgggg

SEQ ID NO: 1003134 - DNA, 15 bp, Homo sapiens
tgatggctgtgggga

SEQ ID NO: 1003135 - DNA, 15 bp, Homo sapiens
gatggctgtggggag

SEQ ID NO: 1003136 - DNA, 15 bp, Homo sapiens
atggctgtggggaga

SEQ ID NO: 1003137 - DNA, 15 bp, Homo sapiens
tggctgtggggagac

SEQ ID NO: 1003138 - DNA, 15 bp, Homo sapiens
ggctgtggggagacg

SEQ ID NO: 1003139 - DNA, 15 bp, Homo sapiens
gctgtggggagacgg

SEQ ID NO: 1003140 - DNA, 15 bp, Homo sapiens
ctgtggggagacggc

SEQ ID NO: 1003141 - DNA, 15 bp, Homo sapiens
tgtggggagacggcg

SEQ ID NO: 1003142 - DNA, 15 bp, Homo sapiens
gtggggagacggcgc

SEQ ID NO: 1003143 - DNA, 15 bp, Homo sapiens
tggggagacggcgct

SEQ ID NO: 1003144 - DNA, 15 bp, Homo sapiens
ggggagacggcgcta

SEQ ID NO: 1003145 - DNA, 15 bp, Homo sapiens
gggagacggcgctag

SEQ ID NO: 1003146 - DNA, 15 bp, Homo sapiens
ggagacggcgctagt

SEQ ID NO: 1003147 - DNA, 15 bp, Homo sapiens
gagacggcgctagtg

SEQ ID NO: 1003148 - DNA, 15 bp, Homo sapiens
agacggcgctagtgg

SEQ ID NO: 1003149 - DNA, 15 bp, Homo sapiens
gacggcgctagtggg

SEQ ID NO: 1003150 - DNA, 15 bp, Homo sapiens
acggcgctagtgggg

SEQ ID NO: 1003151 - DNA, 15 bp, Homo sapiens
cggcgctagtgggga

SEQ ID NO: 1003152 - DNA, 15 bp, Homo sapiens
ggcgctagtggggag

SEQ ID NO: 1003153 - DNA, 15 bp, Homo sapiens
gcgctagtggggaga

SEQ ID NO: 1003154 - DNA, 15 bp, Homo sapiens
cgctagtggggagag

SEQ ID NO: 1003155 - DNA, 15 bp, Homo sapiens
gctagtggggagagc

SEQ ID NO: 1003156 - DNA, 15 bp, Homo sapiens
ctagtggggagagcg

SEQ ID NO: 1003157 - DNA, 15 bp, Homo sapiens
tagtggggagagcga

SEQ ID NO: 1003158 - DNA, 15 bp, Homo sapiens
agtggggagagcgac

SEQ ID NO: 1003159 - DNA, 15 bp, Homo sapiens
gtggggagagcgacc

SEQ ID NO: 1003160 - DNA, 15 bp, Homo sapiens
tggggagagcgacca

SEQ ID NO: 1003161 - DNA, 15 bp, Homo sapiens
ggggagagcgaccaa

SEQ ID NO: 1003162 - DNA, 15 bp, Homo sapiens
gggagagcgaccaag

SEQ ID NO: 1003163 - DNA, 15 bp, Homo sapiens
ggagagcgaccaaga

SEQ ID NO: 1003164 - DNA, 15 bp, Homo sapiens
gagagcgaccaagag

SEQ ID NO: 1003165 - DNA, 15 bp, Homo sapiens
agagcgaccaagagg

SEQ ID NO: 1003166 - DNA, 15 bp, Homo sapiens
gagcgaccaagaggc

SEQ ID NO: 1003167 - DNA, 15 bp, Homo sapiens
agcgaccaagaggcc

SEQ ID NO: 1003168 - DNA, 15 bp, Homo sapiens
gcgaccaagaggccc

SEQ ID NO: 1003169 - DNA, 15 bp, Homo sapiens
cgaccaagaggcccc

SEQ ID NO: 1003170 - DNA, 15 bp, Homo sapiens
gaccaagaggccccc

SEQ ID NO: 1003171 - DNA, 15 bp, Homo sapiens
accaagaggccccct

SEQ ID NO: 1003172 - DNA, 15 bp, Homo sapiens
ccaagaggccccctc

SEQ ID NO: 1003173 - DNA, 15 bp, Homo sapiens
caagaggccccctcc

SEQ ID NO: 1003174 - DNA, 15 bp, Homo sapiens
aagaggccccctccc

SEQ ID NO: 1003175 - DNA, 15 bp, Homo sapiens
agaggccccctcccc

SEQ ID NO: 1003176 - DNA, 15 bp, Homo sapiens
gaggccccctcccct

SEQ ID NO: 1003177 - DNA, 15 bp, Homo sapiens
aggccccctcccctc

SEQ ID NO: 1003178 - DNA, 15 bp, Homo sapiens
ggccccctcccctcc

SEQ ID NO: 1003179 - DNA, 15 bp, Homo sapiens
gccccctcccctccc

SEQ ID NO: 1003180 - DNA, 15 bp, Homo sapiens
ccccctcccctcccc

SEQ ID NO: 1003181 - DNA, 15 bp, Homo sapiens
cccctcccctccccg

SEQ ID NO: 1003182 - DNA, 15 bp, Homo sapiens
ccctcccctccccgg

SEQ ID NO: 1003183 - DNA, 15 bp, Homo sapiens
cctcccctccccggg

SEQ ID NO: 1003184 - DNA, 15 bp, Homo sapiens
ctcccctccccgggt

SEQ ID NO: 1003185 - DNA, 15 bp, Homo sapiens
tcccctccccgggtc

SEQ ID NO: 1003186 - DNA, 15 bp, Homo sapiens
cccctccccgggtcc

SEQ ID NO: 1003187 - DNA, 15 bp, Homo sapiens
ccctccccgggtccc

SEQ ID NO: 1003188 - DNA, 15 bp, Homo sapiens
cctccccgggtcccc

SEQ ID NO: 1003189 - DNA, 15 bp, Homo sapiens
ctccccgggtcccct

SEQ ID NO: 1003190 - DNA, 15 bp, Homo sapiens
tccccgggtcccctt

SEQ ID NO: 1003191 - DNA, 15 bp, Homo sapiens
ccccgggtccccttc

SEQ ID NO: 1003192 - DNA, 15 bp, Homo sapiens
cccgggtccccttcc

SEQ ID NO: 1003193 - DNA, 15 bp, Homo sapiens
ccgggtccccttccc

SEQ ID NO: 1003194 - DNA, 15 bp, Homo sapiens
cgggtccccttcccc

SEQ ID NO: 1003195 - DNA, 15 bp, Homo sapiens
gggtccccttcccct

SEQ ID NO: 1003196 - DNA, 15 bp, Homo sapiens
ggtccccttccccta

SEQ ID NO: 1003197 - DNA, 15 bp, Homo sapiens
gtccccttcccctat

SEQ ID NO: 1003198 - DNA, 15 bp, Homo sapiens
tccccttcccctatc

SEQ ID NO: 1003199 - DNA, 15 bp, Homo sapiens
ccccttcccctatcc

SEQ ID NO: 1003200 - DNA, 15 bp, Homo sapiens
cccttcccctatccc

SEQ ID NO: 1003201 - DNA, 15 bp, Homo sapiens
ccttcccctatcccc

SEQ ID NO: 1003202 - DNA, 15 bp, Homo sapiens
cttcccctatccccc

SEQ ID NO: 1003203 - DNA, 15 bp, Homo sapiens
ttcccctatccccct

SEQ ID NO: 1003204 - DNA, 15 bp, Homo sapiens
tcccctatccccctc

SEQ ID NO: 1003205 - DNA, 15 bp, Homo sapiens
cccctatccccctcc

SEQ ID NO: 1003206 - DNA, 15 bp, Homo sapiens
ccctatccccctccc

SEQ ID NO: 1003207 - DNA, 15 bp, Homo sapiens
cctatccccctcccc

SEQ ID NO: 1003208 - DNA, 15 bp, Homo sapiens
ctatccccctccccc

SEQ ID NO: 1003209 - DNA, 15 bp, Homo sapiens
tatccccctcccccc

SEQ ID NO: 1003210 - DNA, 15 bp, Homo sapiens
atccccctcccccca

SEQ ID NO: 1003211 - DNA, 15 bp, Homo sapiens
tccccctccccccag

SEQ ID NO: 1003212 - DNA, 15 bp, Homo sapiens
ccccctccccccagc

SEQ ID NO: 1003213 - DNA, 15 bp, Homo sapiens
cccctccccccagcc

SEQ ID NO: 1003214 - DNA, 15 bp, Homo sapiens
ccctccccccagcct

SEQ ID NO: 1003215 - DNA, 15 bp, Homo sapiens
cctccccccagcctc

SEQ ID NO: 1003216 - DNA, 15 bp, Homo sapiens
ctccccccagcctcc

SEQ ID NO: 1003217 - DNA, 15 bp, Homo sapiens
tccccccagcctcct

SEQ ID NO: 1003218 - DNA, 15 bp, Homo sapiens
ccccccagcctcctt

SEQ ID NO: 1003219 - DNA, 15 bp, Homo sapiens
cccccagcctccttg

SEQ ID NO: 1003220 - DNA, 15 bp, Homo sapiens
ccccagcctccttgc

SEQ ID NO: 1003221 - DNA, 15 bp, Homo sapiens
cccagcctccttgcc

SEQ ID NO: 1003222 - DNA, 15 bp, Homo sapiens
ccagcctccttgcca

SEQ ID NO: 1003223 - DNA, 15 bp, Homo sapiens
cagcctccttgccaa

SEQ ID NO: 1003224 - DNA, 15 bp, Homo sapiens
agcctccttgccaac

SEQ ID NO: 1003225 - DNA, 15 bp, Homo sapiens
gcctccttgccaacg

SEQ ID NO: 1003226 - DNA, 15 bp, Homo sapiens
cctccttgccaacgc

SEQ ID NO: 1003227 - DNA, 15 bp, Homo sapiens
ctccttgccaacgcc

SEQ ID NO: 1003228 - DNA, 15 bp, Homo sapiens
tccttgccaacgccc

SEQ ID NO: 1003229 - DNA, 15 bp, Homo sapiens
ccttgccaacgcccc

SEQ ID NO: 1003230 - DNA, 15 bp, Homo sapiens
cttgccaacgccccc

SEQ ID NO: 1003231 - DNA, 15 bp, Homo sapiens
ttgccaacgccccct

SEQ ID NO: 1003232 - DNA, 15 bp, Homo sapiens
tgccaacgccccctt

SEQ ID NO: 1003233 - DNA, 15 bp, Homo sapiens
gccaacgcccccttt

SEQ ID NO: 1003234 - DNA, 15 bp, Homo sapiens
ccaacgccccctttc

SEQ ID NO: 1003235 - DNA, 15 bp, Homo sapiens
caacgccccctttcc

SEQ ID NO: 1003236 - DNA, 15 bp, Homo sapiens
aacgccccctttccc

SEQ ID NO: 1003237 - DNA, 15 bp, Homo sapiens
acgccccctttccct

SEQ ID NO: 1003238 - DNA, 15 bp, Homo sapiens
cgccccctttccctc

SEQ ID NO: 1003239 - DNA, 15 bp, Homo sapiens
gccccctttccctct

SEQ ID NO: 1003240 - DNA, 15 bp, Homo sapiens
ccccctttccctctc

SEQ ID NO: 1003241 - DNA, 15 bp, Homo sapiens
cccctttccctctcc

SEQ ID NO: 1003242 - DNA, 15 bp, Homo sapiens
ccctttccctctccc

SEQ ID NO: 1003243 - DNA, 15 bp, Homo sapiens
cctttccctctcccc

SEQ ID NO: 1003244 - DNA, 15 bp, Homo sapiens
ctttccctctccccc

SEQ ID NO: 1003245 - DNA, 15 bp, Homo sapiens
tttccctctccccct

SEQ ID NO: 1003246 - DNA, 15 bp, Homo sapiens
ttccctctccccctc

SEQ ID NO: 1003247 - DNA, 15 bp, Homo sapiens
tccctctccccctcc

SEQ ID NO: 1003248 - DNA, 15 bp, Homo sapiens
ccctctccccctccc

SEQ ID NO: 1003249 - DNA, 15 bp, Homo sapiens
cctctccccctcccg

SEQ ID NO: 1003250 - DNA, 15 bp, Homo sapiens
ctctccccctcccgc

SEQ ID NO: 1003251 - DNA, 15 bp, Homo sapiens
tctccccctcccgct

SEQ ID NO: 1003252 - DNA, 15 bp, Homo sapiens
ctccccctcccgctc

SEQ ID NO: 1003253 - DNA, 15 bp, Homo sapiens
tccccctcccgctcg

SEQ ID NO: 1003254 - DNA, 15 bp, Homo sapiens
ccccctcccgctcgg

SEQ ID NO: 1003255 - DNA, 15 bp, Homo sapiens
cccctcccgctcggc

SEQ ID NO: 1003256 - DNA, 15 bp, Homo sapiens
ccctcccgctcggcg

SEQ ID NO: 1003257 - DNA, 15 bp, Homo sapiens
cctcccgctcggcgc

SEQ ID NO: 1003258 - DNA, 15 bp, Homo sapiens
ctcccgctcggcgct

SEQ ID NO: 1003259 - DNA, 15 bp, Homo sapiens
tcccgctcggcgctg

SEQ ID NO: 1003260 - DNA, 15 bp, Homo sapiens
cccgctcggcgctga

SEQ ID NO: 1003261 - DNA, 15 bp, Homo sapiens
ccgctcggcgctgac

SEQ ID NO: 1003262 - DNA, 15 bp, Homo sapiens
cgctcggcgctgacc

SEQ ID NO: 1003263 - DNA, 15 bp, Homo sapiens
gctcggcgctgaccc

SEQ ID NO: 1003264 - DNA, 15 bp, Homo sapiens
ctcggcgctgacccc

SEQ ID NO: 1003265 - DNA, 15 bp, Homo sapiens
tcggcgctgaccccc

SEQ ID NO: 1003266 - DNA, 15 bp, Homo sapiens
cggcgctgacccccc

SEQ ID NO: 1003267 - DNA, 15 bp, Homo sapiens
ggcgctgacccccca

SEQ ID NO: 1003268 - DNA, 15 bp, Homo sapiens
gcgctgaccccccat

SEQ ID NO: 1003269 - DNA, 15 bp, Homo sapiens
cgctgaccccccatc

SEQ ID NO: 1003270 - DNA, 15 bp, Homo sapiens
gctgaccccccatcc

SEQ ID NO: 1003271 - DNA, 15 bp, Homo sapiens
ctgaccccccatccc

SEQ ID NO: 1003272 - DNA, 15 bp, Homo sapiens
tgaccccccatcccc

SEQ ID NO: 1003273 - DNA, 15 bp, Homo sapiens
gaccccccatcccca

SEQ ID NO: 1003274 - DNA, 15 bp, Homo sapiens
accccccatccccac

SEQ ID NO: 1003275 - DNA, 15 bp, Homo sapiens
ccccccatccccacc

SEQ ID NO: 1003276 - DNA, 15 bp, Homo sapiens
cccccatccccaccc

SEQ ID NO: 1003277 - DNA, 15 bp, Homo sapiens
ccccatccccacccc

SEQ ID NO: 1003278 - DNA, 15 bp, Homo sapiens
cccatccccaccccc

SEQ ID NO: 1003279 - DNA, 15 bp, Homo sapiens
ccatccccacccccg

SEQ ID NO: 1003280 - DNA, 15 bp, Homo sapiens
catccccacccccgt

SEQ ID NO: 1003281 - DNA, 15 bp, Homo sapiens
atccccacccccgtg

SEQ ID NO: 1003282 - DNA, 15 bp, Homo sapiens
tccccacccccgtgg

SEQ ID NO: 1003283 - DNA, 15 bp, Homo sapiens
ccccacccccgtggg

SEQ ID NO: 1003284 - DNA, 15 bp, Homo sapiens
cccacccccgtggga

SEQ ID NO: 1003285 - DNA, 15 bp, Homo sapiens
ccacccccgtgggaa

SEQ ID NO: 1003286 - DNA, 15 bp, Homo sapiens
cacccccgtgggaac

SEQ ID NO: 1003287 - DNA, 15 bp, Homo sapiens
acccccgtgggaaca

SEQ ID NO: 1003288 - DNA, 15 bp, Homo sapiens
cccccgtgggaacac

SEQ ID NO: 1003289 - DNA, 15 bp, Homo sapiens
ccccgtgggaacact

SEQ ID NO: 1003290 - DNA, 15 bp, Homo sapiens
cccgtgggaacactg

SEQ ID NO: 1003291 - DNA, 15 bp, Homo sapiens
ccgtgggaacactgg

SEQ ID NO: 1003292 - DNA, 15 bp, Homo sapiens
cgtgggaacactggg

SEQ ID NO: 1003293 - DNA, 15 bp, Homo sapiens
gtgggaacactggga

SEQ ID NO: 1003294 - DNA, 15 bp, Homo sapiens
tgggaacactgggag

SEQ ID NO: 1003295 - DNA, 15 bp, Homo sapiens
gggaacactgggagc

SEQ ID NO: 1003296 - DNA, 15 bp, Homo sapiens
ggaacactgggagcc

SEQ ID NO: 1003297 - DNA, 15 bp, Homo sapiens
gaacactgggagcct

SEQ ID NO: 1003298 - DNA, 15 bp, Homo sapiens
aacactgggagcctg

SEQ ID NO: 1003299 - DNA, 15 bp, Homo sapiens
acactgggagcctgc

SEQ ID NO: 1003300 - DNA, 15 bp, Homo sapiens
cactgggagcctgca

SEQ ID NO: 1003301 - DNA, 15 bp, Homo sapiens
actgggagcctgcac

SEQ ID NO: 1003302 - DNA, 15 bp, Homo sapiens
ctgggagcctgcact

SEQ ID NO: 1003303 - DNA, 15 bp, Homo sapiens
tgggagcctgcactc

SEQ ID NO: 1003304 - DNA, 15 bp, Homo sapiens
gggagcctgcactcc

SEQ ID NO: 1003305 - DNA, 15 bp, Homo sapiens
ggagcctgcactcca

SEQ ID NO: 1003306 - DNA, 15 bp, Homo sapiens
gagcctgcactccac

SEQ ID NO: 1003307 - DNA, 15 bp, Homo sapiens
agcctgcactccaca

SEQ ID NO: 1003308 - DNA, 15 bp, Homo sapiens
gcctgcactccacag

SEQ ID NO: 1003309 - DNA, 15 bp, Homo sapiens
cctgcactccacaga

SEQ ID NO: 1003310 - DNA, 15 bp, Homo sapiens
ctgcactccacagac

SEQ ID NO: 1003311 - DNA, 15 bp, Homo sapiens
tgcactccacagacc

SEQ ID NO: 1003312 - DNA, 15 bp, Homo sapiens
gcactccacagaccc

SEQ ID NO: 1003313 - DNA, 15 bp, Homo sapiens
cactccacagaccct

SEQ ID NO: 1003314 - DNA, 15 bp, Homo sapiens
actccacagaccctc

SEQ ID NO: 1003315 - DNA, 15 bp, Homo sapiens
ctccacagaccctct

SEQ ID NO: 1003316 - DNA, 15 bp, Homo sapiens
tccacagaccctctc

SEQ ID NO: 1003317 - DNA, 15 bp, Homo sapiens
ccacagaccctctcc

SEQ ID NO: 1003318 - DNA, 15 bp, Homo sapiens
cacagaccctctcct

SEQ ID NO: 1003319 - DNA, 15 bp, Homo sapiens
acagaccctctcctt

SEQ ID NO: 1003320 - DNA, 15 bp, Homo sapiens
cagaccctctccttg

SEQ ID NO: 1003321 - DNA, 15 bp, Homo sapiens
agaccctctccttgc

SEQ ID NO: 1003322 - DNA, 15 bp, Homo sapiens
gaccctctccttgcc

SEQ ID NO: 1003323 - DNA, 15 bp, Homo sapiens
accctctccttgcct

SEQ ID NO: 1003324 - DNA, 15 bp, Homo sapiens
ccctctccttgcctc

SEQ ID NO: 1003325 - DNA, 15 bp, Homo sapiens
cctctccttgcctct

SEQ ID NO: 1003326 - DNA, 15 bp, Homo sapiens
ctctccttgcctctt

SEQ ID NO: 1003327 - DNA, 15 bp, Homo sapiens
tctccttgcctcttc

SEQ ID NO: 1003328 - DNA, 15 bp, Homo sapiens
ctccttgcctcttcc

SEQ ID NO: 1003329 - DNA, 15 bp, Homo sapiens
tccttgcctcttccc

SEQ ID NO: 1003330 - DNA, 15 bp, Homo sapiens
ccttgcctcttccct

SEQ ID NO: 1003331 - DNA, 15 bp, Homo sapiens
cttgcctcttccctc

SEQ ID NO: 1003332 - DNA, 15 bp, Homo sapiens
ttgcctcttccctca

SEQ ID NO: 1003333 - DNA, 15 bp, Homo sapiens
tgcctcttccctcac

SEQ ID NO: 1003334 - DNA, 15 bp, Homo sapiens
gcctcttccctcacc

SEQ ID NO: 1003335 - DNA, 15 bp, Homo sapiens
cctcttccctcacct

SEQ ID NO: 1003336 - DNA, 15 bp, Homo sapiens
ctcttccctcacctc

SEQ ID NO: 1003337 - DNA, 15 bp, Homo sapiens
tcttccctcacctca

SEQ ID NO: 1003338 - DNA, 15 bp, Homo sapiens
cttccctcacctcag

SEQ ID NO: 1003339 - DNA, 15 bp, Homo sapiens
ttccctcacctcagc

SEQ ID NO: 1003340 - DNA, 15 bp, Homo sapiens
tccctcacctcagcc

SEQ ID NO: 1003341 - DNA, 15 bp, Homo sapiens
ccctcacctcagcct

SEQ ID NO: 1003342 - DNA, 15 bp, Homo sapiens
cctcacctcagcctc

SEQ ID NO: 1003343 - DNA, 15 bp, Homo sapiens
ctcacctcagcctcc

SEQ ID NO: 1003344 - DNA, 15 bp, Homo sapiens
tcacctcagcctccg

SEQ ID NO: 1003345 - DNA, 15 bp, Homo sapiens
cacctcagcctccgc

SEQ ID NO: 1003346 - DNA, 15 bp, Homo sapiens
acctcagcctccgct

SEQ ID NO: 1003347 - DNA, 15 bp, Homo sapiens
cctcagcctccgctc

SEQ ID NO: 1003348 - DNA, 15 bp, Homo sapiens
ctcagcctccgctcc

SEQ ID NO: 1003349 - DNA, 15 bp, Homo sapiens
tcagcctccgctccc

SEQ ID NO: 1003350 - DNA, 15 bp, Homo sapiens
cagcctccgctcccc

SEQ ID NO: 1003351 - DNA, 15 bp, Homo sapiens
agcctccgctccccg

SEQ ID NO: 1003352 - DNA, 15 bp, Homo sapiens
gcctccgctccccgc

SEQ ID NO: 1003353 - DNA, 15 bp, Homo sapiens
cctccgctccccgcc

SEQ ID NO: 1003354 - DNA, 15 bp, Homo sapiens
ctccgctccccgccc

SEQ ID NO: 1003355 - DNA, 15 bp, Homo sapiens
tccgctccccgccct

SEQ ID NO: 1003356 - DNA, 15 bp, Homo sapiens
ccgctccccgccctc

SEQ ID NO: 1003357 - DNA, 15 bp, Homo sapiens
cgctccccgccctct

SEQ ID NO: 1003358 - DNA, 15 bp, Homo sapiens
gctccccgccctctt

SEQ ID NO: 1003359 - DNA, 15 bp, Homo sapiens
ctccccgccctcttc

SEQ ID NO: 1003360 - DNA, 15 bp, Homo sapiens
tccccgccctcttcc

SEQ ID NO: 1003361 - DNA, 15 bp, Homo sapiens
ccccgccctcttccc

SEQ ID NO: 1003362 - DNA, 15 bp, Homo sapiens
cccgccctcttcccg

SEQ ID NO: 1003363 - DNA, 15 bp, Homo sapiens
ccgccctcttcccgg

SEQ ID NO: 1003364 - DNA, 15 bp, Homo sapiens
cgccctcttcccggc

SEQ ID NO: 1003365 - DNA, 15 bp, Homo sapiens
gccctcttcccggcc

SEQ ID NO: 1003366 - DNA, 15 bp, Homo sapiens
ccctcttcccggccc

SEQ ID NO: 1003367 - DNA, 15 bp, Homo sapiens
cctcttcccggccca

SEQ ID NO: 1003368 - DNA, 15 bp, Homo sapiens
ctcttcccggcccag

SEQ ID NO: 1003369 - DNA, 15 bp, Homo sapiens
tcttcccggcccagg

SEQ ID NO: 1003370 - DNA, 15 bp, Homo sapiens
cttcccggcccaggg

SEQ ID NO: 1003371 - DNA, 15 bp, Homo sapiens
ttcccggcccagggc

SEQ ID NO: 1003372 - DNA, 15 bp, Homo sapiens
tcccggcccagggcg

SEQ ID NO: 1003373 - DNA, 15 bp, Homo sapiens
cccggcccagggcgc

SEQ ID NO: 1003374 - DNA, 15 bp, Homo sapiens
ccggcccagggcgcc

SEQ ID NO: 1003375 - DNA, 15 bp, Homo sapiens
cggcccagggcgccg

SEQ ID NO: 1003376 - DNA, 15 bp, Homo sapiens
ggcccagggcgccgg

SEQ ID NO: 1003377 - DNA, 15 bp, Homo sapiens
gcccagggcgccggc

SEQ ID NO: 1003378 - DNA, 15 bp, Homo sapiens
cccagggcgccggcc

SEQ ID NO: 1003379 - DNA, 15 bp, Homo sapiens
ccagggcgccggccc

SEQ ID NO: 1003380 - DNA, 15 bp, Homo sapiens
cagggcgccggccca

SEQ ID NO: 1003381 - DNA, 15 bp, Homo sapiens
agggcgccggcccac

SEQ ID NO: 1003382 - DNA, 15 bp, Homo sapiens
gggcgccggcccacc

SEQ ID NO: 1003383 - DNA, 15 bp, Homo sapiens
ggcgccggcccaccc

SEQ ID NO: 1003384 - DNA, 15 bp, Homo sapiens
gcgccggcccaccct

SEQ ID NO: 1003385 - DNA, 15 bp, Homo sapiens
cgccggcccaccctt

SEQ ID NO: 1003386 - DNA, 15 bp, Homo sapiens
gccggcccacccttc

SEQ ID NO: 1003387 - DNA, 15 bp, Homo sapiens
ccggcccacccttcc

SEQ ID NO: 1003388 - DNA, 15 bp, Homo sapiens
cggcccacccttccc

SEQ ID NO: 1003389 - DNA, 15 bp, Homo sapiens
ggcccacccttccct

SEQ ID NO: 1003390 - DNA, 15 bp, Homo sapiens
gcccacccttccctc

SEQ ID NO: 1003391 - DNA, 15 bp, Homo sapiens
cccacccttccctcc

SEQ ID NO: 1003392 - DNA, 15 bp, Homo sapiens
ccacccttccctccg

SEQ ID NO: 1003393 - DNA, 15 bp, Homo sapiens
cacccttccctccgc

SEQ ID NO: 1003394 - DNA, 15 bp, Homo sapiens
acccttccctccgcc

SEQ ID NO: 1003395 - DNA, 15 bp, Homo sapiens
cccttccctccgccg

SEQ ID NO: 1003396 - DNA, 15 bp, Homo sapiens
ccttccctccgccgc

SEQ ID NO: 1003397 - DNA, 15 bp, Homo sapiens
cttccctccgccgcc

SEQ ID NO: 1003398 - DNA, 15 bp, Homo sapiens
ttccctccgccgccc

SEQ ID NO: 1003399 - DNA, 15 bp, Homo sapiens
tccctccgccgcccc

SEQ ID NO: 1003400 - DNA, 15 bp, Homo sapiens
ccctccgccgccccc

SEQ ID NO: 1003401 - DNA, 15 bp, Homo sapiens
cctccgccgcccccc

SEQ ID NO: 1003402 - DNA, 15 bp, Homo sapiens
ctccgccgccccccg

SEQ ID NO: 1003403 - DNA, 15 bp, Homo sapiens
tccgccgccccccgg

SEQ ID NO: 1003404 - DNA, 15 bp, Homo sapiens
ccgccgccccccggc

SEQ ID NO: 1003405 - DNA, 15 bp, Homo sapiens
cgccgccccccggcc

SEQ ID NO: 1003406 - DNA, 15 bp, Homo sapiens
gccgccccccggccg

SEQ ID NO: 1003407 - DNA, 15 bp, Homo sapiens
ccgccccccggccgc

SEQ ID NO: 1003408 - DNA, 15 bp, Homo sapiens
cgccccccggccgcg

SEQ ID NO: 1003409 - DNA, 15 bp, Homo sapiens
gccccccggccgcgg

SEQ ID NO: 1003410 - DNA, 15 bp, Homo sapiens
ccccccggccgcggg

SEQ ID NO: 1003411 - DNA, 15 bp, Homo sapiens
cccccggccgcgggg

SEQ ID NO: 1003412 - DNA, 15 bp, Homo sapiens
ccccggccgcgggga

SEQ ID NO: 1003413 - DNA, 15 bp, Homo sapiens
cccggccgcggggag

SEQ ID NO: 1003414 - DNA, 15 bp, Homo sapiens
ccggccgcggggagg

SEQ ID NO: 1003415 - DNA, 15 bp, Homo sapiens
cggccgcggggagga

SEQ ID NO: 1003416 - DNA, 15 bp, Homo sapiens
ggccgcggggaggac

SEQ ID NO: 1003417 - DNA, 15 bp, Homo sapiens
gccgcggggaggaca

SEQ ID NO: 1003418 - DNA, 15 bp, Homo sapiens
ccgcggggaggacat

SEQ ID NO: 1003419 - DNA, 15 bp, Homo sapiens
cgcggggaggacatg

SEQ ID NO: 1003420 - DNA, 15 bp, Homo sapiens
gcggggaggacatgg

SEQ ID NO: 1003421 - DNA, 15 bp, Homo sapiens
cggggaggacatggc

SEQ ID NO: 1003422 - DNA, 15 bp, Homo sapiens
ggggaggacatggcc

SEQ ID NO: 1003423 - DNA, 15 bp, Homo sapiens
gggaggacatggccg

SEQ ID NO: 1003424 - DNA, 15 bp, Homo sapiens
ggaggacatggccgc

SEQ ID NO: 1003425 - DNA, 15 bp, Homo sapiens
gaggacatggccgcg

SEQ ID NO: 1003426 - DNA, 15 bp, Homo sapiens
aggacatggccgcgc

SEQ ID NO: 1003427 - DNA, 15 bp, Homo sapiens
ggacatggccgcgca

SEQ ID NO: 1003428 - DNA, 15 bp, Homo sapiens
gacatggccgcgcac

SEQ ID NO: 1003429 - DNA, 15 bp, Homo sapiens
acatggccgcgcaca

SEQ ID NO: 1003430 - DNA, 15 bp, Homo sapiens
catggccgcgcacag

SEQ ID NO: 1003431 - DNA, 15 bp, Homo sapiens
atggccgcgcacagg

SEQ ID NO: 1003432 - DNA, 15 bp, Homo sapiens
tggccgcgcacaggc

SEQ ID NO: 1003433 - DNA, 15 bp, Homo sapiens
ggccgcgcacaggcc

SEQ ID NO: 1003434 - DNA, 15 bp, Homo sapiens
gccgcgcacaggccg

SEQ ID NO: 1003435 - DNA, 15 bp, Homo sapiens
ccgcgcacaggccgg

SEQ ID NO: 1003436 - DNA, 15 bp, Homo sapiens
cgcgcacaggccggt

SEQ ID NO: 1003437 - DNA, 15 bp, Homo sapiens
gcgcacaggccggtg

SEQ ID NO: 1003438 - DNA, 15 bp, Homo sapiens
cgcacaggccggtgg

SEQ ID NO: 1003439 - DNA, 15 bp, Homo sapiens
gcacaggccggtgga

SEQ ID NO: 1003440 - DNA, 15 bp, Homo sapiens
cacaggccggtggaa

SEQ ID NO: 1003441 - DNA, 15 bp, Homo sapiens
acaggccggtggaat

SEQ ID NO: 1003442 - DNA, 15 bp, Homo sapiens
caggccggtggaatg

SEQ ID NO: 1003443 - DNA, 15 bp, Homo sapiens
aggccggtggaatgg

SEQ ID NO: 1003444 - DNA, 15 bp, Homo sapiens
ggccggtggaatggg

SEQ ID NO: 1003445 - DNA, 15 bp, Homo sapiens
gccggtggaatgggt

SEQ ID NO: 1003446 - DNA, 15 bp, Homo sapiens
ccggtggaatgggtc

SEQ ID NO: 1003447 - DNA, 15 bp, Homo sapiens
cggtggaatgggtcc

SEQ ID NO: 1003448 - DNA, 15 bp, Homo sapiens
ggtggaatgggtcca

SEQ ID NO: 1003449 - DNA, 15 bp, Homo sapiens
gtggaatgggtccag

SEQ ID NO: 1003450 - DNA, 15 bp, Homo sapiens
tggaatgggtccagg

SEQ ID NO: 1003451 - DNA, 15 bp, Homo sapiens
ggaatgggtccaggc

SEQ ID NO: 1003452 - DNA, 15 bp, Homo sapiens
gaatgggtccaggcc

SEQ ID NO: 1003453 - DNA, 15 bp, Homo sapiens
aatgggtccaggccg

SEQ ID NO: 1003454 - DNA, 15 bp, Homo sapiens
atgggtccaggccgt

SEQ ID NO: 1003455 - DNA, 15 bp, Homo sapiens
tgggtccaggccgtg

SEQ ID NO: 1003456 - DNA, 15 bp, Homo sapiens
gggtccaggccgtgg

SEQ ID NO: 1003457 - DNA, 15 bp, Homo sapiens
ggtccaggccgtggt

SEQ ID NO: 1003458 - DNA, 15 bp, Homo sapiens
gtccaggccgtggtc

SEQ ID NO: 1003459 - DNA, 15 bp, Homo sapiens
tccaggccgtggtca

SEQ ID NO: 1003460 - DNA, 15 bp, Homo sapiens
ccaggccgtggtcag

SEQ ID NO: 1003461 - DNA, 15 bp, Homo sapiens
caggccgtggtcagc

SEQ ID NO: 1003462 - DNA, 15 bp, Homo sapiens
aggccgtggtcagcc

SEQ ID NO: 1003463 - DNA, 15 bp, Homo sapiens
ggccgtggtcagccg

SEQ ID NO: 1003464 - DNA, 15 bp, Homo sapiens
gccgtggtcagccgc

SEQ ID NO: 1003465 - DNA, 15 bp, Homo sapiens
ccgtggtcagccgct

SEQ ID NO: 1003466 - DNA, 15 bp, Homo sapiens
cgtggtcagccgctt

SEQ ID NO: 1003467 - DNA, 15 bp, Homo sapiens
gtggtcagccgcttc

SEQ ID NO: 1003468 - DNA, 15 bp, Homo sapiens
tggtcagccgcttcg

SEQ ID NO: 1003469 - DNA, 15 bp, Homo sapiens
ggtcagccgcttcga

SEQ ID NO: 1003470 - DNA, 15 bp, Homo sapiens
gtcagccgcttcgac

SEQ ID NO: 1003471 - DNA, 15 bp, Homo sapiens
tcagccgcttcgacg

SEQ ID NO: 1003472 - DNA, 15 bp, Homo sapiens
cagccgcttcgacga

SEQ ID NO: 1003473 - DNA, 15 bp, Homo sapiens
agccgcttcgacgag

SEQ ID NO: 1003474 - DNA, 15 bp, Homo sapiens
gccgcttcgacgagc

SEQ ID NO: 1003475 - DNA, 15 bp, Homo sapiens
ccgcttcgacgagca

SEQ ID NO: 1003476 - DNA, 15 bp, Homo sapiens
cgcttcgacgagcag

SEQ ID NO: 1003477 - DNA, 15 bp, Homo sapiens
gcttcgacgagcagg

SEQ ID NO: 1003478 - DNA, 15 bp, Homo sapiens
cttcgacgagcaggt

SEQ ID NO: 1003479 - DNA, 15 bp, Homo sapiens
ttcgacgagcaggta

SEQ ID NO: 1003480 - DNA, 15 bp, Homo sapiens
tcgacgagcaggtaa

SEQ ID NO: 1003481 - DNA, 15 bp, Homo sapiens
cgacgagcaggtaac

SEQ ID NO: 1003482 - DNA, 15 bp, Homo sapiens
gacgagcaggtaacc

SEQ ID NO: 1003483 - DNA, 15 bp, Homo sapiens
acgagcaggtaaccg

SEQ ID NO: 1003484 - DNA, 15 bp, Homo sapiens
cgagcaggtaaccgg

SEQ ID NO: 1003485 - DNA, 15 bp, Homo sapiens
gagcaggtaaccggc

SEQ ID NO: 1003486 - DNA, 15 bp, Homo sapiens
agcaggtaaccggcc

SEQ ID NO: 1003487 - DNA, 15 bp, Homo sapiens
gcaggtaaccggccc

SEQ ID NO: 1003488 - DNA, 15 bp, Homo sapiens
caggtaaccggcccg

SEQ ID NO: 1003489 - DNA, 15 bp, Homo sapiens
aggtaaccggcccgt

SEQ ID NO: 1003490 - DNA, 15 bp, Homo sapiens
ggtaaccggcccgtg

SEQ ID NO: 1003491 - DNA, 15 bp, Homo sapiens
gtaaccggcccgtgg

SEQ ID NO: 1003492 - DNA, 15 bp, Homo sapiens
taaccggcccgtggc

SEQ ID NO: 1003493 - DNA, 15 bp, Homo sapiens
aaccggcccgtggcg

SEQ ID NO: 1003494 - DNA, 15 bp, Homo sapiens
accggcccgtggcgg

SEQ ID NO: 1003495 - DNA, 15 bp, Homo sapiens
ccggcccgtggcggg

SEQ ID NO: 1003496 - DNA, 15 bp, Homo sapiens
cggcccgtggcgggc

SEQ ID NO: 1003497 - DNA, 15 bp, Homo sapiens
ggcccgtggcgggcg

SEQ ID NO: 1003498 - DNA, 15 bp, Homo sapiens
gcccgtggcgggcgg

SEQ ID NO: 1003499 - DNA, 15 bp, Homo sapiens
cccgtggcgggcggg

SEQ ID NO: 1003500 - DNA, 15 bp, Homo sapiens
ccgtggcgggcggga

SEQ ID NO: 1003501 - DNA, 15 bp, Homo sapiens
cgtggcgggcgggag

SEQ ID NO: 1003502 - DNA, 15 bp, Homo sapiens
gtggcgggcgggagg

SEQ ID NO: 1003503 - DNA, 15 bp, Homo sapiens
tggcgggcgggaggt

SEQ ID NO: 1003504 - DNA, 15 bp, Homo sapiens
ggcgggcgggaggtg

SEQ ID NO: 1003505 - DNA, 15 bp, Homo sapiens
gcgggcgggaggtgg

SEQ ID NO: 1003506 - DNA, 15 bp, Homo sapiens
cgggcgggaggtggg

SEQ ID NO: 1003507 - DNA, 15 bp, Homo sapiens
gggcgggaggtggga

SEQ ID NO: 1003508 - DNA, 15 bp, Homo sapiens
ggcgggaggtgggag

SEQ ID NO: 1003509 - DNA, 15 bp, Homo sapiens
gcgggaggtgggagc

SEQ ID NO: 1003510 - DNA, 15 bp, Homo sapiens
cgggaggtgggagcg

SEQ ID NO: 1003511 - DNA, 15 bp, Homo sapiens
gggaggtgggagcgg

SEQ ID NO: 1003512 - DNA, 15 bp, Homo sapiens
ggaggtgggagcgga

SEQ ID NO: 1003513 - DNA, 15 bp, Homo sapiens
gaggtgggagcggag

SEQ ID NO: 1003514 - DNA, 15 bp, Homo sapiens
aggtgggagcggagt

SEQ ID NO: 1003515 - DNA, 15 bp, Homo sapiens
ggtgggagcggagtg

SEQ ID NO: 1003516 - DNA, 15 bp, Homo sapiens
gtgggagcggagtgg

SEQ ID NO: 1003517 - DNA, 15 bp, Homo sapiens
tgggagcggagtggg

SEQ ID NO: 1003518 - DNA, 15 bp, Homo sapiens
gggagcggagtgggg

SEQ ID NO: 1003519 - DNA, 15 bp, Homo sapiens
ggagcggagtggggg

SEQ ID NO: 1003520 - DNA, 15 bp, Homo sapiens
gagcggagtgggggt

SEQ ID NO: 1003521 - DNA, 15 bp, Homo sapiens
agcggagtgggggtg

SEQ ID NO: 1003522 - DNA, 15 bp, Homo sapiens
gcggagtgggggtgg

SEQ ID NO: 1003523 - DNA, 15 bp, Homo sapiens
cggagtgggggtggg

SEQ ID NO: 1003524 - DNA, 15 bp, Homo sapiens
ggagtgggggtgggg

SEQ ID NO: 1003525 - DNA, 15 bp, Homo sapiens
gagtgggggtgggga

SEQ ID NO: 1003526 - DNA, 15 bp, Homo sapiens
agtgggggtggggac

SEQ ID NO: 1003527 - DNA, 15 bp, Homo sapiens
gtgggggtggggaca

SEQ ID NO: 1003528 - DNA, 15 bp, Homo sapiens
tgggggtggggacag

SEQ ID NO: 1003529 - DNA, 15 bp, Homo sapiens
gggggtggggacaga

SEQ ID NO: 1003530 - DNA, 15 bp, Homo sapiens
ggggtggggacagag

SEQ ID NO: 1003531 - DNA, 15 bp, Homo sapiens
gggtggggacagagt

SEQ ID NO: 1003532 - DNA, 15 bp, Homo sapiens
ggtggggacagagta

SEQ ID NO: 1003533 - DNA, 15 bp, Homo sapiens
gtggggacagagtag

SEQ ID NO: 1003534 - DNA, 15 bp, Homo sapiens
tggggacagagtagg

SEQ ID NO: 1003535 - DNA, 15 bp, Homo sapiens
ggggacagagtaggt

SEQ ID NO: 1003536 - DNA, 15 bp, Homo sapiens
gggacagagtaggtg

SEQ ID NO: 1003537 - DNA, 15 bp, Homo sapiens
ggacagagtaggtga

SEQ ID NO: 1003538 - DNA, 15 bp, Homo sapiens
gacagagtaggtgag

SEQ ID NO: 1003539 - DNA, 15 bp, Homo sapiens
acagagtaggtgagg

SEQ ID NO: 1003540 - DNA, 15 bp, Homo sapiens
cagagtaggtgaggg

SEQ ID NO: 1003541 - DNA, 15 bp, Homo sapiens
agagtaggtgagggg

SEQ ID NO: 1003542 - DNA, 15 bp, Homo sapiens
gagtaggtgagggga

SEQ ID NO: 1003543 - DNA, 15 bp, Homo sapiens
agtaggtgaggggag

SEQ ID NO: 1003544 - DNA, 15 bp, Homo sapiens
gtaggtgaggggagg

SEQ ID NO: 1003545 - DNA, 15 bp, Homo sapiens
taggtgaggggaggt

SEQ ID NO: 1003546 - DNA, 15 bp, Homo sapiens
aggtgaggggaggta

SEQ ID NO: 1003547 - DNA, 15 bp, Homo sapiens
ggtgaggggaggtag

SEQ ID NO: 1003548 - DNA, 15 bp, Homo sapiens
gtgaggggaggtagg

SEQ ID NO: 1003549 - DNA, 15 bp, Homo sapiens
tgaggggaggtagga

SEQ ID NO: 1003550 - DNA, 15 bp, Homo sapiens
gaggggaggtaggag

SEQ ID NO: 1003551 - DNA, 15 bp, Homo sapiens
aggggaggtaggagc

SEQ ID NO: 1003552 - DNA, 15 bp, Homo sapiens
ggggaggtaggagcg

SEQ ID NO: 1003553 - DNA, 15 bp, Homo sapiens
gggaggtaggagcgg

SEQ ID NO: 1003554 - DNA, 15 bp, Homo sapiens
ggaggtaggagcggc

SEQ ID NO: 1003555 - DNA, 15 bp, Homo sapiens
gaggtaggagcggcc

SEQ ID NO: 1003556 - DNA, 15 bp, Homo sapiens
aggtaggagcggccg

SEQ ID NO: 1003557 - DNA, 15 bp, Homo sapiens
ggtaggagcggccgc

SEQ ID NO: 1003558 - DNA, 15 bp, Homo sapiens
gtaggagcggccgcc

SEQ ID NO: 1003559 - DNA, 15 bp, Homo sapiens
taggagcggccgcct

SEQ ID NO: 1003560 - DNA, 15 bp, Homo sapiens
aggagcggccgcctc

SEQ ID NO: 1003561 - DNA, 15 bp, Homo sapiens
ggagcggccgcctcc

SEQ ID NO: 1003562 - DNA, 15 bp, Homo sapiens
gagcggccgcctccc

SEQ ID NO: 1003563 - DNA, 15 bp, Homo sapiens
agcggccgcctcccc

SEQ ID NO: 1003564 - DNA, 15 bp, Homo sapiens
gcggccgcctccccc

SEQ ID NO: 1003565 - DNA, 15 bp, Homo sapiens
cggccgcctcccccg

SEQ ID NO: 1003566 - DNA, 15 bp, Homo sapiens
ggccgcctcccccgc

SEQ ID NO: 1003567 - DNA, 15 bp, Homo sapiens
gccgcctcccccgcg

SEQ ID NO: 1003568 - DNA, 15 bp, Homo sapiens
ccgcctcccccgcgg

SEQ ID NO: 1003569 - DNA, 15 bp, Homo sapiens
cgcctcccccgcggc

SEQ ID NO: 1003570 - DNA, 15 bp, Homo sapiens
gcctcccccgcggct

SEQ ID NO: 1003571 - DNA, 15 bp, Homo sapiens
cctcccccgcggctg

SEQ ID NO: 1003572 - DNA, 15 bp, Homo sapiens
ctcccccgcggctgc

SEQ ID NO: 1003573 - DNA, 15 bp, Homo sapiens
tcccccgcggctgcc

SEQ ID NO: 1003574 - DNA, 15 bp, Homo sapiens
cccccgcggctgcct

SEQ ID NO: 1003575 - DNA, 15 bp, Homo sapiens
ccccgcggctgcctc

SEQ ID NO: 1003576 - DNA, 15 bp, Homo sapiens
cccgcggctgcctca

SEQ ID NO: 1003577 - DNA, 15 bp, Homo sapiens
ccgcggctgcctcag

SEQ ID NO: 1003578 - DNA, 15 bp, Homo sapiens
cgcggctgcctcagg

SEQ ID NO: 1003579 - DNA, 15 bp, Homo sapiens
gcggctgcctcaggc

SEQ ID NO: 1003580 - DNA, 15 bp, Homo sapiens
cggctgcctcaggct

SEQ ID NO: 1003581 - DNA, 15 bp, Homo sapiens
ggctgcctcaggctc

SEQ ID NO: 1003582 - DNA, 15 bp, Homo sapiens
gctgcctcaggctct

SEQ ID NO: 1003583 - DNA, 15 bp, Homo sapiens
ctgcctcaggctctg

SEQ ID NO: 1003584 - DNA, 15 bp, Homo sapiens
tgcctcaggctctgg

SEQ ID NO: 1003585 - DNA, 15 bp, Homo sapiens
gcctcaggctctgga

SEQ ID NO: 1003586 - DNA, 15 bp, Homo sapiens
cctcaggctctggag

SEQ ID NO: 1003587 - DNA, 15 bp, Homo sapiens
ctcaggctctggagg

SEQ ID NO: 1003588 - DNA, 15 bp, Homo sapiens
tcaggctctggagga

SEQ ID NO: 1003589 - DNA, 15 bp, Homo sapiens
caggctctggaggaa

SEQ ID NO: 1003590 - DNA, 15 bp, Homo sapiens
aggctctggaggaaa

SEQ ID NO: 1003591 - DNA, 15 bp, Homo sapiens
ggctctggaggaaag

SEQ ID NO: 1003592 - DNA, 15 bp, Homo sapiens
gctctggaggaaagg

SEQ ID NO: 1003593 - DNA, 15 bp, Homo sapiens
ctctggaggaaagga

SEQ ID NO: 1003594 - DNA, 15 bp, Homo sapiens
tctggaggaaaggaa

SEQ ID NO: 1003595 - DNA, 15 bp, Homo sapiens
ctggaggaaaggaag

SEQ ID NO: 1003596 - DNA, 15 bp, Homo sapiens
tggaggaaaggaagg

SEQ ID NO: 1003597 - DNA, 15 bp, Homo sapiens
ggaggaaaggaaggg

SEQ ID NO: 1003598 - DNA, 15 bp, Homo sapiens
gaggaaaggaaggga

SEQ ID NO: 1003599 - DNA, 15 bp, Homo sapiens
aggaaaggaagggaa

SEQ ID NO: 1003600 - DNA, 15 bp, Homo sapiens
ggaaaggaagggaag

SEQ ID NO: 1003601 - DNA, 15 bp, Homo sapiens
gaaaggaagggaagg

SEQ ID NO: 1003602 - DNA, 15 bp, Homo sapiens
aaaggaagggaaggg

SEQ ID NO: 1003603 - DNA, 15 bp, Homo sapiens
aaggaagggaaggga

SEQ ID NO: 1003604 - DNA, 15 bp, Homo sapiens
aggaagggaagggaa

SEQ ID NO: 1003605 - DNA, 15 bp, Homo sapiens
ggaagggaagggaag

SEQ ID NO: 1003606 - DNA, 15 bp, Homo sapiens
gaagggaagggaaga

SEQ ID NO: 1003607 - DNA, 15 bp, Homo sapiens
aagggaagggaagag

SEQ ID NO: 1003608 - DNA, 15 bp, Homo sapiens
agggaagggaagaga

SEQ ID NO: 1003609 - DNA, 15 bp, Homo sapiens
gggaagggaagagaa

SEQ ID NO: 1003610 - DNA, 15 bp, Homo sapiens
ggaagggaagagaag

SEQ ID NO: 1003611 - DNA, 15 bp, Homo sapiens
gaagggaagagaagg

SEQ ID NO: 1003612 - DNA, 15 bp, Homo sapiens
aagggaagagaaggg

SEQ ID NO: 1003613 - DNA, 15 bp, Homo sapiens
agggaagagaaggga

SEQ ID NO: 1003614 - DNA, 15 bp, Homo sapiens
gggaagagaagggaa

SEQ ID NO: 1003615 - DNA, 15 bp, Homo sapiens
ggaagagaagggaag

SEQ ID NO: 1003616 - DNA, 15 bp, Homo sapiens
gaagagaagggaagg

SEQ ID NO: 1003617 - DNA, 15 bp, Homo sapiens
aagagaagggaaggg

SEQ ID NO: 1003618 - DNA, 15 bp, Homo sapiens
agagaagggaagggg

SEQ ID NO: 1003619 - DNA, 15 bp, Homo sapiens
gagaagggaaggggg

SEQ ID NO: 1003620 - DNA, 15 bp, Homo sapiens
agaagggaagggggg

SEQ ID NO: 1003621 - DNA, 15 bp, Homo sapiens
gaagggaagggggga

SEQ ID NO: 1003622 - DNA, 15 bp, Homo sapiens
aagggaaggggggat

SEQ ID NO: 1003623 - DNA, 15 bp, Homo sapiens
agggaaggggggata

SEQ ID NO: 1003624 - DNA, 15 bp, Homo sapiens
gggaaggggggataa

SEQ ID NO: 1003625 - DNA, 15 bp, Homo sapiens
ggaaggggggataag

SEQ ID NO: 1003626 - DNA, 15 bp, Homo sapiens
gaaggggggataagt

SEQ ID NO: 1003627 - DNA, 15 bp, Homo sapiens
aaggggggataagtg

SEQ ID NO: 1003628 - DNA, 15 bp, Homo sapiens
aggggggataagtgg

SEQ ID NO: 1003629 - DNA, 15 bp, Homo sapiens
ggggggataagtggg

SEQ ID NO: 1003630 - DNA, 15 bp, Homo sapiens
gggggataagtgggg

SEQ ID NO: 1003631 - DNA, 15 bp, Homo sapiens
ggggataagtggggg

SEQ ID NO: 1003632 - DNA, 15 bp, Homo sapiens
gggataagtgggggt

SEQ ID NO: 1003633 - DNA, 15 bp, Homo sapiens
ggataagtgggggtg

SEQ ID NO: 1003634 - DNA, 15 bp, Homo sapiens
gataagtgggggtgg

SEQ ID NO: 1003635 - DNA, 15 bp, Homo sapiens
ataagtgggggtggc

SEQ ID NO: 1003636 - DNA, 15 bp, Homo sapiens
taagtgggggtggcc

SEQ ID NO: 1003637 - DNA, 15 bp, Homo sapiens
aagtgggggtggcca

SEQ ID NO: 1003638 - DNA, 15 bp, Homo sapiens
agtgggggtggccaa

SEQ ID NO: 1003639 - DNA, 15 bp, Homo sapiens
gtgggggtggccaag

SEQ ID NO: 1003640 - DNA, 15 bp, Homo sapiens
tgggggtggccaagg

SEQ ID NO: 1003641 - DNA, 15 bp, Homo sapiens
gggggtggccaaggc

SEQ ID NO: 1003642 - DNA, 15 bp, Homo sapiens
ggggtggccaaggcg

SEQ ID NO: 1003643 - DNA, 15 bp, Homo sapiens
gggtggccaaggcgg

SEQ ID NO: 1003644 - DNA, 15 bp, Homo sapiens
ggtggccaaggcggg

SEQ ID NO: 1003645 - DNA, 15 bp, Homo sapiens
gtggccaaggcggga

SEQ ID NO: 1003646 - DNA, 15 bp, Homo sapiens
tggccaaggcgggag

SEQ ID NO: 1003647 - DNA, 15 bp, Homo sapiens
ggccaaggcgggagg

SEQ ID NO: 1003648 - DNA, 15 bp, Homo sapiens
gccaaggcgggaggt

SEQ ID NO: 1003649 - DNA, 15 bp, Homo sapiens
ccaaggcgggaggtg

SEQ ID NO: 1003650 - DNA, 15 bp, Homo sapiens
caaggcgggaggtga

SEQ ID NO: 1003651 - DNA, 15 bp, Homo sapiens
aaggcgggaggtgag

SEQ ID NO: 1003652 - DNA, 15 bp, Homo sapiens
aggcgggaggtgagg

SEQ ID NO: 1003653 - DNA, 15 bp, Homo sapiens
ggcgggaggtgaggg

SEQ ID NO: 1003654 - DNA, 15 bp, Homo sapiens
gcgggaggtgagggg

SEQ ID NO: 1003655 - DNA, 15 bp, Homo sapiens
cgggaggtgaggggt

SEQ ID NO: 1003656 - DNA, 15 bp, Homo sapiens
gggaggtgaggggta

SEQ ID NO: 1003657 - DNA, 15 bp, Homo sapiens
ggaggtgaggggtag

SEQ ID NO: 1003658 - DNA, 15 bp, Homo sapiens
gaggtgaggggtagg

SEQ ID NO: 1003659 - DNA, 15 bp, Homo sapiens
aggtgaggggtagga

SEQ ID NO: 1003660 - DNA, 15 bp, Homo sapiens
ggtgaggggtaggag

SEQ ID NO: 1003661 - DNA, 15 bp, Homo sapiens
gtgaggggtaggagg

SEQ ID NO: 1003662 - DNA, 15 bp, Homo sapiens
tgaggggtaggaggg

SEQ ID NO: 1003663 - DNA, 15 bp, Homo sapiens
gaggggtaggagggg

SEQ ID NO: 1003664 - DNA, 15 bp, Homo sapiens
aggggtaggagggga

SEQ ID NO: 1003665 - DNA, 15 bp, Homo sapiens
ggggtaggaggggac

SEQ ID NO: 1003666 - DNA, 15 bp, Homo sapiens
gggtaggaggggaca

SEQ ID NO: 1003667 - DNA, 15 bp, Homo sapiens
ggtaggaggggacag

SEQ ID NO: 1003668 - DNA, 15 bp, Homo sapiens
gtaggaggggacagc

SEQ ID NO: 1003669 - DNA, 15 bp, Homo sapiens
taggaggggacagct

SEQ ID NO: 1003670 - DNA, 15 bp, Homo sapiens
aggaggggacagctg

SEQ ID NO: 1003671 - DNA, 15 bp, Homo sapiens
ggaggggacagctgg

SEQ ID NO: 1003672 - DNA, 15 bp, Homo sapiens
gaggggacagctggg

SEQ ID NO: 1003673 - DNA, 15 bp, Homo sapiens
aggggacagctggga

SEQ ID NO: 1003674 - DNA, 15 bp, Homo sapiens
ggggacagctgggag

SEQ ID NO: 1003675 - DNA, 15 bp, Homo sapiens
gggacagctgggagc

SEQ ID NO: 1003676 - DNA, 15 bp, Homo sapiens
ggacagctgggagct

SEQ ID NO: 1003677 - DNA, 15 bp, Homo sapiens
gacagctgggagctt

SEQ ID NO: 1003678 - DNA, 15 bp, Homo sapiens
acagctgggagcttg

SEQ ID NO: 1003679 - DNA, 15 bp, Homo sapiens
cagctgggagcttgg

SEQ ID NO: 1003680 - DNA, 15 bp, Homo sapiens
agctgggagcttggg

SEQ ID NO: 1003681 - DNA, 15 bp, Homo sapiens
gctgggagcttgggc

SEQ ID NO: 1003682 - DNA, 15 bp, Homo sapiens
ctgggagcttgggca

SEQ ID NO: 1003683 - DNA, 15 bp, Homo sapiens
tgggagcttgggcac

SEQ ID NO: 1003684 - DNA, 15 bp, Homo sapiens
gggagcttgggcacc

SEQ ID NO: 1003685 - DNA, 15 bp, Homo sapiens
ggagcttgggcaccc

SEQ ID NO: 1003686 - DNA, 15 bp, Homo sapiens
gagcttgggcaccct

SEQ ID NO: 1003687 - DNA, 15 bp, Homo sapiens
agcttgggcaccctt

SEQ ID NO: 1003688 - DNA, 15 bp, Homo sapiens
gcttgggcacccttt

SEQ ID NO: 1003689 - DNA, 15 bp, Homo sapiens
cttgggcaccctttc

SEQ ID NO: 1003690 - DNA, 15 bp, Homo sapiens
ttgggcaccctttcc

SEQ ID NO: 1003691 - DNA, 15 bp, Homo sapiens
tgggcaccctttccc

SEQ ID NO: 1003692 - DNA, 15 bp, Homo sapiens
gggcaccctttccct

SEQ ID NO: 1003693 - DNA, 15 bp, Homo sapiens
ggcaccctttccctc

SEQ ID NO: 1003694 - DNA, 15 bp, Homo sapiens
gcaccctttccctcc

SEQ ID NO: 1003695 - DNA, 15 bp, Homo sapiens
caccctttccctcct

SEQ ID NO: 1003696 - DNA, 15 bp, Homo sapiens
accctttccctccta

SEQ ID NO: 1003697 - DNA, 15 bp, Homo sapiens
ccctttccctcctaa

SEQ ID NO: 1003698 - DNA, 15 bp, Homo sapiens
cctttccctcctaag

SEQ ID NO: 1003699 - DNA, 15 bp, Homo sapiens
ctttccctcctaagt

SEQ ID NO: 1003700 - DNA, 15 bp, Homo sapiens
tttccctcctaagtc

SEQ ID NO: 1003701 - DNA, 15 bp, Homo sapiens
ttccctcctaagtcg

SEQ ID NO: 1003702 - DNA, 15 bp, Homo sapiens
tccctcctaagtcgg

SEQ ID NO: 1003703 - DNA, 15 bp, Homo sapiens
ccctcctaagtcggg

SEQ ID NO: 1003704 - DNA, 15 bp, Homo sapiens
cctcctaagtcgggg

SEQ ID NO: 1003705 - DNA, 15 bp, Homo sapiens
ctcctaagtcggggg

SEQ ID NO: 1003706 - DNA, 15 bp, Homo sapiens
tcctaagtcgggggg

SEQ ID NO: 1003707 - DNA, 15 bp, Homo sapiens
cctaagtcggggggt

SEQ ID NO: 1003708 - DNA, 15 bp, Homo sapiens
ctaagtcggggggtg

SEQ ID NO: 1003709 - DNA, 15 bp, Homo sapiens
taagtcggggggtgg

SEQ ID NO: 1003710 - DNA, 15 bp, Homo sapiens
aagtcggggggtggg

SEQ ID NO: 1003711 - DNA, 15 bp, Homo sapiens
agtcggggggtgggg

SEQ ID NO: 1003712 - DNA, 15 bp, Homo sapiens
gtcggggggtggggc

SEQ ID NO: 1003713 - DNA, 15 bp, Homo sapiens
tcggggggtggggcc

SEQ ID NO: 1003714 - DNA, 15 bp, Homo sapiens
cggggggtggggcct

SEQ ID NO: 1003715 - DNA, 15 bp, Homo sapiens
ggggggtggggcctt

SEQ ID NO: 1003716 - DNA, 15 bp, Homo sapiens
gggggtggggccttg

SEQ ID NO: 1003717 - DNA, 15 bp, Homo sapiens
ggggtggggccttgt

SEQ ID NO: 1003718 - DNA, 15 bp, Homo sapiens
gggtggggccttgtc

SEQ ID NO: 1003719 - DNA, 15 bp, Homo sapiens
ggtggggccttgtcc

SEQ ID NO: 1003720 - DNA, 15 bp, Homo sapiens
gtggggccttgtccc

SEQ ID NO: 1003721 - DNA, 15 bp, Homo sapiens
tggggccttgtccct

SEQ ID NO: 1003722 - DNA, 15 bp, Homo sapiens
ggggccttgtccctg

SEQ ID NO: 1003723 - DNA, 15 bp, Homo sapiens
gggccttgtccctga

SEQ ID NO: 1003724 - DNA, 15 bp, Homo sapiens
ggccttgtccctgac

SEQ ID NO: 1003725 - DNA, 15 bp, Homo sapiens
gccttgtccctgacc

SEQ ID NO: 1003726 - DNA, 15 bp, Homo sapiens
ccttgtccctgacca

SEQ ID NO: 1003727 - DNA, 15 bp, Homo sapiens
cttgtccctgaccag

SEQ ID NO: 1003728 - DNA, 15 bp, Homo sapiens
ttgtccctgaccagc

SEQ ID NO: 1003729 - DNA, 15 bp, Homo sapiens
tgtccctgaccagcc

SEQ ID NO: 1003730 - DNA, 15 bp, Homo sapiens
gtccctgaccagcct

SEQ ID NO: 1003731 - DNA, 15 bp, Homo sapiens
tccctgaccagcctc

SEQ ID NO: 1003732 - DNA, 15 bp, Homo sapiens
ccctgaccagcctcc

SEQ ID NO: 1003733 - DNA, 15 bp, Homo sapiens
cctgaccagcctccg

SEQ ID NO: 1003734 - DNA, 15 bp, Homo sapiens
ctgaccagcctccga

SEQ ID NO: 1003735 - DNA, 15 bp, Homo sapiens
tgaccagcctccgac

SEQ ID NO: 1003736 - DNA, 15 bp, Homo sapiens
gaccagcctccgacc

SEQ ID NO: 1003737 - DNA, 15 bp, Homo sapiens
accagcctccgaccc

SEQ ID NO: 1003738 - DNA, 15 bp, Homo sapiens
ccagcctccgaccct

SEQ ID NO: 1003739 - DNA, 15 bp, Homo sapiens
cagcctccgaccctc

SEQ ID NO: 1003740 - DNA, 15 bp, Homo sapiens
agcctccgaccctcc

SEQ ID NO: 1003741 - DNA, 15 bp, Homo sapiens
gcctccgaccctcca

SEQ ID NO: 1003742 - DNA, 15 bp, Homo sapiens
cctccgaccctccat

SEQ ID NO: 1003743 - DNA, 15 bp, Homo sapiens
ctccgaccctccatc

SEQ ID NO: 1003744 - DNA, 15 bp, Homo sapiens
tccgaccctccatcc

SEQ ID NO: 1003745 - DNA, 15 bp, Homo sapiens
ccgaccctccatccc

SEQ ID NO: 1003746 - DNA, 15 bp, Homo sapiens
cgaccctccatcccc

SEQ ID NO: 1003747 - DNA, 15 bp, Homo sapiens
gaccctccatcccct

SEQ ID NO: 1003748 - DNA, 15 bp, Homo sapiens
accctccatcccctt

SEQ ID NO: 1003749 - DNA, 15 bp, Homo sapiens
ccctccatccccttt

SEQ ID NO: 1003750 - DNA, 15 bp, Homo sapiens
cctccatccccttta

SEQ ID NO: 1003751 - DNA, 15 bp, Homo sapiens
ctccatcccctttat

SEQ ID NO: 1003752 - DNA, 15 bp, Homo sapiens
tccatcccctttatc

SEQ ID NO: 1003753 - DNA, 15 bp, Homo sapiens
ccatcccctttatcc

SEQ ID NO: 1003754 - DNA, 15 bp, Homo sapiens
catcccctttatccc

SEQ ID NO: 1003755 - DNA, 15 bp, Homo sapiens
atcccctttatccca

SEQ ID NO: 1003756 - DNA, 15 bp, Homo sapiens
tcccctttatcccag

SEQ ID NO: 1003757 - DNA, 15 bp, Homo sapiens
cccctttatcccagc

SEQ ID NO: 1003758 - DNA, 15 bp, Homo sapiens
ccctttatcccagcc

SEQ ID NO: 1003759 - DNA, 15 bp, Homo sapiens
cctttatcccagccc

SEQ ID NO: 1003760 - DNA, 15 bp, Homo sapiens
ctttatcccagccct

SEQ ID NO: 1003761 - DNA, 15 bp, Homo sapiens
tttatcccagccctt

SEQ ID NO: 1003762 - DNA, 15 bp, Homo sapiens
ttatcccagcccttc

SEQ ID NO: 1003763 - DNA, 15 bp, Homo sapiens
tatcccagcccttcc

SEQ ID NO: 1003764 - DNA, 15 bp, Homo sapiens
atcccagcccttccg

SEQ ID NO: 1003765 - DNA, 15 bp, Homo sapiens
tcccagcccttccgc

SEQ ID NO: 1003766 - DNA, 15 bp, Homo sapiens
cccagcccttccgct

SEQ ID NO: 1003767 - DNA, 15 bp, Homo sapiens
ccagcccttccgctt

SEQ ID NO: 1003768 - DNA, 15 bp, Homo sapiens
cagcccttccgcttg

SEQ ID NO: 1003769 - DNA, 15 bp, Homo sapiens
agcccttccgcttgg

SEQ ID NO: 1003770 - DNA, 15 bp, Homo sapiens
gcccttccgcttgga

SEQ ID NO: 1003771 - DNA, 15 bp, Homo sapiens
cccttccgcttggaa

SEQ ID NO: 1003772 - DNA, 15 bp, Homo sapiens
ccttccgcttggaaa

SEQ ID NO: 1003773 - DNA, 15 bp, Homo sapiens
cttccgcttggaaat

SEQ ID NO: 1003774 - DNA, 15 bp, Homo sapiens
ttccgcttggaaatg

SEQ ID NO: 1003775 - DNA, 15 bp, Homo sapiens
tccgcttggaaatgg

SEQ ID NO: 1003776 - DNA, 15 bp, Homo sapiens
ccgcttggaaatggg

SEQ ID NO: 1003777 - DNA, 15 bp, Homo sapiens
cgcttggaaatgggg

SEQ ID NO: 1003778 - DNA, 15 bp, Homo sapiens
gcttggaaatgggga

SEQ ID NO: 1003779 - DNA, 15 bp, Homo sapiens
cttggaaatggggat

SEQ ID NO: 1003780 - DNA, 15 bp, Homo sapiens
ttggaaatggggatg

SEQ ID NO: 1003781 - DNA, 15 bp, Homo sapiens
tggaaatggggatga

SEQ ID NO: 1003782 - DNA, 15 bp, Homo sapiens
ggaaatggggatgag

SEQ ID NO: 1003783 - DNA, 15 bp, Homo sapiens
gaaatggggatgagt

SEQ ID NO: 1003784 - DNA, 15 bp, Homo sapiens
aaatggggatgagtg

SEQ ID NO: 1003785 - DNA, 15 bp, Homo sapiens
aatggggatgagtga

SEQ ID NO: 1003786 - DNA, 15 bp, Homo sapiens
atggggatgagtgac

SEQ ID NO: 1003787 - DNA, 15 bp, Homo sapiens
tggggatgagtgacc

SEQ ID NO: 1003788 - DNA, 15 bp, Homo sapiens
ggggatgagtgacct

SEQ ID NO: 1003789 - DNA, 15 bp, Homo sapiens
gggatgagtgacctg

SEQ ID NO: 1003790 - DNA, 15 bp, Homo sapiens
ggatgagtgacctgg

SEQ ID NO: 1003791 - DNA, 15 bp, Homo sapiens
gatgagtgacctggg

SEQ ID NO: 1003792 - DNA, 15 bp, Homo sapiens
atgagtgacctgggg

SEQ ID NO: 1003793 - DNA, 15 bp, Homo sapiens
tgagtgacctggggg

SEQ ID NO: 1003794 - DNA, 15 bp, Homo sapiens
gagtgacctgggggc

SEQ ID NO: 1003795 - DNA, 15 bp, Homo sapiens
agtgacctgggggcg

SEQ ID NO: 1003796 - DNA, 15 bp, Homo sapiens
gtgacctgggggcgc

SEQ ID NO: 1003797 - DNA, 15 bp, Homo sapiens
tgacctgggggcgcc

SEQ ID NO: 1003798 - DNA, 15 bp, Homo sapiens
gacctgggggcgcct

SEQ ID NO: 1003799 - DNA, 15 bp, Homo sapiens
acctgggggcgcctt

SEQ ID NO: 1003800 - DNA, 15 bp, Homo sapiens
cctgggggcgccttt

SEQ ID NO: 1003801 - DNA, 15 bp, Homo sapiens
ctgggggcgccttta

SEQ ID NO: 1003802 - DNA, 15 bp, Homo sapiens
tgggggcgcctttag

SEQ ID NO: 1003803 - DNA, 15 bp, Homo sapiens
gggggcgcctttagg

SEQ ID NO: 1003804 - DNA, 15 bp, Homo sapiens
ggggcgcctttaggg

SEQ ID NO: 1003805 - DNA, 15 bp, Homo sapiens
gggcgcctttagggg

SEQ ID NO: 1003806 - DNA, 15 bp, Homo sapiens
ggcgcctttaggggc

SEQ ID NO: 1003807 - DNA, 15 bp, Homo sapiens
gcgcctttaggggcg

SEQ ID NO: 1003808 - DNA, 15 bp, Homo sapiens
cgcctttaggggcgc

SEQ ID NO: 1003809 - DNA, 15 bp, Homo sapiens
gcctttaggggcgcg

SEQ ID NO: 1003810 - DNA, 15 bp, Homo sapiens
cctttaggggcgcgc

SEQ ID NO: 1003811 - DNA, 15 bp, Homo sapiens
ctttaggggcgcgcc

SEQ ID NO: 1003812 - DNA, 15 bp, Homo sapiens
tttaggggcgcgcca

SEQ ID NO: 1003813 - DNA, 15 bp, Homo sapiens
ttaggggcgcgccat

SEQ ID NO: 1003814 - DNA, 15 bp, Homo sapiens
taggggcgcgccatc

SEQ ID NO: 1003815 - DNA, 15 bp, Homo sapiens
aggggcgcgccatct

SEQ ID NO: 1003816 - DNA, 15 bp, Homo sapiens
ggggcgcgccatctg

SEQ ID NO: 1003817 - DNA, 15 bp, Homo sapiens
gggcgcgccatctgg

SEQ ID NO: 1003818 - DNA, 15 bp, Homo sapiens
ggcgcgccatctgga

SEQ ID NO: 1003819 - DNA, 15 bp, Homo sapiens
gcgcgccatctggat

SEQ ID NO: 1003820 - DNA, 15 bp, Homo sapiens
cgcgccatctggatt

SEQ ID NO: 1003821 - DNA, 15 bp, Homo sapiens
gcgccatctggattt

SEQ ID NO: 1003822 - DNA, 15 bp, Homo sapiens
cgccatctggattta

SEQ ID NO: 1003823 - DNA, 15 bp, Homo sapiens
gccatctggatttaa

SEQ ID NO: 1003824 - DNA, 15 bp, Homo sapiens
ccatctggatttaat

SEQ ID NO: 1003825 - DNA, 15 bp, Homo sapiens
catctggatttaata

SEQ ID NO: 1003826 - DNA, 15 bp, Homo sapiens
atctggatttaataa

SEQ ID NO: 1003827 - DNA, 15 bp, Homo sapiens
tctggatttaataat

SEQ ID NO: 1003828 - DNA, 15 bp, Homo sapiens
ctggatttaataatt

SEQ ID NO: 1003829 - DNA, 15 bp, Homo sapiens
tggatttaataatta

SEQ ID NO: 1003830 - DNA, 15 bp, Homo sapiens
ggatttaataattac

SEQ ID NO: 1003831 - DNA, 15 bp, Homo sapiens
gatttaataattacc

SEQ ID NO: 1003832 - DNA, 15 bp, Homo sapiens
atttaataattaccc

SEQ ID NO: 1003833 - DNA, 15 bp, Homo sapiens
tttaataattacccc

SEQ ID NO: 1003834 - DNA, 15 bp, Homo sapiens
ttaataattaccccc

SEQ ID NO: 1003835 - DNA, 15 bp, Homo sapiens
taataattaccccct

SEQ ID NO: 1003836 - DNA, 15 bp, Homo sapiens
aataattaccccctt

SEQ ID NO: 1003837 - DNA, 15 bp, Homo sapiens
ataattaccccctta

SEQ ID NO: 1003838 - DNA, 15 bp, Homo sapiens
taattacccccttac

SEQ ID NO: 1003839 - DNA, 15 bp, Homo sapiens
aattacccccttact

SEQ ID NO: 1003840 - DNA, 15 bp, Homo sapiens
attacccccttactt

SEQ ID NO: 1003841 - DNA, 15 bp, Homo sapiens
ttacccccttacttt

SEQ ID NO: 1003842 - DNA, 15 bp, Homo sapiens
tacccccttactttt

SEQ ID NO: 1003843 - DNA, 15 bp, Homo sapiens
acccccttacttttg

SEQ ID NO: 1003844 - DNA, 15 bp, Homo sapiens
cccccttacttttgt

SEQ ID NO: 1003845 - DNA, 15 bp, Homo sapiens
ccccttacttttgtt

SEQ ID NO: 1003846 - DNA, 15 bp, Homo sapiens
cccttacttttgttt

SEQ ID NO: 1003847 - DNA, 15 bp, Homo sapiens
ccttacttttgtttt

SEQ ID NO: 1003848 - DNA, 15 bp, Homo sapiens
cttacttttgttttt

SEQ ID NO: 1003849 - DNA, 15 bp, Homo sapiens
ttacttttgtttttg

SEQ ID NO: 1003850 - DNA, 15 bp, Homo sapiens
tacttttgtttttga

SEQ ID NO: 1003851 - DNA, 15 bp, Homo sapiens
acttttgtttttgag

SEQ ID NO: 1003852 - DNA, 15 bp, Homo sapiens
cttttgtttttgagc

SEQ ID NO: 1003853 - DNA, 15 bp, Homo sapiens
ttttgtttttgagca

SEQ ID NO: 1003854 - DNA, 15 bp, Homo sapiens
tttgtttttgagcag

SEQ ID NO: 1003855 - DNA, 15 bp, Homo sapiens
ttgtttttgagcaga

SEQ ID NO: 1003856 - DNA, 15 bp, Homo sapiens
tgtttttgagcagag

SEQ ID NO: 1003857 - DNA, 15 bp, Homo sapiens
gtttttgagcagagg

SEQ ID NO: 1003858 - DNA, 15 bp, Homo sapiens
tttttgagcagaggt

SEQ ID NO: 1003859 - DNA, 15 bp, Homo sapiens
ttttgagcagaggtg

SEQ ID NO: 1003860 - DNA, 15 bp, Homo sapiens
tttgagcagaggtgg

SEQ ID NO: 1003861 - DNA, 15 bp, Homo sapiens
ttgagcagaggtggg

SEQ ID NO: 1003862 - DNA, 15 bp, Homo sapiens
tgagcagaggtgggt

SEQ ID NO: 1003863 - DNA, 15 bp, Homo sapiens
gagcagaggtgggta

SEQ ID NO: 1003864 - DNA, 15 bp, Homo sapiens
agcagaggtgggtaa

SEQ ID NO: 1003865 - DNA, 15 bp, Homo sapiens
gcagaggtgggtaac

SEQ ID NO: 1003866 - DNA, 15 bp, Homo sapiens
cagaggtgggtaacg

SEQ ID NO: 1003867 - DNA, 15 bp, Homo sapiens
cacatactgattaga

SEQ ID NO: 1003868 - DNA, 15 bp, Homo sapiens
acatactgattagac

SEQ ID NO: 1003869 - DNA, 15 bp, Homo sapiens
catactgattagaca

SEQ ID NO: 1003870 - DNA, 15 bp, Homo sapiens
atactgattagacaa

SEQ ID NO: 1003871 - DNA, 15 bp, Homo sapiens
tactgattagacaaa

SEQ ID NO: 1003872 - DNA, 15 bp, Homo sapiens
actgattagacaaat

SEQ ID NO: 1003873 - DNA, 15 bp, Homo sapiens
ctgattagacaaata

SEQ ID NO: 1003874 - DNA, 15 bp, Homo sapiens
tgattagacaaatag

SEQ ID NO: 1003875 - DNA, 15 bp, Homo sapiens
gattagacaaataga

SEQ ID NO: 1003876 - DNA, 15 bp, Homo sapiens
attagacaaatagat

SEQ ID NO: 1003877 - DNA, 15 bp, Homo sapiens
ttagacaaatagatt

SEQ ID NO: 1003878 - DNA, 15 bp, Homo sapiens
tagacaaatagattt

SEQ ID NO: 1003879 - DNA, 15 bp, Homo sapiens
agacaaatagatttg

SEQ ID NO: 1003880 - DNA, 15 bp, Homo sapiens
gacaaatagatttgc

SEQ ID NO: 1003881 - DNA, 15 bp, Homo sapiens
acaaatagatttgca

SEQ ID NO: 1003882 - DNA, 15 bp, Homo sapiens
caaatagatttgcaa

SEQ ID NO: 1003883 - DNA, 15 bp, Homo sapiens
aaatagatttgcaaa

SEQ ID NO: 1003884 - DNA, 15 bp, Homo sapiens
aatagatttgcaaaa

SEQ ID NO: 1003885 - DNA, 15 bp, Homo sapiens
atagatttgcaaaac

SEQ ID NO: 1003886 - DNA, 15 bp, Homo sapiens
tagatttgcaaaact

SEQ ID NO: 1003887 - DNA, 15 bp, Homo sapiens
agatttgcaaaactg

SEQ ID NO: 1003888 - DNA, 15 bp, Homo sapiens
gatttgcaaaactga

SEQ ID NO: 1003889 - DNA, 15 bp, Homo sapiens
atttgcaaaactgaa

SEQ ID NO: 1003890 - DNA, 15 bp, Homo sapiens
tttgcaaaactgaag

SEQ ID NO: 1003891 - DNA, 15 bp, Homo sapiens
ttgcaaaactgaagc

SEQ ID NO: 1003892 - DNA, 15 bp, Homo sapiens
tgcaaaactgaagct

SEQ ID NO: 1003893 - DNA, 15 bp, Homo sapiens
gcaaaactgaagctt

SEQ ID NO: 1003894 - DNA, 15 bp, Homo sapiens
caaaactgaagcttt

SEQ ID NO: 1003895 - DNA, 15 bp, Homo sapiens
aaaactgaagctttt

SEQ ID NO: 1003896 - DNA, 15 bp, Homo sapiens
aaactgaagcttttt

SEQ ID NO: 1003897 - DNA, 15 bp, Homo sapiens
aactgaagctttttg

SEQ ID NO: 1003898 - DNA, 15 bp, Homo sapiens
actgaagctttttgg

SEQ ID NO: 1003899 - DNA, 15 bp, Homo sapiens
ctgaagctttttgga

SEQ ID NO: 1003900 - DNA, 15 bp, Homo sapiens
tgaagctttttggat

SEQ ID NO: 1003901 - DNA, 15 bp, Homo sapiens
gaagctttttggatt

SEQ ID NO: 1003902 - DNA, 15 bp, Homo sapiens
aagctttttggattt

SEQ ID NO: 1003903 - DNA, 15 bp, Homo sapiens
agctttttggattta

SEQ ID NO: 1003904 - DNA, 15 bp, Homo sapiens
gctttttggatttaa

SEQ ID NO: 1003905 - DNA, 15 bp, Homo sapiens
ctttttggatttaaa

SEQ ID NO: 1003906 - DNA, 15 bp, Homo sapiens
tttttggatttaaaa

SEQ ID NO: 1003907 - DNA, 15 bp, Homo sapiens
ttttggatttaaaaa

SEQ ID NO: 1003908 - DNA, 15 bp, Homo sapiens
tttggatttaaaaaa

SEQ ID NO: 1003909 - DNA, 15 bp, Homo sapiens
ttggatttaaaaaat

SEQ ID NO: 1003910 - DNA, 15 bp, Homo sapiens
tggatttaaaaaata

SEQ ID NO: 1003911 - DNA, 15 bp, Homo sapiens
ggatttaaaaaatat

SEQ ID NO: 1003912 - DNA, 15 bp, Homo sapiens
gatttaaaaaatatc

SEQ ID NO: 1003913 - DNA, 15 bp, Homo sapiens
atttaaaaaatatct

SEQ ID NO: 1003914 - DNA, 15 bp, Homo sapiens
tttaaaaaatatctc

SEQ ID NO: 1003915 - DNA, 15 bp, Homo sapiens
ttaaaaaatatctcc

SEQ ID NO: 1003916 - DNA, 15 bp, Homo sapiens
taaaaaatatctcct

SEQ ID NO: 1003917 - DNA, 15 bp, Homo sapiens
aaaaaatatctccta

SEQ ID NO: 1003918 - DNA, 15 bp, Homo sapiens
aaaaatatctcctag

SEQ ID NO: 1003919 - DNA, 15 bp, Homo sapiens
aaaatatctcctagc

SEQ ID NO: 1003920 - DNA, 15 bp, Homo sapiens
aaatatctcctagcc

SEQ ID NO: 1003921 - DNA, 15 bp, Homo sapiens
aatatctcctagcct

SEQ ID NO: 1003922 - DNA, 15 bp, Homo sapiens
atatctcctagcctc

SEQ ID NO: 1003923 - DNA, 15 bp, Homo sapiens
tatctcctagcctca

SEQ ID NO: 1003924 - DNA, 15 bp, Homo sapiens
atctcctagcctcat

SEQ ID NO: 1003925 - DNA, 15 bp, Homo sapiens
tctcctagcctcatt

SEQ ID NO: 1003926 - DNA, 15 bp, Homo sapiens
ctcctagcctcattc

SEQ ID NO: 1003927 - DNA, 15 bp, Homo sapiens
tcctagcctcattct

SEQ ID NO: 1003928 - DNA, 15 bp, Homo sapiens
cctagcctcattctt

SEQ ID NO: 1003929 - DNA, 15 bp, Homo sapiens
ctagcctcattcttc

SEQ ID NO: 1003930 - DNA, 15 bp, Homo sapiens
tagcctcattcttca

SEQ ID NO: 1003931 - DNA, 15 bp, Homo sapiens
agcctcattcttcaa

SEQ ID NO: 1003932 - DNA, 15 bp, Homo sapiens
gcctcattcttcaag

SEQ ID NO: 1003933 - DNA, 15 bp, Homo sapiens
cctcattcttcaagc

SEQ ID NO: 1003934 - DNA, 15 bp, Homo sapiens
ctcattcttcaagcc

SEQ ID NO: 1003935 - DNA, 15 bp, Homo sapiens
tcattcttcaagcct

SEQ ID NO: 1003936 - DNA, 15 bp, Homo sapiens
cattcttcaagcctg

SEQ ID NO: 1003937 - DNA, 15 bp, Homo sapiens
attcttcaagcctgg

SEQ ID NO: 1003938 - DNA, 15 bp, Homo sapiens
ttcttcaagcctggt

SEQ ID NO: 1003939 - DNA, 15 bp, Homo sapiens
tcttcaagcctggtg

SEQ ID NO: 1003940 - DNA, 15 bp, Homo sapiens
cttcaagcctggtgt

SEQ ID NO: 1003941 - DNA, 15 bp, Homo sapiens
ttcaagcctggtgtg

SEQ ID NO: 1003942 - DNA, 15 bp, Homo sapiens
tcaagcctggtgtgt

SEQ ID NO: 1003943 - DNA, 15 bp, Homo sapiens
caagcctggtgtgta

SEQ ID NO: 1003944 - DNA, 15 bp, Homo sapiens
aagcctggtgtgtaa

SEQ ID NO: 1003945 - DNA, 15 bp, Homo sapiens
agcctggtgtgtaat

SEQ ID NO: 1003946 - DNA, 15 bp, Homo sapiens
gcctggtgtgtaatt

SEQ ID NO: 1003947 - DNA, 15 bp, Homo sapiens
cctggtgtgtaattt

SEQ ID NO: 1003948 - DNA, 15 bp, Homo sapiens
ctggtgtgtaatttt

SEQ ID NO: 1003949 - DNA, 15 bp, Homo sapiens
tggtgtgtaattttt

SEQ ID NO: 1003950 - DNA, 15 bp, Homo sapiens
ggtgtgtaattttta

SEQ ID NO: 1003951 - DNA, 15 bp, Homo sapiens
gtgtgtaatttttat

SEQ ID NO: 1003952 - DNA, 15 bp, Homo sapiens
tgtgtaatttttata

SEQ ID NO: 1003953 - DNA, 15 bp, Homo sapiens
gtgtaatttttataa

SEQ ID NO: 1003954 - DNA, 15 bp, Homo sapiens
tgtaatttttataag

SEQ ID NO: 1003955 - DNA, 15 bp, Homo sapiens
gtaatttttataagg

SEQ ID NO: 1003956 - DNA, 15 bp, Homo sapiens
taatttttataaggc

SEQ ID NO: 1003957 - DNA, 15 bp, Homo sapiens
aatttttataaggcc

SEQ ID NO: 1003958 - DNA, 15 bp, Homo sapiens
atttttataaggcct

SEQ ID NO: 1003959 - DNA, 15 bp, Homo sapiens
tttttataaggcctt

SEQ ID NO: 1003960 - DNA, 15 bp, Homo sapiens
ttttataaggcctta

SEQ ID NO: 1003961 - DNA, 15 bp, Homo sapiens
tttataaggccttat

SEQ ID NO: 1003962 - DNA, 15 bp, Homo sapiens
ttataaggccttata

SEQ ID NO: 1003963 - DNA, 15 bp, Homo sapiens
tataaggccttatag

SEQ ID NO: 1003964 - DNA, 15 bp, Homo sapiens
ataaggccttatagt

SEQ ID NO: 1003965 - DNA, 15 bp, Homo sapiens
taaggccttatagta

SEQ ID NO: 1003966 - DNA, 15 bp, Homo sapiens
aaggccttatagtag

SEQ ID NO: 1003967 - DNA, 15 bp, Homo sapiens
aggccttatagtagt

SEQ ID NO: 1003968 - DNA, 15 bp, Homo sapiens
ggccttatagtagtt

SEQ ID NO: 1003969 - DNA, 15 bp, Homo sapiens
gccttatagtagttg

SEQ ID NO: 1003970 - DNA, 15 bp, Homo sapiens
ccttatagtagttga

SEQ ID NO: 1003971 - DNA, 15 bp, Homo sapiens
cttatagtagttgaa

SEQ ID NO: 1003972 - DNA, 15 bp, Homo sapiens
ttatagtagttgaaa

SEQ ID NO: 1003973 - DNA, 15 bp, Homo sapiens
tatagtagttgaaaa

SEQ ID NO: 1003974 - DNA, 15 bp, Homo sapiens
atagtagttgaaaat

SEQ ID NO: 1003975 - DNA, 15 bp, Homo sapiens
tagtagttgaaaatg

SEQ ID NO: 1003976 - DNA, 15 bp, Homo sapiens
agtagttgaaaatga

SEQ ID NO: 1003977 - DNA, 15 bp, Homo sapiens
gtagttgaaaatgag

SEQ ID NO: 1003978 - DNA, 15 bp, Homo sapiens
tagttgaaaatgagt

SEQ ID NO: 1003979 - DNA, 15 bp, Homo sapiens
agttgaaaatgagta

SEQ ID NO: 1003980 - DNA, 15 bp, Homo sapiens
gttgaaaatgagtac

SEQ ID NO: 1003981 - DNA, 15 bp, Homo sapiens
ttgaaaatgagtact

SEQ ID NO: 1003982 - DNA, 15 bp, Homo sapiens
tgaaaatgagtactc

SEQ ID NO: 1003983 - DNA, 15 bp, Homo sapiens
gaaaatgagtactct

SEQ ID NO: 1003984 - DNA, 15 bp, Homo sapiens
aaaatgagtactctt

SEQ ID NO: 1003985 - DNA, 15 bp, Homo sapiens
aaatgagtactcttt

SEQ ID NO: 1003986 - DNA, 15 bp, Homo sapiens
aatgagtactctttt

SEQ ID NO: 1003987 - DNA, 15 bp, Homo sapiens
atgagtactctttta

SEQ ID NO: 1003988 - DNA, 15 bp, Homo sapiens
tgagtactcttttat

SEQ ID NO: 1003989 - DNA, 15 bp, Homo sapiens
gagtactcttttatg

SEQ ID NO: 1003990 - DNA, 15 bp, Homo sapiens
agtactcttttatgg

SEQ ID NO: 1003991 - DNA, 15 bp, Homo sapiens
gtactcttttatggt

SEQ ID NO: 1003992 - DNA, 15 bp, Homo sapiens
tactcttttatggtg

SEQ ID NO: 1003993 - DNA, 15 bp, Homo sapiens
actcttttatggtga

SEQ ID NO: 1003994 - DNA, 15 bp, Homo sapiens
ctcttttatggtgac

SEQ ID NO: 1003995 - DNA, 15 bp, Homo sapiens
tcttttatggtgacg

SEQ ID NO: 1003996 - DNA, 15 bp, Homo sapiens
cttttatggtgacga

SEQ ID NO: 1003997 - DNA, 15 bp, Homo sapiens
ttttatggtgacgaa

SEQ ID NO: 1003998 - DNA, 15 bp, Homo sapiens
tttatggtgacgaat

SEQ ID NO: 1003999 - DNA, 15 bp, Homo sapiens
ttatggtgacgaatt

SEQ ID NO: 1004000 - DNA, 15 bp, Homo sapiens
tatggtgacgaattc

SEQ ID NO: 1004001 - DNA, 15 bp, Homo sapiens
atggtgacgaattct

SEQ ID NO: 1004002 - DNA, 15 bp, Homo sapiens
tggtgacgaattctt

SEQ ID NO: 1004003 - DNA, 15 bp, Homo sapiens
ggtgacgaattcttt

SEQ ID NO: 1004004 - DNA, 15 bp, Homo sapiens
gtgacgaattcttta

SEQ ID NO: 1004005 - DNA, 15 bp, Homo sapiens
tgacgaattctttat

SEQ ID NO: 1004006 - DNA, 15 bp, Homo sapiens
gacgaattctttatg

SEQ ID NO: 1004007 - DNA, 15 bp, Homo sapiens
acgaattctttatgg

SEQ ID NO: 1004008 - DNA, 15 bp, Homo sapiens
cgaattctttatggt

SEQ ID NO: 1004009 - DNA, 15 bp, Homo sapiens
gaattctttatggtg

SEQ ID NO: 1004010 - DNA, 15 bp, Homo sapiens
aattctttatggtga

SEQ ID NO: 1004011 - DNA, 15 bp, Homo sapiens
attctttatggtgag

SEQ ID NO: 1004012 - DNA, 15 bp, Homo sapiens
ttctttatggtgagt

SEQ ID NO: 1004013 - DNA, 15 bp, Homo sapiens
tctttatggtgagtg

SEQ ID NO: 1004014 - DNA, 15 bp, Homo sapiens
ctttatggtgagtga

SEQ ID NO: 1004015 - DNA, 15 bp, Homo sapiens
tttatggtgagtgag

SEQ ID NO: 1004016 - DNA, 15 bp, Homo sapiens
ttatggtgagtgaga

SEQ ID NO: 1004017 - DNA, 15 bp, Homo sapiens
tatggtgagtgagaa

SEQ ID NO: 1004018 - DNA, 15 bp, Homo sapiens
atggtgagtgagaaa

SEQ ID NO: 1004019 - DNA, 15 bp, Homo sapiens
tggtgagtgagaaat

SEQ ID NO: 1004020 - DNA, 15 bp, Homo sapiens
ggtgagtgagaaata

SEQ ID NO: 1004021 - DNA, 15 bp, Homo sapiens
gtgagtgagaaataa

SEQ ID NO: 1004022 - DNA, 15 bp, Homo sapiens
tgagtgagaaataat

SEQ ID NO: 1004023 - DNA, 15 bp, Homo sapiens
gagtgagaaataatg

SEQ ID NO: 1004024 - DNA, 15 bp, Homo sapiens
agtgagaaataatgc

SEQ ID NO: 1004025 - DNA, 15 bp, Homo sapiens
gtgagaaataatgct

SEQ ID NO: 1004026 - DNA, 15 bp, Homo sapiens
tgagaaataatgctt

SEQ ID NO: 1004027 - DNA, 15 bp, Homo sapiens
gagaaataatgctta

SEQ ID NO: 1004028 - DNA, 15 bp, Homo sapiens
agaaataatgcttat

SEQ ID NO: 1004029 - DNA, 15 bp, Homo sapiens
gaaataatgcttatt

SEQ ID NO: 1004030 - DNA, 15 bp, Homo sapiens
aaataatgcttattc

SEQ ID NO: 1004031 - DNA, 15 bp, Homo sapiens
aataatgcttattct

SEQ ID NO: 1004032 - DNA, 15 bp, Homo sapiens
ataatgcttattctt

SEQ ID NO: 1004033 - DNA, 15 bp, Homo sapiens
taatgcttattcttc

SEQ ID NO: 1004034 - DNA, 15 bp, Homo sapiens
aatgcttattcttcc

SEQ ID NO: 1004035 - DNA, 15 bp, Homo sapiens
atgcttattcttcca

SEQ ID NO: 1004036 - DNA, 15 bp, Homo sapiens
tgcttattcttccaa

SEQ ID NO: 1004037 - DNA, 15 bp, Homo sapiens
gcttattcttccaat

SEQ ID NO: 1004038 - DNA, 15 bp, Homo sapiens
cttattcttccaatt

SEQ ID NO: 1004039 - DNA, 15 bp, Homo sapiens
ttattcttccaattt

SEQ ID NO: 1004040 - DNA, 15 bp, Homo sapiens
tattcttccaatttt

SEQ ID NO: 1004041 - DNA, 15 bp, Homo sapiens
attcttccaatttta

SEQ ID NO: 1004042 - DNA, 15 bp, Homo sapiens
ttcttccaattttag

SEQ ID NO: 1004043 - DNA, 15 bp, Homo sapiens
tcttccaattttagt

SEQ ID NO: 1004044 - DNA, 15 bp, Homo sapiens
cttccaattttagta

SEQ ID NO: 1004045 - DNA, 15 bp, Homo sapiens
ttccaattttagtat

SEQ ID NO: 1004046 - DNA, 15 bp, Homo sapiens
tccaattttagtata

SEQ ID NO: 1004047 - DNA, 15 bp, Homo sapiens
ccaattttagtatat

SEQ ID NO: 1004048 - DNA, 15 bp, Homo sapiens
caattttagtatatg

SEQ ID NO: 1004049 - DNA, 15 bp, Homo sapiens
aattttagtatatgt

SEQ ID NO: 1004050 - DNA, 15 bp, Homo sapiens
attttagtatatgtg

SEQ ID NO: 1004051 - DNA, 15 bp, Homo sapiens
ttttagtatatgtgg

SEQ ID NO: 1004052 - DNA, 15 bp, Homo sapiens
tttagtatatgtggt

SEQ ID NO: 1004053 - DNA, 15 bp, Homo sapiens
ttagtatatgtggtg

SEQ ID NO: 1004054 - DNA, 15 bp, Homo sapiens
tagtatatgtggtgc

SEQ ID NO: 1004055 - DNA, 15 bp, Homo sapiens
agtatatgtggtgct

SEQ ID NO: 1004056 - DNA, 15 bp, Homo sapiens
gtatatgtggtgctg

SEQ ID NO: 1004057 - DNA, 15 bp, Homo sapiens
tatatgtggtgctga

SEQ ID NO: 1004058 - DNA, 15 bp, Homo sapiens
atatgtggtgctgaa

SEQ ID NO: 1004059 - DNA, 15 bp, Homo sapiens
tatgtggtgctgaat

SEQ ID NO: 1004060 - DNA, 15 bp, Homo sapiens
atgtggtgctgaatc

SEQ ID NO: 1004061 - DNA, 15 bp, Homo sapiens
tgtggtgctgaatcg

SEQ ID NO: 1004062 - DNA, 15 bp, Homo sapiens
gtggtgctgaatcga

SEQ ID NO: 1004063 - DNA, 15 bp, Homo sapiens
tggtgctgaatcgag

SEQ ID NO: 1004064 - DNA, 15 bp, Homo sapiens
ggtgctgaatcgagc

SEQ ID NO: 1004065 - DNA, 15 bp, Homo sapiens
gtgctgaatcgagca

SEQ ID NO: 1004066 - DNA, 15 bp, Homo sapiens
tgctgaatcgagcac

SEQ ID NO: 1004067 - DNA, 15 bp, Homo sapiens
gctgaatcgagcaca

SEQ ID NO: 1004068 - DNA, 15 bp, Homo sapiens
ctgaatcgagcacaa

SEQ ID NO: 1004069 - DNA, 15 bp, Homo sapiens
tgaatcgagcacaat

SEQ ID NO: 1004070 - DNA, 15 bp, Homo sapiens
gaatcgagcacaata

SEQ ID NO: 1004071 - DNA, 15 bp, Homo sapiens
aatcgagcacaataa

SEQ ID NO: 1004072 - DNA, 15 bp, Homo sapiens
atcgagcacaataat

SEQ ID NO: 1004073 - DNA, 15 bp, Homo sapiens
tcgagcacaataatg

SEQ ID NO: 1004074 - DNA, 15 bp, Homo sapiens
cgagcacaataatgc

SEQ ID NO: 1004075 - DNA, 15 bp, Homo sapiens
gagcacaataatgct

SEQ ID NO: 1004076 - DNA, 15 bp, Homo sapiens
agcacaataatgctt

SEQ ID NO: 1004077 - DNA, 15 bp, Homo sapiens
gcacaataatgctta

SEQ ID NO: 1004078 - DNA, 15 bp, Homo sapiens
cacaataatgcttat

SEQ ID NO: 1004079 - DNA, 15 bp, Homo sapiens
acaataatgcttatt

SEQ ID NO: 1004080 - DNA, 15 bp, Homo sapiens
caataatgcttattc

SEQ ID NO: 1004081 - DNA, 15 bp, Homo sapiens
taatgcttattcttt

SEQ ID NO: 1004082 - DNA, 15 bp, Homo sapiens
aatgcttattctttg

SEQ ID NO: 1004083 - DNA, 15 bp, Homo sapiens
atgcttattctttgc

SEQ ID NO: 1004084 - DNA, 15 bp, Homo sapiens
tgcttattctttgct

SEQ ID NO: 1004085 - DNA, 15 bp, Homo sapiens
gcttattctttgctt

SEQ ID NO: 1004086 - DNA, 15 bp, Homo sapiens
cttattctttgcttc

SEQ ID NO: 1004087 - DNA, 15 bp, Homo sapiens
ttattctttgcttcg

SEQ ID NO: 1004088 - DNA, 15 bp, Homo sapiens
tattctttgcttcgg

SEQ ID NO: 1004089 - DNA, 15 bp, Homo sapiens
attctttgcttcgga

SEQ ID NO: 1004090 - DNA, 15 bp, Homo sapiens
ttctttgcttcggaa

SEQ ID NO: 1004091 - DNA, 15 bp, Homo sapiens
tctttgcttcggaat

SEQ ID NO: 1004092 - DNA, 15 bp, Homo sapiens
ctttgcttcggaatt

SEQ ID NO: 1004093 - DNA, 15 bp, Homo sapiens
tttgcttcggaattt

SEQ ID NO: 1004094 - DNA, 15 bp, Homo sapiens
ttgcttcggaatttt

SEQ ID NO: 1004095 - DNA, 15 bp, Homo sapiens
tgcttcggaattttt

SEQ ID NO: 1004096 - DNA, 15 bp, Homo sapiens
gcttcggaatttttt

SEQ ID NO: 1004097 - DNA, 15 bp, Homo sapiens
cttcggaatttttta

SEQ ID NO: 1004098 - DNA, 15 bp, Homo sapiens
ttcggaattttttaa

SEQ ID NO: 1004099 - DNA, 15 bp, Homo sapiens
tcggaattttttaat

SEQ ID NO: 1004100 - DNA, 15 bp, Homo sapiens
cggaattttttaatt

SEQ ID NO: 1004101 - DNA, 15 bp, Homo sapiens
ggaattttttaattt

SEQ ID NO: 1004102 - DNA, 15 bp, Homo sapiens
gaattttttaattta

SEQ ID NO: 1004103 - DNA, 15 bp, Homo sapiens
aattttttaatttat

SEQ ID NO: 1004104 - DNA, 15 bp, Homo sapiens
attttttaatttatt

SEQ ID NO: 1004105 - DNA, 15 bp, Homo sapiens
ttttttaatttatta

SEQ ID NO: 1004106 - DNA, 15 bp, Homo sapiens
tttttaatttattat

SEQ ID NO: 1004107 - DNA, 15 bp, Homo sapiens
ttttaatttattatt

SEQ ID NO: 1004108 - DNA, 15 bp, Homo sapiens
tttaatttattatta

SEQ ID NO: 1004109 - DNA, 15 bp, Homo sapiens
ttaatttattattat

SEQ ID NO: 1004110 - DNA, 15 bp, Homo sapiens
taatttattattatt

SEQ ID NO: 1004111 - DNA, 15 bp, Homo sapiens
aatttattattattg

SEQ ID NO: 1004112 - DNA, 15 bp, Homo sapiens
atttattattattgt

SEQ ID NO: 1004113 - DNA, 15 bp, Homo sapiens
tttattattattgtt

SEQ ID NO: 1004114 - DNA, 15 bp, Homo sapiens
ttattattattgtta

SEQ ID NO: 1004115 - DNA, 15 bp, Homo sapiens
tattattattgttat

SEQ ID NO: 1004116 - DNA, 15 bp, Homo sapiens
attattattgttatt

SEQ ID NO: 1004117 - DNA, 15 bp, Homo sapiens
ttattattgttattt

SEQ ID NO: 1004118 - DNA, 15 bp, Homo sapiens
tattattgttatttt

SEQ ID NO: 1004119 - DNA, 15 bp, Homo sapiens
attattgttatttta

SEQ ID NO: 1004120 - DNA, 15 bp, Homo sapiens
ttattgttattttaa

SEQ ID NO: 1004121 - DNA, 15 bp, Homo sapiens
tattgttattttaaa

SEQ ID NO: 1004122 - DNA, 15 bp, Homo sapiens
attgttattttaaat

SEQ ID NO: 1004123 - DNA, 15 bp, Homo sapiens
ttgttattttaaatt

SEQ ID NO: 1004124 - DNA, 15 bp, Homo sapiens
tgttattttaaattt

SEQ ID NO: 1004125 - DNA, 15 bp, Homo sapiens
gttattttaaatttt

SEQ ID NO: 1004126 - DNA, 15 bp, Homo sapiens
ttattttaaattttt

SEQ ID NO: 1004127 - DNA, 15 bp, Homo sapiens
tattttaaattttta

SEQ ID NO: 1004128 - DNA, 15 bp, Homo sapiens
attttaaatttttat

SEQ ID NO: 1004129 - DNA, 15 bp, Homo sapiens
ttttaaatttttatt

SEQ ID NO: 1004130 - DNA, 15 bp, Homo sapiens
tttaaatttttattt

SEQ ID NO: 1004131 - DNA, 15 bp, Homo sapiens
ttaaatttttattta

SEQ ID NO: 1004132 - DNA, 15 bp, Homo sapiens
taaatttttatttat

SEQ ID NO: 1004133 - DNA, 15 bp, Homo sapiens
aaatttttatttatt

SEQ ID NO: 1004134 - DNA, 15 bp, Homo sapiens
aatttttatttattt

SEQ ID NO: 1004135 - DNA, 15 bp, Homo sapiens
atttttatttattta

SEQ ID NO: 1004136 - DNA, 15 bp, Homo sapiens
tttttatttatttat

SEQ ID NO: 1004137 - DNA, 15 bp, Homo sapiens
ttttatttatttatt

SEQ ID NO: 1004138 - DNA, 15 bp, Homo sapiens
tttatttatttattt

SEQ ID NO: 1004139 - DNA, 15 bp, Homo sapiens
ttatttatttattta

SEQ ID NO: 1004140 - DNA, 15 bp, Homo sapiens
tatttatttatttat

SEQ ID NO: 1004141 - DNA, 15 bp, Homo sapiens
atttatttatttatt

SEQ ID NO: 1004142 - DNA, 15 bp, Homo sapiens
ttatttatttatttt

SEQ ID NO: 1004143 - DNA, 15 bp, Homo sapiens
tatttatttattttg

SEQ ID NO: 1004144 - DNA, 15 bp, Homo sapiens
atttatttattttga

SEQ ID NO: 1004145 - DNA, 15 bp, Homo sapiens
tttatttattttgag

SEQ ID NO: 1004146 - DNA, 15 bp, Homo sapiens
ttatttattttgaga

SEQ ID NO: 1004147 - DNA, 15 bp, Homo sapiens
tatttattttgagat

SEQ ID NO: 1004148 - DNA, 15 bp, Homo sapiens
atttattttgagatg

SEQ ID NO: 1004149 - DNA, 15 bp, Homo sapiens
tttattttgagatgg

SEQ ID NO: 1004150 - DNA, 15 bp, Homo sapiens
ttattttgagatgga

SEQ ID NO: 1004151 - DNA, 15 bp, Homo sapiens
tattttgagatggag

SEQ ID NO: 1004152 - DNA, 15 bp, Homo sapiens
attttgagatggagt

SEQ ID NO: 1004153 - DNA, 15 bp, Homo sapiens
tttgagatggagtct

SEQ ID NO: 1004154 - DNA, 15 bp, Homo sapiens
ttgagatggagtctc

SEQ ID NO: 1004155 - DNA, 15 bp, Homo sapiens
tgagatggagtctca

SEQ ID NO: 1004156 - DNA, 15 bp, Homo sapiens
gagatggagtctcac

SEQ ID NO: 1004157 - DNA, 15 bp, Homo sapiens
agatggagtctcact

SEQ ID NO: 1004158 - DNA, 15 bp, Homo sapiens
gatggagtctcactc

SEQ ID NO: 1004159 - DNA, 15 bp, Homo sapiens
atggagtctcactct

SEQ ID NO: 1004160 - DNA, 15 bp, Homo sapiens
tggagtctcactctg

SEQ ID NO: 1004161 - DNA, 15 bp, Homo sapiens
ggagtctcactctgt

SEQ ID NO: 1004162 - DNA, 15 bp, Homo sapiens
gagtctcactctgtc

SEQ ID NO: 1004163 - DNA, 15 bp, Homo sapiens
agtctcactctgtcg

SEQ ID NO: 1004164 - DNA, 15 bp, Homo sapiens
gtctcactctgtcgc

SEQ ID NO: 1004165 - DNA, 15 bp, Homo sapiens
tctcactctgtcgcc

SEQ ID NO: 1004166 - DNA, 15 bp, Homo sapiens
ctcactctgtcgccc

SEQ ID NO: 1004167 - DNA, 15 bp, Homo sapiens
tcgcccaggctggag

SEQ ID NO: 1004168 - DNA, 15 bp, Homo sapiens
cgcccaggctggagt

SEQ ID NO: 1004169 - DNA, 15 bp, Homo sapiens
gcccaggctggagtg

SEQ ID NO: 1004170 - DNA, 15 bp, Homo sapiens
ggagtgcagtggcgc

SEQ ID NO: 1004171 - DNA, 15 bp, Homo sapiens
gagtgcagtggcgcg

SEQ ID NO: 1004172 - DNA, 15 bp, Homo sapiens
agtgcagtggcgcga

SEQ ID NO: 1004173 - DNA, 15 bp, Homo sapiens
gtgcagtggcgcgat

SEQ ID NO: 1004174 - DNA, 15 bp, Homo sapiens
tgcagtggcgcgatc

SEQ ID NO: 1004175 - DNA, 15 bp, Homo sapiens
gcagtggcgcgatct

SEQ ID NO: 1004176 - DNA, 15 bp, Homo sapiens
cagtggcgcgatctc

SEQ ID NO: 1004177 - DNA, 15 bp, Homo sapiens
agtggcgcgatctca

SEQ ID NO: 1004178 - DNA, 15 bp, Homo sapiens
gtggcgcgatctcag

SEQ ID NO: 1004179 - DNA, 15 bp, Homo sapiens
tggcgcgatctcagc

SEQ ID NO: 1004180 - DNA, 15 bp, Homo sapiens
ggcgcgatctcagct

SEQ ID NO: 1004181 - DNA, 15 bp, Homo sapiens
gcgcgatctcagctc

SEQ ID NO: 1004182 - DNA, 15 bp, Homo sapiens
cgcgatctcagctca

SEQ ID NO: 1004183 - DNA, 15 bp, Homo sapiens
gcgatctcagctcac

SEQ ID NO: 1004184 - DNA, 15 bp, Homo sapiens
cgatctcagctcact

SEQ ID NO: 1004185 - DNA, 15 bp, Homo sapiens
gatctcagctcactg

SEQ ID NO: 1004186 - DNA, 15 bp, Homo sapiens
atctcagctcactgc

SEQ ID NO: 1004187 - DNA, 15 bp, Homo sapiens
tctcagctcactgca

SEQ ID NO: 1004188 - DNA, 15 bp, Homo sapiens
ctcagctcactgcaa

SEQ ID NO: 1004189 - DNA, 15 bp, Homo sapiens
tcagctcactgcaac

SEQ ID NO: 1004190 - DNA, 15 bp, Homo sapiens
cagctcactgcaacg

SEQ ID NO: 1004191 - DNA, 15 bp, Homo sapiens
agctcactgcaacgt

SEQ ID NO: 1004192 - DNA, 15 bp, Homo sapiens
gctcactgcaacgtc

SEQ ID NO: 1004193 - DNA, 15 bp, Homo sapiens
ctcactgcaacgtct

SEQ ID NO: 1004194 - DNA, 15 bp, Homo sapiens
tcactgcaacgtctg

SEQ ID NO: 1004195 - DNA, 15 bp, Homo sapiens
cactgcaacgtctgc

SEQ ID NO: 1004196 - DNA, 15 bp, Homo sapiens
actgcaacgtctgcc

SEQ ID NO: 1004197 - DNA, 15 bp, Homo sapiens
ctgcaacgtctgcct

SEQ ID NO: 1004198 - DNA, 15 bp, Homo sapiens
tgcaacgtctgcctc

SEQ ID NO: 1004199 - DNA, 15 bp, Homo sapiens
gcaacgtctgcctcc

SEQ ID NO: 1004200 - DNA, 15 bp, Homo sapiens
caacgtctgcctcct

SEQ ID NO: 1004201 - DNA, 15 bp, Homo sapiens
aacgtctgcctcctg

SEQ ID NO: 1004202 - DNA, 15 bp, Homo sapiens
acgtctgcctcctgg

SEQ ID NO: 1004203 - DNA, 15 bp, Homo sapiens
cgtctgcctcctggg

SEQ ID NO: 1004204 - DNA, 15 bp, Homo sapiens
gtctgcctcctgggt

SEQ ID NO: 1004205 - DNA, 15 bp, Homo sapiens
tcctgggttcaagcg

SEQ ID NO: 1004206 - DNA, 15 bp, Homo sapiens
cctgggttcaagcga

SEQ ID NO: 1004207 - DNA, 15 bp, Homo sapiens
ctgggttcaagcgat

SEQ ID NO: 1004208 - DNA, 15 bp, Homo sapiens
tgggttcaagcgatt

SEQ ID NO: 1004209 - DNA, 15 bp, Homo sapiens
gggttcaagcgattc

SEQ ID NO: 1004210 - DNA, 15 bp, Homo sapiens
ggttcaagcgattct

SEQ ID NO: 1004211 - DNA, 15 bp, Homo sapiens
gttcaagcgattctc

SEQ ID NO: 1004212 - DNA, 15 bp, Homo sapiens
ttcaagcgattctcc

SEQ ID NO: 1004213 - DNA, 15 bp, Homo sapiens
tcaagcgattctcct

SEQ ID NO: 1004214 - DNA, 15 bp, Homo sapiens
caagcgattctcctg

SEQ ID NO: 1004215 - DNA, 15 bp, Homo sapiens
aagcgattctcctgc

SEQ ID NO: 1004216 - DNA, 15 bp, Homo sapiens
agcgattctcctgcc

SEQ ID NO: 1004217 - DNA, 15 bp, Homo sapiens
gcgattctcctgcct

SEQ ID NO: 1004218 - DNA, 15 bp, Homo sapiens
cgattctcctgcctc

SEQ ID NO: 1004219 - DNA, 15 bp, Homo sapiens
ccaagtagctgggac

SEQ ID NO: 1004220 - DNA, 15 bp, Homo sapiens
caagtagctgggact

SEQ ID NO: 1004221 - DNA, 15 bp, Homo sapiens
aagtagctgggacta

SEQ ID NO: 1004222 - DNA, 15 bp, Homo sapiens
gggactacaggcgca

SEQ ID NO: 1004223 - DNA, 15 bp, Homo sapiens
ggactacaggcgcat

SEQ ID NO: 1004224 - DNA, 15 bp, Homo sapiens
gactacaggcgcatg

SEQ ID NO: 1004225 - DNA, 15 bp, Homo sapiens
actacaggcgcatgc

SEQ ID NO: 1004226 - DNA, 15 bp, Homo sapiens
ctacaggcgcatgcc

SEQ ID NO: 1004227 - DNA, 15 bp, Homo sapiens
tacaggcgcatgcca

SEQ ID NO: 1004228 - DNA, 15 bp, Homo sapiens
acaggcgcatgccac

SEQ ID NO: 1004229 - DNA, 15 bp, Homo sapiens
caggcgcatgccacc

SEQ ID NO: 1004230 - DNA, 15 bp, Homo sapiens
aggcgcatgccacca

SEQ ID NO: 1004231 - DNA, 15 bp, Homo sapiens
ggcgcatgccaccac

SEQ ID NO: 1004232 - DNA, 15 bp, Homo sapiens
gcgcatgccaccacg

SEQ ID NO: 1004233 - DNA, 15 bp, Homo sapiens
cgcatgccaccacgc

SEQ ID NO: 1004234 - DNA, 15 bp, Homo sapiens
gcatgccaccacgcc

SEQ ID NO: 1004235 - DNA, 15 bp, Homo sapiens
catgccaccacgccc

SEQ ID NO: 1004236 - DNA, 15 bp, Homo sapiens
atgccaccacgccca

SEQ ID NO: 1004237 - DNA, 15 bp, Homo sapiens
tgccaccacgcccag

SEQ ID NO: 1004238 - DNA, 15 bp, Homo sapiens
gccaccacgcccagc

SEQ ID NO: 1004239 - DNA, 15 bp, Homo sapiens
ccaccacgcccagct

SEQ ID NO: 1004240 - DNA, 15 bp, Homo sapiens
caccacgcccagcta

SEQ ID NO: 1004241 - DNA, 15 bp, Homo sapiens
accacgcccagctaa

SEQ ID NO: 1004242 - DNA, 15 bp, Homo sapiens
ccacgcccagctaat

SEQ ID NO: 1004243 - DNA, 15 bp, Homo sapiens
cacgcccagctaatt

SEQ ID NO: 1004244 - DNA, 15 bp, Homo sapiens
acgcccagctaattt

SEQ ID NO: 1004245 - DNA, 15 bp, Homo sapiens
cgcccagctaatttt

SEQ ID NO: 1004246 - DNA, 15 bp, Homo sapiens
gcccagctaattttg

SEQ ID NO: 1004247 - DNA, 15 bp, Homo sapiens
cccagctaattttgt

SEQ ID NO: 1004248 - DNA, 15 bp, Homo sapiens
ccagctaattttgta

SEQ ID NO: 1004249 - DNA, 15 bp, Homo sapiens
cagctaattttgtat

SEQ ID NO: 1004250 - DNA, 15 bp, Homo sapiens
agctaattttgtatt

SEQ ID NO: 1004251 - DNA, 15 bp, Homo sapiens
gctaattttgtattt

SEQ ID NO: 1004252 - DNA, 15 bp, Homo sapiens
ctaattttgtatttt

SEQ ID NO: 1004253 - DNA, 15 bp, Homo sapiens
taattttgtattttt

SEQ ID NO: 1004254 - DNA, 15 bp, Homo sapiens
aattttgtattttta

SEQ ID NO: 1004255 - DNA, 15 bp, Homo sapiens
attttgtatttttag

SEQ ID NO: 1004256 - DNA, 15 bp, Homo sapiens
gacagggtttcaccg

SEQ ID NO: 1004257 - DNA, 15 bp, Homo sapiens
acagggtttcaccgt

SEQ ID NO: 1004258 - DNA, 15 bp, Homo sapiens
cagggtttcaccgtg

SEQ ID NO: 1004259 - DNA, 15 bp, Homo sapiens
agggtttcaccgtgc

SEQ ID NO: 1004260 - DNA, 15 bp, Homo sapiens
gggtttcaccgtgct

SEQ ID NO: 1004261 - DNA, 15 bp, Homo sapiens
ggtttcaccgtgcta

SEQ ID NO: 1004262 - DNA, 15 bp, Homo sapiens
gtttcaccgtgctag

SEQ ID NO: 1004263 - DNA, 15 bp, Homo sapiens
tttcaccgtgctagc

SEQ ID NO: 1004264 - DNA, 15 bp, Homo sapiens
ttcaccgtgctagcc

SEQ ID NO: 1004265 - DNA, 15 bp, Homo sapiens
tcaccgtgctagcca

SEQ ID NO: 1004266 - DNA, 15 bp, Homo sapiens
caccgtgctagccag

SEQ ID NO: 1004267 - DNA, 15 bp, Homo sapiens
accgtgctagccagg

SEQ ID NO: 1004268 - DNA, 15 bp, Homo sapiens
ccgtgctagccagga

SEQ ID NO: 1004269 - DNA, 15 bp, Homo sapiens
cgtgctagccaggat

SEQ ID NO: 1004270 - DNA, 15 bp, Homo sapiens
gtgctagccaggatg

SEQ ID NO: 1004271 - DNA, 15 bp, Homo sapiens
tgctagccaggatgg

SEQ ID NO: 1004272 - DNA, 15 bp, Homo sapiens
gctagccaggatggg

SEQ ID NO: 1004273 - DNA, 15 bp, Homo sapiens
ctagccaggatgggt

SEQ ID NO: 1004274 - DNA, 15 bp, Homo sapiens
tagccaggatgggtc

SEQ ID NO: 1004275 - DNA, 15 bp, Homo sapiens
agccaggatgggtct

SEQ ID NO: 1004276 - DNA, 15 bp, Homo sapiens
gccaggatgggtctg

SEQ ID NO: 1004277 - DNA, 15 bp, Homo sapiens
ccaggatgggtctga

SEQ ID NO: 1004278 - DNA, 15 bp, Homo sapiens
caggatgggtctgaa

SEQ ID NO: 1004279 - DNA, 15 bp, Homo sapiens
aggatgggtctgaat

SEQ ID NO: 1004280 - DNA, 15 bp, Homo sapiens
ggatgggtctgaatt

SEQ ID NO: 1004281 - DNA, 15 bp, Homo sapiens
gatgggtctgaattt

SEQ ID NO: 1004282 - DNA, 15 bp, Homo sapiens
atgggtctgaatttc

SEQ ID NO: 1004283 - DNA, 15 bp, Homo sapiens
tgggtctgaatttct

SEQ ID NO: 1004284 - DNA, 15 bp, Homo sapiens
gggtctgaatttctt

SEQ ID NO: 1004285 - DNA, 15 bp, Homo sapiens
ggtctgaatttcttg

SEQ ID NO: 1004286 - DNA, 15 bp, Homo sapiens
gtctgaatttcttga

SEQ ID NO: 1004287 - DNA, 15 bp, Homo sapiens
tctgaatttcttgat

SEQ ID NO: 1004288 - DNA, 15 bp, Homo sapiens
ctgaatttcttgatg

SEQ ID NO: 1004289 - DNA, 15 bp, Homo sapiens
tgaatttcttgatgt

SEQ ID NO: 1004290 - DNA, 15 bp, Homo sapiens
gaatttcttgatgtc

SEQ ID NO: 1004291 - DNA, 15 bp, Homo sapiens
aatttcttgatgtcg

SEQ ID NO: 1004292 - DNA, 15 bp, Homo sapiens
atttcttgatgtcgt

SEQ ID NO: 1004293 - DNA, 15 bp, Homo sapiens
tttcttgatgtcgtg

SEQ ID NO: 1004294 - DNA, 15 bp, Homo sapiens
ttcttgatgtcgtga

SEQ ID NO: 1004295 - DNA, 15 bp, Homo sapiens
tcttgatgtcgtgat

SEQ ID NO: 1004296 - DNA, 15 bp, Homo sapiens
cttgatgtcgtgatc

SEQ ID NO: 1004297 - DNA, 15 bp, Homo sapiens
ttgatgtcgtgatcc

SEQ ID NO: 1004298 - DNA, 15 bp, Homo sapiens
tgatgtcgtgatcca

SEQ ID NO: 1004299 - DNA, 15 bp, Homo sapiens
gatgtcgtgatccac

SEQ ID NO: 1004300 - DNA, 15 bp, Homo sapiens
atgtcgtgatccacc

SEQ ID NO: 1004301 - DNA, 15 bp, Homo sapiens
tgtcgtgatccacct

SEQ ID NO: 1004302 - DNA, 15 bp, Homo sapiens
gtcgtgatccacctg

SEQ ID NO: 1004303 - DNA, 15 bp, Homo sapiens
tcgtgatccacctgc

SEQ ID NO: 1004304 - DNA, 15 bp, Homo sapiens
cgtgatccacctgcc

SEQ ID NO: 1004305 - DNA, 15 bp, Homo sapiens
atccacctgccttga

SEQ ID NO: 1004306 - DNA, 15 bp, Homo sapiens
tccacctgccttgac

SEQ ID NO: 1004307 - DNA, 15 bp, Homo sapiens
ccacctgccttgact

SEQ ID NO: 1004308 - DNA, 15 bp, Homo sapiens
cacctgccttgactt

SEQ ID NO: 1004309 - DNA, 15 bp, Homo sapiens
acctgccttgacttc

SEQ ID NO: 1004310 - DNA, 15 bp, Homo sapiens
cctgccttgacttcc

SEQ ID NO: 1004311 - DNA, 15 bp, Homo sapiens
ctgccttgacttccc

SEQ ID NO: 1004312 - DNA, 15 bp, Homo sapiens
tgccttgacttccca

SEQ ID NO: 1004313 - DNA, 15 bp, Homo sapiens
gccttgacttcccaa

SEQ ID NO: 1004314 - DNA, 15 bp, Homo sapiens
ccttgacttcccaaa

SEQ ID NO: 1004315 - DNA, 15 bp, Homo sapiens
cttgacttcccaaag

SEQ ID NO: 1004316 - DNA, 15 bp, Homo sapiens
ttgacttcccaaagt

SEQ ID NO: 1004317 - DNA, 15 bp, Homo sapiens
tgacttcccaaagtg

SEQ ID NO: 1004318 - DNA, 15 bp, Homo sapiens
gacttcccaaagtgc

SEQ ID NO: 1004319 - DNA, 15 bp, Homo sapiens
acttcccaaagtgct

SEQ ID NO: 1004320 - DNA, 15 bp, Homo sapiens
cttcccaaagtgctg

SEQ ID NO: 1004321 - DNA, 15 bp, Homo sapiens
ttcccaaagtgctgg

SEQ ID NO: 1004322 - DNA, 15 bp, Homo sapiens
ggcatgagccaccgt

SEQ ID NO: 1004323 - DNA, 15 bp, Homo sapiens
gcatgagccaccgtg

SEQ ID NO: 1004324 - DNA, 15 bp, Homo sapiens
catgagccaccgtgc

SEQ ID NO: 1004325 - DNA, 15 bp, Homo sapiens
atgagccaccgtgcc

SEQ ID NO: 1004326 - DNA, 15 bp, Homo sapiens
tgagccaccgtgccc

SEQ ID NO: 1004327 - DNA, 15 bp, Homo sapiens
gagccaccgtgcccg

SEQ ID NO: 1004328 - DNA, 15 bp, Homo sapiens
agccaccgtgcccgg

SEQ ID NO: 1004329 - DNA, 15 bp, Homo sapiens
gccaccgtgcccggc

SEQ ID NO: 1004330 - DNA, 15 bp, Homo sapiens
ccaccgtgcccggcc

SEQ ID NO: 1004331 - DNA, 15 bp, Homo sapiens
caccgtgcccggccc

SEQ ID NO: 1004332 - DNA, 15 bp, Homo sapiens
accgtgcccggcccg

SEQ ID NO: 1004333 - DNA, 15 bp, Homo sapiens
ccgtgcccggcccgg

SEQ ID NO: 1004334 - DNA, 15 bp, Homo sapiens
cgtgcccggcccgga

SEQ ID NO: 1004335 - DNA, 15 bp, Homo sapiens
gtgcccggcccggaa

SEQ ID NO: 1004336 - DNA, 15 bp, Homo sapiens
tgcccggcccggaat

SEQ ID NO: 1004337 - DNA, 15 bp, Homo sapiens
gcccggcccggaatt

SEQ ID NO: 1004338 - DNA, 15 bp, Homo sapiens
cccggcccggaattc

SEQ ID NO: 1004339 - DNA, 15 bp, Homo sapiens
ccggcccggaattca

SEQ ID NO: 1004340 - DNA, 15 bp, Homo sapiens
cggcccggaattcat

SEQ ID NO: 1004341 - DNA, 15 bp, Homo sapiens
ggcccggaattcatc

SEQ ID NO: 1004342 - DNA, 15 bp, Homo sapiens
gcccggaattcatcc

SEQ ID NO: 1004343 - DNA, 15 bp, Homo sapiens
cccggaattcatcct

SEQ ID NO: 1004344 - DNA, 15 bp, Homo sapiens
ccggaattcatcctt

SEQ ID NO: 1004345 - DNA, 15 bp, Homo sapiens
cggaattcatccttt

SEQ ID NO: 1004346 - DNA, 15 bp, Homo sapiens
ggaattcatccttta

SEQ ID NO: 1004347 - DNA, 15 bp, Homo sapiens
gaattcatcctttag

SEQ ID NO: 1004348 - DNA, 15 bp, Homo sapiens
aattcatcctttaga

SEQ ID NO: 1004349 - DNA, 15 bp, Homo sapiens
attcatcctttagaa

SEQ ID NO: 1004350 - DNA, 15 bp, Homo sapiens
ttcatcctttagaaa

SEQ ID NO: 1004351 - DNA, 15 bp, Homo sapiens
tcatcctttagaaag

SEQ ID NO: 1004352 - DNA, 15 bp, Homo sapiens
catcctttagaaaga

SEQ ID NO: 1004353 - DNA, 15 bp, Homo sapiens
atcctttagaaagat

SEQ ID NO: 1004354 - DNA, 15 bp, Homo sapiens
tcctttagaaagatt

SEQ ID NO: 1004355 - DNA, 15 bp, Homo sapiens
cctttagaaagattt

SEQ ID NO: 1004356 - DNA, 15 bp, Homo sapiens
ctttagaaagatttc

SEQ ID NO: 1004357 - DNA, 15 bp, Homo sapiens
tttagaaagatttct

SEQ ID NO: 1004358 - DNA, 15 bp, Homo sapiens
ttagaaagatttctt

SEQ ID NO: 1004359 - DNA, 15 bp, Homo sapiens
tagaaagatttcttc

SEQ ID NO: 1004360 - DNA, 15 bp, Homo sapiens
agaaagatttcttcc

SEQ ID NO: 1004361 - DNA, 15 bp, Homo sapiens
gaaagatttcttcca

SEQ ID NO: 1004362 - DNA, 15 bp, Homo sapiens
aaagatttcttccag

SEQ ID NO: 1004363 - DNA, 15 bp, Homo sapiens
aagatttcttccagc

SEQ ID NO: 1004364 - DNA, 15 bp, Homo sapiens
agatttcttccagct

SEQ ID NO: 1004365 - DNA, 15 bp, Homo sapiens
gatttcttccagctg

SEQ ID NO: 1004366 - DNA, 15 bp, Homo sapiens
atttcttccagctgt

SEQ ID NO: 1004367 - DNA, 15 bp, Homo sapiens
tttcttccagctgtt

SEQ ID NO: 1004368 - DNA, 15 bp, Homo sapiens
ttcttccagctgttc

SEQ ID NO: 1004369 - DNA, 15 bp, Homo sapiens
tcttccagctgttcc

SEQ ID NO: 1004370 - DNA, 15 bp, Homo sapiens
cttccagctgttcct

SEQ ID NO: 1004371 - DNA, 15 bp, Homo sapiens
ttccagctgttcctc

SEQ ID NO: 1004372 - DNA, 15 bp, Homo sapiens
tccagctgttcctca

SEQ ID NO: 1004373 - DNA, 15 bp, Homo sapiens
ccagctgttcctcag

SEQ ID NO: 1004374 - DNA, 15 bp, Homo sapiens
cagctgttcctcagt

SEQ ID NO: 1004375 - DNA, 15 bp, Homo sapiens
agctgttcctcagtt

SEQ ID NO: 1004376 - DNA, 15 bp, Homo sapiens
gctgttcctcagttc

SEQ ID NO: 1004377 - DNA, 15 bp, Homo sapiens
ctgttcctcagttct

SEQ ID NO: 1004378 - DNA, 15 bp, Homo sapiens
tgttcctcagttctc

SEQ ID NO: 1004379 - DNA, 15 bp, Homo sapiens
gttcctcagttctct

SEQ ID NO: 1004380 - DNA, 15 bp, Homo sapiens
ttcctcagttctctg

SEQ ID NO: 1004381 - DNA, 15 bp, Homo sapiens
tcctcagttctctgc

SEQ ID NO: 1004382 - DNA, 15 bp, Homo sapiens
cctcagttctctgca

SEQ ID NO: 1004383 - DNA, 15 bp, Homo sapiens
ctcagttctctgcac

SEQ ID NO: 1004384 - DNA, 15 bp, Homo sapiens
tcagttctctgcact

SEQ ID NO: 1004385 - DNA, 15 bp, Homo sapiens
cagttctctgcactc

SEQ ID NO: 1004386 - DNA, 15 bp, Homo sapiens
agttctctgcactcc

SEQ ID NO: 1004387 - DNA, 15 bp, Homo sapiens
gttctctgcactccc

SEQ ID NO: 1004388 - DNA, 15 bp, Homo sapiens
ttctctgcactccct

SEQ ID NO: 1004389 - DNA, 15 bp, Homo sapiens
tctctgcactccctt

SEQ ID NO: 1004390 - DNA, 15 bp, Homo sapiens
ctctgcactccctta

SEQ ID NO: 1004391 - DNA, 15 bp, Homo sapiens
tctgcactcccttac

SEQ ID NO: 1004392 - DNA, 15 bp, Homo sapiens
ctgcactcccttaca

SEQ ID NO: 1004393 - DNA, 15 bp, Homo sapiens
tgcactcccttacac

SEQ ID NO: 1004394 - DNA, 15 bp, Homo sapiens
gcactcccttacact

SEQ ID NO: 1004395 - DNA, 15 bp, Homo sapiens
cactcccttacactt

SEQ ID NO: 1004396 - DNA, 15 bp, Homo sapiens
actcccttacacttt

SEQ ID NO: 1004397 - DNA, 15 bp, Homo sapiens
ctcccttacactttc

SEQ ID NO: 1004398 - DNA, 15 bp, Homo sapiens
tcccttacactttcc

SEQ ID NO: 1004399 - DNA, 15 bp, Homo sapiens
cccttacactttcca

SEQ ID NO: 1004400 - DNA, 15 bp, Homo sapiens
ccttacactttccac

SEQ ID NO: 1004401 - DNA, 15 bp, Homo sapiens
cttacactttccacc

SEQ ID NO: 1004402 - DNA, 15 bp, Homo sapiens
ttacactttccacct

SEQ ID NO: 1004403 - DNA, 15 bp, Homo sapiens
tacactttccacctt

SEQ ID NO: 1004404 - DNA, 15 bp, Homo sapiens
acactttccacctta

SEQ ID NO: 1004405 - DNA, 15 bp, Homo sapiens
cactttccaccttat

SEQ ID NO: 1004406 - DNA, 15 bp, Homo sapiens
actttccaccttatc

SEQ ID NO: 1004407 - DNA, 15 bp, Homo sapiens
ctttccaccttatct

SEQ ID NO: 1004408 - DNA, 15 bp, Homo sapiens
tttccaccttatctg

SEQ ID NO: 1004409 - DNA, 15 bp, Homo sapiens
ttccaccttatctgt

SEQ ID NO: 1004410 - DNA, 15 bp, Homo sapiens
tccaccttatctgtc

SEQ ID NO: 1004411 - DNA, 15 bp, Homo sapiens
ccaccttatctgtct

SEQ ID NO: 1004412 - DNA, 15 bp, Homo sapiens
caccttatctgtctg

SEQ ID NO: 1004413 - DNA, 15 bp, Homo sapiens
accttatctgtctgg

SEQ ID NO: 1004414 - DNA, 15 bp, Homo sapiens
ccttatctgtctggg

SEQ ID NO: 1004415 - DNA, 15 bp, Homo sapiens
cttatctgtctggga

SEQ ID NO: 1004416 - DNA, 15 bp, Homo sapiens
ttatctgtctgggaa

SEQ ID NO: 1004417 - DNA, 15 bp, Homo sapiens
tatctgtctgggaac

SEQ ID NO: 1004418 - DNA, 15 bp, Homo sapiens
atctgtctgggaact

SEQ ID NO: 1004419 - DNA, 15 bp, Homo sapiens
tctgtctgggaacta

SEQ ID NO: 1004420 - DNA, 15 bp, Homo sapiens
ctgtctgggaactaa

SEQ ID NO: 1004421 - DNA, 15 bp, Homo sapiens
tgtctgggaactaat

SEQ ID NO: 1004422 - DNA, 15 bp, Homo sapiens
gtctgggaactaatt

SEQ ID NO: 1004423 - DNA, 15 bp, Homo sapiens
tctgggaactaattt

SEQ ID NO: 1004424 - DNA, 15 bp, Homo sapiens
ctgggaactaattta

SEQ ID NO: 1004425 - DNA, 15 bp, Homo sapiens
tgggaactaatttag

SEQ ID NO: 1004426 - DNA, 15 bp, Homo sapiens
gggaactaatttagt

SEQ ID NO: 1004427 - DNA, 15 bp, Homo sapiens
ggaactaatttagtc

SEQ ID NO: 1004428 - DNA, 15 bp, Homo sapiens
gaactaatttagtct

SEQ ID NO: 1004429 - DNA, 15 bp, Homo sapiens
aactaatttagtctt

SEQ ID NO: 1004430 - DNA, 15 bp, Homo sapiens
actaatttagtcttt

SEQ ID NO: 1004431 - DNA, 15 bp, Homo sapiens
ctaatttagtcttta

SEQ ID NO: 1004432 - DNA, 15 bp, Homo sapiens
taatttagtctttat

SEQ ID NO: 1004433 - DNA, 15 bp, Homo sapiens
aatttagtctttatg

SEQ ID NO: 1004434 - DNA, 15 bp, Homo sapiens
atttagtctttatgt

SEQ ID NO: 1004435 - DNA, 15 bp, Homo sapiens
tttagtctttatgtt

SEQ ID NO: 1004436 - DNA, 15 bp, Homo sapiens
ttagtctttatgttg

SEQ ID NO: 1004437 - DNA, 15 bp, Homo sapiens
tagtctttatgttgg

SEQ ID NO: 1004438 - DNA, 15 bp, Homo sapiens
agtctttatgttggc

SEQ ID NO: 1004439 - DNA, 15 bp, Homo sapiens
gtctttatgttggct

SEQ ID NO: 1004440 - DNA, 15 bp, Homo sapiens
tctttatgttggctg

SEQ ID NO: 1004441 - DNA, 15 bp, Homo sapiens
ctttatgttggctgc

SEQ ID NO: 1004442 - DNA, 15 bp, Homo sapiens
tttatgttggctgct

SEQ ID NO: 1004443 - DNA, 15 bp, Homo sapiens
ttatgttggctgctt

SEQ ID NO: 1004444 - DNA, 15 bp, Homo sapiens
tatgttggctgcttt

SEQ ID NO: 1004445 - DNA, 15 bp, Homo sapiens
atgttggctgctttc

SEQ ID NO: 1004446 - DNA, 15 bp, Homo sapiens
tgttggctgctttct

SEQ ID NO: 1004447 - DNA, 15 bp, Homo sapiens
gttggctgctttctt

SEQ ID NO: 1004448 - DNA, 15 bp, Homo sapiens
ttggctgctttcttt

SEQ ID NO: 1004449 - DNA, 15 bp, Homo sapiens
tggctgctttctttt

SEQ ID NO: 1004450 - DNA, 15 bp, Homo sapiens
ggctgctttcttttc

SEQ ID NO: 1004451 - DNA, 15 bp, Homo sapiens
gctgctttcttttca

SEQ ID NO: 1004452 - DNA, 15 bp, Homo sapiens
ctgctttcttttcac

SEQ ID NO: 1004453 - DNA, 15 bp, Homo sapiens
tgctttcttttcact

SEQ ID NO: 1004454 - DNA, 15 bp, Homo sapiens
gctttcttttcactt

SEQ ID NO: 1004455 - DNA, 15 bp, Homo sapiens
ctttcttttcacttt

SEQ ID NO: 1004456 - DNA, 15 bp, Homo sapiens
tttcttttcactttt

SEQ ID NO: 1004457 - DNA, 15 bp, Homo sapiens
ttcttttcacttttc

SEQ ID NO: 1004458 - DNA, 15 bp, Homo sapiens
tcttttcacttttca

SEQ ID NO: 1004459 - DNA, 15 bp, Homo sapiens
cttttcacttttcag

SEQ ID NO: 1004460 - DNA, 15 bp, Homo sapiens
ttttcacttttcagg

SEQ ID NO: 1004461 - DNA, 15 bp, Homo sapiens
tttcacttttcaggc

SEQ ID NO: 1004462 - DNA, 15 bp, Homo sapiens
ttcacttttcaggct

SEQ ID NO: 1004463 - DNA, 15 bp, Homo sapiens
tcacttttcaggcta

SEQ ID NO: 1004464 - DNA, 15 bp, Homo sapiens
cacttttcaggctaa

SEQ ID NO: 1004465 - DNA, 15 bp, Homo sapiens
acttttcaggctaag

SEQ ID NO: 1004466 - DNA, 15 bp, Homo sapiens
cttttcaggctaaga

SEQ ID NO: 1004467 - DNA, 15 bp, Homo sapiens
ttttcaggctaagat

SEQ ID NO: 1004468 - DNA, 15 bp, Homo sapiens
tttcaggctaagatt

SEQ ID NO: 1004469 - DNA, 15 bp, Homo sapiens
ttcaggctaagattt

SEQ ID NO: 1004470 - DNA, 15 bp, Homo sapiens
tcaggctaagatttc

SEQ ID NO: 1004471 - DNA, 15 bp, Homo sapiens
caggctaagatttcc

SEQ ID NO: 1004472 - DNA, 15 bp, Homo sapiens
aggctaagatttcct

SEQ ID NO: 1004473 - DNA, 15 bp, Homo sapiens
ggctaagatttcctt

SEQ ID NO: 1004474 - DNA, 15 bp, Homo sapiens
gctaagatttccttt

SEQ ID NO: 1004475 - DNA, 15 bp, Homo sapiens
ctaagatttcctttc

SEQ ID NO: 1004476 - DNA, 15 bp, Homo sapiens
taagatttcctttct

SEQ ID NO: 1004477 - DNA, 15 bp, Homo sapiens
aagatttcctttctc

SEQ ID NO: 1004478 - DNA, 15 bp, Homo sapiens
agatttcctttctct

SEQ ID NO: 1004479 - DNA, 15 bp, Homo sapiens
gatttcctttctctt

SEQ ID NO: 1004480 - DNA, 15 bp, Homo sapiens
atttcctttctcttg

SEQ ID NO: 1004481 - DNA, 15 bp, Homo sapiens
tttcctttctcttgg

SEQ ID NO: 1004482 - DNA, 15 bp, Homo sapiens
ttcctttctcttgga

SEQ ID NO: 1004483 - DNA, 15 bp, Homo sapiens
tcctttctcttggaa

SEQ ID NO: 1004484 - DNA, 15 bp, Homo sapiens
cctttctcttggaaa

SEQ ID NO: 1004485 - DNA, 15 bp, Homo sapiens
ctttctcttggaaat

SEQ ID NO: 1004486 - DNA, 15 bp, Homo sapiens
tttctcttggaaatc

SEQ ID NO: 1004487 - DNA, 15 bp, Homo sapiens
ttctcttggaaatca

SEQ ID NO: 1004488 - DNA, 15 bp, Homo sapiens
tctcttggaaatcag

SEQ ID NO: 1004489 - DNA, 15 bp, Homo sapiens
ctcttggaaatcaga

SEQ ID NO: 1004490 - DNA, 15 bp, Homo sapiens
tcttggaaatcagac

SEQ ID NO: 1004491 - DNA, 15 bp, Homo sapiens
cttggaaatcagacg

SEQ ID NO: 1004492 - DNA, 15 bp, Homo sapiens
ttggaaatcagacgt

SEQ ID NO: 1004493 - DNA, 15 bp, Homo sapiens
tggaaatcagacgtt

SEQ ID NO: 1004494 - DNA, 15 bp, Homo sapiens
ggaaatcagacgttt

SEQ ID NO: 1004495 - DNA, 15 bp, Homo sapiens
gaaatcagacgttta

SEQ ID NO: 1004496 - DNA, 15 bp, Homo sapiens
aaatcagacgtttac

SEQ ID NO: 1004497 - DNA, 15 bp, Homo sapiens
aatcagacgtttact

SEQ ID NO: 1004498 - DNA, 15 bp, Homo sapiens
atcagacgtttactt

SEQ ID NO: 1004499 - DNA, 15 bp, Homo sapiens
tcagacgtttacttg

SEQ ID NO: 1004500 - DNA, 15 bp, Homo sapiens
cagacgtttacttgg

SEQ ID NO: 1004501 - DNA, 15 bp, Homo sapiens
agacgtttacttggt

SEQ ID NO: 1004502 - DNA, 15 bp, Homo sapiens
gacgtttacttggtc

SEQ ID NO: 1004503 - DNA, 15 bp, Homo sapiens
acgtttacttggtcc

SEQ ID NO: 1004504 - DNA, 15 bp, Homo sapiens
cgtttacttggtcct

SEQ ID NO: 1004505 - DNA, 15 bp, Homo sapiens
gtttacttggtcctg

SEQ ID NO: 1004506 - DNA, 15 bp, Homo sapiens
tttacttggtcctgc

SEQ ID NO: 1004507 - DNA, 15 bp, Homo sapiens
ttacttggtcctgca

SEQ ID NO: 1004508 - DNA, 15 bp, Homo sapiens
tacttggtcctgcag

SEQ ID NO: 1004509 - DNA, 15 bp, Homo sapiens
acttggtcctgcagc

SEQ ID NO: 1004510 - DNA, 15 bp, Homo sapiens
cttggtcctgcagct

SEQ ID NO: 1004511 - DNA, 15 bp, Homo sapiens
ttggtcctgcagctc

SEQ ID NO: 1004512 - DNA, 15 bp, Homo sapiens
tggtcctgcagctct

SEQ ID NO: 1004513 - DNA, 15 bp, Homo sapiens
ggtcctgcagctctc

SEQ ID NO: 1004514 - DNA, 15 bp, Homo sapiens
gtcctgcagctctct

SEQ ID NO: 1004515 - DNA, 15 bp, Homo sapiens
tcctgcagctctctc

SEQ ID NO: 1004516 - DNA, 15 bp, Homo sapiens
cctgcagctctctct

SEQ ID NO: 1004517 - DNA, 15 bp, Homo sapiens
ctgcagctctctctc

SEQ ID NO: 1004518 - DNA, 15 bp, Homo sapiens
tgcagctctctctct

SEQ ID NO: 1004519 - DNA, 15 bp, Homo sapiens
gcagctctctctctg

SEQ ID NO: 1004520 - DNA, 15 bp, Homo sapiens
cagctctctctctgt

SEQ ID NO: 1004521 - DNA, 15 bp, Homo sapiens
agctctctctctgtg

SEQ ID NO: 1004522 - DNA, 15 bp, Homo sapiens
gctctctctctgtgg

SEQ ID NO: 1004523 - DNA, 15 bp, Homo sapiens
ctctctctctgtgga

SEQ ID NO: 1004524 - DNA, 15 bp, Homo sapiens
tctctctctgtggac

SEQ ID NO: 1004525 - DNA, 15 bp, Homo sapiens
ctctctctgtggacc

SEQ ID NO: 1004526 - DNA, 15 bp, Homo sapiens
tctctctgtggacca

SEQ ID NO: 1004527 - DNA, 15 bp, Homo sapiens
ctctctgtggaccag

SEQ ID NO: 1004528 - DNA, 15 bp, Homo sapiens
tctctgtggaccagt

SEQ ID NO: 1004529 - DNA, 15 bp, Homo sapiens
ctctgtggaccagtc

SEQ ID NO: 1004530 - DNA, 15 bp, Homo sapiens
tctgtggaccagtct

SEQ ID NO: 1004531 - DNA, 15 bp, Homo sapiens
ctgtggaccagtctt

SEQ ID NO: 1004532 - DNA, 15 bp, Homo sapiens
tgtggaccagtcttt

SEQ ID NO: 1004533 - DNA, 15 bp, Homo sapiens
gtggaccagtctttt

SEQ ID NO: 1004534 - DNA, 15 bp, Homo sapiens
tggaccagtcttttt

SEQ ID NO: 1004535 - DNA, 15 bp, Homo sapiens
ggaccagtctttttt

SEQ ID NO: 1004536 - DNA, 15 bp, Homo sapiens
gaccagtcttttttg

SEQ ID NO: 1004537 - DNA, 15 bp, Homo sapiens
accagtcttttttgt

SEQ ID NO: 1004538 - DNA, 15 bp, Homo sapiens
ccagtcttttttgtt

SEQ ID NO: 1004539 - DNA, 15 bp, Homo sapiens
cagtcttttttgttg

SEQ ID NO: 1004540 - DNA, 15 bp, Homo sapiens
agtcttttttgttgt

SEQ ID NO: 1004541 - DNA, 15 bp, Homo sapiens
gtcttttttgttgtt

SEQ ID NO: 1004542 - DNA, 15 bp, Homo sapiens
tcttttttgttgttg

SEQ ID NO: 1004543 - DNA, 15 bp, Homo sapiens
cttttttgttgttgt

SEQ ID NO: 1004544 - DNA, 15 bp, Homo sapiens
ttttttgttgttgtt

SEQ ID NO: 1004545 - DNA, 15 bp, Homo sapiens
tttttgttgttgttg

SEQ ID NO: 1004546 - DNA, 15 bp, Homo sapiens
ttttgttgttgttgt

SEQ ID NO: 1004547 - DNA, 15 bp, Homo sapiens
tttgttgttgttgtt

SEQ ID NO: 1004548 - DNA, 15 bp, Homo sapiens
ttgttgttgttgttg

SEQ ID NO: 1004549 - DNA, 15 bp, Homo sapiens
tgttgttgttgttgc

SEQ ID NO: 1004550 - DNA, 15 bp, Homo sapiens
gttgttgttgttgcc

SEQ ID NO: 1004551 - DNA, 15 bp, Homo sapiens
ttgttgttgttgcca

SEQ ID NO: 1004552 - DNA, 15 bp, Homo sapiens
tgttgttgttgccag

SEQ ID NO: 1004553 - DNA, 15 bp, Homo sapiens
gttgttgttgccaga

SEQ ID NO: 1004554 - DNA, 15 bp, Homo sapiens
ttgttgttgccagat

SEQ ID NO: 1004555 - DNA, 15 bp, Homo sapiens
tgttgttgccagata

SEQ ID NO: 1004556 - DNA, 15 bp, Homo sapiens
gttgttgccagatac

SEQ ID NO: 1004557 - DNA, 15 bp, Homo sapiens
ttgttgccagatact

SEQ ID NO: 1004558 - DNA, 15 bp, Homo sapiens
tgttgccagatactc

SEQ ID NO: 1004559 - DNA, 15 bp, Homo sapiens
gttgccagatactca

SEQ ID NO: 1004560 - DNA, 15 bp, Homo sapiens
ttgccagatactcac

SEQ ID NO: 1004561 - DNA, 15 bp, Homo sapiens
tgccagatactcacc

SEQ ID NO: 1004562 - DNA, 15 bp, Homo sapiens
gccagatactcaccg

SEQ ID NO: 1004563 - DNA, 15 bp, Homo sapiens
ccagatactcaccgc

SEQ ID NO: 1004564 - DNA, 15 bp, Homo sapiens
cagatactcaccgcc

SEQ ID NO: 1004565 - DNA, 15 bp, Homo sapiens
agatactcaccgcct

SEQ ID NO: 1004566 - DNA, 15 bp, Homo sapiens
gatactcaccgcctc

SEQ ID NO: 1004567 - DNA, 15 bp, Homo sapiens
atactcaccgcctct

SEQ ID NO: 1004568 - DNA, 15 bp, Homo sapiens
tactcaccgcctcta

SEQ ID NO: 1004569 - DNA, 15 bp, Homo sapiens
actcaccgcctctac

SEQ ID NO: 1004570 - DNA, 15 bp, Homo sapiens
ctcaccgcctctact

SEQ ID NO: 1004571 - DNA, 15 bp, Homo sapiens
tcaccgcctctactg

SEQ ID NO: 1004572 - DNA, 15 bp, Homo sapiens
caccgcctctactgt

SEQ ID NO: 1004573 - DNA, 15 bp, Homo sapiens
accgcctctactgtt

SEQ ID NO: 1004574 - DNA, 15 bp, Homo sapiens
ccgcctctactgttt

SEQ ID NO: 1004575 - DNA, 15 bp, Homo sapiens
cgcctctactgttta

SEQ ID NO: 1004576 - DNA, 15 bp, Homo sapiens
gcctctactgtttat

SEQ ID NO: 1004577 - DNA, 15 bp, Homo sapiens
cctctactgtttatc

SEQ ID NO: 1004578 - DNA, 15 bp, Homo sapiens
ctctactgtttatcc

SEQ ID NO: 1004579 - DNA, 15 bp, Homo sapiens
tctactgtttatcca

SEQ ID NO: 1004580 - DNA, 15 bp, Homo sapiens
ctactgtttatccac

SEQ ID NO: 1004581 - DNA, 15 bp, Homo sapiens
tactgtttatccacc

SEQ ID NO: 1004582 - DNA, 15 bp, Homo sapiens
actgtttatccaccc

SEQ ID NO: 1004583 - DNA, 15 bp, Homo sapiens
ctgtttatccaccca

SEQ ID NO: 1004584 - DNA, 15 bp, Homo sapiens
tgtttatccacccat

SEQ ID NO: 1004585 - DNA, 15 bp, Homo sapiens
gtttatccacccatt

SEQ ID NO: 1004586 - DNA, 15 bp, Homo sapiens
tttatccacccattt

SEQ ID NO: 1004587 - DNA, 15 bp, Homo sapiens
ttatccacccatttc

SEQ ID NO: 1004588 - DNA, 15 bp, Homo sapiens
tatccacccatttcc

SEQ ID NO: 1004589 - DNA, 15 bp, Homo sapiens
atccacccatttcct

SEQ ID NO: 1004590 - DNA, 15 bp, Homo sapiens
tccacccatttcctt

SEQ ID NO: 1004591 - DNA, 15 bp, Homo sapiens
ccacccatttccttt

SEQ ID NO: 1004592 - DNA, 15 bp, Homo sapiens
cacccatttccttta

SEQ ID NO: 1004593 - DNA, 15 bp, Homo sapiens
acccatttcctttat

SEQ ID NO: 1004594 - DNA, 15 bp, Homo sapiens
cccatttcctttata

SEQ ID NO: 1004595 - DNA, 15 bp, Homo sapiens
ccatttcctttataa

SEQ ID NO: 1004596 - DNA, 15 bp, Homo sapiens
catttcctttataac

SEQ ID NO: 1004597 - DNA, 15 bp, Homo sapiens
atttcctttataact

SEQ ID NO: 1004598 - DNA, 15 bp, Homo sapiens
tttcctttataactc

SEQ ID NO: 1004599 - DNA, 15 bp, Homo sapiens
ttcctttataactct

SEQ ID NO: 1004600 - DNA, 15 bp, Homo sapiens
tcctttataactctg

SEQ ID NO: 1004601 - DNA, 15 bp, Homo sapiens
cctttataactctga

SEQ ID NO: 1004602 - DNA, 15 bp, Homo sapiens
ctttataactctgaa

SEQ ID NO: 1004603 - DNA, 15 bp, Homo sapiens
tttataactctgaaa

SEQ ID NO: 1004604 - DNA, 15 bp, Homo sapiens
ttataactctgaaaa

SEQ ID NO: 1004605 - DNA, 15 bp, Homo sapiens
tataactctgaaaag

SEQ ID NO: 1004606 - DNA, 15 bp, Homo sapiens
ataactctgaaaagt

SEQ ID NO: 1004607 - DNA, 15 bp, Homo sapiens
taactctgaaaagta

SEQ ID NO: 1004608 - DNA, 15 bp, Homo sapiens
aactctgaaaagtag

SEQ ID NO: 1004609 - DNA, 15 bp, Homo sapiens
actctgaaaagtagc

SEQ ID NO: 1004610 - DNA, 15 bp, Homo sapiens
ctctgaaaagtagct

SEQ ID NO: 1004611 - DNA, 15 bp, Homo sapiens
tctgaaaagtagctc

SEQ ID NO: 1004612 - DNA, 15 bp, Homo sapiens
ctgaaaagtagctcc

SEQ ID NO: 1004613 - DNA, 15 bp, Homo sapiens
tgaaaagtagctcct

SEQ ID NO: 1004614 - DNA, 15 bp, Homo sapiens
gaaaagtagctcctg

SEQ ID NO: 1004615 - DNA, 15 bp, Homo sapiens
aaaagtagctcctgc

SEQ ID NO: 1004616 - DNA, 15 bp, Homo sapiens
aaagtagctcctgcc

SEQ ID NO: 1004617 - DNA, 15 bp, Homo sapiens
aagtagctcctgcct

SEQ ID NO: 1004618 - DNA, 15 bp, Homo sapiens
agtagctcctgcctc

SEQ ID NO: 1004619 - DNA, 15 bp, Homo sapiens
gtagctcctgcctct

SEQ ID NO: 1004620 - DNA, 15 bp, Homo sapiens
tagctcctgcctctg

SEQ ID NO: 1004621 - DNA, 15 bp, Homo sapiens
agctcctgcctctgc

SEQ ID NO: 1004622 - DNA, 15 bp, Homo sapiens
gctcctgcctctgct

SEQ ID NO: 1004623 - DNA, 15 bp, Homo sapiens
ctcctgcctctgctt

SEQ ID NO: 1004624 - DNA, 15 bp, Homo sapiens
tcctgcctctgcttg

SEQ ID NO: 1004625 - DNA, 15 bp, Homo sapiens
cctgcctctgcttga

SEQ ID NO: 1004626 - DNA, 15 bp, Homo sapiens
ctgcctctgcttgat

SEQ ID NO: 1004627 - DNA, 15 bp, Homo sapiens
tgcctctgcttgatt

SEQ ID NO: 1004628 - DNA, 15 bp, Homo sapiens
gcctctgcttgattg

SEQ ID NO: 1004629 - DNA, 15 bp, Homo sapiens
cctctgcttgattgc

SEQ ID NO: 1004630 - DNA, 15 bp, Homo sapiens
ctctgcttgattgct

SEQ ID NO: 1004631 - DNA, 15 bp, Homo sapiens
tctgcttgattgctg

SEQ ID NO: 1004632 - DNA, 15 bp, Homo sapiens
ctgcttgattgctgt

SEQ ID NO: 1004633 - DNA, 15 bp, Homo sapiens
tgcttgattgctgtt

SEQ ID NO: 1004634 - DNA, 15 bp, Homo sapiens
gcttgattgctgttt

SEQ ID NO: 1004635 - DNA, 15 bp, Homo sapiens
cttgattgctgtttt

SEQ ID NO: 1004636 - DNA, 15 bp, Homo sapiens
ttgattgctgttttc

SEQ ID NO: 1004637 - DNA, 15 bp, Homo sapiens
tgattgctgttttct

SEQ ID NO: 1004638 - DNA, 15 bp, Homo sapiens
gattgctgttttctt

SEQ ID NO: 1004639 - DNA, 15 bp, Homo sapiens
attgctgttttcttg

SEQ ID NO: 1004640 - DNA, 15 bp, Homo sapiens
ttgctgttttcttga

SEQ ID NO: 1004641 - DNA, 15 bp, Homo sapiens
tgctgttttcttgaa

SEQ ID NO: 1004642 - DNA, 15 bp, Homo sapiens
gctgttttcttgaaa

SEQ ID NO: 1004643 - DNA, 15 bp, Homo sapiens
ctgttttcttgaaag

SEQ ID NO: 1004644 - DNA, 15 bp, Homo sapiens
tgttttcttgaaagt

SEQ ID NO: 1004645 - DNA, 15 bp, Homo sapiens
gttttcttgaaagtg

SEQ ID NO: 1004646 - DNA, 15 bp, Homo sapiens
ttttcttgaaagtga

SEQ ID NO: 1004647 - DNA, 15 bp, Homo sapiens
tttcttgaaagtgat

SEQ ID NO: 1004648 - DNA, 15 bp, Homo sapiens
ttcttgaaagtgatt

SEQ ID NO: 1004649 - DNA, 15 bp, Homo sapiens
tcttgaaagtgatta

SEQ ID NO: 1004650 - DNA, 15 bp, Homo sapiens
cttgaaagtgattac

SEQ ID NO: 1004651 - DNA, 15 bp, Homo sapiens
ttgaaagtgattact

SEQ ID NO: 1004652 - DNA, 15 bp, Homo sapiens
tgaaagtgattactt

SEQ ID NO: 1004653 - DNA, 15 bp, Homo sapiens
gaaagtgattacttc

SEQ ID NO: 1004654 - DNA, 15 bp, Homo sapiens
aaagtgattacttct

SEQ ID NO: 1004655 - DNA, 15 bp, Homo sapiens
aagtgattacttctg

SEQ ID NO: 1004656 - DNA, 15 bp, Homo sapiens
agtgattacttctgg

SEQ ID NO: 1004657 - DNA, 15 bp, Homo sapiens
gtgattacttctggc

SEQ ID NO: 1004658 - DNA, 15 bp, Homo sapiens
tgattacttctggca

SEQ ID NO: 1004659 - DNA, 15 bp, Homo sapiens
gattacttctggcaa

SEQ ID NO: 1004660 - DNA, 15 bp, Homo sapiens
attacttctggcaaa

SEQ ID NO: 1004661 - DNA, 15 bp, Homo sapiens
ttacttctggcaaaa

SEQ ID NO: 1004662 - DNA, 15 bp, Homo sapiens
tacttctggcaaaac

SEQ ID NO: 1004663 - DNA, 15 bp, Homo sapiens
acttctggcaaaaca

SEQ ID NO: 1004664 - DNA, 15 bp, Homo sapiens
cttctggcaaaacat

SEQ ID NO: 1004665 - DNA, 15 bp, Homo sapiens
ttctggcaaaacata

SEQ ID NO: 1004666 - DNA, 15 bp, Homo sapiens
tctggcaaaacatag

SEQ ID NO: 1004667 - DNA, 15 bp, Homo sapiens
ctggcaaaacatagt

SEQ ID NO: 1004668 - DNA, 15 bp, Homo sapiens
tggcaaaacatagtg

SEQ ID NO: 1004669 - DNA, 15 bp, Homo sapiens
ggcaaaacatagtgg

SEQ ID NO: 1004670 - DNA, 15 bp, Homo sapiens
gcaaaacatagtggt

SEQ ID NO: 1004671 - DNA, 15 bp, Homo sapiens
caaaacatagtggtc

SEQ ID NO: 1004672 - DNA, 15 bp, Homo sapiens
aaaacatagtggtca

SEQ ID NO: 1004673 - DNA, 15 bp, Homo sapiens
aaacatagtggtcat

SEQ ID NO: 1004674 - DNA, 15 bp, Homo sapiens
aacatagtggtcatt

SEQ ID NO: 1004675 - DNA, 15 bp, Homo sapiens
acatagtggtcattg

SEQ ID NO: 1004676 - DNA, 15 bp, Homo sapiens
catagtggtcattgc

SEQ ID NO: 1004677 - DNA, 15 bp, Homo sapiens
atagtggtcattgct

SEQ ID NO: 1004678 - DNA, 15 bp, Homo sapiens
tagtggtcattgctt

SEQ ID NO: 1004679 - DNA, 15 bp, Homo sapiens
agtggtcattgctta

SEQ ID NO: 1004680 - DNA, 15 bp, Homo sapiens
gtggtcattgcttag

SEQ ID NO: 1004681 - DNA, 15 bp, Homo sapiens
tggtcattgcttagt

SEQ ID NO: 1004682 - DNA, 15 bp, Homo sapiens
ggtcattgcttagtt

SEQ ID NO: 1004683 - DNA, 15 bp, Homo sapiens
gtcattgcttagttg

SEQ ID NO: 1004684 - DNA, 15 bp, Homo sapiens
tcattgcttagttgt

SEQ ID NO: 1004685 - DNA, 15 bp, Homo sapiens
cattgcttagttgta

SEQ ID NO: 1004686 - DNA, 15 bp, Homo sapiens
attgcttagttgtaa

SEQ ID NO: 1004687 - DNA, 15 bp, Homo sapiens
ttgcttagttgtaat

SEQ ID NO: 1004688 - DNA, 15 bp, Homo sapiens
tgcttagttgtaatg

SEQ ID NO: 1004689 - DNA, 15 bp, Homo sapiens
gcttagttgtaatgc

SEQ ID NO: 1004690 - DNA, 15 bp, Homo sapiens
cttagttgtaatgcc

SEQ ID NO: 1004691 - DNA, 15 bp, Homo sapiens
ttagttgtaatgcca

SEQ ID NO: 1004692 - DNA, 15 bp, Homo sapiens
tagttgtaatgccac

SEQ ID NO: 1004693 - DNA, 15 bp, Homo sapiens
agttgtaatgccact

SEQ ID NO: 1004694 - DNA, 15 bp, Homo sapiens
gttgtaatgccactg

SEQ ID NO: 1004695 - DNA, 15 bp, Homo sapiens
ttgtaatgccactgt

SEQ ID NO: 1004696 - DNA, 15 bp, Homo sapiens
tgtaatgccactgtg

SEQ ID NO: 1004697 - DNA, 15 bp, Homo sapiens
gtaatgccactgtga

SEQ ID NO: 1004698 - DNA, 15 bp, Homo sapiens
taatgccactgtgat

SEQ ID NO: 1004699 - DNA, 15 bp, Homo sapiens
aatgccactgtgatg

SEQ ID NO: 1004700 - DNA, 15 bp, Homo sapiens
atgccactgtgatgt

SEQ ID NO: 1004701 - DNA, 15 bp, Homo sapiens
tgccactgtgatgtt

SEQ ID NO: 1004702 - DNA, 15 bp, Homo sapiens
gccactgtgatgttc

SEQ ID NO: 1004703 - DNA, 15 bp, Homo sapiens
ccactgtgatgttcc

SEQ ID NO: 1004704 - DNA, 15 bp, Homo sapiens
cactgtgatgttcca

SEQ ID NO: 1004705 - DNA, 15 bp, Homo sapiens
actgtgatgttccac

SEQ ID NO: 1004706 - DNA, 15 bp, Homo sapiens
ctgtgatgttccact

SEQ ID NO: 1004707 - DNA, 15 bp, Homo sapiens
tgtgatgttccactc

SEQ ID NO: 1004708 - DNA, 15 bp, Homo sapiens
gtgatgttccactcc

SEQ ID NO: 1004709 - DNA, 15 bp, Homo sapiens
tgatgttccactccc

SEQ ID NO: 1004710 - DNA, 15 bp, Homo sapiens
gatgttccactcccc

SEQ ID NO: 1004711 - DNA, 15 bp, Homo sapiens
atgttccactccccc

SEQ ID NO: 1004712 - DNA, 15 bp, Homo sapiens
tgttccactcccccc

SEQ ID NO: 1004713 - DNA, 15 bp, Homo sapiens
gttccactccccccg

SEQ ID NO: 1004714 - DNA, 15 bp, Homo sapiens
ttccactccccccgg

SEQ ID NO: 1004715 - DNA, 15 bp, Homo sapiens
tccactccccccgga

SEQ ID NO: 1004716 - DNA, 15 bp, Homo sapiens
ccactccccccggaa

SEQ ID NO: 1004717 - DNA, 15 bp, Homo sapiens
cactccccccggaaa

SEQ ID NO: 1004718 - DNA, 15 bp, Homo sapiens
actccccccggaaac

SEQ ID NO: 1004719 - DNA, 15 bp, Homo sapiens
ctccccccggaaacc

SEQ ID NO: 1004720 - DNA, 15 bp, Homo sapiens
tccccccggaaacca

SEQ ID NO: 1004721 - DNA, 15 bp, Homo sapiens
ccccccggaaaccaa

SEQ ID NO: 1004722 - DNA, 15 bp, Homo sapiens
cccccggaaaccaat

SEQ ID NO: 1004723 - DNA, 15 bp, Homo sapiens
ccccggaaaccaatc

SEQ ID NO: 1004724 - DNA, 15 bp, Homo sapiens
cccggaaaccaatct

SEQ ID NO: 1004725 - DNA, 15 bp, Homo sapiens
ccggaaaccaatctc

SEQ ID NO: 1004726 - DNA, 15 bp, Homo sapiens
cggaaaccaatctct

SEQ ID NO: 1004727 - DNA, 15 bp, Homo sapiens
ggaaaccaatctctt

SEQ ID NO: 1004728 - DNA, 15 bp, Homo sapiens
gaaaccaatctcttc

SEQ ID NO: 1004729 - DNA, 15 bp, Homo sapiens
aaaccaatctcttcc

SEQ ID NO: 1004730 - DNA, 15 bp, Homo sapiens
aaccaatctcttcca

SEQ ID NO: 1004731 - DNA, 15 bp, Homo sapiens
accaatctcttccag

SEQ ID NO: 1004732 - DNA, 15 bp, Homo sapiens
ccaatctcttccagt

SEQ ID NO: 1004733 - DNA, 15 bp, Homo sapiens
caatctcttccagtt

SEQ ID NO: 1004734 - DNA, 15 bp, Homo sapiens
aatctcttccagttc

SEQ ID NO: 1004735 - DNA, 15 bp, Homo sapiens
atctcttccagttcc

SEQ ID NO: 1004736 - DNA, 15 bp, Homo sapiens
tctcttccagttccc

SEQ ID NO: 1004737 - DNA, 15 bp, Homo sapiens
ctcttccagttccca

SEQ ID NO: 1004738 - DNA, 15 bp, Homo sapiens
tcttccagttcccaa

SEQ ID NO: 1004739 - DNA, 15 bp, Homo sapiens
cttccagttcccaag

SEQ ID NO: 1004740 - DNA, 15 bp, Homo sapiens
ttccagttcccaaga

SEQ ID NO: 1004741 - DNA, 15 bp, Homo sapiens
tccagttcccaagac

SEQ ID NO: 1004742 - DNA, 15 bp, Homo sapiens
ccagttcccaagaca

SEQ ID NO: 1004743 - DNA, 15 bp, Homo sapiens
cagttcccaagacac

SEQ ID NO: 1004744 - DNA, 15 bp, Homo sapiens
agttcccaagacaca

SEQ ID NO: 1004745 - DNA, 15 bp, Homo sapiens
gttcccaagacacaa

SEQ ID NO: 1004746 - DNA, 15 bp, Homo sapiens
ttcccaagacacaat

SEQ ID NO: 1004747 - DNA, 15 bp, Homo sapiens
tcccaagacacaata

SEQ ID NO: 1004748 - DNA, 15 bp, Homo sapiens
cccaagacacaatac

SEQ ID NO: 1004749 - DNA, 15 bp, Homo sapiens
ccaagacacaatact

SEQ ID NO: 1004750 - DNA, 15 bp, Homo sapiens
caagacacaatactt

SEQ ID NO: 1004751 - DNA, 15 bp, Homo sapiens
aagacacaatacttt

SEQ ID NO: 1004752 - DNA, 15 bp, Homo sapiens
agacacaatactttt

SEQ ID NO: 1004753 - DNA, 15 bp, Homo sapiens
gacacaatacttttc

SEQ ID NO: 1004754 - DNA, 15 bp, Homo sapiens
acacaatacttttct

SEQ ID NO: 1004755 - DNA, 15 bp, Homo sapiens
cacaatacttttcta

SEQ ID NO: 1004756 - DNA, 15 bp, Homo sapiens
acaatacttttctac

SEQ ID NO: 1004757 - DNA, 15 bp, Homo sapiens
caatacttttctact

SEQ ID NO: 1004758 - DNA, 15 bp, Homo sapiens
aatacttttctactg

SEQ ID NO: 1004759 - DNA, 15 bp, Homo sapiens
atacttttctactga

SEQ ID NO: 1004760 - DNA, 15 bp, Homo sapiens
tacttttctactgaa

SEQ ID NO: 1004761 - DNA, 15 bp, Homo sapiens
acttttctactgaat

SEQ ID NO: 1004762 - DNA, 15 bp, Homo sapiens
cttttctactgaatt

SEQ ID NO: 1004763 - DNA, 15 bp, Homo sapiens
ttttctactgaattg

SEQ ID NO: 1004764 - DNA, 15 bp, Homo sapiens
tttctactgaattgg

SEQ ID NO: 1004765 - DNA, 15 bp, Homo sapiens
ttctactgaattgga

SEQ ID NO: 1004766 - DNA, 15 bp, Homo sapiens
tctactgaattggag

SEQ ID NO: 1004767 - DNA, 15 bp, Homo sapiens
ctactgaattggagt

SEQ ID NO: 1004768 - DNA, 15 bp, Homo sapiens
tactgaattggagtt

SEQ ID NO: 1004769 - DNA, 15 bp, Homo sapiens
actgaattggagttc

SEQ ID NO: 1004770 - DNA, 15 bp, Homo sapiens
ctgaattggagttcc

SEQ ID NO: 1004771 - DNA, 15 bp, Homo sapiens
tgaattggagttcct

SEQ ID NO: 1004772 - DNA, 15 bp, Homo sapiens
gaattggagttcctt

SEQ ID NO: 1004773 - DNA, 15 bp, Homo sapiens
aattggagttcctta

SEQ ID NO: 1004774 - DNA, 15 bp, Homo sapiens
attggagttccttag

SEQ ID NO: 1004775 - DNA, 15 bp, Homo sapiens
ttggagttccttagc

SEQ ID NO: 1004776 - DNA, 15 bp, Homo sapiens
tggagttccttagcg

SEQ ID NO: 1004777 - DNA, 15 bp, Homo sapiens
ggagttccttagcgg

SEQ ID NO: 1004778 - DNA, 15 bp, Homo sapiens
gagttccttagcggg

SEQ ID NO: 1004779 - DNA, 15 bp, Homo sapiens
agttccttagcgggg

SEQ ID NO: 1004780 - DNA, 15 bp, Homo sapiens
gttccttagcggggg

SEQ ID NO: 1004781 - DNA, 15 bp, Homo sapiens
ttccttagcgggggt

SEQ ID NO: 1004782 - DNA, 15 bp, Homo sapiens
tccttagcgggggtc

SEQ ID NO: 1004783 - DNA, 15 bp, Homo sapiens
ccttagcgggggtct

SEQ ID NO: 1004784 - DNA, 15 bp, Homo sapiens
cttagcgggggtctt

SEQ ID NO: 1004785 - DNA, 15 bp, Homo sapiens
ttagcgggggtctta

SEQ ID NO: 1004786 - DNA, 15 bp, Homo sapiens
tagcgggggtcttag

SEQ ID NO: 1004787 - DNA, 15 bp, Homo sapiens
agcgggggtcttagt

SEQ ID NO: 1004788 - DNA, 15 bp, Homo sapiens
gcgggggtcttagtt

SEQ ID NO: 1004789 - DNA, 15 bp, Homo sapiens
cgggggtcttagttt

SEQ ID NO: 1004790 - DNA, 15 bp, Homo sapiens
gggggtcttagtttt

SEQ ID NO: 1004791 - DNA, 15 bp, Homo sapiens
ggggtcttagttttg

SEQ ID NO: 1004792 - DNA, 15 bp, Homo sapiens
gggtcttagttttgt

SEQ ID NO: 1004793 - DNA, 15 bp, Homo sapiens
ggtcttagttttgtt

SEQ ID NO: 1004794 - DNA, 15 bp, Homo sapiens
gtcttagttttgttc

SEQ ID NO: 1004795 - DNA, 15 bp, Homo sapiens
tcttagttttgttct

SEQ ID NO: 1004796 - DNA, 15 bp, Homo sapiens
cttagttttgttctg

SEQ ID NO: 1004797 - DNA, 15 bp, Homo sapiens
ttagttttgttctgc

SEQ ID NO: 1004798 - DNA, 15 bp, Homo sapiens
tagttttgttctgct

SEQ ID NO: 1004799 - DNA, 15 bp, Homo sapiens
agttttgttctgcta

SEQ ID NO: 1004800 - DNA, 15 bp, Homo sapiens
gttttgttctgctat

SEQ ID NO: 1004801 - DNA, 15 bp, Homo sapiens
ttttgttctgctatt

SEQ ID NO: 1004802 - DNA, 15 bp, Homo sapiens
tttgttctgctattc

SEQ ID NO: 1004803 - DNA, 15 bp, Homo sapiens
ttgttctgctattca

SEQ ID NO: 1004804 - DNA, 15 bp, Homo sapiens
tgttctgctattcag

SEQ ID NO: 1004805 - DNA, 15 bp, Homo sapiens
gttctgctattcagt

SEQ ID NO: 1004806 - DNA, 15 bp, Homo sapiens
ttctgctattcagtg

SEQ ID NO: 1004807 - DNA, 15 bp, Homo sapiens
tctgctattcagtgc

SEQ ID NO: 1004808 - DNA, 15 bp, Homo sapiens
ctgctattcagtgcc

SEQ ID NO: 1004809 - DNA, 15 bp, Homo sapiens
tgctattcagtgcct

SEQ ID NO: 1004810 - DNA, 15 bp, Homo sapiens
gctattcagtgcctt

SEQ ID NO: 1004811 - DNA, 15 bp, Homo sapiens
ctattcagtgccttt

SEQ ID NO: 1004812 - DNA, 15 bp, Homo sapiens
tattcagtgcctttg

SEQ ID NO: 1004813 - DNA, 15 bp, Homo sapiens
attcagtgcctttgt

SEQ ID NO: 1004814 - DNA, 15 bp, Homo sapiens
ttcagtgcctttgtc

SEQ ID NO: 1004815 - DNA, 15 bp, Homo sapiens
tcagtgcctttgtcc

SEQ ID NO: 1004816 - DNA, 15 bp, Homo sapiens
cagtgcctttgtccc

SEQ ID NO: 1004817 - DNA, 15 bp, Homo sapiens
agtgcctttgtccct

SEQ ID NO: 1004818 - DNA, 15 bp, Homo sapiens
gtgcctttgtcccta

SEQ ID NO: 1004819 - DNA, 15 bp, Homo sapiens
tgcctttgtccctat

SEQ ID NO: 1004820 - DNA, 15 bp, Homo sapiens
gcctttgtccctatc

SEQ ID NO: 1004821 - DNA, 15 bp, Homo sapiens
cctttgtccctatcc

SEQ ID NO: 1004822 - DNA, 15 bp, Homo sapiens
ctttgtccctatcct

SEQ ID NO: 1004823 - DNA, 15 bp, Homo sapiens
tttgtccctatccta

SEQ ID NO: 1004824 - DNA, 15 bp, Homo sapiens
ttgtccctatcctag

SEQ ID NO: 1004825 - DNA, 15 bp, Homo sapiens
tgtccctatcctagc

SEQ ID NO: 1004826 - DNA, 15 bp, Homo sapiens
gtccctatcctagcc

SEQ ID NO: 1004827 - DNA, 15 bp, Homo sapiens
tccctatcctagcca

SEQ ID NO: 1004828 - DNA, 15 bp, Homo sapiens
ccctatcctagccat

SEQ ID NO: 1004829 - DNA, 15 bp, Homo sapiens
cctatcctagccatt

SEQ ID NO: 1004830 - DNA, 15 bp, Homo sapiens
ctatcctagccatta

SEQ ID NO: 1004831 - DNA, 15 bp, Homo sapiens
tatcctagccattag

SEQ ID NO: 1004832 - DNA, 15 bp, Homo sapiens
atcctagccattagc

SEQ ID NO: 1004833 - DNA, 15 bp, Homo sapiens
tcctagccattagct

SEQ ID NO: 1004834 - DNA, 15 bp, Homo sapiens
cctagccattagctt

SEQ ID NO: 1004835 - DNA, 15 bp, Homo sapiens
ctagccattagcttt

SEQ ID NO: 1004836 - DNA, 15 bp, Homo sapiens
tagccattagctttc

SEQ ID NO: 1004837 - DNA, 15 bp, Homo sapiens
agccattagctttcc

SEQ ID NO: 1004838 - DNA, 15 bp, Homo sapiens
gccattagctttcct

SEQ ID NO: 1004839 - DNA, 15 bp, Homo sapiens
ccattagctttccta

SEQ ID NO: 1004840 - DNA, 15 bp, Homo sapiens
cattagctttcctat

SEQ ID NO: 1004841 - DNA, 15 bp, Homo sapiens
attagctttcctata

SEQ ID NO: 1004842 - DNA, 15 bp, Homo sapiens
ttagctttcctatag

SEQ ID NO: 1004843 - DNA, 15 bp, Homo sapiens
tagctttcctataga

SEQ ID NO: 1004844 - DNA, 15 bp, Homo sapiens
agctttcctatagat

SEQ ID NO: 1004845 - DNA, 15 bp, Homo sapiens
gctttcctatagatc

SEQ ID NO: 1004846 - DNA, 15 bp, Homo sapiens
ctttcctatagatcc

SEQ ID NO: 1004847 - DNA, 15 bp, Homo sapiens
tttcctatagatcct

SEQ ID NO: 1004848 - DNA, 15 bp, Homo sapiens
ttcctatagatcctt

SEQ ID NO: 1004849 - DNA, 15 bp, Homo sapiens
tcctatagatccttg

SEQ ID NO: 1004850 - DNA, 15 bp, Homo sapiens
cctatagatccttga

SEQ ID NO: 1004851 - DNA, 15 bp, Homo sapiens
ctatagatccttgat

SEQ ID NO: 1004852 - DNA, 15 bp, Homo sapiens
tatagatccttgatt

SEQ ID NO: 1004853 - DNA, 15 bp, Homo sapiens
atagatccttgattt

SEQ ID NO: 1004854 - DNA, 15 bp, Homo sapiens
tagatccttgatttc

SEQ ID NO: 1004855 - DNA, 15 bp, Homo sapiens
agatccttgatttcc

SEQ ID NO: 1004856 - DNA, 15 bp, Homo sapiens
gatccttgatttcct

SEQ ID NO: 1004857 - DNA, 15 bp, Homo sapiens
atccttgatttcctc

SEQ ID NO: 1004858 - DNA, 15 bp, Homo sapiens
tccttgatttcctca

SEQ ID NO: 1004859 - DNA, 15 bp, Homo sapiens
ccttgatttcctcat

SEQ ID NO: 1004860 - DNA, 15 bp, Homo sapiens
cttgatttcctcatc

SEQ ID NO: 1004861 - DNA, 15 bp, Homo sapiens
ttgatttcctcatct

SEQ ID NO: 1004862 - DNA, 15 bp, Homo sapiens
tgatttcctcatctg

SEQ ID NO: 1004863 - DNA, 15 bp, Homo sapiens
gatttcctcatctgt

SEQ ID NO: 1004864 - DNA, 15 bp, Homo sapiens
atttcctcatctgtt

SEQ ID NO: 1004865 - DNA, 15 bp, Homo sapiens
tttcctcatctgttg

SEQ ID NO: 1004866 - DNA, 15 bp, Homo sapiens
ttcctcatctgttga

SEQ ID NO: 1004867 - DNA, 15 bp, Homo sapiens
tcctcatctgttgaa

SEQ ID NO: 1004868 - DNA, 15 bp, Homo sapiens
cctcatctgttgaaa

SEQ ID NO: 1004869 - DNA, 15 bp, Homo sapiens
ctcatctgttgaaaa

SEQ ID NO: 1004870 - DNA, 15 bp, Homo sapiens
tcatctgttgaaaaa

SEQ ID NO: 1004871 - DNA, 15 bp, Homo sapiens
catctgttgaaaaag

SEQ ID NO: 1004872 - DNA, 15 bp, Homo sapiens
atctgttgaaaaaga

SEQ ID NO: 1004873 - DNA, 15 bp, Homo sapiens
tctgttgaaaaagaa

SEQ ID NO: 1004874 - DNA, 15 bp, Homo sapiens
ctgttgaaaaagaaa

SEQ ID NO: 1004875 - DNA, 15 bp, Homo sapiens
tgttgaaaaagaaat

SEQ ID NO: 1004876 - DNA, 15 bp, Homo sapiens
gttgaaaaagaaatg

SEQ ID NO: 1004877 - DNA, 15 bp, Homo sapiens
ttgaaaaagaaatgg

SEQ ID NO: 1004878 - DNA, 15 bp, Homo sapiens
tgaaaaagaaatggc

SEQ ID NO: 1004879 - DNA, 15 bp, Homo sapiens
gaaaaagaaatggct

SEQ ID NO: 1004880 - DNA, 15 bp, Homo sapiens
aaaaagaaatggcta

SEQ ID NO: 1004881 - DNA, 15 bp, Homo sapiens
aaaagaaatggctag

SEQ ID NO: 1004882 - DNA, 15 bp, Homo sapiens
aaagaaatggctaga

SEQ ID NO: 1004883 - DNA, 15 bp, Homo sapiens
aagaaatggctagaa

SEQ ID NO: 1004884 - DNA, 15 bp, Homo sapiens
agaaatggctagaaa

SEQ ID NO: 1004885 - DNA, 15 bp, Homo sapiens
gaaatggctagaaaa

SEQ ID NO: 1004886 - DNA, 15 bp, Homo sapiens
aaatggctagaaaat

SEQ ID NO: 1004887 - DNA, 15 bp, Homo sapiens
aatggctagaaaatc

SEQ ID NO: 1004888 - DNA, 15 bp, Homo sapiens
atggctagaaaatct

SEQ ID NO: 1004889 - DNA, 15 bp, Homo sapiens
tggctagaaaatctt

SEQ ID NO: 1004890 - DNA, 15 bp, Homo sapiens
ggctagaaaatcttt

SEQ ID NO: 1004891 - DNA, 15 bp, Homo sapiens
gctagaaaatctttt

SEQ ID NO: 1004892 - DNA, 15 bp, Homo sapiens
ctagaaaatctttta

SEQ ID NO: 1004893 - DNA, 15 bp, Homo sapiens
tagaaaatcttttag

SEQ ID NO: 1004894 - DNA, 15 bp, Homo sapiens
agaaaatcttttaga

SEQ ID NO: 1004895 - DNA, 15 bp, Homo sapiens
gaaaatcttttagat

SEQ ID NO: 1004896 - DNA, 15 bp, Homo sapiens
aaaatcttttagatt

SEQ ID NO: 1004897 - DNA, 15 bp, Homo sapiens
aaatcttttagattc

SEQ ID NO: 1004898 - DNA, 15 bp, Homo sapiens
aatcttttagattct

SEQ ID NO: 1004899 - DNA, 15 bp, Homo sapiens
atcttttagattctt

SEQ ID NO: 1004900 - DNA, 15 bp, Homo sapiens
tcttttagattcttt

SEQ ID NO: 1004901 - DNA, 15 bp, Homo sapiens
cttttagattctttc

SEQ ID NO: 1004902 - DNA, 15 bp, Homo sapiens
ttttagattctttca

SEQ ID NO: 1004903 - DNA, 15 bp, Homo sapiens
tttagattctttcaa

SEQ ID NO: 1004904 - DNA, 15 bp, Homo sapiens
ttagattctttcaag

SEQ ID NO: 1004905 - DNA, 15 bp, Homo sapiens
tagattctttcaagt

SEQ ID NO: 1004906 - DNA, 15 bp, Homo sapiens
agattctttcaagtt

SEQ ID NO: 1004907 - DNA, 15 bp, Homo sapiens
gattctttcaagttt

SEQ ID NO: 1004908 - DNA, 15 bp, Homo sapiens
attctttcaagttta

SEQ ID NO: 1004909 - DNA, 15 bp, Homo sapiens
ttctttcaagtttaa

SEQ ID NO: 1004910 - DNA, 15 bp, Homo sapiens
tctttcaagtttaaa

SEQ ID NO: 1004911 - DNA, 15 bp, Homo sapiens
ctttcaagtttaaat

SEQ ID NO: 1004912 - DNA, 15 bp, Homo sapiens
tttcaagtttaaata

SEQ ID NO: 1004913 - DNA, 15 bp, Homo sapiens
ttcaagtttaaatat

SEQ ID NO: 1004914 - DNA, 15 bp, Homo sapiens
tcaagtttaaatatt

SEQ ID NO: 1004915 - DNA, 15 bp, Homo sapiens
caagtttaaatattc

SEQ ID NO: 1004916 - DNA, 15 bp, Homo sapiens
aagtttaaatattcg

SEQ ID NO: 1004917 - DNA, 15 bp, Homo sapiens
agtttaaatattcga

SEQ ID NO: 1004918 - DNA, 15 bp, Homo sapiens
gtttaaatattcgat

SEQ ID NO: 1004919 - DNA, 15 bp, Homo sapiens
tttaaatattcgatg

SEQ ID NO: 1004920 - DNA, 15 bp, Homo sapiens
ttaaatattcgatga

SEQ ID NO: 1004921 - DNA, 15 bp, Homo sapiens
taaatattcgatgat

SEQ ID NO: 1004922 - DNA, 15 bp, Homo sapiens
aaatattcgatgatt

SEQ ID NO: 1004923 - DNA, 15 bp, Homo sapiens
aatattcgatgattt

SEQ ID NO: 1004924 - DNA, 15 bp, Homo sapiens
atattcgatgatttt

SEQ ID NO: 1004925 - DNA, 15 bp, Homo sapiens
tattcgatgatttta

SEQ ID NO: 1004926 - DNA, 15 bp, Homo sapiens
attcgatgattttaa

SEQ ID NO: 1004927 - DNA, 15 bp, Homo sapiens
ttcgatgattttaat

SEQ ID NO: 1004928 - DNA, 15 bp, Homo sapiens
tcgatgattttaata

SEQ ID NO: 1004929 - DNA, 15 bp, Homo sapiens
cgatgattttaatat

SEQ ID NO: 1004930 - DNA, 15 bp, Homo sapiens
gatgattttaatatt

SEQ ID NO: 1004931 - DNA, 15 bp, Homo sapiens
atgattttaatattc

SEQ ID NO: 1004932 - DNA, 15 bp, Homo sapiens
tgattttaatattct

SEQ ID NO: 1004933 - DNA, 15 bp, Homo sapiens
gattttaatattcta

SEQ ID NO: 1004934 - DNA, 15 bp, Homo sapiens
attttaatattctaa

SEQ ID NO: 1004935 - DNA, 15 bp, Homo sapiens
ttttaatattctaac

SEQ ID NO: 1004936 - DNA, 15 bp, Homo sapiens
tttaatattctaaca

SEQ ID NO: 1004937 - DNA, 15 bp, Homo sapiens
ttaatattctaacag

SEQ ID NO: 1004938 - DNA, 15 bp, Homo sapiens
taatattctaacagc

SEQ ID NO: 1004939 - DNA, 15 bp, Homo sapiens
aatattctaacagca

SEQ ID NO: 1004940 - DNA, 15 bp, Homo sapiens
atattctaacagcat

SEQ ID NO: 1004941 - DNA, 15 bp, Homo sapiens
tattctaacagcatg

SEQ ID NO: 1004942 - DNA, 15 bp, Homo sapiens
attctaacagcatgt

SEQ ID NO: 1004943 - DNA, 15 bp, Homo sapiens
ttctaacagcatgtc

SEQ ID NO: 1004944 - DNA, 15 bp, Homo sapiens
tctaacagcatgtct

SEQ ID NO: 1004945 - DNA, 15 bp, Homo sapiens
ctaacagcatgtctc

SEQ ID NO: 1004946 - DNA, 15 bp, Homo sapiens
taacagcatgtctct

SEQ ID NO: 1004947 - DNA, 15 bp, Homo sapiens
aacagcatgtctctg

SEQ ID NO: 1004948 - DNA, 15 bp, Homo sapiens
acagcatgtctctgt

SEQ ID NO: 1004949 - DNA, 15 bp, Homo sapiens
cagcatgtctctgtg

SEQ ID NO: 1004950 - DNA, 15 bp, Homo sapiens
agcatgtctctgtga

SEQ ID NO: 1004951 - DNA, 15 bp, Homo sapiens
gcatgtctctgtgac

SEQ ID NO: 1004952 - DNA, 15 bp, Homo sapiens
catgtctctgtgacc

SEQ ID NO: 1004953 - DNA, 15 bp, Homo sapiens
atgtctctgtgaccc

SEQ ID NO: 1004954 - DNA, 15 bp, Homo sapiens
tgtctctgtgaccca

SEQ ID NO: 1004955 - DNA, 15 bp, Homo sapiens
gtctctgtgacccag

SEQ ID NO: 1004956 - DNA, 15 bp, Homo sapiens
tctctgtgacccagc

SEQ ID NO: 1004957 - DNA, 15 bp, Homo sapiens
ctctgtgacccagca

SEQ ID NO: 1004958 - DNA, 15 bp, Homo sapiens
tctgtgacccagcag

SEQ ID NO: 1004959 - DNA, 15 bp, Homo sapiens
ctgtgacccagcagt

SEQ ID NO: 1004960 - DNA, 15 bp, Homo sapiens
tgtgacccagcagtc

SEQ ID NO: 1004961 - DNA, 15 bp, Homo sapiens
gtgacccagcagtct

SEQ ID NO: 1004962 - DNA, 15 bp, Homo sapiens
tgacccagcagtcta

SEQ ID NO: 1004963 - DNA, 15 bp, Homo sapiens
gacccagcagtctat

SEQ ID NO: 1004964 - DNA, 15 bp, Homo sapiens
acccagcagtctatt

SEQ ID NO: 1004965 - DNA, 15 bp, Homo sapiens
cccagcagtctattg

SEQ ID NO: 1004966 - DNA, 15 bp, Homo sapiens
ccagcagtctattgg

SEQ ID NO: 1004967 - DNA, 15 bp, Homo sapiens
cagcagtctattggg

SEQ ID NO: 1004968 - DNA, 15 bp, Homo sapiens
agcagtctattggga

SEQ ID NO: 1004969 - DNA, 15 bp, Homo sapiens
gcagtctattgggag

SEQ ID NO: 1004970 - DNA, 15 bp, Homo sapiens
cagtctattgggagc

SEQ ID NO: 1004971 - DNA, 15 bp, Homo sapiens
agtctattgggagct

SEQ ID NO: 1004972 - DNA, 15 bp, Homo sapiens
gtctattgggagctg

SEQ ID NO: 1004973 - DNA, 15 bp, Homo sapiens
tctattgggagctga

SEQ ID NO: 1004974 - DNA, 15 bp, Homo sapiens
ctattgggagctgac

SEQ ID NO: 1004975 - DNA, 15 bp, Homo sapiens
tattgggagctgacc

SEQ ID NO: 1004976 - DNA, 15 bp, Homo sapiens
attgggagctgaccc

SEQ ID NO: 1004977 - DNA, 15 bp, Homo sapiens
ttgggagctgacccc

SEQ ID NO: 1004978 - DNA, 15 bp, Homo sapiens
tgggagctgacccca

SEQ ID NO: 1004979 - DNA, 15 bp, Homo sapiens
gggagctgaccccac

SEQ ID NO: 1004980 - DNA, 15 bp, Homo sapiens
ggagctgaccccact

SEQ ID NO: 1004981 - DNA, 15 bp, Homo sapiens
gagctgaccccactt

SEQ ID NO: 1004982 - DNA, 15 bp, Homo sapiens
agctgaccccacttg

SEQ ID NO: 1004983 - DNA, 15 bp, Homo sapiens
gctgaccccacttga

SEQ ID NO: 1004984 - DNA, 15 bp, Homo sapiens
ctgaccccacttgat

SEQ ID NO: 1004985 - DNA, 15 bp, Homo sapiens
tgaccccacttgatt

SEQ ID NO: 1004986 - DNA, 15 bp, Homo sapiens
gaccccacttgattt

SEQ ID NO: 1004987 - DNA, 15 bp, Homo sapiens
accccacttgattta

SEQ ID NO: 1004988 - DNA, 15 bp, Homo sapiens
ccccacttgatttac

SEQ ID NO: 1004989 - DNA, 15 bp, Homo sapiens
cccacttgatttacc

SEQ ID NO: 1004990 - DNA, 15 bp, Homo sapiens
ccacttgatttacca

SEQ ID NO: 1004991 - DNA, 15 bp, Homo sapiens
cacttgatttaccaa

SEQ ID NO: 1004992 - DNA, 15 bp, Homo sapiens
acttgatttaccaaa

SEQ ID NO: 1004993 - DNA, 15 bp, Homo sapiens
cttgatttaccaaac

SEQ ID NO: 1004994 - DNA, 15 bp, Homo sapiens
ttgatttaccaaact

SEQ ID NO: 1004995 - DNA, 15 bp, Homo sapiens
tgatttaccaaactc

SEQ ID NO: 1004996 - DNA, 15 bp, Homo sapiens
gatttaccaaactct

SEQ ID NO: 1004997 - DNA, 15 bp, Homo sapiens
atttaccaaactctt

SEQ ID NO: 1004998 - DNA, 15 bp, Homo sapiens
tttaccaaactcttt

SEQ ID NO: 1004999 - DNA, 15 bp, Homo sapiens
ttaccaaactctttc

SEQ ID NO: 1005000 - DNA, 15 bp, Homo sapiens
taccaaactctttcc

SEQ ID NO: 1005001 - DNA, 15 bp, Homo sapiens
accaaactctttccc

SEQ ID NO: 1005002 - DNA, 15 bp, Homo sapiens
ccaaactctttccca

SEQ ID NO: 1005003 - DNA, 15 bp, Homo sapiens
caaactctttcccat

SEQ ID NO: 1005004 - DNA, 15 bp, Homo sapiens
aaactctttcccatt

SEQ ID NO: 1005005 - DNA, 15 bp, Homo sapiens
aactctttcccatta

SEQ ID NO: 1005006 - DNA, 15 bp, Homo sapiens
actctttcccattat

SEQ ID NO: 1005007 - DNA, 15 bp, Homo sapiens
ctctttcccattatg

SEQ ID NO: 1005008 - DNA, 15 bp, Homo sapiens
tctttcccattatgc

SEQ ID NO: 1005009 - DNA, 15 bp, Homo sapiens
ctttcccattatgcc

SEQ ID NO: 1005010 - DNA, 15 bp, Homo sapiens
tttcccattatgcct

SEQ ID NO: 1005011 - DNA, 15 bp, Homo sapiens
ttcccattatgcctc

SEQ ID NO: 1005012 - DNA, 15 bp, Homo sapiens
tcccattatgcctct

SEQ ID NO: 1005013 - DNA, 15 bp, Homo sapiens
cccattatgcctctg

SEQ ID NO: 1005014 - DNA, 15 bp, Homo sapiens
ccattatgcctctgc

SEQ ID NO: 1005015 - DNA, 15 bp, Homo sapiens
cattatgcctctgca

SEQ ID NO: 1005016 - DNA, 15 bp, Homo sapiens
attatgcctctgcat

SEQ ID NO: 1005017 - DNA, 15 bp, Homo sapiens
ttatgcctctgcatg

SEQ ID NO: 1005018 - DNA, 15 bp, Homo sapiens
tatgcctctgcatgc

SEQ ID NO: 1005019 - DNA, 15 bp, Homo sapiens
atgcctctgcatgca

SEQ ID NO: 1005020 - DNA, 15 bp, Homo sapiens
tgcctctgcatgcac

SEQ ID NO: 1005021 - DNA, 15 bp, Homo sapiens
gcctctgcatgcacc

SEQ ID NO: 1005022 - DNA, 15 bp, Homo sapiens
cctctgcatgcacct

SEQ ID NO: 1005023 - DNA, 15 bp, Homo sapiens
ctctgcatgcaccta

SEQ ID NO: 1005024 - DNA, 15 bp, Homo sapiens
tctgcatgcacctat

SEQ ID NO: 1005025 - DNA, 15 bp, Homo sapiens
ctgcatgcacctatg

SEQ ID NO: 1005026 - DNA, 15 bp, Homo sapiens
tgcatgcacctatgt

SEQ ID NO: 1005027 - DNA, 15 bp, Homo sapiens
gcatgcacctatgtt

SEQ ID NO: 1005028 - DNA, 15 bp, Homo sapiens
catgcacctatgttc

SEQ ID NO: 1005029 - DNA, 15 bp, Homo sapiens
atgcacctatgttcc

SEQ ID NO: 1005030 - DNA, 15 bp, Homo sapiens
tgcacctatgttcca

SEQ ID NO: 1005031 - DNA, 15 bp, Homo sapiens
gcacctatgttccag

SEQ ID NO: 1005032 - DNA, 15 bp, Homo sapiens
cacctatgttccagg

SEQ ID NO: 1005033 - DNA, 15 bp, Homo sapiens
acctatgttccaggc

SEQ ID NO: 1005034 - DNA, 15 bp, Homo sapiens
cctatgttccaggca

SEQ ID NO: 1005035 - DNA, 15 bp, Homo sapiens
ctatgttccaggcag

SEQ ID NO: 1005036 - DNA, 15 bp, Homo sapiens
tatgttccaggcagg

SEQ ID NO: 1005037 - DNA, 15 bp, Homo sapiens
atgttccaggcaggt

SEQ ID NO: 1005038 - DNA, 15 bp, Homo sapiens
tgttccaggcaggtc

SEQ ID NO: 1005039 - DNA, 15 bp, Homo sapiens
gttccaggcaggtca

SEQ ID NO: 1005040 - DNA, 15 bp, Homo sapiens
ttccaggcaggtcac

SEQ ID NO: 1005041 - DNA, 15 bp, Homo sapiens
tccaggcaggtcacc

SEQ ID NO: 1005042 - DNA, 15 bp, Homo sapiens
ccaggcaggtcacct

SEQ ID NO: 1005043 - DNA, 15 bp, Homo sapiens
caggcaggtcacctc

SEQ ID NO: 1005044 - DNA, 15 bp, Homo sapiens
aggcaggtcacctca

SEQ ID NO: 1005045 - DNA, 15 bp, Homo sapiens
ggcaggtcacctcag

SEQ ID NO: 1005046 - DNA, 15 bp, Homo sapiens
gcaggtcacctcagt

SEQ ID NO: 1005047 - DNA, 15 bp, Homo sapiens
caggtcacctcagtc

SEQ ID NO: 1005048 - DNA, 15 bp, Homo sapiens
aggtcacctcagtct

SEQ ID NO: 1005049 - DNA, 15 bp, Homo sapiens
ggtcacctcagtctc

SEQ ID NO: 1005050 - DNA, 15 bp, Homo sapiens
gtcacctcagtctct

SEQ ID NO: 1005051 - DNA, 15 bp, Homo sapiens
tcacctcagtctctt

SEQ ID NO: 1005052 - DNA, 15 bp, Homo sapiens
cacctcagtctcttc

SEQ ID NO: 1005053 - DNA, 15 bp, Homo sapiens
acctcagtctcttct

SEQ ID NO: 1005054 - DNA, 15 bp, Homo sapiens
cctcagtctcttctg

SEQ ID NO: 1005055 - DNA, 15 bp, Homo sapiens
ctcagtctcttctgt

SEQ ID NO: 1005056 - DNA, 15 bp, Homo sapiens
tcagtctcttctgtg

SEQ ID NO: 1005057 - DNA, 15 bp, Homo sapiens
cagtctcttctgtgt

SEQ ID NO: 1005058 - DNA, 15 bp, Homo sapiens
agtctcttctgtgtg

SEQ ID NO: 1005059 - DNA, 15 bp, Homo sapiens
gtctcttctgtgtgt

SEQ ID NO: 1005060 - DNA, 15 bp, Homo sapiens
tctcttctgtgtgta

SEQ ID NO: 1005061 - DNA, 15 bp, Homo sapiens
ctcttctgtgtgtat

SEQ ID NO: 1005062 - DNA, 15 bp, Homo sapiens
tcttctgtgtgtatc

SEQ ID NO: 1005063 - DNA, 15 bp, Homo sapiens
cttctgtgtgtatca

SEQ ID NO: 1005064 - DNA, 15 bp, Homo sapiens
ttctgtgtgtatcat

SEQ ID NO: 1005065 - DNA, 15 bp, Homo sapiens
tctgtgtgtatcatg

SEQ ID NO: 1005066 - DNA, 15 bp, Homo sapiens
ctgtgtgtatcatgc

SEQ ID NO: 1005067 - DNA, 15 bp, Homo sapiens
tgtgtgtatcatgct

SEQ ID NO: 1005068 - DNA, 15 bp, Homo sapiens
gtgtgtatcatgctt

SEQ ID NO: 1005069 - DNA, 15 bp, Homo sapiens
tgtgtatcatgcttc

SEQ ID NO: 1005070 - DNA, 15 bp, Homo sapiens
gtgtatcatgcttct

SEQ ID NO: 1005071 - DNA, 15 bp, Homo sapiens
tgtatcatgcttctt

SEQ ID NO: 1005072 - DNA, 15 bp, Homo sapiens
gtatcatgcttcttc

SEQ ID NO: 1005073 - DNA, 15 bp, Homo sapiens
tatcatgcttcttcc

SEQ ID NO: 1005074 - DNA, 15 bp, Homo sapiens
atcatgcttcttccc

SEQ ID NO: 1005075 - DNA, 15 bp, Homo sapiens
tcatgcttcttccca

SEQ ID NO: 1005076 - DNA, 15 bp, Homo sapiens
catgcttcttcccac

SEQ ID NO: 1005077 - DNA, 15 bp, Homo sapiens
atgcttcttcccact

SEQ ID NO: 1005078 - DNA, 15 bp, Homo sapiens
tgcttcttcccactt

SEQ ID NO: 1005079 - DNA, 15 bp, Homo sapiens
gcttcttcccacttc

SEQ ID NO: 1005080 - DNA, 15 bp, Homo sapiens
cttcttcccacttct

SEQ ID NO: 1005081 - DNA, 15 bp, Homo sapiens
ttcttcccacttctt

SEQ ID NO: 1005082 - DNA, 15 bp, Homo sapiens
tcttcccacttcttg

SEQ ID NO: 1005083 - DNA, 15 bp, Homo sapiens
cttcccacttcttgg

SEQ ID NO: 1005084 - DNA, 15 bp, Homo sapiens
ttcccacttcttggc

SEQ ID NO: 1005085 - DNA, 15 bp, Homo sapiens
tcccacttcttggcc

SEQ ID NO: 1005086 - DNA, 15 bp, Homo sapiens
cccacttcttggcct

SEQ ID NO: 1005087 - DNA, 15 bp, Homo sapiens
ccacttcttggcctt

SEQ ID NO: 1005088 - DNA, 15 bp, Homo sapiens
cacttcttggccttt

SEQ ID NO: 1005089 - DNA, 15 bp, Homo sapiens
acttcttggccttta

SEQ ID NO: 1005090 - DNA, 15 bp, Homo sapiens
cttcttggcctttat

SEQ ID NO: 1005091 - DNA, 15 bp, Homo sapiens
ttcttggcctttatt

SEQ ID NO: 1005092 - DNA, 15 bp, Homo sapiens
tcttggcctttattt

SEQ ID NO: 1005093 - DNA, 15 bp, Homo sapiens
cttggcctttatttc

SEQ ID NO: 1005094 - DNA, 15 bp, Homo sapiens
ttggcctttatttct

SEQ ID NO: 1005095 - DNA, 15 bp, Homo sapiens
tggcctttatttctg

SEQ ID NO: 1005096 - DNA, 15 bp, Homo sapiens
ggcctttatttctgc

SEQ ID NO: 1005097 - DNA, 15 bp, Homo sapiens
gcctttatttctgcc

SEQ ID NO: 1005098 - DNA, 15 bp, Homo sapiens
cctttatttctgcca

SEQ ID NO: 1005099 - DNA, 15 bp, Homo sapiens
ctttatttctgccag

SEQ ID NO: 1005100 - DNA, 15 bp, Homo sapiens
tttatttctgccagt

SEQ ID NO: 1005101 - DNA, 15 bp, Homo sapiens
ttatttctgccagtc

SEQ ID NO: 1005102 - DNA, 15 bp, Homo sapiens
tatttctgccagtct

SEQ ID NO: 1005103 - DNA, 15 bp, Homo sapiens
atttctgccagtctc

SEQ ID NO: 1005104 - DNA, 15 bp, Homo sapiens
tttctgccagtctct

SEQ ID NO: 1005105 - DNA, 15 bp, Homo sapiens
ttctgccagtctctg

SEQ ID NO: 1005106 - DNA, 15 bp, Homo sapiens
tctgccagtctctgc

SEQ ID NO: 1005107 - DNA, 15 bp, Homo sapiens
ctgccagtctctgcc

SEQ ID NO: 1005108 - DNA, 15 bp, Homo sapiens
tgccagtctctgcct

SEQ ID NO: 1005109 - DNA, 15 bp, Homo sapiens
gccagtctctgcctg

SEQ ID NO: 1005110 - DNA, 15 bp, Homo sapiens
ccagtctctgcctga

SEQ ID NO: 1005111 - DNA, 15 bp, Homo sapiens
cagtctctgcctgaa

SEQ ID NO: 1005112 - DNA, 15 bp, Homo sapiens
agtctctgcctgaat

SEQ ID NO: 1005113 - DNA, 15 bp, Homo sapiens
gtctctgcctgaatg

SEQ ID NO: 1005114 - DNA, 15 bp, Homo sapiens
tctctgcctgaatgc

SEQ ID NO: 1005115 - DNA, 15 bp, Homo sapiens
ctctgcctgaatgct

SEQ ID NO: 1005116 - DNA, 15 bp, Homo sapiens
tctgcctgaatgctt

SEQ ID NO: 1005117 - DNA, 15 bp, Homo sapiens
ctgcctgaatgcttt

SEQ ID NO: 1005118 - DNA, 15 bp, Homo sapiens
tgcctgaatgcttta

SEQ ID NO: 1005119 - DNA, 15 bp, Homo sapiens
gcctgaatgctttaa

SEQ ID NO: 1005120 - DNA, 15 bp, Homo sapiens
cctgaatgctttaat

SEQ ID NO: 1005121 - DNA, 15 bp, Homo sapiens
ctgaatgctttaatt

SEQ ID NO: 1005122 - DNA, 15 bp, Homo sapiens
tgaatgctttaattc

SEQ ID NO: 1005123 - DNA, 15 bp, Homo sapiens
gaatgctttaattcc

SEQ ID NO: 1005124 - DNA, 15 bp, Homo sapiens
aatgctttaattcct

SEQ ID NO: 1005125 - DNA, 15 bp, Homo sapiens
atgctttaattcctc

SEQ ID NO: 1005126 - DNA, 15 bp, Homo sapiens
tgctttaattcctcc

SEQ ID NO: 1005127 - DNA, 15 bp, Homo sapiens
gctttaattcctcct

SEQ ID NO: 1005128 - DNA, 15 bp, Homo sapiens
ctttaattcctcctt

SEQ ID NO: 1005129 - DNA, 15 bp, Homo sapiens
tttaattcctccttt

SEQ ID NO: 1005130 - DNA, 15 bp, Homo sapiens
ttaattcctcctttg

SEQ ID NO: 1005131 - DNA, 15 bp, Homo sapiens
taattcctcctttgt

SEQ ID NO: 1005132 - DNA, 15 bp, Homo sapiens
aattcctcctttgtg

SEQ ID NO: 1005133 - DNA, 15 bp, Homo sapiens
attcctcctttgtgc

SEQ ID NO: 1005134 - DNA, 15 bp, Homo sapiens
ttcctcctttgtgct

SEQ ID NO: 1005135 - DNA, 15 bp, Homo sapiens
tcctcctttgtgctt

SEQ ID NO: 1005136 - DNA, 15 bp, Homo sapiens
cctcctttgtgcttt

SEQ ID NO: 1005137 - DNA, 15 bp, Homo sapiens
ctcctttgtgctttt

SEQ ID NO: 1005138 - DNA, 15 bp, Homo sapiens
tcctttgtgcttttc

SEQ ID NO: 1005139 - DNA, 15 bp, Homo sapiens
cctttgtgcttttct

SEQ ID NO: 1005140 - DNA, 15 bp, Homo sapiens
ctttgtgcttttcta

SEQ ID NO: 1005141 - DNA, 15 bp, Homo sapiens
tttgtgcttttctaa

SEQ ID NO: 1005142 - DNA, 15 bp, Homo sapiens
ttgtgcttttctaat

SEQ ID NO: 1005143 - DNA, 15 bp, Homo sapiens
tgtgcttttctaatt

SEQ ID NO: 1005144 - DNA, 15 bp, Homo sapiens
gtgcttttctaattc

SEQ ID NO: 1005145 - DNA, 15 bp, Homo sapiens
tgcttttctaattcc

SEQ ID NO: 1005146 - DNA, 15 bp, Homo sapiens
gcttttctaattcct

SEQ ID NO: 1005147 - DNA, 15 bp, Homo sapiens
cttttctaattcctg

SEQ ID NO: 1005148 - DNA, 15 bp, Homo sapiens
ttttctaattcctgt

SEQ ID NO: 1005149 - DNA, 15 bp, Homo sapiens
tttctaattcctgtc

SEQ ID NO: 1005150 - DNA, 15 bp, Homo sapiens
ttctaattcctgtcc

SEQ ID NO: 1005151 - DNA, 15 bp, Homo sapiens
tctaattcctgtcca

SEQ ID NO: 1005152 - DNA, 15 bp, Homo sapiens
ctaattcctgtccat

SEQ ID NO: 1005153 - DNA, 15 bp, Homo sapiens
taattcctgtccatc

SEQ ID NO: 1005154 - DNA, 15 bp, Homo sapiens
aattcctgtccatcc

SEQ ID NO: 1005155 - DNA, 15 bp, Homo sapiens
attcctgtccatcct

SEQ ID NO: 1005156 - DNA, 15 bp, Homo sapiens
ttcctgtccatcctt

SEQ ID NO: 1005157 - DNA, 15 bp, Homo sapiens
tcctgtccatccttc

SEQ ID NO: 1005158 - DNA, 15 bp, Homo sapiens
cctgtccatccttca

SEQ ID NO: 1005159 - DNA, 15 bp, Homo sapiens
ctgtccatccttcaa

SEQ ID NO: 1005160 - DNA, 15 bp, Homo sapiens
tgtccatccttcaat

SEQ ID NO: 1005161 - DNA, 15 bp, Homo sapiens
gtccatccttcaatg

SEQ ID NO: 1005162 - DNA, 15 bp, Homo sapiens
tccatccttcaatgt

SEQ ID NO: 1005163 - DNA, 15 bp, Homo sapiens
ccatccttcaatgtt

SEQ ID NO: 1005164 - DNA, 15 bp, Homo sapiens
catccttcaatgttc

SEQ ID NO: 1005165 - DNA, 15 bp, Homo sapiens
atccttcaatgttca

SEQ ID NO: 1005166 - DNA, 15 bp, Homo sapiens
tccttcaatgttcag

SEQ ID NO: 1005167 - DNA, 15 bp, Homo sapiens
ccttcaatgttcagc

SEQ ID NO: 1005168 - DNA, 15 bp, Homo sapiens
cttcaatgttcagct

SEQ ID NO: 1005169 - DNA, 15 bp, Homo sapiens
ttcaatgttcagctc

SEQ ID NO: 1005170 - DNA, 15 bp, Homo sapiens
tcaatgttcagctca

SEQ ID NO: 1005171 - DNA, 15 bp, Homo sapiens
caatgttcagctcag

SEQ ID NO: 1005172 - DNA, 15 bp, Homo sapiens
aatgttcagctcaga

SEQ ID NO: 1005173 - DNA, 15 bp, Homo sapiens
atgttcagctcagat

SEQ ID NO: 1005174 - DNA, 15 bp, Homo sapiens
tgttcagctcagatt

SEQ ID NO: 1005175 - DNA, 15 bp, Homo sapiens
gttcagctcagattt

SEQ ID NO: 1005176 - DNA, 15 bp, Homo sapiens
ttcagctcagatttc

SEQ ID NO: 1005177 - DNA, 15 bp, Homo sapiens
tcagctcagatttca

SEQ ID NO: 1005178 - DNA, 15 bp, Homo sapiens
cagctcagatttcat

SEQ ID NO: 1005179 - DNA, 15 bp, Homo sapiens
agctcagatttcatt

SEQ ID NO: 1005180 - DNA, 15 bp, Homo sapiens
gctcagatttcattt

SEQ ID NO: 1005181 - DNA, 15 bp, Homo sapiens
ctcagatttcatttt

SEQ ID NO: 1005182 - DNA, 15 bp, Homo sapiens
tcagatttcattttt

SEQ ID NO: 1005183 - DNA, 15 bp, Homo sapiens
cagatttcatttttt

SEQ ID NO: 1005184 - DNA, 15 bp, Homo sapiens
agatttcattttttt

SEQ ID NO: 1005185 - DNA, 15 bp, Homo sapiens
gatttcatttttttt

SEQ ID NO: 1005186 - DNA, 15 bp, Homo sapiens
atttcattttttttt

SEQ ID NO: 1005187 - DNA, 15 bp, Homo sapiens
tttcatttttttttt

SEQ ID NO: 1005188 - DNA, 15 bp, Homo sapiens
ttcattttttttttt

SEQ ID NO: 1005189 - DNA, 15 bp, Homo sapiens
tcatttttttttttt

SEQ ID NO: 1005190 - DNA, 15 bp, Homo sapiens
cattttttttttttc

SEQ ID NO: 1005191 - DNA, 15 bp, Homo sapiens
attttttttttttcc

SEQ ID NO: 1005192 - DNA, 15 bp, Homo sapiens
ttttttttttttccc

SEQ ID NO: 1005193 - DNA, 15 bp, Homo sapiens
tttttttttttcccc

SEQ ID NO: 1005194 - DNA, 15 bp, Homo sapiens
ttttttttttcccca

SEQ ID NO: 1005195 - DNA, 15 bp, Homo sapiens
tttttttttccccat

SEQ ID NO: 1005196 - DNA, 15 bp, Homo sapiens
ttttttttccccatg

SEQ ID NO: 1005197 - DNA, 15 bp, Homo sapiens
tttttttccccatga

SEQ ID NO: 1005198 - DNA, 15 bp, Homo sapiens
ttttttccccatgag

SEQ ID NO: 1005199 - DNA, 15 bp, Homo sapiens
tttttccccatgagg

SEQ ID NO: 1005200 - DNA, 15 bp, Homo sapiens
ttttccccatgaggt

SEQ ID NO: 1005201 - DNA, 15 bp, Homo sapiens
tttccccatgaggtt

SEQ ID NO: 1005202 - DNA, 15 bp, Homo sapiens
ttccccatgaggttg

SEQ ID NO: 1005203 - DNA, 15 bp, Homo sapiens
tccccatgaggttgt

SEQ ID NO: 1005204 - DNA, 15 bp, Homo sapiens
ccccatgaggttgtt

SEQ ID NO: 1005205 - DNA, 15 bp, Homo sapiens
cccatgaggttgttt

SEQ ID NO: 1005206 - DNA, 15 bp, Homo sapiens
ccatgaggttgtttc

SEQ ID NO: 1005207 - DNA, 15 bp, Homo sapiens
catgaggttgtttca

SEQ ID NO: 1005208 - DNA, 15 bp, Homo sapiens
atgaggttgtttcag

SEQ ID NO: 1005209 - DNA, 15 bp, Homo sapiens
tgaggttgtttcaga

SEQ ID NO: 1005210 - DNA, 15 bp, Homo sapiens
gaggttgtttcagac

SEQ ID NO: 1005211 - DNA, 15 bp, Homo sapiens
aggttgtttcagact

SEQ ID NO: 1005212 - DNA, 15 bp, Homo sapiens
ggttgtttcagacta

SEQ ID NO: 1005213 - DNA, 15 bp, Homo sapiens
gttgtttcagactaa

SEQ ID NO: 1005214 - DNA, 15 bp, Homo sapiens
ttgtttcagactaaa

SEQ ID NO: 1005215 - DNA, 15 bp, Homo sapiens
tgtttcagactaaac

SEQ ID NO: 1005216 - DNA, 15 bp, Homo sapiens
gtttcagactaaact

SEQ ID NO: 1005217 - DNA, 15 bp, Homo sapiens
tttcagactaaactc

SEQ ID NO: 1005218 - DNA, 15 bp, Homo sapiens
ttcagactaaactct

SEQ ID NO: 1005219 - DNA, 15 bp, Homo sapiens
tcagactaaactctg

SEQ ID NO: 1005220 - DNA, 15 bp, Homo sapiens
cagactaaactctgc

SEQ ID NO: 1005221 - DNA, 15 bp, Homo sapiens
agactaaactctgct

SEQ ID NO: 1005222 - DNA, 15 bp, Homo sapiens
gactaaactctgcta

SEQ ID NO: 1005223 - DNA, 15 bp, Homo sapiens
actaaactctgctat

SEQ ID NO: 1005224 - DNA, 15 bp, Homo sapiens
ctaaactctgctatc

SEQ ID NO: 1005225 - DNA, 15 bp, Homo sapiens
taaactctgctatct

SEQ ID NO: 1005226 - DNA, 15 bp, Homo sapiens
aaactctgctatctc

SEQ ID NO: 1005227 - DNA, 15 bp, Homo sapiens
aactctgctatctca

SEQ ID NO: 1005228 - DNA, 15 bp, Homo sapiens
actctgctatctcac

SEQ ID NO: 1005229 - DNA, 15 bp, Homo sapiens
ctctgctatctcact

SEQ ID NO: 1005230 - DNA, 15 bp, Homo sapiens
tctgctatctcactt

SEQ ID NO: 1005231 - DNA, 15 bp, Homo sapiens
ctgctatctcacttc

SEQ ID NO: 1005232 - DNA, 15 bp, Homo sapiens
tgctatctcacttct

SEQ ID NO: 1005233 - DNA, 15 bp, Homo sapiens
gctatctcacttctt

SEQ ID NO: 1005234 - DNA, 15 bp, Homo sapiens
ctatctcacttcttg

SEQ ID NO: 1005235 - DNA, 15 bp, Homo sapiens
tatctcacttcttgg

SEQ ID NO: 1005236 - DNA, 15 bp, Homo sapiens
atctcacttcttggt

SEQ ID NO: 1005237 - DNA, 15 bp, Homo sapiens
tctcacttcttggta

SEQ ID NO: 1005238 - DNA, 15 bp, Homo sapiens
ctcacttcttggtat

SEQ ID NO: 1005239 - DNA, 15 bp, Homo sapiens
tcacttcttggtatc

SEQ ID NO: 1005240 - DNA, 15 bp, Homo sapiens
cacttcttggtatcc

SEQ ID NO: 1005241 - DNA, 15 bp, Homo sapiens
acttcttggtatcct

SEQ ID NO: 1005242 - DNA, 15 bp, Homo sapiens
cttcttggtatcctt

SEQ ID NO: 1005243 - DNA, 15 bp, Homo sapiens
ttcttggtatccttg

SEQ ID NO: 1005244 - DNA, 15 bp, Homo sapiens
tcttggtatccttgt

SEQ ID NO: 1005245 - DNA, 15 bp, Homo sapiens
cttggtatccttgtt

SEQ ID NO: 1005246 - DNA, 15 bp, Homo sapiens
ttggtatccttgtta

SEQ ID NO: 1005247 - DNA, 15 bp, Homo sapiens
tggtatccttgttac

SEQ ID NO: 1005248 - DNA, 15 bp, Homo sapiens
ggtatccttgttacc

SEQ ID NO: 1005249 - DNA, 15 bp, Homo sapiens
gtatccttgttacct

SEQ ID NO: 1005250 - DNA, 15 bp, Homo sapiens
tatccttgttacctg

SEQ ID NO: 1005251 - DNA, 15 bp, Homo sapiens
atccttgttacctgg

SEQ ID NO: 1005252 - DNA, 15 bp, Homo sapiens
tccttgttacctgga

SEQ ID NO: 1005253 - DNA, 15 bp, Homo sapiens
ccttgttacctggag

SEQ ID NO: 1005254 - DNA, 15 bp, Homo sapiens
cttgttacctggagt

SEQ ID NO: 1005255 - DNA, 15 bp, Homo sapiens
ttgttacctggagtt

SEQ ID NO: 1005256 - DNA, 15 bp, Homo sapiens
tgttacctggagttt

SEQ ID NO: 1005257 - DNA, 15 bp, Homo sapiens
gttacctggagtttt

SEQ ID NO: 1005258 - DNA, 15 bp, Homo sapiens
ttacctggagtttta

SEQ ID NO: 1005259 - DNA, 15 bp, Homo sapiens
tacctggagttttac

SEQ ID NO: 1005260 - DNA, 15 bp, Homo sapiens
acctggagttttaca

SEQ ID NO: 1005261 - DNA, 15 bp, Homo sapiens
cctggagttttacag

SEQ ID NO: 1005262 - DNA, 15 bp, Homo sapiens
ctggagttttacaga

SEQ ID NO: 1005263 - DNA, 15 bp, Homo sapiens
tggagttttacagaa

SEQ ID NO: 1005264 - DNA, 15 bp, Homo sapiens
ggagttttacagaac

SEQ ID NO: 1005265 - DNA, 15 bp, Homo sapiens
gagttttacagaacc

SEQ ID NO: 1005266 - DNA, 15 bp, Homo sapiens
agttttacagaacca

SEQ ID NO: 1005267 - DNA, 15 bp, Homo sapiens
gttttacagaaccac

SEQ ID NO: 1005268 - DNA, 15 bp, Homo sapiens
ttttacagaaccaca

SEQ ID NO: 1005269 - DNA, 15 bp, Homo sapiens
tttacagaaccacac

SEQ ID NO: 1005270 - DNA, 15 bp, Homo sapiens
ttacagaaccacaca

SEQ ID NO: 1005271 - DNA, 15 bp, Homo sapiens
tacagaaccacacag

SEQ ID NO: 1005272 - DNA, 15 bp, Homo sapiens
acagaaccacacagt

SEQ ID NO: 1005273 - DNA, 15 bp, Homo sapiens
cagaaccacacagta

SEQ ID NO: 1005274 - DNA, 15 bp, Homo sapiens
agaaccacacagtaa

SEQ ID NO: 1005275 - DNA, 15 bp, Homo sapiens
gaaccacacagtaag

SEQ ID NO: 1005276 - DNA, 15 bp, Homo sapiens
aaccacacagtaagt

SEQ ID NO: 1005277 - DNA, 15 bp, Homo sapiens
accacacagtaagtt

SEQ ID NO: 1005278 - DNA, 15 bp, Homo sapiens
ccacacagtaagttt

SEQ ID NO: 1005279 - DNA, 15 bp, Homo sapiens
cacacagtaagtttt

SEQ ID NO: 1005280 - DNA, 15 bp, Homo sapiens
acacagtaagttttc

SEQ ID NO: 1005281 - DNA, 15 bp, Homo sapiens
cacagtaagttttct

SEQ ID NO: 1005282 - DNA, 15 bp, Homo sapiens
acagtaagttttctt

SEQ ID NO: 1005283 - DNA, 15 bp, Homo sapiens
cagtaagttttcttc

SEQ ID NO: 1005284 - DNA, 15 bp, Homo sapiens
agtaagttttcttcc

SEQ ID NO: 1005285 - DNA, 15 bp, Homo sapiens
gtaagttttcttcct

SEQ ID NO: 1005286 - DNA, 15 bp, Homo sapiens
taagttttcttcctt

SEQ ID NO: 1005287 - DNA, 15 bp, Homo sapiens
aagttttcttccttt

SEQ ID NO: 1005288 - DNA, 15 bp, Homo sapiens
agttttcttccttta

SEQ ID NO: 1005289 - DNA, 15 bp, Homo sapiens
gttttcttcctttag

SEQ ID NO: 1005290 - DNA, 15 bp, Homo sapiens
ttttcttcctttagg

SEQ ID NO: 1005291 - DNA, 15 bp, Homo sapiens
tttcttcctttagga

SEQ ID NO: 1005292 - DNA, 15 bp, Homo sapiens
ttcttcctttaggag

SEQ ID NO: 1005293 - DNA, 15 bp, Homo sapiens
tcttcctttaggagg

SEQ ID NO: 1005294 - DNA, 15 bp, Homo sapiens
cttcctttaggagga

SEQ ID NO: 1005295 - DNA, 15 bp, Homo sapiens
ttcctttaggaggat

SEQ ID NO: 1005296 - DNA, 15 bp, Homo sapiens
tcctttaggaggatt

SEQ ID NO: 1005297 - DNA, 15 bp, Homo sapiens
cctttaggaggattg

SEQ ID NO: 1005298 - DNA, 15 bp, Homo sapiens
ctttaggaggattgt

SEQ ID NO: 1005299 - DNA, 15 bp, Homo sapiens
tttaggaggattgtt

SEQ ID NO: 1005300 - DNA, 15 bp, Homo sapiens
ttaggaggattgttt

SEQ ID NO: 1005301 - DNA, 15 bp, Homo sapiens
taggaggattgtttg

SEQ ID NO: 1005302 - DNA, 15 bp, Homo sapiens
aggaggattgtttga

SEQ ID NO: 1005303 - DNA, 15 bp, Homo sapiens
ggaggattgtttgaa

SEQ ID NO: 1005304 - DNA, 15 bp, Homo sapiens
gaggattgtttgaac

SEQ ID NO: 1005305 - DNA, 15 bp, Homo sapiens
aggattgtttgaaca

SEQ ID NO: 1005306 - DNA, 15 bp, Homo sapiens
ggattgtttgaacac

SEQ ID NO: 1005307 - DNA, 15 bp, Homo sapiens
gattgtttgaacaca

SEQ ID NO: 1005308 - DNA, 15 bp, Homo sapiens
attgtttgaacacag

SEQ ID NO: 1005309 - DNA, 15 bp, Homo sapiens
ttgtttgaacacagc

SEQ ID NO: 1005310 - DNA, 15 bp, Homo sapiens
tgtttgaacacagct

SEQ ID NO: 1005311 - DNA, 15 bp, Homo sapiens
gtttgaacacagctt

SEQ ID NO: 1005312 - DNA, 15 bp, Homo sapiens
tttgaacacagcttg

SEQ ID NO: 1005313 - DNA, 15 bp, Homo sapiens
ttgaacacagcttgg

SEQ ID NO: 1005314 - DNA, 15 bp, Homo sapiens
tgaacacagcttggc

SEQ ID NO: 1005315 - DNA, 15 bp, Homo sapiens
gaacacagcttggct

SEQ ID NO: 1005316 - DNA, 15 bp, Homo sapiens
aacacagcttggctt

SEQ ID NO: 1005317 - DNA, 15 bp, Homo sapiens
acacagcttggcttt

SEQ ID NO: 1005318 - DNA, 15 bp, Homo sapiens
cacagcttggctttg

SEQ ID NO: 1005319 - DNA, 15 bp, Homo sapiens
acagcttggctttgt

SEQ ID NO: 1005320 - DNA, 15 bp, Homo sapiens
cagcttggctttgtt

SEQ ID NO: 1005321 - DNA, 15 bp, Homo sapiens
agcttggctttgttt

SEQ ID NO: 1005322 - DNA, 15 bp, Homo sapiens
gcttggctttgtttt

SEQ ID NO: 1005323 - DNA, 15 bp, Homo sapiens
cttggctttgttttc

SEQ ID NO: 1005324 - DNA, 15 bp, Homo sapiens
ttggctttgttttct

SEQ ID NO: 1005325 - DNA, 15 bp, Homo sapiens
tggctttgttttctt

SEQ ID NO: 1005326 - DNA, 15 bp, Homo sapiens
ggctttgttttcttt

SEQ ID NO: 1005327 - DNA, 15 bp, Homo sapiens
gctttgttttctttt

SEQ ID NO: 1005328 - DNA, 15 bp, Homo sapiens
ctttgttttcttttt

SEQ ID NO: 1005329 - DNA, 15 bp, Homo sapiens
tttgttttctttttt

SEQ ID NO: 1005330 - DNA, 15 bp, Homo sapiens
ttgttttcttttttt

SEQ ID NO: 1005331 - DNA, 15 bp, Homo sapiens
tgttttctttttttc

SEQ ID NO: 1005332 - DNA, 15 bp, Homo sapiens
gttttctttttttct

SEQ ID NO: 1005333 - DNA, 15 bp, Homo sapiens
ttttctttttttctt

SEQ ID NO: 1005334 - DNA, 15 bp, Homo sapiens
tttctttttttcttg

SEQ ID NO: 1005335 - DNA, 15 bp, Homo sapiens
ttctttttttcttgt

SEQ ID NO: 1005336 - DNA, 15 bp, Homo sapiens
tctttttttcttgtc

SEQ ID NO: 1005337 - DNA, 15 bp, Homo sapiens
ctttttttcttgtct

SEQ ID NO: 1005338 - DNA, 15 bp, Homo sapiens
tttttttcttgtctt

SEQ ID NO: 1005339 - DNA, 15 bp, Homo sapiens
ttttttcttgtcttt

SEQ ID NO: 1005340 - DNA, 15 bp, Homo sapiens
tttttcttgtctttt

SEQ ID NO: 1005341 - DNA, 15 bp, Homo sapiens
ttttcttgtcttttt

SEQ ID NO: 1005342 - DNA, 15 bp, Homo sapiens
tttcttgtcttttta

SEQ ID NO: 1005343 - DNA, 15 bp, Homo sapiens
ttcttgtctttttat

SEQ ID NO: 1005344 - DNA, 15 bp, Homo sapiens
tcttgtctttttatc

SEQ ID NO: 1005345 - DNA, 15 bp, Homo sapiens
cttgtctttttatca

SEQ ID NO: 1005346 - DNA, 15 bp, Homo sapiens
ttgtctttttatcaa

SEQ ID NO: 1005347 - DNA, 15 bp, Homo sapiens
tgtctttttatcaaa

SEQ ID NO: 1005348 - DNA, 15 bp, Homo sapiens
gtctttttatcaaat

SEQ ID NO: 1005349 - DNA, 15 bp, Homo sapiens
tctttttatcaaatg

SEQ ID NO: 1005350 - DNA, 15 bp, Homo sapiens
ctttttatcaaatgg

SEQ ID NO: 1005351 - DNA, 15 bp, Homo sapiens
tttttatcaaatgga

SEQ ID NO: 1005352 - DNA, 15 bp, Homo sapiens
ttttatcaaatggag

SEQ ID NO: 1005353 - DNA, 15 bp, Homo sapiens
tttatcaaatggagt

SEQ ID NO: 1005354 - DNA, 15 bp, Homo sapiens
ttatcaaatggagtg

SEQ ID NO: 1005355 - DNA, 15 bp, Homo sapiens
tatcaaatggagtgc

SEQ ID NO: 1005356 - DNA, 15 bp, Homo sapiens
atcaaatggagtgca

SEQ ID NO: 1005357 - DNA, 15 bp, Homo sapiens
tcaaatggagtgcat

SEQ ID NO: 1005358 - DNA, 15 bp, Homo sapiens
caaatggagtgcata

SEQ ID NO: 1005359 - DNA, 15 bp, Homo sapiens
aaatggagtgcatac

SEQ ID NO: 1005360 - DNA, 15 bp, Homo sapiens
aatggagtgcatact

SEQ ID NO: 1005361 - DNA, 15 bp, Homo sapiens
atggagtgcatactt

SEQ ID NO: 1005362 - DNA, 15 bp, Homo sapiens
tggagtgcatacttt

SEQ ID NO: 1005363 - DNA, 15 bp, Homo sapiens
ggagtgcatactttc

SEQ ID NO: 1005364 - DNA, 15 bp, Homo sapiens
gagtgcatactttct

SEQ ID NO: 1005365 - DNA, 15 bp, Homo sapiens
agtgcatactttctg

SEQ ID NO: 1005366 - DNA, 15 bp, Homo sapiens
gtgcatactttctga

SEQ ID NO: 1005367 - DNA, 15 bp, Homo sapiens
tgcatactttctgaa

SEQ ID NO: 1005368 - DNA, 15 bp, Homo sapiens
gcatactttctgaaa

SEQ ID NO: 1005369 - DNA, 15 bp, Homo sapiens
catactttctgaaaa

SEQ ID NO: 1005370 - DNA, 15 bp, Homo sapiens
atactttctgaaaag

SEQ ID NO: 1005371 - DNA, 15 bp, Homo sapiens
tactttctgaaaagc

SEQ ID NO: 1005372 - DNA, 15 bp, Homo sapiens
actttctgaaaagca

SEQ ID NO: 1005373 - DNA, 15 bp, Homo sapiens
ctttctgaaaagcaa

SEQ ID NO: 1005374 - DNA, 15 bp, Homo sapiens
tttctgaaaagcaaa

SEQ ID NO: 1005375 - DNA, 15 bp, Homo sapiens
ttctgaaaagcaaag

SEQ ID NO: 1005376 - DNA, 15 bp, Homo sapiens
tctgaaaagcaaaga

SEQ ID NO: 1005377 - DNA, 15 bp, Homo sapiens
ctgaaaagcaaagaa

SEQ ID NO: 1005378 - DNA, 15 bp, Homo sapiens
tgaaaagcaaagaac

SEQ ID NO: 1005379 - DNA, 15 bp, Homo sapiens
gaaaagcaaagaacg

SEQ ID NO: 1005380 - DNA, 15 bp, Homo sapiens
aaaagcaaagaacgc

SEQ ID NO: 1005381 - DNA, 15 bp, Homo sapiens
aaagcaaagaacgct

SEQ ID NO: 1005382 - DNA, 15 bp, Homo sapiens
aagcaaagaacgcta

SEQ ID NO: 1005383 - DNA, 15 bp, Homo sapiens
agcaaagaacgctat

SEQ ID NO: 1005384 - DNA, 15 bp, Homo sapiens
gcaaagaacgctatt

SEQ ID NO: 1005385 - DNA, 15 bp, Homo sapiens
caaagaacgctattt

SEQ ID NO: 1005386 - DNA, 15 bp, Homo sapiens
aaagaacgctatttg

SEQ ID NO: 1005387 - DNA, 15 bp, Homo sapiens
aagaacgctatttga

SEQ ID NO: 1005388 - DNA, 15 bp, Homo sapiens
agaacgctatttgaa

SEQ ID NO: 1005389 - DNA, 15 bp, Homo sapiens
gaacgctatttgaat

SEQ ID NO: 1005390 - DNA, 15 bp, Homo sapiens
aacgctatttgaatt

SEQ ID NO: 1005391 - DNA, 15 bp, Homo sapiens
acgctatttgaattc

SEQ ID NO: 1005392 - DNA, 15 bp, Homo sapiens
cgctatttgaattct

SEQ ID NO: 1005393 - DNA, 15 bp, Homo sapiens
gctatttgaattctc

SEQ ID NO: 1005394 - DNA, 15 bp, Homo sapiens
ctatttgaattctct

SEQ ID NO: 1005395 - DNA, 15 bp, Homo sapiens
tatttgaattctctt

SEQ ID NO: 1005396 - DNA, 15 bp, Homo sapiens
atttgaattctcttc

SEQ ID NO: 1005397 - DNA, 15 bp, Homo sapiens
tttgaattctcttct

SEQ ID NO: 1005398 - DNA, 15 bp, Homo sapiens
ttgaattctcttcta

SEQ ID NO: 1005399 - DNA, 15 bp, Homo sapiens
tgaattctcttctag

SEQ ID NO: 1005400 - DNA, 15 bp, Homo sapiens
gaattctcttctagt

SEQ ID NO: 1005401 - DNA, 15 bp, Homo sapiens
aattctcttctagtc

SEQ ID NO: 1005402 - DNA, 15 bp, Homo sapiens
attctcttctagtca

SEQ ID NO: 1005403 - DNA, 15 bp, Homo sapiens
ttctcttctagtcac

SEQ ID NO: 1005404 - DNA, 15 bp, Homo sapiens
tctcttctagtcacc

SEQ ID NO: 1005405 - DNA, 15 bp, Homo sapiens
ctcttctagtcaccc

SEQ ID NO: 1005406 - DNA, 15 bp, Homo sapiens
tcttctagtcacccc

SEQ ID NO: 1005407 - DNA, 15 bp, Homo sapiens
cttctagtcacccca

SEQ ID NO: 1005408 - DNA, 15 bp, Homo sapiens
ttctagtcaccccag

SEQ ID NO: 1005409 - DNA, 15 bp, Homo sapiens
tctagtcaccccagt

SEQ ID NO: 1005410 - DNA, 15 bp, Homo sapiens
ctagtcaccccagtg

SEQ ID NO: 1005411 - DNA, 15 bp, Homo sapiens
tagtcaccccagtgc

SEQ ID NO: 1005412 - DNA, 15 bp, Homo sapiens
agtcaccccagtgcc

SEQ ID NO: 1005413 - DNA, 15 bp, Homo sapiens
gtcaccccagtgccc

SEQ ID NO: 1005414 - DNA, 15 bp, Homo sapiens
tcaccccagtgccca

SEQ ID NO: 1005415 - DNA, 15 bp, Homo sapiens
caccccagtgcccag

SEQ ID NO: 1005416 - DNA, 15 bp, Homo sapiens
accccagtgcccagc

SEQ ID NO: 1005417 - DNA, 15 bp, Homo sapiens
ccccagtgcccagca

SEQ ID NO: 1005418 - DNA, 15 bp, Homo sapiens
cccagtgcccagcac

SEQ ID NO: 1005419 - DNA, 15 bp, Homo sapiens
ccagtgcccagcaca

SEQ ID NO: 1005420 - DNA, 15 bp, Homo sapiens
cagtgcccagcacag

SEQ ID NO: 1005421 - DNA, 15 bp, Homo sapiens
agtgcccagcacagt

SEQ ID NO: 1005422 - DNA, 15 bp, Homo sapiens
gtgcccagcacagtc

SEQ ID NO: 1005423 - DNA, 15 bp, Homo sapiens
tgcccagcacagtct

SEQ ID NO: 1005424 - DNA, 15 bp, Homo sapiens
gcccagcacagtctt

SEQ ID NO: 1005425 - DNA, 15 bp, Homo sapiens
cccagcacagtctta

SEQ ID NO: 1005426 - DNA, 15 bp, Homo sapiens
ccagcacagtcttaa

SEQ ID NO: 1005427 - DNA, 15 bp, Homo sapiens
cagcacagtcttaaa

SEQ ID NO: 1005428 - DNA, 15 bp, Homo sapiens
agcacagtcttaaac

SEQ ID NO: 1005429 - DNA, 15 bp, Homo sapiens
gcacagtcttaaaca

SEQ ID NO: 1005430 - DNA, 15 bp, Homo sapiens
cacagtcttaaacac

SEQ ID NO: 1005431 - DNA, 15 bp, Homo sapiens
acagtcttaaacaca

SEQ ID NO: 1005432 - DNA, 15 bp, Homo sapiens
cagtcttaaacacac

SEQ ID NO: 1005433 - DNA, 15 bp, Homo sapiens
agtcttaaacacaca

SEQ ID NO: 1005434 - DNA, 15 bp, Homo sapiens
gtcttaaacacacag

SEQ ID NO: 1005435 - DNA, 15 bp, Homo sapiens
tcttaaacacacaga

SEQ ID NO: 1005436 - DNA, 15 bp, Homo sapiens
cttaaacacacagaa

SEQ ID NO: 1005437 - DNA, 15 bp, Homo sapiens
ttaaacacacagaac

SEQ ID NO: 1005438 - DNA, 15 bp, Homo sapiens
taaacacacagaaca

SEQ ID NO: 1005439 - DNA, 15 bp, Homo sapiens
aaacacacagaacat

SEQ ID NO: 1005440 - DNA, 15 bp, Homo sapiens
aacacacagaacatt

SEQ ID NO: 1005441 - DNA, 15 bp, Homo sapiens
acacacagaacattg

SEQ ID NO: 1005442 - DNA, 15 bp, Homo sapiens
cacacagaacattga

SEQ ID NO: 1005443 - DNA, 15 bp, Homo sapiens
acacagaacattgat

SEQ ID NO: 1005444 - DNA, 15 bp, Homo sapiens
cacagaacattgatg

SEQ ID NO: 1005445 - DNA, 15 bp, Homo sapiens
acagaacattgatgg

SEQ ID NO: 1005446 - DNA, 15 bp, Homo sapiens
cagaacattgatgga

SEQ ID NO: 1005447 - DNA, 15 bp, Homo sapiens
agaacattgatggaa

SEQ ID NO: 1005448 - DNA, 15 bp, Homo sapiens
gaacattgatggaat

SEQ ID NO: 1005449 - DNA, 15 bp, Homo sapiens
aacattgatggaatg

SEQ ID NO: 1005450 - DNA, 15 bp, Homo sapiens
acattgatggaatgt

SEQ ID NO: 1005451 - DNA, 15 bp, Homo sapiens
cattgatggaatgtt

SEQ ID NO: 1005452 - DNA, 15 bp, Homo sapiens
attgatggaatgttt

SEQ ID NO: 1005453 - DNA, 15 bp, Homo sapiens
ttgatggaatgtttt

SEQ ID NO: 1005454 - DNA, 15 bp, Homo sapiens
tgatggaatgttttt

SEQ ID NO: 1005455 - DNA, 15 bp, Homo sapiens
gatggaatgtttttc

SEQ ID NO: 1005456 - DNA, 15 bp, Homo sapiens
atggaatgtttttca

SEQ ID NO: 1005457 - DNA, 15 bp, Homo sapiens
tggaatgtttttcat

SEQ ID NO: 1005458 - DNA, 15 bp, Homo sapiens
ggaatgtttttcata

SEQ ID NO: 1005459 - DNA, 15 bp, Homo sapiens
gaatgtttttcatat

SEQ ID NO: 1005460 - DNA, 15 bp, Homo sapiens
aatgtttttcatatg

SEQ ID NO: 1005461 - DNA, 15 bp, Homo sapiens
atgtttttcatatga

SEQ ID NO: 1005462 - DNA, 15 bp, Homo sapiens
tgtttttcatatgat

SEQ ID NO: 1005463 - DNA, 15 bp, Homo sapiens
gtttttcatatgatt

SEQ ID NO: 1005464 - DNA, 15 bp, Homo sapiens
tttttcatatgattc

SEQ ID NO: 1005465 - DNA, 15 bp, Homo sapiens
ttttcatatgattcc

SEQ ID NO: 1005466 - DNA, 15 bp, Homo sapiens
tttcatatgattcct

SEQ ID NO: 1005467 - DNA, 15 bp, Homo sapiens
ttcatatgattcctg

SEQ ID NO: 1005468 - DNA, 15 bp, Homo sapiens
tcatatgattcctgg

SEQ ID NO: 1005469 - DNA, 15 bp, Homo sapiens
catatgattcctggt

SEQ ID NO: 1005470 - DNA, 15 bp, Homo sapiens
atatgattcctggtt

SEQ ID NO: 1005471 - DNA, 15 bp, Homo sapiens
tatgattcctggttg

SEQ ID NO: 1005472 - DNA, 15 bp, Homo sapiens
atgattcctggttga

SEQ ID NO: 1005473 - DNA, 15 bp, Homo sapiens
tgattcctggttgaa

SEQ ID NO: 1005474 - DNA, 15 bp, Homo sapiens
gattcctggttgaag

SEQ ID NO: 1005475 - DNA, 15 bp, Homo sapiens
attcctggttgaagg

SEQ ID NO: 1005476 - DNA, 15 bp, Homo sapiens
ttcctggttgaaggg

SEQ ID NO: 1005477 - DNA, 15 bp, Homo sapiens
tcctggttgaagggt

SEQ ID NO: 1005478 - DNA, 15 bp, Homo sapiens
cctggttgaagggta

SEQ ID NO: 1005479 - DNA, 15 bp, Homo sapiens
ctggttgaagggtag

SEQ ID NO: 1005480 - DNA, 15 bp, Homo sapiens
tggttgaagggtaga

SEQ ID NO: 1005481 - DNA, 15 bp, Homo sapiens
ggttgaagggtagac

SEQ ID NO: 1005482 - DNA, 15 bp, Homo sapiens
gttgaagggtagact

SEQ ID NO: 1005483 - DNA, 15 bp, Homo sapiens
ttgaagggtagactg

SEQ ID NO: 1005484 - DNA, 15 bp, Homo sapiens
tgaagggtagactgg

SEQ ID NO: 1005485 - DNA, 15 bp, Homo sapiens
gaagggtagactggc

SEQ ID NO: 1005486 - DNA, 15 bp, Homo sapiens
aagggtagactggct

SEQ ID NO: 1005487 - DNA, 15 bp, Homo sapiens
agggtagactggcta

SEQ ID NO: 1005488 - DNA, 15 bp, Homo sapiens
gggtagactggctaa

SEQ ID NO: 1005489 - DNA, 15 bp, Homo sapiens
ggtagactggctaaa

SEQ ID NO: 1005490 - DNA, 15 bp, Homo sapiens
gtagactggctaaat

SEQ ID NO: 1005491 - DNA, 15 bp, Homo sapiens
tagactggctaaata

SEQ ID NO: 1005492 - DNA, 15 bp, Homo sapiens
agactggctaaataa

SEQ ID NO: 1005493 - DNA, 15 bp, Homo sapiens
gactggctaaataaa

SEQ ID NO: 1005494 - DNA, 15 bp, Homo sapiens
actggctaaataaaa

SEQ ID NO: 1005495 - DNA, 15 bp, Homo sapiens
ctggctaaataaaaa

SEQ ID NO: 1005496 - DNA, 15 bp, Homo sapiens
tggctaaataaaaaa

SEQ ID NO: 1005497 - DNA, 15 bp, Homo sapiens
ggctaaataaaaaaa

SEQ ID NO: 1005498 - DNA, 15 bp, Homo sapiens
gctaaataaaaaaag

SEQ ID NO: 1005499 - DNA, 15 bp, Homo sapiens
ctaaataaaaaaagt

SEQ ID NO: 1005500 - DNA, 15 bp, Homo sapiens
taaataaaaaaagtg

SEQ ID NO: 1005501 - DNA, 15 bp, Homo sapiens
aaataaaaaaagtgg

SEQ ID NO: 1005502 - DNA, 15 bp, Homo sapiens
aataaaaaaagtggt

SEQ ID NO: 1005503 - DNA, 15 bp, Homo sapiens
ataaaaaaagtggta

SEQ ID NO: 1005504 - DNA, 15 bp, Homo sapiens
taaaaaaagtggtac

SEQ ID NO: 1005505 - DNA, 15 bp, Homo sapiens
aaaaaaagtggtact

SEQ ID NO: 1005506 - DNA, 15 bp, Homo sapiens
aaaaaagtggtactt

SEQ ID NO: 1005507 - DNA, 15 bp, Homo sapiens
aaaaagtggtacttt

SEQ ID NO: 1005508 - DNA, 15 bp, Homo sapiens
aaaagtggtactttt

SEQ ID NO: 1005509 - DNA, 15 bp, Homo sapiens
aaagtggtacttttg

SEQ ID NO: 1005510 - DNA, 15 bp, Homo sapiens
aagtggtacttttgg

SEQ ID NO: 1005511 - DNA, 15 bp, Homo sapiens
agtggtacttttggc

SEQ ID NO: 1005512 - DNA, 15 bp, Homo sapiens
gtggtacttttggct

SEQ ID NO: 1005513 - DNA, 15 bp, Homo sapiens
tggtacttttggctt

SEQ ID NO: 1005514 - DNA, 15 bp, Homo sapiens
ggtacttttggcttt

SEQ ID NO: 1005515 - DNA, 15 bp, Homo sapiens
gtacttttggctttg

SEQ ID NO: 1005516 - DNA, 15 bp, Homo sapiens
tacttttggctttgt

SEQ ID NO: 1005517 - DNA, 15 bp, Homo sapiens
acttttggctttgtt

SEQ ID NO: 1005518 - DNA, 15 bp, Homo sapiens
cttttggctttgttt

SEQ ID NO: 1005519 - DNA, 15 bp, Homo sapiens
ttttggctttgtttt

SEQ ID NO: 1005520 - DNA, 15 bp, Homo sapiens
tttggctttgtttta

SEQ ID NO: 1005521 - DNA, 15 bp, Homo sapiens
ttggctttgttttac

SEQ ID NO: 1005522 - DNA, 15 bp, Homo sapiens
tggctttgttttact

SEQ ID NO: 1005523 - DNA, 15 bp, Homo sapiens
ggctttgttttactg

SEQ ID NO: 1005524 - DNA, 15 bp, Homo sapiens
gctttgttttactga

SEQ ID NO: 1005525 - DNA, 15 bp, Homo sapiens
ctttgttttactgaa

SEQ ID NO: 1005526 - DNA, 15 bp, Homo sapiens
tttgttttactgaat

SEQ ID NO: 1005527 - DNA, 15 bp, Homo sapiens
ttgttttactgaatt

SEQ ID NO: 1005528 - DNA, 15 bp, Homo sapiens
tgttttactgaattt

SEQ ID NO: 1005529 - DNA, 15 bp, Homo sapiens
gttttactgaatttt

SEQ ID NO: 1005530 - DNA, 15 bp, Homo sapiens
ttttactgaatttta

SEQ ID NO: 1005531 - DNA, 15 bp, Homo sapiens
tttactgaattttac

SEQ ID NO: 1005532 - DNA, 15 bp, Homo sapiens
ttactgaattttact

SEQ ID NO: 1005533 - DNA, 15 bp, Homo sapiens
tactgaattttactt

SEQ ID NO: 1005534 - DNA, 15 bp, Homo sapiens
actgaattttacttc

SEQ ID NO: 1005535 - DNA, 15 bp, Homo sapiens
ctgaattttacttcc

SEQ ID NO: 1005536 - DNA, 15 bp, Homo sapiens
tgaattttacttcca

SEQ ID NO: 1005537 - DNA, 15 bp, Homo sapiens
gaattttacttccat

SEQ ID NO: 1005538 - DNA, 15 bp, Homo sapiens
aattttacttccatg

SEQ ID NO: 1005539 - DNA, 15 bp, Homo sapiens
attttacttccatgt

SEQ ID NO: 1005540 - DNA, 15 bp, Homo sapiens
ttttacttccatgtt

SEQ ID NO: 1005541 - DNA, 15 bp, Homo sapiens
tttacttccatgttt

SEQ ID NO: 1005542 - DNA, 15 bp, Homo sapiens
ttacttccatgtttg

SEQ ID NO: 1005543 - DNA, 15 bp, Homo sapiens
tacttccatgtttgc

SEQ ID NO: 1005544 - DNA, 15 bp, Homo sapiens
acttccatgtttgca

SEQ ID NO: 1005545 - DNA, 15 bp, Homo sapiens
cttccatgtttgcaa

SEQ ID NO: 1005546 - DNA, 15 bp, Homo sapiens
ttccatgtttgcaat

SEQ ID NO: 1005547 - DNA, 15 bp, Homo sapiens
tccatgtttgcaata

SEQ ID NO: 1005548 - DNA, 15 bp, Homo sapiens
ccatgtttgcaatag

SEQ ID NO: 1005549 - DNA, 15 bp, Homo sapiens
catgtttgcaatagc

SEQ ID NO: 1005550 - DNA, 15 bp, Homo sapiens
atgtttgcaatagcc

SEQ ID NO: 1005551 - DNA, 15 bp, Homo sapiens
tgtttgcaatagcct

SEQ ID NO: 1005552 - DNA, 15 bp, Homo sapiens
gtttgcaatagccta

SEQ ID NO: 1005553 - DNA, 15 bp, Homo sapiens
tttgcaatagcctag

SEQ ID NO: 1005554 - DNA, 15 bp, Homo sapiens
ttgcaatagcctagg

SEQ ID NO: 1005555 - DNA, 15 bp, Homo sapiens
tgcaatagcctaggt

SEQ ID NO: 1005556 - DNA, 15 bp, Homo sapiens
gcaatagcctaggtc

SEQ ID NO: 1005557 - DNA, 15 bp, Homo sapiens
caatagcctaggtct

SEQ ID NO: 1005558 - DNA, 15 bp, Homo sapiens
aatagcctaggtctg

SEQ ID NO: 1005559 - DNA, 15 bp, Homo sapiens
atagcctaggtctga

SEQ ID NO: 1005560 - DNA, 15 bp, Homo sapiens
tagcctaggtctgat

SEQ ID NO: 1005561 - DNA, 15 bp, Homo sapiens
agcctaggtctgata

SEQ ID NO: 1005562 - DNA, 15 bp, Homo sapiens
gcctaggtctgataa

SEQ ID NO: 1005563 - DNA, 15 bp, Homo sapiens
cctaggtctgataag

SEQ ID NO: 1005564 - DNA, 15 bp, Homo sapiens
ctaggtctgataagt

SEQ ID NO: 1005565 - DNA, 15 bp, Homo sapiens
taggtctgataagtg

SEQ ID NO: 1005566 - DNA, 15 bp, Homo sapiens
aggtctgataagtga

SEQ ID NO: 1005567 - DNA, 15 bp, Homo sapiens
ggtctgataagtgat

SEQ ID NO: 1005568 - DNA, 15 bp, Homo sapiens
gtctgataagtgata

SEQ ID NO: 1005569 - DNA, 15 bp, Homo sapiens
tctgataagtgatat

SEQ ID NO: 1005570 - DNA, 15 bp, Homo sapiens
ctgataagtgatatt

SEQ ID NO: 1005571 - DNA, 15 bp, Homo sapiens
tgataagtgatattt

SEQ ID NO: 1005572 - DNA, 15 bp, Homo sapiens
gataagtgatatttt

SEQ ID NO: 1005573 - DNA, 15 bp, Homo sapiens
ataagtgatatttta

SEQ ID NO: 1005574 - DNA, 15 bp, Homo sapiens
taagtgatattttaa

SEQ ID NO: 1005575 - DNA, 15 bp, Homo sapiens
aagtgatattttaac

SEQ ID NO: 1005576 - DNA, 15 bp, Homo sapiens
agtgatattttaact

SEQ ID NO: 1005577 - DNA, 15 bp, Homo sapiens
gtgatattttaacta

SEQ ID NO: 1005578 - DNA, 15 bp, Homo sapiens
tgatattttaactag

SEQ ID NO: 1005579 - DNA, 15 bp, Homo sapiens
gatattttaactagg

SEQ ID NO: 1005580 - DNA, 15 bp, Homo sapiens
atattttaactagga

SEQ ID NO: 1005581 - DNA, 15 bp, Homo sapiens
tattttaactaggaa

SEQ ID NO: 1005582 - DNA, 15 bp, Homo sapiens
attttaactaggaat

SEQ ID NO: 1005583 - DNA, 15 bp, Homo sapiens
ttttaactaggaatg

SEQ ID NO: 1005584 - DNA, 15 bp, Homo sapiens
tttaactaggaatga

SEQ ID NO: 1005585 - DNA, 15 bp, Homo sapiens
ttaactaggaatgag

SEQ ID NO: 1005586 - DNA, 15 bp, Homo sapiens
taactaggaatgagt

SEQ ID NO: 1005587 - DNA, 15 bp, Homo sapiens
aactaggaatgagta

SEQ ID NO: 1005588 - DNA, 15 bp, Homo sapiens
actaggaatgagtaa

SEQ ID NO: 1005589 - DNA, 15 bp, Homo sapiens
ctaggaatgagtaag

SEQ ID NO: 1005590 - DNA, 15 bp, Homo sapiens
taggaatgagtaaga

SEQ ID NO: 1005591 - DNA, 15 bp, Homo sapiens
aggaatgagtaagaa

SEQ ID NO: 1005592 - DNA, 15 bp, Homo sapiens
ggaatgagtaagaaa

SEQ ID NO: 1005593 - DNA, 15 bp, Homo sapiens
gaatgagtaagaaaa

SEQ ID NO: 1005594 - DNA, 15 bp, Homo sapiens
aatgagtaagaaaat

SEQ ID NO: 1005595 - DNA, 15 bp, Homo sapiens
atgagtaagaaaatt

SEQ ID NO: 1005596 - DNA, 15 bp, Homo sapiens
tgagtaagaaaatta

SEQ ID NO: 1005597 - DNA, 15 bp, Homo sapiens
gagtaagaaaattag

SEQ ID NO: 1005598 - DNA, 15 bp, Homo sapiens
agtaagaaaattagc

SEQ ID NO: 1005599 - DNA, 15 bp, Homo sapiens
gtaagaaaattagca

SEQ ID NO: 1005600 - DNA, 15 bp, Homo sapiens
taagaaaattagcat

SEQ ID NO: 1005601 - DNA, 15 bp, Homo sapiens
aagaaaattagcata

SEQ ID NO: 1005602 - DNA, 15 bp, Homo sapiens
agaaaattagcataa

SEQ ID NO: 1005603 - DNA, 15 bp, Homo sapiens
gaaaattagcataaa

SEQ ID NO: 1005604 - DNA, 15 bp, Homo sapiens
aaaattagcataaag

SEQ ID NO: 1005605 - DNA, 15 bp, Homo sapiens
aaattagcataaaga

SEQ ID NO: 1005606 - DNA, 15 bp, Homo sapiens
aattagcataaagaa

SEQ ID NO: 1005607 - DNA, 15 bp, Homo sapiens
attagcataaagaag

SEQ ID NO: 1005608 - DNA, 15 bp, Homo sapiens
ttagcataaagaagg

SEQ ID NO: 1005609 - DNA, 15 bp, Homo sapiens
tagcataaagaagga

SEQ ID NO: 1005610 - DNA, 15 bp, Homo sapiens
agcataaagaaggaa

SEQ ID NO: 1005611 - DNA, 15 bp, Homo sapiens
gcataaagaaggaat

SEQ ID NO: 1005612 - DNA, 15 bp, Homo sapiens
cataaagaaggaatt

SEQ ID NO: 1005613 - DNA, 15 bp, Homo sapiens
ataaagaaggaattt

SEQ ID NO: 1005614 - DNA, 15 bp, Homo sapiens
taaagaaggaattta

SEQ ID NO: 1005615 - DNA, 15 bp, Homo sapiens
aaagaaggaatttat

SEQ ID NO: 1005616 - DNA, 15 bp, Homo sapiens
aagaaggaatttata

SEQ ID NO: 1005617 - DNA, 15 bp, Homo sapiens
agaaggaatttatac

SEQ ID NO: 1005618 - DNA, 15 bp, Homo sapiens
gaaggaatttataca

SEQ ID NO: 1005619 - DNA, 15 bp, Homo sapiens
aaggaatttatacat

SEQ ID NO: 1005620 - DNA, 15 bp, Homo sapiens
aggaatttatacata

SEQ ID NO: 1005621 - DNA, 15 bp, Homo sapiens
ggaatttatacatat

SEQ ID NO: 1005622 - DNA, 15 bp, Homo sapiens
gaatttatacatatt

SEQ ID NO: 1005623 - DNA, 15 bp, Homo sapiens
aatttatacatattt

SEQ ID NO: 1005624 - DNA, 15 bp, Homo sapiens
atttatacatattta

SEQ ID NO: 1005625 - DNA, 15 bp, Homo sapiens
tttatacatatttat

SEQ ID NO: 1005626 - DNA, 15 bp, Homo sapiens
ttatacatatttata

SEQ ID NO: 1005627 - DNA, 15 bp, Homo sapiens
tatacatatttatat

SEQ ID NO: 1005628 - DNA, 15 bp, Homo sapiens
atacatatttatatt

SEQ ID NO: 1005629 - DNA, 15 bp, Homo sapiens
tacatatttatattt

SEQ ID NO: 1005630 - DNA, 15 bp, Homo sapiens
acatatttatatttc

SEQ ID NO: 1005631 - DNA, 15 bp, Homo sapiens
catatttatatttcc

SEQ ID NO: 1005632 - DNA, 15 bp, Homo sapiens
atatttatatttcct

SEQ ID NO: 1005633 - DNA, 15 bp, Homo sapiens
tatttatatttcctc

SEQ ID NO: 1005634 - DNA, 15 bp, Homo sapiens
atttatatttcctcc

SEQ ID NO: 1005635 - DNA, 15 bp, Homo sapiens
tttatatttcctccc

SEQ ID NO: 1005636 - DNA, 15 bp, Homo sapiens
ttatatttcctccca

SEQ ID NO: 1005637 - DNA, 15 bp, Homo sapiens
tatatttcctcccat

SEQ ID NO: 1005638 - DNA, 15 bp, Homo sapiens
atatttcctcccata

SEQ ID NO: 1005639 - DNA, 15 bp, Homo sapiens
tatttcctcccatag

SEQ ID NO: 1005640 - DNA, 15 bp, Homo sapiens
atttcctcccataga

SEQ ID NO: 1005641 - DNA, 15 bp, Homo sapiens
tttcctcccatagag

SEQ ID NO: 1005642 - DNA, 15 bp, Homo sapiens
ttcctcccatagagc

SEQ ID NO: 1005643 - DNA, 15 bp, Homo sapiens
tcctcccatagagca

SEQ ID NO: 1005644 - DNA, 15 bp, Homo sapiens
cctcccatagagcaa

SEQ ID NO: 1005645 - DNA, 15 bp, Homo sapiens
ctcccatagagcaaa

SEQ ID NO: 1005646 - DNA, 15 bp, Homo sapiens
tcccatagagcaaac

SEQ ID NO: 1005647 - DNA, 15 bp, Homo sapiens
cccatagagcaaaca

SEQ ID NO: 1005648 - DNA, 15 bp, Homo sapiens
ccatagagcaaacat

SEQ ID NO: 1005649 - DNA, 15 bp, Homo sapiens
catagagcaaacatg

SEQ ID NO: 1005650 - DNA, 15 bp, Homo sapiens
atagagcaaacatgt

SEQ ID NO: 1005651 - DNA, 15 bp, Homo sapiens
tagagcaaacatgtt

SEQ ID NO: 1005652 - DNA, 15 bp, Homo sapiens
agagcaaacatgttt

SEQ ID NO: 1005653 - DNA, 15 bp, Homo sapiens
gagcaaacatgtttt

SEQ ID NO: 1005654 - DNA, 15 bp, Homo sapiens
agcaaacatgttttt

SEQ ID NO: 1005655 - DNA, 15 bp, Homo sapiens
gcaaacatgtttttt

SEQ ID NO: 1005656 - DNA, 15 bp, Homo sapiens
caaacatgttttttg

SEQ ID NO: 1005657 - DNA, 15 bp, Homo sapiens
aaacatgttttttga

SEQ ID NO: 1005658 - DNA, 15 bp, Homo sapiens
aacatgttttttgaa

SEQ ID NO: 1005659 - DNA, 15 bp, Homo sapiens
acatgttttttgaat

SEQ ID NO: 1005660 - DNA, 15 bp, Homo sapiens
catgttttttgaatc

SEQ ID NO: 1005661 - DNA, 15 bp, Homo sapiens
atgttttttgaatca

SEQ ID NO: 1005662 - DNA, 15 bp, Homo sapiens
tgttttttgaatcag

SEQ ID NO: 1005663 - DNA, 15 bp, Homo sapiens
gttttttgaatcagg

SEQ ID NO: 1005664 - DNA, 15 bp, Homo sapiens
ttttttgaatcaggt

SEQ ID NO: 1005665 - DNA, 15 bp, Homo sapiens
tttttgaatcaggtt

SEQ ID NO: 1005666 - DNA, 15 bp, Homo sapiens
ttttgaatcaggttt

SEQ ID NO: 1005667 - DNA, 15 bp, Homo sapiens
tttgaatcaggtttc

SEQ ID NO: 1005668 - DNA, 15 bp, Homo sapiens
ttgaatcaggtttca

SEQ ID NO: 1005669 - DNA, 15 bp, Homo sapiens
tgaatcaggtttcag

SEQ ID NO: 1005670 - DNA, 15 bp, Homo sapiens
gaatcaggtttcaga

SEQ ID NO: 1005671 - DNA, 15 bp, Homo sapiens
aatcaggtttcagat

SEQ ID NO: 1005672 - DNA, 15 bp, Homo sapiens
atcaggtttcagatc

SEQ ID NO: 1005673 - DNA, 15 bp, Homo sapiens
tcaggtttcagatct

SEQ ID NO: 1005674 - DNA, 15 bp, Homo sapiens
caggtttcagatctg

SEQ ID NO: 1005675 - DNA, 15 bp, Homo sapiens
aggtttcagatctga

SEQ ID NO: 1005676 - DNA, 15 bp, Homo sapiens
ggtttcagatctgat

SEQ ID NO: 1005677 - DNA, 15 bp, Homo sapiens
gtttcagatctgatc

SEQ ID NO: 1005678 - DNA, 15 bp, Homo sapiens
tttcagatctgatca

SEQ ID NO: 1005679 - DNA, 15 bp, Homo sapiens
ttcagatctgatcaa

SEQ ID NO: 1005680 - DNA, 15 bp, Homo sapiens
tcagatctgatcaac

SEQ ID NO: 1005681 - DNA, 15 bp, Homo sapiens
cagatctgatcaact

SEQ ID NO: 1005682 - DNA, 15 bp, Homo sapiens
agatctgatcaacta

SEQ ID NO: 1005683 - DNA, 15 bp, Homo sapiens
gatctgatcaactac

SEQ ID NO: 1005684 - DNA, 15 bp, Homo sapiens
atctgatcaactact

SEQ ID NO: 1005685 - DNA, 15 bp, Homo sapiens
tctgatcaactactt

SEQ ID NO: 1005686 - DNA, 15 bp, Homo sapiens
ctgatcaactacttt

SEQ ID NO: 1005687 - DNA, 15 bp, Homo sapiens
tgatcaactactttt

SEQ ID NO: 1005688 - DNA, 15 bp, Homo sapiens
gatcaactacttttg

SEQ ID NO: 1005689 - DNA, 15 bp, Homo sapiens
atcaactacttttgt

SEQ ID NO: 1005690 - DNA, 15 bp, Homo sapiens
tcaactacttttgta

SEQ ID NO: 1005691 - DNA, 15 bp, Homo sapiens
caactacttttgtaa

SEQ ID NO: 1005692 - DNA, 15 bp, Homo sapiens
aactacttttgtaat

SEQ ID NO: 1005693 - DNA, 15 bp, Homo sapiens
actacttttgtaatt

SEQ ID NO: 1005694 - DNA, 15 bp, Homo sapiens
ctacttttgtaattt

SEQ ID NO: 1005695 - DNA, 15 bp, Homo sapiens
tacttttgtaatttt

SEQ ID NO: 1005696 - DNA, 15 bp, Homo sapiens
acttttgtaattttg

SEQ ID NO: 1005697 - DNA, 15 bp, Homo sapiens
cttttgtaattttgg

SEQ ID NO: 1005698 - DNA, 15 bp, Homo sapiens
ttttgtaattttgga

SEQ ID NO: 1005699 - DNA, 15 bp, Homo sapiens
tttgtaattttggat

SEQ ID NO: 1005700 - DNA, 15 bp, Homo sapiens
ttgtaattttggatt

SEQ ID NO: 1005701 - DNA, 15 bp, Homo sapiens
tgtaattttggattt

SEQ ID NO: 1005702 - DNA, 15 bp, Homo sapiens
gtaattttggatttg

SEQ ID NO: 1005703 - DNA, 15 bp, Homo sapiens
taattttggatttgt

SEQ ID NO: 1005704 - DNA, 15 bp, Homo sapiens
aattttggatttgtc

SEQ ID NO: 1005705 - DNA, 15 bp, Homo sapiens
attttggatttgtca

SEQ ID NO: 1005706 - DNA, 15 bp, Homo sapiens
ttttggatttgtcac

SEQ ID NO: 1005707 - DNA, 15 bp, Homo sapiens
tttggatttgtcact

SEQ ID NO: 1005708 - DNA, 15 bp, Homo sapiens
ttggatttgtcactt

SEQ ID NO: 1005709 - DNA, 15 bp, Homo sapiens
tggatttgtcactta

SEQ ID NO: 1005710 - DNA, 15 bp, Homo sapiens
ggatttgtcacttac

SEQ ID NO: 1005711 - DNA, 15 bp, Homo sapiens
gatttgtcacttact

SEQ ID NO: 1005712 - DNA, 15 bp, Homo sapiens
atttgtcacttactg

SEQ ID NO: 1005713 - DNA, 15 bp, Homo sapiens
tttgtcacttactgt

SEQ ID NO: 1005714 - DNA, 15 bp, Homo sapiens
ttgtcacttactgtt

SEQ ID NO: 1005715 - DNA, 15 bp, Homo sapiens
tgtcacttactgtta

SEQ ID NO: 1005716 - DNA, 15 bp, Homo sapiens
gtcacttactgttag

SEQ ID NO: 1005717 - DNA, 15 bp, Homo sapiens
tcacttactgttagg

SEQ ID NO: 1005718 - DNA, 15 bp, Homo sapiens
cacttactgttagga

SEQ ID NO: 1005719 - DNA, 15 bp, Homo sapiens
acttactgttaggat

SEQ ID NO: 1005720 - DNA, 15 bp, Homo sapiens
cttactgttaggata

SEQ ID NO: 1005721 - DNA, 15 bp, Homo sapiens
ttactgttaggatat

SEQ ID NO: 1005722 - DNA, 15 bp, Homo sapiens
tactgttaggatatt

SEQ ID NO: 1005723 - DNA, 15 bp, Homo sapiens
actgttaggatattt

SEQ ID NO: 1005724 - DNA, 15 bp, Homo sapiens
ctgttaggatatttt

SEQ ID NO: 1005725 - DNA, 15 bp, Homo sapiens
tgttaggatattttg

SEQ ID NO: 1005726 - DNA, 15 bp, Homo sapiens
gttaggatattttgc

SEQ ID NO: 1005727 - DNA, 15 bp, Homo sapiens
ttaggatattttgca

SEQ ID NO: 1005728 - DNA, 15 bp, Homo sapiens
taggatattttgcaa

SEQ ID NO: 1005729 - DNA, 15 bp, Homo sapiens
aggatattttgcaat

SEQ ID NO: 1005730 - DNA, 15 bp, Homo sapiens
ggatattttgcaatg

SEQ ID NO: 1005731 - DNA, 15 bp, Homo sapiens
gatattttgcaatgg

SEQ ID NO: 1005732 - DNA, 15 bp, Homo sapiens
atattttgcaatggt

SEQ ID NO: 1005733 - DNA, 15 bp, Homo sapiens
tattttgcaatggtg

SEQ ID NO: 1005734 - DNA, 15 bp, Homo sapiens
attttgcaatggtgt

SEQ ID NO: 1005735 - DNA, 15 bp, Homo sapiens
ttttgcaatggtgtg

SEQ ID NO: 1005736 - DNA, 15 bp, Homo sapiens
tttgcaatggtgtga

SEQ ID NO: 1005737 - DNA, 15 bp, Homo sapiens
ttgcaatggtgtgat

SEQ ID NO: 1005738 - DNA, 15 bp, Homo sapiens
tgcaatggtgtgata

SEQ ID NO: 1005739 - DNA, 15 bp, Homo sapiens
gcaatggtgtgatag

SEQ ID NO: 1005740 - DNA, 15 bp, Homo sapiens
caatggtgtgataga

SEQ ID NO: 1005741 - DNA, 15 bp, Homo sapiens
aatggtgtgatagaa

SEQ ID NO: 1005742 - DNA, 15 bp, Homo sapiens
atggtgtgatagaat

SEQ ID NO: 1005743 - DNA, 15 bp, Homo sapiens
tggtgtgatagaata

SEQ ID NO: 1005744 - DNA, 15 bp, Homo sapiens
ggtgtgatagaatat

SEQ ID NO: 1005745 - DNA, 15 bp, Homo sapiens
gtgtgatagaatatg

SEQ ID NO: 1005746 - DNA, 15 bp, Homo sapiens
tgtgatagaatatga

SEQ ID NO: 1005747 - DNA, 15 bp, Homo sapiens
gtgatagaatatgaa

SEQ ID NO: 1005748 - DNA, 15 bp, Homo sapiens
tgatagaatatgaat

SEQ ID NO: 1005749 - DNA, 15 bp, Homo sapiens
gatagaatatgaatg

SEQ ID NO: 1005750 - DNA, 15 bp, Homo sapiens
atagaatatgaatgt

SEQ ID NO: 1005751 - DNA, 15 bp, Homo sapiens
tagaatatgaatgtg

SEQ ID NO: 1005752 - DNA, 15 bp, Homo sapiens
agaatatgaatgtga

SEQ ID NO: 1005753 - DNA, 15 bp, Homo sapiens
gaatatgaatgtgaa

SEQ ID NO: 1005754 - DNA, 15 bp, Homo sapiens
aatatgaatgtgaag

SEQ ID NO: 1005755 - DNA, 15 bp, Homo sapiens
atatgaatgtgaagc

SEQ ID NO: 1005756 - DNA, 15 bp, Homo sapiens
tatgaatgtgaagca

SEQ ID NO: 1005757 - DNA, 15 bp, Homo sapiens
atgaatgtgaagcac

SEQ ID NO: 1005758 - DNA, 15 bp, Homo sapiens
tgaatgtgaagcact

SEQ ID NO: 1005759 - DNA, 15 bp, Homo sapiens
gaatgtgaagcactt

SEQ ID NO: 1005760 - DNA, 15 bp, Homo sapiens
aatgtgaagcacttt

SEQ ID NO: 1005761 - DNA, 15 bp, Homo sapiens
atgtgaagcactttg

SEQ ID NO: 1005762 - DNA, 15 bp, Homo sapiens
tgtgaagcactttga

SEQ ID NO: 1005763 - DNA, 15 bp, Homo sapiens
gtgaagcactttgaa

SEQ ID NO: 1005764 - DNA, 15 bp, Homo sapiens
tgaagcactttgaaa

SEQ ID NO: 1005765 - DNA, 15 bp, Homo sapiens
gaagcactttgaaaa

SEQ ID NO: 1005766 - DNA, 15 bp, Homo sapiens
aagcactttgaaaag

SEQ ID NO: 1005767 - DNA, 15 bp, Homo sapiens
agcactttgaaaagt

SEQ ID NO: 1005768 - DNA, 15 bp, Homo sapiens
gcactttgaaaagtc

SEQ ID NO: 1005769 - DNA, 15 bp, Homo sapiens
cactttgaaaagtct

SEQ ID NO: 1005770 - DNA, 15 bp, Homo sapiens
actttgaaaagtcta

SEQ ID NO: 1005771 - DNA, 15 bp, Homo sapiens
ctttgaaaagtctaa

SEQ ID NO: 1005772 - DNA, 15 bp, Homo sapiens
tttgaaaagtctaaa

SEQ ID NO: 1005773 - DNA, 15 bp, Homo sapiens
ttgaaaagtctaaaa

SEQ ID NO: 1005774 - DNA, 15 bp, Homo sapiens
tgaaaagtctaaaat

SEQ ID NO: 1005775 - DNA, 15 bp, Homo sapiens
gaaaagtctaaaatt

SEQ ID NO: 1005776 - DNA, 15 bp, Homo sapiens
aaaagtctaaaattt

SEQ ID NO: 1005777 - DNA, 15 bp, Homo sapiens
aaagtctaaaatttt

SEQ ID NO: 1005778 - DNA, 15 bp, Homo sapiens
aagtctaaaattttt

SEQ ID NO: 1005779 - DNA, 15 bp, Homo sapiens
agtctaaaatttttc

SEQ ID NO: 1005780 - DNA, 15 bp, Homo sapiens
gtctaaaatttttct

SEQ ID NO: 1005781 - DNA, 15 bp, Homo sapiens
tctaaaatttttcta

SEQ ID NO: 1005782 - DNA, 15 bp, Homo sapiens
ctaaaatttttctaa

SEQ ID NO: 1005783 - DNA, 15 bp, Homo sapiens
taaaatttttctaat

SEQ ID NO: 1005784 - DNA, 15 bp, Homo sapiens
aaaatttttctaata

SEQ ID NO: 1005785 - DNA, 15 bp, Homo sapiens
aaatttttctaatat

SEQ ID NO: 1005786 - DNA, 15 bp, Homo sapiens
aatttttctaatata

SEQ ID NO: 1005787 - DNA, 15 bp, Homo sapiens
atttttctaatataa

SEQ ID NO: 1005788 - DNA, 15 bp, Homo sapiens
tttttctaatataag

SEQ ID NO: 1005789 - DNA, 15 bp, Homo sapiens
ttttctaatataaga

SEQ ID NO: 1005790 - DNA, 15 bp, Homo sapiens
tttctaatataagat

SEQ ID NO: 1005791 - DNA, 15 bp, Homo sapiens
ttctaatataagatt

SEQ ID NO: 1005792 - DNA, 15 bp, Homo sapiens
tctaatataagattt

SEQ ID NO: 1005793 - DNA, 15 bp, Homo sapiens
ctaatataagattta

SEQ ID NO: 1005794 - DNA, 15 bp, Homo sapiens
taatataagatttat

SEQ ID NO: 1005795 - DNA, 15 bp, Homo sapiens
aatataagatttata

SEQ ID NO: 1005796 - DNA, 15 bp, Homo sapiens
atataagatttatat

SEQ ID NO: 1005797 - DNA, 15 bp, Homo sapiens
tataagatttatatg

SEQ ID NO: 1005798 - DNA, 15 bp, Homo sapiens
ataagatttatatgt

SEQ ID NO: 1005799 - DNA, 15 bp, Homo sapiens
taagatttatatgtt

SEQ ID NO: 1005800 - DNA, 15 bp, Homo sapiens
aagatttatatgttt

SEQ ID NO: 1005801 - DNA, 15 bp, Homo sapiens
agatttatatgtttt

SEQ ID NO: 1005802 - DNA, 15 bp, Homo sapiens
gatttatatgttttc

SEQ ID NO: 1005803 - DNA, 15 bp, Homo sapiens
atttatatgttttct

SEQ ID NO: 1005804 - DNA, 15 bp, Homo sapiens
tttatatgttttctt

SEQ ID NO: 1005805 - DNA, 15 bp, Homo sapiens
ttatatgttttcttt

SEQ ID NO: 1005806 - DNA, 15 bp, Homo sapiens
tatatgttttcttta

SEQ ID NO: 1005807 - DNA, 15 bp, Homo sapiens
atatgttttctttat

SEQ ID NO: 1005808 - DNA, 15 bp, Homo sapiens
tatgttttctttata

SEQ ID NO: 1005809 - DNA, 15 bp, Homo sapiens
atgttttctttatag

SEQ ID NO: 1005810 - DNA, 15 bp, Homo sapiens
tgttttctttatagc

SEQ ID NO: 1005811 - DNA, 15 bp, Homo sapiens
gttttctttatagct

SEQ ID NO: 1005812 - DNA, 15 bp, Homo sapiens
ttttctttatagctt

SEQ ID NO: 1005813 - DNA, 15 bp, Homo sapiens
tttctttatagctta

SEQ ID NO: 1005814 - DNA, 15 bp, Homo sapiens
ttctttatagcttat

SEQ ID NO: 1005815 - DNA, 15 bp, Homo sapiens
tctttatagcttatt

SEQ ID NO: 1005816 - DNA, 15 bp, Homo sapiens
ctttatagcttatta

SEQ ID NO: 1005817 - DNA, 15 bp, Homo sapiens
tttatagcttattat

SEQ ID NO: 1005818 - DNA, 15 bp, Homo sapiens
ttatagcttattatt

SEQ ID NO: 1005819 - DNA, 15 bp, Homo sapiens
tatagcttattatta

SEQ ID NO: 1005820 - DNA, 15 bp, Homo sapiens
atagcttattattat

SEQ ID NO: 1005821 - DNA, 15 bp, Homo sapiens
tagcttattattatt

SEQ ID NO: 1005822 - DNA, 15 bp, Homo sapiens
agcttattattatta

SEQ ID NO: 1005823 - DNA, 15 bp, Homo sapiens
gcttattattattat

SEQ ID NO: 1005824 - DNA, 15 bp, Homo sapiens
cttattattattatt

SEQ ID NO: 1005825 - DNA, 15 bp, Homo sapiens
ttattattattatta

SEQ ID NO: 1005826 - DNA, 15 bp, Homo sapiens
tattattattattat

SEQ ID NO: 1005827 - DNA, 15 bp, Homo sapiens
attattattattatt

SEQ ID NO: 1005828 - DNA, 15 bp, Homo sapiens
ttattattattattt

SEQ ID NO: 1005829 - DNA, 15 bp, Homo sapiens
tattattattatttt

SEQ ID NO: 1005830 - DNA, 15 bp, Homo sapiens
attattattattttt

SEQ ID NO: 1005831 - DNA, 15 bp, Homo sapiens
ttattattatttttt

SEQ ID NO: 1005832 - DNA, 15 bp, Homo sapiens
tattattattttttg

SEQ ID NO: 1005833 - DNA, 15 bp, Homo sapiens
attattattttttgt

SEQ ID NO: 1005834 - DNA, 15 bp, Homo sapiens
ttattattttttgtg

SEQ ID NO: 1005835 - DNA, 15 bp, Homo sapiens
tattattttttgtgt

SEQ ID NO: 1005836 - DNA, 15 bp, Homo sapiens
attattttttgtgtg

SEQ ID NO: 1005837 - DNA, 15 bp, Homo sapiens
ttattttttgtgtgt

SEQ ID NO: 1005838 - DNA, 15 bp, Homo sapiens
tattttttgtgtgtg

SEQ ID NO: 1005839 - DNA, 15 bp, Homo sapiens
attttttgtgtgtgt

SEQ ID NO: 1005840 - DNA, 15 bp, Homo sapiens
ttttttgtgtgtgtg

SEQ ID NO: 1005841 - DNA, 15 bp, Homo sapiens
tttttgtgtgtgtga

SEQ ID NO: 1005842 - DNA, 15 bp, Homo sapiens
ttttgtgtgtgtgac

SEQ ID NO: 1005843 - DNA, 15 bp, Homo sapiens
tttgtgtgtgtgaca

SEQ ID NO: 1005844 - DNA, 15 bp, Homo sapiens
ttgtgtgtgtgacag

SEQ ID NO: 1005845 - DNA, 15 bp, Homo sapiens
tgtgtgtgtgacaga

SEQ ID NO: 1005846 - DNA, 15 bp, Homo sapiens
gtgtgtgtgacagag

SEQ ID NO: 1005847 - DNA, 15 bp, Homo sapiens
tgtgtgtgacagagt

SEQ ID NO: 1005848 - DNA, 15 bp, Homo sapiens
gtgtgtgacagagtc

SEQ ID NO: 1005849 - DNA, 15 bp, Homo sapiens
tgtgtgacagagtct

SEQ ID NO: 1005850 - DNA, 15 bp, Homo sapiens
gtgtgacagagtctt

SEQ ID NO: 1005851 - DNA, 15 bp, Homo sapiens
tgtgacagagtcttg

SEQ ID NO: 1005852 - DNA, 15 bp, Homo sapiens
gtgacagagtcttgc

SEQ ID NO: 1005853 - DNA, 15 bp, Homo sapiens
tgacagagtcttgct

SEQ ID NO: 1005854 - DNA, 15 bp, Homo sapiens
gacagagtcttgctc

SEQ ID NO: 1005855 - DNA, 15 bp, Homo sapiens
acagagtcttgctct

SEQ ID NO: 1005856 - DNA, 15 bp, Homo sapiens
cagagtcttgctctg

SEQ ID NO: 1005857 - DNA, 15 bp, Homo sapiens
agagtcttgctctgt

SEQ ID NO: 1005858 - DNA, 15 bp, Homo sapiens
gagtcttgctctgtc

SEQ ID NO: 1005859 - DNA, 15 bp, Homo sapiens
agtcttgctctgtca

SEQ ID NO: 1005860 - DNA, 15 bp, Homo sapiens
tcttgctctgtcact

SEQ ID NO: 1005861 - DNA, 15 bp, Homo sapiens
cttgctctgtcactc

SEQ ID NO: 1005862 - DNA, 15 bp, Homo sapiens
ttgctctgtcactca

SEQ ID NO: 1005863 - DNA, 15 bp, Homo sapiens
tgctctgtcactcag

SEQ ID NO: 1005864 - DNA, 15 bp, Homo sapiens
gctctgtcactcagg

SEQ ID NO: 1005865 - DNA, 15 bp, Homo sapiens
ctctgtcactcaggc

SEQ ID NO: 1005866 - DNA, 15 bp, Homo sapiens
tctgtcactcaggct

SEQ ID NO: 1005867 - DNA, 15 bp, Homo sapiens
ctgtcactcaggcta

SEQ ID NO: 1005868 - DNA, 15 bp, Homo sapiens
tgtcactcaggctag

SEQ ID NO: 1005869 - DNA, 15 bp, Homo sapiens
gtcactcaggctaga

SEQ ID NO: 1005870 - DNA, 15 bp, Homo sapiens
tcactcaggctagag

SEQ ID NO: 1005871 - DNA, 15 bp, Homo sapiens
cactcaggctagagt

SEQ ID NO: 1005872 - DNA, 15 bp, Homo sapiens
actcaggctagagtg

SEQ ID NO: 1005873 - DNA, 15 bp, Homo sapiens
ctcaggctagagtgc

SEQ ID NO: 1005874 - DNA, 15 bp, Homo sapiens
tcaggctagagtgca

SEQ ID NO: 1005875 - DNA, 15 bp, Homo sapiens
caggctagagtgcag

SEQ ID NO: 1005876 - DNA, 15 bp, Homo sapiens
aggctagagtgcagt

SEQ ID NO: 1005877 - DNA, 15 bp, Homo sapiens
ggctagagtgcagtg

SEQ ID NO: 1005878 - DNA, 15 bp, Homo sapiens
gctagagtgcagtgt

SEQ ID NO: 1005879 - DNA, 15 bp, Homo sapiens
ctagagtgcagtgta

SEQ ID NO: 1005880 - DNA, 15 bp, Homo sapiens
gtgcattggttgaaa

SEQ ID NO: 1005881 - DNA, 15 bp, Homo sapiens
tgcattggttgaaag

SEQ ID NO: 1005882 - DNA, 15 bp, Homo sapiens
gcattggttgaaagt

SEQ ID NO: 1005883 - DNA, 15 bp, Homo sapiens
cattggttgaaagta

SEQ ID NO: 1005884 - DNA, 15 bp, Homo sapiens
attggttgaaagtaa

SEQ ID NO: 1005885 - DNA, 15 bp, Homo sapiens
ttggttgaaagtaaa

SEQ ID NO: 1005886 - DNA, 15 bp, Homo sapiens
tggttgaaagtaaag

SEQ ID NO: 1005887 - DNA, 15 bp, Homo sapiens
ggttgaaagtaaaga

SEQ ID NO: 1005888 - DNA, 15 bp, Homo sapiens
gttgaaagtaaagaa

SEQ ID NO: 1005889 - DNA, 15 bp, Homo sapiens
ttgaaagtaaagaaa

SEQ ID NO: 1005890 - DNA, 15 bp, Homo sapiens
tgaaagtaaagaaaa

SEQ ID NO: 1005891 - DNA, 15 bp, Homo sapiens
gaaagtaaagaaaag

SEQ ID NO: 1005892 - DNA, 15 bp, Homo sapiens
aaagtaaagaaaaga

SEQ ID NO: 1005893 - DNA, 15 bp, Homo sapiens
aagtaaagaaaagaa

SEQ ID NO: 1005894 - DNA, 15 bp, Homo sapiens
agtaaagaaaagaaa

SEQ ID NO: 1005895 - DNA, 15 bp, Homo sapiens
gtaaagaaaagaaaa

SEQ ID NO: 1005896 - DNA, 15 bp, Homo sapiens
taaagaaaagaaaaa

SEQ ID NO: 1005897 - DNA, 15 bp, Homo sapiens
aaagaaaagaaaaaa

SEQ ID NO: 1005898 - DNA, 15 bp, Homo sapiens
aagaaaagaaaaaaa

SEQ ID NO: 1005899 - DNA, 15 bp, Homo sapiens
agaaaagaaaaaaaa

SEQ ID NO: 1005900 - DNA, 15 bp, Homo sapiens
gaaaagaaaaaaaac

SEQ ID NO: 1005901 - DNA, 15 bp, Homo sapiens
aaaagaaaaaaaaca

SEQ ID NO: 1005902 - DNA, 15 bp, Homo sapiens
aaagaaaaaaaacag

SEQ ID NO: 1005903 - DNA, 15 bp, Homo sapiens
aagaaaaaaaacaga

SEQ ID NO: 1005904 - DNA, 15 bp, Homo sapiens
agaaaaaaaacagac

SEQ ID NO: 1005905 - DNA, 15 bp, Homo sapiens
gaaaaaaaacagaca

SEQ ID NO: 1005906 - DNA, 15 bp, Homo sapiens
aaaaaaaacagacaa

SEQ ID NO: 1005907 - DNA, 15 bp, Homo sapiens
aaaaaaacagacaaa

SEQ ID NO: 1005908 - DNA, 15 bp, Homo sapiens
aaaaaacagacaaat

SEQ ID NO: 1005909 - DNA, 15 bp, Homo sapiens
aaaaacagacaaatt

SEQ ID NO: 1005910 - DNA, 15 bp, Homo sapiens
aaaacagacaaatta

SEQ ID NO: 1005911 - DNA, 15 bp, Homo sapiens
aaacagacaaattag

SEQ ID NO: 1005912 - DNA, 15 bp, Homo sapiens
aacagacaaattagc

SEQ ID NO: 1005913 - DNA, 15 bp, Homo sapiens
acagacaaattagcc

SEQ ID NO: 1005914 - DNA, 15 bp, Homo sapiens
cagacaaattagcca

SEQ ID NO: 1005915 - DNA, 15 bp, Homo sapiens
agacaaattagccaa

SEQ ID NO: 1005916 - DNA, 15 bp, Homo sapiens
gacaaattagccaag

SEQ ID NO: 1005917 - DNA, 15 bp, Homo sapiens
acaaattagccaagt

SEQ ID NO: 1005918 - DNA, 15 bp, Homo sapiens
caaattagccaagtg

SEQ ID NO: 1005919 - DNA, 15 bp, Homo sapiens
aaattagccaagtgt

SEQ ID NO: 1005920 - DNA, 15 bp, Homo sapiens
aattagccaagtgtg

SEQ ID NO: 1005921 - DNA, 15 bp, Homo sapiens
attagccaagtgtgg

SEQ ID NO: 1005922 - DNA, 15 bp, Homo sapiens
ttagccaagtgtggt

SEQ ID NO: 1005923 - DNA, 15 bp, Homo sapiens
tagccaagtgtggta

SEQ ID NO: 1005924 - DNA, 15 bp, Homo sapiens
agccaagtgtggtag

SEQ ID NO: 1005925 - DNA, 15 bp, Homo sapiens
gccaagtgtggtagt

SEQ ID NO: 1005926 - DNA, 15 bp, Homo sapiens
ccaagtgtggtagta

SEQ ID NO: 1005927 - DNA, 15 bp, Homo sapiens
caagtgtggtagtat

SEQ ID NO: 1005928 - DNA, 15 bp, Homo sapiens
aagtgtggtagtata

SEQ ID NO: 1005929 - DNA, 15 bp, Homo sapiens
agtgtggtagtatat

SEQ ID NO: 1005930 - DNA, 15 bp, Homo sapiens
gtgtggtagtatatg

SEQ ID NO: 1005931 - DNA, 15 bp, Homo sapiens
tgtggtagtatatgc

SEQ ID NO: 1005932 - DNA, 15 bp, Homo sapiens
gtggtagtatatgct

SEQ ID NO: 1005933 - DNA, 15 bp, Homo sapiens
tggtagtatatgcta

SEQ ID NO: 1005934 - DNA, 15 bp, Homo sapiens
ggtagtatatgctac

SEQ ID NO: 1005935 - DNA, 15 bp, Homo sapiens
gtagtatatgctact

SEQ ID NO: 1005936 - DNA, 15 bp, Homo sapiens
tagtatatgctactt

SEQ ID NO: 1005937 - DNA, 15 bp, Homo sapiens
agtatatgctacttg

SEQ ID NO: 1005938 - DNA, 15 bp, Homo sapiens
gtatatgctacttgg

SEQ ID NO: 1005939 - DNA, 15 bp, Homo sapiens
tatatgctacttggg

SEQ ID NO: 1005940 - DNA, 15 bp, Homo sapiens
atatgctacttggga

SEQ ID NO: 1005941 - DNA, 15 bp, Homo sapiens
tatgctacttgggag

SEQ ID NO: 1005942 - DNA, 15 bp, Homo sapiens
atgctacttgggagg

SEQ ID NO: 1005943 - DNA, 15 bp, Homo sapiens
tgctacttgggaggc

SEQ ID NO: 1005944 - DNA, 15 bp, Homo sapiens
cttgggaggctgagt

SEQ ID NO: 1005945 - DNA, 15 bp, Homo sapiens
ttgggaggctgagtc

SEQ ID NO: 1005946 - DNA, 15 bp, Homo sapiens
tgggaggctgagtca

SEQ ID NO: 1005947 - DNA, 15 bp, Homo sapiens
gggaggctgagtcag

SEQ ID NO: 1005948 - DNA, 15 bp, Homo sapiens
ggaggctgagtcagg

SEQ ID NO: 1005949 - DNA, 15 bp, Homo sapiens
gaggctgagtcagga

SEQ ID NO: 1005950 - DNA, 15 bp, Homo sapiens
aggctgagtcaggat

SEQ ID NO: 1005951 - DNA, 15 bp, Homo sapiens
ggctgagtcaggatt

SEQ ID NO: 1005952 - DNA, 15 bp, Homo sapiens
gctgagtcaggattg

SEQ ID NO: 1005953 - DNA, 15 bp, Homo sapiens
ctgagtcaggattgc

SEQ ID NO: 1005954 - DNA, 15 bp, Homo sapiens
tgagtcaggattgct

SEQ ID NO: 1005955 - DNA, 15 bp, Homo sapiens
gagtcaggattgctt

SEQ ID NO: 1005956 - DNA, 15 bp, Homo sapiens
agtcaggattgcttg

SEQ ID NO: 1005957 - DNA, 15 bp, Homo sapiens
gtcaggattgcttga

SEQ ID NO: 1005958 - DNA, 15 bp, Homo sapiens
tcaggattgcttgag

SEQ ID NO: 1005959 - DNA, 15 bp, Homo sapiens
caggattgcttgagc

SEQ ID NO: 1005960 - DNA, 15 bp, Homo sapiens
aggattgcttgagcc

SEQ ID NO: 1005961 - DNA, 15 bp, Homo sapiens
ggattgcttgagccc

SEQ ID NO: 1005962 - DNA, 15 bp, Homo sapiens
gattgcttgagccca

SEQ ID NO: 1005963 - DNA, 15 bp, Homo sapiens
attgcttgagcccag

SEQ ID NO: 1005964 - DNA, 15 bp, Homo sapiens
ttgcttgagcccagg

SEQ ID NO: 1005965 - DNA, 15 bp, Homo sapiens
tgcttgagcccagga

SEQ ID NO: 1005966 - DNA, 15 bp, Homo sapiens
gcttgagcccaggaa

SEQ ID NO: 1005967 - DNA, 15 bp, Homo sapiens
cttgagcccaggaaa

SEQ ID NO: 1005968 - DNA, 15 bp, Homo sapiens
ttgagcccaggaaat

SEQ ID NO: 1005969 - DNA, 15 bp, Homo sapiens
tgagcccaggaaatt

SEQ ID NO: 1005970 - DNA, 15 bp, Homo sapiens
gagcccaggaaatta

SEQ ID NO: 1005971 - DNA, 15 bp, Homo sapiens
agcccaggaaattaa

SEQ ID NO: 1005972 - DNA, 15 bp, Homo sapiens
gcccaggaaattaag

SEQ ID NO: 1005973 - DNA, 15 bp, Homo sapiens
cccaggaaattaagg

SEQ ID NO: 1005974 - DNA, 15 bp, Homo sapiens
ccaggaaattaaggc

SEQ ID NO: 1005975 - DNA, 15 bp, Homo sapiens
caggaaattaaggct

SEQ ID NO: 1005976 - DNA, 15 bp, Homo sapiens
aggaaattaaggctg

SEQ ID NO: 1005977 - DNA, 15 bp, Homo sapiens
ggaaattaaggctgc

SEQ ID NO: 1005978 - DNA, 15 bp, Homo sapiens
gaaattaaggctgca

SEQ ID NO: 1005979 - DNA, 15 bp, Homo sapiens
aaattaaggctgcag

SEQ ID NO: 1005980 - DNA, 15 bp, Homo sapiens
aattaaggctgcagt

SEQ ID NO: 1005981 - DNA, 15 bp, Homo sapiens
attaaggctgcagtg

SEQ ID NO: 1005982 - DNA, 15 bp, Homo sapiens
ttaaggctgcagtga

SEQ ID NO: 1005983 - DNA, 15 bp, Homo sapiens
taaggctgcagtgag

SEQ ID NO: 1005984 - DNA, 15 bp, Homo sapiens
aaggctgcagtgagg

SEQ ID NO: 1005985 - DNA, 15 bp, Homo sapiens
aggctgcagtgaggc

SEQ ID NO: 1005986 - DNA, 15 bp, Homo sapiens
ggctgcagtgaggca

SEQ ID NO: 1005987 - DNA, 15 bp, Homo sapiens
gctgcagtgaggcat

SEQ ID NO: 1005988 - DNA, 15 bp, Homo sapiens
ctgcagtgaggcatg

SEQ ID NO: 1005989 - DNA, 15 bp, Homo sapiens
tgcagtgaggcatga

SEQ ID NO: 1005990 - DNA, 15 bp, Homo sapiens
gcagtgaggcatgat

SEQ ID NO: 1005991 - DNA, 15 bp, Homo sapiens
cagtgaggcatgatt

SEQ ID NO: 1005992 - DNA, 15 bp, Homo sapiens
agtgaggcatgattg

SEQ ID NO: 1005993 - DNA, 15 bp, Homo sapiens
gtgaggcatgattgc

SEQ ID NO: 1005994 - DNA, 15 bp, Homo sapiens
tgaggcatgattgca

SEQ ID NO: 1005995 - DNA, 15 bp, Homo sapiens
gaggcatgattgcac

SEQ ID NO: 1005996 - DNA, 15 bp, Homo sapiens
aggcatgattgcacc

SEQ ID NO: 1005997 - DNA, 15 bp, Homo sapiens
ggcatgattgcacca

SEQ ID NO: 1005998 - DNA, 15 bp, Homo sapiens
gcatgattgcaccac

SEQ ID NO: 1005999 - DNA, 15 bp, Homo sapiens
catgattgcaccact

SEQ ID NO: 1006000 - DNA, 15 bp, Homo sapiens
atgattgcaccactg

SEQ ID NO: 1006001 - DNA, 15 bp, Homo sapiens
tgattgcaccactgc

SEQ ID NO: 1006002 - DNA, 15 bp, Homo sapiens
gcaccactgcactct

SEQ ID NO: 1006003 - DNA, 15 bp, Homo sapiens
caccactgcactctg

SEQ ID NO: 1006004 - DNA, 15 bp, Homo sapiens
accactgcactctgg

SEQ ID NO: 1006005 - DNA, 15 bp, Homo sapiens
ccactgcactctggc

SEQ ID NO: 1006006 - DNA, 15 bp, Homo sapiens
cactgcactctggcc

SEQ ID NO: 1006007 - DNA, 15 bp, Homo sapiens
actgcactctggcct

SEQ ID NO: 1006008 - DNA, 15 bp, Homo sapiens
ctgcactctggcctg

SEQ ID NO: 1006009 - DNA, 15 bp, Homo sapiens
tgcactctggcctgg

SEQ ID NO: 1006010 - DNA, 15 bp, Homo sapiens
gcactctggcctggg

SEQ ID NO: 1006011 - DNA, 15 bp, Homo sapiens
cactctggcctgggt

SEQ ID NO: 1006012 - DNA, 15 bp, Homo sapiens
actctggcctgggtg

SEQ ID NO: 1006013 - DNA, 15 bp, Homo sapiens
ctctggcctgggtga

SEQ ID NO: 1006014 - DNA, 15 bp, Homo sapiens
tctggcctgggtgag

SEQ ID NO: 1006015 - DNA, 15 bp, Homo sapiens
ctggcctgggtgaga

SEQ ID NO: 1006016 - DNA, 15 bp, Homo sapiens
tggcctgggtgagac

SEQ ID NO: 1006017 - DNA, 15 bp, Homo sapiens
ggcctgggtgagacc

SEQ ID NO: 1006018 - DNA, 15 bp, Homo sapiens
gcctgggtgagaccc

SEQ ID NO: 1006019 - DNA, 15 bp, Homo sapiens
cctgggtgagaccct

SEQ ID NO: 1006020 - DNA, 15 bp, Homo sapiens
ctgggtgagaccctg

SEQ ID NO: 1006021 - DNA, 15 bp, Homo sapiens
tgggtgagaccctgt

SEQ ID NO: 1006022 - DNA, 15 bp, Homo sapiens
gggtgagaccctgtc

SEQ ID NO: 1006023 - DNA, 15 bp, Homo sapiens
ggtgagaccctgtct

SEQ ID NO: 1006024 - DNA, 15 bp, Homo sapiens
gtgagaccctgtctc

SEQ ID NO: 1006025 - DNA, 15 bp, Homo sapiens
tgagaccctgtctca

SEQ ID NO: 1006026 - DNA, 15 bp, Homo sapiens
gagaccctgtctcaa

SEQ ID NO: 1006027 - DNA, 15 bp, Homo sapiens
agaccctgtctcaaa

SEQ ID NO: 1006028 - DNA, 15 bp, Homo sapiens
gaccctgtctcaaaa

SEQ ID NO: 1006029 - DNA, 15 bp, Homo sapiens
accctgtctcaaaaa

SEQ ID NO: 1006030 - DNA, 15 bp, Homo sapiens
ccctgtctcaaaaaa

SEQ ID NO: 1006031 - DNA, 15 bp, Homo sapiens
cctgtctcaaaaaaa

SEQ ID NO: 1006032 - DNA, 15 bp, Homo sapiens
tgtctcaaaaaaaat

SEQ ID NO: 1006033 - DNA, 15 bp, Homo sapiens
gtctcaaaaaaaatt

SEQ ID NO: 1006034 - DNA, 15 bp, Homo sapiens
tctcaaaaaaaattt

SEQ ID NO: 1006035 - DNA, 15 bp, Homo sapiens
ctcaaaaaaaatttt

SEQ ID NO: 1006036 - DNA, 15 bp, Homo sapiens
tcaaaaaaaattttt

SEQ ID NO: 1006037 - DNA, 15 bp, Homo sapiens
caaaaaaaatttttt

SEQ ID NO: 1006038 - DNA, 15 bp, Homo sapiens
aaaaaaaattttttt

SEQ ID NO: 1006039 - DNA, 15 bp, Homo sapiens
aaaaaaatttttttt

SEQ ID NO: 1006040 - DNA, 15 bp, Homo sapiens
aaaaaattttttttt

SEQ ID NO: 1006041 - DNA, 15 bp, Homo sapiens
aaaaatttttttttt

SEQ ID NO: 1006042 - DNA, 15 bp, Homo sapiens
aaaattttttttttt

SEQ ID NO: 1006043 - DNA, 15 bp, Homo sapiens
aaattttttttttta

SEQ ID NO: 1006044 - DNA, 15 bp, Homo sapiens
aatttttttttttaa

SEQ ID NO: 1006045 - DNA, 15 bp, Homo sapiens
atttttttttttaat

SEQ ID NO: 1006046 - DNA, 15 bp, Homo sapiens
tttttttttttaata

SEQ ID NO: 1006047 - DNA, 15 bp, Homo sapiens
ttttttttttaatat

SEQ ID NO: 1006048 - DNA, 15 bp, Homo sapiens
tttttttttaatatg

SEQ ID NO: 1006049 - DNA, 15 bp, Homo sapiens
ttttttttaatatgg

SEQ ID NO: 1006050 - DNA, 15 bp, Homo sapiens
tttttttaatatgga

SEQ ID NO: 1006051 - DNA, 15 bp, Homo sapiens
ttttttaatatggag

SEQ ID NO: 1006052 - DNA, 15 bp, Homo sapiens
tttttaatatggaga

SEQ ID NO: 1006053 - DNA, 15 bp, Homo sapiens
ttttaatatggagaa

SEQ ID NO: 1006054 - DNA, 15 bp, Homo sapiens
tttaatatggagaaa

SEQ ID NO: 1006055 - DNA, 15 bp, Homo sapiens
ttaatatggagaaag

SEQ ID NO: 1006056 - DNA, 15 bp, Homo sapiens
taatatggagaaagt

SEQ ID NO: 1006057 - DNA, 15 bp, Homo sapiens
aatatggagaaagta

SEQ ID NO: 1006058 - DNA, 15 bp, Homo sapiens
atatggagaaagtat

SEQ ID NO: 1006059 - DNA, 15 bp, Homo sapiens
tatggagaaagtatt

SEQ ID NO: 1006060 - DNA, 15 bp, Homo sapiens
atggagaaagtattt

SEQ ID NO: 1006061 - DNA, 15 bp, Homo sapiens
tggagaaagtatttt

SEQ ID NO: 1006062 - DNA, 15 bp, Homo sapiens
ggagaaagtattttt

SEQ ID NO: 1006063 - DNA, 15 bp, Homo sapiens
gagaaagtatttttg

SEQ ID NO: 1006064 - DNA, 15 bp, Homo sapiens
agaaagtatttttgt

SEQ ID NO: 1006065 - DNA, 15 bp, Homo sapiens
gaaagtatttttgtt

SEQ ID NO: 1006066 - DNA, 15 bp, Homo sapiens
aaagtatttttgttt

SEQ ID NO: 1006067 - DNA, 15 bp, Homo sapiens
aagtatttttgtttt

SEQ ID NO: 1006068 - DNA, 15 bp, Homo sapiens
agtatttttgttttt

SEQ ID NO: 1006069 - DNA, 15 bp, Homo sapiens
gtatttttgtttttc

SEQ ID NO: 1006070 - DNA, 15 bp, Homo sapiens
tatttttgtttttcg

SEQ ID NO: 1006071 - DNA, 15 bp, Homo sapiens
atttttgtttttcgt

SEQ ID NO: 1006072 - DNA, 15 bp, Homo sapiens
tttttgtttttcgtt

SEQ ID NO: 1006073 - DNA, 15 bp, Homo sapiens
ttttgtttttcgttt

SEQ ID NO: 1006074 - DNA, 15 bp, Homo sapiens
tttgtttttcgtttt

SEQ ID NO: 1006075 - DNA, 15 bp, Homo sapiens
ttgtttttcgttttt

SEQ ID NO: 1006076 - DNA, 15 bp, Homo sapiens
tgtttttcgtttttt

SEQ ID NO: 1006077 - DNA, 15 bp, Homo sapiens
gtttttcgtttttta

SEQ ID NO: 1006078 - DNA, 15 bp, Homo sapiens
tttttcgttttttat

SEQ ID NO: 1006079 - DNA, 15 bp, Homo sapiens
ttttcgttttttatt

SEQ ID NO: 1006080 - DNA, 15 bp, Homo sapiens
tttcgttttttattt

SEQ ID NO: 1006081 - DNA, 15 bp, Homo sapiens
ttcgttttttatttg

SEQ ID NO: 1006082 - DNA, 15 bp, Homo sapiens
tcgttttttatttgg

SEQ ID NO: 1006083 - DNA, 15 bp, Homo sapiens
cgttttttatttggg

SEQ ID NO: 1006084 - DNA, 15 bp, Homo sapiens
gttttttatttgggt

SEQ ID NO: 1006085 - DNA, 15 bp, Homo sapiens
ttttttatttgggta

SEQ ID NO: 1006086 - DNA, 15 bp, Homo sapiens
tttttatttgggtac

SEQ ID NO: 1006087 - DNA, 15 bp, Homo sapiens
ttttatttgggtacc

SEQ ID NO: 1006088 - DNA, 15 bp, Homo sapiens
tttatttgggtaccg

SEQ ID NO: 1006089 - DNA, 15 bp, Homo sapiens
ttatttgggtaccgg

SEQ ID NO: 1006090 - DNA, 15 bp, Homo sapiens
tatttgggtaccggc

SEQ ID NO: 1006091 - DNA, 15 bp, Homo sapiens
atttgggtaccggcc

SEQ ID NO: 1006092 - DNA, 15 bp, Homo sapiens
tttgggtaccggcca

SEQ ID NO: 1006093 - DNA, 15 bp, Homo sapiens
ttgggtaccggccac

SEQ ID NO: 1006094 - DNA, 15 bp, Homo sapiens
tgggtaccggccact

SEQ ID NO: 1006095 - DNA, 15 bp, Homo sapiens
gggtaccggccactg

SEQ ID NO: 1006096 - DNA, 15 bp, Homo sapiens
ggtaccggccactgc

SEQ ID NO: 1006097 - DNA, 15 bp, Homo sapiens
gtaccggccactgca

SEQ ID NO: 1006098 - DNA, 15 bp, Homo sapiens
taccggccactgcac

SEQ ID NO: 1006099 - DNA, 15 bp, Homo sapiens
accggccactgcacc

SEQ ID NO: 1006100 - DNA, 15 bp, Homo sapiens
ccggccactgcaccc

SEQ ID NO: 1006101 - DNA, 15 bp, Homo sapiens
cggccactgcaccca

SEQ ID NO: 1006102 - DNA, 15 bp, Homo sapiens
ggccactgcacccaa

SEQ ID NO: 1006103 - DNA, 15 bp, Homo sapiens
gccactgcacccaac

SEQ ID NO: 1006104 - DNA, 15 bp, Homo sapiens
ccactgcacccaacc

SEQ ID NO: 1006105 - DNA, 15 bp, Homo sapiens
cactgcacccaacca

SEQ ID NO: 1006106 - DNA, 15 bp, Homo sapiens
actgcacccaaccaa

SEQ ID NO: 1006107 - DNA, 15 bp, Homo sapiens
ctgcacccaaccaaa

SEQ ID NO: 1006108 - DNA, 15 bp, Homo sapiens
tgcacccaaccaaac

SEQ ID NO: 1006109 - DNA, 15 bp, Homo sapiens
gcacccaaccaaaca

SEQ ID NO: 1006110 - DNA, 15 bp, Homo sapiens
cacccaaccaaacat

SEQ ID NO: 1006111 - DNA, 15 bp, Homo sapiens
acccaaccaaacatt

SEQ ID NO: 1006112 - DNA, 15 bp, Homo sapiens
cccaaccaaacattt

SEQ ID NO: 1006113 - DNA, 15 bp, Homo sapiens
ccaaccaaacatttt

SEQ ID NO: 1006114 - DNA, 15 bp, Homo sapiens
caaccaaacattttg

SEQ ID NO: 1006115 - DNA, 15 bp, Homo sapiens
aaccaaacattttgt

SEQ ID NO: 1006116 - DNA, 15 bp, Homo sapiens
accaaacattttgtc

SEQ ID NO: 1006117 - DNA, 15 bp, Homo sapiens
ccaaacattttgtcc

SEQ ID NO: 1006118 - DNA, 15 bp, Homo sapiens
caaacattttgtcct

SEQ ID NO: 1006119 - DNA, 15 bp, Homo sapiens
aaacattttgtcctt

SEQ ID NO: 1006120 - DNA, 15 bp, Homo sapiens
aacattttgtcctta

SEQ ID NO: 1006121 - DNA, 15 bp, Homo sapiens
acattttgtccttaa

SEQ ID NO: 1006122 - DNA, 15 bp, Homo sapiens
cattttgtccttaaa

SEQ ID NO: 1006123 - DNA, 15 bp, Homo sapiens
attttgtccttaaac

SEQ ID NO: 1006124 - DNA, 15 bp, Homo sapiens
ttttgtccttaaaca

SEQ ID NO: 1006125 - DNA, 15 bp, Homo sapiens
tttgtccttaaacaa

SEQ ID NO: 1006126 - DNA, 15 bp, Homo sapiens
ttgtccttaaacaaa

SEQ ID NO: 1006127 - DNA, 15 bp, Homo sapiens
tgtccttaaacaaaa

SEQ ID NO: 1006128 - DNA, 15 bp, Homo sapiens
gtccttaaacaaaag

SEQ ID NO: 1006129 - DNA, 15 bp, Homo sapiens
tccttaaacaaaagt

SEQ ID NO: 1006130 - DNA, 15 bp, Homo sapiens
ccttaaacaaaagtt

SEQ ID NO: 1006131 - DNA, 15 bp, Homo sapiens
cttaaacaaaagttt

SEQ ID NO: 1006132 - DNA, 15 bp, Homo sapiens
ttaaacaaaagttta

SEQ ID NO: 1006133 - DNA, 15 bp, Homo sapiens
taaacaaaagtttaa

SEQ ID NO: 1006134 - DNA, 15 bp, Homo sapiens
aaacaaaagtttaag

SEQ ID NO: 1006135 - DNA, 15 bp, Homo sapiens
aacaaaagtttaagt

SEQ ID NO: 1006136 - DNA, 15 bp, Homo sapiens
acaaaagtttaagtc

SEQ ID NO: 1006137 - DNA, 15 bp, Homo sapiens
caaaagtttaagtca

SEQ ID NO: 1006138 - DNA, 15 bp, Homo sapiens
aaaagtttaagtcat

SEQ ID NO: 1006139 - DNA, 15 bp, Homo sapiens
aaagtttaagtcata

SEQ ID NO: 1006140 - DNA, 15 bp, Homo sapiens
aagtttaagtcatat

SEQ ID NO: 1006141 - DNA, 15 bp, Homo sapiens
agtttaagtcatata

SEQ ID NO: 1006142 - DNA, 15 bp, Homo sapiens
gtttaagtcatataa

SEQ ID NO: 1006143 - DNA, 15 bp, Homo sapiens
tttaagtcatataat

SEQ ID NO: 1006144 - DNA, 15 bp, Homo sapiens
ttaagtcatataata

SEQ ID NO: 1006145 - DNA, 15 bp, Homo sapiens
taagtcatataatac

SEQ ID NO: 1006146 - DNA, 15 bp, Homo sapiens
aagtcatataataca

SEQ ID NO: 1006147 - DNA, 15 bp, Homo sapiens
agtcatataatacag

SEQ ID NO: 1006148 - DNA, 15 bp, Homo sapiens
gtcatataatacagt

SEQ ID NO: 1006149 - DNA, 15 bp, Homo sapiens
tcatataatacagta

SEQ ID NO: 1006150 - DNA, 15 bp, Homo sapiens
catataatacagtag

SEQ ID NO: 1006151 - DNA, 15 bp, Homo sapiens
atataatacagtagt

SEQ ID NO: 1006152 - DNA, 15 bp, Homo sapiens
tataatacagtagta

SEQ ID NO: 1006153 - DNA, 15 bp, Homo sapiens
ataatacagtagtaa

SEQ ID NO: 1006154 - DNA, 15 bp, Homo sapiens
taatacagtagtaag

SEQ ID NO: 1006155 - DNA, 15 bp, Homo sapiens
aatacagtagtaaga

SEQ ID NO: 1006156 - DNA, 15 bp, Homo sapiens
atacagtagtaagaa

SEQ ID NO: 1006157 - DNA, 15 bp, Homo sapiens
tacagtagtaagaat

SEQ ID NO: 1006158 - DNA, 15 bp, Homo sapiens
acagtagtaagaatg

SEQ ID NO: 1006159 - DNA, 15 bp, Homo sapiens
cagtagtaagaatgc

SEQ ID NO: 1006160 - DNA, 15 bp, Homo sapiens
agtagtaagaatgcc

SEQ ID NO: 1006161 - DNA, 15 bp, Homo sapiens
gtagtaagaatgcct

SEQ ID NO: 1006162 - DNA, 15 bp, Homo sapiens
tagtaagaatgcctt

SEQ ID NO: 1006163 - DNA, 15 bp, Homo sapiens
agtaagaatgcctta

SEQ ID NO: 1006164 - DNA, 15 bp, Homo sapiens
gtaagaatgccttat

SEQ ID NO: 1006165 - DNA, 15 bp, Homo sapiens
taagaatgccttatt

SEQ ID NO: 1006166 - DNA, 15 bp, Homo sapiens
aagaatgccttattt

SEQ ID NO: 1006167 - DNA, 15 bp, Homo sapiens
agaatgccttatttt

SEQ ID NO: 1006168 - DNA, 15 bp, Homo sapiens
gaatgccttattttt

SEQ ID NO: 1006169 - DNA, 15 bp, Homo sapiens
aatgccttatttttt

SEQ ID NO: 1006170 - DNA, 15 bp, Homo sapiens
atgccttatttttta

SEQ ID NO: 1006171 - DNA, 15 bp, Homo sapiens
tgccttattttttac

SEQ ID NO: 1006172 - DNA, 15 bp, Homo sapiens
gccttattttttaca

SEQ ID NO: 1006173 - DNA, 15 bp, Homo sapiens
ccttattttttacat

SEQ ID NO: 1006174 - DNA, 15 bp, Homo sapiens
cttattttttacatc

SEQ ID NO: 1006175 - DNA, 15 bp, Homo sapiens
ttattttttacatct

SEQ ID NO: 1006176 - DNA, 15 bp, Homo sapiens
tattttttacatctt

SEQ ID NO: 1006177 - DNA, 15 bp, Homo sapiens
attttttacatcttt

SEQ ID NO: 1006178 - DNA, 15 bp, Homo sapiens
ttttttacatctttg

SEQ ID NO: 1006179 - DNA, 15 bp, Homo sapiens
tttttacatctttgt

SEQ ID NO: 1006180 - DNA, 15 bp, Homo sapiens
ttttacatctttgtt

SEQ ID NO: 1006181 - DNA, 15 bp, Homo sapiens
tttacatctttgttc

SEQ ID NO: 1006182 - DNA, 15 bp, Homo sapiens
ttacatctttgttct

SEQ ID NO: 1006183 - DNA, 15 bp, Homo sapiens
tacatctttgttctt

SEQ ID NO: 1006184 - DNA, 15 bp, Homo sapiens
acatctttgttcttt

SEQ ID NO: 1006185 - DNA, 15 bp, Homo sapiens
catctttgttcttta

SEQ ID NO: 1006186 - DNA, 15 bp, Homo sapiens
atctttgttctttaa

SEQ ID NO: 1006187 - DNA, 15 bp, Homo sapiens
tctttgttctttaaa

SEQ ID NO: 1006188 - DNA, 15 bp, Homo sapiens
ctttgttctttaaat

SEQ ID NO: 1006189 - DNA, 15 bp, Homo sapiens
tttgttctttaaatt

SEQ ID NO: 1006190 - DNA, 15 bp, Homo sapiens
ttgttctttaaatta

SEQ ID NO: 1006191 - DNA, 15 bp, Homo sapiens
tgttctttaaattac

SEQ ID NO: 1006192 - DNA, 15 bp, Homo sapiens
gttctttaaattact

SEQ ID NO: 1006193 - DNA, 15 bp, Homo sapiens
ttctttaaattactc

SEQ ID NO: 1006194 - DNA, 15 bp, Homo sapiens
tctttaaattactca

SEQ ID NO: 1006195 - DNA, 15 bp, Homo sapiens
ctttaaattactcag

SEQ ID NO: 1006196 - DNA, 15 bp, Homo sapiens
tttaaattactcaga

SEQ ID NO: 1006197 - DNA, 15 bp, Homo sapiens
ttaaattactcagat

SEQ ID NO: 1006198 - DNA, 15 bp, Homo sapiens
taaattactcagatt

SEQ ID NO: 1006199 - DNA, 15 bp, Homo sapiens
aaattactcagattg

SEQ ID NO: 1006200 - DNA, 15 bp, Homo sapiens
aattactcagattgc

SEQ ID NO: 1006201 - DNA, 15 bp, Homo sapiens
attactcagattgct

SEQ ID NO: 1006202 - DNA, 15 bp, Homo sapiens
ttactcagattgcta

SEQ ID NO: 1006203 - DNA, 15 bp, Homo sapiens
tactcagattgctat

SEQ ID NO: 1006204 - DNA, 15 bp, Homo sapiens
actcagattgctatg

SEQ ID NO: 1006205 - DNA, 15 bp, Homo sapiens
ctcagattgctatgg

SEQ ID NO: 1006206 - DNA, 15 bp, Homo sapiens
tcagattgctatggg

SEQ ID NO: 1006207 - DNA, 15 bp, Homo sapiens
cagattgctatgggg

SEQ ID NO: 1006208 - DNA, 15 bp, Homo sapiens
agattgctatggggc

SEQ ID NO: 1006209 - DNA, 15 bp, Homo sapiens
gattgctatggggca

SEQ ID NO: 1006210 - DNA, 15 bp, Homo sapiens
attgctatggggcat

SEQ ID NO: 1006211 - DNA, 15 bp, Homo sapiens
ttgctatggggcatt

SEQ ID NO: 1006212 - DNA, 15 bp, Homo sapiens
tgctatggggcattt

SEQ ID NO: 1006213 - DNA, 15 bp, Homo sapiens
gctatggggcatttt

SEQ ID NO: 1006214 - DNA, 15 bp, Homo sapiens
ctatggggcattttt

SEQ ID NO: 1006215 - DNA, 15 bp, Homo sapiens
tatggggcatttttg

SEQ ID NO: 1006216 - DNA, 15 bp, Homo sapiens
atggggcatttttgt

SEQ ID NO: 1006217 - DNA, 15 bp, Homo sapiens
tggggcatttttgtt

SEQ ID NO: 1006218 - DNA, 15 bp, Homo sapiens
ggggcatttttgttg

SEQ ID NO: 1006219 - DNA, 15 bp, Homo sapiens
gggcatttttgttgt

SEQ ID NO: 1006220 - DNA, 15 bp, Homo sapiens
ggcatttttgttgta

SEQ ID NO: 1006221 - DNA, 15 bp, Homo sapiens
gcatttttgttgtag

SEQ ID NO: 1006222 - DNA, 15 bp, Homo sapiens
catttttgttgtagc

SEQ ID NO: 1006223 - DNA, 15 bp, Homo sapiens
atttttgttgtagct

SEQ ID NO: 1006224 - DNA, 15 bp, Homo sapiens
tttttgttgtagctt

SEQ ID NO: 1006225 - DNA, 15 bp, Homo sapiens
ttttgttgtagcttt

SEQ ID NO: 1006226 - DNA, 15 bp, Homo sapiens
tttgttgtagctttc

SEQ ID NO: 1006227 - DNA, 15 bp, Homo sapiens
ttgttgtagctttca

SEQ ID NO: 1006228 - DNA, 15 bp, Homo sapiens
tgttgtagctttcaa

SEQ ID NO: 1006229 - DNA, 15 bp, Homo sapiens
gttgtagctttcaaa

SEQ ID NO: 1006230 - DNA, 15 bp, Homo sapiens
ttgtagctttcaaat

SEQ ID NO: 1006231 - DNA, 15 bp, Homo sapiens
tgtagctttcaaatt

SEQ ID NO: 1006232 - DNA, 15 bp, Homo sapiens
gtagctttcaaattt

SEQ ID NO: 1006233 - DNA, 15 bp, Homo sapiens
tagctttcaaatttg

SEQ ID NO: 1006234 - DNA, 15 bp, Homo sapiens
agctttcaaatttgg

SEQ ID NO: 1006235 - DNA, 15 bp, Homo sapiens
gctttcaaatttggt

SEQ ID NO: 1006236 - DNA, 15 bp, Homo sapiens
ctttcaaatttggta

SEQ ID NO: 1006237 - DNA, 15 bp, Homo sapiens
tttcaaatttggtat

SEQ ID NO: 1006238 - DNA, 15 bp, Homo sapiens
ttcaaatttggtatt

SEQ ID NO: 1006239 - DNA, 15 bp, Homo sapiens
tcaaatttggtattc

SEQ ID NO: 1006240 - DNA, 15 bp, Homo sapiens
caaatttggtattct

SEQ ID NO: 1006241 - DNA, 15 bp, Homo sapiens
aaatttggtattctg

SEQ ID NO: 1006242 - DNA, 15 bp, Homo sapiens
aatttggtattctgg

SEQ ID NO: 1006243 - DNA, 15 bp, Homo sapiens
atttggtattctggg

SEQ ID NO: 1006244 - DNA, 15 bp, Homo sapiens
tttggtattctgggg

SEQ ID NO: 1006245 - DNA, 15 bp, Homo sapiens
ttggtattctggggt

SEQ ID NO: 1006246 - DNA, 15 bp, Homo sapiens
tggtattctggggtt

SEQ ID NO: 1006247 - DNA, 15 bp, Homo sapiens
ggtattctggggttc

SEQ ID NO: 1006248 - DNA, 15 bp, Homo sapiens
gtattctggggttct

SEQ ID NO: 1006249 - DNA, 15 bp, Homo sapiens
tattctggggttcta

SEQ ID NO: 1006250 - DNA, 15 bp, Homo sapiens
attctggggttctat

SEQ ID NO: 1006251 - DNA, 15 bp, Homo sapiens
ttctggggttctatg

SEQ ID NO: 1006252 - DNA, 15 bp, Homo sapiens
tctggggttctatgt

SEQ ID NO: 1006253 - DNA, 15 bp, Homo sapiens
ctggggttctatgta

SEQ ID NO: 1006254 - DNA, 15 bp, Homo sapiens
tggggttctatgtag

SEQ ID NO: 1006255 - DNA, 15 bp, Homo sapiens
ggggttctatgtaga

SEQ ID NO: 1006256 - DNA, 15 bp, Homo sapiens
gggttctatgtagac

SEQ ID NO: 1006257 - DNA, 15 bp, Homo sapiens
ggttctatgtagact

SEQ ID NO: 1006258 - DNA, 15 bp, Homo sapiens
gttctatgtagactc

SEQ ID NO: 1006259 - DNA, 15 bp, Homo sapiens
ttctatgtagactct

SEQ ID NO: 1006260 - DNA, 15 bp, Homo sapiens
tctatgtagactcta

SEQ ID NO: 1006261 - DNA, 15 bp, Homo sapiens
ctatgtagactctat

SEQ ID NO: 1006262 - DNA, 15 bp, Homo sapiens
tatgtagactctata

SEQ ID NO: 1006263 - DNA, 15 bp, Homo sapiens
atgtagactctatat

SEQ ID NO: 1006264 - DNA, 15 bp, Homo sapiens
tgtagactctatatt

SEQ ID NO: 1006265 - DNA, 15 bp, Homo sapiens
gtagactctatattg

SEQ ID NO: 1006266 - DNA, 15 bp, Homo sapiens
tagactctatattgt

SEQ ID NO: 1006267 - DNA, 15 bp, Homo sapiens
agactctatattgtt

SEQ ID NO: 1006268 - DNA, 15 bp, Homo sapiens
gactctatattgttg

SEQ ID NO: 1006269 - DNA, 15 bp, Homo sapiens
actctatattgttgc

SEQ ID NO: 1006270 - DNA, 15 bp, Homo sapiens
ctctatattgttgca

SEQ ID NO: 1006271 - DNA, 15 bp, Homo sapiens
tctatattgttgcat

SEQ ID NO: 1006272 - DNA, 15 bp, Homo sapiens
ctatattgttgcatt

SEQ ID NO: 1006273 - DNA, 15 bp, Homo sapiens
tatattgttgcattc

SEQ ID NO: 1006274 - DNA, 15 bp, Homo sapiens
atattgttgcattct

SEQ ID NO: 1006275 - DNA, 15 bp, Homo sapiens
tattgttgcattcta

SEQ ID NO: 1006276 - DNA, 15 bp, Homo sapiens
attgttgcattctaa

SEQ ID NO: 1006277 - DNA, 15 bp, Homo sapiens
ttgttgcattctaac

SEQ ID NO: 1006278 - DNA, 15 bp, Homo sapiens
tgttgcattctaacg

SEQ ID NO: 1006279 - DNA, 15 bp, Homo sapiens
gttgcattctaacga

SEQ ID NO: 1006280 - DNA, 15 bp, Homo sapiens
ttgcattctaacgac

SEQ ID NO: 1006281 - DNA, 15 bp, Homo sapiens
tgcattctaacgaca

SEQ ID NO: 1006282 - DNA, 15 bp, Homo sapiens
gcattctaacgacat

SEQ ID NO: 1006283 - DNA, 15 bp, Homo sapiens
cattctaacgacata

SEQ ID NO: 1006284 - DNA, 15 bp, Homo sapiens
attctaacgacatac

SEQ ID NO: 1006285 - DNA, 15 bp, Homo sapiens
ttctaacgacatact

SEQ ID NO: 1006286 - DNA, 15 bp, Homo sapiens
tctaacgacatactt

SEQ ID NO: 1006287 - DNA, 15 bp, Homo sapiens
ctaacgacatacttt

SEQ ID NO: 1006288 - DNA, 15 bp, Homo sapiens
taacgacatactttt

SEQ ID NO: 1006289 - DNA, 15 bp, Homo sapiens
aacgacatactttta

SEQ ID NO: 1006290 - DNA, 15 bp, Homo sapiens
acgacatacttttaa

SEQ ID NO: 1006291 - DNA, 15 bp, Homo sapiens
cgacatacttttaag

SEQ ID NO: 1006292 - DNA, 15 bp, Homo sapiens
gacatacttttaagg

SEQ ID NO: 1006293 - DNA, 15 bp, Homo sapiens
acatacttttaagga

SEQ ID NO: 1006294 - DNA, 15 bp, Homo sapiens
catacttttaaggat

SEQ ID NO: 1006295 - DNA, 15 bp, Homo sapiens
atacttttaaggata

SEQ ID NO: 1006296 - DNA, 15 bp, Homo sapiens
tacttttaaggataa

SEQ ID NO: 1006297 - DNA, 15 bp, Homo sapiens
acttttaaggataag

SEQ ID NO: 1006298 - DNA, 15 bp, Homo sapiens
cttttaaggataagc

SEQ ID NO: 1006299 - DNA, 15 bp, Homo sapiens
ttttaaggataagca

SEQ ID NO: 1006300 - DNA, 15 bp, Homo sapiens
tttaaggataagcag

SEQ ID NO: 1006301 - DNA, 15 bp, Homo sapiens
ttaaggataagcagc

SEQ ID NO: 1006302 - DNA, 15 bp, Homo sapiens
taaggataagcagcg

SEQ ID NO: 1006303 - DNA, 15 bp, Homo sapiens
aaggataagcagcgt

SEQ ID NO: 1006304 - DNA, 15 bp, Homo sapiens
aggataagcagcgta

SEQ ID NO: 1006305 - DNA, 15 bp, Homo sapiens
ggataagcagcgtat

SEQ ID NO: 1006306 - DNA, 15 bp, Homo sapiens
gataagcagcgtatt

SEQ ID NO: 1006307 - DNA, 15 bp, Homo sapiens
ataagcagcgtatta

SEQ ID NO: 1006308 - DNA, 15 bp, Homo sapiens
taagcagcgtattaa

SEQ ID NO: 1006309 - DNA, 15 bp, Homo sapiens
aagcagcgtattaat

SEQ ID NO: 1006310 - DNA, 15 bp, Homo sapiens
agcagcgtattaatt

SEQ ID NO: 1006311 - DNA, 15 bp, Homo sapiens
gcagcgtattaatta

SEQ ID NO: 1006312 - DNA, 15 bp, Homo sapiens
cagcgtattaattaa

SEQ ID NO: 1006313 - DNA, 15 bp, Homo sapiens
agcgtattaattaaa

SEQ ID NO: 1006314 - DNA, 15 bp, Homo sapiens
gcgtattaattaaaa

SEQ ID NO: 1006315 - DNA, 15 bp, Homo sapiens
cgtattaattaaaaa

SEQ ID NO: 1006316 - DNA, 15 bp, Homo sapiens
gtattaattaaaaat

SEQ ID NO: 1006317 - DNA, 15 bp, Homo sapiens
tattaattaaaaatg

SEQ ID NO: 1006318 - DNA, 15 bp, Homo sapiens
attaattaaaaatgt

SEQ ID NO: 1006319 - DNA, 15 bp, Homo sapiens
ttaattaaaaatgtg

SEQ ID NO: 1006320 - DNA, 15 bp, Homo sapiens
taattaaaaatgtgt

SEQ ID NO: 1006321 - DNA, 15 bp, Homo sapiens
aattaaaaatgtgtt

SEQ ID NO: 1006322 - DNA, 15 bp, Homo sapiens
attaaaaatgtgttt

SEQ ID NO: 1006323 - DNA, 15 bp, Homo sapiens
ttaaaaatgtgtttt

SEQ ID NO: 1006324 - DNA, 15 bp, Homo sapiens
taaaaatgtgttttc

SEQ ID NO: 1006325 - DNA, 15 bp, Homo sapiens
aaaaatgtgttttcc

SEQ ID NO: 1006326 - DNA, 15 bp, Homo sapiens
aaaatgtgttttcca

SEQ ID NO: 1006327 - DNA, 15 bp, Homo sapiens
aaatgtgttttccac

SEQ ID NO: 1006328 - DNA, 15 bp, Homo sapiens
aatgtgttttccact

SEQ ID NO: 1006329 - DNA, 15 bp, Homo sapiens
atgtgttttccactt

SEQ ID NO: 1006330 - DNA, 15 bp, Homo sapiens
tgtgttttccacttg

SEQ ID NO: 1006331 - DNA, 15 bp, Homo sapiens
gtgttttccacttgt

SEQ ID NO: 1006332 - DNA, 15 bp, Homo sapiens
tgttttccacttgtg

SEQ ID NO: 1006333 - DNA, 15 bp, Homo sapiens
gttttccacttgtgt

SEQ ID NO: 1006334 - DNA, 15 bp, Homo sapiens
ttttccacttgtgtt

SEQ ID NO: 1006335 - DNA, 15 bp, Homo sapiens
tttccacttgtgttc

SEQ ID NO: 1006336 - DNA, 15 bp, Homo sapiens
ttccacttgtgttcc

SEQ ID NO: 1006337 - DNA, 15 bp, Homo sapiens
tccacttgtgttcct

SEQ ID NO: 1006338 - DNA, 15 bp, Homo sapiens
ccacttgtgttcctt

SEQ ID NO: 1006339 - DNA, 15 bp, Homo sapiens
cacttgtgttcctta

SEQ ID NO: 1006340 - DNA, 15 bp, Homo sapiens
acttgtgttccttag

SEQ ID NO: 1006341 - DNA, 15 bp, Homo sapiens
cttgtgttccttagg

SEQ ID NO: 1006342 - DNA, 15 bp, Homo sapiens
ttgtgttccttaggt

SEQ ID NO: 1006343 - DNA, 15 bp, Homo sapiens
tgtgttccttaggtc

SEQ ID NO: 1006344 - DNA, 15 bp, Homo sapiens
gtgttccttaggtct

SEQ ID NO: 1006345 - DNA, 15 bp, Homo sapiens
tgttccttaggtctg

SEQ ID NO: 1006346 - DNA, 15 bp, Homo sapiens
gttccttaggtctgc

SEQ ID NO: 1006347 - DNA, 15 bp, Homo sapiens
ttccttaggtctgcg

SEQ ID NO: 1006348 - DNA, 15 bp, Homo sapiens
tccttaggtctgcgt

SEQ ID NO: 1006349 - DNA, 15 bp, Homo sapiens
ccttaggtctgcgta

SEQ ID NO: 1006350 - DNA, 15 bp, Homo sapiens
cttaggtctgcgtat

SEQ ID NO: 1006351 - DNA, 15 bp, Homo sapiens
ttaggtctgcgtata

SEQ ID NO: 1006352 - DNA, 15 bp, Homo sapiens
taggtctgcgtatat

SEQ ID NO: 1006353 - DNA, 15 bp, Homo sapiens
aggtctgcgtatatt

SEQ ID NO: 1006354 - DNA, 15 bp, Homo sapiens
ggtctgcgtatattt

SEQ ID NO: 1006355 - DNA, 15 bp, Homo sapiens
gtctgcgtatatttt

SEQ ID NO: 1006356 - DNA, 15 bp, Homo sapiens
tctgcgtatattttg

SEQ ID NO: 1006357 - DNA, 15 bp, Homo sapiens
ctgcgtatattttgg

SEQ ID NO: 1006358 - DNA, 15 bp, Homo sapiens
tgcgtatattttgga

SEQ ID NO: 1006359 - DNA, 15 bp, Homo sapiens
gcgtatattttggag

SEQ ID NO: 1006360 - DNA, 15 bp, Homo sapiens
cgtatattttggagg

SEQ ID NO: 1006361 - DNA, 15 bp, Homo sapiens
gtatattttggaggt

SEQ ID NO: 1006362 - DNA, 15 bp, Homo sapiens
tatattttggaggtg

SEQ ID NO: 1006363 - DNA, 15 bp, Homo sapiens
atattttggaggtgt

SEQ ID NO: 1006364 - DNA, 15 bp, Homo sapiens
tattttggaggtgtg

SEQ ID NO: 1006365 - DNA, 15 bp, Homo sapiens
attttggaggtgtgt

SEQ ID NO: 1006366 - DNA, 15 bp, Homo sapiens
ttttggaggtgtgtg

SEQ ID NO: 1006367 - DNA, 15 bp, Homo sapiens
tttggaggtgtgtgt

SEQ ID NO: 1006368 - DNA, 15 bp, Homo sapiens
ttggaggtgtgtgtg

SEQ ID NO: 1006369 - DNA, 15 bp, Homo sapiens
tggaggtgtgtgtgt

SEQ ID NO: 1006370 - DNA, 15 bp, Homo sapiens
ggaggtgtgtgtgta

SEQ ID NO: 1006371 - DNA, 15 bp, Homo sapiens
gaggtgtgtgtgtat

SEQ ID NO: 1006372 - DNA, 15 bp, Homo sapiens
aggtgtgtgtgtata

SEQ ID NO: 1006373 - DNA, 15 bp, Homo sapiens
ggtgtgtgtgtatat

SEQ ID NO: 1006374 - DNA, 15 bp, Homo sapiens
gtgtgtgtgtatata

SEQ ID NO: 1006375 - DNA, 15 bp, Homo sapiens
tgtgtgtgtatataa

SEQ ID NO: 1006376 - DNA, 15 bp, Homo sapiens
gtgtgtgtatataag

SEQ ID NO: 1006377 - DNA, 15 bp, Homo sapiens
tgtgtgtatataagt

SEQ ID NO: 1006378 - DNA, 15 bp, Homo sapiens
gtgtgtatataagtc

SEQ ID NO: 1006379 - DNA, 15 bp, Homo sapiens
tgtgtatataagtca

SEQ ID NO: 1006380 - DNA, 15 bp, Homo sapiens
gtgtatataagtcaa

SEQ ID NO: 1006381 - DNA, 15 bp, Homo sapiens
tgtatataagtcaag

SEQ ID NO: 1006382 - DNA, 15 bp, Homo sapiens
gtatataagtcaagg

SEQ ID NO: 1006383 - DNA, 15 bp, Homo sapiens
tatataagtcaaggg

SEQ ID NO: 1006384 - DNA, 15 bp, Homo sapiens
atataagtcaaggga

SEQ ID NO: 1006385 - DNA, 15 bp, Homo sapiens
tataagtcaagggac

SEQ ID NO: 1006386 - DNA, 15 bp, Homo sapiens
ataagtcaagggaca

SEQ ID NO: 1006387 - DNA, 15 bp, Homo sapiens
taagtcaagggacag

SEQ ID NO: 1006388 - DNA, 15 bp, Homo sapiens
aagtcaagggacagg

SEQ ID NO: 1006389 - DNA, 15 bp, Homo sapiens
agtcaagggacagga

SEQ ID NO: 1006390 - DNA, 15 bp, Homo sapiens
gtcaagggacaggag

SEQ ID NO: 1006391 - DNA, 15 bp, Homo sapiens
tcaagggacaggagg

SEQ ID NO: 1006392 - DNA, 15 bp, Homo sapiens
caagggacaggaggt

SEQ ID NO: 1006393 - DNA, 15 bp, Homo sapiens
aagggacaggaggta

SEQ ID NO: 1006394 - DNA, 15 bp, Homo sapiens
agggacaggaggtat

SEQ ID NO: 1006395 - DNA, 15 bp, Homo sapiens
gggacaggaggtatc

SEQ ID NO: 1006396 - DNA, 15 bp, Homo sapiens
ggacaggaggtatcg

SEQ ID NO: 1006397 - DNA, 15 bp, Homo sapiens
gacaggaggtatcgg

SEQ ID NO: 1006398 - DNA, 15 bp, Homo sapiens
acaggaggtatcgga

SEQ ID NO: 1006399 - DNA, 15 bp, Homo sapiens
caggaggtatcggaa

SEQ ID NO: 1006400 - DNA, 15 bp, Homo sapiens
aggaggtatcggaag

SEQ ID NO: 1006401 - DNA, 15 bp, Homo sapiens
ggaggtatcggaagg

SEQ ID NO: 1006402 - DNA, 15 bp, Homo sapiens
gaggtatcggaaggc

SEQ ID NO: 1006403 - DNA, 15 bp, Homo sapiens
aggtatcggaaggct

SEQ ID NO: 1006404 - DNA, 15 bp, Homo sapiens
ggtatcggaaggctc

SEQ ID NO: 1006405 - DNA, 15 bp, Homo sapiens
gtatcggaaggctct

SEQ ID NO: 1006406 - DNA, 15 bp, Homo sapiens
tatcggaaggctcta

SEQ ID NO: 1006407 - DNA, 15 bp, Homo sapiens
atcggaaggctctaa

SEQ ID NO: 1006408 - DNA, 15 bp, Homo sapiens
tcggaaggctctaaa

SEQ ID NO: 1006409 - DNA, 15 bp, Homo sapiens
cggaaggctctaaag

SEQ ID NO: 1006410 - DNA, 15 bp, Homo sapiens
ggaaggctctaaagg

SEQ ID NO: 1006411 - DNA, 15 bp, Homo sapiens
gaaggctctaaagga

SEQ ID NO: 1006412 - DNA, 15 bp, Homo sapiens
aaggctctaaaggaa

SEQ ID NO: 1006413 - DNA, 15 bp, Homo sapiens
aggctctaaaggaag

SEQ ID NO: 1006414 - DNA, 15 bp, Homo sapiens
ggctctaaaggaagt

SEQ ID NO: 1006415 - DNA, 15 bp, Homo sapiens
gctctaaaggaagtt

SEQ ID NO: 1006416 - DNA, 15 bp, Homo sapiens
ctctaaaggaagttt

SEQ ID NO: 1006417 - DNA, 15 bp, Homo sapiens
tctaaaggaagttta

SEQ ID NO: 1006418 - DNA, 15 bp, Homo sapiens
ctaaaggaagtttaa

SEQ ID NO: 1006419 - DNA, 15 bp, Homo sapiens
taaaggaagtttaag

SEQ ID NO: 1006420 - DNA, 15 bp, Homo sapiens
aaaggaagtttaagg

SEQ ID NO: 1006421 - DNA, 15 bp, Homo sapiens
aaggaagtttaagga

SEQ ID NO: 1006422 - DNA, 15 bp, Homo sapiens
aggaagtttaaggag

SEQ ID NO: 1006423 - DNA, 15 bp, Homo sapiens
ggaagtttaaggagg

SEQ ID NO: 1006424 - DNA, 15 bp, Homo sapiens
gaagtttaaggagga

SEQ ID NO: 1006425 - DNA, 15 bp, Homo sapiens
aagtttaaggaggag

SEQ ID NO: 1006426 - DNA, 15 bp, Homo sapiens
agtttaaggaggaga

SEQ ID NO: 1006427 - DNA, 15 bp, Homo sapiens
gtttaaggaggagaa

SEQ ID NO: 1006428 - DNA, 15 bp, Homo sapiens
tttaaggaggagaat

SEQ ID NO: 1006429 - DNA, 15 bp, Homo sapiens
ttaaggaggagaata

SEQ ID NO: 1006430 - DNA, 15 bp, Homo sapiens
taaggaggagaatat

SEQ ID NO: 1006431 - DNA, 15 bp, Homo sapiens
aaggaggagaatatt

SEQ ID NO: 1006432 - DNA, 15 bp, Homo sapiens
aggaggagaatattc

SEQ ID NO: 1006433 - DNA, 15 bp, Homo sapiens
ggaggagaatattct

SEQ ID NO: 1006434 - DNA, 15 bp, Homo sapiens
gaggagaatattcta

SEQ ID NO: 1006435 - DNA, 15 bp, Homo sapiens
aggagaatattctat

SEQ ID NO: 1006436 - DNA, 15 bp, Homo sapiens
ggagaatattctata

SEQ ID NO: 1006437 - DNA, 15 bp, Homo sapiens
gagaatattctatag

SEQ ID NO: 1006438 - DNA, 15 bp, Homo sapiens
agaatattctataga

SEQ ID NO: 1006439 - DNA, 15 bp, Homo sapiens
gaatattctatagaa

SEQ ID NO: 1006440 - DNA, 15 bp, Homo sapiens
aatattctatagaag

SEQ ID NO: 1006441 - DNA, 15 bp, Homo sapiens
atattctatagaagt

SEQ ID NO: 1006442 - DNA, 15 bp, Homo sapiens
tattctatagaagtg

SEQ ID NO: 1006443 - DNA, 15 bp, Homo sapiens
attctatagaagtgg

SEQ ID NO: 1006444 - DNA, 15 bp, Homo sapiens
ttctatagaagtgga

SEQ ID NO: 1006445 - DNA, 15 bp, Homo sapiens
tctatagaagtggaa

SEQ ID NO: 1006446 - DNA, 15 bp, Homo sapiens
ctatagaagtggaag

SEQ ID NO: 1006447 - DNA, 15 bp, Homo sapiens
tatagaagtggaagg

SEQ ID NO: 1006448 - DNA, 15 bp, Homo sapiens
atagaagtggaaggg

SEQ ID NO: 1006449 - DNA, 15 bp, Homo sapiens
tagaagtggaagggg

SEQ ID NO: 1006450 - DNA, 15 bp, Homo sapiens
agaagtggaagggga

SEQ ID NO: 1006451 - DNA, 15 bp, Homo sapiens
gaagtggaaggggag

SEQ ID NO: 1006452 - DNA, 15 bp, Homo sapiens
aagtggaaggggaga

SEQ ID NO: 1006453 - DNA, 15 bp, Homo sapiens
agtggaaggggagat

SEQ ID NO: 1006454 - DNA, 15 bp, Homo sapiens
gtggaaggggagatt

SEQ ID NO: 1006455 - DNA, 15 bp, Homo sapiens
tggaaggggagattt

SEQ ID NO: 1006456 - DNA, 15 bp, Homo sapiens
ggaaggggagatttg

SEQ ID NO: 1006457 - DNA, 15 bp, Homo sapiens
gaaggggagatttgt

SEQ ID NO: 1006458 - DNA, 15 bp, Homo sapiens
aaggggagatttgtg

SEQ ID NO: 1006459 - DNA, 15 bp, Homo sapiens
aggggagatttgtgg

SEQ ID NO: 1006460 - DNA, 15 bp, Homo sapiens
ggggagatttgtggt

SEQ ID NO: 1006461 - DNA, 15 bp, Homo sapiens
gggagatttgtggtc

SEQ ID NO: 1006462 - DNA, 15 bp, Homo sapiens
ggagatttgtggtca

SEQ ID NO: 1006463 - DNA, 15 bp, Homo sapiens
gagatttgtggtcag

SEQ ID NO: 1006464 - DNA, 15 bp, Homo sapiens
agatttgtggtcagc

SEQ ID NO: 1006465 - DNA, 15 bp, Homo sapiens
gatttgtggtcagct

SEQ ID NO: 1006466 - DNA, 15 bp, Homo sapiens
atttgtggtcagctt

SEQ ID NO: 1006467 - DNA, 15 bp, Homo sapiens
tttgtggtcagctta

SEQ ID NO: 1006468 - DNA, 15 bp, Homo sapiens
ttgtggtcagcttaa

SEQ ID NO: 1006469 - DNA, 15 bp, Homo sapiens
tgtggtcagcttaaa

SEQ ID NO: 1006470 - DNA, 15 bp, Homo sapiens
gtggtcagcttaaac

SEQ ID NO: 1006471 - DNA, 15 bp, Homo sapiens
tggtcagcttaaact

SEQ ID NO: 1006472 - DNA, 15 bp, Homo sapiens
ggtcagcttaaactg

SEQ ID NO: 1006473 - DNA, 15 bp, Homo sapiens
gtcagcttaaactgt

SEQ ID NO: 1006474 - DNA, 15 bp, Homo sapiens
tcagcttaaactgtt

SEQ ID NO: 1006475 - DNA, 15 bp, Homo sapiens
cagcttaaactgtta

SEQ ID NO: 1006476 - DNA, 15 bp, Homo sapiens
agcttaaactgttaa

SEQ ID NO: 1006477 - DNA, 15 bp, Homo sapiens
gcttaaactgttaaa

SEQ ID NO: 1006478 - DNA, 15 bp, Homo sapiens
cttaaactgttaaaa

SEQ ID NO: 1006479 - DNA, 15 bp, Homo sapiens
ttaaactgttaaaag

SEQ ID NO: 1006480 - DNA, 15 bp, Homo sapiens
taaactgttaaaagg

SEQ ID NO: 1006481 - DNA, 15 bp, Homo sapiens
aaactgttaaaaggc

SEQ ID NO: 1006482 - DNA, 15 bp, Homo sapiens
aactgttaaaaggct

SEQ ID NO: 1006483 - DNA, 15 bp, Homo sapiens
actgttaaaaggctt

SEQ ID NO: 1006484 - DNA, 15 bp, Homo sapiens
ctgttaaaaggcttg

SEQ ID NO: 1006485 - DNA, 15 bp, Homo sapiens
tgttaaaaggcttgg

SEQ ID NO: 1006486 - DNA, 15 bp, Homo sapiens
gttaaaaggcttggg

SEQ ID NO: 1006487 - DNA, 15 bp, Homo sapiens
ttaaaaggcttggga

SEQ ID NO: 1006488 - DNA, 15 bp, Homo sapiens
taaaaggcttgggat

SEQ ID NO: 1006489 - DNA, 15 bp, Homo sapiens
aaaaggcttgggatc

SEQ ID NO: 1006490 - DNA, 15 bp, Homo sapiens
aaaggcttgggatca

SEQ ID NO: 1006491 - DNA, 15 bp, Homo sapiens
aaggcttgggatcaa

SEQ ID NO: 1006492 - DNA, 15 bp, Homo sapiens
aggcttgggatcaat

SEQ ID NO: 1006493 - DNA, 15 bp, Homo sapiens
ggcttgggatcaata

SEQ ID NO: 1006494 - DNA, 15 bp, Homo sapiens
gcttgggatcaatac

SEQ ID NO: 1006495 - DNA, 15 bp, Homo sapiens
cttgggatcaatacc

SEQ ID NO: 1006496 - DNA, 15 bp, Homo sapiens
ttgggatcaataccg

SEQ ID NO: 1006497 - DNA, 15 bp, Homo sapiens
tgggatcaataccga

SEQ ID NO: 1006498 - DNA, 15 bp, Homo sapiens
gggatcaataccgaa

SEQ ID NO: 1006499 - DNA, 15 bp, Homo sapiens
ggatcaataccgaag

SEQ ID NO: 1006500 - DNA, 15 bp, Homo sapiens
gatcaataccgaagc

SEQ ID NO: 1006501 - DNA, 15 bp, Homo sapiens
atcaataccgaagca

SEQ ID NO: 1006502 - DNA, 15 bp, Homo sapiens
tcaataccgaagcag

SEQ ID NO: 1006503 - DNA, 15 bp, Homo sapiens
caataccgaagcaga

SEQ ID NO: 1006504 - DNA, 15 bp, Homo sapiens
aataccgaagcagaa

SEQ ID NO: 1006505 - DNA, 15 bp, Homo sapiens
ataccgaagcagaat

SEQ ID NO: 1006506 - DNA, 15 bp, Homo sapiens
taccgaagcagaata

SEQ ID NO: 1006507 - DNA, 15 bp, Homo sapiens
accgaagcagaatat

SEQ ID NO: 1006508 - DNA, 15 bp, Homo sapiens
ccgaagcagaatatg

SEQ ID NO: 1006509 - DNA, 15 bp, Homo sapiens
cgaagcagaatatga

SEQ ID NO: 1006510 - DNA, 15 bp, Homo sapiens
gaagcagaatatgag

SEQ ID NO: 1006511 - DNA, 15 bp, Homo sapiens
aagcagaatatgagc

SEQ ID NO: 1006512 - DNA, 15 bp, Homo sapiens
agcagaatatgagca

SEQ ID NO: 1006513 - DNA, 15 bp, Homo sapiens
gcagaatatgagcat

SEQ ID NO: 1006514 - DNA, 15 bp, Homo sapiens
cagaatatgagcatc

SEQ ID NO: 1006515 - DNA, 15 bp, Homo sapiens
agaatatgagcatct

SEQ ID NO: 1006516 - DNA, 15 bp, Homo sapiens
gaatatgagcatctt

SEQ ID NO: 1006517 - DNA, 15 bp, Homo sapiens
aatatgagcatctta

SEQ ID NO: 1006518 - DNA, 15 bp, Homo sapiens
atatgagcatcttaa

SEQ ID NO: 1006519 - DNA, 15 bp, Homo sapiens
tatgagcatcttaat

SEQ ID NO: 1006520 - DNA, 15 bp, Homo sapiens
atgagcatcttaatc

SEQ ID NO: 1006521 - DNA, 15 bp, Homo sapiens
tgagcatcttaatct

SEQ ID NO: 1006522 - DNA, 15 bp, Homo sapiens
gagcatcttaatctg

SEQ ID NO: 1006523 - DNA, 15 bp, Homo sapiens
agcatcttaatctgt

SEQ ID NO: 1006524 - DNA, 15 bp, Homo sapiens
gcatcttaatctgtt

SEQ ID NO: 1006525 - DNA, 15 bp, Homo sapiens
catcttaatctgttt

SEQ ID NO: 1006526 - DNA, 15 bp, Homo sapiens
atcttaatctgtttc

SEQ ID NO: 1006527 - DNA, 15 bp, Homo sapiens
tcttaatctgtttct

SEQ ID NO: 1006528 - DNA, 15 bp, Homo sapiens
cttaatctgtttctt

SEQ ID NO: 1006529 - DNA, 15 bp, Homo sapiens
ttaatctgtttcttt

SEQ ID NO: 1006530 - DNA, 15 bp, Homo sapiens
taatctgtttctttg

SEQ ID NO: 1006531 - DNA, 15 bp, Homo sapiens
aatctgtttctttgc

SEQ ID NO: 1006532 - DNA, 15 bp, Homo sapiens
atctgtttctttgca

SEQ ID NO: 1006533 - DNA, 15 bp, Homo sapiens
tctgtttctttgcaa

SEQ ID NO: 1006534 - DNA, 15 bp, Homo sapiens
ctgtttctttgcaaa

SEQ ID NO: 1006535 - DNA, 15 bp, Homo sapiens
tgtttctttgcaaag

SEQ ID NO: 1006536 - DNA, 15 bp, Homo sapiens
gtttctttgcaaagg

SEQ ID NO: 1006537 - DNA, 15 bp, Homo sapiens
tttctttgcaaagga

SEQ ID NO: 1006538 - DNA, 15 bp, Homo sapiens
ttctttgcaaaggat

SEQ ID NO: 1006539 - DNA, 15 bp, Homo sapiens
tctttgcaaaggatt

SEQ ID NO: 1006540 - DNA, 15 bp, Homo sapiens
ctttgcaaaggattg

SEQ ID NO: 1006541 - DNA, 15 bp, Homo sapiens
tttgcaaaggattga

SEQ ID NO: 1006542 - DNA, 15 bp, Homo sapiens
ttgcaaaggattgac

SEQ ID NO: 1006543 - DNA, 15 bp, Homo sapiens
tgcaaaggattgact

SEQ ID NO: 1006544 - DNA, 15 bp, Homo sapiens
gcaaaggattgactt

SEQ ID NO: 1006545 - DNA, 15 bp, Homo sapiens
caaaggattgacttg

SEQ ID NO: 1006546 - DNA, 15 bp, Homo sapiens
aaaggattgacttgt

SEQ ID NO: 1006547 - DNA, 15 bp, Homo sapiens
aaggattgacttgta

SEQ ID NO: 1006548 - DNA, 15 bp, Homo sapiens
aggattgacttgtat

SEQ ID NO: 1006549 - DNA, 15 bp, Homo sapiens
ggattgacttgtatt

SEQ ID NO: 1006550 - DNA, 15 bp, Homo sapiens
gattgacttgtattt

SEQ ID NO: 1006551 - DNA, 15 bp, Homo sapiens
attgacttgtattta

SEQ ID NO: 1006552 - DNA, 15 bp, Homo sapiens
ttgacttgtatttat

SEQ ID NO: 1006553 - DNA, 15 bp, Homo sapiens
tgacttgtatttata

SEQ ID NO: 1006554 - DNA, 15 bp, Homo sapiens
gacttgtatttataa

SEQ ID NO: 1006555 - DNA, 15 bp, Homo sapiens
acttgtatttataaa

SEQ ID NO: 1006556 - DNA, 15 bp, Homo sapiens
cttgtatttataaaa

SEQ ID NO: 1006557 - DNA, 15 bp, Homo sapiens
ttgtatttataaaag

SEQ ID NO: 1006558 - DNA, 15 bp, Homo sapiens
tgtatttataaaagc

SEQ ID NO: 1006559 - DNA, 15 bp, Homo sapiens
gtatttataaaagca

SEQ ID NO: 1006560 - DNA, 15 bp, Homo sapiens
tatttataaaagcat

SEQ ID NO: 1006561 - DNA, 15 bp, Homo sapiens
atttataaaagcatt

SEQ ID NO: 1006562 - DNA, 15 bp, Homo sapiens
tttataaaagcattg

SEQ ID NO: 1006563 - DNA, 15 bp, Homo sapiens
ttataaaagcattgg

SEQ ID NO: 1006564 - DNA, 15 bp, Homo sapiens
tataaaagcattggc

SEQ ID NO: 1006565 - DNA, 15 bp, Homo sapiens
ataaaagcattggct

SEQ ID NO: 1006566 - DNA, 15 bp, Homo sapiens
taaaagcattggctt

SEQ ID NO: 1006567 - DNA, 15 bp, Homo sapiens
aaaagcattggcttg

SEQ ID NO: 1006568 - DNA, 15 bp, Homo sapiens
aaagcattggcttgt

SEQ ID NO: 1006569 - DNA, 15 bp, Homo sapiens
aagcattggcttgtt

SEQ ID NO: 1006570 - DNA, 15 bp, Homo sapiens
agcattggcttgttt

SEQ ID NO: 1006571 - DNA, 15 bp, Homo sapiens
gcattggcttgtttc

SEQ ID NO: 1006572 - DNA, 15 bp, Homo sapiens
cattggcttgtttca

SEQ ID NO: 1006573 - DNA, 15 bp, Homo sapiens
attggcttgtttcat

SEQ ID NO: 1006574 - DNA, 15 bp, Homo sapiens
ttggcttgtttcatc

SEQ ID NO: 1006575 - DNA, 15 bp, Homo sapiens
tggcttgtttcatct

SEQ ID NO: 1006576 - DNA, 15 bp, Homo sapiens
ggcttgtttcatctg

SEQ ID NO: 1006577 - DNA, 15 bp, Homo sapiens
gcttgtttcatctga

SEQ ID NO: 1006578 - DNA, 15 bp, Homo sapiens
cttgtttcatctgac

SEQ ID NO: 1006579 - DNA, 15 bp, Homo sapiens
ttgtttcatctgaca

SEQ ID NO: 1006580 - DNA, 15 bp, Homo sapiens
tgtttcatctgacat

SEQ ID NO: 1006581 - DNA, 15 bp, Homo sapiens
gtttcatctgacatc

SEQ ID NO: 1006582 - DNA, 15 bp, Homo sapiens
tttcatctgacatct

SEQ ID NO: 1006583 - DNA, 15 bp, Homo sapiens
ttcatctgacatctt

SEQ ID NO: 1006584 - DNA, 15 bp, Homo sapiens
tcatctgacatcttt

SEQ ID NO: 1006585 - DNA, 15 bp, Homo sapiens
catctgacatctttt

SEQ ID NO: 1006586 - DNA, 15 bp, Homo sapiens
atctgacatctttta

SEQ ID NO: 1006587 - DNA, 15 bp, Homo sapiens
tctgacatcttttaa

SEQ ID NO: 1006588 - DNA, 15 bp, Homo sapiens
ctgacatcttttaaa

SEQ ID NO: 1006589 - DNA, 15 bp, Homo sapiens
tgacatcttttaaag

SEQ ID NO: 1006590 - DNA, 15 bp, Homo sapiens
gacatcttttaaagt

SEQ ID NO: 1006591 - DNA, 15 bp, Homo sapiens
acatcttttaaagta

SEQ ID NO: 1006592 - DNA, 15 bp, Homo sapiens
catcttttaaagtac

SEQ ID NO: 1006593 - DNA, 15 bp, Homo sapiens
atcttttaaagtacc

SEQ ID NO: 1006594 - DNA, 15 bp, Homo sapiens
tcttttaaagtaccc

SEQ ID NO: 1006595 - DNA, 15 bp, Homo sapiens
cttttaaagtacccc

SEQ ID NO: 1006596 - DNA, 15 bp, Homo sapiens
ttttaaagtacccca

SEQ ID NO: 1006597 - DNA, 15 bp, Homo sapiens
tttaaagtaccccat

SEQ ID NO: 1006598 - DNA, 15 bp, Homo sapiens
ttaaagtaccccatt

SEQ ID NO: 1006599 - DNA, 15 bp, Homo sapiens
taaagtaccccattt

SEQ ID NO: 1006600 - DNA, 15 bp, Homo sapiens
aaagtaccccatttt

SEQ ID NO: 1006601 - DNA, 15 bp, Homo sapiens
aagtaccccattttc

SEQ ID NO: 1006602 - DNA, 15 bp, Homo sapiens
agtaccccattttct

SEQ ID NO: 1006603 - DNA, 15 bp, Homo sapiens
gtaccccattttctt

SEQ ID NO: 1006604 - DNA, 15 bp, Homo sapiens
taccccattttcttg

SEQ ID NO: 1006605 - DNA, 15 bp, Homo sapiens
accccattttcttgg

SEQ ID NO: 1006606 - DNA, 15 bp, Homo sapiens
ccccattttcttggg

SEQ ID NO: 1006607 - DNA, 15 bp, Homo sapiens
cccattttcttgggg

SEQ ID NO: 1006608 - DNA, 15 bp, Homo sapiens
ccattttcttggggg

SEQ ID NO: 1006609 - DNA, 15 bp, Homo sapiens
cattttcttgggggc

SEQ ID NO: 1006610 - DNA, 15 bp, Homo sapiens
attttcttgggggcg

SEQ ID NO: 1006611 - DNA, 15 bp, Homo sapiens
ttttcttgggggcgg

SEQ ID NO: 1006612 - DNA, 15 bp, Homo sapiens
tttcttgggggcggg

SEQ ID NO: 1006613 - DNA, 15 bp, Homo sapiens
ttcttgggggcggga

SEQ ID NO: 1006614 - DNA, 15 bp, Homo sapiens
tcttgggggcgggaa

SEQ ID NO: 1006615 - DNA, 15 bp, Homo sapiens
cttgggggcgggaag

SEQ ID NO: 1006616 - DNA, 15 bp, Homo sapiens
ttgggggcgggaagg

SEQ ID NO: 1006617 - DNA, 15 bp, Homo sapiens
tgggggcgggaaggg

SEQ ID NO: 1006618 - DNA, 15 bp, Homo sapiens
gggggcgggaaggga

SEQ ID NO: 1006619 - DNA, 15 bp, Homo sapiens
ggggcgggaagggag

SEQ ID NO: 1006620 - DNA, 15 bp, Homo sapiens
gggcgggaagggaga

SEQ ID NO: 1006621 - DNA, 15 bp, Homo sapiens
ggcgggaagggagag

SEQ ID NO: 1006622 - DNA, 15 bp, Homo sapiens
gcgggaagggagaga

SEQ ID NO: 1006623 - DNA, 15 bp, Homo sapiens
cgggaagggagagat

SEQ ID NO: 1006624 - DNA, 15 bp, Homo sapiens
gggaagggagagatg

SEQ ID NO: 1006625 - DNA, 15 bp, Homo sapiens
ggaagggagagatga

SEQ ID NO: 1006626 - DNA, 15 bp, Homo sapiens
gaagggagagatgag

SEQ ID NO: 1006627 - DNA, 15 bp, Homo sapiens
aagggagagatgaga

SEQ ID NO: 1006628 - DNA, 15 bp, Homo sapiens
agggagagatgagac

SEQ ID NO: 1006629 - DNA, 15 bp, Homo sapiens
gggagagatgagacc

SEQ ID NO: 1006630 - DNA, 15 bp, Homo sapiens
ggagagatgagacca

SEQ ID NO: 1006631 - DNA, 15 bp, Homo sapiens
gagagatgagaccat

SEQ ID NO: 1006632 - DNA, 15 bp, Homo sapiens
agagatgagaccatt

SEQ ID NO: 1006633 - DNA, 15 bp, Homo sapiens
gagatgagaccattt

SEQ ID NO: 1006634 - DNA, 15 bp, Homo sapiens
agatgagaccatttg

SEQ ID NO: 1006635 - DNA, 15 bp, Homo sapiens
gatgagaccatttgt

SEQ ID NO: 1006636 - DNA, 15 bp, Homo sapiens
atgagaccatttgtt

SEQ ID NO: 1006637 - DNA, 15 bp, Homo sapiens
tgagaccatttgttt

SEQ ID NO: 1006638 - DNA, 15 bp, Homo sapiens
gagaccatttgtttt

SEQ ID NO: 1006639 - DNA, 15 bp, Homo sapiens
agaccatttgttttg

SEQ ID NO: 1006640 - DNA, 15 bp, Homo sapiens
gaccatttgttttga

SEQ ID NO: 1006641 - DNA, 15 bp, Homo sapiens
accatttgttttgat

SEQ ID NO: 1006642 - DNA, 15 bp, Homo sapiens
ccatttgttttgatc

SEQ ID NO: 1006643 - DNA, 15 bp, Homo sapiens
catttgttttgatct

SEQ ID NO: 1006644 - DNA, 15 bp, Homo sapiens
atttgttttgatctt

SEQ ID NO: 1006645 - DNA, 15 bp, Homo sapiens
tttgttttgatcttg

SEQ ID NO: 1006646 - DNA, 15 bp, Homo sapiens
ttgttttgatcttga

SEQ ID NO: 1006647 - DNA, 15 bp, Homo sapiens
tgttttgatcttgaa

SEQ ID NO: 1006648 - DNA, 15 bp, Homo sapiens
gttttgatcttgaag

SEQ ID NO: 1006649 - DNA, 15 bp, Homo sapiens
ttttgatcttgaagg

SEQ ID NO: 1006650 - DNA, 15 bp, Homo sapiens
tttgatcttgaagga

SEQ ID NO: 1006651 - DNA, 15 bp, Homo sapiens
ttgatcttgaaggac

SEQ ID NO: 1006652 - DNA, 15 bp, Homo sapiens
tgatcttgaaggaca

SEQ ID NO: 1006653 - DNA, 15 bp, Homo sapiens
gatcttgaaggacag

SEQ ID NO: 1006654 - DNA, 15 bp, Homo sapiens
atcttgaaggacaga

SEQ ID NO: 1006655 - DNA, 15 bp, Homo sapiens
tcttgaaggacagaa

SEQ ID NO: 1006656 - DNA, 15 bp, Homo sapiens
cttgaaggacagaaa

SEQ ID NO: 1006657 - DNA, 15 bp, Homo sapiens
ttgaaggacagaaaa

SEQ ID NO: 1006658 - DNA, 15 bp, Homo sapiens
tgaaggacagaaaag

SEQ ID NO: 1006659 - DNA, 15 bp, Homo sapiens
gaaggacagaaaagt

SEQ ID NO: 1006660 - DNA, 15 bp, Homo sapiens
aaggacagaaaagtg

SEQ ID NO: 1006661 - DNA, 15 bp, Homo sapiens
aggacagaaaagtgg

SEQ ID NO: 1006662 - DNA, 15 bp, Homo sapiens
ggacagaaaagtggt

SEQ ID NO: 1006663 - DNA, 15 bp, Homo sapiens
gacagaaaagtggtt

SEQ ID NO: 1006664 - DNA, 15 bp, Homo sapiens
acagaaaagtggttt

SEQ ID NO: 1006665 - DNA, 15 bp, Homo sapiens
cagaaaagtggtttt

SEQ ID NO: 1006666 - DNA, 15 bp, Homo sapiens
agaaaagtggtttta

SEQ ID NO: 1006667 - DNA, 15 bp, Homo sapiens
gaaaagtggttttac

SEQ ID NO: 1006668 - DNA, 15 bp, Homo sapiens
aaaagtggttttacg

SEQ ID NO: 1006669 - DNA, 15 bp, Homo sapiens
aaagtggttttacgt

SEQ ID NO: 1006670 - DNA, 15 bp, Homo sapiens
aagtggttttacgtt

SEQ ID NO: 1006671 - DNA, 15 bp, Homo sapiens
agtggttttacgttg

SEQ ID NO: 1006672 - DNA, 15 bp, Homo sapiens
gtggttttacgttgt

SEQ ID NO: 1006673 - DNA, 15 bp, Homo sapiens
tggttttacgttgta

SEQ ID NO: 1006674 - DNA, 15 bp, Homo sapiens
ggttttacgttgtag

SEQ ID NO: 1006675 - DNA, 15 bp, Homo sapiens
gttttacgttgtagt

SEQ ID NO: 1006676 - DNA, 15 bp, Homo sapiens
ttttacgttgtagtg

SEQ ID NO: 1006677 - DNA, 15 bp, Homo sapiens
tttacgttgtagtga

SEQ ID NO: 1006678 - DNA, 15 bp, Homo sapiens
ttacgttgtagtgac

SEQ ID NO: 1006679 - DNA, 15 bp, Homo sapiens
tacgttgtagtgact

SEQ ID NO: 1006680 - DNA, 15 bp, Homo sapiens
acgttgtagtgactg

SEQ ID NO: 1006681 - DNA, 15 bp, Homo sapiens
cgttgtagtgactgt

SEQ ID NO: 1006682 - DNA, 15 bp, Homo sapiens
gttgtagtgactgtg

SEQ ID NO: 1006683 - DNA, 15 bp, Homo sapiens
ttgtagtgactgtga

SEQ ID NO: 1006684 - DNA, 15 bp, Homo sapiens
tgtagtgactgtgaa

SEQ ID NO: 1006685 - DNA, 15 bp, Homo sapiens
gtagtgactgtgaat

SEQ ID NO: 1006686 - DNA, 15 bp, Homo sapiens
tagtgactgtgaatt

SEQ ID NO: 1006687 - DNA, 15 bp, Homo sapiens
agtgactgtgaatta

SEQ ID NO: 1006688 - DNA, 15 bp, Homo sapiens
gtgactgtgaattaa

SEQ ID NO: 1006689 - DNA, 15 bp, Homo sapiens
tgactgtgaattaag

SEQ ID NO: 1006690 - DNA, 15 bp, Homo sapiens
gactgtgaattaagt

SEQ ID NO: 1006691 - DNA, 15 bp, Homo sapiens
actgtgaattaagtt

SEQ ID NO: 1006692 - DNA, 15 bp, Homo sapiens
ctgtgaattaagttt

SEQ ID NO: 1006693 - DNA, 15 bp, Homo sapiens
tgtgaattaagttta

SEQ ID NO: 1006694 - DNA, 15 bp, Homo sapiens
gtgaattaagtttaa

SEQ ID NO: 1006695 - DNA, 15 bp, Homo sapiens
tgaattaagtttaag

SEQ ID NO: 1006696 - DNA, 15 bp, Homo sapiens
gaattaagtttaagg

SEQ ID NO: 1006697 - DNA, 15 bp, Homo sapiens
aattaagtttaaggt

SEQ ID NO: 1006698 - DNA, 15 bp, Homo sapiens
attaagtttaaggtc

SEQ ID NO: 1006699 - DNA, 15 bp, Homo sapiens
ttaagtttaaggtct

SEQ ID NO: 1006700 - DNA, 15 bp, Homo sapiens
taagtttaaggtctc

SEQ ID NO: 1006701 - DNA, 15 bp, Homo sapiens
aagtttaaggtctca

SEQ ID NO: 1006702 - DNA, 15 bp, Homo sapiens
agtttaaggtctcag

SEQ ID NO: 1006703 - DNA, 15 bp, Homo sapiens
gtttaaggtctcagc

SEQ ID NO: 1006704 - DNA, 15 bp, Homo sapiens
tttaaggtctcagca

SEQ ID NO: 1006705 - DNA, 15 bp, Homo sapiens
ttaaggtctcagcaa

SEQ ID NO: 1006706 - DNA, 15 bp, Homo sapiens
taaggtctcagcaag

SEQ ID NO: 1006707 - DNA, 15 bp, Homo sapiens
aaggtctcagcaagt

SEQ ID NO: 1006708 - DNA, 15 bp, Homo sapiens
aggtctcagcaagtt

SEQ ID NO: 1006709 - DNA, 15 bp, Homo sapiens
ggtctcagcaagttg

SEQ ID NO: 1006710 - DNA, 15 bp, Homo sapiens
gtctcagcaagttgt

SEQ ID NO: 1006711 - DNA, 15 bp, Homo sapiens
tctcagcaagttgta

SEQ ID NO: 1006712 - DNA, 15 bp, Homo sapiens
ctcagcaagttgtaa

SEQ ID NO: 1006713 - DNA, 15 bp, Homo sapiens
tcagcaagttgtaaa

SEQ ID NO: 1006714 - DNA, 15 bp, Homo sapiens
cagcaagttgtaaat

SEQ ID NO: 1006715 - DNA, 15 bp, Homo sapiens
agcaagttgtaaatt

SEQ ID NO: 1006716 - DNA, 15 bp, Homo sapiens
gcaagttgtaaattt

SEQ ID NO: 1006717 - DNA, 15 bp, Homo sapiens
caagttgtaaatttc

SEQ ID NO: 1006718 - DNA, 15 bp, Homo sapiens
aagttgtaaatttct

SEQ ID NO: 1006719 - DNA, 15 bp, Homo sapiens
agttgtaaatttctg

SEQ ID NO: 1006720 - DNA, 15 bp, Homo sapiens
gttgtaaatttctgt

SEQ ID NO: 1006721 - DNA, 15 bp, Homo sapiens
ttgtaaatttctgta

SEQ ID NO: 1006722 - DNA, 15 bp, Homo sapiens
tgtaaatttctgtat

SEQ ID NO: 1006723 - DNA, 15 bp, Homo sapiens
gtaaatttctgtatc

SEQ ID NO: 1006724 - DNA, 15 bp, Homo sapiens
taaatttctgtatca

SEQ ID NO: 1006725 - DNA, 15 bp, Homo sapiens
aaatttctgtatcat

SEQ ID NO: 1006726 - DNA, 15 bp, Homo sapiens
aatttctgtatcata

SEQ ID NO: 1006727 - DNA, 15 bp, Homo sapiens
atttctgtatcatac

SEQ ID NO: 1006728 - DNA, 15 bp, Homo sapiens
tttctgtatcatact

SEQ ID NO: 1006729 - DNA, 15 bp, Homo sapiens
ttctgtatcatacta

SEQ ID NO: 1006730 - DNA, 15 bp, Homo sapiens
tctgtatcatactat

SEQ ID NO: 1006731 - DNA, 15 bp, Homo sapiens
ctgtatcatactatg

SEQ ID NO: 1006732 - DNA, 15 bp, Homo sapiens
tgtatcatactatgt

SEQ ID NO: 1006733 - DNA, 15 bp, Homo sapiens
gtatcatactatgtg

SEQ ID NO: 1006734 - DNA, 15 bp, Homo sapiens
tatcatactatgtgg

SEQ ID NO: 1006735 - DNA, 15 bp, Homo sapiens
atcatactatgtggt

SEQ ID NO: 1006736 - DNA, 15 bp, Homo sapiens
tcatactatgtggta

SEQ ID NO: 1006737 - DNA, 15 bp, Homo sapiens
catactatgtggtag

SEQ ID NO: 1006738 - DNA, 15 bp, Homo sapiens
atactatgtggtaga

SEQ ID NO: 1006739 - DNA, 15 bp, Homo sapiens
tactatgtggtagag

SEQ ID NO: 1006740 - DNA, 15 bp, Homo sapiens
actatgtggtagagc

SEQ ID NO: 1006741 - DNA, 15 bp, Homo sapiens
ctatgtggtagagcc

SEQ ID NO: 1006742 - DNA, 15 bp, Homo sapiens
tatgtggtagagcct

SEQ ID NO: 1006743 - DNA, 15 bp, Homo sapiens
atgtggtagagcctt

SEQ ID NO: 1006744 - DNA, 15 bp, Homo sapiens
tgtggtagagccttc

SEQ ID NO: 1006745 - DNA, 15 bp, Homo sapiens
gtggtagagccttca

SEQ ID NO: 1006746 - DNA, 15 bp, Homo sapiens
tggtagagccttcag

SEQ ID NO: 1006747 - DNA, 15 bp, Homo sapiens
ggtagagccttcagt

SEQ ID NO: 1006748 - DNA, 15 bp, Homo sapiens
gtagagccttcagta

SEQ ID NO: 1006749 - DNA, 15 bp, Homo sapiens
tagagccttcagtaa

SEQ ID NO: 1006750 - DNA, 15 bp, Homo sapiens
agagccttcagtaaa

SEQ ID NO: 1006751 - DNA, 15 bp, Homo sapiens
gagccttcagtaaac

SEQ ID NO: 1006752 - DNA, 15 bp, Homo sapiens
agccttcagtaaaca

SEQ ID NO: 1006753 - DNA, 15 bp, Homo sapiens
gccttcagtaaacag

SEQ ID NO: 1006754 - DNA, 15 bp, Homo sapiens
ccttcagtaaacaga

SEQ ID NO: 1006755 - DNA, 15 bp, Homo sapiens
cttcagtaaacagag

SEQ ID NO: 1006756 - DNA, 15 bp, Homo sapiens
ttcagtaaacagagt

SEQ ID NO: 1006757 - DNA, 15 bp, Homo sapiens
tcagtaaacagagta

SEQ ID NO: 1006758 - DNA, 15 bp, Homo sapiens
cagtaaacagagtac

SEQ ID NO: 1006759 - DNA, 15 bp, Homo sapiens
agtaaacagagtact

SEQ ID NO: 1006760 - DNA, 15 bp, Homo sapiens
gtaaacagagtactc

SEQ ID NO: 1006761 - DNA, 15 bp, Homo sapiens
taaacagagtactct

SEQ ID NO: 1006762 - DNA, 15 bp, Homo sapiens
aaacagagtactctc

SEQ ID NO: 1006763 - DNA, 15 bp, Homo sapiens
aacagagtactctca

SEQ ID NO: 1006764 - DNA, 15 bp, Homo sapiens
acagagtactctcag

SEQ ID NO: 1006765 - DNA, 15 bp, Homo sapiens
cagagtactctcagg

SEQ ID NO: 1006766 - DNA, 15 bp, Homo sapiens
agagtactctcaggt

SEQ ID NO: 1006767 - DNA, 15 bp, Homo sapiens
gagtactctcaggtg

SEQ ID NO: 1006768 - DNA, 15 bp, Homo sapiens
agtactctcaggtgt

SEQ ID NO: 1006769 - DNA, 15 bp, Homo sapiens
gtactctcaggtgtt

SEQ ID NO: 1006770 - DNA, 15 bp, Homo sapiens
tactctcaggtgttt

SEQ ID NO: 1006771 - DNA, 15 bp, Homo sapiens
actctcaggtgttta

SEQ ID NO: 1006772 - DNA, 15 bp, Homo sapiens
ctctcaggtgtttaa

SEQ ID NO: 1006773 - DNA, 15 bp, Homo sapiens
tctcaggtgtttaat

SEQ ID NO: 1006774 - DNA, 15 bp, Homo sapiens
ctcaggtgtttaatg

SEQ ID NO: 1006775 - DNA, 15 bp, Homo sapiens
tcaggtgtttaatgc

SEQ ID NO: 1006776 - DNA, 15 bp, Homo sapiens
caggtgtttaatgct

SEQ ID NO: 1006777 - DNA, 15 bp, Homo sapiens
aggtgtttaatgcta

SEQ ID NO: 1006778 - DNA, 15 bp, Homo sapiens
ggtgtttaatgctat

SEQ ID NO: 1006779 - DNA, 15 bp, Homo sapiens
gtgtttaatgctata

SEQ ID NO: 1006780 - DNA, 15 bp, Homo sapiens
tgtttaatgctatag

SEQ ID NO: 1006781 - DNA, 15 bp, Homo sapiens
gtttaatgctatagg

SEQ ID NO: 1006782 - DNA, 15 bp, Homo sapiens
tttaatgctatagga

SEQ ID NO: 1006783 - DNA, 15 bp, Homo sapiens
ttaatgctataggat

SEQ ID NO: 1006784 - DNA, 15 bp, Homo sapiens
taatgctataggata

SEQ ID NO: 1006785 - DNA, 15 bp, Homo sapiens
aatgctataggatat

SEQ ID NO: 1006786 - DNA, 15 bp, Homo sapiens
atgctataggatata

SEQ ID NO: 1006787 - DNA, 15 bp, Homo sapiens
tgctataggatataa

SEQ ID NO: 1006788 - DNA, 15 bp, Homo sapiens
gctataggatataaa

SEQ ID NO: 1006789 - DNA, 15 bp, Homo sapiens
ctataggatataaac

SEQ ID NO: 1006790 - DNA, 15 bp, Homo sapiens
tataggatataaact

SEQ ID NO: 1006791 - DNA, 15 bp, Homo sapiens
ataggatataaacta

SEQ ID NO: 1006792 - DNA, 15 bp, Homo sapiens
taggatataaactat

SEQ ID NO: 1006793 - DNA, 15 bp, Homo sapiens
aggatataaactata

SEQ ID NO: 1006794 - DNA, 15 bp, Homo sapiens
ggatataaactataa

SEQ ID NO: 1006795 - DNA, 15 bp, Homo sapiens
gatataaactataac

SEQ ID NO: 1006796 - DNA, 15 bp, Homo sapiens
atataaactataact

SEQ ID NO: 1006797 - DNA, 15 bp, Homo sapiens
tataaactataactg

SEQ ID NO: 1006798 - DNA, 15 bp, Homo sapiens
ataaactataactgc

SEQ ID NO: 1006799 - DNA, 15 bp, Homo sapiens
taaactataactgct

SEQ ID NO: 1006800 - DNA, 15 bp, Homo sapiens
aaactataactgctg

SEQ ID NO: 1006801 - DNA, 15 bp, Homo sapiens
aactataactgctgt

SEQ ID NO: 1006802 - DNA, 15 bp, Homo sapiens
actataactgctgtt

SEQ ID NO: 1006803 - DNA, 15 bp, Homo sapiens
ctataactgctgttt

SEQ ID NO: 1006804 - DNA, 15 bp, Homo sapiens
tataactgctgttta

SEQ ID NO: 1006805 - DNA, 15 bp, Homo sapiens
ataactgctgtttat

SEQ ID NO: 1006806 - DNA, 15 bp, Homo sapiens
taactgctgtttata

SEQ ID NO: 1006807 - DNA, 15 bp, Homo sapiens
aactgctgtttatag

SEQ ID NO: 1006808 - DNA, 15 bp, Homo sapiens
actgctgtttatagt

SEQ ID NO: 1006809 - DNA, 15 bp, Homo sapiens
ctgctgtttatagta

SEQ ID NO: 1006810 - DNA, 15 bp, Homo sapiens
tgctgtttatagtac

SEQ ID NO: 1006811 - DNA, 15 bp, Homo sapiens
gctgtttatagtacc

SEQ ID NO: 1006812 - DNA, 15 bp, Homo sapiens
ctgtttatagtaccc

SEQ ID NO: 1006813 - DNA, 15 bp, Homo sapiens
tgtttatagtaccct

SEQ ID NO: 1006814 - DNA, 15 bp, Homo sapiens
gtttatagtaccctc

SEQ ID NO: 1006815 - DNA, 15 bp, Homo sapiens
tttatagtaccctcg

SEQ ID NO: 1006816 - DNA, 15 bp, Homo sapiens
ttatagtaccctcgc

SEQ ID NO: 1006817 - DNA, 15 bp, Homo sapiens
tatagtaccctcgct

SEQ ID NO: 1006818 - DNA, 15 bp, Homo sapiens
atagtaccctcgcta

SEQ ID NO: 1006819 - DNA, 15 bp, Homo sapiens
tagtaccctcgctaa

SEQ ID NO: 1006820 - DNA, 15 bp, Homo sapiens
agtaccctcgctaaa

SEQ ID NO: 1006821 - DNA, 15 bp, Homo sapiens
gtaccctcgctaaat

SEQ ID NO: 1006822 - DNA, 15 bp, Homo sapiens
taccctcgctaaatt

SEQ ID NO: 1006823 - DNA, 15 bp, Homo sapiens
accctcgctaaattc

SEQ ID NO: 1006824 - DNA, 15 bp, Homo sapiens
ccctcgctaaattct

SEQ ID NO: 1006825 - DNA, 15 bp, Homo sapiens
cctcgctaaattctc

SEQ ID NO: 1006826 - DNA, 15 bp, Homo sapiens
ctcgctaaattctct

SEQ ID NO: 1006827 - DNA, 15 bp, Homo sapiens
tcgctaaattctctt

SEQ ID NO: 1006828 - DNA, 15 bp, Homo sapiens
cgctaaattctctta

SEQ ID NO: 1006829 - DNA, 15 bp, Homo sapiens
gctaaattctcttaa

SEQ ID NO: 1006830 - DNA, 15 bp, Homo sapiens
ctaaattctcttaaa

SEQ ID NO: 1006831 - DNA, 15 bp, Homo sapiens
taaattctcttaaag

SEQ ID NO: 1006832 - DNA, 15 bp, Homo sapiens
aaattctcttaaagg

SEQ ID NO: 1006833 - DNA, 15 bp, Homo sapiens
aattctcttaaaggc

SEQ ID NO: 1006834 - DNA, 15 bp, Homo sapiens
attctcttaaaggca

SEQ ID NO: 1006835 - DNA, 15 bp, Homo sapiens
ttctcttaaaggcaa

SEQ ID NO: 1006836 - DNA, 15 bp, Homo sapiens
tctcttaaaggcaat

SEQ ID NO: 1006837 - DNA, 15 bp, Homo sapiens
ctcttaaaggcaatc

SEQ ID NO: 1006838 - DNA, 15 bp, Homo sapiens
tcttaaaggcaatcc

SEQ ID NO: 1006839 - DNA, 15 bp, Homo sapiens
cttaaaggcaatcca

SEQ ID NO: 1006840 - DNA, 15 bp, Homo sapiens
ttaaaggcaatccat

SEQ ID NO: 1006841 - DNA, 15 bp, Homo sapiens
taaaggcaatccatt

SEQ ID NO: 1006842 - DNA, 15 bp, Homo sapiens
aaaggcaatccattt

SEQ ID NO: 1006843 - DNA, 15 bp, Homo sapiens
aaggcaatccatttg

SEQ ID NO: 1006844 - DNA, 15 bp, Homo sapiens
aggcaatccatttga

SEQ ID NO: 1006845 - DNA, 15 bp, Homo sapiens
ggcaatccatttgac

SEQ ID NO: 1006846 - DNA, 15 bp, Homo sapiens
gcaatccatttgacc

SEQ ID NO: 1006847 - DNA, 15 bp, Homo sapiens
caatccatttgacca

SEQ ID NO: 1006848 - DNA, 15 bp, Homo sapiens
aatccatttgaccac

SEQ ID NO: 1006849 - DNA, 15 bp, Homo sapiens
atccatttgaccact

SEQ ID NO: 1006850 - DNA, 15 bp, Homo sapiens
tccatttgaccactt

SEQ ID NO: 1006851 - DNA, 15 bp, Homo sapiens
ccatttgaccacttc

SEQ ID NO: 1006852 - DNA, 15 bp, Homo sapiens
catttgaccacttca

SEQ ID NO: 1006853 - DNA, 15 bp, Homo sapiens
atttgaccacttcaa

SEQ ID NO: 1006854 - DNA, 15 bp, Homo sapiens
tttgaccacttcaaa

SEQ ID NO: 1006855 - DNA, 15 bp, Homo sapiens
ttgaccacttcaaat

SEQ ID NO: 1006856 - DNA, 15 bp, Homo sapiens
tgaccacttcaaatg

SEQ ID NO: 1006857 - DNA, 15 bp, Homo sapiens
gaccacttcaaatgt

SEQ ID NO: 1006858 - DNA, 15 bp, Homo sapiens
accacttcaaatgtt

SEQ ID NO: 1006859 - DNA, 15 bp, Homo sapiens
ccacttcaaatgtta

SEQ ID NO: 1006860 - DNA, 15 bp, Homo sapiens
cacttcaaatgttat

SEQ ID NO: 1006861 - DNA, 15 bp, Homo sapiens
acttcaaatgttata

SEQ ID NO: 1006862 - DNA, 15 bp, Homo sapiens
cttcaaatgttatat

SEQ ID NO: 1006863 - DNA, 15 bp, Homo sapiens
ttcaaatgttatatg

SEQ ID NO: 1006864 - DNA, 15 bp, Homo sapiens
tcaaatgttatatgc

SEQ ID NO: 1006865 - DNA, 15 bp, Homo sapiens
caaatgttatatgcc

SEQ ID NO: 1006866 - DNA, 15 bp, Homo sapiens
aaatgttatatgcct

SEQ ID NO: 1006867 - DNA, 15 bp, Homo sapiens
aatgttatatgcctg

SEQ ID NO: 1006868 - DNA, 15 bp, Homo sapiens
atgttatatgcctgt

SEQ ID NO: 1006869 - DNA, 15 bp, Homo sapiens
tgttatatgcctgtg

SEQ ID NO: 1006870 - DNA, 15 bp, Homo sapiens
gttatatgcctgtga

SEQ ID NO: 1006871 - DNA, 15 bp, Homo sapiens
ttatatgcctgtgat

SEQ ID NO: 1006872 - DNA, 15 bp, Homo sapiens
tatatgcctgtgata

SEQ ID NO: 1006873 - DNA, 15 bp, Homo sapiens
atatgcctgtgatat

SEQ ID NO: 1006874 - DNA, 15 bp, Homo sapiens
tatgcctgtgatata

SEQ ID NO: 1006875 - DNA, 15 bp, Homo sapiens
atgcctgtgatatat

SEQ ID NO: 1006876 - DNA, 15 bp, Homo sapiens
tgcctgtgatatata

SEQ ID NO: 1006877 - DNA, 15 bp, Homo sapiens
gcctgtgatatatag

SEQ ID NO: 1006878 - DNA, 15 bp, Homo sapiens
cctgtgatatatagt

SEQ ID NO: 1006879 - DNA, 15 bp, Homo sapiens
ctgtgatatatagtt

SEQ ID NO: 1006880 - DNA, 15 bp, Homo sapiens
tgtgatatatagtta

SEQ ID NO: 1006881 - DNA, 15 bp, Homo sapiens
gtgatatatagttat

SEQ ID NO: 1006882 - DNA, 15 bp, Homo sapiens
tgatatatagttata

SEQ ID NO: 1006883 - DNA, 15 bp, Homo sapiens
gatatatagttatat

SEQ ID NO: 1006884 - DNA, 15 bp, Homo sapiens
atatatagttatatt

SEQ ID NO: 1006885 - DNA, 15 bp, Homo sapiens
tatatagttatattc

SEQ ID NO: 1006886 - DNA, 15 bp, Homo sapiens
atatagttatattct

SEQ ID NO: 1006887 - DNA, 15 bp, Homo sapiens
tatagttatattctc

SEQ ID NO: 1006888 - DNA, 15 bp, Homo sapiens
atagttatattctct

SEQ ID NO: 1006889 - DNA, 15 bp, Homo sapiens
tagttatattctctg

SEQ ID NO: 1006890 - DNA, 15 bp, Homo sapiens
agttatattctctgc

SEQ ID NO: 1006891 - DNA, 15 bp, Homo sapiens
gttatattctctgca

SEQ ID NO: 1006892 - DNA, 15 bp, Homo sapiens
ttatattctctgcat

SEQ ID NO: 1006893 - DNA, 15 bp, Homo sapiens
tatattctctgcata

SEQ ID NO: 1006894 - DNA, 15 bp, Homo sapiens
atattctctgcatat

SEQ ID NO: 1006895 - DNA, 15 bp, Homo sapiens
tattctctgcatata

SEQ ID NO: 1006896 - DNA, 15 bp, Homo sapiens
attctctgcatataa

SEQ ID NO: 1006897 - DNA, 15 bp, Homo sapiens
ttctctgcatataac

SEQ ID NO: 1006898 - DNA, 15 bp, Homo sapiens
tctctgcatataact

SEQ ID NO: 1006899 - DNA, 15 bp, Homo sapiens
ctctgcatataactg

SEQ ID NO: 1006900 - DNA, 15 bp, Homo sapiens
tctgcatataactgg

SEQ ID NO: 1006901 - DNA, 15 bp, Homo sapiens
ctgcatataactggt

SEQ ID NO: 1006902 - DNA, 15 bp, Homo sapiens
tgcatataactggtt

SEQ ID NO: 1006903 - DNA, 15 bp, Homo sapiens
gcatataactggttt

SEQ ID NO: 1006904 - DNA, 15 bp, Homo sapiens
catataactggtttt

SEQ ID NO: 1006905 - DNA, 15 bp, Homo sapiens
atataactggttttt

SEQ ID NO: 1006906 - DNA, 15 bp, Homo sapiens
tataactggttttta

SEQ ID NO: 1006907 - DNA, 15 bp, Homo sapiens
ataactggtttttaa

SEQ ID NO: 1006908 - DNA, 15 bp, Homo sapiens
taactggtttttaaa

SEQ ID NO: 1006909 - DNA, 15 bp, Homo sapiens
aactggtttttaaaa

SEQ ID NO: 1006910 - DNA, 15 bp, Homo sapiens
actggtttttaaaaa

SEQ ID NO: 1006911 - DNA, 15 bp, Homo sapiens
ctggtttttaaaaat

SEQ ID NO: 1006912 - DNA, 15 bp, Homo sapiens
tggtttttaaaaatt

SEQ ID NO: 1006913 - DNA, 15 bp, Homo sapiens
ggtttttaaaaattg

SEQ ID NO: 1006914 - DNA, 15 bp, Homo sapiens
gtttttaaaaattgt

SEQ ID NO: 1006915 - DNA, 15 bp, Homo sapiens
tttttaaaaattgtt

SEQ ID NO: 1006916 - DNA, 15 bp, Homo sapiens
ttttaaaaattgttt

SEQ ID NO: 1006917 - DNA, 15 bp, Homo sapiens
tttaaaaattgttta

SEQ ID NO: 1006918 - DNA, 15 bp, Homo sapiens
ttaaaaattgtttat

SEQ ID NO: 1006919 - DNA, 15 bp, Homo sapiens
taaaaattgtttatt

SEQ ID NO: 1006920 - DNA, 15 bp, Homo sapiens
aaaaattgtttatta

SEQ ID NO: 1006921 - DNA, 15 bp, Homo sapiens
aaaattgtttattat

SEQ ID NO: 1006922 - DNA, 15 bp, Homo sapiens
aaattgtttattatt

SEQ ID NO: 1006923 - DNA, 15 bp, Homo sapiens
aattgtttattattc

SEQ ID NO: 1006924 - DNA, 15 bp, Homo sapiens
attgtttattattca

SEQ ID NO: 1006925 - DNA, 15 bp, Homo sapiens
ttgtttattattcat

SEQ ID NO: 1006926 - DNA, 15 bp, Homo sapiens
tgtttattattcatt

SEQ ID NO: 1006927 - DNA, 15 bp, Homo sapiens
gtttattattcattt

SEQ ID NO: 1006928 - DNA, 15 bp, Homo sapiens
tttattattcattta

SEQ ID NO: 1006929 - DNA, 15 bp, Homo sapiens
ttattattcatttat

SEQ ID NO: 1006930 - DNA, 15 bp, Homo sapiens
tattattcatttatt

SEQ ID NO: 1006931 - DNA, 15 bp, Homo sapiens
attattcatttattt

SEQ ID NO: 1006932 - DNA, 15 bp, Homo sapiens
ttattcatttatttt

SEQ ID NO: 1006933 - DNA, 15 bp, Homo sapiens
tattcatttatttta

SEQ ID NO: 1006934 - DNA, 15 bp, Homo sapiens
attcatttattttag

SEQ ID NO: 1006935 - DNA, 15 bp, Homo sapiens
ttcatttattttaga

SEQ ID NO: 1006936 - DNA, 15 bp, Homo sapiens
tcatttattttagaa

SEQ ID NO: 1006937 - DNA, 15 bp, Homo sapiens
catttattttagaag

SEQ ID NO: 1006938 - DNA, 15 bp, Homo sapiens
atttattttagaagt

SEQ ID NO: 1006939 - DNA, 15 bp, Homo sapiens
tttattttagaagtg

SEQ ID NO: 1006940 - DNA, 15 bp, Homo sapiens
ttattttagaagtga

SEQ ID NO: 1006941 - DNA, 15 bp, Homo sapiens
tattttagaagtgag

SEQ ID NO: 1006942 - DNA, 15 bp, Homo sapiens
attttagaagtgagg

SEQ ID NO: 1006943 - DNA, 15 bp, Homo sapiens
ttttagaagtgaggt

SEQ ID NO: 1006944 - DNA, 15 bp, Homo sapiens
tttagaagtgaggtc

SEQ ID NO: 1006945 - DNA, 15 bp, Homo sapiens
ttagaagtgaggtct

SEQ ID NO: 1006946 - DNA, 15 bp, Homo sapiens
tagaagtgaggtctc

SEQ ID NO: 1006947 - DNA, 15 bp, Homo sapiens
agaagtgaggtctct

SEQ ID NO: 1006948 - DNA, 15 bp, Homo sapiens
gaagtgaggtctctc

SEQ ID NO: 1006949 - DNA, 15 bp, Homo sapiens
aagtgaggtctctct

SEQ ID NO: 1006950 - DNA, 15 bp, Homo sapiens
agtgaggtctctctt

SEQ ID NO: 1006951 - DNA, 15 bp, Homo sapiens
gtgaggtctctcttt

SEQ ID NO: 1006952 - DNA, 15 bp, Homo sapiens
tgaggtctctctttg

SEQ ID NO: 1006953 - DNA, 15 bp, Homo sapiens
gaggtctctctttgt

SEQ ID NO: 1006954 - DNA, 15 bp, Homo sapiens
aggtctctctttgtt

SEQ ID NO: 1006955 - DNA, 15 bp, Homo sapiens
ggtctctctttgttc

SEQ ID NO: 1006956 - DNA, 15 bp, Homo sapiens
gtctctctttgttcc

SEQ ID NO: 1006957 - DNA, 15 bp, Homo sapiens
tctctctttgttcct

SEQ ID NO: 1006958 - DNA, 15 bp, Homo sapiens
ctctctttgttcctc

SEQ ID NO: 1006959 - DNA, 15 bp, Homo sapiens
tctctttgttcctca

SEQ ID NO: 1006960 - DNA, 15 bp, Homo sapiens
ctctttgttcctcag

SEQ ID NO: 1006961 - DNA, 15 bp, Homo sapiens
tctttgttcctcagg

SEQ ID NO: 1006962 - DNA, 15 bp, Homo sapiens
ctttgttcctcaggc

SEQ ID NO: 1006963 - DNA, 15 bp, Homo sapiens
tttgttcctcaggct

SEQ ID NO: 1006964 - DNA, 15 bp, Homo sapiens
ttgttcctcaggctg

SEQ ID NO: 1006965 - DNA, 15 bp, Homo sapiens
tgttcctcaggctgg

SEQ ID NO: 1006966 - DNA, 15 bp, Homo sapiens
gttcctcaggctgga

SEQ ID NO: 1006967 - DNA, 15 bp, Homo sapiens
ttcctcaggctggag

SEQ ID NO: 1006968 - DNA, 15 bp, Homo sapiens
tcctcaggctggagt

SEQ ID NO: 1006969 - DNA, 15 bp, Homo sapiens
cctcaggctggagtg

SEQ ID NO: 1006970 - DNA, 15 bp, Homo sapiens
ctcaggctggagtgc

SEQ ID NO: 1006971 - DNA, 15 bp, Homo sapiens
tcaggctggagtgca

SEQ ID NO: 1006972 - DNA, 15 bp, Homo sapiens
tggagtgcagtggtg

SEQ ID NO: 1006973 - DNA, 15 bp, Homo sapiens
ggagtgcagtggtgt

SEQ ID NO: 1006974 - DNA, 15 bp, Homo sapiens
gagtgcagtggtgtg

SEQ ID NO: 1006975 - DNA, 15 bp, Homo sapiens
agtgcagtggtgtga

SEQ ID NO: 1006976 - DNA, 15 bp, Homo sapiens
gtgcagtggtgtgat

SEQ ID NO: 1006977 - DNA, 15 bp, Homo sapiens
tgcagtggtgtgatc

SEQ ID NO: 1006978 - DNA, 15 bp, Homo sapiens
gcagtggtgtgatca

SEQ ID NO: 1006979 - DNA, 15 bp, Homo sapiens
cagtggtgtgatcat

SEQ ID NO: 1006980 - DNA, 15 bp, Homo sapiens
agtggtgtgatcata

SEQ ID NO: 1006981 - DNA, 15 bp, Homo sapiens
gtggtgtgatcatag

SEQ ID NO: 1006982 - DNA, 15 bp, Homo sapiens
tggtgtgatcatagc

SEQ ID NO: 1006983 - DNA, 15 bp, Homo sapiens
ggtgtgatcatagct

SEQ ID NO: 1006984 - DNA, 15 bp, Homo sapiens
gtgtgatcatagctc

SEQ ID NO: 1006985 - DNA, 15 bp, Homo sapiens
tgtgatcatagctca

SEQ ID NO: 1006986 - DNA, 15 bp, Homo sapiens
gtgatcatagctcac

SEQ ID NO: 1006987 - DNA, 15 bp, Homo sapiens
tgatcatagctcacc

SEQ ID NO: 1006988 - DNA, 15 bp, Homo sapiens
gatcatagctcacca

SEQ ID NO: 1006989 - DNA, 15 bp, Homo sapiens
atcatagctcaccat

SEQ ID NO: 1006990 - DNA, 15 bp, Homo sapiens
tcatagctcaccata

SEQ ID NO: 1006991 - DNA, 15 bp, Homo sapiens
catagctcaccatag

SEQ ID NO: 1006992 - DNA, 15 bp, Homo sapiens
atagctcaccatagc

SEQ ID NO: 1006993 - DNA, 15 bp, Homo sapiens
tagctcaccatagcc

SEQ ID NO: 1006994 - DNA, 15 bp, Homo sapiens
agctcaccatagcct

SEQ ID NO: 1006995 - DNA, 15 bp, Homo sapiens
gctcaccatagcctc

SEQ ID NO: 1006996 - DNA, 15 bp, Homo sapiens
ctcaccatagcctcg

SEQ ID NO: 1006997 - DNA, 15 bp, Homo sapiens
tcaccatagcctcga

SEQ ID NO: 1006998 - DNA, 15 bp, Homo sapiens
caccatagcctcgaa

SEQ ID NO: 1006999 - DNA, 15 bp, Homo sapiens
accatagcctcgaac

SEQ ID NO: 1007000 - DNA, 15 bp, Homo sapiens
ccatagcctcgaact

SEQ ID NO: 1007001 - DNA, 15 bp, Homo sapiens
catagcctcgaactc

SEQ ID NO: 1007002 - DNA, 15 bp, Homo sapiens
atagcctcgaactcc

SEQ ID NO: 1007003 - DNA, 15 bp, Homo sapiens
tagcctcgaactcct

SEQ ID NO: 1007004 - DNA, 15 bp, Homo sapiens
agcctcgaactcctg

SEQ ID NO: 1007005 - DNA, 15 bp, Homo sapiens
gcctcgaactcctgg

SEQ ID NO: 1007006 - DNA, 15 bp, Homo sapiens
cctcgaactcctggg

SEQ ID NO: 1007007 - DNA, 15 bp, Homo sapiens
ctcgaactcctgggc

SEQ ID NO: 1007008 - DNA, 15 bp, Homo sapiens
tcgaactcctgggct

SEQ ID NO: 1007009 - DNA, 15 bp, Homo sapiens
cgaactcctgggctc

SEQ ID NO: 1007010 - DNA, 15 bp, Homo sapiens
gggctcaagtgatct

SEQ ID NO: 1007011 - DNA, 15 bp, Homo sapiens
ggctcaagtgatctc

SEQ ID NO: 1007012 - DNA, 15 bp, Homo sapiens
gctcaagtgatctcc

SEQ ID NO: 1007013 - DNA, 15 bp, Homo sapiens
ctcaagtgatctccc

SEQ ID NO: 1007014 - DNA, 15 bp, Homo sapiens
tcaagtgatctccca

SEQ ID NO: 1007015 - DNA, 15 bp, Homo sapiens
caagtgatctcccac

SEQ ID NO: 1007016 - DNA, 15 bp, Homo sapiens
aagtgatctcccacc

SEQ ID NO: 1007017 - DNA, 15 bp, Homo sapiens
agtgatctcccacct

SEQ ID NO: 1007018 - DNA, 15 bp, Homo sapiens
gtgatctcccacctc

SEQ ID NO: 1007019 - DNA, 15 bp, Homo sapiens
tgatctcccacctcc

SEQ ID NO: 1007020 - DNA, 15 bp, Homo sapiens
gatctcccacctccc

SEQ ID NO: 1007021 - DNA, 15 bp, Homo sapiens
atctcccacctcccg

SEQ ID NO: 1007022 - DNA, 15 bp, Homo sapiens
tctcccacctcccga

SEQ ID NO: 1007023 - DNA, 15 bp, Homo sapiens
ctcccacctcccgaa

SEQ ID NO: 1007024 - DNA, 15 bp, Homo sapiens
tcccacctcccgaat

SEQ ID NO: 1007025 - DNA, 15 bp, Homo sapiens
cccacctcccgaata

SEQ ID NO: 1007026 - DNA, 15 bp, Homo sapiens
ccacctcccgaatat

SEQ ID NO: 1007027 - DNA, 15 bp, Homo sapiens
cacctcccgaatatc

SEQ ID NO: 1007028 - DNA, 15 bp, Homo sapiens
acctcccgaatatct

SEQ ID NO: 1007029 - DNA, 15 bp, Homo sapiens
cctcccgaatatcta

SEQ ID NO: 1007030 - DNA, 15 bp, Homo sapiens
ctcccgaatatctag

SEQ ID NO: 1007031 - DNA, 15 bp, Homo sapiens
tcccgaatatctagg

SEQ ID NO: 1007032 - DNA, 15 bp, Homo sapiens
cccgaatatctagga

SEQ ID NO: 1007033 - DNA, 15 bp, Homo sapiens
ccgaatatctaggac

SEQ ID NO: 1007034 - DNA, 15 bp, Homo sapiens
cgaatatctaggact

SEQ ID NO: 1007035 - DNA, 15 bp, Homo sapiens
gaatatctaggacta

SEQ ID NO: 1007036 - DNA, 15 bp, Homo sapiens
aatatctaggactat

SEQ ID NO: 1007037 - DNA, 15 bp, Homo sapiens
atatctaggactatg

SEQ ID NO: 1007038 - DNA, 15 bp, Homo sapiens
tatctaggactatgg

SEQ ID NO: 1007039 - DNA, 15 bp, Homo sapiens
atctaggactatggg

SEQ ID NO: 1007040 - DNA, 15 bp, Homo sapiens
tctaggactatgggc

SEQ ID NO: 1007041 - DNA, 15 bp, Homo sapiens
ctaggactatgggcg

SEQ ID NO: 1007042 - DNA, 15 bp, Homo sapiens
taggactatgggcgt

SEQ ID NO: 1007043 - DNA, 15 bp, Homo sapiens
aggactatgggcgtg

SEQ ID NO: 1007044 - DNA, 15 bp, Homo sapiens
ggactatgggcgtgc

SEQ ID NO: 1007045 - DNA, 15 bp, Homo sapiens
gactatgggcgtgcg

SEQ ID NO: 1007046 - DNA, 15 bp, Homo sapiens
actatgggcgtgcgc

SEQ ID NO: 1007047 - DNA, 15 bp, Homo sapiens
ctatgggcgtgcgcc

SEQ ID NO: 1007048 - DNA, 15 bp, Homo sapiens
tatgggcgtgcgcca

SEQ ID NO: 1007049 - DNA, 15 bp, Homo sapiens
atgggcgtgcgccac

SEQ ID NO: 1007050 - DNA, 15 bp, Homo sapiens
tgggcgtgcgccacc

SEQ ID NO: 1007051 - DNA, 15 bp, Homo sapiens
gggcgtgcgccacca

SEQ ID NO: 1007052 - DNA, 15 bp, Homo sapiens
ggcgtgcgccaccat

SEQ ID NO: 1007053 - DNA, 15 bp, Homo sapiens
gcgtgcgccaccata

SEQ ID NO: 1007054 - DNA, 15 bp, Homo sapiens
cgtgcgccaccatac

SEQ ID NO: 1007055 - DNA, 15 bp, Homo sapiens
gtgcgccaccatacc

SEQ ID NO: 1007056 - DNA, 15 bp, Homo sapiens
tgcgccaccatacct

SEQ ID NO: 1007057 - DNA, 15 bp, Homo sapiens
gcgccaccatacctg

SEQ ID NO: 1007058 - DNA, 15 bp, Homo sapiens
cgccaccatacctgg

SEQ ID NO: 1007059 - DNA, 15 bp, Homo sapiens
gccaccatacctggc

SEQ ID NO: 1007060 - DNA, 15 bp, Homo sapiens
ccaccatacctggct

SEQ ID NO: 1007061 - DNA, 15 bp, Homo sapiens
caccatacctggcta

SEQ ID NO: 1007062 - DNA, 15 bp, Homo sapiens
accatacctggctat

SEQ ID NO: 1007063 - DNA, 15 bp, Homo sapiens
ccatacctggctatt

SEQ ID NO: 1007064 - DNA, 15 bp, Homo sapiens
catacctggctatta

SEQ ID NO: 1007065 - DNA, 15 bp, Homo sapiens
atacctggctattat

SEQ ID NO: 1007066 - DNA, 15 bp, Homo sapiens
tacctggctattatt

SEQ ID NO: 1007067 - DNA, 15 bp, Homo sapiens
acctggctattattt

SEQ ID NO: 1007068 - DNA, 15 bp, Homo sapiens
cctggctattatttt

SEQ ID NO: 1007069 - DNA, 15 bp, Homo sapiens
ctggctattatttta

SEQ ID NO: 1007070 - DNA, 15 bp, Homo sapiens
tggctattattttaa

SEQ ID NO: 1007071 - DNA, 15 bp, Homo sapiens
ggctattattttaat

SEQ ID NO: 1007072 - DNA, 15 bp, Homo sapiens
gctattattttaatt

SEQ ID NO: 1007073 - DNA, 15 bp, Homo sapiens
ctattattttaattt

SEQ ID NO: 1007074 - DNA, 15 bp, Homo sapiens
tattattttaatttt

SEQ ID NO: 1007075 - DNA, 15 bp, Homo sapiens
attattttaattttt

SEQ ID NO: 1007076 - DNA, 15 bp, Homo sapiens
ttattttaatttttt

SEQ ID NO: 1007077 - DNA, 15 bp, Homo sapiens
tattttaattttttt

SEQ ID NO: 1007078 - DNA, 15 bp, Homo sapiens
attttaatttttttc

SEQ ID NO: 1007079 - DNA, 15 bp, Homo sapiens
ttttaatttttttcg

SEQ ID NO: 1007080 - DNA, 15 bp, Homo sapiens
tttaatttttttcgt

SEQ ID NO: 1007081 - DNA, 15 bp, Homo sapiens
ttaatttttttcgta

SEQ ID NO: 1007082 - DNA, 15 bp, Homo sapiens
taatttttttcgtag

SEQ ID NO: 1007083 - DNA, 15 bp, Homo sapiens
aatttttttcgtaga

SEQ ID NO: 1007084 - DNA, 15 bp, Homo sapiens
atttttttcgtagag

SEQ ID NO: 1007085 - DNA, 15 bp, Homo sapiens
tttttttcgtagaga

SEQ ID NO: 1007086 - DNA, 15 bp, Homo sapiens
ttttttcgtagagac

SEQ ID NO: 1007087 - DNA, 15 bp, Homo sapiens
tttttcgtagagaca

SEQ ID NO: 1007088 - DNA, 15 bp, Homo sapiens
ttttcgtagagacag

SEQ ID NO: 1007089 - DNA, 15 bp, Homo sapiens
tttcgtagagacagt

SEQ ID NO: 1007090 - DNA, 15 bp, Homo sapiens
ttcgtagagacagtg

SEQ ID NO: 1007091 - DNA, 15 bp, Homo sapiens
tcgtagagacagtgt

SEQ ID NO: 1007092 - DNA, 15 bp, Homo sapiens
cgtagagacagtgtc

SEQ ID NO: 1007093 - DNA, 15 bp, Homo sapiens
gtagagacagtgtct

SEQ ID NO: 1007094 - DNA, 15 bp, Homo sapiens
tagagacagtgtctt

SEQ ID NO: 1007095 - DNA, 15 bp, Homo sapiens
agagacagtgtcttg

SEQ ID NO: 1007096 - DNA, 15 bp, Homo sapiens
gagacagtgtcttgt

SEQ ID NO: 1007097 - DNA, 15 bp, Homo sapiens
agacagtgtcttgtt

SEQ ID NO: 1007098 - DNA, 15 bp, Homo sapiens
gacagtgtcttgtta

SEQ ID NO: 1007099 - DNA, 15 bp, Homo sapiens
acagtgtcttgttat

SEQ ID NO: 1007100 - DNA, 15 bp, Homo sapiens
cagtgtcttgttatg

SEQ ID NO: 1007101 - DNA, 15 bp, Homo sapiens
agtgtcttgttatgt

SEQ ID NO: 1007102 - DNA, 15 bp, Homo sapiens
gtgtcttgttatgtt

SEQ ID NO: 1007103 - DNA, 15 bp, Homo sapiens
tgtcttgttatgttg

SEQ ID NO: 1007104 - DNA, 15 bp, Homo sapiens
gtcttgttatgttgc

SEQ ID NO: 1007105 - DNA, 15 bp, Homo sapiens
tcttgttatgttgcc

SEQ ID NO: 1007106 - DNA, 15 bp, Homo sapiens
cttgttatgttgccc

SEQ ID NO: 1007107 - DNA, 15 bp, Homo sapiens
ttgttatgttgccca

SEQ ID NO: 1007108 - DNA, 15 bp, Homo sapiens
tgttatgttgcccag

SEQ ID NO: 1007109 - DNA, 15 bp, Homo sapiens
gttatgttgcccagg

SEQ ID NO: 1007110 - DNA, 15 bp, Homo sapiens
ttatgttgcccaggc

SEQ ID NO: 1007111 - DNA, 15 bp, Homo sapiens
gcccaggctggtctc

SEQ ID NO: 1007112 - DNA, 15 bp, Homo sapiens
cccaggctggtctca

SEQ ID NO: 1007113 - DNA, 15 bp, Homo sapiens
ctggtctcaaactct

SEQ ID NO: 1007114 - DNA, 15 bp, Homo sapiens
tggtctcaaactctt

SEQ ID NO: 1007115 - DNA, 15 bp, Homo sapiens
ggtctcaaactcttg

SEQ ID NO: 1007116 - DNA, 15 bp, Homo sapiens
gtctcaaactcttgg

SEQ ID NO: 1007117 - DNA, 15 bp, Homo sapiens
tctcaaactcttggc

SEQ ID NO: 1007118 - DNA, 15 bp, Homo sapiens
ctcaaactcttggcc

SEQ ID NO: 1007119 - DNA, 15 bp, Homo sapiens
tcaaactcttggcct

SEQ ID NO: 1007120 - DNA, 15 bp, Homo sapiens
caaactcttggcctc

SEQ ID NO: 1007121 - DNA, 15 bp, Homo sapiens
aaactcttggcctca

SEQ ID NO: 1007122 - DNA, 15 bp, Homo sapiens
aactcttggcctcaa

SEQ ID NO: 1007123 - DNA, 15 bp, Homo sapiens
actcttggcctcaag

SEQ ID NO: 1007124 - DNA, 15 bp, Homo sapiens
ctcttggcctcaagc

SEQ ID NO: 1007125 - DNA, 15 bp, Homo sapiens
tcttggcctcaagca

SEQ ID NO: 1007126 - DNA, 15 bp, Homo sapiens
cttggcctcaagcag

SEQ ID NO: 1007127 - DNA, 15 bp, Homo sapiens
ttggcctcaagcagt

SEQ ID NO: 1007128 - DNA, 15 bp, Homo sapiens
tggcctcaagcagtc

SEQ ID NO: 1007129 - DNA, 15 bp, Homo sapiens
ggcctcaagcagtct

SEQ ID NO: 1007130 - DNA, 15 bp, Homo sapiens
gcctcaagcagtctt

SEQ ID NO: 1007131 - DNA, 15 bp, Homo sapiens
cctcaagcagtcttc

SEQ ID NO: 1007132 - DNA, 15 bp, Homo sapiens
ctcaagcagtcttcc

SEQ ID NO: 1007133 - DNA, 15 bp, Homo sapiens
tcaagcagtcttccc

SEQ ID NO: 1007134 - DNA, 15 bp, Homo sapiens
caagcagtcttccca

SEQ ID NO: 1007135 - DNA, 15 bp, Homo sapiens
aagcagtcttcccac

SEQ ID NO: 1007136 - DNA, 15 bp, Homo sapiens
agcagtcttcccacc

SEQ ID NO: 1007137 - DNA, 15 bp, Homo sapiens
gcagtcttcccacct

SEQ ID NO: 1007138 - DNA, 15 bp, Homo sapiens
cagtcttcccacctg

SEQ ID NO: 1007139 - DNA, 15 bp, Homo sapiens
agtcttcccacctgg

SEQ ID NO: 1007140 - DNA, 15 bp, Homo sapiens
gtcttcccacctggc

SEQ ID NO: 1007141 - DNA, 15 bp, Homo sapiens
tcttcccacctggct

SEQ ID NO: 1007142 - DNA, 15 bp, Homo sapiens
cttcccacctggctt

SEQ ID NO: 1007143 - DNA, 15 bp, Homo sapiens
ttcccacctggcttc

SEQ ID NO: 1007144 - DNA, 15 bp, Homo sapiens
tcccacctggcttcc

SEQ ID NO: 1007145 - DNA, 15 bp, Homo sapiens
cccacctggcttccc

SEQ ID NO: 1007146 - DNA, 15 bp, Homo sapiens
ccacctggcttccca

SEQ ID NO: 1007147 - DNA, 15 bp, Homo sapiens
cacctggcttcccaa

SEQ ID NO: 1007148 - DNA, 15 bp, Homo sapiens
acctggcttcccaaa

SEQ ID NO: 1007149 - DNA, 15 bp, Homo sapiens
cctggcttcccaaag

SEQ ID NO: 1007150 - DNA, 15 bp, Homo sapiens
ctggcttcccaaagc

SEQ ID NO: 1007151 - DNA, 15 bp, Homo sapiens
tggcttcccaaagca

SEQ ID NO: 1007152 - DNA, 15 bp, Homo sapiens
ggcttcccaaagcac

SEQ ID NO: 1007153 - DNA, 15 bp, Homo sapiens
gcttcccaaagcact

SEQ ID NO: 1007154 - DNA, 15 bp, Homo sapiens
cttcccaaagcactg

SEQ ID NO: 1007155 - DNA, 15 bp, Homo sapiens
ttcccaaagcactgg

SEQ ID NO: 1007156 - DNA, 15 bp, Homo sapiens
tcccaaagcactgga

SEQ ID NO: 1007157 - DNA, 15 bp, Homo sapiens
cccaaagcactggaa

SEQ ID NO: 1007158 - DNA, 15 bp, Homo sapiens
ccaaagcactggaat

SEQ ID NO: 1007159 - DNA, 15 bp, Homo sapiens
caaagcactggaatt

SEQ ID NO: 1007160 - DNA, 15 bp, Homo sapiens
aaagcactggaatta

SEQ ID NO: 1007161 - DNA, 15 bp, Homo sapiens
aagcactggaattac

SEQ ID NO: 1007162 - DNA, 15 bp, Homo sapiens
agcactggaattaca

SEQ ID NO: 1007163 - DNA, 15 bp, Homo sapiens
gcactggaattacag

SEQ ID NO: 1007164 - DNA, 15 bp, Homo sapiens
cactggaattacagg

SEQ ID NO: 1007165 - DNA, 15 bp, Homo sapiens
actggaattacaggc

SEQ ID NO: 1007166 - DNA, 15 bp, Homo sapiens
ctggaattacaggcg

SEQ ID NO: 1007167 - DNA, 15 bp, Homo sapiens
tggaattacaggcgt

SEQ ID NO: 1007168 - DNA, 15 bp, Homo sapiens
ggaattacaggcgtg

SEQ ID NO: 1007169 - DNA, 15 bp, Homo sapiens
gaattacaggcgtga

SEQ ID NO: 1007170 - DNA, 15 bp, Homo sapiens
aattacaggcgtgaa

SEQ ID NO: 1007171 - DNA, 15 bp, Homo sapiens
attacaggcgtgaac

SEQ ID NO: 1007172 - DNA, 15 bp, Homo sapiens
ttacaggcgtgaact

SEQ ID NO: 1007173 - DNA, 15 bp, Homo sapiens
tacaggcgtgaacta

SEQ ID NO: 1007174 - DNA, 15 bp, Homo sapiens
acaggcgtgaactac

SEQ ID NO: 1007175 - DNA, 15 bp, Homo sapiens
caggcgtgaactact

SEQ ID NO: 1007176 - DNA, 15 bp, Homo sapiens
aggcgtgaactactg

SEQ ID NO: 1007177 - DNA, 15 bp, Homo sapiens
ggcgtgaactactgt

SEQ ID NO: 1007178 - DNA, 15 bp, Homo sapiens
gcgtgaactactgtg

SEQ ID NO: 1007179 - DNA, 15 bp, Homo sapiens
cgtgaactactgtgc

SEQ ID NO: 1007180 - DNA, 15 bp, Homo sapiens
gtgaactactgtgct

SEQ ID NO: 1007181 - DNA, 15 bp, Homo sapiens
tgaactactgtgctg

SEQ ID NO: 1007182 - DNA, 15 bp, Homo sapiens
gaactactgtgctgg

SEQ ID NO: 1007183 - DNA, 15 bp, Homo sapiens
aactactgtgctggg

SEQ ID NO: 1007184 - DNA, 15 bp, Homo sapiens
actactgtgctgggt

SEQ ID NO: 1007185 - DNA, 15 bp, Homo sapiens
ctactgtgctgggtc

SEQ ID NO: 1007186 - DNA, 15 bp, Homo sapiens
tactgtgctgggtcc

SEQ ID NO: 1007187 - DNA, 15 bp, Homo sapiens
actgtgctgggtcct

SEQ ID NO: 1007188 - DNA, 15 bp, Homo sapiens
ctgtgctgggtcctg

SEQ ID NO: 1007189 - DNA, 15 bp, Homo sapiens
tgtgctgggtcctga

SEQ ID NO: 1007190 - DNA, 15 bp, Homo sapiens
gtgctgggtcctgag

SEQ ID NO: 1007191 - DNA, 15 bp, Homo sapiens
tgctgggtcctgagt

SEQ ID NO: 1007192 - DNA, 15 bp, Homo sapiens
gctgggtcctgagtg

SEQ ID NO: 1007193 - DNA, 15 bp, Homo sapiens
ctgggtcctgagtgg

SEQ ID NO: 1007194 - DNA, 15 bp, Homo sapiens
tgggtcctgagtggc

SEQ ID NO: 1007195 - DNA, 15 bp, Homo sapiens
gggtcctgagtggct

SEQ ID NO: 1007196 - DNA, 15 bp, Homo sapiens
ggtcctgagtggctt

SEQ ID NO: 1007197 - DNA, 15 bp, Homo sapiens
gtcctgagtggcttt

SEQ ID NO: 1007198 - DNA, 15 bp, Homo sapiens
tcctgagtggctttt

SEQ ID NO: 1007199 - DNA, 15 bp, Homo sapiens
cctgagtggcttttg

SEQ ID NO: 1007200 - DNA, 15 bp, Homo sapiens
ctgagtggcttttga

SEQ ID NO: 1007201 - DNA, 15 bp, Homo sapiens
tgagtggcttttgag

SEQ ID NO: 1007202 - DNA, 15 bp, Homo sapiens
gagtggcttttgagc

SEQ ID NO: 1007203 - DNA, 15 bp, Homo sapiens
agtggcttttgagcc

SEQ ID NO: 1007204 - DNA, 15 bp, Homo sapiens
gtggcttttgagcca

SEQ ID NO: 1007205 - DNA, 15 bp, Homo sapiens
tggcttttgagccac

SEQ ID NO: 1007206 - DNA, 15 bp, Homo sapiens
ggcttttgagccact

SEQ ID NO: 1007207 - DNA, 15 bp, Homo sapiens
gcttttgagccactg

SEQ ID NO: 1007208 - DNA, 15 bp, Homo sapiens
cttttgagccactga

SEQ ID NO: 1007209 - DNA, 15 bp, Homo sapiens
ttttgagccactgac

SEQ ID NO: 1007210 - DNA, 15 bp, Homo sapiens
tttgagccactgact

SEQ ID NO: 1007211 - DNA, 15 bp, Homo sapiens
ttgagccactgacta

SEQ ID NO: 1007212 - DNA, 15 bp, Homo sapiens
tgagccactgactat

SEQ ID NO: 1007213 - DNA, 15 bp, Homo sapiens
gagccactgactata

SEQ ID NO: 1007214 - DNA, 15 bp, Homo sapiens
agccactgactatat

SEQ ID NO: 1007215 - DNA, 15 bp, Homo sapiens
gccactgactatatc

SEQ ID NO: 1007216 - DNA, 15 bp, Homo sapiens
ccactgactatatca

SEQ ID NO: 1007217 - DNA, 15 bp, Homo sapiens
cactgactatatcat

SEQ ID NO: 1007218 - DNA, 15 bp, Homo sapiens
actgactatatcatc

SEQ ID NO: 1007219 - DNA, 15 bp, Homo sapiens
ctgactatatcatca

SEQ ID NO: 1007220 - DNA, 15 bp, Homo sapiens
tgactatatcatcaa

SEQ ID NO: 1007221 - DNA, 15 bp, Homo sapiens
gactatatcatcaaa

SEQ ID NO: 1007222 - DNA, 15 bp, Homo sapiens
actatatcatcaaaa

SEQ ID NO: 1007223 - DNA, 15 bp, Homo sapiens
ctatatcatcaaaaa

SEQ ID NO: 1007224 - DNA, 15 bp, Homo sapiens
tatatcatcaaaaag

SEQ ID NO: 1007225 - DNA, 15 bp, Homo sapiens
atatcatcaaaaagc

SEQ ID NO: 1007226 - DNA, 15 bp, Homo sapiens
tatcatcaaaaagct

SEQ ID NO: 1007227 - DNA, 15 bp, Homo sapiens
atcatcaaaaagctt

SEQ ID NO: 1007228 - DNA, 15 bp, Homo sapiens
tcatcaaaaagcttc

SEQ ID NO: 1007229 - DNA, 15 bp, Homo sapiens
catcaaaaagcttct

SEQ ID NO: 1007230 - DNA, 15 bp, Homo sapiens
atcaaaaagcttctg

SEQ ID NO: 1007231 - DNA, 15 bp, Homo sapiens
tcaaaaagcttctgt

SEQ ID NO: 1007232 - DNA, 15 bp, Homo sapiens
caaaaagcttctgtt

SEQ ID NO: 1007233 - DNA, 15 bp, Homo sapiens
aaaaagcttctgttg

SEQ ID NO: 1007234 - DNA, 15 bp, Homo sapiens
aaaagcttctgttga

SEQ ID NO: 1007235 - DNA, 15 bp, Homo sapiens
aaagcttctgttgag

SEQ ID NO: 1007236 - DNA, 15 bp, Homo sapiens
aagcttctgttgaga

SEQ ID NO: 1007237 - DNA, 15 bp, Homo sapiens
agcttctgttgagac

SEQ ID NO: 1007238 - DNA, 15 bp, Homo sapiens
gcttctgttgagaca

SEQ ID NO: 1007239 - DNA, 15 bp, Homo sapiens
cttctgttgagacaa

SEQ ID NO: 1007240 - DNA, 15 bp, Homo sapiens
ttctgttgagacaaa

SEQ ID NO: 1007241 - DNA, 15 bp, Homo sapiens
tctgttgagacaaag

SEQ ID NO: 1007242 - DNA, 15 bp, Homo sapiens
ctgttgagacaaagc

SEQ ID NO: 1007243 - DNA, 15 bp, Homo sapiens
tgttgagacaaagcc

SEQ ID NO: 1007244 - DNA, 15 bp, Homo sapiens
gttgagacaaagcct

SEQ ID NO: 1007245 - DNA, 15 bp, Homo sapiens
ttgagacaaagcctc

SEQ ID NO: 1007246 - DNA, 15 bp, Homo sapiens
tgagacaaagcctca

SEQ ID NO: 1007247 - DNA, 15 bp, Homo sapiens
gagacaaagcctcaa

SEQ ID NO: 1007248 - DNA, 15 bp, Homo sapiens
agacaaagcctcaag

SEQ ID NO: 1007249 - DNA, 15 bp, Homo sapiens
gacaaagcctcaagc

SEQ ID NO: 1007250 - DNA, 15 bp, Homo sapiens
acaaagcctcaagct

SEQ ID NO: 1007251 - DNA, 15 bp, Homo sapiens
caaagcctcaagcta

SEQ ID NO: 1007252 - DNA, 15 bp, Homo sapiens
aaagcctcaagctag

SEQ ID NO: 1007253 - DNA, 15 bp, Homo sapiens
aagcctcaagctagt

SEQ ID NO: 1007254 - DNA, 15 bp, Homo sapiens
agcctcaagctagtg

SEQ ID NO: 1007255 - DNA, 15 bp, Homo sapiens
gcctcaagctagtgt

SEQ ID NO: 1007256 - DNA, 15 bp, Homo sapiens
cctcaagctagtgtg

SEQ ID NO: 1007257 - DNA, 15 bp, Homo sapiens
ctcaagctagtgtgg

SEQ ID NO: 1007258 - DNA, 15 bp, Homo sapiens
tcaagctagtgtgga

SEQ ID NO: 1007259 - DNA, 15 bp, Homo sapiens
caagctagtgtggag

SEQ ID NO: 1007260 - DNA, 15 bp, Homo sapiens
aagctagtgtggagt

SEQ ID NO: 1007261 - DNA, 15 bp, Homo sapiens
agctagtgtggagtt

SEQ ID NO: 1007262 - DNA, 15 bp, Homo sapiens
gctagtgtggagttc

SEQ ID NO: 1007263 - DNA, 15 bp, Homo sapiens
ctagtgtggagttca

SEQ ID NO: 1007264 - DNA, 15 bp, Homo sapiens
tagtgtggagttcat

SEQ ID NO: 1007265 - DNA, 15 bp, Homo sapiens
agtgtggagttcatc

SEQ ID NO: 1007266 - DNA, 15 bp, Homo sapiens
gtgtggagttcatcc

SEQ ID NO: 1007267 - DNA, 15 bp, Homo sapiens
tgtggagttcatcct

SEQ ID NO: 1007268 - DNA, 15 bp, Homo sapiens
gtggagttcatccta

SEQ ID NO: 1007269 - DNA, 15 bp, Homo sapiens
tggagttcatcctac

SEQ ID NO: 1007270 - DNA, 15 bp, Homo sapiens
ggagttcatcctact

SEQ ID NO: 1007271 - DNA, 15 bp, Homo sapiens
gagttcatcctacta

SEQ ID NO: 1007272 - DNA, 15 bp, Homo sapiens
agttcatcctactaa

SEQ ID NO: 1007273 - DNA, 15 bp, Homo sapiens
gttcatcctactaaa

SEQ ID NO: 1007274 - DNA, 15 bp, Homo sapiens
ttcatcctactaaaa

SEQ ID NO: 1007275 - DNA, 15 bp, Homo sapiens
tcatcctactaaaat

SEQ ID NO: 1007276 - DNA, 15 bp, Homo sapiens
catcctactaaaatg

SEQ ID NO: 1007277 - DNA, 15 bp, Homo sapiens
atcctactaaaatga

SEQ ID NO: 1007278 - DNA, 15 bp, Homo sapiens
tcctactaaaatgaa

SEQ ID NO: 1007279 - DNA, 15 bp, Homo sapiens
cctactaaaatgaag

SEQ ID NO: 1007280 - DNA, 15 bp, Homo sapiens
ctactaaaatgaaga

SEQ ID NO: 1007281 - DNA, 15 bp, Homo sapiens
tactaaaatgaagaa

SEQ ID NO: 1007282 - DNA, 15 bp, Homo sapiens
actaaaatgaagaat

SEQ ID NO: 1007283 - DNA, 15 bp, Homo sapiens
ctaaaatgaagaatt

SEQ ID NO: 1007284 - DNA, 15 bp, Homo sapiens
taaaatgaagaattg

SEQ ID NO: 1007285 - DNA, 15 bp, Homo sapiens
aaaatgaagaattgg

SEQ ID NO: 1007286 - DNA, 15 bp, Homo sapiens
aaatgaagaattggc

SEQ ID NO: 1007287 - DNA, 15 bp, Homo sapiens
aatgaagaattggca

SEQ ID NO: 1007288 - DNA, 15 bp, Homo sapiens
atgaagaattggcat

SEQ ID NO: 1007289 - DNA, 15 bp, Homo sapiens
tgaagaattggcatt

SEQ ID NO: 1007290 - DNA, 15 bp, Homo sapiens
gaagaattggcatta

SEQ ID NO: 1007291 - DNA, 15 bp, Homo sapiens
aagaattggcattat

SEQ ID NO: 1007292 - DNA, 15 bp, Homo sapiens
agaattggcattatg

SEQ ID NO: 1007293 - DNA, 15 bp, Homo sapiens
gaattggcattatgt

SEQ ID NO: 1007294 - DNA, 15 bp, Homo sapiens
aattggcattatgtt

SEQ ID NO: 1007295 - DNA, 15 bp, Homo sapiens
attggcattatgttc

SEQ ID NO: 1007296 - DNA, 15 bp, Homo sapiens
ttggcattatgttct

SEQ ID NO: 1007297 - DNA, 15 bp, Homo sapiens
tggcattatgttcta

SEQ ID NO: 1007298 - DNA, 15 bp, Homo sapiens
ggcattatgttctaa

SEQ ID NO: 1007299 - DNA, 15 bp, Homo sapiens
gcattatgttctaaa

SEQ ID NO: 1007300 - DNA, 15 bp, Homo sapiens
cattatgttctaaaa

SEQ ID NO: 1007301 - DNA, 15 bp, Homo sapiens
attatgttctaaaac

SEQ ID NO: 1007302 - DNA, 15 bp, Homo sapiens
ttatgttctaaaact

SEQ ID NO: 1007303 - DNA, 15 bp, Homo sapiens
tatgttctaaaactt

SEQ ID NO: 1007304 - DNA, 15 bp, Homo sapiens
atgttctaaaacttt

SEQ ID NO: 1007305 - DNA, 15 bp, Homo sapiens
tgttctaaaacttta

SEQ ID NO: 1007306 - DNA, 15 bp, Homo sapiens
gttctaaaactttac

SEQ ID NO: 1007307 - DNA, 15 bp, Homo sapiens
ttctaaaactttaca

SEQ ID NO: 1007308 - DNA, 15 bp, Homo sapiens
tctaaaactttacat

SEQ ID NO: 1007309 - DNA, 15 bp, Homo sapiens
ctaaaactttacata

SEQ ID NO: 1007310 - DNA, 15 bp, Homo sapiens
taaaactttacatat

SEQ ID NO: 1007311 - DNA, 15 bp, Homo sapiens
aaaactttacatatt

SEQ ID NO: 1007312 - DNA, 15 bp, Homo sapiens
aaactttacatattc

SEQ ID NO: 1007313 - DNA, 15 bp, Homo sapiens
aactttacatattct

SEQ ID NO: 1007314 - DNA, 15 bp, Homo sapiens
actttacatattctt

SEQ ID NO: 1007315 - DNA, 15 bp, Homo sapiens
ctttacatattctta

SEQ ID NO: 1007316 - DNA, 15 bp, Homo sapiens
tttacatattcttac

SEQ ID NO: 1007317 - DNA, 15 bp, Homo sapiens
ttacatattcttacc

SEQ ID NO: 1007318 - DNA, 15 bp, Homo sapiens
tacatattcttacca

SEQ ID NO: 1007319 - DNA, 15 bp, Homo sapiens
acatattcttaccat

SEQ ID NO: 1007320 - DNA, 15 bp, Homo sapiens
catattcttaccata

SEQ ID NO: 1007321 - DNA, 15 bp, Homo sapiens
atattcttaccataa

SEQ ID NO: 1007322 - DNA, 15 bp, Homo sapiens
tattcttaccataaa

SEQ ID NO: 1007323 - DNA, 15 bp, Homo sapiens
attcttaccataaat

SEQ ID NO: 1007324 - DNA, 15 bp, Homo sapiens
ttcttaccataaatg

SEQ ID NO: 1007325 - DNA, 15 bp, Homo sapiens
tcttaccataaatgg

SEQ ID NO: 1007326 - DNA, 15 bp, Homo sapiens
cttaccataaatggt

SEQ ID NO: 1007327 - DNA, 15 bp, Homo sapiens
ttaccataaatggta

SEQ ID NO: 1007328 - DNA, 15 bp, Homo sapiens
taccataaatggtac

SEQ ID NO: 1007329 - DNA, 15 bp, Homo sapiens
accataaatggtact

SEQ ID NO: 1007330 - DNA, 15 bp, Homo sapiens
ccataaatggtacta

SEQ ID NO: 1007331 - DNA, 15 bp, Homo sapiens
cataaatggtactaa

SEQ ID NO: 1007332 - DNA, 15 bp, Homo sapiens
ataaatggtactaat

SEQ ID NO: 1007333 - DNA, 15 bp, Homo sapiens
taaatggtactaatt

SEQ ID NO: 1007334 - DNA, 15 bp, Homo sapiens
aaatggtactaatta

SEQ ID NO: 1007335 - DNA, 15 bp, Homo sapiens
aatggtactaattac

SEQ ID NO: 1007336 - DNA, 15 bp, Homo sapiens
atggtactaattact

SEQ ID NO: 1007337 - DNA, 15 bp, Homo sapiens
tggtactaattactt

SEQ ID NO: 1007338 - DNA, 15 bp, Homo sapiens
ggtactaattacttt

SEQ ID NO: 1007339 - DNA, 15 bp, Homo sapiens
gtactaattactttg

SEQ ID NO: 1007340 - DNA, 15 bp, Homo sapiens
tactaattactttgc

SEQ ID NO: 1007341 - DNA, 15 bp, Homo sapiens
actaattactttgca

SEQ ID NO: 1007342 - DNA, 15 bp, Homo sapiens
ctaattactttgcag

SEQ ID NO: 1007343 - DNA, 15 bp, Homo sapiens
taattactttgcagt

SEQ ID NO: 1007344 - DNA, 15 bp, Homo sapiens
aattactttgcagta

SEQ ID NO: 1007345 - DNA, 15 bp, Homo sapiens
attactttgcagtag

SEQ ID NO: 1007346 - DNA, 15 bp, Homo sapiens
ttactttgcagtagc

SEQ ID NO: 1007347 - DNA, 15 bp, Homo sapiens
tactttgcagtagca

SEQ ID NO: 1007348 - DNA, 15 bp, Homo sapiens
actttgcagtagcag

SEQ ID NO: 1007349 - DNA, 15 bp, Homo sapiens
ctttgcagtagcagt

SEQ ID NO: 1007350 - DNA, 15 bp, Homo sapiens
tttgcagtagcagta

SEQ ID NO: 1007351 - DNA, 15 bp, Homo sapiens
ttgcagtagcagtaa

SEQ ID NO: 1007352 - DNA, 15 bp, Homo sapiens
tgcagtagcagtaac

SEQ ID NO: 1007353 - DNA, 15 bp, Homo sapiens
gcagtagcagtaact

SEQ ID NO: 1007354 - DNA, 15 bp, Homo sapiens
cagtagcagtaactt

SEQ ID NO: 1007355 - DNA, 15 bp, Homo sapiens
agtagcagtaacttg

SEQ ID NO: 1007356 - DNA, 15 bp, Homo sapiens
gtagcagtaacttga

SEQ ID NO: 1007357 - DNA, 15 bp, Homo sapiens
tagcagtaacttgag

SEQ ID NO: 1007358 - DNA, 15 bp, Homo sapiens
agcagtaacttgagg

SEQ ID NO: 1007359 - DNA, 15 bp, Homo sapiens
gcagtaacttgaggt

SEQ ID NO: 1007360 - DNA, 15 bp, Homo sapiens
cagtaacttgaggtg

SEQ ID NO: 1007361 - DNA, 15 bp, Homo sapiens
agtaacttgaggtgc

SEQ ID NO: 1007362 - DNA, 15 bp, Homo sapiens
gtaacttgaggtgca

SEQ ID NO: 1007363 - DNA, 15 bp, Homo sapiens
taacttgaggtgcaa

SEQ ID NO: 1007364 - DNA, 15 bp, Homo sapiens
aacttgaggtgcaaa

SEQ ID NO: 1007365 - DNA, 15 bp, Homo sapiens
acttgaggtgcaaac

SEQ ID NO: 1007366 - DNA, 15 bp, Homo sapiens
cttgaggtgcaaact

SEQ ID NO: 1007367 - DNA, 15 bp, Homo sapiens
ttgaggtgcaaactt

SEQ ID NO: 1007368 - DNA, 15 bp, Homo sapiens
tgaggtgcaaacttc

SEQ ID NO: 1007369 - DNA, 15 bp, Homo sapiens
gaggtgcaaacttcc

SEQ ID NO: 1007370 - DNA, 15 bp, Homo sapiens
aggtgcaaacttcca

SEQ ID NO: 1007371 - DNA, 15 bp, Homo sapiens
ggtgcaaacttccag

SEQ ID NO: 1007372 - DNA, 15 bp, Homo sapiens
gtgcaaacttccaga

SEQ ID NO: 1007373 - DNA, 15 bp, Homo sapiens
tgcaaacttccagat

SEQ ID NO: 1007374 - DNA, 15 bp, Homo sapiens
gcaaacttccagatt

SEQ ID NO: 1007375 - DNA, 15 bp, Homo sapiens
caaacttccagattg

SEQ ID NO: 1007376 - DNA, 15 bp, Homo sapiens
aaacttccagattgc

SEQ ID NO: 1007377 - DNA, 15 bp, Homo sapiens
aacttccagattgca

SEQ ID NO: 1007378 - DNA, 15 bp, Homo sapiens
acttccagattgcat

SEQ ID NO: 1007379 - DNA, 15 bp, Homo sapiens
cttccagattgcata

SEQ ID NO: 1007380 - DNA, 15 bp, Homo sapiens
ttccagattgcatat

SEQ ID NO: 1007381 - DNA, 15 bp, Homo sapiens
tccagattgcatatt

SEQ ID NO: 1007382 - DNA, 15 bp, Homo sapiens
ccagattgcatattt

SEQ ID NO: 1007383 - DNA, 15 bp, Homo sapiens
cagattgcatatttt

SEQ ID NO: 1007384 - DNA, 15 bp, Homo sapiens
agattgcatattttc

SEQ ID NO: 1007385 - DNA, 15 bp, Homo sapiens
gattgcatattttct

SEQ ID NO: 1007386 - DNA, 15 bp, Homo sapiens
attgcatattttctt

SEQ ID NO: 1007387 - DNA, 15 bp, Homo sapiens
ttgcatattttcttt

SEQ ID NO: 1007388 - DNA, 15 bp, Homo sapiens
tgcatattttcttta

SEQ ID NO: 1007389 - DNA, 15 bp, Homo sapiens
gcatattttctttaa

SEQ ID NO: 1007390 - DNA, 15 bp, Homo sapiens
catattttctttaaa

SEQ ID NO: 1007391 - DNA, 15 bp, Homo sapiens
atattttctttaaac

SEQ ID NO: 1007392 - DNA, 15 bp, Homo sapiens
tattttctttaaacc

SEQ ID NO: 1007393 - DNA, 15 bp, Homo sapiens
attttctttaaacca

SEQ ID NO: 1007394 - DNA, 15 bp, Homo sapiens
ttttctttaaaccat

SEQ ID NO: 1007395 - DNA, 15 bp, Homo sapiens
tttctttaaaccata

SEQ ID NO: 1007396 - DNA, 15 bp, Homo sapiens
ttctttaaaccatag

SEQ ID NO: 1007397 - DNA, 15 bp, Homo sapiens
tctttaaaccatagt

SEQ ID NO: 1007398 - DNA, 15 bp, Homo sapiens
ctttaaaccatagtc

SEQ ID NO: 1007399 - DNA, 15 bp, Homo sapiens
tttaaaccatagtct

SEQ ID NO: 1007400 - DNA, 15 bp, Homo sapiens
ttaaaccatagtctg

SEQ ID NO: 1007401 - DNA, 15 bp, Homo sapiens
taaaccatagtctgg

SEQ ID NO: 1007402 - DNA, 15 bp, Homo sapiens
aaaccatagtctggc

SEQ ID NO: 1007403 - DNA, 15 bp, Homo sapiens
aaccatagtctggca

SEQ ID NO: 1007404 - DNA, 15 bp, Homo sapiens
accatagtctggcac

SEQ ID NO: 1007405 - DNA, 15 bp, Homo sapiens
ccatagtctggcact

SEQ ID NO: 1007406 - DNA, 15 bp, Homo sapiens
catagtctggcactc

SEQ ID NO: 1007407 - DNA, 15 bp, Homo sapiens
atagtctggcactca

SEQ ID NO: 1007408 - DNA, 15 bp, Homo sapiens
tagtctggcactcac

SEQ ID NO: 1007409 - DNA, 15 bp, Homo sapiens
agtctggcactcacg

SEQ ID NO: 1007410 - DNA, 15 bp, Homo sapiens
gtctggcactcacgg

SEQ ID NO: 1007411 - DNA, 15 bp, Homo sapiens
tctggcactcacggt

SEQ ID NO: 1007412 - DNA, 15 bp, Homo sapiens
ctggcactcacggtt

SEQ ID NO: 1007413 - DNA, 15 bp, Homo sapiens
tggcactcacggttt

SEQ ID NO: 1007414 - DNA, 15 bp, Homo sapiens
ggcactcacggtttg

SEQ ID NO: 1007415 - DNA, 15 bp, Homo sapiens
gcactcacggtttgg

SEQ ID NO: 1007416 - DNA, 15 bp, Homo sapiens
cactcacggtttggc

SEQ ID NO: 1007417 - DNA, 15 bp, Homo sapiens
actcacggtttggct

SEQ ID NO: 1007418 - DNA, 15 bp, Homo sapiens
ctcacggtttggctt

SEQ ID NO: 1007419 - DNA, 15 bp, Homo sapiens
tcacggtttggctta

SEQ ID NO: 1007420 - DNA, 15 bp, Homo sapiens
cacggtttggcttag

SEQ ID NO: 1007421 - DNA, 15 bp, Homo sapiens
acggtttggcttagg

SEQ ID NO: 1007422 - DNA, 15 bp, Homo sapiens
cggtttggcttaggg

SEQ ID NO: 1007423 - DNA, 15 bp, Homo sapiens
ggtttggcttagggt

SEQ ID NO: 1007424 - DNA, 15 bp, Homo sapiens
gtttggcttagggtt

SEQ ID NO: 1007425 - DNA, 15 bp, Homo sapiens
tttggcttagggttg

SEQ ID NO: 1007426 - DNA, 15 bp, Homo sapiens
ttggcttagggttgc

SEQ ID NO: 1007427 - DNA, 15 bp, Homo sapiens
tggcttagggttgcc

SEQ ID NO: 1007428 - DNA, 15 bp, Homo sapiens
ggcttagggttgcca

SEQ ID NO: 1007429 - DNA, 15 bp, Homo sapiens
gcttagggttgccac

SEQ ID NO: 1007430 - DNA, 15 bp, Homo sapiens
cttagggttgccact

SEQ ID NO: 1007431 - DNA, 15 bp, Homo sapiens
ttagggttgccactg

SEQ ID NO: 1007432 - DNA, 15 bp, Homo sapiens
tagggttgccactgc

SEQ ID NO: 1007433 - DNA, 15 bp, Homo sapiens
agggttgccactgca

SEQ ID NO: 1007434 - DNA, 15 bp, Homo sapiens
gggttgccactgcag

SEQ ID NO: 1007435 - DNA, 15 bp, Homo sapiens
ggttgccactgcagt

SEQ ID NO: 1007436 - DNA, 15 bp, Homo sapiens
gttgccactgcagtc

SEQ ID NO: 1007437 - DNA, 15 bp, Homo sapiens
ttgccactgcagtcc

SEQ ID NO: 1007438 - DNA, 15 bp, Homo sapiens
tgccactgcagtcca

SEQ ID NO: 1007439 - DNA, 15 bp, Homo sapiens
gccactgcagtccac

SEQ ID NO: 1007440 - DNA, 15 bp, Homo sapiens
ccactgcagtccaca

SEQ ID NO: 1007441 - DNA, 15 bp, Homo sapiens
cactgcagtccacaa

SEQ ID NO: 1007442 - DNA, 15 bp, Homo sapiens
actgcagtccacaag

SEQ ID NO: 1007443 - DNA, 15 bp, Homo sapiens
ctgcagtccacaagc

SEQ ID NO: 1007444 - DNA, 15 bp, Homo sapiens
tgcagtccacaagct

SEQ ID NO: 1007445 - DNA, 15 bp, Homo sapiens
gcagtccacaagctg

SEQ ID NO: 1007446 - DNA, 15 bp, Homo sapiens
cagtccacaagctgt

SEQ ID NO: 1007447 - DNA, 15 bp, Homo sapiens
agtccacaagctgtc

SEQ ID NO: 1007448 - DNA, 15 bp, Homo sapiens
gtccacaagctgtcg

SEQ ID NO: 1007449 - DNA, 15 bp, Homo sapiens
tccacaagctgtcgc

SEQ ID NO: 1007450 - DNA, 15 bp, Homo sapiens
ccacaagctgtcgcc

SEQ ID NO: 1007451 - DNA, 15 bp, Homo sapiens
cacaagctgtcgcct

SEQ ID NO: 1007452 - DNA, 15 bp, Homo sapiens
acaagctgtcgcctg

SEQ ID NO: 1007453 - DNA, 15 bp, Homo sapiens
caagctgtcgcctgc

SEQ ID NO: 1007454 - DNA, 15 bp, Homo sapiens
aagctgtcgcctgcc

SEQ ID NO: 1007455 - DNA, 15 bp, Homo sapiens
agctgtcgcctgccc

SEQ ID NO: 1007456 - DNA, 15 bp, Homo sapiens
gctgtcgcctgccct

SEQ ID NO: 1007457 - DNA, 15 bp, Homo sapiens
ctgtcgcctgccctt

SEQ ID NO: 1007458 - DNA, 15 bp, Homo sapiens
tgtcgcctgccctta

SEQ ID NO: 1007459 - DNA, 15 bp, Homo sapiens
gtcgcctgcccttat

SEQ ID NO: 1007460 - DNA, 15 bp, Homo sapiens
tcgcctgcccttatt

SEQ ID NO: 1007461 - DNA, 15 bp, Homo sapiens
cgcctgcccttattc

SEQ ID NO: 1007462 - DNA, 15 bp, Homo sapiens
gcctgcccttattca

SEQ ID NO: 1007463 - DNA, 15 bp, Homo sapiens
cctgcccttattcat

SEQ ID NO: 1007464 - DNA, 15 bp, Homo sapiens
ctgcccttattcata

SEQ ID NO: 1007465 - DNA, 15 bp, Homo sapiens
tgcccttattcatat

SEQ ID NO: 1007466 - DNA, 15 bp, Homo sapiens
gcccttattcatatt

SEQ ID NO: 1007467 - DNA, 15 bp, Homo sapiens
cccttattcatattt

SEQ ID NO: 1007468 - DNA, 15 bp, Homo sapiens
ccttattcatatttt

SEQ ID NO: 1007469 - DNA, 15 bp, Homo sapiens
cttattcatatttta

SEQ ID NO: 1007470 - DNA, 15 bp, Homo sapiens
ttattcatattttat

SEQ ID NO: 1007471 - DNA, 15 bp, Homo sapiens
tattcatattttata

SEQ ID NO: 1007472 - DNA, 15 bp, Homo sapiens
attcatattttatag

SEQ ID NO: 1007473 - DNA, 15 bp, Homo sapiens
ttcatattttatagc

SEQ ID NO: 1007474 - DNA, 15 bp, Homo sapiens
tcatattttatagct

SEQ ID NO: 1007475 - DNA, 15 bp, Homo sapiens
catattttatagctt

SEQ ID NO: 1007476 - DNA, 15 bp, Homo sapiens
atattttatagcttt

SEQ ID NO: 1007477 - DNA, 15 bp, Homo sapiens
tattttatagctttg

SEQ ID NO: 1007478 - DNA, 15 bp, Homo sapiens
attttatagctttga

SEQ ID NO: 1007479 - DNA, 15 bp, Homo sapiens
ttttatagctttgaa

SEQ ID NO: 1007480 - DNA, 15 bp, Homo sapiens
tttatagctttgaat

SEQ ID NO: 1007481 - DNA, 15 bp, Homo sapiens
ttatagctttgaatg

SEQ ID NO: 1007482 - DNA, 15 bp, Homo sapiens
tatagctttgaatgt

SEQ ID NO: 1007483 - DNA, 15 bp, Homo sapiens
atagctttgaatgtc

SEQ ID NO: 1007484 - DNA, 15 bp, Homo sapiens
tagctttgaatgtct

SEQ ID NO: 1007485 - DNA, 15 bp, Homo sapiens
agctttgaatgtctt

SEQ ID NO: 1007486 - DNA, 15 bp, Homo sapiens
gctttgaatgtctta

SEQ ID NO: 1007487 - DNA, 15 bp, Homo sapiens
ctttgaatgtcttat

SEQ ID NO: 1007488 - DNA, 15 bp, Homo sapiens
tttgaatgtcttatt

SEQ ID NO: 1007489 - DNA, 15 bp, Homo sapiens
ttgaatgtcttattc

SEQ ID NO: 1007490 - DNA, 15 bp, Homo sapiens
tgaatgtcttattcc

SEQ ID NO: 1007491 - DNA, 15 bp, Homo sapiens
gaatgtcttattcca

SEQ ID NO: 1007492 - DNA, 15 bp, Homo sapiens
aatgtcttattccat

SEQ ID NO: 1007493 - DNA, 15 bp, Homo sapiens
atgtcttattccatt

SEQ ID NO: 1007494 - DNA, 15 bp, Homo sapiens
tgtcttattccattg

SEQ ID NO: 1007495 - DNA, 15 bp, Homo sapiens
gtcttattccattga

SEQ ID NO: 1007496 - DNA, 15 bp, Homo sapiens
tcttattccattgaa

SEQ ID NO: 1007497 - DNA, 15 bp, Homo sapiens
cttattccattgaac

SEQ ID NO: 1007498 - DNA, 15 bp, Homo sapiens
ttattccattgaact

SEQ ID NO: 1007499 - DNA, 15 bp, Homo sapiens
tattccattgaactt

SEQ ID NO: 1007500 - DNA, 15 bp, Homo sapiens
attccattgaacttc

SEQ ID NO: 1007501 - DNA, 15 bp, Homo sapiens
ttccattgaacttca

SEQ ID NO: 1007502 - DNA, 15 bp, Homo sapiens
tccattgaacttcag

SEQ ID NO: 1007503 - DNA, 15 bp, Homo sapiens
ccattgaacttcaga

SEQ ID NO: 1007504 - DNA, 15 bp, Homo sapiens
cattgaacttcagat

SEQ ID NO: 1007505 - DNA, 15 bp, Homo sapiens
attgaacttcagata

SEQ ID NO: 1007506 - DNA, 15 bp, Homo sapiens
ttgaacttcagataa

SEQ ID NO: 1007507 - DNA, 15 bp, Homo sapiens
tgaacttcagataac

SEQ ID NO: 1007508 - DNA, 15 bp, Homo sapiens
gaacttcagataact

SEQ ID NO: 1007509 - DNA, 15 bp, Homo sapiens
aacttcagataactt

SEQ ID NO: 1007510 - DNA, 15 bp, Homo sapiens
acttcagataacttt

SEQ ID NO: 1007511 - DNA, 15 bp, Homo sapiens
cttcagataactttt

SEQ ID NO: 1007512 - DNA, 15 bp, Homo sapiens
ttcagataacttttt

SEQ ID NO: 1007513 - DNA, 15 bp, Homo sapiens
tcagataactttttt

SEQ ID NO: 1007514 - DNA, 15 bp, Homo sapiens
cagataacttttttt

SEQ ID NO: 1007515 - DNA, 15 bp, Homo sapiens
agataactttttttt

SEQ ID NO: 1007516 - DNA, 15 bp, Homo sapiens
gataacttttttttt

SEQ ID NO: 1007517 - DNA, 15 bp, Homo sapiens
ataactttttttttt

SEQ ID NO: 1007518 - DNA, 15 bp, Homo sapiens
taacttttttttttt

SEQ ID NO: 1007519 - DNA, 15 bp, Homo sapiens
aactttttttttttg

SEQ ID NO: 1007520 - DNA, 15 bp, Homo sapiens
ttttgagatggagtt

SEQ ID NO: 1007521 - DNA, 15 bp, Homo sapiens
tttgagatggagttt

SEQ ID NO: 1007522 - DNA, 15 bp, Homo sapiens
ttgagatggagtttt

SEQ ID NO: 1007523 - DNA, 15 bp, Homo sapiens
tgagatggagttttg

SEQ ID NO: 1007524 - DNA, 15 bp, Homo sapiens
gagatggagttttgc

SEQ ID NO: 1007525 - DNA, 15 bp, Homo sapiens
agatggagttttgct

SEQ ID NO: 1007526 - DNA, 15 bp, Homo sapiens
gatggagttttgctc

SEQ ID NO: 1007527 - DNA, 15 bp, Homo sapiens
atggagttttgctct

SEQ ID NO: 1007528 - DNA, 15 bp, Homo sapiens
tggagttttgctctt

SEQ ID NO: 1007529 - DNA, 15 bp, Homo sapiens
ggagttttgctcttg

SEQ ID NO: 1007530 - DNA, 15 bp, Homo sapiens
gagttttgctcttgt

SEQ ID NO: 1007531 - DNA, 15 bp, Homo sapiens
agttttgctcttgtt

SEQ ID NO: 1007532 - DNA, 15 bp, Homo sapiens
gttttgctcttgttg

SEQ ID NO: 1007533 - DNA, 15 bp, Homo sapiens
ttttgctcttgttgc

SEQ ID NO: 1007534 - DNA, 15 bp, Homo sapiens
tttgctcttgttgcc

SEQ ID NO: 1007535 - DNA, 15 bp, Homo sapiens
ttgctcttgttgccc

SEQ ID NO: 1007536 - DNA, 15 bp, Homo sapiens
tgctcttgttgccca

SEQ ID NO: 1007537 - DNA, 15 bp, Homo sapiens
gctcttgttgcccag

SEQ ID NO: 1007538 - DNA, 15 bp, Homo sapiens
ctcttgttgcccagg

SEQ ID NO: 1007539 - DNA, 15 bp, Homo sapiens
tcttgttgcccaggc

SEQ ID NO: 1007540 - DNA, 15 bp, Homo sapiens
cttgttgcccaggct

SEQ ID NO: 1007541 - DNA, 15 bp, Homo sapiens
ttgttgcccaggctg

SEQ ID NO: 1007542 - DNA, 15 bp, Homo sapiens
gttgcccaggctgga

SEQ ID NO: 1007543 - DNA, 15 bp, Homo sapiens
ttgcccaggctggag

SEQ ID NO: 1007544 - DNA, 15 bp, Homo sapiens
tgcccaggctggagt

SEQ ID NO: 1007545 - DNA, 15 bp, Homo sapiens
caggctggagtgcaa

SEQ ID NO: 1007546 - DNA, 15 bp, Homo sapiens
gctggagtgcaatgt

SEQ ID NO: 1007547 - DNA, 15 bp, Homo sapiens
ctggagtgcaatgtt

SEQ ID NO: 1007548 - DNA, 15 bp, Homo sapiens
tggagtgcaatgttg

SEQ ID NO: 1007549 - DNA, 15 bp, Homo sapiens
ggagtgcaatgttgt

SEQ ID NO: 1007550 - DNA, 15 bp, Homo sapiens
gagtgcaatgttgtg

SEQ ID NO: 1007551 - DNA, 15 bp, Homo sapiens
agtgcaatgttgtga

SEQ ID NO: 1007552 - DNA, 15 bp, Homo sapiens
gtgcaatgttgtgat

SEQ ID NO: 1007553 - DNA, 15 bp, Homo sapiens
tgcaatgttgtgatc

SEQ ID NO: 1007554 - DNA, 15 bp, Homo sapiens
gcaatgttgtgatct

SEQ ID NO: 1007555 - DNA, 15 bp, Homo sapiens
caatgttgtgatctg

SEQ ID NO: 1007556 - DNA, 15 bp, Homo sapiens
aatgttgtgatctgg

SEQ ID NO: 1007557 - DNA, 15 bp, Homo sapiens
atgttgtgatctggg

SEQ ID NO: 1007558 - DNA, 15 bp, Homo sapiens
tgttgtgatctgggc

SEQ ID NO: 1007559 - DNA, 15 bp, Homo sapiens
gttgtgatctgggct

SEQ ID NO: 1007560 - DNA, 15 bp, Homo sapiens
ttgtgatctgggctc

SEQ ID NO: 1007561 - DNA, 15 bp, Homo sapiens
tgtgatctgggctca

SEQ ID NO: 1007562 - DNA, 15 bp, Homo sapiens
gtgatctgggctcac

SEQ ID NO: 1007563 - DNA, 15 bp, Homo sapiens
tgatctgggctcact

SEQ ID NO: 1007564 - DNA, 15 bp, Homo sapiens
gatctgggctcactg

SEQ ID NO: 1007565 - DNA, 15 bp, Homo sapiens
atctgggctcactgc

SEQ ID NO: 1007566 - DNA, 15 bp, Homo sapiens
tctgggctcactgca

SEQ ID NO: 1007567 - DNA, 15 bp, Homo sapiens
ctgggctcactgcaa

SEQ ID NO: 1007568 - DNA, 15 bp, Homo sapiens
tgggctcactgcaac

SEQ ID NO: 1007569 - DNA, 15 bp, Homo sapiens
gggctcactgcaacc

SEQ ID NO: 1007570 - DNA, 15 bp, Homo sapiens
aacctctgcctccca

SEQ ID NO: 1007571 - DNA, 15 bp, Homo sapiens
acctctgcctcccag

SEQ ID NO: 1007572 - DNA, 15 bp, Homo sapiens
cctctgcctcccagg

SEQ ID NO: 1007573 - DNA, 15 bp, Homo sapiens
ctctgcctcccaggc

SEQ ID NO: 1007574 - DNA, 15 bp, Homo sapiens
tctgcctcccaggct

SEQ ID NO: 1007575 - DNA, 15 bp, Homo sapiens
ctgcctcccaggctc

SEQ ID NO: 1007576 - DNA, 15 bp, Homo sapiens
tgcctcccaggctca

SEQ ID NO: 1007577 - DNA, 15 bp, Homo sapiens
gcctcccaggctcaa

SEQ ID NO: 1007578 - DNA, 15 bp, Homo sapiens
cctcccaggctcaag

SEQ ID NO: 1007579 - DNA, 15 bp, Homo sapiens
ctcccaggctcaagc

SEQ ID NO: 1007580 - DNA, 15 bp, Homo sapiens
tcccaggctcaagcg

SEQ ID NO: 1007581 - DNA, 15 bp, Homo sapiens
cccaggctcaagcga

SEQ ID NO: 1007582 - DNA, 15 bp, Homo sapiens
ccaggctcaagcgat

SEQ ID NO: 1007583 - DNA, 15 bp, Homo sapiens
caggctcaagcgatt

SEQ ID NO: 1007584 - DNA, 15 bp, Homo sapiens
aggctcaagcgattt

SEQ ID NO: 1007585 - DNA, 15 bp, Homo sapiens
ggctcaagcgatttt

SEQ ID NO: 1007586 - DNA, 15 bp, Homo sapiens
gctcaagcgattttc

SEQ ID NO: 1007587 - DNA, 15 bp, Homo sapiens
ctcaagcgattttcc

SEQ ID NO: 1007588 - DNA, 15 bp, Homo sapiens
tcaagcgattttcct

SEQ ID NO: 1007589 - DNA, 15 bp, Homo sapiens
caagcgattttcctg

SEQ ID NO: 1007590 - DNA, 15 bp, Homo sapiens
aagcgattttcctgc

SEQ ID NO: 1007591 - DNA, 15 bp, Homo sapiens
agcgattttcctgcc

SEQ ID NO: 1007592 - DNA, 15 bp, Homo sapiens
gcgattttcctgcct

SEQ ID NO: 1007593 - DNA, 15 bp, Homo sapiens
cgattttcctgcctc

SEQ ID NO: 1007594 - DNA, 15 bp, Homo sapiens
gattttcctgcctca

SEQ ID NO: 1007595 - DNA, 15 bp, Homo sapiens
attttcctgcctcag

SEQ ID NO: 1007596 - DNA, 15 bp, Homo sapiens
ttttcctgcctcagc

SEQ ID NO: 1007597 - DNA, 15 bp, Homo sapiens
tttcctgcctcagcc

SEQ ID NO: 1007598 - DNA, 15 bp, Homo sapiens
ttcctgcctcagcct

SEQ ID NO: 1007599 - DNA, 15 bp, Homo sapiens
caagtagctgggatg

SEQ ID NO: 1007600 - DNA, 15 bp, Homo sapiens
aagtagctgggatga

SEQ ID NO: 1007601 - DNA, 15 bp, Homo sapiens
agtagctgggatgac

SEQ ID NO: 1007602 - DNA, 15 bp, Homo sapiens
gtagctgggatgaca

SEQ ID NO: 1007603 - DNA, 15 bp, Homo sapiens
tagctgggatgacag

SEQ ID NO: 1007604 - DNA, 15 bp, Homo sapiens
agctgggatgacagg

SEQ ID NO: 1007605 - DNA, 15 bp, Homo sapiens
ggatgacaggcatgc

SEQ ID NO: 1007606 - DNA, 15 bp, Homo sapiens
gatgacaggcatgcg

SEQ ID NO: 1007607 - DNA, 15 bp, Homo sapiens
atgacaggcatgcgc

SEQ ID NO: 1007608 - DNA, 15 bp, Homo sapiens
tgacaggcatgcgcc

SEQ ID NO: 1007609 - DNA, 15 bp, Homo sapiens
gacaggcatgcgcca

SEQ ID NO: 1007610 - DNA, 15 bp, Homo sapiens
acaggcatgcgccac

SEQ ID NO: 1007611 - DNA, 15 bp, Homo sapiens
caggcatgcgccacc

SEQ ID NO: 1007612 - DNA, 15 bp, Homo sapiens
aggcatgcgccacca

SEQ ID NO: 1007613 - DNA, 15 bp, Homo sapiens
ggcatgcgccaccat

SEQ ID NO: 1007614 - DNA, 15 bp, Homo sapiens
gcatgcgccaccatg

SEQ ID NO: 1007615 - DNA, 15 bp, Homo sapiens
catgcgccaccatgc

SEQ ID NO: 1007616 - DNA, 15 bp, Homo sapiens
atgcgccaccatgcc

SEQ ID NO: 1007617 - DNA, 15 bp, Homo sapiens
tgcgccaccatgccc

SEQ ID NO: 1007618 - DNA, 15 bp, Homo sapiens
gcgccaccatgccca

SEQ ID NO: 1007619 - DNA, 15 bp, Homo sapiens
cgccaccatgcccag

SEQ ID NO: 1007620 - DNA, 15 bp, Homo sapiens
caccatgcccagctg

SEQ ID NO: 1007621 - DNA, 15 bp, Homo sapiens
accatgcccagctga

SEQ ID NO: 1007622 - DNA, 15 bp, Homo sapiens
ccatgcccagctgat

SEQ ID NO: 1007623 - DNA, 15 bp, Homo sapiens
catgcccagctgatt

SEQ ID NO: 1007624 - DNA, 15 bp, Homo sapiens
atgcccagctgattt

SEQ ID NO: 1007625 - DNA, 15 bp, Homo sapiens
tgcccagctgatttt

SEQ ID NO: 1007626 - DNA, 15 bp, Homo sapiens
gcccagctgattttg

SEQ ID NO: 1007627 - DNA, 15 bp, Homo sapiens
cccagctgattttgt

SEQ ID NO: 1007628 - DNA, 15 bp, Homo sapiens
ccagctgattttgtt

SEQ ID NO: 1007629 - DNA, 15 bp, Homo sapiens
cagctgattttgttt

SEQ ID NO: 1007630 - DNA, 15 bp, Homo sapiens
agctgattttgtttt

SEQ ID NO: 1007631 - DNA, 15 bp, Homo sapiens
gctgattttgttttt

SEQ ID NO: 1007632 - DNA, 15 bp, Homo sapiens
ctgattttgtttttt

SEQ ID NO: 1007633 - DNA, 15 bp, Homo sapiens
tgattttgttttttt

SEQ ID NO: 1007634 - DNA, 15 bp, Homo sapiens
gattttgttttttta

SEQ ID NO: 1007635 - DNA, 15 bp, Homo sapiens
attttgtttttttag

SEQ ID NO: 1007636 - DNA, 15 bp, Homo sapiens
ttttgtttttttagt

SEQ ID NO: 1007637 - DNA, 15 bp, Homo sapiens
tttgtttttttagta

SEQ ID NO: 1007638 - DNA, 15 bp, Homo sapiens
ttgtttttttagtag

SEQ ID NO: 1007639 - DNA, 15 bp, Homo sapiens
tgtttttttagtaga

SEQ ID NO: 1007640 - DNA, 15 bp, Homo sapiens
gtttttttagtagag

SEQ ID NO: 1007641 - DNA, 15 bp, Homo sapiens
ttttttagtagagac

SEQ ID NO: 1007642 - DNA, 15 bp, Homo sapiens
atgttggtcaggcta

SEQ ID NO: 1007643 - DNA, 15 bp, Homo sapiens
tgttggtcaggctag

SEQ ID NO: 1007644 - DNA, 15 bp, Homo sapiens
gttggtcaggctagt

SEQ ID NO: 1007645 - DNA, 15 bp, Homo sapiens
ttggtcaggctagtc

SEQ ID NO: 1007646 - DNA, 15 bp, Homo sapiens
tggtcaggctagtct

SEQ ID NO: 1007647 - DNA, 15 bp, Homo sapiens
ggtcaggctagtctt

SEQ ID NO: 1007648 - DNA, 15 bp, Homo sapiens
gtcaggctagtcttg

SEQ ID NO: 1007649 - DNA, 15 bp, Homo sapiens
tcaggctagtcttga

SEQ ID NO: 1007650 - DNA, 15 bp, Homo sapiens
caggctagtcttgaa

SEQ ID NO: 1007651 - DNA, 15 bp, Homo sapiens
aggctagtcttgaac

SEQ ID NO: 1007652 - DNA, 15 bp, Homo sapiens
ggctagtcttgaact

SEQ ID NO: 1007653 - DNA, 15 bp, Homo sapiens
gctagtcttgaactc

SEQ ID NO: 1007654 - DNA, 15 bp, Homo sapiens
ctagtcttgaactcc

SEQ ID NO: 1007655 - DNA, 15 bp, Homo sapiens
tagtcttgaactccc

SEQ ID NO: 1007656 - DNA, 15 bp, Homo sapiens
agtcttgaactccca

SEQ ID NO: 1007657 - DNA, 15 bp, Homo sapiens
gtcttgaactcccaa

SEQ ID NO: 1007658 - DNA, 15 bp, Homo sapiens
tcttgaactcccaac

SEQ ID NO: 1007659 - DNA, 15 bp, Homo sapiens
cttgaactcccaacc

SEQ ID NO: 1007660 - DNA, 15 bp, Homo sapiens
ttgaactcccaacct

SEQ ID NO: 1007661 - DNA, 15 bp, Homo sapiens
tgaactcccaacctc

SEQ ID NO: 1007662 - DNA, 15 bp, Homo sapiens
gaactcccaacctca

SEQ ID NO: 1007663 - DNA, 15 bp, Homo sapiens
aactcccaacctcag

SEQ ID NO: 1007664 - DNA, 15 bp, Homo sapiens
actcccaacctcagg

SEQ ID NO: 1007665 - DNA, 15 bp, Homo sapiens
ctcccaacctcaggt

SEQ ID NO: 1007666 - DNA, 15 bp, Homo sapiens
tcccaacctcaggtg

SEQ ID NO: 1007667 - DNA, 15 bp, Homo sapiens
cccaacctcaggtga

SEQ ID NO: 1007668 - DNA, 15 bp, Homo sapiens
ccaacctcaggtgat

SEQ ID NO: 1007669 - DNA, 15 bp, Homo sapiens
caacctcaggtgatc

SEQ ID NO: 1007670 - DNA, 15 bp, Homo sapiens
aacctcaggtgatcc

SEQ ID NO: 1007671 - DNA, 15 bp, Homo sapiens
acctcaggtgatcct

SEQ ID NO: 1007672 - DNA, 15 bp, Homo sapiens
cctcaggtgatcctc

SEQ ID NO: 1007673 - DNA, 15 bp, Homo sapiens
ctcaggtgatcctcc

SEQ ID NO: 1007674 - DNA, 15 bp, Homo sapiens
tcaggtgatcctcct

SEQ ID NO: 1007675 - DNA, 15 bp, Homo sapiens
caggtgatcctcctg

SEQ ID NO: 1007676 - DNA, 15 bp, Homo sapiens
aggtgatcctcctgc

SEQ ID NO: 1007677 - DNA, 15 bp, Homo sapiens
ggtgatcctcctgcc

SEQ ID NO: 1007678 - DNA, 15 bp, Homo sapiens
gtgatcctcctgcct

SEQ ID NO: 1007679 - DNA, 15 bp, Homo sapiens
tgatcctcctgcctt

SEQ ID NO: 1007680 - DNA, 15 bp, Homo sapiens
gatcctcctgccttg

SEQ ID NO: 1007681 - DNA, 15 bp, Homo sapiens
atcctcctgccttgg

SEQ ID NO: 1007682 - DNA, 15 bp, Homo sapiens
tcctcctgccttggc

SEQ ID NO: 1007683 - DNA, 15 bp, Homo sapiens
cctcctgccttggcc

SEQ ID NO: 1007684 - DNA, 15 bp, Homo sapiens
ctcctgccttggcct

SEQ ID NO: 1007685 - DNA, 15 bp, Homo sapiens
tcctgccttggcctc

SEQ ID NO: 1007686 - DNA, 15 bp, Homo sapiens
ccaccgtgcccggct

SEQ ID NO: 1007687 - DNA, 15 bp, Homo sapiens
caccgtgcccggctg

SEQ ID NO: 1007688 - DNA, 15 bp, Homo sapiens
accgtgcccggctga

SEQ ID NO: 1007689 - DNA, 15 bp, Homo sapiens
ccgtgcccggctgag

SEQ ID NO: 1007690 - DNA, 15 bp, Homo sapiens
cgtgcccggctgaga

SEQ ID NO: 1007691 - DNA, 15 bp, Homo sapiens
gtgcccggctgagaa

SEQ ID NO: 1007692 - DNA, 15 bp, Homo sapiens
tgcccggctgagaac

SEQ ID NO: 1007693 - DNA, 15 bp, Homo sapiens
gcccggctgagaact

SEQ ID NO: 1007694 - DNA, 15 bp, Homo sapiens
cccggctgagaactt

SEQ ID NO: 1007695 - DNA, 15 bp, Homo sapiens
ccggctgagaactta

SEQ ID NO: 1007696 - DNA, 15 bp, Homo sapiens
cggctgagaacttaa

SEQ ID NO: 1007697 - DNA, 15 bp, Homo sapiens
ggctgagaacttaac

SEQ ID NO: 1007698 - DNA, 15 bp, Homo sapiens
gctgagaacttaact

SEQ ID NO: 1007699 - DNA, 15 bp, Homo sapiens
ctgagaacttaactt

SEQ ID NO: 1007700 - DNA, 15 bp, Homo sapiens
tgagaacttaacttt

SEQ ID NO: 1007701 - DNA, 15 bp, Homo sapiens
gagaacttaactttt

SEQ ID NO: 1007702 - DNA, 15 bp, Homo sapiens
agaacttaacttttt

SEQ ID NO: 1007703 - DNA, 15 bp, Homo sapiens
gaacttaactttttc

SEQ ID NO: 1007704 - DNA, 15 bp, Homo sapiens
aacttaactttttct

SEQ ID NO: 1007705 - DNA, 15 bp, Homo sapiens
acttaactttttctg

SEQ ID NO: 1007706 - DNA, 15 bp, Homo sapiens
cttaactttttctga

SEQ ID NO: 1007707 - DNA, 15 bp, Homo sapiens
ttaactttttctgat

SEQ ID NO: 1007708 - DNA, 15 bp, Homo sapiens
taactttttctgatg

SEQ ID NO: 1007709 - DNA, 15 bp, Homo sapiens
aactttttctgatga

SEQ ID NO: 1007710 - DNA, 15 bp, Homo sapiens
actttttctgatgaa

SEQ ID NO: 1007711 - DNA, 15 bp, Homo sapiens
ctttttctgatgaaa

SEQ ID NO: 1007712 - DNA, 15 bp, Homo sapiens
tttttctgatgaaat

SEQ ID NO: 1007713 - DNA, 15 bp, Homo sapiens
ttttctgatgaaatt

SEQ ID NO: 1007714 - DNA, 15 bp, Homo sapiens
tttctgatgaaattc

SEQ ID NO: 1007715 - DNA, 15 bp, Homo sapiens
ttctgatgaaattct

SEQ ID NO: 1007716 - DNA, 15 bp, Homo sapiens
tctgatgaaattctt

SEQ ID NO: 1007717 - DNA, 15 bp, Homo sapiens
ctgatgaaattcttt

SEQ ID NO: 1007718 - DNA, 15 bp, Homo sapiens
tgatgaaattctttc

SEQ ID NO: 1007719 - DNA, 15 bp, Homo sapiens
gatgaaattctttcc

SEQ ID NO: 1007720 - DNA, 15 bp, Homo sapiens
atgaaattctttcct

SEQ ID NO: 1007721 - DNA, 15 bp, Homo sapiens
tgaaattctttcctg

SEQ ID NO: 1007722 - DNA, 15 bp, Homo sapiens
gaaattctttcctgc

SEQ ID NO: 1007723 - DNA, 15 bp, Homo sapiens
aaattctttcctgct

SEQ ID NO: 1007724 - DNA, 15 bp, Homo sapiens
aattctttcctgctc

SEQ ID NO: 1007725 - DNA, 15 bp, Homo sapiens
attctttcctgctcc

SEQ ID NO: 1007726 - DNA, 15 bp, Homo sapiens
ttctttcctgctcca

SEQ ID NO: 1007727 - DNA, 15 bp, Homo sapiens
tctttcctgctccac

SEQ ID NO: 1007728 - DNA, 15 bp, Homo sapiens
ctttcctgctccacc

SEQ ID NO: 1007729 - DNA, 15 bp, Homo sapiens
tttcctgctccacct

SEQ ID NO: 1007730 - DNA, 15 bp, Homo sapiens
ttcctgctccaccta

SEQ ID NO: 1007731 - DNA, 15 bp, Homo sapiens
tcctgctccacctaa

SEQ ID NO: 1007732 - DNA, 15 bp, Homo sapiens
cctgctccacctaac

SEQ ID NO: 1007733 - DNA, 15 bp, Homo sapiens
ctgctccacctaact

SEQ ID NO: 1007734 - DNA, 15 bp, Homo sapiens
tgctccacctaactc

SEQ ID NO: 1007735 - DNA, 15 bp, Homo sapiens
gctccacctaactcc

SEQ ID NO: 1007736 - DNA, 15 bp, Homo sapiens
ctccacctaactccc

SEQ ID NO: 1007737 - DNA, 15 bp, Homo sapiens
tccacctaactcccg

SEQ ID NO: 1007738 - DNA, 15 bp, Homo sapiens
ccacctaactcccgt

SEQ ID NO: 1007739 - DNA, 15 bp, Homo sapiens
cacctaactcccgtg

SEQ ID NO: 1007740 - DNA, 15 bp, Homo sapiens
acctaactcccgtgt

SEQ ID NO: 1007741 - DNA, 15 bp, Homo sapiens
cctaactcccgtgtc

SEQ ID NO: 1007742 - DNA, 15 bp, Homo sapiens
ctaactcccgtgtcc

SEQ ID NO: 1007743 - DNA, 15 bp, Homo sapiens
taactcccgtgtccc

SEQ ID NO: 1007744 - DNA, 15 bp, Homo sapiens
aactcccgtgtccca

SEQ ID NO: 1007745 - DNA, 15 bp, Homo sapiens
actcccgtgtcccac

SEQ ID NO: 1007746 - DNA, 15 bp, Homo sapiens
ctcccgtgtcccacc

SEQ ID NO: 1007747 - DNA, 15 bp, Homo sapiens
tcccgtgtcccaccc

SEQ ID NO: 1007748 - DNA, 15 bp, Homo sapiens
cccgtgtcccacccc

SEQ ID NO: 1007749 - DNA, 15 bp, Homo sapiens
ccgtgtcccaccccc

SEQ ID NO: 1007750 - DNA, 15 bp, Homo sapiens
cgtgtcccaccccca

SEQ ID NO: 1007751 - DNA, 15 bp, Homo sapiens
gtgtcccacccccac

SEQ ID NO: 1007752 - DNA, 15 bp, Homo sapiens
tgtcccacccccacc

SEQ ID NO: 1007753 - DNA, 15 bp, Homo sapiens
gtcccacccccacca

SEQ ID NO: 1007754 - DNA, 15 bp, Homo sapiens
tcccacccccaccag

SEQ ID NO: 1007755 - DNA, 15 bp, Homo sapiens
cccacccccaccagc

SEQ ID NO: 1007756 - DNA, 15 bp, Homo sapiens
ccacccccaccagca

SEQ ID NO: 1007757 - DNA, 15 bp, Homo sapiens
cacccccaccagcag

SEQ ID NO: 1007758 - DNA, 15 bp, Homo sapiens
acccccaccagcaga

SEQ ID NO: 1007759 - DNA, 15 bp, Homo sapiens
cccccaccagcagag

SEQ ID NO: 1007760 - DNA, 15 bp, Homo sapiens
ccccaccagcagagt

SEQ ID NO: 1007761 - DNA, 15 bp, Homo sapiens
cccaccagcagagtg

SEQ ID NO: 1007762 - DNA, 15 bp, Homo sapiens
ccaccagcagagtgg

SEQ ID NO: 1007763 - DNA, 15 bp, Homo sapiens
caccagcagagtggt

SEQ ID NO: 1007764 - DNA, 15 bp, Homo sapiens
accagcagagtggta

SEQ ID NO: 1007765 - DNA, 15 bp, Homo sapiens
ccagcagagtggtat

SEQ ID NO: 1007766 - DNA, 15 bp, Homo sapiens
cagcagagtggtata

SEQ ID NO: 1007767 - DNA, 15 bp, Homo sapiens
agcagagtggtatat

SEQ ID NO: 1007768 - DNA, 15 bp, Homo sapiens
gcagagtggtatatc

SEQ ID NO: 1007769 - DNA, 15 bp, Homo sapiens
cagagtggtatatct

SEQ ID NO: 1007770 - DNA, 15 bp, Homo sapiens
agagtggtatatcta

SEQ ID NO: 1007771 - DNA, 15 bp, Homo sapiens
gagtggtatatctag

SEQ ID NO: 1007772 - DNA, 15 bp, Homo sapiens
agtggtatatctagc

SEQ ID NO: 1007773 - DNA, 15 bp, Homo sapiens
gtggtatatctagca

SEQ ID NO: 1007774 - DNA, 15 bp, Homo sapiens
tggtatatctagcac

SEQ ID NO: 1007775 - DNA, 15 bp, Homo sapiens
ggtatatctagcaca

SEQ ID NO: 1007776 - DNA, 15 bp, Homo sapiens
gtatatctagcacaa

SEQ ID NO: 1007777 - DNA, 15 bp, Homo sapiens
tatatctagcacaag

SEQ ID NO: 1007778 - DNA, 15 bp, Homo sapiens
atatctagcacaaga

SEQ ID NO: 1007779 - DNA, 15 bp, Homo sapiens
tatctagcacaagag

SEQ ID NO: 1007780 - DNA, 15 bp, Homo sapiens
atctagcacaagagg

SEQ ID NO: 1007781 - DNA, 15 bp, Homo sapiens
tctagcacaagaggc

SEQ ID NO: 1007782 - DNA, 15 bp, Homo sapiens
ctagcacaagaggca

SEQ ID NO: 1007783 - DNA, 15 bp, Homo sapiens
tagcacaagaggcat

SEQ ID NO: 1007784 - DNA, 15 bp, Homo sapiens
agcacaagaggcatg

SEQ ID NO: 1007785 - DNA, 15 bp, Homo sapiens
gcacaagaggcatga

SEQ ID NO: 1007786 - DNA, 15 bp, Homo sapiens
cacaagaggcatgaa

SEQ ID NO: 1007787 - DNA, 15 bp, Homo sapiens
acaagaggcatgaaa

SEQ ID NO: 1007788 - DNA, 15 bp, Homo sapiens
caagaggcatgaaat

SEQ ID NO: 1007789 - DNA, 15 bp, Homo sapiens
aagaggcatgaaatt

SEQ ID NO: 1007790 - DNA, 15 bp, Homo sapiens
agaggcatgaaatta

SEQ ID NO: 1007791 - DNA, 15 bp, Homo sapiens
gaggcatgaaattaa

SEQ ID NO: 1007792 - DNA, 15 bp, Homo sapiens
aggcatgaaattaat

SEQ ID NO: 1007793 - DNA, 15 bp, Homo sapiens
ggcatgaaattaatt

SEQ ID NO: 1007794 - DNA, 15 bp, Homo sapiens
gcatgaaattaattt

SEQ ID NO: 1007795 - DNA, 15 bp, Homo sapiens
catgaaattaattta

SEQ ID NO: 1007796 - DNA, 15 bp, Homo sapiens
atgaaattaatttag

SEQ ID NO: 1007797 - DNA, 15 bp, Homo sapiens
tgaaattaatttagt

SEQ ID NO: 1007798 - DNA, 15 bp, Homo sapiens
gaaattaatttagta

SEQ ID NO: 1007799 - DNA, 15 bp, Homo sapiens
aaattaatttagtaa

SEQ ID NO: 1007800 - DNA, 15 bp, Homo sapiens
aattaatttagtaaa

SEQ ID NO: 1007801 - DNA, 15 bp, Homo sapiens
attaatttagtaaat

SEQ ID NO: 1007802 - DNA, 15 bp, Homo sapiens
ttaatttagtaaata

SEQ ID NO: 1007803 - DNA, 15 bp, Homo sapiens
taatttagtaaatag

SEQ ID NO: 1007804 - DNA, 15 bp, Homo sapiens
aatttagtaaatagc

SEQ ID NO: 1007805 - DNA, 15 bp, Homo sapiens
atttagtaaatagca

SEQ ID NO: 1007806 - DNA, 15 bp, Homo sapiens
tttagtaaatagcag

SEQ ID NO: 1007807 - DNA, 15 bp, Homo sapiens
ttagtaaatagcagg

SEQ ID NO: 1007808 - DNA, 15 bp, Homo sapiens
tagtaaatagcagga

SEQ ID NO: 1007809 - DNA, 15 bp, Homo sapiens
agtaaatagcaggac

SEQ ID NO: 1007810 - DNA, 15 bp, Homo sapiens
gtaaatagcaggact

SEQ ID NO: 1007811 - DNA, 15 bp, Homo sapiens
taaatagcaggacta

SEQ ID NO: 1007812 - DNA, 15 bp, Homo sapiens
aaatagcaggactac

SEQ ID NO: 1007813 - DNA, 15 bp, Homo sapiens
aatagcaggactact

SEQ ID NO: 1007814 - DNA, 15 bp, Homo sapiens
atagcaggactacta

SEQ ID NO: 1007815 - DNA, 15 bp, Homo sapiens
tagcaggactactag

SEQ ID NO: 1007816 - DNA, 15 bp, Homo sapiens
agcaggactactaga

SEQ ID NO: 1007817 - DNA, 15 bp, Homo sapiens
gcaggactactagaa

SEQ ID NO: 1007818 - DNA, 15 bp, Homo sapiens
caggactactagaaa

SEQ ID NO: 1007819 - DNA, 15 bp, Homo sapiens
aggactactagaaac

SEQ ID NO: 1007820 - DNA, 15 bp, Homo sapiens
ggactactagaaact

SEQ ID NO: 1007821 - DNA, 15 bp, Homo sapiens
gactactagaaactt

SEQ ID NO: 1007822 - DNA, 15 bp, Homo sapiens
actactagaaacttt

SEQ ID NO: 1007823 - DNA, 15 bp, Homo sapiens
ctactagaaactttt

SEQ ID NO: 1007824 - DNA, 15 bp, Homo sapiens
tactagaaactttta

SEQ ID NO: 1007825 - DNA, 15 bp, Homo sapiens
actagaaacttttaa

SEQ ID NO: 1007826 - DNA, 15 bp, Homo sapiens
ctagaaacttttaag

SEQ ID NO: 1007827 - DNA, 15 bp, Homo sapiens
tagaaacttttaagg

SEQ ID NO: 1007828 - DNA, 15 bp, Homo sapiens
agaaacttttaagga

SEQ ID NO: 1007829 - DNA, 15 bp, Homo sapiens
gaaacttttaaggat

SEQ ID NO: 1007830 - DNA, 15 bp, Homo sapiens
aaacttttaaggatt

SEQ ID NO: 1007831 - DNA, 15 bp, Homo sapiens
aacttttaaggatta

SEQ ID NO: 1007832 - DNA, 15 bp, Homo sapiens
acttttaaggattat

SEQ ID NO: 1007833 - DNA, 15 bp, Homo sapiens
cttttaaggattatt

SEQ ID NO: 1007834 - DNA, 15 bp, Homo sapiens
ttttaaggattattt

SEQ ID NO: 1007835 - DNA, 15 bp, Homo sapiens
tttaaggattattta

SEQ ID NO: 1007836 - DNA, 15 bp, Homo sapiens
ttaaggattatttaa

SEQ ID NO: 1007837 - DNA, 15 bp, Homo sapiens
taaggattatttaac

SEQ ID NO: 1007838 - DNA, 15 bp, Homo sapiens
aaggattatttaact

SEQ ID NO: 1007839 - DNA, 15 bp, Homo sapiens
aggattatttaactt

SEQ ID NO: 1007840 - DNA, 15 bp, Homo sapiens
ggattatttaactta

SEQ ID NO: 1007841 - DNA, 15 bp, Homo sapiens
gattatttaacttat

SEQ ID NO: 1007842 - DNA, 15 bp, Homo sapiens
attatttaacttatt

SEQ ID NO: 1007843 - DNA, 15 bp, Homo sapiens
ttatttaacttattt

SEQ ID NO: 1007844 - DNA, 15 bp, Homo sapiens
tatttaacttatttt

SEQ ID NO: 1007845 - DNA, 15 bp, Homo sapiens
atttaacttattttt

SEQ ID NO: 1007846 - DNA, 15 bp, Homo sapiens
tttaacttattttta

SEQ ID NO: 1007847 - DNA, 15 bp, Homo sapiens
ttaacttatttttaa

SEQ ID NO: 1007848 - DNA, 15 bp, Homo sapiens
taacttatttttaat

SEQ ID NO: 1007849 - DNA, 15 bp, Homo sapiens
aacttatttttaatc

SEQ ID NO: 1007850 - DNA, 15 bp, Homo sapiens
acttatttttaatca

SEQ ID NO: 1007851 - DNA, 15 bp, Homo sapiens
cttatttttaatcaa

SEQ ID NO: 1007852 - DNA, 15 bp, Homo sapiens
ttatttttaatcaaa

SEQ ID NO: 1007853 - DNA, 15 bp, Homo sapiens
tatttttaatcaaaa

SEQ ID NO: 1007854 - DNA, 15 bp, Homo sapiens
atttttaatcaaaat

SEQ ID NO: 1007855 - DNA, 15 bp, Homo sapiens
tttttaatcaaaatt

SEQ ID NO: 1007856 - DNA, 15 bp, Homo sapiens
ttttaatcaaaattt

SEQ ID NO: 1007857 - DNA, 15 bp, Homo sapiens
tttaatcaaaatttt

SEQ ID NO: 1007858 - DNA, 15 bp, Homo sapiens
ttaatcaaaatttta

SEQ ID NO: 1007859 - DNA, 15 bp, Homo sapiens
taatcaaaattttat

SEQ ID NO: 1007860 - DNA, 15 bp, Homo sapiens
aatcaaaattttata

SEQ ID NO: 1007861 - DNA, 15 bp, Homo sapiens
atcaaaattttatac

SEQ ID NO: 1007862 - DNA, 15 bp, Homo sapiens
tcaaaattttatact

SEQ ID NO: 1007863 - DNA, 15 bp, Homo sapiens
caaaattttatactc

SEQ ID NO: 1007864 - DNA, 15 bp, Homo sapiens
aaaattttatactca

SEQ ID NO: 1007865 - DNA, 15 bp, Homo sapiens
aaattttatactcag

SEQ ID NO: 1007866 - DNA, 15 bp, Homo sapiens
aattttatactcaga

SEQ ID NO: 1007867 - DNA, 15 bp, Homo sapiens
attttatactcagat

SEQ ID NO: 1007868 - DNA, 15 bp, Homo sapiens
ttttatactcagata

SEQ ID NO: 1007869 - DNA, 15 bp, Homo sapiens
tttatactcagataa

SEQ ID NO: 1007870 - DNA, 15 bp, Homo sapiens
ttatactcagataat

SEQ ID NO: 1007871 - DNA, 15 bp, Homo sapiens
tatactcagataatg

SEQ ID NO: 1007872 - DNA, 15 bp, Homo sapiens
atactcagataatga

SEQ ID NO: 1007873 - DNA, 15 bp, Homo sapiens
tactcagataatgac

SEQ ID NO: 1007874 - DNA, 15 bp, Homo sapiens
actcagataatgacc

SEQ ID NO: 1007875 - DNA, 15 bp, Homo sapiens
ctcagataatgacct

SEQ ID NO: 1007876 - DNA, 15 bp, Homo sapiens
tcagataatgacctt

SEQ ID NO: 1007877 - DNA, 15 bp, Homo sapiens
cagataatgaccttt

SEQ ID NO: 1007878 - DNA, 15 bp, Homo sapiens
agataatgacctttt

SEQ ID NO: 1007879 - DNA, 15 bp, Homo sapiens
gataatgaccttttg

SEQ ID NO: 1007880 - DNA, 15 bp, Homo sapiens
ataatgaccttttgg

SEQ ID NO: 1007881 - DNA, 15 bp, Homo sapiens
taatgaccttttggg

SEQ ID NO: 1007882 - DNA, 15 bp, Homo sapiens
aatgaccttttggga

SEQ ID NO: 1007883 - DNA, 15 bp, Homo sapiens
atgaccttttgggaa

SEQ ID NO: 1007884 - DNA, 15 bp, Homo sapiens
tgaccttttgggaag

SEQ ID NO: 1007885 - DNA, 15 bp, Homo sapiens
gaccttttgggaagt

SEQ ID NO: 1007886 - DNA, 15 bp, Homo sapiens
accttttgggaagtt

SEQ ID NO: 1007887 - DNA, 15 bp, Homo sapiens
ccttttgggaagtta

SEQ ID NO: 1007888 - DNA, 15 bp, Homo sapiens
cttttgggaagttat

SEQ ID NO: 1007889 - DNA, 15 bp, Homo sapiens
ttttgggaagttatg

SEQ ID NO: 1007890 - DNA, 15 bp, Homo sapiens
tttgggaagttatgt

SEQ ID NO: 1007891 - DNA, 15 bp, Homo sapiens
ttgggaagttatgtc

SEQ ID NO: 1007892 - DNA, 15 bp, Homo sapiens
tgggaagttatgtct

SEQ ID NO: 1007893 - DNA, 15 bp, Homo sapiens
gggaagttatgtctc

SEQ ID NO: 1007894 - DNA, 15 bp, Homo sapiens
ggaagttatgtctct

SEQ ID NO: 1007895 - DNA, 15 bp, Homo sapiens
gaagttatgtctctt

SEQ ID NO: 1007896 - DNA, 15 bp, Homo sapiens
aagttatgtctctta

SEQ ID NO: 1007897 - DNA, 15 bp, Homo sapiens
agttatgtctcttaa

SEQ ID NO: 1007898 - DNA, 15 bp, Homo sapiens
gttatgtctcttaat

SEQ ID NO: 1007899 - DNA, 15 bp, Homo sapiens
ttatgtctcttaatg

SEQ ID NO: 1007900 - DNA, 15 bp, Homo sapiens
tatgtctcttaatga

SEQ ID NO: 1007901 - DNA, 15 bp, Homo sapiens
atgtctcttaatgat

SEQ ID NO: 1007902 - DNA, 15 bp, Homo sapiens
tgtctcttaatgatc

SEQ ID NO: 1007903 - DNA, 15 bp, Homo sapiens
gtctcttaatgatct

SEQ ID NO: 1007904 - DNA, 15 bp, Homo sapiens
tctcttaatgatctc

SEQ ID NO: 1007905 - DNA, 15 bp, Homo sapiens
ctcttaatgatctca

SEQ ID NO: 1007906 - DNA, 15 bp, Homo sapiens
tcttaatgatctcaa

SEQ ID NO: 1007907 - DNA, 15 bp, Homo sapiens
cttaatgatctcaag

SEQ ID NO: 1007908 - DNA, 15 bp, Homo sapiens
ttaatgatctcaagt

SEQ ID NO: 1007909 - DNA, 15 bp, Homo sapiens
taatgatctcaagtg

SEQ ID NO: 1007910 - DNA, 15 bp, Homo sapiens
aatgatctcaagtgg

SEQ ID NO: 1007911 - DNA, 15 bp, Homo sapiens
atgatctcaagtggt

SEQ ID NO: 1007912 - DNA, 15 bp, Homo sapiens
tgatctcaagtggtg

SEQ ID NO: 1007913 - DNA, 15 bp, Homo sapiens
gatctcaagtggtga

SEQ ID NO: 1007914 - DNA, 15 bp, Homo sapiens
atctcaagtggtgac

SEQ ID NO: 1007915 - DNA, 15 bp, Homo sapiens
tctcaagtggtgaca

SEQ ID NO: 1007916 - DNA, 15 bp, Homo sapiens
ctcaagtggtgacac

SEQ ID NO: 1007917 - DNA, 15 bp, Homo sapiens
tcaagtggtgacact

SEQ ID NO: 1007918 - DNA, 15 bp, Homo sapiens
caagtggtgacactt

SEQ ID NO: 1007919 - DNA, 15 bp, Homo sapiens
aagtggtgacacttt

SEQ ID NO: 1007920 - DNA, 15 bp, Homo sapiens
agtggtgacactttt

SEQ ID NO: 1007921 - DNA, 15 bp, Homo sapiens
gtggtgacacttttc

SEQ ID NO: 1007922 - DNA, 15 bp, Homo sapiens
tggtgacacttttct

SEQ ID NO: 1007923 - DNA, 15 bp, Homo sapiens
ggtgacacttttctg

SEQ ID NO: 1007924 - DNA, 15 bp, Homo sapiens
gtgacacttttctgt

SEQ ID NO: 1007925 - DNA, 15 bp, Homo sapiens
tgacacttttctgtt

SEQ ID NO: 1007926 - DNA, 15 bp, Homo sapiens
gacacttttctgttg

SEQ ID NO: 1007927 - DNA, 15 bp, Homo sapiens
acacttttctgttga

SEQ ID NO: 1007928 - DNA, 15 bp, Homo sapiens
cacttttctgttgac

SEQ ID NO: 1007929 - DNA, 15 bp, Homo sapiens
acttttctgttgaca

SEQ ID NO: 1007930 - DNA, 15 bp, Homo sapiens
cttttctgttgacac

SEQ ID NO: 1007931 - DNA, 15 bp, Homo sapiens
ttttctgttgacacg

SEQ ID NO: 1007932 - DNA, 15 bp, Homo sapiens
tttctgttgacacgg

SEQ ID NO: 1007933 - DNA, 15 bp, Homo sapiens
ttctgttgacacggt

SEQ ID NO: 1007934 - DNA, 15 bp, Homo sapiens
tctgttgacacggtt

SEQ ID NO: 1007935 - DNA, 15 bp, Homo sapiens
ctgttgacacggttt

SEQ ID NO: 1007936 - DNA, 15 bp, Homo sapiens
tgttgacacggtttc

SEQ ID NO: 1007937 - DNA, 15 bp, Homo sapiens
gttgacacggtttct

SEQ ID NO: 1007938 - DNA, 15 bp, Homo sapiens
ttgacacggtttctc

SEQ ID NO: 1007939 - DNA, 15 bp, Homo sapiens
tgacacggtttctct

SEQ ID NO: 1007940 - DNA, 15 bp, Homo sapiens
gacacggtttctctt

SEQ ID NO: 1007941 - DNA, 15 bp, Homo sapiens
acacggtttctcttg

SEQ ID NO: 1007942 - DNA, 15 bp, Homo sapiens
cacggtttctcttgg

SEQ ID NO: 1007943 - DNA, 15 bp, Homo sapiens
acggtttctcttggg

SEQ ID NO: 1007944 - DNA, 15 bp, Homo sapiens
cggtttctcttgggt

SEQ ID NO: 1007945 - DNA, 15 bp, Homo sapiens
ggtttctcttgggta

SEQ ID NO: 1007946 - DNA, 15 bp, Homo sapiens
gtttctcttgggtag

SEQ ID NO: 1007947 - DNA, 15 bp, Homo sapiens
tttctcttgggtagt

SEQ ID NO: 1007948 - DNA, 15 bp, Homo sapiens
ttctcttgggtagtt

SEQ ID NO: 1007949 - DNA, 15 bp, Homo sapiens
tctcttgggtagttc

SEQ ID NO: 1007950 - DNA, 15 bp, Homo sapiens
ctcttgggtagttct

SEQ ID NO: 1007951 - DNA, 15 bp, Homo sapiens
tcttgggtagttctc

SEQ ID NO: 1007952 - DNA, 15 bp, Homo sapiens
cttgggtagttctca

SEQ ID NO: 1007953 - DNA, 15 bp, Homo sapiens
ttgggtagttctcat

SEQ ID NO: 1007954 - DNA, 15 bp, Homo sapiens
tgggtagttctcata

SEQ ID NO: 1007955 - DNA, 15 bp, Homo sapiens
gggtagttctcatag

SEQ ID NO: 1007956 - DNA, 15 bp, Homo sapiens
ggtagttctcatagt

SEQ ID NO: 1007957 - DNA, 15 bp, Homo sapiens
gtagttctcatagta

SEQ ID NO: 1007958 - DNA, 15 bp, Homo sapiens
tagttctcatagtag

SEQ ID NO: 1007959 - DNA, 15 bp, Homo sapiens
agttctcatagtagt

SEQ ID NO: 1007960 - DNA, 15 bp, Homo sapiens
gttctcatagtagtt

SEQ ID NO: 1007961 - DNA, 15 bp, Homo sapiens
ttctcatagtagttt

SEQ ID NO: 1007962 - DNA, 15 bp, Homo sapiens
tctcatagtagtttg

SEQ ID NO: 1007963 - DNA, 15 bp, Homo sapiens
ctcatagtagtttgg

SEQ ID NO: 1007964 - DNA, 15 bp, Homo sapiens
tcatagtagtttggg

SEQ ID NO: 1007965 - DNA, 15 bp, Homo sapiens
catagtagtttgggc

SEQ ID NO: 1007966 - DNA, 15 bp, Homo sapiens
atagtagtttgggca

SEQ ID NO: 1007967 - DNA, 15 bp, Homo sapiens
tagtagtttgggcat

SEQ ID NO: 1007968 - DNA, 15 bp, Homo sapiens
agtagtttgggcatg

SEQ ID NO: 1007969 - DNA, 15 bp, Homo sapiens
gtagtttgggcatga

SEQ ID NO: 1007970 - DNA, 15 bp, Homo sapiens
tagtttgggcatgag

SEQ ID NO: 1007971 - DNA, 15 bp, Homo sapiens
agtttgggcatgaga

SEQ ID NO: 1007972 - DNA, 15 bp, Homo sapiens
gtttgggcatgagaa

SEQ ID NO: 1007973 - DNA, 15 bp, Homo sapiens
tttgggcatgagaaa

SEQ ID NO: 1007974 - DNA, 15 bp, Homo sapiens
ttgggcatgagaaaa

SEQ ID NO: 1007975 - DNA, 15 bp, Homo sapiens
tgggcatgagaaaac

SEQ ID NO: 1007976 - DNA, 15 bp, Homo sapiens
gggcatgagaaaaca

SEQ ID NO: 1007977 - DNA, 15 bp, Homo sapiens
ggcatgagaaaacaa

SEQ ID NO: 1007978 - DNA, 15 bp, Homo sapiens
gcatgagaaaacaac

SEQ ID NO: 1007979 - DNA, 15 bp, Homo sapiens
catgagaaaacaact

SEQ ID NO: 1007980 - DNA, 15 bp, Homo sapiens
atgagaaaacaactt

SEQ ID NO: 1007981 - DNA, 15 bp, Homo sapiens
tgagaaaacaacttt

SEQ ID NO: 1007982 - DNA, 15 bp, Homo sapiens
gagaaaacaactttt

SEQ ID NO: 1007983 - DNA, 15 bp, Homo sapiens
agaaaacaactttta

SEQ ID NO: 1007984 - DNA, 15 bp, Homo sapiens
gaaaacaacttttac

SEQ ID NO: 1007985 - DNA, 15 bp, Homo sapiens
aaaacaacttttacc

SEQ ID NO: 1007986 - DNA, 15 bp, Homo sapiens
aaacaacttttacca

SEQ ID NO: 1007987 - DNA, 15 bp, Homo sapiens
aacaacttttaccac

SEQ ID NO: 1007988 - DNA, 15 bp, Homo sapiens
acaacttttaccact

SEQ ID NO: 1007989 - DNA, 15 bp, Homo sapiens
caacttttaccactt

SEQ ID NO: 1007990 - DNA, 15 bp, Homo sapiens
aacttttaccacttt

SEQ ID NO: 1007991 - DNA, 15 bp, Homo sapiens
acttttaccacttta

SEQ ID NO: 1007992 - DNA, 15 bp, Homo sapiens
cttttaccactttag

SEQ ID NO: 1007993 - DNA, 15 bp, Homo sapiens
ttttaccactttaga

SEQ ID NO: 1007994 - DNA, 15 bp, Homo sapiens
tttaccactttagac

SEQ ID NO: 1007995 - DNA, 15 bp, Homo sapiens
ttaccactttagact

SEQ ID NO: 1007996 - DNA, 15 bp, Homo sapiens
taccactttagactt

SEQ ID NO: 1007997 - DNA, 15 bp, Homo sapiens
accactttagacttg

SEQ ID NO: 1007998 - DNA, 15 bp, Homo sapiens
ccactttagacttgt

SEQ ID NO: 1007999 - DNA, 15 bp, Homo sapiens
cactttagacttgtg

SEQ ID NO: 1008000 - DNA, 15 bp, Homo sapiens
actttagacttgtga

SEQ ID NO: 1008001 - DNA, 15 bp, Homo sapiens
ctttagacttgtgag

SEQ ID NO: 1008002 - DNA, 15 bp, Homo sapiens
tttagacttgtgagg

SEQ ID NO: 1008003 - DNA, 15 bp, Homo sapiens
ttagacttgtgaggg

SEQ ID NO: 1008004 - DNA, 15 bp, Homo sapiens
tagacttgtgagggc

SEQ ID NO: 1008005 - DNA, 15 bp, Homo sapiens
agacttgtgagggca

SEQ ID NO: 1008006 - DNA, 15 bp, Homo sapiens
gacttgtgagggcag

SEQ ID NO: 1008007 - DNA, 15 bp, Homo sapiens
acttgtgagggcagc

SEQ ID NO: 1008008 - DNA, 15 bp, Homo sapiens
cttgtgagggcagcc

SEQ ID NO: 1008009 - DNA, 15 bp, Homo sapiens
ttgtgagggcagcct

SEQ ID NO: 1008010 - DNA, 15 bp, Homo sapiens
tgtgagggcagccta

SEQ ID NO: 1008011 - DNA, 15 bp, Homo sapiens
gtgagggcagcctac

SEQ ID NO: 1008012 - DNA, 15 bp, Homo sapiens
tgagggcagcctact

SEQ ID NO: 1008013 - DNA, 15 bp, Homo sapiens
gagggcagcctacta

SEQ ID NO: 1008014 - DNA, 15 bp, Homo sapiens
agggcagcctactat

SEQ ID NO: 1008015 - DNA, 15 bp, Homo sapiens
gggcagcctactatg

SEQ ID NO: 1008016 - DNA, 15 bp, Homo sapiens
ggcagcctactatgt

SEQ ID NO: 1008017 - DNA, 15 bp, Homo sapiens
gcagcctactatgta

SEQ ID NO: 1008018 - DNA, 15 bp, Homo sapiens
cagcctactatgtag

SEQ ID NO: 1008019 - DNA, 15 bp, Homo sapiens
agcctactatgtagt

SEQ ID NO: 1008020 - DNA, 15 bp, Homo sapiens
gcctactatgtagta

SEQ ID NO: 1008021 - DNA, 15 bp, Homo sapiens
cctactatgtagtaa

SEQ ID NO: 1008022 - DNA, 15 bp, Homo sapiens
ctactatgtagtaaa

SEQ ID NO: 1008023 - DNA, 15 bp, Homo sapiens
tactatgtagtaaaa

SEQ ID NO: 1008024 - DNA, 15 bp, Homo sapiens
actatgtagtaaaag

SEQ ID NO: 1008025 - DNA, 15 bp, Homo sapiens
ctatgtagtaaaaga

SEQ ID NO: 1008026 - DNA, 15 bp, Homo sapiens
tatgtagtaaaagaa

SEQ ID NO: 1008027 - DNA, 15 bp, Homo sapiens
atgtagtaaaagaaa

SEQ ID NO: 1008028 - DNA, 15 bp, Homo sapiens
tgtagtaaaagaaaa

SEQ ID NO: 1008029 - DNA, 15 bp, Homo sapiens
gtagtaaaagaaaaa

SEQ ID NO: 1008030 - DNA, 15 bp, Homo sapiens
tagtaaaagaaaaag

SEQ ID NO: 1008031 - DNA, 15 bp, Homo sapiens
agtaaaagaaaaagc

SEQ ID NO: 1008032 - DNA, 15 bp, Homo sapiens
gtaaaagaaaaagct

SEQ ID NO: 1008033 - DNA, 15 bp, Homo sapiens
taaaagaaaaagctt

SEQ ID NO: 1008034 - DNA, 15 bp, Homo sapiens
aaaagaaaaagcttt

SEQ ID NO: 1008035 - DNA, 15 bp, Homo sapiens
aaagaaaaagctttt

SEQ ID NO: 1008036 - DNA, 15 bp, Homo sapiens
aagaaaaagcttttg

SEQ ID NO: 1008037 - DNA, 15 bp, Homo sapiens
agaaaaagcttttga

SEQ ID NO: 1008038 - DNA, 15 bp, Homo sapiens
gaaaaagcttttgat

SEQ ID NO: 1008039 - DNA, 15 bp, Homo sapiens
aaaaagcttttgatt

SEQ ID NO: 1008040 - DNA, 15 bp, Homo sapiens
aaaagcttttgattg

SEQ ID NO: 1008041 - DNA, 15 bp, Homo sapiens
aaagcttttgattgt

SEQ ID NO: 1008042 - DNA, 15 bp, Homo sapiens
aagcttttgattgtg

SEQ ID NO: 1008043 - DNA, 15 bp, Homo sapiens
agcttttgattgtgc

SEQ ID NO: 1008044 - DNA, 15 bp, Homo sapiens
gcttttgattgtgca

SEQ ID NO: 1008045 - DNA, 15 bp, Homo sapiens
cttttgattgtgcaa

SEQ ID NO: 1008046 - DNA, 15 bp, Homo sapiens
ttttgattgtgcaac

SEQ ID NO: 1008047 - DNA, 15 bp, Homo sapiens
tttgattgtgcaact

SEQ ID NO: 1008048 - DNA, 15 bp, Homo sapiens
ttgattgtgcaactt

SEQ ID NO: 1008049 - DNA, 15 bp, Homo sapiens
tgattgtgcaacttg

SEQ ID NO: 1008050 - DNA, 15 bp, Homo sapiens
gattgtgcaacttgc

SEQ ID NO: 1008051 - DNA, 15 bp, Homo sapiens
attgtgcaacttgca

SEQ ID NO: 1008052 - DNA, 15 bp, Homo sapiens
ttgtgcaacttgcag

SEQ ID NO: 1008053 - DNA, 15 bp, Homo sapiens
tgtgcaacttgcagt

SEQ ID NO: 1008054 - DNA, 15 bp, Homo sapiens
gtgcaacttgcagtg

SEQ ID NO: 1008055 - DNA, 15 bp, Homo sapiens
tgcaacttgcagtgt

SEQ ID NO: 1008056 - DNA, 15 bp, Homo sapiens
gcaacttgcagtgtg

SEQ ID NO: 1008057 - DNA, 15 bp, Homo sapiens
caacttgcagtgtgg

SEQ ID NO: 1008058 - DNA, 15 bp, Homo sapiens
aacttgcagtgtggt

SEQ ID NO: 1008059 - DNA, 15 bp, Homo sapiens
acttgcagtgtggtc

SEQ ID NO: 1008060 - DNA, 15 bp, Homo sapiens
cttgcagtgtggtct

SEQ ID NO: 1008061 - DNA, 15 bp, Homo sapiens
ttgcagtgtggtctt

SEQ ID NO: 1008062 - DNA, 15 bp, Homo sapiens
tgcagtgtggtcttg

SEQ ID NO: 1008063 - DNA, 15 bp, Homo sapiens
gcagtgtggtcttgg

SEQ ID NO: 1008064 - DNA, 15 bp, Homo sapiens
cagtgtggtcttggg

SEQ ID NO: 1008065 - DNA, 15 bp, Homo sapiens
agtgtggtcttgggg

SEQ ID NO: 1008066 - DNA, 15 bp, Homo sapiens
gtgtggtcttgggga

SEQ ID NO: 1008067 - DNA, 15 bp, Homo sapiens
tgtggtcttggggaa

SEQ ID NO: 1008068 - DNA, 15 bp, Homo sapiens
gtggtcttggggaag

SEQ ID NO: 1008069 - DNA, 15 bp, Homo sapiens
tggtcttggggaagt

SEQ ID NO: 1008070 - DNA, 15 bp, Homo sapiens
ggtcttggggaagtc

SEQ ID NO: 1008071 - DNA, 15 bp, Homo sapiens
gtcttggggaagtct

SEQ ID NO: 1008072 - DNA, 15 bp, Homo sapiens
tcttggggaagtctc

SEQ ID NO: 1008073 - DNA, 15 bp, Homo sapiens
cttggggaagtctct

SEQ ID NO: 1008074 - DNA, 15 bp, Homo sapiens
ttggggaagtctctt

SEQ ID NO: 1008075 - DNA, 15 bp, Homo sapiens
tggggaagtctctta

SEQ ID NO: 1008076 - DNA, 15 bp, Homo sapiens
ggggaagtctcttaa

SEQ ID NO: 1008077 - DNA, 15 bp, Homo sapiens
gggaagtctcttaac

SEQ ID NO: 1008078 - DNA, 15 bp, Homo sapiens
ggaagtctcttaacc

SEQ ID NO: 1008079 - DNA, 15 bp, Homo sapiens
gaagtctcttaacct

SEQ ID NO: 1008080 - DNA, 15 bp, Homo sapiens
aagtctcttaacctc

SEQ ID NO: 1008081 - DNA, 15 bp, Homo sapiens
agtctcttaacctct

SEQ ID NO: 1008082 - DNA, 15 bp, Homo sapiens
gtctcttaacctctc

SEQ ID NO: 1008083 - DNA, 15 bp, Homo sapiens
tctcttaacctctct

SEQ ID NO: 1008084 - DNA, 15 bp, Homo sapiens
ctcttaacctctctg

SEQ ID NO: 1008085 - DNA, 15 bp, Homo sapiens
tcttaacctctctga

SEQ ID NO: 1008086 - DNA, 15 bp, Homo sapiens
cttaacctctctgaa

SEQ ID NO: 1008087 - DNA, 15 bp, Homo sapiens
ttaacctctctgaac

SEQ ID NO: 1008088 - DNA, 15 bp, Homo sapiens
taacctctctgaaca

SEQ ID NO: 1008089 - DNA, 15 bp, Homo sapiens
aacctctctgaacat

SEQ ID NO: 1008090 - DNA, 15 bp, Homo sapiens
acctctctgaacatc

SEQ ID NO: 1008091 - DNA, 15 bp, Homo sapiens
cctctctgaacatca

SEQ ID NO: 1008092 - DNA, 15 bp, Homo sapiens
ctctctgaacatcag

SEQ ID NO: 1008093 - DNA, 15 bp, Homo sapiens
tctctgaacatcagt

SEQ ID NO: 1008094 - DNA, 15 bp, Homo sapiens
ctctgaacatcagtt

SEQ ID NO: 1008095 - DNA, 15 bp, Homo sapiens
tctgaacatcagttt

SEQ ID NO: 1008096 - DNA, 15 bp, Homo sapiens
ctgaacatcagtttt

SEQ ID NO: 1008097 - DNA, 15 bp, Homo sapiens
tgaacatcagttttc

SEQ ID NO: 1008098 - DNA, 15 bp, Homo sapiens
gaacatcagttttct

SEQ ID NO: 1008099 - DNA, 15 bp, Homo sapiens
aacatcagttttcta

SEQ ID NO: 1008100 - DNA, 15 bp, Homo sapiens
acatcagttttctat

SEQ ID NO: 1008101 - DNA, 15 bp, Homo sapiens
catcagttttctata

SEQ ID NO: 1008102 - DNA, 15 bp, Homo sapiens
atcagttttctatat

SEQ ID NO: 1008103 - DNA, 15 bp, Homo sapiens
tcagttttctatatt

SEQ ID NO: 1008104 - DNA, 15 bp, Homo sapiens
cagttttctatattt

SEQ ID NO: 1008105 - DNA, 15 bp, Homo sapiens
agttttctatatttt

SEQ ID NO: 1008106 - DNA, 15 bp, Homo sapiens
gttttctatattttc

SEQ ID NO: 1008107 - DNA, 15 bp, Homo sapiens
ttttctatattttca

SEQ ID NO: 1008108 - DNA, 15 bp, Homo sapiens
tttctatattttcat

SEQ ID NO: 1008109 - DNA, 15 bp, Homo sapiens
ttctatattttcatg

SEQ ID NO: 1008110 - DNA, 15 bp, Homo sapiens
tctatattttcatgt

SEQ ID NO: 1008111 - DNA, 15 bp, Homo sapiens
ctatattttcatgtg

SEQ ID NO: 1008112 - DNA, 15 bp, Homo sapiens
tatattttcatgtgt

SEQ ID NO: 1008113 - DNA, 15 bp, Homo sapiens
atattttcatgtgta

SEQ ID NO: 1008114 - DNA, 15 bp, Homo sapiens
tattttcatgtgtaa

SEQ ID NO: 1008115 - DNA, 15 bp, Homo sapiens
attttcatgtgtaaa

SEQ ID NO: 1008116 - DNA, 15 bp, Homo sapiens
ttttcatgtgtaaaa

SEQ ID NO: 1008117 - DNA, 15 bp, Homo sapiens
tttcatgtgtaaaat

SEQ ID NO: 1008118 - DNA, 15 bp, Homo sapiens
ttcatgtgtaaaatg

SEQ ID NO: 1008119 - DNA, 15 bp, Homo sapiens
tcatgtgtaaaatgg

SEQ ID NO: 1008120 - DNA, 15 bp, Homo sapiens
catgtgtaaaatggg

SEQ ID NO: 1008121 - DNA, 15 bp, Homo sapiens
atgtgtaaaatgggc

SEQ ID NO: 1008122 - DNA, 15 bp, Homo sapiens
tgtgtaaaatgggca

SEQ ID NO: 1008123 - DNA, 15 bp, Homo sapiens
gtgtaaaatgggcat

SEQ ID NO: 1008124 - DNA, 15 bp, Homo sapiens
tgtaaaatgggcatg

SEQ ID NO: 1008125 - DNA, 15 bp, Homo sapiens
gtaaaatgggcatga

SEQ ID NO: 1008126 - DNA, 15 bp, Homo sapiens
taaaatgggcatgat

SEQ ID NO: 1008127 - DNA, 15 bp, Homo sapiens
aaaatgggcatgata

SEQ ID NO: 1008128 - DNA, 15 bp, Homo sapiens
aaatgggcatgatac

SEQ ID NO: 1008129 - DNA, 15 bp, Homo sapiens
aatgggcatgatact

SEQ ID NO: 1008130 - DNA, 15 bp, Homo sapiens
atgggcatgatactt

SEQ ID NO: 1008131 - DNA, 15 bp, Homo sapiens
tgggcatgatactta

SEQ ID NO: 1008132 - DNA, 15 bp, Homo sapiens
gggcatgatacttac

SEQ ID NO: 1008133 - DNA, 15 bp, Homo sapiens
ggcatgatacttacc

SEQ ID NO: 1008134 - DNA, 15 bp, Homo sapiens
gcatgatacttaccc

SEQ ID NO: 1008135 - DNA, 15 bp, Homo sapiens
catgatacttaccct

SEQ ID NO: 1008136 - DNA, 15 bp, Homo sapiens
atgatacttaccctt

SEQ ID NO: 1008137 - DNA, 15 bp, Homo sapiens
tgatacttacccttc

SEQ ID NO: 1008138 - DNA, 15 bp, Homo sapiens
gatacttacccttct

SEQ ID NO: 1008139 - DNA, 15 bp, Homo sapiens
atacttacccttctc

SEQ ID NO: 1008140 - DNA, 15 bp, Homo sapiens
tacttacccttctca

SEQ ID NO: 1008141 - DNA, 15 bp, Homo sapiens
acttacccttctcac

SEQ ID NO: 1008142 - DNA, 15 bp, Homo sapiens
cttacccttctcaca

SEQ ID NO: 1008143 - DNA, 15 bp, Homo sapiens
ttacccttctcacat

SEQ ID NO: 1008144 - DNA, 15 bp, Homo sapiens
tacccttctcacatc

SEQ ID NO: 1008145 - DNA, 15 bp, Homo sapiens
acccttctcacatca

SEQ ID NO: 1008146 - DNA, 15 bp, Homo sapiens
cccttctcacatcat

SEQ ID NO: 1008147 - DNA, 15 bp, Homo sapiens
ccttctcacatcatg

SEQ ID NO: 1008148 - DNA, 15 bp, Homo sapiens
cttctcacatcatgg

SEQ ID NO: 1008149 - DNA, 15 bp, Homo sapiens
ttctcacatcatggg

SEQ ID NO: 1008150 - DNA, 15 bp, Homo sapiens
tctcacatcatgggc

SEQ ID NO: 1008151 - DNA, 15 bp, Homo sapiens
ctcacatcatgggct

SEQ ID NO: 1008152 - DNA, 15 bp, Homo sapiens
tcacatcatgggctt

SEQ ID NO: 1008153 - DNA, 15 bp, Homo sapiens
cacatcatgggcttg

SEQ ID NO: 1008154 - DNA, 15 bp, Homo sapiens
acatcatgggcttgt

SEQ ID NO: 1008155 - DNA, 15 bp, Homo sapiens
catcatgggcttgtt

SEQ ID NO: 1008156 - DNA, 15 bp, Homo sapiens
atcatgggcttgttt

SEQ ID NO: 1008157 - DNA, 15 bp, Homo sapiens
tcatgggcttgttta

SEQ ID NO: 1008158 - DNA, 15 bp, Homo sapiens
catgggcttgtttaa

SEQ ID NO: 1008159 - DNA, 15 bp, Homo sapiens
atgggcttgtttaat

SEQ ID NO: 1008160 - DNA, 15 bp, Homo sapiens
tgggcttgtttaatg

SEQ ID NO: 1008161 - DNA, 15 bp, Homo sapiens
gggcttgtttaatga

SEQ ID NO: 1008162 - DNA, 15 bp, Homo sapiens
ggcttgtttaatgac

SEQ ID NO: 1008163 - DNA, 15 bp, Homo sapiens
gcttgtttaatgact

SEQ ID NO: 1008164 - DNA, 15 bp, Homo sapiens
cttgtttaatgactt

SEQ ID NO: 1008165 - DNA, 15 bp, Homo sapiens
ttgtttaatgactta

SEQ ID NO: 1008166 - DNA, 15 bp, Homo sapiens
tgtttaatgacttag

SEQ ID NO: 1008167 - DNA, 15 bp, Homo sapiens
gtttaatgacttagg

SEQ ID NO: 1008168 - DNA, 15 bp, Homo sapiens
tttaatgacttaggt

SEQ ID NO: 1008169 - DNA, 15 bp, Homo sapiens
ttaatgacttaggta

SEQ ID NO: 1008170 - DNA, 15 bp, Homo sapiens
taatgacttaggtat

SEQ ID NO: 1008171 - DNA, 15 bp, Homo sapiens
aatgacttaggtatg

SEQ ID NO: 1008172 - DNA, 15 bp, Homo sapiens
atgacttaggtatga

SEQ ID NO: 1008173 - DNA, 15 bp, Homo sapiens
tgacttaggtatgaa

SEQ ID NO: 1008174 - DNA, 15 bp, Homo sapiens
gacttaggtatgaat

SEQ ID NO: 1008175 - DNA, 15 bp, Homo sapiens
acttaggtatgaatc

SEQ ID NO: 1008176 - DNA, 15 bp, Homo sapiens
cttaggtatgaatct

SEQ ID NO: 1008177 - DNA, 15 bp, Homo sapiens
ttaggtatgaatctt

SEQ ID NO: 1008178 - DNA, 15 bp, Homo sapiens
taggtatgaatctta

SEQ ID NO: 1008179 - DNA, 15 bp, Homo sapiens
aggtatgaatcttat

SEQ ID NO: 1008180 - DNA, 15 bp, Homo sapiens
ggtatgaatcttata

SEQ ID NO: 1008181 - DNA, 15 bp, Homo sapiens
gtatgaatcttatat

SEQ ID NO: 1008182 - DNA, 15 bp, Homo sapiens
tatgaatcttatatg

SEQ ID NO: 1008183 - DNA, 15 bp, Homo sapiens
atgaatcttatatga

SEQ ID NO: 1008184 - DNA, 15 bp, Homo sapiens
tgaatcttatatgaa

SEQ ID NO: 1008185 - DNA, 15 bp, Homo sapiens
gaatcttatatgaaa

SEQ ID NO: 1008186 - DNA, 15 bp, Homo sapiens
aatcttatatgaaag

SEQ ID NO: 1008187 - DNA, 15 bp, Homo sapiens
atcttatatgaaagg

SEQ ID NO: 1008188 - DNA, 15 bp, Homo sapiens
tcttatatgaaagga

SEQ ID NO: 1008189 - DNA, 15 bp, Homo sapiens
cttatatgaaaggaa

SEQ ID NO: 1008190 - DNA, 15 bp, Homo sapiens
ttatatgaaaggaag

SEQ ID NO: 1008191 - DNA, 15 bp, Homo sapiens
tatatgaaaggaagc

SEQ ID NO: 1008192 - DNA, 15 bp, Homo sapiens
atatgaaaggaagct

SEQ ID NO: 1008193 - DNA, 15 bp, Homo sapiens
tatgaaaggaagctg

SEQ ID NO: 1008194 - DNA, 15 bp, Homo sapiens
atgaaaggaagctgt

SEQ ID NO: 1008195 - DNA, 15 bp, Homo sapiens
tgaaaggaagctgta

SEQ ID NO: 1008196 - DNA, 15 bp, Homo sapiens
gaaaggaagctgtaa

SEQ ID NO: 1008197 - DNA, 15 bp, Homo sapiens
aaaggaagctgtaaa

SEQ ID NO: 1008198 - DNA, 15 bp, Homo sapiens
aaggaagctgtaaac

SEQ ID NO: 1008199 - DNA, 15 bp, Homo sapiens
aggaagctgtaaaca

SEQ ID NO: 1008200 - DNA, 15 bp, Homo sapiens
ggaagctgtaaacag

SEQ ID NO: 1008201 - DNA, 15 bp, Homo sapiens
gaagctgtaaacagt

SEQ ID NO: 1008202 - DNA, 15 bp, Homo sapiens
aagctgtaaacagtc

SEQ ID NO: 1008203 - DNA, 15 bp, Homo sapiens
agctgtaaacagtca

SEQ ID NO: 1008204 - DNA, 15 bp, Homo sapiens
gctgtaaacagtcat

SEQ ID NO: 1008205 - DNA, 15 bp, Homo sapiens
ctgtaaacagtcata

SEQ ID NO: 1008206 - DNA, 15 bp, Homo sapiens
tgtaaacagtcataa

SEQ ID NO: 1008207 - DNA, 15 bp, Homo sapiens
gtaaacagtcataaa

SEQ ID NO: 1008208 - DNA, 15 bp, Homo sapiens
taaacagtcataaaa

SEQ ID NO: 1008209 - DNA, 15 bp, Homo sapiens
aaacagtcataaaaa

SEQ ID NO: 1008210 - DNA, 15 bp, Homo sapiens
aacagtcataaaaat

SEQ ID NO: 1008211 - DNA, 15 bp, Homo sapiens
acagtcataaaaatg

SEQ ID NO: 1008212 - DNA, 15 bp, Homo sapiens
cagtcataaaaatgt

SEQ ID NO: 1008213 - DNA, 15 bp, Homo sapiens
agtcataaaaatgta

SEQ ID NO: 1008214 - DNA, 15 bp, Homo sapiens
gtcataaaaatgtat

SEQ ID NO: 1008215 - DNA, 15 bp, Homo sapiens
tcataaaaatgtatt

SEQ ID NO: 1008216 - DNA, 15 bp, Homo sapiens
cataaaaatgtatta

SEQ ID NO: 1008217 - DNA, 15 bp, Homo sapiens
ataaaaatgtattag

SEQ ID NO: 1008218 - DNA, 15 bp, Homo sapiens
taaaaatgtattagc

SEQ ID NO: 1008219 - DNA, 15 bp, Homo sapiens
aaaaatgtattagca

SEQ ID NO: 1008220 - DNA, 15 bp, Homo sapiens
aaaatgtattagcat

SEQ ID NO: 1008221 - DNA, 15 bp, Homo sapiens
aaatgtattagcatc

SEQ ID NO: 1008222 - DNA, 15 bp, Homo sapiens
aatgtattagcatct

SEQ ID NO: 1008223 - DNA, 15 bp, Homo sapiens
atgtattagcatctg

SEQ ID NO: 1008224 - DNA, 15 bp, Homo sapiens
tgtattagcatctgt

SEQ ID NO: 1008225 - DNA, 15 bp, Homo sapiens
gtattagcatctgtg

SEQ ID NO: 1008226 - DNA, 15 bp, Homo sapiens
tattagcatctgtgc

SEQ ID NO: 1008227 - DNA, 15 bp, Homo sapiens
attagcatctgtgca

SEQ ID NO: 1008228 - DNA, 15 bp, Homo sapiens
ttagcatctgtgcag

SEQ ID NO: 1008229 - DNA, 15 bp, Homo sapiens
tagcatctgtgcagt

SEQ ID NO: 1008230 - DNA, 15 bp, Homo sapiens
agcatctgtgcagta

SEQ ID NO: 1008231 - DNA, 15 bp, Homo sapiens
gcatctgtgcagtat

SEQ ID NO: 1008232 - DNA, 15 bp, Homo sapiens
catctgtgcagtatt

SEQ ID NO: 1008233 - DNA, 15 bp, Homo sapiens
atctgtgcagtattt

SEQ ID NO: 1008234 - DNA, 15 bp, Homo sapiens
tctgtgcagtatttt

SEQ ID NO: 1008235 - DNA, 15 bp, Homo sapiens
ctgtgcagtattttt

SEQ ID NO: 1008236 - DNA, 15 bp, Homo sapiens
tgtgcagtatttttt

SEQ ID NO: 1008237 - DNA, 15 bp, Homo sapiens
gtgcagtattttttt

SEQ ID NO: 1008238 - DNA, 15 bp, Homo sapiens
tgcagtatttttttt

SEQ ID NO: 1008239 - DNA, 15 bp, Homo sapiens
gcagtattttttttc

SEQ ID NO: 1008240 - DNA, 15 bp, Homo sapiens
cagtattttttttct

SEQ ID NO: 1008241 - DNA, 15 bp, Homo sapiens
agtattttttttcta

SEQ ID NO: 1008242 - DNA, 15 bp, Homo sapiens
gtattttttttctat

SEQ ID NO: 1008243 - DNA, 15 bp, Homo sapiens
tattttttttctatc

SEQ ID NO: 1008244 - DNA, 15 bp, Homo sapiens
attttttttctatcc

SEQ ID NO: 1008245 - DNA, 15 bp, Homo sapiens
ttttttttctatcca

SEQ ID NO: 1008246 - DNA, 15 bp, Homo sapiens
tttttttctatccat

SEQ ID NO: 1008247 - DNA, 15 bp, Homo sapiens
ttttttctatccatt

SEQ ID NO: 1008248 - DNA, 15 bp, Homo sapiens
tttttctatccattc

SEQ ID NO: 1008249 - DNA, 15 bp, Homo sapiens
ttttctatccattct

SEQ ID NO: 1008250 - DNA, 15 bp, Homo sapiens
tttctatccattctt

SEQ ID NO: 1008251 - DNA, 15 bp, Homo sapiens
ttctatccattcttt

SEQ ID NO: 1008252 - DNA, 15 bp, Homo sapiens
tctatccattcttta

SEQ ID NO: 1008253 - DNA, 15 bp, Homo sapiens
ctatccattctttat

SEQ ID NO: 1008254 - DNA, 15 bp, Homo sapiens
tatccattctttata

SEQ ID NO: 1008255 - DNA, 15 bp, Homo sapiens
atccattctttataa

SEQ ID NO: 1008256 - DNA, 15 bp, Homo sapiens
tccattctttataat

SEQ ID NO: 1008257 - DNA, 15 bp, Homo sapiens
ccattctttataatt

SEQ ID NO: 1008258 - DNA, 15 bp, Homo sapiens
cattctttataattt

SEQ ID NO: 1008259 - DNA, 15 bp, Homo sapiens
attctttataatttg

SEQ ID NO: 1008260 - DNA, 15 bp, Homo sapiens
ttctttataatttgg

SEQ ID NO: 1008261 - DNA, 15 bp, Homo sapiens
tctttataatttggt

SEQ ID NO: 1008262 - DNA, 15 bp, Homo sapiens
ctttataatttggtg

SEQ ID NO: 1008263 - DNA, 15 bp, Homo sapiens
tttataatttggtgg

SEQ ID NO: 1008264 - DNA, 15 bp, Homo sapiens
ttataatttggtggt

SEQ ID NO: 1008265 - DNA, 15 bp, Homo sapiens
tataatttggtggtt

SEQ ID NO: 1008266 - DNA, 15 bp, Homo sapiens
ataatttggtggtta

SEQ ID NO: 1008267 - DNA, 15 bp, Homo sapiens
taatttggtggttat

SEQ ID NO: 1008268 - DNA, 15 bp, Homo sapiens
aatttggtggttatt

SEQ ID NO: 1008269 - DNA, 15 bp, Homo sapiens
atttggtggttatta

SEQ ID NO: 1008270 - DNA, 15 bp, Homo sapiens
tttggtggttattat

SEQ ID NO: 1008271 - DNA, 15 bp, Homo sapiens
ttggtggttattatt

SEQ ID NO: 1008272 - DNA, 15 bp, Homo sapiens
tggtggttattattt

SEQ ID NO: 1008273 - DNA, 15 bp, Homo sapiens
ggtggttattatttc

SEQ ID NO: 1008274 - DNA, 15 bp, Homo sapiens
gtggttattatttct

SEQ ID NO: 1008275 - DNA, 15 bp, Homo sapiens
tggttattatttcta

SEQ ID NO: 1008276 - DNA, 15 bp, Homo sapiens
ggttattatttctac

SEQ ID NO: 1008277 - DNA, 15 bp, Homo sapiens
gttattatttctact

SEQ ID NO: 1008278 - DNA, 15 bp, Homo sapiens
ttattatttctactc

SEQ ID NO: 1008279 - DNA, 15 bp, Homo sapiens
tattatttctactct

SEQ ID NO: 1008280 - DNA, 15 bp, Homo sapiens
attatttctactcta

SEQ ID NO: 1008281 - DNA, 15 bp, Homo sapiens
ttatttctactctac

SEQ ID NO: 1008282 - DNA, 15 bp, Homo sapiens
tatttctactctaca

SEQ ID NO: 1008283 - DNA, 15 bp, Homo sapiens
atttctactctacat

SEQ ID NO: 1008284 - DNA, 15 bp, Homo sapiens
tttctactctacatg

SEQ ID NO: 1008285 - DNA, 15 bp, Homo sapiens
ttctactctacatga

SEQ ID NO: 1008286 - DNA, 15 bp, Homo sapiens
tctactctacatgag

SEQ ID NO: 1008287 - DNA, 15 bp, Homo sapiens
ctactctacatgaga

SEQ ID NO: 1008288 - DNA, 15 bp, Homo sapiens
tactctacatgagaa

SEQ ID NO: 1008289 - DNA, 15 bp, Homo sapiens
actctacatgagaaa

SEQ ID NO: 1008290 - DNA, 15 bp, Homo sapiens
ctctacatgagaaaa

SEQ ID NO: 1008291 - DNA, 15 bp, Homo sapiens
tctacatgagaaaaa

SEQ ID NO: 1008292 - DNA, 15 bp, Homo sapiens
ctacatgagaaaaaa

SEQ ID NO: 1008293 - DNA, 15 bp, Homo sapiens
tacatgagaaaaaag

SEQ ID NO: 1008294 - DNA, 15 bp, Homo sapiens
acatgagaaaaaagt

SEQ ID NO: 1008295 - DNA, 15 bp, Homo sapiens
catgagaaaaaagtt

SEQ ID NO: 1008296 - DNA, 15 bp, Homo sapiens
atgagaaaaaagtta

SEQ ID NO: 1008297 - DNA, 15 bp, Homo sapiens
tgagaaaaaagttac

SEQ ID NO: 1008298 - DNA, 15 bp, Homo sapiens
gagaaaaaagttaca

SEQ ID NO: 1008299 - DNA, 15 bp, Homo sapiens
agaaaaaagttacag

SEQ ID NO: 1008300 - DNA, 15 bp, Homo sapiens
gaaaaaagttacaga

SEQ ID NO: 1008301 - DNA, 15 bp, Homo sapiens
aaaaaagttacagag

SEQ ID NO: 1008302 - DNA, 15 bp, Homo sapiens
aaaaagttacagagg

SEQ ID NO: 1008303 - DNA, 15 bp, Homo sapiens
aaaagttacagaggc

SEQ ID NO: 1008304 - DNA, 15 bp, Homo sapiens
aaagttacagaggca

SEQ ID NO: 1008305 - DNA, 15 bp, Homo sapiens
aagttacagaggcaa

SEQ ID NO: 1008306 - DNA, 15 bp, Homo sapiens
agttacagaggcaaa

SEQ ID NO: 1008307 - DNA, 15 bp, Homo sapiens
gttacagaggcaaaa

SEQ ID NO: 1008308 - DNA, 15 bp, Homo sapiens
ttacagaggcaaaac

SEQ ID NO: 1008309 - DNA, 15 bp, Homo sapiens
tacagaggcaaaaca

SEQ ID NO: 1008310 - DNA, 15 bp, Homo sapiens
acagaggcaaaacat

SEQ ID NO: 1008311 - DNA, 15 bp, Homo sapiens
cagaggcaaaacatg

SEQ ID NO: 1008312 - DNA, 15 bp, Homo sapiens
agaggcaaaacatgt

SEQ ID NO: 1008313 - DNA, 15 bp, Homo sapiens
gaggcaaaacatgtt

SEQ ID NO: 1008314 - DNA, 15 bp, Homo sapiens
aggcaaaacatgttc

SEQ ID NO: 1008315 - DNA, 15 bp, Homo sapiens
ggcaaaacatgttca

SEQ ID NO: 1008316 - DNA, 15 bp, Homo sapiens
gcaaaacatgttcac

SEQ ID NO: 1008317 - DNA, 15 bp, Homo sapiens
caaaacatgttcaca

SEQ ID NO: 1008318 - DNA, 15 bp, Homo sapiens
aaaacatgttcacaa

SEQ ID NO: 1008319 - DNA, 15 bp, Homo sapiens
aaacatgttcacaat

SEQ ID NO: 1008320 - DNA, 15 bp, Homo sapiens
aacatgttcacaatc

SEQ ID NO: 1008321 - DNA, 15 bp, Homo sapiens
acatgttcacaatca

SEQ ID NO: 1008322 - DNA, 15 bp, Homo sapiens
catgttcacaatcat

SEQ ID NO: 1008323 - DNA, 15 bp, Homo sapiens
atgttcacaatcata

SEQ ID NO: 1008324 - DNA, 15 bp, Homo sapiens
tgttcacaatcatat

SEQ ID NO: 1008325 - DNA, 15 bp, Homo sapiens
gttcacaatcatatg

SEQ ID NO: 1008326 - DNA, 15 bp, Homo sapiens
ttcacaatcatatga

SEQ ID NO: 1008327 - DNA, 15 bp, Homo sapiens
tcacaatcatatgat

SEQ ID NO: 1008328 - DNA, 15 bp, Homo sapiens
cacaatcatatgatt

SEQ ID NO: 1008329 - DNA, 15 bp, Homo sapiens
acaatcatatgatta

SEQ ID NO: 1008330 - DNA, 15 bp, Homo sapiens
caatcatatgattat

SEQ ID NO: 1008331 - DNA, 15 bp, Homo sapiens
aatcatatgattata

SEQ ID NO: 1008332 - DNA, 15 bp, Homo sapiens
atcatatgattatat

SEQ ID NO: 1008333 - DNA, 15 bp, Homo sapiens
tcatatgattatata

SEQ ID NO: 1008334 - DNA, 15 bp, Homo sapiens
catatgattatataa

SEQ ID NO: 1008335 - DNA, 15 bp, Homo sapiens
atatgattatataat

SEQ ID NO: 1008336 - DNA, 15 bp, Homo sapiens
tatgattatataatt

SEQ ID NO: 1008337 - DNA, 15 bp, Homo sapiens
atgattatataatta

SEQ ID NO: 1008338 - DNA, 15 bp, Homo sapiens
tgattatataattaa

SEQ ID NO: 1008339 - DNA, 15 bp, Homo sapiens
gattatataattaac

SEQ ID NO: 1008340 - DNA, 15 bp, Homo sapiens
attatataattaact

SEQ ID NO: 1008341 - DNA, 15 bp, Homo sapiens
ttatataattaactg

SEQ ID NO: 1008342 - DNA, 15 bp, Homo sapiens
tatataattaactga

SEQ ID NO: 1008343 - DNA, 15 bp, Homo sapiens
atataattaactgag

SEQ ID NO: 1008344 - DNA, 15 bp, Homo sapiens
tataattaactgagt

SEQ ID NO: 1008345 - DNA, 15 bp, Homo sapiens
ataattaactgagtt

SEQ ID NO: 1008346 - DNA, 15 bp, Homo sapiens
taattaactgagtta

SEQ ID NO: 1008347 - DNA, 15 bp, Homo sapiens
aattaactgagttaa

SEQ ID NO: 1008348 - DNA, 15 bp, Homo sapiens
attaactgagttaaa

SEQ ID NO: 1008349 - DNA, 15 bp, Homo sapiens
ttaactgagttaaac

SEQ ID NO: 1008350 - DNA, 15 bp, Homo sapiens
taactgagttaaact

SEQ ID NO: 1008351 - DNA, 15 bp, Homo sapiens
aactgagttaaacta

SEQ ID NO: 1008352 - DNA, 15 bp, Homo sapiens
actgagttaaactag

SEQ ID NO: 1008353 - DNA, 15 bp, Homo sapiens
ctgagttaaactaga

SEQ ID NO: 1008354 - DNA, 15 bp, Homo sapiens
tgagttaaactagag

SEQ ID NO: 1008355 - DNA, 15 bp, Homo sapiens
gagttaaactagagt

SEQ ID NO: 1008356 - DNA, 15 bp, Homo sapiens
agttaaactagagta

SEQ ID NO: 1008357 - DNA, 15 bp, Homo sapiens
gttaaactagagtat

SEQ ID NO: 1008358 - DNA, 15 bp, Homo sapiens
ttaaactagagtatg

SEQ ID NO: 1008359 - DNA, 15 bp, Homo sapiens
taaactagagtatgg

SEQ ID NO: 1008360 - DNA, 15 bp, Homo sapiens
aaactagagtatgga

SEQ ID NO: 1008361 - DNA, 15 bp, Homo sapiens
aactagagtatggat

SEQ ID NO: 1008362 - DNA, 15 bp, Homo sapiens
actagagtatggatg

SEQ ID NO: 1008363 - DNA, 15 bp, Homo sapiens
ctagagtatggatgt

SEQ ID NO: 1008364 - DNA, 15 bp, Homo sapiens
tagagtatggatgtc

SEQ ID NO: 1008365 - DNA, 15 bp, Homo sapiens
agagtatggatgtct

SEQ ID NO: 1008366 - DNA, 15 bp, Homo sapiens
gagtatggatgtctt

SEQ ID NO: 1008367 - DNA, 15 bp, Homo sapiens
agtatggatgtcttg

SEQ ID NO: 1008368 - DNA, 15 bp, Homo sapiens
gtatggatgtcttga

SEQ ID NO: 1008369 - DNA, 15 bp, Homo sapiens
tatggatgtcttgac

SEQ ID NO: 1008370 - DNA, 15 bp, Homo sapiens
atggatgtcttgacc

SEQ ID NO: 1008371 - DNA, 15 bp, Homo sapiens
tggatgtcttgaccc

SEQ ID NO: 1008372 - DNA, 15 bp, Homo sapiens
ggatgtcttgaccct

SEQ ID NO: 1008373 - DNA, 15 bp, Homo sapiens
gatgtcttgaccctt

SEQ ID NO: 1008374 - DNA, 15 bp, Homo sapiens
atgtcttgaccctta

SEQ ID NO: 1008375 - DNA, 15 bp, Homo sapiens
tgtcttgacccttag

SEQ ID NO: 1008376 - DNA, 15 bp, Homo sapiens
gtcttgacccttaga

SEQ ID NO: 1008377 - DNA, 15 bp, Homo sapiens
tcttgacccttagat

SEQ ID NO: 1008378 - DNA, 15 bp, Homo sapiens
cttgacccttagatc

SEQ ID NO: 1008379 - DNA, 15 bp, Homo sapiens
ttgacccttagatca

SEQ ID NO: 1008380 - DNA, 15 bp, Homo sapiens
tgacccttagatcac

SEQ ID NO: 1008381 - DNA, 15 bp, Homo sapiens
gacccttagatcact

SEQ ID NO: 1008382 - DNA, 15 bp, Homo sapiens
acccttagatcacta

SEQ ID NO: 1008383 - DNA, 15 bp, Homo sapiens
cccttagatcactat

SEQ ID NO: 1008384 - DNA, 15 bp, Homo sapiens
ccttagatcactatc

SEQ ID NO: 1008385 - DNA, 15 bp, Homo sapiens
cttagatcactatct

SEQ ID NO: 1008386 - DNA, 15 bp, Homo sapiens
ttagatcactatctt

SEQ ID NO: 1008387 - DNA, 15 bp, Homo sapiens
tagatcactatcttt

SEQ ID NO: 1008388 - DNA, 15 bp, Homo sapiens
agatcactatctttc

SEQ ID NO: 1008389 - DNA, 15 bp, Homo sapiens
gatcactatctttcc

SEQ ID NO: 1008390 - DNA, 15 bp, Homo sapiens
atcactatctttcca

SEQ ID NO: 1008391 - DNA, 15 bp, Homo sapiens
tcactatctttccaa

SEQ ID NO: 1008392 - DNA, 15 bp, Homo sapiens
cactatctttccaat

SEQ ID NO: 1008393 - DNA, 15 bp, Homo sapiens
actatctttccaata

SEQ ID NO: 1008394 - DNA, 15 bp, Homo sapiens
ctatctttccaataa

SEQ ID NO: 1008395 - DNA, 15 bp, Homo sapiens
tatctttccaataaa

SEQ ID NO: 1008396 - DNA, 15 bp, Homo sapiens
atctttccaataaat

SEQ ID NO: 1008397 - DNA, 15 bp, Homo sapiens
tctttccaataaata

SEQ ID NO: 1008398 - DNA, 15 bp, Homo sapiens
ctttccaataaatag

SEQ ID NO: 1008399 - DNA, 15 bp, Homo sapiens
tttccaataaatagt

SEQ ID NO: 1008400 - DNA, 15 bp, Homo sapiens
ttccaataaatagtt

SEQ ID NO: 1008401 - DNA, 15 bp, Homo sapiens
tccaataaatagttt

SEQ ID NO: 1008402 - DNA, 15 bp, Homo sapiens
ccaataaatagtttt

SEQ ID NO: 1008403 - DNA, 15 bp, Homo sapiens
caataaatagtttta

SEQ ID NO: 1008404 - DNA, 15 bp, Homo sapiens
aataaatagttttaa

SEQ ID NO: 1008405 - DNA, 15 bp, Homo sapiens
ataaatagttttaaa

SEQ ID NO: 1008406 - DNA, 15 bp, Homo sapiens
taaatagttttaaaa

SEQ ID NO: 1008407 - DNA, 15 bp, Homo sapiens
aaatagttttaaaag

SEQ ID NO: 1008408 - DNA, 15 bp, Homo sapiens
aatagttttaaaagt

SEQ ID NO: 1008409 - DNA, 15 bp, Homo sapiens
atagttttaaaagtc

SEQ ID NO: 1008410 - DNA, 15 bp, Homo sapiens
tagttttaaaagtct

SEQ ID NO: 1008411 - DNA, 15 bp, Homo sapiens
agttttaaaagtcta

SEQ ID NO: 1008412 - DNA, 15 bp, Homo sapiens
gttttaaaagtctaa

SEQ ID NO: 1008413 - DNA, 15 bp, Homo sapiens
ttttaaaagtctaaa

SEQ ID NO: 1008414 - DNA, 15 bp, Homo sapiens
tttaaaagtctaaat

SEQ ID NO: 1008415 - DNA, 15 bp, Homo sapiens
ttaaaagtctaaatt

SEQ ID NO: 1008416 - DNA, 15 bp, Homo sapiens
taaaagtctaaattt

SEQ ID NO: 1008417 - DNA, 15 bp, Homo sapiens
aaaagtctaaatttt

SEQ ID NO: 1008418 - DNA, 15 bp, Homo sapiens
aaagtctaaatttta

SEQ ID NO: 1008419 - DNA, 15 bp, Homo sapiens
aagtctaaattttac

SEQ ID NO: 1008420 - DNA, 15 bp, Homo sapiens
agtctaaattttact

SEQ ID NO: 1008421 - DNA, 15 bp, Homo sapiens
gtctaaattttacta

SEQ ID NO: 1008422 - DNA, 15 bp, Homo sapiens
tctaaattttactaa

SEQ ID NO: 1008423 - DNA, 15 bp, Homo sapiens
ctaaattttactaac

SEQ ID NO: 1008424 - DNA, 15 bp, Homo sapiens
taaattttactaaca

SEQ ID NO: 1008425 - DNA, 15 bp, Homo sapiens
aaattttactaacag

SEQ ID NO: 1008426 - DNA, 15 bp, Homo sapiens
aattttactaacagg

SEQ ID NO: 1008427 - DNA, 15 bp, Homo sapiens
attttactaacaggt

SEQ ID NO: 1008428 - DNA, 15 bp, Homo sapiens
ttttactaacaggta

SEQ ID NO: 1008429 - DNA, 15 bp, Homo sapiens
tttactaacaggtag

SEQ ID NO: 1008430 - DNA, 15 bp, Homo sapiens
ttactaacaggtagt

SEQ ID NO: 1008431 - DNA, 15 bp, Homo sapiens
tactaacaggtagta

SEQ ID NO: 1008432 - DNA, 15 bp, Homo sapiens
actaacaggtagtac

SEQ ID NO: 1008433 - DNA, 15 bp, Homo sapiens
ctaacaggtagtaca

SEQ ID NO: 1008434 - DNA, 15 bp, Homo sapiens
taacaggtagtacaa

SEQ ID NO: 1008435 - DNA, 15 bp, Homo sapiens
aacaggtagtacaaa

SEQ ID NO: 1008436 - DNA, 15 bp, Homo sapiens
acaggtagtacaaat

SEQ ID NO: 1008437 - DNA, 15 bp, Homo sapiens
caggtagtacaaata

SEQ ID NO: 1008438 - DNA, 15 bp, Homo sapiens
aggtagtacaaatat

SEQ ID NO: 1008439 - DNA, 15 bp, Homo sapiens
ggtagtacaaatatg

SEQ ID NO: 1008440 - DNA, 15 bp, Homo sapiens
gtagtacaaatatgc

SEQ ID NO: 1008441 - DNA, 15 bp, Homo sapiens
tagtacaaatatgca

SEQ ID NO: 1008442 - DNA, 15 bp, Homo sapiens
agtacaaatatgcaa

SEQ ID NO: 1008443 - DNA, 15 bp, Homo sapiens
gtacaaatatgcaaa

SEQ ID NO: 1008444 - DNA, 15 bp, Homo sapiens
tacaaatatgcaaaa

SEQ ID NO: 1008445 - DNA, 15 bp, Homo sapiens
acaaatatgcaaaat

SEQ ID NO: 1008446 - DNA, 15 bp, Homo sapiens
caaatatgcaaaatg

SEQ ID NO: 1008447 - DNA, 15 bp, Homo sapiens
aaatatgcaaaatga

SEQ ID NO: 1008448 - DNA, 15 bp, Homo sapiens
aatatgcaaaatgag

SEQ ID NO: 1008449 - DNA, 15 bp, Homo sapiens
atatgcaaaatgagg

SEQ ID NO: 1008450 - DNA, 15 bp, Homo sapiens
tatgcaaaatgaggg

SEQ ID NO: 1008451 - DNA, 15 bp, Homo sapiens
atgcaaaatgaggga

SEQ ID NO: 1008452 - DNA, 15 bp, Homo sapiens
tgcaaaatgagggat

SEQ ID NO: 1008453 - DNA, 15 bp, Homo sapiens
gcaaaatgagggatg

SEQ ID NO: 1008454 - DNA, 15 bp, Homo sapiens
caaaatgagggatgt

SEQ ID NO: 1008455 - DNA, 15 bp, Homo sapiens
aaaatgagggatgta

SEQ ID NO: 1008456 - DNA, 15 bp, Homo sapiens
aaatgagggatgtat

SEQ ID NO: 1008457 - DNA, 15 bp, Homo sapiens
aatgagggatgtatg

SEQ ID NO: 1008458 - DNA, 15 bp, Homo sapiens
atgagggatgtatga

SEQ ID NO: 1008459 - DNA, 15 bp, Homo sapiens
tgagggatgtatgat

SEQ ID NO: 1008460 - DNA, 15 bp, Homo sapiens
gagggatgtatgatt

SEQ ID NO: 1008461 - DNA, 15 bp, Homo sapiens
agggatgtatgattg

SEQ ID NO: 1008462 - DNA, 15 bp, Homo sapiens
gggatgtatgattgc

SEQ ID NO: 1008463 - DNA, 15 bp, Homo sapiens
ggatgtatgattgct

SEQ ID NO: 1008464 - DNA, 15 bp, Homo sapiens
gatgtatgattgctt

SEQ ID NO: 1008465 - DNA, 15 bp, Homo sapiens
atgtatgattgcttc

SEQ ID NO: 1008466 - DNA, 15 bp, Homo sapiens
tgtatgattgcttct

SEQ ID NO: 1008467 - DNA, 15 bp, Homo sapiens
gtatgattgcttctt

SEQ ID NO: 1008468 - DNA, 15 bp, Homo sapiens
tatgattgcttcttc

SEQ ID NO: 1008469 - DNA, 15 bp, Homo sapiens
atgattgcttcttca

SEQ ID NO: 1008470 - DNA, 15 bp, Homo sapiens
tgattgcttcttcac

SEQ ID NO: 1008471 - DNA, 15 bp, Homo sapiens
gattgcttcttcact

SEQ ID NO: 1008472 - DNA, 15 bp, Homo sapiens
attgcttcttcactc

SEQ ID NO: 1008473 - DNA, 15 bp, Homo sapiens
ttgcttcttcactcg

SEQ ID NO: 1008474 - DNA, 15 bp, Homo sapiens
tgcttcttcactcga

SEQ ID NO: 1008475 - DNA, 15 bp, Homo sapiens
gcttcttcactcgaa

SEQ ID NO: 1008476 - DNA, 15 bp, Homo sapiens
cttcttcactcgaag

SEQ ID NO: 1008477 - DNA, 15 bp, Homo sapiens
ttcttcactcgaaga

SEQ ID NO: 1008478 - DNA, 15 bp, Homo sapiens
tcttcactcgaagat

SEQ ID NO: 1008479 - DNA, 15 bp, Homo sapiens
cttcactcgaagatg

SEQ ID NO: 1008480 - DNA, 15 bp, Homo sapiens
ttcactcgaagatgg

SEQ ID NO: 1008481 - DNA, 15 bp, Homo sapiens
tcactcgaagatggt

SEQ ID NO: 1008482 - DNA, 15 bp, Homo sapiens
cactcgaagatggta

SEQ ID NO: 1008483 - DNA, 15 bp, Homo sapiens
actcgaagatggtat

SEQ ID NO: 1008484 - DNA, 15 bp, Homo sapiens
ctcgaagatggtata

SEQ ID NO: 1008485 - DNA, 15 bp, Homo sapiens
tcgaagatggtatat

SEQ ID NO: 1008486 - DNA, 15 bp, Homo sapiens
cgaagatggtatatt

SEQ ID NO: 1008487 - DNA, 15 bp, Homo sapiens
gaagatggtatatta

SEQ ID NO: 1008488 - DNA, 15 bp, Homo sapiens
aagatggtatattat

SEQ ID NO: 1008489 - DNA, 15 bp, Homo sapiens
agatggtatattatg

SEQ ID NO: 1008490 - DNA, 15 bp, Homo sapiens
gatggtatattatgt

SEQ ID NO: 1008491 - DNA, 15 bp, Homo sapiens
atggtatattatgtt

SEQ ID NO: 1008492 - DNA, 15 bp, Homo sapiens
tggtatattatgttt

SEQ ID NO: 1008493 - DNA, 15 bp, Homo sapiens
ggtatattatgtttt

SEQ ID NO: 1008494 - DNA, 15 bp, Homo sapiens
gtatattatgttttt

SEQ ID NO: 1008495 - DNA, 15 bp, Homo sapiens
tatattatgtttttc

SEQ ID NO: 1008496 - DNA, 15 bp, Homo sapiens
atattatgtttttcc

SEQ ID NO: 1008497 - DNA, 15 bp, Homo sapiens
tattatgtttttcct

SEQ ID NO: 1008498 - DNA, 15 bp, Homo sapiens
attatgtttttcctt

SEQ ID NO: 1008499 - DNA, 15 bp, Homo sapiens
ttatgtttttccttt

SEQ ID NO: 1008500 - DNA, 15 bp, Homo sapiens
tatgtttttcctttt

SEQ ID NO: 1008501 - DNA, 15 bp, Homo sapiens
atgtttttcctttta

SEQ ID NO: 1008502 - DNA, 15 bp, Homo sapiens
tgtttttccttttaa

SEQ ID NO: 1008503 - DNA, 15 bp, Homo sapiens
gtttttccttttaag

SEQ ID NO: 1008504 - DNA, 15 bp, Homo sapiens
tttttccttttaagt

SEQ ID NO: 1008505 - DNA, 15 bp, Homo sapiens
ttttccttttaagtt

SEQ ID NO: 1008506 - DNA, 15 bp, Homo sapiens
tttccttttaagttc

SEQ ID NO: 1008507 - DNA, 15 bp, Homo sapiens
ttccttttaagttca

SEQ ID NO: 1008508 - DNA, 15 bp, Homo sapiens
tccttttaagttcat

SEQ ID NO: 1008509 - DNA, 15 bp, Homo sapiens
ccttttaagttcatg

SEQ ID NO: 1008510 - DNA, 15 bp, Homo sapiens
cttttaagttcatgt

SEQ ID NO: 1008511 - DNA, 15 bp, Homo sapiens
ttttaagttcatgtt

SEQ ID NO: 1008512 - DNA, 15 bp, Homo sapiens
tttaagttcatgtta

SEQ ID NO: 1008513 - DNA, 15 bp, Homo sapiens
ttaagttcatgttag

SEQ ID NO: 1008514 - DNA, 15 bp, Homo sapiens
taagttcatgttaga

SEQ ID NO: 1008515 - DNA, 15 bp, Homo sapiens
aagttcatgttagag

SEQ ID NO: 1008516 - DNA, 15 bp, Homo sapiens
agttcatgttagagt

SEQ ID NO: 1008517 - DNA, 15 bp, Homo sapiens
gttcatgttagagta

SEQ ID NO: 1008518 - DNA, 15 bp, Homo sapiens
ttcatgttagagtat

SEQ ID NO: 1008519 - DNA, 15 bp, Homo sapiens
tcatgttagagtatc

SEQ ID NO: 1008520 - DNA, 15 bp, Homo sapiens
catgttagagtatct

SEQ ID NO: 1008521 - DNA, 15 bp, Homo sapiens
atgttagagtatctg

SEQ ID NO: 1008522 - DNA, 15 bp, Homo sapiens
tgttagagtatctga

SEQ ID NO: 1008523 - DNA, 15 bp, Homo sapiens
gttagagtatctgaa

SEQ ID NO: 1008524 - DNA, 15 bp, Homo sapiens
ttagagtatctgaat

SEQ ID NO: 1008525 - DNA, 15 bp, Homo sapiens
tagagtatctgaatc

SEQ ID NO: 1008526 - DNA, 15 bp, Homo sapiens
agagtatctgaatct

SEQ ID NO: 1008527 - DNA, 15 bp, Homo sapiens
gagtatctgaatctt

SEQ ID NO: 1008528 - DNA, 15 bp, Homo sapiens
agtatctgaatcttt

SEQ ID NO: 1008529 - DNA, 15 bp, Homo sapiens
gtatctgaatctttt

SEQ ID NO: 1008530 - DNA, 15 bp, Homo sapiens
tatctgaatcttttc

SEQ ID NO: 1008531 - DNA, 15 bp, Homo sapiens
atctgaatcttttca

SEQ ID NO: 1008532 - DNA, 15 bp, Homo sapiens
tctgaatcttttcaa

SEQ ID NO: 1008533 - DNA, 15 bp, Homo sapiens
ctgaatcttttcaag

SEQ ID NO: 1008534 - DNA, 15 bp, Homo sapiens
tgaatcttttcaagt

SEQ ID NO: 1008535 - DNA, 15 bp, Homo sapiens
gaatcttttcaagtt

SEQ ID NO: 1008536 - DNA, 15 bp, Homo sapiens
aatcttttcaagttg

SEQ ID NO: 1008537 - DNA, 15 bp, Homo sapiens
atcttttcaagttgg

SEQ ID NO: 1008538 - DNA, 15 bp, Homo sapiens
tcttttcaagttggt

SEQ ID NO: 1008539 - DNA, 15 bp, Homo sapiens
cttttcaagttggtt

SEQ ID NO: 1008540 - DNA, 15 bp, Homo sapiens
ttttcaagttggtta

SEQ ID NO: 1008541 - DNA, 15 bp, Homo sapiens
tttcaagttggttag

SEQ ID NO: 1008542 - DNA, 15 bp, Homo sapiens
ttcaagttggttaga

SEQ ID NO: 1008543 - DNA, 15 bp, Homo sapiens
tcaagttggttagat

SEQ ID NO: 1008544 - DNA, 15 bp, Homo sapiens
caagttggttagatg

SEQ ID NO: 1008545 - DNA, 15 bp, Homo sapiens
aagttggttagatgt

SEQ ID NO: 1008546 - DNA, 15 bp, Homo sapiens
agttggttagatgtt

SEQ ID NO: 1008547 - DNA, 15 bp, Homo sapiens
gttggttagatgtta

SEQ ID NO: 1008548 - DNA, 15 bp, Homo sapiens
ttggttagatgttag

SEQ ID NO: 1008549 - DNA, 15 bp, Homo sapiens
tggttagatgttaga

SEQ ID NO: 1008550 - DNA, 15 bp, Homo sapiens
ggttagatgttagaa

SEQ ID NO: 1008551 - DNA, 15 bp, Homo sapiens
gttagatgttagaaa

SEQ ID NO: 1008552 - DNA, 15 bp, Homo sapiens
ttagatgttagaaat

SEQ ID NO: 1008553 - DNA, 15 bp, Homo sapiens
tagatgttagaaata

SEQ ID NO: 1008554 - DNA, 15 bp, Homo sapiens
agatgttagaaatag

SEQ ID NO: 1008555 - DNA, 15 bp, Homo sapiens
gatgttagaaataga

SEQ ID NO: 1008556 - DNA, 15 bp, Homo sapiens
atgttagaaatagat

SEQ ID NO: 1008557 - DNA, 15 bp, Homo sapiens
tgttagaaatagatg

SEQ ID NO: 1008558 - DNA, 15 bp, Homo sapiens
gttagaaatagatgt

SEQ ID NO: 1008559 - DNA, 15 bp, Homo sapiens
ttagaaatagatgta

SEQ ID NO: 1008560 - DNA, 15 bp, Homo sapiens
tagaaatagatgtaa

SEQ ID NO: 1008561 - DNA, 15 bp, Homo sapiens
agaaatagatgtaaa

SEQ ID NO: 1008562 - DNA, 15 bp, Homo sapiens
gaaatagatgtaaat

SEQ ID NO: 1008563 - DNA, 15 bp, Homo sapiens
aaatagatgtaaatt

SEQ ID NO: 1008564 - DNA, 15 bp, Homo sapiens
aatagatgtaaattt

SEQ ID NO: 1008565 - DNA, 15 bp, Homo sapiens
atagatgtaaatttt

SEQ ID NO: 1008566 - DNA, 15 bp, Homo sapiens
tagatgtaaatttta

SEQ ID NO: 1008567 - DNA, 15 bp, Homo sapiens
agatgtaaattttaa

SEQ ID NO: 1008568 - DNA, 15 bp, Homo sapiens
gatgtaaattttaag

SEQ ID NO: 1008569 - DNA, 15 bp, Homo sapiens
atgtaaattttaagc

SEQ ID NO: 1008570 - DNA, 15 bp, Homo sapiens
tgtaaattttaagca

SEQ ID NO: 1008571 - DNA, 15 bp, Homo sapiens
gtaaattttaagcat

SEQ ID NO: 1008572 - DNA, 15 bp, Homo sapiens
taaattttaagcatt

SEQ ID NO: 1008573 - DNA, 15 bp, Homo sapiens
aaattttaagcatta

SEQ ID NO: 1008574 - DNA, 15 bp, Homo sapiens
aattttaagcattat

SEQ ID NO: 1008575 - DNA, 15 bp, Homo sapiens
attttaagcattata

SEQ ID NO: 1008576 - DNA, 15 bp, Homo sapiens
ttttaagcattatat

SEQ ID NO: 1008577 - DNA, 15 bp, Homo sapiens
tttaagcattatata

SEQ ID NO: 1008578 - DNA, 15 bp, Homo sapiens
ttaagcattatatat

SEQ ID NO: 1008579 - DNA, 15 bp, Homo sapiens
taagcattatatatc

SEQ ID NO: 1008580 - DNA, 15 bp, Homo sapiens
aagcattatatatcc

SEQ ID NO: 1008581 - DNA, 15 bp, Homo sapiens
agcattatatatcct

SEQ ID NO: 1008582 - DNA, 15 bp, Homo sapiens
gcattatatatcctt

SEQ ID NO: 1008583 - DNA, 15 bp, Homo sapiens
cattatatatccttg

SEQ ID NO: 1008584 - DNA, 15 bp, Homo sapiens
attatatatccttga

SEQ ID NO: 1008585 - DNA, 15 bp, Homo sapiens
ttatatatccttgat

SEQ ID NO: 1008586 - DNA, 15 bp, Homo sapiens
tatatatccttgatt

SEQ ID NO: 1008587 - DNA, 15 bp, Homo sapiens
atatatccttgattt

SEQ ID NO: 1008588 - DNA, 15 bp, Homo sapiens
tatatccttgatttc

SEQ ID NO: 1008589 - DNA, 15 bp, Homo sapiens
atatccttgatttca

SEQ ID NO: 1008590 - DNA, 15 bp, Homo sapiens
tatccttgatttcat

SEQ ID NO: 1008591 - DNA, 15 bp, Homo sapiens
atccttgatttcatt

SEQ ID NO: 1008592 - DNA, 15 bp, Homo sapiens
tccttgatttcatta

SEQ ID NO: 1008593 - DNA, 15 bp, Homo sapiens
ccttgatttcattat

SEQ ID NO: 1008594 - DNA, 15 bp, Homo sapiens
cttgatttcattatg

SEQ ID NO: 1008595 - DNA, 15 bp, Homo sapiens
ttgatttcattatgt

SEQ ID NO: 1008596 - DNA, 15 bp, Homo sapiens
tgatttcattatgta

SEQ ID NO: 1008597 - DNA, 15 bp, Homo sapiens
gatttcattatgtat

SEQ ID NO: 1008598 - DNA, 15 bp, Homo sapiens
atttcattatgtatt

SEQ ID NO: 1008599 - DNA, 15 bp, Homo sapiens
tttcattatgtatta

SEQ ID NO: 1008600 - DNA, 15 bp, Homo sapiens
ttcattatgtattat

SEQ ID NO: 1008601 - DNA, 15 bp, Homo sapiens
tcattatgtattatt

SEQ ID NO: 1008602 - DNA, 15 bp, Homo sapiens
cattatgtattattc

SEQ ID NO: 1008603 - DNA, 15 bp, Homo sapiens
attatgtattattct

SEQ ID NO: 1008604 - DNA, 15 bp, Homo sapiens
ttatgtattattctc

SEQ ID NO: 1008605 - DNA, 15 bp, Homo sapiens
tatgtattattctcc

SEQ ID NO: 1008606 - DNA, 15 bp, Homo sapiens
atgtattattctcct

SEQ ID NO: 1008607 - DNA, 15 bp, Homo sapiens
tgtattattctcctg

SEQ ID NO: 1008608 - DNA, 15 bp, Homo sapiens
gtattattctcctgg

SEQ ID NO: 1008609 - DNA, 15 bp, Homo sapiens
tattattctcctggt

SEQ ID NO: 1008610 - DNA, 15 bp, Homo sapiens
attattctcctggtc

SEQ ID NO: 1008611 - DNA, 15 bp, Homo sapiens
ttattctcctggtca

SEQ ID NO: 1008612 - DNA, 15 bp, Homo sapiens
tattctcctggtcac

SEQ ID NO: 1008613 - DNA, 15 bp, Homo sapiens
attctcctggtcact

SEQ ID NO: 1008614 - DNA, 15 bp, Homo sapiens
ttctcctggtcactt

SEQ ID NO: 1008615 - DNA, 15 bp, Homo sapiens
tctcctggtcacttt

SEQ ID NO: 1008616 - DNA, 15 bp, Homo sapiens
ctcctggtcacttta

SEQ ID NO: 1008617 - DNA, 15 bp, Homo sapiens
tcctggtcactttat

SEQ ID NO: 1008618 - DNA, 15 bp, Homo sapiens
cctggtcactttatc

SEQ ID NO: 1008619 - DNA, 15 bp, Homo sapiens
ctggtcactttatca

SEQ ID NO: 1008620 - DNA, 15 bp, Homo sapiens
tggtcactttatcaa

SEQ ID NO: 1008621 - DNA, 15 bp, Homo sapiens
ggtcactttatcaaa

SEQ ID NO: 1008622 - DNA, 15 bp, Homo sapiens
gtcactttatcaaaa

SEQ ID NO: 1008623 - DNA, 15 bp, Homo sapiens
tcactttatcaaaac

SEQ ID NO: 1008624 - DNA, 15 bp, Homo sapiens
cactttatcaaaact

SEQ ID NO: 1008625 - DNA, 15 bp, Homo sapiens
actttatcaaaactt

SEQ ID NO: 1008626 - DNA, 15 bp, Homo sapiens
ctttatcaaaacttc

SEQ ID NO: 1008627 - DNA, 15 bp, Homo sapiens
tttatcaaaacttct

SEQ ID NO: 1008628 - DNA, 15 bp, Homo sapiens
ttatcaaaacttctt

SEQ ID NO: 1008629 - DNA, 15 bp, Homo sapiens
tatcaaaacttcttc

SEQ ID NO: 1008630 - DNA, 15 bp, Homo sapiens
atcaaaacttcttca

SEQ ID NO: 1008631 - DNA, 15 bp, Homo sapiens
tcaaaacttcttcag

SEQ ID NO: 1008632 - DNA, 15 bp, Homo sapiens
caaaacttcttcagc

SEQ ID NO: 1008633 - DNA, 15 bp, Homo sapiens
aaaacttcttcagct

SEQ ID NO: 1008634 - DNA, 15 bp, Homo sapiens
aaacttcttcagctg

SEQ ID NO: 1008635 - DNA, 15 bp, Homo sapiens
aacttcttcagctgt

SEQ ID NO: 1008636 - DNA, 15 bp, Homo sapiens
acttcttcagctgtt

SEQ ID NO: 1008637 - DNA, 15 bp, Homo sapiens
cttcttcagctgtta

SEQ ID NO: 1008638 - DNA, 15 bp, Homo sapiens
ttcttcagctgttag

SEQ ID NO: 1008639 - DNA, 15 bp, Homo sapiens
tcttcagctgttaga

SEQ ID NO: 1008640 - DNA, 15 bp, Homo sapiens
cttcagctgttagaa

SEQ ID NO: 1008641 - DNA, 15 bp, Homo sapiens
ttcagctgttagaag

SEQ ID NO: 1008642 - DNA, 15 bp, Homo sapiens
tcagctgttagaagt

SEQ ID NO: 1008643 - DNA, 15 bp, Homo sapiens
cagctgttagaagtt

SEQ ID NO: 1008644 - DNA, 15 bp, Homo sapiens
agctgttagaagttg

SEQ ID NO: 1008645 - DNA, 15 bp, Homo sapiens
gctgttagaagttgt

SEQ ID NO: 1008646 - DNA, 15 bp, Homo sapiens
ctgttagaagttgta

SEQ ID NO: 1008647 - DNA, 15 bp, Homo sapiens
tgttagaagttgtaa

SEQ ID NO: 1008648 - DNA, 15 bp, Homo sapiens
gttagaagttgtaac

SEQ ID NO: 1008649 - DNA, 15 bp, Homo sapiens
ttagaagttgtaaca

SEQ ID NO: 1008650 - DNA, 15 bp, Homo sapiens
tagaagttgtaacat

SEQ ID NO: 1008651 - DNA, 15 bp, Homo sapiens
agaagttgtaacatt

SEQ ID NO: 1008652 - DNA, 15 bp, Homo sapiens
gaagttgtaacattg

SEQ ID NO: 1008653 - DNA, 15 bp, Homo sapiens
aagttgtaacattgt

SEQ ID NO: 1008654 - DNA, 15 bp, Homo sapiens
agttgtaacattgtt

SEQ ID NO: 1008655 - DNA, 15 bp, Homo sapiens
gttgtaacattgttt

SEQ ID NO: 1008656 - DNA, 15 bp, Homo sapiens
ttgtaacattgtttc

SEQ ID NO: 1008657 - DNA, 15 bp, Homo sapiens
tgtaacattgtttcc

SEQ ID NO: 1008658 - DNA, 15 bp, Homo sapiens
gtaacattgtttccc

SEQ ID NO: 1008659 - DNA, 15 bp, Homo sapiens
taacattgtttccct

SEQ ID NO: 1008660 - DNA, 15 bp, Homo sapiens
aacattgtttccctt

SEQ ID NO: 1008661 - DNA, 15 bp, Homo sapiens
acattgtttcccttt

SEQ ID NO: 1008662 - DNA, 15 bp, Homo sapiens
cattgtttccctttt

SEQ ID NO: 1008663 - DNA, 15 bp, Homo sapiens
attgtttccctttta

SEQ ID NO: 1008664 - DNA, 15 bp, Homo sapiens
ttgtttcccttttat

SEQ ID NO: 1008665 - DNA, 15 bp, Homo sapiens
tgtttcccttttatt

SEQ ID NO: 1008666 - DNA, 15 bp, Homo sapiens
gtttcccttttattt

SEQ ID NO: 1008667 - DNA, 15 bp, Homo sapiens
tttcccttttattta

SEQ ID NO: 1008668 - DNA, 15 bp, Homo sapiens
ttcccttttatttag

SEQ ID NO: 1008669 - DNA, 15 bp, Homo sapiens
tcccttttatttagt

SEQ ID NO: 1008670 - DNA, 15 bp, Homo sapiens
cccttttatttagtt

SEQ ID NO: 1008671 - DNA, 15 bp, Homo sapiens
ccttttatttagtta

SEQ ID NO: 1008672 - DNA, 15 bp, Homo sapiens
cttttatttagttat

SEQ ID NO: 1008673 - DNA, 15 bp, Homo sapiens
ttttatttagttata

SEQ ID NO: 1008674 - DNA, 15 bp, Homo sapiens
tttatttagttatat

SEQ ID NO: 1008675 - DNA, 15 bp, Homo sapiens
ttatttagttatata

SEQ ID NO: 1008676 - DNA, 15 bp, Homo sapiens
tatttagttatataa

SEQ ID NO: 1008677 - DNA, 15 bp, Homo sapiens
atttagttatataat

SEQ ID NO: 1008678 - DNA, 15 bp, Homo sapiens
tttagttatataata

SEQ ID NO: 1008679 - DNA, 15 bp, Homo sapiens
ttagttatataatac

SEQ ID NO: 1008680 - DNA, 15 bp, Homo sapiens
tagttatataataca

SEQ ID NO: 1008681 - DNA, 15 bp, Homo sapiens
agttatataatacac

SEQ ID NO: 1008682 - DNA, 15 bp, Homo sapiens
gttatataatacact

SEQ ID NO: 1008683 - DNA, 15 bp, Homo sapiens
ttatataatacactt

SEQ ID NO: 1008684 - DNA, 15 bp, Homo sapiens
tatataatacactta

SEQ ID NO: 1008685 - DNA, 15 bp, Homo sapiens
atataatacacttat

SEQ ID NO: 1008686 - DNA, 15 bp, Homo sapiens
tataatacacttatt

SEQ ID NO: 1008687 - DNA, 15 bp, Homo sapiens
ataatacacttattg

SEQ ID NO: 1008688 - DNA, 15 bp, Homo sapiens
taatacacttattgt

SEQ ID NO: 1008689 - DNA, 15 bp, Homo sapiens
aatacacttattgta

SEQ ID NO: 1008690 - DNA, 15 bp, Homo sapiens
atacacttattgtac

SEQ ID NO: 1008691 - DNA, 15 bp, Homo sapiens
tacacttattgtaca

SEQ ID NO: 1008692 - DNA, 15 bp, Homo sapiens
acacttattgtacat

SEQ ID NO: 1008693 - DNA, 15 bp, Homo sapiens
cacttattgtacatt

SEQ ID NO: 1008694 - DNA, 15 bp, Homo sapiens
acttattgtacattc

SEQ ID NO: 1008695 - DNA, 15 bp, Homo sapiens
cttattgtacattct

SEQ ID NO: 1008696 - DNA, 15 bp, Homo sapiens
ttattgtacattctt

SEQ ID NO: 1008697 - DNA, 15 bp, Homo sapiens
tattgtacattctta

SEQ ID NO: 1008698 - DNA, 15 bp, Homo sapiens
attgtacattcttaa

SEQ ID NO: 1008699 - DNA, 15 bp, Homo sapiens
ttgtacattcttaag

SEQ ID NO: 1008700 - DNA, 15 bp, Homo sapiens
tgtacattcttaagt

SEQ ID NO: 1008701 - DNA, 15 bp, Homo sapiens
gtacattcttaagtg

SEQ ID NO: 1008702 - DNA, 15 bp, Homo sapiens
tacattcttaagtgg

SEQ ID NO: 1008703 - DNA, 15 bp, Homo sapiens
acattcttaagtggg

SEQ ID NO: 1008704 - DNA, 15 bp, Homo sapiens
cattcttaagtggga

SEQ ID NO: 1008705 - DNA, 15 bp, Homo sapiens
attcttaagtgggag

SEQ ID NO: 1008706 - DNA, 15 bp, Homo sapiens
ttcttaagtgggaga

SEQ ID NO: 1008707 - DNA, 15 bp, Homo sapiens
tcttaagtgggagaa

SEQ ID NO: 1008708 - DNA, 15 bp, Homo sapiens
cttaagtgggagaat

SEQ ID NO: 1008709 - DNA, 15 bp, Homo sapiens
ttaagtgggagaata

SEQ ID NO: 1008710 - DNA, 15 bp, Homo sapiens
taagtgggagaatag

SEQ ID NO: 1008711 - DNA, 15 bp, Homo sapiens
aagtgggagaataga

SEQ ID NO: 1008712 - DNA, 15 bp, Homo sapiens
agtgggagaatagaa

SEQ ID NO: 1008713 - DNA, 15 bp, Homo sapiens
gtgggagaatagaat

SEQ ID NO: 1008714 - DNA, 15 bp, Homo sapiens
tgggagaatagaatt

SEQ ID NO: 1008715 - DNA, 15 bp, Homo sapiens
gggagaatagaattt

SEQ ID NO: 1008716 - DNA, 15 bp, Homo sapiens
ggagaatagaatttg

SEQ ID NO: 1008717 - DNA, 15 bp, Homo sapiens
gagaatagaatttgt

SEQ ID NO: 1008718 - DNA, 15 bp, Homo sapiens
agaatagaatttgtg

SEQ ID NO: 1008719 - DNA, 15 bp, Homo sapiens
gaatagaatttgtga

SEQ ID NO: 1008720 - DNA, 15 bp, Homo sapiens
aatagaatttgtgag

SEQ ID NO: 1008721 - DNA, 15 bp, Homo sapiens
atagaatttgtgaga

SEQ ID NO: 1008722 - DNA, 15 bp, Homo sapiens
tagaatttgtgagaa

SEQ ID NO: 1008723 - DNA, 15 bp, Homo sapiens
agaatttgtgagaat

SEQ ID NO: 1008724 - DNA, 15 bp, Homo sapiens
gaatttgtgagaata

SEQ ID NO: 1008725 - DNA, 15 bp, Homo sapiens
aatttgtgagaatac

SEQ ID NO: 1008726 - DNA, 15 bp, Homo sapiens
atttgtgagaatacc

SEQ ID NO: 1008727 - DNA, 15 bp, Homo sapiens
tttgtgagaatacca

SEQ ID NO: 1008728 - DNA, 15 bp, Homo sapiens
ttgtgagaataccaa

SEQ ID NO: 1008729 - DNA, 15 bp, Homo sapiens
tgtgagaataccaac

SEQ ID NO: 1008730 - DNA, 15 bp, Homo sapiens
gtgagaataccaaca

SEQ ID NO: 1008731 - DNA, 15 bp, Homo sapiens
tgagaataccaacag

SEQ ID NO: 1008732 - DNA, 15 bp, Homo sapiens
gagaataccaacaga

SEQ ID NO: 1008733 - DNA, 15 bp, Homo sapiens
agaataccaacagaa

SEQ ID NO: 1008734 - DNA, 15 bp, Homo sapiens
gaataccaacagaaa

SEQ ID NO: 1008735 - DNA, 15 bp, Homo sapiens
aataccaacagaaat

SEQ ID NO: 1008736 - DNA, 15 bp, Homo sapiens
ataccaacagaaata

SEQ ID NO: 1008737 - DNA, 15 bp, Homo sapiens
taccaacagaaatac

SEQ ID NO: 1008738 - DNA, 15 bp, Homo sapiens
accaacagaaataca

SEQ ID NO: 1008739 - DNA, 15 bp, Homo sapiens
ccaacagaaatacac

SEQ ID NO: 1008740 - DNA, 15 bp, Homo sapiens
caacagaaatacaca

SEQ ID NO: 1008741 - DNA, 15 bp, Homo sapiens
aacagaaatacacat

SEQ ID NO: 1008742 - DNA, 15 bp, Homo sapiens
acagaaatacacata

SEQ ID NO: 1008743 - DNA, 15 bp, Homo sapiens
cagaaatacacatac

SEQ ID NO: 1008744 - DNA, 15 bp, Homo sapiens
agaaatacacataca

SEQ ID NO: 1008745 - DNA, 15 bp, Homo sapiens
gaaatacacatacag

SEQ ID NO: 1008746 - DNA, 15 bp, Homo sapiens
aaatacacatacagc

SEQ ID NO: 1008747 - DNA, 15 bp, Homo sapiens
aatacacatacagct

SEQ ID NO: 1008748 - DNA, 15 bp, Homo sapiens
atacacatacagcta

SEQ ID NO: 1008749 - DNA, 15 bp, Homo sapiens
tacacatacagctat

SEQ ID NO: 1008750 - DNA, 15 bp, Homo sapiens
acacatacagctata

SEQ ID NO: 1008751 - DNA, 15 bp, Homo sapiens
cacatacagctataa

SEQ ID NO: 1008752 - DNA, 15 bp, Homo sapiens
acatacagctataaa

SEQ ID NO: 1008753 - DNA, 15 bp, Homo sapiens
catacagctataaat

SEQ ID NO: 1008754 - DNA, 15 bp, Homo sapiens
atacagctataaata

SEQ ID NO: 1008755 - DNA, 15 bp, Homo sapiens
tacagctataaatat

SEQ ID NO: 1008756 - DNA, 15 bp, Homo sapiens
acagctataaatatg

SEQ ID NO: 1008757 - DNA, 15 bp, Homo sapiens
cagctataaatatga

SEQ ID NO: 1008758 - DNA, 15 bp, Homo sapiens
agctataaatatgag

SEQ ID NO: 1008759 - DNA, 15 bp, Homo sapiens
gctataaatatgaga

SEQ ID NO: 1008760 - DNA, 15 bp, Homo sapiens
ctataaatatgagat

SEQ ID NO: 1008761 - DNA, 15 bp, Homo sapiens
tataaatatgagatt

SEQ ID NO: 1008762 - DNA, 15 bp, Homo sapiens
ataaatatgagatta

SEQ ID NO: 1008763 - DNA, 15 bp, Homo sapiens
taaatatgagattat

SEQ ID NO: 1008764 - DNA, 15 bp, Homo sapiens
aaatatgagattatg

SEQ ID NO: 1008765 - DNA, 15 bp, Homo sapiens
aatatgagattatga

SEQ ID NO: 1008766 - DNA, 15 bp, Homo sapiens
atatgagattatgat

SEQ ID NO: 1008767 - DNA, 15 bp, Homo sapiens
tatgagattatgatt

SEQ ID NO: 1008768 - DNA, 15 bp, Homo sapiens
atgagattatgattc

SEQ ID NO: 1008769 - DNA, 15 bp, Homo sapiens
tgagattatgattct

SEQ ID NO: 1008770 - DNA, 15 bp, Homo sapiens
gagattatgattctt

SEQ ID NO: 1008771 - DNA, 15 bp, Homo sapiens
agattatgattcttt

SEQ ID NO: 1008772 - DNA, 15 bp, Homo sapiens
gattatgattctttc

SEQ ID NO: 1008773 - DNA, 15 bp, Homo sapiens
attatgattctttca

SEQ ID NO: 1008774 - DNA, 15 bp, Homo sapiens
ttatgattctttcat

SEQ ID NO: 1008775 - DNA, 15 bp, Homo sapiens
tatgattctttcatg

SEQ ID NO: 1008776 - DNA, 15 bp, Homo sapiens
atgattctttcatgt

SEQ ID NO: 1008777 - DNA, 15 bp, Homo sapiens
tgattctttcatgtt

SEQ ID NO: 1008778 - DNA, 15 bp, Homo sapiens
gattctttcatgttg

SEQ ID NO: 1008779 - DNA, 15 bp, Homo sapiens
attctttcatgttgg

SEQ ID NO: 1008780 - DNA, 15 bp, Homo sapiens
ttctttcatgttggc

SEQ ID NO: 1008781 - DNA, 15 bp, Homo sapiens
tctttcatgttggca

SEQ ID NO: 1008782 - DNA, 15 bp, Homo sapiens
ctttcatgttggcat

SEQ ID NO: 1008783 - DNA, 15 bp, Homo sapiens
tttcatgttggcatt

SEQ ID NO: 1008784 - DNA, 15 bp, Homo sapiens
ttcatgttggcattg

SEQ ID NO: 1008785 - DNA, 15 bp, Homo sapiens
tcatgttggcattgc

SEQ ID NO: 1008786 - DNA, 15 bp, Homo sapiens
catgttggcattgca

SEQ ID NO: 1008787 - DNA, 15 bp, Homo sapiens
atgttggcattgcac

SEQ ID NO: 1008788 - DNA, 15 bp, Homo sapiens
tgttggcattgcaca

SEQ ID NO: 1008789 - DNA, 15 bp, Homo sapiens
gttggcattgcacag

SEQ ID NO: 1008790 - DNA, 15 bp, Homo sapiens
ttggcattgcacagt

SEQ ID NO: 1008791 - DNA, 15 bp, Homo sapiens
tggcattgcacagtc

SEQ ID NO: 1008792 - DNA, 15 bp, Homo sapiens
ggcattgcacagtct

SEQ ID NO: 1008793 - DNA, 15 bp, Homo sapiens
gcattgcacagtcta

SEQ ID NO: 1008794 - DNA, 15 bp, Homo sapiens
cattgcacagtctat

SEQ ID NO: 1008795 - DNA, 15 bp, Homo sapiens
attgcacagtctatt

SEQ ID NO: 1008796 - DNA, 15 bp, Homo sapiens
ttgcacagtctattt

SEQ ID NO: 1008797 - DNA, 15 bp, Homo sapiens
tgcacagtctatttt

SEQ ID NO: 1008798 - DNA, 15 bp, Homo sapiens
gcacagtctattttt

SEQ ID NO: 1008799 - DNA, 15 bp, Homo sapiens
cacagtctatttttg

SEQ ID NO: 1008800 - DNA, 15 bp, Homo sapiens
acagtctatttttgt

SEQ ID NO: 1008801 - DNA, 15 bp, Homo sapiens
cagtctatttttgta

SEQ ID NO: 1008802 - DNA, 15 bp, Homo sapiens
agtctatttttgtaa

SEQ ID NO: 1008803 - DNA, 15 bp, Homo sapiens
gtctatttttgtaaa

SEQ ID NO: 1008804 - DNA, 15 bp, Homo sapiens
tctatttttgtaaag

SEQ ID NO: 1008805 - DNA, 15 bp, Homo sapiens
ctatttttgtaaagt

SEQ ID NO: 1008806 - DNA, 15 bp, Homo sapiens
tatttttgtaaagtt

SEQ ID NO: 1008807 - DNA, 15 bp, Homo sapiens
atttttgtaaagttg

SEQ ID NO: 1008808 - DNA, 15 bp, Homo sapiens
tttttgtaaagttgg

SEQ ID NO: 1008809 - DNA, 15 bp, Homo sapiens
ttttgtaaagttggt

SEQ ID NO: 1008810 - DNA, 15 bp, Homo sapiens
tttgtaaagttggtt

SEQ ID NO: 1008811 - DNA, 15 bp, Homo sapiens
ttgtaaagttggttt

SEQ ID NO: 1008812 - DNA, 15 bp, Homo sapiens
tgtaaagttggtttt

SEQ ID NO: 1008813 - DNA, 15 bp, Homo sapiens
gtaaagttggttttt

SEQ ID NO: 1008814 - DNA, 15 bp, Homo sapiens
taaagttggttttta

SEQ ID NO: 1008815 - DNA, 15 bp, Homo sapiens
aaagttggtttttat

SEQ ID NO: 1008816 - DNA, 15 bp, Homo sapiens
aagttggtttttata

SEQ ID NO: 1008817 - DNA, 15 bp, Homo sapiens
agttggtttttatat

SEQ ID NO: 1008818 - DNA, 15 bp, Homo sapiens
gttggtttttatatt

SEQ ID NO: 1008819 - DNA, 15 bp, Homo sapiens
ttggtttttatattc

SEQ ID NO: 1008820 - DNA, 15 bp, Homo sapiens
tggtttttatattct

SEQ ID NO: 1008821 - DNA, 15 bp, Homo sapiens
ggtttttatattcta

SEQ ID NO: 1008822 - DNA, 15 bp, Homo sapiens
gtttttatattctaa

SEQ ID NO: 1008823 - DNA, 15 bp, Homo sapiens
tttttatattctaag

SEQ ID NO: 1008824 - DNA, 15 bp, Homo sapiens
ttttatattctaaga

SEQ ID NO: 1008825 - DNA, 15 bp, Homo sapiens
tttatattctaagaa

SEQ ID NO: 1008826 - DNA, 15 bp, Homo sapiens
ttatattctaagaac

SEQ ID NO: 1008827 - DNA, 15 bp, Homo sapiens
tatattctaagaaca

SEQ ID NO: 1008828 - DNA, 15 bp, Homo sapiens
atattctaagaacat

SEQ ID NO: 1008829 - DNA, 15 bp, Homo sapiens
tattctaagaacatt

SEQ ID NO: 1008830 - DNA, 15 bp, Homo sapiens
attctaagaacattt

SEQ ID NO: 1008831 - DNA, 15 bp, Homo sapiens
ttctaagaacatttt

SEQ ID NO: 1008832 - DNA, 15 bp, Homo sapiens
tctaagaacatttta

SEQ ID NO: 1008833 - DNA, 15 bp, Homo sapiens
ctaagaacattttac

SEQ ID NO: 1008834 - DNA, 15 bp, Homo sapiens
taagaacattttact

SEQ ID NO: 1008835 - DNA, 15 bp, Homo sapiens
aagaacattttactt

SEQ ID NO: 1008836 - DNA, 15 bp, Homo sapiens
agaacattttactta

SEQ ID NO: 1008837 - DNA, 15 bp, Homo sapiens
gaacattttacttag

SEQ ID NO: 1008838 - DNA, 15 bp, Homo sapiens
aacattttacttaga

SEQ ID NO: 1008839 - DNA, 15 bp, Homo sapiens
acattttacttagag

SEQ ID NO: 1008840 - DNA, 15 bp, Homo sapiens
cattttacttagagt

SEQ ID NO: 1008841 - DNA, 15 bp, Homo sapiens
attttacttagagtt

SEQ ID NO: 1008842 - DNA, 15 bp, Homo sapiens
ttttacttagagttt

SEQ ID NO: 1008843 - DNA, 15 bp, Homo sapiens
tttacttagagtttg

SEQ ID NO: 1008844 - DNA, 15 bp, Homo sapiens
ttacttagagtttga

SEQ ID NO: 1008845 - DNA, 15 bp, Homo sapiens
tacttagagtttgat

SEQ ID NO: 1008846 - DNA, 15 bp, Homo sapiens
acttagagtttgatt

SEQ ID NO: 1008847 - DNA, 15 bp, Homo sapiens
cttagagtttgatta

SEQ ID NO: 1008848 - DNA, 15 bp, Homo sapiens
ttagagtttgattac

SEQ ID NO: 1008849 - DNA, 15 bp, Homo sapiens
tagagtttgattaca

SEQ ID NO: 1008850 - DNA, 15 bp, Homo sapiens
agagtttgattacat

SEQ ID NO: 1008851 - DNA, 15 bp, Homo sapiens
gagtttgattacatt

SEQ ID NO: 1008852 - DNA, 15 bp, Homo sapiens
agtttgattacattt

SEQ ID NO: 1008853 - DNA, 15 bp, Homo sapiens
gtttgattacatttg

SEQ ID NO: 1008854 - DNA, 15 bp, Homo sapiens
tttgattacatttga

SEQ ID NO: 1008855 - DNA, 15 bp, Homo sapiens
ttgattacatttgag

SEQ ID NO: 1008856 - DNA, 15 bp, Homo sapiens
tgattacatttgagg

SEQ ID NO: 1008857 - DNA, 15 bp, Homo sapiens
gattacatttgaggc

SEQ ID NO: 1008858 - DNA, 15 bp, Homo sapiens
attacatttgaggca

SEQ ID NO: 1008859 - DNA, 15 bp, Homo sapiens
ttacatttgaggcaa

SEQ ID NO: 1008860 - DNA, 15 bp, Homo sapiens
tacatttgaggcaaa

SEQ ID NO: 1008861 - DNA, 15 bp, Homo sapiens
acatttgaggcaaac

SEQ ID NO: 1008862 - DNA, 15 bp, Homo sapiens
catttgaggcaaact

SEQ ID NO: 1008863 - DNA, 15 bp, Homo sapiens
atttgaggcaaactt

SEQ ID NO: 1008864 - DNA, 15 bp, Homo sapiens
tttgaggcaaacttt

SEQ ID NO: 1008865 - DNA, 15 bp, Homo sapiens
ttgaggcaaactttt

SEQ ID NO: 1008866 - DNA, 15 bp, Homo sapiens
tgaggcaaacttttc

SEQ ID NO: 1008867 - DNA, 15 bp, Homo sapiens
gaggcaaacttttca

SEQ ID NO: 1008868 - DNA, 15 bp, Homo sapiens
aggcaaacttttcaa

SEQ ID NO: 1008869 - DNA, 15 bp, Homo sapiens
ggcaaacttttcaac

SEQ ID NO: 1008870 - DNA, 15 bp, Homo sapiens
gcaaacttttcaact

SEQ ID NO: 1008871 - DNA, 15 bp, Homo sapiens
caaacttttcaactt

SEQ ID NO: 1008872 - DNA, 15 bp, Homo sapiens
aaacttttcaacttt

SEQ ID NO: 1008873 - DNA, 15 bp, Homo sapiens
aacttttcaactttg

SEQ ID NO: 1008874 - DNA, 15 bp, Homo sapiens
acttttcaactttgg

SEQ ID NO: 1008875 - DNA, 15 bp, Homo sapiens
cttttcaactttggt

SEQ ID NO: 1008876 - DNA, 15 bp, Homo sapiens
ttttcaactttggta

SEQ ID NO: 1008877 - DNA, 15 bp, Homo sapiens
tttcaactttggtag

SEQ ID NO: 1008878 - DNA, 15 bp, Homo sapiens
ttcaactttggtagt

SEQ ID NO: 1008879 - DNA, 15 bp, Homo sapiens
tcaactttggtagta

SEQ ID NO: 1008880 - DNA, 15 bp, Homo sapiens
caactttggtagtat

SEQ ID NO: 1008881 - DNA, 15 bp, Homo sapiens
aactttggtagtatt

SEQ ID NO: 1008882 - DNA, 15 bp, Homo sapiens
actttggtagtattt

SEQ ID NO: 1008883 - DNA, 15 bp, Homo sapiens
ctttggtagtatttg

SEQ ID NO: 1008884 - DNA, 15 bp, Homo sapiens
tttggtagtatttga

SEQ ID NO: 1008885 - DNA, 15 bp, Homo sapiens
ttggtagtatttgaa

SEQ ID NO: 1008886 - DNA, 15 bp, Homo sapiens
tggtagtatttgaat

SEQ ID NO: 1008887 - DNA, 15 bp, Homo sapiens
ggtagtatttgaatg

SEQ ID NO: 1008888 - DNA, 15 bp, Homo sapiens
gtagtatttgaatga

SEQ ID NO: 1008889 - DNA, 15 bp, Homo sapiens
tagtatttgaatgaa

SEQ ID NO: 1008890 - DNA, 15 bp, Homo sapiens
agtatttgaatgaag

SEQ ID NO: 1008891 - DNA, 15 bp, Homo sapiens
gtatttgaatgaaga

SEQ ID NO: 1008892 - DNA, 15 bp, Homo sapiens
tatttgaatgaagat

SEQ ID NO: 1008893 - DNA, 15 bp, Homo sapiens
atttgaatgaagatt

SEQ ID NO: 1008894 - DNA, 15 bp, Homo sapiens
tttgaatgaagattc

SEQ ID NO: 1008895 - DNA, 15 bp, Homo sapiens
ttgaatgaagattcc

SEQ ID NO: 1008896 - DNA, 15 bp, Homo sapiens
tgaatgaagattcct

SEQ ID NO: 1008897 - DNA, 15 bp, Homo sapiens
gaatgaagattcctg

SEQ ID NO: 1008898 - DNA, 15 bp, Homo sapiens
aatgaagattcctgg

SEQ ID NO: 1008899 - DNA, 15 bp, Homo sapiens
atgaagattcctgga

SEQ ID NO: 1008900 - DNA, 15 bp, Homo sapiens
tgaagattcctggat

SEQ ID NO: 1008901 - DNA, 15 bp, Homo sapiens
gaagattcctggatg

SEQ ID NO: 1008902 - DNA, 15 bp, Homo sapiens
aagattcctggatgt

SEQ ID NO: 1008903 - DNA, 15 bp, Homo sapiens
agattcctggatgtg

SEQ ID NO: 1008904 - DNA, 15 bp, Homo sapiens
gattcctggatgtgg

SEQ ID NO: 1008905 - DNA, 15 bp, Homo sapiens
attcctggatgtggt

SEQ ID NO: 1008906 - DNA, 15 bp, Homo sapiens
ttcctggatgtggtt

SEQ ID NO: 1008907 - DNA, 15 bp, Homo sapiens
tcctggatgtggttt

SEQ ID NO: 1008908 - DNA, 15 bp, Homo sapiens
cctggatgtggtttt

SEQ ID NO: 1008909 - DNA, 15 bp, Homo sapiens
ctggatgtggttttt

SEQ ID NO: 1008910 - DNA, 15 bp, Homo sapiens
tggatgtggtttttt

SEQ ID NO: 1008911 - DNA, 15 bp, Homo sapiens
ggatgtggttttttt

SEQ ID NO: 1008912 - DNA, 15 bp, Homo sapiens
gatgtggttttttta

SEQ ID NO: 1008913 - DNA, 15 bp, Homo sapiens
atgtggtttttttaa

SEQ ID NO: 1008914 - DNA, 15 bp, Homo sapiens
tgtggtttttttaat

SEQ ID NO: 1008915 - DNA, 15 bp, Homo sapiens
gtggtttttttaatt

SEQ ID NO: 1008916 - DNA, 15 bp, Homo sapiens
tggtttttttaattg

SEQ ID NO: 1008917 - DNA, 15 bp, Homo sapiens
ggtttttttaattgt

SEQ ID NO: 1008918 - DNA, 15 bp, Homo sapiens
gtttttttaattgtt

SEQ ID NO: 1008919 - DNA, 15 bp, Homo sapiens
tttttttaattgtta

SEQ ID NO: 1008920 - DNA, 15 bp, Homo sapiens
ttttttaattgttac

SEQ ID NO: 1008921 - DNA, 15 bp, Homo sapiens
tttttaattgttaca

SEQ ID NO: 1008922 - DNA, 15 bp, Homo sapiens
ttttaattgttacat

SEQ ID NO: 1008923 - DNA, 15 bp, Homo sapiens
tttaattgttacatc

SEQ ID NO: 1008924 - DNA, 15 bp, Homo sapiens
ttaattgttacatct

SEQ ID NO: 1008925 - DNA, 15 bp, Homo sapiens
taattgttacatcta

SEQ ID NO: 1008926 - DNA, 15 bp, Homo sapiens
aattgttacatctac

SEQ ID NO: 1008927 - DNA, 15 bp, Homo sapiens
attgttacatctact

SEQ ID NO: 1008928 - DNA, 15 bp, Homo sapiens
ttgttacatctactt

SEQ ID NO: 1008929 - DNA, 15 bp, Homo sapiens
tgttacatctacttt

SEQ ID NO: 1008930 - DNA, 15 bp, Homo sapiens
gttacatctactttt

SEQ ID NO: 1008931 - DNA, 15 bp, Homo sapiens
ttacatctacttttt

SEQ ID NO: 1008932 - DNA, 15 bp, Homo sapiens
tacatctactttttc

SEQ ID NO: 1008933 - DNA, 15 bp, Homo sapiens
acatctactttttca

SEQ ID NO: 1008934 - DNA, 15 bp, Homo sapiens
catctactttttcag

SEQ ID NO: 1008935 - DNA, 15 bp, Homo sapiens
atctactttttcagt

SEQ ID NO: 1008936 - DNA, 15 bp, Homo sapiens
tctactttttcagtt

SEQ ID NO: 1008937 - DNA, 15 bp, Homo sapiens
ctactttttcagttt

SEQ ID NO: 1008938 - DNA, 15 bp, Homo sapiens
tactttttcagtttt

SEQ ID NO: 1008939 - DNA, 15 bp, Homo sapiens
actttttcagttttt

SEQ ID NO: 1008940 - DNA, 15 bp, Homo sapiens
ctttttcagtttttc

SEQ ID NO: 1008941 - DNA, 15 bp, Homo sapiens
tttttcagtttttct

SEQ ID NO: 1008942 - DNA, 15 bp, Homo sapiens
ttttcagtttttctt

SEQ ID NO: 1008943 - DNA, 15 bp, Homo sapiens
tttcagtttttcttt

SEQ ID NO: 1008944 - DNA, 15 bp, Homo sapiens
ttcagtttttctttt

SEQ ID NO: 1008945 - DNA, 15 bp, Homo sapiens
tcagtttttcttttt

SEQ ID NO: 1008946 - DNA, 15 bp, Homo sapiens
cagtttttctttttc

SEQ ID NO: 1008947 - DNA, 15 bp, Homo sapiens
agtttttctttttcc

SEQ ID NO: 1008948 - DNA, 15 bp, Homo sapiens
gtttttctttttccc

SEQ ID NO: 1008949 - DNA, 15 bp, Homo sapiens
tttttctttttccct

SEQ ID NO: 1008950 - DNA, 15 bp, Homo sapiens
ttttctttttcccta

SEQ ID NO: 1008951 - DNA, 15 bp, Homo sapiens
tttctttttccctat

SEQ ID NO: 1008952 - DNA, 15 bp, Homo sapiens
ttctttttccctata

SEQ ID NO: 1008953 - DNA, 15 bp, Homo sapiens
tctttttccctataa

SEQ ID NO: 1008954 - DNA, 15 bp, Homo sapiens
ctttttccctataac

SEQ ID NO: 1008955 - DNA, 15 bp, Homo sapiens
tttttccctataaca

SEQ ID NO: 1008956 - DNA, 15 bp, Homo sapiens
ttttccctataacaa

SEQ ID NO: 1008957 - DNA, 15 bp, Homo sapiens
tttccctataacaac

SEQ ID NO: 1008958 - DNA, 15 bp, Homo sapiens
ttccctataacaacc

SEQ ID NO: 1008959 - DNA, 15 bp, Homo sapiens
tccctataacaaccc

SEQ ID NO: 1008960 - DNA, 15 bp, Homo sapiens
ccctataacaaccct

SEQ ID NO: 1008961 - DNA, 15 bp, Homo sapiens
cctataacaaccctc

SEQ ID NO: 1008962 - DNA, 15 bp, Homo sapiens
ctataacaaccctca

SEQ ID NO: 1008963 - DNA, 15 bp, Homo sapiens
tataacaaccctcaa

SEQ ID NO: 1008964 - DNA, 15 bp, Homo sapiens
ataacaaccctcaaa

SEQ ID NO: 1008965 - DNA, 15 bp, Homo sapiens
taacaaccctcaaat

SEQ ID NO: 1008966 - DNA, 15 bp, Homo sapiens
aacaaccctcaaatc

SEQ ID NO: 1008967 - DNA, 15 bp, Homo sapiens
acaaccctcaaatcc

SEQ ID NO: 1008968 - DNA, 15 bp, Homo sapiens
caaccctcaaatcct

SEQ ID NO: 1008969 - DNA, 15 bp, Homo sapiens
aaccctcaaatcctt

SEQ ID NO: 1008970 - DNA, 15 bp, Homo sapiens
accctcaaatccttc

SEQ ID NO: 1008971 - DNA, 15 bp, Homo sapiens
ccctcaaatccttca

SEQ ID NO: 1008972 - DNA, 15 bp, Homo sapiens
cctcaaatccttcat

SEQ ID NO: 1008973 - DNA, 15 bp, Homo sapiens
ctcaaatccttcatc

SEQ ID NO: 1008974 - DNA, 15 bp, Homo sapiens
tcaaatccttcatct

SEQ ID NO: 1008975 - DNA, 15 bp, Homo sapiens
caaatccttcatctt

SEQ ID NO: 1008976 - DNA, 15 bp, Homo sapiens
aaatccttcatcttg

SEQ ID NO: 1008977 - DNA, 15 bp, Homo sapiens
aatccttcatcttgt

SEQ ID NO: 1008978 - DNA, 15 bp, Homo sapiens
atccttcatcttgtc

SEQ ID NO: 1008979 - DNA, 15 bp, Homo sapiens
tccttcatcttgtct

SEQ ID NO: 1008980 - DNA, 15 bp, Homo sapiens
ccttcatcttgtctt

SEQ ID NO: 1008981 - DNA, 15 bp, Homo sapiens
cttcatcttgtcttt

SEQ ID NO: 1008982 - DNA, 15 bp, Homo sapiens
ttcatcttgtctttt

SEQ ID NO: 1008983 - DNA, 15 bp, Homo sapiens
tcatcttgtcttttg

SEQ ID NO: 1008984 - DNA, 15 bp, Homo sapiens
catcttgtcttttgg

SEQ ID NO: 1008985 - DNA, 15 bp, Homo sapiens
atcttgtcttttgga

SEQ ID NO: 1008986 - DNA, 15 bp, Homo sapiens
tcttgtcttttggag

SEQ ID NO: 1008987 - DNA, 15 bp, Homo sapiens
cttgtcttttggagt

SEQ ID NO: 1008988 - DNA, 15 bp, Homo sapiens
ttgtcttttggagta

SEQ ID NO: 1008989 - DNA, 15 bp, Homo sapiens
tgtcttttggagtat

SEQ ID NO: 1008990 - DNA, 15 bp, Homo sapiens
gtcttttggagtatt

SEQ ID NO: 1008991 - DNA, 15 bp, Homo sapiens
tcttttggagtattt

SEQ ID NO: 1008992 - DNA, 15 bp, Homo sapiens
cttttggagtatttt

SEQ ID NO: 1008993 - DNA, 15 bp, Homo sapiens
ttttggagtattttt

SEQ ID NO: 1008994 - DNA, 15 bp, Homo sapiens
tttggagtatttttt

SEQ ID NO: 1008995 - DNA, 15 bp, Homo sapiens
ttggagtattttttt

SEQ ID NO: 1008996 - DNA, 15 bp, Homo sapiens
tggagtatttttttc

SEQ ID NO: 1008997 - DNA, 15 bp, Homo sapiens
ggagtatttttttct

SEQ ID NO: 1008998 - DNA, 15 bp, Homo sapiens
gagtatttttttcta

SEQ ID NO: 1008999 - DNA, 15 bp, Homo sapiens
agtatttttttctat

SEQ ID NO: 1009000 - DNA, 15 bp, Homo sapiens
gtatttttttctatc

SEQ ID NO: 1009001 - DNA, 15 bp, Homo sapiens
tatttttttctatcc

SEQ ID NO: 1009002 - DNA, 15 bp, Homo sapiens
atttttttctatcct

SEQ ID NO: 1009003 - DNA, 15 bp, Homo sapiens
tttttttctatcctc

SEQ ID NO: 1009004 - DNA, 15 bp, Homo sapiens
ttttttctatcctcc

SEQ ID NO: 1009005 - DNA, 15 bp, Homo sapiens
tttttctatcctcct

SEQ ID NO: 1009006 - DNA, 15 bp, Homo sapiens
ttttctatcctcctg

SEQ ID NO: 1009007 - DNA, 15 bp, Homo sapiens
tttctatcctcctgt

SEQ ID NO: 1009008 - DNA, 15 bp, Homo sapiens
ttctatcctcctgtc

SEQ ID NO: 1009009 - DNA, 15 bp, Homo sapiens
tctatcctcctgtct

SEQ ID NO: 1009010 - DNA, 15 bp, Homo sapiens
ctatcctcctgtctt

SEQ ID NO: 1009011 - DNA, 15 bp, Homo sapiens
tatcctcctgtcttt

SEQ ID NO: 1009012 - DNA, 15 bp, Homo sapiens
atcctcctgtcttta

SEQ ID NO: 1009013 - DNA, 15 bp, Homo sapiens
tcctcctgtctttat

SEQ ID NO: 1009014 - DNA, 15 bp, Homo sapiens
cctcctgtctttatc

SEQ ID NO: 1009015 - DNA, 15 bp, Homo sapiens
ctcctgtctttatcg

SEQ ID NO: 1009016 - DNA, 15 bp, Homo sapiens
tcctgtctttatcgg

SEQ ID NO: 1009017 - DNA, 15 bp, Homo sapiens
cctgtctttatcggt

SEQ ID NO: 1009018 - DNA, 15 bp, Homo sapiens
ctgtctttatcggtg

SEQ ID NO: 1009019 - DNA, 15 bp, Homo sapiens
tgtctttatcggtgc

SEQ ID NO: 1009020 - DNA, 15 bp, Homo sapiens
gtctttatcggtgcc

SEQ ID NO: 1009021 - DNA, 15 bp, Homo sapiens
tctttatcggtgcct

SEQ ID NO: 1009022 - DNA, 15 bp, Homo sapiens
ctttatcggtgcctt

SEQ ID NO: 1009023 - DNA, 15 bp, Homo sapiens
tttatcggtgccttc

SEQ ID NO: 1009024 - DNA, 15 bp, Homo sapiens
ttatcggtgccttct

SEQ ID NO: 1009025 - DNA, 15 bp, Homo sapiens
tatcggtgccttcta

SEQ ID NO: 1009026 - DNA, 15 bp, Homo sapiens
atcggtgccttctat

SEQ ID NO: 1009027 - DNA, 15 bp, Homo sapiens
tcggtgccttctatt

SEQ ID NO: 1009028 - DNA, 15 bp, Homo sapiens
cggtgccttctattc

SEQ ID NO: 1009029 - DNA, 15 bp, Homo sapiens
ggtgccttctattcc

SEQ ID NO: 1009030 - DNA, 15 bp, Homo sapiens
gtgccttctattcct

SEQ ID NO: 1009031 - DNA, 15 bp, Homo sapiens
tgccttctattcctg

SEQ ID NO: 1009032 - DNA, 15 bp, Homo sapiens
gccttctattcctgt

SEQ ID NO: 1009033 - DNA, 15 bp, Homo sapiens
ccttctattcctgtc

SEQ ID NO: 1009034 - DNA, 15 bp, Homo sapiens
cttctattcctgtcc

SEQ ID NO: 1009035 - DNA, 15 bp, Homo sapiens
ttctattcctgtccc

SEQ ID NO: 1009036 - DNA, 15 bp, Homo sapiens
tctattcctgtccca

SEQ ID NO: 1009037 - DNA, 15 bp, Homo sapiens
ctattcctgtcccac

SEQ ID NO: 1009038 - DNA, 15 bp, Homo sapiens
tattcctgtcccacc

SEQ ID NO: 1009039 - DNA, 15 bp, Homo sapiens
attcctgtcccacct

SEQ ID NO: 1009040 - DNA, 15 bp, Homo sapiens
ttcctgtcccacctt

SEQ ID NO: 1009041 - DNA, 15 bp, Homo sapiens
tcctgtcccaccttg

SEQ ID NO: 1009042 - DNA, 15 bp, Homo sapiens
cctgtcccaccttgg

SEQ ID NO: 1009043 - DNA, 15 bp, Homo sapiens
ctgtcccaccttggg

SEQ ID NO: 1009044 - DNA, 15 bp, Homo sapiens
tgtcccaccttgggt

SEQ ID NO: 1009045 - DNA, 15 bp, Homo sapiens
gtcccaccttgggtc

SEQ ID NO: 1009046 - DNA, 15 bp, Homo sapiens
tcccaccttgggtct

SEQ ID NO: 1009047 - DNA, 15 bp, Homo sapiens
cccaccttgggtctg

SEQ ID NO: 1009048 - DNA, 15 bp, Homo sapiens
ccaccttgggtctgg

SEQ ID NO: 1009049 - DNA, 15 bp, Homo sapiens
caccttgggtctggg

SEQ ID NO: 1009050 - DNA, 15 bp, Homo sapiens
accttgggtctggga

SEQ ID NO: 1009051 - DNA, 15 bp, Homo sapiens
ccttgggtctgggaa

SEQ ID NO: 1009052 - DNA, 15 bp, Homo sapiens
cttgggtctgggaaa

SEQ ID NO: 1009053 - DNA, 15 bp, Homo sapiens
ttgggtctgggaaaa

SEQ ID NO: 1009054 - DNA, 15 bp, Homo sapiens
tgggtctgggaaaat

SEQ ID NO: 1009055 - DNA, 15 bp, Homo sapiens
gggtctgggaaaatg

SEQ ID NO: 1009056 - DNA, 15 bp, Homo sapiens
ggtctgggaaaatgt

SEQ ID NO: 1009057 - DNA, 15 bp, Homo sapiens
gtctgggaaaatgtg

SEQ ID NO: 1009058 - DNA, 15 bp, Homo sapiens
tctgggaaaatgtgc

SEQ ID NO: 1009059 - DNA, 15 bp, Homo sapiens
ctgggaaaatgtgcc

SEQ ID NO: 1009060 - DNA, 15 bp, Homo sapiens
tgggaaaatgtgcct

SEQ ID NO: 1009061 - DNA, 15 bp, Homo sapiens
gggaaaatgtgcctt

SEQ ID NO: 1009062 - DNA, 15 bp, Homo sapiens
ggaaaatgtgccttt

SEQ ID NO: 1009063 - DNA, 15 bp, Homo sapiens
gaaaatgtgccttta

SEQ ID NO: 1009064 - DNA, 15 bp, Homo sapiens
aaaatgtgcctttat

SEQ ID NO: 1009065 - DNA, 15 bp, Homo sapiens
aaatgtgcctttatg

SEQ ID NO: 1009066 - DNA, 15 bp, Homo sapiens
aatgtgcctttatgc

SEQ ID NO: 1009067 - DNA, 15 bp, Homo sapiens
atgtgcctttatgct

SEQ ID NO: 1009068 - DNA, 15 bp, Homo sapiens
tgtgcctttatgctc

SEQ ID NO: 1009069 - DNA, 15 bp, Homo sapiens
gtgcctttatgctcc

SEQ ID NO: 1009070 - DNA, 15 bp, Homo sapiens
tgcctttatgctcca

SEQ ID NO: 1009071 - DNA, 15 bp, Homo sapiens
gcctttatgctccat

SEQ ID NO: 1009072 - DNA, 15 bp, Homo sapiens
cctttatgctccatg

SEQ ID NO: 1009073 - DNA, 15 bp, Homo sapiens
ctttatgctccatgt

SEQ ID NO: 1009074 - DNA, 15 bp, Homo sapiens
tttatgctccatgtg

SEQ ID NO: 1009075 - DNA, 15 bp, Homo sapiens
ttatgctccatgtga

SEQ ID NO: 1009076 - DNA, 15 bp, Homo sapiens
tatgctccatgtgag

SEQ ID NO: 1009077 - DNA, 15 bp, Homo sapiens
atgctccatgtgagt

SEQ ID NO: 1009078 - DNA, 15 bp, Homo sapiens
tgctccatgtgagtc

SEQ ID NO: 1009079 - DNA, 15 bp, Homo sapiens
gctccatgtgagtct

SEQ ID NO: 1009080 - DNA, 15 bp, Homo sapiens
ctccatgtgagtctt

SEQ ID NO: 1009081 - DNA, 15 bp, Homo sapiens
tccatgtgagtcttc

SEQ ID NO: 1009082 - DNA, 15 bp, Homo sapiens
ccatgtgagtcttct

SEQ ID NO: 1009083 - DNA, 15 bp, Homo sapiens
catgtgagtcttctt

SEQ ID NO: 1009084 - DNA, 15 bp, Homo sapiens
atgtgagtcttcttc

SEQ ID NO: 1009085 - DNA, 15 bp, Homo sapiens
tgtgagtcttcttcc

SEQ ID NO: 1009086 - DNA, 15 bp, Homo sapiens
gtgagtcttcttcct

SEQ ID NO: 1009087 - DNA, 15 bp, Homo sapiens
tgagtcttcttcctt

SEQ ID NO: 1009088 - DNA, 15 bp, Homo sapiens
gagtcttcttccttt

SEQ ID NO: 1009089 - DNA, 15 bp, Homo sapiens
agtcttcttcctttt

SEQ ID NO: 1009090 - DNA, 15 bp, Homo sapiens
gtcttcttccttttg

SEQ ID NO: 1009091 - DNA, 15 bp, Homo sapiens
tcttcttccttttgg

SEQ ID NO: 1009092 - DNA, 15 bp, Homo sapiens
cttcttccttttggg

SEQ ID NO: 1009093 - DNA, 15 bp, Homo sapiens
ttcttccttttgggt

SEQ ID NO: 1009094 - DNA, 15 bp, Homo sapiens
tcttccttttgggta

SEQ ID NO: 1009095 - DNA, 15 bp, Homo sapiens
cttccttttgggtaa

SEQ ID NO: 1009096 - DNA, 15 bp, Homo sapiens
ttccttttgggtaat

SEQ ID NO: 1009097 - DNA, 15 bp, Homo sapiens
tccttttgggtaatg

SEQ ID NO: 1009098 - DNA, 15 bp, Homo sapiens
ccttttgggtaatga

SEQ ID NO: 1009099 - DNA, 15 bp, Homo sapiens
cttttgggtaatgag

SEQ ID NO: 1009100 - DNA, 15 bp, Homo sapiens
ttttgggtaatgagt

SEQ ID NO: 1009101 - DNA, 15 bp, Homo sapiens
tttgggtaatgagtg

SEQ ID NO: 1009102 - DNA, 15 bp, Homo sapiens
ttgggtaatgagtgc

SEQ ID NO: 1009103 - DNA, 15 bp, Homo sapiens
tgggtaatgagtgcg

SEQ ID NO: 1009104 - DNA, 15 bp, Homo sapiens
gggtaatgagtgcgg

SEQ ID NO: 1009105 - DNA, 15 bp, Homo sapiens
ggtaatgagtgcgga

SEQ ID NO: 1009106 - DNA, 15 bp, Homo sapiens
gtaatgagtgcggag

SEQ ID NO: 1009107 - DNA, 15 bp, Homo sapiens
taatgagtgcggagg

SEQ ID NO: 1009108 - DNA, 15 bp, Homo sapiens
aatgagtgcggaggg

SEQ ID NO: 1009109 - DNA, 15 bp, Homo sapiens
atgagtgcggaggga

SEQ ID NO: 1009110 - DNA, 15 bp, Homo sapiens
tgagtgcggagggaa

SEQ ID NO: 1009111 - DNA, 15 bp, Homo sapiens
gagtgcggagggaaa

SEQ ID NO: 1009112 - DNA, 15 bp, Homo sapiens
agtgcggagggaaaa

SEQ ID NO: 1009113 - DNA, 15 bp, Homo sapiens
gtgcggagggaaaaa

SEQ ID NO: 1009114 - DNA, 15 bp, Homo sapiens
tgcggagggaaaaaa

SEQ ID NO: 1009115 - DNA, 15 bp, Homo sapiens
gcggagggaaaaaaa

SEQ ID NO: 1009116 - DNA, 15 bp, Homo sapiens
cggagggaaaaaaag

SEQ ID NO: 1009117 - DNA, 15 bp, Homo sapiens
ggagggaaaaaaagc

SEQ ID NO: 1009118 - DNA, 15 bp, Homo sapiens
gagggaaaaaaagca

SEQ ID NO: 1009119 - DNA, 15 bp, Homo sapiens
agggaaaaaaagcac

SEQ ID NO: 1009120 - DNA, 15 bp, Homo sapiens
gggaaaaaaagcaca

SEQ ID NO: 1009121 - DNA, 15 bp, Homo sapiens
ggaaaaaaagcacag

SEQ ID NO: 1009122 - DNA, 15 bp, Homo sapiens
gaaaaaaagcacagt

SEQ ID NO: 1009123 - DNA, 15 bp, Homo sapiens
aaaaaaagcacagta

SEQ ID NO: 1009124 - DNA, 15 bp, Homo sapiens
aaaaaagcacagtat

SEQ ID NO: 1009125 - DNA, 15 bp, Homo sapiens
aaaaagcacagtatt

SEQ ID NO: 1009126 - DNA, 15 bp, Homo sapiens
aaaagcacagtattt

SEQ ID NO: 1009127 - DNA, 15 bp, Homo sapiens
aaagcacagtatttc

SEQ ID NO: 1009128 - DNA, 15 bp, Homo sapiens
aagcacagtatttct

SEQ ID NO: 1009129 - DNA, 15 bp, Homo sapiens
agcacagtatttctt

SEQ ID NO: 1009130 - DNA, 15 bp, Homo sapiens
gcacagtatttcttt

SEQ ID NO: 1009131 - DNA, 15 bp, Homo sapiens
cacagtatttctttc

SEQ ID NO: 1009132 - DNA, 15 bp, Homo sapiens
acagtatttctttcc

SEQ ID NO: 1009133 - DNA, 15 bp, Homo sapiens
cagtatttctttccc

SEQ ID NO: 1009134 - DNA, 15 bp, Homo sapiens
agtatttctttccct

SEQ ID NO: 1009135 - DNA, 15 bp, Homo sapiens
gtatttctttccctg

SEQ ID NO: 1009136 - DNA, 15 bp, Homo sapiens
tatttctttccctgt

SEQ ID NO: 1009137 - DNA, 15 bp, Homo sapiens
atttctttccctgtt

SEQ ID NO: 1009138 - DNA, 15 bp, Homo sapiens
tttctttccctgtta

SEQ ID NO: 1009139 - DNA, 15 bp, Homo sapiens
ttctttccctgttat

SEQ ID NO: 1009140 - DNA, 15 bp, Homo sapiens
tctttccctgttatg

SEQ ID NO: 1009141 - DNA, 15 bp, Homo sapiens
ctttccctgttatgt

SEQ ID NO: 1009142 - DNA, 15 bp, Homo sapiens
tttccctgttatgtt

SEQ ID NO: 1009143 - DNA, 15 bp, Homo sapiens
ttccctgttatgttt

SEQ ID NO: 1009144 - DNA, 15 bp, Homo sapiens
tccctgttatgtttc

SEQ ID NO: 1009145 - DNA, 15 bp, Homo sapiens
ccctgttatgtttca

SEQ ID NO: 1009146 - DNA, 15 bp, Homo sapiens
cctgttatgtttcag

SEQ ID NO: 1009147 - DNA, 15 bp, Homo sapiens
ctgttatgtttcagt

SEQ ID NO: 1009148 - DNA, 15 bp, Homo sapiens
tgttatgtttcagtt

SEQ ID NO: 1009149 - DNA, 15 bp, Homo sapiens
gttatgtttcagttt

SEQ ID NO: 1009150 - DNA, 15 bp, Homo sapiens
ttatgtttcagtttt

SEQ ID NO: 1009151 - DNA, 15 bp, Homo sapiens
tatgtttcagttttt

SEQ ID NO: 1009152 - DNA, 15 bp, Homo sapiens
atgtttcagtttttg

SEQ ID NO: 1009153 - DNA, 15 bp, Homo sapiens
tgtttcagtttttgg

SEQ ID NO: 1009154 - DNA, 15 bp, Homo sapiens
gtttcagtttttggc

SEQ ID NO: 1009155 - DNA, 15 bp, Homo sapiens
tttcagtttttggcc

SEQ ID NO: 1009156 - DNA, 15 bp, Homo sapiens
ttcagtttttggcct

SEQ ID NO: 1009157 - DNA, 15 bp, Homo sapiens
tcagtttttggcctc

SEQ ID NO: 1009158 - DNA, 15 bp, Homo sapiens
cagtttttggcctct

SEQ ID NO: 1009159 - DNA, 15 bp, Homo sapiens
agtttttggcctctg

SEQ ID NO: 1009160 - DNA, 15 bp, Homo sapiens
gtttttggcctctga

SEQ ID NO: 1009161 - DNA, 15 bp, Homo sapiens
tttttggcctctgat

SEQ ID NO: 1009162 - DNA, 15 bp, Homo sapiens
ttttggcctctgata

SEQ ID NO: 1009163 - DNA, 15 bp, Homo sapiens
tttggcctctgataa

SEQ ID NO: 1009164 - DNA, 15 bp, Homo sapiens
ttggcctctgataag

SEQ ID NO: 1009165 - DNA, 15 bp, Homo sapiens
tggcctctgataagt

SEQ ID NO: 1009166 - DNA, 15 bp, Homo sapiens
ggcctctgataagtg

SEQ ID NO: 1009167 - DNA, 15 bp, Homo sapiens
gcctctgataagtga

SEQ ID NO: 1009168 - DNA, 15 bp, Homo sapiens
cctctgataagtgaa

SEQ ID NO: 1009169 - DNA, 15 bp, Homo sapiens
ctctgataagtgaat

SEQ ID NO: 1009170 - DNA, 15 bp, Homo sapiens
tctgataagtgaatc

SEQ ID NO: 1009171 - DNA, 15 bp, Homo sapiens
ctgataagtgaatct

SEQ ID NO: 1009172 - DNA, 15 bp, Homo sapiens
tgataagtgaatctg

SEQ ID NO: 1009173 - DNA, 15 bp, Homo sapiens
gataagtgaatctgg

SEQ ID NO: 1009174 - DNA, 15 bp, Homo sapiens
ataagtgaatctgga

SEQ ID NO: 1009175 - DNA, 15 bp, Homo sapiens
taagtgaatctggag

SEQ ID NO: 1009176 - DNA, 15 bp, Homo sapiens
aagtgaatctggagt

SEQ ID NO: 1009177 - DNA, 15 bp, Homo sapiens
agtgaatctggagta

SEQ ID NO: 1009178 - DNA, 15 bp, Homo sapiens
gtgaatctggagtag

SEQ ID NO: 1009179 - DNA, 15 bp, Homo sapiens
tgaatctggagtagg

SEQ ID NO: 1009180 - DNA, 15 bp, Homo sapiens
gaatctggagtaggg

SEQ ID NO: 1009181 - DNA, 15 bp, Homo sapiens
aatctggagtaggga

SEQ ID NO: 1009182 - DNA, 15 bp, Homo sapiens
atctggagtagggaa

SEQ ID NO: 1009183 - DNA, 15 bp, Homo sapiens
tctggagtagggaat

SEQ ID NO: 1009184 - DNA, 15 bp, Homo sapiens
ctggagtagggaatg

SEQ ID NO: 1009185 - DNA, 15 bp, Homo sapiens
tggagtagggaatga

SEQ ID NO: 1009186 - DNA, 15 bp, Homo sapiens
ggagtagggaatgac

SEQ ID NO: 1009187 - DNA, 15 bp, Homo sapiens
gagtagggaatgaca

SEQ ID NO: 1009188 - DNA, 15 bp, Homo sapiens
agtagggaatgacag

SEQ ID NO: 1009189 - DNA, 15 bp, Homo sapiens
gtagggaatgacagt

SEQ ID NO: 1009190 - DNA, 15 bp, Homo sapiens
tagggaatgacagtg

SEQ ID NO: 1009191 - DNA, 15 bp, Homo sapiens
agggaatgacagtga

SEQ ID NO: 1009192 - DNA, 15 bp, Homo sapiens
gggaatgacagtgat

SEQ ID NO: 1009193 - DNA, 15 bp, Homo sapiens
ggaatgacagtgata

SEQ ID NO: 1009194 - DNA, 15 bp, Homo sapiens
gaatgacagtgatag

SEQ ID NO: 1009195 - DNA, 15 bp, Homo sapiens
aatgacagtgatagt

SEQ ID NO: 1009196 - DNA, 15 bp, Homo sapiens
atgacagtgatagta

SEQ ID NO: 1009197 - DNA, 15 bp, Homo sapiens
tgacagtgatagtag

SEQ ID NO: 1009198 - DNA, 15 bp, Homo sapiens
gacagtgatagtagg

SEQ ID NO: 1009199 - DNA, 15 bp, Homo sapiens
acagtgatagtaggt

SEQ ID NO: 1009200 - DNA, 15 bp, Homo sapiens
cagtgatagtaggtt

SEQ ID NO: 1009201 - DNA, 15 bp, Homo sapiens
agtgatagtaggttt

SEQ ID NO: 1009202 - DNA, 15 bp, Homo sapiens
gtgatagtaggtttt

SEQ ID NO: 1009203 - DNA, 15 bp, Homo sapiens
tgatagtaggttttg

SEQ ID NO: 1009204 - DNA, 15 bp, Homo sapiens
gatagtaggttttgt

SEQ ID NO: 1009205 - DNA, 15 bp, Homo sapiens
atagtaggttttgtt

SEQ ID NO: 1009206 - DNA, 15 bp, Homo sapiens
tagtaggttttgttt

SEQ ID NO: 1009207 - DNA, 15 bp, Homo sapiens
agtaggttttgtttt

SEQ ID NO: 1009208 - DNA, 15 bp, Homo sapiens
gtaggttttgtttta

SEQ ID NO: 1009209 - DNA, 15 bp, Homo sapiens
taggttttgttttag

SEQ ID NO: 1009210 - DNA, 15 bp, Homo sapiens
aggttttgttttagt

SEQ ID NO: 1009211 - DNA, 15 bp, Homo sapiens
ggttttgttttagtc

SEQ ID NO: 1009212 - DNA, 15 bp, Homo sapiens
gttttgttttagtca

SEQ ID NO: 1009213 - DNA, 15 bp, Homo sapiens
ttttgttttagtcat

SEQ ID NO: 1009214 - DNA, 15 bp, Homo sapiens
tttgttttagtcata

SEQ ID NO: 1009215 - DNA, 15 bp, Homo sapiens
ttgttttagtcatat

SEQ ID NO: 1009216 - DNA, 15 bp, Homo sapiens
tgttttagtcatata

SEQ ID NO: 1009217 - DNA, 15 bp, Homo sapiens
gttttagtcatatat

SEQ ID NO: 1009218 - DNA, 15 bp, Homo sapiens
ttttagtcatatatt

SEQ ID NO: 1009219 - DNA, 15 bp, Homo sapiens
tttagtcatatattg

SEQ ID NO: 1009220 - DNA, 15 bp, Homo sapiens
ttagtcatatattgg

SEQ ID NO: 1009221 - DNA, 15 bp, Homo sapiens
tagtcatatattggc

SEQ ID NO: 1009222 - DNA, 15 bp, Homo sapiens
agtcatatattggcg

SEQ ID NO: 1009223 - DNA, 15 bp, Homo sapiens
gtcatatattggcga

SEQ ID NO: 1009224 - DNA, 15 bp, Homo sapiens
tcatatattggcgac

SEQ ID NO: 1009225 - DNA, 15 bp, Homo sapiens
catatattggcgaca

SEQ ID NO: 1009226 - DNA, 15 bp, Homo sapiens
atatattggcgacaa

SEQ ID NO: 1009227 - DNA, 15 bp, Homo sapiens
tatattggcgacaaa

SEQ ID NO: 1009228 - DNA, 15 bp, Homo sapiens
atattggcgacaaag

SEQ ID NO: 1009229 - DNA, 15 bp, Homo sapiens
tattggcgacaaaga

SEQ ID NO: 1009230 - DNA, 15 bp, Homo sapiens
attggcgacaaagat

SEQ ID NO: 1009231 - DNA, 15 bp, Homo sapiens
ttggcgacaaagatc

SEQ ID NO: 1009232 - DNA, 15 bp, Homo sapiens
tggcgacaaagatca

SEQ ID NO: 1009233 - DNA, 15 bp, Homo sapiens
ggcgacaaagatcaa

SEQ ID NO: 1009234 - DNA, 15 bp, Homo sapiens
gcgacaaagatcaac

SEQ ID NO: 1009235 - DNA, 15 bp, Homo sapiens
cgacaaagatcaacg

SEQ ID NO: 1009236 - DNA, 15 bp, Homo sapiens
gacaaagatcaacga

SEQ ID NO: 1009237 - DNA, 15 bp, Homo sapiens
acaaagatcaacgaa

SEQ ID NO: 1009238 - DNA, 15 bp, Homo sapiens
caaagatcaacgaag

SEQ ID NO: 1009239 - DNA, 15 bp, Homo sapiens
aaagatcaacgaaga

SEQ ID NO: 1009240 - DNA, 15 bp, Homo sapiens
aagatcaacgaagac

SEQ ID NO: 1009241 - DNA, 15 bp, Homo sapiens
agatcaacgaagacc

SEQ ID NO: 1009242 - DNA, 15 bp, Homo sapiens
gatcaacgaagacct

SEQ ID NO: 1009243 - DNA, 15 bp, Homo sapiens
atcaacgaagacctg

SEQ ID NO: 1009244 - DNA, 15 bp, Homo sapiens
tcaacgaagacctga

SEQ ID NO: 1009245 - DNA, 15 bp, Homo sapiens
caacgaagacctgaa

SEQ ID NO: 1009246 - DNA, 15 bp, Homo sapiens
aacgaagacctgaag

SEQ ID NO: 1009247 - DNA, 15 bp, Homo sapiens
acgaagacctgaagc

SEQ ID NO: 1009248 - DNA, 15 bp, Homo sapiens
cgaagacctgaagct

SEQ ID NO: 1009249 - DNA, 15 bp, Homo sapiens
gaagacctgaagctc

SEQ ID NO: 1009250 - DNA, 15 bp, Homo sapiens
aagacctgaagctct

SEQ ID NO: 1009251 - DNA, 15 bp, Homo sapiens
agacctgaagctctt

SEQ ID NO: 1009252 - DNA, 15 bp, Homo sapiens
gacctgaagctcttg

SEQ ID NO: 1009253 - DNA, 15 bp, Homo sapiens
acctgaagctcttgt

SEQ ID NO: 1009254 - DNA, 15 bp, Homo sapiens
cctgaagctcttgtt

SEQ ID NO: 1009255 - DNA, 15 bp, Homo sapiens
ctgaagctcttgttc

SEQ ID NO: 1009256 - DNA, 15 bp, Homo sapiens
tgaagctcttgttcc

SEQ ID NO: 1009257 - DNA, 15 bp, Homo sapiens
gaagctcttgttcct

SEQ ID NO: 1009258 - DNA, 15 bp, Homo sapiens
aagctcttgttcctc

SEQ ID NO: 1009259 - DNA, 15 bp, Homo sapiens
agctcttgttcctct

SEQ ID NO: 1009260 - DNA, 15 bp, Homo sapiens
gctcttgttcctctc

SEQ ID NO: 1009261 - DNA, 15 bp, Homo sapiens
ctcttgttcctctca

SEQ ID NO: 1009262 - DNA, 15 bp, Homo sapiens
tcttgttcctctcat

SEQ ID NO: 1009263 - DNA, 15 bp, Homo sapiens
cttgttcctctcatg

SEQ ID NO: 1009264 - DNA, 15 bp, Homo sapiens
ttgttcctctcatga

SEQ ID NO: 1009265 - DNA, 15 bp, Homo sapiens
tgttcctctcatgac

SEQ ID NO: 1009266 - DNA, 15 bp, Homo sapiens
gttcctctcatgaca

SEQ ID NO: 1009267 - DNA, 15 bp, Homo sapiens
ttcctctcatgacac

SEQ ID NO: 1009268 - DNA, 15 bp, Homo sapiens
tcctctcatgacaca

SEQ ID NO: 1009269 - DNA, 15 bp, Homo sapiens
cctctcatgacacaa

SEQ ID NO: 1009270 - DNA, 15 bp, Homo sapiens
ctctcatgacacaaa

SEQ ID NO: 1009271 - DNA, 15 bp, Homo sapiens
tctcatgacacaaac

SEQ ID NO: 1009272 - DNA, 15 bp, Homo sapiens
ctcatgacacaaact

SEQ ID NO: 1009273 - DNA, 15 bp, Homo sapiens
tcatgacacaaacta

SEQ ID NO: 1009274 - DNA, 15 bp, Homo sapiens
catgacacaaactac

SEQ ID NO: 1009275 - DNA, 15 bp, Homo sapiens
atgacacaaactacc

SEQ ID NO: 1009276 - DNA, 15 bp, Homo sapiens
tgacacaaactaccc

SEQ ID NO: 1009277 - DNA, 15 bp, Homo sapiens
gacacaaactaccca

SEQ ID NO: 1009278 - DNA, 15 bp, Homo sapiens
acacaaactacccac

SEQ ID NO: 1009279 - DNA, 15 bp, Homo sapiens
cacaaactacccaca

SEQ ID NO: 1009280 - DNA, 15 bp, Homo sapiens
acaaactacccacag

SEQ ID NO: 1009281 - DNA, 15 bp, Homo sapiens
caaactacccacagg

SEQ ID NO: 1009282 - DNA, 15 bp, Homo sapiens
aaactacccacaggt

SEQ ID NO: 1009283 - DNA, 15 bp, Homo sapiens
aactacccacaggtg

SEQ ID NO: 1009284 - DNA, 15 bp, Homo sapiens
actacccacaggtgc

SEQ ID NO: 1009285 - DNA, 15 bp, Homo sapiens
ctacccacaggtgca

SEQ ID NO: 1009286 - DNA, 15 bp, Homo sapiens
tacccacaggtgcat

SEQ ID NO: 1009287 - DNA, 15 bp, Homo sapiens
acccacaggtgcatg

SEQ ID NO: 1009288 - DNA, 15 bp, Homo sapiens
cccacaggtgcatgc

SEQ ID NO: 1009289 - DNA, 15 bp, Homo sapiens
ccacaggtgcatgcc

SEQ ID NO: 1009290 - DNA, 15 bp, Homo sapiens
cacaggtgcatgcca

SEQ ID NO: 1009291 - DNA, 15 bp, Homo sapiens
acaggtgcatgccac

SEQ ID NO: 1009292 - DNA, 15 bp, Homo sapiens
caggtgcatgccacc

SEQ ID NO: 1009293 - DNA, 15 bp, Homo sapiens
aggtgcatgccacca

SEQ ID NO: 1009294 - DNA, 15 bp, Homo sapiens
ggtgcatgccaccat

SEQ ID NO: 1009295 - DNA, 15 bp, Homo sapiens
gtgcatgccaccatg

SEQ ID NO: 1009296 - DNA, 15 bp, Homo sapiens
tgcatgccaccatgc

SEQ ID NO: 1009297 - DNA, 15 bp, Homo sapiens
gcatgccaccatgcc

SEQ ID NO: 1009298 - DNA, 15 bp, Homo sapiens
catgccaccatgccg

SEQ ID NO: 1009299 - DNA, 15 bp, Homo sapiens
atgccaccatgccgg

SEQ ID NO: 1009300 - DNA, 15 bp, Homo sapiens
tgccaccatgccggg

SEQ ID NO: 1009301 - DNA, 15 bp, Homo sapiens
gccaccatgccgggc

SEQ ID NO: 1009302 - DNA, 15 bp, Homo sapiens
ccaccatgccgggct

SEQ ID NO: 1009303 - DNA, 15 bp, Homo sapiens
caccatgccgggcta

SEQ ID NO: 1009304 - DNA, 15 bp, Homo sapiens
accatgccgggctag

SEQ ID NO: 1009305 - DNA, 15 bp, Homo sapiens
ccatgccgggctagt

SEQ ID NO: 1009306 - DNA, 15 bp, Homo sapiens
catgccgggctagtt

SEQ ID NO: 1009307 - DNA, 15 bp, Homo sapiens
atgccgggctagttt

SEQ ID NO: 1009308 - DNA, 15 bp, Homo sapiens
tgccgggctagtttt

SEQ ID NO: 1009309 - DNA, 15 bp, Homo sapiens
gccgggctagttttt

SEQ ID NO: 1009310 - DNA, 15 bp, Homo sapiens
ccgggctagttttta

SEQ ID NO: 1009311 - DNA, 15 bp, Homo sapiens
cgggctagtttttaa

SEQ ID NO: 1009312 - DNA, 15 bp, Homo sapiens
gggctagtttttaaa

SEQ ID NO: 1009313 - DNA, 15 bp, Homo sapiens
ggctagtttttaaat

SEQ ID NO: 1009314 - DNA, 15 bp, Homo sapiens
gctagtttttaaatt

SEQ ID NO: 1009315 - DNA, 15 bp, Homo sapiens
ctagtttttaaattt

SEQ ID NO: 1009316 - DNA, 15 bp, Homo sapiens
tagtttttaaatttt

SEQ ID NO: 1009317 - DNA, 15 bp, Homo sapiens
agtttttaaattttt

SEQ ID NO: 1009318 - DNA, 15 bp, Homo sapiens
gtttttaaatttttt

SEQ ID NO: 1009319 - DNA, 15 bp, Homo sapiens
tttttaaattttttg

SEQ ID NO: 1009320 - DNA, 15 bp, Homo sapiens
ttttaaattttttgt

SEQ ID NO: 1009321 - DNA, 15 bp, Homo sapiens
tttaaattttttgta

SEQ ID NO: 1009322 - DNA, 15 bp, Homo sapiens
ttaaattttttgtag

SEQ ID NO: 1009323 - DNA, 15 bp, Homo sapiens
taaattttttgtaga

SEQ ID NO: 1009324 - DNA, 15 bp, Homo sapiens
aaattttttgtagag

SEQ ID NO: 1009325 - DNA, 15 bp, Homo sapiens
aattttttgtagaga

SEQ ID NO: 1009326 - DNA, 15 bp, Homo sapiens
attttttgtagagac

SEQ ID NO: 1009327 - DNA, 15 bp, Homo sapiens
ttttttgtagagacg

SEQ ID NO: 1009328 - DNA, 15 bp, Homo sapiens
tttttgtagagacga

SEQ ID NO: 1009329 - DNA, 15 bp, Homo sapiens
ttttgtagagacgag

SEQ ID NO: 1009330 - DNA, 15 bp, Homo sapiens
tttgtagagacgagg

SEQ ID NO: 1009331 - DNA, 15 bp, Homo sapiens
ttgtagagacgaggt

SEQ ID NO: 1009332 - DNA, 15 bp, Homo sapiens
tgtagagacgaggtt

SEQ ID NO: 1009333 - DNA, 15 bp, Homo sapiens
gtagagacgaggttt

SEQ ID NO: 1009334 - DNA, 15 bp, Homo sapiens
tagagacgaggtttc

SEQ ID NO: 1009335 - DNA, 15 bp, Homo sapiens
agagacgaggtttcg

SEQ ID NO: 1009336 - DNA, 15 bp, Homo sapiens
gagacgaggtttcgc

SEQ ID NO: 1009337 - DNA, 15 bp, Homo sapiens
agacgaggtttcgcc

SEQ ID NO: 1009338 - DNA, 15 bp, Homo sapiens
gacgaggtttcgcca

SEQ ID NO: 1009339 - DNA, 15 bp, Homo sapiens
acgaggtttcgccat

SEQ ID NO: 1009340 - DNA, 15 bp, Homo sapiens
cgaggtttcgccatc

SEQ ID NO: 1009341 - DNA, 15 bp, Homo sapiens
gaggtttcgccatct

SEQ ID NO: 1009342 - DNA, 15 bp, Homo sapiens
aggtttcgccatctt

SEQ ID NO: 1009343 - DNA, 15 bp, Homo sapiens
ggtttcgccatcttg

SEQ ID NO: 1009344 - DNA, 15 bp, Homo sapiens
gtttcgccatcttgc

SEQ ID NO: 1009345 - DNA, 15 bp, Homo sapiens
tttcgccatcttgcc

SEQ ID NO: 1009346 - DNA, 15 bp, Homo sapiens
ttcgccatcttgccc

SEQ ID NO: 1009347 - DNA, 15 bp, Homo sapiens
tcgccatcttgccca

SEQ ID NO: 1009348 - DNA, 15 bp, Homo sapiens
cgccatcttgcccag

SEQ ID NO: 1009349 - DNA, 15 bp, Homo sapiens
gccatcttgcccagg

SEQ ID NO: 1009350 - DNA, 15 bp, Homo sapiens
ccatcttgcccaggc

SEQ ID NO: 1009351 - DNA, 15 bp, Homo sapiens
catcttgcccaggct

SEQ ID NO: 1009352 - DNA, 15 bp, Homo sapiens
atcttgcccaggctg

SEQ ID NO: 1009353 - DNA, 15 bp, Homo sapiens
tcttgcccaggctgg

SEQ ID NO: 1009354 - DNA, 15 bp, Homo sapiens
cttgcccaggctggt

SEQ ID NO: 1009355 - DNA, 15 bp, Homo sapiens
gcccaggctggtctt

SEQ ID NO: 1009356 - DNA, 15 bp, Homo sapiens
cccaggctggtcttg

SEQ ID NO: 1009357 - DNA, 15 bp, Homo sapiens
ccaggctggtcttga

SEQ ID NO: 1009358 - DNA, 15 bp, Homo sapiens
aggctggtcttgaat

SEQ ID NO: 1009359 - DNA, 15 bp, Homo sapiens
ggctggtcttgaatt

SEQ ID NO: 1009360 - DNA, 15 bp, Homo sapiens
gctggtcttgaattc

SEQ ID NO: 1009361 - DNA, 15 bp, Homo sapiens
ctggtcttgaattcc

SEQ ID NO: 1009362 - DNA, 15 bp, Homo sapiens
tggtcttgaattcct

SEQ ID NO: 1009363 - DNA, 15 bp, Homo sapiens
ggtcttgaattcctg

SEQ ID NO: 1009364 - DNA, 15 bp, Homo sapiens
gtcttgaattcctgg

SEQ ID NO: 1009365 - DNA, 15 bp, Homo sapiens
tcttgaattcctgga

SEQ ID NO: 1009366 - DNA, 15 bp, Homo sapiens
cttgaattcctggac

SEQ ID NO: 1009367 - DNA, 15 bp, Homo sapiens
ttgaattcctggact

SEQ ID NO: 1009368 - DNA, 15 bp, Homo sapiens
tgaattcctggactc

SEQ ID NO: 1009369 - DNA, 15 bp, Homo sapiens
gaattcctggactca

SEQ ID NO: 1009370 - DNA, 15 bp, Homo sapiens
aattcctggactcaa

SEQ ID NO: 1009371 - DNA, 15 bp, Homo sapiens
attcctggactcaag

SEQ ID NO: 1009372 - DNA, 15 bp, Homo sapiens
ttcctggactcaagc

SEQ ID NO: 1009373 - DNA, 15 bp, Homo sapiens
tcctggactcaagcg

SEQ ID NO: 1009374 - DNA, 15 bp, Homo sapiens
cctggactcaagcga

SEQ ID NO: 1009375 - DNA, 15 bp, Homo sapiens
ctggactcaagcgat

SEQ ID NO: 1009376 - DNA, 15 bp, Homo sapiens
tggactcaagcgatc

SEQ ID NO: 1009377 - DNA, 15 bp, Homo sapiens
ggactcaagcgatct

SEQ ID NO: 1009378 - DNA, 15 bp, Homo sapiens
gactcaagcgatctt

SEQ ID NO: 1009379 - DNA, 15 bp, Homo sapiens
actcaagcgatcttc

SEQ ID NO: 1009380 - DNA, 15 bp, Homo sapiens
ctcaagcgatcttcc

SEQ ID NO: 1009381 - DNA, 15 bp, Homo sapiens
tcaagcgatcttccc

SEQ ID NO: 1009382 - DNA, 15 bp, Homo sapiens
caagcgatcttccca

SEQ ID NO: 1009383 - DNA, 15 bp, Homo sapiens
aagcgatcttcccac

SEQ ID NO: 1009384 - DNA, 15 bp, Homo sapiens
agcgatcttcccact

SEQ ID NO: 1009385 - DNA, 15 bp, Homo sapiens
gcgatcttcccactt

SEQ ID NO: 1009386 - DNA, 15 bp, Homo sapiens
cgatcttcccacttc

SEQ ID NO: 1009387 - DNA, 15 bp, Homo sapiens
gatcttcccacttcg

SEQ ID NO: 1009388 - DNA, 15 bp, Homo sapiens
atcttcccacttcgg

SEQ ID NO: 1009389 - DNA, 15 bp, Homo sapiens
tcttcccacttcggc

SEQ ID NO: 1009390 - DNA, 15 bp, Homo sapiens
cttcccacttcggcc

SEQ ID NO: 1009391 - DNA, 15 bp, Homo sapiens
ttcccacttcggcct

SEQ ID NO: 1009392 - DNA, 15 bp, Homo sapiens
tcccacttcggcctc

SEQ ID NO: 1009393 - DNA, 15 bp, Homo sapiens
cccacttcggcctcc

SEQ ID NO: 1009394 - DNA, 15 bp, Homo sapiens
ccacttcggcctccc

SEQ ID NO: 1009395 - DNA, 15 bp, Homo sapiens
cacttcggcctccca

SEQ ID NO: 1009396 - DNA, 15 bp, Homo sapiens
acttcggcctcccag

SEQ ID NO: 1009397 - DNA, 15 bp, Homo sapiens
cttcggcctcccaga

SEQ ID NO: 1009398 - DNA, 15 bp, Homo sapiens
ttcggcctcccagag

SEQ ID NO: 1009399 - DNA, 15 bp, Homo sapiens
tcggcctcccagagt

SEQ ID NO: 1009400 - DNA, 15 bp, Homo sapiens
cggcctcccagagtg

SEQ ID NO: 1009401 - DNA, 15 bp, Homo sapiens
ggcctcccagagtgc

SEQ ID NO: 1009402 - DNA, 15 bp, Homo sapiens
gcctcccagagtgct

SEQ ID NO: 1009403 - DNA, 15 bp, Homo sapiens
cctcccagagtgctg

SEQ ID NO: 1009404 - DNA, 15 bp, Homo sapiens
ctcccagagtgctgg

SEQ ID NO: 1009405 - DNA, 15 bp, Homo sapiens
tcccagagtgctggg

SEQ ID NO: 1009406 - DNA, 15 bp, Homo sapiens
cccagagtgctggga

SEQ ID NO: 1009407 - DNA, 15 bp, Homo sapiens
ccagagtgctgggat

SEQ ID NO: 1009408 - DNA, 15 bp, Homo sapiens
cagagtgctgggatt

SEQ ID NO: 1009409 - DNA, 15 bp, Homo sapiens
agagtgctgggatta

SEQ ID NO: 1009410 - DNA, 15 bp, Homo sapiens
gagtgctgggattac

SEQ ID NO: 1009411 - DNA, 15 bp, Homo sapiens
gagccaccgtgccca

SEQ ID NO: 1009412 - DNA, 15 bp, Homo sapiens
agccaccgtgcccaa

SEQ ID NO: 1009413 - DNA, 15 bp, Homo sapiens
gccaccgtgcccaac

SEQ ID NO: 1009414 - DNA, 15 bp, Homo sapiens
ccaccgtgcccaacc

SEQ ID NO: 1009415 - DNA, 15 bp, Homo sapiens
caccgtgcccaaccg

SEQ ID NO: 1009416 - DNA, 15 bp, Homo sapiens
accgtgcccaaccga

SEQ ID NO: 1009417 - DNA, 15 bp, Homo sapiens
ccgtgcccaaccgag

SEQ ID NO: 1009418 - DNA, 15 bp, Homo sapiens
cgtgcccaaccgaga

SEQ ID NO: 1009419 - DNA, 15 bp, Homo sapiens
gtgcccaaccgagat

SEQ ID NO: 1009420 - DNA, 15 bp, Homo sapiens
tgcccaaccgagatt

SEQ ID NO: 1009421 - DNA, 15 bp, Homo sapiens
gcccaaccgagattc

SEQ ID NO: 1009422 - DNA, 15 bp, Homo sapiens
cccaaccgagattct

SEQ ID NO: 1009423 - DNA, 15 bp, Homo sapiens
ccaaccgagattctg

SEQ ID NO: 1009424 - DNA, 15 bp, Homo sapiens
caaccgagattctgt

SEQ ID NO: 1009425 - DNA, 15 bp, Homo sapiens
aaccgagattctgtc

SEQ ID NO: 1009426 - DNA, 15 bp, Homo sapiens
accgagattctgtct

SEQ ID NO: 1009427 - DNA, 15 bp, Homo sapiens
ccgagattctgtctc

SEQ ID NO: 1009428 - DNA, 15 bp, Homo sapiens
cgagattctgtctct

SEQ ID NO: 1009429 - DNA, 15 bp, Homo sapiens
gagattctgtctctg

SEQ ID NO: 1009430 - DNA, 15 bp, Homo sapiens
agattctgtctctga

SEQ ID NO: 1009431 - DNA, 15 bp, Homo sapiens
gattctgtctctgaa

SEQ ID NO: 1009432 - DNA, 15 bp, Homo sapiens
attctgtctctgaaa

SEQ ID NO: 1009433 - DNA, 15 bp, Homo sapiens
ttctgtctctgaaaa

SEQ ID NO: 1009434 - DNA, 15 bp, Homo sapiens
tctgtctctgaaaaa

SEQ ID NO: 1009435 - DNA, 15 bp, Homo sapiens
ctgtctctgaaaaaa

SEQ ID NO: 1009436 - DNA, 15 bp, Homo sapiens
tgtctctgaaaaaat

SEQ ID NO: 1009437 - DNA, 15 bp, Homo sapiens
gtctctgaaaaaata

SEQ ID NO: 1009438 - DNA, 15 bp, Homo sapiens
tctctgaaaaaataa

SEQ ID NO: 1009439 - DNA, 15 bp, Homo sapiens
ctctgaaaaaataaa

SEQ ID NO: 1009440 - DNA, 15 bp, Homo sapiens
tctgaaaaaataaat

SEQ ID NO: 1009441 - DNA, 15 bp, Homo sapiens
ctgaaaaaataaata

SEQ ID NO: 1009442 - DNA, 15 bp, Homo sapiens
tgaaaaaataaataa

SEQ ID NO: 1009443 - DNA, 15 bp, Homo sapiens
gaaaaaataaataaa

SEQ ID NO: 1009444 - DNA, 15 bp, Homo sapiens
aaaaaataaataaat

SEQ ID NO: 1009445 - DNA, 15 bp, Homo sapiens
aaaaataaataaata

SEQ ID NO: 1009446 - DNA, 15 bp, Homo sapiens
aaaataaataaataa

SEQ ID NO: 1009447 - DNA, 15 bp, Homo sapiens
aaataaataaataaa

SEQ ID NO: 1009448 - DNA, 15 bp, Homo sapiens
aataaataaataaat

SEQ ID NO: 1009449 - DNA, 15 bp, Homo sapiens
ataaataaataaata

SEQ ID NO: 1009450 - DNA, 15 bp, Homo sapiens
taaataaataaataa

SEQ ID NO: 1009451 - DNA, 15 bp, Homo sapiens
aataaataaataaaa

SEQ ID NO: 1009452 - DNA, 15 bp, Homo sapiens
ataaataaataaaat

SEQ ID NO: 1009453 - DNA, 15 bp, Homo sapiens
taaataaataaaata

SEQ ID NO: 1009454 - DNA, 15 bp, Homo sapiens
aaataaataaaataa

SEQ ID NO: 1009455 - DNA, 15 bp, Homo sapiens
aataaataaaataaa

SEQ ID NO: 1009456 - DNA, 15 bp, Homo sapiens
ataaataaaataaat

SEQ ID NO: 1009457 - DNA, 15 bp, Homo sapiens
taaataaaataaata

SEQ ID NO: 1009458 - DNA, 15 bp, Homo sapiens
aaataaaataaatac

SEQ ID NO: 1009459 - DNA, 15 bp, Homo sapiens
aataaaataaataca

SEQ ID NO: 1009460 - DNA, 15 bp, Homo sapiens
ataaaataaatacat

SEQ ID NO: 1009461 - DNA, 15 bp, Homo sapiens
taaaataaatacata

SEQ ID NO: 1009462 - DNA, 15 bp, Homo sapiens
aaaataaatacataa

SEQ ID NO: 1009463 - DNA, 15 bp, Homo sapiens
aaataaatacataaa

SEQ ID NO: 1009464 - DNA, 15 bp, Homo sapiens
aataaatacataaaa

SEQ ID NO: 1009465 - DNA, 15 bp, Homo sapiens
ataaatacataaaaa

SEQ ID NO: 1009466 - DNA, 15 bp, Homo sapiens
taaatacataaaaat

SEQ ID NO: 1009467 - DNA, 15 bp, Homo sapiens
aaatacataaaaata

SEQ ID NO: 1009468 - DNA, 15 bp, Homo sapiens
aatacataaaaataa

SEQ ID NO: 1009469 - DNA, 15 bp, Homo sapiens
atacataaaaataaa

SEQ ID NO: 1009470 - DNA, 15 bp, Homo sapiens
tacataaaaataaaa

SEQ ID NO: 1009471 - DNA, 15 bp, Homo sapiens
acataaaaataaaat

SEQ ID NO: 1009472 - DNA, 15 bp, Homo sapiens
cataaaaataaaata

SEQ ID NO: 1009473 - DNA, 15 bp, Homo sapiens
ataaaaataaaataa

SEQ ID NO: 1009474 - DNA, 15 bp, Homo sapiens
taaaaataaaataaa

SEQ ID NO: 1009475 - DNA, 15 bp, Homo sapiens
aaaaataaaataaaa

SEQ ID NO: 1009476 - DNA, 15 bp, Homo sapiens
aaaataaaataaaaa

SEQ ID NO: 1009477 - DNA, 15 bp, Homo sapiens
aaataaaataaaaac

SEQ ID NO: 1009478 - DNA, 15 bp, Homo sapiens
aataaaataaaaaca

SEQ ID NO: 1009479 - DNA, 15 bp, Homo sapiens
ataaaataaaaacat

SEQ ID NO: 1009480 - DNA, 15 bp, Homo sapiens
taaaataaaaacatt

SEQ ID NO: 1009481 - DNA, 15 bp, Homo sapiens
aaaataaaaacattt

SEQ ID NO: 1009482 - DNA, 15 bp, Homo sapiens
aaataaaaacatttg

SEQ ID NO: 1009483 - DNA, 15 bp, Homo sapiens
aataaaaacatttga

SEQ ID NO: 1009484 - DNA, 15 bp, Homo sapiens
ataaaaacatttgaa

SEQ ID NO: 1009485 - DNA, 15 bp, Homo sapiens
taaaaacatttgaag

SEQ ID NO: 1009486 - DNA, 15 bp, Homo sapiens
aaaaacatttgaaga

SEQ ID NO: 1009487 - DNA, 15 bp, Homo sapiens
aaaacatttgaagac

SEQ ID NO: 1009488 - DNA, 15 bp, Homo sapiens
aaacatttgaagaca

SEQ ID NO: 1009489 - DNA, 15 bp, Homo sapiens
aacatttgaagacat

SEQ ID NO: 1009490 - DNA, 15 bp, Homo sapiens
acatttgaagacatc

SEQ ID NO: 1009491 - DNA, 15 bp, Homo sapiens
catttgaagacatct

SEQ ID NO: 1009492 - DNA, 15 bp, Homo sapiens
atttgaagacatctt

SEQ ID NO: 1009493 - DNA, 15 bp, Homo sapiens
tttgaagacatctta

SEQ ID NO: 1009494 - DNA, 15 bp, Homo sapiens
ttgaagacatcttaa

SEQ ID NO: 1009495 - DNA, 15 bp, Homo sapiens
tgaagacatcttaag

SEQ ID NO: 1009496 - DNA, 15 bp, Homo sapiens
gaagacatcttaagt

SEQ ID NO: 1009497 - DNA, 15 bp, Homo sapiens
aagacatcttaagta

SEQ ID NO: 1009498 - DNA, 15 bp, Homo sapiens
agacatcttaagtac

SEQ ID NO: 1009499 - DNA, 15 bp, Homo sapiens
gacatcttaagtaca

SEQ ID NO: 1009500 - DNA, 15 bp, Homo sapiens
acatcttaagtacac

SEQ ID NO: 1009501 - DNA, 15 bp, Homo sapiens
catcttaagtacacc

SEQ ID NO: 1009502 - DNA, 15 bp, Homo sapiens
atcttaagtacaccc

SEQ ID NO: 1009503 - DNA, 15 bp, Homo sapiens
tcttaagtacaccct

SEQ ID NO: 1009504 - DNA, 15 bp, Homo sapiens
cttaagtacacccta

SEQ ID NO: 1009505 - DNA, 15 bp, Homo sapiens
ttaagtacaccctag

SEQ ID NO: 1009506 - DNA, 15 bp, Homo sapiens
taagtacaccctaga

SEQ ID NO: 1009507 - DNA, 15 bp, Homo sapiens
aagtacaccctagat

SEQ ID NO: 1009508 - DNA, 15 bp, Homo sapiens
agtacaccctagatt

SEQ ID NO: 1009509 - DNA, 15 bp, Homo sapiens
gtacaccctagattc

SEQ ID NO: 1009510 - DNA, 15 bp, Homo sapiens
tacaccctagattcc

SEQ ID NO: 1009511 - DNA, 15 bp, Homo sapiens
acaccctagattccc

SEQ ID NO: 1009512 - DNA, 15 bp, Homo sapiens
caccctagattccca

SEQ ID NO: 1009513 - DNA, 15 bp, Homo sapiens
accctagattcccac

SEQ ID NO: 1009514 - DNA, 15 bp, Homo sapiens
ccctagattcccacc

SEQ ID NO: 1009515 - DNA, 15 bp, Homo sapiens
cctagattcccaccc

SEQ ID NO: 1009516 - DNA, 15 bp, Homo sapiens
ctagattcccacccc

SEQ ID NO: 1009517 - DNA, 15 bp, Homo sapiens
tagattcccaccccc

SEQ ID NO: 1009518 - DNA, 15 bp, Homo sapiens
agattcccaccccca

SEQ ID NO: 1009519 - DNA, 15 bp, Homo sapiens
gattcccacccccac

SEQ ID NO: 1009520 - DNA, 15 bp, Homo sapiens
attcccacccccacc

SEQ ID NO: 1009521 - DNA, 15 bp, Homo sapiens
ttcccacccccacca

SEQ ID NO: 1009522 - DNA, 15 bp, Homo sapiens
tcccacccccaccaa

SEQ ID NO: 1009523 - DNA, 15 bp, Homo sapiens
cccacccccaccaaa

SEQ ID NO: 1009524 - DNA, 15 bp, Homo sapiens
ccacccccaccaaaa

SEQ ID NO: 1009525 - DNA, 15 bp, Homo sapiens
cacccccaccaaaaa

SEQ ID NO: 1009526 - DNA, 15 bp, Homo sapiens
acccccaccaaaaaa

SEQ ID NO: 1009527 - DNA, 15 bp, Homo sapiens
cccccaccaaaaaat

SEQ ID NO: 1009528 - DNA, 15 bp, Homo sapiens
ccccaccaaaaaatt

SEQ ID NO: 1009529 - DNA, 15 bp, Homo sapiens
cccaccaaaaaattt

SEQ ID NO: 1009530 - DNA, 15 bp, Homo sapiens
ccaccaaaaaatttc

SEQ ID NO: 1009531 - DNA, 15 bp, Homo sapiens
caccaaaaaatttca

SEQ ID NO: 1009532 - DNA, 15 bp, Homo sapiens
accaaaaaatttcat

SEQ ID NO: 1009533 - DNA, 15 bp, Homo sapiens
ccaaaaaatttcatt

SEQ ID NO: 1009534 - DNA, 15 bp, Homo sapiens
caaaaaatttcattc

SEQ ID NO: 1009535 - DNA, 15 bp, Homo sapiens
aaaaaatttcattca

SEQ ID NO: 1009536 - DNA, 15 bp, Homo sapiens
aaaaatttcattcat

SEQ ID NO: 1009537 - DNA, 15 bp, Homo sapiens
aaaatttcattcatt

SEQ ID NO: 1009538 - DNA, 15 bp, Homo sapiens
aaatttcattcattc

SEQ ID NO: 1009539 - DNA, 15 bp, Homo sapiens
aatttcattcattct

SEQ ID NO: 1009540 - DNA, 15 bp, Homo sapiens
atttcattcattctt

SEQ ID NO: 1009541 - DNA, 15 bp, Homo sapiens
tttcattcattcttc

SEQ ID NO: 1009542 - DNA, 15 bp, Homo sapiens
ttcattcattcttca

SEQ ID NO: 1009543 - DNA, 15 bp, Homo sapiens
tcattcattcttcaa

SEQ ID NO: 1009544 - DNA, 15 bp, Homo sapiens
cattcattcttcaac

SEQ ID NO: 1009545 - DNA, 15 bp, Homo sapiens
attcattcttcaacc

SEQ ID NO: 1009546 - DNA, 15 bp, Homo sapiens
ttcattcttcaacca

SEQ ID NO: 1009547 - DNA, 15 bp, Homo sapiens
tcattcttcaaccat

SEQ ID NO: 1009548 - DNA, 15 bp, Homo sapiens
cattcttcaaccatt

SEQ ID NO: 1009549 - DNA, 15 bp, Homo sapiens
attcttcaaccattt

SEQ ID NO: 1009550 - DNA, 15 bp, Homo sapiens
ttcttcaaccatttc

SEQ ID NO: 1009551 - DNA, 15 bp, Homo sapiens
tcttcaaccatttct

SEQ ID NO: 1009552 - DNA, 15 bp, Homo sapiens
cttcaaccatttctc

SEQ ID NO: 1009553 - DNA, 15 bp, Homo sapiens
ttcaaccatttctca

SEQ ID NO: 1009554 - DNA, 15 bp, Homo sapiens
tcaaccatttctcaa

SEQ ID NO: 1009555 - DNA, 15 bp, Homo sapiens
caaccatttctcaaa

SEQ ID NO: 1009556 - DNA, 15 bp, Homo sapiens
aaccatttctcaaag

SEQ ID NO: 1009557 - DNA, 15 bp, Homo sapiens
accatttctcaaaga

SEQ ID NO: 1009558 - DNA, 15 bp, Homo sapiens
ccatttctcaaagaa

SEQ ID NO: 1009559 - DNA, 15 bp, Homo sapiens
catttctcaaagaac

SEQ ID NO: 1009560 - DNA, 15 bp, Homo sapiens
atttctcaaagaaca

SEQ ID NO: 1009561 - DNA, 15 bp, Homo sapiens
tttctcaaagaacat

SEQ ID NO: 1009562 - DNA, 15 bp, Homo sapiens
ttctcaaagaacatg

SEQ ID NO: 1009563 - DNA, 15 bp, Homo sapiens
tctcaaagaacatgt

SEQ ID NO: 1009564 - DNA, 15 bp, Homo sapiens
ctcaaagaacatgtt

SEQ ID NO: 1009565 - DNA, 15 bp, Homo sapiens
tcaaagaacatgttt

SEQ ID NO: 1009566 - DNA, 15 bp, Homo sapiens
caaagaacatgtttt

SEQ ID NO: 1009567 - DNA, 15 bp, Homo sapiens
aaagaacatgttttc

SEQ ID NO: 1009568 - DNA, 15 bp, Homo sapiens
aagaacatgttttca

SEQ ID NO: 1009569 - DNA, 15 bp, Homo sapiens
agaacatgttttcaa

SEQ ID NO: 1009570 - DNA, 15 bp, Homo sapiens
gaacatgttttcaag

SEQ ID NO: 1009571 - DNA, 15 bp, Homo sapiens
aacatgttttcaaga

SEQ ID NO: 1009572 - DNA, 15 bp, Homo sapiens
acatgttttcaagac

SEQ ID NO: 1009573 - DNA, 15 bp, Homo sapiens
catgttttcaagaca

SEQ ID NO: 1009574 - DNA, 15 bp, Homo sapiens
atgttttcaagacac

SEQ ID NO: 1009575 - DNA, 15 bp, Homo sapiens
tgttttcaagacacc

SEQ ID NO: 1009576 - DNA, 15 bp, Homo sapiens
gttttcaagacacct

SEQ ID NO: 1009577 - DNA, 15 bp, Homo sapiens
ttttcaagacacctc

SEQ ID NO: 1009578 - DNA, 15 bp, Homo sapiens
tttcaagacacctca

SEQ ID NO: 1009579 - DNA, 15 bp, Homo sapiens
ttcaagacacctcac

SEQ ID NO: 1009580 - DNA, 15 bp, Homo sapiens
tcaagacacctcact

SEQ ID NO: 1009581 - DNA, 15 bp, Homo sapiens
caagacacctcacta

SEQ ID NO: 1009582 - DNA, 15 bp, Homo sapiens
aagacacctcactat

SEQ ID NO: 1009583 - DNA, 15 bp, Homo sapiens
agacacctcactatc

SEQ ID NO: 1009584 - DNA, 15 bp, Homo sapiens
gacacctcactatcc

SEQ ID NO: 1009585 - DNA, 15 bp, Homo sapiens
acacctcactatcct

SEQ ID NO: 1009586 - DNA, 15 bp, Homo sapiens
cacctcactatccta

SEQ ID NO: 1009587 - DNA, 15 bp, Homo sapiens
acctcactatcctaa

SEQ ID NO: 1009588 - DNA, 15 bp, Homo sapiens
cctcactatcctaat

SEQ ID NO: 1009589 - DNA, 15 bp, Homo sapiens
ctcactatcctaatt

SEQ ID NO: 1009590 - DNA, 15 bp, Homo sapiens
tcactatcctaattg

SEQ ID NO: 1009591 - DNA, 15 bp, Homo sapiens
cactatcctaattgt

SEQ ID NO: 1009592 - DNA, 15 bp, Homo sapiens
actatcctaattgtt

SEQ ID NO: 1009593 - DNA, 15 bp, Homo sapiens
ctatcctaattgttt

SEQ ID NO: 1009594 - DNA, 15 bp, Homo sapiens
tatcctaattgtttt

SEQ ID NO: 1009595 - DNA, 15 bp, Homo sapiens
atcctaattgttttc

SEQ ID NO: 1009596 - DNA, 15 bp, Homo sapiens
tcctaattgttttcc

SEQ ID NO: 1009597 - DNA, 15 bp, Homo sapiens
cctaattgttttcct

SEQ ID NO: 1009598 - DNA, 15 bp, Homo sapiens
ctaattgttttcctt

SEQ ID NO: 1009599 - DNA, 15 bp, Homo sapiens
taattgttttccttt

SEQ ID NO: 1009600 - DNA, 15 bp, Homo sapiens
aattgttttcctttt

SEQ ID NO: 1009601 - DNA, 15 bp, Homo sapiens
attgttttccttttg

SEQ ID NO: 1009602 - DNA, 15 bp, Homo sapiens
ttgttttccttttgg

SEQ ID NO: 1009603 - DNA, 15 bp, Homo sapiens
tgttttccttttggt

SEQ ID NO: 1009604 - DNA, 15 bp, Homo sapiens
gttttccttttggtg

SEQ ID NO: 1009605 - DNA, 15 bp, Homo sapiens
ttttccttttggtgc

SEQ ID NO: 1009606 - DNA, 15 bp, Homo sapiens
tttccttttggtgca

SEQ ID NO: 1009607 - DNA, 15 bp, Homo sapiens
ttccttttggtgcaa

SEQ ID NO: 1009608 - DNA, 15 bp, Homo sapiens
tccttttggtgcaat

SEQ ID NO: 1009609 - DNA, 15 bp, Homo sapiens
ccttttggtgcaatg

SEQ ID NO: 1009610 - DNA, 15 bp, Homo sapiens
cttttggtgcaatgg

SEQ ID NO: 1009611 - DNA, 15 bp, Homo sapiens
ttttggtgcaatggt

SEQ ID NO: 1009612 - DNA, 15 bp, Homo sapiens
tttggtgcaatggtg

SEQ ID NO: 1009613 - DNA, 15 bp, Homo sapiens
ttggtgcaatggtgg

SEQ ID NO: 1009614 - DNA, 15 bp, Homo sapiens
tggtgcaatggtggt

SEQ ID NO: 1009615 - DNA, 15 bp, Homo sapiens
ggtgcaatggtggtc

SEQ ID NO: 1009616 - DNA, 15 bp, Homo sapiens
gtgcaatggtggtca

SEQ ID NO: 1009617 - DNA, 15 bp, Homo sapiens
tgcaatggtggtcag

SEQ ID NO: 1009618 - DNA, 15 bp, Homo sapiens
gcaatggtggtcagt

SEQ ID NO: 1009619 - DNA, 15 bp, Homo sapiens
caatggtggtcagta

SEQ ID NO: 1009620 - DNA, 15 bp, Homo sapiens
aatggtggtcagtac

SEQ ID NO: 1009621 - DNA, 15 bp, Homo sapiens
atggtggtcagtact

SEQ ID NO: 1009622 - DNA, 15 bp, Homo sapiens
tggtggtcagtactc

SEQ ID NO: 1009623 - DNA, 15 bp, Homo sapiens
ggtggtcagtactca

SEQ ID NO: 1009624 - DNA, 15 bp, Homo sapiens
gtggtcagtactcag

SEQ ID NO: 1009625 - DNA, 15 bp, Homo sapiens
tggtcagtactcagg

SEQ ID NO: 1009626 - DNA, 15 bp, Homo sapiens
ggtcagtactcaggc

SEQ ID NO: 1009627 - DNA, 15 bp, Homo sapiens
gtcagtactcaggca

SEQ ID NO: 1009628 - DNA, 15 bp, Homo sapiens
tcagtactcaggcat

SEQ ID NO: 1009629 - DNA, 15 bp, Homo sapiens
cagtactcaggcata

SEQ ID NO: 1009630 - DNA, 15 bp, Homo sapiens
agtactcaggcatac

SEQ ID NO: 1009631 - DNA, 15 bp, Homo sapiens
gtactcaggcatacc

SEQ ID NO: 1009632 - DNA, 15 bp, Homo sapiens
tactcaggcatacca

SEQ ID NO: 1009633 - DNA, 15 bp, Homo sapiens
actcaggcataccat

SEQ ID NO: 1009634 - DNA, 15 bp, Homo sapiens
ctcaggcataccatt

SEQ ID NO: 1009635 - DNA, 15 bp, Homo sapiens
tcaggcataccattt

SEQ ID NO: 1009636 - DNA, 15 bp, Homo sapiens
caggcataccatttt

SEQ ID NO: 1009637 - DNA, 15 bp, Homo sapiens
aggcataccattttt

SEQ ID NO: 1009638 - DNA, 15 bp, Homo sapiens
ggcataccatttttt

SEQ ID NO: 1009639 - DNA, 15 bp, Homo sapiens
gcataccatttttta

SEQ ID NO: 1009640 - DNA, 15 bp, Homo sapiens
cataccattttttat

SEQ ID NO: 1009641 - DNA, 15 bp, Homo sapiens
ataccattttttatc

SEQ ID NO: 1009642 - DNA, 15 bp, Homo sapiens
taccattttttatct

SEQ ID NO: 1009643 - DNA, 15 bp, Homo sapiens
accattttttatctt

SEQ ID NO: 1009644 - DNA, 15 bp, Homo sapiens
ccattttttatcttt

SEQ ID NO: 1009645 - DNA, 15 bp, Homo sapiens
cattttttatctttc

SEQ ID NO: 1009646 - DNA, 15 bp, Homo sapiens
attttttatctttcc

SEQ ID NO: 1009647 - DNA, 15 bp, Homo sapiens
ttttttatctttcct

SEQ ID NO: 1009648 - DNA, 15 bp, Homo sapiens
tttttatctttcctc

SEQ ID NO: 1009649 - DNA, 15 bp, Homo sapiens
ttttatctttcctcc

SEQ ID NO: 1009650 - DNA, 15 bp, Homo sapiens
tttatctttcctccc

SEQ ID NO: 1009651 - DNA, 15 bp, Homo sapiens
ttatctttcctccca

SEQ ID NO: 1009652 - DNA, 15 bp, Homo sapiens
tatctttcctcccaa

SEQ ID NO: 1009653 - DNA, 15 bp, Homo sapiens
atctttcctcccaat

SEQ ID NO: 1009654 - DNA, 15 bp, Homo sapiens
tctttcctcccaatg

SEQ ID NO: 1009655 - DNA, 15 bp, Homo sapiens
ctttcctcccaatgt

SEQ ID NO: 1009656 - DNA, 15 bp, Homo sapiens
tttcctcccaatgtt

SEQ ID NO: 1009657 - DNA, 15 bp, Homo sapiens
ttcctcccaatgttg

SEQ ID NO: 1009658 - DNA, 15 bp, Homo sapiens
tcctcccaatgttgt

SEQ ID NO: 1009659 - DNA, 15 bp, Homo sapiens
cctcccaatgttgta

SEQ ID NO: 1009660 - DNA, 15 bp, Homo sapiens
ctcccaatgttgtat

SEQ ID NO: 1009661 - DNA, 15 bp, Homo sapiens
tcccaatgttgtatg

SEQ ID NO: 1009662 - DNA, 15 bp, Homo sapiens
cccaatgttgtatga

SEQ ID NO: 1009663 - DNA, 15 bp, Homo sapiens
ccaatgttgtatgag

SEQ ID NO: 1009664 - DNA, 15 bp, Homo sapiens
caatgttgtatgagg

SEQ ID NO: 1009665 - DNA, 15 bp, Homo sapiens
aatgttgtatgaggg

SEQ ID NO: 1009666 - DNA, 15 bp, Homo sapiens
atgttgtatgagggc

SEQ ID NO: 1009667 - DNA, 15 bp, Homo sapiens
tgttgtatgagggca

SEQ ID NO: 1009668 - DNA, 15 bp, Homo sapiens
gttgtatgagggcat

SEQ ID NO: 1009669 - DNA, 15 bp, Homo sapiens
ttgtatgagggcatt

SEQ ID NO: 1009670 - DNA, 15 bp, Homo sapiens
tgtatgagggcatta

SEQ ID NO: 1009671 - DNA, 15 bp, Homo sapiens
gtatgagggcattat

SEQ ID NO: 1009672 - DNA, 15 bp, Homo sapiens
tatgagggcattata

SEQ ID NO: 1009673 - DNA, 15 bp, Homo sapiens
atgagggcattatat

SEQ ID NO: 1009674 - DNA, 15 bp, Homo sapiens
tgagggcattatatg

SEQ ID NO: 1009675 - DNA, 15 bp, Homo sapiens
gagggcattatatga

SEQ ID NO: 1009676 - DNA, 15 bp, Homo sapiens
agggcattatatgaa

SEQ ID NO: 1009677 - DNA, 15 bp, Homo sapiens
gggcattatatgaaa

SEQ ID NO: 1009678 - DNA, 15 bp, Homo sapiens
ggcattatatgaaac

SEQ ID NO: 1009679 - DNA, 15 bp, Homo sapiens
gcattatatgaaact

SEQ ID NO: 1009680 - DNA, 15 bp, Homo sapiens
cattatatgaaactt

SEQ ID NO: 1009681 - DNA, 15 bp, Homo sapiens
attatatgaaactta

SEQ ID NO: 1009682 - DNA, 15 bp, Homo sapiens
ttatatgaaacttaa

SEQ ID NO: 1009683 - DNA, 15 bp, Homo sapiens
tatatgaaacttaaa

SEQ ID NO: 1009684 - DNA, 15 bp, Homo sapiens
atatgaaacttaaat

SEQ ID NO: 1009685 - DNA, 15 bp, Homo sapiens
tatgaaacttaaatg

SEQ ID NO: 1009686 - DNA, 15 bp, Homo sapiens
atgaaacttaaatgg

SEQ ID NO: 1009687 - DNA, 15 bp, Homo sapiens
tgaaacttaaatgga

SEQ ID NO: 1009688 - DNA, 15 bp, Homo sapiens
gaaacttaaatggat

SEQ ID NO: 1009689 - DNA, 15 bp, Homo sapiens
aaacttaaatggatt

SEQ ID NO: 1009690 - DNA, 15 bp, Homo sapiens
aacttaaatggattt

SEQ ID NO: 1009691 - DNA, 15 bp, Homo sapiens
acttaaatggattta

SEQ ID NO: 1009692 - DNA, 15 bp, Homo sapiens
cttaaatggatttaa

SEQ ID NO: 1009693 - DNA, 15 bp, Homo sapiens
ttaaatggatttaaa

SEQ ID NO: 1009694 - DNA, 15 bp, Homo sapiens
taaatggatttaaaa

SEQ ID NO: 1009695 - DNA, 15 bp, Homo sapiens
aaatggatttaaaaa

SEQ ID NO: 1009696 - DNA, 15 bp, Homo sapiens
aatggatttaaaaat

SEQ ID NO: 1009697 - DNA, 15 bp, Homo sapiens
atggatttaaaaatg

SEQ ID NO: 1009698 - DNA, 15 bp, Homo sapiens
tggatttaaaaatgc

SEQ ID NO: 1009699 - DNA, 15 bp, Homo sapiens
ggatttaaaaatgct

SEQ ID NO: 1009700 - DNA, 15 bp, Homo sapiens
gatttaaaaatgctg

SEQ ID NO: 1009701 - DNA, 15 bp, Homo sapiens
atttaaaaatgctga

SEQ ID NO: 1009702 - DNA, 15 bp, Homo sapiens
tttaaaaatgctgag

SEQ ID NO: 1009703 - DNA, 15 bp, Homo sapiens
ttaaaaatgctgagc

SEQ ID NO: 1009704 - DNA, 15 bp, Homo sapiens
taaaaatgctgagct

SEQ ID NO: 1009705 - DNA, 15 bp, Homo sapiens
aaaaatgctgagctt

SEQ ID NO: 1009706 - DNA, 15 bp, Homo sapiens
aaaatgctgagcttg

SEQ ID NO: 1009707 - DNA, 15 bp, Homo sapiens
aaatgctgagcttgc

SEQ ID NO: 1009708 - DNA, 15 bp, Homo sapiens
aatgctgagcttgct

SEQ ID NO: 1009709 - DNA, 15 bp, Homo sapiens
atgctgagcttgctg

SEQ ID NO: 1009710 - DNA, 15 bp, Homo sapiens
tgctgagcttgctgg

SEQ ID NO: 1009711 - DNA, 15 bp, Homo sapiens
gctgagcttgctgga

SEQ ID NO: 1009712 - DNA, 15 bp, Homo sapiens
ctgagcttgctggac

SEQ ID NO: 1009713 - DNA, 15 bp, Homo sapiens
tgagcttgctggaca

SEQ ID NO: 1009714 - DNA, 15 bp, Homo sapiens
gagcttgctggacat

SEQ ID NO: 1009715 - DNA, 15 bp, Homo sapiens
agcttgctggacatg

SEQ ID NO: 1009716 - DNA, 15 bp, Homo sapiens
gcttgctggacatgg

SEQ ID NO: 1009717 - DNA, 15 bp, Homo sapiens
cttgctggacatggt

SEQ ID NO: 1009718 - DNA, 15 bp, Homo sapiens
ttgctggacatggtg

SEQ ID NO: 1009719 - DNA, 15 bp, Homo sapiens
tgctggacatggtgg

SEQ ID NO: 1009720 - DNA, 15 bp, Homo sapiens
gctggacatggtggc

SEQ ID NO: 1009721 - DNA, 15 bp, Homo sapiens
ctggacatggtggct

SEQ ID NO: 1009722 - DNA, 15 bp, Homo sapiens
tggacatggtggctc

SEQ ID NO: 1009723 - DNA, 15 bp, Homo sapiens
ggacatggtggctca

SEQ ID NO: 1009724 - DNA, 15 bp, Homo sapiens
gacatggtggctcac

SEQ ID NO: 1009725 - DNA, 15 bp, Homo sapiens
acatggtggctcaca

SEQ ID NO: 1009726 - DNA, 15 bp, Homo sapiens
catggtggctcacac

SEQ ID NO: 1009727 - DNA, 15 bp, Homo sapiens
atggtggctcacacc

SEQ ID NO: 1009728 - DNA, 15 bp, Homo sapiens
tggtggctcacacct

SEQ ID NO: 1009729 - DNA, 15 bp, Homo sapiens
acctgtaatcccagc

SEQ ID NO: 1009730 - DNA, 15 bp, Homo sapiens
agcactttgggaggt

SEQ ID NO: 1009731 - DNA, 15 bp, Homo sapiens
gcactttgggaggtg

SEQ ID NO: 1009732 - DNA, 15 bp, Homo sapiens
cactttgggaggtgg

SEQ ID NO: 1009733 - DNA, 15 bp, Homo sapiens
actttgggaggtggg

SEQ ID NO: 1009734 - DNA, 15 bp, Homo sapiens
ctttgggaggtgggg

SEQ ID NO: 1009735 - DNA, 15 bp, Homo sapiens
tttgggaggtggggg

SEQ ID NO: 1009736 - DNA, 15 bp, Homo sapiens
ttgggaggtggggga

SEQ ID NO: 1009737 - DNA, 15 bp, Homo sapiens
tgggaggtgggggag

SEQ ID NO: 1009738 - DNA, 15 bp, Homo sapiens
gggaggtgggggagg

SEQ ID NO: 1009739 - DNA, 15 bp, Homo sapiens
ggaggtgggggaggg

SEQ ID NO: 1009740 - DNA, 15 bp, Homo sapiens
gaggtgggggaggga

SEQ ID NO: 1009741 - DNA, 15 bp, Homo sapiens
aggtgggggagggag

SEQ ID NO: 1009742 - DNA, 15 bp, Homo sapiens
ggtgggggagggagg

SEQ ID NO: 1009743 - DNA, 15 bp, Homo sapiens
gtgggggagggagga

SEQ ID NO: 1009744 - DNA, 15 bp, Homo sapiens
tgggggagggaggat

SEQ ID NO: 1009745 - DNA, 15 bp, Homo sapiens
gggggagggaggatt

SEQ ID NO: 1009746 - DNA, 15 bp, Homo sapiens
ggggagggaggattg

SEQ ID NO: 1009747 - DNA, 15 bp, Homo sapiens
gggagggaggattgc

SEQ ID NO: 1009748 - DNA, 15 bp, Homo sapiens
ttggaggaatccatt

SEQ ID NO: 1009749 - DNA, 15 bp, Homo sapiens
tggaggaatccatta

SEQ ID NO: 1009750 - DNA, 15 bp, Homo sapiens
ggaggaatccattat

SEQ ID NO: 1009751 - DNA, 15 bp, Homo sapiens
gaggaatccattata

SEQ ID NO: 1009752 - DNA, 15 bp, Homo sapiens
aggaatccattatac

SEQ ID NO: 1009753 - DNA, 15 bp, Homo sapiens
ggaatccattatact

SEQ ID NO: 1009754 - DNA, 15 bp, Homo sapiens
gaatccattatacta

SEQ ID NO: 1009755 - DNA, 15 bp, Homo sapiens
aatccattatactat

SEQ ID NO: 1009756 - DNA, 15 bp, Homo sapiens
atccattatactatc

SEQ ID NO: 1009757 - DNA, 15 bp, Homo sapiens
tccattatactatca

SEQ ID NO: 1009758 - DNA, 15 bp, Homo sapiens
ccattatactatcag

SEQ ID NO: 1009759 - DNA, 15 bp, Homo sapiens
cattatactatcaga

SEQ ID NO: 1009760 - DNA, 15 bp, Homo sapiens
attatactatcagac

SEQ ID NO: 1009761 - DNA, 15 bp, Homo sapiens
ttatactatcagact

SEQ ID NO: 1009762 - DNA, 15 bp, Homo sapiens
tatactatcagacta

SEQ ID NO: 1009763 - DNA, 15 bp, Homo sapiens
atactatcagactaa

SEQ ID NO: 1009764 - DNA, 15 bp, Homo sapiens
tactatcagactaaa

SEQ ID NO: 1009765 - DNA, 15 bp, Homo sapiens
actatcagactaaaa

SEQ ID NO: 1009766 - DNA, 15 bp, Homo sapiens
ctatcagactaaaaa

SEQ ID NO: 1009767 - DNA, 15 bp, Homo sapiens
tatcagactaaaaat

SEQ ID NO: 1009768 - DNA, 15 bp, Homo sapiens
atcagactaaaaatt

SEQ ID NO: 1009769 - DNA, 15 bp, Homo sapiens
tcagactaaaaattg

SEQ ID NO: 1009770 - DNA, 15 bp, Homo sapiens
cagactaaaaattga

SEQ ID NO: 1009771 - DNA, 15 bp, Homo sapiens
agactaaaaattgat

SEQ ID NO: 1009772 - DNA, 15 bp, Homo sapiens
gactaaaaattgatc

SEQ ID NO: 1009773 - DNA, 15 bp, Homo sapiens
actaaaaattgatca

SEQ ID NO: 1009774 - DNA, 15 bp, Homo sapiens
ctaaaaattgatcat

SEQ ID NO: 1009775 - DNA, 15 bp, Homo sapiens
taaaaattgatcatt

SEQ ID NO: 1009776 - DNA, 15 bp, Homo sapiens
aaaaattgatcattt

SEQ ID NO: 1009777 - DNA, 15 bp, Homo sapiens
aaaattgatcatttg

SEQ ID NO: 1009778 - DNA, 15 bp, Homo sapiens
aaattgatcatttgt

SEQ ID NO: 1009779 - DNA, 15 bp, Homo sapiens
aattgatcatttgta

SEQ ID NO: 1009780 - DNA, 15 bp, Homo sapiens
attgatcatttgtag

SEQ ID NO: 1009781 - DNA, 15 bp, Homo sapiens
ttgatcatttgtaga

SEQ ID NO: 1009782 - DNA, 15 bp, Homo sapiens
tgatcatttgtagaa

SEQ ID NO: 1009783 - DNA, 15 bp, Homo sapiens
gatcatttgtagaaa

SEQ ID NO: 1009784 - DNA, 15 bp, Homo sapiens
atcatttgtagaaac

SEQ ID NO: 1009785 - DNA, 15 bp, Homo sapiens
tcatttgtagaaact

SEQ ID NO: 1009786 - DNA, 15 bp, Homo sapiens
catttgtagaaacta

SEQ ID NO: 1009787 - DNA, 15 bp, Homo sapiens
atttgtagaaactag

SEQ ID NO: 1009788 - DNA, 15 bp, Homo sapiens
tttgtagaaactaga

SEQ ID NO: 1009789 - DNA, 15 bp, Homo sapiens
ttgtagaaactagat

SEQ ID NO: 1009790 - DNA, 15 bp, Homo sapiens
tgtagaaactagatt

SEQ ID NO: 1009791 - DNA, 15 bp, Homo sapiens
gtagaaactagatta

SEQ ID NO: 1009792 - DNA, 15 bp, Homo sapiens
tagaaactagattaa

SEQ ID NO: 1009793 - DNA, 15 bp, Homo sapiens
agaaactagattaaa

SEQ ID NO: 1009794 - DNA, 15 bp, Homo sapiens
gaaactagattaaat

SEQ ID NO: 1009795 - DNA, 15 bp, Homo sapiens
aaactagattaaata

SEQ ID NO: 1009796 - DNA, 15 bp, Homo sapiens
aactagattaaataa

SEQ ID NO: 1009797 - DNA, 15 bp, Homo sapiens
actagattaaataaa

SEQ ID NO: 1009798 - DNA, 15 bp, Homo sapiens
ctagattaaataaag

SEQ ID NO: 1009799 - DNA, 15 bp, Homo sapiens
tagattaaataaagt

SEQ ID NO: 1009800 - DNA, 15 bp, Homo sapiens
agattaaataaagta

SEQ ID NO: 1009801 - DNA, 15 bp, Homo sapiens
gattaaataaagtag

SEQ ID NO: 1009802 - DNA, 15 bp, Homo sapiens
attaaataaagtagg

SEQ ID NO: 1009803 - DNA, 15 bp, Homo sapiens
ttaaataaagtagga

SEQ ID NO: 1009804 - DNA, 15 bp, Homo sapiens
taaataaagtaggag

SEQ ID NO: 1009805 - DNA, 15 bp, Homo sapiens
aaataaagtaggagt

SEQ ID NO: 1009806 - DNA, 15 bp, Homo sapiens
aataaagtaggagtt

SEQ ID NO: 1009807 - DNA, 15 bp, Homo sapiens
ataaagtaggagttg

SEQ ID NO: 1009808 - DNA, 15 bp, Homo sapiens
taaagtaggagttga

SEQ ID NO: 1009809 - DNA, 15 bp, Homo sapiens
aaagtaggagttgag

SEQ ID NO: 1009810 - DNA, 15 bp, Homo sapiens
aagtaggagttgagg

SEQ ID NO: 1009811 - DNA, 15 bp, Homo sapiens
agtaggagttgaggg

SEQ ID NO: 1009812 - DNA, 15 bp, Homo sapiens
gtaggagttgaggga

SEQ ID NO: 1009813 - DNA, 15 bp, Homo sapiens
taggagttgagggaa

SEQ ID NO: 1009814 - DNA, 15 bp, Homo sapiens
aggagttgagggaaa

SEQ ID NO: 1009815 - DNA, 15 bp, Homo sapiens
ggagttgagggaaaa

SEQ ID NO: 1009816 - DNA, 15 bp, Homo sapiens
gagttgagggaaaaa

SEQ ID NO: 1009817 - DNA, 15 bp, Homo sapiens
agttgagggaaaaat

SEQ ID NO: 1009818 - DNA, 15 bp, Homo sapiens
gttgagggaaaaatg

SEQ ID NO: 1009819 - DNA, 15 bp, Homo sapiens
ttgagggaaaaatgt

SEQ ID NO: 1009820 - DNA, 15 bp, Homo sapiens
tgagggaaaaatgta

SEQ ID NO: 1009821 - DNA, 15 bp, Homo sapiens
gagggaaaaatgtaa

SEQ ID NO: 1009822 - DNA, 15 bp, Homo sapiens
agggaaaaatgtaaa

SEQ ID NO: 1009823 - DNA, 15 bp, Homo sapiens
gggaaaaatgtaaac

SEQ ID NO: 1009824 - DNA, 15 bp, Homo sapiens
ggaaaaatgtaaaca

SEQ ID NO: 1009825 - DNA, 15 bp, Homo sapiens
gaaaaatgtaaacaa

SEQ ID NO: 1009826 - DNA, 15 bp, Homo sapiens
aaaaatgtaaacaac

SEQ ID NO: 1009827 - DNA, 15 bp, Homo sapiens
aaaatgtaaacaacc

SEQ ID NO: 1009828 - DNA, 15 bp, Homo sapiens
aaatgtaaacaacca

SEQ ID NO: 1009829 - DNA, 15 bp, Homo sapiens
aatgtaaacaaccat

SEQ ID NO: 1009830 - DNA, 15 bp, Homo sapiens
atgtaaacaaccata

SEQ ID NO: 1009831 - DNA, 15 bp, Homo sapiens
tgtaaacaaccatac

SEQ ID NO: 1009832 - DNA, 15 bp, Homo sapiens
gtaaacaaccatact

SEQ ID NO: 1009833 - DNA, 15 bp, Homo sapiens
taaacaaccatactg

SEQ ID NO: 1009834 - DNA, 15 bp, Homo sapiens
aaacaaccatactgt

SEQ ID NO: 1009835 - DNA, 15 bp, Homo sapiens
aacaaccatactgtc

SEQ ID NO: 1009836 - DNA, 15 bp, Homo sapiens
acaaccatactgtcc

SEQ ID NO: 1009837 - DNA, 15 bp, Homo sapiens
caaccatactgtccc

SEQ ID NO: 1009838 - DNA, 15 bp, Homo sapiens
aaccatactgtccca

SEQ ID NO: 1009839 - DNA, 15 bp, Homo sapiens
accatactgtcccaa

SEQ ID NO: 1009840 - DNA, 15 bp, Homo sapiens
ccatactgtcccaaa

SEQ ID NO: 1009841 - DNA, 15 bp, Homo sapiens
catactgtcccaaaa

SEQ ID NO: 1009842 - DNA, 15 bp, Homo sapiens
atactgtcccaaaaa

SEQ ID NO: 1009843 - DNA, 15 bp, Homo sapiens
tactgtcccaaaaaa

SEQ ID NO: 1009844 - DNA, 15 bp, Homo sapiens
actgtcccaaaaaag

SEQ ID NO: 1009845 - DNA, 15 bp, Homo sapiens
ctgtcccaaaaaagc

SEQ ID NO: 1009846 - DNA, 15 bp, Homo sapiens
tgtcccaaaaaagca

SEQ ID NO: 1009847 - DNA, 15 bp, Homo sapiens
gtcccaaaaaagcat

SEQ ID NO: 1009848 - DNA, 15 bp, Homo sapiens
tcccaaaaaagcatt

SEQ ID NO: 1009849 - DNA, 15 bp, Homo sapiens
cccaaaaaagcattt

SEQ ID NO: 1009850 - DNA, 15 bp, Homo sapiens
ccaaaaaagcatttc

SEQ ID NO: 1009851 - DNA, 15 bp, Homo sapiens
caaaaaagcatttct

SEQ ID NO: 1009852 - DNA, 15 bp, Homo sapiens
aaaaaagcatttctt

SEQ ID NO: 1009853 - DNA, 15 bp, Homo sapiens
aaaaagcatttcttc

SEQ ID NO: 1009854 - DNA, 15 bp, Homo sapiens
aaaagcatttcttcc

SEQ ID NO: 1009855 - DNA, 15 bp, Homo sapiens
aaagcatttcttccc

SEQ ID NO: 1009856 - DNA, 15 bp, Homo sapiens
aagcatttcttccct

SEQ ID NO: 1009857 - DNA, 15 bp, Homo sapiens
agcatttcttccctc

SEQ ID NO: 1009858 - DNA, 15 bp, Homo sapiens
gcatttcttccctcc

SEQ ID NO: 1009859 - DNA, 15 bp, Homo sapiens
catttcttccctccc

SEQ ID NO: 1009860 - DNA, 15 bp, Homo sapiens
atttcttccctccca

SEQ ID NO: 1009861 - DNA, 15 bp, Homo sapiens
tttcttccctcccag

SEQ ID NO: 1009862 - DNA, 15 bp, Homo sapiens
ttcttccctcccagt

SEQ ID NO: 1009863 - DNA, 15 bp, Homo sapiens
tcttccctcccagtt

SEQ ID NO: 1009864 - DNA, 15 bp, Homo sapiens
cttccctcccagttt

SEQ ID NO: 1009865 - DNA, 15 bp, Homo sapiens
ttccctcccagtttt

SEQ ID NO: 1009866 - DNA, 15 bp, Homo sapiens
tccctcccagttttg

SEQ ID NO: 1009867 - DNA, 15 bp, Homo sapiens
ccctcccagttttgg

SEQ ID NO: 1009868 - DNA, 15 bp, Homo sapiens
cctcccagttttggg

SEQ ID NO: 1009869 - DNA, 15 bp, Homo sapiens
ctcccagttttggga

SEQ ID NO: 1009870 - DNA, 15 bp, Homo sapiens
tcccagttttgggat

SEQ ID NO: 1009871 - DNA, 15 bp, Homo sapiens
cccagttttgggatt

SEQ ID NO: 1009872 - DNA, 15 bp, Homo sapiens
ccagttttgggattc

SEQ ID NO: 1009873 - DNA, 15 bp, Homo sapiens
cagttttgggattcc

SEQ ID NO: 1009874 - DNA, 15 bp, Homo sapiens
agttttgggattcct

SEQ ID NO: 1009875 - DNA, 15 bp, Homo sapiens
gttttgggattcctc

SEQ ID NO: 1009876 - DNA, 15 bp, Homo sapiens
ttttgggattcctcc

SEQ ID NO: 1009877 - DNA, 15 bp, Homo sapiens
tttgggattcctccc

SEQ ID NO: 1009878 - DNA, 15 bp, Homo sapiens
ttgggattcctccct

SEQ ID NO: 1009879 - DNA, 15 bp, Homo sapiens
tgggattcctccctg

SEQ ID NO: 1009880 - DNA, 15 bp, Homo sapiens
gggattcctccctga

SEQ ID NO: 1009881 - DNA, 15 bp, Homo sapiens
ggattcctccctgaa

SEQ ID NO: 1009882 - DNA, 15 bp, Homo sapiens
gattcctccctgaat

SEQ ID NO: 1009883 - DNA, 15 bp, Homo sapiens
attcctccctgaatg

SEQ ID NO: 1009884 - DNA, 15 bp, Homo sapiens
ttcctccctgaatgg

SEQ ID NO: 1009885 - DNA, 15 bp, Homo sapiens
tcctccctgaatgga

SEQ ID NO: 1009886 - DNA, 15 bp, Homo sapiens
cctccctgaatggag

SEQ ID NO: 1009887 - DNA, 15 bp, Homo sapiens
ctccctgaatggagt

SEQ ID NO: 1009888 - DNA, 15 bp, Homo sapiens
tccctgaatggagtt

SEQ ID NO: 1009889 - DNA, 15 bp, Homo sapiens
ccctgaatggagttc

SEQ ID NO: 1009890 - DNA, 15 bp, Homo sapiens
cctgaatggagttca

SEQ ID NO: 1009891 - DNA, 15 bp, Homo sapiens
ctgaatggagttcag

SEQ ID NO: 1009892 - DNA, 15 bp, Homo sapiens
tgaatggagttcagt

SEQ ID NO: 1009893 - DNA, 15 bp, Homo sapiens
gaatggagttcagta

SEQ ID NO: 1009894 - DNA, 15 bp, Homo sapiens
aatggagttcagtat

SEQ ID NO: 1009895 - DNA, 15 bp, Homo sapiens
atggagttcagtatt

SEQ ID NO: 1009896 - DNA, 15 bp, Homo sapiens
tggagttcagtattc

SEQ ID NO: 1009897 - DNA, 15 bp, Homo sapiens
ggagttcagtattca

SEQ ID NO: 1009898 - DNA, 15 bp, Homo sapiens
gagttcagtattcaa

SEQ ID NO: 1009899 - DNA, 15 bp, Homo sapiens
agttcagtattcaaa

SEQ ID NO: 1009900 - DNA, 15 bp, Homo sapiens
gttcagtattcaaaa

SEQ ID NO: 1009901 - DNA, 15 bp, Homo sapiens
ttcagtattcaaaat

SEQ ID NO: 1009902 - DNA, 15 bp, Homo sapiens
tcagtattcaaaatg

SEQ ID NO: 1009903 - DNA, 15 bp, Homo sapiens
cagtattcaaaatgt

SEQ ID NO: 1009904 - DNA, 15 bp, Homo sapiens
agtattcaaaatgtg

SEQ ID NO: 1009905 - DNA, 15 bp, Homo sapiens
gtattcaaaatgtgt

SEQ ID NO: 1009906 - DNA, 15 bp, Homo sapiens
tattcaaaatgtgta

SEQ ID NO: 1009907 - DNA, 15 bp, Homo sapiens
attcaaaatgtgtat

SEQ ID NO: 1009908 - DNA, 15 bp, Homo sapiens
ttcaaaatgtgtatc

SEQ ID NO: 1009909 - DNA, 15 bp, Homo sapiens
tcaaaatgtgtatca

SEQ ID NO: 1009910 - DNA, 15 bp, Homo sapiens
caaaatgtgtatcat

SEQ ID NO: 1009911 - DNA, 15 bp, Homo sapiens
aaaatgtgtatcata

SEQ ID NO: 1009912 - DNA, 15 bp, Homo sapiens
aaatgtgtatcataa

SEQ ID NO: 1009913 - DNA, 15 bp, Homo sapiens
aatgtgtatcataag

SEQ ID NO: 1009914 - DNA, 15 bp, Homo sapiens
atgtgtatcataagt

SEQ ID NO: 1009915 - DNA, 15 bp, Homo sapiens
tgtgtatcataagtt

SEQ ID NO: 1009916 - DNA, 15 bp, Homo sapiens
gtgtatcataagttg

SEQ ID NO: 1009917 - DNA, 15 bp, Homo sapiens
tgtatcataagttgg

SEQ ID NO: 1009918 - DNA, 15 bp, Homo sapiens
gtatcataagttggt

SEQ ID NO: 1009919 - DNA, 15 bp, Homo sapiens
tatcataagttggtt

SEQ ID NO: 1009920 - DNA, 15 bp, Homo sapiens
atcataagttggttt

SEQ ID NO: 1009921 - DNA, 15 bp, Homo sapiens
tcataagttggtttt

SEQ ID NO: 1009922 - DNA, 15 bp, Homo sapiens
cataagttggtttta

SEQ ID NO: 1009923 - DNA, 15 bp, Homo sapiens
ataagttggttttat

SEQ ID NO: 1009924 - DNA, 15 bp, Homo sapiens
taagttggttttata

SEQ ID NO: 1009925 - DNA, 15 bp, Homo sapiens
aagttggttttatat

SEQ ID NO: 1009926 - DNA, 15 bp, Homo sapiens
agttggttttatatt

SEQ ID NO: 1009927 - DNA, 15 bp, Homo sapiens
gttggttttatattt

SEQ ID NO: 1009928 - DNA, 15 bp, Homo sapiens
ttggttttatatttt

SEQ ID NO: 1009929 - DNA, 15 bp, Homo sapiens
tggttttatatttta

SEQ ID NO: 1009930 - DNA, 15 bp, Homo sapiens
ggttttatattttac

SEQ ID NO: 1009931 - DNA, 15 bp, Homo sapiens
gttttatattttact

SEQ ID NO: 1009932 - DNA, 15 bp, Homo sapiens
ttttatattttacta

SEQ ID NO: 1009933 - DNA, 15 bp, Homo sapiens
tttatattttactat

SEQ ID NO: 1009934 - DNA, 15 bp, Homo sapiens
ttatattttactatc

SEQ ID NO: 1009935 - DNA, 15 bp, Homo sapiens
tatattttactatcc

SEQ ID NO: 1009936 - DNA, 15 bp, Homo sapiens
atattttactatccg

SEQ ID NO: 1009937 - DNA, 15 bp, Homo sapiens
tattttactatccgg

SEQ ID NO: 1009938 - DNA, 15 bp, Homo sapiens
attttactatccggc

SEQ ID NO: 1009939 - DNA, 15 bp, Homo sapiens
ttttactatccggcg

SEQ ID NO: 1009940 - DNA, 15 bp, Homo sapiens
tttactatccggcga

SEQ ID NO: 1009941 - DNA, 15 bp, Homo sapiens
ttactatccggcgaa

SEQ ID NO: 1009942 - DNA, 15 bp, Homo sapiens
tactatccggcgaac

SEQ ID NO: 1009943 - DNA, 15 bp, Homo sapiens
actatccggcgaaca

SEQ ID NO: 1009944 - DNA, 15 bp, Homo sapiens
ctatccggcgaacag

SEQ ID NO: 1009945 - DNA, 15 bp, Homo sapiens
tatccggcgaacagg

SEQ ID NO: 1009946 - DNA, 15 bp, Homo sapiens
atccggcgaacagga

SEQ ID NO: 1009947 - DNA, 15 bp, Homo sapiens
tccggcgaacaggat

SEQ ID NO: 1009948 - DNA, 15 bp, Homo sapiens
ccggcgaacaggatt

SEQ ID NO: 1009949 - DNA, 15 bp, Homo sapiens
cggcgaacaggattt

SEQ ID NO: 1009950 - DNA, 15 bp, Homo sapiens
ggcgaacaggatttg

SEQ ID NO: 1009951 - DNA, 15 bp, Homo sapiens
gcgaacaggatttgt

SEQ ID NO: 1009952 - DNA, 15 bp, Homo sapiens
cgaacaggatttgta

SEQ ID NO: 1009953 - DNA, 15 bp, Homo sapiens
gaacaggatttgtaa

SEQ ID NO: 1009954 - DNA, 15 bp, Homo sapiens
aacaggatttgtaat

SEQ ID NO: 1009955 - DNA, 15 bp, Homo sapiens
acaggatttgtaatc

SEQ ID NO: 1009956 - DNA, 15 bp, Homo sapiens
caggatttgtaatcc

SEQ ID NO: 1009957 - DNA, 15 bp, Homo sapiens
aggatttgtaatcca

SEQ ID NO: 1009958 - DNA, 15 bp, Homo sapiens
ggatttgtaatccac

SEQ ID NO: 1009959 - DNA, 15 bp, Homo sapiens
gatttgtaatccaca

SEQ ID NO: 1009960 - DNA, 15 bp, Homo sapiens
atttgtaatccacag

SEQ ID NO: 1009961 - DNA, 15 bp, Homo sapiens
tttgtaatccacagt

SEQ ID NO: 1009962 - DNA, 15 bp, Homo sapiens
ttgtaatccacagtt

SEQ ID NO: 1009963 - DNA, 15 bp, Homo sapiens
tgtaatccacagttt

SEQ ID NO: 1009964 - DNA, 15 bp, Homo sapiens
gtaatccacagtttg

SEQ ID NO: 1009965 - DNA, 15 bp, Homo sapiens
taatccacagtttgg

SEQ ID NO: 1009966 - DNA, 15 bp, Homo sapiens
aatccacagtttggg

SEQ ID NO: 1009967 - DNA, 15 bp, Homo sapiens
atccacagtttgggt

SEQ ID NO: 1009968 - DNA, 15 bp, Homo sapiens
tccacagtttgggtt

SEQ ID NO: 1009969 - DNA, 15 bp, Homo sapiens
ccacagtttgggtta

SEQ ID NO: 1009970 - DNA, 15 bp, Homo sapiens
cacagtttgggttaa

SEQ ID NO: 1009971 - DNA, 15 bp, Homo sapiens
acagtttgggttaag

SEQ ID NO: 1009972 - DNA, 15 bp, Homo sapiens
cagtttgggttaagg

SEQ ID NO: 1009973 - DNA, 15 bp, Homo sapiens
agtttgggttaaggt

SEQ ID NO: 1009974 - DNA, 15 bp, Homo sapiens
gtttgggttaaggta

SEQ ID NO: 1009975 - DNA, 15 bp, Homo sapiens
tttgggttaaggtaa

SEQ ID NO: 1009976 - DNA, 15 bp, Homo sapiens
ttgggttaaggtaat

SEQ ID NO: 1009977 - DNA, 15 bp, Homo sapiens
tgggttaaggtaata

SEQ ID NO: 1009978 - DNA, 15 bp, Homo sapiens
gggttaaggtaatat

SEQ ID NO: 1009979 - DNA, 15 bp, Homo sapiens
ggttaaggtaatata

SEQ ID NO: 1009980 - DNA, 15 bp, Homo sapiens
gttaaggtaatataa

SEQ ID NO: 1009981 - DNA, 15 bp, Homo sapiens
ttaaggtaatataac

SEQ ID NO: 1009982 - DNA, 15 bp, Homo sapiens
taaggtaatataact

SEQ ID NO: 1009983 - DNA, 15 bp, Homo sapiens
aaggtaatataactc

SEQ ID NO: 1009984 - DNA, 15 bp, Homo sapiens
aggtaatataactcg

SEQ ID NO: 1009985 - DNA, 15 bp, Homo sapiens
ggtaatataactcga

SEQ ID NO: 1009986 - DNA, 15 bp, Homo sapiens
gtaatataactcgat

SEQ ID NO: 1009987 - DNA, 15 bp, Homo sapiens
taatataactcgatg

SEQ ID NO: 1009988 - DNA, 15 bp, Homo sapiens
aatataactcgatgc

SEQ ID NO: 1009989 - DNA, 15 bp, Homo sapiens
atataactcgatgct

SEQ ID NO: 1009990 - DNA, 15 bp, Homo sapiens
tataactcgatgcta

SEQ ID NO: 1009991 - DNA, 15 bp, Homo sapiens
ataactcgatgctat

SEQ ID NO: 1009992 - DNA, 15 bp, Homo sapiens
taactcgatgctatt

SEQ ID NO: 1009993 - DNA, 15 bp, Homo sapiens
aactcgatgctattc

SEQ ID NO: 1009994 - DNA, 15 bp, Homo sapiens
actcgatgctattca

SEQ ID NO: 1009995 - DNA, 15 bp, Homo sapiens
ctcgatgctattcaa

SEQ ID NO: 1009996 - DNA, 15 bp, Homo sapiens
tcgatgctattcaaa

SEQ ID NO: 1009997 - DNA, 15 bp, Homo sapiens
cgatgctattcaaaa

SEQ ID NO: 1009998 - DNA, 15 bp, Homo sapiens
gatgctattcaaaat

SEQ ID NO: 1009999 - DNA, 15 bp, Homo sapiens
atgctattcaaaata

SEQ ID NO: 1010000 - DNA, 15 bp, Homo sapiens
tgctattcaaaatat

SEQ ID NO: 1010001 - DNA, 15 bp, Homo sapiens
gctattcaaaatatt

SEQ ID NO: 1010002 - DNA, 15 bp, Homo sapiens
ctattcaaaatattc

SEQ ID NO: 1010003 - DNA, 15 bp, Homo sapiens
tattcaaaatattct

SEQ ID NO: 1010004 - DNA, 15 bp, Homo sapiens
attcaaaatattctg

SEQ ID NO: 1010005 - DNA, 15 bp, Homo sapiens
ttcaaaatattctga

SEQ ID NO: 1010006 - DNA, 15 bp, Homo sapiens
tcaaaatattctgag

SEQ ID NO: 1010007 - DNA, 15 bp, Homo sapiens
caaaatattctgaga

SEQ ID NO: 1010008 - DNA, 15 bp, Homo sapiens
aaaatattctgagaa

SEQ ID NO: 1010009 - DNA, 15 bp, Homo sapiens
aaatattctgagaat

SEQ ID NO: 1010010 - DNA, 15 bp, Homo sapiens
aatattctgagaatt

SEQ ID NO: 1010011 - DNA, 15 bp, Homo sapiens
atattctgagaattc

SEQ ID NO: 1010012 - DNA, 15 bp, Homo sapiens
tattctgagaattcc

SEQ ID NO: 1010013 - DNA, 15 bp, Homo sapiens
attctgagaattcca

SEQ ID NO: 1010014 - DNA, 15 bp, Homo sapiens
ttctgagaattccaa

SEQ ID NO: 1010015 - DNA, 15 bp, Homo sapiens
tctgagaattccaag

SEQ ID NO: 1010016 - DNA, 15 bp, Homo sapiens
ctgagaattccaagt

SEQ ID NO: 1010017 - DNA, 15 bp, Homo sapiens
tgagaattccaagtg

SEQ ID NO: 1010018 - DNA, 15 bp, Homo sapiens
gagaattccaagtga

SEQ ID NO: 1010019 - DNA, 15 bp, Homo sapiens
agaattccaagtgaa

SEQ ID NO: 1010020 - DNA, 15 bp, Homo sapiens
gaattccaagtgaag

SEQ ID NO: 1010021 - DNA, 15 bp, Homo sapiens
aattccaagtgaaga

SEQ ID NO: 1010022 - DNA, 15 bp, Homo sapiens
attccaagtgaagaa

SEQ ID NO: 1010023 - DNA, 15 bp, Homo sapiens
ttccaagtgaagaaa

SEQ ID NO: 1010024 - DNA, 15 bp, Homo sapiens
tccaagtgaagaaat

SEQ ID NO: 1010025 - DNA, 15 bp, Homo sapiens
ccaagtgaagaaatt

SEQ ID NO: 1010026 - DNA, 15 bp, Homo sapiens
caagtgaagaaatta

SEQ ID NO: 1010027 - DNA, 15 bp, Homo sapiens
aagtgaagaaattaa

SEQ ID NO: 1010028 - DNA, 15 bp, Homo sapiens
agtgaagaaattaaa

SEQ ID NO: 1010029 - DNA, 15 bp, Homo sapiens
gtgaagaaattaaaa

SEQ ID NO: 1010030 - DNA, 15 bp, Homo sapiens
tgaagaaattaaaat

SEQ ID NO: 1010031 - DNA, 15 bp, Homo sapiens
gaagaaattaaaatg

SEQ ID NO: 1010032 - DNA, 15 bp, Homo sapiens
aagaaattaaaatgt

SEQ ID NO: 1010033 - DNA, 15 bp, Homo sapiens
agaaattaaaatgtc

SEQ ID NO: 1010034 - DNA, 15 bp, Homo sapiens
gaaattaaaatgtcg

SEQ ID NO: 1010035 - DNA, 15 bp, Homo sapiens
aaattaaaatgtcga

SEQ ID NO: 1010036 - DNA, 15 bp, Homo sapiens
aattaaaatgtcgag

SEQ ID NO: 1010037 - DNA, 15 bp, Homo sapiens
attaaaatgtcgaga

SEQ ID NO: 1010038 - DNA, 15 bp, Homo sapiens
ttaaaatgtcgagac

SEQ ID NO: 1010039 - DNA, 15 bp, Homo sapiens
taaaatgtcgagact

SEQ ID NO: 1010040 - DNA, 15 bp, Homo sapiens
aaaatgtcgagactt

SEQ ID NO: 1010041 - DNA, 15 bp, Homo sapiens
aaatgtcgagacttc

SEQ ID NO: 1010042 - DNA, 15 bp, Homo sapiens
aatgtcgagacttca

SEQ ID NO: 1010043 - DNA, 15 bp, Homo sapiens
atgtcgagacttcaa

SEQ ID NO: 1010044 - DNA, 15 bp, Homo sapiens
tgtcgagacttcaat

SEQ ID NO: 1010045 - DNA, 15 bp, Homo sapiens
gtcgagacttcaatt

SEQ ID NO: 1010046 - DNA, 15 bp, Homo sapiens
tcgagacttcaatta

SEQ ID NO: 1010047 - DNA, 15 bp, Homo sapiens
cgagacttcaattag

SEQ ID NO: 1010048 - DNA, 15 bp, Homo sapiens
gagacttcaattagc

SEQ ID NO: 1010049 - DNA, 15 bp, Homo sapiens
agacttcaattagct

SEQ ID NO: 1010050 - DNA, 15 bp, Homo sapiens
gacttcaattagctt

SEQ ID NO: 1010051 - DNA, 15 bp, Homo sapiens
acttcaattagctta

SEQ ID NO: 1010052 - DNA, 15 bp, Homo sapiens
cttcaattagcttag

SEQ ID NO: 1010053 - DNA, 15 bp, Homo sapiens
ttcaattagcttagt

SEQ ID NO: 1010054 - DNA, 15 bp, Homo sapiens
tcaattagcttagtt

SEQ ID NO: 1010055 - DNA, 15 bp, Homo sapiens
caattagcttagttt

SEQ ID NO: 1010056 - DNA, 15 bp, Homo sapiens
aattagcttagtttt

SEQ ID NO: 1010057 - DNA, 15 bp, Homo sapiens
attagcttagttttg

SEQ ID NO: 1010058 - DNA, 15 bp, Homo sapiens
ttagcttagttttga

SEQ ID NO: 1010059 - DNA, 15 bp, Homo sapiens
tagcttagttttgaa

SEQ ID NO: 1010060 - DNA, 15 bp, Homo sapiens
agcttagttttgaat

SEQ ID NO: 1010061 - DNA, 15 bp, Homo sapiens
gcttagttttgaata

SEQ ID NO: 1010062 - DNA, 15 bp, Homo sapiens
cttagttttgaataa

SEQ ID NO: 1010063 - DNA, 15 bp, Homo sapiens
ttagttttgaataag

SEQ ID NO: 1010064 - DNA, 15 bp, Homo sapiens
tagttttgaataaga

SEQ ID NO: 1010065 - DNA, 15 bp, Homo sapiens
agttttgaataagaa

SEQ ID NO: 1010066 - DNA, 15 bp, Homo sapiens
gttttgaataagaaa

SEQ ID NO: 1010067 - DNA, 15 bp, Homo sapiens
ttttgaataagaaaa

SEQ ID NO: 1010068 - DNA, 15 bp, Homo sapiens
tttgaataagaaaaa

SEQ ID NO: 1010069 - DNA, 15 bp, Homo sapiens
ttgaataagaaaaaa

SEQ ID NO: 1010070 - DNA, 15 bp, Homo sapiens
tgaataagaaaaaat

SEQ ID NO: 1010071 - DNA, 15 bp, Homo sapiens
gaataagaaaaaatc

SEQ ID NO: 1010072 - DNA, 15 bp, Homo sapiens
aataagaaaaaatct

SEQ ID NO: 1010073 - DNA, 15 bp, Homo sapiens
ataagaaaaaatctg

SEQ ID NO: 1010074 - DNA, 15 bp, Homo sapiens
taagaaaaaatctgg

SEQ ID NO: 1010075 - DNA, 15 bp, Homo sapiens
aagaaaaaatctggg

SEQ ID NO: 1010076 - DNA, 15 bp, Homo sapiens
agaaaaaatctggga

SEQ ID NO: 1010077 - DNA, 15 bp, Homo sapiens
gaaaaaatctgggac

SEQ ID NO: 1010078 - DNA, 15 bp, Homo sapiens
aaaaaatctgggact

SEQ ID NO: 1010079 - DNA, 15 bp, Homo sapiens
aaaaatctgggactg

SEQ ID NO: 1010080 - DNA, 15 bp, Homo sapiens
aaaatctgggactga

SEQ ID NO: 1010081 - DNA, 15 bp, Homo sapiens
aaatctgggactgaa

SEQ ID NO: 1010082 - DNA, 15 bp, Homo sapiens
aatctgggactgaaa

SEQ ID NO: 1010083 - DNA, 15 bp, Homo sapiens
atctgggactgaaat

SEQ ID NO: 1010084 - DNA, 15 bp, Homo sapiens
tctgggactgaaatg

SEQ ID NO: 1010085 - DNA, 15 bp, Homo sapiens
ctgggactgaaatgt

SEQ ID NO: 1010086 - DNA, 15 bp, Homo sapiens
tgggactgaaatgtg

SEQ ID NO: 1010087 - DNA, 15 bp, Homo sapiens
gggactgaaatgtga

SEQ ID NO: 1010088 - DNA, 15 bp, Homo sapiens
ggactgaaatgtgag

SEQ ID NO: 1010089 - DNA, 15 bp, Homo sapiens
gactgaaatgtgaga

SEQ ID NO: 1010090 - DNA, 15 bp, Homo sapiens
actgaaatgtgagag

SEQ ID NO: 1010091 - DNA, 15 bp, Homo sapiens
ctgaaatgtgagaga

SEQ ID NO: 1010092 - DNA, 15 bp, Homo sapiens
tgaaatgtgagagat

SEQ ID NO: 1010093 - DNA, 15 bp, Homo sapiens
gaaatgtgagagatg

SEQ ID NO: 1010094 - DNA, 15 bp, Homo sapiens
aaatgtgagagatgt

SEQ ID NO: 1010095 - DNA, 15 bp, Homo sapiens
aatgtgagagatgtg

SEQ ID NO: 1010096 - DNA, 15 bp, Homo sapiens
atgtgagagatgtga

SEQ ID NO: 1010097 - DNA, 15 bp, Homo sapiens
tgtgagagatgtgag

SEQ ID NO: 1010098 - DNA, 15 bp, Homo sapiens
gtgagagatgtgagg

SEQ ID NO: 1010099 - DNA, 15 bp, Homo sapiens
tgagagatgtgaggc

SEQ ID NO: 1010100 - DNA, 15 bp, Homo sapiens
gagagatgtgaggct

SEQ ID NO: 1010101 - DNA, 15 bp, Homo sapiens
agagatgtgaggcta

SEQ ID NO: 1010102 - DNA, 15 bp, Homo sapiens
gagatgtgaggctat

SEQ ID NO: 1010103 - DNA, 15 bp, Homo sapiens
agatgtgaggctatt

SEQ ID NO: 1010104 - DNA, 15 bp, Homo sapiens
gatgtgaggctattc

SEQ ID NO: 1010105 - DNA, 15 bp, Homo sapiens
atgtgaggctattca

SEQ ID NO: 1010106 - DNA, 15 bp, Homo sapiens
tgtgaggctattcaa

SEQ ID NO: 1010107 - DNA, 15 bp, Homo sapiens
gtgaggctattcaat

SEQ ID NO: 1010108 - DNA, 15 bp, Homo sapiens
tgaggctattcaatc

SEQ ID NO: 1010109 - DNA, 15 bp, Homo sapiens
gaggctattcaatcc

SEQ ID NO: 1010110 - DNA, 15 bp, Homo sapiens
aggctattcaatccc

SEQ ID NO: 1010111 - DNA, 15 bp, Homo sapiens
ggctattcaatccct

SEQ ID NO: 1010112 - DNA, 15 bp, Homo sapiens
gctattcaatccctc

SEQ ID NO: 1010113 - DNA, 15 bp, Homo sapiens
ctattcaatccctct

SEQ ID NO: 1010114 - DNA, 15 bp, Homo sapiens
tattcaatccctctt

SEQ ID NO: 1010115 - DNA, 15 bp, Homo sapiens
attcaatccctctta

SEQ ID NO: 1010116 - DNA, 15 bp, Homo sapiens
ttcaatccctcttat

SEQ ID NO: 1010117 - DNA, 15 bp, Homo sapiens
tcaatccctcttatc

SEQ ID NO: 1010118 - DNA, 15 bp, Homo sapiens
caatccctcttatct

SEQ ID NO: 1010119 - DNA, 15 bp, Homo sapiens
aatccctcttatcta

SEQ ID NO: 1010120 - DNA, 15 bp, Homo sapiens
atccctcttatctac

SEQ ID NO: 1010121 - DNA, 15 bp, Homo sapiens
tccctcttatctaca

SEQ ID NO: 1010122 - DNA, 15 bp, Homo sapiens
ccctcttatctacaa

SEQ ID NO: 1010123 - DNA, 15 bp, Homo sapiens
cctcttatctacaat

SEQ ID NO: 1010124 - DNA, 15 bp, Homo sapiens
ctcttatctacaatt

SEQ ID NO: 1010125 - DNA, 15 bp, Homo sapiens
tcttatctacaattt

SEQ ID NO: 1010126 - DNA, 15 bp, Homo sapiens
cttatctacaatttg

SEQ ID NO: 1010127 - DNA, 15 bp, Homo sapiens
ttatctacaatttga

SEQ ID NO: 1010128 - DNA, 15 bp, Homo sapiens
tatctacaatttgaa

SEQ ID NO: 1010129 - DNA, 15 bp, Homo sapiens
atctacaatttgaat

SEQ ID NO: 1010130 - DNA, 15 bp, Homo sapiens
tctacaatttgaatg

SEQ ID NO: 1010131 - DNA, 15 bp, Homo sapiens
ctacaatttgaatgt

SEQ ID NO: 1010132 - DNA, 15 bp, Homo sapiens
tacaatttgaatgta

SEQ ID NO: 1010133 - DNA, 15 bp, Homo sapiens
acaatttgaatgtat

SEQ ID NO: 1010134 - DNA, 15 bp, Homo sapiens
caatttgaatgtatt

SEQ ID NO: 1010135 - DNA, 15 bp, Homo sapiens
aatttgaatgtatta

SEQ ID NO: 1010136 - DNA, 15 bp, Homo sapiens
atttgaatgtattat

SEQ ID NO: 1010137 - DNA, 15 bp, Homo sapiens
tttgaatgtattatt

SEQ ID NO: 1010138 - DNA, 15 bp, Homo sapiens
ttgaatgtattattc

SEQ ID NO: 1010139 - DNA, 15 bp, Homo sapiens
tgaatgtattattct

SEQ ID NO: 1010140 - DNA, 15 bp, Homo sapiens
gaatgtattattctt

SEQ ID NO: 1010141 - DNA, 15 bp, Homo sapiens
aatgtattattcttc

SEQ ID NO: 1010142 - DNA, 15 bp, Homo sapiens
atgtattattcttcc

SEQ ID NO: 1010143 - DNA, 15 bp, Homo sapiens
tgtattattcttcca

SEQ ID NO: 1010144 - DNA, 15 bp, Homo sapiens
gtattattcttccag

SEQ ID NO: 1010145 - DNA, 15 bp, Homo sapiens
tattattcttccaga

SEQ ID NO: 1010146 - DNA, 15 bp, Homo sapiens
attattcttccagat

SEQ ID NO: 1010147 - DNA, 15 bp, Homo sapiens
ttattcttccagatt

SEQ ID NO: 1010148 - DNA, 15 bp, Homo sapiens
tattcttccagattt

SEQ ID NO: 1010149 - DNA, 15 bp, Homo sapiens
attcttccagatttt

SEQ ID NO: 1010150 - DNA, 15 bp, Homo sapiens
ttcttccagattttt

SEQ ID NO: 1010151 - DNA, 15 bp, Homo sapiens
tcttccagatttttt

SEQ ID NO: 1010152 - DNA, 15 bp, Homo sapiens
cttccagatttttta

SEQ ID NO: 1010153 - DNA, 15 bp, Homo sapiens
ttccagattttttaa

SEQ ID NO: 1010154 - DNA, 15 bp, Homo sapiens
tccagattttttaaa

SEQ ID NO: 1010155 - DNA, 15 bp, Homo sapiens
ccagattttttaaat

SEQ ID NO: 1010156 - DNA, 15 bp, Homo sapiens
cagattttttaaata

SEQ ID NO: 1010157 - DNA, 15 bp, Homo sapiens
agattttttaaataa

SEQ ID NO: 1010158 - DNA, 15 bp, Homo sapiens
gattttttaaataaa

SEQ ID NO: 1010159 - DNA, 15 bp, Homo sapiens
attttttaaataaac

SEQ ID NO: 1010160 - DNA, 15 bp, Homo sapiens
ttttttaaataaaca

SEQ ID NO: 1010161 - DNA, 15 bp, Homo sapiens
tttttaaataaacat

SEQ ID NO: 1010162 - DNA, 15 bp, Homo sapiens
ttttaaataaacatc

SEQ ID NO: 1010163 - DNA, 15 bp, Homo sapiens
tttaaataaacatct

SEQ ID NO: 1010164 - DNA, 15 bp, Homo sapiens
ttaaataaacatctg

SEQ ID NO: 1010165 - DNA, 15 bp, Homo sapiens
taaataaacatctgg

SEQ ID NO: 1010166 - DNA, 15 bp, Homo sapiens
aaataaacatctgga

SEQ ID NO: 1010167 - DNA, 15 bp, Homo sapiens
aataaacatctggag

SEQ ID NO: 1010168 - DNA, 15 bp, Homo sapiens
ataaacatctggagt

SEQ ID NO: 1010169 - DNA, 15 bp, Homo sapiens
taaacatctggagta

SEQ ID NO: 1010170 - DNA, 15 bp, Homo sapiens
aaacatctggagtat

SEQ ID NO: 1010171 - DNA, 15 bp, Homo sapiens
aacatctggagtatt

SEQ ID NO: 1010172 - DNA, 15 bp, Homo sapiens
acatctggagtatta

SEQ ID NO: 1010173 - DNA, 15 bp, Homo sapiens
catctggagtattat

SEQ ID NO: 1010174 - DNA, 15 bp, Homo sapiens
atctggagtattata

SEQ ID NO: 1010175 - DNA, 15 bp, Homo sapiens
tctggagtattataa

SEQ ID NO: 1010176 - DNA, 15 bp, Homo sapiens
ctggagtattataaa

SEQ ID NO: 1010177 - DNA, 15 bp, Homo sapiens
tggagtattataaat

SEQ ID NO: 1010178 - DNA, 15 bp, Homo sapiens
ggagtattataaatt

SEQ ID NO: 1010179 - DNA, 15 bp, Homo sapiens
gagtattataaatta

SEQ ID NO: 1010180 - DNA, 15 bp, Homo sapiens
agtattataaattag

SEQ ID NO: 1010181 - DNA, 15 bp, Homo sapiens
gtattataaattaga

SEQ ID NO: 1010182 - DNA, 15 bp, Homo sapiens
tattataaattagaa

SEQ ID NO: 1010183 - DNA, 15 bp, Homo sapiens
attataaattagaag

SEQ ID NO: 1010184 - DNA, 15 bp, Homo sapiens
ttataaattagaagc

SEQ ID NO: 1010185 - DNA, 15 bp, Homo sapiens
tataaattagaagcc

SEQ ID NO: 1010186 - DNA, 15 bp, Homo sapiens
ataaattagaagcct

SEQ ID NO: 1010187 - DNA, 15 bp, Homo sapiens
taaattagaagccta

SEQ ID NO: 1010188 - DNA, 15 bp, Homo sapiens
aaattagaagcctac

SEQ ID NO: 1010189 - DNA, 15 bp, Homo sapiens
aattagaagcctaca

SEQ ID NO: 1010190 - DNA, 15 bp, Homo sapiens
attagaagcctacat

SEQ ID NO: 1010191 - DNA, 15 bp, Homo sapiens
ttagaagcctacatt

SEQ ID NO: 1010192 - DNA, 15 bp, Homo sapiens
tagaagcctacattt

SEQ ID NO: 1010193 - DNA, 15 bp, Homo sapiens
agaagcctacatttt

SEQ ID NO: 1010194 - DNA, 15 bp, Homo sapiens
gaagcctacatttta

SEQ ID NO: 1010195 - DNA, 15 bp, Homo sapiens
aagcctacattttag

SEQ ID NO: 1010196 - DNA, 15 bp, Homo sapiens
agcctacattttagg

SEQ ID NO: 1010197 - DNA, 15 bp, Homo sapiens
gcctacattttaggt

SEQ ID NO: 1010198 - DNA, 15 bp, Homo sapiens
cctacattttaggtc

SEQ ID NO: 1010199 - DNA, 15 bp, Homo sapiens
ctacattttaggtca

SEQ ID NO: 1010200 - DNA, 15 bp, Homo sapiens
tacattttaggtcat

SEQ ID NO: 1010201 - DNA, 15 bp, Homo sapiens
acattttaggtcatt

SEQ ID NO: 1010202 - DNA, 15 bp, Homo sapiens
cattttaggtcattt

SEQ ID NO: 1010203 - DNA, 15 bp, Homo sapiens
attttaggtcattta

SEQ ID NO: 1010204 - DNA, 15 bp, Homo sapiens
ttttaggtcatttaa

SEQ ID NO: 1010205 - DNA, 15 bp, Homo sapiens
tttaggtcatttaat

SEQ ID NO: 1010206 - DNA, 15 bp, Homo sapiens
ttaggtcatttaatg

SEQ ID NO: 1010207 - DNA, 15 bp, Homo sapiens
taggtcatttaatgc

SEQ ID NO: 1010208 - DNA, 15 bp, Homo sapiens
aggtcatttaatgca

SEQ ID NO: 1010209 - DNA, 15 bp, Homo sapiens
ggtcatttaatgcat

SEQ ID NO: 1010210 - DNA, 15 bp, Homo sapiens
gtcatttaatgcata

SEQ ID NO: 1010211 - DNA, 15 bp, Homo sapiens
tcatttaatgcatag

SEQ ID NO: 1010212 - DNA, 15 bp, Homo sapiens
catttaatgcatagt

SEQ ID NO: 1010213 - DNA, 15 bp, Homo sapiens
atttaatgcatagtc

SEQ ID NO: 1010214 - DNA, 15 bp, Homo sapiens
tttaatgcatagtct

SEQ ID NO: 1010215 - DNA, 15 bp, Homo sapiens
ttaatgcatagtcta

SEQ ID NO: 1010216 - DNA, 15 bp, Homo sapiens
taatgcatagtctac

SEQ ID NO: 1010217 - DNA, 15 bp, Homo sapiens
aatgcatagtctaca

SEQ ID NO: 1010218 - DNA, 15 bp, Homo sapiens
atgcatagtctacat

SEQ ID NO: 1010219 - DNA, 15 bp, Homo sapiens
tgcatagtctacata

SEQ ID NO: 1010220 - DNA, 15 bp, Homo sapiens
gcatagtctacatat

SEQ ID NO: 1010221 - DNA, 15 bp, Homo sapiens
catagtctacatatg

SEQ ID NO: 1010222 - DNA, 15 bp, Homo sapiens
atagtctacatatgt

SEQ ID NO: 1010223 - DNA, 15 bp, Homo sapiens
tagtctacatatgta

SEQ ID NO: 1010224 - DNA, 15 bp, Homo sapiens
agtctacatatgtag

SEQ ID NO: 1010225 - DNA, 15 bp, Homo sapiens
gtctacatatgtagt

SEQ ID NO: 1010226 - DNA, 15 bp, Homo sapiens
tctacatatgtagtg

SEQ ID NO: 1010227 - DNA, 15 bp, Homo sapiens
ctacatatgtagtga

SEQ ID NO: 1010228 - DNA, 15 bp, Homo sapiens
tacatatgtagtgaa

SEQ ID NO: 1010229 - DNA, 15 bp, Homo sapiens
acatatgtagtgaaa

SEQ ID NO: 1010230 - DNA, 15 bp, Homo sapiens
catatgtagtgaaaa

SEQ ID NO: 1010231 - DNA, 15 bp, Homo sapiens
atatgtagtgaaaat

SEQ ID NO: 1010232 - DNA, 15 bp, Homo sapiens
tatgtagtgaaaatt

SEQ ID NO: 1010233 - DNA, 15 bp, Homo sapiens
atgtagtgaaaattc

SEQ ID NO: 1010234 - DNA, 15 bp, Homo sapiens
tgtagtgaaaattca

SEQ ID NO: 1010235 - DNA, 15 bp, Homo sapiens
gtagtgaaaattcat

SEQ ID NO: 1010236 - DNA, 15 bp, Homo sapiens
tagtgaaaattcatc

SEQ ID NO: 1010237 - DNA, 15 bp, Homo sapiens
agtgaaaattcatcc

SEQ ID NO: 1010238 - DNA, 15 bp, Homo sapiens
gtgaaaattcatcca

SEQ ID NO: 1010239 - DNA, 15 bp, Homo sapiens
tgaaaattcatccag

SEQ ID NO: 1010240 - DNA, 15 bp, Homo sapiens
gaaaattcatccagt

SEQ ID NO: 1010241 - DNA, 15 bp, Homo sapiens
aaaattcatccagtc

SEQ ID NO: 1010242 - DNA, 15 bp, Homo sapiens
aaattcatccagtca

SEQ ID NO: 1010243 - DNA, 15 bp, Homo sapiens
aattcatccagtcag

SEQ ID NO: 1010244 - DNA, 15 bp, Homo sapiens
attcatccagtcagt

SEQ ID NO: 1010245 - DNA, 15 bp, Homo sapiens
ttcatccagtcagtt

SEQ ID NO: 1010246 - DNA, 15 bp, Homo sapiens
tcatccagtcagttt

SEQ ID NO: 1010247 - DNA, 15 bp, Homo sapiens
catccagtcagtttt

SEQ ID NO: 1010248 - DNA, 15 bp, Homo sapiens
atccagtcagttttt

SEQ ID NO: 1010249 - DNA, 15 bp, Homo sapiens
tccagtcagtttttt

SEQ ID NO: 1010250 - DNA, 15 bp, Homo sapiens
ccagtcagtttttta

SEQ ID NO: 1010251 - DNA, 15 bp, Homo sapiens
cagtcagttttttat

SEQ ID NO: 1010252 - DNA, 15 bp, Homo sapiens
agtcagttttttatt

SEQ ID NO: 1010253 - DNA, 15 bp, Homo sapiens
gtcagttttttatta

SEQ ID NO: 1010254 - DNA, 15 bp, Homo sapiens
tcagttttttattaa

SEQ ID NO: 1010255 - DNA, 15 bp, Homo sapiens
cagttttttattaaa

SEQ ID NO: 1010256 - DNA, 15 bp, Homo sapiens
agttttttattaaat

SEQ ID NO: 1010257 - DNA, 15 bp, Homo sapiens
gttttttattaaatg

SEQ ID NO: 1010258 - DNA, 15 bp, Homo sapiens
ttttttattaaatga

SEQ ID NO: 1010259 - DNA, 15 bp, Homo sapiens
tttttattaaatgat

SEQ ID NO: 1010260 - DNA, 15 bp, Homo sapiens
ttttattaaatgata

SEQ ID NO: 1010261 - DNA, 15 bp, Homo sapiens
tttattaaatgatag

SEQ ID NO: 1010262 - DNA, 15 bp, Homo sapiens
ttattaaatgataga

SEQ ID NO: 1010263 - DNA, 15 bp, Homo sapiens
tattaaatgatagac

SEQ ID NO: 1010264 - DNA, 15 bp, Homo sapiens
attaaatgatagact

SEQ ID NO: 1010265 - DNA, 15 bp, Homo sapiens
ttaaatgatagactt

SEQ ID NO: 1010266 - DNA, 15 bp, Homo sapiens
taaatgatagacttt

SEQ ID NO: 1010267 - DNA, 15 bp, Homo sapiens
aaatgatagacttta

SEQ ID NO: 1010268 - DNA, 15 bp, Homo sapiens
aatgatagactttaa

SEQ ID NO: 1010269 - DNA, 15 bp, Homo sapiens
atgatagactttaaa

SEQ ID NO: 1010270 - DNA, 15 bp, Homo sapiens
tgatagactttaaag

SEQ ID NO: 1010271 - DNA, 15 bp, Homo sapiens
gatagactttaaaga

SEQ ID NO: 1010272 - DNA, 15 bp, Homo sapiens
atagactttaaagat

SEQ ID NO: 1010273 - DNA, 15 bp, Homo sapiens
tagactttaaagata

SEQ ID NO: 1010274 - DNA, 15 bp, Homo sapiens
agactttaaagatat

SEQ ID NO: 1010275 - DNA, 15 bp, Homo sapiens
gactttaaagatata

SEQ ID NO: 1010276 - DNA, 15 bp, Homo sapiens
actttaaagatatag

SEQ ID NO: 1010277 - DNA, 15 bp, Homo sapiens
ctttaaagatatagt

SEQ ID NO: 1010278 - DNA, 15 bp, Homo sapiens
tttaaagatatagtg

SEQ ID NO: 1010279 - DNA, 15 bp, Homo sapiens
ttaaagatatagtga

SEQ ID NO: 1010280 - DNA, 15 bp, Homo sapiens
taaagatatagtgat

SEQ ID NO: 1010281 - DNA, 15 bp, Homo sapiens
aaagatatagtgatt

SEQ ID NO: 1010282 - DNA, 15 bp, Homo sapiens
aagatatagtgattt

SEQ ID NO: 1010283 - DNA, 15 bp, Homo sapiens
agatatagtgatttt

SEQ ID NO: 1010284 - DNA, 15 bp, Homo sapiens
gatatagtgattttc

SEQ ID NO: 1010285 - DNA, 15 bp, Homo sapiens
atatagtgattttca

SEQ ID NO: 1010286 - DNA, 15 bp, Homo sapiens
tatagtgattttcac

SEQ ID NO: 1010287 - DNA, 15 bp, Homo sapiens
atagtgattttcaca

SEQ ID NO: 1010288 - DNA, 15 bp, Homo sapiens
tagtgattttcacaa

SEQ ID NO: 1010289 - DNA, 15 bp, Homo sapiens
agtgattttcacaat

SEQ ID NO: 1010290 - DNA, 15 bp, Homo sapiens
gtgattttcacaatt

SEQ ID NO: 1010291 - DNA, 15 bp, Homo sapiens
tgattttcacaattg

SEQ ID NO: 1010292 - DNA, 15 bp, Homo sapiens
gattttcacaattgt

SEQ ID NO: 1010293 - DNA, 15 bp, Homo sapiens
attttcacaattgtc

SEQ ID NO: 1010294 - DNA, 15 bp, Homo sapiens
ttttcacaattgtca

SEQ ID NO: 1010295 - DNA, 15 bp, Homo sapiens
tttcacaattgtcat

SEQ ID NO: 1010296 - DNA, 15 bp, Homo sapiens
ttcacaattgtcatt

SEQ ID NO: 1010297 - DNA, 15 bp, Homo sapiens
tcacaattgtcattt

SEQ ID NO: 1010298 - DNA, 15 bp, Homo sapiens
cacaattgtcatttt

SEQ ID NO: 1010299 - DNA, 15 bp, Homo sapiens
acaattgtcattttt

SEQ ID NO: 1010300 - DNA, 15 bp, Homo sapiens
caattgtcatttttt

SEQ ID NO: 1010301 - DNA, 15 bp, Homo sapiens
aattgtcatttttta

SEQ ID NO: 1010302 - DNA, 15 bp, Homo sapiens
attgtcattttttaa

SEQ ID NO: 1010303 - DNA, 15 bp, Homo sapiens
ttgtcattttttaat

SEQ ID NO: 1010304 - DNA, 15 bp, Homo sapiens
tgtcattttttaata

SEQ ID NO: 1010305 - DNA, 15 bp, Homo sapiens
gtcattttttaataa

SEQ ID NO: 1010306 - DNA, 15 bp, Homo sapiens
tcattttttaataat

SEQ ID NO: 1010307 - DNA, 15 bp, Homo sapiens
cattttttaataata

SEQ ID NO: 1010308 - DNA, 15 bp, Homo sapiens
attttttaataatat

SEQ ID NO: 1010309 - DNA, 15 bp, Homo sapiens
ttttttaataatata

SEQ ID NO: 1010310 - DNA, 15 bp, Homo sapiens
tttttaataatatat

SEQ ID NO: 1010311 - DNA, 15 bp, Homo sapiens
ttttaataatatatc

SEQ ID NO: 1010312 - DNA, 15 bp, Homo sapiens
tttaataatatatca

SEQ ID NO: 1010313 - DNA, 15 bp, Homo sapiens
ttaataatatatcaa

SEQ ID NO: 1010314 - DNA, 15 bp, Homo sapiens
taataatatatcaag

SEQ ID NO: 1010315 - DNA, 15 bp, Homo sapiens
aataatatatcaagt

SEQ ID NO: 1010316 - DNA, 15 bp, Homo sapiens
ataatatatcaagta

SEQ ID NO: 1010317 - DNA, 15 bp, Homo sapiens
taatatatcaagtaa

SEQ ID NO: 1010318 - DNA, 15 bp, Homo sapiens
aatatatcaagtaat

SEQ ID NO: 1010319 - DNA, 15 bp, Homo sapiens
atatatcaagtaatt

SEQ ID NO: 1010320 - DNA, 15 bp, Homo sapiens
tatatcaagtaattc

SEQ ID NO: 1010321 - DNA, 15 bp, Homo sapiens
atatcaagtaattca

SEQ ID NO: 1010322 - DNA, 15 bp, Homo sapiens
tatcaagtaattcat

SEQ ID NO: 1010323 - DNA, 15 bp, Homo sapiens
atcaagtaattcatt

SEQ ID NO: 1010324 - DNA, 15 bp, Homo sapiens
tcaagtaattcattt

SEQ ID NO: 1010325 - DNA, 15 bp, Homo sapiens
caagtaattcatttt

SEQ ID NO: 1010326 - DNA, 15 bp, Homo sapiens
aagtaattcatttta

SEQ ID NO: 1010327 - DNA, 15 bp, Homo sapiens
agtaattcattttaa

SEQ ID NO: 1010328 - DNA, 15 bp, Homo sapiens
gtaattcattttaaa

SEQ ID NO: 1010329 - DNA, 15 bp, Homo sapiens
taattcattttaaag

SEQ ID NO: 1010330 - DNA, 15 bp, Homo sapiens
aattcattttaaagt

SEQ ID NO: 1010331 - DNA, 15 bp, Homo sapiens
attcattttaaagtt

SEQ ID NO: 1010332 - DNA, 15 bp, Homo sapiens
ttcattttaaagtta

SEQ ID NO: 1010333 - DNA, 15 bp, Homo sapiens
tcattttaaagttaa

SEQ ID NO: 1010334 - DNA, 15 bp, Homo sapiens
cattttaaagttaaa

SEQ ID NO: 1010335 - DNA, 15 bp, Homo sapiens
attttaaagttaaag

SEQ ID NO: 1010336 - DNA, 15 bp, Homo sapiens
ttttaaagttaaaga

SEQ ID NO: 1010337 - DNA, 15 bp, Homo sapiens
tttaaagttaaagat

SEQ ID NO: 1010338 - DNA, 15 bp, Homo sapiens
ttaaagttaaagata

SEQ ID NO: 1010339 - DNA, 15 bp, Homo sapiens
taaagttaaagatac

SEQ ID NO: 1010340 - DNA, 15 bp, Homo sapiens
aaagttaaagataca

SEQ ID NO: 1010341 - DNA, 15 bp, Homo sapiens
aagttaaagatacac

SEQ ID NO: 1010342 - DNA, 15 bp, Homo sapiens
agttaaagatacact

SEQ ID NO: 1010343 - DNA, 15 bp, Homo sapiens
gttaaagatacactt

SEQ ID NO: 1010344 - DNA, 15 bp, Homo sapiens
ttaaagatacacttc

SEQ ID NO: 1010345 - DNA, 15 bp, Homo sapiens
taaagatacacttcc

SEQ ID NO: 1010346 - DNA, 15 bp, Homo sapiens
aaagatacacttcca

SEQ ID NO: 1010347 - DNA, 15 bp, Homo sapiens
aagatacacttccaa

SEQ ID NO: 1010348 - DNA, 15 bp, Homo sapiens
agatacacttccaaa

SEQ ID NO: 1010349 - DNA, 15 bp, Homo sapiens
gatacacttccaaat

SEQ ID NO: 1010350 - DNA, 15 bp, Homo sapiens
atacacttccaaata

SEQ ID NO: 1010351 - DNA, 15 bp, Homo sapiens
tacacttccaaataa

SEQ ID NO: 1010352 - DNA, 15 bp, Homo sapiens
acacttccaaataaa

SEQ ID NO: 1010353 - DNA, 15 bp, Homo sapiens
cacttccaaataaaa

SEQ ID NO: 1010354 - DNA, 15 bp, Homo sapiens
acttccaaataaaat

SEQ ID NO: 1010355 - DNA, 15 bp, Homo sapiens
cttccaaataaaata

SEQ ID NO: 1010356 - DNA, 15 bp, Homo sapiens
ttccaaataaaatag

SEQ ID NO: 1010357 - DNA, 15 bp, Homo sapiens
tccaaataaaatagg

SEQ ID NO: 1010358 - DNA, 15 bp, Homo sapiens
ccaaataaaataggc

SEQ ID NO: 1010359 - DNA, 15 bp, Homo sapiens
caaataaaataggca

SEQ ID NO: 1010360 - DNA, 15 bp, Homo sapiens
aaataaaataggcac

SEQ ID NO: 1010361 - DNA, 15 bp, Homo sapiens
aataaaataggcact

SEQ ID NO: 1010362 - DNA, 15 bp, Homo sapiens
ataaaataggcacta

SEQ ID NO: 1010363 - DNA, 15 bp, Homo sapiens
taaaataggcactaa

SEQ ID NO: 1010364 - DNA, 15 bp, Homo sapiens
aaaataggcactaaa

SEQ ID NO: 1010365 - DNA, 15 bp, Homo sapiens
aaataggcactaaaa

SEQ ID NO: 1010366 - DNA, 15 bp, Homo sapiens
aataggcactaaaaa

SEQ ID NO: 1010367 - DNA, 15 bp, Homo sapiens
ataggcactaaaaac

SEQ ID NO: 1010368 - DNA, 15 bp, Homo sapiens
taggcactaaaaact

SEQ ID NO: 1010369 - DNA, 15 bp, Homo sapiens
aggcactaaaaacta

SEQ ID NO: 1010370 - DNA, 15 bp, Homo sapiens
ggcactaaaaactag

SEQ ID NO: 1010371 - DNA, 15 bp, Homo sapiens
gcactaaaaactaga

SEQ ID NO: 1010372 - DNA, 15 bp, Homo sapiens
cactaaaaactagac

SEQ ID NO: 1010373 - DNA, 15 bp, Homo sapiens
actaaaaactagaca

SEQ ID NO: 1010374 - DNA, 15 bp, Homo sapiens
ctaaaaactagacat

SEQ ID NO: 1010375 - DNA, 15 bp, Homo sapiens
taaaaactagacatc

SEQ ID NO: 1010376 - DNA, 15 bp, Homo sapiens
aaaaactagacatca

SEQ ID NO: 1010377 - DNA, 15 bp, Homo sapiens
aaaactagacatcag

SEQ ID NO: 1010378 - DNA, 15 bp, Homo sapiens
aaactagacatcaga

SEQ ID NO: 1010379 - DNA, 15 bp, Homo sapiens
aactagacatcagag

SEQ ID NO: 1010380 - DNA, 15 bp, Homo sapiens
actagacatcagagt

SEQ ID NO: 1010381 - DNA, 15 bp, Homo sapiens
ctagacatcagagtt

SEQ ID NO: 1010382 - DNA, 15 bp, Homo sapiens
tagacatcagagtta

SEQ ID NO: 1010383 - DNA, 15 bp, Homo sapiens
agacatcagagttaa

SEQ ID NO: 1010384 - DNA, 15 bp, Homo sapiens
gacatcagagttaaa

SEQ ID NO: 1010385 - DNA, 15 bp, Homo sapiens
acatcagagttaaac

SEQ ID NO: 1010386 - DNA, 15 bp, Homo sapiens
catcagagttaaaca

SEQ ID NO: 1010387 - DNA, 15 bp, Homo sapiens
atcagagttaaacag

SEQ ID NO: 1010388 - DNA, 15 bp, Homo sapiens
tcagagttaaacagg

SEQ ID NO: 1010389 - DNA, 15 bp, Homo sapiens
cagagttaaacaggg

SEQ ID NO: 1010390 - DNA, 15 bp, Homo sapiens
agagttaaacagggt

SEQ ID NO: 1010391 - DNA, 15 bp, Homo sapiens
gagttaaacagggta

SEQ ID NO: 1010392 - DNA, 15 bp, Homo sapiens
agttaaacagggtaa

SEQ ID NO: 1010393 - DNA, 15 bp, Homo sapiens
gttaaacagggtaaa

SEQ ID NO: 1010394 - DNA, 15 bp, Homo sapiens
ttaaacagggtaaat

SEQ ID NO: 1010395 - DNA, 15 bp, Homo sapiens
taaacagggtaaatt

SEQ ID NO: 1010396 - DNA, 15 bp, Homo sapiens
aaacagggtaaattg

SEQ ID NO: 1010397 - DNA, 15 bp, Homo sapiens
aacagggtaaattga

SEQ ID NO: 1010398 - DNA, 15 bp, Homo sapiens
acagggtaaattgaa

SEQ ID NO: 1010399 - DNA, 15 bp, Homo sapiens
cagggtaaattgaaa

SEQ ID NO: 1010400 - DNA, 15 bp, Homo sapiens
agggtaaattgaaat

SEQ ID NO: 1010401 - DNA, 15 bp, Homo sapiens
gggtaaattgaaata

SEQ ID NO: 1010402 - DNA, 15 bp, Homo sapiens
ggtaaattgaaatag

SEQ ID NO: 1010403 - DNA, 15 bp, Homo sapiens
gtaaattgaaataga

SEQ ID NO: 1010404 - DNA, 15 bp, Homo sapiens
taaattgaaatagaa

SEQ ID NO: 1010405 - DNA, 15 bp, Homo sapiens
aaattgaaatagaaa

SEQ ID NO: 1010406 - DNA, 15 bp, Homo sapiens
aattgaaatagaaaa

SEQ ID NO: 1010407 - DNA, 15 bp, Homo sapiens
attgaaatagaaaat

SEQ ID NO: 1010408 - DNA, 15 bp, Homo sapiens
ttgaaatagaaaata

SEQ ID NO: 1010409 - DNA, 15 bp, Homo sapiens
tgaaatagaaaatac

SEQ ID NO: 1010410 - DNA, 15 bp, Homo sapiens
gaaatagaaaataca

SEQ ID NO: 1010411 - DNA, 15 bp, Homo sapiens
aaatagaaaatacat

SEQ ID NO: 1010412 - DNA, 15 bp, Homo sapiens
aatagaaaatacata

SEQ ID NO: 1010413 - DNA, 15 bp, Homo sapiens
atagaaaatacataa

SEQ ID NO: 1010414 - DNA, 15 bp, Homo sapiens
tagaaaatacataaa

SEQ ID NO: 1010415 - DNA, 15 bp, Homo sapiens
agaaaatacataaaa

SEQ ID NO: 1010416 - DNA, 15 bp, Homo sapiens
gaaaatacataaaat

SEQ ID NO: 1010417 - DNA, 15 bp, Homo sapiens
aaaatacataaaata

SEQ ID NO: 1010418 - DNA, 15 bp, Homo sapiens
aaatacataaaataa

SEQ ID NO: 1010419 - DNA, 15 bp, Homo sapiens
aatacataaaataat

SEQ ID NO: 1010420 - DNA, 15 bp, Homo sapiens
atacataaaataatt

SEQ ID NO: 1010421 - DNA, 15 bp, Homo sapiens
tacataaaataattg

SEQ ID NO: 1010422 - DNA, 15 bp, Homo sapiens
acataaaataattgt

SEQ ID NO: 1010423 - DNA, 15 bp, Homo sapiens
cataaaataattgtt

SEQ ID NO: 1010424 - DNA, 15 bp, Homo sapiens
ataaaataattgttt

SEQ ID NO: 1010425 - DNA, 15 bp, Homo sapiens
taaaataattgttta

SEQ ID NO: 1010426 - DNA, 15 bp, Homo sapiens
aaaataattgtttaa

SEQ ID NO: 1010427 - DNA, 15 bp, Homo sapiens
aaataattgtttaaa

SEQ ID NO: 1010428 - DNA, 15 bp, Homo sapiens
aataattgtttaaaa

SEQ ID NO: 1010429 - DNA, 15 bp, Homo sapiens
ataattgtttaaaaa

SEQ ID NO: 1010430 - DNA, 15 bp, Homo sapiens
taattgtttaaaaaa

SEQ ID NO: 1010431 - DNA, 15 bp, Homo sapiens
aattgtttaaaaaat

SEQ ID NO: 1010432 - DNA, 15 bp, Homo sapiens
attgtttaaaaaata

SEQ ID NO: 1010433 - DNA, 15 bp, Homo sapiens
ttgtttaaaaaatat

SEQ ID NO: 1010434 - DNA, 15 bp, Homo sapiens
tgtttaaaaaatatt

SEQ ID NO: 1010435 - DNA, 15 bp, Homo sapiens
gtttaaaaaatattt

SEQ ID NO: 1010436 - DNA, 15 bp, Homo sapiens
tttaaaaaatatttc

SEQ ID NO: 1010437 - DNA, 15 bp, Homo sapiens
ttaaaaaatatttca

SEQ ID NO: 1010438 - DNA, 15 bp, Homo sapiens
taaaaaatatttcac

SEQ ID NO: 1010439 - DNA, 15 bp, Homo sapiens
aaaaaatatttcact

SEQ ID NO: 1010440 - DNA, 15 bp, Homo sapiens
aaaaatatttcacta

SEQ ID NO: 1010441 - DNA, 15 bp, Homo sapiens
aaaatatttcactag

SEQ ID NO: 1010442 - DNA, 15 bp, Homo sapiens
aaatatttcactagg

SEQ ID NO: 1010443 - DNA, 15 bp, Homo sapiens
aatatttcactagga

SEQ ID NO: 1010444 - DNA, 15 bp, Homo sapiens
atatttcactaggat

SEQ ID NO: 1010445 - DNA, 15 bp, Homo sapiens
tatttcactaggatc

SEQ ID NO: 1010446 - DNA, 15 bp, Homo sapiens
atttcactaggatca

SEQ ID NO: 1010447 - DNA, 15 bp, Homo sapiens
tttcactaggatcag

SEQ ID NO: 1010448 - DNA, 15 bp, Homo sapiens
ttcactaggatcagt

SEQ ID NO: 1010449 - DNA, 15 bp, Homo sapiens
tcactaggatcagtt

SEQ ID NO: 1010450 - DNA, 15 bp, Homo sapiens
cactaggatcagttt

SEQ ID NO: 1010451 - DNA, 15 bp, Homo sapiens
actaggatcagtttg

SEQ ID NO: 1010452 - DNA, 15 bp, Homo sapiens
ctaggatcagtttgt

SEQ ID NO: 1010453 - DNA, 15 bp, Homo sapiens
taggatcagtttgtc

SEQ ID NO: 1010454 - DNA, 15 bp, Homo sapiens
aggatcagtttgtct

SEQ ID NO: 1010455 - DNA, 15 bp, Homo sapiens
ggatcagtttgtctt

SEQ ID NO: 1010456 - DNA, 15 bp, Homo sapiens
gatcagtttgtcttt

SEQ ID NO: 1010457 - DNA, 15 bp, Homo sapiens
atcagtttgtctttg

SEQ ID NO: 1010458 - DNA, 15 bp, Homo sapiens
tcagtttgtctttgt

SEQ ID NO: 1010459 - DNA, 15 bp, Homo sapiens
cagtttgtctttgtt

SEQ ID NO: 1010460 - DNA, 15 bp, Homo sapiens
agtttgtctttgttt

SEQ ID NO: 1010461 - DNA, 15 bp, Homo sapiens
gtttgtctttgttta

SEQ ID NO: 1010462 - DNA, 15 bp, Homo sapiens
tttgtctttgtttat

SEQ ID NO: 1010463 - DNA, 15 bp, Homo sapiens
ttgtctttgtttatg

SEQ ID NO: 1010464 - DNA, 15 bp, Homo sapiens
tgtctttgtttatgg

SEQ ID NO: 1010465 - DNA, 15 bp, Homo sapiens
gtctttgtttatggt

SEQ ID NO: 1010466 - DNA, 15 bp, Homo sapiens
tctttgtttatggta

SEQ ID NO: 1010467 - DNA, 15 bp, Homo sapiens
ctttgtttatggtaa

SEQ ID NO: 1010468 - DNA, 15 bp, Homo sapiens
tttgtttatggtaat

SEQ ID NO: 1010469 - DNA, 15 bp, Homo sapiens
ttgtttatggtaatt

SEQ ID NO: 1010470 - DNA, 15 bp, Homo sapiens
tgtttatggtaattg

SEQ ID NO: 1010471 - DNA, 15 bp, Homo sapiens
gtttatggtaattgt

SEQ ID NO: 1010472 - DNA, 15 bp, Homo sapiens
tttatggtaattgtt

SEQ ID NO: 1010473 - DNA, 15 bp, Homo sapiens
ttatggtaattgtta

SEQ ID NO: 1010474 - DNA, 15 bp, Homo sapiens
tatggtaattgttag

SEQ ID NO: 1010475 - DNA, 15 bp, Homo sapiens
atggtaattgttagt

SEQ ID NO: 1010476 - DNA, 15 bp, Homo sapiens
tggtaattgttagtc

SEQ ID NO: 1010477 - DNA, 15 bp, Homo sapiens
ggtaattgttagtct

SEQ ID NO: 1010478 - DNA, 15 bp, Homo sapiens
gtaattgttagtctc

SEQ ID NO: 1010479 - DNA, 15 bp, Homo sapiens
taattgttagtctcc

SEQ ID NO: 1010480 - DNA, 15 bp, Homo sapiens
aattgttagtctccc

SEQ ID NO: 1010481 - DNA, 15 bp, Homo sapiens
attgttagtctccca

SEQ ID NO: 1010482 - DNA, 15 bp, Homo sapiens
ttgttagtctcccat

SEQ ID NO: 1010483 - DNA, 15 bp, Homo sapiens
tgttagtctcccata

SEQ ID NO: 1010484 - DNA, 15 bp, Homo sapiens
gttagtctcccatat

SEQ ID NO: 1010485 - DNA, 15 bp, Homo sapiens
ttagtctcccatata

SEQ ID NO: 1010486 - DNA, 15 bp, Homo sapiens
tagtctcccatatat

SEQ ID NO: 1010487 - DNA, 15 bp, Homo sapiens
agtctcccatatatc

SEQ ID NO: 1010488 - DNA, 15 bp, Homo sapiens
gtctcccatatatca

SEQ ID NO: 1010489 - DNA, 15 bp, Homo sapiens
tctcccatatatcat

SEQ ID NO: 1010490 - DNA, 15 bp, Homo sapiens
ctcccatatatcatg

SEQ ID NO: 1010491 - DNA, 15 bp, Homo sapiens
tcccatatatcatgt

SEQ ID NO: 1010492 - DNA, 15 bp, Homo sapiens
cccatatatcatgtc

SEQ ID NO: 1010493 - DNA, 15 bp, Homo sapiens
ccatatatcatgtca

SEQ ID NO: 1010494 - DNA, 15 bp, Homo sapiens
catatatcatgtcat

SEQ ID NO: 1010495 - DNA, 15 bp, Homo sapiens
atatatcatgtcatc

SEQ ID NO: 1010496 - DNA, 15 bp, Homo sapiens
tatatcatgtcatca

SEQ ID NO: 1010497 - DNA, 15 bp, Homo sapiens
atatcatgtcatcat

SEQ ID NO: 1010498 - DNA, 15 bp, Homo sapiens
tatcatgtcatcatt

SEQ ID NO: 1010499 - DNA, 15 bp, Homo sapiens
atcatgtcatcattg

SEQ ID NO: 1010500 - DNA, 15 bp, Homo sapiens
tcatgtcatcattgc

SEQ ID NO: 1010501 - DNA, 15 bp, Homo sapiens
catgtcatcattgca

SEQ ID NO: 1010502 - DNA, 15 bp, Homo sapiens
atgtcatcattgcat

SEQ ID NO: 1010503 - DNA, 15 bp, Homo sapiens
tgtcatcattgcata

SEQ ID NO: 1010504 - DNA, 15 bp, Homo sapiens
gtcatcattgcatat

SEQ ID NO: 1010505 - DNA, 15 bp, Homo sapiens
tcatcattgcatatc

SEQ ID NO: 1010506 - DNA, 15 bp, Homo sapiens
catcattgcatatca

SEQ ID NO: 1010507 - DNA, 15 bp, Homo sapiens
atcattgcatatcaa

SEQ ID NO: 1010508 - DNA, 15 bp, Homo sapiens
tcattgcatatcaat

SEQ ID NO: 1010509 - DNA, 15 bp, Homo sapiens
cattgcatatcaatt

SEQ ID NO: 1010510 - DNA, 15 bp, Homo sapiens
attgcatatcaattt

SEQ ID NO: 1010511 - DNA, 15 bp, Homo sapiens
ttgcatatcaattta

SEQ ID NO: 1010512 - DNA, 15 bp, Homo sapiens
tgcatatcaatttat

SEQ ID NO: 1010513 - DNA, 15 bp, Homo sapiens
gcatatcaatttata

SEQ ID NO: 1010514 - DNA, 15 bp, Homo sapiens
catatcaatttatag

SEQ ID NO: 1010515 - DNA, 15 bp, Homo sapiens
atatcaatttatagg

SEQ ID NO: 1010516 - DNA, 15 bp, Homo sapiens
tatcaatttataggt

SEQ ID NO: 1010517 - DNA, 15 bp, Homo sapiens
atcaatttataggtt

SEQ ID NO: 1010518 - DNA, 15 bp, Homo sapiens
tcaatttataggttt

SEQ ID NO: 1010519 - DNA, 15 bp, Homo sapiens
caatttataggttta

SEQ ID NO: 1010520 - DNA, 15 bp, Homo sapiens
aatttataggtttac

SEQ ID NO: 1010521 - DNA, 15 bp, Homo sapiens
atttataggtttact

SEQ ID NO: 1010522 - DNA, 15 bp, Homo sapiens
tttataggtttactt

SEQ ID NO: 1010523 - DNA, 15 bp, Homo sapiens
ttataggtttactta

SEQ ID NO: 1010524 - DNA, 15 bp, Homo sapiens
tataggtttacttaa

SEQ ID NO: 1010525 - DNA, 15 bp, Homo sapiens
ataggtttacttaat

SEQ ID NO: 1010526 - DNA, 15 bp, Homo sapiens
taggtttacttaata

SEQ ID NO: 1010527 - DNA, 15 bp, Homo sapiens
aggtttacttaatag

SEQ ID NO: 1010528 - DNA, 15 bp, Homo sapiens
ggtttacttaatagt

SEQ ID NO: 1010529 - DNA, 15 bp, Homo sapiens
gtttacttaatagtt

SEQ ID NO: 1010530 - DNA, 15 bp, Homo sapiens
tttacttaatagttt

SEQ ID NO: 1010531 - DNA, 15 bp, Homo sapiens
ttacttaatagtttt

SEQ ID NO: 1010532 - DNA, 15 bp, Homo sapiens
tacttaatagtttta

SEQ ID NO: 1010533 - DNA, 15 bp, Homo sapiens
acttaatagttttat

SEQ ID NO: 1010534 - DNA, 15 bp, Homo sapiens
cttaatagttttatt

SEQ ID NO: 1010535 - DNA, 15 bp, Homo sapiens
ttaatagttttattt

SEQ ID NO: 1010536 - DNA, 15 bp, Homo sapiens
taatagttttatttc

SEQ ID NO: 1010537 - DNA, 15 bp, Homo sapiens
aatagttttatttca

SEQ ID NO: 1010538 - DNA, 15 bp, Homo sapiens
atagttttatttcat

SEQ ID NO: 1010539 - DNA, 15 bp, Homo sapiens
tagttttatttcatt

SEQ ID NO: 1010540 - DNA, 15 bp, Homo sapiens
agttttatttcattt

SEQ ID NO: 1010541 - DNA, 15 bp, Homo sapiens
gttttatttcattta

SEQ ID NO: 1010542 - DNA, 15 bp, Homo sapiens
ttttatttcatttac

SEQ ID NO: 1010543 - DNA, 15 bp, Homo sapiens
tttatttcatttact

SEQ ID NO: 1010544 - DNA, 15 bp, Homo sapiens
ttatttcatttacta

SEQ ID NO: 1010545 - DNA, 15 bp, Homo sapiens
tatttcatttactaa

SEQ ID NO: 1010546 - DNA, 15 bp, Homo sapiens
atttcatttactaat

SEQ ID NO: 1010547 - DNA, 15 bp, Homo sapiens
tttcatttactaatt

SEQ ID NO: 1010548 - DNA, 15 bp, Homo sapiens
ttcatttactaattt

SEQ ID NO: 1010549 - DNA, 15 bp, Homo sapiens
tcatttactaatttc

SEQ ID NO: 1010550 - DNA, 15 bp, Homo sapiens
catttactaatttca

SEQ ID NO: 1010551 - DNA, 15 bp, Homo sapiens
atttactaatttcat

SEQ ID NO: 1010552 - DNA, 15 bp, Homo sapiens
tttactaatttcatg

SEQ ID NO: 1010553 - DNA, 15 bp, Homo sapiens
ttactaatttcatgt

SEQ ID NO: 1010554 - DNA, 15 bp, Homo sapiens
tactaatttcatgtt

SEQ ID NO: 1010555 - DNA, 15 bp, Homo sapiens
actaatttcatgttg

SEQ ID NO: 1010556 - DNA, 15 bp, Homo sapiens
ctaatttcatgttgt

SEQ ID NO: 1010557 - DNA, 15 bp, Homo sapiens
taatttcatgttgta

SEQ ID NO: 1010558 - DNA, 15 bp, Homo sapiens
aatttcatgttgtaa

SEQ ID NO: 1010559 - DNA, 15 bp, Homo sapiens
atttcatgttgtaat

SEQ ID NO: 1010560 - DNA, 15 bp, Homo sapiens
tttcatgttgtaatt

SEQ ID NO: 1010561 - DNA, 15 bp, Homo sapiens
ttcatgttgtaatta

SEQ ID NO: 1010562 - DNA, 15 bp, Homo sapiens
tcatgttgtaattat

SEQ ID NO: 1010563 - DNA, 15 bp, Homo sapiens
catgttgtaattatc

SEQ ID NO: 1010564 - DNA, 15 bp, Homo sapiens
atgttgtaattatca

SEQ ID NO: 1010565 - DNA, 15 bp, Homo sapiens
tgttgtaattatcat

SEQ ID NO: 1010566 - DNA, 15 bp, Homo sapiens
gttgtaattatcatt

SEQ ID NO: 1010567 - DNA, 15 bp, Homo sapiens
ttgtaattatcattg

SEQ ID NO: 1010568 - DNA, 15 bp, Homo sapiens
tgtaattatcattgt

SEQ ID NO: 1010569 - DNA, 15 bp, Homo sapiens
gtaattatcattgtt

SEQ ID NO: 1010570 - DNA, 15 bp, Homo sapiens
taattatcattgttg

SEQ ID NO: 1010571 - DNA, 15 bp, Homo sapiens
aattatcattgttgt

SEQ ID NO: 1010572 - DNA, 15 bp, Homo sapiens
attatcattgttgtc

SEQ ID NO: 1010573 - DNA, 15 bp, Homo sapiens
ttatcattgttgtct

SEQ ID NO: 1010574 - DNA, 15 bp, Homo sapiens
tatcattgttgtctg

SEQ ID NO: 1010575 - DNA, 15 bp, Homo sapiens
atcattgttgtctgt

SEQ ID NO: 1010576 - DNA, 15 bp, Homo sapiens
tcattgttgtctgta

SEQ ID NO: 1010577 - DNA, 15 bp, Homo sapiens
cattgttgtctgtaa

SEQ ID NO: 1010578 - DNA, 15 bp, Homo sapiens
attgttgtctgtaaa

SEQ ID NO: 1010579 - DNA, 15 bp, Homo sapiens
ttgttgtctgtaaac

SEQ ID NO: 1010580 - DNA, 15 bp, Homo sapiens
tgttgtctgtaaaca

SEQ ID NO: 1010581 - DNA, 15 bp, Homo sapiens
gttgtctgtaaacat

SEQ ID NO: 1010582 - DNA, 15 bp, Homo sapiens
ttgtctgtaaacata

SEQ ID NO: 1010583 - DNA, 15 bp, Homo sapiens
tgtctgtaaacatat

SEQ ID NO: 1010584 - DNA, 15 bp, Homo sapiens
gtctgtaaacatata

SEQ ID NO: 1010585 - DNA, 15 bp, Homo sapiens
tctgtaaacatataa

SEQ ID NO: 1010586 - DNA, 15 bp, Homo sapiens
ctgtaaacatataag

SEQ ID NO: 1010587 - DNA, 15 bp, Homo sapiens
tgtaaacatataagt

SEQ ID NO: 1010588 - DNA, 15 bp, Homo sapiens
gtaaacatataagta

SEQ ID NO: 1010589 - DNA, 15 bp, Homo sapiens
taaacatataagtaa

SEQ ID NO: 1010590 - DNA, 15 bp, Homo sapiens
aaacatataagtaat

SEQ ID NO: 1010591 - DNA, 15 bp, Homo sapiens
aacatataagtaatg

SEQ ID NO: 1010592 - DNA, 15 bp, Homo sapiens
acatataagtaatgg

SEQ ID NO: 1010593 - DNA, 15 bp, Homo sapiens
catataagtaatggt

SEQ ID NO: 1010594 - DNA, 15 bp, Homo sapiens
atataagtaatggtt

SEQ ID NO: 1010595 - DNA, 15 bp, Homo sapiens
tataagtaatggttt

SEQ ID NO: 1010596 - DNA, 15 bp, Homo sapiens
ataagtaatggtttt

SEQ ID NO: 1010597 - DNA, 15 bp, Homo sapiens
taagtaatggttttc

SEQ ID NO: 1010598 - DNA, 15 bp, Homo sapiens
aagtaatggttttcc

SEQ ID NO: 1010599 - DNA, 15 bp, Homo sapiens
agtaatggttttcca

SEQ ID NO: 1010600 - DNA, 15 bp, Homo sapiens
gtaatggttttccac

SEQ ID NO: 1010601 - DNA, 15 bp, Homo sapiens
taatggttttccaca

SEQ ID NO: 1010602 - DNA, 15 bp, Homo sapiens
aatggttttccacat

SEQ ID NO: 1010603 - DNA, 15 bp, Homo sapiens
atggttttccacata

SEQ ID NO: 1010604 - DNA, 15 bp, Homo sapiens
tggttttccacatac

SEQ ID NO: 1010605 - DNA, 15 bp, Homo sapiens
ggttttccacataca

SEQ ID NO: 1010606 - DNA, 15 bp, Homo sapiens
gttttccacatacac

SEQ ID NO: 1010607 - DNA, 15 bp, Homo sapiens
ttttccacatacact

SEQ ID NO: 1010608 - DNA, 15 bp, Homo sapiens
tttccacatacactt

SEQ ID NO: 1010609 - DNA, 15 bp, Homo sapiens
ttccacatacacttt

SEQ ID NO: 1010610 - DNA, 15 bp, Homo sapiens
tccacatacactttt

SEQ ID NO: 1010611 - DNA, 15 bp, Homo sapiens
ccacatacactttta

SEQ ID NO: 1010612 - DNA, 15 bp, Homo sapiens
cacatacacttttaa

SEQ ID NO: 1010613 - DNA, 15 bp, Homo sapiens
acatacacttttaat

SEQ ID NO: 1010614 - DNA, 15 bp, Homo sapiens
catacacttttaata

SEQ ID NO: 1010615 - DNA, 15 bp, Homo sapiens
atacacttttaatac

SEQ ID NO: 1010616 - DNA, 15 bp, Homo sapiens
tacacttttaatact

SEQ ID NO: 1010617 - DNA, 15 bp, Homo sapiens
acacttttaatactg

SEQ ID NO: 1010618 - DNA, 15 bp, Homo sapiens
cacttttaatactgt

SEQ ID NO: 1010619 - DNA, 15 bp, Homo sapiens
acttttaatactgtg

SEQ ID NO: 1010620 - DNA, 15 bp, Homo sapiens
cttttaatactgtgt

SEQ ID NO: 1010621 - DNA, 15 bp, Homo sapiens
ttttaatactgtgtt

SEQ ID NO: 1010622 - DNA, 15 bp, Homo sapiens
tttaatactgtgttg

SEQ ID NO: 1010623 - DNA, 15 bp, Homo sapiens
ttaatactgtgttga

SEQ ID NO: 1010624 - DNA, 15 bp, Homo sapiens
taatactgtgttgaa

SEQ ID NO: 1010625 - DNA, 15 bp, Homo sapiens
aatactgtgttgaac

SEQ ID NO: 1010626 - DNA, 15 bp, Homo sapiens
atactgtgttgaacc

SEQ ID NO: 1010627 - DNA, 15 bp, Homo sapiens
tactgtgttgaacca

SEQ ID NO: 1010628 - DNA, 15 bp, Homo sapiens
actgtgttgaaccac

SEQ ID NO: 1010629 - DNA, 15 bp, Homo sapiens
ctgtgttgaaccact

SEQ ID NO: 1010630 - DNA, 15 bp, Homo sapiens
tgtgttgaaccacta

SEQ ID NO: 1010631 - DNA, 15 bp, Homo sapiens
gtgttgaaccactaa

SEQ ID NO: 1010632 - DNA, 15 bp, Homo sapiens
tgttgaaccactaat

SEQ ID NO: 1010633 - DNA, 15 bp, Homo sapiens
gttgaaccactaatc

SEQ ID NO: 1010634 - DNA, 15 bp, Homo sapiens
ttgaaccactaatca

SEQ ID NO: 1010635 - DNA, 15 bp, Homo sapiens
tgaaccactaatcac

SEQ ID NO: 1010636 - DNA, 15 bp, Homo sapiens
gaaccactaatcact

SEQ ID NO: 1010637 - DNA, 15 bp, Homo sapiens
aaccactaatcactt

SEQ ID NO: 1010638 - DNA, 15 bp, Homo sapiens
accactaatcacttt

SEQ ID NO: 1010639 - DNA, 15 bp, Homo sapiens
ccactaatcactttt

SEQ ID NO: 1010640 - DNA, 15 bp, Homo sapiens
cactaatcactttta

SEQ ID NO: 1010641 - DNA, 15 bp, Homo sapiens
actaatcacttttaa

SEQ ID NO: 1010642 - DNA, 15 bp, Homo sapiens
ctaatcacttttaaa

SEQ ID NO: 1010643 - DNA, 15 bp, Homo sapiens
taatcacttttaaag

SEQ ID NO: 1010644 - DNA, 15 bp, Homo sapiens
aatcacttttaaagc

SEQ ID NO: 1010645 - DNA, 15 bp, Homo sapiens
atcacttttaaagct

SEQ ID NO: 1010646 - DNA, 15 bp, Homo sapiens
tcacttttaaagctt

SEQ ID NO: 1010647 - DNA, 15 bp, Homo sapiens
cacttttaaagcttt

SEQ ID NO: 1010648 - DNA, 15 bp, Homo sapiens
acttttaaagctttg

SEQ ID NO: 1010649 - DNA, 15 bp, Homo sapiens
cttttaaagctttga

SEQ ID NO: 1010650 - DNA, 15 bp, Homo sapiens
ttttaaagctttgat

SEQ ID NO: 1010651 - DNA, 15 bp, Homo sapiens
tttaaagctttgata

SEQ ID NO: 1010652 - DNA, 15 bp, Homo sapiens
ttaaagctttgataa

SEQ ID NO: 1010653 - DNA, 15 bp, Homo sapiens
taaagctttgataat

SEQ ID NO: 1010654 - DNA, 15 bp, Homo sapiens
aaagctttgataata

SEQ ID NO: 1010655 - DNA, 15 bp, Homo sapiens
aagctttgataatag

SEQ ID NO: 1010656 - DNA, 15 bp, Homo sapiens
agctttgataatagc

SEQ ID NO: 1010657 - DNA, 15 bp, Homo sapiens
gctttgataatagca

SEQ ID NO: 1010658 - DNA, 15 bp, Homo sapiens
ctttgataatagcat

SEQ ID NO: 1010659 - DNA, 15 bp, Homo sapiens
tttgataatagcatt

SEQ ID NO: 1010660 - DNA, 15 bp, Homo sapiens
ttgataatagcattc

SEQ ID NO: 1010661 - DNA, 15 bp, Homo sapiens
tgataatagcattct

SEQ ID NO: 1010662 - DNA, 15 bp, Homo sapiens
gataatagcattctt

SEQ ID NO: 1010663 - DNA, 15 bp, Homo sapiens
ataatagcattctta

SEQ ID NO: 1010664 - DNA, 15 bp, Homo sapiens
taatagcattcttac

SEQ ID NO: 1010665 - DNA, 15 bp, Homo sapiens
aatagcattcttacc

SEQ ID NO: 1010666 - DNA, 15 bp, Homo sapiens
atagcattcttacct

SEQ ID NO: 1010667 - DNA, 15 bp, Homo sapiens
tagcattcttacctg

SEQ ID NO: 1010668 - DNA, 15 bp, Homo sapiens
agcattcttacctgg

SEQ ID NO: 1010669 - DNA, 15 bp, Homo sapiens
gcattcttacctggg

SEQ ID NO: 1010670 - DNA, 15 bp, Homo sapiens
cattcttacctggga

SEQ ID NO: 1010671 - DNA, 15 bp, Homo sapiens
attcttacctgggaa

SEQ ID NO: 1010672 - DNA, 15 bp, Homo sapiens
ttcttacctgggaaa

SEQ ID NO: 1010673 - DNA, 15 bp, Homo sapiens
tcttacctgggaaaa

SEQ ID NO: 1010674 - DNA, 15 bp, Homo sapiens
cttacctgggaaaat

SEQ ID NO: 1010675 - DNA, 15 bp, Homo sapiens
ttacctgggaaaata

SEQ ID NO: 1010676 - DNA, 15 bp, Homo sapiens
tacctgggaaaatat

SEQ ID NO: 1010677 - DNA, 15 bp, Homo sapiens
acctgggaaaatata

SEQ ID NO: 1010678 - DNA, 15 bp, Homo sapiens
cctgggaaaatatat

SEQ ID NO: 1010679 - DNA, 15 bp, Homo sapiens
ctgggaaaatatatg

SEQ ID NO: 1010680 - DNA, 15 bp, Homo sapiens
tgggaaaatatatgc

SEQ ID NO: 1010681 - DNA, 15 bp, Homo sapiens
gggaaaatatatgcc

SEQ ID NO: 1010682 - DNA, 15 bp, Homo sapiens
ggaaaatatatgcca

SEQ ID NO: 1010683 - DNA, 15 bp, Homo sapiens
gaaaatatatgccat

SEQ ID NO: 1010684 - DNA, 15 bp, Homo sapiens
aaaatatatgccatg

SEQ ID NO: 1010685 - DNA, 15 bp, Homo sapiens
aaatatatgccatgt

SEQ ID NO: 1010686 - DNA, 15 bp, Homo sapiens
aatatatgccatgta

SEQ ID NO: 1010687 - DNA, 15 bp, Homo sapiens
atatatgccatgtat

SEQ ID NO: 1010688 - DNA, 15 bp, Homo sapiens
tatatgccatgtatg

SEQ ID NO: 1010689 - DNA, 15 bp, Homo sapiens
atatgccatgtatgc

SEQ ID NO: 1010690 - DNA, 15 bp, Homo sapiens
tatgccatgtatgca

SEQ ID NO: 1010691 - DNA, 15 bp, Homo sapiens
atgccatgtatgcac

SEQ ID NO: 1010692 - DNA, 15 bp, Homo sapiens
tgccatgtatgcacg

SEQ ID NO: 1010693 - DNA, 15 bp, Homo sapiens
gccatgtatgcacgt

SEQ ID NO: 1010694 - DNA, 15 bp, Homo sapiens
ccatgtatgcacgtg

SEQ ID NO: 1010695 - DNA, 15 bp, Homo sapiens
catgtatgcacgtgt

SEQ ID NO: 1010696 - DNA, 15 bp, Homo sapiens
atgtatgcacgtgtg

SEQ ID NO: 1010697 - DNA, 15 bp, Homo sapiens
tgtatgcacgtgtgc

SEQ ID NO: 1010698 - DNA, 15 bp, Homo sapiens
gtatgcacgtgtgcc

SEQ ID NO: 1010699 - DNA, 15 bp, Homo sapiens
tatgcacgtgtgcca

SEQ ID NO: 1010700 - DNA, 15 bp, Homo sapiens
atgcacgtgtgccag

SEQ ID NO: 1010701 - DNA, 15 bp, Homo sapiens
tgcacgtgtgccaga

SEQ ID NO: 1010702 - DNA, 15 bp, Homo sapiens
gcacgtgtgccagaa

SEQ ID NO: 1010703 - DNA, 15 bp, Homo sapiens
cacgtgtgccagaaa

SEQ ID NO: 1010704 - DNA, 15 bp, Homo sapiens
acgtgtgccagaaat

SEQ ID NO: 1010705 - DNA, 15 bp, Homo sapiens
cgtgtgccagaaatt

SEQ ID NO: 1010706 - DNA, 15 bp, Homo sapiens
gtgtgccagaaattg

SEQ ID NO: 1010707 - DNA, 15 bp, Homo sapiens
tgtgccagaaattgt

SEQ ID NO: 1010708 - DNA, 15 bp, Homo sapiens
gtgccagaaattgta

SEQ ID NO: 1010709 - DNA, 15 bp, Homo sapiens
tgccagaaattgtaa

SEQ ID NO: 1010710 - DNA, 15 bp, Homo sapiens
gccagaaattgtaaa

SEQ ID NO: 1010711 - DNA, 15 bp, Homo sapiens
ccagaaattgtaaaa

SEQ ID NO: 1010712 - DNA, 15 bp, Homo sapiens
cagaaattgtaaaac

SEQ ID NO: 1010713 - DNA, 15 bp, Homo sapiens
agaaattgtaaaaca

SEQ ID NO: 1010714 - DNA, 15 bp, Homo sapiens
gaaattgtaaaacat

SEQ ID NO: 1010715 - DNA, 15 bp, Homo sapiens
aaattgtaaaacatt

SEQ ID NO: 1010716 - DNA, 15 bp, Homo sapiens
aattgtaaaacatta

SEQ ID NO: 1010717 - DNA, 15 bp, Homo sapiens
attgtaaaacattaa

SEQ ID NO: 1010718 - DNA, 15 bp, Homo sapiens
ttgtaaaacattaaa

SEQ ID NO: 1010719 - DNA, 15 bp, Homo sapiens
tgtaaaacattaaac

SEQ ID NO: 1010720 - DNA, 15 bp, Homo sapiens
gtaaaacattaaact

SEQ ID NO: 1010721 - DNA, 15 bp, Homo sapiens
taaaacattaaactt

SEQ ID NO: 1010722 - DNA, 15 bp, Homo sapiens
aaaacattaaactta

SEQ ID NO: 1010723 - DNA, 15 bp, Homo sapiens
aaacattaaacttaa

SEQ ID NO: 1010724 - DNA, 15 bp, Homo sapiens
aacattaaacttaaa

SEQ ID NO: 1010725 - DNA, 15 bp, Homo sapiens
acattaaacttaaaa

SEQ ID NO: 1010726 - DNA, 15 bp, Homo sapiens
cattaaacttaaaaa

SEQ ID NO: 1010727 - DNA, 15 bp, Homo sapiens
attaaacttaaaaaa

SEQ ID NO: 1010728 - DNA, 15 bp, Homo sapiens
ttaaacttaaaaaaa

SEQ ID NO: 1010729 - DNA, 15 bp, Homo sapiens
taaacttaaaaaaaa

SEQ ID NO: 1010730 - DNA, 15 bp, Homo sapiens
aaacttaaaaaaaaa

SEQ ID NO: 1010731 - DNA, 15 bp, Homo sapiens
aacttaaaaaaaaaa

SEQ ID NO: 1010732 - DNA, 15 bp, Homo sapiens
taaaaaaaaaaaaag

SEQ ID NO: 1010733 - DNA, 15 bp, Homo sapiens
aaaaaaaaaagaaga

SEQ ID NO: 1010734 - DNA, 15 bp, Homo sapiens
aaaaaaaaagaagat

SEQ ID NO: 1010735 - DNA, 15 bp, Homo sapiens
aaaaaaaagaagatt

SEQ ID NO: 1010736 - DNA, 15 bp, Homo sapiens
aaaaaaagaagattg

SEQ ID NO: 1010737 - DNA, 15 bp, Homo sapiens
aaaaaagaagattgg

SEQ ID NO: 1010738 - DNA, 15 bp, Homo sapiens
aaaaagaagattggc

SEQ ID NO: 1010739 - DNA, 15 bp, Homo sapiens
aaaagaagattggct

SEQ ID NO: 1010740 - DNA, 15 bp, Homo sapiens
aaagaagattggcta

SEQ ID NO: 1010741 - DNA, 15 bp, Homo sapiens
aagaagattggctac

SEQ ID NO: 1010742 - DNA, 15 bp, Homo sapiens
agaagattggctaca

SEQ ID NO: 1010743 - DNA, 15 bp, Homo sapiens
gaagattggctacag

SEQ ID NO: 1010744 - DNA, 15 bp, Homo sapiens
aagattggctacaga

SEQ ID NO: 1010745 - DNA, 15 bp, Homo sapiens
agattggctacagat

SEQ ID NO: 1010746 - DNA, 15 bp, Homo sapiens
gattggctacagatt

SEQ ID NO: 1010747 - DNA, 15 bp, Homo sapiens
attggctacagatta

SEQ ID NO: 1010748 - DNA, 15 bp, Homo sapiens
ttggctacagattag

SEQ ID NO: 1010749 - DNA, 15 bp, Homo sapiens
tggctacagattagc

SEQ ID NO: 1010750 - DNA, 15 bp, Homo sapiens
ggctacagattagct

SEQ ID NO: 1010751 - DNA, 15 bp, Homo sapiens
gctacagattagctc

SEQ ID NO: 1010752 - DNA, 15 bp, Homo sapiens
ctacagattagctct

SEQ ID NO: 1010753 - DNA, 15 bp, Homo sapiens
tacagattagctctc

SEQ ID NO: 1010754 - DNA, 15 bp, Homo sapiens
acagattagctctct

SEQ ID NO: 1010755 - DNA, 15 bp, Homo sapiens
cagattagctctctg

SEQ ID NO: 1010756 - DNA, 15 bp, Homo sapiens
agattagctctctga

SEQ ID NO: 1010757 - DNA, 15 bp, Homo sapiens
gattagctctctgaa

SEQ ID NO: 1010758 - DNA, 15 bp, Homo sapiens
attagctctctgaag

SEQ ID NO: 1010759 - DNA, 15 bp, Homo sapiens
ttagctctctgaaga

SEQ ID NO: 1010760 - DNA, 15 bp, Homo sapiens
tagctctctgaagac

SEQ ID NO: 1010761 - DNA, 15 bp, Homo sapiens
agctctctgaagact

SEQ ID NO: 1010762 - DNA, 15 bp, Homo sapiens
gctctctgaagactt

SEQ ID NO: 1010763 - DNA, 15 bp, Homo sapiens
ctctctgaagacttt

SEQ ID NO: 1010764 - DNA, 15 bp, Homo sapiens
tctctgaagacttta

SEQ ID NO: 1010765 - DNA, 15 bp, Homo sapiens
ctctgaagactttat

SEQ ID NO: 1010766 - DNA, 15 bp, Homo sapiens
tctgaagactttatt

SEQ ID NO: 1010767 - DNA, 15 bp, Homo sapiens
ctgaagactttattt

SEQ ID NO: 1010768 - DNA, 15 bp, Homo sapiens
tgaagactttatttt

SEQ ID NO: 1010769 - DNA, 15 bp, Homo sapiens
gaagactttattttt

SEQ ID NO: 1010770 - DNA, 15 bp, Homo sapiens
aagactttatttttc

SEQ ID NO: 1010771 - DNA, 15 bp, Homo sapiens
agactttatttttca

SEQ ID NO: 1010772 - DNA, 15 bp, Homo sapiens
gactttatttttcaa

SEQ ID NO: 1010773 - DNA, 15 bp, Homo sapiens
actttatttttcaaa

SEQ ID NO: 1010774 - DNA, 15 bp, Homo sapiens
ctttatttttcaaat

SEQ ID NO: 1010775 - DNA, 15 bp, Homo sapiens
tttatttttcaaatt

SEQ ID NO: 1010776 - DNA, 15 bp, Homo sapiens
ttatttttcaaattc

SEQ ID NO: 1010777 - DNA, 15 bp, Homo sapiens
tatttttcaaattca

SEQ ID NO: 1010778 - DNA, 15 bp, Homo sapiens
atttttcaaattcac

SEQ ID NO: 1010779 - DNA, 15 bp, Homo sapiens
tttttcaaattcact

SEQ ID NO: 1010780 - DNA, 15 bp, Homo sapiens
ttttcaaattcactg

SEQ ID NO: 1010781 - DNA, 15 bp, Homo sapiens
tttcaaattcactgg

SEQ ID NO: 1010782 - DNA, 15 bp, Homo sapiens
ttcaaattcactggc

SEQ ID NO: 1010783 - DNA, 15 bp, Homo sapiens
tcaaattcactggct

SEQ ID NO: 1010784 - DNA, 15 bp, Homo sapiens
caaattcactggcta

SEQ ID NO: 1010785 - DNA, 15 bp, Homo sapiens
aaattcactggctaa

SEQ ID NO: 1010786 - DNA, 15 bp, Homo sapiens
aattcactggctaat

SEQ ID NO: 1010787 - DNA, 15 bp, Homo sapiens
attcactggctaatc

SEQ ID NO: 1010788 - DNA, 15 bp, Homo sapiens
ttcactggctaatca

SEQ ID NO: 1010789 - DNA, 15 bp, Homo sapiens
tcactggctaatcat

SEQ ID NO: 1010790 - DNA, 15 bp, Homo sapiens
cactggctaatcatc

SEQ ID NO: 1010791 - DNA, 15 bp, Homo sapiens
actggctaatcatcg

SEQ ID NO: 1010792 - DNA, 15 bp, Homo sapiens
ctggctaatcatcga

SEQ ID NO: 1010793 - DNA, 15 bp, Homo sapiens
tggctaatcatcgag

SEQ ID NO: 1010794 - DNA, 15 bp, Homo sapiens
ggctaatcatcgaga

SEQ ID NO: 1010795 - DNA, 15 bp, Homo sapiens
gctaatcatcgagaa

SEQ ID NO: 1010796 - DNA, 15 bp, Homo sapiens
ctaatcatcgagaaa

SEQ ID NO: 1010797 - DNA, 15 bp, Homo sapiens
taatcatcgagaaaa

SEQ ID NO: 1010798 - DNA, 15 bp, Homo sapiens
aatcatcgagaaaag

SEQ ID NO: 1010799 - DNA, 15 bp, Homo sapiens
atcatcgagaaaaga

SEQ ID NO: 1010800 - DNA, 15 bp, Homo sapiens
tcatcgagaaaagat

SEQ ID NO: 1010801 - DNA, 15 bp, Homo sapiens
catcgagaaaagatg

SEQ ID NO: 1010802 - DNA, 15 bp, Homo sapiens
atcgagaaaagatgt

SEQ ID NO: 1010803 - DNA, 15 bp, Homo sapiens
tcgagaaaagatgtc

SEQ ID NO: 1010804 - DNA, 15 bp, Homo sapiens
cgagaaaagatgtct

SEQ ID NO: 1010805 - DNA, 15 bp, Homo sapiens
gagaaaagatgtctc

SEQ ID NO: 1010806 - DNA, 15 bp, Homo sapiens
agaaaagatgtctca

SEQ ID NO: 1010807 - DNA, 15 bp, Homo sapiens
gaaaagatgtctcac

SEQ ID NO: 1010808 - DNA, 15 bp, Homo sapiens
aaaagatgtctcaca

SEQ ID NO: 1010809 - DNA, 15 bp, Homo sapiens
aaagatgtctcacat

SEQ ID NO: 1010810 - DNA, 15 bp, Homo sapiens
aagatgtctcacatg

SEQ ID NO: 1010811 - DNA, 15 bp, Homo sapiens
agatgtctcacatgc

SEQ ID NO: 1010812 - DNA, 15 bp, Homo sapiens
gatgtctcacatgca

SEQ ID NO: 1010813 - DNA, 15 bp, Homo sapiens
atgtctcacatgcac

SEQ ID NO: 1010814 - DNA, 15 bp, Homo sapiens
tgtctcacatgcaca

SEQ ID NO: 1010815 - DNA, 15 bp, Homo sapiens
gtctcacatgcacat

SEQ ID NO: 1010816 - DNA, 15 bp, Homo sapiens
tctcacatgcacatg

SEQ ID NO: 1010817 - DNA, 15 bp, Homo sapiens
ctcacatgcacatgc

SEQ ID NO: 1010818 - DNA, 15 bp, Homo sapiens
tcacatgcacatgct

SEQ ID NO: 1010819 - DNA, 15 bp, Homo sapiens
cacatgcacatgctc

SEQ ID NO: 1010820 - DNA, 15 bp, Homo sapiens
acatgcacatgctca

SEQ ID NO: 1010821 - DNA, 15 bp, Homo sapiens
catgcacatgctcat

SEQ ID NO: 1010822 - DNA, 15 bp, Homo sapiens
atgcacatgctcata

SEQ ID NO: 1010823 - DNA, 15 bp, Homo sapiens
tgcacatgctcataa

SEQ ID NO: 1010824 - DNA, 15 bp, Homo sapiens
gcacatgctcataaa

SEQ ID NO: 1010825 - DNA, 15 bp, Homo sapiens
cacatgctcataaag

SEQ ID NO: 1010826 - DNA, 15 bp, Homo sapiens
acatgctcataaagt

SEQ ID NO: 1010827 - DNA, 15 bp, Homo sapiens
catgctcataaagtg

SEQ ID NO: 1010828 - DNA, 15 bp, Homo sapiens
atgctcataaagtgg

SEQ ID NO: 1010829 - DNA, 15 bp, Homo sapiens
tgctcataaagtggg

SEQ ID NO: 1010830 - DNA, 15 bp, Homo sapiens
gctcataaagtgggc

SEQ ID NO: 1010831 - DNA, 15 bp, Homo sapiens
ctcataaagtgggca

SEQ ID NO: 1010832 - DNA, 15 bp, Homo sapiens
tcataaagtgggcaa

SEQ ID NO: 1010833 - DNA, 15 bp, Homo sapiens
cataaagtgggcaat

SEQ ID NO: 1010834 - DNA, 15 bp, Homo sapiens
ataaagtgggcaatt

SEQ ID NO: 1010835 - DNA, 15 bp, Homo sapiens
taaagtgggcaattt

SEQ ID NO: 1010836 - DNA, 15 bp, Homo sapiens
aaagtgggcaatttg

SEQ ID NO: 1010837 - DNA, 15 bp, Homo sapiens
aagtgggcaatttgt

SEQ ID NO: 1010838 - DNA, 15 bp, Homo sapiens
agtgggcaatttgtc

SEQ ID NO: 1010839 - DNA, 15 bp, Homo sapiens
gtgggcaatttgtct

SEQ ID NO: 1010840 - DNA, 15 bp, Homo sapiens
tgggcaatttgtctc

SEQ ID NO: 1010841 - DNA, 15 bp, Homo sapiens
gggcaatttgtctca

SEQ ID NO: 1010842 - DNA, 15 bp, Homo sapiens
ggcaatttgtctcat

SEQ ID NO: 1010843 - DNA, 15 bp, Homo sapiens
gcaatttgtctcatg

SEQ ID NO: 1010844 - DNA, 15 bp, Homo sapiens
caatttgtctcatgc

SEQ ID NO: 1010845 - DNA, 15 bp, Homo sapiens
aatttgtctcatgct

SEQ ID NO: 1010846 - DNA, 15 bp, Homo sapiens
atttgtctcatgctc

SEQ ID NO: 1010847 - DNA, 15 bp, Homo sapiens
tttgtctcatgctca

SEQ ID NO: 1010848 - DNA, 15 bp, Homo sapiens
ttgtctcatgctcac

SEQ ID NO: 1010849 - DNA, 15 bp, Homo sapiens
tgtctcatgctcact

SEQ ID NO: 1010850 - DNA, 15 bp, Homo sapiens
gtctcatgctcacta

SEQ ID NO: 1010851 - DNA, 15 bp, Homo sapiens
tctcatgctcactat

SEQ ID NO: 1010852 - DNA, 15 bp, Homo sapiens
ctcatgctcactatt

SEQ ID NO: 1010853 - DNA, 15 bp, Homo sapiens
tcatgctcactatta

SEQ ID NO: 1010854 - DNA, 15 bp, Homo sapiens
catgctcactattat

SEQ ID NO: 1010855 - DNA, 15 bp, Homo sapiens
atgctcactattatg

SEQ ID NO: 1010856 - DNA, 15 bp, Homo sapiens
tgctcactattatgt

SEQ ID NO: 1010857 - DNA, 15 bp, Homo sapiens
gctcactattatgtt

SEQ ID NO: 1010858 - DNA, 15 bp, Homo sapiens
ctcactattatgttt

SEQ ID NO: 1010859 - DNA, 15 bp, Homo sapiens
tcactattatgtttt

SEQ ID NO: 1010860 - DNA, 15 bp, Homo sapiens
cactattatgtttta

SEQ ID NO: 1010861 - DNA, 15 bp, Homo sapiens
actattatgttttat

SEQ ID NO: 1010862 - DNA, 15 bp, Homo sapiens
ctattatgttttata

SEQ ID NO: 1010863 - DNA, 15 bp, Homo sapiens
tattatgttttataa

SEQ ID NO: 1010864 - DNA, 15 bp, Homo sapiens
attatgttttataat

SEQ ID NO: 1010865 - DNA, 15 bp, Homo sapiens
ttatgttttataata

SEQ ID NO: 1010866 - DNA, 15 bp, Homo sapiens
tatgttttataatat

SEQ ID NO: 1010867 - DNA, 15 bp, Homo sapiens
atgttttataatata

SEQ ID NO: 1010868 - DNA, 15 bp, Homo sapiens
tgttttataatataa

SEQ ID NO: 1010869 - DNA, 15 bp, Homo sapiens
gttttataatataat

SEQ ID NO: 1010870 - DNA, 15 bp, Homo sapiens
ttttataatataata

SEQ ID NO: 1010871 - DNA, 15 bp, Homo sapiens
tttataatataatat

SEQ ID NO: 1010872 - DNA, 15 bp, Homo sapiens
ttataatataatatg

SEQ ID NO: 1010873 - DNA, 15 bp, Homo sapiens
tataatataatatgt

SEQ ID NO: 1010874 - DNA, 15 bp, Homo sapiens
ataatataatatgta

SEQ ID NO: 1010875 - DNA, 15 bp, Homo sapiens
taatataatatgtat
